United States Patent Application Publication US 2014/0004565 A1 - sequence listing, part 80

SEQ ID NO: 1962175 - RNA, 19 nt, Artificial Sequence
  Description of Artificial Sequence: Synthetic oligonucleotide
acucggccuccacagguua

SEQ ID NO: 1962176 - RNA, 19 nt, Artificial Sequence
  Description of Artificial Sequence: Synthetic oligonucleotide
cacauagguauuccagggu

SEQ ID NO: 1962177 - RNA, 19 nt, Artificial Sequence
  Description of Artificial Sequence: Synthetic oligonucleotide
caggugacagcccuuacuu

SEQ ID NO: 1962178 - RNA, 19 nt, Artificial Sequence
  Description of Artificial Sequence: Synthetic oligonucleotide
gcacacagugguucaggac

SEQ ID NO: 1962179 - RNA, 19 nt, Artificial Sequence
  Description of Artificial Sequence: Synthetic oligonucleotide
uaaccagguucuggaccca

SEQ ID NO: 1962180 - RNA, 19 nt, Artificial Sequence
  Description of Artificial Sequence: Synthetic oligonucleotide
cugccuccaccccaggaga

SEQ ID NO: 1962181 - RNA, 19 nt, Artificial Sequence
  Description of Artificial Sequence: Synthetic oligonucleotide
cacaggugacagcccuuac

SEQ ID NO: 1962182 - RNA, 19 nt, Artificial Sequence
  Description of Artificial Sequence: Synthetic oligonucleotide
aaggguggcugcgggguua

SEQ ID NO: 1962183 - RNA, 19 nt, Artificial Sequence
  Description of Artificial Sequence: Synthetic oligonucleotide
accaagcuguccauauuua

SEQ ID NO: 1962184 - RNA, 19 nt, Artificial Sequence
  Description of Artificial Sequence: Synthetic oligonucleotide
gugacagcccuuacuucga

SEQ ID NO: 1962185 - RNA, 19 nt, Artificial Sequence
  Description of Artificial Sequence: Synthetic oligonucleotide
guggcugcgggguuacaua

SEQ ID NO: 1962186 - RNA, 19 nt, Artificial Sequence
  Description of Artificial Sequence: Synthetic oligonucleotide
ccagcuucgcaaagcagca

SEQ ID NO: 1962187 - RNA, 19 nt, Artificial Sequence
  Description of Artificial Sequence: Synthetic oligonucleotide
ccagguauagaguucuccu

SEQ ID NO: 1962188 - RNA, 19 nt, Artificial Sequence
  Description of Artificial Sequence: Synthetic oligonucleotide
acggcagggucgauccaag

SEQ ID NO: 1962189 - RNA, 19 nt, Artificial Sequence
  Description of Artificial Sequence: Synthetic oligonucleotide
ggcagggucgauccaagcu

SEQ ID NO: 1962190 - RNA, 19 nt, Artificial Sequence
  Description of Artificial Sequence: Synthetic oligonucleotide
gucgauccaagcugcugcu

SEQ ID NO: 1962191 - RNA, 19 nt, Artificial Sequence
  Description of Artificial Sequence: Synthetic oligonucleotide
augccugccuccaccccag

SEQ ID NO: 1962192 - RNA, 19 nt, Artificial Sequence
  Description of Artificial Sequence: Synthetic oligonucleotide
ccaccaagaguccuucuga

SEQ ID NO: 1962193 - RNA, 19 nt, Artificial Sequence
  Description of Artificial Sequence: Synthetic oligonucleotide
ccaggagaacaccuggcca

SEQ ID NO: 1962194 - RNA, 19 nt, Artificial Sequence
  Description of Artificial Sequence: Synthetic oligonucleotide
agccauccgcaggccuugc

SEQ ID NO: 1962195 - RNA, 19 nt, Artificial Sequence
  Description of Artificial Sequence: Synthetic oligonucleotide
gcuugcacucacucggcaa

SEQ ID NO: 1962196 - RNA, 19 nt, Artificial Sequence
  Description of Artificial Sequence: Synthetic oligonucleotide
cugacucauuccagcccca

SEQ ID NO: 1962197 - RNA, 19 nt, Artificial Sequence
  Description of Artificial Sequence: Synthetic oligonucleotide
cgcaaagcagcaacacaug

SEQ ID NO: 1962198 - RNA, 19 nt, Artificial Sequence
  Description of Artificial Sequence: Synthetic oligonucleotide
cauccgcaggccuugcagu

SEQ ID NO: 1962199 - RNA, 19 nt, Artificial Sequence
  Description of Artificial Sequence: Synthetic oligonucleotide
ugacugcaucugagccugu

SEQ ID NO: 1962200 - RNA, 19 nt, Artificial Sequence
  Description of Artificial Sequence: Synthetic oligonucleotide
cugagccugugggaagauc

SEQ ID NO: 1962201 - RNA, 19 nt, Artificial Sequence
  Description of Artificial Sequence: Synthetic oligonucleotide
gcuucgcaaagcagcaaca

SEQ ID NO: 1962202 - RNA, 19 nt, Artificial Sequence
  Description of Artificial Sequence: Synthetic oligonucleotide
cccaacuguccaugccugc

SEQ ID NO: 1962203 - RNA, 19 nt, Artificial Sequence
  Description of Artificial Sequence: Synthetic oligonucleotide
cuccaacaucagccauggc

SEQ ID NO: 1962204 - RNA, 19 nt, Artificial Sequence
  Description of Artificial Sequence: Synthetic oligonucleotide
ccuucugaagcccacgcgu

SEQ ID NO: 1962205 - RNA, 19 nt, Artificial Sequence
  Description of Artificial Sequence: Synthetic oligonucleotide
cugcgggguuacauaggca

SEQ ID NO: 1962206 - RNA, 19 nt, Artificial Sequence
  Description of Artificial Sequence: Synthetic oligonucleotide
ggcugcgggguuacauagg

SEQ ID NO: 1962207 - RNA, 19 nt, Artificial Sequence
  Description of Artificial Sequence: Synthetic oligonucleotide
gcacucacucggcaaaugu

SEQ ID NO: 1962208 - RNA, 19 nt, Artificial Sequence
  Description of Artificial Sequence: Synthetic oligonucleotide
ggcuaugaagagggcagga

SEQ ID NO: 1962209 - RNA, 19 nt, Artificial Sequence
  Description of Artificial Sequence: Synthetic oligonucleotide
cagccauccgcaggccuug

SEQ ID NO: 1962210 - RNA, 19 nt, Artificial Sequence
  Description of Artificial Sequence: Synthetic oligonucleotide
gggucgauccaagcugcug

SEQ ID NO: 1962211 - RNA, 19 nt, Artificial Sequence
  Description of Artificial Sequence: Synthetic oligonucleotide
ggauccgcagcuggccuug

SEQ ID NO: 1962212 - RNA, 19 nt, Artificial Sequence
  Description of Artificial Sequence: Synthetic oligonucleotide
gucccguggcccaacuguc

SEQ ID NO: 1962213 - RNA, 19 nt, Artificial Sequence
  Description of Artificial Sequence: Synthetic oligonucleotide
cucacucggcaaaugucau

SEQ ID NO: 1962214 - RNA, 19 nt, Artificial Sequence
  Description of Artificial Sequence: Synthetic oligonucleotide
gagaacaccuggccagcuu

SEQ ID NO: 1962215 - RNA, 19 nt, Artificial Sequence
  Description of Artificial Sequence: Synthetic oligonucleotide
gcgcacccgaagcucuggg

SEQ ID NO: 1962216 - RNA, 19 nt, Artificial Sequence
  Description of Artificial Sequence: Synthetic oligonucleotide
gguauagaguucuccuguu

SEQ ID NO: 1962217 - RNA, 19 nt, Artificial Sequence
  Description of Artificial Sequence: Synthetic oligonucleotide
acacggcagggucgaucca

SEQ ID NO: 1962218 - RNA, 19 nt, Artificial Sequence
  Description of Artificial Sequence: Synthetic oligonucleotide
ccugugggaagauccagua

SEQ ID NO: 1962219 - RNA, 19 nt, Artificial Sequence
  Description of Artificial Sequence: Synthetic oligonucleotide
cuagccucacugcuggguu

SEQ ID NO: 1962220 - RNA, 19 nt, Artificial Sequence
  Description of Artificial Sequence: Synthetic oligonucleotide
cagcucugugcaggacccg

SEQ ID NO: 1962221 - RNA, 19 nt, Artificial Sequence
  Description of Artificial Sequence: Synthetic oligonucleotide
cagccccagguauagaguu

SEQ ID NO: 1962222 - RNA, 19 nt, Artificial Sequence
  Description of Artificial Sequence: Synthetic oligonucleotide
cacggcagggucgauccaa

SEQ ID NO: 1962223 - RNA, 19 nt, Artificial Sequence
  Description of Artificial Sequence: Synthetic oligonucleotide
gcccaacuguccaugccug

SEQ ID NO: 1962224 - RNA, 19 nt, Artificial Sequence
  Description of Artificial Sequence: Synthetic oligonucleotide
ccagccccagauauaaaua

SEQ ID NO: 1962225 - RNA, 19 nt, Artificial Sequence
  Description of Artificial Sequence: Synthetic oligonucleotide
cacagagugccagccaccu

SEQ ID NO: 1962226 - RNA, 19 nt, Artificial Sequence
  Description of Artificial Sequence: Synthetic oligonucleotide
ggacccgcccuuguaugug

SEQ ID NO: 1962227 - RNA, 19 nt, Artificial Sequence
  Description of Artificial Sequence: Synthetic oligonucleotide
cccgcccuagccucacugc

SEQ ID NO: 1962228 - RNA, 19 nt, Artificial Sequence
  Description of Artificial Sequence: Synthetic oligonucleotide
gugucgggauccgcagcug

SEQ ID NO: 1962229 - RNA, 19 nt, Artificial Sequence
  Description of Artificial Sequence: Synthetic oligonucleotide
ccgcccuuguaugugcagc

SEQ ID NO: 1962230 - RNA, 19 nt, Artificial Sequence
  Description of Artificial Sequence: Synthetic oligonucleotide
gcccgcccuagccucacug

SEQ ID NO: 1962231 - RNA, 19 nt, Artificial Sequence
  Description of Artificial Sequence: Synthetic oligonucleotide
cgcacccgaagcucugggg

SEQ ID NO: 1962232 - RNA, 19 nt, Artificial Sequence
  Description of Artificial Sequence: Synthetic oligonucleotide
ggcgcacccgaagcucugg

SEQ ID NO: 1962233 - RNA, 19 nt, Artificial Sequence
  Description of Artificial Sequence: Synthetic oligonucleotide
gcugagcuguucacagaac

SEQ ID NO: 1962234 - RNA, 19 nt, Artificial Sequence
  Description of Artificial Sequence: Synthetic oligonucleotide
cgggguuacauaggcacug

SEQ ID NO: 1962235 - RNA, 19 nt, Artificial Sequence
  Description of Artificial Sequence: Synthetic oligonucleotide
gcacaaggcagcagcggca

SEQ ID NO: 1962236 - RNA, 19 nt, Artificial Sequence
  Description of Artificial Sequence: Synthetic oligonucleotide
gccuugcagugcuuccaac

SEQ ID NO: 1962237 - RNA, 19 nt, Artificial Sequence
  Description of Artificial Sequence: Synthetic oligonucleotide
gggugcccgcccuagccuc

SEQ ID NO: 1962238 - RNA, 19 nt, Artificial Sequence
  Description of Artificial Sequence: Synthetic oligonucleotide
agggucgauccaagcugcu

SEQ ID NO: 1962239 - RNA, 19 nt, Artificial Sequence
  Description of Artificial Sequence: Synthetic oligonucleotide
guauuccacacggcagggu

SEQ ID NO: 1962240 - RNA, 19 nt, Artificial Sequence
  Description of Artificial Sequence: Synthetic oligonucleotide
gcaccaccaagaguccuuc

SEQ ID NO: 1962241 - RNA, 19 nt, Artificial Sequence
  Description of Artificial Sequence: Synthetic oligonucleotide
gcugugugucgggauccgc

SEQ ID NO: 1962242 - RNA, 19 nt, Artificial Sequence
  Description of Artificial Sequence: Synthetic oligonucleotide
cccauucccagagcccagc

SEQ ID NO: 1962243 - RNA, 19 nt, Artificial Sequence
  Description of Artificial Sequence: Synthetic oligonucleotide
cagggcgguguagcuccag

SEQ ID NO: 1962244 - RNA, 19 nt, Artificial Sequence
  Description of Artificial Sequence: Synthetic oligonucleotide
ugcccgcccuagccucacu

SEQ ID NO: 1962245 - RNA, 19 nt, Artificial Sequence
  Description of Artificial Sequence: Synthetic oligonucleotide
acccgcccuuguaugugca

SEQ ID NO: 1962246 - RNA, 19 nt, Artificial Sequence
  Description of Artificial Sequence: Synthetic oligonucleotide
cccgcccuuguaugugcag

SEQ ID NO: 1962247 - RNA, 19 nt, Artificial Sequence
  Description of Artificial Sequence: Synthetic oligonucleotide
gggcgguguagcuccagcu

SEQ ID NO: 1962248 - RNA, 19 nt, Artificial Sequence
  Description of Artificial Sequence: Synthetic oligonucleotide
cgaagcucuggggccagag

SEQ ID NO: 1962249 - RNA, 19 nt, Artificial Sequence
  Description of Artificial Sequence: Synthetic oligonucleotide
gcaggacccgcccuuguau

SEQ ID NO: 1962250 - RNA, 19 nt, Artificial Sequence
  Description of Artificial Sequence: Synthetic oligonucleotide
cacagguuaccagggcggu

SEQ ID NO: 1962251 - RNA, 19 nt, Artificial Sequence
  Description of Artificial Sequence: Synthetic oligonucleotide
gauccgcagcuggccuuga

SEQ ID NO: 1962252 - RNA, 19 nt, Artificial Sequence
  Description of Artificial Sequence: Synthetic oligonucleotide
ggccgagccugguguccag

SEQ ID NO: 1962253 - RNA, 19 nt, Artificial Sequence
  Description of Artificial Sequence: Synthetic oligonucleotide
ggcgguguagcuccagcuu

SEQ ID NO: 1962254 - RNA, 19 nt, Artificial Sequence
  Description of Artificial Sequence: Synthetic oligonucleotide
cugaagcccacgcgucccu

SEQ ID NO: 1962255 - RNA, 19 nt, Artificial Sequence
  Description of Artificial Sequence: Synthetic oligonucleotide
cguggcccaacuguccaug

SEQ ID NO: 1962256 - RNA, 19 nt, Artificial Sequence
  Description of Artificial Sequence: Synthetic oligonucleotide
cgcccuagccucacugcug

SEQ ID NO: 1962257 - RNA, 19 nt, Artificial Sequence
  Description of Artificial Sequence: Synthetic oligonucleotide
cccguggcccaacugucca

SEQ ID NO: 1962258 - RNA, 19 nt, Artificial Sequence
  Description of Artificial Sequence: Synthetic oligonucleotide
ccacacggcagggucgauc

SEQ ID NO: 1962259 - RNA, 19 nt, Artificial Sequence
  Description of Artificial Sequence: Synthetic oligonucleotide
gccugccuccaccccagga

SEQ ID NO: 1962260 - RNA, 19 nt, Artificial Sequence
  Description of Artificial Sequence: Synthetic oligonucleotide
ggccagaggcuggcagaag

SEQ ID NO: 1962261 - RNA, 19 nt, Artificial Sequence
  Description of Artificial Sequence: Synthetic oligonucleotide
gcacuugcccaaagccaca

SEQ ID NO: 1962262 - RNA, 19 nt, Artificial Sequence
  Description of Artificial Sequence: Synthetic oligonucleotide
gcgucccguggcccaacug

SEQ ID NO: 1962263 - RNA, 19 nt, Artificial Sequence
  Description of Artificial Sequence: Synthetic oligonucleotide
gggccagaggcuggcagaa

SEQ ID NO: 1962264 - RNA, 19 nt, Artificial Sequence
  Description of Artificial Sequence: Synthetic oligonucleotide
gccauccgcaggccuugca

SEQ ID NO: 1962265 - RNA, 19 nt, Artificial Sequence
  Description of Artificial Sequence: Synthetic oligonucleotide
uccacacggcagggucgau

SEQ ID NO: 1962266 - RNA, 19 nt, Artificial Sequence
  Description of Artificial Sequence: Synthetic oligonucleotide
cagcggcagggugcccgcc

SEQ ID NO: 1962267 - RNA, 19 nt, Artificial Sequence
  Description of Artificial Sequence: Synthetic oligonucleotide
cggcagggucgauccaagc

SEQ ID NO: 1962268 - RNA, 19 nt, Artificial Sequence
  Description of Artificial Sequence: Synthetic oligonucleotide
gugcaggacccgcccuugu

SEQ ID NO: 1962269 - RNA, 19 nt, Artificial Sequence
  Description of Artificial Sequence: Synthetic oligonucleotide
ccagccccagguauagagu

SEQ ID NO: 1962270 - RNA, 19 nt, Artificial Sequence
  Description of Artificial Sequence: Synthetic oligonucleotide
cgugucaccacagcugugu

SEQ ID NO: 1962271 - RNA, 19 nt, Artificial Sequence
  Description of Artificial Sequence: Synthetic oligonucleotide
gugcccgcccuagccucac

SEQ ID NO: 1962272 - RNA, 19 nt, Artificial Sequence
  Description of Artificial Sequence: Synthetic oligonucleotide
ccccagguauagaguucuc

SEQ ID NO: 1962273 - RNA, 19 nt, Artificial Sequence
  Description of Artificial Sequence: Synthetic oligonucleotide
cacagugguucaggacugu

SEQ ID NO: 1962274 - RNA, 19 nt, Artificial Sequence
  Description of Artificial Sequence: Synthetic oligonucleotide
gugcaccgaauggcaccca

SEQ ID NO: 1962275 - RNA, 19 nt, Artificial Sequence
  Description of Artificial Sequence: Synthetic oligonucleotide
cgucccguggcccaacugu

SEQ ID NO: 1962276 - RNA, 19 nt, Artificial Sequence
  Description of Artificial Sequence: Synthetic oligonucleotide
gagcugggaagggcuggau

SEQ ID NO: 1962277 - RNA, 19 nt, Artificial Sequence
  Description of Artificial Sequence: Synthetic oligonucleotide
ccuagccucacugcugggu

SEQ ID NO: 1962278 - RNA, 19 nt, Artificial Sequence
  Description of Artificial Sequence: Synthetic oligonucleotide
gcgggguuacauaggcacu

SEQ ID NO: 1962279 - RNA, 19 nt, Artificial Sequence
  Description of Artificial Sequence: Synthetic oligonucleotide
ccacagcugugugucggga

SEQ ID NO: 1962280 - RNA, 19 nt, Artificial Sequence
  Description of Artificial Sequence: Synthetic oligonucleotide
cagcuggccuugacugcau

SEQ ID NO: 1962281 - RNA, 19 nt, Artificial Sequence
  Description of Artificial Sequence: Synthetic oligonucleotide
ccgcccuagccucacugcu

SEQ ID NO: 1962282 - RNA, 19 nt, Artificial Sequence
  Description of Artificial Sequence: Synthetic oligonucleotide
ccacgcgucccugcagcca

SEQ ID NO: 1962283 - RNA, 19 nt, Artificial Sequence
  Description of Artificial Sequence: Synthetic oligonucleotide
gcaccgaauggcacccauu

SEQ ID NO: 1962284 - RNA, 19 nt, Artificial Sequence
  Description of Artificial Sequence: Synthetic oligonucleotide
ccagggcgguguagcucca

SEQ ID NO: 1962285 - RNA, 19 nt, Artificial Sequence
  Description of Artificial Sequence: Synthetic oligonucleotide
cgggauccgcagcuggccu

SEQ ID NO: 1962286 - RNA, 19 nt, Artificial Sequence
  Description of Artificial Sequence: Synthetic oligonucleotide
cggccuccacagguuacca

SEQ ID NO: 1962287 - RNA, 19 nt, Artificial Sequence
  Description of Artificial Sequence: Synthetic oligonucleotide
ccagcgucccguggcccaa

SEQ ID NO: 1962288 - RNA, 19 nt, Artificial Sequence
  Description of Artificial Sequence: Synthetic oligonucleotide
gcccuuacuucgaguuguu

SEQ ID NO: 1962289 - RNA, 19 nt, Artificial Sequence
  Description of Artificial Sequence: Synthetic oligonucleotide
cccuuacuucgaguuguuu

SEQ ID NO: 1962290 - RNA, 19 nt, Artificial Sequence
  Description of Artificial Sequence: Synthetic oligonucleotide
ccguggcccaacuguccau

SEQ ID NO: 1962291 - RNA, 19 nt, Artificial Sequence
  Description of Artificial Sequence: Synthetic oligonucleotide
ccgaagcucuggggccaga

SEQ ID NO: 1962292 - RNA, 19 nt, Artificial Sequence
  Description of Artificial Sequence: Synthetic oligonucleotide
cgcgucccugcagccaccu

SEQ ID NO: 1962293 - RNA, 19 nt, Artificial Sequence
  Description of Artificial Sequence: Synthetic oligonucleotide
agaucuauggcuuguaugc

SEQ ID NO: 1962294 - RNA, 19 nt, Artificial Sequence
  Description of Artificial Sequence: Synthetic oligonucleotide
uuuucugucgggcauagag

SEQ ID NO: 1962295 - RNA, 19 nt, Artificial Sequence
  Description of Artificial Sequence: Synthetic oligonucleotide
uggacaaggagcuauaacc

SEQ ID NO: 1962296 - RNA, 19 nt, Artificial Sequence
  Description of Artificial Sequence: Synthetic oligonucleotide
aguaaacugcucuuguacc

SEQ ID NO: 1962297 - RNA, 19 nt, Artificial Sequence
  Description of Artificial Sequence: Synthetic oligonucleotide
augucgaucauacuucccc

SEQ ID NO: 1962298 - RNA, 19 nt, Artificial Sequence
  Description of Artificial Sequence: Synthetic oligonucleotide
aauggcaugucgaucauac

SEQ ID NO: 1962299 - RNA, 19 nt, Artificial Sequence
  Description of Artificial Sequence: Synthetic oligonucleotide
accgaguugauucucacac

SEQ ID NO: 1962300 - RNA, 19 nt, Artificial Sequence
  Description of Artificial Sequence: Synthetic oligonucleotide
aauuugucugaaaaccacc

SEQ ID NO: 1962301 - RNA, 19 nt, Artificial Sequence
  Description of Artificial Sequence: Synthetic oligonucleotide
uugugauuggacaaggagc

SEQ ID NO: 1962302 - RNA, 19 nt, Artificial Sequence
  Description of Artificial Sequence: Synthetic oligonucleotide
ugugauuggacaaggagcu

SEQ ID NO: 1962303 - RNA, 19 nt, Artificial Sequence
  Description of Artificial Sequence: Synthetic oligonucleotide
aaauuugucugaaaaccac

SEQ ID NO: 1962304 - RNA, 19 nt, Artificial Sequence
  Description of Artificial Sequence: Synthetic oligonucleotide
aguaauggcaugucgauca

SEQ ID NO: 1962305 - RNA, 19 nt, Artificial Sequence
  Description of Artificial Sequence: Synthetic oligonucleotide
augacgacaauuuucuguc

SEQ ID NO: 1962306 - RNA, 19 nt, Artificial Sequence
  Description of Artificial Sequence: Synthetic oligonucleotide
aagcguaacaauguugugg

SEQ ID NO: 1962307 - RNA, 19 nt, Artificial Sequence
  Description of Artificial Sequence: Synthetic oligonucleotide
aauucauugguuguucaag

SEQ ID NO: 1962308 - RNA, 19 nt, Artificial Sequence
  Description of Artificial Sequence: Synthetic oligonucleotide
aguaaaggcucccuuuccc

SEQ ID NO: 1962309 - RNA, 19 nt, Artificial Sequence
  Description of Artificial Sequence: Synthetic oligonucleotide
uaugacgacaauuuucugu

SEQ ID NO: 1962310 - RNA, 19 nt, Artificial Sequence
  Description of Artificial Sequence: Synthetic oligonucleotide
uguggcaagcguaacaaug

SEQ ID NO: 1962311 - RNA, 19 nt, Artificial Sequence
  Description of Artificial Sequence: Synthetic oligonucleotide
uucggcagcaucaaacuag

SEQ ID NO: 1962312 - RNA, 19 nt, Artificial Sequence
  Description of Artificial Sequence: Synthetic oligonucleotide
uugcaguuuccacaaaggg

SEQ ID NO: 1962313 - RNA, 19 nt, Artificial Sequence
  Description of Artificial Sequence: Synthetic oligonucleotide
uuaagaaacccacuguauc

SEQ ID NO: 1962314 - RNA, 19 nt, Artificial Sequence
  Description of Artificial Sequence: Synthetic oligonucleotide
ucagagauggaaucuuccg

SEQ ID NO: 1962315 - RNA, 19 nt, Artificial Sequence
  Description of Artificial Sequence: Synthetic oligonucleotide
cuagacaccgaguugauuc

SEQ ID NO: 1962316 - RNA, 19 nt, Artificial Sequence
  Description of Artificial Sequence: Synthetic oligonucleotide
uucaguaauggcaugucga

SEQ ID NO: 1962317 - RNA, 19 nt, Artificial Sequence
  Description of Artificial Sequence: Synthetic oligonucleotide
uauacaagaucuauggcuu

SEQ ID NO: 1962318 - RNA, 19 nt, Artificial Sequence
  Description of Artificial Sequence: Synthetic oligonucleotide
uaugcuggcucgaaaaucu

SEQ ID NO: 1962319 - RNA, 19 nt, Artificial Sequence
  Description of Artificial Sequence: Synthetic oligonucleotide
aggggauuaaauucauugg

SEQ ID NO: 1962320 - RNA, 19 nt, Artificial Sequence
  Description of Artificial Sequence: Synthetic oligonucleotide
ucuaccuucggcagcauca

SEQ ID NO: 1962321 - RNA, 19 nt, Artificial Sequence
  Description of Artificial Sequence: Synthetic oligonucleotide
uuugucugaaaaccaccgg

SEQ ID NO: 1962322 - RNA, 19 nt, Artificial Sequence
  Description of Artificial Sequence: Synthetic oligonucleotide
uuucugucgggcauagagg

SEQ ID NO: 1962323 - RNA, 19 nt, Artificial Sequence
  Description of Artificial Sequence: Synthetic oligonucleotide
accuguuuaccagugaagc

SEQ ID NO: 1962324 - RNA, 19 nt, Artificial Sequence
  Description of Artificial Sequence: Synthetic oligonucleotide
guucuuacuauucucaguc

SEQ ID NO: 1962325 - RNA, 19 nt, Artificial Sequence
  Description of Artificial Sequence: Synthetic oligonucleotide
ucuuacuauucucagucga

SEQ ID NO: 1962326 - RNA, 19 nt, Artificial Sequence
  Description of Artificial Sequence: Synthetic oligonucleotide
uugucugaaaaccaccgga

SEQ ID NO: 1962327 - RNA, 19 nt, Artificial Sequence
  Description of Artificial Sequence: Synthetic oligonucleotide
aagaaacccacuguauccg

SEQ ID NO: 1962328 - RNA, 19 nt, Artificial Sequence
  Description of Artificial Sequence: Synthetic oligonucleotide
cuugugauuggacaaggag

SEQ ID NO: 1962329 - RNA, 19 nt, Artificial Sequence
  Description of Artificial Sequence: Synthetic oligonucleotide
aggaacauacuugugauug

SEQ ID NO: 1962330 - RNA, 19 nt, Artificial Sequence
  Description of Artificial Sequence: Synthetic oligonucleotide
ucuuccguauuuucuuucg

SEQ ID NO: 1962331 - RNA, 19 nt, Artificial Sequence
  Description of Artificial Sequence: Synthetic oligonucleotide
ucucagucgagcuucauuc

SEQ ID NO: 1962332 - RNA, 19 nt, Artificial Sequence
  Description of Artificial Sequence: Synthetic oligonucleotide
ucuuucgucauucccgggc

SEQ ID NO: 1962333 - RNA, 19 nt, Artificial Sequence
  Description of Artificial Sequence: Synthetic oligonucleotide
uucgcuaugacgacaauuu

SEQ ID NO: 1962334 - RNA, 19 nt, Artificial Sequence
  Description of Artificial Sequence: Synthetic oligonucleotide
uuuaagaaacccacuguau

SEQ ID NO: 1962335 - RNA, 19 nt, Artificial Sequence
  Description of Artificial Sequence: Synthetic oligonucleotide
ugagcaaacccauugcagu

SEQ ID NO: 1962336 - RNA, 19 nt, Artificial Sequence
  Description of Artificial Sequence: Synthetic oligonucleotide
auagaggaugucuugggug

SEQ ID NO: 1962337 - RNA, 19 nt, Artificial Sequence
  Description of Artificial Sequence: Synthetic oligonucleotide
aacccauugcaguuuccac

SEQ ID NO: 1962338 - RNA, 19 nt, Artificial Sequence
  Description of Artificial Sequence: Synthetic oligonucleotide
ugcagaauugucucuaggu

SEQ ID NO: 1962339 - RNA, 19 nt, Artificial Sequence
  Description of Artificial Sequence: Synthetic oligonucleotide
caaaccacuagacaccgag

SEQ ID NO: 1962340 - RNA, 19 nt, Artificial Sequence
  Description of Artificial Sequence: Synthetic oligonucleotide
aaggccuucgcuaugacga

SEQ ID NO: 1962341 - RNA, 19 nt, Artificial Sequence
  Description of Artificial Sequence: Synthetic oligonucleotide
uggcuuguaugccaaaggc

SEQ ID NO: 1962342 - RNA, 19 nt, Artificial Sequence
  Description of Artificial Sequence: Synthetic oligonucleotide
gauccgguaugcuagcaag

SEQ ID NO: 1962343 - RNA, 19 nt, Artificial Sequence
  Description of Artificial Sequence: Synthetic oligonucleotide
acauacuugugauuggaca

SEQ ID NO: 1962344 - RNA, 19 nt, Artificial Sequence
  Description of Artificial Sequence: Synthetic oligonucleotide
aaacacaacugcaucuagg

SEQ ID NO: 1962345 - RNA, 19 nt, Artificial Sequence
  Description of Artificial Sequence: Synthetic oligonucleotide
cuguuuaccagugaagccc

SEQ ID NO: 1962346 - RNA, 19 nt, Artificial Sequence
  Description of Artificial Sequence: Synthetic oligonucleotide
acagucuacuuucagagau

SEQ ID NO: 1962347 - RNA, 19 nt, Artificial Sequence
  Description of Artificial Sequence: Synthetic oligonucleotide
ucugaaaaccaccggauuu

SEQ ID NO: 1962348 - RNA, 19 nt, Artificial Sequence
  Description of Artificial Sequence: Synthetic oligonucleotide
uccguauuuucuuucguca

SEQ ID NO: 1962349 - RNA, 19 nt, Artificial Sequence
  Description of Artificial Sequence: Synthetic oligonucleotide
cuuacuauucucagucgag

SEQ ID NO: 1962350 - RNA, 19 nt, Artificial Sequence
  Description of Artificial Sequence: Synthetic oligonucleotide
ucacacacuuuuccguugg

SEQ ID NO: 1962351 - RNA, 19 nt, Artificial Sequence
  Description of Artificial Sequence: Synthetic oligonucleotide
ugucgaucauacuuccccg

SEQ ID NO: 1962352 - RNA, 19 nt, Artificial Sequence
  Description of Artificial Sequence: Synthetic oligonucleotide
cagccaaaccacuagacac

SEQ ID NO: 1962353 - RNA, 19 nt, Artificial Sequence
  Description of Artificial Sequence: Synthetic oligonucleotide
ggcagcaucaaacuagagg

SEQ ID NO: 1962354 - RNA, 19 nt, Artificial Sequence
  Description of Artificial Sequence: Synthetic oligonucleotide
uucugucgggcauagagga

SEQ ID NO: 1962355 - RNA, 19 nt, Artificial Sequence
  Description of Artificial Sequence: Synthetic oligonucleotide
caggguuggaguaaacugc

SEQ ID NO: 1962356 - RNA, 19 nt, Artificial Sequence
  Description of Artificial Sequence: Synthetic oligonucleotide
aaauucauugguuguucaa

SEQ ID NO: 1962357 - RNA, 19 nt, Artificial Sequence
  Description of Artificial Sequence: Synthetic oligonucleotide
agucuacuuucagagaugg

SEQ ID NO: 1962358 - RNA, 19 nt, Artificial Sequence
  Description of Artificial Sequence: Synthetic oligonucleotide
ucuuggguguccuuauugc

SEQ ID NO: 1962359 - RNA, 19 nt, Artificial Sequence
  Description of Artificial Sequence: Synthetic oligonucleotide
uuccguugggcccagguca

SEQ ID NO: 1962360 - RNA, 19 nt, Artificial Sequence
  Description of Artificial Sequence: Synthetic oligonucleotide
aggagcuauaaccaggccu

SEQ ID NO: 1962361 - RNA, 19 nt, Artificial Sequence
  Description of Artificial Sequence: Synthetic oligonucleotide
gacaaggagcuauaaccag

SEQ ID NO: 1962362 - RNA, 19 nt, Artificial Sequence
  Description of Artificial Sequence: Synthetic oligonucleotide
uagagcaccgcccuccgag

SEQ ID NO: 1962363 - RNA, 19 nt, Artificial Sequence
  Description of Artificial Sequence: Synthetic oligonucleotide
aacauacuugugauuggac

SEQ ID NO: 1962364 - RNA, 19 nt, Artificial Sequence
  Description of Artificial Sequence: Synthetic oligonucleotide
auggcuuguaugccaaagg

SEQ ID NO: 1962365 - RNA, 19 nt, Artificial Sequence
  Description of Artificial Sequence: Synthetic oligonucleotide
auucauugguuguucaagu

SEQ ID NO: 1962366 - RNA, 19 nt, Artificial Sequence
  Description of Artificial Sequence: Synthetic oligonucleotide
uuccccggaaaguaaaggc

SEQ ID NO: 1962367 - RNA, 19 nt, Artificial Sequence
  Description of Artificial Sequence: Synthetic oligonucleotide
aaaccaccggauuucuuca

SEQ ID NO: 1962368 - RNA, 19 nt, Artificial Sequence
  Description of Artificial Sequence: Synthetic oligonucleotide
aaccacuagacaccgaguu

SEQ ID NO: 1962369 - RNA, 19 nt, Artificial Sequence
  Description of Artificial Sequence: Synthetic oligonucleotide
uugacuguuugagaagucc

SEQ ID NO: 1962370 - RNA, 19 nt, Artificial Sequence
  Description of Artificial Sequence: Synthetic oligonucleotide
uguuuaccagugaagccca

SEQ ID NO: 1962371 - RNA, 19 nt, Artificial Sequence
  Description of Artificial Sequence: Synthetic oligonucleotide
uauccguucagcccgccug

SEQ ID NO: 1962372 - RNA, 19 nt, Artificial Sequence
  Description of Artificial Sequence: Synthetic oligonucleotide
acuagagggaagaaccugg

SEQ ID NO: 1962373 - RNA, 19 nt, Artificial Sequence
  Description of Artificial Sequence: Synthetic oligonucleotide
accacagcuaucugguuag

SEQ ID NO: 1962374 - RNA, 19 nt, Artificial Sequence
  Description of Artificial Sequence: Synthetic oligonucleotide
ucauugguuguucaaguuu

SEQ ID NO: 1962375 - RNA, 19 nt, Artificial Sequence
  Description of Artificial Sequence: Synthetic oligonucleotide
cucgaaaaucuucuccucc

SEQ ID NO: 1962376 - RNA, 19 nt, Artificial Sequence
  Description of Artificial Sequence: Synthetic oligonucleotide
ugcacagucuacuuucaga

SEQ ID NO: 1962377 - RNA, 19 nt, Artificial Sequence
  Description of Artificial Sequence: Synthetic oligonucleotide
uuacuauucucagucgagc

SEQ ID NO: 1962378 - RNA, 19 nt, Artificial Sequence
  Description of Artificial Sequence: Synthetic oligonucleotide
acgacaauuuucugucggg

SEQ ID NO: 1962379 - RNA, 19 nt, Artificial Sequence
  Description of Artificial Sequence: Synthetic oligonucleotide
uucaggaccuucuaccuuc

SEQ ID NO: 1962380 - RNA, 19 nt, Artificial Sequence
  Description of Artificial Sequence: Synthetic oligonucleotide
uucagccaaaccacuagac

SEQ ID NO: 1962381 - RNA, 19 nt, Artificial Sequence
  Description of Artificial Sequence: Synthetic oligonucleotide
ucaccuguuuaccagugaa

SEQ ID NO: 1962382 - RNA, 19 nt, Artificial Sequence
  Description of Artificial Sequence: Synthetic oligonucleotide
aagucaauguauacaagau

SEQ ID NO: 1962383 - RNA, 19 nt, Artificial Sequence
  Description of Artificial Sequence: Synthetic oligonucleotide
uauggcuuguaugccaaag

SEQ ID NO: 1962384 - RNA, 19 nt, Artificial Sequence
  Description of Artificial Sequence: Synthetic oligonucleotide
ugucugaaaaccaccggau

SEQ ID NO: 1962385 - RNA, 19 nt, Artificial Sequence
  Description of Artificial Sequence: Synthetic oligonucleotide
aauugucucuaggucagcu

SEQ ID NO: 1962386 - RNA, 19 nt, Artificial Sequence
  Description of Artificial Sequence: Synthetic oligonucleotide
uacuugugauuggacaagg

SEQ ID NO: 1962387 - RNA, 19 nt, Artificial Sequence
  Description of Artificial Sequence: Synthetic oligonucleotide
uucucacacacuuuuccgu

SEQ ID NO: 1962388 - RNA, 19 nt, Artificial Sequence
  Description of Artificial Sequence: Synthetic oligonucleotide
aacuagagggaagaaccug

SEQ ID NO: 1962389 - RNA, 19 nt, Artificial Sequence
  Description of Artificial Sequence: Synthetic oligonucleotide
aucauacuuccccggaaag

SEQ ID NO: 1962390 - RNA, 19 nt, Artificial Sequence
  Description of Artificial Sequence: Synthetic oligonucleotide
ucaguaauggcaugucgau

SEQ ID NO: 1962391 - RNA, 19 nt, Artificial Sequence
  Description of Artificial Sequence: Synthetic oligonucleotide
agaauugucucuaggucag

SEQ ID NO: 1962392 - RNA, 19 nt, Artificial Sequence
  Description of Artificial Sequence: Synthetic oligonucleotide
agccaaaccacuagacacc

SEQ ID NO: 1962393 - RNA, 19 nt, Artificial Sequence
  Description of Artificial Sequence: Synthetic oligonucleotide
uuggacaaggagcuauaac

SEQ ID NO: 1962394 - RNA, 19 nt, Artificial Sequence
  Description of Artificial Sequence: Synthetic oligonucleotide
ucuauggcuuguaugccaa

SEQ ID NO: 1962395 - RNA, 19 nt, Artificial Sequence
  Description of Artificial Sequence: Synthetic oligonucleotide
gcaacgaucaguucuucag

SEQ ID NO: 1962396 - RNA, 19 nt, Artificial Sequence
  Description of Artificial Sequence: Synthetic oligonucleotide
aaacccauugcaguuucca

SEQ ID NO: 1962397 - RNA, 19 nt, Artificial Sequence
  Description of Artificial Sequence: Synthetic oligonucleotide
uagcaagccacccugggua

SEQ ID NO: 1962398 - RNA, 19 nt, Artificial Sequence
  Description of Artificial Sequence: Synthetic oligonucleotide
cacuguauccguucagccc

SEQ ID NO: 1962399 - RNA, 19 nt, Artificial Sequence
  Description of Artificial Sequence: Synthetic oligonucleotide
cuuuaagaaacccacugua

SEQ ID NO: 1962400 - RNA, 19 nt, Artificial Sequence
  Description of Artificial Sequence: Synthetic oligonucleotide
ugcaaaggcaacgaucagu

SEQ ID NO: 1962401 - RNA, 19 nt, Artificial Sequence
  Description of Artificial Sequence: Synthetic oligonucleotide
guaaacugcucuuguacca

SEQ ID NO: 1962402 - RNA, 19 nt, Artificial Sequence
  Description of Artificial Sequence: Synthetic oligonucleotide
ugacgacaauuuucugucg

SEQ ID NO: 1962403 - RNA, 19 nt, Artificial Sequence
  Description of Artificial Sequence: Synthetic oligonucleotide
caacgaucaguucuucagc

SEQ ID NO: 1962404 - RNA, 19 nt, Artificial Sequence
  Description of Artificial Sequence: Synthetic oligonucleotide
acccauugcaguuuccaca

SEQ ID NO: 1962405 - RNA, 19 nt, Artificial Sequence
  Description of Artificial Sequence: Synthetic oligonucleotide
aucuauggcuuguaugcca

SEQ ID NO: 1962406 - RNA, 19 nt, Artificial Sequence
  Description of Artificial Sequence: Synthetic oligonucleotide
accuucuaccuucggcagc

SEQ ID NO: 1962407 - RNA, 19 nt, Artificial Sequence
  Description of Artificial Sequence: Synthetic oligonucleotide
uuuuccguugggcccaggu

SEQ ID NO: 1962408 - RNA, 19 nt, Artificial Sequence
  Description of Artificial Sequence: Synthetic oligonucleotide
cuauucucagucgagcuuc

SEQ ID NO: 1962409 - RNA, 19 nt, Artificial Sequence
  Description of Artificial Sequence: Synthetic oligonucleotide
ucgaucauacuuccccgga

SEQ ID NO: 1962410 - RNA, 19 nt, Artificial Sequence
  Description of Artificial Sequence: Synthetic oligonucleotide
ugauuggacaaggagcuau

SEQ ID NO: 1962411 - RNA, 19 nt, Artificial Sequence
  Description of Artificial Sequence: Synthetic oligonucleotide
uuggaguaaacugcucuug

SEQ ID NO: 1962412 - RNA, 19 nt, Artificial Sequence
  Description of Artificial Sequence: Synthetic oligonucleotide
gucgaucauacuuccccgg

SEQ ID NO: 1962413 - RNA, 19 nt, Artificial Sequence
  Description of Artificial Sequence: Synthetic oligonucleotide
uugauggauguggcaagcg

SEQ ID NO: 1962414 - RNA, 19 nt, Artificial Sequence
  Description of Artificial Sequence: Synthetic oligonucleotide
ucaggaccuucuaccuucg

SEQ ID NO: 1962415 - RNA, 19 nt, Artificial Sequence
  Description of Artificial Sequence: Synthetic oligonucleotide
gacggcguuccgcagcacg

SEQ ID NO: 1962416 - RNA, 19 nt, Artificial Sequence
  Description of Artificial Sequence: Synthetic oligonucleotide
acguagagcaccgcccucc

SEQ ID NO: 1962417 - RNA, 19 nt, Artificial Sequence
  Description of Artificial Sequence: Synthetic oligonucleotide
auacuugugauuggacaag

SEQ ID NO: 1962418 - RNA, 19 nt, Artificial Sequence
  Description of Artificial Sequence: Synthetic oligonucleotide
acaccgaguugauucucac

SEQ ID NO: 1962419 - RNA, 19 nt, Artificial Sequence
  Description of Artificial Sequence: Synthetic oligonucleotide
ggagcuauaaccaggccug

SEQ ID NO: 1962420 - RNA, 19 nt, Artificial Sequence
  Description of Artificial Sequence: Synthetic oligonucleotide
gucuuggguguccuuauug

SEQ ID NO: 1962421 - RNA, 19 nt, Artificial Sequence
  Description of Artificial Sequence: Synthetic oligonucleotide
gaucauacuuccccggaaa

SEQ ID NO: 1962422 - RNA, 19 nt, Artificial Sequence
  Description of Artificial Sequence: Synthetic oligonucleotide
ggaacauacuugugauugg

SEQ ID NO: 1962423 - RNA, 19 nt, Artificial Sequence
  Description of Artificial Sequence: Synthetic oligonucleotide
agcaagccacccuggguac

SEQ ID NO: 1962424 - RNA, 19 nt, Artificial Sequence
  Description of Artificial Sequence: Synthetic oligonucleotide
aaccaccggauuucuucag

SEQ ID NO: 1962425 - RNA, 19 nt, Artificial Sequence
  Description of Artificial Sequence: Synthetic oligonucleotide
ugcuagcaagccacccugg

SEQ ID NO: 1962426 - RNA, 19 nt, Artificial Sequence
  Description of Artificial Sequence: Synthetic oligonucleotide
ucuccaucccggaagucaa

SEQ ID NO: 1962427 - RNA, 19 nt, Artificial Sequence
  Description of Artificial Sequence: Synthetic oligonucleotide
agcuaucugguuagggugg

SEQ ID NO: 1962428 - RNA, 19 nt, Artificial Sequence
  Description of Artificial Sequence: Synthetic oligonucleotide
accuaugcuggcucgaaaa

SEQ ID NO: 1962429 - RNA, 19 nt, Artificial Sequence
  Description of Artificial Sequence: Synthetic oligonucleotide
gcuauaaccaggccugcag

SEQ ID NO: 1962430 - RNA, 19 nt, Artificial Sequence
  Description of Artificial Sequence: Synthetic oligonucleotide
gucauucccgggcacguag

SEQ ID NO: 1962431 - RNA, 19 nt, Artificial Sequence
  Description of Artificial Sequence: Synthetic oligonucleotide
ugauucucacacacuuuuc

SEQ ID NO: 1962432 - RNA, 19 nt, Artificial Sequence
  Description of Artificial Sequence: Synthetic oligonucleotide
accacuagacaccgaguug

SEQ ID NO: 1962433 - RNA, 19 nt, Artificial Sequence
  Description of Artificial Sequence: Synthetic oligonucleotide
uucgucauucccgggcacg

SEQ ID NO: 1962434 - RNA, 19 nt, Artificial Sequence
  Description of Artificial Sequence: Synthetic oligonucleotide
agcccauagcggcagcuuc

SEQ ID NO: 1962435 - RNA, 19 nt, Artificial Sequence
  Description of Artificial Sequence: Synthetic oligonucleotide
gaucuauggcuuguaugcc

SEQ ID NO: 1962436 - RNA, 19 nt, Artificial Sequence
  Description of Artificial Sequence: Synthetic oligonucleotide
uagacaccgaguugauucu

SEQ ID NO: 1962437 - RNA, 19 nt, Artificial Sequence
  Description of Artificial Sequence: Synthetic oligonucleotide
uccuuauugcuuguugcac

SEQ ID NO: 1962438 - RNA, 19 nt, Artificial Sequence
  Description of Artificial Sequence: Synthetic oligonucleotide
ucauacuuccccggaaagu

SEQ ID NO: 1962439 - RNA, 19 nt, Artificial Sequence
  Description of Artificial Sequence: Synthetic oligonucleotide
uacaagaucuauggcuugu

SEQ ID NO: 1962440 - RNA, 19 nt, Artificial Sequence
  Description of Artificial Sequence: Synthetic oligonucleotide
uucauugguuguucaaguu

SEQ ID NO: 1962441 - RNA, 19 nt, Artificial Sequence
  Description of Artificial Sequence: Synthetic oligonucleotide
ugauccgguaugcuagcaa

SEQ ID NO: 1962442 - RNA, 19 nt, Artificial Sequence
  Description of Artificial Sequence: Synthetic oligonucleotide
acuauucucagucgagcuu

SEQ ID NO: 1962443 - RNA, 19 nt, Artificial Sequence
  Description of Artificial Sequence: Synthetic oligonucleotide
uacuuccccggaaaguaaa

SEQ ID NO: 1962444 - RNA, 19 nt, Artificial Sequence
  Description of Artificial Sequence: Synthetic oligonucleotide
caccuguuuaccagugaag

SEQ ID NO: 1962445 - RNA, 19 nt, Artificial Sequence
  Description of Artificial Sequence: Synthetic oligonucleotide
ucucacacacuuuuccguu

SEQ ID NO: 1962446 - RNA, 19 nt, Artificial Sequence
  Description of Artificial Sequence: Synthetic oligonucleotide
cuuccccggaaaguaaagg

SEQ ID NO: 1962447 - RNA, 19 nt, Artificial Sequence
  Description of Artificial Sequence: Synthetic oligonucleotide
aacugcucuuguaccacag

SEQ ID NO: 1962448 - RNA, 19 nt, Artificial Sequence
  Description of Artificial Sequence: Synthetic oligonucleotide
ccuuauugcuuguugcacc

SEQ ID NO: 1962449 - RNA, 19 nt, Artificial Sequence
  Description of Artificial Sequence: Synthetic oligonucleotide
aaccugggacugcagaauu

SEQ ID NO: 1962450 - RNA, 19 nt, Artificial Sequence
  Description of Artificial Sequence: Synthetic oligonucleotide
agggcuucauuuaacagau

SEQ ID NO: 1962451 - RNA, 19 nt, Artificial Sequence
  Description of Artificial Sequence: Synthetic oligonucleotide
caugucgaucauacuuccc

SEQ ID NO: 1962452 - RNA, 19 nt, Artificial Sequence
  Description of Artificial Sequence: Synthetic oligonucleotide
gauggaaucuuccguauuu

SEQ ID NO: 1962453 - RNA, 19 nt, Artificial Sequence
  Description of Artificial Sequence: Synthetic oligonucleotide
ugaaaaccaccggauuucu

SEQ ID NO: 1962454 - RNA, 19 nt, Artificial Sequence
  Description of Artificial Sequence: Synthetic oligonucleotide
caugagggaugccuucagc

SEQ ID NO: 1962455 - RNA, 19 nt, Artificial Sequence
  Description of Artificial Sequence: Synthetic oligonucleotide
ugcuggcucgaaaaucuuc

SEQ ID NO: 1962456 - RNA, 19 nt, Artificial Sequence
  Description of Artificial Sequence: Synthetic oligonucleotide
auccgguaugcuagcaagc

SEQ ID NO: 1962457 - RNA, 19 nt, Artificial Sequence
  Description of Artificial Sequence: Synthetic oligonucleotide
ugucgggcauagaggaugu

SEQ ID NO: 1962458 - RNA, 19 nt, Artificial Sequence
  Description of Artificial Sequence: Synthetic oligonucleotide
aaaauugagcaaacccauu

SEQ ID NO: 1962459 - RNA, 19 nt, Artificial Sequence
  Description of Artificial Sequence: Synthetic oligonucleotide
uccgaggaacauacuugug

SEQ ID NO: 1962460 - RNA, 19 nt, Artificial Sequence
  Description of Artificial Sequence: Synthetic oligonucleotide
guccuuauugcuuguugca

SEQ ID NO: 1962461 - RNA, 19 nt, Artificial Sequence
  Description of Artificial Sequence: Synthetic oligonucleotide
gaucaccuguuuaccagug

SEQ ID NO: 1962462 - RNA, 19 nt, Artificial Sequence
  Description of Artificial Sequence: Synthetic oligonucleotide
gcuucagccaaaccacuag

SEQ ID NO: 1962463 - RNA, 19 nt, Artificial Sequence
  Description of Artificial Sequence: Synthetic oligonucleotide
uuccuugauggauguggca

SEQ ID NO: 1962464 - RNA, 19 nt, Artificial Sequence
  Description of Artificial Sequence: Synthetic oligonucleotide
cucacacacuuuuccguug

SEQ ID NO: 1962465 - RNA, 19 nt, Artificial Sequence
  Description of Artificial Sequence: Synthetic oligonucleotide
cacagcuaucugguuaggg

SEQ ID NO: 1962466 - RNA, 19 nt, Artificial Sequence
  Description of Artificial Sequence: Synthetic oligonucleotide
guugcaccuaugcuggcuc

SEQ ID NO: 1962467 - RNA, 19 nt, Artificial Sequence
  Description of Artificial Sequence: Synthetic oligonucleotide
ggagggcuucauuuaacag

SEQ ID NO: 1962468 - RNA, 19 nt, Artificial Sequence
  Description of Artificial Sequence: Synthetic oligonucleotide
cugcaucuaggaacaggcc

SEQ ID NO: 1962469 - RNA, 19 nt, Artificial Sequence
  Description of Artificial Sequence: Synthetic oligonucleotide
aaaccacuagacaccgagu

SEQ ID NO: 1962470 - RNA, 19 nt, Artificial Sequence
  Description of Artificial Sequence: Synthetic oligonucleotide
caagcguaacaauguugug

SEQ ID NO: 1962471 - RNA, 19 nt, Artificial Sequence
  Description of Artificial Sequence: Synthetic oligonucleotide
ucccggaagucaauguaua

SEQ ID NO: 1962472 - RNA, 19 nt, Artificial Sequence
  Description of Artificial Sequence: Synthetic oligonucleotide
gauggauguggcaagcgua

SEQ ID NO: 1962473 - RNA, 19 nt, Artificial Sequence
  Description of Artificial Sequence: Synthetic oligonucleotide
uguugcaccuaugcuggcu

SEQ ID NO: 1962474 - RNA, 19 nt, Artificial Sequence
  Description of Artificial Sequence: Synthetic oligonucleotide
cguaacaauguugugggcc

SEQ ID NO: 1962475 - RNA, 19 nt, Artificial Sequence
  Description of Artificial Sequence: Synthetic oligonucleotide
ccuguuuaccagugaagcc

SEQ ID NO: 1962476 - RNA, 19 nt, Artificial Sequence
  Description of Artificial Sequence: Synthetic oligonucleotide
aaggcaacgaucaguucuu

SEQ ID NO: 1962477 - RNA, 19 nt, Artificial Sequence
  Description of Artificial Sequence: Synthetic oligonucleotide
aggccuucgcuaugacgac

SEQ ID NO: 1962478 - RNA, 19 nt, Artificial Sequence
  Description of Artificial Sequence: Synthetic oligonucleotide
cuugaggcccaauccucac

SEQ ID NO: 1962479 - RNA, 19 nt, Artificial Sequence
  Description of Artificial Sequence: Synthetic oligonucleotide
ggggauuaaauucauuggu

SEQ ID NO: 1962480 - RNA, 19 nt, Artificial Sequence
  Description of Artificial Sequence: Synthetic oligonucleotide
cauacuuccccggaaagua

SEQ ID NO: 1962481 - RNA, 19 nt, Artificial Sequence
  Description of Artificial Sequence: Synthetic oligonucleotide
ucggccauuuaaguggaau

SEQ ID NO: 1962482 - RNA, 19 nt, Artificial Sequence
  Description of Artificial Sequence: Synthetic oligonucleotide
guaugcuagcaagccaccc

SEQ ID NO: 1962483 - RNA, 19 nt, Artificial Sequence
  Description of Artificial Sequence: Synthetic oligonucleotide
uuucgucauucccgggcac

SEQ ID NO: 1962484 - RNA, 19 nt, Artificial Sequence
  Description of Artificial Sequence: Synthetic oligonucleotide
aucaccuguuuaccaguga

SEQ ID NO: 1962485 - RNA, 19 nt, Artificial Sequence
  Description of Artificial Sequence: Synthetic oligonucleotide
cuuucgucauucccgggca

SEQ ID NO: 1962486 - RNA, 19 nt, Artificial Sequence
  Description of Artificial Sequence: Synthetic oligonucleotide
acggcguuccgcagcacgc

SEQ ID NO: 1962487 - RNA, 19 nt, Artificial Sequence
  Description of Artificial Sequence: Synthetic oligonucleotide
uucuaccuucggcagcauc

SEQ ID NO: 1962488 - RNA, 19 nt, Artificial Sequence
  Description of Artificial Sequence: Synthetic oligonucleotide
uuccacaaaggggauuaaa

SEQ ID NO: 1962489 - RNA, 19 nt, Artificial Sequence
  Description of Artificial Sequence: Synthetic oligonucleotide
aggguuggaguaaacugcu

SEQ ID NO: 1962490 - RNA, 19 nt, Artificial Sequence
  Description of Artificial Sequence: Synthetic oligonucleotide
ggcuuguaugccaaaggcc

SEQ ID NO: 1962491 - RNA, 19 nt, Artificial Sequence
  Description of Artificial Sequence: Synthetic oligonucleotide
caccggauuucuucaggac

SEQ ID NO: 1962492 - RNA, 19 nt, Artificial Sequence
  Description of Artificial Sequence: Synthetic oligonucleotide
ggacaaggagcuauaacca

SEQ ID NO: 1962493 - RNA, 19 nt, Artificial Sequence
  Description of Artificial Sequence: Synthetic oligonucleotide
ccuccgaggaacauacuug

SEQ ID NO: 1962494 - RNA, 19 nt, Artificial Sequence
  Description of Artificial Sequence: Synthetic oligonucleotide
agcacugcacagucuacuu

SEQ ID NO: 1962495 - RNA, 19 nt, Artificial Sequence
  Description of Artificial Sequence: Synthetic oligonucleotide
cuucagccugggcagcgcc

SEQ ID NO: 1962496 - RNA, 19 nt, Artificial Sequence
  Description of Artificial Sequence: Synthetic oligonucleotide
uggcaagcguaacaauguu

SEQ ID NO: 1962497 - RNA, 19 nt, Artificial Sequence
  Description of Artificial Sequence: Synthetic oligonucleotide
cauucccgggcacguagag

SEQ ID NO: 1962498 - RNA, 19 nt, Artificial Sequence
  Description of Artificial Sequence: Synthetic oligonucleotide
cuuguaccacagcuaucug

SEQ ID NO: 1962499 - RNA, 19 nt, Artificial Sequence
  Description of Artificial Sequence: Synthetic oligonucleotide
ucgcuaugacgacaauuuu

SEQ ID NO: 1962500 - RNA, 19 nt, Artificial Sequence
  Description of Artificial Sequence: Synthetic oligonucleotide
ggaagucaauguauacaag

SEQ ID NO: 1962501 - RNA, 19 nt, Artificial Sequence
  Description of Artificial Sequence: Synthetic oligonucleotide
gguuggaguaaacugcucu

SEQ ID NO: 1962502 - RNA, 19 nt, Artificial Sequence
  Description of Artificial Sequence: Synthetic oligonucleotide
agacaccgaguugauucuc

SEQ ID NO: 1962503 - RNA, 19 nt, Artificial Sequence
  Description of Artificial Sequence: Synthetic oligonucleotide
gguggaucaccuguuuacc

SEQ ID NO: 1962504 - RNA, 19 nt, Artificial Sequence
  Description of Artificial Sequence: Synthetic oligonucleotide
guucagcccgccugaggag

SEQ ID NO: 1962505 - RNA, 19 nt, Artificial Sequence
  Description of Artificial Sequence: Synthetic oligonucleotide
acccacuguauccguucag

SEQ ID NO: 1962506 - RNA, 19 nt, Artificial Sequence
  Description of Artificial Sequence: Synthetic oligonucleotide
acuugaggcccaauccuca

SEQ ID NO: 1962507 - RNA, 19 nt, Artificial Sequence
  Description of Artificial Sequence: Synthetic oligonucleotide
gacaccgaguugauucuca

SEQ ID NO: 1962508 - RNA, 19 nt, Artificial Sequence
  Description of Artificial Sequence: Synthetic oligonucleotide
ucugucgggcauagaggau

SEQ ID NO: 1962509 - RNA, 19 nt, Artificial Sequence
  Description of Artificial Sequence: Synthetic oligonucleotide
auccguucagcccgccuga

SEQ ID NO: 1962510 - RNA, 19 nt, Artificial Sequence
  Description of Artificial Sequence: Synthetic oligonucleotide
auuggacaaggagcuauaa

SEQ ID NO: 1962511 - RNA, 19 nt, Artificial Sequence
  Description of Artificial Sequence: Synthetic oligonucleotide
acuuccccggaaaguaaag

SEQ ID NO: 1962512 - RNA, 19 nt, Artificial Sequence
  Description of Artificial Sequence: Synthetic oligonucleotide
cgcagcgccaucuaucccg

SEQ ID NO: 1962513 - RNA, 19 nt, Artificial Sequence
  Description of Artificial Sequence: Synthetic oligonucleotide
ggcaagcguaacaauguug

SEQ ID NO: 1962514 - RNA, 19 nt, Artificial Sequence
  Description of Artificial Sequence: Synthetic oligonucleotide
auggauguggcaagcguaa

SEQ ID NO: 1962515 - RNA, 19 nt, Artificial Sequence
  Description of Artificial Sequence: Synthetic oligonucleotide
gaauugucucuaggucagc

SEQ ID NO: 1962516 - RNA, 19 nt, Artificial Sequence
  Description of Artificial Sequence: Synthetic oligonucleotide
acaagguccugauccggua

SEQ ID NO: 1962517 - RNA, 19 nt, Artificial Sequence
  Description of Artificial Sequence: Synthetic oligonucleotide
gcaucaaacuagagggaag

SEQ ID NO: 1962518 - RNA, 19 nt, Artificial Sequence
  Description of Artificial Sequence: Synthetic oligonucleotide
ccacuguauccguucagcc

SEQ ID NO: 1962519 - RNA, 19 nt, Artificial Sequence
  Description of Artificial Sequence: Synthetic oligonucleotide
uccguugggcccaggucaa

SEQ ID NO: 1962520 - RNA, 19 nt, Artificial Sequence
  Description of Artificial Sequence: Synthetic oligonucleotide
gacugcagaauugucucua

SEQ ID NO: 1962521 - RNA, 19 nt, Artificial Sequence
  Description of Artificial Sequence: Synthetic oligonucleotide
gcaagcguaacaauguugu

SEQ ID NO: 1962522 - RNA, 19 nt, Artificial Sequence
  Description of Artificial Sequence: Synthetic oligonucleotide
cgguaugcuagcaagccac

SEQ ID NO: 1962523 - RNA, 19 nt, Artificial Sequence
  Description of Artificial Sequence: Synthetic oligonucleotide
caguaauggcaugucgauc

SEQ ID NO: 1962524 - RNA, 19 nt, Artificial Sequence
  Description of Artificial Sequence: Synthetic oligonucleotide
acuugugauuggacaagga

SEQ ID NO: 1962525 - RNA, 19 nt, Artificial Sequence
  Description of Artificial Sequence: Synthetic oligonucleotide
guaugccaaaggccuucgc

SEQ ID NO: 1962526 - RNA, 19 nt, Artificial Sequence
  Description of Artificial Sequence: Synthetic oligonucleotide
gagauggaaucuuccguau

SEQ ID NO: 1962527 - RNA, 19 nt, Artificial Sequence
  Description of Artificial Sequence: Synthetic oligonucleotide
aggguggaucaccuguuua

SEQ ID NO: 1962528 - RNA, 19 nt, Artificial Sequence
  Description of Artificial Sequence: Synthetic oligonucleotide
cuguauccguucagcccgc

SEQ ID NO: 1962529 - RNA, 19 nt, Artificial Sequence
  Description of Artificial Sequence: Synthetic oligonucleotide
cagagauggaaucuuccgu

SEQ ID NO: 1962530 - RNA, 19 nt, Artificial Sequence
  Description of Artificial Sequence: Synthetic oligonucleotide
cgcuaugacgacaauuuuc

SEQ ID NO: 1962531 - RNA, 19 nt, Artificial Sequence
  Description of Artificial Sequence: Synthetic oligonucleotide
cugggacugcagaauuguc

SEQ ID NO: 1962532 - RNA, 19 nt, Artificial Sequence
  Description of Artificial Sequence: Synthetic oligonucleotide
auguggcaagcguaacaau

SEQ ID NO: 1962533 - RNA, 19 nt, Artificial Sequence
  Description of Artificial Sequence: Synthetic oligonucleotide
cuccgaggaacauacuugu

SEQ ID NO: 1962534 - RNA, 19 nt, Artificial Sequence
  Description of Artificial Sequence: Synthetic oligonucleotide
ucgucauucccgggcacgu

SEQ ID NO: 1962535 - RNA, 19 nt, Artificial Sequence
  Description of Artificial Sequence: Synthetic oligonucleotide
ugucuuggguguccuuauu

SEQ ID NO: 1962536 - RNA, 19 nt, Artificial Sequence
  Description of Artificial Sequence: Synthetic oligonucleotide
uggccaugagggaugccuu

SEQ ID NO: 1962537 - RNA, 19 nt, Artificial Sequence
  Description of Artificial Sequence: Synthetic oligonucleotide
ccgaggaacauacuuguga

SEQ ID NO: 1962538 - RNA, 19 nt, Artificial Sequence
  Description of Artificial Sequence: Synthetic oligonucleotide
cccggaaaguaaaggcucc

SEQ ID NO: 1962539 - RNA, 19 nt, Artificial Sequence
  Description of Artificial Sequence: Synthetic oligonucleotide
gcaucuaggaacaggccca

SEQ ID NO: 1962540 - RNA, 19 nt, Artificial Sequence
  Description of Artificial Sequence: Synthetic oligonucleotide
guuggaguaaacugcucuu

SEQ ID NO: 1962541 - RNA, 19 nt, Artificial Sequence
  Description of Artificial Sequence: Synthetic oligonucleotide
ugcaccuaugcuggcucga

SEQ ID NO: 1962542 - RNA, 19 nt, Artificial Sequence
  Description of Artificial Sequence: Synthetic oligonucleotide
gauuggacaaggagcuaua

SEQ ID NO: 1962543 - RNA, 19 nt, Artificial Sequence
  Description of Artificial Sequence: Synthetic oligonucleotide
agcuauaaccaggccugca

SEQ ID NO: 1962544 - RNA, 19 nt, Artificial Sequence
  Description of Artificial Sequence: Synthetic oligonucleotide
acgcgcagcgccaucuauc

SEQ ID NO: 1962545 - RNA, 19 nt, Artificial Sequence
  Description of Artificial Sequence: Synthetic oligonucleotide
uggauguggcaagcguaac

SEQ ID NO: 1962546 - RNA, 19 nt, Artificial Sequence
  Description of Artificial Sequence: Synthetic oligonucleotide
caucccggaagucaaugua

SEQ ID NO: 1962547 - RNA, 19 nt, Artificial Sequence
  Description of Artificial Sequence: Synthetic oligonucleotide
aggcccaauccucacuguu

SEQ ID NO: 1962548 - RNA, 19 nt, Artificial Sequence
  Description of Artificial Sequence: Synthetic oligonucleotide
ggcacguagagcaccgccc

SEQ ID NO: 1962549 - RNA, 19 nt, Artificial Sequence
  Description of Artificial Sequence: Synthetic oligonucleotide
guggcaagcguaacaaugu

SEQ ID NO: 1962550 - RNA, 19 nt, Artificial Sequence
  Description of Artificial Sequence: Synthetic oligonucleotide
uccgcggacggcguuccgc

SEQ ID NO: 1962551 - RNA, 19 nt, Artificial Sequence
  Description of Artificial Sequence: Synthetic oligonucleotide
uaauggcaugucgaucaua

SEQ ID NO: 1962552 - RNA, 19 nt, Artificial Sequence
  Description of Artificial Sequence: Synthetic oligonucleotide
uaccuucggcagcaucaaa

SEQ ID NO: 1962553 - RNA, 19 nt, Artificial Sequence
  Description of Artificial Sequence: Synthetic oligonucleotide
uuuccacaaaggggauuaa

SEQ ID NO: 1962554 - RNA, 19 nt, Artificial Sequence
  Description of Artificial Sequence: Synthetic oligonucleotide
gguaugcuagcaagccacc

SEQ ID NO: 1962555 - RNA, 19 nt, Artificial Sequence
  Description of Artificial Sequence: Synthetic oligonucleotide
aguuuccacaaaggggauu

SEQ ID NO: 1962556 - RNA, 19 nt, Artificial Sequence
  Description of Artificial Sequence: Synthetic oligonucleotide
ccacuagacaccgaguuga

SEQ ID NO: 1962557 - RNA, 19 nt, Artificial Sequence
  Description of Artificial Sequence: Synthetic oligonucleotide
cccacuguauccguucagc

SEQ ID NO: 1962558 - RNA, 19 nt, Artificial Sequence
  Description of Artificial Sequence: Synthetic oligonucleotide
caccgaguugauucucaca

SEQ ID NO: 1962559 - RNA, 19 nt, Artificial Sequence
  Description of Artificial Sequence: Synthetic oligonucleotide
uguauccguucagcccgcc

SEQ ID NO: 1962560 - RNA, 19 nt, Artificial Sequence
  Description of Artificial Sequence: Synthetic oligonucleotide
ggcaacgaucaguucuuca

SEQ ID NO: 1962561 - RNA, 19 nt, Artificial Sequence
  Description of Artificial Sequence: Synthetic oligonucleotide
aagcccauagcggcagcuu

SEQ ID NO: 1962562 - RNA, 19 nt, Artificial Sequence
  Description of Artificial Sequence: Synthetic oligonucleotide
gacuguuugagaaguccau

SEQ ID NO: 1962563 - RNA, 19 nt, Artificial Sequence
  Description of Artificial Sequence: Synthetic oligonucleotide
auacuuccccggaaaguaa

SEQ ID NO: 1962564 - RNA, 19 nt, Artificial Sequence
  Description of Artificial Sequence: Synthetic oligonucleotide
ccugauccgguaugcuagc

SEQ ID NO: 1962565 - RNA, 19 nt, Artificial Sequence
  Description of Artificial Sequence: Synthetic oligonucleotide
uccguucagcccgccugag

SEQ ID NO: 1962566 - RNA, 19 nt, Artificial Sequence
  Description of Artificial Sequence: Synthetic oligonucleotide
cuucggcagcaucaaacua

SEQ ID NO: 1962567 - RNA, 19 nt, Artificial Sequence
  Description of Artificial Sequence: Synthetic oligonucleotide
aaccaggccugcagauacu

SEQ ID NO: 1962568 - RNA, 19 nt, Artificial Sequence
  Description of Artificial Sequence: Synthetic oligonucleotide
acuagacaccgaguugauu

SEQ ID NO: 1962569 - RNA, 19 nt, Artificial Sequence
  Description of Artificial Sequence: Synthetic oligonucleotide
uucggccauuuaaguggaa

SEQ ID NO: 1962570 - RNA, 19 nt, Artificial Sequence
  Description of Artificial Sequence: Synthetic oligonucleotide
cuagcaagccacccugggu

SEQ ID NO: 1962571 - RNA, 19 nt, Artificial Sequence
  Description of Artificial Sequence: Synthetic oligonucleotide
ggaaaguaaaggcucccuu

SEQ ID NO: 1962572 - RNA, 19 nt, Artificial Sequence
  Description of Artificial Sequence: Synthetic oligonucleotide
gucugaaaaccaccggauu

SEQ ID NO: 1962573 - RNA, 19 nt, Artificial Sequence
  Description of Artificial Sequence: Synthetic oligonucleotide
caauuuucugucgggcaua

SEQ ID NO: 1962574 - RNA, 19 nt, Artificial Sequence
  Description of Artificial Sequence: Synthetic oligonucleotide
caagaucuauggcuuguau

SEQ ID NO: 1962575 - RNA, 19 nt, Artificial Sequence
  Description of Artificial Sequence: Synthetic oligonucleotide
gggauuaaauucauugguu

SEQ ID NO: 1962576 - RNA, 19 nt, Artificial Sequence
  Description of Artificial Sequence: Synthetic oligonucleotide
ucccgggcacguagagcac

SEQ ID NO: 1962577 - RNA, 19 nt, Artificial Sequence
  Description of Artificial Sequence: Synthetic oligonucleotide
cacguagagcaccgcccuc

SEQ ID NO: 1962578 - RNA, 19 nt, Artificial Sequence
  Description of Artificial Sequence: Synthetic oligonucleotide
ccgggcacguagagcaccg

SEQ ID NO: 1962579 - RNA, 19 nt, Artificial Sequence
  Description of Artificial Sequence: Synthetic oligonucleotide
acuuuuccguugggcccag

SEQ ID NO: 1962580 - RNA, 19 nt, Artificial Sequence
  Description of Artificial Sequence: Synthetic oligonucleotide
ggcguuccgcagcacgcgc

SEQ ID NO: 1962581 - RNA, 19 nt, Artificial Sequence
  Description of Artificial Sequence: Synthetic oligonucleotide
cgcccuccgaggaacauac

SEQ ID NO: 1962582 - RNA, 19 nt, Artificial Sequence
  Description of Artificial Sequence: Synthetic oligonucleotide
guccaucuccaucccggaa

SEQ ID NO: 1962583 - RNA, 19 nt, Artificial Sequence
  Description of Artificial Sequence: Synthetic oligonucleotide
cuucgcuaugacgacaauu

SEQ ID NO: 1962584 - RNA, 19 nt, Artificial Sequence
  Description of Artificial Sequence: Synthetic oligonucleotide
gucuacuuucagagaugga

SEQ ID NO: 1962585 - RNA, 19 nt, Artificial Sequence
  Description of Artificial Sequence: Synthetic oligonucleotide
cuaccuucggcagcaucaa

SEQ ID NO: 1962586 - RNA, 19 nt, Artificial Sequence
  Description of Artificial Sequence: Synthetic oligonucleotide
guaauggcaugucgaucau

SEQ ID NO: 1962587 - RNA, 19 nt, Artificial Sequence
  Description of Artificial Sequence: Synthetic oligonucleotide
ccggaaaguaaaggcuccc

SEQ ID NO: 1962588 - RNA, 19 nt, Artificial Sequence
  Description of Artificial Sequence: Synthetic oligonucleotide
guagagcaccgcccuccga

SEQ ID NO: 1962589 - RNA, 19 nt, Artificial Sequence
  Description of Artificial Sequence: Synthetic oligonucleotide
gcggacggcguuccgcagc

SEQ ID NO: 1962590 - RNA, 19 nt, Artificial Sequence
  Description of Artificial Sequence: Synthetic oligonucleotide
ccugcagauacuggccaug

SEQ ID NO: 1962591 - RNA, 19 nt, Artificial Sequence
  Description of Artificial Sequence: Synthetic oligonucleotide
ccacaaaggggauuaaauu

SEQ ID NO: 1962592 - RNA, 19 nt, Artificial Sequence
  Description of Artificial Sequence: Synthetic oligonucleotide
cugauccgguaugcuagca

SEQ ID NO: 1962593 - RNA, 19 nt, Artificial Sequence
  Description of Artificial Sequence: Synthetic oligonucleotide
gaggcccaauccucacugu

SEQ ID NO: 1962594 - RNA, 19 nt, Artificial Sequence
  Description of Artificial Sequence: Synthetic oligonucleotide
caagguccugauccgguau

SEQ ID NO: 1962595 - RNA, 19 nt, Artificial Sequence
  Description of Artificial Sequence: Synthetic oligonucleotide
guauccguucagcccgccu

SEQ ID NO: 1962596 - RNA, 19 nt, Artificial Sequence
  Description of Artificial Sequence: Synthetic oligonucleotide
caccuaugcuggcucgaaa

SEQ ID NO: 1962597 - RNA, 19 nt, Artificial Sequence
  Description of Artificial Sequence: Synthetic oligonucleotide
cuucagcccauugaauuuu

SEQ ID NO: 1962598 - RNA, 19 nt, Artificial Sequence
  Description of Artificial Sequence: Synthetic oligonucleotide
cuuuuccguugggcccagg

SEQ ID NO: 1962599 - RNA, 19 nt, Artificial Sequence
  Description of Artificial Sequence: Synthetic oligonucleotide
ccacaccguccucacaguc

SEQ ID NO: 1962600 - RNA, 19 nt, Artificial Sequence
  Description of Artificial Sequence: Synthetic oligonucleotide
gcuaucugguuagggugga

SEQ ID NO: 1962601 - RNA, 19 nt, Artificial Sequence
  Description of Artificial Sequence: Synthetic oligonucleotide
ccgaguugauucucacaca

SEQ ID NO: 1962602 - RNA, 19 nt, Artificial Sequence
  Description of Artificial Sequence: Synthetic oligonucleotide
ccguucagcccgccugagg

SEQ ID NO: 1962603 - RNA, 19 nt, Artificial Sequence
  Description of Artificial Sequence: Synthetic oligonucleotide
agcccgccugaggagggcu

SEQ ID NO: 1962604 - RNA, 19 nt, Artificial Sequence
  Description of Artificial Sequence: Synthetic oligonucleotide
gcacguagagcaccgcccu

SEQ ID NO: 1962605 - RNA, 19 nt, Artificial Sequence
  Description of Artificial Sequence: Synthetic oligonucleotide
gccuucgcuaugacgacaa

SEQ ID NO: 1962606 - RNA, 19 nt, Artificial Sequence
  Description of Artificial Sequence: Synthetic oligonucleotide
gugauuggacaaggagcua

SEQ ID NO: 1962607 - RNA, 19 nt, Artificial Sequence
  Description of Artificial Sequence: Synthetic oligonucleotide
cgaggaacauacuugugau

SEQ ID NO: 1962608 - RNA, 19 nt, Artificial Sequence
  Description of Artificial Sequence: Synthetic oligonucleotide
ccgguaugcuagcaagcca

SEQ ID NO: 1962609 - RNA, 19 nt, Artificial Sequence
  Description of Artificial Sequence: Synthetic oligonucleotide
cuccgcggacggcguuccg

SEQ ID NO: 1962610 - RNA, 19 nt, Artificial Sequence
  Description of Artificial Sequence: Synthetic oligonucleotide
ggguacuguggcuugucuu

SEQ ID NO: 1962611 - RNA, 19 nt, Artificial Sequence
  Description of Artificial Sequence: Synthetic oligonucleotide
cccgggcacguagagcacc

SEQ ID NO: 1962612 - RNA, 19 nt, Artificial Sequence
  Description of Artificial Sequence: Synthetic oligonucleotide
cacuagacaccgaguugau

SEQ ID NO: 1962613 - RNA, 19 nt, Artificial Sequence
  Description of Artificial Sequence: Synthetic oligonucleotide
ggguuggaguaaacugcuc

SEQ ID NO: 1962614 - RNA, 19 nt, Artificial Sequence
  Description of Artificial Sequence: Synthetic oligonucleotide
gcaccgcccuccgaggaac

SEQ ID NO: 1962615 - RNA, 19 nt, Artificial Sequence
  Description of Artificial Sequence: Synthetic oligonucleotide
ccacagcuaucugguuagg

SEQ ID NO: 1962616 - RNA, 19 nt, Artificial Sequence
  Description of Artificial Sequence: Synthetic oligonucleotide
ggccuucgcuaugacgaca

SEQ ID NO: 1962617 - RNA, 19 nt, Artificial Sequence
  Description of Artificial Sequence: Synthetic oligonucleotide
cagcccgccugaggagggc

SEQ ID NO: 1962618 - RNA, 19 nt, Artificial Sequence
  Description of Artificial Sequence: Synthetic oligonucleotide
accgcccuccgaggaacau

SEQ ID NO: 1962619 - RNA, 19 nt, Artificial Sequence
  Description of Artificial Sequence: Synthetic oligonucleotide
caccgcccuccgaggaaca

SEQ ID NO: 1962620 - RNA, 19 nt, Artificial Sequence
  Description of Artificial Sequence: Synthetic oligonucleotide
gcacugcacagucuacuuu

SEQ ID NO: 1962621 - RNA, 19 nt, Artificial Sequence
  Description of Artificial Sequence: Synthetic oligonucleotide
gcaccuaugcuggcucgaa

SEQ ID NO: 1962622 - RNA, 19 nt, Artificial Sequence
  Description of Artificial Sequence: Synthetic oligonucleotide
gcguuccgcagcacgcgca

SEQ ID NO: 1962623 - RNA, 19 nt, Artificial Sequence
  Description of Artificial Sequence: Synthetic oligonucleotide
cuaucugguuaggguggau

SEQ ID NO: 1962624 - RNA, 19 nt, Artificial Sequence
  Description of Artificial Sequence: Synthetic oligonucleotide
cggacggcguuccgcagca

SEQ ID NO: 1962625 - RNA, 19 nt, Artificial Sequence
  Description of Artificial Sequence: Synthetic oligonucleotide
gcaagccacccuggguacu

SEQ ID NO: 1962626 - RNA, 19 nt, Artificial Sequence
  Description of Artificial Sequence: Synthetic oligonucleotide
ggacggcguuccgcagcac

SEQ ID NO: 1962627 - RNA, 19 nt, Artificial Sequence
  Description of Artificial Sequence: Synthetic oligonucleotide
cgggcacguagagcaccgc

SEQ ID NO: 1962628 - RNA, 19 nt, Artificial Sequence
  Description of Artificial Sequence: Synthetic oligonucleotide
ccgcccuccgaggaacaua

SEQ ID NO: 1962629 - RNA, 19 nt, Artificial Sequence
  Description of Artificial Sequence: Synthetic oligonucleotide
ccuucgcuaugacgacaau

SEQ ID NO: 1962630 - RNA, 19 nt, Artificial Sequence
  Description of Artificial Sequence: Synthetic oligonucleotide
cccauagcggcagcuucuu

SEQ ID NO: 1962631 - RNA, 19 nt, Artificial Sequence
  Description of Artificial Sequence: Synthetic oligonucleotide
cgucauucccgggcacgua

SEQ ID NO: 1962632 - RNA, 19 nt, Artificial Sequence
  Description of Artificial Sequence: Synthetic oligonucleotide
gcccuccgaggaacauacu

SEQ ID NO: 1962633 - RNA, 19 nt, Artificial Sequence
  Description of Artificial Sequence: Synthetic oligonucleotide
ccguugggcccaggucaaa

SEQ ID NO: 1962634 - RNA, 19 nt, Artificial Sequence
  Description of Artificial Sequence: Synthetic oligonucleotide
ggcccacuugaggcccaau

SEQ ID NO: 1962635 - RNA, 19 nt, Artificial Sequence
  Description of Artificial Sequence: Synthetic oligonucleotide
ccgcuccgcggacggcguu

SEQ ID NO: 1962636 - RNA, 19 nt, Artificial Sequence
  Description of Artificial Sequence: Synthetic oligonucleotide
uguuauauaaacauuauga

SEQ ID NO: 1962637 - RNA, 19 nt, Artificial Sequence
  Description of Artificial Sequence: Synthetic oligonucleotide
aacauuaugaaaacuaucc

SEQ ID NO: 1962638 - RNA, 19 nt, Artificial Sequence
  Description of Artificial Sequence: Synthetic oligonucleotide
aacuaauggaguuagucac

SEQ ID NO: 1962639 - RNA, 19 nt, Artificial Sequence
  Description of Artificial Sequence: Synthetic oligonucleotide
uuauuuaccacauuuaaga

SEQ ID NO: 1962640 - RNA, 19 nt, Artificial Sequence
  Description of Artificial Sequence: Synthetic oligonucleotide
aauaacuucacauaggcua

SEQ ID NO: 1962641 - RNA, 19 nt, Artificial Sequence
  Description of Artificial Sequence: Synthetic oligonucleotide
uuugguauaauaaucuugc

SEQ ID NO: 1962642 - RNA, 19 nt, Artificial Sequence
  Description of Artificial Sequence: Synthetic oligonucleotide
aaaguuauuucuuguaguc

SEQ ID NO: 1962643 - RNA, 19 nt, Artificial Sequence
  Description of Artificial Sequence: Synthetic oligonucleotide
aaucaagugacuaaucacc

SEQ ID NO: 1962644 - RNA, 19 nt, Artificial Sequence
  Description of Artificial Sequence: Synthetic oligonucleotide
aaaucaagugacuaaucac

SEQ ID NO: 1962645 - RNA, 19 nt, Artificial Sequence
  Description of Artificial Sequence: Synthetic oligonucleotide
aauggcauagcucacagcu

SEQ ID NO: 1962646 - RNA, 19 nt, Artificial Sequence
  Description of Artificial Sequence: Synthetic oligonucleotide
aaccaaaccaagucgaugg

SEQ ID NO: 1962647 - RNA, 19 nt, Artificial Sequence
  Description of Artificial Sequence: Synthetic oligonucleotide
aauacugauaacuaaugga

SEQ ID NO: 1962648 - RNA, 19 nt, Artificial Sequence
  Description of Artificial Sequence: Synthetic oligonucleotide
aucuuuaguagacagcucc

SEQ ID NO: 1962649 - RNA, 19 nt, Artificial Sequence
  Description of Artificial Sequence: Synthetic oligonucleotide
auaaccuaagauuauuuac

SEQ ID NO: 1962650 - RNA, 19 nt, Artificial Sequence
  Description of Artificial Sequence: Synthetic oligonucleotide
aauuauuacauaaucucuc

SEQ ID NO: 1962651 - RNA, 19 nt, Artificial Sequence
  Description of Artificial Sequence: Synthetic oligonucleotide
aaaacuagauguuugguau

SEQ ID NO: 1962652 - RNA, 19 nt, Artificial Sequence
  Description of Artificial Sequence: Synthetic oligonucleotide
acgaacagcaaauaucacc

SEQ ID NO: 1962653 - RNA, 19 nt, Artificial Sequence
  Description of Artificial Sequence: Synthetic oligonucleotide
uaaccuaagauuauuuacc

SEQ ID NO: 1962654 - RNA, 19 nt, Artificial Sequence
  Description of Artificial Sequence: Synthetic oligonucleotide
ucaaaguuauuucuuguag

SEQ ID NO: 1962655 - RNA, 19 nt, Artificial Sequence
  Description of Artificial Sequence: Synthetic oligonucleotide
acugaacuguauuaugucc

SEQ ID NO: 1962656 - RNA, 19 nt, Artificial Sequence
  Description of Artificial Sequence: Synthetic oligonucleotide
uuuuaugcuaguuuguaca

SEQ ID NO: 1962657 - RNA, 19 nt, Artificial Sequence
  Description of Artificial Sequence: Synthetic oligonucleotide
cugauuucuaacaucagcc

SEQ ID NO: 1962658 - RNA, 19 nt, Artificial Sequence
  Description of Artificial Sequence: Synthetic oligonucleotide
ugguauaauaaucuugcag

SEQ ID NO: 1962659 - RNA, 19 nt, Artificial Sequence
  Description of Artificial Sequence: Synthetic oligonucleotide
auagcucacagcuucaagg

SEQ ID NO: 1962660 - RNA, 19 nt, Artificial Sequence
  Description of Artificial Sequence: Synthetic oligonucleotide
acauaaucucucuaaauag

SEQ ID NO: 1962661 - RNA, 19 nt, Artificial Sequence
  Description of Artificial Sequence: Synthetic oligonucleotide
guaauaacuucacauaggc

SEQ ID NO: 1962662 - RNA, 19 nt, Artificial Sequence
  Description of Artificial Sequence: Synthetic oligonucleotide
aggcuaauguuauauaaac

SEQ ID NO: 1962663 - RNA, 19 nt, Artificial Sequence
  Description of Artificial Sequence: Synthetic oligonucleotide
uuaaacaucagacaccaua

SEQ ID NO: 1962664 - RNA, 19 nt, Artificial Sequence
  Description of Artificial Sequence: Synthetic oligonucleotide
acuaguuaguuuuacaaca

SEQ ID NO: 1962665 - RNA, 19 nt, Artificial Sequence
  Description of Artificial Sequence: Synthetic oligonucleotide
uuugcuacuaguuaguuuu

SEQ ID NO: 1962666 - RNA, 19 nt, Artificial Sequence
  Description of Artificial Sequence: Synthetic oligonucleotide
cuauccuccacuaauuggg

SEQ ID NO: 1962667 - RNA, 19 nt, Artificial Sequence
  Description of Artificial Sequence: Synthetic oligonucleotide
cucuaaauaguugugagcc

SEQ ID NO: 1962668 - RNA, 19 nt, Artificial Sequence
  Description of Artificial Sequence: Synthetic oligonucleotide
aaguuauuucuuguagucc

SEQ ID NO: 1962669 - RNA, 19 nt, Artificial Sequence
  Description of Artificial Sequence: Synthetic oligonucleotide
cauauucuaaacuaaugac

SEQ ID NO: 1962670 - RNA, 19 nt, Artificial Sequence
  Description of Artificial Sequence: Synthetic oligonucleotide
aacuuuuaaacaucagaca

SEQ ID NO: 1962671 - RNA, 19 nt, Artificial Sequence
  Description of Artificial Sequence: Synthetic oligonucleotide
augaaaacuauccaaauua

SEQ ID NO: 1962672 - RNA, 19 nt, Artificial Sequence
  Description of Artificial Sequence: Synthetic oligonucleotide
uccacugagagcuucuugg

SEQ ID NO: 1962673 - RNA, 19 nt, Artificial Sequence
  Description of Artificial Sequence: Synthetic oligonucleotide
auaacuaauggaguuaguc

SEQ ID NO: 1962674 - RNA, 19 nt, Artificial Sequence
  Description of Artificial Sequence: Synthetic oligonucleotide
auuuaagacuuagaguacc

SEQ ID NO: 1962675 - RNA, 19 nt, Artificial Sequence
  Description of Artificial Sequence: Synthetic oligonucleotide
aauaauugugcuugcuucu

SEQ ID NO: 1962676 - RNA, 19 nt, Artificial Sequence
  Description of Artificial Sequence: Synthetic oligonucleotide
acuggaaccaaaccaaguc

SEQ ID NO: 1962677 - RNA, 19 nt, Artificial Sequence
  Description of Artificial Sequence: Synthetic oligonucleotide
uucauauucuaaacuaaug

SEQ ID NO: 1962678 - RNA, 19 nt, Artificial Sequence
  Description of Artificial Sequence: Synthetic oligonucleotide
gaugcucuagcacagacac

SEQ ID NO: 1962679 - RNA, 19 nt, Artificial Sequence
  Description of Artificial Sequence: Synthetic oligonucleotide
auaauggcaauuucgucuc

SEQ ID NO: 1962680 - RNA, 19 nt, Artificial Sequence
  Description of Artificial Sequence: Synthetic oligonucleotide
auuuuaugcuaguuuguac

SEQ ID NO: 1962681 - RNA, 19 nt, Artificial Sequence
  Description of Artificial Sequence: Synthetic oligonucleotide
aaauuauuacauaaucucu

SEQ ID NO: 1962682 - RNA, 19 nt, Artificial Sequence
  Description of Artificial Sequence: Synthetic oligonucleotide
ucugcuauuccuccauugg

SEQ ID NO: 1962683 - RNA, 19 nt, Artificial Sequence
  Description of Artificial Sequence: Synthetic oligonucleotide
uauuacauaaucucucuaa

SEQ ID NO: 1962684 - RNA, 19 nt, Artificial Sequence
  Description of Artificial Sequence: Synthetic oligonucleotide
ugaaggaugcucuagcaca

SEQ ID NO: 1962685 - RNA, 19 nt, Artificial Sequence
  Description of Artificial Sequence: Synthetic oligonucleotide
aaaacuauccaaauuacuu

SEQ ID NO: 1962686 - RNA, 19 nt, Artificial Sequence
  Description of Artificial Sequence: Synthetic oligonucleotide
gagucaauggcauagcuca

SEQ ID NO: 1962687 - RNA, 19 nt, Artificial Sequence
  Description of Artificial Sequence: Synthetic oligonucleotide
auacugauaacuaauggag

SEQ ID NO: 1962688 - RNA, 19 nt, Artificial Sequence
  Description of Artificial Sequence: Synthetic oligonucleotide
uaucucauauuuaaaguaa

SEQ ID NO: 1962689 - RNA, 19 nt, Artificial Sequence
  Description of Artificial Sequence: Synthetic oligonucleotide
uguauuauguccuuagguu

SEQ ID NO: 1962690 - RNA, 19 nt, Artificial Sequence
  Description of Artificial Sequence: Synthetic oligonucleotide
aaacauuaugaaaacuauc

SEQ ID NO: 1962691 - RNA, 19 nt, Artificial Sequence
  Description of Artificial Sequence: Synthetic oligonucleotide
uuggcauaaccuaagauua

SEQ ID NO: 1962692 - RNA, 19 nt, Artificial Sequence
  Description of Artificial Sequence: Synthetic oligonucleotide
uuaucucauauuuaaagua

SEQ ID NO: 1962693 - RNA, 19 nt, Artificial Sequence
  Description of Artificial Sequence: Synthetic oligonucleotide
auuggcauaaccuaagauu

SEQ ID NO: 1962694 - RNA, 19 nt, Artificial Sequence
  Description of Artificial Sequence: Synthetic oligonucleotide
aaccuaagauuauuuacca

SEQ ID NO: 1962695 - RNA, 19 nt, Artificial Sequence
  Description of Artificial Sequence: Synthetic oligonucleotide
ugaaaacuauccaaauuac

SEQ ID NO: 1962696 - RNA, 19 nt, Artificial Sequence
  Description of Artificial Sequence: Synthetic oligonucleotide
uuaguaauaacuucacaua

SEQ ID NO: 1962697 - RNA, 19 nt, Artificial Sequence
  Description of Artificial Sequence: Synthetic oligonucleotide
uaugcuaguuuguacagac

SEQ ID NO: 1962698 - RNA, 19 nt, Artificial Sequence
  Description of Artificial Sequence: Synthetic oligonucleotide
gauaauggcaauuucgucu

SEQ ID NO: 1962699 - RNA, 19 nt, Artificial Sequence
  Description of Artificial Sequence: Synthetic oligonucleotide
agcacagacaccuuaucuc

SEQ ID NO: 1962700 - RNA, 19 nt, Artificial Sequence
  Description of Artificial Sequence: Synthetic oligonucleotide
uucacauaggcuaauguua

SEQ ID NO: 1962701 - RNA, 19 nt, Artificial Sequence
  Description of Artificial Sequence: Synthetic oligonucleotide
ugacuaaucaccagcugcc

SEQ ID NO: 1962702 - RNA, 19 nt, Artificial Sequence
  Description of Artificial Sequence: Synthetic oligonucleotide
uuccauaugggcaccuugg

SEQ ID NO: 1962703 - RNA, 19 nt, Artificial Sequence
  Description of Artificial Sequence: Synthetic oligonucleotide
uugacgaacagcaaauauc

SEQ ID NO: 1962704 - RNA, 19 nt, Artificial Sequence
  Description of Artificial Sequence: Synthetic oligonucleotide
auuuaccacauuuaagacu

SEQ ID NO: 1962705 - RNA, 19 nt, Artificial Sequence
  Description of Artificial Sequence: Synthetic oligonucleotide
ugugagccaacuuuuaaac

SEQ ID NO: 1962706 - RNA, 19 nt, Artificial Sequence
  Description of Artificial Sequence: Synthetic oligonucleotide
uaugcuucauauucuaaac

SEQ ID NO: 1962707 - RNA, 19 nt, Artificial Sequence
  Description of Artificial Sequence: Synthetic oligonucleotide
uucauuuucugccaucggu

SEQ ID NO: 1962708 - RNA, 19 nt, Artificial Sequence
  Description of Artificial Sequence: Synthetic oligonucleotide
ugauaacuaauggaguuag

SEQ ID NO: 1962709 - RNA, 19 nt, Artificial Sequence
  Description of Artificial Sequence: Synthetic oligonucleotide
acuauccuccacuaauugg

SEQ ID NO: 1962710 - RNA, 19 nt, Artificial Sequence
  Description of Artificial Sequence: Synthetic oligonucleotide
uaaucucucuaaauaguug

SEQ ID NO: 1962711 - RNA, 19 nt, Artificial Sequence
  Description of Artificial Sequence: Synthetic oligonucleotide
aagucgauggaacaccgca

SEQ ID NO: 1962712 - RNA, 19 nt, Artificial Sequence
  Description of Artificial Sequence: Synthetic oligonucleotide
uuguacagacauaagaaua

SEQ ID NO: 1962713 - RNA, 19 nt, Artificial Sequence
  Description of Artificial Sequence: Synthetic oligonucleotide
aaagagucaauggcauagc

SEQ ID NO: 1962714 - RNA, 19 nt, Artificial Sequence
  Description of Artificial Sequence: Synthetic oligonucleotide
aauaaucuugcagaaaauu

SEQ ID NO: 1962715 - RNA, 19 nt, Artificial Sequence
  Description of Artificial Sequence: Synthetic oligonucleotide
ugcuaguuuguacagacau

SEQ ID NO: 1962716 - RNA, 19 nt, Artificial Sequence
  Description of Artificial Sequence: Synthetic oligonucleotide
caagugacuaaucaccagc

SEQ ID NO: 1962717 - RNA, 19 nt, Artificial Sequence
  Description of Artificial Sequence: Synthetic oligonucleotide
uauuaaaaccucuuugcua

SEQ ID NO: 1962718 - RNA, 19 nt, Artificial Sequence
  Description of Artificial Sequence: Synthetic oligonucleotide
caauaauugugcuugcuuc

SEQ ID NO: 1962719 - RNA, 19 nt, Artificial Sequence
  Description of Artificial Sequence: Synthetic oligonucleotide
accgcaaugugucugacug

SEQ ID NO: 1962720 - RNA, 19 nt, Artificial Sequence
  Description of Artificial Sequence: Synthetic oligonucleotide
uagcucacagcuucaaggg

SEQ ID NO: 1962721 - RNA, 19 nt, Artificial Sequence
  Description of Artificial Sequence: Synthetic oligonucleotide
uaugaaaacuauccaaauu

SEQ ID NO: 1962722 - RNA, 19 nt, Artificial Sequence
  Description of Artificial Sequence: Synthetic oligonucleotide
ugcggagaauuaaaucugg

SEQ ID NO: 1962723 - RNA, 19 nt, Artificial Sequence
  Description of Artificial Sequence: Synthetic oligonucleotide
auaggcuaauguuauauaa

SEQ ID NO: 1962724 - RNA, 19 nt, Artificial Sequence
  Description of Artificial Sequence: Synthetic oligonucleotide
gugacuaaucaccagcugc

SEQ ID NO: 1962725 - RNA, 19 nt, Artificial Sequence
  Description of Artificial Sequence: Synthetic oligonucleotide
ucucuaaauaguugugagc

SEQ ID NO: 1962726 - RNA, 19 nt, Artificial Sequence
  Description of Artificial Sequence: Synthetic oligonucleotide
uauuauguccuuagguuuc

SEQ ID NO: 1962727 - RNA, 19 nt, Artificial Sequence
  Description of Artificial Sequence: Synthetic oligonucleotide
gaggacacagcaauaauug

SEQ ID NO: 1962728 - RNA, 19 nt, Artificial Sequence
  Description of Artificial Sequence: Synthetic oligonucleotide
auaguugugagccaacuuu

SEQ ID NO: 1962729 - RNA, 19 nt, Artificial Sequence
  Description of Artificial Sequence: Synthetic oligonucleotide
aguaauaacuucacauagg

SEQ ID NO: 1962730 - RNA, 19 nt, Artificial Sequence
  Description of Artificial Sequence: Synthetic oligonucleotide
uggaaccaaaccaagucga

SEQ ID NO: 1962731 - RNA, 19 nt, Artificial Sequence
  Description of Artificial Sequence: Synthetic oligonucleotide
ggagaauuaaaucuggguc

SEQ ID NO: 1962732 - RNA, 19 nt, Artificial Sequence
  Description of Artificial Sequence: Synthetic oligonucleotide
uacuaguuaguuuuacaac

SEQ ID NO: 1962733 - RNA, 19 nt, Artificial Sequence
  Description of Artificial Sequence: Synthetic oligonucleotide
agauguuugguauaauaau

SEQ ID NO: 1962734 - RNA, 19 nt, Artificial Sequence
  Description of Artificial Sequence: Synthetic oligonucleotide
caaagagucaauggcauag

SEQ ID NO: 1962735 - RNA, 19 nt, Artificial Sequence
  Description of Artificial Sequence: Synthetic oligonucleotide
auaucaccugauuucuaac

SEQ ID NO: 1962736 - RNA, 19 nt, Artificial Sequence
  Description of Artificial Sequence: Synthetic oligonucleotide
ucugccuuaugucacuaca

SEQ ID NO: 1962737 - RNA, 19 nt, Artificial Sequence
  Description of Artificial Sequence: Synthetic oligonucleotide
cuggaaccaaaccaagucg

SEQ ID NO: 1962738 - RNA, 19 nt, Artificial Sequence
  Description of Artificial Sequence: Synthetic oligonucleotide
acauuaugaaaacuaucca

SEQ ID NO: 1962739 - RNA, 19 nt, Artificial Sequence
  Description of Artificial Sequence: Synthetic oligonucleotide
ugcuauuccuccauuggca

SEQ ID NO: 1962740 - RNA, 19 nt, Artificial Sequence
  Description of Artificial Sequence: Synthetic oligonucleotide
uucaaagagucaauggcau

SEQ ID NO: 1962741 - RNA, 19 nt, Artificial Sequence
  Description of Artificial Sequence: Synthetic oligonucleotide
auaugcuucauauucuaaa

SEQ ID NO: 1962742 - RNA, 19 nt, Artificial Sequence
  Description of Artificial Sequence: Synthetic oligonucleotide
acuguauuauguccuuagg

SEQ ID NO: 1962743 - RNA, 19 nt, Artificial Sequence
  Description of Artificial Sequence: Synthetic oligonucleotide
aaagagagacaccgcacca

SEQ ID NO: 1962744 - RNA, 19 nt, Artificial Sequence
  Description of Artificial Sequence: Synthetic oligonucleotide
uucgucuccgggcugaagc

SEQ ID NO: 1962745 - RNA, 19 nt, Artificial Sequence
  Description of Artificial Sequence: Synthetic oligonucleotide
uaagacuuagaguaccaaa

SEQ ID NO: 1962746 - RNA, 19 nt, Artificial Sequence
  Description of Artificial Sequence: Synthetic oligonucleotide
uggaacaccgcaauguguc

SEQ ID NO: 1962747 - RNA, 19 nt, Artificial Sequence
  Description of Artificial Sequence: Synthetic oligonucleotide
uuaugaaaacuauccaaau

SEQ ID NO: 1962748 - RNA, 19 nt, Artificial Sequence
  Description of Artificial Sequence: Synthetic oligonucleotide
ccuacaaagagagacaccg

SEQ ID NO: 1962749 - RNA, 19 nt, Artificial Sequence
  Description of Artificial Sequence: Synthetic oligonucleotide
acugauaacuaauggaguu

SEQ ID NO: 1962750 - RNA, 19 nt, Artificial Sequence
  Description of Artificial Sequence: Synthetic oligonucleotide
uuggcuuucaaagagucaa

SEQ ID NO: 1962751 - RNA, 19 nt, Artificial Sequence
  Description of Artificial Sequence: Synthetic oligonucleotide
aagacuuagaguaccaaaa

SEQ ID NO: 1962752 - RNA, 19 nt, Artificial Sequence
  Description of Artificial Sequence: Synthetic oligonucleotide
ugugagacuucauccacug

SEQ ID NO: 1962753 - RNA, 19 nt, Artificial Sequence
  Description of Artificial Sequence: Synthetic oligonucleotide
cauuaugaaaacuauccaa

SEQ ID NO: 1962754 - RNA, 19 nt, Artificial Sequence
  Description of Artificial Sequence: Synthetic oligonucleotide
uguagucccuacaaagaga

SEQ ID NO: 1962755 - RNA, 19 nt, Artificial Sequence
  Description of Artificial Sequence: Synthetic oligonucleotide
uacugauaacuaauggagu

SEQ ID NO: 1962756 - RNA, 19 nt, Artificial Sequence
  Description of Artificial Sequence: Synthetic oligonucleotide
guagucccuacaaagagag

SEQ ID NO: 1962757 - RNA, 19 nt, Artificial Sequence
  Description of Artificial Sequence: Synthetic oligonucleotide
ucugacacuggaaccaaac

SEQ ID NO: 1962758 - RNA, 19 nt, Artificial Sequence
  Description of Artificial Sequence: Synthetic oligonucleotide
cuaaucaccagcugcccag

SEQ ID NO: 1962759 - RNA, 19 nt, Artificial Sequence
  Description of Artificial Sequence: Synthetic oligonucleotide
uauccuccacuaauugggg

SEQ ID NO: 1962760 - RNA, 19 nt, Artificial Sequence
  Description of Artificial Sequence: Synthetic oligonucleotide
agcaaauaucaccugauuu

SEQ ID NO: 1962761 - RNA, 19 nt, Artificial Sequence
  Description of Artificial Sequence: Synthetic oligonucleotide
accuaagauuauuuaccac

SEQ ID NO: 1962762 - RNA, 19 nt, Artificial Sequence
  Description of Artificial Sequence: Synthetic oligonucleotide
aagggaugcggcucuauga

SEQ ID NO: 1962763 - RNA, 19 nt, Artificial Sequence
  Description of Artificial Sequence: Synthetic oligonucleotide
ggcaccuuggcuuucaaag

SEQ ID NO: 1962764 - RNA, 19 nt, Artificial Sequence
  Description of Artificial Sequence: Synthetic oligonucleotide
ucaugcauucugcuauucc

SEQ ID NO: 1962765 - RNA, 19 nt, Artificial Sequence
  Description of Artificial Sequence: Synthetic oligonucleotide
uuuccauaugggcaccuug

SEQ ID NO: 1962766 - RNA, 19 nt, Artificial Sequence
  Description of Artificial Sequence: Synthetic oligonucleotide
cucgacauacucuugacga

SEQ ID NO: 1962767 - RNA, 19 nt, Artificial Sequence
  Description of Artificial Sequence: Synthetic oligonucleotide
aagagagacaccgcaccac

SEQ ID NO: 1962768 - RNA, 19 nt, Artificial Sequence
  Description of Artificial Sequence: Synthetic oligonucleotide
accaagucgauggaacacc

SEQ ID NO: 1962769 - RNA, 19 nt, Artificial Sequence
  Description of Artificial Sequence: Synthetic oligonucleotide
ucacauaggcuaauguuau

SEQ ID NO: 1962770 - RNA, 19 nt, Artificial Sequence
  Description of Artificial Sequence: Synthetic oligonucleotide
auacucuugacgaacagca

SEQ ID NO: 1962771 - RNA, 19 nt, Artificial Sequence
  Description of Artificial Sequence: Synthetic oligonucleotide
acagcuucaagggaugcgg

SEQ ID NO: 1962772 - RNA, 19 nt, Artificial Sequence
  Description of Artificial Sequence: Synthetic oligonucleotide
ucugccaucgguagauaug

SEQ ID NO: 1962773 - RNA, 19 nt, Artificial Sequence
  Description of Artificial Sequence: Synthetic oligonucleotide
ucaagugacuaaucaccag

SEQ ID NO: 1962774 - RNA, 19 nt, Artificial Sequence
  Description of Artificial Sequence: Synthetic oligonucleotide
aggaugcucuagcacagac

SEQ ID NO: 1962775 - RNA, 19 nt, Artificial Sequence
  Description of Artificial Sequence: Synthetic oligonucleotide
aauaguugugagccaacuu

SEQ ID NO: 1962776 - RNA, 19 nt, Artificial Sequence
  Description of Artificial Sequence: Synthetic oligonucleotide
agaauacugauaacuaaug

SEQ ID NO: 1962777 - RNA, 19 nt, Artificial Sequence
  Description of Artificial Sequence: Synthetic oligonucleotide
cauuuucugccaucgguag

SEQ ID NO: 1962778 - RNA, 19 nt, Artificial Sequence
  Description of Artificial Sequence: Synthetic oligonucleotide
cuacuaguuaguuuuacaa

SEQ ID NO: 1962779 - RNA, 19 nt, Artificial Sequence
  Description of Artificial Sequence: Synthetic oligonucleotide
ucuaaauaguugugagcca

SEQ ID NO: 1962780 - RNA, 19 nt, Artificial Sequence
  Description of Artificial Sequence: Synthetic oligonucleotide
uucuaaacuaaugacuuuu

SEQ ID NO: 1962781 - RNA, 19 nt, Artificial Sequence
  Description of Artificial Sequence: Synthetic oligonucleotide
gaguugcugaucuccaagc

SEQ ID NO: 1962782 - RNA, 19 nt, Artificial Sequence
  Description of Artificial Sequence: Synthetic oligonucleotide
cuccgaugcacuauccucc

SEQ ID NO: 1962783 - RNA, 19 nt, Artificial Sequence
  Description of Artificial Sequence: Synthetic oligonucleotide
ucucucuaaauaguuguga

SEQ ID NO: 1962784 - RNA, 19 nt, Artificial Sequence
  Description of Artificial Sequence: Synthetic oligonucleotide
caccgcaccacacagcagg

SEQ ID NO: 1962785 - RNA, 19 nt, Artificial Sequence
  Description of Artificial Sequence: Synthetic oligonucleotide
gagacaccgcaccacacag

SEQ ID NO: 1962786 - RNA, 19 nt, Artificial Sequence
  Description of Artificial Sequence: Synthetic oligonucleotide
acuucacauaggcuaaugu

SEQ ID NO: 1962787 - RNA, 19 nt, Artificial Sequence
  Description of Artificial Sequence: Synthetic oligonucleotide
agggaugcggcucuaugag

SEQ ID NO: 1962788 - RNA, 19 nt, Artificial Sequence
  Description of Artificial Sequence: Synthetic oligonucleotide
ucuagcacagacaccuuau

SEQ ID NO: 1962789 - RNA, 19 nt, Artificial Sequence
  Description of Artificial Sequence: Synthetic oligonucleotide
uucugcuauuccuccauug

SEQ ID NO: 1962790 - RNA, 19 nt, Artificial Sequence
  Description of Artificial Sequence: Synthetic oligonucleotide
aacaccgcaaugugucuga

SEQ ID NO: 1962791 - RNA, 19 nt, Artificial Sequence
  Description of Artificial Sequence: Synthetic oligonucleotide
aacuagauguuugguauaa

SEQ ID NO: 1962792 - RNA, 19 nt, Artificial Sequence
  Description of Artificial Sequence: Synthetic oligonucleotide
acucuugacgaacagcaaa

SEQ ID NO: 1962793 - RNA, 19 nt, Artificial Sequence
  Description of Artificial Sequence: Synthetic oligonucleotide
cuaguuuguacagacauaa

SEQ ID NO: 1962794 - RNA, 19 nt, Artificial Sequence
  Description of Artificial Sequence: Synthetic oligonucleotide
cuuaucucauauuuaaagu

SEQ ID NO: 1962795 - RNA, 19 nt, Artificial Sequence
  Description of Artificial Sequence: Synthetic oligonucleotide
cuuguagucccuacaaaga

SEQ ID NO: 1962796 - RNA, 19 nt, Artificial Sequence
  Description of Artificial Sequence: Synthetic oligonucleotide
uaguuuguacagacauaag

SEQ ID NO: 1962797 - RNA, 19 nt, Artificial Sequence
  Description of Artificial Sequence: Synthetic oligonucleotide
uaccacauuuaagacuuag

SEQ ID NO: 1962798 - RNA, 19 nt, Artificial Sequence
  Description of Artificial Sequence: Synthetic oligonucleotide
agaugaugcugauucuuca

SEQ ID NO: 1962799 - RNA, 19 nt, Artificial Sequence
  Description of Artificial Sequence: Synthetic oligonucleotide
gcuaauguuauauaaacau

SEQ ID NO: 1962800 - RNA, 19 nt, Artificial Sequence
  Description of Artificial Sequence: Synthetic oligonucleotide
gacaccauauuaaaaccuc

SEQ ID NO: 1962801 - RNA, 19 nt, Artificial Sequence
  Description of Artificial Sequence: Synthetic oligonucleotide
uauuucuuguagucccuac

SEQ ID NO: 1962802 - RNA, 19 nt, Artificial Sequence
  Description of Artificial Sequence: Synthetic oligonucleotide
aagugacuaaucaccagcu

SEQ ID NO: 1962803 - RNA, 19 nt, Artificial Sequence
  Description of Artificial Sequence: Synthetic oligonucleotide
agcucgacauacucuugac

SEQ ID NO: 1962804 - RNA, 19 nt, Artificial Sequence
  Description of Artificial Sequence: Synthetic oligonucleotide
ugccuuaugucacuacaaa

SEQ ID NO: 1962805 - RNA, 19 nt, Artificial Sequence
  Description of Artificial Sequence: Synthetic oligonucleotide
ccauauuaaaaccucuuug

SEQ ID NO: 1962806 - RNA, 19 nt, Artificial Sequence
  Description of Artificial Sequence: Synthetic oligonucleotide
gacaccgcaccacacagca

SEQ ID NO: 1962807 - RNA, 19 nt, Artificial Sequence
  Description of Artificial Sequence: Synthetic oligonucleotide
uccauaugggcaccuuggc

SEQ ID NO: 1962808 - RNA, 19 nt, Artificial Sequence
  Description of Artificial Sequence: Synthetic oligonucleotide
aaacuagauguuugguaua

SEQ ID NO: 1962809 - RNA, 19 nt, Artificial Sequence
  Description of Artificial Sequence: Synthetic oligonucleotide
cugccaucgguagauaugc

SEQ ID NO: 1962810 - RNA, 19 nt, Artificial Sequence
  Description of Artificial Sequence: Synthetic oligonucleotide
gacaccuuaucucauauuu

SEQ ID NO: 1962811 - RNA, 19 nt, Artificial Sequence
  Description of Artificial Sequence: Synthetic oligonucleotide
cugcuauuccuccauuggc

SEQ ID NO: 1962812 - RNA, 19 nt, Artificial Sequence
  Description of Artificial Sequence: Synthetic oligonucleotide
auggcuccgaugcacuauc

SEQ ID NO: 1962813 - RNA, 19 nt, Artificial Sequence
  Description of Artificial Sequence: Synthetic oligonucleotide
ucguccacaucuucccuag

SEQ ID NO: 1962814 - RNA, 19 nt, Artificial Sequence
  Description of Artificial Sequence: Synthetic oligonucleotide
cacugaaggaugcucuagc

SEQ ID NO: 1962815 - RNA, 19 nt, Artificial Sequence
  Description of Artificial Sequence: Synthetic oligonucleotide
ggugcggagaauuaaaucu

SEQ ID NO: 1962816 - RNA, 19 nt, Artificial Sequence
  Description of Artificial Sequence: Synthetic oligonucleotide
aguuagucacugaaggaug

SEQ ID NO: 1962817 - RNA, 19 nt, Artificial Sequence
  Description of Artificial Sequence: Synthetic oligonucleotide
agagagacaccgcaccaca

SEQ ID NO: 1962818 - RNA, 19 nt, Artificial Sequence
  Description of Artificial Sequence: Synthetic oligonucleotide
aauuucgucuccgggcuga

SEQ ID NO: 1962819 - RNA, 19 nt, Artificial Sequence
  Description of Artificial Sequence: Synthetic oligonucleotide
cagaaacauucuuuguuuc

SEQ ID NO: 1962820 - RNA, 19 nt, Artificial Sequence
  Description of Artificial Sequence: Synthetic oligonucleotide
ccugauuucuaacaucagc

SEQ ID NO: 1962821 - RNA, 19 nt, Artificial Sequence
  Description of Artificial Sequence: Synthetic oligonucleotide
acuaaucaccagcugccca

SEQ ID NO: 1962822 - RNA, 19 nt, Artificial Sequence
  Description of Artificial Sequence: Synthetic oligonucleotide
uaguugugagccaacuuuu

SEQ ID NO: 1962823 - RNA, 19 nt, Artificial Sequence
  Description of Artificial Sequence: Synthetic oligonucleotide
cuacaaagagagacaccgc

SEQ ID NO: 1962824 - RNA, 19 nt, Artificial Sequence
  Description of Artificial Sequence: Synthetic oligonucleotide
ucccuacaaagagagacac

SEQ ID NO: 1962825 - RNA, 19 nt, Artificial Sequence
  Description of Artificial Sequence: Synthetic oligonucleotide
ugacuggccauuucugccu

SEQ ID NO: 1962826 - RNA, 19 nt, Artificial Sequence
  Description of Artificial Sequence: Synthetic oligonucleotide
cacugaacuguauuauguc

SEQ ID NO: 1962827 - RNA, 19 nt, Artificial Sequence
  Description of Artificial Sequence: Synthetic oligonucleotide
cugaaggaugcucuagcac

SEQ ID NO: 1962828 - RNA, 19 nt, Artificial Sequence
  Description of Artificial Sequence: Synthetic oligonucleotide
ucgauggaacaccgcaaug

SEQ ID NO: 1962829 - RNA, 19 nt, Artificial Sequence
  Description of Artificial Sequence: Synthetic oligonucleotide
cauaaccuaagauuauuua

SEQ ID NO: 1962830 - RNA, 19 nt, Artificial Sequence
  Description of Artificial Sequence: Synthetic oligonucleotide
uuaugcuaguuuguacaga

SEQ ID NO: 1962831 - RNA, 19 nt, Artificial Sequence
  Description of Artificial Sequence: Synthetic oligonucleotide
cuuuaguaauaacuucaca

SEQ ID NO: 1962832 - RNA, 19 nt, Artificial Sequence
  Description of Artificial Sequence: Synthetic oligonucleotide
cuaguuaguuuuacaacaa

SEQ ID NO: 1962833 - RNA, 19 nt, Artificial Sequence
  Description of Artificial Sequence: Synthetic oligonucleotide
auugugcuugcuucugaca

SEQ ID NO: 1962834 - RNA, 19 nt, Artificial Sequence
  Description of Artificial Sequence: Synthetic oligonucleotide
gaacagcaaauaucaccug

SEQ ID NO: 1962835 - RNA, 19 nt, Artificial Sequence
  Description of Artificial Sequence: Synthetic oligonucleotide
cccuagauggcuccgaugc

SEQ ID NO: 1962836 - RNA, 19 nt, Artificial Sequence
  Description of Artificial Sequence: Synthetic oligonucleotide
cauagcucacagcuucaag

SEQ ID NO: 1962837 - RNA, 19 nt, Artificial Sequence
  Description of Artificial Sequence: Synthetic oligonucleotide
ccucuuugcuacuaguuag

SEQ ID NO: 1962838 - RNA, 19 nt, Artificial Sequence
  Description of Artificial Sequence: Synthetic oligonucleotide
augcauucugcuauuccuc

SEQ ID NO: 1962839 - RNA, 19 nt, Artificial Sequence
  Description of Artificial Sequence: Synthetic oligonucleotide
uuaaaaccucuuugcuacu

SEQ ID NO: 1962840 - RNA, 19 nt, Artificial Sequence
  Description of Artificial Sequence: Synthetic oligonucleotide
cacuauccuccacuaauug

SEQ ID NO: 1962841 - RNA, 19 nt, Artificial Sequence
  Description of Artificial Sequence: Synthetic oligonucleotide
uagauggcuccgaugcacu

SEQ ID NO: 1962842 - RNA, 19 nt, Artificial Sequence
  Description of Artificial Sequence: Synthetic oligonucleotide
caaaguuauuucuuguagu

SEQ ID NO: 1962843 - RNA, 19 nt, Artificial Sequence
  Description of Artificial Sequence: Synthetic oligonucleotide
auaacuucacauaggcuaa

SEQ ID NO: 1962844 - RNA, 19 nt, Artificial Sequence
  Description of Artificial Sequence: Synthetic oligonucleotide
ggcucuaugagcugaggac

SEQ ID NO: 1962845 - RNA, 19 nt, Artificial Sequence
  Description of Artificial Sequence: Synthetic oligonucleotide
gaaaacuauccaaauuacu

SEQ ID NO: 1962846 - RNA, 19 nt, Artificial Sequence
  Description of Artificial Sequence: Synthetic oligonucleotide
agacauaagaauacugaua

SEQ ID NO: 1962847 - RNA, 19 nt, Artificial Sequence
  Description of Artificial Sequence: Synthetic oligonucleotide
ucgacauacucuugacgaa

SEQ ID NO: 1962848 - RNA, 19 nt, Artificial Sequence
  Description of Artificial Sequence: Synthetic oligonucleotide
cuuuuccaagaugaugcug

SEQ ID NO: 1962849 - RNA, 19 nt, Artificial Sequence
  Description of Artificial Sequence: Synthetic oligonucleotide
uaauggaguuagucacuga

SEQ ID NO: 1962850 - RNA, 19 nt, Artificial Sequence
  Description of Artificial Sequence: Synthetic oligonucleotide
uggggugcggagaauuaaa

SEQ ID NO: 1962851 - RNA, 19 nt, Artificial Sequence
  Description of Artificial Sequence: Synthetic oligonucleotide
acacagcaauaauugugcu

SEQ ID NO: 1962852 - RNA, 19 nt, Artificial Sequence
  Description of Artificial Sequence: Synthetic oligonucleotide
ggagaucaccaacugugag

SEQ ID NO: 1962853 - RNA, 19 nt, Artificial Sequence
  Description of Artificial Sequence: Synthetic oligonucleotide
gaugcacuauccuccacua

SEQ ID NO: 1962854 - RNA, 19 nt, Artificial Sequence
  Description of Artificial Sequence: Synthetic oligonucleotide
caugcauucugcuauuccu

SEQ ID NO: 1962855 - RNA, 19 nt, Artificial Sequence
  Description of Artificial Sequence: Synthetic oligonucleotide
gaacaccgcaaugugucug

SEQ ID NO: 1962856 - RNA, 19 nt, Artificial Sequence
  Description of Artificial Sequence: Synthetic oligonucleotide
ucgguagauaugcuucaua

SEQ ID NO: 1962857 - RNA, 19 nt, Artificial Sequence
  Description of Artificial Sequence: Synthetic oligonucleotide
gugcggagaauuaaaucug

SEQ ID NO: 1962858 - RNA, 19 nt, Artificial Sequence
  Description of Artificial Sequence: Synthetic oligonucleotide
cuguauuauguccuuaggu

SEQ ID NO: 1962859 - RNA, 19 nt, Artificial Sequence
  Description of Artificial Sequence: Synthetic oligonucleotide
gaguuagucacugaaggau

SEQ ID NO: 1962860 - RNA, 19 nt, Artificial Sequence
  Description of Artificial Sequence: Synthetic oligonucleotide
ugcuacuaguuaguuuuac

SEQ ID NO: 1962861 - RNA, 19 nt, Artificial Sequence
  Description of Artificial Sequence: Synthetic oligonucleotide
acuaauggaguuagucacu

SEQ ID NO: 1962862 - RNA, 19 nt, Artificial Sequence
  Description of Artificial Sequence: Synthetic oligonucleotide
gacuaaucaccagcugccc

SEQ ID NO: 1962863 - RNA, 19 nt, Artificial Sequence
  Description of Artificial Sequence: Synthetic oligonucleotide
uucugccaucgguagauau

SEQ ID NO: 1962864 - RNA, 19 nt, Artificial Sequence
  Description of Artificial Sequence: Synthetic oligonucleotide
uccgaugcacuauccucca

SEQ ID NO: 1962865 - RNA, 19 nt, Artificial Sequence
  Description of Artificial Sequence: Synthetic oligonucleotide
gcucgacauacucuugacg

SEQ ID NO: 1962866 - RNA, 19 nt, Artificial Sequence
  Description of Artificial Sequence: Synthetic oligonucleotide
auccacugagagcuucuug

SEQ ID NO: 1962867 - RNA, 19 nt, Artificial Sequence
  Description of Artificial Sequence: Synthetic oligonucleotide
uggcauaaccuaagauuau

SEQ ID NO: 1962868 - RNA, 19 nt, Artificial Sequence
  Description of Artificial Sequence: Synthetic oligonucleotide
uaaaaccucuuugcuacua

SEQ ID NO: 1962869 - RNA, 19 nt, Artificial Sequence
  Description of Artificial Sequence: Synthetic oligonucleotide
caagucgauggaacaccgc

SEQ ID NO: 1962870 - RNA, 19 nt, Artificial Sequence
  Description of Artificial Sequence: Synthetic oligonucleotide
ucuucccuagauggcuccg

SEQ ID NO: 1962871 - RNA, 19 nt, Artificial Sequence
  Description of Artificial Sequence: Synthetic oligonucleotide
uacucuugacgaacagcaa

SEQ ID NO: 1962872 - RNA, 19 nt, Artificial Sequence
  Description of Artificial Sequence: Synthetic oligonucleotide
ggcacugaacuguauuaug

SEQ ID NO: 1962873 - RNA, 19 nt, Artificial Sequence
  Description of Artificial Sequence: Synthetic oligonucleotide
uuagucacugaaggaugcu

SEQ ID NO: 1962874 - RNA, 19 nt, Artificial Sequence
  Description of Artificial Sequence: Synthetic oligonucleotide
ccaucgguagauaugcuuc

SEQ ID NO: 1962875 - RNA, 19 nt, Artificial Sequence
  Description of Artificial Sequence: Synthetic oligonucleotide
caauggcauagcucacagc

SEQ ID NO: 1962876 - RNA, 19 nt, Artificial Sequence
  Description of Artificial Sequence: Synthetic oligonucleotide
gauaugcuucauauucuaa

SEQ ID NO: 1962877 - RNA, 19 nt, Artificial Sequence
  Description of Artificial Sequence: Synthetic oligonucleotide
gaugcggcucuaugagcug

SEQ ID NO: 1962878 - RNA, 19 nt, Artificial Sequence
  Description of Artificial Sequence: Synthetic oligonucleotide
cuccaagcucgacauacuc

SEQ ID NO: 1962879 - RNA, 19 nt, Artificial Sequence
  Description of Artificial Sequence: Synthetic oligonucleotide
caagggaugcggcucuaug

SEQ ID NO: 1962880 - RNA, 19 nt, Artificial Sequence
  Description of Artificial Sequence: Synthetic oligonucleotide
gagccaacuuuuaaacauc

SEQ ID NO: 1962881 - RNA, 19 nt, Artificial Sequence
  Description of Artificial Sequence: Synthetic oligonucleotide
cuugcuucugacacuggaa

SEQ ID NO: 1962882 - RNA, 19 nt, Artificial Sequence
  Description of Artificial Sequence: Synthetic oligonucleotide
agcaauaauugugcuugcu

SEQ ID NO: 1962883 - RNA, 19 nt, Artificial Sequence
  Description of Artificial Sequence: Synthetic oligonucleotide
gaguaacuauuguucuuaa

SEQ ID NO: 1962884 - RNA, 19 nt, Artificial Sequence
  Description of Artificial Sequence: Synthetic oligonucleotide
accaaaccaagucgaugga

SEQ ID NO: 1962885 - RNA, 19 nt, Artificial Sequence
  Description of Artificial Sequence: Synthetic oligonucleotide
ccaagucgauggaacaccg

SEQ ID NO: 1962886 - RNA, 19 nt, Artificial Sequence
  Description of Artificial Sequence: Synthetic oligonucleotide
caucuucccuagauggcuc

SEQ ID NO: 1962887 - RNA, 19 nt, Artificial Sequence
  Description of Artificial Sequence: Synthetic oligonucleotide
ggaguuagucacugaagga

SEQ ID NO: 1962888 - RNA, 19 nt, Artificial Sequence
  Description of Artificial Sequence: Synthetic oligonucleotide
accacauuuaagacuuaga

SEQ ID NO: 1962889 - RNA, 19 nt, Artificial Sequence
  Description of Artificial Sequence: Synthetic oligonucleotide
gaugaugcugauucuucau

SEQ ID NO: 1962890 - RNA, 19 nt, Artificial Sequence
  Description of Artificial Sequence: Synthetic oligonucleotide
caaauaucaccugauuucu

SEQ ID NO: 1962891 - RNA, 19 nt, Artificial Sequence
  Description of Artificial Sequence: Synthetic oligonucleotide
gcuacuaguuaguuuuaca

SEQ ID NO: 1962892 - RNA, 19 nt, Artificial Sequence
  Description of Artificial Sequence: Synthetic oligonucleotide
ucuuugcuacuaguuaguu

SEQ ID NO: 1962893 - RNA, 19 nt, Artificial Sequence
  Description of Artificial Sequence: Synthetic oligonucleotide
caucgguagauaugcuuca

SEQ ID NO: 1962894 - RNA, 19 nt, Artificial Sequence
  Description of Artificial Sequence: Synthetic oligonucleotide
acacuggaaccaaaccaag

SEQ ID NO: 1962895 - RNA, 19 nt, Artificial Sequence
  Description of Artificial Sequence: Synthetic oligonucleotide
ucccuagauggcuccgaug

SEQ ID NO: 1962896 - RNA, 19 nt, Artificial Sequence
  Description of Artificial Sequence: Synthetic oligonucleotide
cagcuucaagggaugcggc

SEQ ID NO: 1962897 - RNA, 19 nt, Artificial Sequence
  Description of Artificial Sequence: Synthetic oligonucleotide
aaauaucaccugauuucua

SEQ ID NO: 1962898 - RNA, 19 nt, Artificial Sequence
  Description of Artificial Sequence: Synthetic oligonucleotide
ucuugacgaacagcaaaua

SEQ ID NO: 1962899 - RNA, 19 nt, Artificial Sequence
  Description of Artificial Sequence: Synthetic oligonucleotide
cauaggcuaauguuauaua

SEQ ID NO: 1962900 - RNA, 19 nt, Artificial Sequence
  Description of Artificial Sequence: Synthetic oligonucleotide
ggcuuucaaagagucaaug

SEQ ID NO: 1962901 - RNA, 19 nt, Artificial Sequence
  Description of Artificial Sequence: Synthetic oligonucleotide
agacaccgcaccacacagc

SEQ ID NO: 1962902 - RNA, 19 nt, Artificial Sequence
  Description of Artificial Sequence: Synthetic oligonucleotide
acuauccaaauuacuuuaa

SEQ ID NO: 1962903 - RNA, 19 nt, Artificial Sequence
  Description of Artificial Sequence: Synthetic oligonucleotide
caagcucgacauacucuug

SEQ ID NO: 1962904 - RNA, 19 nt, Artificial Sequence
  Description of Artificial Sequence: Synthetic oligonucleotide
cuccauuggcauaaccuaa

SEQ ID NO: 1962905 - RNA, 19 nt, Artificial Sequence
  Description of Artificial Sequence: Synthetic oligonucleotide
uucugacacuggaaccaaa

SEQ ID NO: 1962906 - RNA, 19 nt, Artificial Sequence
  Description of Artificial Sequence: Synthetic oligonucleotide
ugccacauuggggugcgga

SEQ ID NO: 1962907 - RNA, 19 nt, Artificial Sequence
  Description of Artificial Sequence: Synthetic oligonucleotide
aucaccagcugcccagaaa

SEQ ID NO: 1962908 - RNA, 19 nt, Artificial Sequence
  Description of Artificial Sequence: Synthetic oligonucleotide
gacgaacagcaaauaucac

SEQ ID NO: 1962909 - RNA, 19 nt, Artificial Sequence
  Description of Artificial Sequence: Synthetic oligonucleotide
uagucccuacaaagagaga

SEQ ID NO: 1962910 - RNA, 19 nt, Artificial Sequence
  Description of Artificial Sequence: Synthetic oligonucleotide
caucucacacacucaugca

SEQ ID NO: 1962911 - RNA, 19 nt, Artificial Sequence
  Description of Artificial Sequence: Synthetic oligonucleotide
gucuccgggcugaagcagg

SEQ ID NO: 1962912 - RNA, 19 nt, Artificial Sequence
  Description of Artificial Sequence: Synthetic oligonucleotide
auggaacaccgcaaugugu

SEQ ID NO: 1962913 - RNA, 19 nt, Artificial Sequence
  Description of Artificial Sequence: Synthetic oligonucleotide
uggcuccgaugcacuaucc

SEQ ID NO: 1962914 - RNA, 19 nt, Artificial Sequence
  Description of Artificial Sequence: Synthetic oligonucleotide
uuggggugcggagaauuaa

SEQ ID NO: 1962915 - RNA, 19 nt, Artificial Sequence
  Description of Artificial Sequence: Synthetic oligonucleotide
cacucaugcauucugcuau

SEQ ID NO: 1962916 - RNA, 19 nt, Artificial Sequence
  Description of Artificial Sequence: Synthetic oligonucleotide
augcucuagcacagacacc

SEQ ID NO: 1962917 - RNA, 19 nt, Artificial Sequence
  Description of Artificial Sequence: Synthetic oligonucleotide
cucuugacgaacagcaaau

SEQ ID NO: 1962918 - RNA, 19 nt, Artificial Sequence
  Description of Artificial Sequence: Synthetic oligonucleotide
cugccuuaugucacuacaa

SEQ ID NO: 1962919 - RNA, 19 nt, Artificial Sequence
  Description of Artificial Sequence: Synthetic oligonucleotide
cugauaacuaauggaguua

SEQ ID NO: 1962920 - RNA, 19 nt, Artificial Sequence
  Description of Artificial Sequence: Synthetic oligonucleotide
agacaccuuaucucauauu

SEQ ID NO: 1962921 - RNA, 19 nt, Artificial Sequence
  Description of Artificial Sequence: Synthetic oligonucleotide
gcggagaauuaaaucuggg

SEQ ID NO: 1962922 - RNA, 19 nt, Artificial Sequence
  Description of Artificial Sequence: Synthetic oligonucleotide
gggugcggagaauuaaauc

SEQ ID NO: 1962923 - RNA, 19 nt, Artificial Sequence
  Description of Artificial Sequence: Synthetic oligonucleotide
acucaugcauucugcuauu

SEQ ID NO: 1962924 - RNA, 19 nt, Artificial Sequence
  Description of Artificial Sequence: Synthetic oligonucleotide
ugccaucgguagauaugcu

SEQ ID NO: 1962925 - RNA, 19 nt, Artificial Sequence
  Description of Artificial Sequence: Synthetic oligonucleotide
gcagggagaucaccaacug

SEQ ID NO: 1962926 - RNA, 19 nt, Artificial Sequence
  Description of Artificial Sequence: Synthetic oligonucleotide
gagagacaccgcaccacac

SEQ ID NO: 1962927 - RNA, 19 nt, Artificial Sequence
  Description of Artificial Sequence: Synthetic oligonucleotide
uuucugccuuaugucacua

SEQ ID NO: 1962928 - RNA, 19 nt, Artificial Sequence
  Description of Artificial Sequence: Synthetic oligonucleotide
uaacuucacauaggcuaau

SEQ ID NO: 1962929 - RNA, 19 nt, Artificial Sequence
  Description of Artificial Sequence: Synthetic oligonucleotide
caauuucgucuccgggcug

SEQ ID NO: 1962930 - RNA, 19 nt, Artificial Sequence
  Description of Artificial Sequence: Synthetic oligonucleotide
gggauaauggcaauuucgu

SEQ ID NO: 1962931 - RNA, 19 nt, Artificial Sequence
  Description of Artificial Sequence: Synthetic oligonucleotide
accuuaucucauauuuaaa

SEQ ID NO: 1962932 - RNA, 19 nt, Artificial Sequence
  Description of Artificial Sequence: Synthetic oligonucleotide
acaccgcaaugugucugac

SEQ ID NO: 1962933 - RNA, 19 nt, Artificial Sequence
  Description of Artificial Sequence: Synthetic oligonucleotide
caaccucguccacaucuuc

SEQ ID NO: 1962934 - RNA, 19 nt, Artificial Sequence
  Description of Artificial Sequence: Synthetic oligonucleotide
uuucgucuccgggcugaag

SEQ ID NO: 1962935 - RNA, 19 nt, Artificial Sequence
  Description of Artificial Sequence: Synthetic oligonucleotide
agucgauggaacaccgcaa

SEQ ID NO: 1962936 - RNA, 19 nt, Artificial Sequence
  Description of Artificial Sequence: Synthetic oligonucleotide
acaccuuaucucauauuua

SEQ ID NO: 1962937 - RNA, 19 nt, Artificial Sequence
  Description of Artificial Sequence: Synthetic oligonucleotide
cucuuugcuacuaguuagu

SEQ ID NO: 1962938 - RNA, 19 nt, Artificial Sequence
  Description of Artificial Sequence: Synthetic oligonucleotide
gcaauuucgucuccgggcu

SEQ ID NO: 1962939 - RNA, 19 nt, Artificial Sequence
  Description of Artificial Sequence: Synthetic oligonucleotide
cauuggcauaaccuaagau

SEQ ID NO: 1962940 - RNA, 19 nt, Artificial Sequence
  Description of Artificial Sequence: Synthetic oligonucleotide
cucuagcacagacaccuua

SEQ ID NO: 1962941 - RNA, 19 nt, Artificial Sequence
  Description of Artificial Sequence: Synthetic oligonucleotide
cucaugcauucugcuauuc

SEQ ID NO: 1962942 - RNA, 19 nt, Artificial Sequence
  Description of Artificial Sequence: Synthetic oligonucleotide
gggaugcggcucuaugagc

SEQ ID NO: 1962943 - RNA, 19 nt, Artificial Sequence
  Description of Artificial Sequence: Synthetic oligonucleotide
gauaacuaauggaguuagu

SEQ ID NO: 1962944 - RNA, 19 nt, Artificial Sequence
  Description of Artificial Sequence: Synthetic oligonucleotide
gucgauggaacaccgcaau

SEQ ID NO: 1962945 - RNA, 19 nt, Artificial Sequence
  Description of Artificial Sequence: Synthetic oligonucleotide
cuucuggaagaguaacuau

SEQ ID NO: 1962946 - RNA, 19 nt, Artificial Sequence
  Description of Artificial Sequence: Synthetic oligonucleotide
accgcaccacacagcaggg

SEQ ID NO: 1962947 - RNA, 19 nt, Artificial Sequence
  Description of Artificial Sequence: Synthetic oligonucleotide
agauggcuccgaugcacua

SEQ ID NO: 1962948 - RNA, 19 nt, Artificial Sequence
  Description of Artificial Sequence: Synthetic oligonucleotide
cuuugcuacuaguuaguuu

SEQ ID NO: 1962949 - RNA, 19 nt, Artificial Sequence
  Description of Artificial Sequence: Synthetic oligonucleotide
cacacucaugcauucugcu

SEQ ID NO: 1962950 - RNA, 19 nt, Artificial Sequence
  Description of Artificial Sequence: Synthetic oligonucleotide
augcggcucuaugagcuga

SEQ ID NO: 1962951 - RNA, 19 nt, Artificial Sequence
  Description of Artificial Sequence: Synthetic oligonucleotide
cccuacaaagagagacacc

SEQ ID NO: 1962952 - RNA, 19 nt, Artificial Sequence
  Description of Artificial Sequence: Synthetic oligonucleotide
aucgguagauaugcuucau

SEQ ID NO: 1962953 - RNA, 19 nt, Artificial Sequence
  Description of Artificial Sequence: Synthetic oligonucleotide
gcaauaauugugcuugcuu

SEQ ID NO: 1962954 - RNA, 19 nt, Artificial Sequence
  Description of Artificial Sequence: Synthetic oligonucleotide
cacuggaaccaaaccaagu

SEQ ID NO: 1962955 - RNA, 19 nt, Artificial Sequence
  Description of Artificial Sequence: Synthetic oligonucleotide
cgcaccacacagcagggag

SEQ ID NO: 1962956 - RNA, 19 nt, Artificial Sequence
  Description of Artificial Sequence: Synthetic oligonucleotide
ucaagggaugcggcucuau

SEQ ID NO: 1962957 - RNA, 19 nt, Artificial Sequence
  Description of Artificial Sequence: Synthetic oligonucleotide
cauucugcuauuccuccau

SEQ ID NO: 1962958 - RNA, 19 nt, Artificial Sequence
  Description of Artificial Sequence: Synthetic oligonucleotide
cuauuccuccauuggcaua

SEQ ID NO: 1962959 - RNA, 19 nt, Artificial Sequence
  Description of Artificial Sequence: Synthetic oligonucleotide
cacagcaauaauugugcuu

SEQ ID NO: 1962960 - RNA, 19 nt, Artificial Sequence
  Description of Artificial Sequence: Synthetic oligonucleotide
cuucaagggaugcggcucu

SEQ ID NO: 1962961 - RNA, 19 nt, Artificial Sequence
  Description of Artificial Sequence: Synthetic oligonucleotide
auuggggugcggagaauua

SEQ ID NO: 1962962 - RNA, 19 nt, Artificial Sequence
  Description of Artificial Sequence: Synthetic oligonucleotide
ggaugcggcucuaugagcu

SEQ ID NO: 1962963 - RNA, 19 nt, Artificial Sequence
  Description of Artificial Sequence: Synthetic oligonucleotide
gcugccacauuggggugcg

SEQ ID NO: 1962964 - RNA, 19 nt, Artificial Sequence
  Description of Artificial Sequence: Synthetic oligonucleotide
cugcccagaaacauucuuu

SEQ ID NO: 1962965 - RNA, 19 nt, Artificial Sequence
  Description of Artificial Sequence: Synthetic oligonucleotide
gguagauaugcuucauauu

SEQ ID NO: 1962966 - RNA, 19 nt, Artificial Sequence
  Description of Artificial Sequence: Synthetic oligonucleotide
cagacaccuuaucucauau

SEQ ID NO: 1962967 - RNA, 19 nt, Artificial Sequence
  Description of Artificial Sequence: Synthetic oligonucleotide
gaucuccaagcucgacaua

SEQ ID NO: 1962968 - RNA, 19 nt, Artificial Sequence
  Description of Artificial Sequence: Synthetic oligonucleotide
cugagagcuucuuggcacu

SEQ ID NO: 1962969 - RNA, 19 nt, Artificial Sequence
  Description of Artificial Sequence: Synthetic oligonucleotide
gauggcuccgaugcacuau

SEQ ID NO: 1962970 - RNA, 19 nt, Artificial Sequence
  Description of Artificial Sequence: Synthetic oligonucleotide
auggcauagcucacagcuu

SEQ ID NO: 1962971 - RNA, 19 nt, Artificial Sequence
  Description of Artificial Sequence: Synthetic oligonucleotide
gcuauuccuccauuggcau

SEQ ID NO: 1962972 - RNA, 19 nt, Artificial Sequence
  Description of Artificial Sequence: Synthetic oligonucleotide
uucaagggaugcggcucua

SEQ ID NO: 1962973 - RNA, 19 nt, Artificial Sequence
  Description of Artificial Sequence: Synthetic oligonucleotide
ccauuggcauaaccuaaga

SEQ ID NO: 1962974 - RNA, 19 nt, Artificial Sequence
  Description of Artificial Sequence: Synthetic oligonucleotide
gcuaguuuguacagacaua

SEQ ID NO: 1962975 - RNA, 19 nt, Artificial Sequence
  Description of Artificial Sequence: Synthetic oligonucleotide
gaucaccaacugugagacu

SEQ ID NO: 1962976 - RNA, 19 nt, Artificial Sequence
  Description of Artificial Sequence: Synthetic oligonucleotide
ccaagcucgacauacucuu

SEQ ID NO: 1962977 - RNA, 19 nt, Artificial Sequence
  Description of Artificial Sequence: Synthetic oligonucleotide
acaccgcaccacacagcag

SEQ ID NO: 1962978 - RNA, 19 nt, Artificial Sequence
  Description of Artificial Sequence: Synthetic oligonucleotide
cagcaaauaucaccugauu

SEQ ID NO: 1962979 - RNA, 19 nt, Artificial Sequence
  Description of Artificial Sequence: Synthetic oligonucleotide
gcauaaccuaagauuauuu

SEQ ID NO: 1962980 - RNA, 19 nt, Artificial Sequence
  Description of Artificial Sequence: Synthetic oligonucleotide
ggaacaccgcaaugugucu

SEQ ID NO: 1962981 - RNA, 19 nt, Artificial Sequence
  Description of Artificial Sequence: Synthetic oligonucleotide
auuucgucuccgggcugaa

SEQ ID NO: 1962982 - RNA, 19 nt, Artificial Sequence
  Description of Artificial Sequence: Synthetic oligonucleotide
cgguagauaugcuucauau

SEQ ID NO: 1962983 - RNA, 19 nt, Artificial Sequence
  Description of Artificial Sequence: Synthetic oligonucleotide
cauuggggugcggagaauu

SEQ ID NO: 1962984 - RNA, 19 nt, Artificial Sequence
  Description of Artificial Sequence: Synthetic oligonucleotide
gccaucgguagauaugcuu

SEQ ID NO: 1962985 - RNA, 19 nt, Artificial Sequence
  Description of Artificial Sequence: Synthetic oligonucleotide
gcggcucuaugagcugagg

SEQ ID NO: 1962986 - RNA, 19 nt, Artificial Sequence
  Description of Artificial Sequence: Synthetic oligonucleotide
caccacacagcagggagau

SEQ ID NO: 1962987 - RNA, 19 nt, Artificial Sequence
  Description of Artificial Sequence: Synthetic oligonucleotide
ccaaaccaagucgauggaa

SEQ ID NO: 1962988 - RNA, 19 nt, Artificial Sequence
  Description of Artificial Sequence: Synthetic oligonucleotide
ggcuccgaugcacuauccu

SEQ ID NO: 1962989 - RNA, 19 nt, Artificial Sequence
  Description of Artificial Sequence: Synthetic oligonucleotide
gcaccacacagcagggaga

SEQ ID NO: 1962990 - RNA, 19 nt, Artificial Sequence
  Description of Artificial Sequence: Synthetic oligonucleotide
ccuagauggcuccgaugca

SEQ ID NO: 1962991 - RNA, 19 nt, Artificial Sequence
  Description of Artificial Sequence: Synthetic oligonucleotide
caccgcaaugugucugacu

SEQ ID NO: 1962992 - RNA, 19 nt, Artificial Sequence
  Description of Artificial Sequence: Synthetic oligonucleotide
gcauagcucacagcuucaa

SEQ ID NO: 1962993 - RNA, 19 nt, Artificial Sequence
  Description of Artificial Sequence: Synthetic oligonucleotide
ggaaccaaaccaagucgau

SEQ ID NO: 1962994 - RNA, 19 nt, Artificial Sequence
  Description of Artificial Sequence: Synthetic oligonucleotide
gcugcccagaaacauucuu

SEQ ID NO: 1962995 - RNA, 19 nt, Artificial Sequence
  Description of Artificial Sequence: Synthetic oligonucleotide
cgauggaacaccgcaaugu

SEQ ID NO: 1962996 - RNA, 19 nt, Artificial Sequence
  Description of Artificial Sequence: Synthetic oligonucleotide
cgaugcacuauccuccacu

SEQ ID NO: 1962997 - RNA, 19 nt, Artificial Sequence
  Description of Artificial Sequence: Synthetic oligonucleotide
cggcucuaugagcugagga

SEQ ID NO: 1962998 - RNA, 19 nt, Artificial Sequence
  Description of Artificial Sequence: Synthetic oligonucleotide
cugccacauuggggugcgg

SEQ ID NO: 1962999 - RNA, 19 nt, Artificial Sequence
  Description of Artificial Sequence: Synthetic oligonucleotide
gcacuauccuccacuaauu

SEQ ID NO: 1963000 - RNA, 19 nt, Artificial Sequence
  Description of Artificial Sequence: Synthetic oligonucleotide
ggggugcggagaauuaaau

SEQ ID NO: 1963001 - RNA, 19 nt, Artificial Sequence
  Description of Artificial Sequence: Synthetic oligonucleotide
ccgggcugaagcaggaguu

SEQ ID NO: 1963002 - RNA, 19 nt, Artificial Sequence
  Description of Artificial Sequence: Synthetic oligonucleotide
ccgcaccacacagcaggga

SEQ ID NO: 1963003 - RNA, 19 nt, Artificial Sequence
  Description of Artificial Sequence: Synthetic oligonucleotide
ugagcagaauuguagagag

SEQ ID NO: 1963004 - RNA, 19 nt, Artificial Sequence
  Description of Artificial Sequence: Synthetic oligonucleotide
aauggaaccaugacugacc

SEQ ID NO: 1963005 - RNA, 19 nt, Artificial Sequence
  Description of Artificial Sequence: Synthetic oligonucleotide
agcagaauuguagagaguc

SEQ ID NO: 1963006 - RNA, 19 nt, Artificial Sequence
  Description of Artificial Sequence: Synthetic oligonucleotide
gaagcuacguaacuugucc

SEQ ID NO: 1963007 - RNA, 19 nt, Artificial Sequence
  Description of Artificial Sequence: Synthetic oligonucleotide
augacugaccacuagccgg

SEQ ID NO: 1963008 - RNA, 19 nt, Artificial Sequence
  Description of Artificial Sequence: Synthetic oligonucleotide
aacaucaaauggccagggc

SEQ ID NO: 1963009 - RNA, 19 nt, Artificial Sequence
  Description of Artificial Sequence: Synthetic oligonucleotide
ucaaguucuuccaaucccc

SEQ ID NO: 1963010 - RNA, 19 nt, Artificial Sequence
  Description of Artificial Sequence: Synthetic oligonucleotide
accaugacugaccacuagc

SEQ ID NO: 1963011 - RNA, 19 nt, Artificial Sequence
  Description of Artificial Sequence: Synthetic oligonucleotide
aguucaaguucuuccaauc

SEQ ID NO: 1963012 - RNA, 19 nt, Artificial Sequence
  Description of Artificial Sequence: Synthetic oligonucleotide
uguacacgcaccacagacg

SEQ ID NO: 1963013 - RNA, 19 nt, Artificial Sequence
  Description of Artificial Sequence: Synthetic oligonucleotide
acguaacuuguccaggggc

SEQ ID NO: 1963014 - RNA, 19 nt, Artificial Sequence
  Description of Artificial Sequence: Synthetic oligonucleotide
acaucaaauggccagggcu

SEQ ID NO: 1963015 - RNA, 19 nt, Artificial Sequence
  Description of Artificial Sequence: Synthetic oligonucleotide
uuugcaguggggaccacag

SEQ ID NO: 1963016 - RNA, 19 nt, Artificial Sequence
  Description of Artificial Sequence: Synthetic oligonucleotide
guacacgcaccacagacgg

SEQ ID NO: 1963017 - RNA, 19 nt, Artificial Sequence
  Description of Artificial Sequence: Synthetic oligonucleotide
aagguguacacgcaccaca

SEQ ID NO: 1963018 - RNA, 19 nt, Artificial Sequence
  Description of Artificial Sequence: Synthetic oligonucleotide
uuaggugggcagaaaggag

SEQ ID NO: 1963019 - RNA, 19 nt, Artificial Sequence
  Description of Artificial Sequence: Synthetic oligonucleotide
uccccuaccaccccaguag

SEQ ID NO: 1963020 - RNA, 19 nt, Artificial Sequence
  Description of Artificial Sequence: Synthetic oligonucleotide
cuugagcagaauuguagag

SEQ ID NO: 1963021 - RNA, 19 nt, Artificial Sequence
  Description of Artificial Sequence: Synthetic oligonucleotide
agagucgccauggaguggc

SEQ ID NO: 1963022 - RNA, 19 nt, Artificial Sequence
  Description of Artificial Sequence: Synthetic oligonucleotide
cuacguaacuuguccaggg

SEQ ID NO: 1963023 - RNA, 19 nt, Artificial Sequence
  Description of Artificial Sequence: Synthetic oligonucleotide
aguagcaccagggauagca

SEQ ID NO: 1963024 - RNA, 19 nt, Artificial Sequence
  Description of Artificial Sequence: Synthetic oligonucleotide
uacguaacuuguccagggg

SEQ ID NO: 1963025 - RNA, 19 nt, Artificial Sequence
  Description of Artificial Sequence: Synthetic oligonucleotide
aggggaacaucaaauggcc

SEQ ID NO: 1963026 - RNA, 19 nt, Artificial Sequence
  Description of Artificial Sequence: Synthetic oligonucleotide
gaaagaugaggucacaccu

SEQ ID NO: 1963027 - RNA, 19 nt, Artificial Sequence
  Description of Artificial Sequence: Synthetic oligonucleotide
ucgcaguggggacaggugg

SEQ ID NO: 1963028 - RNA, 19 nt, Artificial Sequence
  Description of Artificial Sequence: Synthetic oligonucleotide
ugaggcacccucuggagcc

SEQ ID NO: 1963029 - RNA, 19 nt, Artificial Sequence
  Description of Artificial Sequence: Synthetic oligonucleotide
gaggggaacaucaaauggc

SEQ ID NO: 1963030 - RNA, 19 nt, Artificial Sequence
  Description of Artificial Sequence: Synthetic oligonucleotide
agaauuguagagagucgcc

SEQ ID NO: 1963031 - RNA, 19 nt, Artificial Sequence
  Description of Artificial Sequence: Synthetic oligonucleotide
gcuuaaaagguuuuaauaa

SEQ ID NO: 1963032 - RNA, 19 nt, Artificial Sequence
  Description of Artificial Sequence: Synthetic oligonucleotide
cugaccacuagccggaggc

SEQ ID NO: 1963033 - RNA, 19 nt, Artificial Sequence
  Description of Artificial Sequence: Synthetic oligonucleotide
cagaauuguagagagucgc

SEQ ID NO: 1963034 - RNA, 19 nt, Artificial Sequence
  Description of Artificial Sequence: Synthetic oligonucleotide
cuuugucucucgaagcuac

SEQ ID NO: 1963035 - RNA, 19 nt, Artificial Sequence
  Description of Artificial Sequence: Synthetic oligonucleotide
gacgguagcccguagcgcc

SEQ ID NO: 1963036 - RNA, 19 nt, Artificial Sequence
  Description of Artificial Sequence: Synthetic oligonucleotide
agggauagcaccgugagaa

SEQ ID NO: 1963037 - RNA, 19 nt, Artificial Sequence
  Description of Artificial Sequence: Synthetic oligonucleotide
ggaggggaacaucaaaugg

SEQ ID NO: 1963038 - RNA, 19 nt, Artificial Sequence
  Description of Artificial Sequence: Synthetic oligonucleotide
cucgaagcuacguaacuug

SEQ ID NO: 1963039 - RNA, 19 nt, Artificial Sequence
  Description of Artificial Sequence: Synthetic oligonucleotide
uugagcagaauuguagaga

SEQ ID NO: 1963040 - RNA, 19 nt, Artificial Sequence
  Description of Artificial Sequence: Synthetic oligonucleotide
caucaaauggccagggcuc

SEQ ID NO: 1963041 - RNA, 19 nt, Artificial Sequence
  Description of Artificial Sequence: Synthetic oligonucleotide
agcuacguaacuuguccag

SEQ ID NO: 1963042 - RNA, 19 nt, Artificial Sequence
  Description of Artificial Sequence: Synthetic oligonucleotide
caagccacuccccuugugg

SEQ ID NO: 1963043 - RNA, 19 nt, Artificial Sequence
  Description of Artificial Sequence: Synthetic oligonucleotide
caugacugaccacuagccg

SEQ ID NO: 1963044 - RNA, 19 nt, Artificial Sequence
  Description of Artificial Sequence: Synthetic oligonucleotide
gaucaauggaaccaugacu

SEQ ID NO: 1963045 - RNA, 19 nt, Artificial Sequence
  Description of Artificial Sequence: Synthetic oligonucleotide
gggaacaucaaauggccag

SEQ ID NO: 1963046 - RNA, 19 nt, Artificial Sequence
  Description of Artificial Sequence: Synthetic oligonucleotide
uuugucucucgaagcuacg

SEQ ID NO: 1963047 - RNA, 19 nt, Artificial Sequence
  Description of Artificial Sequence: Synthetic oligonucleotide
aagcuacguaacuugucca

SEQ ID NO: 1963048 - RNA, 19 nt, Artificial Sequence
  Description of Artificial Sequence: Synthetic oligonucleotide
uccuacaguucugaggugc

SEQ ID NO: 1963049 - RNA, 19 nt, Artificial Sequence
  Description of Artificial Sequence: Synthetic oligonucleotide
guguacacgcaccacagac

SEQ ID NO: 1963050 - RNA, 19 nt, Artificial Sequence
  Description of Artificial Sequence: Synthetic oligonucleotide
guagagagucgccauggag

SEQ ID NO: 1963051 - RNA, 19 nt, Artificial Sequence
  Description of Artificial Sequence: Synthetic oligonucleotide
aaccaugacugaccacuag

SEQ ID NO: 1963052 - RNA, 19 nt, Artificial Sequence
  Description of Artificial Sequence: Synthetic oligonucleotide
agucaagccacuccccuug

SEQ ID NO: 1963053 - RNA, 19 nt, Artificial Sequence
  Description of Artificial Sequence: Synthetic oligonucleotide
aggaugugccccuggguac

SEQ ID NO: 1963054 - RNA, 19 nt, Artificial Sequence
  Description of Artificial Sequence: Synthetic oligonucleotide
ugacugaccacuagccgga

SEQ ID NO: 1963055 - RNA, 19 nt, Artificial Sequence
  Description of Artificial Sequence: Synthetic oligonucleotide
gaacaucaaauggccaggg

SEQ ID NO: 1963056 - RNA, 19 nt, Artificial Sequence
  Description of Artificial Sequence: Synthetic oligonucleotide
cagacgguagcccguagcg

SEQ ID NO: 1963057 - RNA, 19 nt, Artificial Sequence
  Description of Artificial Sequence: Synthetic oligonucleotide
uucggggacggacucuggg

SEQ ID NO: 1963058 - RNA, 19 nt, Artificial Sequence
  Description of Artificial Sequence: Synthetic oligonucleotide
guaccaguccugcuguggg

SEQ ID NO: 1963059 - RNA, 19 nt, Artificial Sequence
  Description of Artificial Sequence: Synthetic oligonucleotide
accccuuauggcuuugcuc

SEQ ID NO: 1963060 - RNA, 19 nt, Artificial Sequence
  Description of Artificial Sequence: Synthetic oligonucleotide
uccaacaacugcagagcug

SEQ ID NO: 1963061 - RNA, 19 nt, Artificial Sequence
  Description of Artificial Sequence: Synthetic oligonucleotide
gggaggaagacuccuacag

SEQ ID NO: 1963062 - RNA, 19 nt, Artificial Sequence
  Description of Artificial Sequence: Synthetic oligonucleotide
ucccugagacccauggggc

SEQ ID NO: 1963063 - RNA, 19 nt, Artificial Sequence
  Description of Artificial Sequence: Synthetic oligonucleotide
gucacggagucgcaguggg

SEQ ID NO: 1963064 - RNA, 19 nt, Artificial Sequence
  Description of Artificial Sequence: Synthetic oligonucleotide
ccccuuauggcuuugcucc

SEQ ID NO: 1963065 - RNA, 19 nt, Artificial Sequence
  Description of Artificial Sequence: Synthetic oligonucleotide
aagacuccuacaguucuga

SEQ ID NO: 1963066 - RNA, 19 nt, Artificial Sequence
  Description of Artificial Sequence: Synthetic oligonucleotide
ucgaagcuacguaacuugu

SEQ ID NO: 1963067 - RNA, 19 nt, Artificial Sequence
  Description of Artificial Sequence: Synthetic oligonucleotide
ucgguguaaggagacacug

SEQ ID NO: 1963068 - RNA, 19 nt, Artificial Sequence
  Description of Artificial Sequence: Synthetic oligonucleotide
agagggagccuccccuacc

SEQ ID NO: 1963069 - RNA, 19 nt, Artificial Sequence
  Description of Artificial Sequence: Synthetic oligonucleotide
auggaaccaugacugacca

SEQ ID NO: 1963070 - RNA, 19 nt, Artificial Sequence
  Description of Artificial Sequence: Synthetic oligonucleotide
ucggggacggacucugggg

SEQ ID NO: 1963071 - RNA, 19 nt, Artificial Sequence
  Description of Artificial Sequence: Synthetic oligonucleotide
gaacgggucacggagucgc

SEQ ID NO: 1963072 - RNA, 19 nt, Artificial Sequence
  Description of Artificial Sequence: Synthetic oligonucleotide
ucaauggaaccaugacuga

SEQ ID NO: 1963073 - RNA, 19 nt, Artificial Sequence
  Description of Artificial Sequence: Synthetic oligonucleotide
accgugagaaagaugaggu

SEQ ID NO: 1963074 - RNA, 19 nt, Artificial Sequence
  Description of Artificial Sequence: Synthetic oligonucleotide
uaagggucagggguagggg

SEQ ID NO: 1963075 - RNA, 19 nt, Artificial Sequence
  Description of Artificial Sequence: Synthetic oligonucleotide
uggggauaagggucagggg

SEQ ID NO: 1963076 - RNA, 19 nt, Artificial Sequence
  Description of Artificial Sequence: Synthetic oligonucleotide
ggcaaguaguccaaguggg

SEQ ID NO: 1963077 - RNA, 19 nt, Artificial Sequence
  Description of Artificial Sequence: Synthetic oligonucleotide
aacaacugcagagcugaga

SEQ ID NO: 1963078 - RNA, 19 nt, Artificial Sequence
  Description of Artificial Sequence: Synthetic oligonucleotide
cugcuuggggauaaggguc

SEQ ID NO: 1963079 - RNA, 19 nt, Artificial Sequence
  Description of Artificial Sequence: Synthetic oligonucleotide
gacuuagcccggcggaucc

SEQ ID NO: 1963080 - RNA, 19 nt, Artificial Sequence
  Description of Artificial Sequence: Synthetic oligonucleotide
ucagcccgcaguuugcagu

SEQ ID NO: 1963081 - RNA, 19 nt, Artificial Sequence
  Description of Artificial Sequence: Synthetic oligonucleotide
uuauggcuuugcucccugg

SEQ ID NO: 1963082 - RNA, 19 nt, Artificial Sequence
  Description of Artificial Sequence: Synthetic oligonucleotide
ucccuggggaggaagacuc

SEQ ID NO: 1963083 - RNA, 19 nt, Artificial Sequence
  Description of Artificial Sequence: Synthetic oligonucleotide
aguaccaguccugcugugg

SEQ ID NO: 1963084 - RNA, 19 nt, Artificial Sequence
  Description of Artificial Sequence: Synthetic oligonucleotide
guuggggcagcccaucaug

SEQ ID NO: 1963085 - RNA, 19 nt, Artificial Sequence
  Description of Artificial Sequence: Synthetic oligonucleotide
aggcggguaagguguacac

SEQ ID NO: 1963086 - RNA, 19 nt, Artificial Sequence
  Description of Artificial Sequence: Synthetic oligonucleotide
cuggguaccacccacccca

SEQ ID NO: 1963087 - RNA, 19 nt, Artificial Sequence
  Description of Artificial Sequence: Synthetic oligonucleotide
gccggaggcgcuuaggugg

SEQ ID NO: 1963088 - RNA, 19 nt, Artificial Sequence
  Description of Artificial Sequence: Synthetic oligonucleotide
guaagguguacacgcacca

SEQ ID NO: 1963089 - RNA, 19 nt, Artificial Sequence
  Description of Artificial Sequence: Synthetic oligonucleotide
gcggguaagguguacacgc

SEQ ID NO: 1963090 - RNA, 19 nt, Artificial Sequence
  Description of Artificial Sequence: Synthetic oligonucleotide
ggaacaucaaauggccagg

SEQ ID NO: 1963091 - RNA, 19 nt, Artificial Sequence
  Description of Artificial Sequence: Synthetic oligonucleotide
caucgguguaaggagacac

SEQ ID NO: 1963092 - RNA, 19 nt, Artificial Sequence
  Description of Artificial Sequence: Synthetic oligonucleotide
ugucucucgaagcuacgua

SEQ ID NO: 1963093 - RNA, 19 nt, Artificial Sequence
  Description of Artificial Sequence: Synthetic oligonucleotide
caauggaaccaugacugac

SEQ ID NO: 1963094 - RNA, 19 nt, Artificial Sequence
  Description of Artificial Sequence: Synthetic oligonucleotide
uaccaguccugcugugggg

SEQ ID NO: 1963095 - RNA, 19 nt, Artificial Sequence
  Description of Artificial Sequence: Synthetic oligonucleotide
cuaccaccccaguagcacc

SEQ ID NO: 1963096 - RNA, 19 nt, Artificial Sequence
  Description of Artificial Sequence: Synthetic oligonucleotide
uccagaucaauggaaccau

SEQ ID NO: 1963097 - RNA, 19 nt, Artificial Sequence
  Description of Artificial Sequence: Synthetic oligonucleotide
agacgguagcccguagcgc

SEQ ID NO: 1963098 - RNA, 19 nt, Artificial Sequence
  Description of Artificial Sequence: Synthetic oligonucleotide
uuagcccggcggauccugg

SEQ ID NO: 1963099 - RNA, 19 nt, Artificial Sequence
  Description of Artificial Sequence: Synthetic oligonucleotide
uagccggaggcgcuuaggu

SEQ ID NO: 1963100 - RNA, 19 nt, Artificial Sequence
  Description of Artificial Sequence: Synthetic oligonucleotide
uaccaccccaguagcacca

SEQ ID NO: 1963101 - RNA, 19 nt, Artificial Sequence
  Description of Artificial Sequence: Synthetic oligonucleotide
acugaccacuagccggagg

SEQ ID NO: 1963102 - RNA, 19 nt, Artificial Sequence
  Description of Artificial Sequence: Synthetic oligonucleotide
gugagaaagaugaggucac

SEQ ID NO: 1963103 - RNA, 19 nt, Artificial Sequence
  Description of Artificial Sequence: Synthetic oligonucleotide
guagggcuggggcuaggcg

SEQ ID NO: 1963104 - RNA, 19 nt, Artificial Sequence
  Description of Artificial Sequence: Synthetic oligonucleotide
acaggugggagcaggcccg

SEQ ID NO: 1963105 - RNA, 19 nt, Artificial Sequence
  Description of Artificial Sequence: Synthetic oligonucleotide
cugguaggcagcaggcaug

SEQ ID NO: 1963106 - RNA, 19 nt, Artificial Sequence
  Description of Artificial Sequence: Synthetic oligonucleotide
agccacuccccuugugggg

SEQ ID NO: 1963107 - RNA, 19 nt, Artificial Sequence
  Description of Artificial Sequence: Synthetic oligonucleotide
ccugcugugggguccagcg

SEQ ID NO: 1963108 - RNA, 19 nt, Artificial Sequence
  Description of Artificial Sequence: Synthetic oligonucleotide
ggggcaaguaguccaagug

SEQ ID NO: 1963109 - RNA, 19 nt, Artificial Sequence
  Description of Artificial Sequence: Synthetic oligonucleotide
agcgaaggcaagggucugc

SEQ ID NO: 1963110 - RNA, 19 nt, Artificial Sequence
  Description of Artificial Sequence: Synthetic oligonucleotide
caccuggccucccugagac

SEQ ID NO: 1963111 - RNA, 19 nt, Artificial Sequence
  Description of Artificial Sequence: Synthetic oligonucleotide
gccgcuuugucucucgaag

SEQ ID NO: 1963112 - RNA, 19 nt, Artificial Sequence
  Description of Artificial Sequence: Synthetic oligonucleotide
cugaggcacccucuggagc

SEQ ID NO: 1963113 - RNA, 19 nt, Artificial Sequence
  Description of Artificial Sequence: Synthetic oligonucleotide
agguguacacgcaccacag

SEQ ID NO: 1963114 - RNA, 19 nt, Artificial Sequence
  Description of Artificial Sequence: Synthetic oligonucleotide
uagcccguagcgccgggcc

SEQ ID NO: 1963115 - RNA, 19 nt, Artificial Sequence
  Description of Artificial Sequence: Synthetic oligonucleotide
ggucuuggggagcaugugc

SEQ ID NO: 1963116 - RNA, 19 nt, Artificial Sequence
  Description of Artificial Sequence: Synthetic oligonucleotide
ggauagcaccgugagaaag

SEQ ID NO: 1963117 - RNA, 19 nt, Artificial Sequence
  Description of Artificial Sequence: Synthetic oligonucleotide
gcuuaggugggcagaaagg

SEQ ID NO: 1963118 - RNA, 19 nt, Artificial Sequence
  Description of Artificial Sequence: Synthetic oligonucleotide
gauaagggucagggguagg

SEQ ID NO: 1963119 - RNA, 19 nt, Artificial Sequence
  Description of Artificial Sequence: Synthetic oligonucleotide
agacuccuacaguucugag

SEQ ID NO: 1963120 - RNA, 19 nt, Artificial Sequence
  Description of Artificial Sequence: Synthetic oligonucleotide
uugucucucgaagcuacgu

SEQ ID NO: 1963121 - RNA, 19 nt, Artificial Sequence
  Description of Artificial Sequence: Synthetic oligonucleotide
uggcucgccacuguugaug

SEQ ID NO: 1963122 - RNA, 19 nt, Artificial Sequence
  Description of Artificial Sequence: Synthetic oligonucleotide
ugagaaagaugaggucaca

SEQ ID NO: 1963123 - RNA, 19 nt, Artificial Sequence
  Description of Artificial Sequence: Synthetic oligonucleotide
uuucggggacggacucugg

SEQ ID NO: 1963124 - RNA, 19 nt, Artificial Sequence
  Description of Artificial Sequence: Synthetic oligonucleotide
ugaccacuagccggaggcg

SEQ ID NO: 1963125 - RNA, 19 nt, Artificial Sequence
  Description of Artificial Sequence: Synthetic oligonucleotide
gguaagguguacacgcacc

SEQ ID NO: 1963126 - RNA, 19 nt, Artificial Sequence
  Description of Artificial Sequence: Synthetic oligonucleotide
cugggcucccagcaggggc

SEQ ID NO: 1963127 - RNA, 19 nt, Artificial Sequence
  Description of Artificial Sequence: Synthetic oligonucleotide
gacgccgcuuugucucucg

SEQ ID NO: 1963128 - RNA, 19 nt, Artificial Sequence
  Description of Artificial Sequence: Synthetic oligonucleotide
caggcccugcugcagacgc

SEQ ID NO: 1963129 - RNA, 19 nt, Artificial Sequence
  Description of Artificial Sequence: Synthetic oligonucleotide
agcgcagaacgggucacgg

SEQ ID NO: 1963130 - RNA, 19 nt, Artificial Sequence
  Description of Artificial Sequence: Synthetic oligonucleotide
ggaaccaugacugaccacu

SEQ ID NO: 1963131 - RNA, 19 nt, Artificial Sequence
  Description of Artificial Sequence: Synthetic oligonucleotide
uaccacccaccccaucuga

SEQ ID NO: 1963132 - RNA, 19 nt, Artificial Sequence
  Description of Artificial Sequence: Synthetic oligonucleotide
gcagaauuguagagagucg

SEQ ID NO: 1963133 - RNA, 19 nt, Artificial Sequence
  Description of Artificial Sequence: Synthetic oligonucleotide
cauggcucgccacuguuga

SEQ ID NO: 1963134 - RNA, 19 nt, Artificial Sequence
  Description of Artificial Sequence: Synthetic oligonucleotide
cagcugguagggcuggggc

SEQ ID NO: 1963135 - RNA, 19 nt, Artificial Sequence
  Description of Artificial Sequence: Synthetic oligonucleotide
caugugcagggccaccaug

SEQ ID NO: 1963136 - RNA, 19 nt, Artificial Sequence
  Description of Artificial Sequence: Synthetic oligonucleotide
agcccguagcgccgggccc

SEQ ID NO: 1963137 - RNA, 19 nt, Artificial Sequence
  Description of Artificial Sequence: Synthetic oligonucleotide
gcagaaaggagcgaaggca

SEQ ID NO: 1963138 - RNA, 19 nt, Artificial Sequence
  Description of Artificial Sequence: Synthetic oligonucleotide
gacugcuccugccuccaac

SEQ ID NO: 1963139 - RNA, 19 nt, Artificial Sequence
  Description of Artificial Sequence: Synthetic oligonucleotide
gcuacguaacuuguccagg

SEQ ID NO: 1963140 - RNA, 19 nt, Artificial Sequence
  Description of Artificial Sequence: Synthetic oligonucleotide
gaggagagggagccucccc

SEQ ID NO: 1963141 - RNA, 19 nt, Artificial Sequence
  Description of Artificial Sequence: Synthetic oligonucleotide
gagagucaagccacucccc

SEQ ID NO: 1963142 - RNA, 19 nt, Artificial Sequence
  Description of Artificial Sequence: Synthetic oligonucleotide
gaccacuagccggaggcgc

SEQ ID NO: 1963143 - RNA, 19 nt, Artificial Sequence
  Description of Artificial Sequence: Synthetic oligonucleotide
uagcgccgggcccaguacc

SEQ ID NO: 1963144 - RNA, 19 nt, Artificial Sequence
  Description of Artificial Sequence: Synthetic oligonucleotide
auagcaccgugagaaagau

SEQ ID NO: 1963145 - RNA, 19 nt, Artificial Sequence
  Description of Artificial Sequence: Synthetic oligonucleotide
gaggugcgggcagggaugg

SEQ ID NO: 1963146 - RNA, 19 nt, Artificial Sequence
  Description of Artificial Sequence: Synthetic oligonucleotide
cagaacgggucacggaguc

SEQ ID NO: 1963147 - RNA, 19 nt, Artificial Sequence
  Description of Artificial Sequence: Synthetic oligonucleotide
uaggcggguaagguguaca

SEQ ID NO: 1963148 - RNA, 19 nt, Artificial Sequence
  Description of Artificial Sequence: Synthetic oligonucleotide
gacccagcgggcucugcug

SEQ ID NO: 1963149 - RNA, 19 nt, Artificial Sequence
  Description of Artificial Sequence: Synthetic oligonucleotide
acacgcaccacagacggua

SEQ ID NO: 1963150 - RNA, 19 nt, Artificial Sequence
  Description of Artificial Sequence: Synthetic oligonucleotide
agaacgggucacggagucg

SEQ ID NO: 1963151 - RNA, 19 nt, Artificial Sequence
  Description of Artificial Sequence: Synthetic oligonucleotide
ucaaauggccagggcuccc

SEQ ID NO: 1963152 - RNA, 19 nt, Artificial Sequence
  Description of Artificial Sequence: Synthetic oligonucleotide
ggcuugggagggcaaaccc

SEQ ID NO: 1963153 - RNA, 19 nt, Artificial Sequence
  Description of Artificial Sequence: Synthetic oligonucleotide
guaccacccaccccaucug

SEQ ID NO: 1963154 - RNA, 19 nt, Artificial Sequence
  Description of Artificial Sequence: Synthetic oligonucleotide
ccaagucaguuccaccucc

SEQ ID NO: 1963155 - RNA, 19 nt, Artificial Sequence
  Description of Artificial Sequence: Synthetic oligonucleotide
gcaguuugcaguggggacc

SEQ ID NO: 1963156 - RNA, 19 nt, Artificial Sequence
  Description of Artificial Sequence: Synthetic oligonucleotide
ugcugcagacgccgcuuug

SEQ ID NO: 1963157 - RNA, 19 nt, Artificial Sequence
  Description of Artificial Sequence: Synthetic oligonucleotide
ccagggauagcaccgugag

SEQ ID NO: 1963158 - RNA, 19 nt, Artificial Sequence
  Description of Artificial Sequence: Synthetic oligonucleotide
uagcccggcggauccuggg

SEQ ID NO: 1963159 - RNA, 19 nt, Artificial Sequence
  Description of Artificial Sequence: Synthetic oligonucleotide
agccggaggcgcuuaggug

SEQ ID NO: 1963160 - RNA, 19 nt, Artificial Sequence
  Description of Artificial Sequence: Synthetic oligonucleotide
gccucccugagacccaugg

SEQ ID NO: 1963161 - RNA, 19 nt, Artificial Sequence
  Description of Artificial Sequence: Synthetic oligonucleotide
ggugggagcaggcccgcgg

SEQ ID NO: 1963162 - RNA, 19 nt, Artificial Sequence
  Description of Artificial Sequence: Synthetic oligonucleotide
agggagccuccccuaccac

SEQ ID NO: 1963163 - RNA, 19 nt, Artificial Sequence
  Description of Artificial Sequence: Synthetic oligonucleotide
gcaaguaguccaagugggg

SEQ ID NO: 1963164 - RNA, 19 nt, Artificial Sequence
  Description of Artificial Sequence: Synthetic oligonucleotide
cagcccgcaguuugcagug

SEQ ID NO: 1963165 - RNA, 19 nt, Artificial Sequence
  Description of Artificial Sequence: Synthetic oligonucleotide
acuagccggaggcgcuuag

SEQ ID NO: 1963166 - RNA, 19 nt, Artificial Sequence
  Description of Artificial Sequence: Synthetic oligonucleotide
gagagucgccauggagugg

SEQ ID NO: 1963167 - RNA, 19 nt, Artificial Sequence
  Description of Artificial Sequence: Synthetic oligonucleotide
aucauggcucgccacuguu

SEQ ID NO: 1963168 - RNA, 19 nt, Artificial Sequence
  Description of Artificial Sequence: Synthetic oligonucleotide
gcaggcagcgcagaacggg

SEQ ID NO: 1963169 - RNA, 19 nt, Artificial Sequence
  Description of Artificial Sequence: Synthetic oligonucleotide
ugagacccauggggcaggg

SEQ ID NO: 1963170 - RNA, 19 nt, Artificial Sequence
  Description of Artificial Sequence: Synthetic oligonucleotide
gucacaccuggccucccug

SEQ ID NO: 1963171 - RNA, 19 nt, Artificial Sequence
  Description of Artificial Sequence: Synthetic oligonucleotide
gcuguccaggcccugcugc

SEQ ID NO: 1963172 - RNA, 19 nt, Artificial Sequence
  Description of Artificial Sequence: Synthetic oligonucleotide
ccaacaacugcagagcuga

SEQ ID NO: 1963173 - RNA, 19 nt, Artificial Sequence
  Description of Artificial Sequence: Synthetic oligonucleotide
cucagcccgcaguuugcag

SEQ ID NO: 1963174 - RNA, 19 nt, Artificial Sequence
  Description of Artificial Sequence: Synthetic oligonucleotide
uggaaccaugacugaccac

SEQ ID NO: 1963175 - RNA, 19 nt, Artificial Sequence
  Description of Artificial Sequence: Synthetic oligonucleotide
cacaccuggccucccugag

SEQ ID NO: 1963176 - RNA, 19 nt, Artificial Sequence
  Description of Artificial Sequence: Synthetic oligonucleotide
ccaaggaugugccccuggg

SEQ ID NO: 1963177 - RNA, 19 nt, Artificial Sequence
  Description of Artificial Sequence: Synthetic oligonucleotide
cgcagaacgggucacggag

SEQ ID NO: 1963178 - RNA, 19 nt, Artificial Sequence
  Description of Artificial Sequence: Synthetic oligonucleotide
agcccaucauggcucgcca

SEQ ID NO: 1963179 - RNA, 19 nt, Artificial Sequence
  Description of Artificial Sequence: Synthetic oligonucleotide
cacggagucgcagugggga

SEQ ID NO: 1963180 - RNA, 19 nt, Artificial Sequence
  Description of Artificial Sequence: Synthetic oligonucleotide
aucgguguaaggagacacu

SEQ ID NO: 1963181 - RNA, 19 nt, Artificial Sequence
  Description of Artificial Sequence: Synthetic oligonucleotide
ggauaagggucagggguag

SEQ ID NO: 1963182 - RNA, 19 nt, Artificial Sequence
  Description of Artificial Sequence: Synthetic oligonucleotide
gcugaggcacccucuggag

SEQ ID NO: 1963183 - RNA, 19 nt, Artificial Sequence
  Description of Artificial Sequence: Synthetic oligonucleotide
caacaacugcagagcugag

SEQ ID NO: 1963184 - RNA, 19 nt, Artificial Sequence
  Description of Artificial Sequence: Synthetic oligonucleotide
cgugagaaagaugagguca

SEQ ID NO: 1963185 - RNA, 19 nt, Artificial Sequence
  Description of Artificial Sequence: Synthetic oligonucleotide
cuagccggaggcgcuuagg

SEQ ID NO: 1963186 - RNA, 19 nt, Artificial Sequence
  Description of Artificial Sequence: Synthetic oligonucleotide
uacacgcaccacagacggu

SEQ ID NO: 1963187 - RNA, 19 nt, Artificial Sequence
  Description of Artificial Sequence: Synthetic oligonucleotide
ggcaagggucugcuugggg

SEQ ID NO: 1963188 - RNA, 19 nt, Artificial Sequence
  Description of Artificial Sequence: Synthetic oligonucleotide
cugagacccauggggcagg

SEQ ID NO: 1963189 - RNA, 19 nt, Artificial Sequence
  Description of Artificial Sequence: Synthetic oligonucleotide
guagcaccagggauagcac

SEQ ID NO: 1963190 - RNA, 19 nt, Artificial Sequence
  Description of Artificial Sequence: Synthetic oligonucleotide
ccaucugacugcuccugcc

SEQ ID NO: 1963191 - RNA, 19 nt, Artificial Sequence
  Description of Artificial Sequence: Synthetic oligonucleotide
gggagccuccccuaccacc

SEQ ID NO: 1963192 - RNA, 19 nt, Artificial Sequence
  Description of Artificial Sequence: Synthetic oligonucleotide
ggcggguaagguguacacg

SEQ ID NO: 1963193 - RNA, 19 nt, Artificial Sequence
  Description of Artificial Sequence: Synthetic oligonucleotide
gagcugagagagagucaag

SEQ ID NO: 1963194 - RNA, 19 nt, Artificial Sequence
  Description of Artificial Sequence: Synthetic oligonucleotide
accagggauagcaccguga

SEQ ID NO: 1963195 - RNA, 19 nt, Artificial Sequence
  Description of Artificial Sequence: Synthetic oligonucleotide
ggagcaggcccgcggaccc

SEQ ID NO: 1963196 - RNA, 19 nt, Artificial Sequence
  Description of Artificial Sequence: Synthetic oligonucleotide
cuuagcccggcggauccug

SEQ ID NO: 1963197 - RNA, 19 nt, Artificial Sequence
  Description of Artificial Sequence: Synthetic oligonucleotide
guuugcaguggggaccaca

SEQ ID NO: 1963198 - RNA, 19 nt, Artificial Sequence
  Description of Artificial Sequence: Synthetic oligonucleotide
ccuccugaggcuugagcag

SEQ ID NO: 1963199 - RNA, 19 nt, Artificial Sequence
  Description of Artificial Sequence: Synthetic oligonucleotide
cucuggagccacaggggca

SEQ ID NO: 1963200 - RNA, 19 nt, Artificial Sequence
  Description of Artificial Sequence: Synthetic oligonucleotide
gcuugggagggcaaacccc

SEQ ID NO: 1963201 - RNA, 19 nt, Artificial Sequence
  Description of Artificial Sequence: Synthetic oligonucleotide
ccaguagcaccagggauag

SEQ ID NO: 1963202 - RNA, 19 nt, Artificial Sequence
  Description of Artificial Sequence: Synthetic oligonucleotide
cugcagacgccgcuuuguc

SEQ ID NO: 1963203 - RNA, 19 nt, Artificial Sequence
  Description of Artificial Sequence: Synthetic oligonucleotide
ccgcuuugucucucgaagc

SEQ ID NO: 1963204 - RNA, 19 nt, Artificial Sequence
  Description of Artificial Sequence: Synthetic oligonucleotide
gucgcaguggggacaggug

SEQ ID NO: 1963205 - RNA, 19 nt, Artificial Sequence
  Description of Artificial Sequence: Synthetic oligonucleotide
uggggagcaugugcagggc

SEQ ID NO: 1963206 - RNA, 19 nt, Artificial Sequence
  Description of Artificial Sequence: Synthetic oligonucleotide
caggcccgcggacccagcg

SEQ ID NO: 1963207 - RNA, 19 nt, Artificial Sequence
  Description of Artificial Sequence: Synthetic oligonucleotide
acgguagcccguagcgccg

SEQ ID NO: 1963208 - RNA, 19 nt, Artificial Sequence
  Description of Artificial Sequence: Synthetic oligonucleotide
cacccucuggagccacagg

SEQ ID NO: 1963209 - RNA, 19 nt, Artificial Sequence
  Description of Artificial Sequence: Synthetic oligonucleotide
cauggggcagggccaagga

SEQ ID NO: 1963210 - RNA, 19 nt, Artificial Sequence
  Description of Artificial Sequence: Synthetic oligonucleotide
guagcgccgggcccaguac

SEQ ID NO: 1963211 - RNA, 19 nt, Artificial Sequence
  Description of Artificial Sequence: Synthetic oligonucleotide
cccaucgguguaaggagac

SEQ ID NO: 1963212 - RNA, 19 nt, Artificial Sequence
  Description of Artificial Sequence: Synthetic oligonucleotide
gggcuaggcggguaaggug

SEQ ID NO: 1963213 - RNA, 19 nt, Artificial Sequence
  Description of Artificial Sequence: Synthetic oligonucleotide
ggcgcuuucggggacggac

SEQ ID NO: 1963214 - RNA, 19 nt, Artificial Sequence
  Description of Artificial Sequence: Synthetic oligonucleotide
cgcuuaggugggcagaaag

SEQ ID NO: 1963215 - RNA, 19 nt, Artificial Sequence
  Description of Artificial Sequence: Synthetic oligonucleotide
ggucacggagucgcagugg

SEQ ID NO: 1963216 - RNA, 19 nt, Artificial Sequence
  Description of Artificial Sequence: Synthetic oligonucleotide
ccagaucaauggaaccaug

SEQ ID NO: 1963217 - RNA, 19 nt, Artificial Sequence
  Description of Artificial Sequence: Synthetic oligonucleotide
gggcgacuuagcccggcgg

SEQ ID NO: 1963218 - RNA, 19 nt, Artificial Sequence
  Description of Artificial Sequence: Synthetic oligonucleotide
uugguuggggcagcccauc

SEQ ID NO: 1963219 - RNA, 19 nt, Artificial Sequence
  Description of Artificial Sequence: Synthetic oligonucleotide
ggcgacuuagcccggcgga

SEQ ID NO: 1963220 - RNA, 19 nt, Artificial Sequence
  Description of Artificial Sequence: Synthetic oligonucleotide
caccagggauagcaccgug

SEQ ID NO: 1963221 - RNA, 19 nt, Artificial Sequence
  Description of Artificial Sequence: Synthetic oligonucleotide
gacccauggggcagggcca

SEQ ID NO: 1963222 - RNA, 19 nt, Artificial Sequence
  Description of Artificial Sequence: Synthetic oligonucleotide
cuccaacaacugcagagcu

SEQ ID NO: 1963223 - RNA, 19 nt, Artificial Sequence
  Description of Artificial Sequence: Synthetic oligonucleotide
ggggcuuaaaagguuuuaa

SEQ ID NO: 1963224 - RNA, 19 nt, Artificial Sequence
  Description of Artificial Sequence: Synthetic oligonucleotide
ggaugugccccuggguacc

SEQ ID NO: 1963225 - RNA, 19 nt, Artificial Sequence
  Description of Artificial Sequence: Synthetic oligonucleotide
gaaccaugacugaccacua

SEQ ID NO: 1963226 - RNA, 19 nt, Artificial Sequence
  Description of Artificial Sequence: Synthetic oligonucleotide
gagcgaaggcaagggucug

SEQ ID NO: 1963227 - RNA, 19 nt, Artificial Sequence
  Description of Artificial Sequence: Synthetic oligonucleotide
accacuagccggaggcgcu

SEQ ID NO: 1963228 - RNA, 19 nt, Artificial Sequence
  Description of Artificial Sequence: Synthetic oligonucleotide
caguaccaguccugcugug

SEQ ID NO: 1963229 - RNA, 19 nt, Artificial Sequence
  Description of Artificial Sequence: Synthetic oligonucleotide
cuccugaggcuugagcaga

SEQ ID NO: 1963230 - RNA, 19 nt, Artificial Sequence
  Description of Artificial Sequence: Synthetic oligonucleotide
gcccgcaguuugcaguggg

SEQ ID NO: 1963231 - RNA, 19 nt, Artificial Sequence
  Description of Artificial Sequence: Synthetic oligonucleotide
cacagacgguagcccguag

SEQ ID NO: 1963232 - RNA, 19 nt, Artificial Sequence
  Description of Artificial Sequence: Synthetic oligonucleotide
gggcuuaaaagguuuuaau

SEQ ID NO: 1963233 - RNA, 19 nt, Artificial Sequence
  Description of Artificial Sequence: Synthetic oligonucleotide
cucucgaagcuacguaacu

SEQ ID NO: 1963234 - RNA, 19 nt, Artificial Sequence
  Description of Artificial Sequence: Synthetic oligonucleotide
cagcgcagaacgggucacg

SEQ ID NO: 1963235 - RNA, 19 nt, Artificial Sequence
  Description of Artificial Sequence: Synthetic oligonucleotide
gugccccuggguaccaccc

SEQ ID NO: 1963236 - RNA, 19 nt, Artificial Sequence
  Description of Artificial Sequence: Synthetic oligonucleotide
cuaggcggguaagguguac

SEQ ID NO: 1963237 - RNA, 19 nt, Artificial Sequence
  Description of Artificial Sequence: Synthetic oligonucleotide
uggguaccacccaccccau

SEQ ID NO: 1963238 - RNA, 19 nt, Artificial Sequence
  Description of Artificial Sequence: Synthetic oligonucleotide
ggggcgacuuagcccggcg

SEQ ID NO: 1963239 - RNA, 19 nt, Artificial Sequence
  Description of Artificial Sequence: Synthetic oligonucleotide
caucugacugcuccugccu

SEQ ID NO: 1963240 - RNA, 19 nt, Artificial Sequence
  Description of Artificial Sequence: Synthetic oligonucleotide
cccaguagcaccagggaua

SEQ ID NO: 1963241 - RNA, 19 nt, Artificial Sequence
  Description of Artificial Sequence: Synthetic oligonucleotide
gguguacacgcaccacaga

SEQ ID NO: 1963242 - RNA, 19 nt, Artificial Sequence
  Description of Artificial Sequence: Synthetic oligonucleotide
ggggaggaagacuccuaca

SEQ ID NO: 1963243 - RNA, 19 nt, Artificial Sequence
  Description of Artificial Sequence: Synthetic oligonucleotide
gguagggcuggggcuaggc

SEQ ID NO: 1963244 - RNA, 19 nt, Artificial Sequence
  Description of Artificial Sequence: Synthetic oligonucleotide
ccgugagaaagaugagguc

SEQ ID NO: 1963245 - RNA, 19 nt, Artificial Sequence
  Description of Artificial Sequence: Synthetic oligonucleotide
cccuuauggcuuugcuccc

SEQ ID NO: 1963246 - RNA, 19 nt, Artificial Sequence
  Description of Artificial Sequence: Synthetic oligonucleotide
caagucaguuccaccuccu

SEQ ID NO: 1963247 - RNA, 19 nt, Artificial Sequence
  Description of Artificial Sequence: Synthetic oligonucleotide
caggggcaaguaguccaag

SEQ ID NO: 1963248 - RNA, 19 nt, Artificial Sequence
  Description of Artificial Sequence: Synthetic oligonucleotide
ggauccuggggcggcggcg

SEQ ID NO: 1963249 - RNA, 19 nt, Artificial Sequence
  Description of Artificial Sequence: Synthetic oligonucleotide
cccaucugacugcuccugc

SEQ ID NO: 1963250 - RNA, 19 nt, Artificial Sequence
  Description of Artificial Sequence: Synthetic oligonucleotide
ggagcgaaggcaagggucu

SEQ ID NO: 1963251 - RNA, 19 nt, Artificial Sequence
  Description of Artificial Sequence: Synthetic oligonucleotide
ggcccaguaccaguccugc

SEQ ID NO: 1963252 - RNA, 19 nt, Artificial Sequence
  Description of Artificial Sequence: Synthetic oligonucleotide
ggcuaggcggguaaggugu

SEQ ID NO: 1963253 - RNA, 19 nt, Artificial Sequence
  Description of Artificial Sequence: Synthetic oligonucleotide
caguucugaggugcgggca

SEQ ID NO: 1963254 - RNA, 19 nt, Artificial Sequence
  Description of Artificial Sequence: Synthetic oligonucleotide
uuugcucccuggggaggaa

SEQ ID NO: 1963255 - RNA, 19 nt, Artificial Sequence
  Description of Artificial Sequence: Synthetic oligonucleotide
cgaagcuacguaacuuguc

SEQ ID NO: 1963256 - RNA, 19 nt, Artificial Sequence
  Description of Artificial Sequence: Synthetic oligonucleotide
gacggacucuggggcuggg

SEQ ID NO: 1963257 - RNA, 19 nt, Artificial Sequence
  Description of Artificial Sequence: Synthetic oligonucleotide
ccucccugagacccauggg

SEQ ID NO: 1963258 - RNA, 19 nt, Artificial Sequence
  Description of Artificial Sequence: Synthetic oligonucleotide
auggcucgccacuguugau

SEQ ID NO: 1963259 - RNA, 19 nt, Artificial Sequence
  Description of Artificial Sequence: Synthetic oligonucleotide
gaugugccccuggguacca

SEQ ID NO: 1963260 - RNA, 19 nt, Artificial Sequence
  Description of Artificial Sequence: Synthetic oligonucleotide
gggagcaugugcagggcca

SEQ ID NO: 1963261 - RNA, 19 nt, Artificial Sequence
  Description of Artificial Sequence: Synthetic oligonucleotide
guagcccguagcgccgggc

SEQ ID NO: 1963262 - RNA, 19 nt, Artificial Sequence
  Description of Artificial Sequence: Synthetic oligonucleotide
agcccgcaguuugcagugg

SEQ ID NO: 1963263 - RNA, 19 nt, Artificial Sequence
  Description of Artificial Sequence: Synthetic oligonucleotide
gggcugguaggcagcaggc

SEQ ID NO: 1963264 - RNA, 19 nt, Artificial Sequence
  Description of Artificial Sequence: Synthetic oligonucleotide
aggcgcuuaggugggcaga

SEQ ID NO: 1963265 - RNA, 19 nt, Artificial Sequence
  Description of Artificial Sequence: Synthetic oligonucleotide
ccggaggcgcuuagguggg

SEQ ID NO: 1963266 - RNA, 19 nt, Artificial Sequence
  Description of Artificial Sequence: Synthetic oligonucleotide
acgccgcuuugucucucga

SEQ ID NO: 1963267 - RNA, 19 nt, Artificial Sequence
  Description of Artificial Sequence: Synthetic oligonucleotide
cccaagucaguuccaccuc

SEQ ID NO: 1963268 - RNA, 19 nt, Artificial Sequence
  Description of Artificial Sequence: Synthetic oligonucleotide
gagacccauggggcagggc

SEQ ID NO: 1963269 - RNA, 19 nt, Artificial Sequence
  Description of Artificial Sequence: Synthetic oligonucleotide
ccuggguaccacccacccc

SEQ ID NO: 1963270 - RNA, 19 nt, Artificial Sequence
  Description of Artificial Sequence: Synthetic oligonucleotide
cuggggcuaggcggguaag

SEQ ID NO: 1963271 - RNA, 19 nt, Artificial Sequence
  Description of Artificial Sequence: Synthetic oligonucleotide
cuggggaggaagacuccua

SEQ ID NO: 1963272 - RNA, 19 nt, Artificial Sequence
  Description of Artificial Sequence: Synthetic oligonucleotide
cagcgggcucugcuggcug

SEQ ID NO: 1963273 - RNA, 19 nt, Artificial Sequence
  Description of Artificial Sequence: Synthetic oligonucleotide
gggagcaggcccgcggacc

SEQ ID NO: 1963274 - RNA, 19 nt, Artificial Sequence
  Description of Artificial Sequence: Synthetic oligonucleotide
ccccuaccaccccaguagc

SEQ ID NO: 1963275 - RNA, 19 nt, Artificial Sequence
  Description of Artificial Sequence: Synthetic oligonucleotide
ggggaacaucaaauggcca

SEQ ID NO: 1963276 - RNA, 19 nt, Artificial Sequence
  Description of Artificial Sequence: Synthetic oligonucleotide
acuuagcccggcggauccu

SEQ ID NO: 1963277 - RNA, 19 nt, Artificial Sequence
  Description of Artificial Sequence: Synthetic oligonucleotide
caggcagcgcagaacgggu

SEQ ID NO: 1963278 - RNA, 19 nt, Artificial Sequence
  Description of Artificial Sequence: Synthetic oligonucleotide
gagcagaauuguagagagu

SEQ ID NO: 1963279 - RNA, 19 nt, Artificial Sequence
  Description of Artificial Sequence: Synthetic oligonucleotide
gagucgccauggaguggcc

SEQ ID NO: 1963280 - RNA, 19 nt, Artificial Sequence
  Description of Artificial Sequence: Synthetic oligonucleotide
gggacggacucuggggcug

SEQ ID NO: 1963281 - RNA, 19 nt, Artificial Sequence
  Description of Artificial Sequence: Synthetic oligonucleotide
aggugggagcaggcccgcg

SEQ ID NO: 1963282 - RNA, 19 nt, Artificial Sequence
  Description of Artificial Sequence: Synthetic oligonucleotide
gcaccgugagaaagaugag

SEQ ID NO: 1963283 - RNA, 19 nt, Artificial Sequence
  Description of Artificial Sequence: Synthetic oligonucleotide
cuccccuaccaccccagua

SEQ ID NO: 1963284 - RNA, 19 nt, Artificial Sequence
  Description of Artificial Sequence: Synthetic oligonucleotide
ggacggacucuggggcugg

SEQ ID NO: 1963285 - RNA, 19 nt, Artificial Sequence
  Description of Artificial Sequence: Synthetic oligonucleotide
gaggcacccucuggagcca

SEQ ID NO: 1963286 - RNA, 19 nt, Artificial Sequence
  Description of Artificial Sequence: Synthetic oligonucleotide
ccccuggguaccacccacc

SEQ ID NO: 1963287 - RNA, 19 nt, Artificial Sequence
  Description of Artificial Sequence: Synthetic oligonucleotide
acccauggggcagggccaa

SEQ ID NO: 1963288 - RNA, 19 nt, Artificial Sequence
  Description of Artificial Sequence: Synthetic oligonucleotide
gucaagccacuccccuugu

SEQ ID NO: 1963289 - RNA, 19 nt, Artificial Sequence
  Description of Artificial Sequence: Synthetic oligonucleotide
ggagccacaggggcaagua

SEQ ID NO: 1963290 - RNA, 19 nt, Artificial Sequence
  Description of Artificial Sequence: Synthetic oligonucleotide
ccacuguugauguccagau

SEQ ID NO: 1963291 - RNA, 19 nt, Artificial Sequence
  Description of Artificial Sequence: Synthetic oligonucleotide
gggcccaguaccaguccug

SEQ ID NO: 1963292 - RNA, 19 nt, Artificial Sequence
  Description of Artificial Sequence: Synthetic oligonucleotide
ggcggcgcuuucggggacg

SEQ ID NO: 1963293 - RNA, 19 nt, Artificial Sequence
  Description of Artificial Sequence: Synthetic oligonucleotide
ggauggggaggggaacauc

SEQ ID NO: 1963294 - RNA, 19 nt, Artificial Sequence
  Description of Artificial Sequence: Synthetic oligonucleotide
ccugcuugguuggggcagc

SEQ ID NO: 1963295 - RNA, 19 nt, Artificial Sequence
  Description of Artificial Sequence: Synthetic oligonucleotide
ccccaucgguguaaggaga

SEQ ID NO: 1963296 - RNA, 19 nt, Artificial Sequence
  Description of Artificial Sequence: Synthetic oligonucleotide
caccccuuauggcuuugcu

SEQ ID NO: 1963297 - RNA, 19 nt, Artificial Sequence
  Description of Artificial Sequence: Synthetic oligonucleotide
ggcgcuuaggugggcagaa

SEQ ID NO: 1963298 - RNA, 19 nt, Artificial Sequence
  Description of Artificial Sequence: Synthetic oligonucleotide
gcgggucuuggggagcaug

SEQ ID NO: 1963299 - RNA, 19 nt, Artificial Sequence
  Description of Artificial Sequence: Synthetic oligonucleotide
ggcggauccuggggcggcg

SEQ ID NO: 1963300 - RNA, 19 nt, Artificial Sequence
  Description of Artificial Sequence: Synthetic oligonucleotide
caguagcaccagggauagc

SEQ ID NO: 1963301 - RNA, 19 nt, Artificial Sequence
  Description of Artificial Sequence: Synthetic oligonucleotide
gcagcgcagaacgggucac

SEQ ID NO: 1963302 - RNA, 19 nt, Artificial Sequence
  Description of Artificial Sequence: Synthetic oligonucleotide
cagcgggucuuggggagca

SEQ ID NO: 1963303 - RNA, 19 nt, Artificial Sequence
  Description of Artificial Sequence: Synthetic oligonucleotide
gcgcagaacgggucacgga

SEQ ID NO: 1963304 - RNA, 19 nt, Artificial Sequence
  Description of Artificial Sequence: Synthetic oligonucleotide
ccgcaguuugcagugggga

SEQ ID NO: 1963305 - RNA, 19 nt, Artificial Sequence
  Description of Artificial Sequence: Synthetic oligonucleotide
gggguggcuugggagggca

SEQ ID NO: 1963306 - RNA, 19 nt, Artificial Sequence
  Description of Artificial Sequence: Synthetic oligonucleotide
cccaucauggcucgccacu

SEQ ID NO: 1963307 - RNA, 19 nt, Artificial Sequence
  Description of Artificial Sequence: Synthetic oligonucleotide
gcggauccuggggcggcgg

SEQ ID NO: 1963308 - RNA, 19 nt, Artificial Sequence
  Description of Artificial Sequence: Synthetic oligonucleotide
gggccaaggaugugccccu

SEQ ID NO: 1963309 - RNA, 19 nt, Artificial Sequence
  Description of Artificial Sequence: Synthetic oligonucleotide
gccgggcccaguaccaguc

SEQ ID NO: 1963310 - RNA, 19 nt, Artificial Sequence
  Description of Artificial Sequence: Synthetic oligonucleotide
ccagcgggucuuggggagc

SEQ ID NO: 1963311 - RNA, 19 nt, Artificial Sequence
  Description of Artificial Sequence: Synthetic oligonucleotide
ggggacggacucuggggcu

SEQ ID NO: 1963312 - RNA, 19 nt, Artificial Sequence
  Description of Artificial Sequence: Synthetic oligonucleotide
ggguaccacccaccccauc

SEQ ID NO: 1963313 - RNA, 19 nt, Artificial Sequence
  Description of Artificial Sequence: Synthetic oligonucleotide
cgcuuucggggacggacuc

SEQ ID NO: 1963314 - RNA, 19 nt, Artificial Sequence
  Description of Artificial Sequence: Synthetic oligonucleotide
gcagaacgggucacggagu

SEQ ID NO: 1963315 - RNA, 19 nt, Artificial Sequence
  Description of Artificial Sequence: Synthetic oligonucleotide
ccaucgguguaaggagaca

SEQ ID NO: 1963316 - RNA, 19 nt, Artificial Sequence
  Description of Artificial Sequence: Synthetic oligonucleotide
ccggcggauccuggggcgg

SEQ ID NO: 1963317 - RNA, 19 nt, Artificial Sequence
  Description of Artificial Sequence: Synthetic oligonucleotide
cgacuuagcccggcggauc

SEQ ID NO: 1963318 - RNA, 19 nt, Artificial Sequence
  Description of Artificial Sequence: Synthetic oligonucleotide
gcccguagcgccgggccca

SEQ ID NO: 1963319 - RNA, 19 nt, Artificial Sequence
  Description of Artificial Sequence: Synthetic oligonucleotide
cagggcucccugcuugguu

SEQ ID NO: 1963320 - RNA, 19 nt, Artificial Sequence
  Description of Artificial Sequence: Synthetic oligonucleotide
ccccaguagcaccagggau

SEQ ID NO: 1963321 - RNA, 19 nt, Artificial Sequence
  Description of Artificial Sequence: Synthetic oligonucleotide
cggauccuggggcggcggc

SEQ ID NO: 1963322 - RNA, 19 nt, Artificial Sequence
  Description of Artificial Sequence: Synthetic oligonucleotide
ccucagcccgcaguuugca

SEQ ID NO: 1963323 - RNA, 19 nt, Artificial Sequence
  Description of Artificial Sequence: Synthetic oligonucleotide
cacuagccggaggcgcuua

SEQ ID NO: 1963324 - RNA, 19 nt, Artificial Sequence
  Description of Artificial Sequence: Synthetic oligonucleotide
gcgccgggcccaguaccag

SEQ ID NO: 1963325 - RNA, 19 nt, Artificial Sequence
  Description of Artificial Sequence: Synthetic oligonucleotide
gcuaggcggguaaggugua

SEQ ID NO: 1963326 - RNA, 19 nt, Artificial Sequence
  Description of Artificial Sequence: Synthetic oligonucleotide
gcgcuuucggggacggacu

SEQ ID NO: 1963327 - RNA, 19 nt, Artificial Sequence
  Description of Artificial Sequence: Synthetic oligonucleotide
ccuuauggcuuugcucccu

SEQ ID NO: 1963328 - RNA, 19 nt, Artificial Sequence
  Description of Artificial Sequence: Synthetic oligonucleotide
gggcagggccaaggaugug

SEQ ID NO: 1963329 - RNA, 19 nt, Artificial Sequence
  Description of Artificial Sequence: Synthetic oligonucleotide
cguagcgccgggcccagua

SEQ ID NO: 1963330 - RNA, 19 nt, Artificial Sequence
  Description of Artificial Sequence: Synthetic oligonucleotide
ccgcggacccagcgggcuc

SEQ ID NO: 1963331 - RNA, 19 nt, Artificial Sequence
  Description of Artificial Sequence: Synthetic oligonucleotide
cggagucgcaguggggaca

SEQ ID NO: 1963332 - RNA, 19 nt, Artificial Sequence
  Description of Artificial Sequence: Synthetic oligonucleotide
ccacagacgguagcccgua

SEQ ID NO: 1963333 - RNA, 19 nt, Artificial Sequence
  Description of Artificial Sequence: Synthetic oligonucleotide
ggccucccugagacccaug

SEQ ID NO: 1963334 - RNA, 19 nt, Artificial Sequence
  Description of Artificial Sequence: Synthetic oligonucleotide
gcgcuuaggugggcagaaa

SEQ ID NO: 1963335 - RNA, 19 nt, Artificial Sequence
  Description of Artificial Sequence: Synthetic oligonucleotide
gcccgcggacccagcgggc

SEQ ID NO: 1963336 - RNA, 19 nt, Artificial Sequence
  Description of Artificial Sequence: Synthetic oligonucleotide
cgccgcuuugucucucgaa

SEQ ID NO: 1963337 - RNA, 19 nt, Artificial Sequence
  Description of Artificial Sequence: Synthetic oligonucleotide
cccguagcgccgggcccag

SEQ ID NO: 1963338 - RNA, 19 nt, Artificial Sequence
  Description of Artificial Sequence: Synthetic oligonucleotide
gcggacccagcgggcucug

SEQ ID NO: 1963339 - RNA, 19 nt, Artificial Sequence
  Description of Artificial Sequence: Synthetic oligonucleotide
cgggcccaguaccaguccu

SEQ ID NO: 1963340 - RNA, 19 nt, Artificial Sequence
  Description of Artificial Sequence: Synthetic oligonucleotide
cggacccagcgggcucugc

SEQ ID NO: 1963341 - RNA, 19 nt, Artificial Sequence
  Description of Artificial Sequence: Synthetic oligonucleotide
cccgcggacccagcgggcu

SEQ ID NO: 1963342 - RNA, 19 nt, Artificial Sequence
  Description of Artificial Sequence: Synthetic oligonucleotide
ccacuagccggaggcgcuu

SEQ ID NO: 1963343 - RNA, 19 nt, Artificial Sequence
  Description of Artificial Sequence: Synthetic oligonucleotide
cgcggacccagcgggcucu

SEQ ID NO: 1963344 - RNA, 19 nt, Artificial Sequence
  Description of Artificial Sequence: Synthetic oligonucleotide
cggcgcuuucggggacgga

SEQ ID NO: 1963345 - RNA, 19 nt, Artificial Sequence
  Description of Artificial Sequence: Synthetic oligonucleotide
ccguagcgccgggcccagu

SEQ ID NO: 1963346 - RNA, 19 nt, Artificial Sequence
  Description of Artificial Sequence: Synthetic oligonucleotide
ucugcuaucaucuaguaug

SEQ ID NO: 1963347 - RNA, 19 nt, Artificial Sequence
  Description of Artificial Sequence: Synthetic oligonucleotide
uucauaauacuccugagcc

SEQ ID NO: 1963348 - RNA, 19 nt, Artificial Sequence
  Description of Artificial Sequence: Synthetic oligonucleotide
aagucuugcgaugagaucc

SEQ ID NO: 1963349 - RNA, 19 nt, Artificial Sequence
  Description of Artificial Sequence: Synthetic oligonucleotide
agcagaacaggacugaggc

SEQ ID NO: 1963350 - RNA, 19 nt, Artificial Sequence
  Description of Artificial Sequence: Synthetic oligonucleotide
caaggaauuaugcucaugc

SEQ ID NO: 1963351 - RNA, 19 nt, Artificial Sequence
  Description of Artificial Sequence: Synthetic oligonucleotide
ugucagugagagaagaugc

SEQ ID NO: 1963352 - RNA, 19 nt, Artificial Sequence
  Description of Artificial Sequence: Synthetic oligonucleotide
acagcaaugccgcuggccc

SEQ ID NO: 1963353 - RNA, 19 nt, Artificial Sequence
  Description of Artificial Sequence: Synthetic oligonucleotide
aucaucacuaugcagcguc

SEQ ID NO: 1963354 - RNA, 19 nt, Artificial Sequence
  Description of Artificial Sequence: Synthetic oligonucleotide
uucggcaacuccuauagcc

SEQ ID NO: 1963355 - RNA, 19 nt, Artificial Sequence
  Description of Artificial Sequence: Synthetic oligonucleotide
uaaccgguuacccucuugg

SEQ ID NO: 1963356 - RNA, 19 nt, Artificial Sequence
  Description of Artificial Sequence: Synthetic oligonucleotide
uauggagccuucaucauca

SEQ ID NO: 1963357 - RNA, 19 nt, Artificial Sequence
  Description of Artificial Sequence: Synthetic oligonucleotide
uaguauggagccuucauca

SEQ ID NO: 1963358 - RNA, 19 nt, Artificial Sequence
  Description of Artificial Sequence: Synthetic oligonucleotide
ucugucauugcccaugggu

SEQ ID NO: 1963359 - RNA, 19 nt, Artificial Sequence
  Description of Artificial Sequence: Synthetic oligonucleotide
agcgauuccacagcaaugc

SEQ ID NO: 1963360 - RNA, 19 nt, Artificial Sequence
  Description of Artificial Sequence: Synthetic oligonucleotide
acuccuauagccucggcag

SEQ ID NO: 1963361 - RNA, 19 nt, Artificial Sequence
  Description of Artificial Sequence: Synthetic oligonucleotide
agugagagaagaugccucg

SEQ ID NO: 1963362 - RNA, 19 nt, Artificial Sequence
  Description of Artificial Sequence: Synthetic oligonucleotide
aauguggaagaugaggggu

SEQ ID NO: 1963363 - RNA, 19 nt, Artificial Sequence
  Description of Artificial Sequence: Synthetic oligonucleotide
auugucgucguacuuguug

SEQ ID NO: 1963364 - RNA, 19 nt, Artificial Sequence
  Description of Artificial Sequence: Synthetic oligonucleotide
gauggucucccacacaggc

SEQ ID NO: 1963365 - RNA, 19 nt, Artificial Sequence
  Description of Artificial Sequence: Synthetic oligonucleotide
ucggguucugcuaucaucu

SEQ ID NO: 1963366 - RNA, 19 nt, Artificial Sequence
  Description of Artificial Sequence: Synthetic oligonucleotide
uguaucacacgcuuuugga

SEQ ID NO: 1963367 - RNA, 19 nt, Artificial Sequence
  Description of Artificial Sequence: Synthetic oligonucleotide
ucucuuucggcaacuuccg

SEQ ID NO: 1963368 - RNA, 19 nt, Artificial Sequence
  Description of Artificial Sequence: Synthetic oligonucleotide
gauuccacagcaaugccgc

SEQ ID NO: 1963369 - RNA, 19 nt, Artificial Sequence
  Description of Artificial Sequence: Synthetic oligonucleotide
uuuggaucccguccucucg

SEQ ID NO: 1963370 - RNA, 19 nt, Artificial Sequence
  Description of Artificial Sequence: Synthetic oligonucleotide
aacuccuauagccucggca

SEQ ID NO: 1963371 - RNA, 19 nt, Artificial Sequence
  Description of Artificial Sequence: Synthetic oligonucleotide
uccgaaaguggaauguggc

SEQ ID NO: 1963372 - RNA, 19 nt, Artificial Sequence
  Description of Artificial Sequence: Synthetic oligonucleotide
acgauggucucccacacag

SEQ ID NO: 1963373 - RNA, 19 nt, Artificial Sequence
  Description of Artificial Sequence: Synthetic oligonucleotide
agagaagaugccucggaag

SEQ ID NO: 1963374 - RNA, 19 nt, Artificial Sequence
  Description of Artificial Sequence: Synthetic oligonucleotide
acgcuuuuggaucccgucc

SEQ ID NO: 1963375 - RNA, 19 nt, Artificial Sequence
  Description of Artificial Sequence: Synthetic oligonucleotide
cauaguacuuggcagcagc

SEQ ID NO: 1963376 - RNA, 19 nt, Artificial Sequence
  Description of Artificial Sequence: Synthetic oligonucleotide
ucacgcauggugcacacga

SEQ ID NO: 1963377 - RNA, 19 nt, Artificial Sequence
  Description of Artificial Sequence: Synthetic oligonucleotide
cagcacuucauaauacucc

SEQ ID NO: 1963378 - RNA, 19 nt, Artificial Sequence
  Description of Artificial Sequence: Synthetic oligonucleotide
uucucugcuuaccacaggu

SEQ ID NO: 1963379 - RNA, 19 nt, Artificial Sequence
  Description of Artificial Sequence: Synthetic oligonucleotide
aucugagcgauuccacagc

SEQ ID NO: 1963380 - RNA, 19 nt, Artificial Sequence
  Description of Artificial Sequence: Synthetic oligonucleotide
aaggaauuaugcucaugca

SEQ ID NO: 1963381 - RNA, 19 nt, Artificial Sequence
  Description of Artificial Sequence: Synthetic oligonucleotide
uaugcagcguccgaaagug

SEQ ID NO: 1963382 - RNA, 19 nt, Artificial Sequence
  Description of Artificial Sequence: Synthetic oligonucleotide
gacccaaggaauuaugcuc

SEQ ID NO: 1963383 - RNA, 19 nt, Artificial Sequence
  Description of Artificial Sequence: Synthetic oligonucleotide
ucugcuuaccacaggugcc

SEQ ID NO: 1963384 - RNA, 19 nt, Artificial Sequence
  Description of Artificial Sequence: Synthetic oligonucleotide
acugccuuagcuuucuccu

SEQ ID NO: 1963385 - RNA, 19 nt, Artificial Sequence
  Description of Artificial Sequence: Synthetic oligonucleotide
gacuacaugcuugacauca

SEQ ID NO: 1963386 - RNA, 19 nt, Artificial Sequence
  Description of Artificial Sequence: Synthetic oligonucleotide
aggaauuaugcucaugcau

SEQ ID NO: 1963387 - RNA, 19 nt, Artificial Sequence
  Description of Artificial Sequence: Synthetic oligonucleotide
cucugcuuaccacaggugc

SEQ ID NO: 1963388 - RNA, 19 nt, Artificial Sequence
  Description of Artificial Sequence: Synthetic oligonucleotide
ucuuucggcaacuuccgga

SEQ ID NO: 1963389 - RNA, 19 nt, Artificial Sequence
  Description of Artificial Sequence: Synthetic oligonucleotide
gaugagauccgccauccuc

SEQ ID NO: 1963390 - RNA, 19 nt, Artificial Sequence
  Description of Artificial Sequence: Synthetic oligonucleotide
gcuaucaucuaguauggag

SEQ ID NO: 1963391 - RNA, 19 nt, Artificial Sequence
  Description of Artificial Sequence: Synthetic oligonucleotide
ugagcgauuccacagcaau

SEQ ID NO: 1963392 - RNA, 19 nt, Artificial Sequence
  Description of Artificial Sequence: Synthetic oligonucleotide
ucauaauacuccugagcca

SEQ ID NO: 1963393 - RNA, 19 nt, Artificial Sequence
  Description of Artificial Sequence: Synthetic oligonucleotide
gacauugucgucguacuug

SEQ ID NO: 1963394 - RNA, 19 nt, Artificial Sequence
  Description of Artificial Sequence: Synthetic oligonucleotide
gaagaugccucggaagcgg

SEQ ID NO: 1963395 - RNA, 19 nt, Artificial Sequence
  Description of Artificial Sequence: Synthetic oligonucleotide
ucggaagcgggcuuugucc

SEQ ID NO: 1963396 - RNA, 19 nt, Artificial Sequence
  Description of Artificial Sequence: Synthetic oligonucleotide
uugucgucguacuuguuga

SEQ ID NO: 1963397 - RNA, 19 nt, Artificial Sequence
  Description of Artificial Sequence: Synthetic oligonucleotide
ucugagcgauuccacagca

SEQ ID NO: 1963398 - RNA, 19 nt, Artificial Sequence
  Description of Artificial Sequence: Synthetic oligonucleotide
uuacacuggcaguaguuga

SEQ ID NO: 1963399 - RNA, 19 nt, Artificial Sequence
  Description of Artificial Sequence: Synthetic oligonucleotide
ucgucguacuuguugagga

SEQ ID NO: 1963400 - RNA, 19 nt, Artificial Sequence
  Description of Artificial Sequence: Synthetic oligonucleotide
cuguaucacacgcuuuugg

SEQ ID NO: 1963401 - RNA, 19 nt, Artificial Sequence
  Description of Artificial Sequence: Synthetic oligonucleotide
ucuaguauggagccuucau

SEQ ID NO: 1963402 - RNA, 19 nt, Artificial Sequence
  Description of Artificial Sequence: Synthetic oligonucleotide
cuuaccucgcuugaaguag

SEQ ID NO: 1963403 - RNA, 19 nt, Artificial Sequence
  Description of Artificial Sequence: Synthetic oligonucleotide
ucacagaggaacugggcga

SEQ ID NO: 1963404 - RNA, 19 nt, Artificial Sequence
  Description of Artificial Sequence: Synthetic oligonucleotide
gguauaaccgguuacccuc

SEQ ID NO: 1963405 - RNA, 19 nt, Artificial Sequence
  Description of Artificial Sequence: Synthetic oligonucleotide
cuuucggcaacuuccggac

SEQ ID NO: 1963406 - RNA, 19 nt, Artificial Sequence
  Description of Artificial Sequence: Synthetic oligonucleotide
caguaguugagcagcagug

SEQ ID NO: 1963407 - RNA, 19 nt, Artificial Sequence
  Description of Artificial Sequence: Synthetic oligonucleotide
auaguacuuggcagcagcc

SEQ ID NO: 1963408 - RNA, 19 nt, Artificial Sequence
  Description of Artificial Sequence: Synthetic oligonucleotide
acgguauaaccgguuaccc

SEQ ID NO: 1963409 - RNA, 19 nt, Artificial Sequence
  Description of Artificial Sequence: Synthetic oligonucleotide
uugacauugucgucguacu

SEQ ID NO: 1963410 - RNA, 19 nt, Artificial Sequence
  Description of Artificial Sequence: Synthetic oligonucleotide
uggucucccacacaggcaa

SEQ ID NO: 1963411 - RNA, 19 nt, Artificial Sequence
  Description of Artificial Sequence: Synthetic oligonucleotide
cugucauugcccauggguc

SEQ ID NO: 1963412 - RNA, 19 nt, Artificial Sequence
  Description of Artificial Sequence: Synthetic oligonucleotide
guugcggaggcucuuggcc

SEQ ID NO: 1963413 - RNA, 19 nt, Artificial Sequence
  Description of Artificial Sequence: Synthetic oligonucleotide
cuaguauggagccuucauc

SEQ ID NO: 1963414 - RNA, 19 nt, Artificial Sequence
  Description of Artificial Sequence: Synthetic oligonucleotide
ugccuuagcuuucuccuca

SEQ ID NO: 1963415 - RNA, 19 nt, Artificial Sequence
  Description of Artificial Sequence: Synthetic oligonucleotide
acuaugcagcguccgaaag

SEQ ID NO: 1963416 - RNA, 19 nt, Artificial Sequence
  Description of Artificial Sequence: Synthetic oligonucleotide
ucggcaacuccuauagccu

SEQ ID NO: 1963417 - RNA, 19 nt, Artificial Sequence
  Description of Artificial Sequence: Synthetic oligonucleotide
aaugccgcuggcccucaag

SEQ ID NO: 1963418 - RNA, 19 nt, Artificial Sequence
  Description of Artificial Sequence: Synthetic oligonucleotide
uccuguaucacacgcuuuu

SEQ ID NO: 1963419 - RNA, 19 nt, Artificial Sequence
  Description of Artificial Sequence: Synthetic oligonucleotide
cagcaugggccuuaccucg

SEQ ID NO: 1963420 - RNA, 19 nt, Artificial Sequence
  Description of Artificial Sequence: Synthetic oligonucleotide
agguucuugaggcaggcaa

SEQ ID NO: 1963421 - RNA, 19 nt, Artificial Sequence
  Description of Artificial Sequence: Synthetic oligonucleotide
cuugcgaugagauccgcca

SEQ ID NO: 1963422 - RNA, 19 nt, Artificial Sequence
  Description of Artificial Sequence: Synthetic oligonucleotide
cacacaggcaacuugaacu

SEQ ID NO: 1963423 - RNA, 19 nt, Artificial Sequence
  Description of Artificial Sequence: Synthetic oligonucleotide
ucuugcgaugagauccgcc

SEQ ID NO: 1963424 - RNA, 19 nt, Artificial Sequence
  Description of Artificial Sequence: Synthetic oligonucleotide
agcgauguugcggaggcuc

SEQ ID NO: 1963425 - RNA, 19 nt, Artificial Sequence
  Description of Artificial Sequence: Synthetic oligonucleotide
acauugucgucguacuugu

SEQ ID NO: 1963426 - RNA, 19 nt, Artificial Sequence
  Description of Artificial Sequence: Synthetic oligonucleotide
cuuacacuggcaguaguug

SEQ ID NO: 1963427 - RNA, 19 nt, Artificial Sequence
  Description of Artificial Sequence: Synthetic oligonucleotide
cucuugguggaugaguggc

SEQ ID NO: 1963428 - RNA, 19 nt, Artificial Sequence
  Description of Artificial Sequence: Synthetic oligonucleotide
ucaugcaucugagcgauuc

SEQ ID NO: 1963429 - RNA, 19 nt, Artificial Sequence
  Description of Artificial Sequence: Synthetic oligonucleotide
agaagaugccucggaagcg

SEQ ID NO: 1963430 - RNA, 19 nt, Artificial Sequence
  Description of Artificial Sequence: Synthetic oligonucleotide
aacuuccggacucgcucgg

SEQ ID NO: 1963431 - RNA, 19 nt, Artificial Sequence
  Description of Artificial Sequence: Synthetic oligonucleotide
ggaauuaugcucaugcauc

SEQ ID NO: 1963432 - RNA, 19 nt, Artificial Sequence
  Description of Artificial Sequence: Synthetic oligonucleotide
uguugcagggcguccaggu

SEQ ID NO: 1963433 - RNA, 19 nt, Artificial Sequence
  Description of Artificial Sequence: Synthetic oligonucleotide
cuugaggcaggcaauggca

SEQ ID NO: 1963434 - RNA, 19 nt, Artificial Sequence
  Description of Artificial Sequence: Synthetic oligonucleotide
caacuuccggacucgcucg

SEQ ID NO: 1963435 - RNA, 19 nt, Artificial Sequence
  Description of Artificial Sequence: Synthetic oligonucleotide
ucacgguauaaccgguuac

SEQ ID NO: 1963436 - RNA, 19 nt, Artificial Sequence
  Description of Artificial Sequence: Synthetic oligonucleotide
ugcucaugcaucugagcga

SEQ ID NO: 1963437 - RNA, 19 nt, Artificial Sequence
  Description of Artificial Sequence: Synthetic oligonucleotide
gaauuaugcucaugcaucu

SEQ ID NO: 1963438 - RNA, 19 nt, Artificial Sequence
  Description of Artificial Sequence: Synthetic oligonucleotide
uucggcaacuuccggacuc

SEQ ID NO: 1963439 - RNA, 19 nt, Artificial Sequence
  Description of Artificial Sequence: Synthetic oligonucleotide
caucacagaggaacugggc

SEQ ID NO: 1963440 - RNA, 19 nt, Artificial Sequence
  Description of Artificial Sequence: Synthetic oligonucleotide
caugacccaaggaauuaug

SEQ ID NO: 1963441 - RNA, 19 nt, Artificial Sequence
  Description of Artificial Sequence: Synthetic oligonucleotide
accgguuacccucuuggug

SEQ ID NO: 1963442 - RNA, 19 nt, Artificial Sequence
  Description of Artificial Sequence: Synthetic oligonucleotide
ucaucuaguauggagccuu

SEQ ID NO: 1963443 - RNA, 19 nt, Artificial Sequence
  Description of Artificial Sequence: Synthetic oligonucleotide
ugccccucacgguauaacc

SEQ ID NO: 1963444 - RNA, 19 nt, Artificial Sequence
  Description of Artificial Sequence: Synthetic oligonucleotide
cacgguauaaccgguuacc

SEQ ID NO: 1963445 - RNA, 19 nt, Artificial Sequence
  Description of Artificial Sequence: Synthetic oligonucleotide
ucucugcuuaccacaggug

SEQ ID NO: 1963446 - RNA, 19 nt, Artificial Sequence
  Description of Artificial Sequence: Synthetic oligonucleotide
acacuggcaguaguugagc

SEQ ID NO: 1963447 - RNA, 19 nt, Artificial Sequence
  Description of Artificial Sequence: Synthetic oligonucleotide
ccgguuacccucuuggugg

SEQ ID NO: 1963448 - RNA, 19 nt, Artificial Sequence
  Description of Artificial Sequence: Synthetic oligonucleotide
ugguggaugaguggcacug

SEQ ID NO: 1963449 - RNA, 19 nt, Artificial Sequence
  Description of Artificial Sequence: Synthetic oligonucleotide
caucugucauugcccaugg

SEQ ID NO: 1963450 - RNA, 19 nt, Artificial Sequence
  Description of Artificial Sequence: Synthetic oligonucleotide
aggcaacucuccucugccc

SEQ ID NO: 1963451 - RNA, 19 nt, Artificial Sequence
  Description of Artificial Sequence: Synthetic oligonucleotide
uggaagaugagggguugag

SEQ ID NO: 1963452 - RNA, 19 nt, Artificial Sequence
  Description of Artificial Sequence: Synthetic oligonucleotide
augcuugacaucacagagg

SEQ ID NO: 1963453 - RNA, 19 nt, Artificial Sequence
  Description of Artificial Sequence: Synthetic oligonucleotide
uguggccuuagugccaucc

SEQ ID NO: 1963454 - RNA, 19 nt, Artificial Sequence
  Description of Artificial Sequence: Synthetic oligonucleotide
uggccuuagugccauccug

SEQ ID NO: 1963455 - RNA, 19 nt, Artificial Sequence
  Description of Artificial Sequence: Synthetic oligonucleotide
uuacccucuugguggauga

SEQ ID NO: 1963456 - RNA, 19 nt, Artificial Sequence
  Description of Artificial Sequence: Synthetic oligonucleotide
uaauacuccugagccacca

SEQ ID NO: 1963457 - RNA, 19 nt, Artificial Sequence
  Description of Artificial Sequence: Synthetic oligonucleotide
uuggcaaagucagccuggg

SEQ ID NO: 1963458 - RNA, 19 nt, Artificial Sequence
  Description of Artificial Sequence: Synthetic oligonucleotide
aggaacugggcgaucuccc

SEQ ID NO: 1963459 - RNA, 19 nt, Artificial Sequence
  Description of Artificial Sequence: Synthetic oligonucleotide
uauagccucggcagcuucu

SEQ ID NO: 1963460 - RNA, 19 nt, Artificial Sequence
  Description of Artificial Sequence: Synthetic oligonucleotide
ugauaugugccagggcucu

SEQ ID NO: 1963461 - RNA, 19 nt, Artificial Sequence
  Description of Artificial Sequence: Synthetic oligonucleotide
ucucgaagucuugcgauga

SEQ ID NO: 1963462 - RNA, 19 nt, Artificial Sequence
  Description of Artificial Sequence: Synthetic oligonucleotide
aguggcacugccuuagcuu

SEQ ID NO: 1963463 - RNA, 19 nt, Artificial Sequence
  Description of Artificial Sequence: Synthetic oligonucleotide
uuuuggaucccguccucuc

SEQ ID NO: 1963464 - RNA, 19 nt, Artificial Sequence
  Description of Artificial Sequence: Synthetic oligonucleotide
auacaggacuacaugcuug

SEQ ID NO: 1963465 - RNA, 19 nt, Artificial Sequence
  Description of Artificial Sequence: Synthetic oligonucleotide
ugaccugccccucacggua

SEQ ID NO: 1963466 - RNA, 19 nt, Artificial Sequence
  Description of Artificial Sequence: Synthetic oligonucleotide
gaagucuugcgaugagauc

SEQ ID NO: 1963467 - RNA, 19 nt, Artificial Sequence
  Description of Artificial Sequence: Synthetic oligonucleotide
auaauacuccugagccacc

SEQ ID NO: 1963468 - RNA, 19 nt, Artificial Sequence
  Description of Artificial Sequence: Synthetic oligonucleotide
ggcaauggcaucauaguac

SEQ ID NO: 1963469 - RNA, 19 nt, Artificial Sequence
  Description of Artificial Sequence: Synthetic oligonucleotide
acacaggcaacuugaacuu

SEQ ID NO: 1963470 - RNA, 19 nt, Artificial Sequence
  Description of Artificial Sequence: Synthetic oligonucleotide
ugcgaugagauccgccauc

SEQ ID NO: 1963471 - RNA, 19 nt, Artificial Sequence
  Description of Artificial Sequence: Synthetic oligonucleotide
aucccguccucucgaaguc

SEQ ID NO: 1963472 - RNA, 19 nt, Artificial Sequence
  Description of Artificial Sequence: Synthetic oligonucleotide
guauggagccuucaucauc

SEQ ID NO: 1963473 - RNA, 19 nt, Artificial Sequence
  Description of Artificial Sequence: Synthetic oligonucleotide
uuccggacucgcucgguag

SEQ ID NO: 1963474 - RNA, 19 nt, Artificial Sequence
  Description of Artificial Sequence: Synthetic oligonucleotide
ugacaucacagaggaacug

SEQ ID NO: 1963475 - RNA, 19 nt, Artificial Sequence
  Description of Artificial Sequence: Synthetic oligonucleotide
aaccgguuacccucuuggu

SEQ ID NO: 1963476 - RNA, 19 nt, Artificial Sequence
  Description of Artificial Sequence: Synthetic oligonucleotide
caggcaacucuccucugcc

SEQ ID NO: 1963477 - RNA, 19 nt, Artificial Sequence
  Description of Artificial Sequence: Synthetic oligonucleotide
guccucucgaagucuugcg

SEQ ID NO: 1963478 - RNA, 19 nt, Artificial Sequence
  Description of Artificial Sequence: Synthetic oligonucleotide
caugcaucugagcgauucc

SEQ ID NO: 1963479 - RNA, 19 nt, Artificial Sequence
  Description of Artificial Sequence: Synthetic oligonucleotide
ugcugauaugugccagggc

SEQ ID NO: 1963480 - RNA, 19 nt, Artificial Sequence
  Description of Artificial Sequence: Synthetic oligonucleotide
gucgucguacuuguugagg

SEQ ID NO: 1963481 - RNA, 19 nt, Artificial Sequence
  Description of Artificial Sequence: Synthetic oligonucleotide
cucggguucugcuaucauc

SEQ ID NO: 1963482 - RNA, 19 nt, Artificial Sequence
  Description of Artificial Sequence: Synthetic oligonucleotide
gauccagucaggugaccca

SEQ ID NO: 1963483 - RNA, 19 nt, Artificial Sequence
  Description of Artificial Sequence: Synthetic oligonucleotide
aucacuaugcagcguccga

SEQ ID NO: 1963484 - RNA, 19 nt, Artificial Sequence
  Description of Artificial Sequence: Synthetic oligonucleotide
augggccuuaccucgcuug

SEQ ID NO: 1963485 - RNA, 19 nt, Artificial Sequence
  Description of Artificial Sequence: Synthetic oligonucleotide
aguggaauguggccuuagu

SEQ ID NO: 1963486 - RNA, 19 nt, Artificial Sequence
  Description of Artificial Sequence: Synthetic oligonucleotide
agaggaacugggcgaucuc

SEQ ID NO: 1963487 - RNA, 19 nt, Artificial Sequence
  Description of Artificial Sequence: Synthetic oligonucleotide
auaaccgguuacccucuug

SEQ ID NO: 1963488 - RNA, 19 nt, Artificial Sequence
  Description of Artificial Sequence: Synthetic oligonucleotide
aagaugccucggaagcggg

SEQ ID NO: 1963489 - RNA, 19 nt, Artificial Sequence
  Description of Artificial Sequence: Synthetic oligonucleotide
acuacaugcuugacaucac

SEQ ID NO: 1963490 - RNA, 19 nt, Artificial Sequence
  Description of Artificial Sequence: Synthetic oligonucleotide
acgcauggugcacacgaug

SEQ ID NO: 1963491 - RNA, 19 nt, Artificial Sequence
  Description of Artificial Sequence: Synthetic oligonucleotide
ggggauacaggacuacaug

SEQ ID NO: 1963492 - RNA, 19 nt, Artificial Sequence
  Description of Artificial Sequence: Synthetic oligonucleotide
cugcugauaugugccaggg

SEQ ID NO: 1963493 - RNA, 19 nt, Artificial Sequence
  Description of Artificial Sequence: Synthetic oligonucleotide
aguauggagccuucaucau

SEQ ID NO: 1963494 - RNA, 19 nt, Artificial Sequence
  Description of Artificial Sequence: Synthetic oligonucleotide
cucucgaagucuugcgaug

SEQ ID NO: 1963495 - RNA, 19 nt, Artificial Sequence
  Description of Artificial Sequence: Synthetic oligonucleotide
gucagugagagaagaugcc

SEQ ID NO: 1963496 - RNA, 19 nt, Artificial Sequence
  Description of Artificial Sequence: Synthetic oligonucleotide
uaugugccagggcucucca

SEQ ID NO: 1963497 - RNA, 19 nt, Artificial Sequence
  Description of Artificial Sequence: Synthetic oligonucleotide
agucuugcgaugagauccg

SEQ ID NO: 1963498 - RNA, 19 nt, Artificial Sequence
  Description of Artificial Sequence: Synthetic oligonucleotide
gaagcgggcuuuguccucc

SEQ ID NO: 1963499 - RNA, 19 nt, Artificial Sequence
  Description of Artificial Sequence: Synthetic oligonucleotide
ugggcgaucuccccuucac

SEQ ID NO: 1963500 - RNA, 19 nt, Artificial Sequence
  Description of Artificial Sequence: Synthetic oligonucleotide
aaguggaauguggccuuag

SEQ ID NO: 1963501 - RNA, 19 nt, Artificial Sequence
  Description of Artificial Sequence: Synthetic oligonucleotide
uccuauagccucggcagcu

SEQ ID NO: 1963502 - RNA, 19 nt, Artificial Sequence
  Description of Artificial Sequence: Synthetic oligonucleotide
agcguccgaaaguggaaug

SEQ ID NO: 1963503 - RNA, 19 nt, Artificial Sequence
  Description of Artificial Sequence: Synthetic oligonucleotide
ucacuaugcagcguccgaa

SEQ ID NO: 1963504 - RNA, 19 nt, Artificial Sequence
  Description of Artificial Sequence: Synthetic oligonucleotide
aggcaacuugaacuucuug

SEQ ID NO: 1963505 - RNA, 19 nt, Artificial Sequence
  Description of Artificial Sequence: Synthetic oligonucleotide
accucgcuugaaguaggcc

SEQ ID NO: 1963506 - RNA, 19 nt, Artificial Sequence
  Description of Artificial Sequence: Synthetic oligonucleotide
auggguccugcugauaugu

SEQ ID NO: 1963507 - RNA, 19 nt, Artificial Sequence
  Description of Artificial Sequence: Synthetic oligonucleotide
uccugcugauaugugccag

SEQ ID NO: 1963508 - RNA, 19 nt, Artificial Sequence
  Description of Artificial Sequence: Synthetic oligonucleotide
cuugguggaugaguggcac

SEQ ID NO: 1963509 - RNA, 19 nt, Artificial Sequence
  Description of Artificial Sequence: Synthetic oligonucleotide
gaucccguccucucgaagu

SEQ ID NO: 1963510 - RNA, 19 nt, Artificial Sequence
  Description of Artificial Sequence: Synthetic oligonucleotide
ugggccuuaccucgcuuga

SEQ ID NO: 1963511 - RNA, 19 nt, Artificial Sequence
  Description of Artificial Sequence: Synthetic oligonucleotide
aucuccccuucacgcaugg

SEQ ID NO: 1963512 - RNA, 19 nt, Artificial Sequence
  Description of Artificial Sequence: Synthetic oligonucleotide
cacacgauggucucccaca

SEQ ID NO: 1963513 - RNA, 19 nt, Artificial Sequence
  Description of Artificial Sequence: Synthetic oligonucleotide
ucggcaacuuccggacucg

SEQ ID NO: 1963514 - RNA, 19 nt, Artificial Sequence
  Description of Artificial Sequence: Synthetic oligonucleotide
cagggucuagcuccaacac

SEQ ID NO: 1963515 - RNA, 19 nt, Artificial Sequence
  Description of Artificial Sequence: Synthetic oligonucleotide
caggacuacaugcuugaca

SEQ ID NO: 1963516 - RNA, 19 nt, Artificial Sequence
  Description of Artificial Sequence: Synthetic oligonucleotide
gagcgauuccacagcaaug

SEQ ID NO: 1963517 - RNA, 19 nt, Artificial Sequence
  Description of Artificial Sequence: Synthetic oligonucleotide
gugagagaagaugccucgg

SEQ ID NO: 1963518 - RNA, 19 nt, Artificial Sequence
  Description of Artificial Sequence: Synthetic oligonucleotide
uaccucgcuugaaguaggc

SEQ ID NO: 1963519 - RNA, 19 nt, Artificial Sequence
  Description of Artificial Sequence: Synthetic oligonucleotide
auccgccauccucuuuccc

SEQ ID NO: 1963520 - RNA, 19 nt, Artificial Sequence
  Description of Artificial Sequence: Synthetic oligonucleotide
gguccugcugauaugugcc

SEQ ID NO: 1963521 - RNA, 19 nt, Artificial Sequence
  Description of Artificial Sequence: Synthetic oligonucleotide
ugacauugucgucguacuu

SEQ ID NO: 1963522 - RNA, 19 nt, Artificial Sequence
  Description of Artificial Sequence: Synthetic oligonucleotide
ugaguggcacugccuuagc

SEQ ID NO: 1963523 - RNA, 19 nt, Artificial Sequence
  Description of Artificial Sequence: Synthetic oligonucleotide
augcaucugagcgauucca

SEQ ID NO: 1963524 - RNA, 19 nt, Artificial Sequence
  Description of Artificial Sequence: Synthetic oligonucleotide
guuacccucuugguggaug

SEQ ID NO: 1963525 - RNA, 19 nt, Artificial Sequence
  Description of Artificial Sequence: Synthetic oligonucleotide
cacgcuuuuggaucccguc

SEQ ID NO: 1963526 - RNA, 19 nt, Artificial Sequence
  Description of Artificial Sequence: Synthetic oligonucleotide
ggagccuucaucaucacua

SEQ ID NO: 1963527 - RNA, 19 nt, Artificial Sequence
  Description of Artificial Sequence: Synthetic oligonucleotide
uuucggcaacuuccggacu

SEQ ID NO: 1963528 - RNA, 19 nt, Artificial Sequence
  Description of Artificial Sequence: Synthetic oligonucleotide
cucuuucggcaacuuccgg

SEQ ID NO: 1963529 - RNA, 19 nt, Artificial Sequence
  Description of Artificial Sequence: Synthetic oligonucleotide
cuccuauagccucggcagc

SEQ ID NO: 1963530 - RNA, 19 nt, Artificial Sequence
  Description of Artificial Sequence: Synthetic oligonucleotide
ugaggcaggcaauggcauc

SEQ ID NO: 1963531 - RNA, 19 nt, Artificial Sequence
  Description of Artificial Sequence: Synthetic oligonucleotide
agcuuacacuggcaguagu

SEQ ID NO: 1963532 - RNA, 19 nt, Artificial Sequence
  Description of Artificial Sequence: Synthetic oligonucleotide
cugcagguucuugaggcag

SEQ ID NO: 1963533 - RNA, 19 nt, Artificial Sequence
  Description of Artificial Sequence: Synthetic oligonucleotide
gcaacuuccggacucgcuc

SEQ ID NO: 1963534 - RNA, 19 nt, Artificial Sequence
  Description of Artificial Sequence: Synthetic oligonucleotide
ugcccuccuguaucacacg

SEQ ID NO: 1963535 - RNA, 19 nt, Artificial Sequence
  Description of Artificial Sequence: Synthetic oligonucleotide
guaguugagcagcaguggu

SEQ ID NO: 1963536 - RNA, 19 nt, Artificial Sequence
  Description of Artificial Sequence: Synthetic oligonucleotide
ugcaugacccaaggaauua

SEQ ID NO: 1963537 - RNA, 19 nt, Artificial Sequence
  Description of Artificial Sequence: Synthetic oligonucleotide
cgauuccacagcaaugccg

SEQ ID NO: 1963538 - RNA, 19 nt, Artificial Sequence
  Description of Artificial Sequence: Synthetic oligonucleotide
ccgaaaguggaauguggcc

SEQ ID NO: 1963539 - RNA, 19 nt, Artificial Sequence
  Description of Artificial Sequence: Synthetic oligonucleotide
acaccuuggcaaagucagc

SEQ ID NO: 1963540 - RNA, 19 nt, Artificial Sequence
  Description of Artificial Sequence: Synthetic oligonucleotide
aucugucauugcccauggg

SEQ ID NO: 1963541 - RNA, 19 nt, Artificial Sequence
  Description of Artificial Sequence: Synthetic oligonucleotide
uugcgaugagauccgccau

SEQ ID NO: 1963542 - RNA, 19 nt, Artificial Sequence
  Description of Artificial Sequence: Synthetic oligonucleotide
gguccaacuggauccaguc

SEQ ID NO: 1963543 - RNA, 19 nt, Artificial Sequence
  Description of Artificial Sequence: Synthetic oligonucleotide
ucgcucgguagcuuccgga

SEQ ID NO: 1963544 - RNA, 19 nt, Artificial Sequence
  Description of Artificial Sequence: Synthetic oligonucleotide
cucgaagucuugcgaugag

SEQ ID NO: 1963545 - RNA, 19 nt, Artificial Sequence
  Description of Artificial Sequence: Synthetic oligonucleotide
ggccuuaccucgcuugaag

SEQ ID NO: 1963546 - RNA, 19 nt, Artificial Sequence
  Description of Artificial Sequence: Synthetic oligonucleotide
ugcuucggcaacuccuaua

SEQ ID NO: 1963547 - RNA, 19 nt, Artificial Sequence
  Description of Artificial Sequence: Synthetic oligonucleotide
agcaugggccuuaccucgc

SEQ ID NO: 1963548 - RNA, 19 nt, Artificial Sequence
  Description of Artificial Sequence: Synthetic oligonucleotide
uccccgcugcucucuuucg

SEQ ID NO: 1963549 - RNA, 19 nt, Artificial Sequence
  Description of Artificial Sequence: Synthetic oligonucleotide
ggauccagucaggugaccc

SEQ ID NO: 1963550 - RNA, 19 nt, Artificial Sequence
  Description of Artificial Sequence: Synthetic oligonucleotide
gccgcuggcccucaagggg

SEQ ID NO: 1963551 - RNA, 19 nt, Artificial Sequence
  Description of Artificial Sequence: Synthetic oligonucleotide
cuucggcaacuccuauagc

SEQ ID NO: 1963552 - RNA, 19 nt, Artificial Sequence
  Description of Artificial Sequence: Synthetic oligonucleotide
caucuaguauggagccuuc

SEQ ID NO: 1963553 - RNA, 19 nt, Artificial Sequence
  Description of Artificial Sequence: Synthetic oligonucleotide
ccccucacgguauaaccgg

SEQ ID NO: 1963554 - RNA, 19 nt, Artificial Sequence
  Description of Artificial Sequence: Synthetic oligonucleotide
ucugccggauccgugucuc

SEQ ID NO: 1963555 - RNA, 19 nt, Artificial Sequence
  Description of Artificial Sequence: Synthetic oligonucleotide
aucaucuaguauggagccu

SEQ ID NO: 1963556 - RNA, 19 nt, Artificial Sequence
  Description of Artificial Sequence: Synthetic oligonucleotide
ugcuaucaucuaguaugga

SEQ ID NO: 1963557 - RNA, 19 nt, Artificial Sequence
  Description of Artificial Sequence: Synthetic oligonucleotide
gaugaguggcacugccuua

SEQ ID NO: 1963558 - RNA, 19 nt, Artificial Sequence
  Description of Artificial Sequence: Synthetic oligonucleotide
ugcuuaccacaggugccag

SEQ ID NO: 1963559 - RNA, 19 nt, Artificial Sequence
  Description of Artificial Sequence: Synthetic oligonucleotide
cccucuugguggaugagug

SEQ ID NO: 1963560 - RNA, 19 nt, Artificial Sequence
  Description of Artificial Sequence: Synthetic oligonucleotide
ugaggcccugucagugaga

SEQ ID NO: 1963561 - RNA, 19 nt, Artificial Sequence
  Description of Artificial Sequence: Synthetic oligonucleotide
cacuggcaguaguugagca

SEQ ID NO: 1963562 - RNA, 19 nt, Artificial Sequence
  Description of Artificial Sequence: Synthetic oligonucleotide
acucgcucgguagcuuccg

SEQ ID NO: 1963563 - RNA, 19 nt, Artificial Sequence
  Description of Artificial Sequence: Synthetic oligonucleotide
gacucgcucgguagcuucc

SEQ ID NO: 1963564 - RNA, 19 nt, Artificial Sequence
  Description of Artificial Sequence: Synthetic oligonucleotide
guccaacuggauccaguca

SEQ ID NO: 1963565 - RNA, 19 nt, Artificial Sequence
  Description of Artificial Sequence: Synthetic oligonucleotide
aggggauacaggacuacau

SEQ ID NO: 1963566 - RNA, 19 nt, Artificial Sequence
  Description of Artificial Sequence: Synthetic oligonucleotide
aaaguggaauguggccuua

SEQ ID NO: 1963567 - RNA, 19 nt, Artificial Sequence
  Description of Artificial Sequence: Synthetic oligonucleotide
cuuuccucggguucugcua

SEQ ID NO: 1963568 - RNA, 19 nt, Artificial Sequence
  Description of Artificial Sequence: Synthetic oligonucleotide
ugccggauccgugucucca

SEQ ID NO: 1963569 - RNA, 19 nt, Artificial Sequence
  Description of Artificial Sequence: Synthetic oligonucleotide
uauaaccgguuacccucuu

SEQ ID NO: 1963570 - RNA, 19 nt, Artificial Sequence
  Description of Artificial Sequence: Synthetic oligonucleotide
gcaguggugugaucugcag

SEQ ID NO: 1963571 - RNA, 19 nt, Artificial Sequence
  Description of Artificial Sequence: Synthetic oligonucleotide
ucuuuccccgcugcucucu

SEQ ID NO: 1963572 - RNA, 19 nt, Artificial Sequence
  Description of Artificial Sequence: Synthetic oligonucleotide
uccggaccugcuucggcaa

SEQ ID NO: 1963573 - RNA, 19 nt, Artificial Sequence
  Description of Artificial Sequence: Synthetic oligonucleotide
aucuaguauggagccuuca

SEQ ID NO: 1963574 - RNA, 19 nt, Artificial Sequence
  Description of Artificial Sequence: Synthetic oligonucleotide
guucugcuaucaucuagua

SEQ ID NO: 1963575 - RNA, 19 nt, Artificial Sequence
  Description of Artificial Sequence: Synthetic oligonucleotide
cacacgcuuuuggaucccg

SEQ ID NO: 1963576 - RNA, 19 nt, Artificial Sequence
  Description of Artificial Sequence: Synthetic oligonucleotide
agggcguccaggucugcau

SEQ ID NO: 1963577 - RNA, 19 nt, Artificial Sequence
  Description of Artificial Sequence: Synthetic oligonucleotide
cucgcucgguagcuuccgg

SEQ ID NO: 1963578 - RNA, 19 nt, Artificial Sequence
  Description of Artificial Sequence: Synthetic oligonucleotide
cucacgguauaaccgguua

SEQ ID NO: 1963579 - RNA, 19 nt, Artificial Sequence
  Description of Artificial Sequence: Synthetic oligonucleotide
gccccucacgguauaaccg

SEQ ID NO: 1963580 - RNA, 19 nt, Artificial Sequence
  Description of Artificial Sequence: Synthetic oligonucleotide
acccucuugguggaugagu

SEQ ID NO: 1963581 - RNA, 19 nt, Artificial Sequence
  Description of Artificial Sequence: Synthetic oligonucleotide
guugcagggcguccagguc

SEQ ID NO: 1963582 - RNA, 19 nt, Artificial Sequence
  Description of Artificial Sequence: Synthetic oligonucleotide
cugcuuaccacaggugcca

SEQ ID NO: 1963583 - RNA, 19 nt, Artificial Sequence
  Description of Artificial Sequence: Synthetic oligonucleotide
cacuaugcagcguccgaaa

SEQ ID NO: 1963584 - RNA, 19 nt, Artificial Sequence
  Description of Artificial Sequence: Synthetic oligonucleotide
ccucuugguggaugagugg

SEQ ID NO: 1963585 - RNA, 19 nt, Artificial Sequence
  Description of Artificial Sequence: Synthetic oligonucleotide
gcgaugagauccgccaucc

SEQ ID NO: 1963586 - RNA, 19 nt, Artificial Sequence
  Description of Artificial Sequence: Synthetic oligonucleotide
cuucugccggauccguguc

SEQ ID NO: 1963587 - RNA, 19 nt, Artificial Sequence
  Description of Artificial Sequence: Synthetic oligonucleotide
ucacacgcuuuuggauccc

SEQ ID NO: 1963588 - RNA, 19 nt, Artificial Sequence
  Description of Artificial Sequence: Synthetic oligonucleotide
guccugcugauaugugcca

SEQ ID NO: 1963589 - RNA, 19 nt, Artificial Sequence
  Description of Artificial Sequence: Synthetic oligonucleotide
gcagugguccagcacuuca

SEQ ID NO: 1963590 - RNA, 19 nt, Artificial Sequence
  Description of Artificial Sequence: Synthetic oligonucleotide
uacccucuugguggaugag

SEQ ID NO: 1963591 - RNA, 19 nt, Artificial Sequence
  Description of Artificial Sequence: Synthetic oligonucleotide
cucgguagcuuccggaccu

SEQ ID NO: 1963592 - RNA, 19 nt, Artificial Sequence
  Description of Artificial Sequence: Synthetic oligonucleotide
ugcacacgauggucuccca

SEQ ID NO: 1963593 - RNA, 19 nt, Artificial Sequence
  Description of Artificial Sequence: Synthetic oligonucleotide
gcgauuccacagcaaugcc

SEQ ID NO: 1963594 - RNA, 19 nt, Artificial Sequence
  Description of Artificial Sequence: Synthetic oligonucleotide
ugagggguugaggguucug

SEQ ID NO: 1963595 - RNA, 19 nt, Artificial Sequence
  Description of Artificial Sequence: Synthetic oligonucleotide
uggaucccguccucucgaa

SEQ ID NO: 1963596 - RNA, 19 nt, Artificial Sequence
  Description of Artificial Sequence: Synthetic oligonucleotide
gucaggcaacucuccucug

SEQ ID NO: 1963597 - RNA, 19 nt, Artificial Sequence
  Description of Artificial Sequence: Synthetic oligonucleotide
gcaguaguugagcagcagu

SEQ ID NO: 1963598 - RNA, 19 nt, Artificial Sequence
  Description of Artificial Sequence: Synthetic oligonucleotide
caacuccuauagccucggc

SEQ ID NO: 1963599 - RNA, 19 nt, Artificial Sequence
  Description of Artificial Sequence: Synthetic oligonucleotide
cacaggcaacuugaacuuc

SEQ ID NO: 1963600 - RNA, 19 nt, Artificial Sequence
  Description of Artificial Sequence: Synthetic oligonucleotide
ggauacaggacuacaugcu

SEQ ID NO: 1963601 - RNA, 19 nt, Artificial Sequence
  Description of Artificial Sequence: Synthetic oligonucleotide
ggaucccguccucucgaag

SEQ ID NO: 1963602 - RNA, 19 nt, Artificial Sequence
  Description of Artificial Sequence: Synthetic oligonucleotide
gccucggcagcuucugagc

SEQ ID NO: 1963603 - RNA, 19 nt, Artificial Sequence
  Description of Artificial Sequence: Synthetic oligonucleotide
gagggguugaggguucugu

SEQ ID NO: 1963604 - RNA, 19 nt, Artificial Sequence
  Description of Artificial Sequence: Synthetic oligonucleotide
gcccucagcgauguugcgg

SEQ ID NO: 1963605 - RNA, 19 nt, Artificial Sequence
  Description of Artificial Sequence: Synthetic oligonucleotide
agcuucugagcaagcgcca

SEQ ID NO: 1963606 - RNA, 19 nt, Artificial Sequence
  Description of Artificial Sequence: Synthetic oligonucleotide
ucccguccucucgaagucu

SEQ ID NO: 1963607 - RNA, 19 nt, Artificial Sequence
  Description of Artificial Sequence: Synthetic oligonucleotide
ggacucgcucgguagcuuc

SEQ ID NO: 1963608 - RNA, 19 nt, Artificial Sequence
  Description of Artificial Sequence: Synthetic oligonucleotide
ggcaguaguugagcagcag

SEQ ID NO: 1963609 - RNA, 19 nt, Artificial Sequence
  Description of Artificial Sequence: Synthetic oligonucleotide
ggaugaguggcacugccuu

SEQ ID NO: 1963610 - RNA, 19 nt, Artificial Sequence
  Description of Artificial Sequence: Synthetic oligonucleotide
guauaaccgguuacccucu

SEQ ID NO: 1963611 - RNA, 19 nt, Artificial Sequence
  Description of Artificial Sequence: Synthetic oligonucleotide
gcacacgauggucucccac

SEQ ID NO: 1963612 - RNA, 19 nt, Artificial Sequence
  Description of Artificial Sequence: Synthetic oligonucleotide
auccuucugccggauccgu

SEQ ID NO: 1963613 - RNA, 19 nt, Artificial Sequence
  Description of Artificial Sequence: Synthetic oligonucleotide
cugagcgauuccacagcaa

SEQ ID NO: 1963614 - RNA, 19 nt, Artificial Sequence
  Description of Artificial Sequence: Synthetic oligonucleotide
gguccuugcccucagcgau

SEQ ID NO: 1963615 - RNA, 19 nt, Artificial Sequence
  Description of Artificial Sequence: Synthetic oligonucleotide
gucuugcgaugagauccgc

SEQ ID NO: 1963616 - RNA, 19 nt, Artificial Sequence
  Description of Artificial Sequence: Synthetic oligonucleotide
gggcguccaggucugcaug

SEQ ID NO: 1963617 - RNA, 19 nt, Artificial Sequence
  Description of Artificial Sequence: Synthetic oligonucleotide
ccauccugaaagucaggca

SEQ ID NO: 1963618 - RNA, 19 nt, Artificial Sequence
  Description of Artificial Sequence: Synthetic oligonucleotide
accaggggauacaggacua

SEQ ID NO: 1963619 - RNA, 19 nt, Artificial Sequence
  Description of Artificial Sequence: Synthetic oligonucleotide
cugcaugacccaaggaauu

SEQ ID NO: 1963620 - RNA, 19 nt, Artificial Sequence
  Description of Artificial Sequence: Synthetic oligonucleotide
ggucugcaugacccaagga

SEQ ID NO: 1963621 - RNA, 19 nt, Artificial Sequence
  Description of Artificial Sequence: Synthetic oligonucleotide
ccggauccgugucuccagg

SEQ ID NO: 1963622 - RNA, 19 nt, Artificial Sequence
  Description of Artificial Sequence: Synthetic oligonucleotide
acuuccggacucgcucggu

SEQ ID NO: 1963623 - RNA, 19 nt, Artificial Sequence
  Description of Artificial Sequence: Synthetic oligonucleotide
ggacuacaugcuugacauc

SEQ ID NO: 1963624 - RNA, 19 nt, Artificial Sequence
  Description of Artificial Sequence: Synthetic oligonucleotide
ccagcuuacacuggcagua

SEQ ID NO: 1963625 - RNA, 19 nt, Artificial Sequence
  Description of Artificial Sequence: Synthetic oligonucleotide
cuuccggacucgcucggua

SEQ ID NO: 1963626 - RNA, 19 nt, Artificial Sequence
  Description of Artificial Sequence: Synthetic oligonucleotide
ccuuaccucgcuugaagua

SEQ ID NO: 1963627 - RNA, 19 nt, Artificial Sequence
  Description of Artificial Sequence: Synthetic oligonucleotide
ccaaggaauuaugcucaug

SEQ ID NO: 1963628 - RNA, 19 nt, Artificial Sequence
  Description of Artificial Sequence: Synthetic oligonucleotide
ugccaaugaugagcuccau

SEQ ID NO: 1963629 - RNA, 19 nt, Artificial Sequence
  Description of Artificial Sequence: Synthetic oligonucleotide
guggccuuagugccauccu

SEQ ID NO: 1963630 - RNA, 19 nt, Artificial Sequence
  Description of Artificial Sequence: Synthetic oligonucleotide
cgauggucucccacacagg

SEQ ID NO: 1963631 - RNA, 19 nt, Artificial Sequence
  Description of Artificial Sequence: Synthetic oligonucleotide
ucuuggccaccaggggaua

SEQ ID NO: 1963632 - RNA, 19 nt, Artificial Sequence
  Description of Artificial Sequence: Synthetic oligonucleotide
ggaggcucuuggccaccag

SEQ ID NO: 1963633 - RNA, 19 nt, Artificial Sequence
  Description of Artificial Sequence: Synthetic oligonucleotide
ugccucggaagcgggcuuu

SEQ ID NO: 1963634 - RNA, 19 nt, Artificial Sequence
  Description of Artificial Sequence: Synthetic oligonucleotide
ccugaaagucaggcaacuc

SEQ ID NO: 1963635 - RNA, 19 nt, Artificial Sequence
  Description of Artificial Sequence: Synthetic oligonucleotide
cgcucgguagcuuccggac

SEQ ID NO: 1963636 - RNA, 19 nt, Artificial Sequence
  Description of Artificial Sequence: Synthetic oligonucleotide
ucuccccuucacgcauggu

SEQ ID NO: 1963637 - RNA, 19 nt, Artificial Sequence
  Description of Artificial Sequence: Synthetic oligonucleotide
cguccucucgaagucuugc

SEQ ID NO: 1963638 - RNA, 19 nt, Artificial Sequence
  Description of Artificial Sequence: Synthetic oligonucleotide
gccuuaccucgcuugaagu

SEQ ID NO: 1963639 - RNA, 19 nt, Artificial Sequence
  Description of Artificial Sequence: Synthetic oligonucleotide
gccuuagugccauccugaa

SEQ ID NO: 1963640 - RNA, 19 nt, Artificial Sequence
  Description of Artificial Sequence: Synthetic oligonucleotide
cugggcgaucuccccuuca

SEQ ID NO: 1963641 - RNA, 19 nt, Artificial Sequence
  Description of Artificial Sequence: Synthetic oligonucleotide
cagugguccagcacuucau

SEQ ID NO: 1963642 - RNA, 19 nt, Artificial Sequence
  Description of Artificial Sequence: Synthetic oligonucleotide
cguccaggucugcaugacc

SEQ ID NO: 1963643 - RNA, 19 nt, Artificial Sequence
  Description of Artificial Sequence: Synthetic oligonucleotide
gucucccacacaggcaacu

SEQ ID NO: 1963644 - RNA, 19 nt, Artificial Sequence
  Description of Artificial Sequence: Synthetic oligonucleotide
ccucggcagcuucugagca

SEQ ID NO: 1963645 - RNA, 19 nt, Artificial Sequence
  Description of Artificial Sequence: Synthetic oligonucleotide
cgaagucuugcgaugagau

SEQ ID NO: 1963646 - RNA, 19 nt, Artificial Sequence
  Description of Artificial Sequence: Synthetic oligonucleotide
ccugcuucggcaacuccua

SEQ ID NO: 1963647 - RNA, 19 nt, Artificial Sequence
  Description of Artificial Sequence: Synthetic oligonucleotide
gguucuugaggcaggcaau

SEQ ID NO: 1963648 - RNA, 19 nt, Artificial Sequence
  Description of Artificial Sequence: Synthetic oligonucleotide
ccaggggauacaggacuac

SEQ ID NO: 1963649 - RNA, 19 nt, Artificial Sequence
  Description of Artificial Sequence: Synthetic oligonucleotide
ccuucugccggauccgugu

SEQ ID NO: 1963650 - RNA, 19 nt, Artificial Sequence
  Description of Artificial Sequence: Synthetic oligonucleotide
cagguucuugaggcaggca

SEQ ID NO: 1963651 - RNA, 19 nt, Artificial Sequence
  Description of Artificial Sequence: Synthetic oligonucleotide
cagucaggugacccaggcu

SEQ ID NO: 1963652 - RNA, 19 nt, Artificial Sequence
  Description of Artificial Sequence: Synthetic oligonucleotide
cccugucagugagagaaga

SEQ ID NO: 1963653 - RNA, 19 nt, Artificial Sequence
  Description of Artificial Sequence: Synthetic oligonucleotide
gcauggugcacacgauggu

SEQ ID NO: 1963654 - RNA, 19 nt, Artificial Sequence
  Description of Artificial Sequence: Synthetic oligonucleotide
ccgcaguucucugcuuacc

SEQ ID NO: 1963655 - RNA, 19 nt, Artificial Sequence
  Description of Artificial Sequence: Synthetic oligonucleotide
ggaccugcuucggcaacuc

SEQ ID NO: 1963656 - RNA, 19 nt, Artificial Sequence
  Description of Artificial Sequence: Synthetic oligonucleotide
ccuucacgcauggugcaca

SEQ ID NO: 1963657 - RNA, 19 nt, Artificial Sequence
  Description of Artificial Sequence: Synthetic oligonucleotide
caugggcuuuccucggguu

SEQ ID NO: 1963658 - RNA, 19 nt, Artificial Sequence
  Description of Artificial Sequence: Synthetic oligonucleotide
gcuuacacuggcaguaguu

SEQ ID NO: 1963659 - RNA, 19 nt, Artificial Sequence
  Description of Artificial Sequence: Synthetic oligonucleotide
cagcaaugccgcuggcccu

SEQ ID NO: 1963660 - RNA, 19 nt, Artificial Sequence
  Description of Artificial Sequence: Synthetic oligonucleotide
ccucugcccuccuguauca

SEQ ID NO: 1963661 - RNA, 19 nt, Artificial Sequence
  Description of Artificial Sequence: Synthetic oligonucleotide
gcagcguccgaaaguggaa

SEQ ID NO: 1963662 - RNA, 19 nt, Artificial Sequence
  Description of Artificial Sequence: Synthetic oligonucleotide
ccucagcgauguugcggag

SEQ ID NO: 1963663 - RNA, 19 nt, Artificial Sequence
  Description of Artificial Sequence: Synthetic oligonucleotide
gccuugacauugucgucgu

SEQ ID NO: 1963664 - RNA, 19 nt, Artificial Sequence
  Description of Artificial Sequence: Synthetic oligonucleotide
gcccugucagugagagaag

SEQ ID NO: 1963665 - RNA, 19 nt, Artificial Sequence
  Description of Artificial Sequence: Synthetic oligonucleotide
caucaucacuaugcagcgu

SEQ ID NO: 1963666 - RNA, 19 nt, Artificial Sequence
  Description of Artificial Sequence: Synthetic oligonucleotide
gcguccgaaaguggaaugu

SEQ ID NO: 1963667 - RNA, 19 nt, Artificial Sequence
  Description of Artificial Sequence: Synthetic oligonucleotide
cacgcauggugcacacgau

SEQ ID NO: 1963668 - RNA, 19 nt, Artificial Sequence
  Description of Artificial Sequence: Synthetic oligonucleotide
gguagcuuccggaccugcu

SEQ ID NO: 1963669 - RNA, 19 nt, Artificial Sequence
  Description of Artificial Sequence: Synthetic oligonucleotide
ggucucccacacaggcaac

SEQ ID NO: 1963670 - RNA, 19 nt, Artificial Sequence
  Description of Artificial Sequence: Synthetic oligonucleotide
gcaugacccaaggaauuau

SEQ ID NO: 1963671 - RNA, 19 nt, Artificial Sequence
  Description of Artificial Sequence: Synthetic oligonucleotide
ccagggcucuccaccuuca

SEQ ID NO: 1963672 - RNA, 19 nt, Artificial Sequence
  Description of Artificial Sequence: Synthetic oligonucleotide
cccuucacgcauggugcac

SEQ ID NO: 1963673 - RNA, 19 nt, Artificial Sequence
  Description of Artificial Sequence: Synthetic oligonucleotide
ccccuucacgcauggugca

SEQ ID NO: 1963674 - RNA, 19 nt, Artificial Sequence
  Description of Artificial Sequence: Synthetic oligonucleotide
ccugucagugagagaagau

SEQ ID NO: 1963675 - RNA, 19 nt, Artificial Sequence
  Description of Artificial Sequence: Synthetic oligonucleotide
ccggaccugcuucggcaac

SEQ ID NO: 1963676 - RNA, 19 nt, Artificial Sequence
  Description of Artificial Sequence: Synthetic oligonucleotide
ggcaggcaauggcaucaua

SEQ ID NO: 1963677 - RNA, 19 nt, Artificial Sequence
  Description of Artificial Sequence: Synthetic oligonucleotide
cgguauaaccgguuacccu

SEQ ID NO: 1963678 - RNA, 19 nt, Artificial Sequence
  Description of Artificial Sequence: Synthetic oligonucleotide
ggcaacuuccggacucgcu

SEQ ID NO: 1963679 - RNA, 19 nt, Artificial Sequence
  Description of Artificial Sequence: Synthetic oligonucleotide
cauugucgucguacuuguu

SEQ ID NO: 1963680 - RNA, 19 nt, Artificial Sequence
  Description of Artificial Sequence: Synthetic oligonucleotide
gccucggaagcgggcuuug

SEQ ID NO: 1963681 - RNA, 19 nt, Artificial Sequence
  Description of Artificial Sequence: Synthetic oligonucleotide
caugggccuuaccucgcuu

SEQ ID NO: 1963682 - RNA, 19 nt, Artificial Sequence
  Description of Artificial Sequence: Synthetic oligonucleotide
gcaugggccuuaccucgcu

SEQ ID NO: 1963683 - RNA, 19 nt, Artificial Sequence
  Description of Artificial Sequence: Synthetic oligonucleotide
cugcuucggcaacuccuau

SEQ ID NO: 1963684 - RNA, 19 nt, Artificial Sequence
  Description of Artificial Sequence: Synthetic oligonucleotide
gggccuuaccucgcuugaa

SEQ ID NO: 1963685 - RNA, 19 nt, Artificial Sequence
  Description of Artificial Sequence: Synthetic oligonucleotide
cuuuccccgcugcucucuu

SEQ ID NO: 1963686 - RNA, 19 nt, Artificial Sequence
  Description of Artificial Sequence: Synthetic oligonucleotide
cgccauccucuuuccccgc

SEQ ID NO: 1963687 - RNA, 19 nt, Artificial Sequence
  Description of Artificial Sequence: Synthetic oligonucleotide
cgguuacccucuuggugga

SEQ ID NO: 1963688 - RNA, 19 nt, Artificial Sequence
  Description of Artificial Sequence: Synthetic oligonucleotide
cccucacgguauaaccggu

SEQ ID NO: 1963689 - RNA, 19 nt, Artificial Sequence
  Description of Artificial Sequence: Synthetic oligonucleotide
gcaaugccgcuggcccuca

SEQ ID NO: 1963690 - RNA, 19 nt, Artificial Sequence
  Description of Artificial Sequence: Synthetic oligonucleotide
ggguucuguugcagggcgu

SEQ ID NO: 1963691 - RNA, 19 nt, Artificial Sequence
  Description of Artificial Sequence: Synthetic oligonucleotide
cucaugcaucugagcgauu

SEQ ID NO: 1963692 - RNA, 19 nt, Artificial Sequence
  Description of Artificial Sequence: Synthetic oligonucleotide
cccaaggaauuaugcucau

SEQ ID NO: 1963693 - RNA, 19 nt, Artificial Sequence
  Description of Artificial Sequence: Synthetic oligonucleotide
ccucacgguauaaccgguu

SEQ ID NO: 1963694 - RNA, 19 nt, Artificial Sequence
  Description of Artificial Sequence: Synthetic oligonucleotide
cggcaacuuccggacucgc

SEQ ID NO: 1963695 - RNA, 19 nt, Artificial Sequence
  Description of Artificial Sequence: Synthetic oligonucleotide
cgaucuccccuucacgcau

SEQ ID NO: 1963696 - RNA, 19 nt, Artificial Sequence
  Description of Artificial Sequence: Synthetic oligonucleotide
cccguccucucgaagucuu

SEQ ID NO: 1963697 - RNA, 19 nt, Artificial Sequence
  Description of Artificial Sequence: Synthetic oligonucleotide
gguuacccucuugguggau

SEQ ID NO: 1963698 - RNA, 19 nt, Artificial Sequence
  Description of Artificial Sequence: Synthetic oligonucleotide
cggguucugcuaucaucua

SEQ ID NO: 1963699 - RNA, 19 nt, Artificial Sequence
  Description of Artificial Sequence: Synthetic oligonucleotide
ccggacucgcucgguagcu

SEQ ID NO: 1963700 - RNA, 19 nt, Artificial Sequence
  Description of Artificial Sequence: Synthetic oligonucleotide
ccuauagccucggcagcuu

SEQ ID NO: 1963701 - RNA, 19 nt, Artificial Sequence
  Description of Artificial Sequence: Synthetic oligonucleotide
ccucggguucugcuaucau

SEQ ID NO: 1963702 - RNA, 19 nt, Artificial Sequence
  Description of Artificial Sequence: Synthetic oligonucleotide
cccauggguccugcugaua

SEQ ID NO: 1963703 - RNA, 19 nt, Artificial Sequence
  Description of Artificial Sequence: Synthetic oligonucleotide
cggaccugcuucggcaacu

SEQ ID NO: 1963704 - RNA, 19 nt, Artificial Sequence
  Description of Artificial Sequence: Synthetic oligonucleotide
ccucggaagcgggcuuugu

SEQ ID NO: 1963705 - RNA, 19 nt, Artificial Sequence
  Description of Artificial Sequence: Synthetic oligonucleotide
cgauguugcggaggcucuu

SEQ ID NO: 1963706 - RNA, 19 nt, Artificial Sequence
  Description of Artificial Sequence: Synthetic oligonucleotide
cggacucgcucgguagcuu

SEQ ID NO: 1963707 - RNA, 19 nt, Artificial Sequence
  Description of Artificial Sequence: Synthetic oligonucleotide
ccuugcccucagcgauguu

SEQ ID NO: 1963708 - RNA, 19 nt, Artificial Sequence
  Description of Artificial Sequence: Synthetic oligonucleotide
aaaaucuggaaauaaaagg

SEQ ID NO: 1963709 - RNA, 19 nt, Artificial Sequence
  Description of Artificial Sequence: Synthetic oligonucleotide
aaaaguacccgccaggcac

SEQ ID NO: 1963710 - RNA, 19 nt, Artificial Sequence
  Description of Artificial Sequence: Synthetic oligonucleotide
uacaguucaauuucgaagg

SEQ ID NO: 1963711 - RNA, 19 nt, Artificial Sequence
  Description of Artificial Sequence: Synthetic oligonucleotide
aucugcaaguuuuagauac

SEQ ID NO: 1963712 - RNA, 19 nt, Artificial Sequence
  Description of Artificial Sequence: Synthetic oligonucleotide
aagguagaaaaguacccgc

SEQ ID NO: 1963713 - RNA, 19 nt, Artificial Sequence
  Description of Artificial Sequence: Synthetic oligonucleotide
aaaagguagaaaaguaccc

SEQ ID NO: 1963714 - RNA, 19 nt, Artificial Sequence
  Description of Artificial Sequence: Synthetic oligonucleotide
aaaugguuccccuagccag

SEQ ID NO: 1963715 - RNA, 19 nt, Artificial Sequence
  Description of Artificial Sequence: Synthetic oligonucleotide
cugaauuccaucuuggcgc

SEQ ID NO: 1963716 - RNA, 19 nt, Artificial Sequence
  Description of Artificial Sequence: Synthetic oligonucleotide
aaagguagaaaaguacccg

SEQ ID NO: 1963717 - RNA, 19 nt, Artificial Sequence
  Description of Artificial Sequence: Synthetic oligonucleotide
gaaagggcaacagaaaccg

SEQ ID NO: 1963718 - RNA, 19 nt, Artificial Sequence
  Description of Artificial Sequence: Synthetic oligonucleotide
ucuaaugcugcccacugag

SEQ ID NO: 1963719 - RNA, 19 nt, Artificial Sequence
  Description of Artificial Sequence: Synthetic oligonucleotide
aauauugguucuguagugg

SEQ ID NO: 1963720 - RNA, 19 nt, Artificial Sequence
  Description of Artificial Sequence: Synthetic oligonucleotide
uaacugagcgucuuuaucc

SEQ ID NO: 1963721 - RNA, 19 nt, Artificial Sequence
  Description of Artificial Sequence: Synthetic oligonucleotide
uuugcaagucaccagagaa

SEQ ID NO: 1963722 - RNA, 19 nt, Artificial Sequence
  Description of Artificial Sequence: Synthetic oligonucleotide
acagcauuggcagugaacg

SEQ ID NO: 1963723 - RNA, 19 nt, Artificial Sequence
  Description of Artificial Sequence: Synthetic oligonucleotide
acaauauugguucuguagu

SEQ ID NO: 1963724 - RNA, 19 nt, Artificial Sequence
  Description of Artificial Sequence: Synthetic oligonucleotide
ugugcuguguguauggggc

SEQ ID NO: 1963725 - RNA, 19 nt, Artificial Sequence
  Description of Artificial Sequence: Synthetic oligonucleotide
aaguccggcagugaaaugg

SEQ ID NO: 1963726 - RNA, 19 nt, Artificial Sequence
  Description of Artificial Sequence: Synthetic oligonucleotide
ugcaagucaccagagaagg

SEQ ID NO: 1963727 - RNA, 19 nt, Artificial Sequence
  Description of Artificial Sequence: Synthetic oligonucleotide
uaaugcugcccacugagcc

SEQ ID NO: 1963728 - RNA, 19 nt, Artificial Sequence
  Description of Artificial Sequence: Synthetic oligonucleotide
ucuguagugguuugugagg

SEQ ID NO: 1963729 - RNA, 19 nt, Artificial Sequence
  Description of Artificial Sequence: Synthetic oligonucleotide
uuuccaagcaguguggcag

SEQ ID NO: 1963730 - RNA, 19 nt, Artificial Sequence
  Description of Artificial Sequence: Synthetic oligonucleotide
ucugugaagguguaaugcc

SEQ ID NO: 1963731 - RNA, 19 nt, Artificial Sequence
  Description of Artificial Sequence: Synthetic oligonucleotide
agaaaaguacccgccaggc

SEQ ID NO: 1963732 - RNA, 19 nt, Artificial Sequence
  Description of Artificial Sequence: Synthetic oligonucleotide
ucuggaaauaaaagguaga

SEQ ID NO: 1963733 - RNA, 19 nt, Artificial Sequence
  Description of Artificial Sequence: Synthetic oligonucleotide
ugaaaugguuccccuagcc

SEQ ID NO: 1963734 - RNA, 19 nt, Artificial Sequence
  Description of Artificial Sequence: Synthetic oligonucleotide
auuucgaaggucuuuugca

SEQ ID NO: 1963735 - RNA, 19 nt, Artificial Sequence
  Description of Artificial Sequence: Synthetic oligonucleotide
aauuccaucuuggcgcaac

SEQ ID NO: 1963736 - RNA, 19 nt, Artificial Sequence
  Description of Artificial Sequence: Synthetic oligonucleotide
uaggcgggcacaaauggag

SEQ ID NO: 1963737 - RNA, 19 nt, Artificial Sequence
  Description of Artificial Sequence: Synthetic oligonucleotide
uugcaagucaccagagaag

SEQ ID NO: 1963738 - RNA, 19 nt, Artificial Sequence
  Description of Artificial Sequence: Synthetic oligonucleotide
ucuccuggguccccaaucg

SEQ ID NO: 1963739 - RNA, 19 nt, Artificial Sequence
  Description of Artificial Sequence: Synthetic oligonucleotide
aagugggcaucccaccuuc

SEQ ID NO: 1963740 - RNA, 19 nt, Artificial Sequence
  Description of Artificial Sequence: Synthetic oligonucleotide
acaaauggaggcugcaugu

SEQ ID NO: 1963741 - RNA, 19 nt, Artificial Sequence
  Description of Artificial Sequence: Synthetic oligonucleotide
aguucaauuucgaaggucu

SEQ ID NO: 1963742 - RNA, 19 nt, Artificial Sequence
  Description of Artificial Sequence: Synthetic oligonucleotide
agcgucuuuaucccucccc

SEQ ID NO: 1963743 - RNA, 19 nt, Artificial Sequence
  Description of Artificial Sequence: Synthetic oligonucleotide
ccuagcauuauauucuucc

SEQ ID NO: 1963744 - RNA, 19 nt, Artificial Sequence
  Description of Artificial Sequence: Synthetic oligonucleotide
agcauuauauucuuccuuu

SEQ ID NO: 1963745 - RNA, 19 nt, Artificial Sequence
  Description of Artificial Sequence: Synthetic oligonucleotide
gaagguguaaugcccacca

SEQ ID NO: 1963746 - RNA, 19 nt, Artificial Sequence
  Description of Artificial Sequence: Synthetic oligonucleotide
aaaguacccgccaggcacc

SEQ ID NO: 1963747 - RNA, 19 nt, Artificial Sequence
  Description of Artificial Sequence: Synthetic oligonucleotide
uuggccaccaucugugaag

SEQ ID NO: 1963748 - RNA, 19 nt, Artificial Sequence
  Description of Artificial Sequence: Synthetic oligonucleotide
ucccugaauuccaucuugg

SEQ ID NO: 1963749 - RNA, 19 nt, Artificial Sequence
  Description of Artificial Sequence: Synthetic oligonucleotide
uccuuguauaauacaaauc

SEQ ID NO: 1963750 - RNA, 19 nt, Artificial Sequence
  Description of Artificial Sequence: Synthetic oligonucleotide
caauauugguucuguagug

SEQ ID NO: 1963751 - RNA, 19 nt, Artificial Sequence
  Description of Artificial Sequence: Synthetic oligonucleotide
caugagguaacugagcguc

SEQ ID NO: 1963752 - RNA, 19 nt, Artificial Sequence
  Description of Artificial Sequence: Synthetic oligonucleotide
ggcaucacaauauugguuc

SEQ ID NO: 1963753 - RNA, 19 nt, Artificial Sequence
  Description of Artificial Sequence: Synthetic oligonucleotide
cugugaagguguaaugccc

SEQ ID NO: 1963754 - RNA, 19 nt, Artificial Sequence
  Description of Artificial Sequence: Synthetic oligonucleotide
cuuaagugggcaucccacc

SEQ ID NO: 1963755 - RNA, 19 nt, Artificial Sequence
  Description of Artificial Sequence: Synthetic oligonucleotide
uguccuuguauaauacaaa

SEQ ID NO: 1963756 - RNA, 19 nt, Artificial Sequence
  Description of Artificial Sequence: Synthetic oligonucleotide
uccuggguccccaaucggg

SEQ ID NO: 1963757 - RNA, 19 nt, Artificial Sequence
  Description of Artificial Sequence: Synthetic oligonucleotide
agguagaaaaguacccgcc

SEQ ID NO: 1963758 - RNA, 19 nt, Artificial Sequence
  Description of Artificial Sequence: Synthetic oligonucleotide
auauugguucuguaguggu

SEQ ID NO: 1963759 - RNA, 19 nt, Artificial Sequence
  Description of Artificial Sequence: Synthetic oligonucleotide
aucuuggcgcaaccuaggc

SEQ ID NO: 1963760 - RNA, 19 nt, Artificial Sequence
  Description of Artificial Sequence: Synthetic oligonucleotide
uuucgaaggucuuuugcaa

SEQ ID NO: 1963761 - RNA, 19 nt, Artificial Sequence
  Description of Artificial Sequence: Synthetic oligonucleotide
auuccaucuuggcgcaacc

SEQ ID NO: 1963762 - RNA, 19 nt, Artificial Sequence
  Description of Artificial Sequence: Synthetic oligonucleotide
auaacccaggccuggguag

SEQ ID NO: 1963763 - RNA, 19 nt, Artificial Sequence
  Description of Artificial Sequence: Synthetic oligonucleotide
aagguguaaugcccaccac

SEQ ID NO: 1963764 - RNA, 19 nt, Artificial Sequence
  Description of Artificial Sequence: Synthetic oligonucleotide
uccugcccaacacuggaag

SEQ ID NO: 1963765 - RNA, 19 nt, Artificial Sequence
  Description of Artificial Sequence: Synthetic oligonucleotide
ucauccugcccaacacugg

SEQ ID NO: 1963766 - RNA, 19 nt, Artificial Sequence
  Description of Artificial Sequence: Synthetic oligonucleotide
uaggcaucacaauauuggu

SEQ ID NO: 1963767 - RNA, 19 nt, Artificial Sequence
  Description of Artificial Sequence: Synthetic oligonucleotide
gaaaugguuccccuagcca

SEQ ID NO: 1963768 - RNA, 19 nt, Artificial Sequence
  Description of Artificial Sequence: Synthetic oligonucleotide
ugaaccgagggcauuccgu

SEQ ID NO: 1963769 - RNA, 19 nt, Artificial Sequence
  Description of Artificial Sequence: Synthetic oligonucleotide
agguguaaugcccaccaca

SEQ ID NO: 1963770 - RNA, 19 nt, Artificial Sequence
  Description of Artificial Sequence: Synthetic oligonucleotide
uggaaauaaaagguagaaa

SEQ ID NO: 1963771 - RNA, 19 nt, Artificial Sequence
  Description of Artificial Sequence: Synthetic oligonucleotide
caucccaccuucauccugc

SEQ ID NO: 1963772 - RNA, 19 nt, Artificial Sequence
  Description of Artificial Sequence: Synthetic oligonucleotide
gaaccgagggcauuccgug

SEQ ID NO: 1963773 - RNA, 19 nt, Artificial Sequence
  Description of Artificial Sequence: Synthetic oligonucleotide
uugaaccgagggcauuccg

SEQ ID NO: 1963774 - RNA, 19 nt, Artificial Sequence
  Description of Artificial Sequence: Synthetic oligonucleotide
uguagugguuugugagggg

SEQ ID NO: 1963775 - RNA, 19 nt, Artificial Sequence
  Description of Artificial Sequence: Synthetic oligonucleotide
caguguggcagguuggggc

SEQ ID NO: 1963776 - RNA, 19 nt, Artificial Sequence
  Description of Artificial Sequence: Synthetic oligonucleotide
aaggcguuggccaccaucu

SEQ ID NO: 1963777 - RNA, 19 nt, Artificial Sequence
  Description of Artificial Sequence: Synthetic oligonucleotide
ucugcaaguuuuagauaca

SEQ ID NO: 1963778 - RNA, 19 nt, Artificial Sequence
  Description of Artificial Sequence: Synthetic oligonucleotide
uagcauuauauucuuccuu

SEQ ID NO: 1963779 - RNA, 19 nt, Artificial Sequence
  Description of Artificial Sequence: Synthetic oligonucleotide
ucaauuucgaaggucuuuu

SEQ ID NO: 1963780 - RNA, 19 nt, Artificial Sequence
  Description of Artificial Sequence: Synthetic oligonucleotide
gaagggcuuagagggagcg

SEQ ID NO: 1963781 - RNA, 19 nt, Artificial Sequence
  Description of Artificial Sequence: Synthetic oligonucleotide
gguaggcgggcacaaaugg

SEQ ID NO: 1963782 - RNA, 19 nt, Artificial Sequence
  Description of Artificial Sequence: Synthetic oligonucleotide
ccugaauuccaucuuggcg

SEQ ID NO: 1963783 - RNA, 19 nt, Artificial Sequence
  Description of Artificial Sequence: Synthetic oligonucleotide
cauggguggauaacccagg

SEQ ID NO: 1963784 - RNA, 19 nt, Artificial Sequence
  Description of Artificial Sequence: Synthetic oligonucleotide
acaaaucugcaaguuuuag

SEQ ID NO: 1963785 - RNA, 19 nt, Artificial Sequence
  Description of Artificial Sequence: Synthetic oligonucleotide
aaucugcaaguuuuagaua

SEQ ID NO: 1963786 - RNA, 19 nt, Artificial Sequence
  Description of Artificial Sequence: Synthetic oligonucleotide
ucuuggcgcaaccuaggca

SEQ ID NO: 1963787 - RNA, 19 nt, Artificial Sequence
  Description of Artificial Sequence: Synthetic oligonucleotide
gauuggagggcuucuccac

SEQ ID NO: 1963788 - RNA, 19 nt, Artificial Sequence
  Description of Artificial Sequence: Synthetic oligonucleotide
ugccuucuaaugcugccca

SEQ ID NO: 1963789 - RNA, 19 nt, Artificial Sequence
  Description of Artificial Sequence: Synthetic oligonucleotide
uguguauggggcggggagg

SEQ ID NO: 1963790 - RNA, 19 nt, Artificial Sequence
  Description of Artificial Sequence: Synthetic oligonucleotide
gagaagggcuuagagggag

SEQ ID NO: 1963791 - RNA, 19 nt, Artificial Sequence
  Description of Artificial Sequence: Synthetic oligonucleotide
uccggcagugaaaugguuc

SEQ ID NO: 1963792 - RNA, 19 nt, Artificial Sequence
  Description of Artificial Sequence: Synthetic oligonucleotide
uuccaagcaguguggcagg

SEQ ID NO: 1963793 - RNA, 19 nt, Artificial Sequence
  Description of Artificial Sequence: Synthetic oligonucleotide
uacaaaucugcaaguuuua

SEQ ID NO: 1963794 - RNA, 19 nt, Artificial Sequence
  Description of Artificial Sequence: Synthetic oligonucleotide
ccuuguauaauacaaaucu

SEQ ID NO: 1963795 - RNA, 19 nt, Artificial Sequence
  Description of Artificial Sequence: Synthetic oligonucleotide
aaccggggaggguagcuug

SEQ ID NO: 1963796 - RNA, 19 nt, Artificial Sequence
  Description of Artificial Sequence: Synthetic oligonucleotide
aggucuuuugcaagucacc

SEQ ID NO: 1963797 - RNA, 19 nt, Artificial Sequence
  Description of Artificial Sequence: Synthetic oligonucleotide
cuguccuuguauaauacaa

SEQ ID NO: 1963798 - RNA, 19 nt, Artificial Sequence
  Description of Artificial Sequence: Synthetic oligonucleotide
gagcagaaggcguuggcca

SEQ ID NO: 1963799 - RNA, 19 nt, Artificial Sequence
  Description of Artificial Sequence: Synthetic oligonucleotide
gguguaaugcccaccacag

SEQ ID NO: 1963800 - RNA, 19 nt, Artificial Sequence
  Description of Artificial Sequence: Synthetic oligonucleotide
gggaggguagcuugaaccg

SEQ ID NO: 1963801 - RNA, 19 nt, Artificial Sequence
  Description of Artificial Sequence: Synthetic oligonucleotide
aucacaauauugguucugu

SEQ ID NO: 1963802 - RNA, 19 nt, Artificial Sequence
  Description of Artificial Sequence: Synthetic oligonucleotide
uggguggauaacccaggcc

SEQ ID NO: 1963803 - RNA, 19 nt, Artificial Sequence
  Description of Artificial Sequence: Synthetic oligonucleotide
uccaucuuggcgcaaccua

SEQ ID NO: 1963804 - RNA, 19 nt, Artificial Sequence
  Description of Artificial Sequence: Synthetic oligonucleotide
agcauuggcagugaacgca

SEQ ID NO: 1963805 - RNA, 19 nt, Artificial Sequence
  Description of Artificial Sequence: Synthetic oligonucleotide
gguagcuugaaccgagggc

SEQ ID NO: 1963806 - RNA, 19 nt, Artificial Sequence
  Description of Artificial Sequence: Synthetic oligonucleotide
gggcaucccaccuucaucc

SEQ ID NO: 1963807 - RNA, 19 nt, Artificial Sequence
  Description of Artificial Sequence: Synthetic oligonucleotide
cuaaugcugcccacugagc

SEQ ID NO: 1963808 - RNA, 19 nt, Artificial Sequence
  Description of Artificial Sequence: Synthetic oligonucleotide
caucgccagccuaaguccg

SEQ ID NO: 1963809 - RNA, 19 nt, Artificial Sequence
  Description of Artificial Sequence: Synthetic oligonucleotide
acugggugcagcagguggc

SEQ ID NO: 1963810 - RNA, 19 nt, Artificial Sequence
  Description of Artificial Sequence: Synthetic oligonucleotide
aguguggcagguuggggcu

SEQ ID NO: 1963811 - RNA, 19 nt, Artificial Sequence
  Description of Artificial Sequence: Synthetic oligonucleotide
ugagcgucuuuaucccucc

SEQ ID NO: 1963812 - RNA, 19 nt, Artificial Sequence
  Description of Artificial Sequence: Synthetic oligonucleotide
ugagccucaaaugggucca

SEQ ID NO: 1963813 - RNA, 19 nt, Artificial Sequence
  Description of Artificial Sequence: Synthetic oligonucleotide
ugcccacugagccucaaau

SEQ ID NO: 1963814 - RNA, 19 nt, Artificial Sequence
  Description of Artificial Sequence: Synthetic oligonucleotide
guguguauggggcggggag

SEQ ID NO: 1963815 - RNA, 19 nt, Artificial Sequence
  Description of Artificial Sequence: Synthetic oligonucleotide
ugaagguguaaugcccacc

SEQ ID NO: 1963816 - RNA, 19 nt, Artificial Sequence
  Description of Artificial Sequence: Synthetic oligonucleotide
cuuagagggagcggugggg

SEQ ID NO: 1963817 - RNA, 19 nt, Artificial Sequence
  Description of Artificial Sequence: Synthetic oligonucleotide
gaaaaguacccgccaggca

SEQ ID NO: 1963818 - RNA, 19 nt, Artificial Sequence
  Description of Artificial Sequence: Synthetic oligonucleotide
gaggguagcuugaaccgag

SEQ ID NO: 1963819 - RNA, 19 nt, Artificial Sequence
  Description of Artificial Sequence: Synthetic oligonucleotide
gaaggcguuggccaccauc

SEQ ID NO: 1963820 - RNA, 19 nt, Artificial Sequence
  Description of Artificial Sequence: Synthetic oligonucleotide
acaguucaauuucgaaggu

SEQ ID NO: 1963821 - RNA, 19 nt, Artificial Sequence
  Description of Artificial Sequence: Synthetic oligonucleotide
gagggcauuccgugucugg

SEQ ID NO: 1963822 - RNA, 19 nt, Artificial Sequence
  Description of Artificial Sequence: Synthetic oligonucleotide
aacucaggggcuggggcag

SEQ ID NO: 1963823 - RNA, 19 nt, Artificial Sequence
  Description of Artificial Sequence: Synthetic oligonucleotide
uggguaggcgggcacaaau

SEQ ID NO: 1963824 - RNA, 19 nt, Artificial Sequence
  Description of Artificial Sequence: Synthetic oligonucleotide
gauaacccaggccugggua

SEQ ID NO: 1963825 - RNA, 19 nt, Artificial Sequence
  Description of Artificial Sequence: Synthetic oligonucleotide
uauugguucuguagugguu

SEQ ID NO: 1963826 - RNA, 19 nt, Artificial Sequence
  Description of Artificial Sequence: Synthetic oligonucleotide
acaugagguaacugagcgu

SEQ ID NO: 1963827 - RNA, 19 nt, Artificial Sequence
  Description of Artificial Sequence: Synthetic oligonucleotide
gcguggacgggccugaccg

SEQ ID NO: 1963828 - RNA, 19 nt, Artificial Sequence
  Description of Artificial Sequence: Synthetic oligonucleotide
gcaacagaaaccggggagg

SEQ ID NO: 1963829 - RNA, 19 nt, Artificial Sequence
  Description of Artificial Sequence: Synthetic oligonucleotide
aaguacccgccaggcaccc

SEQ ID NO: 1963830 - RNA, 19 nt, Artificial Sequence
  Description of Artificial Sequence: Synthetic oligonucleotide
uucaauuucgaaggucuuu

SEQ ID NO: 1963831 - RNA, 19 nt, Artificial Sequence
  Description of Artificial Sequence: Synthetic oligonucleotide
agugaacgcagcgugggca

SEQ ID NO: 1963832 - RNA, 19 nt, Artificial Sequence
  Description of Artificial Sequence: Synthetic oligonucleotide
cuggaagguggaaagggca

SEQ ID NO: 1963833 - RNA, 19 nt, Artificial Sequence
  Description of Artificial Sequence: Synthetic oligonucleotide
accuucauccugcccaaca

SEQ ID NO: 1963834 - RNA, 19 nt, Artificial Sequence
  Description of Artificial Sequence: Synthetic oligonucleotide
agggcauuccgugucuggg

SEQ ID NO: 1963835 - RNA, 19 nt, Artificial Sequence
  Description of Artificial Sequence: Synthetic oligonucleotide
gugaacgcagcgugggcag

SEQ ID NO: 1963836 - RNA, 19 nt, Artificial Sequence
  Description of Artificial Sequence: Synthetic oligonucleotide
guguaaugcccaccacagg

SEQ ID NO: 1963837 - RNA, 19 nt, Artificial Sequence
  Description of Artificial Sequence: Synthetic oligonucleotide
aagggcuuagagggagcgg

SEQ ID NO: 1963838 - RNA, 19 nt, Artificial Sequence
  Description of Artificial Sequence: Synthetic oligonucleotide
ccggggagcagcauuaggg

SEQ ID NO: 1963839 - RNA, 19 nt, Artificial Sequence
  Description of Artificial Sequence: Synthetic oligonucleotide
acagaaaccggggagggua

SEQ ID NO: 1963840 - RNA, 19 nt, Artificial Sequence
  Description of Artificial Sequence: Synthetic oligonucleotide
uuggcagugaacgcagcgu

SEQ ID NO: 1963841 - RNA, 19 nt, Artificial Sequence
  Description of Artificial Sequence: Synthetic oligonucleotide
gguggaaagggcaacagaa

SEQ ID NO: 1963842 - RNA, 19 nt, Artificial Sequence
  Description of Artificial Sequence: Synthetic oligonucleotide
gagaccucggcccuccgga

SEQ ID NO: 1963843 - RNA, 19 nt, Artificial Sequence
  Description of Artificial Sequence: Synthetic oligonucleotide
caaccuaggcaucacaaua

SEQ ID NO: 1963844 - RNA, 19 nt, Artificial Sequence
  Description of Artificial Sequence: Synthetic oligonucleotide
ggcaucgccagccuaaguc

SEQ ID NO: 1963845 - RNA, 19 nt, Artificial Sequence
  Description of Artificial Sequence: Synthetic oligonucleotide
ugggcaucccaccuucauc

SEQ ID NO: 1963846 - RNA, 19 nt, Artificial Sequence
  Description of Artificial Sequence: Synthetic oligonucleotide
aaccgagggcauuccgugu

SEQ ID NO: 1963847 - RNA, 19 nt, Artificial Sequence
  Description of Artificial Sequence: Synthetic oligonucleotide
cuccggaagacacggcccc

SEQ ID NO: 1963848 - RNA, 19 nt, Artificial Sequence
  Description of Artificial Sequence: Synthetic oligonucleotide
cuuggcgcaaccuaggcau

SEQ ID NO: 1963849 - RNA, 19 nt, Artificial Sequence
  Description of Artificial Sequence: Synthetic oligonucleotide
guggauaacccaggccugg

SEQ ID NO: 1963850 - RNA, 19 nt, Artificial Sequence
  Description of Artificial Sequence: Synthetic oligonucleotide
agcgggcaccaacaugagg

SEQ ID NO: 1963851 - RNA, 19 nt, Artificial Sequence
  Description of Artificial Sequence: Synthetic oligonucleotide
cuugugcuguguguauggg

SEQ ID NO: 1963852 - RNA, 19 nt, Artificial Sequence
  Description of Artificial Sequence: Synthetic oligonucleotide
caggcuuaagugggcaucc

SEQ ID NO: 1963853 - RNA, 19 nt, Artificial Sequence
  Description of Artificial Sequence: Synthetic oligonucleotide
agcggguuugccuucuaau

SEQ ID NO: 1963854 - RNA, 19 nt, Artificial Sequence
  Description of Artificial Sequence: Synthetic oligonucleotide
guguauggggcggggaggg

SEQ ID NO: 1963855 - RNA, 19 nt, Artificial Sequence
  Description of Artificial Sequence: Synthetic oligonucleotide
ucacaauauugguucugua

SEQ ID NO: 1963856 - RNA, 19 nt, Artificial Sequence
  Description of Artificial Sequence: Synthetic oligonucleotide
guuugccuucuaaugcugc

SEQ ID NO: 1963857 - RNA, 19 nt, Artificial Sequence
  Description of Artificial Sequence: Synthetic oligonucleotide
gugcuguguguauggggcg

SEQ ID NO: 1963858 - RNA, 19 nt, Artificial Sequence
  Description of Artificial Sequence: Synthetic oligonucleotide
aaggccccggcuuuuccaa

SEQ ID NO: 1963859 - RNA, 19 nt, Artificial Sequence
  Description of Artificial Sequence: Synthetic oligonucleotide
agcagggcaacuugggcua

SEQ ID NO: 1963860 - RNA, 19 nt, Artificial Sequence
  Description of Artificial Sequence: Synthetic oligonucleotide
uaagugggcaucccaccuu

SEQ ID NO: 1963861 - RNA, 19 nt, Artificial Sequence
  Description of Artificial Sequence: Synthetic oligonucleotide
gagcagggcaacuugggcu

SEQ ID NO: 1963862 - RNA, 19 nt, Artificial Sequence
  Description of Artificial Sequence: Synthetic oligonucleotide
auuggggcguggacgggcc

SEQ ID NO: 1963863 - RNA, 19 nt, Artificial Sequence
  Description of Artificial Sequence: Synthetic oligonucleotide
ggguagcuugaaccgaggg

SEQ ID NO: 1963864 - RNA, 19 nt, Artificial Sequence
  Description of Artificial Sequence: Synthetic oligonucleotide
agaaaccggggaggguagc

SEQ ID NO: 1963865 - RNA, 19 nt, Artificial Sequence
  Description of Artificial Sequence: Synthetic oligonucleotide
aucccaccuucauccugcc

SEQ ID NO: 1963866 - RNA, 19 nt, Artificial Sequence
  Description of Artificial Sequence: Synthetic oligonucleotide
gcaucgccagccuaagucc

SEQ ID NO: 1963867 - RNA, 19 nt, Artificial Sequence
  Description of Artificial Sequence: Synthetic oligonucleotide
cagaaaccggggaggguag

SEQ ID NO: 1963868 - RNA, 19 nt, Artificial Sequence
  Description of Artificial Sequence: Synthetic oligonucleotide
gguuccccuagccaggcug

SEQ ID NO: 1963869 - RNA, 19 nt, Artificial Sequence
  Description of Artificial Sequence: Synthetic oligonucleotide
acugagcgucuuuaucccu

SEQ ID NO: 1963870 - RNA, 19 nt, Artificial Sequence
  Description of Artificial Sequence: Synthetic oligonucleotide
uuggcuguccuuguauaau

SEQ ID NO: 1963871 - RNA, 19 nt, Artificial Sequence
  Description of Artificial Sequence: Synthetic oligonucleotide
ccggcagugaaaugguucc

SEQ ID NO: 1963872 - RNA, 19 nt, Artificial Sequence
  Description of Artificial Sequence: Synthetic oligonucleotide
cagcauuggcagugaacgc

SEQ ID NO: 1963873 - RNA, 19 nt, Artificial Sequence
  Description of Artificial Sequence: Synthetic oligonucleotide
gaagggauuggagggcuuc

SEQ ID NO: 1963874 - RNA, 19 nt, Artificial Sequence
  Description of Artificial Sequence: Synthetic oligonucleotide
aagggauuggagggcuucu

SEQ ID NO: 1963875 - RNA, 19 nt, Artificial Sequence
  Description of Artificial Sequence: Synthetic oligonucleotide
ccaucuuggcgcaaccuag

SEQ ID NO: 1963876 - RNA, 19 nt, Artificial Sequence
  Description of Artificial Sequence: Synthetic oligonucleotide
gcggguuugccuucuaaug

SEQ ID NO: 1963877 - RNA, 19 nt, Artificial Sequence
  Description of Artificial Sequence: Synthetic oligonucleotide
uaaguccggcagugaaaug

SEQ ID NO: 1963878 - RNA, 19 nt, Artificial Sequence
  Description of Artificial Sequence: Synthetic oligonucleotide
cuagcauuauauucuuccu

SEQ ID NO: 1963879 - RNA, 19 nt, Artificial Sequence
  Description of Artificial Sequence: Synthetic oligonucleotide
ggguccaucccugaauucc

SEQ ID NO: 1963880 - RNA, 19 nt, Artificial Sequence
  Description of Artificial Sequence: Synthetic oligonucleotide
cuugaaccgagggcauucc

SEQ ID NO: 1963881 - RNA, 19 nt, Artificial Sequence
  Description of Artificial Sequence: Synthetic oligonucleotide
ccuuuauuggcuguccuug

SEQ ID NO: 1963882 - RNA, 19 nt, Artificial Sequence
  Description of Artificial Sequence: Synthetic oligonucleotide
guuccccuagccaggcugg

SEQ ID NO: 1963883 - RNA, 19 nt, Artificial Sequence
  Description of Artificial Sequence: Synthetic oligonucleotide
ccuaggcaucacaauauug

SEQ ID NO: 1963884 - RNA, 19 nt, Artificial Sequence
  Description of Artificial Sequence: Synthetic oligonucleotide
caguucaauuucgaagguc

SEQ ID NO: 1963885 - RNA, 19 nt, Artificial Sequence
  Description of Artificial Sequence: Synthetic oligonucleotide
gguucuguagugguuugug

SEQ ID NO: 1963886 - RNA, 19 nt, Artificial Sequence
  Description of Artificial Sequence: Synthetic oligonucleotide
ggucuuuugcaagucacca

SEQ ID NO: 1963887 - RNA, 19 nt, Artificial Sequence
  Description of Artificial Sequence: Synthetic oligonucleotide
aacgcagcgugggcagggg

SEQ ID NO: 1963888 - RNA, 19 nt, Artificial Sequence
  Description of Artificial Sequence: Synthetic oligonucleotide
ggcauuccgugucuggggc

SEQ ID NO: 1963889 - RNA, 19 nt, Artificial Sequence
  Description of Artificial Sequence: Synthetic oligonucleotide
gaggggaugaccaggcuua

SEQ ID NO: 1963890 - RNA, 19 nt, Artificial Sequence
  Description of Artificial Sequence: Synthetic oligonucleotide
uguguguauggggcgggga

SEQ ID NO: 1963891 - RNA, 19 nt, Artificial Sequence
  Description of Artificial Sequence: Synthetic oligonucleotide
gggauuggagggcuucucc

SEQ ID NO: 1963892 - RNA, 19 nt, Artificial Sequence
  Description of Artificial Sequence: Synthetic oligonucleotide
cuggguccccaaucgggcc

SEQ ID NO: 1963893 - RNA, 19 nt, Artificial Sequence
  Description of Artificial Sequence: Synthetic oligonucleotide
cccauuggggcguggacgg

SEQ ID NO: 1963894 - RNA, 19 nt, Artificial Sequence
  Description of Artificial Sequence: Synthetic oligonucleotide
aggcuuaagugggcauccc

SEQ ID NO: 1963895 - RNA, 19 nt, Artificial Sequence
  Description of Artificial Sequence: Synthetic oligonucleotide
gcauggguggauaacccag

SEQ ID NO: 1963896 - RNA, 19 nt, Artificial Sequence
  Description of Artificial Sequence: Synthetic oligonucleotide
gaccucggcccuccggaag

SEQ ID NO: 1963897 - RNA, 19 nt, Artificial Sequence
  Description of Artificial Sequence: Synthetic oligonucleotide
ugagguaacugagcgucuu

SEQ ID NO: 1963898 - RNA, 19 nt, Artificial Sequence
  Description of Artificial Sequence: Synthetic oligonucleotide
accuaggcaucacaauauu

SEQ ID NO: 1963899 - RNA, 19 nt, Artificial Sequence
  Description of Artificial Sequence: Synthetic oligonucleotide
uauggggcggggaggggau

SEQ ID NO: 1963900 - RNA, 19 nt, Artificial Sequence
  Description of Artificial Sequence: Synthetic oligonucleotide
agggauuggagggcuucuc

SEQ ID NO: 1963901 - RNA, 19 nt, Artificial Sequence
  Description of Artificial Sequence: Synthetic oligonucleotide
cauuccgugucuggggcug

SEQ ID NO: 1963902 - RNA, 19 nt, Artificial Sequence
  Description of Artificial Sequence: Synthetic oligonucleotide
gggcauuccgugucugggg

SEQ ID NO: 1963903 - RNA, 19 nt, Artificial Sequence
  Description of Artificial Sequence: Synthetic oligonucleotide
cauccugcccaacacugga

SEQ ID NO: 1963904 - RNA, 19 nt, Artificial Sequence
  Description of Artificial Sequence: Synthetic oligonucleotide
uuccaucuuggcgcaaccu

SEQ ID NO: 1963905 - RNA, 19 nt, Artificial Sequence
  Description of Artificial Sequence: Synthetic oligonucleotide
gggaugaccaggcuuaagu

SEQ ID NO: 1963906 - RNA, 19 nt, Artificial Sequence
  Description of Artificial Sequence: Synthetic oligonucleotide
gcuuaagugggcaucccac

SEQ ID NO: 1963907 - RNA, 19 nt, Artificial Sequence
  Description of Artificial Sequence: Synthetic oligonucleotide
ggcgggcacaaauggaggc

SEQ ID NO: 1963908 - RNA, 19 nt, Artificial Sequence
  Description of Artificial Sequence: Synthetic oligonucleotide
gcuacaguucaauuucgaa

SEQ ID NO: 1963909 - RNA, 19 nt, Artificial Sequence
  Description of Artificial Sequence: Synthetic oligonucleotide
agccucaaauggguccaac

SEQ ID NO: 1963910 - RNA, 19 nt, Artificial Sequence
  Description of Artificial Sequence: Synthetic oligonucleotide
caacucaggggcuggggca

SEQ ID NO: 1963911 - RNA, 19 nt, Artificial Sequence
  Description of Artificial Sequence: Synthetic oligonucleotide
ggauuggagggcuucucca

SEQ ID NO: 1963912 - RNA, 19 nt, Artificial Sequence
  Description of Artificial Sequence: Synthetic oligonucleotide
cugggaccccuccccagcg

SEQ ID NO: 1963913 - RNA, 19 nt, Artificial Sequence
  Description of Artificial Sequence: Synthetic oligonucleotide
aaucgggccccgccccgug

SEQ ID NO: 1963914 - RNA, 19 nt, Artificial Sequence
  Description of Artificial Sequence: Synthetic oligonucleotide
uagcuugaaccgagggcau

SEQ ID NO: 1963915 - RNA, 19 nt, Artificial Sequence
  Description of Artificial Sequence: Synthetic oligonucleotide
ggcuuagagggagcggugg

SEQ ID NO: 1963916 - RNA, 19 nt, Artificial Sequence
  Description of Artificial Sequence: Synthetic oligonucleotide
uguauggggcggggagggg

SEQ ID NO: 1963917 - RNA, 19 nt, Artificial Sequence
  Description of Artificial Sequence: Synthetic oligonucleotide
cugggugcagcagguggcg

SEQ ID NO: 1963918 - RNA, 19 nt, Artificial Sequence
  Description of Artificial Sequence: Synthetic oligonucleotide
cggguuugccuucuaaugc

SEQ ID NO: 1963919 - RNA, 19 nt, Artificial Sequence
  Description of Artificial Sequence: Synthetic oligonucleotide
agggcaacuugggcuacag

SEQ ID NO: 1963920 - RNA, 19 nt, Artificial Sequence
  Description of Artificial Sequence: Synthetic oligonucleotide
cagugaacgcagcgugggc

SEQ ID NO: 1963921 - RNA, 19 nt, Artificial Sequence
  Description of Artificial Sequence: Synthetic oligonucleotide
cagccuaaguccggcagug

SEQ ID NO: 1963922 - RNA, 19 nt, Artificial Sequence
  Description of Artificial Sequence: Synthetic oligonucleotide
ccugcccaacacuggaagg

SEQ ID NO: 1963923 - RNA, 19 nt, Artificial Sequence
  Description of Artificial Sequence: Synthetic oligonucleotide
uggguccaacucaggggcu

SEQ ID NO: 1963924 - RNA, 19 nt, Artificial Sequence
  Description of Artificial Sequence: Synthetic oligonucleotide
uggcgcaaccuaggcauca

SEQ ID NO: 1963925 - RNA, 19 nt, Artificial Sequence
  Description of Artificial Sequence: Synthetic oligonucleotide
aaaccggggaggguagcuu

SEQ ID NO: 1963926 - RNA, 19 nt, Artificial Sequence
  Description of Artificial Sequence: Synthetic oligonucleotide
ucgggccccgccccgugag

SEQ ID NO: 1963927 - RNA, 19 nt, Artificial Sequence
  Description of Artificial Sequence: Synthetic oligonucleotide
ugggugcagcagguggcgg

SEQ ID NO: 1963928 - RNA, 19 nt, Artificial Sequence
  Description of Artificial Sequence: Synthetic oligonucleotide
aguccggcagugaaauggu

SEQ ID NO: 1963929 - RNA, 19 nt, Artificial Sequence
  Description of Artificial Sequence: Synthetic oligonucleotide
aggguagcuugaaccgagg

SEQ ID NO: 1963930 - RNA, 19 nt, Artificial Sequence
  Description of Artificial Sequence: Synthetic oligonucleotide
uggguccaucccugaauuc

SEQ ID NO: 1963931 - RNA, 19 nt, Artificial Sequence
  Description of Artificial Sequence: Synthetic oligonucleotide
uggcuugugcuguguguau

SEQ ID NO: 1963932 - RNA, 19 nt, Artificial Sequence
  Description of Artificial Sequence: Synthetic oligonucleotide
guuggccaccaucugugaa

SEQ ID NO: 1963933 - RNA, 19 nt, Artificial Sequence
  Description of Artificial Sequence: Synthetic oligonucleotide
cccugaauuccaucuuggc

SEQ ID NO: 1963934 - RNA, 19 nt, Artificial Sequence
  Description of Artificial Sequence: Synthetic oligonucleotide
uccgugucuggggcugggg

SEQ ID NO: 1963935 - RNA, 19 nt, Artificial Sequence
  Description of Artificial Sequence: Synthetic oligonucleotide
gggcuacaguucaauuucg

SEQ ID NO: 1963936 - RNA, 19 nt, Artificial Sequence
  Description of Artificial Sequence: Synthetic oligonucleotide
agagaagggcuuagaggga

SEQ ID NO: 1963937 - RNA, 19 nt, Artificial Sequence
  Description of Artificial Sequence: Synthetic oligonucleotide
aucgccagccuaaguccgg

SEQ ID NO: 1963938 - RNA, 19 nt, Artificial Sequence
  Description of Artificial Sequence: Synthetic oligonucleotide
cuaaguccggcagugaaau

SEQ ID NO: 1963939 - RNA, 19 nt, Artificial Sequence
  Description of Artificial Sequence: Synthetic oligonucleotide
agugggagcagggcaacuu

SEQ ID NO: 1963940 - RNA, 19 nt, Artificial Sequence
  Description of Artificial Sequence: Synthetic oligonucleotide
gggccaaggggccccauug

SEQ ID NO: 1963941 - RNA, 19 nt, Artificial Sequence
  Description of Artificial Sequence: Synthetic oligonucleotide
uuggcgcaaccuaggcauc

SEQ ID NO: 1963942 - RNA, 19 nt, Artificial Sequence
  Description of Artificial Sequence: Synthetic oligonucleotide
gcacccggggcaugggugg

SEQ ID NO: 1963943 - RNA, 19 nt, Artificial Sequence
  Description of Artificial Sequence: Synthetic oligonucleotide
gggagcagggcaacuuggg

SEQ ID NO: 1963944 - RNA, 19 nt, Artificial Sequence
  Description of Artificial Sequence: Synthetic oligonucleotide
uggacgggccugaccgcca

SEQ ID NO: 1963945 - RNA, 19 nt, Artificial Sequence
  Description of Artificial Sequence: Synthetic oligonucleotide
ucgccagccuaaguccggc

SEQ ID NO: 1963946 - RNA, 19 nt, Artificial Sequence
  Description of Artificial Sequence: Synthetic oligonucleotide
gcccacugagccucaaaug

SEQ ID NO: 1963947 - RNA, 19 nt, Artificial Sequence
  Description of Artificial Sequence: Synthetic oligonucleotide
gguggauaacccaggccug

SEQ ID NO: 1963948 - RNA, 19 nt, Artificial Sequence
  Description of Artificial Sequence: Synthetic oligonucleotide
uuccgugucuggggcuggg

SEQ ID NO: 1963949 - RNA, 19 nt, Artificial Sequence
  Description of Artificial Sequence: Synthetic oligonucleotide
ggcccuccggaagacacgg

SEQ ID NO: 1963950 - RNA, 19 nt, Artificial Sequence
  Description of Artificial Sequence: Synthetic oligonucleotide
ccuccggaagacacggccc

SEQ ID NO: 1963951 - RNA, 19 nt, Artificial Sequence
  Description of Artificial Sequence: Synthetic oligonucleotide
cugaccgccaggggcacug

SEQ ID NO: 1963952 - RNA, 19 nt, Artificial Sequence
  Description of Artificial Sequence: Synthetic oligonucleotide
ggcuuaagugggcauccca

SEQ ID NO: 1963953 - RNA, 19 nt, Artificial Sequence
  Description of Artificial Sequence: Synthetic oligonucleotide
guaggcgggcacaaaugga

SEQ ID NO: 1963954 - RNA, 19 nt, Artificial Sequence
  Description of Artificial Sequence: Synthetic oligonucleotide
auuccgugucuggggcugg

SEQ ID NO: 1963955 - RNA, 19 nt, Artificial Sequence
  Description of Artificial Sequence: Synthetic oligonucleotide
caccaacaugagguaacug

SEQ ID NO: 1963956 - RNA, 19 nt, Artificial Sequence
  Description of Artificial Sequence: Synthetic oligonucleotide
uccaagcaguguggcaggu

SEQ ID NO: 1963957 - RNA, 19 nt, Artificial Sequence
  Description of Artificial Sequence: Synthetic oligonucleotide
guggacgggccugaccgcc

SEQ ID NO: 1963958 - RNA, 19 nt, Artificial Sequence
  Description of Artificial Sequence: Synthetic oligonucleotide
ggaagguggaaagggcaac

SEQ ID NO: 1963959 - RNA, 19 nt, Artificial Sequence
  Description of Artificial Sequence: Synthetic oligonucleotide
guauggggcggggagggga

SEQ ID NO: 1963960 - RNA, 19 nt, Artificial Sequence
  Description of Artificial Sequence: Synthetic oligonucleotide
ccccgaaccccgaacgggg

SEQ ID NO: 1963961 - RNA, 19 nt, Artificial Sequence
  Description of Artificial Sequence: Synthetic oligonucleotide
aguacccgccaggcacccc

SEQ ID NO: 1963962 - RNA, 19 nt, Artificial Sequence
  Description of Artificial Sequence: Synthetic oligonucleotide
gacgggccugaccgccagg

SEQ ID NO: 1963963 - RNA, 19 nt, Artificial Sequence
  Description of Artificial Sequence: Synthetic oligonucleotide
caccagagaagggauugga

SEQ ID NO: 1963964 - RNA, 19 nt, Artificial Sequence
  Description of Artificial Sequence: Synthetic oligonucleotide
gcgggcaccaacaugaggu

SEQ ID NO: 1963965 - RNA, 19 nt, Artificial Sequence
  Description of Artificial Sequence: Synthetic oligonucleotide
augagguaacugagcgucu

SEQ ID NO: 1963966 - RNA, 19 nt, Artificial Sequence
  Description of Artificial Sequence: Synthetic oligonucleotide
gcauuauauucuuccuuua

SEQ ID NO: 1963967 - RNA, 19 nt, Artificial Sequence
  Description of Artificial Sequence: Synthetic oligonucleotide
gagggccgggcaagcacag

SEQ ID NO: 1963968 - RNA, 19 nt, Artificial Sequence
  Description of Artificial Sequence: Synthetic oligonucleotide
gcccaacacuggaaggugg

SEQ ID NO: 1963969 - RNA, 19 nt, Artificial Sequence
  Description of Artificial Sequence: Synthetic oligonucleotide
ccccauuggggcguggacg

SEQ ID NO: 1963970 - RNA, 19 nt, Artificial Sequence
  Description of Artificial Sequence: Synthetic oligonucleotide
gguccaacucaggggcugg

SEQ ID NO: 1963971 - RNA, 19 nt, Artificial Sequence
  Description of Artificial Sequence: Synthetic oligonucleotide
gcuugaaccgagggcauuc

SEQ ID NO: 1963972 - RNA, 19 nt, Artificial Sequence
  Description of Artificial Sequence: Synthetic oligonucleotide
gggccgggcaagcacagca

SEQ ID NO: 1963973 - RNA, 19 nt, Artificial Sequence
  Description of Artificial Sequence: Synthetic oligonucleotide
ggguaggcgggcacaaaug

SEQ ID NO: 1963974 - RNA, 19 nt, Artificial Sequence
  Description of Artificial Sequence: Synthetic oligonucleotide
gcuguguguauggggcggg

SEQ ID NO: 1963975 - RNA, 19 nt, Artificial Sequence
  Description of Artificial Sequence: Synthetic oligonucleotide
gggcauggguggauaaccc

SEQ ID NO: 1963976 - RNA, 19 nt, Artificial Sequence
  Description of Artificial Sequence: Synthetic oligonucleotide
ggcuugugcuguguguaug

SEQ ID NO: 1963977 - RNA, 19 nt, Artificial Sequence
  Description of Artificial Sequence: Synthetic oligonucleotide
gaaaccggggaggguagcu

SEQ ID NO: 1963978 - RNA, 19 nt, Artificial Sequence
  Description of Artificial Sequence: Synthetic oligonucleotide
aggggcaucgccagccuaa

SEQ ID NO: 1963979 - RNA, 19 nt, Artificial Sequence
  Description of Artificial Sequence: Synthetic oligonucleotide
ugguuccccuagccaggcu

SEQ ID NO: 1963980 - RNA, 19 nt, Artificial Sequence
  Description of Artificial Sequence: Synthetic oligonucleotide
guacccgccaggcaccccu

SEQ ID NO: 1963981 - RNA, 19 nt, Artificial Sequence
  Description of Artificial Sequence: Synthetic oligonucleotide
agggccgggcaagcacagc

SEQ ID NO: 1963982 - RNA, 19 nt, Artificial Sequence
  Description of Artificial Sequence: Synthetic oligonucleotide
gccuaaguccggcagugaa

SEQ ID NO: 1963983 - RNA, 19 nt, Artificial Sequence
  Description of Artificial Sequence: Synthetic oligonucleotide
uccccuccugagugugcug

SEQ ID NO: 1963984 - RNA, 19 nt, Artificial Sequence
  Description of Artificial Sequence: Synthetic oligonucleotide
ccgggcaagcacagcauug

SEQ ID NO: 1963985 - RNA, 19 nt, Artificial Sequence
  Description of Artificial Sequence: Synthetic oligonucleotide
accaucugugaagguguaa

SEQ ID NO: 1963986 - RNA, 19 nt, Artificial Sequence
  Description of Artificial Sequence: Synthetic oligonucleotide
ugaccgccaggggcacugg

SEQ ID NO: 1963987 - RNA, 19 nt, Artificial Sequence
  Description of Artificial Sequence: Synthetic oligonucleotide
acccgccaggcaccccuuc

SEQ ID NO: 1963988 - RNA, 19 nt, Artificial Sequence
  Description of Artificial Sequence: Synthetic oligonucleotide
gugagaccucggcccuccg

SEQ ID NO: 1963989 - RNA, 19 nt, Artificial Sequence
  Description of Artificial Sequence: Synthetic oligonucleotide
agaccucggcccuccggaa

SEQ ID NO: 1963990 - RNA, 19 nt, Artificial Sequence
  Description of Artificial Sequence: Synthetic oligonucleotide
uuggggcguggacgggccu

SEQ ID NO: 1963991 - RNA, 19 nt, Artificial Sequence
  Description of Artificial Sequence: Synthetic oligonucleotide
gggcaacagaaaccgggga

SEQ ID NO: 1963992 - RNA, 19 nt, Artificial Sequence
  Description of Artificial Sequence: Synthetic oligonucleotide
ccaucccugaauuccaucu

SEQ ID NO: 1963993 - RNA, 19 nt, Artificial Sequence
  Description of Artificial Sequence: Synthetic oligonucleotide
ggcuacaguucaauuucga

SEQ ID NO: 1963994 - RNA, 19 nt, Artificial Sequence
  Description of Artificial Sequence: Synthetic oligonucleotide
gccccgugagaccucggcc

SEQ ID NO: 1963995 - RNA, 19 nt, Artificial Sequence
  Description of Artificial Sequence: Synthetic oligonucleotide
ggaggguagcuugaaccga

SEQ ID NO: 1963996 - RNA, 19 nt, Artificial Sequence
  Description of Artificial Sequence: Synthetic oligonucleotide
cuugggcuacaguucaauu

SEQ ID NO: 1963997 - RNA, 19 nt, Artificial Sequence
  Description of Artificial Sequence: Synthetic oligonucleotide
ggagcccuuggcuugugcu

SEQ ID NO: 1963998 - RNA, 19 nt, Artificial Sequence
  Description of Artificial Sequence: Synthetic oligonucleotide
cccuagccaggcugggucc

SEQ ID NO: 1963999 - RNA, 19 nt, Artificial Sequence
  Description of Artificial Sequence: Synthetic oligonucleotide
ccgugucuggggcuggggc

SEQ ID NO: 1964000 - RNA, 19 nt, Artificial Sequence
  Description of Artificial Sequence: Synthetic oligonucleotide
ccaggcuuaagugggcauc

SEQ ID NO: 1964001 - RNA, 19 nt, Artificial Sequence
  Description of Artificial Sequence: Synthetic oligonucleotide
gagguaacugagcgucuuu

SEQ ID NO: 1964002 - RNA, 19 nt, Artificial Sequence
  Description of Artificial Sequence: Synthetic oligonucleotide
ggcggggaggggaugacca

SEQ ID NO: 1964003 - RNA, 19 nt, Artificial Sequence
  Description of Artificial Sequence: Synthetic oligonucleotide
ccuaaguccggcagugaaa

SEQ ID NO: 1964004 - RNA, 19 nt, Artificial Sequence
  Description of Artificial Sequence: Synthetic oligonucleotide
ggguccaacucaggggcug

SEQ ID NO: 1964005 - RNA, 19 nt, Artificial Sequence
  Description of Artificial Sequence: Synthetic oligonucleotide
ccuuggcuugugcugugug

SEQ ID NO: 1964006 - RNA, 19 nt, Artificial Sequence
  Description of Artificial Sequence: Synthetic oligonucleotide
gaccccuccccagcgggca

SEQ ID NO: 1964007 - RNA, 19 nt, Artificial Sequence
  Description of Artificial Sequence: Synthetic oligonucleotide
gccucaaauggguccaacu

SEQ ID NO: 1964008 - RNA, 19 nt, Artificial Sequence
  Description of Artificial Sequence: Synthetic oligonucleotide
ggcggagagaagggcuuag

SEQ ID NO: 1964009 - RNA, 19 nt, Artificial Sequence
  Description of Artificial Sequence: Synthetic oligonucleotide
ccccuagccaggcuggguc

SEQ ID NO: 1964010 - RNA, 19 nt, Artificial Sequence
  Description of Artificial Sequence: Synthetic oligonucleotide
ggcacccggggcaugggug

SEQ ID NO: 1964011 - RNA, 19 nt, Artificial Sequence
  Description of Artificial Sequence: Synthetic oligonucleotide
cccaaucgggccccgcccc

SEQ ID NO: 1964012 - RNA, 19 nt, Artificial Sequence
  Description of Artificial Sequence: Synthetic oligonucleotide
cuggguccaucccugaauu

SEQ ID NO: 1964013 - RNA, 19 nt, Artificial Sequence
  Description of Artificial Sequence: Synthetic oligonucleotide
uggcggagagaagggcuua

SEQ ID NO: 1964014 - RNA, 19 nt, Artificial Sequence
  Description of Artificial Sequence: Synthetic oligonucleotide
ggcguggacgggccugacc

SEQ ID NO: 1964015 - RNA, 19 nt, Artificial Sequence
  Description of Artificial Sequence: Synthetic oligonucleotide
agccuaaguccggcaguga

SEQ ID NO: 1964016 - RNA, 19 nt, Artificial Sequence
  Description of Artificial Sequence: Synthetic oligonucleotide
agcuugaaccgagggcauu

SEQ ID NO: 1964017 - RNA, 19 nt, Artificial Sequence
  Description of Artificial Sequence: Synthetic oligonucleotide
ggcacaaauggaggcugca

SEQ ID NO: 1964018 - RNA, 19 nt, Artificial Sequence
  Description of Artificial Sequence: Synthetic oligonucleotide
ggcguuggccaccaucugu

SEQ ID NO: 1964019 - RNA, 19 nt, Artificial Sequence
  Description of Artificial Sequence: Synthetic oligonucleotide
ccccuccugagugugcugc

SEQ ID NO: 1964020 - RNA, 19 nt, Artificial Sequence
  Description of Artificial Sequence: Synthetic oligonucleotide
gggcacaaauggaggcugc

SEQ ID NO: 1964021 - RNA, 19 nt, Artificial Sequence
  Description of Artificial Sequence: Synthetic oligonucleotide
ggagggccgggcaagcaca

SEQ ID NO: 1964022 - RNA, 19 nt, Artificial Sequence
  Description of Artificial Sequence: Synthetic oligonucleotide
auccugcccaacacuggaa

SEQ ID NO: 1964023 - RNA, 19 nt, Artificial Sequence
  Description of Artificial Sequence: Synthetic oligonucleotide
guguggcagguuggggcug

SEQ ID NO: 1964024 - RNA, 19 nt, Artificial Sequence
  Description of Artificial Sequence: Synthetic oligonucleotide
aucgggccccgccccguga

SEQ ID NO: 1964025 - RNA, 19 nt, Artificial Sequence
  Description of Artificial Sequence: Synthetic oligonucleotide
gcaaccuaggcaucacaau

SEQ ID NO: 1964026 - RNA, 19 nt, Artificial Sequence
  Description of Artificial Sequence: Synthetic oligonucleotide
gccuucuaaugcugcccac

SEQ ID NO: 1964027 - RNA, 19 nt, Artificial Sequence
  Description of Artificial Sequence: Synthetic oligonucleotide
ccaaucgggccccgccccg

SEQ ID NO: 1964028 - RNA, 19 nt, Artificial Sequence
  Description of Artificial Sequence: Synthetic oligonucleotide
gguggcggagagaagggcu

SEQ ID NO: 1964029 - RNA, 19 nt, Artificial Sequence
  Description of Artificial Sequence: Synthetic oligonucleotide
accggggaggguagcuuga

SEQ ID NO: 1964030 - RNA, 19 nt, Artificial Sequence
  Description of Artificial Sequence: Synthetic oligonucleotide
agaagggauuggagggcuu

SEQ ID NO: 1964031 - RNA, 19 nt, Artificial Sequence
  Description of Artificial Sequence: Synthetic oligonucleotide
ccgccaggggcacugggug

SEQ ID NO: 1964032 - RNA, 19 nt, Artificial Sequence
  Description of Artificial Sequence: Synthetic oligonucleotide
agcccggggagcagcauua

SEQ ID NO: 1964033 - RNA, 19 nt, Artificial Sequence
  Description of Artificial Sequence: Synthetic oligonucleotide
ccccaaucgggccccgccc

SEQ ID NO: 1964034 - RNA, 19 nt, Artificial Sequence
  Description of Artificial Sequence: Synthetic oligonucleotide
aggcugcaugugugugggu

SEQ ID NO: 1964035 - RNA, 19 nt, Artificial Sequence
  Description of Artificial Sequence: Synthetic oligonucleotide
ggggcaucgccagccuaag

SEQ ID NO: 1964036 - RNA, 19 nt, Artificial Sequence
  Description of Artificial Sequence: Synthetic oligonucleotide
ggccugaccgccaggggca

SEQ ID NO: 1964037 - RNA, 19 nt, Artificial Sequence
  Description of Artificial Sequence: Synthetic oligonucleotide
cagcggguuugccuucuaa

SEQ ID NO: 1964038 - RNA, 19 nt, Artificial Sequence
  Description of Artificial Sequence: Synthetic oligonucleotide
caggcacccggggcauggg

SEQ ID NO: 1964039 - RNA, 19 nt, Artificial Sequence
  Description of Artificial Sequence: Synthetic oligonucleotide
gggcuuagagggagcggug

SEQ ID NO: 1964040 - RNA, 19 nt, Artificial Sequence
  Description of Artificial Sequence: Synthetic oligonucleotide
acagcggguuugccuucua

SEQ ID NO: 1964041 - RNA, 19 nt, Artificial Sequence
  Description of Artificial Sequence: Synthetic oligonucleotide
gcuggguccaucccugaau

SEQ ID NO: 1964042 - RNA, 19 nt, Artificial Sequence
  Description of Artificial Sequence: Synthetic oligonucleotide
uacccgccaggcaccccuu

SEQ ID NO: 1964043 - RNA, 19 nt, Artificial Sequence
  Description of Artificial Sequence: Synthetic oligonucleotide
gcgcaaccuaggcaucaca

SEQ ID NO: 1964044 - RNA, 19 nt, Artificial Sequence
  Description of Artificial Sequence: Synthetic oligonucleotide
agaaggcguuggccaccau

SEQ ID NO: 1964045 - RNA, 19 nt, Artificial Sequence
  Description of Artificial Sequence: Synthetic oligonucleotide
gccccauuggggcguggac

SEQ ID NO: 1964046 - RNA, 19 nt, Artificial Sequence
  Description of Artificial Sequence: Synthetic oligonucleotide
ggcgcaaccuaggcaucac

SEQ ID NO: 1964047 - RNA, 19 nt, Artificial Sequence
  Description of Artificial Sequence: Synthetic oligonucleotide
gccuagcauuauauucuuc

SEQ ID NO: 1964048 - RNA, 19 nt, Artificial Sequence
  Description of Artificial Sequence: Synthetic oligonucleotide
caccuucauccugcccaac

SEQ ID NO: 1964049 - RNA, 19 nt, Artificial Sequence
  Description of Artificial Sequence: Synthetic oligonucleotide
gagccucaaauggguccaa

SEQ ID NO: 1964050 - RNA, 19 nt, Artificial Sequence
  Description of Artificial Sequence: Synthetic oligonucleotide
cgugagaccucggcccucc

SEQ ID NO: 1964051 - RNA, 19 nt, Artificial Sequence
  Description of Artificial Sequence: Synthetic oligonucleotide
cccggcuuuuccaagcagu

SEQ ID NO: 1964052 - RNA, 19 nt, Artificial Sequence
  Description of Artificial Sequence: Synthetic oligonucleotide
gggcaccaacaugagguaa

SEQ ID NO: 1964053 - RNA, 19 nt, Artificial Sequence
  Description of Artificial Sequence: Synthetic oligonucleotide
cugcccacugagccucaaa

SEQ ID NO: 1964054 - RNA, 19 nt, Artificial Sequence
  Description of Artificial Sequence: Synthetic oligonucleotide
ggcuggguccaucccugaa

SEQ ID NO: 1964055 - RNA, 19 nt, Artificial Sequence
  Description of Artificial Sequence: Synthetic oligonucleotide
ccccggcuuuuccaagcag

SEQ ID NO: 1964056 - RNA, 19 nt, Artificial Sequence
  Description of Artificial Sequence: Synthetic oligonucleotide
gcaccaacaugagguaacu

SEQ ID NO: 1964057 - RNA, 19 nt, Artificial Sequence
  Description of Artificial Sequence: Synthetic oligonucleotide
ggccuggguaggcgggcac

SEQ ID NO: 1964058 - RNA, 19 nt, Artificial Sequence
  Description of Artificial Sequence: Synthetic oligonucleotide
guggcggagagaagggcuu

SEQ ID NO: 1964059 - RNA, 19 nt, Artificial Sequence
  Description of Artificial Sequence: Synthetic oligonucleotide
cagggcaacuugggcuaca

SEQ ID NO: 1964060 - RNA, 19 nt, Artificial Sequence
  Description of Artificial Sequence: Synthetic oligonucleotide
ccuucuaaugcugcccacu

SEQ ID NO: 1964061 - RNA, 19 nt, Artificial Sequence
  Description of Artificial Sequence: Synthetic oligonucleotide
cguggacgggccugaccgc

SEQ ID NO: 1964062 - RNA, 19 nt, Artificial Sequence
  Description of Artificial Sequence: Synthetic oligonucleotide
cgccccgugagaccucggc

SEQ ID NO: 1964063 - RNA, 19 nt, Artificial Sequence
  Description of Artificial Sequence: Synthetic oligonucleotide
gggcacagcccggggagca

SEQ ID NO: 1964064 - RNA, 19 nt, Artificial Sequence
  Description of Artificial Sequence: Synthetic oligonucleotide
cggcccuccggaagacacg

SEQ ID NO: 1964065 - RNA, 19 nt, Artificial Sequence
  Description of Artificial Sequence: Synthetic oligonucleotide
ggcaucccaccuucauccu

SEQ ID NO: 1964066 - RNA, 19 nt, Artificial Sequence
  Description of Artificial Sequence: Synthetic oligonucleotide
gcauuccgugucuggggcu

SEQ ID NO: 1964067 - RNA, 19 nt, Artificial Sequence
  Description of Artificial Sequence: Synthetic oligonucleotide
ggcgggaaggccccggcuu

SEQ ID NO: 1964068 - RNA, 19 nt, Artificial Sequence
  Description of Artificial Sequence: Synthetic oligonucleotide
gggccccgccccgugagac

SEQ ID NO: 1964069 - RNA, 19 nt, Artificial Sequence
  Description of Artificial Sequence: Synthetic oligonucleotide
cucggcccuccggaagaca

SEQ ID NO: 1964070 - RNA, 19 nt, Artificial Sequence
  Description of Artificial Sequence: Synthetic oligonucleotide
gcagggcaacuugggcuac

SEQ ID NO: 1964071 - RNA, 19 nt, Artificial Sequence
  Description of Artificial Sequence: Synthetic oligonucleotide
gcgggcacaaauggaggcu

SEQ ID NO: 1964072 - RNA, 19 nt, Artificial Sequence
  Description of Artificial Sequence: Synthetic oligonucleotide
ggccccauuggggcgugga

SEQ ID NO: 1964073 - RNA, 19 nt, Artificial Sequence
  Description of Artificial Sequence: Synthetic oligonucleotide
cuggguaggcgggcacaaa

SEQ ID NO: 1964074 - RNA, 19 nt, Artificial Sequence
  Description of Artificial Sequence: Synthetic oligonucleotide
cggggaggguagcuugaac

SEQ ID NO: 1964075 - RNA, 19 nt, Artificial Sequence
  Description of Artificial Sequence: Synthetic oligonucleotide
ccaacacuggaagguggaa

SEQ ID NO: 1964076 - RNA, 19 nt, Artificial Sequence
  Description of Artificial Sequence: Synthetic oligonucleotide
gccuggguaggcgggcaca

SEQ ID NO: 1964077 - RNA, 19 nt, Artificial Sequence
  Description of Artificial Sequence: Synthetic oligonucleotide
acccggggcauggguggau

SEQ ID NO: 1964078 - RNA, 19 nt, Artificial Sequence
  Description of Artificial Sequence: Synthetic oligonucleotide
gcccggggagcagcauuag

SEQ ID NO: 1964079 - RNA, 19 nt, Artificial Sequence
  Description of Artificial Sequence: Synthetic oligonucleotide
cacagcggguuugccuucu

SEQ ID NO: 1964080 - RNA, 19 nt, Artificial Sequence
  Description of Artificial Sequence: Synthetic oligonucleotide
gggcaacuugggcuacagu

SEQ ID NO: 1964081 - RNA, 19 nt, Artificial Sequence
  Description of Artificial Sequence: Synthetic oligonucleotide
ccuagccaggcugggucca

SEQ ID NO: 1964082 - RNA, 19 nt, Artificial Sequence
  Description of Artificial Sequence: Synthetic oligonucleotide
cacccggggcaugggugga

SEQ ID NO: 1964083 - RNA, 19 nt, Artificial Sequence
  Description of Artificial Sequence: Synthetic oligonucleotide
gggcaucgccagccuaagu

SEQ ID NO: 1964084 - RNA, 19 nt, Artificial Sequence
  Description of Artificial Sequence: Synthetic oligonucleotide
caaucgggccccgccccgu

SEQ ID NO: 1964085 - RNA, 19 nt, Artificial Sequence
  Description of Artificial Sequence: Synthetic oligonucleotide
guccggcagugaaaugguu

SEQ ID NO: 1964086 - RNA, 19 nt, Artificial Sequence
  Description of Artificial Sequence: Synthetic oligonucleotide
gccugaccgccaggggcac

SEQ ID NO: 1964087 - RNA, 19 nt, Artificial Sequence
  Description of Artificial Sequence: Synthetic oligonucleotide
ccggggcauggguggauaa

SEQ ID NO: 1964088 - RNA, 19 nt, Artificial Sequence
  Description of Artificial Sequence: Synthetic oligonucleotide
cuagccaggcuggguccau

SEQ ID NO: 1964089 - RNA, 19 nt, Artificial Sequence
  Description of Artificial Sequence: Synthetic oligonucleotide
ggccaccaucugugaaggu

SEQ ID NO: 1964090 - RNA, 19 nt, Artificial Sequence
  Description of Artificial Sequence: Synthetic oligonucleotide
gcgggaaggccccggcuuu

SEQ ID NO: 1964091 - RNA, 19 nt, Artificial Sequence
  Description of Artificial Sequence: Synthetic oligonucleotide
cgggcaccaacaugaggua

SEQ ID NO: 1964092 - RNA, 19 nt, Artificial Sequence
  Description of Artificial Sequence: Synthetic oligonucleotide
cccgugagaccucggcccu

SEQ ID NO: 1964093 - RNA, 19 nt, Artificial Sequence
  Description of Artificial Sequence: Synthetic oligonucleotide
ccgccccgugagaccucgg

SEQ ID NO: 1964094 - RNA, 19 nt, Artificial Sequence
  Description of Artificial Sequence: Synthetic oligonucleotide
gggccccauuggggcgugg

SEQ ID NO: 1964095 - RNA, 19 nt, Artificial Sequence
  Description of Artificial Sequence: Synthetic oligonucleotide
ggccgggcaagcacagcau

SEQ ID NO: 1964096 - RNA, 19 nt, Artificial Sequence
  Description of Artificial Sequence: Synthetic oligonucleotide
ccgugagaccucggcccuc

SEQ ID NO: 1964097 - RNA, 19 nt, Artificial Sequence
  Description of Artificial Sequence: Synthetic oligonucleotide
cgccagccuaaguccggca

SEQ ID NO: 1964098 - RNA, 19 nt, Artificial Sequence
  Description of Artificial Sequence: Synthetic oligonucleotide
ccggggaggguagcuugaa

SEQ ID NO: 1964099 - RNA, 19 nt, Artificial Sequence
  Description of Artificial Sequence: Synthetic oligonucleotide
cccggggcauggguggaua

SEQ ID NO: 1964100 - RNA, 19 nt, Artificial Sequence
  Description of Artificial Sequence: Synthetic oligonucleotide
ccucuccuggguccccaau

SEQ ID NO: 1964101 - RNA, 19 nt, Artificial Sequence
  Description of Artificial Sequence: Synthetic oligonucleotide
ccccgccccgugagaccuc

SEQ ID NO: 1964102 - RNA, 19 nt, Artificial Sequence
  Description of Artificial Sequence: Synthetic oligonucleotide
ccccagcgggcaccaacau

SEQ ID NO: 1964103 - RNA, 19 nt, Artificial Sequence
  Description of Artificial Sequence: Synthetic oligonucleotide
cgggccccgccccgugaga

SEQ ID NO: 1964104 - RNA, 19 nt, Artificial Sequence
  Description of Artificial Sequence: Synthetic oligonucleotide
ccugaccgccaggggcacu

SEQ ID NO: 1964105 - RNA, 19 nt, Artificial Sequence
  Description of Artificial Sequence: Synthetic oligonucleotide
cgggaaggccccggcuuuu

SEQ ID NO: 1964106 - RNA, 19 nt, Artificial Sequence
  Description of Artificial Sequence: Synthetic oligonucleotide
acuaguauaucccagaucc

SEQ ID NO: 1964107 - RNA, 19 nt, Artificial Sequence
  Description of Artificial Sequence: Synthetic oligonucleotide
aaaucauccguucucaugg

SEQ ID NO: 1964108 - RNA, 19 nt, Artificial Sequence
  Description of Artificial Sequence: Synthetic oligonucleotide
uuuguucugaggaagaagg

SEQ ID NO: 1964109 - RNA, 19 nt, Artificial Sequence
  Description of Artificial Sequence: Synthetic oligonucleotide
aaaagagagcccuugagag

SEQ ID NO: 1964110 - RNA, 19 nt, Artificial Sequence
  Description of Artificial Sequence: Synthetic oligonucleotide
aauaauggaacucuuggcu

SEQ ID NO: 1964111 - RNA, 19 nt, Artificial Sequence
  Description of Artificial Sequence: Synthetic oligonucleotide
ucuguaaacuauaacuugg

SEQ ID NO: 1964112 - RNA, 19 nt, Artificial Sequence
  Description of Artificial Sequence: Synthetic oligonucleotide
uaggguaaaucucugaagg

SEQ ID NO: 1964113 - RNA, 19 nt, Artificial Sequence
  Description of Artificial Sequence: Synthetic oligonucleotide
agaauaauggaacucuugg

SEQ ID NO: 1964114 - RNA, 19 nt, Artificial Sequence
  Description of Artificial Sequence: Synthetic oligonucleotide
uccauuauaggguaaaucu

SEQ ID NO: 1964115 - RNA, 19 nt, Artificial Sequence
  Description of Artificial Sequence: Synthetic oligonucleotide
aaauguaagugauacagau

SEQ ID NO: 1964116 - RNA, 19 nt, Artificial Sequence
  Description of Artificial Sequence: Synthetic oligonucleotide
aauaugacuucccacauau

SEQ ID NO: 1964117 - RNA, 19 nt, Artificial Sequence
  Description of Artificial Sequence: Synthetic oligonucleotide
acaaauguaagugauacag

SEQ ID NO: 1964118 - RNA, 19 nt, Artificial Sequence
  Description of Artificial Sequence: Synthetic oligonucleotide
ucucuugagauccacauca

SEQ ID NO: 1964119 - RNA, 19 nt, Artificial Sequence
  Description of Artificial Sequence: Synthetic oligonucleotide
uuccacaaugaaaagagag

SEQ ID NO: 1964120 - RNA, 19 nt, Artificial Sequence
  Description of Artificial Sequence: Synthetic oligonucleotide
uuauuuuaaucuuuauugc

SEQ ID NO: 1964121 - RNA, 19 nt, Artificial Sequence
  Description of Artificial Sequence: Synthetic oligonucleotide
ugaaaaucgaaccuuucug

SEQ ID NO: 1964122 - RNA, 19 nt, Artificial Sequence
  Description of Artificial Sequence: Synthetic oligonucleotide
aaagucacccuuucagugg

SEQ ID NO: 1964123 - RNA, 19 nt, Artificial Sequence
  Description of Artificial Sequence: Synthetic oligonucleotide
aacguuuugucaaagucac

SEQ ID NO: 1964124 - RNA, 19 nt, Artificial Sequence
  Description of Artificial Sequence: Synthetic oligonucleotide
uggaauuuucagcuggugg

SEQ ID NO: 1964125 - RNA, 19 nt, Artificial Sequence
  Description of Artificial Sequence: Synthetic oligonucleotide
uaugacuucccacauauuc

SEQ ID NO: 1964126 - RNA, 19 nt, Artificial Sequence
  Description of Artificial Sequence: Synthetic oligonucleotide
aacuugguuguucaaauga

SEQ ID NO: 1964127 - RNA, 19 nt, Artificial Sequence
  Description of Artificial Sequence: Synthetic oligonucleotide
ucacuaauaccacuccucg

SEQ ID NO: 1964128 - RNA, 19 nt, Artificial Sequence
  Description of Artificial Sequence: Synthetic oligonucleotide
acauucgaaagauaguguc

SEQ ID NO: 1964129 - RNA, 19 nt, Artificial Sequence
  Description of Artificial Sequence: Synthetic oligonucleotide
agcaauaaaauccuucucu

SEQ ID NO: 1964130 - RNA, 19 nt, Artificial Sequence
  Description of Artificial Sequence: Synthetic oligonucleotide
agugucaacuuuuaaaaca

SEQ ID NO: 1964131 - RNA, 19 nt, Artificial Sequence
  Description of Artificial Sequence: Synthetic oligonucleotide
ucuuucacuaguauauccc

SEQ ID NO: 1964132 - RNA, 19 nt, Artificial Sequence
  Description of Artificial Sequence: Synthetic oligonucleotide
uacagauuuggcuugcuag

SEQ ID NO: 1964133 - RNA, 19 nt, Artificial Sequence
  Description of Artificial Sequence: Synthetic oligonucleotide
ucucauggaauuuucagcu

SEQ ID NO: 1964134 - RNA, 19 nt, Artificial Sequence
  Description of Artificial Sequence: Synthetic oligonucleotide
uguuuuaauguccugggaa

SEQ ID NO: 1964135 - RNA, 19 nt, Artificial Sequence
  Description of Artificial Sequence: Synthetic oligonucleotide
gaugauaacuuuuggcuug

SEQ ID NO: 1964136 - RNA, 19 nt, Artificial Sequence
  Description of Artificial Sequence: Synthetic oligonucleotide
acaucugcuacuuuaucgg

SEQ ID NO: 1964137 - RNA, 19 nt, Artificial Sequence
  Description of Artificial Sequence: Synthetic oligonucleotide
gauuuggcuugcuagaggc

SEQ ID NO: 1964138 - RNA, 19 nt, Artificial Sequence
  Description of Artificial Sequence: Synthetic oligonucleotide
uugucuuucaagcuugggc

SEQ ID NO: 1964139 - RNA, 19 nt, Artificial Sequence
  Description of Artificial Sequence: Synthetic oligonucleotide
uccuaaaacagguacagaa

SEQ ID NO: 1964140 - RNA, 19 nt, Artificial Sequence
  Description of Artificial Sequence: Synthetic oligonucleotide
ucagcaaauuccuucacug

SEQ ID NO: 1964141 - RNA, 19 nt, Artificial Sequence
  Description of Artificial Sequence: Synthetic oligonucleotide
ucuccaagaaacauugucu

SEQ ID NO: 1964142 - RNA, 19 nt, Artificial Sequence
  Description of Artificial Sequence: Synthetic oligonucleotide
agauaaugagagcaagacg

SEQ ID NO: 1964143 - RNA, 19 nt, Artificial Sequence
  Description of Artificial Sequence: Synthetic oligonucleotide
auaaaauccuucucuaugu

SEQ ID NO: 1964144 - RNA, 19 nt, Artificial Sequence
  Description of Artificial Sequence: Synthetic oligonucleotide
ugaaucuuucacuaauacc

SEQ ID NO: 1964145 - RNA, 19 nt, Artificial Sequence
  Description of Artificial Sequence: Synthetic oligonucleotide
gauaaugagagcaagacgu

SEQ ID NO: 1964146 - RNA, 19 nt, Artificial Sequence
  Description of Artificial Sequence: Synthetic oligonucleotide
uaagaauuucuuuccagug

SEQ ID NO: 1964147 - RNA, 19 nt, Artificial Sequence
  Description of Artificial Sequence: Synthetic oligonucleotide
gauagugucaacuuuuaaa

SEQ ID NO: 1964148 - RNA, 19 nt, Artificial Sequence
  Description of Artificial Sequence: Synthetic oligonucleotide
ugggcagucagcaaauucc

SEQ ID NO: 1964149 - RNA, 19 nt, Artificial Sequence
  Description of Artificial Sequence: Synthetic oligonucleotide
uuuaaucuuuauugcauca

SEQ ID NO: 1964150 - RNA, 19 nt, Artificial Sequence
  Description of Artificial Sequence: Synthetic oligonucleotide
uacuuuaucggaauaugac

SEQ ID NO: 1964151 - RNA, 19 nt, Artificial Sequence
  Description of Artificial Sequence: Synthetic oligonucleotide
aauccuucucuaugugcgc

SEQ ID NO: 1964152 - RNA, 19 nt, Artificial Sequence
  Description of Artificial Sequence: Synthetic oligonucleotide
guaagugauacagauuugg

SEQ ID NO: 1964153 - RNA, 19 nt, Artificial Sequence
  Description of Artificial Sequence: Synthetic oligonucleotide
ucuaaggagcauaacuuca

SEQ ID NO: 1964154 - RNA, 19 nt, Artificial Sequence
  Description of Artificial Sequence: Synthetic oligonucleotide
acuaauaccacuccucggu

SEQ ID NO: 1964155 - RNA, 19 nt, Artificial Sequence
  Description of Artificial Sequence: Synthetic oligonucleotide
aguuccacaaugaaaagag

SEQ ID NO: 1964156 - RNA, 19 nt, Artificial Sequence
  Description of Artificial Sequence: Synthetic oligonucleotide
agugauacagauuuggcuu

SEQ ID NO: 1964157 - RNA, 19 nt, Artificial Sequence
  Description of Artificial Sequence: Synthetic oligonucleotide
uguucaaaugaaaaucgaa

SEQ ID NO: 1964158 - RNA, 19 nt, Artificial Sequence
  Description of Artificial Sequence: Synthetic oligonucleotide
aacuauaacuugguuguuc

SEQ ID NO: 1964159 - RNA, 19 nt, Artificial Sequence
  Description of Artificial Sequence: Synthetic oligonucleotide
ucuacugaaucuuucacua

SEQ ID NO: 1964160 - RNA, 19 nt, Artificial Sequence
  Description of Artificial Sequence: Synthetic oligonucleotide
acuuuaucggaauaugacu

SEQ ID NO: 1964161 - RNA, 19 nt, Artificial Sequence
  Description of Artificial Sequence: Synthetic oligonucleotide
agaaggauauccucccugg

SEQ ID NO: 1964162 - RNA, 19 nt, Artificial Sequence
  Description of Artificial Sequence: Synthetic oligonucleotide
agaccaugcauauucuuuc

SEQ ID NO: 1964163 - RNA, 19 nt, Artificial Sequence
  Description of Artificial Sequence: Synthetic oligonucleotide
ucuuucacuaauaccacuc

SEQ ID NO: 1964164 - RNA, 19 nt, Artificial Sequence
  Description of Artificial Sequence: Synthetic oligonucleotide
cacaagaccaugcauauuc

SEQ ID NO: 1964165 - RNA, 19 nt, Artificial Sequence
  Description of Artificial Sequence: Synthetic oligonucleotide
aagaaggauauccucccug

SEQ ID NO: 1964166 - RNA, 19 nt, Artificial Sequence
  Description of Artificial Sequence: Synthetic oligonucleotide
augugcgcuuucuuaaugc

SEQ ID NO: 1964167 - RNA, 19 nt, Artificial Sequence
  Description of Artificial Sequence: Synthetic oligonucleotide
ugggcuguuucuaaggagc

SEQ ID NO: 1964168 - RNA, 19 nt, Artificial Sequence
  Description of Artificial Sequence: Synthetic oligonucleotide
aucuguaaacuauaacuug

SEQ ID NO: 1964169 - RNA, 19 nt, Artificial Sequence
  Description of Artificial Sequence: Synthetic oligonucleotide
aauaccacuccucgguucu

SEQ ID NO: 1964170 - RNA, 19 nt, Artificial Sequence
  Description of Artificial Sequence: Synthetic oligonucleotide
uugguuguucaaaugaaaa

SEQ ID NO: 1964171 - RNA, 19 nt, Artificial Sequence
  Description of Artificial Sequence: Synthetic oligonucleotide
aaaaucgaaccuuucugaa

SEQ ID NO: 1964172 - RNA, 19 nt, Artificial Sequence
  Description of Artificial Sequence: Synthetic oligonucleotide
uuuuaaucuuuauugcauc

SEQ ID NO: 1964173 - RNA, 19 nt, Artificial Sequence
  Description of Artificial Sequence: Synthetic oligonucleotide
auuggcaugauuccuaaaa

SEQ ID NO: 1964174 - RNA, 19 nt, Artificial Sequence
  Description of Artificial Sequence: Synthetic oligonucleotide
uacagaauaauggaacucu

SEQ ID NO: 1964175 - RNA, 19 nt, Artificial Sequence
  Description of Artificial Sequence: Synthetic oligonucleotide
cuuucugaaaauguccucc

SEQ ID NO: 1964176 - RNA, 19 nt, Artificial Sequence
  Description of Artificial Sequence: Synthetic oligonucleotide
gaaaaguacugucagaagu

SEQ ID NO: 1964177 - RNA, 19 nt, Artificial Sequence
  Description of Artificial Sequence: Synthetic oligonucleotide
cuuuccguaucuuuugggc

SEQ ID NO: 1964178 - RNA, 19 nt, Artificial Sequence
  Description of Artificial Sequence: Synthetic oligonucleotide
uucuaauuggcaugauucc

SEQ ID NO: 1964179 - RNA, 19 nt, Artificial Sequence
  Description of Artificial Sequence: Synthetic oligonucleotide
acuauaacuugguuguuca

SEQ ID NO: 1964180 - RNA, 19 nt, Artificial Sequence
  Description of Artificial Sequence: Synthetic oligonucleotide
auaggguaaaucucugaag

SEQ ID NO: 1964181 - RNA, 19 nt, Artificial Sequence
  Description of Artificial Sequence: Synthetic oligonucleotide
gaaaagagagcccuugaga

SEQ ID NO: 1964182 - RNA, 19 nt, Artificial Sequence
  Description of Artificial Sequence: Synthetic oligonucleotide
caacauucgaaagauagug

SEQ ID NO: 1964183 - RNA, 19 nt, Artificial Sequence
  Description of Artificial Sequence: Synthetic oligonucleotide
ucuucuacugaaucuuuca

SEQ ID NO: 1964184 - RNA, 19 nt, Artificial Sequence
  Description of Artificial Sequence: Synthetic oligonucleotide
augacuucccacauauucc

SEQ ID NO: 1964185 - RNA, 19 nt, Artificial Sequence
  Description of Artificial Sequence: Synthetic oligonucleotide
uccguugcagauaaugaga

SEQ ID NO: 1964186 - RNA, 19 nt, Artificial Sequence
  Description of Artificial Sequence: Synthetic oligonucleotide
auuccuaaaacagguacag

SEQ ID NO: 1964187 - RNA, 19 nt, Artificial Sequence
  Description of Artificial Sequence: Synthetic oligonucleotide
aaugaaaaucgaaccuuuc

SEQ ID NO: 1964188 - RNA, 19 nt, Artificial Sequence
  Description of Artificial Sequence: Synthetic oligonucleotide
uucacuaauaccacuccuc

SEQ ID NO: 1964189 - RNA, 19 nt, Artificial Sequence
  Description of Artificial Sequence: Synthetic oligonucleotide
guggauguauccauuauag

SEQ ID NO: 1964190 - RNA, 19 nt, Artificial Sequence
  Description of Artificial Sequence: Synthetic oligonucleotide
aaaguguucaacauucgaa

SEQ ID NO: 1964191 - RNA, 19 nt, Artificial Sequence
  Description of Artificial Sequence: Synthetic oligonucleotide
acaaugaaaagagagcccu

SEQ ID NO: 1964192 - RNA, 19 nt, Artificial Sequence
  Description of Artificial Sequence: Synthetic oligonucleotide
aagagguagaaacguuuug

SEQ ID NO: 1964193 - RNA, 19 nt, Artificial Sequence
  Description of Artificial Sequence: Synthetic oligonucleotide
uucauuugcuugaugaguu

SEQ ID NO: 1964194 - RNA, 19 nt, Artificial Sequence
  Description of Artificial Sequence: Synthetic oligonucleotide
aggagcauaacuucaggcu

SEQ ID NO: 1964195 - RNA, 19 nt, Artificial Sequence
  Description of Artificial Sequence: Synthetic oligonucleotide
agagaaaugucacuucuaa

SEQ ID NO: 1964196 - RNA, 19 nt, Artificial Sequence
  Description of Artificial Sequence: Synthetic oligonucleotide
auaacuugguuguucaaau

SEQ ID NO: 1964197 - RNA, 19 nt, Artificial Sequence
  Description of Artificial Sequence: Synthetic oligonucleotide
uggauguauccauuauagg

SEQ ID NO: 1964198 - RNA, 19 nt, Artificial Sequence
  Description of Artificial Sequence: Synthetic oligonucleotide
agaaaaguacugucagaag

SEQ ID NO: 1964199 - RNA, 19 nt, Artificial Sequence
  Description of Artificial Sequence: Synthetic oligonucleotide
uguucaacauucgaaagau

SEQ ID NO: 1964200 - RNA, 19 nt, Artificial Sequence
  Description of Artificial Sequence: Synthetic oligonucleotide
uuguucaaaugaaaaucga

SEQ ID NO: 1964201 - RNA, 19 nt, Artificial Sequence
  Description of Artificial Sequence: Synthetic oligonucleotide
acuucccacauauuccuuc

SEQ ID NO: 1964202 - RNA, 19 nt, Artificial Sequence
  Description of Artificial Sequence: Synthetic oligonucleotide
uugaugaguuccacaauga

SEQ ID NO: 1964203 - RNA, 19 nt, Artificial Sequence
  Description of Artificial Sequence: Synthetic oligonucleotide
aaaucgaaccuuucugaaa

SEQ ID NO: 1964204 - RNA, 19 nt, Artificial Sequence
  Description of Artificial Sequence: Synthetic oligonucleotide
uggcaugauuccuaaaaca

SEQ ID NO: 1964205 - RNA, 19 nt, Artificial Sequence
  Description of Artificial Sequence: Synthetic oligonucleotide
uuucacuaauaccacuccu

SEQ ID NO: 1964206 - RNA, 19 nt, Artificial Sequence
  Description of Artificial Sequence: Synthetic oligonucleotide
cuaaggagcauaacuucag

SEQ ID NO: 1964207 - RNA, 19 nt, Artificial Sequence
  Description of Artificial Sequence: Synthetic oligonucleotide
aaagauagugucaacuuuu

SEQ ID NO: 1964208 - RNA, 19 nt, Artificial Sequence
  Description of Artificial Sequence: Synthetic oligonucleotide
uuucucuugagauccacau

SEQ ID NO: 1964209 - RNA, 19 nt, Artificial Sequence
  Description of Artificial Sequence: Synthetic oligonucleotide
uuucauuugcuugaugagu

SEQ ID NO: 1964210 - RNA, 19 nt, Artificial Sequence
  Description of Artificial Sequence: Synthetic oligonucleotide
  modified_base (7)..(7): a, c, u, g, unknown or other
ugaaggnuucucuuuccgu

SEQ ID NO: 1964211 - RNA, 19 nt, Artificial Sequence
  Description of Artificial Sequence: Synthetic oligonucleotide
ucgaaagauagugucaacu

SEQ ID NO: 1964212 - RNA, 19 nt, Artificial Sequence
  Description of Artificial Sequence: Synthetic oligonucleotide
uuggcaugauuccuaaaac

SEQ ID NO: 1964213 - RNA, 19 nt, Artificial Sequence
  Description of Artificial Sequence: Synthetic oligonucleotide
cauaacuucaggcucccac

SEQ ID NO: 1964214 - RNA, 19 nt, Artificial Sequence
  Description of Artificial Sequence: Synthetic oligonucleotide
uucuaaggagcauaacuuc

SEQ ID NO: 1964215 - RNA, 19 nt, Artificial Sequence
  Description of Artificial Sequence: Synthetic oligonucleotide
auuagccaucuccagagcu

SEQ ID NO: 1964216 - RNA, 19 nt, Artificial Sequence
  Description of Artificial Sequence: Synthetic oligonucleotide
cacaaugaaaagagagccc

SEQ ID NO: 1964217 - RNA, 19 nt, Artificial Sequence
  Description of Artificial Sequence: Synthetic oligonucleotide
cagauaaugagagcaagac

SEQ ID NO: 1964218 - RNA, 19 nt, Artificial Sequence
  Description of Artificial Sequence: Synthetic oligonucleotide
uguaagugauacagauuug

SEQ ID NO: 1964219 - RNA, 19 nt, Artificial Sequence
  Description of Artificial Sequence: Synthetic oligonucleotide
cugggaagagguagaaacg

SEQ ID NO: 1964220 - RNA, 19 nt, Artificial Sequence
  Description of Artificial Sequence: Synthetic oligonucleotide
uuuccguaucuuuugggcu

SEQ ID NO: 1964221 - RNA, 19 nt, Artificial Sequence
  Description of Artificial Sequence: Synthetic oligonucleotide
uuccuggauaccaugggac

SEQ ID NO: 1964222 - RNA, 19 nt, Artificial Sequence
  Description of Artificial Sequence: Synthetic oligonucleotide
  modified_base (9)..(9): a, c, u, g, unknown or other
ucugaaggnuucucuuucc

SEQ ID NO: 1964223 - RNA, 19 nt, Artificial Sequence
  Description of Artificial Sequence: Synthetic oligonucleotide
ucuaauuggcaugauuccu

SEQ ID NO: 1964224 - RNA, 19 nt, Artificial Sequence
  Description of Artificial Sequence: Synthetic oligonucleotide
uaugugcgcuuucuuaaug

SEQ ID NO: 1964225 - RNA, 19 nt, Artificial Sequence
  Description of Artificial Sequence: Synthetic oligonucleotide
uuaucggaauaugacuucc

SEQ ID NO: 1964226 - RNA, 19 nt, Artificial Sequence
  Description of Artificial Sequence: Synthetic oligonucleotide
ugucacuucuaauuggcau

SEQ ID NO: 1964227 - RNA, 19 nt, Artificial Sequence
  Description of Artificial Sequence: Synthetic oligonucleotide
uuauaggguaaaucucuga

SEQ ID NO: 1964228 - RNA, 19 nt, Artificial Sequence
  Description of Artificial Sequence: Synthetic oligonucleotide
uaccaugggacaugaauac

SEQ ID NO: 1964229 - RNA, 19 nt, Artificial Sequence
  Description of Artificial Sequence: Synthetic oligonucleotide
uuuaucggaauaugacuuc

SEQ ID NO: 1964230 - RNA, 19 nt, Artificial Sequence
  Description of Artificial Sequence: Synthetic oligonucleotide
uucugaggaagaaggauau

SEQ ID NO: 1964231 - RNA, 19 nt, Artificial Sequence
  Description of Artificial Sequence: Synthetic oligonucleotide
acagauuuggcuugcuaga

SEQ ID NO: 1964232 - RNA, 19 nt, Artificial Sequence
  Description of Artificial Sequence: Synthetic oligonucleotide
ugaugauaacuuuuggcuu

SEQ ID NO: 1964233 - RNA, 19 nt, Artificial Sequence
  Description of Artificial Sequence: Synthetic oligonucleotide
agagcagaaagcaauaaaa

SEQ ID NO: 1964234 - RNA, 19 nt, Artificial Sequence
  Description of Artificial Sequence: Synthetic oligonucleotide
agguagaaacguuuuguca

SEQ ID NO: 1964235 - RNA, 19 nt, Artificial Sequence
  Description of Artificial Sequence: Synthetic oligonucleotide
gaagucuugugcucugggc

SEQ ID NO: 1964236 - RNA, 19 nt, Artificial Sequence
  Description of Artificial Sequence: Synthetic oligonucleotide
auccauuauaggguaaauc

SEQ ID NO: 1964237 - RNA, 19 nt, Artificial Sequence
  Description of Artificial Sequence: Synthetic oligonucleotide
ucagcuccguugcagauaa

SEQ ID NO: 1964238 - RNA, 19 nt, Artificial Sequence
  Description of Artificial Sequence: Synthetic oligonucleotide
uggaccggauuccagcucc

SEQ ID NO: 1964239 - RNA, 19 nt, Artificial Sequence
  Description of Artificial Sequence: Synthetic oligonucleotide
ugguuguucaaaugaaaau

SEQ ID NO: 1964240 - RNA, 19 nt, Artificial Sequence
  Description of Artificial Sequence: Synthetic oligonucleotide
ugcagauaaugagagcaag

SEQ ID NO: 1964241 - RNA, 19 nt, Artificial Sequence
  Description of Artificial Sequence: Synthetic oligonucleotide
gaaacauugucugguguug

SEQ ID NO: 1964242 - RNA, 19 nt, Artificial Sequence
  Description of Artificial Sequence: Synthetic oligonucleotide
uuuugucaaagucacccuu

SEQ ID NO: 1964243 - RNA, 19 nt, Artificial Sequence
  Description of Artificial Sequence: Synthetic oligonucleotide
ucugguguugaagagcaga

SEQ ID NO: 1964244 - RNA, 19 nt, Artificial Sequence
  Description of Artificial Sequence: Synthetic oligonucleotide
uguaaacuauaacuugguu

SEQ ID NO: 1964245 - RNA, 19 nt, Artificial Sequence
  Description of Artificial Sequence: Synthetic oligonucleotide
cuccguugcagauaaugag

SEQ ID NO: 1964246 - RNA, 19 nt, Artificial Sequence
  Description of Artificial Sequence: Synthetic oligonucleotide
ugagaggaugucuccaaga

SEQ ID NO: 1964247 - RNA, 19 nt, Artificial Sequence
  Description of Artificial Sequence: Synthetic oligonucleotide
aagucacccuuucaguggu

SEQ ID NO: 1964248 - RNA, 19 nt, Artificial Sequence
  Description of Artificial Sequence: Synthetic oligonucleotide
ugugcgcuuucuuaaugcc

SEQ ID NO: 1964249 - RNA, 19 nt, Artificial Sequence
  Description of Artificial Sequence: Synthetic oligonucleotide
  modified_base (5)..(5): a, c, u, g, unknown or other
aaggnuucucuuuccguau

SEQ ID NO: 1964250 - RNA, 19 nt, Artificial Sequence
  Description of Artificial Sequence: Synthetic oligonucleotide
cagaauaauggaacucuug

SEQ ID NO: 1964251 - RNA, 19 nt, Artificial Sequence
  Description of Artificial Sequence: Synthetic oligonucleotide
caucauucagagaaauguc

SEQ ID NO: 1964252 - RNA, 19 nt, Artificial Sequence
  Description of Artificial Sequence: Synthetic oligonucleotide
agagguagaaacguuuugu

SEQ ID NO: 1964253 - RNA, 19 nt, Artificial Sequence
  Description of Artificial Sequence: Synthetic oligonucleotide
auaauggaacucuuggcuu

SEQ ID NO: 1964254 - RNA, 19 nt, Artificial Sequence
  Description of Artificial Sequence: Synthetic oligonucleotide
ugaguuccacaaugaaaag

SEQ ID NO: 1964255 - RNA, 19 nt, Artificial Sequence
  Description of Artificial Sequence: Synthetic oligonucleotide
uaucggaauaugacuuccc

SEQ ID NO: 1964256 - RNA, 19 nt, Artificial Sequence
  Description of Artificial Sequence: Synthetic oligonucleotide
ugcgcuuucuuaaugccau

SEQ ID NO: 1964257 - RNA, 19 nt, Artificial Sequence
  Description of Artificial Sequence: Synthetic oligonucleotide
gguuguucaaaugaaaauc

SEQ ID NO: 1964258 - RNA, 19 nt, Artificial Sequence
  Description of Artificial Sequence: Synthetic oligonucleotide
gagguagaaacguuuuguc

SEQ ID NO: 1964259 - RNA, 19 nt, Artificial Sequence
  Description of Artificial Sequence: Synthetic oligonucleotide
aaaacaucugcuacuuuau

SEQ ID NO: 1964260 - RNA, 19 nt, Artificial Sequence
  Description of Artificial Sequence: Synthetic oligonucleotide
  modified_base (8)..(8): a, c, u, g, unknown or other
cugaaggnuucucuuuccg

SEQ ID NO: 1964261 - RNA, 19 nt, Artificial Sequence
  Description of Artificial Sequence: Synthetic oligonucleotide
ggcaugauuccuaaaacag

SEQ ID NO: 1964262 - RNA, 19 nt, Artificial Sequence
  Description of Artificial Sequence: Synthetic oligonucleotide
ucugcuacuuuaucggaau

SEQ ID NO: 1964263 - RNA, 19 nt, Artificial Sequence
  Description of Artificial Sequence: Synthetic oligonucleotide
aguacugucagaagucuug

SEQ ID NO: 1964264 - RNA, 19 nt, Artificial Sequence
  Description of Artificial Sequence: Synthetic oligonucleotide
aacauucgaaagauagugu

SEQ ID NO: 1964265 - RNA, 19 nt, Artificial Sequence
  Description of Artificial Sequence: Synthetic oligonucleotide
uaacuugguuguucaaaug

SEQ ID NO: 1964266 - RNA, 19 nt, Artificial Sequence
  Description of Artificial Sequence: Synthetic oligonucleotide
gcaucuguaaacuauaacu

SEQ ID NO: 1964267 - RNA, 19 nt, Artificial Sequence
  Description of Artificial Sequence: Synthetic oligonucleotide
cuucuacugaaucuuucac

SEQ ID NO: 1964268 - RNA, 19 nt, Artificial Sequence
  Description of Artificial Sequence: Synthetic oligonucleotide
gucuccaagaaacauuguc

SEQ ID NO: 1964269 - RNA, 19 nt, Artificial Sequence
  Description of Artificial Sequence: Synthetic oligonucleotide
gguagaaacguuuugucaa

SEQ ID NO: 1964270 - RNA, 19 nt, Artificial Sequence
  Description of Artificial Sequence: Synthetic oligonucleotide
  modified_base (4)..(4): a, c, u, g, unknown or other
aggnuucucuuuccguauc

SEQ ID NO: 1964271 - RNA, 19 nt, Artificial Sequence
  Description of Artificial Sequence: Synthetic oligonucleotide
uuccuuuguucugaggaag

SEQ ID NO: 1964272 - RNA, 19 nt, Artificial Sequence
  Description of Artificial Sequence: Synthetic oligonucleotide
gcauuagccaucuccagag

SEQ ID NO: 1964273 - RNA, 19 nt, Artificial Sequence
  Description of Artificial Sequence: Synthetic oligonucleotide
  modified_base (6)..(6): a, c, u, g, unknown or other
gaaggnuucucuuuccgua

SEQ ID NO: 1964274 - RNA, 19 nt, Artificial Sequence
  Description of Artificial Sequence: Synthetic oligonucleotide
  modified_base (13)..(13): a, c, u, g, unknown or other
aaucucugaaggnuucucu

SEQ ID NO: 1964275 - RNA, 19 nt, Artificial Sequence
  Description of Artificial Sequence: Synthetic oligonucleotide
ucccacauauuccuuccug

SEQ ID NO: 1964276 - RNA, 19 nt, Artificial Sequence
  Description of Artificial Sequence: Synthetic oligonucleotide
cauuauaggguaaaucucu

SEQ ID NO: 1964277 - RNA, 19 nt, Artificial Sequence
  Description of Artificial Sequence: Synthetic oligonucleotide
ucauccguucucauggaau

SEQ ID NO: 1964278 - RNA, 19 nt, Artificial Sequence
  Description of Artificial Sequence: Synthetic oligonucleotide
gauuccuaaaacagguaca

SEQ ID NO: 1964279 - RNA, 19 nt, Artificial Sequence
  Description of Artificial Sequence: Synthetic oligonucleotide
ucggaauaugacuucccac

SEQ ID NO: 1964280 - RNA, 19 nt, Artificial Sequence
  Description of Artificial Sequence: Synthetic oligonucleotide
ucacuaguauaucccagau

SEQ ID NO: 1964281 - RNA, 19 nt, Artificial Sequence
  Description of Artificial Sequence: Synthetic oligonucleotide
aucggaauaugacuuccca

SEQ ID NO: 1964282 - RNA, 19 nt, Artificial Sequence
  Description of Artificial Sequence: Synthetic oligonucleotide
aggauauccucccuggaaa

SEQ ID NO: 1964283 - RNA, 19 nt, Artificial Sequence
  Description of Artificial Sequence: Synthetic oligonucleotide
uuaaucuuuauugcaucau

SEQ ID NO: 1964284 - RNA, 19 nt, Artificial Sequence
  Description of Artificial Sequence: Synthetic oligonucleotide
cuacuuuaucggaauauga

SEQ ID NO: 1964285 - RNA, 19 nt, Artificial Sequence
  Description of Artificial Sequence: Synthetic oligonucleotide
gaugaguuccacaaugaaa

SEQ ID NO: 1964286 - RNA, 19 nt, Artificial Sequence
  Description of Artificial Sequence: Synthetic oligonucleotide
guguucaacauucgaaaga

SEQ ID NO: 1964287 - RNA, 19 nt, Artificial Sequence
  Description of Artificial Sequence: Synthetic oligonucleotide
ccacaaugaaaagagagcc

SEQ ID NO: 1964288 - RNA, 19 nt, Artificial Sequence
  Description of Artificial Sequence: Synthetic oligonucleotide
cuuucacuaguauauccca

SEQ ID NO: 1964289 - RNA, 19 nt, Artificial Sequence
  Description of Artificial Sequence: Synthetic oligonucleotide
ucacuucuaauuggcauga

SEQ ID NO: 1964290 - RNA, 19 nt, Artificial Sequence
  Description of Artificial Sequence: Synthetic oligonucleotide
cuugguccuggacaugugc

SEQ ID NO: 1964291 - RNA, 19 nt, Artificial Sequence
  Description of Artificial Sequence: Synthetic oligonucleotide
agagcaagacguguacgcg

SEQ ID NO: 1964292 - RNA, 19 nt, Artificial Sequence
  Description of Artificial Sequence: Synthetic oligonucleotide
cuuuguucugaggaagaag

SEQ ID NO: 1964293 - RNA, 19 nt, Artificial Sequence
  Description of Artificial Sequence: Synthetic oligonucleotide
cacuaauaccacuccucgg

SEQ ID NO: 1964294 - RNA, 19 nt, Artificial Sequence
  Description of Artificial Sequence: Synthetic oligonucleotide
  modified_base (16)..(16): a, c, u, g, unknown or other
guaaaucucugaaggnuuc

SEQ ID NO: 1964295 - RNA, 19 nt, Artificial Sequence
  Description of Artificial Sequence: Synthetic oligonucleotide
uaaugagagcaagacgugu

SEQ ID NO: 1964296 - RNA, 19 nt, Artificial Sequence
  Description of Artificial Sequence: Synthetic oligonucleotide
cuggaaaucauccguucuc

SEQ ID NO: 1964297 - RNA, 19 nt, Artificial Sequence
  Description of Artificial Sequence: Synthetic oligonucleotide
  modified_base (19)..(19): a, c, u, g, unknown or other
aggguaaaucucugaaggn

SEQ ID NO: 1964298 - RNA, 19 nt, Artificial Sequence
  Description of Artificial Sequence: Synthetic oligonucleotide
aagaccaugcauauucuuu

SEQ ID NO: 1964299 - RNA, 19 nt, Artificial Sequence
  Description of Artificial Sequence: Synthetic oligonucleotide
ucgaaccuuucugaaaaug

SEQ ID NO: 1964300 - RNA, 19 nt, Artificial Sequence
  Description of Artificial Sequence: Synthetic oligonucleotide
cauucgaaagauaguguca

SEQ ID NO: 1964301 - RNA, 19 nt, Artificial Sequence
  Description of Artificial Sequence: Synthetic oligonucleotide
uguacgcguggauguaucc

SEQ ID NO: 1964302 - RNA, 19 nt, Artificial Sequence
  Description of Artificial Sequence: Synthetic oligonucleotide
uagaaacguuuugucaaag

SEQ ID NO: 1964303 - RNA, 19 nt, Artificial Sequence
  Description of Artificial Sequence: Synthetic oligonucleotide
gaauuuucagcugguggac

SEQ ID NO: 1964304 - RNA, 19 nt, Artificial Sequence
  Description of Artificial Sequence: Synthetic oligonucleotide
aacauugucugguguugaa

SEQ ID NO: 1964305 - RNA, 19 nt, Artificial Sequence
  Description of Artificial Sequence: Synthetic oligonucleotide
ucaagcuugggcacuucaa

SEQ ID NO: 1964306 - RNA, 19 nt, Artificial Sequence
  Description of Artificial Sequence: Synthetic oligonucleotide
auauccucccuggaaauca

SEQ ID NO: 1964307 - RNA, 19 nt, Artificial Sequence
  Description of Artificial Sequence: Synthetic oligonucleotide
ugguggaccggauuccagc

SEQ ID NO: 1964308 - RNA, 19 nt, Artificial Sequence
  Description of Artificial Sequence: Synthetic oligonucleotide
gauaacuuuuggcuugucu

SEQ ID NO: 1964309 - RNA, 19 nt, Artificial Sequence
  Description of Artificial Sequence: Synthetic oligonucleotide
aaacauugucugguguuga

SEQ ID NO: 1964310 - RNA, 19 nt, Artificial Sequence
  Description of Artificial Sequence: Synthetic oligonucleotide
uugucaaagucacccuuuc

SEQ ID NO: 1964311 - RNA, 19 nt, Artificial Sequence
  Description of Artificial Sequence: Synthetic oligonucleotide
aaugagagcaagacgugua

SEQ ID NO: 1964312 - RNA, 19 nt, Artificial Sequence
  Description of Artificial Sequence: Synthetic oligonucleotide
auuauaggguaaaucucug

SEQ ID NO: 1964313 - RNA, 19 nt, Artificial Sequence
  Description of Artificial Sequence: Synthetic oligonucleotide
aauguaagugauacagauu

SEQ ID NO: 1964314 - RNA, 19 nt, Artificial Sequence
  Description of Artificial Sequence: Synthetic oligonucleotide
cuaagaauuucuuuccagu

SEQ ID NO: 1964315 - RNA, 19 nt, Artificial Sequence
  Description of Artificial Sequence: Synthetic oligonucleotide
ucuuuugggcuguuucuaa

SEQ ID NO: 1964316 - RNA, 19 nt, Artificial Sequence
  Description of Artificial Sequence: Synthetic oligonucleotide
acuucuaauuggcaugauu

SEQ ID NO: 1964317 - RNA, 19 nt, Artificial Sequence
  Description of Artificial Sequence: Synthetic oligonucleotide
ucaguggugggcaucugua

SEQ ID NO: 1964318 - RNA, 19 nt, Artificial Sequence
  Description of Artificial Sequence: Synthetic oligonucleotide
auguauccauuauagggua

SEQ ID NO: 1964319 - RNA, 19 nt, Artificial Sequence
  Description of Artificial Sequence: Synthetic oligonucleotide
acucccgccagguagcagu

SEQ ID NO: 1964320 - RNA, 19 nt, Artificial Sequence
  Description of Artificial Sequence: Synthetic oligonucleotide
uugggcacuucaaaguguu

SEQ ID NO: 1964321 - RNA, 19 nt, Artificial Sequence
  Description of Artificial Sequence: Synthetic oligonucleotide
agcauaacuucaggcuccc

SEQ ID NO: 1964322 - RNA, 19 nt, Artificial Sequence
  Description of Artificial Sequence: Synthetic oligonucleotide
aauguccuccaagucacaa

SEQ ID NO: 1964323 - RNA, 19 nt, Artificial Sequence
  Description of Artificial Sequence: Synthetic oligonucleotide
agcgaccucauuucucuug

SEQ ID NO: 1964324 - RNA, 19 nt, Artificial Sequence
  Description of Artificial Sequence: Synthetic oligonucleotide
agcuccguugcagauaaug

SEQ ID NO: 1964325 - RNA, 19 nt, Artificial Sequence
  Description of Artificial Sequence: Synthetic oligonucleotide
gaccucauuucucuugaga

SEQ ID NO: 1964326 - RNA, 19 nt, Artificial Sequence
  Description of Artificial Sequence: Synthetic oligonucleotide
caaaguguucaacauucga

SEQ ID NO: 1964327 - RNA, 19 nt, Artificial Sequence
  Description of Artificial Sequence: Synthetic oligonucleotide
ccacuaagaauuucuuucc

SEQ ID NO: 1964328 - RNA, 19 nt, Artificial Sequence
  Description of Artificial Sequence: Synthetic oligonucleotide
ggagcauaacuucaggcuc

SEQ ID NO: 1964329 - RNA, 19 nt, Artificial Sequence
  Description of Artificial Sequence: Synthetic oligonucleotide
acauugucugguguugaag

SEQ ID NO: 1964330 - RNA, 19 nt, Artificial Sequence
  Description of Artificial Sequence: Synthetic oligonucleotide
cuuuaucggaauaugacuu

SEQ ID NO: 1964331 - RNA, 19 nt, Artificial Sequence
  Description of Artificial Sequence: Synthetic oligonucleotide
aguagcgaccucauuucuc

SEQ ID NO: 1964332 - RNA, 19 nt, Artificial Sequence
  Description of Artificial Sequence: Synthetic oligonucleotide
uucucuaugugcgcuuucu

SEQ ID NO: 1964333 - RNA, 19 nt, Artificial Sequence
  Description of Artificial Sequence: Synthetic oligonucleotide
auaaugagagcaagacgug

SEQ ID NO: 1964334 - RNA, 19 nt, Artificial Sequence
  Description of Artificial Sequence: Synthetic oligonucleotide
ugauacagauuuggcuugc

SEQ ID NO: 1964335 - RNA, 19 nt, Artificial Sequence
  Description of Artificial Sequence: Synthetic oligonucleotide
cuaauuggcaugauuccua

SEQ ID NO: 1964336 - RNA, 19 nt, Artificial Sequence
  Description of Artificial Sequence: Synthetic oligonucleotide
aguggugggcaucuguaaa

SEQ ID NO: 1964337 - RNA, 19 nt, Artificial Sequence
  Description of Artificial Sequence: Synthetic oligonucleotide
acaucagcuccguugcaga

SEQ ID NO: 1964338 - RNA, 19 nt, Artificial Sequence
  Description of Artificial Sequence: Synthetic oligonucleotide
uuucuuucacuaguauauc

SEQ ID NO: 1964339 - RNA, 19 nt, Artificial Sequence
  Description of Artificial Sequence: Synthetic oligonucleotide
uuaaaacaucugcuacuuu

SEQ ID NO: 1964340 - RNA, 19 nt, Artificial Sequence
  Description of Artificial Sequence: Synthetic oligonucleotide
gaaagauagugucaacuuu

SEQ ID NO: 1964341 - RNA, 19 nt, Artificial Sequence
  Description of Artificial Sequence: Synthetic oligonucleotide
agguagcagucuucuuuac

SEQ ID NO: 1964342 - RNA, 19 nt, Artificial Sequence
  Description of Artificial Sequence: Synthetic oligonucleotide
cuugguuguucaaaugaaa

SEQ ID NO: 1964343 - RNA, 19 nt, Artificial Sequence
  Description of Artificial Sequence: Synthetic oligonucleotide
ucauuugcuugaugaguuc

SEQ ID NO: 1964344 - RNA, 19 nt, Artificial Sequence
  Description of Artificial Sequence: Synthetic oligonucleotide
guauaucccagauccugca

SEQ ID NO: 1964345 - RNA, 19 nt, Artificial Sequence
  Description of Artificial Sequence: Synthetic oligonucleotide
uuggcuugcuagaggcccc

SEQ ID NO: 1964346 - RNA, 19 nt, Artificial Sequence
  Description of Artificial Sequence: Synthetic oligonucleotide
aauuggcaugauuccuaaa

SEQ ID NO: 1964347 - RNA, 19 nt, Artificial Sequence
  Description of Artificial Sequence: Synthetic oligonucleotide
agaggaugucuccaagaaa

SEQ ID NO: 1964348 - RNA, 19 nt, Artificial Sequence
  Description of Artificial Sequence: Synthetic oligonucleotide
uucgaaagauagugucaac

SEQ ID NO: 1964349 - RNA, 19 nt, Artificial Sequence
  Description of Artificial Sequence: Synthetic oligonucleotide
auccacuaagaauuucuuu

SEQ ID NO: 1964350 - RNA, 19 nt, Artificial Sequence
  Description of Artificial Sequence: Synthetic oligonucleotide
agauagugucaacuuuuaa

SEQ ID NO: 1964351 - RNA, 19 nt, Artificial Sequence
  Description of Artificial Sequence: Synthetic oligonucleotide
aagacguguacgcguggau

SEQ ID NO: 1964352 - RNA, 19 nt, Artificial Sequence
  Description of Artificial Sequence: Synthetic oligonucleotide
cuucacugcauuagccauc

SEQ ID NO: 1964353 - RNA, 19 nt, Artificial Sequence
  Description of Artificial Sequence: Synthetic oligonucleotide
guacagaauaauggaacuc

SEQ ID NO: 1964354 - RNA, 19 nt, Artificial Sequence
  Description of Artificial Sequence: Synthetic oligonucleotide
gaccaugcauauucuuuca

SEQ ID NO: 1964355 - RNA, 19 nt, Artificial Sequence
  Description of Artificial Sequence: Synthetic oligonucleotide
uaacuucaggcucccacuu

SEQ ID NO: 1964356 - RNA, 19 nt, Artificial Sequence
  Description of Artificial Sequence: Synthetic oligonucleotide
guggugggcaucuguaaac

SEQ ID NO: 1964357 - RNA, 19 nt, Artificial Sequence
  Description of Artificial Sequence: Synthetic oligonucleotide
gucacccuuucaguggugg

SEQ ID NO: 1964358 - RNA, 19 nt, Artificial Sequence
  Description of Artificial Sequence: Synthetic oligonucleotide
ccaagucacaagaccaugc

SEQ ID NO: 1964359 - RNA, 19 nt, Artificial Sequence
  Description of Artificial Sequence: Synthetic oligonucleotide
ugucuucuacugaaucuuu

SEQ ID NO: 1964360 - RNA, 19 nt, Artificial Sequence
  Description of Artificial Sequence: Synthetic oligonucleotide
ucuuucaagcuugggcacu

SEQ ID NO: 1964361 - RNA, 19 nt, Artificial Sequence
  Description of Artificial Sequence: Synthetic oligonucleotide
guagaaacguuuugucaaa

SEQ ID NO: 1964362 - RNA, 19 nt, Artificial Sequence
  Description of Artificial Sequence: Synthetic oligonucleotide
cagugucuucuacugaauc

SEQ ID NO: 1964363 - RNA, 19 nt, Artificial Sequence
  Description of Artificial Sequence: Synthetic oligonucleotide
caucuguaaacuauaacuu

SEQ ID NO: 1964364 - RNA, 19 nt, Artificial Sequence
  Description of Artificial Sequence: Synthetic oligonucleotide
aagauagugucaacuuuua

SEQ ID NO: 1964365 - RNA, 19 nt, Artificial Sequence
  Description of Artificial Sequence: Synthetic oligonucleotide
cccacauauuccuuccugg

SEQ ID NO: 1964366 - RNA, 19 nt, Artificial Sequence
  Description of Artificial Sequence: Synthetic oligonucleotide
gucuuucaagcuugggcac

SEQ ID NO: 1964367 - RNA, 19 nt, Artificial Sequence
  Description of Artificial Sequence: Synthetic oligonucleotide
agcugguggaccggauucc

SEQ ID NO: 1964368 - RNA, 19 nt, Artificial Sequence
  Description of Artificial Sequence: Synthetic oligonucleotide
gcuugggcacuucaaagug

SEQ ID NO: 1964369 - RNA, 19 nt, Artificial Sequence
  Description of Artificial Sequence: Synthetic oligonucleotide
agacguguacgcguggaug

SEQ ID NO: 1964370 - RNA, 19 nt, Artificial Sequence
  Description of Artificial Sequence: Synthetic oligonucleotide
cugcauuagccaucuccag

SEQ ID NO: 1964371 - RNA, 19 nt, Artificial Sequence
  Description of Artificial Sequence: Synthetic oligonucleotide
caugcauauucuuucauuu

SEQ ID NO: 1964372 - RNA, 19 nt, Artificial Sequence
  Description of Artificial Sequence: Synthetic oligonucleotide
gggacaugaauacaagaaa

SEQ ID NO: 1964373 - RNA, 19 nt, Artificial Sequence
  Description of Artificial Sequence: Synthetic oligonucleotide
guagcgaccucauuucucu

SEQ ID NO: 1964374 - RNA, 19 nt, Artificial Sequence
  Description of Artificial Sequence: Synthetic oligonucleotide
gaaggauauccucccugga

SEQ ID NO: 1964375 - RNA, 19 nt, Artificial Sequence
  Description of Artificial Sequence: Synthetic oligonucleotide
ccguugcagauaaugagag

SEQ ID NO: 1964376 - RNA, 19 nt, Artificial Sequence
  Description of Artificial Sequence: Synthetic oligonucleotide
gacguguacgcguggaugu

SEQ ID NO: 1964377 - RNA, 19 nt, Artificial Sequence
  Description of Artificial Sequence: Synthetic oligonucleotide
gauauccucccuggaaauc

SEQ ID NO: 1964378 - RNA, 19 nt, Artificial Sequence
  Description of Artificial Sequence: Synthetic oligonucleotide
ugucuccaagaaacauugu

SEQ ID NO: 1964379 - RNA, 19 nt, Artificial Sequence
  Description of Artificial Sequence: Synthetic oligonucleotide
uggugggcaucuguaaacu

SEQ ID NO: 1964380 - RNA, 19 nt, Artificial Sequence
  Description of Artificial Sequence: Synthetic oligonucleotide
auuugcuugaugaguucca

SEQ ID NO: 1964381 - RNA, 19 nt, Artificial Sequence
  Description of Artificial Sequence: Synthetic oligonucleotide
uuccuaaaacagguacaga

SEQ ID NO: 1964382 - RNA, 19 nt, Artificial Sequence
  Description of Artificial Sequence: Synthetic oligonucleotide
cacccuuucaguggugggc

SEQ ID NO: 1964383 - RNA, 19 nt, Artificial Sequence
  Description of Artificial Sequence: Synthetic oligonucleotide
ggcaucuguaaacuauaac

SEQ ID NO: 1964384 - RNA, 19 nt, Artificial Sequence
  Description of Artificial Sequence: Synthetic oligonucleotide
guauccauuauaggguaaa

SEQ ID NO: 1964385 - RNA, 19 nt, Artificial Sequence
  Description of Artificial Sequence: Synthetic oligonucleotide
agcaagacguguacgcgug

SEQ ID NO: 1964386 - RNA, 19 nt, Artificial Sequence
  Description of Artificial Sequence: Synthetic oligonucleotide
cucuaugugcgcuuucuua

SEQ ID NO: 1964387 - RNA, 19 nt, Artificial Sequence
  Description of Artificial Sequence: Synthetic oligonucleotide
acguuuugucaaagucacc

SEQ ID NO: 1964388 - RNA, 19 nt, Artificial Sequence
  Description of Artificial Sequence: Synthetic oligonucleotide
augauaacuuuuggcuugu

SEQ ID NO: 1964389 - RNA, 19 nt, Artificial Sequence
  Description of Artificial Sequence: Synthetic oligonucleotide
cugaaugaugauaacuuuu

SEQ ID NO: 1964390 - RNA, 19 nt, Artificial Sequence
  Description of Artificial Sequence: Synthetic oligonucleotide
uccguucucauggaauuuu

SEQ ID NO: 1964391 - RNA, 19 nt, Artificial Sequence
  Description of Artificial Sequence: Synthetic oligonucleotide
accggauuccagcuccaga

SEQ ID NO: 1964392 - RNA, 19 nt, Artificial Sequence
  Description of Artificial Sequence: Synthetic oligonucleotide
cuggauaccaugggacaug

SEQ ID NO: 1964393 - RNA, 19 nt, Artificial Sequence
  Description of Artificial Sequence: Synthetic oligonucleotide
guuuugucaaagucacccu

SEQ ID NO: 1964394 - RNA, 19 nt, Artificial Sequence
  Description of Artificial Sequence: Synthetic oligonucleotide
aucauccguucucauggaa

SEQ ID NO: 1964395 - RNA, 19 nt, Artificial Sequence
  Description of Artificial Sequence: Synthetic oligonucleotide
gagaaaugucacuucuaau

SEQ ID NO: 1964396 - RNA, 19 nt, Artificial Sequence
  Description of Artificial Sequence: Synthetic oligonucleotide
caucugcuacuuuaucgga

SEQ ID NO: 1964397 - RNA, 19 nt, Artificial Sequence
  Description of Artificial Sequence: Synthetic oligonucleotide
gcaguagcgaccucauuuc

SEQ ID NO: 1964398 - RNA, 19 nt, Artificial Sequence
  Description of Artificial Sequence: Synthetic oligonucleotide
cccagauccugcaguagcg

SEQ ID NO: 1964399 - RNA, 19 nt, Artificial Sequence
  Description of Artificial Sequence: Synthetic oligonucleotide
cauucagagaaaugucacu

SEQ ID NO: 1964400 - RNA, 19 nt, Artificial Sequence
  Description of Artificial Sequence: Synthetic oligonucleotide
aaacuauaacuugguuguu

SEQ ID NO: 1964401 - RNA, 19 nt, Artificial Sequence
  Description of Artificial Sequence: Synthetic oligonucleotide
ucucuccacggcaggccug

SEQ ID NO: 1964402 - RNA, 19 nt, Artificial Sequence
  Description of Artificial Sequence: Synthetic oligonucleotide
cagaagucuugugcucugg

SEQ ID NO: 1964403 - RNA, 19 nt, Artificial Sequence
  Description of Artificial Sequence: Synthetic oligonucleotide
gagcaagacguguacgcgu

SEQ ID NO: 1964404 - RNA, 19 nt, Artificial Sequence
  Description of Artificial Sequence: Synthetic oligonucleotide
acccuuucaguggugggca

SEQ ID NO: 1964405 - RNA, 19 nt, Artificial Sequence
  Description of Artificial Sequence: Synthetic oligonucleotide
auugcaucauucagagaaa

SEQ ID NO: 1964406 - RNA, 19 nt, Artificial Sequence
  Description of Artificial Sequence: Synthetic oligonucleotide
uggacaugugccgccuucu

SEQ ID NO: 1964407 - RNA, 19 nt, Artificial Sequence
  Description of Artificial Sequence: Synthetic oligonucleotide
cugguggaccggauuccag

SEQ ID NO: 1964408 - RNA, 19 nt, Artificial Sequence
  Description of Artificial Sequence: Synthetic oligonucleotide
cagguagcagucuucuuua

SEQ ID NO: 1964409 - RNA, 19 nt, Artificial Sequence
  Description of Artificial Sequence: Synthetic oligonucleotide
uccguaucuuuugggcugu

SEQ ID NO: 1964410 - RNA, 19 nt, Artificial Sequence
  Description of Artificial Sequence: Synthetic oligonucleotide
cagagcugugagguuuucc

SEQ ID NO: 1964411 - RNA, 19 nt, Artificial Sequence
  Description of Artificial Sequence: Synthetic oligonucleotide
cuggacaugugccgccuuc

SEQ ID NO: 1964412 - RNA, 19 nt, Artificial Sequence
  Description of Artificial Sequence: Synthetic oligonucleotide
aucugcuacuuuaucggaa

SEQ ID NO: 1964413 - RNA, 19 nt, Artificial Sequence
  Description of Artificial Sequence: Synthetic oligonucleotide
gagagcccuugagaggaug

SEQ ID NO: 1964414 - RNA, 19 nt, Artificial Sequence
  Description of Artificial Sequence: Synthetic oligonucleotide
ccucccuggaaaucauccg

SEQ ID NO: 1964415 - RNA, 19 nt, Artificial Sequence
  Description of Artificial Sequence: Synthetic oligonucleotide
cuauaacuugguuguucaa

SEQ ID NO: 1964416 - RNA, 19 nt, Artificial Sequence
  Description of Artificial Sequence: Synthetic oligonucleotide
agagcccuugagaggaugu

SEQ ID NO: 1964417 - RNA, 19 nt, Artificial Sequence
  Description of Artificial Sequence: Synthetic oligonucleotide
uaccacuccucgguucucu

SEQ ID NO: 1964418 - RNA, 19 nt, Artificial Sequence
  Description of Artificial Sequence: Synthetic oligonucleotide
ugggcacuucaaaguguuc

SEQ ID NO: 1964419 - RNA, 19 nt, Artificial Sequence
  Description of Artificial Sequence: Synthetic oligonucleotide
cagagaaaugucacuucua

SEQ ID NO: 1964420 - RNA, 19 nt, Artificial Sequence
  Description of Artificial Sequence: Synthetic oligonucleotide
gcagauaaugagagcaaga

SEQ ID NO: 1964421 - RNA, 19 nt, Artificial Sequence
  Description of Artificial Sequence: Synthetic oligonucleotide
cuucucuaugugcgcuuuc

SEQ ID NO: 1964422 - RNA, 19 nt, Artificial Sequence
  Description of Artificial Sequence: Synthetic oligonucleotide
guacgcguggauguaucca

SEQ ID NO: 1964423 - RNA, 19 nt, Artificial Sequence
  Description of Artificial Sequence: Synthetic oligonucleotide
agucuucuuuacaaaugua

SEQ ID NO: 1964424 - RNA, 19 nt, Artificial Sequence
  Description of Artificial Sequence: Synthetic oligonucleotide
gucagaagucuugugcucu

SEQ ID NO: 1964425 - RNA, 19 nt, Artificial Sequence
  Description of Artificial Sequence: Synthetic oligonucleotide
aacucccgccagguagcag

SEQ ID NO: 1964426 - RNA, 19 nt, Artificial Sequence
  Description of Artificial Sequence: Synthetic oligonucleotide
cuugggcacuucaaagugu

SEQ ID NO: 1964427 - RNA, 19 nt, Artificial Sequence
  Description of Artificial Sequence: Synthetic oligonucleotide
augauuccuaaaacaggua

SEQ ID NO: 1964428 - RNA, 19 nt, Artificial Sequence
  Description of Artificial Sequence: Synthetic oligonucleotide
gugcgcuuucuuaaugcca

SEQ ID NO: 1964429 - RNA, 19 nt, Artificial Sequence
  Description of Artificial Sequence: Synthetic oligonucleotide
cucccuggaaaucauccgu

SEQ ID NO: 1964430 - RNA, 19 nt, Artificial Sequence
  Description of Artificial Sequence: Synthetic oligonucleotide
gcaagacguguacgcgugg

SEQ ID NO: 1964431 - RNA, 19 nt, Artificial Sequence
  Description of Artificial Sequence: Synthetic oligonucleotide
gaccggauuccagcuccag

SEQ ID NO: 1964432 - RNA, 19 nt, Artificial Sequence
  Description of Artificial Sequence: Synthetic oligonucleotide
auaccacuccucgguucuc

SEQ ID NO: 1964433 - RNA, 19 nt, Artificial Sequence
  Description of Artificial Sequence: Synthetic oligonucleotide
gguccuggacaugugccgc

SEQ ID NO: 1964434 - RNA, 19 nt, Artificial Sequence
  Description of Artificial Sequence: Synthetic oligonucleotide
caagacguguacgcgugga

SEQ ID NO: 1964435 - RNA, 19 nt, Artificial Sequence
  Description of Artificial Sequence: Synthetic oligonucleotide
cuaguauaucccagauccu

SEQ ID NO: 1964436 - RNA, 19 nt, Artificial Sequence
  Description of Artificial Sequence: Synthetic oligonucleotide
cauccguucucauggaauu

SEQ ID NO: 1964437 - RNA, 19 nt, Artificial Sequence
  Description of Artificial Sequence: Synthetic oligonucleotide
gcgaccucauuucucuuga

SEQ ID NO: 1964438 - RNA, 19 nt, Artificial Sequence
  Description of Artificial Sequence: Synthetic oligonucleotide
  modified_base (18)..(18): a, c, u, g, unknown or other
ggguaaaucucugaaggnu

SEQ ID NO: 1964439 - RNA, 19 nt, Artificial Sequence
  Description of Artificial Sequence: Synthetic oligonucleotide
cccuugagaggaugucucc

SEQ ID NO: 1964440 - RNA, 19 nt, Artificial Sequence
  Description of Artificial Sequence: Synthetic oligonucleotide
gcuccguugcagauaauga

SEQ ID NO: 1964441 - RNA, 19 nt, Artificial Sequence
  Description of Artificial Sequence: Synthetic oligonucleotide
uuucaagcuugggcacuuc

SEQ ID NO: 1964442 - RNA, 19 nt, Artificial Sequence
  Description of Artificial Sequence: Synthetic oligonucleotide
cacauauuccuuccuggau

SEQ ID NO: 1964443 - RNA, 19 nt, Artificial Sequence
  Description of Artificial Sequence: Synthetic oligonucleotide
gagcccuugagaggauguc

SEQ ID NO: 1964444 - RNA, 19 nt, Artificial Sequence
  Description of Artificial Sequence: Synthetic oligonucleotide
ccacauauuccuuccugga

SEQ ID NO: 1964445 - RNA, 19 nt, Artificial Sequence
  Description of Artificial Sequence: Synthetic oligonucleotide
aucagcuccguugcagaua

SEQ ID NO: 1964446 - RNA, 19 nt, Artificial Sequence
  Description of Artificial Sequence: Synthetic oligonucleotide
  modified_base (3)..(3): a, c, u, g, unknown or other
ggnuucucuuuccguaucu

SEQ ID NO: 1964447 - RNA, 19 nt, Artificial Sequence
  Description of Artificial Sequence: Synthetic oligonucleotide
ccagcuccagaacucccgc

SEQ ID NO: 1964448 - RNA, 19 nt, Artificial Sequence
  Description of Artificial Sequence: Synthetic oligonucleotide
gugggcaucuguaaacuau

SEQ ID NO: 1964449 - RNA, 19 nt, Artificial Sequence
  Description of Artificial Sequence: Synthetic oligonucleotide
guguacgcguggauguauc

SEQ ID NO: 1964450 - RNA, 19 nt, Artificial Sequence
  Description of Artificial Sequence: Synthetic oligonucleotide
gacaugugccgccuucuuu

SEQ ID NO: 1964451 - RNA, 19 nt, Artificial Sequence
  Description of Artificial Sequence: Synthetic oligonucleotide
gauacagauuuggcuugcu

SEQ ID NO: 1964452 - RNA, 19 nt, Artificial Sequence
  Description of Artificial Sequence: Synthetic oligonucleotide
uggcuugcuagaggccccu

SEQ ID NO: 1964453 - RNA, 19 nt, Artificial Sequence
  Description of Artificial Sequence: Synthetic oligonucleotide
cucccgccagguagcaguc

SEQ ID NO: 1964454 - RNA, 19 nt, Artificial Sequence
  Description of Artificial Sequence: Synthetic oligonucleotide
ggccugaaugaugauaacu

SEQ ID NO: 1964455 - RNA, 19 nt, Artificial Sequence
  Description of Artificial Sequence: Synthetic oligonucleotide
cuaugugcgcuuucuuaau

SEQ ID NO: 1964456 - RNA, 19 nt, Artificial Sequence
  Description of Artificial Sequence: Synthetic oligonucleotide
  modified_base (2)..(2): a, c, u, g, unknown or other
gnuucucuuuccguaucuu

SEQ ID NO: 1964457 - RNA, 19 nt, Artificial Sequence
  Description of Artificial Sequence: Synthetic oligonucleotide
cccuggaaaucauccguuc

SEQ ID NO: 1964458 - RNA, 19 nt, Artificial Sequence
  Description of Artificial Sequence: Synthetic oligonucleotide
ccguucucauggaauuuuc

SEQ ID NO: 1964459 - RNA, 19 nt, Artificial Sequence
  Description of Artificial Sequence: Synthetic oligonucleotide
gguggaccggauuccagcu

SEQ ID NO: 1964460 - RNA, 19 nt, Artificial Sequence
  Description of Artificial Sequence: Synthetic oligonucleotide
gucugguguugaagagcag

SEQ ID NO: 1964461 - RNA, 19 nt, Artificial Sequence
  Description of Artificial Sequence: Synthetic oligonucleotide
uagcgaccucauuucucuu

SEQ ID NO: 1964462 - RNA, 19 nt, Artificial Sequence
  Description of Artificial Sequence: Synthetic oligonucleotide
cuaauaccacuccucgguu

SEQ ID NO: 1964463 - RNA, 19 nt, Artificial Sequence
  Description of Artificial Sequence: Synthetic oligonucleotide
gaacucccgccagguagca

SEQ ID NO: 1964464 - RNA, 19 nt, Artificial Sequence
  Description of Artificial Sequence: Synthetic oligonucleotide
auaugacuucccacauauu

SEQ ID NO: 1964465 - RNA, 19 nt, Artificial Sequence
  Description of Artificial Sequence: Synthetic oligonucleotide
gcccuugagaggaugucuc

SEQ ID NO: 1964466 - RNA, 19 nt, Artificial Sequence
  Description of Artificial Sequence: Synthetic oligonucleotide
cucuccacggcaggccuga

SEQ ID NO: 1964467 - RNA, 19 nt, Artificial Sequence
  Description of Artificial Sequence: Synthetic oligonucleotide
agucacccuuucaguggug

SEQ ID NO: 1964468 - RNA, 19 nt, Artificial Sequence
  Description of Artificial Sequence: Synthetic oligonucleotide
caguagcgaccucauuucu

SEQ ID NO: 1964469 - RNA, 19 nt, Artificial Sequence
  Description of Artificial Sequence: Synthetic oligonucleotide
caucagcuccguugcagau

SEQ ID NO: 1964470 - RNA, 19 nt, Artificial Sequence
  Description of Artificial Sequence: Synthetic oligonucleotide
cgaaagauagugucaacuu

SEQ ID NO: 1964471 - RNA, 19 nt, Artificial Sequence
  Description of Artificial Sequence: Synthetic oligonucleotide
acguguacgcguggaugua

SEQ ID NO: 1964472 - RNA, 19 nt, Artificial Sequence
  Description of Artificial Sequence: Synthetic oligonucleotide
ucccgccagguagcagucu

SEQ ID NO: 1964473 - RNA, 19 nt, Artificial Sequence
  Description of Artificial Sequence: Synthetic oligonucleotide
ccaugcauauucuuucauu

SEQ ID NO: 1964474 - RNA, 19 nt, Artificial Sequence
  Description of Artificial Sequence: Synthetic oligonucleotide
gcugguggaccggauucca

SEQ ID NO: 1964475 - RNA, 19 nt, Artificial Sequence
  Description of Artificial Sequence: Synthetic oligonucleotide
gcgcuuucuuaaugccauc

SEQ ID NO: 1964476 - RNA, 19 nt, Artificial Sequence
  Description of Artificial Sequence: Synthetic oligonucleotide
gauccacaucagcuccguu

SEQ ID NO: 1964477 - RNA, 19 nt, Artificial Sequence
  Description of Artificial Sequence: Synthetic oligonucleotide
cgaccucauuucucuugag

SEQ ID NO: 1964478 - RNA, 19 nt, Artificial Sequence
  Description of Artificial Sequence: Synthetic oligonucleotide
gucuugugcucugggcagu

SEQ ID NO: 1964479 - RNA, 19 nt, Artificial Sequence
  Description of Artificial Sequence: Synthetic oligonucleotide
ccagauccugcaguagcga

SEQ ID NO: 1964480 - RNA, 19 nt, Artificial Sequence
  Description of Artificial Sequence: Synthetic oligonucleotide
gcguggauguauccauuau

SEQ ID NO: 1964481 - RNA, 19 nt, Artificial Sequence
  Description of Artificial Sequence: Synthetic oligonucleotide
ccgccagguagcagucuuc

SEQ ID NO: 1964482 - RNA, 19 nt, Artificial Sequence
  Description of Artificial Sequence: Synthetic oligonucleotide
ucuccacggcaggccugaa

SEQ ID NO: 1964483 - RNA, 19 nt, Artificial Sequence
  Description of Artificial Sequence: Synthetic oligonucleotide
gcuugcuagaggccccuuu

SEQ ID NO: 1964484 - RNA, 19 nt, Artificial Sequence
  Description of Artificial Sequence: Synthetic oligonucleotide
ggaccggauuccagcucca

SEQ ID NO: 1964485 - RNA, 19 nt, Artificial Sequence
  Description of Artificial Sequence: Synthetic oligonucleotide
cgcguggauguauccauua

SEQ ID NO: 1964486 - RNA, 19 nt, Artificial Sequence
  Description of Artificial Sequence: Synthetic oligonucleotide
gcauaacuucaggcuccca

SEQ ID NO: 1964487 - RNA, 19 nt, Artificial Sequence
  Description of Artificial Sequence: Synthetic oligonucleotide
ggacaugugccgccuucuu

SEQ ID NO: 1964488 - RNA, 19 nt, Artificial Sequence
  Description of Artificial Sequence: Synthetic oligonucleotide
ggauaccaugggacaugaa

SEQ ID NO: 1964489 - RNA, 19 nt, Artificial Sequence
  Description of Artificial Sequence: Synthetic oligonucleotide
ccacuugguccuggacaug

SEQ ID NO: 1964490 - RNA, 19 nt, Artificial Sequence
  Description of Artificial Sequence: Synthetic oligonucleotide
ccacaucagcuccguugca

SEQ ID NO: 1964491 - RNA, 19 nt, Artificial Sequence
  Description of Artificial Sequence: Synthetic oligonucleotide
cacuucuaauuggcaugau

SEQ ID NO: 1964492 - RNA, 19 nt, Artificial Sequence
  Description of Artificial Sequence: Synthetic oligonucleotide
ccagaacucccgccaggua

SEQ ID NO: 1964493 - RNA, 19 nt, Artificial Sequence
  Description of Artificial Sequence: Synthetic oligonucleotide
gccagguagcagucuucuu

SEQ ID NO: 1964494 - RNA, 19 nt, Artificial Sequence
  Description of Artificial Sequence: Synthetic oligonucleotide
cccgccagguagcagucuu

SEQ ID NO: 1964495 - RNA, 19 nt, Artificial Sequence
  Description of Artificial Sequence: Synthetic oligonucleotide
ccuucucuaugugcgcuuu

SEQ ID NO: 1964496 - RNA, 19 nt, Artificial Sequence
  Description of Artificial Sequence: Synthetic oligonucleotide
cgccagguagcagucuucu

SEQ ID NO: 1964497 - RNA, 19 nt, Artificial Sequence
  Description of Artificial Sequence: Synthetic oligonucleotide
cguguacgcguggauguau

SEQ ID NO: 1964498 - RNA, 19 nt, Artificial Sequence
  Description of Artificial Sequence: Synthetic oligonucleotide
cagcuccguugcagauaau

SEQ ID NO: 1964499 - RNA, 19 nt, Artificial Sequence
  Description of Artificial Sequence: Synthetic oligonucleotide
ccuggacaugugccgccuu

SEQ ID NO: 1964500 - RNA, 19 nt, Artificial Sequence
  Description of Artificial Sequence: Synthetic oligonucleotide
ggcuugcuagaggccccuu

SEQ ID NO: 1964501 - RNA, 19 nt, Artificial Sequence
  Description of Artificial Sequence: Synthetic oligonucleotide
aauaauuggaaucuggagg

SEQ ID NO: 1964502 - RNA, 19 nt, Artificial Sequence
  Description of Artificial Sequence: Synthetic oligonucleotide
auaguuaagaaacucauuc

SEQ ID NO: 1964503 - RNA, 19 nt, Artificial Sequence
  Description of Artificial Sequence: Synthetic oligonucleotide
cauaguauaguuaagaaac

SEQ ID NO: 1964504 - RNA, 19 nt, Artificial Sequence
  Description of Artificial Sequence: Synthetic oligonucleotide
aaaagaugauuucuuagac

SEQ ID NO: 1964505 - RNA, 19 nt, Artificial Sequence
  Description of Artificial Sequence: Synthetic oligonucleotide
uuuccuuuaaauaacuucc

SEQ ID NO: 1964506 - RNA, 19 nt, Artificial Sequence
  Description of Artificial Sequence: Synthetic oligonucleotide
aagaugauuucuuagaccu

SEQ ID NO: 1964507 - RNA, 19 nt, Artificial Sequence
  Description of Artificial Sequence: Synthetic oligonucleotide
ugaaguuacuuccauauag

SEQ ID NO: 1964508 - RNA, 19 nt, Artificial Sequence
  Description of Artificial Sequence: Synthetic oligonucleotide
uaaaauaauuggaaucugg

SEQ ID NO: 1964509 - RNA, 19 nt, Artificial Sequence
  Description of Artificial Sequence: Synthetic oligonucleotide
aaauaguauucuccuaccc

SEQ ID NO: 1964510 - RNA, 19 nt, Artificial Sequence
  Description of Artificial Sequence: Synthetic oligonucleotide
uaaguaaauaguauucucc

SEQ ID NO: 1964511 - RNA, 19 nt, Artificial Sequence
  Description of Artificial Sequence: Synthetic oligonucleotide
uuagaaaugucugagaucu

SEQ ID NO: 1964512 - RNA, 19 nt, Artificial Sequence
  Description of Artificial Sequence: Synthetic oligonucleotide
aaauaauuggaaucuggag

SEQ ID NO: 1964513 - RNA, 19 nt, Artificial Sequence
  Description of Artificial Sequence: Synthetic oligonucleotide
uaugcguuuacauaaagcu

SEQ ID NO: 1964514 - RNA, 19 nt, Artificial Sequence
  Description of Artificial Sequence: Synthetic oligonucleotide
aggacauguauccaaaucg

SEQ ID NO: 1964515 - RNA, 19 nt, Artificial Sequence
  Description of Artificial Sequence: Synthetic oligonucleotide
auuaguuuccuuuaaauaa

SEQ ID NO: 1964516 - RNA, 19 nt, Artificial Sequence
  Description of Artificial Sequence: Synthetic oligonucleotide
auaauaauucuuuugugug

SEQ ID NO: 1964517 - RNA, 19 nt, Artificial Sequence
  Description of Artificial Sequence: Synthetic oligonucleotide
uuuauucaggcaaugaaac

SEQ ID NO: 1964518 - RNA, 19 nt, Artificial Sequence
  Description of Artificial Sequence: Synthetic oligonucleotide
uccagaucuaaccacaugc

SEQ ID NO: 1964519 - RNA, 19 nt, Artificial Sequence
  Description of Artificial Sequence: Synthetic oligonucleotide
aucauaauaauucuuuugu

SEQ ID NO: 1964520 - RNA, 19 nt, Artificial Sequence
  Description of Artificial Sequence: Synthetic oligonucleotide
ucuaauucucuuuaguuga

SEQ ID NO: 1964521 - RNA, 19 nt, Artificial Sequence
  Description of Artificial Sequence: Synthetic oligonucleotide
uauuaaaagggaaauuacu

SEQ ID NO: 1964522 - RNA, 19 nt, Artificial Sequence
  Description of Artificial Sequence: Synthetic oligonucleotide
aaguuacuuccauauaggg

SEQ ID NO: 1964523 - RNA, 19 nt, Artificial Sequence
  Description of Artificial Sequence: Synthetic oligonucleotide
aaguaaauaguauucuccu

SEQ ID NO: 1964524 - RNA, 19 nt, Artificial Sequence
  Description of Artificial Sequence: Synthetic oligonucleotide
aaaucuaugaggaugauua

SEQ ID NO: 1964525 - RNA, 19 nt, Artificial Sequence
  Description of Artificial Sequence: Synthetic oligonucleotide
uauauuaguaauuaucaua

SEQ ID NO: 1964526 - RNA, 19 nt, Artificial Sequence
  Description of Artificial Sequence: Synthetic oligonucleotide
cauguauccaaaucgagag

SEQ ID NO: 1964527 - RNA, 19 nt, Artificial Sequence
  Description of Artificial Sequence: Synthetic oligonucleotide
ugcguuuacauaaagcuga

SEQ ID NO: 1964528 - RNA, 19 nt, Artificial Sequence
  Description of Artificial Sequence: Synthetic oligonucleotide
aauaguauucuccuacccu

SEQ ID NO: 1964529 - RNA, 19 nt, Artificial Sequence
  Description of Artificial Sequence: Synthetic oligonucleotide
aaucgagagacugaguuuc

SEQ ID NO: 1964530 - RNA, 19 nt, Artificial Sequence
  Description of Artificial Sequence: Synthetic oligonucleotide
auaacuuccuuauuaaacu

SEQ ID NO: 1964531 - RNA, 19 nt, Artificial Sequence
  Description of Artificial Sequence: Synthetic oligonucleotide
uuacauaaagcugaaacca

SEQ ID NO: 1964532 - RNA, 19 nt, Artificial Sequence
  Description of Artificial Sequence: Synthetic oligonucleotide
uauuccauacaauugguac

SEQ ID NO: 1964533 - RNA, 19 nt, Artificial Sequence
  Description of Artificial Sequence: Synthetic oligonucleotide
uauagccagaauauaugcg

SEQ ID NO: 1964534 - RNA, 19 nt, Artificial Sequence
  Description of Artificial Sequence: Synthetic oligonucleotide
aagaggauuccaguggucc

SEQ ID NO: 1964535 - RNA, 19 nt, Artificial Sequence
  Description of Artificial Sequence: Synthetic oligonucleotide
auuccagugguccaugccc

SEQ ID NO: 1964536 - RNA, 19 nt, Artificial Sequence
  Description of Artificial Sequence: Synthetic oligonucleotide
uuaagaaacucauuccuca

SEQ ID NO: 1964537 - RNA, 19 nt, Artificial Sequence
  Description of Artificial Sequence: Synthetic oligonucleotide
uaccugacauauuaaaagg

SEQ ID NO: 1964538 - RNA, 19 nt, Artificial Sequence
  Description of Artificial Sequence: Synthetic oligonucleotide
uuuugugugaguauaacuu

SEQ ID NO: 1964539 - RNA, 19 nt, Artificial Sequence
  Description of Artificial Sequence: Synthetic oligonucleotide
uuuaguaaguaaauaguau

SEQ ID NO: 1964540 - RNA, 19 nt, Artificial Sequence
  Description of Artificial Sequence: Synthetic oligonucleotide
uauuuguccagaucuaacc

SEQ ID NO: 1964541 - RNA, 19 nt, Artificial Sequence
  Description of Artificial Sequence: Synthetic oligonucleotide
auacaauugguacugaagu

SEQ ID NO: 1964542 - RNA, 19 nt, Artificial Sequence
  Description of Artificial Sequence: Synthetic oligonucleotide
agcaguuaaagcaucauac

SEQ ID NO: 1964543 - RNA, 19 nt, Artificial Sequence
  Description of Artificial Sequence: Synthetic oligonucleotide
aaucuuauuuguccagauc

SEQ ID NO: 1964544 - RNA, 19 nt, Artificial Sequence
  Description of Artificial Sequence: Synthetic oligonucleotide
gugaguauaacuuuuacaa

SEQ ID NO: 1964545 - RNA, 19 nt, Artificial Sequence
  Description of Artificial Sequence: Synthetic oligonucleotide
uucaauaccuacauucucu

SEQ ID NO: 1964546 - RNA, 19 nt, Artificial Sequence
  Description of Artificial Sequence: Synthetic oligonucleotide
aguuaagaaacucauuccu

SEQ ID NO: 1964547 - RNA, 19 nt, Artificial Sequence
  Description of Artificial Sequence: Synthetic oligonucleotide
ucuaaccacaugcugagca

SEQ ID NO: 1964548 - RNA, 19 nt, Artificial Sequence
  Description of Artificial Sequence: Synthetic oligonucleotide
aguuucguauuucuucacc

SEQ ID NO: 1964549 - RNA, 19 nt, Artificial Sequence
  Description of Artificial Sequence: Synthetic oligonucleotide
uuaguaaguaaauaguauu

SEQ ID NO: 1964550 - RNA, 19 nt, Artificial Sequence
  Description of Artificial Sequence: Synthetic oligonucleotide
auuagaaaugucugagauc

SEQ ID NO: 1964551 - RNA, 19 nt, Artificial Sequence
  Description of Artificial Sequence: Synthetic oligonucleotide
uaguaaguaaauaguauuc

SEQ ID NO: 1964552 - RNA, 19 nt, Artificial Sequence
  Description of Artificial Sequence: Synthetic oligonucleotide
uuaaaagggaaauuacuau

SEQ ID NO: 1964553 - RNA, 19 nt, Artificial Sequence
  Description of Artificial Sequence: Synthetic oligonucleotide
aagggaaauuacuaugugu

SEQ ID NO: 1964554 - RNA, 19 nt, Artificial Sequence
  Description of Artificial Sequence: Synthetic oligonucleotide
gauuucuuagaccuuuggc

SEQ ID NO: 1964555 - RNA, 19 nt, Artificial Sequence
  Description of Artificial Sequence: Synthetic oligonucleotide
cuauagccagaauauaugc

SEQ ID NO: 1964556 - RNA, 19 nt, Artificial Sequence
  Description of Artificial Sequence: Synthetic oligonucleotide
uggaacuauagccagaaua

SEQ ID NO: 1964557 - RNA, 19 nt, Artificial Sequence
  Description of Artificial Sequence: Synthetic oligonucleotide
uuuaccugacauauuaaaa

SEQ ID NO: 1964558 - RNA, 19 nt, Artificial Sequence
  Description of Artificial Sequence: Synthetic oligonucleotide
auagccagaauauaugcgu

SEQ ID NO: 1964559 - RNA, 19 nt, Artificial Sequence
  Description of Artificial Sequence: Synthetic oligonucleotide
ugugaguauaacuuuuaca

SEQ ID NO: 1964560 - RNA, 19 nt, Artificial Sequence
  Description of Artificial Sequence: Synthetic oligonucleotide
auaaggccagcauugcagc

SEQ ID NO: 1964561 - RNA, 19 nt, Artificial Sequence
  Description of Artificial Sequence: Synthetic oligonucleotide
aaacucauuccucaggaau

SEQ ID NO: 1964562 - RNA, 19 nt, Artificial Sequence
  Description of Artificial Sequence: Synthetic oligonucleotide
agacacuggagccuuuucc

SEQ ID NO: 1964563 - RNA, 19 nt, Artificial Sequence
  Description of Artificial Sequence: Synthetic oligonucleotide
aaaagggaaauuacuaugu

SEQ ID NO: 1964564 - RNA, 19 nt, Artificial Sequence
  Description of Artificial Sequence: Synthetic oligonucleotide
aaagggaaauuacuaugug

SEQ ID NO: 1964565 - RNA, 19 nt, Artificial Sequence
  Description of Artificial Sequence: Synthetic oligonucleotide
uucaggcaaugaaacaugg

SEQ ID NO: 1964566 - RNA, 19 nt, Artificial Sequence
  Description of Artificial Sequence: Synthetic oligonucleotide
cauacaauugguacugaag

SEQ ID NO: 1964567 - RNA, 19 nt, Artificial Sequence
  Description of Artificial Sequence: Synthetic oligonucleotide
uaguuaagaaacucauucc

SEQ ID NO: 1964568 - RNA, 19 nt, Artificial Sequence
  Description of Artificial Sequence: Synthetic oligonucleotide
gaaguuacuuccauauagg

SEQ ID NO: 1964569 - RNA, 19 nt, Artificial Sequence
  Description of Artificial Sequence: Synthetic oligonucleotide
gacuuuaucuguucuuuag

SEQ ID NO: 1964570 - RNA, 19 nt, Artificial Sequence
  Description of Artificial Sequence: Synthetic oligonucleotide
acugaaguuacuuccauau

SEQ ID NO: 1964571 - RNA, 19 nt, Artificial Sequence
  Description of Artificial Sequence: Synthetic oligonucleotide
uaaauaguauucuccuacc

SEQ ID NO: 1964572 - RNA, 19 nt, Artificial Sequence
  Description of Artificial Sequence: Synthetic oligonucleotide
aaaugucugagaucuguga

SEQ ID NO: 1964573 - RNA, 19 nt, Artificial Sequence
  Description of Artificial Sequence: Synthetic oligonucleotide
gaagggucaggccauaccc

SEQ ID NO: 1964574 - RNA, 19 nt, Artificial Sequence
  Description of Artificial Sequence: Synthetic oligonucleotide
gaucuaaccacaugcugag

SEQ ID NO: 1964575 - RNA, 19 nt, Artificial Sequence
  Description of Artificial Sequence: Synthetic oligonucleotide
uuccauauagggaaggguc

SEQ ID NO: 1964576 - RNA, 19 nt, Artificial Sequence
  Description of Artificial Sequence: Synthetic oligonucleotide
ugauuucuuagaccuuugg

SEQ ID NO: 1964577 - RNA, 19 nt, Artificial Sequence
  Description of Artificial Sequence: Synthetic oligonucleotide
aaagcugaaaccauaguau

SEQ ID NO: 1964578 - RNA, 19 nt, Artificial Sequence
  Description of Artificial Sequence: Synthetic oligonucleotide
ugaguuucguauuucuuca

SEQ ID NO: 1964579 - RNA, 19 nt, Artificial Sequence
  Description of Artificial Sequence: Synthetic oligonucleotide
uauaugcguuuacauaaag

SEQ ID NO: 1964580 - RNA, 19 nt, Artificial Sequence
  Description of Artificial Sequence: Synthetic oligonucleotide
aauuacuauguguaauaaa

SEQ ID NO: 1964581 - RNA, 19 nt, Artificial Sequence
  Description of Artificial Sequence: Synthetic oligonucleotide
uguucuuuaguaaguaaau

SEQ ID NO: 1964582 - RNA, 19 nt, Artificial Sequence
  Description of Artificial Sequence: Synthetic oligonucleotide
caccaacugagcuacaucc

SEQ ID NO: 1964583 - RNA, 19 nt, Artificial Sequence
  Description of Artificial Sequence: Synthetic oligonucleotide
caucauacagacuacauaa

SEQ ID NO: 1964584 - RNA, 19 nt, Artificial Sequence
  Description of Artificial Sequence: Synthetic oligonucleotide
uaugaggaugauuauucca

SEQ ID NO: 1964585 - RNA, 19 nt, Artificial Sequence
  Description of Artificial Sequence: Synthetic oligonucleotide
uuuccgaagaggauuccag

SEQ ID NO: 1964586 - RNA, 19 nt, Artificial Sequence
  Description of Artificial Sequence: Synthetic oligonucleotide
auaugcguuuacauaaagc

SEQ ID NO: 1964587 - RNA, 19 nt, Artificial Sequence
  Description of Artificial Sequence: Synthetic oligonucleotide
uugaacauuaguuuccuuu

SEQ ID NO: 1964588 - RNA, 19 nt, Artificial Sequence
  Description of Artificial Sequence: Synthetic oligonucleotide
agaauauaugcguuuacau

SEQ ID NO: 1964589 - RNA, 19 nt, Artificial Sequence
  Description of Artificial Sequence: Synthetic oligonucleotide
aacucauuccucaggaauc

SEQ ID NO: 1964590 - RNA, 19 nt, Artificial Sequence
  Description of Artificial Sequence: Synthetic oligonucleotide
auauagggaagggucaggc

SEQ ID NO: 1964591 - RNA, 19 nt, Artificial Sequence
  Description of Artificial Sequence: Synthetic oligonucleotide
aucauuuacucuuucaaua

SEQ ID NO: 1964592 - RNA, 19 nt, Artificial Sequence
  Description of Artificial Sequence: Synthetic oligonucleotide
agucuugucugcuucacug

SEQ ID NO: 1964593 - RNA, 19 nt, Artificial Sequence
  Description of Artificial Sequence: Synthetic oligonucleotide
uucucucuucccaagaggu

SEQ ID NO: 1964594 - RNA, 19 nt, Artificial Sequence
  Description of Artificial Sequence: Synthetic oligonucleotide
uacagacuacauaaggcca

SEQ ID NO: 1964595 - RNA, 19 nt, Artificial Sequence
  Description of Artificial Sequence: Synthetic oligonucleotide
auagggaagggucaggcca

SEQ ID NO: 1964596 - RNA, 19 nt, Artificial Sequence
  Description of Artificial Sequence: Synthetic oligonucleotide
aauucuuuugugugaguau

SEQ ID NO: 1964597 - RNA, 19 nt, Artificial Sequence
  Description of Artificial Sequence: Synthetic oligonucleotide
uagaccuuuggcuuggugu

SEQ ID NO: 1964598 - RNA, 19 nt, Artificial Sequence
  Description of Artificial Sequence: Synthetic oligonucleotide
ucccuauuagaaaugucug

SEQ ID NO: 1964599 - RNA, 19 nt, Artificial Sequence
  Description of Artificial Sequence: Synthetic oligonucleotide
uauccaaaucgagagacug

SEQ ID NO: 1964600 - RNA, 19 nt, Artificial Sequence
  Description of Artificial Sequence: Synthetic oligonucleotide
uccaaaucgagagacugag

SEQ ID NO: 1964601 - RNA, 19 nt, Artificial Sequence
  Description of Artificial Sequence: Synthetic oligonucleotide
gaaauuacuauguguaaua

SEQ ID NO: 1964602 - RNA, 19 nt, Artificial Sequence
  Description of Artificial Sequence: Synthetic oligonucleotide
agaccuuuggcuugguguc

SEQ ID NO: 1964603 - RNA, 19 nt, Artificial Sequence
  Description of Artificial Sequence: Synthetic oligonucleotide
ugucaugggauucccagac

SEQ ID NO: 1964604 - RNA, 19 nt, Artificial Sequence
  Description of Artificial Sequence: Synthetic oligonucleotide
ucuucauaauauauacauc

SEQ ID NO: 1964605 - RNA, 19 nt, Artificial Sequence
  Description of Artificial Sequence: Synthetic oligonucleotide
aguaaguaaauaguauucu

SEQ ID NO: 1964606 - RNA, 19 nt, Artificial Sequence
  Description of Artificial Sequence: Synthetic oligonucleotide
ucguuugucuucuaauucu

SEQ ID NO: 1964607 - RNA, 19 nt, Artificial Sequence
  Description of Artificial Sequence: Synthetic oligonucleotide
auaccuacauucucucuuc

SEQ ID NO: 1964608 - RNA, 19 nt, Artificial Sequence
  Description of Artificial Sequence: Synthetic oligonucleotide
auuuguccagaucuaacca

SEQ ID NO: 1964609 - RNA, 19 nt, Artificial Sequence
  Description of Artificial Sequence: Synthetic oligonucleotide
caucuuuaaauuccuugcc

SEQ ID NO: 1964610 - RNA, 19 nt, Artificial Sequence
  Description of Artificial Sequence: Synthetic oligonucleotide
ucugaucaaagugagcaca

SEQ ID NO: 1964611 - RNA, 19 nt, Artificial Sequence
  Description of Artificial Sequence: Synthetic oligonucleotide
gauucccagacuuuaucug

SEQ ID NO: 1964612 - RNA, 19 nt, Artificial Sequence
  Description of Artificial Sequence: Synthetic oligonucleotide
aacuauagccagaauauau

SEQ ID NO: 1964613 - RNA, 19 nt, Artificial Sequence
  Description of Artificial Sequence: Synthetic oligonucleotide
cugaguuucguauuucuuc

SEQ ID NO: 1964614 - RNA, 19 nt, Artificial Sequence
  Description of Artificial Sequence: Synthetic oligonucleotide
uccauauagggaaggguca

SEQ ID NO: 1964615 - RNA, 19 nt, Artificial Sequence
  Description of Artificial Sequence: Synthetic oligonucleotide
guaaguaaauaguauucuc

SEQ ID NO: 1964616 - RNA, 19 nt, Artificial Sequence
  Description of Artificial Sequence: Synthetic oligonucleotide
uucguuugucuucuaauuc

SEQ ID NO: 1964617 - RNA, 19 nt, Artificial Sequence
  Description of Artificial Sequence: Synthetic oligonucleotide
uuuggcuuggugucauggg

SEQ ID NO: 1964618 - RNA, 19 nt, Artificial Sequence
  Description of Artificial Sequence: Synthetic oligonucleotide
uuauucaggcaaugaaaca

SEQ ID NO: 1964619 - RNA, 19 nt, Artificial Sequence
  Description of Artificial Sequence: Synthetic oligonucleotide
auuaaaagggaaauuacua

SEQ ID NO: 1964620 - RNA, 19 nt, Artificial Sequence
  Description of Artificial Sequence: Synthetic oligonucleotide
uuucuuagaccuuuggcuu

SEQ ID NO: 1964621 - RNA, 19 nt, Artificial Sequence
  Description of Artificial Sequence: Synthetic oligonucleotide
uuucaauaccuacauucuc

SEQ ID NO: 1964622 - RNA, 19 nt, Artificial Sequence
  Description of Artificial Sequence: Synthetic oligonucleotide
accuacauucucucuuccc

SEQ ID NO: 1964623 - RNA, 19 nt, Artificial Sequence
  Description of Artificial Sequence: Synthetic oligonucleotide
cauuuacucuuucaauacc

SEQ ID NO: 1964624 - RNA, 19 nt, Artificial Sequence
  Description of Artificial Sequence: Synthetic oligonucleotide
acuacauaaggccagcauu

SEQ ID NO: 1964625 - RNA, 19 nt, Artificial Sequence
  Description of Artificial Sequence: Synthetic oligonucleotide
uauucuccuacccuugaaa

SEQ ID NO: 1964626 - RNA, 19 nt, Artificial Sequence
  Description of Artificial Sequence: Synthetic oligonucleotide
aaagugagcacagcagucu

SEQ ID NO: 1964627 - RNA, 19 nt, Artificial Sequence
  Description of Artificial Sequence: Synthetic oligonucleotide
ugagaucacggcuccuucg

SEQ ID NO: 1964628 - RNA, 19 nt, Artificial Sequence
  Description of Artificial Sequence: Synthetic oligonucleotide
aguuaaagcaucauacaga

SEQ ID NO: 1964629 - RNA, 19 nt, Artificial Sequence
  Description of Artificial Sequence: Synthetic oligonucleotide
caauugguacugaaguuac

SEQ ID NO: 1964630 - RNA, 19 nt, Artificial Sequence
  Description of Artificial Sequence: Synthetic oligonucleotide
auaguauucuccuacccuu

SEQ ID NO: 1964631 - RNA, 19 nt, Artificial Sequence
  Description of Artificial Sequence: Synthetic oligonucleotide
uuuccuauucguuugucuu

SEQ ID NO: 1964632 - RNA, 19 nt, Artificial Sequence
  Description of Artificial Sequence: Synthetic oligonucleotide
ugaaaccauaguauaguua

SEQ ID NO: 1964633 - RNA, 19 nt, Artificial Sequence
  Description of Artificial Sequence: Synthetic oligonucleotide
cauaauaauucuuuugugu

SEQ ID NO: 1964634 - RNA, 19 nt, Artificial Sequence
  Description of Artificial Sequence: Synthetic oligonucleotide
gaggaugauuauuccauac

SEQ ID NO: 1964635 - RNA, 19 nt, Artificial Sequence
  Description of Artificial Sequence: Synthetic oligonucleotide
cuaugaggaugauuauucc

SEQ ID NO: 1964636 - RNA, 19 nt, Artificial Sequence
  Description of Artificial Sequence: Synthetic oligonucleotide
uuccuuuaaauaacuuccu

SEQ ID NO: 1964637 - RNA, 19 nt, Artificial Sequence
  Description of Artificial Sequence: Synthetic oligonucleotide
cucaucaguagcguggccg

SEQ ID NO: 1964638 - RNA, 19 nt, Artificial Sequence
  Description of Artificial Sequence: Synthetic oligonucleotide
ugucuucuaauucucuuua

SEQ ID NO: 1964639 - RNA, 19 nt, Artificial Sequence
  Description of Artificial Sequence: Synthetic oligonucleotide
aggcagaucccauccaggg

SEQ ID NO: 1964640 - RNA, 19 nt, Artificial Sequence
  Description of Artificial Sequence: Synthetic oligonucleotide
uuugugugaguauaacuuu

SEQ ID NO: 1964641 - RNA, 19 nt, Artificial Sequence
  Description of Artificial Sequence: Synthetic oligonucleotide
ucugugagaucacggcucc

SEQ ID NO: 1964642 - RNA, 19 nt, Artificial Sequence
  Description of Artificial Sequence: Synthetic oligonucleotide
acuauagccagaauauaug

SEQ ID NO: 1964643 - RNA, 19 nt, Artificial Sequence
  Description of Artificial Sequence: Synthetic oligonucleotide
aagcugaaaccauaguaua

SEQ ID NO: 1964644 - RNA, 19 nt, Artificial Sequence
  Description of Artificial Sequence: Synthetic oligonucleotide
aaaucgagagacugaguuu

SEQ ID NO: 1964645 - RNA, 19 nt, Artificial Sequence
  Description of Artificial Sequence: Synthetic oligonucleotide
gagaucugugagaucacgg

SEQ ID NO: 1964646 - RNA, 19 nt, Artificial Sequence
  Description of Artificial Sequence: Synthetic oligonucleotide
ugagaucugugagaucacg

SEQ ID NO: 1964647 - RNA, 19 nt, Artificial Sequence
  Description of Artificial Sequence: Synthetic oligonucleotide
accauaguauaguuaagaa

SEQ ID NO: 1964648 - RNA, 19 nt, Artificial Sequence
  Description of Artificial Sequence: Synthetic oligonucleotide
gaucacggcuccuucgucc

SEQ ID NO: 1964649 - RNA, 19 nt, Artificial Sequence
  Description of Artificial Sequence: Synthetic oligonucleotide
ucaauaccuacauucucuc

SEQ ID NO: 1964650 - RNA, 19 nt, Artificial Sequence
  Description of Artificial Sequence: Synthetic oligonucleotide
ucuccuacccuugaaaguc

SEQ ID NO: 1964651 - RNA, 19 nt, Artificial Sequence
  Description of Artificial Sequence: Synthetic oligonucleotide
agaucuaaccacaugcuga

SEQ ID NO: 1964652 - RNA, 19 nt, Artificial Sequence
  Description of Artificial Sequence: Synthetic oligonucleotide
aguugauuaucuccucucu

SEQ ID NO: 1964653 - RNA, 19 nt, Artificial Sequence
  Description of Artificial Sequence: Synthetic oligonucleotide
ugccuuucaccucugcccc

SEQ ID NO: 1964654 - RNA, 19 nt, Artificial Sequence
  Description of Artificial Sequence: Synthetic oligonucleotide
uauuuaccugacauauuaa

SEQ ID NO: 1964655 - RNA, 19 nt, Artificial Sequence
  Description of Artificial Sequence: Synthetic oligonucleotide
cugaucaaagugagcacag

SEQ ID NO: 1964656 - RNA, 19 nt, Artificial Sequence
  Description of Artificial Sequence: Synthetic oligonucleotide
guugauuaucuccucucug

SEQ ID NO: 1964657 - RNA, 19 nt, Artificial Sequence
  Description of Artificial Sequence: Synthetic oligonucleotide
uuuugaacauuaguuuccu

SEQ ID NO: 1964658 - RNA, 19 nt, Artificial Sequence
  Description of Artificial Sequence: Synthetic oligonucleotide
aagggucaggccauacccc

SEQ ID NO: 1964659 - RNA, 19 nt, Artificial Sequence
  Description of Artificial Sequence: Synthetic oligonucleotide
acuagugguaaacuaguuu

SEQ ID NO: 1964660 - RNA, 19 nt, Artificial Sequence
  Description of Artificial Sequence: Synthetic oligonucleotide
uuauuccauacaauuggua

SEQ ID NO: 1964661 - RNA, 19 nt, Artificial Sequence
  Description of Artificial Sequence: Synthetic oligonucleotide
gaggacauguauccaaauc

SEQ ID NO: 1964662 - RNA, 19 nt, Artificial Sequence
  Description of Artificial Sequence: Synthetic oligonucleotide
uucuuagaccuuuggcuug

SEQ ID NO: 1964663 - RNA, 19 nt, Artificial Sequence
  Description of Artificial Sequence: Synthetic oligonucleotide
uaguauucuccuacccuug

SEQ ID NO: 1964664 - RNA, 19 nt, Artificial Sequence
  Description of Artificial Sequence: Synthetic oligonucleotide
uugccugaaucauuuacuc

SEQ ID NO: 1964665 - RNA, 19 nt, Artificial Sequence
  Description of Artificial Sequence: Synthetic oligonucleotide
auaaagcugaaaccauagu

SEQ ID NO: 1964666 - RNA, 19 nt, Artificial Sequence
  Description of Artificial Sequence: Synthetic oligonucleotide
gacauguauccaaaucgag

SEQ ID NO: 1964667 - RNA, 19 nt, Artificial Sequence
  Description of Artificial Sequence: Synthetic oligonucleotide
auucguuugucuucuaauu

SEQ ID NO: 1964668 - RNA, 19 nt, Artificial Sequence
  Description of Artificial Sequence: Synthetic oligonucleotide
aaucuaugaggaugauuau

SEQ ID NO: 1964669 - RNA, 19 nt, Artificial Sequence
  Description of Artificial Sequence: Synthetic oligonucleotide
uuuaguugauuaucuccuc

SEQ ID NO: 1964670 - RNA, 19 nt, Artificial Sequence
  Description of Artificial Sequence: Synthetic oligonucleotide
ucuuauuuguccagaucua

SEQ ID NO: 1964671 - RNA, 19 nt, Artificial Sequence
  Description of Artificial Sequence: Synthetic oligonucleotide
uaguugauuaucuccucuc

SEQ ID NO: 1964672 - RNA, 19 nt, Artificial Sequence
  Description of Artificial Sequence: Synthetic oligonucleotide
cuuuaguugauuaucuccu

SEQ ID NO: 1964673 - RNA, 19 nt, Artificial Sequence
  Description of Artificial Sequence: Synthetic oligonucleotide
ugugugaguauaacuuuua

SEQ ID NO: 1964674 - RNA, 19 nt, Artificial Sequence
  Description of Artificial Sequence: Synthetic oligonucleotide
aucaguagcguggccgucc

SEQ ID NO: 1964675 - RNA, 19 nt, Artificial Sequence
  Description of Artificial Sequence: Synthetic oligonucleotide
cauucucucuucccaagag

SEQ ID NO: 1964676 - RNA, 19 nt, Artificial Sequence
  Description of Artificial Sequence: Synthetic oligonucleotide
aaaaucuaugaggaugauu

SEQ ID NO: 1964677 - RNA, 19 nt, Artificial Sequence
  Description of Artificial Sequence: Synthetic oligonucleotide
caucuccauauauuggaac

SEQ ID NO: 1964678 - RNA, 19 nt, Artificial Sequence
  Description of Artificial Sequence: Synthetic oligonucleotide
gauuccagugguccaugcc

SEQ ID NO: 1964679 - RNA, 19 nt, Artificial Sequence
  Description of Artificial Sequence: Synthetic oligonucleotide
agggaaauuacuaugugua

SEQ ID NO: 1964680 - RNA, 19 nt, Artificial Sequence
  Description of Artificial Sequence: Synthetic oligonucleotide
acaauugguacugaaguua

SEQ ID NO: 1964681 - RNA, 19 nt, Artificial Sequence
  Description of Artificial Sequence: Synthetic oligonucleotide
uugguacugaaguuacuuc

SEQ ID NO: 1964682 - RNA, 19 nt, Artificial Sequence
  Description of Artificial Sequence: Synthetic oligonucleotide
uacaauugguacugaaguu

SEQ ID NO: 1964683 - RNA, 19 nt, Artificial Sequence
  Description of Artificial Sequence: Synthetic oligonucleotide
ucauuccucaggaaucuua

SEQ ID NO: 1964684 - RNA, 19 nt, Artificial Sequence
  Description of Artificial Sequence: Synthetic oligonucleotide
uacuuccauauagggaagg

SEQ ID NO: 1964685 - RNA, 19 nt, Artificial Sequence
  Description of Artificial Sequence: Synthetic oligonucleotide
uccuuuaaauaacuuccuu

SEQ ID NO: 1964686 - RNA, 19 nt, Artificial Sequence
  Description of Artificial Sequence: Synthetic oligonucleotide
aguuacuuccauauaggga

SEQ ID NO: 1964687 - RNA, 19 nt, Artificial Sequence
  Description of Artificial Sequence: Synthetic oligonucleotide
uucuccuacccuugaaagu

SEQ ID NO: 1964688 - RNA, 19 nt, Artificial Sequence
  Description of Artificial Sequence: Synthetic oligonucleotide
caaagugagcacagcaguc

SEQ ID NO: 1964689 - RNA, 19 nt, Artificial Sequence
  Description of Artificial Sequence: Synthetic oligonucleotide
auuggaacuauagccagaa

SEQ ID NO: 1964690 - RNA, 19 nt, Artificial Sequence
  Description of Artificial Sequence: Synthetic oligonucleotide
ccuauuagaaaugucugag

SEQ ID NO: 1964691 - RNA, 19 nt, Artificial Sequence
  Description of Artificial Sequence: Synthetic oligonucleotide
cagaucuaaccacaugcug

SEQ ID NO: 1964692 - RNA, 19 nt, Artificial Sequence
  Description of Artificial Sequence: Synthetic oligonucleotide
ucaucaguagcguggccgu

SEQ ID NO: 1964693 - RNA, 19 nt, Artificial Sequence
  Description of Artificial Sequence: Synthetic oligonucleotide
agugugucaccaacugagc

SEQ ID NO: 1964694 - RNA, 19 nt, Artificial Sequence
  Description of Artificial Sequence: Synthetic oligonucleotide
ugacugcaggauguggacg

SEQ ID NO: 1964695 - RNA, 19 nt, Artificial Sequence
  Description of Artificial Sequence: Synthetic oligonucleotide
acagacuacauaaggccag

SEQ ID NO: 1964696 - RNA, 19 nt, Artificial Sequence
  Description of Artificial Sequence: Synthetic oligonucleotide
agcugaaaccauaguauag

SEQ ID NO: 1964697 - RNA, 19 nt, Artificial Sequence
  Description of Artificial Sequence: Synthetic oligonucleotide
uuuuccgaagaggauucca

SEQ ID NO: 1964698 - RNA, 19 nt, Artificial Sequence
  Description of Artificial Sequence: Synthetic oligonucleotide
uuccuauucguuugucuuc

SEQ ID NO: 1964699 - RNA, 19 nt, Artificial Sequence
  Description of Artificial Sequence: Synthetic oligonucleotide
ggaugauuauuccauacaa

SEQ ID NO: 1964700 - RNA, 19 nt, Artificial Sequence
  Description of Artificial Sequence: Synthetic oligonucleotide
cuagugguaaacuaguuuu

SEQ ID NO: 1964701 - RNA, 19 nt, Artificial Sequence
  Description of Artificial Sequence: Synthetic oligonucleotide
uuagaccuuuggcuuggug

SEQ ID NO: 1964702 - RNA, 19 nt, Artificial Sequence
  Description of Artificial Sequence: Synthetic oligonucleotide
gagcaagugugucaccaac

SEQ ID NO: 1964703 - RNA, 19 nt, Artificial Sequence
  Description of Artificial Sequence: Synthetic oligonucleotide
aguauucuccuacccuuga

SEQ ID NO: 1964704 - RNA, 19 nt, Artificial Sequence
  Description of Artificial Sequence: Synthetic oligonucleotide
uccuauucguuugucuucu

SEQ ID NO: 1964705 - RNA, 19 nt, Artificial Sequence
  Description of Artificial Sequence: Synthetic oligonucleotide
uuucguauuucuucaccuu

SEQ ID NO: 1964706 - RNA, 19 nt, Artificial Sequence
  Description of Artificial Sequence: Synthetic oligonucleotide
acccuuuugaacauuaguu

SEQ ID NO: 1964707 - RNA, 19 nt, Artificial Sequence
  Description of Artificial Sequence: Synthetic oligonucleotide
uuccgaagaggauuccagu

SEQ ID NO: 1964708 - RNA, 19 nt, Artificial Sequence
  Description of Artificial Sequence: Synthetic oligonucleotide
acauaaggccagcauugca

SEQ ID NO: 1964709 - RNA, 19 nt, Artificial Sequence
  Description of Artificial Sequence: Synthetic oligonucleotide
uacauaaggccagcauugc

SEQ ID NO: 1964710 - RNA, 19 nt, Artificial Sequence
  Description of Artificial Sequence: Synthetic oligonucleotide
gugugaguauaacuuuuac

SEQ ID NO: 1964711 - RNA, 19 nt, Artificial Sequence
  Description of Artificial Sequence: Synthetic oligonucleotide
ucaccaacugagcuacauc

SEQ ID NO: 1964712 - RNA, 19 nt, Artificial Sequence
  Description of Artificial Sequence: Synthetic oligonucleotide
uaccuacauucucucuucc

SEQ ID NO: 1964713 - RNA, 19 nt, Artificial Sequence
  Description of Artificial Sequence: Synthetic oligonucleotide
aucauacagacuacauaag

SEQ ID NO: 1964714 - RNA, 19 nt, Artificial Sequence
  Description of Artificial Sequence: Synthetic oligonucleotide
auguauccaaaucgagaga

SEQ ID NO: 1964715 - RNA, 19 nt, Artificial Sequence
  Description of Artificial Sequence: Synthetic oligonucleotide
ucguccugaggacauguau

SEQ ID NO: 1964716 - RNA, 19 nt, Artificial Sequence
  Description of Artificial Sequence: Synthetic oligonucleotide
augcguuuacauaaagcug

SEQ ID NO: 1964717 - RNA, 19 nt, Artificial Sequence
  Description of Artificial Sequence: Synthetic oligonucleotide
cucugaucaaagugagcac

SEQ ID NO: 1964718 - RNA, 19 nt, Artificial Sequence
  Description of Artificial Sequence: Synthetic oligonucleotide
ugaggaugauuauuccaua

SEQ ID NO: 1964719 - RNA, 19 nt, Artificial Sequence
  Description of Artificial Sequence: Synthetic oligonucleotide
ugaucaaagugagcacagc

SEQ ID NO: 1964720 - RNA, 19 nt, Artificial Sequence
  Description of Artificial Sequence: Synthetic oligonucleotide
caggaaucuuauuugucca

SEQ ID NO: 1964721 - RNA, 19 nt, Artificial Sequence
  Description of Artificial Sequence: Synthetic oligonucleotide
uaauuggaaucuggaggcc

SEQ ID NO: 1964722 - RNA, 19 nt, Artificial Sequence
  Description of Artificial Sequence: Synthetic oligonucleotide
cugacugcaggauguggac

SEQ ID NO: 1964723 - RNA, 19 nt, Artificial Sequence
  Description of Artificial Sequence: Synthetic oligonucleotide
cagaauauaugcguuuaca

SEQ ID NO: 1964724 - RNA, 19 nt, Artificial Sequence
  Description of Artificial Sequence: Synthetic oligonucleotide
cuuuugugugaguauaacu

SEQ ID NO: 1964725 - RNA, 19 nt, Artificial Sequence
  Description of Artificial Sequence: Synthetic oligonucleotide
ggcuccuucguccugagga

SEQ ID NO: 1964726 - RNA, 19 nt, Artificial Sequence
  Description of Artificial Sequence: Synthetic oligonucleotide
agaucacggcuccuucguc

SEQ ID NO: 1964727 - RNA, 19 nt, Artificial Sequence
  Description of Artificial Sequence: Synthetic oligonucleotide
uagccagaauauaugcguu

SEQ ID NO: 1964728 - RNA, 19 nt, Artificial Sequence
  Description of Artificial Sequence: Synthetic oligonucleotide
uggagccuuuuccgaagag

SEQ ID NO: 1964729 - RNA, 19 nt, Artificial Sequence
  Description of Artificial Sequence: Synthetic oligonucleotide
uccaugcccagcugacucc

SEQ ID NO: 1964730 - RNA, 19 nt, Artificial Sequence
  Description of Artificial Sequence: Synthetic oligonucleotide
gucccuauuagaaaugucu

SEQ ID NO: 1964731 - RNA, 19 nt, Artificial Sequence
  Description of Artificial Sequence: Synthetic oligonucleotide
gaguuucguauuucuucac

SEQ ID NO: 1964732 - RNA, 19 nt, Artificial Sequence
  Description of Artificial Sequence: Synthetic oligonucleotide
caaaucgagagacugaguu

SEQ ID NO: 1964733 - RNA, 19 nt, Artificial Sequence
  Description of Artificial Sequence: Synthetic oligonucleotide
acucauuccucaggaaucu

SEQ ID NO: 1964734 - RNA, 19 nt, Artificial Sequence
  Description of Artificial Sequence: Synthetic oligonucleotide
ggcaaugaaacaugggaaa

SEQ ID NO: 1964735 - RNA, 19 nt, Artificial Sequence
  Description of Artificial Sequence: Synthetic oligonucleotide
ucucucuucccaagagguc

SEQ ID NO: 1964736 - RNA, 19 nt, Artificial Sequence
  Description of Artificial Sequence: Synthetic oligonucleotide
ugaggacauguauccaaau

SEQ ID NO: 1964737 - RNA, 19 nt, Artificial Sequence
  Description of Artificial Sequence: Synthetic oligonucleotide
agacugaguuucguauuuc

SEQ ID NO: 1964738 - RNA, 19 nt, Artificial Sequence
  Description of Artificial Sequence: Synthetic oligonucleotide
aauugguacugaaguuacu

SEQ ID NO: 1964739 - RNA, 19 nt, Artificial Sequence
  Description of Artificial Sequence: Synthetic oligonucleotide
gaaacucauuccucaggaa

SEQ ID NO: 1964740 - RNA, 19 nt, Artificial Sequence
  Description of Artificial Sequence: Synthetic oligonucleotide
aucuaaccacaugcugagc

SEQ ID NO: 1964741 - RNA, 19 nt, Artificial Sequence
  Description of Artificial Sequence: Synthetic oligonucleotide
ucugccccagcugauuucu

SEQ ID NO: 1964742 - RNA, 19 nt, Artificial Sequence
  Description of Artificial Sequence: Synthetic oligonucleotide
cuacccuugaaagucuuca

SEQ ID NO: 1964743 - RNA, 19 nt, Artificial Sequence
  Description of Artificial Sequence: Synthetic oligonucleotide
uagggaagggucaggccau

SEQ ID NO: 1964744 - RNA, 19 nt, Artificial Sequence
  Description of Artificial Sequence: Synthetic oligonucleotide
acccuugaaagucuucaua

SEQ ID NO: 1964745 - RNA, 19 nt, Artificial Sequence
  Description of Artificial Sequence: Synthetic oligonucleotide
uuggccucuucugagcagu

SEQ ID NO: 1964746 - RNA, 19 nt, Artificial Sequence
  Description of Artificial Sequence: Synthetic oligonucleotide
caggccauaccccagccca

SEQ ID NO: 1964747 - RNA, 19 nt, Artificial Sequence
  Description of Artificial Sequence: Synthetic oligonucleotide
gacugaguuucguauuucu

SEQ ID NO: 1964748 - RNA, 19 nt, Artificial Sequence
  Description of Artificial Sequence: Synthetic oligonucleotide
agacuuuaucuguucuuua

SEQ ID NO: 1964749 - RNA, 19 nt, Artificial Sequence
  Description of Artificial Sequence: Synthetic oligonucleotide
cuuauuuguccagaucuaa

SEQ ID NO: 1964750 - RNA, 19 nt, Artificial Sequence
  Description of Artificial Sequence: Synthetic oligonucleotide
guccaugcccagcugacuc

SEQ ID NO: 1964751 - RNA, 19 nt, Artificial Sequence
  Description of Artificial Sequence: Synthetic oligonucleotide
uccuucucugugccuuuca

SEQ ID NO: 1964752 - RNA, 19 nt, Artificial Sequence
  Description of Artificial Sequence: Synthetic oligonucleotide
gaugauuauuccauacaau

SEQ ID NO: 1964753 - RNA, 19 nt, Artificial Sequence
  Description of Artificial Sequence: Synthetic oligonucleotide
agccagaauauaugcguuu

SEQ ID NO: 1964754 - RNA, 19 nt, Artificial Sequence
  Description of Artificial Sequence: Synthetic oligonucleotide
auguggacgccaguuucuc

SEQ ID NO: 1964755 - RNA, 19 nt, Artificial Sequence
  Description of Artificial Sequence: Synthetic oligonucleotide
ccuuuaaauaacuuccuua

SEQ ID NO: 1964756 - RNA, 19 nt, Artificial Sequence
  Description of Artificial Sequence: Synthetic oligonucleotide
ggaacuauagccagaauau

SEQ ID NO: 1964757 - RNA, 19 nt, Artificial Sequence
  Description of Artificial Sequence: Synthetic oligonucleotide
aacuagugguaaacuaguu

SEQ ID NO: 1964758 - RNA, 19 nt, Artificial Sequence
  Description of Artificial Sequence: Synthetic oligonucleotide
ggcagaucccauccagggg

SEQ ID NO: 1964759 - RNA, 19 nt, Artificial Sequence
  Description of Artificial Sequence: Synthetic oligonucleotide
cuuggccucuucugagcag

SEQ ID NO: 1964760 - RNA, 19 nt, Artificial Sequence
  Description of Artificial Sequence: Synthetic oligonucleotide
uacauccccggcccuggca

SEQ ID NO: 1964761 - RNA, 19 nt, Artificial Sequence
  Description of Artificial Sequence: Synthetic oligonucleotide
agcaagugugucaccaacu

SEQ ID NO: 1964762 - RNA, 19 nt, Artificial Sequence
  Description of Artificial Sequence: Synthetic oligonucleotide
cagacuacauaaggccagc

SEQ ID NO: 1964763 - RNA, 19 nt, Artificial Sequence
  Description of Artificial Sequence: Synthetic oligonucleotide
ggaagggucaggccauacc

SEQ ID NO: 1964764 - RNA, 19 nt, Artificial Sequence
  Description of Artificial Sequence: Synthetic oligonucleotide
ccuugccugaaucauuuac

SEQ ID NO: 1964765 - RNA, 19 nt, Artificial Sequence
  Description of Artificial Sequence: Synthetic oligonucleotide
cuauucguuugucuucuaa

SEQ ID NO: 1964766 - RNA, 19 nt, Artificial Sequence
  Description of Artificial Sequence: Synthetic oligonucleotide
ccauaguauaguuaagaaa

SEQ ID NO: 1964767 - RNA, 19 nt, Artificial Sequence
  Description of Artificial Sequence: Synthetic oligonucleotide
auauaugcguuuacauaaa

SEQ ID NO: 1964768 - RNA, 19 nt, Artificial Sequence
  Description of Artificial Sequence: Synthetic oligonucleotide
agcaucauacagacuacau

SEQ ID NO: 1964769 - RNA, 19 nt, Artificial Sequence
  Description of Artificial Sequence: Synthetic oligonucleotide
aucgagagacugaguuucg

SEQ ID NO: 1964770 - RNA, 19 nt, Artificial Sequence
  Description of Artificial Sequence: Synthetic oligonucleotide
gacuacauaaggccagcau

SEQ ID NO: 1964771 - RNA, 19 nt, Artificial Sequence
  Description of Artificial Sequence: Synthetic oligonucleotide
gaacuauagccagaauaua

SEQ ID NO: 1964772 - RNA, 19 nt, Artificial Sequence
  Description of Artificial Sequence: Synthetic oligonucleotide
ggacauguauccaaaucga

SEQ ID NO: 1964773 - RNA, 19 nt, Artificial Sequence
  Description of Artificial Sequence: Synthetic oligonucleotide
uggccgucccuauuagaaa

SEQ ID NO: 1964774 - RNA, 19 nt, Artificial Sequence
  Description of Artificial Sequence: Synthetic oligonucleotide
ccuacauucucucuuccca

SEQ ID NO: 1964775 - RNA, 19 nt, Artificial Sequence
  Description of Artificial Sequence: Synthetic oligonucleotide
cuuuuccgaagaggauucc

SEQ ID NO: 1964776 - RNA, 19 nt, Artificial Sequence
  Description of Artificial Sequence: Synthetic oligonucleotide
uccauacaauugguacuga

SEQ ID NO: 1964777 - RNA, 19 nt, Artificial Sequence
  Description of Artificial Sequence: Synthetic oligonucleotide
ucgagagacugaguuucgu

SEQ ID NO: 1964778 - RNA, 19 nt, Artificial Sequence
  Description of Artificial Sequence: Synthetic oligonucleotide
gagaucacggcuccuucgu

SEQ ID NO: 1964779 - RNA, 19 nt, Artificial Sequence
  Description of Artificial Sequence: Synthetic oligonucleotide
gguacugaaguuacuucca

SEQ ID NO: 1964780 - RNA, 19 nt, Artificial Sequence
  Description of Artificial Sequence: Synthetic oligonucleotide
ggaaucuuauuuguccaga

SEQ ID NO: 1964781 - RNA, 19 nt, Artificial Sequence
  Description of Artificial Sequence: Synthetic oligonucleotide
agcguggccgucccuauua

SEQ ID NO: 1964782 - RNA, 19 nt, Artificial Sequence
  Description of Artificial Sequence: Synthetic oligonucleotide
cccagcugauuucugacug

SEQ ID NO: 1964783 - RNA, 19 nt, Artificial Sequence
  Description of Artificial Sequence: Synthetic oligonucleotide
uccugaggacauguaucca

SEQ ID NO: 1964784 - RNA, 19 nt, Artificial Sequence
  Description of Artificial Sequence: Synthetic oligonucleotide
gaagaggauuccagugguc

SEQ ID NO: 1964785 - RNA, 19 nt, Artificial Sequence
  Description of Artificial Sequence: Synthetic oligonucleotide
ggauucccagacuuuaucu

SEQ ID NO: 1964786 - RNA, 19 nt, Artificial Sequence
  Description of Artificial Sequence: Synthetic oligonucleotide
guggccgucccuauuagaa

SEQ ID NO: 1964787 - RNA, 19 nt, Artificial Sequence
  Description of Artificial Sequence: Synthetic oligonucleotide
gcaucauacagacuacaua

SEQ ID NO: 1964788 - RNA, 19 nt, Artificial Sequence
  Description of Artificial Sequence: Synthetic oligonucleotide
ucuucaccuugcagccacu

SEQ ID NO: 1964789 - RNA, 19 nt, Artificial Sequence
  Description of Artificial Sequence: Synthetic oligonucleotide
uccuacccuugaaagucuu

SEQ ID NO: 1964790 - RNA, 19 nt, Artificial Sequence
  Description of Artificial Sequence: Synthetic oligonucleotide
gugugucaccaacugagcu

SEQ ID NO: 1964791 - RNA, 19 nt, Artificial Sequence
  Description of Artificial Sequence: Synthetic oligonucleotide
aguagcguggccgucccua

SEQ ID NO: 1964792 - RNA, 19 nt, Artificial Sequence
  Description of Artificial Sequence: Synthetic oligonucleotide
guauucuccuacccuugaa

SEQ ID NO: 1964793 - RNA, 19 nt, Artificial Sequence
  Description of Artificial Sequence: Synthetic oligonucleotide
ggccagucaaacccuuuug

SEQ ID NO: 1964794 - RNA, 19 nt, Artificial Sequence
  Description of Artificial Sequence: Synthetic oligonucleotide
uucguccugaggacaugua

SEQ ID NO: 1964795 - RNA, 19 nt, Artificial Sequence
  Description of Artificial Sequence: Synthetic oligonucleotide
agacuacauaaggccagca

SEQ ID NO: 1964796 - RNA, 19 nt, Artificial Sequence
  Description of Artificial Sequence: Synthetic oligonucleotide
cauuccucaggaaucuuau

SEQ ID NO: 1964797 - RNA, 19 nt, Artificial Sequence
  Description of Artificial Sequence: Synthetic oligonucleotide
ggucaggccauaccccagc

SEQ ID NO: 1964798 - RNA, 19 nt, Artificial Sequence
  Description of Artificial Sequence: Synthetic oligonucleotide
auaccccagcccaugcuug

SEQ ID NO: 1964799 - RNA, 19 nt, Artificial Sequence
  Description of Artificial Sequence: Synthetic oligonucleotide
ccagaauauaugcguuuac

SEQ ID NO: 1964800 - RNA, 19 nt, Artificial Sequence
  Description of Artificial Sequence: Synthetic oligonucleotide
ggaaauuacuauguguaau

SEQ ID NO: 1964801 - RNA, 19 nt, Artificial Sequence
  Description of Artificial Sequence: Synthetic oligonucleotide
gccugaaucauuuacucuu

SEQ ID NO: 1964802 - RNA, 19 nt, Artificial Sequence
  Description of Artificial Sequence: Synthetic oligonucleotide
gcugaaaccauaguauagu

SEQ ID NO: 1964803 - RNA, 19 nt, Artificial Sequence
  Description of Artificial Sequence: Synthetic oligonucleotide
gcaaugaaacaugggaaaa

SEQ ID NO: 1964804 - RNA, 19 nt, Artificial Sequence
  Description of Artificial Sequence: Synthetic oligonucleotide
cccuauuagaaaugucuga

SEQ ID NO: 1964805 - RNA, 19 nt, Artificial Sequence
  Description of Artificial Sequence: Synthetic oligonucleotide
ccauauagggaagggucag

SEQ ID NO: 1964806 - RNA, 19 nt, Artificial Sequence
  Description of Artificial Sequence: Synthetic oligonucleotide
ccagcugauuucugacugc

SEQ ID NO: 1964807 - RNA, 19 nt, Artificial Sequence
  Description of Artificial Sequence: Synthetic oligonucleotide
agcuacauccccggcccug

SEQ ID NO: 1964808 - RNA, 19 nt, Artificial Sequence
  Description of Artificial Sequence: Synthetic oligonucleotide
agaggucucuuucguuauu

SEQ ID NO: 1964809 - RNA, 19 nt, Artificial Sequence
  Description of Artificial Sequence: Synthetic oligonucleotide
ugucaccaacugagcuaca

SEQ ID NO: 1964810 - RNA, 19 nt, Artificial Sequence
  Description of Artificial Sequence: Synthetic oligonucleotide
cugaaguuacuuccauaua

SEQ ID NO: 1964811 - RNA, 19 nt, Artificial Sequence
  Description of Artificial Sequence: Synthetic oligonucleotide
ccaugcuuggccucuucug

SEQ ID NO: 1964812 - RNA, 19 nt, Artificial Sequence
  Description of Artificial Sequence: Synthetic oligonucleotide
cuucaccuugcagccacuc

SEQ ID NO: 1964813 - RNA, 19 nt, Artificial Sequence
  Description of Artificial Sequence: Synthetic oligonucleotide
cguccugaggacauguauc

SEQ ID NO: 1964814 - RNA, 19 nt, Artificial Sequence
  Description of Artificial Sequence: Synthetic oligonucleotide
cuuucaccucugccccagc

SEQ ID NO: 1964815 - RNA, 19 nt, Artificial Sequence
  Description of Artificial Sequence: Synthetic oligonucleotide
cuaauucucuuuaguugau

SEQ ID NO: 1964816 - RNA, 19 nt, Artificial Sequence
  Description of Artificial Sequence: Synthetic oligonucleotide
guacugaaguuacuuccau

SEQ ID NO: 1964817 - RNA, 19 nt, Artificial Sequence
  Description of Artificial Sequence: Synthetic oligonucleotide
cugugccuuucaccucugc

SEQ ID NO: 1964818 - RNA, 19 nt, Artificial Sequence
  Description of Artificial Sequence: Synthetic oligonucleotide
gucaaacccuuuugaacau

SEQ ID NO: 1964819 - RNA, 19 nt, Artificial Sequence
  Description of Artificial Sequence: Synthetic oligonucleotide
gcuccuucguccugaggac

SEQ ID NO: 1964820 - RNA, 19 nt, Artificial Sequence
  Description of Artificial Sequence: Synthetic oligonucleotide
caauaccuacauucucucu

SEQ ID NO: 1964821 - RNA, 19 nt, Artificial Sequence
  Description of Artificial Sequence: Synthetic oligonucleotide
cuggagccuuuuccgaaga

SEQ ID NO: 1964822 - RNA, 19 nt, Artificial Sequence
  Description of Artificial Sequence: Synthetic oligonucleotide
cuacauccccggcccuggc

SEQ ID NO: 1964823 - RNA, 19 nt, Artificial Sequence
  Description of Artificial Sequence: Synthetic oligonucleotide
guauccaaaucgagagacu

SEQ ID NO: 1964824 - RNA, 19 nt, Artificial Sequence
  Description of Artificial Sequence: Synthetic oligonucleotide
gccauaccccagcccaugc

SEQ ID NO: 1964825 - RNA, 19 nt, Artificial Sequence
  Description of Artificial Sequence: Synthetic oligonucleotide
ccauacaauugguacugaa

SEQ ID NO: 1964826 - RNA, 19 nt, Artificial Sequence
  Description of Artificial Sequence: Synthetic oligonucleotide
agccuuuuccgaagaggau

SEQ ID NO: 1964827 - RNA, 19 nt, Artificial Sequence
  Description of Artificial Sequence: Synthetic oligonucleotide
gcugagcaagugugucacc

SEQ ID NO: 1964828 - RNA, 19 nt, Artificial Sequence
  Description of Artificial Sequence: Synthetic oligonucleotide
cagugguccaugcccagcu

SEQ ID NO: 1964829 - RNA, 19 nt, Artificial Sequence
  Description of Artificial Sequence: Synthetic oligonucleotide
gccagaauauaugcguuua

SEQ ID NO: 1964830 - RNA, 19 nt, Artificial Sequence
  Description of Artificial Sequence: Synthetic oligonucleotide
cauaccccagcccaugcuu

SEQ ID NO: 1964831 - RNA, 19 nt, Artificial Sequence
  Description of Artificial Sequence: Synthetic oligonucleotide
gucaugggauucccagacu

SEQ ID NO: 1964832 - RNA, 19 nt, Artificial Sequence
  Description of Artificial Sequence: Synthetic oligonucleotide
ccuacccuugaaagucuuc

SEQ ID NO: 1964833 - RNA, 19 nt, Artificial Sequence
  Description of Artificial Sequence: Synthetic oligonucleotide
cccuuuugaacauuaguuu

SEQ ID NO: 1964834 - RNA, 19 nt, Artificial Sequence
  Description of Artificial Sequence: Synthetic oligonucleotide
cuccuucguccugaggaca

SEQ ID NO: 1964835 - RNA, 19 nt, Artificial Sequence
  Description of Artificial Sequence: Synthetic oligonucleotide
ggccgucccuauuagaaau

SEQ ID NO: 1964836 - RNA, 19 nt, Artificial Sequence
  Description of Artificial Sequence: Synthetic oligonucleotide
uagcguggccgucccuauu

SEQ ID NO: 1964837 - RNA, 19 nt, Artificial Sequence
  Description of Artificial Sequence: Synthetic oligonucleotide
ccagaucuaaccacaugcu

SEQ ID NO: 1964838 - RNA, 19 nt, Artificial Sequence
  Description of Artificial Sequence: Synthetic oligonucleotide
caucaguagcguggccguc

SEQ ID NO: 1964839 - RNA, 19 nt, Artificial Sequence
  Description of Artificial Sequence: Synthetic oligonucleotide
cuccuacccuugaaagucu

SEQ ID NO: 1964840 - RNA, 19 nt, Artificial Sequence
  Description of Artificial Sequence: Synthetic oligonucleotide
cuucguccugaggacaugu

SEQ ID NO: 1964841 - RNA, 19 nt, Artificial Sequence
  Description of Artificial Sequence: Synthetic oligonucleotide
gcuuggugucaugggauuc

SEQ ID NO: 1964842 - RNA, 19 nt, Artificial Sequence
  Description of Artificial Sequence: Synthetic oligonucleotide
gccgucccuauuagaaaug

SEQ ID NO: 1964843 - RNA, 19 nt, Artificial Sequence
  Description of Artificial Sequence: Synthetic oligonucleotide
gacgccaguuucuccucau

SEQ ID NO: 1964844 - RNA, 19 nt, Artificial Sequence
  Description of Artificial Sequence: Synthetic oligonucleotide
cacggcuccuucguccuga

SEQ ID NO: 1964845 - RNA, 19 nt, Artificial Sequence
  Description of Artificial Sequence: Synthetic oligonucleotide
gcguggccgucccuauuag

SEQ ID NO: 1964846 - RNA, 19 nt, Artificial Sequence
  Description of Artificial Sequence: Synthetic oligonucleotide
ggccauaccccagcccaug

SEQ ID NO: 1964847 - RNA, 19 nt, Artificial Sequence
  Description of Artificial Sequence: Synthetic oligonucleotide
ggacgccaguuucuccuca

SEQ ID NO: 1964848 - RNA, 19 nt, Artificial Sequence
  Description of Artificial Sequence: Synthetic oligonucleotide
cgucccuauuagaaauguc

SEQ ID NO: 1964849 - RNA, 19 nt, Artificial Sequence
  Description of Artificial Sequence: Synthetic oligonucleotide
accucugccccagcugauu

SEQ ID NO: 1964850 - RNA, 19 nt, Artificial Sequence
  Description of Artificial Sequence: Synthetic oligonucleotide
ccccagcccaugcuuggcc

SEQ ID NO: 1964851 - RNA, 19 nt, Artificial Sequence
  Description of Artificial Sequence: Synthetic oligonucleotide
cagucuugucugcuucacu

SEQ ID NO: 1964852 - RNA, 19 nt, Artificial Sequence
  Description of Artificial Sequence: Synthetic oligonucleotide
ccucaucaguagcguggcc

SEQ ID NO: 1964853 - RNA, 19 nt, Artificial Sequence
  Description of Artificial Sequence: Synthetic oligonucleotide
cacagcagucuugucugcu

SEQ ID NO: 1964854 - RNA, 19 nt, Artificial Sequence
  Description of Artificial Sequence: Synthetic oligonucleotide
gcguuuacauaaagcugaa

SEQ ID NO: 1964855 - RNA, 19 nt, Artificial Sequence
  Description of Artificial Sequence: Synthetic oligonucleotide
guagcguggccgucccuau

SEQ ID NO: 1964856 - RNA, 19 nt, Artificial Sequence
  Description of Artificial Sequence: Synthetic oligonucleotide
gggaagggucaggccauac

SEQ ID NO: 1964857 - RNA, 19 nt, Artificial Sequence
  Description of Artificial Sequence: Synthetic oligonucleotide
auccccggcccuggcaaau

SEQ ID NO: 1964858 - RNA, 19 nt, Artificial Sequence
  Description of Artificial Sequence: Synthetic oligonucleotide
aggccauaccccagcccau

SEQ ID NO: 1964859 - RNA, 19 nt, Artificial Sequence
  Description of Artificial Sequence: Synthetic oligonucleotide
cgaagaggauuccaguggu

SEQ ID NO: 1964860 - RNA, 19 nt, Artificial Sequence
  Description of Artificial Sequence: Synthetic oligonucleotide
cgagagacugaguuucgua

SEQ ID NO: 1964861 - RNA, 19 nt, Artificial Sequence
  Description of Artificial Sequence: Synthetic oligonucleotide
cccaagaggucucuuucgu

SEQ ID NO: 1964862 - RNA, 19 nt, Artificial Sequence
  Description of Artificial Sequence: Synthetic oligonucleotide
agggaagggucaggccaua

SEQ ID NO: 1964863 - RNA, 19 nt, Artificial Sequence
  Description of Artificial Sequence: Synthetic oligonucleotide
uccccggcccuggcaaauu

SEQ ID NO: 1964864 - RNA, 19 nt, Artificial Sequence
  Description of Artificial Sequence: Synthetic oligonucleotide
cauccccggcccuggcaaa

SEQ ID NO: 1964865 - RNA, 19 nt, Artificial Sequence
  Description of Artificial Sequence: Synthetic oligonucleotide
ccaaaucgagagacugagu

SEQ ID NO: 1964866 - RNA, 19 nt, Artificial Sequence
  Description of Artificial Sequence: Synthetic oligonucleotide
gaggccagucaaacccuuu

SEQ ID NO: 1964867 - RNA, 19 nt, Artificial Sequence
  Description of Artificial Sequence: Synthetic oligonucleotide
ccuucguccugaggacaug

SEQ ID NO: 1964868 - RNA, 19 nt, Artificial Sequence
  Description of Artificial Sequence: Synthetic oligonucleotide
ccccggcccuggcaaauug

SEQ ID NO: 1964869 - RNA, 19 nt, Artificial Sequence
  Description of Artificial Sequence: Synthetic oligonucleotide
cuuagaccuuuggcuuggu

SEQ ID NO: 1964870 - RNA, 19 nt, Artificial Sequence
  Description of Artificial Sequence: Synthetic oligonucleotide
ccgucccuauuagaaaugu

SEQ ID NO: 1964871 - RNA, 19 nt, Artificial Sequence
  Description of Artificial Sequence: Synthetic oligonucleotide
ccuauucguuugucuucua

SEQ ID NO: 1964872 - RNA, 19 nt, Artificial Sequence
  Description of Artificial Sequence: Synthetic oligonucleotide
cguggccgucccuauuaga

SEQ ID NO: 1964873 - RNA, 19 nt, Artificial Sequence
  Description of Artificial Sequence: Synthetic oligonucleotide
cccagcccaugcuuggccu

SEQ ID NO: 1964874 - RNA, 19 nt, Artificial Sequence
  Description of Artificial Sequence: Synthetic oligonucleotide
caccucugccccagcugau

SEQ ID NO: 1964875 - RNA, 19 nt, Artificial Sequence
  Description of Artificial Sequence: Synthetic oligonucleotide
cugugagaucacggcuccu

SEQ ID NO: 1964876 - RNA, 19 nt, Artificial Sequence
  Description of Artificial Sequence: Synthetic oligonucleotide
cacagacacuggagccuuu

SEQ ID NO: 1964877 - RNA, 19 nt, Artificial Sequence
  Description of Artificial Sequence: Synthetic oligonucleotide
ccaugcccagcugacuccu

SEQ ID NO: 1964878 - RNA, 19 nt, Artificial Sequence
  Description of Artificial Sequence: Synthetic oligonucleotide
caguagcguggccgucccu

SEQ ID NO: 1964879 - RNA, 19 nt, Artificial Sequence
  Description of Artificial Sequence: Synthetic oligonucleotide
ccggcccuggcaaauuguu

SEQ ID NO: 1964880 - RNA, 19 nt, Artificial Sequence
  Description of Artificial Sequence: Synthetic oligonucleotide
cccggcccuggcaaauugu

SEQ ID NO: 1964881 - RNA, 19 nt, Artificial Sequence
  Description of Artificial Sequence: Synthetic oligonucleotide
cggcccuggcaaauuguuu

SEQ ID NO: 1964882 - RNA, 19 nt, Artificial Sequence
  Description of Artificial Sequence: Synthetic oligonucleotide
aauaacuaauuucaggucc

SEQ ID NO: 1964883 - RNA, 19 nt, Artificial Sequence
  Description of Artificial Sequence: Synthetic oligonucleotide
uuuguaauuauucacauca

SEQ ID NO: 1964884 - RNA, 19 nt, Artificial Sequence
  Description of Artificial Sequence: Synthetic oligonucleotide
aauaagggugauuuuggcc

SEQ ID NO: 1964885 - RNA, 19 nt, Artificial Sequence
  Description of Artificial Sequence: Synthetic oligonucleotide
uuaaauaacuaauuucagg

SEQ ID NO: 1964886 - RNA, 19 nt, Artificial Sequence
  Description of Artificial Sequence: Synthetic oligonucleotide
uaaauaacuaauuucaggu

SEQ ID NO: 1964887 - RNA, 19 nt, Artificial Sequence
  Description of Artificial Sequence: Synthetic oligonucleotide
acauuuaguucauacaacc

SEQ ID NO: 1964888 - RNA, 19 nt, Artificial Sequence
  Description of Artificial Sequence: Synthetic oligonucleotide
aaucuauuucauuagcguc

SEQ ID NO: 1964889 - RNA, 19 nt, Artificial Sequence
  Description of Artificial Sequence: Synthetic oligonucleotide
aauuauucacaucaaauau

SEQ ID NO: 1964890 - RNA, 19 nt, Artificial Sequence
  Description of Artificial Sequence: Synthetic oligonucleotide
uuuccagucauuuccaugg

SEQ ID NO: 1964891 - RNA, 19 nt, Artificial Sequence
  Description of Artificial Sequence: Synthetic oligonucleotide
aaauaacuaauuucagguc

SEQ ID NO: 1964892 - RNA, 19 nt, Artificial Sequence
  Description of Artificial Sequence: Synthetic oligonucleotide
ucuaugaccaccaaucuga

SEQ ID NO: 1964893 - RNA, 19 nt, Artificial Sequence
  Description of Artificial Sequence: Synthetic oligonucleotide
uuuagguuggugaucagag

SEQ ID NO: 1964894 - RNA, 19 nt, Artificial Sequence
  Description of Artificial Sequence: Synthetic oligonucleotide
aucugagagaacuucaggg

SEQ ID NO: 1964895 - RNA, 19 nt, Artificial Sequence
  Description of Artificial Sequence: Synthetic oligonucleotide
caaccuuucaauaagggug

SEQ ID NO: 1964896 - RNA, 19 nt, Artificial Sequence
  Description of Artificial Sequence: Synthetic oligonucleotide
aacgcaggcagcuuucagc

SEQ ID NO: 1964897 - RNA, 19 nt, Artificial Sequence
  Description of Artificial Sequence: Synthetic oligonucleotide
uuugccugaacaaaaggug

SEQ ID NO: 1964898 - RNA, 19 nt, Artificial Sequence
  Description of Artificial Sequence: Synthetic oligonucleotide
caaauaucuucuuugcacg

SEQ ID NO: 1964899 - RNA, 19 nt, Artificial Sequence
  Description of Artificial Sequence: Synthetic oligonucleotide
auagaagaugucuuugaac

SEQ ID NO: 1964900 - RNA, 19 nt, Artificial Sequence
  Description of Artificial Sequence: Synthetic oligonucleotide
auuagcgucauucacauuu

SEQ ID NO: 1964901 - RNA, 19 nt, Artificial Sequence
  Description of Artificial Sequence: Synthetic oligonucleotide
cuaauuucagguccaaggg

SEQ ID NO: 1964902 - RNA, 19 nt, Artificial Sequence
  Description of Artificial Sequence: Synthetic oligonucleotide
uuuugccugaacaaaaggu

SEQ ID NO: 1964903 - RNA, 19 nt, Artificial Sequence
  Description of Artificial Sequence: Synthetic oligonucleotide
aacagagacaagucugagg

SEQ ID NO: 1964904 - RNA, 19 nt, Artificial Sequence
  Description of Artificial Sequence: Synthetic oligonucleotide
uuuaggaucacauccucca

SEQ ID NO: 1964905 - RNA, 19 nt, Artificial Sequence
  Description of Artificial Sequence: Synthetic oligonucleotide
uugccugaacaaaaggugg

SEQ ID NO: 1964906 - RNA, 19 nt, Artificial Sequence
  Description of Artificial Sequence: Synthetic oligonucleotide
uucauuagcgucauucaca

SEQ ID NO: 1964907 - RNA, 19 nt, Artificial Sequence
  Description of Artificial Sequence: Synthetic oligonucleotide
aaugaucucuggaaaaguc

SEQ ID NO: 1964908 - RNA, 19 nt, Artificial Sequence
  Description of Artificial Sequence: Synthetic oligonucleotide
uucaauaagggugauuuug

SEQ ID NO: 1964909 - RNA, 19 nt, Artificial Sequence
  Description of Artificial Sequence: Synthetic oligonucleotide
gcuuauaaaauuuugccug

SEQ ID NO: 1964910 - RNA, 19 nt, Artificial Sequence
  Description of Artificial Sequence: Synthetic oligonucleotide
auagucacggcacaccagg

SEQ ID NO: 1964911 - RNA, 19 nt, Artificial Sequence
  Description of Artificial Sequence: Synthetic oligonucleotide
ucauauaaguagucaauga

SEQ ID NO: 1964912 - RNA, 19 nt, Artificial Sequence
  Description of Artificial Sequence: Synthetic oligonucleotide
uuacuuuugcacugcaucc

SEQ ID NO: 1964913 - RNA, 19 nt, Artificial Sequence
  Description of Artificial Sequence: Synthetic oligonucleotide
ugucuuacuccaaguaccg

SEQ ID NO: 1964914 - RNA, 19 nt, Artificial Sequence
  Description of Artificial Sequence: Synthetic oligonucleotide
caugauaugccccuuguac

SEQ ID NO: 1964915 - RNA, 19 nt, Artificial Sequence
  Description of Artificial Sequence: Synthetic oligonucleotide
ucuuacuccaaguaccgug

SEQ ID NO: 1964916 - RNA, 19 nt, Artificial Sequence
  Description of Artificial Sequence: Synthetic oligonucleotide
auuuugccugaacaaaagg

SEQ ID NO: 1964917 - RNA, 19 nt, Artificial Sequence
  Description of Artificial Sequence: Synthetic oligonucleotide
aaaauuuugccugaacaaa

SEQ ID NO: 1964918 - RNA, 19 nt, Artificial Sequence
  Description of Artificial Sequence: Synthetic oligonucleotide
guguauagcagcuugucug

SEQ ID NO: 1964919 - RNA, 19 nt, Artificial Sequence
  Description of Artificial Sequence: Synthetic oligonucleotide
cugucuuacuccaaguacc

SEQ ID NO: 1964920 - RNA, 19 nt, Artificial Sequence
  Description of Artificial Sequence: Synthetic oligonucleotide
cuuacuccaaguaccgugg

SEQ ID NO: 1964921 - RNA, 19 nt, Artificial Sequence
  Description of Artificial Sequence: Synthetic oligonucleotide
ugauaugccccuuguacag

SEQ ID NO: 1964922 - RNA, 19 nt, Artificial Sequence
  Description of Artificial Sequence: Synthetic oligonucleotide
aguaccgugguuucuauga

SEQ ID NO: 1964923 - RNA, 19 nt, Artificial Sequence
  Description of Artificial Sequence: Synthetic oligonucleotide
ucucuuaacuccuggggag

SEQ ID NO: 1964924 - RNA, 19 nt, Artificial Sequence
  Description of Artificial Sequence: Synthetic oligonucleotide
ucaaugaucucuggaaaag

SEQ ID NO: 1964925 - RNA, 19 nt, Artificial Sequence
  Description of Artificial Sequence: Synthetic oligonucleotide
guuucuaugaccaccaauc

SEQ ID NO: 1964926 - RNA, 19 nt, Artificial Sequence
  Description of Artificial Sequence: Synthetic oligonucleotide
aucacaauagaagaugucu

SEQ ID NO: 1964927 - RNA, 19 nt, Artificial Sequence
  Description of Artificial Sequence: Synthetic oligonucleotide
auuuaguucauacaaccuu

SEQ ID NO: 1964928 - RNA, 19 nt, Artificial Sequence
  Description of Artificial Sequence: Synthetic oligonucleotide
uguauagcagcuugucugc

SEQ ID NO: 1964929 - RNA, 19 nt, Artificial Sequence
  Description of Artificial Sequence: Synthetic oligonucleotide
uuucccggacaauugacag

SEQ ID NO: 1964930 - RNA, 19 nt, Artificial Sequence
  Description of Artificial Sequence: Synthetic oligonucleotide
uuucauuagcgucauucac

SEQ ID NO: 1964931 - RNA, 19 nt, Artificial Sequence
  Description of Artificial Sequence: Synthetic oligonucleotide
ucuuugaacaggaagucuu

SEQ ID NO: 1964932 - RNA, 19 nt, Artificial Sequence
  Description of Artificial Sequence: Synthetic oligonucleotide
uuccguuuuagguugguga

SEQ ID NO: 1964933 - RNA, 19 nt, Artificial Sequence
  Description of Artificial Sequence: Synthetic oligonucleotide
augguaugccuucagcuuc

SEQ ID NO: 1964934 - RNA, 19 nt, Artificial Sequence
  Description of Artificial Sequence: Synthetic oligonucleotide
agucugaaugcaugcuucc

SEQ ID NO: 1964935 - RNA, 19 nt, Artificial Sequence
  Description of Artificial Sequence: Synthetic oligonucleotide
ugaucagagacuuuuccuc

SEQ ID NO: 1964936 - RNA, 19 nt, Artificial Sequence
  Description of Artificial Sequence: Synthetic oligonucleotide
ucucauauaaguagucaau

SEQ ID NO: 1964937 - RNA, 19 nt, Artificial Sequence
  Description of Artificial Sequence: Synthetic oligonucleotide
uucuaugaccaccaaucug

SEQ ID NO: 1964938 - RNA, 19 nt, Artificial Sequence
  Description of Artificial Sequence: Synthetic oligonucleotide
acugcauccaguuucuggu

SEQ ID NO: 1964939 - RNA, 19 nt, Artificial Sequence
  Description of Artificial Sequence: Synthetic oligonucleotide
  modified_base (2)..(2): a, c, u, g, unknown or other
cncuuauuuguuuauuuuc

SEQ ID NO: 1964940 - RNA, 19 nt, Artificial Sequence
  Description of Artificial Sequence: Synthetic oligonucleotide
uucuuuaggaucacauccu

SEQ ID NO: 1964941 - RNA, 19 nt, Artificial Sequence
  Description of Artificial Sequence: Synthetic oligonucleotide
acuagcaagaucuucccaa

SEQ ID NO: 1964942 - RNA, 19 nt, Artificial Sequence
  Description of Artificial Sequence: Synthetic oligonucleotide
auuucauuagcgucauuca

SEQ ID NO: 1964943 - RNA, 19 nt, Artificial Sequence
  Description of Artificial Sequence: Synthetic oligonucleotide
acaaccuuucaauaagggu

SEQ ID NO: 1964944 - RNA, 19 nt, Artificial Sequence
  Description of Artificial Sequence: Synthetic oligonucleotide
agacuggucucauauaagu

SEQ ID NO: 1964945 - RNA, 19 nt, Artificial Sequence
  Description of Artificial Sequence: Synthetic oligonucleotide
ucugaaugcaugcuuccgu

SEQ ID NO: 1964946 - RNA, 19 nt, Artificial Sequence
  Description of Artificial Sequence: Synthetic oligonucleotide
gagucuagaauccaguucu

SEQ ID NO: 1964947 - RNA, 19 nt, Artificial Sequence
  Description of Artificial Sequence: Synthetic oligonucleotide
agcauugaccccacgauac

SEQ ID NO: 1964948 - RNA, 19 nt, Artificial Sequence
  Description of Artificial Sequence: Synthetic oligonucleotide
uuucuaugaccaccaaucu

SEQ ID NO: 1964949 - RNA, 19 nt, Artificial Sequence
  Description of Artificial Sequence: Synthetic oligonucleotide
uguguauagcagcuugucu

SEQ ID NO: 1964950 - RNA, 19 nt, Artificial Sequence
  Description of Artificial Sequence: Synthetic oligonucleotide
uguuugggagcugagggag

SEQ ID NO: 1964951 - RNA, 19 nt, Artificial Sequence
  Description of Artificial Sequence: Synthetic oligonucleotide
uaucggucuguguauagca

SEQ ID NO: 1964952 - RNA, 19 nt, Artificial Sequence
  Description of Artificial Sequence: Synthetic oligonucleotide
  modified_base (4)..(4): a, c, u, g, unknown or other
uucncuuauuuguuuauuu

SEQ ID NO: 1964953 - RNA, 19 nt, Artificial Sequence
  Description of Artificial Sequence: Synthetic oligonucleotide
uuuucccggacaauugaca

SEQ ID NO: 1964954 - RNA, 19 nt, Artificial Sequence
  Description of Artificial Sequence: Synthetic oligonucleotide
ugcacucucaauuccaguc

SEQ ID NO: 1964955 - RNA, 19 nt, Artificial Sequence
  Description of Artificial Sequence: Synthetic oligonucleotide
aaauuuugccugaacaaaa

SEQ ID NO: 1964956 - RNA, 19 nt, Artificial Sequence
  Description of Artificial Sequence: Synthetic oligonucleotide
uuuuccucuggauaucggu

SEQ ID NO: 1964957 - RNA, 19 nt, Artificial Sequence
  Description of Artificial Sequence: Synthetic oligonucleotide
auaaguagucaaugaucuc

SEQ ID NO: 1964958 - RNA, 19 nt, Artificial Sequence
  Description of Artificial Sequence: Synthetic oligonucleotide
ucauuagcgucauucacau

SEQ ID NO: 1964959 - RNA, 19 nt, Artificial Sequence
  Description of Artificial Sequence: Synthetic oligonucleotide
ucuucuuugcacgauagua

SEQ ID NO: 1964960 - RNA, 19 nt, Artificial Sequence
  Description of Artificial Sequence: Synthetic oligonucleotide
acgauaguacacaagcuuc

SEQ ID NO: 1964961 - RNA, 19 nt, Artificial Sequence
  Description of Artificial Sequence: Synthetic oligonucleotide
augauaugccccuuguaca

SEQ ID NO: 1964962 - RNA, 19 nt, Artificial Sequence
  Description of Artificial Sequence: Synthetic oligonucleotide
ucccaaucuauuucauuag

SEQ ID NO: 1964963 - RNA, 19 nt, Artificial Sequence
  Description of Artificial Sequence: Synthetic oligonucleotide
ucaauuccagucagggaca

SEQ ID NO: 1964964 - RNA, 19 nt, Artificial Sequence
  Description of Artificial Sequence: Synthetic oligonucleotide
ucacaauagaagaugucuu

SEQ ID NO: 1964965 - RNA, 19 nt, Artificial Sequence
  Description of Artificial Sequence: Synthetic oligonucleotide
auaucggucuguguauagc

SEQ ID NO: 1964966 - RNA, 19 nt, Artificial Sequence
  Description of Artificial Sequence: Synthetic oligonucleotide
cacauuuaguucauacaac

SEQ ID NO: 1964967 - RNA, 19 nt, Artificial Sequence
  Description of Artificial Sequence: Synthetic oligonucleotide
ucccggacaauugacaggc

SEQ ID NO: 1964968 - RNA, 19 nt, Artificial Sequence
  Description of Artificial Sequence: Synthetic oligonucleotide
  modified_base (3)..(3): a, c, u, g, unknown or other
ucncuuauuuguuuauuuu

SEQ ID NO: 1964969 - RNA, 19 nt, Artificial Sequence
  Description of Artificial Sequence: Synthetic oligonucleotide
gauaucggucuguguauag

SEQ ID NO: 1964970 - RNA, 19 nt, Artificial Sequence
  Description of Artificial Sequence: Synthetic oligonucleotide
ccaaucuauuucauuagcg

SEQ ID NO: 1964971 - RNA, 19 nt, Artificial Sequence
  Description of Artificial Sequence: Synthetic oligonucleotide
uguaccugccuuuuguaau

SEQ ID NO: 1964972 - RNA, 19 nt, Artificial Sequence
  Description of Artificial Sequence: Synthetic oligonucleotide
uucauacaaccuuucaaua

SEQ ID NO: 1964973 - RNA, 19 nt, Artificial Sequence
  Description of Artificial Sequence: Synthetic oligonucleotide
gguccaagggaacagagac

SEQ ID NO: 1964974 - RNA, 19 nt, Artificial Sequence
  Description of Artificial Sequence: Synthetic oligonucleotide
uccagucauuuccauggag

SEQ ID NO: 1964975 - RNA, 19 nt, Artificial Sequence
  Description of Artificial Sequence: Synthetic oligonucleotide
  modified_base (6)..(6): a, c, u, g, unknown or other
uuuucncuuauuuguuuau

SEQ ID NO: 1964976 - RNA, 19 nt, Artificial Sequence
  Description of Artificial Sequence: Synthetic oligonucleotide
uucuucauuguaccugccu

SEQ ID NO: 1964977 - RNA, 19 nt, Artificial Sequence
  Description of Artificial Sequence: Synthetic oligonucleotide
uggugagaaucucugucca

SEQ ID NO: 1964978 - RNA, 19 nt, Artificial Sequence
  Description of Artificial Sequence: Synthetic oligonucleotide
uccccuauggcacuagcaa

SEQ ID NO: 1964979 - RNA, 19 nt, Artificial Sequence
  Description of Artificial Sequence: Synthetic oligonucleotide
cacugcauccaguuucugg

SEQ ID NO: 1964980 - RNA, 19 nt, Artificial Sequence
  Description of Artificial Sequence: Synthetic oligonucleotide
ucggucuguguauagcagc

SEQ ID NO: 1964981 - RNA, 19 nt, Artificial Sequence
  Description of Artificial Sequence: Synthetic oligonucleotide
ugagagaacuucagggcaa

SEQ ID NO: 1964982 - RNA, 19 nt, Artificial Sequence
  Description of Artificial Sequence: Synthetic oligonucleotide
auacaaccuuucaauaagg

SEQ ID NO: 1964983 - RNA, 19 nt, Artificial Sequence
  Description of Artificial Sequence: Synthetic oligonucleotide
ucuguguauagcagcuugu

SEQ ID NO: 1964984 - RNA, 19 nt, Artificial Sequence
  Description of Artificial Sequence: Synthetic oligonucleotide
ugucugcacucucaauucc

SEQ ID NO: 1964985 - RNA, 19 nt, Artificial Sequence
  Description of Artificial Sequence: Synthetic oligonucleotide
agucaaugaucucuggaaa

SEQ ID NO: 1964986 - RNA, 19 nt, Artificial Sequence
  Description of Artificial Sequence: Synthetic oligonucleotide
aagcuuccauggccgagcg

SEQ ID NO: 1964987 - RNA, 19 nt, Artificial Sequence
  Description of Artificial Sequence: Synthetic oligonucleotide
uuguaauuauucacaucaa

SEQ ID NO: 1964988 - RNA, 19 nt, Artificial Sequence
  Description of Artificial Sequence: Synthetic oligonucleotide
gucuguguauagcagcuug

SEQ ID NO: 1964989 - RNA, 19 nt, Artificial Sequence
  Description of Artificial Sequence: Synthetic oligonucleotide
ugccugaacaaaaggugga

SEQ ID NO: 1964990 - RNA, 19 nt, Artificial Sequence
  Description of Artificial Sequence: Synthetic oligonucleotide
ccaaugugcagucugaaug

SEQ ID NO: 1964991 - RNA, 19 nt, Artificial Sequence
  Description of Artificial Sequence: Synthetic oligonucleotide
agaucuucccaaucuauuu

SEQ ID NO: 1964992 - RNA, 19 nt, Artificial Sequence
  Description of Artificial Sequence: Synthetic oligonucleotide
uuccuggagucuagaaucc

SEQ ID NO: 1964993 - RNA, 19 nt, Artificial Sequence
  Description of Artificial Sequence: Synthetic oligonucleotide
uuugcacgauaguacacaa

SEQ ID NO: 1964994 - RNA, 19 nt, Artificial Sequence
  Description of Artificial Sequence: Synthetic oligonucleotide
uucccggacaauugacagg

SEQ ID NO: 1964995 - RNA, 19 nt, Artificial Sequence
  Description of Artificial Sequence: Synthetic oligonucleotide
agucacggcacaccagggg

SEQ ID NO: 1964996 - RNA, 19 nt, Artificial Sequence
  Description of Artificial Sequence: Synthetic oligonucleotide
uucugucuuacuccaagua

SEQ ID NO: 1964997 - RNA, 19 nt, Artificial Sequence
  Description of Artificial Sequence: Synthetic oligonucleotide
uuccucuggauaucggucu

SEQ ID NO: 1964998 - RNA, 19 nt, Artificial Sequence
  Description of Artificial Sequence: Synthetic oligonucleotide
ucuuugcacgauaguacac

SEQ ID NO: 1964999 - RNA, 19 nt, Artificial Sequence
  Description of Artificial Sequence: Synthetic oligonucleotide
aauaucuucuuugcacgau

SEQ ID NO: 1965000 - RNA, 19 nt, Artificial Sequence
  Description of Artificial Sequence: Synthetic oligonucleotide
acagagaggcugcuucggg

SEQ ID NO: 1965001 - RNA, 19 nt, Artificial Sequence
  Description of Artificial Sequence: Synthetic oligonucleotide
gaggagauccauagucacg

SEQ ID NO: 1965002 - RNA, 19 nt, Artificial Sequence
  Description of Artificial Sequence: Synthetic oligonucleotide
uuagguuggugaucagaga

SEQ ID NO: 1965003 - RNA, 19 nt, Artificial Sequence
  Description of Artificial Sequence: Synthetic oligonucleotide
caacagagaggcugcuucg

SEQ ID NO: 1965004 - RNA, 19 nt, Artificial Sequence
  Description of Artificial Sequence: Synthetic oligonucleotide
gucucauauaaguagucaa

SEQ ID NO: 1965005 - RNA, 19 nt, Artificial Sequence
  Description of Artificial Sequence: Synthetic oligonucleotide
gaauccaguucucuuaacu

SEQ ID NO: 1965006 - RNA, 19 nt, Artificial Sequence
  Description of Artificial Sequence: Synthetic oligonucleotide
uccguuuuagguuggugau

SEQ ID NO: 1965007 - RNA, 19 nt, Artificial Sequence
  Description of Artificial Sequence: Synthetic oligonucleotide
uugaccccacgauacacga

SEQ ID NO: 1965008 - RNA, 19 nt, Artificial Sequence
  Description of Artificial Sequence: Synthetic oligonucleotide
guagucaaugaucucugga

SEQ ID NO: 1965009 - RNA, 19 nt, Artificial Sequence
  Description of Artificial Sequence: Synthetic oligonucleotide
gccuugauuagucucuggg

SEQ ID NO: 1965010 - RNA, 19 nt, Artificial Sequence
  Description of Artificial Sequence: Synthetic oligonucleotide
auaacuaauuucaggucca

SEQ ID NO: 1965011 - RNA, 19 nt, Artificial Sequence
  Description of Artificial Sequence: Synthetic oligonucleotide
uugcacgauaguacacaag

SEQ ID NO: 1965012 - RNA, 19 nt, Artificial Sequence
  Description of Artificial Sequence: Synthetic oligonucleotide
acacaagcuuccauggccg

SEQ ID NO: 1965013 - RNA, 19 nt, Artificial Sequence
  Description of Artificial Sequence: Synthetic oligonucleotide
uaccgugguuucuaugacc

SEQ ID NO: 1965014 - RNA, 19 nt, Artificial Sequence
  Description of Artificial Sequence: Synthetic oligonucleotide
uauagcagcuugucugcac

SEQ ID NO: 1965015 - RNA, 19 nt, Artificial Sequence
  Description of Artificial Sequence: Synthetic oligonucleotide
aagggugauuuuggccugc

SEQ ID NO: 1965016 - RNA, 19 nt, Artificial Sequence
  Description of Artificial Sequence: Synthetic oligonucleotide
gucacggcacaccaggggc

SEQ ID NO: 1965017 - RNA, 19 nt, Artificial Sequence
  Description of Artificial Sequence: Synthetic oligonucleotide
aaggaacgcaggcagcuuu

SEQ ID NO: 1965018 - RNA, 19 nt, Artificial Sequence
  Description of Artificial Sequence: Synthetic oligonucleotide
auugaccccacgauacacg

SEQ ID NO: 1965019 - RNA, 19 nt, Artificial Sequence
  Description of Artificial Sequence: Synthetic oligonucleotide
uugauuagucucuggguuu

SEQ ID NO: 1965020 - RNA, 19 nt, Artificial Sequence
  Description of Artificial Sequence: Synthetic oligonucleotide
ugucuuugaacaggaaguc

SEQ ID NO: 1965021 - RNA, 19 nt, Artificial Sequence
  Description of Artificial Sequence: Synthetic oligonucleotide
gagauccauagucacggca

SEQ ID NO: 1965022 - RNA, 19 nt, Artificial Sequence
  Description of Artificial Sequence: Synthetic oligonucleotide
aaguaccgugguuucuaug

SEQ ID NO: 1965023 - RNA, 19 nt, Artificial Sequence
  Description of Artificial Sequence: Synthetic oligonucleotide
uuugaacaggaagucuugu

SEQ ID NO: 1965024 - RNA, 19 nt, Artificial Sequence
  Description of Artificial Sequence: Synthetic oligonucleotide
acgcaggcagcuuucagcu

SEQ ID NO: 1965025 - RNA, 19 nt, Artificial Sequence
  Description of Artificial Sequence: Synthetic oligonucleotide
ugcaugcuuccguuuuagg

SEQ ID NO: 1965026 - RNA, 19 nt, Artificial Sequence
  Description of Artificial Sequence: Synthetic oligonucleotide
auugacaggcgaccuucag

SEQ ID NO: 1965027 - RNA, 19 nt, Artificial Sequence
  Description of Artificial Sequence: Synthetic oligonucleotide
ugcacugcauccaguuucu

SEQ ID NO: 1965028 - RNA, 19 nt, Artificial Sequence
  Description of Artificial Sequence: Synthetic oligonucleotide
uaagggugauuuuggccug

SEQ ID NO: 1965029 - RNA, 19 nt, Artificial Sequence
  Description of Artificial Sequence: Synthetic oligonucleotide
uucccaaugugcagucuga

SEQ ID NO: 1965030 - RNA, 19 nt, Artificial Sequence
  Description of Artificial Sequence: Synthetic oligonucleotide
uggauaucggucuguguau

SEQ ID NO: 1965031 - RNA, 19 nt, Artificial Sequence
  Description of Artificial Sequence: Synthetic oligonucleotide
aaugcaugcuuccguuuua

SEQ ID NO: 1965032 - RNA, 19 nt, Artificial Sequence
  Description of Artificial Sequence: Synthetic oligonucleotide
gagggaaugguaugccuuc

SEQ ID NO: 1965033 - RNA, 19 nt, Artificial Sequence
  Description of Artificial Sequence: Synthetic oligonucleotide
uuguaccugccuuuuguaa

SEQ ID NO: 1965034 - RNA, 19 nt, Artificial Sequence
  Description of Artificial Sequence: Synthetic oligonucleotide
uggagggacauccccuaug

SEQ ID NO: 1965035 - RNA, 19 nt, Artificial Sequence
  Description of Artificial Sequence: Synthetic oligonucleotide
gucauuuccauggagggaa

SEQ ID NO: 1965036 - RNA, 19 nt, Artificial Sequence
  Description of Artificial Sequence: Synthetic oligonucleotide
uagcgucauucacauuuag

SEQ ID NO: 1965037 - RNA, 19 nt, Artificial Sequence
  Description of Artificial Sequence: Synthetic oligonucleotide
caaucuauuucauuagcgu

SEQ ID NO: 1965038 - RNA, 19 nt, Artificial Sequence
  Description of Artificial Sequence: Synthetic oligonucleotide
cuuucaauaagggugauuu

SEQ ID NO: 1965039 - RNA, 19 nt, Artificial Sequence
  Description of Artificial Sequence: Synthetic oligonucleotide
uccacucuagcuuccacuu

SEQ ID NO: 1965040 - RNA, 19 nt, Artificial Sequence
  Description of Artificial Sequence: Synthetic oligonucleotide
cuggauaucggucugugua

SEQ ID NO: 1965041 - RNA, 19 nt, Artificial Sequence
  Description of Artificial Sequence: Synthetic oligonucleotide
ggcacuagcaagaucuucc

SEQ ID NO: 1965042 - RNA, 19 nt, Artificial Sequence
  Description of Artificial Sequence: Synthetic oligonucleotide
uggucucauauaaguaguc

SEQ ID NO: 1965043 - RNA, 19 nt, Artificial Sequence
  Description of Artificial Sequence: Synthetic oligonucleotide
cacucucaauuccagucag

SEQ ID NO: 1965044 - RNA, 19 nt, Artificial Sequence
  Description of Artificial Sequence: Synthetic oligonucleotide
cuaugaccaccaaucugag

SEQ ID NO: 1965045 - RNA, 19 nt, Artificial Sequence
  Description of Artificial Sequence: Synthetic oligonucleotide
cauauaaguagucaaugau

SEQ ID NO: 1965046 - RNA, 19 nt, Artificial Sequence
  Description of Artificial Sequence: Synthetic oligonucleotide
gagacauuuucuuuaggau

SEQ ID NO: 1965047 - RNA, 19 nt, Artificial Sequence
  Description of Artificial Sequence: Synthetic oligonucleotide
cagacuggucucauauaag

SEQ ID NO: 1965048 - RNA, 19 nt, Artificial Sequence
  Description of Artificial Sequence: Synthetic oligonucleotide
aggcagacuggucucauau

SEQ ID NO: 1965049 - RNA, 19 nt, Artificial Sequence
  Description of Artificial Sequence: Synthetic oligonucleotide
gaacagagacaagucugag

SEQ ID NO: 1965050 - RNA, 19 nt, Artificial Sequence
  Description of Artificial Sequence: Synthetic oligonucleotide
caucacaauagaagauguc

SEQ ID NO: 1965051 - RNA, 19 nt, Artificial Sequence
  Description of Artificial Sequence: Synthetic oligonucleotide
auaguacacaagcuuccau

SEQ ID NO: 1965052 - RNA, 19 nt, Artificial Sequence
  Description of Artificial Sequence: Synthetic oligonucleotide
caguucucuuaacuccugg

SEQ ID NO: 1965053 - RNA, 19 nt, Artificial Sequence
  Description of Artificial Sequence: Synthetic oligonucleotide
ugagggagucuggaucugg

SEQ ID NO: 1965054 - RNA, 19 nt, Artificial Sequence
  Description of Artificial Sequence: Synthetic oligonucleotide
caauugacaggcgaccuuc

SEQ ID NO: 1965055 - RNA, 19 nt, Artificial Sequence
  Description of Artificial Sequence: Synthetic oligonucleotide
agagacuuuuccucuggau

SEQ ID NO: 1965056 - RNA, 19 nt, Artificial Sequence
  Description of Artificial Sequence: Synthetic oligonucleotide
uccuggggagacauuuucu

SEQ ID NO: 1965057 - RNA, 19 nt, Artificial Sequence
  Description of Artificial Sequence: Synthetic oligonucleotide
uuagcgucauucacauuua

SEQ ID NO: 1965058 - RNA, 19 nt, Artificial Sequence
  Description of Artificial Sequence: Synthetic oligonucleotide
gauaguacacaagcuucca

SEQ ID NO: 1965059 - RNA, 19 nt, Artificial Sequence
  Description of Artificial Sequence: Synthetic oligonucleotide
ugauuagucucuggguuuc

SEQ ID NO: 1965060 - RNA, 19 nt, Artificial Sequence
  Description of Artificial Sequence: Synthetic oligonucleotide
cauagucacggcacaccag

SEQ ID NO: 1965061 - RNA, 19 nt, Artificial Sequence
  Description of Artificial Sequence: Synthetic oligonucleotide
uggucuccacucuagcuuc

SEQ ID NO: 1965062 - RNA, 19 nt, Artificial Sequence
  Description of Artificial Sequence: Synthetic oligonucleotide
gaucagagacuuuuccucu

SEQ ID NO: 1965063 - RNA, 19 nt, Artificial Sequence
  Description of Artificial Sequence: Synthetic oligonucleotide
ggaaugguaugccuucagc

SEQ ID NO: 1965064 - RNA, 19 nt, Artificial Sequence
  Description of Artificial Sequence: Synthetic oligonucleotide
ugguaugccuucagcuucu

SEQ ID NO: 1965065 - RNA, 19 nt, Artificial Sequence
  Description of Artificial Sequence: Synthetic oligonucleotide
ggaagucuuguuugggagc

SEQ ID NO: 1965066 - RNA, 19 nt, Artificial Sequence
  Description of Artificial Sequence: Synthetic oligonucleotide
uggagucuagaauccaguu

SEQ ID NO: 1965067 - RNA, 19 nt, Artificial Sequence
  Description of Artificial Sequence: Synthetic oligonucleotide
uaugaccaccaaucugaga

SEQ ID NO: 1965068 - RNA, 19 nt, Artificial Sequence
  Description of Artificial Sequence: Synthetic oligonucleotide
acaagucugaggaggagga

SEQ ID NO: 1965069 - RNA, 19 nt, Artificial Sequence
  Description of Artificial Sequence: Synthetic oligonucleotide
aacuucagggcaacagaga

SEQ ID NO: 1965070 - RNA, 19 nt, Artificial Sequence
  Description of Artificial Sequence: Synthetic oligonucleotide
accgugguuucuaugacca

SEQ ID NO: 1965071 - RNA, 19 nt, Artificial Sequence
  Description of Artificial Sequence: Synthetic oligonucleotide
uuccacccaugauaugccc

SEQ ID NO: 1965072 - RNA, 19 nt, Artificial Sequence
  Description of Artificial Sequence: Synthetic oligonucleotide
caagcuuccauggccgagc

SEQ ID NO: 1965073 - RNA, 19 nt, Artificial Sequence
  Description of Artificial Sequence: Synthetic oligonucleotide
  modified_base (5)..(5): a, c, u, g, unknown or other
uuucncuuauuuguuuauu

SEQ ID NO: 1965074 - RNA, 19 nt, Artificial Sequence
  Description of Artificial Sequence: Synthetic oligonucleotide
gauccauagucacggcaca

SEQ ID NO: 1965075 - RNA, 19 nt, Artificial Sequence
  Description of Artificial Sequence: Synthetic oligonucleotide
cuuugcacgauaguacaca

SEQ ID NO: 1965076 - RNA, 19 nt, Artificial Sequence
  Description of Artificial Sequence: Synthetic oligonucleotide
gaacgcaggcagcuuucag

SEQ ID NO: 1965077 - RNA, 19 nt, Artificial Sequence
  Description of Artificial Sequence: Synthetic oligonucleotide
uuccauggccgagcgaugc

SEQ ID NO: 1965078 - RNA, 19 nt, Artificial Sequence
  Description of Artificial Sequence: Synthetic oligonucleotide
augccuuucccaaugugca

SEQ ID NO: 1965079 - RNA, 19 nt, Artificial Sequence
  Description of Artificial Sequence: Synthetic oligonucleotide
ccacgauacacgaaucccc

SEQ ID NO: 1965080 - RNA, 19 nt, Artificial Sequence
  Description of Artificial Sequence: Synthetic oligonucleotide
uuccagucauuuccaugga

SEQ ID NO: 1965081 - RNA, 19 nt, Artificial Sequence
  Description of Artificial Sequence: Synthetic oligonucleotide
uuacuccaaguaccguggu

SEQ ID NO: 1965082 - RNA, 19 nt, Artificial Sequence
  Description of Artificial Sequence: Synthetic oligonucleotide
gcaacagagaggcugcuuc

SEQ ID NO: 1965083 - RNA, 19 nt, Artificial Sequence
  Description of Artificial Sequence: Synthetic oligonucleotide
ggagucuagaauccaguuc

SEQ ID NO: 1965084 - RNA, 19 nt, Artificial Sequence
  Description of Artificial Sequence: Synthetic oligonucleotide
cauugaccccacgauacac

SEQ ID NO: 1965085 - RNA, 19 nt, Artificial Sequence
  Description of Artificial Sequence: Synthetic oligonucleotide
uucgggccaccauugcccc

SEQ ID NO: 1965086 - RNA, 19 nt, Artificial Sequence
  Description of Artificial Sequence: Synthetic oligonucleotide
cauuuaguucauacaaccu

SEQ ID NO: 1965087 - RNA, 19 nt, Artificial Sequence
  Description of Artificial Sequence: Synthetic oligonucleotide
cuugauuagucucuggguu

SEQ ID NO: 1965088 - RNA, 19 nt, Artificial Sequence
  Description of Artificial Sequence: Synthetic oligonucleotide
acaauugacaggcgaccuu

SEQ ID NO: 1965089 - RNA, 19 nt, Artificial Sequence
  Description of Artificial Sequence: Synthetic oligonucleotide
cagagcauugaccccacga

SEQ ID NO: 1965090 - RNA, 19 nt, Artificial Sequence
  Description of Artificial Sequence: Synthetic oligonucleotide
auuagucucuggguuucug

SEQ ID NO: 1965091 - RNA, 19 nt, Artificial Sequence
  Description of Artificial Sequence: Synthetic oligonucleotide
aauugacaggcgaccuuca

SEQ ID NO: 1965092 - RNA, 19 nt, Artificial Sequence
  Description of Artificial Sequence: Synthetic oligonucleotide
uccauggccgagcgaugcc

SEQ ID NO: 1965093 - RNA, 19 nt, Artificial Sequence
  Description of Artificial Sequence: Synthetic oligonucleotide
cccaaucuauuucauuagc

SEQ ID NO: 1965094 - RNA, 19 nt, Artificial Sequence
  Description of Artificial Sequence: Synthetic oligonucleotide
gcagacuggucucauauaa

SEQ ID NO: 1965095 - RNA, 19 nt, Artificial Sequence
  Description of Artificial Sequence: Synthetic oligonucleotide
cuguguauagcagcuuguc

SEQ ID NO: 1965096 - RNA, 19 nt, Artificial Sequence
  Description of Artificial Sequence: Synthetic oligonucleotide
ggacaauugacaggcgacc

SEQ ID NO: 1965097 - RNA, 19 nt, Artificial Sequence
  Description of Artificial Sequence: Synthetic oligonucleotide
cuccuggggagacauuuuc

SEQ ID NO: 1965098 - RNA, 19 nt, Artificial Sequence
  Description of Artificial Sequence: Synthetic oligonucleotide
guaccgugguuucuaugac

SEQ ID NO: 1965099 - RNA, 19 nt, Artificial Sequence
  Description of Artificial Sequence: Synthetic oligonucleotide
guuuuagguuggugaucag

SEQ ID NO: 1965100 - RNA, 19 nt, Artificial Sequence
  Description of Artificial Sequence: Synthetic oligonucleotide
cgauaguacacaagcuucc

SEQ ID NO: 1965101 - RNA, 19 nt, Artificial Sequence
  Description of Artificial Sequence: Synthetic oligonucleotide
uaacuaauuucagguccaa

SEQ ID NO: 1965102 - RNA, 19 nt, Artificial Sequence
  Description of Artificial Sequence: Synthetic oligonucleotide
acaagcuuccauggccgag

SEQ ID NO: 1965103 - RNA, 19 nt, Artificial Sequence
  Description of Artificial Sequence: Synthetic oligonucleotide
ccugaacaaaagguggagg

SEQ ID NO: 1965104 - RNA, 19 nt, Artificial Sequence
  Description of Artificial Sequence: Synthetic oligonucleotide
acucucaauuccagucagg

SEQ ID NO: 1965105 - RNA, 19 nt, Artificial Sequence
  Description of Artificial Sequence: Synthetic oligonucleotide
agucuagaauccaguucuc

SEQ ID NO: 1965106 - RNA, 19 nt, Artificial Sequence
  Description of Artificial Sequence: Synthetic oligonucleotide
agcgucauucacauuuagu

SEQ ID NO: 1965107 - RNA, 19 nt, Artificial Sequence
  Description of Artificial Sequence: Synthetic oligonucleotide
gaccccacgauacacgaau

SEQ ID NO: 1965108 - RNA, 19 nt, Artificial Sequence
  Description of Artificial Sequence: Synthetic oligonucleotide
uccuuuuggugagaaucuc

SEQ ID NO: 1965109 - RNA, 19 nt, Artificial Sequence
  Description of Artificial Sequence: Synthetic oligonucleotide
ugcuucgggccaccauugc

SEQ ID NO: 1965110 - RNA, 19 nt, Artificial Sequence
  Description of Artificial Sequence: Synthetic oligonucleotide
uacuccaaguaccgugguu

SEQ ID NO: 1965111 - RNA, 19 nt, Artificial Sequence
  Description of Artificial Sequence: Synthetic oligonucleotide
cugcuucgggccaccauug

SEQ ID NO: 1965112 - RNA, 19 nt, Artificial Sequence
  Description of Artificial Sequence: Synthetic oligonucleotide
gcacuagcaagaucuuccc

SEQ ID NO: 1965113 - RNA, 19 nt, Artificial Sequence
  Description of Artificial Sequence: Synthetic oligonucleotide
ucauccuuuuggugagaau

SEQ ID NO: 1965114 - RNA, 19 nt, Artificial Sequence
  Description of Artificial Sequence: Synthetic oligonucleotide
cuggucucauauaaguagu

SEQ ID NO: 1965115 - RNA, 19 nt, Artificial Sequence
  Description of Artificial Sequence: Synthetic oligonucleotide
caauuccagucagggacag

SEQ ID NO: 1965116 - RNA, 19 nt, Artificial Sequence
  Description of Artificial Sequence: Synthetic oligonucleotide
aggaacgcaggcagcuuuc

SEQ ID NO: 1965117 - RNA, 19 nt, Artificial Sequence
  Description of Artificial Sequence: Synthetic oligonucleotide
ggucucauauaaguaguca

SEQ ID NO: 1965118 - RNA, 19 nt, Artificial Sequence
  Description of Artificial Sequence: Synthetic oligonucleotide
gcgucauucacauuuaguu

SEQ ID NO: 1965119 - RNA, 19 nt, Artificial Sequence
  Description of Artificial Sequence: Synthetic oligonucleotide
gaccaccaaucugagagaa

SEQ ID NO: 1965120 - RNA, 19 nt, Artificial Sequence
  Description of Artificial Sequence: Synthetic oligonucleotide
cucuggauaucggucugug

SEQ ID NO: 1965121 - RNA, 19 nt, Artificial Sequence
  Description of Artificial Sequence: Synthetic oligonucleotide
accaccaaucugagagaac

SEQ ID NO: 1965122 - RNA, 19 nt, Artificial Sequence
  Description of Artificial Sequence: Synthetic oligonucleotide
cucuguccacuuacuuuug

SEQ ID NO: 1965123 - RNA, 19 nt, Artificial Sequence
  Description of Artificial Sequence: Synthetic oligonucleotide
gacuggucucauauaagua

SEQ ID NO: 1965124 - RNA, 19 nt, Artificial Sequence
  Description of Artificial Sequence: Synthetic oligonucleotide
cuuccguuuuagguuggug

SEQ ID NO: 1965125 - RNA, 19 nt, Artificial Sequence
  Description of Artificial Sequence: Synthetic oligonucleotide
aaggcagacuggucucaua

SEQ ID NO: 1965126 - RNA, 19 nt, Artificial Sequence
  Description of Artificial Sequence: Synthetic oligonucleotide
gacaauugacaggcgaccu

SEQ ID NO: 1965127 - RNA, 19 nt, Artificial Sequence
  Description of Artificial Sequence: Synthetic oligonucleotide
cacgauaguacacaagcuu

SEQ ID NO: 1965128 - RNA, 19 nt, Artificial Sequence
  Description of Artificial Sequence: Synthetic oligonucleotide
acaggaauucuugcacuau

SEQ ID NO: 1965129 - RNA, 19 nt, Artificial Sequence
  Description of Artificial Sequence: Synthetic oligonucleotide
gacuuuuccucuggauauc

SEQ ID NO: 1965130 - RNA, 19 nt, Artificial Sequence
  Description of Artificial Sequence: Synthetic oligonucleotide
cauuuccauggagggaaug

SEQ ID NO: 1965131 - RNA, 19 nt, Artificial Sequence
  Description of Artificial Sequence: Synthetic oligonucleotide
ugguuucuaugaccaccaa

SEQ ID NO: 1965132 - RNA, 19 nt, Artificial Sequence
  Description of Artificial Sequence: Synthetic oligonucleotide
gugagaaucucuguccacu

SEQ ID NO: 1965133 - RNA, 19 nt, Artificial Sequence
  Description of Artificial Sequence: Synthetic oligonucleotide
cacaauagaagaugucuuu

SEQ ID NO: 1965134 - RNA, 19 nt, Artificial Sequence
  Description of Artificial Sequence: Synthetic oligonucleotide
augccccuuguacaguuuu

SEQ ID NO: 1965135 - RNA, 19 nt, Artificial Sequence
  Description of Artificial Sequence: Synthetic oligonucleotide
cccacgauacacgaauccc

SEQ ID NO: 1965136 - RNA, 19 nt, Artificial Sequence
  Description of Artificial Sequence: Synthetic oligonucleotide
caagaucuucccaaucuau

SEQ ID NO: 1965137 - RNA, 19 nt, Artificial Sequence
  Description of Artificial Sequence: Synthetic oligonucleotide
gccaccauugccccgaucu

SEQ ID NO: 1965138 - RNA, 19 nt, Artificial Sequence
  Description of Artificial Sequence: Synthetic oligonucleotide
cgugguuucuaugaccacc

SEQ ID NO: 1965139 - RNA, 19 nt, Artificial Sequence
  Description of Artificial Sequence: Synthetic oligonucleotide
cuuccacuuccacccauga

SEQ ID NO: 1965140 - RNA, 19 nt, Artificial Sequence
  Description of Artificial Sequence: Synthetic oligonucleotide
ucccaaugugcagucugaa

SEQ ID NO: 1965141 - RNA, 19 nt, Artificial Sequence
  Description of Artificial Sequence: Synthetic oligonucleotide
ccccuauggcacuagcaag

SEQ ID NO: 1965142 - RNA, 19 nt, Artificial Sequence
  Description of Artificial Sequence: Synthetic oligonucleotide
gccugaacaaaagguggag

SEQ ID NO: 1965143 - RNA, 19 nt, Artificial Sequence
  Description of Artificial Sequence: Synthetic oligonucleotide
cuggagucuagaauccagu

SEQ ID NO: 1965144 - RNA, 19 nt, Artificial Sequence
  Description of Artificial Sequence: Synthetic oligonucleotide
auccccuauggcacuagca

SEQ ID NO: 1965145 - RNA, 19 nt, Artificial Sequence
  Description of Artificial Sequence: Synthetic oligonucleotide
cacuagcaagaucuuccca

SEQ ID NO: 1965146 - RNA, 19 nt, Artificial Sequence
  Description of Artificial Sequence: Synthetic oligonucleotide
ucgggccaccauugccccg

SEQ ID NO: 1965147 - RNA, 19 nt, Artificial Sequence
  Description of Artificial Sequence: Synthetic oligonucleotide
agggaaugguaugccuuca

SEQ ID NO: 1965148 - RNA, 19 nt, Artificial Sequence
  Description of Artificial Sequence: Synthetic oligonucleotide
accugccuuuuguaauuau

SEQ ID NO: 1965149 - RNA, 19 nt, Artificial Sequence
  Description of Artificial Sequence: Synthetic oligonucleotide
cccuauggcacuagcaaga

SEQ ID NO: 1965150 - RNA, 19 nt, Artificial Sequence
  Description of Artificial Sequence: Synthetic oligonucleotide
accccacgauacacgaauc

SEQ ID NO: 1965151 - RNA, 19 nt, Artificial Sequence
  Description of Artificial Sequence: Synthetic oligonucleotide
cggacaauugacaggcgac

SEQ ID NO: 1965152 - RNA, 19 nt, Artificial Sequence
  Description of Artificial Sequence: Synthetic oligonucleotide
ccauggagggaaugguaug

SEQ ID NO: 1965153 - RNA, 19 nt, Artificial Sequence
  Description of Artificial Sequence: Synthetic oligonucleotide
cucuuaacuccuggggaga

SEQ ID NO: 1965154 - RNA, 19 nt, Artificial Sequence
  Description of Artificial Sequence: Synthetic oligonucleotide
gaaucucuguccacuuacu

SEQ ID NO: 1965155 - RNA, 19 nt, Artificial Sequence
  Description of Artificial Sequence: Synthetic oligonucleotide
cuccacucuagcuuccacu

SEQ ID NO: 1965156 - RNA, 19 nt, Artificial Sequence
  Description of Artificial Sequence: Synthetic oligonucleotide
guauagcagcuugucugca

SEQ ID NO: 1965157 - RNA, 19 nt, Artificial Sequence
  Description of Artificial Sequence: Synthetic oligonucleotide
cguuuuagguuggugauca

SEQ ID NO: 1965158 - RNA, 19 nt, Artificial Sequence
  Description of Artificial Sequence: Synthetic oligonucleotide
accauugccccgaucuuuu

SEQ ID NO: 1965159 - RNA, 19 nt, Artificial Sequence
  Description of Artificial Sequence: Synthetic oligonucleotide
gguuucuaugaccaccaau

SEQ ID NO: 1965160 - RNA, 19 nt, Artificial Sequence
  Description of Artificial Sequence: Synthetic oligonucleotide
ccauagucacggcacacca

SEQ ID NO: 1965161 - RNA, 19 nt, Artificial Sequence
  Description of Artificial Sequence: Synthetic oligonucleotide
acucuagcuuccacuucca

SEQ ID NO: 1965162 - RNA, 19 nt, Artificial Sequence
  Description of Artificial Sequence: Synthetic oligonucleotide
gggugauuuuggccugcag

SEQ ID NO: 1965163 - RNA, 19 nt, Artificial Sequence
  Description of Artificial Sequence: Synthetic oligonucleotide
gucuagaauccaguucucu

SEQ ID NO: 1965164 - RNA, 19 nt, Artificial Sequence
  Description of Artificial Sequence: Synthetic oligonucleotide
cacggcacaccaggggcac

SEQ ID NO: 1965165 - RNA, 19 nt, Artificial Sequence
  Description of Artificial Sequence: Synthetic oligonucleotide
cuuuugcacugcauccagu

SEQ ID NO: 1965166 - RNA, 19 nt, Artificial Sequence
  Description of Artificial Sequence: Synthetic oligonucleotide
ggccgagcgaugccuuucc

SEQ ID NO: 1965167 - RNA, 19 nt, Artificial Sequence
  Description of Artificial Sequence: Synthetic oligonucleotide
caggcgaccuucagggucu

SEQ ID NO: 1965168 - RNA, 19 nt, Artificial Sequence
  Description of Artificial Sequence: Synthetic oligonucleotide
uaacuccuggggagacauu

SEQ ID NO: 1965169 - RNA, 19 nt, Artificial Sequence
  Description of Artificial Sequence: Synthetic oligonucleotide
gcauugaccccacgauaca

SEQ ID NO: 1965170 - RNA, 19 nt, Artificial Sequence
  Description of Artificial Sequence: Synthetic oligonucleotide
uggccgagcgaugccuuuc

SEQ ID NO: 1965171 - RNA, 19 nt, Artificial Sequence
  Description of Artificial Sequence: Synthetic oligonucleotide
gguggagggacauccccua

SEQ ID NO: 1965172 - RNA, 19 nt, Artificial Sequence
  Description of Artificial Sequence: Synthetic oligonucleotide
cugagggagucuggaucug

SEQ ID NO: 1965173 - RNA, 19 nt, Artificial Sequence
  Description of Artificial Sequence: Synthetic oligonucleotide
agcuuccauggccgagcga

SEQ ID NO: 1965174 - RNA, 19 nt, Artificial Sequence
  Description of Artificial Sequence: Synthetic oligonucleotide
ccggacaauugacaggcga

SEQ ID NO: 1965175 - RNA, 19 nt, Artificial Sequence
  Description of Artificial Sequence: Synthetic oligonucleotide
ccuugauuagucucugggu

SEQ ID NO: 1965176 - RNA, 19 nt, Artificial Sequence
  Description of Artificial Sequence: Synthetic oligonucleotide
auggccgagcgaugccuuu

SEQ ID NO: 1965177 - RNA, 19 nt, Artificial Sequence
  Description of Artificial Sequence: Synthetic oligonucleotide
gauuagucucuggguuucu

SEQ ID NO: 1965178 - RNA, 19 nt, Artificial Sequence
  Description of Artificial Sequence: Synthetic oligonucleotide
accuuucaauaagggugau

SEQ ID NO: 1965179 - RNA, 19 nt, Artificial Sequence
  Description of Artificial Sequence: Synthetic oligonucleotide
gacauccccuauggcacua

SEQ ID NO: 1965180 - RNA, 19 nt, Artificial Sequence
  Description of Artificial Sequence: Synthetic oligonucleotide
cugcacucucaauuccagu

SEQ ID NO: 1965181 - RNA, 19 nt, Artificial Sequence
  Description of Artificial Sequence: Synthetic oligonucleotide
ggauaucggucuguguaua

SEQ ID NO: 1965182 - RNA, 19 nt, Artificial Sequence
  Description of Artificial Sequence: Synthetic oligonucleotide
caaguaccgugguuucuau

SEQ ID NO: 1965183 - RNA, 19 nt, Artificial Sequence
  Description of Artificial Sequence: Synthetic oligonucleotide
acuccuggggagacauuuu

SEQ ID NO: 1965184 - RNA, 19 nt, Artificial Sequence
  Description of Artificial Sequence: Synthetic oligonucleotide
gucugaggaggaggagauc

SEQ ID NO: 1965185 - RNA, 19 nt, Artificial Sequence
  Description of Artificial Sequence: Synthetic oligonucleotide
ggcagacuggucucauaua

SEQ ID NO: 1965186 - RNA, 19 nt, Artificial Sequence
  Description of Artificial Sequence: Synthetic oligonucleotide
ggcacaccaggggcacugg

SEQ ID NO: 1965187 - RNA, 19 nt, Artificial Sequence
  Description of Artificial Sequence: Synthetic oligonucleotide
ggaggaggagauccauagu

SEQ ID NO: 1965188 - RNA, 19 nt, Artificial Sequence
  Description of Artificial Sequence: Synthetic oligonucleotide
ggaacgcaggcagcuuuca

SEQ ID NO: 1965189 - RNA, 19 nt, Artificial Sequence
  Description of Artificial Sequence: Synthetic oligonucleotide
cccggacaauugacaggcg

SEQ ID NO: 1965190 - RNA, 19 nt, Artificial Sequence
  Description of Artificial Sequence: Synthetic oligonucleotide
ccguuuuagguuggugauc

SEQ ID NO: 1965191 - RNA, 19 nt, Artificial Sequence
  Description of Artificial Sequence: Synthetic oligonucleotide
gucuuacuccaaguaccgu

SEQ ID NO: 1965192 - RNA, 19 nt, Artificial Sequence
  Description of Artificial Sequence: Synthetic oligonucleotide
cgaugccuuucccaaugug

SEQ ID NO: 1965193 - RNA, 19 nt, Artificial Sequence
  Description of Artificial Sequence: Synthetic oligonucleotide
gccgagcgaugccuuuccc

SEQ ID NO: 1965194 - RNA, 19 nt, Artificial Sequence
  Description of Artificial Sequence: Synthetic oligonucleotide
guuugggagcugagggagu

SEQ ID NO: 1965195 - RNA, 19 nt, Artificial Sequence
  Description of Artificial Sequence: Synthetic oligonucleotide
ccaaguaccgugguuucua

SEQ ID NO: 1965196 - RNA, 19 nt, Artificial Sequence
  Description of Artificial Sequence: Synthetic oligonucleotide
gccuuucccaaugugcagu

SEQ ID NO: 1965197 - RNA, 19 nt, Artificial Sequence
  Description of Artificial Sequence: Synthetic oligonucleotide
caccaaucugagagaacuu

SEQ ID NO: 1965198 - RNA, 19 nt, Artificial Sequence
  Description of Artificial Sequence: Synthetic oligonucleotide
ccgugguuucuaugaccac

SEQ ID NO: 1965199 - RNA, 19 nt, Artificial Sequence
  Description of Artificial Sequence: Synthetic oligonucleotide
cuuucccaaugugcagucu

SEQ ID NO: 1965200 - RNA, 19 nt, Artificial Sequence
  Description of Artificial Sequence: Synthetic oligonucleotide
ccaugauaugccccuugua

SEQ ID NO: 1965201 - RNA, 19 nt, Artificial Sequence
  Description of Artificial Sequence: Synthetic oligonucleotide
guggagggacauccccuau

SEQ ID NO: 1965202 - RNA, 19 nt, Artificial Sequence
  Description of Artificial Sequence: Synthetic oligonucleotide
cauggccgagcgaugccuu

SEQ ID NO: 1965203 - RNA, 19 nt, Artificial Sequence
  Description of Artificial Sequence: Synthetic oligonucleotide
guuggugaucagagacuuu

SEQ ID NO: 1965204 - RNA, 19 nt, Artificial Sequence
  Description of Artificial Sequence: Synthetic oligonucleotide
cggucuguguauagcagcu

SEQ ID NO: 1965205 - RNA, 19 nt, Artificial Sequence
  Description of Artificial Sequence: Synthetic oligonucleotide
cauuagcgucauucacauu

SEQ ID NO: 1965206 - RNA, 19 nt, Artificial Sequence
  Description of Artificial Sequence: Synthetic oligonucleotide
ccacagccuugauuagucu

SEQ ID NO: 1965207 - RNA, 19 nt, Artificial Sequence
  Description of Artificial Sequence: Synthetic oligonucleotide
ggccaccauugccccgauc

SEQ ID NO: 1965208 - RNA, 19 nt, Artificial Sequence
  Description of Artificial Sequence: Synthetic oligonucleotide
gcuuccguuuuagguuggu

SEQ ID NO: 1965209 - RNA, 19 nt, Artificial Sequence
  Description of Artificial Sequence: Synthetic oligonucleotide
ccauggccgagcgaugccu

SEQ ID NO: 1965210 - RNA, 19 nt, Artificial Sequence
  Description of Artificial Sequence: Synthetic oligonucleotide
aggcgaccuucagggucuu

SEQ ID NO: 1965211 - RNA, 19 nt, Artificial Sequence
  Description of Artificial Sequence: Synthetic oligonucleotide
ccuuucaauaagggugauu

SEQ ID NO: 1965212 - RNA, 19 nt, Artificial Sequence
  Description of Artificial Sequence: Synthetic oligonucleotide
ggcgaccuucagggucuuc

SEQ ID NO: 1965213 - RNA, 19 nt, Artificial Sequence
  Description of Artificial Sequence: Synthetic oligonucleotide
ccucuggauaucggucugu

SEQ ID NO: 1965214 - RNA, 19 nt, Artificial Sequence
  Description of Artificial Sequence: Synthetic oligonucleotide
cacccaugauaugccccuu

SEQ ID NO: 1965215 - RNA, 19 nt, Artificial Sequence
  Description of Artificial Sequence: Synthetic oligonucleotide
gcgcccuccccgucacugu

SEQ ID NO: 1965216 - RNA, 19 nt, Artificial Sequence
  Description of Artificial Sequence: Synthetic oligonucleotide
cugcgcccuccccgucacu

SEQ ID NO: 1965217 - RNA, 19 nt, Artificial Sequence
  Description of Artificial Sequence: Synthetic oligonucleotide
auaauauaaaugcaaauac

SEQ ID NO: 1965218 - RNA, 19 nt, Artificial Sequence
  Description of Artificial Sequence: Synthetic oligonucleotide
aaaacaauuacucaugccu

SEQ ID NO: 1965219 - RNA, 19 nt, Artificial Sequence
  Description of Artificial Sequence: Synthetic oligonucleotide
uuaguuauuaugaaacugg

SEQ ID NO: 1965220 - RNA, 19 nt, Artificial Sequence
  Description of Artificial Sequence: Synthetic oligonucleotide
aauaagacaaugcaaaaca

SEQ ID NO: 1965221 - RNA, 19 nt, Artificial Sequence
  Description of Artificial Sequence: Synthetic oligonucleotide
auuaucuuaaaaccaagcc

SEQ ID NO: 1965222 - RNA, 19 nt, Artificial Sequence
  Description of Artificial Sequence: Synthetic oligonucleotide
aaguguacaaaggagaugc

SEQ ID NO: 1965223 - RNA, 19 nt, Artificial Sequence
  Description of Artificial Sequence: Synthetic oligonucleotide
uauauaaugcauuaaacca

SEQ ID NO: 1965224 - RNA, 19 nt, Artificial Sequence
  Description of Artificial Sequence: Synthetic oligonucleotide
uucaauuaaaauaacauuc

SEQ ID NO: 1965225 - RNA, 19 nt, Artificial Sequence
  Description of Artificial Sequence: Synthetic oligonucleotide
uuauauaaugcauuaaacc

SEQ ID NO: 1965226 - RNA, 19 nt, Artificial Sequence
  Description of Artificial Sequence: Synthetic oligonucleotide
aauauaaaugcaaauacag

SEQ ID NO: 1965227 - RNA, 19 nt, Artificial Sequence
  Description of Artificial Sequence: Synthetic oligonucleotide
uugcaaauaauuaaguucc

SEQ ID NO: 1965228 - RNA, 19 nt, Artificial Sequence
  Description of Artificial Sequence: Synthetic oligonucleotide
ucaaauaccauguucuugg

SEQ ID NO: 1965229 - RNA, 19 nt, Artificial Sequence
  Description of Artificial Sequence: Synthetic oligonucleotide
aacaccuagacacaauccc

SEQ ID NO: 1965230 - RNA, 19 nt, Artificial Sequence
  Description of Artificial Sequence: Synthetic oligonucleotide
aauaccauguucuuggucu

SEQ ID NO: 1965231 - RNA, 19 nt, Artificial Sequence
  Description of Artificial Sequence: Synthetic oligonucleotide
aaugaaauuccuucaacag

SEQ ID NO: 1965232 - RNA, 19 nt, Artificial Sequence
  Description of Artificial Sequence: Synthetic oligonucleotide
aaagucaaggguuaaaaca

SEQ ID NO: 1965233 - RNA, 19 nt, Artificial Sequence
  Description of Artificial Sequence: Synthetic oligonucleotide
uguacaaaggagaugcugg

SEQ ID NO: 1965234 - RNA, 19 nt, Artificial Sequence
  Description of Artificial Sequence: Synthetic oligonucleotide
aauacuauaguacagucuu

SEQ ID NO: 1965235 - RNA, 19 nt, Artificial Sequence
  Description of Artificial Sequence: Synthetic oligonucleotide
uauauuaacauauuagaaa

SEQ ID NO: 1965236 - RNA, 19 nt, Artificial Sequence
  Description of Artificial Sequence: Synthetic oligonucleotide
uauaguacagucuuauuag

SEQ ID NO: 1965237 - RNA, 19 nt, Artificial Sequence
  Description of Artificial Sequence: Synthetic oligonucleotide
uuaucuuaaaaccaagcca

SEQ ID NO: 1965238 - RNA, 19 nt, Artificial Sequence
  Description of Artificial Sequence: Synthetic oligonucleotide
uuugauuaucuuaaaacca

SEQ ID NO: 1965239 - RNA, 19 nt, Artificial Sequence
  Description of Artificial Sequence: Synthetic oligonucleotide
aaauaagacaaugcaaaac

SEQ ID NO: 1965240 - RNA, 19 nt, Artificial Sequence
  Description of Artificial Sequence: Synthetic oligonucleotide
caauuaguuauuaugaaac

SEQ ID NO: 1965241 - RNA, 19 nt, Artificial Sequence
  Description of Artificial Sequence: Synthetic oligonucleotide
ucaucaauuaguuauuaug

SEQ ID NO: 1965242 - RNA, 19 nt, Artificial Sequence
  Description of Artificial Sequence: Synthetic oligonucleotide
caugugauaaauacuauag

SEQ ID NO: 1965243 - RNA, 19 nt, Artificial Sequence
  Description of Artificial Sequence: Synthetic oligonucleotide
uaagacaaugcaaaacagg

SEQ ID NO: 1965244 - RNA, 19 nt, Artificial Sequence
  Description of Artificial Sequence: Synthetic oligonucleotide
uuugaauuaaggcugaaua

SEQ ID NO: 1965245 - RNA, 19 nt, Artificial Sequence
  Description of Artificial Sequence: Synthetic oligonucleotide
gacaaugcaaaacaggagc

SEQ ID NO: 1965246 - RNA, 19 nt, Artificial Sequence
  Description of Artificial Sequence: Synthetic oligonucleotide
uaucuuaaaaccaagccaa

SEQ ID NO: 1965247 - RNA, 19 nt, Artificial Sequence
  Description of Artificial Sequence: Synthetic oligonucleotide
ugaucuuauuauauaaugc

SEQ ID NO: 1965248 - RNA, 19 nt, Artificial Sequence
  Description of Artificial Sequence: Synthetic oligonucleotide
gaaaaguauaauauaaaug

SEQ ID NO: 1965249 - RNA, 19 nt, Artificial Sequence
  Description of Artificial Sequence: Synthetic oligonucleotide
ugaaauuccuucaacagaa

SEQ ID NO: 1965250 - RNA, 19 nt, Artificial Sequence
  Description of Artificial Sequence: Synthetic oligonucleotide
auguccauaucuucuaugc

SEQ ID NO: 1965251 - RNA, 19 nt, Artificial Sequence
  Description of Artificial Sequence: Synthetic oligonucleotide
ucucaaaucagagugaucu

SEQ ID NO: 1965252 - RNA, 19 nt, Artificial Sequence
  Description of Artificial Sequence: Synthetic oligonucleotide
uuaaaguacuccauaauuc

SEQ ID NO: 1965253 - RNA, 19 nt, Artificial Sequence
  Description of Artificial Sequence: Synthetic oligonucleotide
aaauaauuaaguucccuaa

SEQ ID NO: 1965254 - RNA, 19 nt, Artificial Sequence
  Description of Artificial Sequence: Synthetic oligonucleotide
uuagaauauaauuucuugu

SEQ ID NO: 1965255 - RNA, 19 nt, Artificial Sequence
  Description of Artificial Sequence: Synthetic oligonucleotide
uuacacuucaauuaaaaua

SEQ ID NO: 1965256 - RNA, 19 nt, Artificial Sequence
  Description of Artificial Sequence: Synthetic oligonucleotide
ugugauaaauacuauagua

SEQ ID NO: 1965257 - RNA, 19 nt, Artificial Sequence
  Description of Artificial Sequence: Synthetic oligonucleotide
gaucuuauuauauaaugca

SEQ ID NO: 1965258 - RNA, 19 nt, Artificial Sequence
  Description of Artificial Sequence: Synthetic oligonucleotide
ucuuaccucauuaauauaa

SEQ ID NO: 1965259 - RNA, 19 nt, Artificial Sequence
  Description of Artificial Sequence: Synthetic oligonucleotide
ugggauuugaauuaaggcu

SEQ ID NO: 1965260 - RNA, 19 nt, Artificial Sequence
  Description of Artificial Sequence: Synthetic oligonucleotide
uuacugaacaacaaugacu

SEQ ID NO: 1965261 - RNA, 19 nt, Artificial Sequence
  Description of Artificial Sequence: Synthetic oligonucleotide
auaguaaugcucucauagc

SEQ ID NO: 1965262 - RNA, 19 nt, Artificial Sequence
  Description of Artificial Sequence: Synthetic oligonucleotide
ugccuuuucuaguaaaugg

SEQ ID NO: 1965263 - RNA, 19 nt, Artificial Sequence
  Description of Artificial Sequence: Synthetic oligonucleotide
uuaacauauuagaaaauaa

SEQ ID NO: 1965264 - RNA, 19 nt, Artificial Sequence
  Description of Artificial Sequence: Synthetic oligonucleotide
aauauaguaaugcucucau

SEQ ID NO: 1965265 - RNA, 19 nt, Artificial Sequence
  Description of Artificial Sequence: Synthetic oligonucleotide
uaugacuuacugaacaaca

SEQ ID NO: 1965266 - RNA, 19 nt, Artificial Sequence
  Description of Artificial Sequence: Synthetic oligonucleotide
aaaauauaguaaugcucuc

SEQ ID NO: 1965267 - RNA, 19 nt, Artificial Sequence
  Description of Artificial Sequence: Synthetic oligonucleotide
aaaauaacauucaaucugu

SEQ ID NO: 1965268 - RNA, 19 nt, Artificial Sequence
  Description of Artificial Sequence: Synthetic oligonucleotide
uguggcaaauauauuaaca

SEQ ID NO: 1965269 - RNA, 19 nt, Artificial Sequence
  Description of Artificial Sequence: Synthetic oligonucleotide
aagaugcaucucuauuucc

SEQ ID NO: 1965270 - RNA, 19 nt, Artificial Sequence
  Description of Artificial Sequence: Synthetic oligonucleotide
uuauugguaccacuuaaug

SEQ ID NO: 1965271 - RNA, 19 nt, Artificial Sequence
  Description of Artificial Sequence: Synthetic oligonucleotide
augcaaauacaguuguggc

SEQ ID NO: 1965272 - RNA, 19 nt, Artificial Sequence
  Description of Artificial Sequence: Synthetic oligonucleotide
aagacaaugcaaaacagga

SEQ ID NO: 1965273 - RNA, 19 nt, Artificial Sequence
  Description of Artificial Sequence: Synthetic oligonucleotide
aauaauuaaguucccuaau

SEQ ID NO: 1965274 - RNA, 19 nt, Artificial Sequence
  Description of Artificial Sequence: Synthetic oligonucleotide
uuugcgaagaugcaucucu

SEQ ID NO: 1965275 - RNA, 19 nt, Artificial Sequence
  Description of Artificial Sequence: Synthetic oligonucleotide
uauauauguacccaugcua

SEQ ID NO: 1965276 - RNA, 19 nt, Artificial Sequence
  Description of Artificial Sequence: Synthetic oligonucleotide
aggguuaaaacaauuacuc

SEQ ID NO: 1965277 - RNA, 19 nt, Artificial Sequence
  Description of Artificial Sequence: Synthetic oligonucleotide
uugauuaucuuaaaaccaa

SEQ ID NO: 1965278 - RNA, 19 nt, Artificial Sequence
  Description of Artificial Sequence: Synthetic oligonucleotide
aauaacaggucccuuuuaa

SEQ ID NO: 1965279 - RNA, 19 nt, Artificial Sequence
  Description of Artificial Sequence: Synthetic oligonucleotide
aaacuggauucacuuuagc

SEQ ID NO: 1965280 - RNA, 19 nt, Artificial Sequence
  Description of Artificial Sequence: Synthetic oligonucleotide
uguaacauuugaaagugua

SEQ ID NO: 1965281 - RNA, 19 nt, Artificial Sequence
  Description of Artificial Sequence: Synthetic oligonucleotide
uuuucauggguuauauaca

SEQ ID NO: 1965282 - RNA, 19 nt, Artificial Sequence
  Description of Artificial Sequence: Synthetic oligonucleotide
gugaucuuauuauauaaug

SEQ ID NO: 1965283 - RNA, 19 nt, Artificial Sequence
  Description of Artificial Sequence: Synthetic oligonucleotide
uuuucuaguaaauggccca

SEQ ID NO: 1965284 - RNA, 19 nt, Artificial Sequence
  Description of Artificial Sequence: Synthetic oligonucleotide
aauuacucaugccuuuucu

SEQ ID NO: 1965285 - RNA, 19 nt, Artificial Sequence
  Description of Artificial Sequence: Synthetic oligonucleotide
aaacaccuagacacaaucc

SEQ ID NO: 1965286 - RNA, 19 nt, Artificial Sequence
  Description of Artificial Sequence: Synthetic oligonucleotide
aauucauauuucuaugauu

SEQ ID NO: 1965287 - RNA, 19 nt, Artificial Sequence
  Description of Artificial Sequence: Synthetic oligonucleotide
cuuuucuaguaaauggccc

SEQ ID NO: 1965288 - RNA, 19 nt, Artificial Sequence
  Description of Artificial Sequence: Synthetic oligonucleotide
uucacuuuagcaccuagaa

SEQ ID NO: 1965289 - RNA, 19 nt, Artificial Sequence
  Description of Artificial Sequence: Synthetic oligonucleotide
caucaauuaguuauuauga

SEQ ID NO: 1965290 - RNA, 19 nt, Artificial Sequence
  Description of Artificial Sequence: Synthetic oligonucleotide
ugaaacuggauucacuuua

SEQ ID NO: 1965291 - RNA, 19 nt, Artificial Sequence
  Description of Artificial Sequence: Synthetic oligonucleotide
auuaguuauuaugaaacug

SEQ ID NO: 1965292 - RNA, 19 nt, Artificial Sequence
  Description of Artificial Sequence: Synthetic oligonucleotide
uacaaaacccacuguaaug

SEQ ID NO: 1965293 - RNA, 19 nt, Artificial Sequence
  Description of Artificial Sequence: Synthetic oligonucleotide
cuggauucacuuuagcacc

SEQ ID NO: 1965294 - RNA, 19 nt, Artificial Sequence
  Description of Artificial Sequence: Synthetic oligonucleotide
aauguccauaucuucuaug

SEQ ID NO: 1965295 - RNA, 19 nt, Artificial Sequence
  Description of Artificial Sequence: Synthetic oligonucleotide
uaccucauuaauauaauuu

SEQ ID NO: 1965296 - RNA, 19 nt, Artificial Sequence
  Description of Artificial Sequence: Synthetic oligonucleotide
aaauauaguaaugcucuca

SEQ ID NO: 1965297 - RNA, 19 nt, Artificial Sequence
  Description of Artificial Sequence: Synthetic oligonucleotide
aauaaacagugcugguuug

SEQ ID NO: 1965298 - RNA, 19 nt, Artificial Sequence
  Description of Artificial Sequence: Synthetic oligonucleotide
uauuucuaugauuacuuuc

SEQ ID NO: 1965299 - RNA, 19 nt, Artificial Sequence
  Description of Artificial Sequence: Synthetic oligonucleotide
auaaauauauauguaccca

SEQ ID NO: 1965300 - RNA, 19 nt, Artificial Sequence
  Description of Artificial Sequence: Synthetic oligonucleotide
uugaauuaaggcugaauaa

SEQ ID NO: 1965301 - RNA, 19 nt, Artificial Sequence
  Description of Artificial Sequence: Synthetic oligonucleotide
gauuaucuuaaaaccaagc

SEQ ID NO: 1965302 - RNA, 19 nt, Artificial Sequence
  Description of Artificial Sequence: Synthetic oligonucleotide
uaauuaaguucccuaauuu

SEQ ID NO: 1965303 - RNA, 19 nt, Artificial Sequence
  Description of Artificial Sequence: Synthetic oligonucleotide
ugaauuaaggcugaauaaa

SEQ ID NO: 1965304 - RNA, 19 nt, Artificial Sequence
  Description of Artificial Sequence: Synthetic oligonucleotide
uaguaaauggcccacuaau

SEQ ID NO: 1965305 - RNA, 19 nt, Artificial Sequence
  Description of Artificial Sequence: Synthetic oligonucleotide
gaaguuuggcauuuguaac

SEQ ID NO: 1965306 - RNA, 19 nt, Artificial Sequence
  Description of Artificial Sequence: Synthetic oligonucleotide
uccuucaacagaaaaguau

SEQ ID NO: 1965307 - RNA, 19 nt, Artificial Sequence
  Description of Artificial Sequence: Synthetic oligonucleotide
ccuaauuucaaauaccaug

SEQ ID NO: 1965308 - RNA, 19 nt, Artificial Sequence
  Description of Artificial Sequence: Synthetic oligonucleotide
ucaaugaaauuccuucaac

SEQ ID NO: 1965309 - RNA, 19 nt, Artificial Sequence
  Description of Artificial Sequence: Synthetic oligonucleotide
gacuuacugaacaacaaug

SEQ ID NO: 1965310 - RNA, 19 nt, Artificial Sequence
  Description of Artificial Sequence: Synthetic oligonucleotide
acauuugaaaguguaugac

SEQ ID NO: 1965311 - RNA, 19 nt, Artificial Sequence
  Description of Artificial Sequence: Synthetic oligonucleotide
auaaauacuauaguacagu

SEQ ID NO: 1965312 - RNA, 19 nt, Artificial Sequence
  Description of Artificial Sequence: Synthetic oligonucleotide
acaaugcaaaacaggagcc

SEQ ID NO: 1965313 - RNA, 19 nt, Artificial Sequence
  Description of Artificial Sequence: Synthetic oligonucleotide
uucugcacaaagcacauua

SEQ ID NO: 1965314 - RNA, 19 nt, Artificial Sequence
  Description of Artificial Sequence: Synthetic oligonucleotide
auuccuucaacagaaaagu

SEQ ID NO: 1965315 - RNA, 19 nt, Artificial Sequence
  Description of Artificial Sequence: Synthetic oligonucleotide
ucuaagaggcacagaaucu

SEQ ID NO: 1965316 - RNA, 19 nt, Artificial Sequence
  Description of Artificial Sequence: Synthetic oligonucleotide
uuuuaaaguacuccauaau

SEQ ID NO: 1965317 - RNA, 19 nt, Artificial Sequence
  Description of Artificial Sequence: Synthetic oligonucleotide
ugcaaauacaguuguggca

SEQ ID NO: 1965318 - RNA, 19 nt, Artificial Sequence
  Description of Artificial Sequence: Synthetic oligonucleotide
ucccugaagaccaucauuc

SEQ ID NO: 1965319 - RNA, 19 nt, Artificial Sequence
  Description of Artificial Sequence: Synthetic oligonucleotide
uaauucauauuucuaugau

SEQ ID NO: 1965320 - RNA, 19 nt, Artificial Sequence
  Description of Artificial Sequence: Synthetic oligonucleotide
uagacacaaucccagcuag

SEQ ID NO: 1965321 - RNA, 19 nt, Artificial Sequence
  Description of Artificial Sequence: Synthetic oligonucleotide
gugauaaauacuauaguac

SEQ ID NO: 1965322 - RNA, 19 nt, Artificial Sequence
  Description of Artificial Sequence: Synthetic oligonucleotide
uucuguaugccuguuugcg

SEQ ID NO: 1965323 - RNA, 19 nt, Artificial Sequence
  Description of Artificial Sequence: Synthetic oligonucleotide
uguacccaugcuaaauaag

SEQ ID NO: 1965324 - RNA, 19 nt, Artificial Sequence
  Description of Artificial Sequence: Synthetic oligonucleotide
uaacauucaaucuguacau

SEQ ID NO: 1965325 - RNA, 19 nt, Artificial Sequence
  Description of Artificial Sequence: Synthetic oligonucleotide
acccucaucaauuaguuau

SEQ ID NO: 1965326 - RNA, 19 nt, Artificial Sequence
  Description of Artificial Sequence: Synthetic oligonucleotide
acuucaauuaaaauaacau

SEQ ID NO: 1965327 - RNA, 19 nt, Artificial Sequence
  Description of Artificial Sequence: Synthetic oligonucleotide
uauaaugcauuaaaccauu

SEQ ID NO: 1965328 - RNA, 19 nt, Artificial Sequence
  Description of Artificial Sequence: Synthetic oligonucleotide
augaaauuccuucaacaga

SEQ ID NO: 1965329 - RNA, 19 nt, Artificial Sequence
  Description of Artificial Sequence: Synthetic oligonucleotide
ucacuuuagcaccuagaag

SEQ ID NO: 1965330 - RNA, 19 nt, Artificial Sequence
  Description of Artificial Sequence: Synthetic oligonucleotide
caugcuaaauaagacaaug

SEQ ID NO: 1965331 - RNA, 19 nt, Artificial Sequence
  Description of Artificial Sequence: Synthetic oligonucleotide
auauauauguacccaugcu

SEQ ID NO: 1965332 - RNA, 19 nt, Artificial Sequence
  Description of Artificial Sequence: Synthetic oligonucleotide
cucuaagaggcacagaauc

SEQ ID NO: 1965333 - RNA, 19 nt, Artificial Sequence
  Description of Artificial Sequence: Synthetic oligonucleotide
auuaacauauuagaaaaua

SEQ ID NO: 1965334 - RNA, 19 nt, Artificial Sequence
  Description of Artificial Sequence: Synthetic oligonucleotide
uggcccacuaauaaaauau

SEQ ID NO: 1965335 - RNA, 19 nt, Artificial Sequence
  Description of Artificial Sequence: Synthetic oligonucleotide
uuaaguucccuaauuucaa

SEQ ID NO: 1965336 - RNA, 19 nt, Artificial Sequence
  Description of Artificial Sequence: Synthetic oligonucleotide
uucaaucuguacauaauuu

SEQ ID NO: 1965337 - RNA, 19 nt, Artificial Sequence
  Description of Artificial Sequence: Synthetic oligonucleotide
augcuaaauaagacaaugc

SEQ ID NO: 1965338 - RNA, 19 nt, Artificial Sequence
  Description of Artificial Sequence: Synthetic oligonucleotide
auaauuaaguucccuaauu

SEQ ID NO: 1965339 - RNA, 19 nt, Artificial Sequence
  Description of Artificial Sequence: Synthetic oligonucleotide
aaauacuauaguacagucu

SEQ ID NO: 1965340 - RNA, 19 nt, Artificial Sequence
  Description of Artificial Sequence: Synthetic oligonucleotide
ucaaucuguacauaauuuu

SEQ ID NO: 1965341 - RNA, 19 nt, Artificial Sequence
  Description of Artificial Sequence: Synthetic oligonucleotide
ucugcacaaguguuucucg

SEQ ID NO: 1965342 - RNA, 19 nt, Artificial Sequence
  Description of Artificial Sequence: Synthetic oligonucleotide
aaggcugaauaaacagugc

SEQ ID NO: 1965343 - RNA, 19 nt, Artificial Sequence
  Description of Artificial Sequence: Synthetic oligonucleotide
agccauacaaaacccacug

SEQ ID NO: 1965344 - RNA, 19 nt, Artificial Sequence
  Description of Artificial Sequence: Synthetic oligonucleotide
uauuaacauauuagaaaau

SEQ ID NO: 1965345 - RNA, 19 nt, Artificial Sequence
  Description of Artificial Sequence: Synthetic oligonucleotide
guucccuaauuucaaauac

SEQ ID NO: 1965346 - RNA, 19 nt, Artificial Sequence
  Description of Artificial Sequence: Synthetic oligonucleotide
uggcauuuguaacauuuga

SEQ ID NO: 1965347 - RNA, 19 nt, Artificial Sequence
  Description of Artificial Sequence: Synthetic oligonucleotide
uuccuauucugcacaaagc

SEQ ID NO: 1965348 - RNA, 19 nt, Artificial Sequence
  Description of Artificial Sequence: Synthetic oligonucleotide
aaguucccuaauuucaaau

SEQ ID NO: 1965349 - RNA, 19 nt, Artificial Sequence
  Description of Artificial Sequence: Synthetic oligonucleotide
gaagaugcaucucuauuuc

SEQ ID NO: 1965350 - RNA, 19 nt, Artificial Sequence
  Description of Artificial Sequence: Synthetic oligonucleotide
aguacuccauaauucauau

SEQ ID NO: 1965351 - RNA, 19 nt, Artificial Sequence
  Description of Artificial Sequence: Synthetic oligonucleotide
auucaaucuguacauaauu

SEQ ID NO: 1965352 - RNA, 19 nt, Artificial Sequence
  Description of Artificial Sequence: Synthetic oligonucleotide
aaauggcccacuaauaaaa

SEQ ID NO: 1965353 - RNA, 19 nt, Artificial Sequence
  Description of Artificial Sequence: Synthetic oligonucleotide
cuucacaauaaaaguguac

SEQ ID NO: 1965354 - RNA, 19 nt, Artificial Sequence
  Description of Artificial Sequence: Synthetic oligonucleotide
augugauaaauacuauagu

SEQ ID NO: 1965355 - RNA, 19 nt, Artificial Sequence
  Description of Artificial Sequence: Synthetic oligonucleotide
uauguacccaugcuaaaua

SEQ ID NO: 1965356 - RNA, 19 nt, Artificial Sequence
  Description of Artificial Sequence: Synthetic oligonucleotide
aucaauuaguuauuaugaa

SEQ ID NO: 1965357 - RNA, 19 nt, Artificial Sequence
  Description of Artificial Sequence: Synthetic oligonucleotide
gagugaucuuauuauauaa

SEQ ID NO: 1965358 - RNA, 19 nt, Artificial Sequence
  Description of Artificial Sequence: Synthetic oligonucleotide
ugcaaauaauuaaguuccc

SEQ ID NO: 1965359 - RNA, 19 nt, Artificial Sequence
  Description of Artificial Sequence: Synthetic oligonucleotide
uaaauggcccacuaauaaa

SEQ ID NO: 1965360 - RNA, 19 nt, Artificial Sequence
  Description of Artificial Sequence: Synthetic oligonucleotide
ugacuuacugaacaacaau

SEQ ID NO: 1965361 - RNA, 19 nt, Artificial Sequence
  Description of Artificial Sequence: Synthetic oligonucleotide
uguaugacuuacugaacaa

SEQ ID NO: 1965362 - RNA, 19 nt, Artificial Sequence
  Description of Artificial Sequence: Synthetic oligonucleotide
uuggcauuuguaacauuug

SEQ ID NO: 1965363 - RNA, 19 nt, Artificial Sequence
  Description of Artificial Sequence: Synthetic oligonucleotide
accuuugcaaauaauuaag

SEQ ID NO: 1965364 - RNA, 19 nt, Artificial Sequence
  Description of Artificial Sequence: Synthetic oligonucleotide
uccucuuaccucauuaaua

SEQ ID NO: 1965365 - RNA, 19 nt, Artificial Sequence
  Description of Artificial Sequence: Synthetic oligonucleotide
aaugcaaaacaggagccau

SEQ ID NO: 1965366 - RNA, 19 nt, Artificial Sequence
  Description of Artificial Sequence: Synthetic oligonucleotide
guguaugacuuacugaaca

SEQ ID NO: 1965367 - RNA, 19 nt, Artificial Sequence
  Description of Artificial Sequence: Synthetic oligonucleotide
agcaccuagaaguuuggca

SEQ ID NO: 1965368 - RNA, 19 nt, Artificial Sequence
  Description of Artificial Sequence: Synthetic oligonucleotide
guaaauggcccacuaauaa

SEQ ID NO: 1965369 - RNA, 19 nt, Artificial Sequence
  Description of Artificial Sequence: Synthetic oligonucleotide
auauaaaugcaaauacagu

SEQ ID NO: 1965370 - RNA, 19 nt, Artificial Sequence
  Description of Artificial Sequence: Synthetic oligonucleotide
auauaaugcauuaaaccau

SEQ ID NO: 1965371 - RNA, 19 nt, Artificial Sequence
  Description of Artificial Sequence: Synthetic oligonucleotide
augauuacuuuccuucccu

SEQ ID NO: 1965372 - RNA, 19 nt, Artificial Sequence
  Description of Artificial Sequence: Synthetic oligonucleotide
uuucuaugauuacuuuccu

SEQ ID NO: 1965373 - RNA, 19 nt, Artificial Sequence
  Description of Artificial Sequence: Synthetic oligonucleotide
uguuccucuuaccucauua

SEQ ID NO: 1965374 - RNA, 19 nt, Artificial Sequence
  Description of Artificial Sequence: Synthetic oligonucleotide
acccaugcuaaauaagaca

SEQ ID NO: 1965375 - RNA, 19 nt, Artificial Sequence
  Description of Artificial Sequence: Synthetic oligonucleotide
acacaaucccagcuagaac

SEQ ID NO: 1965376 - RNA, 19 nt, Artificial Sequence
  Description of Artificial Sequence: Synthetic oligonucleotide
uacccaugcuaaauaagac

SEQ ID NO: 1965377 - RNA, 19 nt, Artificial Sequence
  Description of Artificial Sequence: Synthetic oligonucleotide
gggauuugaauuaaggcug

SEQ ID NO: 1965378 - RNA, 19 nt, Artificial Sequence
  Description of Artificial Sequence: Synthetic oligonucleotide
auacaguuguggcaaauau

SEQ ID NO: 1965379 - RNA, 19 nt, Artificial Sequence
  Description of Artificial Sequence: Synthetic oligonucleotide
ugcaaaacaggagccauac

SEQ ID NO: 1965380 - RNA, 19 nt, Artificial Sequence
  Description of Artificial Sequence: Synthetic oligonucleotide
guguugauggcugucaccc

SEQ ID NO: 1965381 - RNA, 19 nt, Artificial Sequence
  Description of Artificial Sequence: Synthetic oligonucleotide
cugaagaccaucauuccca

SEQ ID NO: 1965382 - RNA, 19 nt, Artificial Sequence
  Description of Artificial Sequence: Synthetic oligonucleotide
caaauaauuaaguucccua

SEQ ID NO: 1965383 - RNA, 19 nt, Artificial Sequence
  Description of Artificial Sequence: Synthetic oligonucleotide
ucuaguaaauggcccacua

SEQ ID NO: 1965384 - RNA, 19 nt, Artificial Sequence
  Description of Artificial Sequence: Synthetic oligonucleotide
ucuucagauaaaagcuagu

SEQ ID NO: 1965385 - RNA, 19 nt, Artificial Sequence
  Description of Artificial Sequence: Synthetic oligonucleotide
uagaacccucaucaauuag

SEQ ID NO: 1965386 - RNA, 19 nt, Artificial Sequence
  Description of Artificial Sequence: Synthetic oligonucleotide
auauauguacccaugcuaa

SEQ ID NO: 1965387 - RNA, 19 nt, Artificial Sequence
  Description of Artificial Sequence: Synthetic oligonucleotide
aucuucagauaaaagcuag

SEQ ID NO: 1965388 - RNA, 19 nt, Artificial Sequence
  Description of Artificial Sequence: Synthetic oligonucleotide
uaugccucuaagaggcaca

SEQ ID NO: 1965389 - RNA, 19 nt, Artificial Sequence
  Description of Artificial Sequence: Synthetic oligonucleotide
agaagccucguucauggcu

SEQ ID NO: 1965390 - RNA, 19 nt, Artificial Sequence
  Description of Artificial Sequence: Synthetic oligonucleotide
auauuagaaaauaaauaua

SEQ ID NO: 1965391 - RNA, 19 nt, Artificial Sequence
  Description of Artificial Sequence: Synthetic oligonucleotide
gaaacuggauucacuuuag

SEQ ID NO: 1965392 - RNA, 19 nt, Artificial Sequence
  Description of Artificial Sequence: Synthetic oligonucleotide
ucgcuguuuguucuguaug

SEQ ID NO: 1965393 - RNA, 19 nt, Artificial Sequence
  Description of Artificial Sequence: Synthetic oligonucleotide
ucaaaucagagugaucuua

SEQ ID NO: 1965394 - RNA, 19 nt, Artificial Sequence
  Description of Artificial Sequence: Synthetic oligonucleotide
cacuucaauuaaaauaaca

SEQ ID NO: 1965395 - RNA, 19 nt, Artificial Sequence
  Description of Artificial Sequence: Synthetic oligonucleotide
ugaauaaacagugcugguu

SEQ ID NO: 1965396 - RNA, 19 nt, Artificial Sequence
  Description of Artificial Sequence: Synthetic oligonucleotide
cauuaauauaauuuacacu

SEQ ID NO: 1965397 - RNA, 19 nt, Artificial Sequence
  Description of Artificial Sequence: Synthetic oligonucleotide
uacuauaguacagucuuau

SEQ ID NO: 1965398 - RNA, 19 nt, Artificial Sequence
  Description of Artificial Sequence: Synthetic oligonucleotide
ugcacaaguguuucucgug

SEQ ID NO: 1965399 - RNA, 19 nt, Artificial Sequence
  Description of Artificial Sequence: Synthetic oligonucleotide
aucucuauuuccucccuga

SEQ ID NO: 1965400 - RNA, 19 nt, Artificial Sequence
  Description of Artificial Sequence: Synthetic oligonucleotide
aauccaccuuugcaaauaa

SEQ ID NO: 1965401 - RNA, 19 nt, Artificial Sequence
  Description of Artificial Sequence: Synthetic oligonucleotide
ucuguaugccuguuugcga

SEQ ID NO: 1965402 - RNA, 19 nt, Artificial Sequence
  Description of Artificial Sequence: Synthetic oligonucleotide
uuugaaaguguaugacuua

SEQ ID NO: 1965403 - RNA, 19 nt, Artificial Sequence
  Description of Artificial Sequence: Synthetic oligonucleotide
acaaucccagcuagaaccc

SEQ ID NO: 1965404 - RNA, 19 nt, Artificial Sequence
  Description of Artificial Sequence: Synthetic oligonucleotide
agagugaucuuauuauaua

SEQ ID NO: 1965405 - RNA, 19 nt, Artificial Sequence
  Description of Artificial Sequence: Synthetic oligonucleotide
ucagagugaucuuauuaua

SEQ ID NO: 1965406 - RNA, 19 nt, Artificial Sequence
  Description of Artificial Sequence: Synthetic oligonucleotide
uacaguuguggcaaauaua

SEQ ID NO: 1965407 - RNA, 19 nt, Artificial Sequence
  Description of Artificial Sequence: Synthetic oligonucleotide
uguuugcgaagaugcaucu

SEQ ID NO: 1965408 - RNA, 19 nt, Artificial Sequence
  Description of Artificial Sequence: Synthetic oligonucleotide
caccuagacacaaucccag

SEQ ID NO: 1965409 - RNA, 19 nt, Artificial Sequence
  Description of Artificial Sequence: Synthetic oligonucleotide
ucaggcgucagcucaucug

SEQ ID NO: 1965410 - RNA, 19 nt, Artificial Sequence
  Description of Artificial Sequence: Synthetic oligonucleotide
aguucccuaauuucaaaua

SEQ ID NO: 1965411 - RNA, 19 nt, Artificial Sequence
  Description of Artificial Sequence: Synthetic oligonucleotide
uaaugcucucauagccuag

SEQ ID NO: 1965412 - RNA, 19 nt, Artificial Sequence
  Description of Artificial Sequence: Synthetic oligonucleotide
aauacaguuguggcaaaua

SEQ ID NO: 1965413 - RNA, 19 nt, Artificial Sequence
  Description of Artificial Sequence: Synthetic oligonucleotide
uucugaguuuucauggguu

SEQ ID NO: 1965414 - RNA, 19 nt, Artificial Sequence
  Description of Artificial Sequence: Synthetic oligonucleotide
ucugaguuuucauggguua

SEQ ID NO: 1965415 - RNA, 19 nt, Artificial Sequence
  Description of Artificial Sequence: Synthetic oligonucleotide
uuuaaaagucaaggguuaa

SEQ ID NO: 1965416 - RNA, 19 nt, Artificial Sequence
  Description of Artificial Sequence: Synthetic oligonucleotide
acuccauaauucauauuuc

SEQ ID NO: 1965417 - RNA, 19 nt, Artificial Sequence
  Description of Artificial Sequence: Synthetic oligonucleotide
uugguaccacuuaauguaa

SEQ ID NO: 1965418 - RNA, 19 nt, Artificial Sequence
  Description of Artificial Sequence: Synthetic oligonucleotide
uacucaugccuuuucuagu

SEQ ID NO: 1965419 - RNA, 19 nt, Artificial Sequence
  Description of Artificial Sequence: Synthetic oligonucleotide
uauauguacccaugcuaaa

SEQ ID NO: 1965420 - RNA, 19 nt, Artificial Sequence
  Description of Artificial Sequence: Synthetic oligonucleotide
uagccuagcuuccaucuuc

SEQ ID NO: 1965421 - RNA, 19 nt, Artificial Sequence
  Description of Artificial Sequence: Synthetic oligonucleotide
uuaccucauuaauauaauu

SEQ ID NO: 1965422 - RNA, 19 nt, Artificial Sequence
  Description of Artificial Sequence: Synthetic oligonucleotide
aaaguacuccauaauucau

SEQ ID NO: 1965423 - RNA, 19 nt, Artificial Sequence
  Description of Artificial Sequence: Synthetic oligonucleotide
caggcgucagcucaucugc

SEQ ID NO: 1965424 - RNA, 19 nt, Artificial Sequence
  Description of Artificial Sequence: Synthetic oligonucleotide
aauuuacacuucaauuaaa

SEQ ID NO: 1965425 - RNA, 19 nt, Artificial Sequence
  Description of Artificial Sequence: Synthetic oligonucleotide
aguguaugacuuacugaac

SEQ ID NO: 1965426 - RNA, 19 nt, Artificial Sequence
  Description of Artificial Sequence: Synthetic oligonucleotide
uuguaacauuugaaagugu

SEQ ID NO: 1965427 - RNA, 19 nt, Artificial Sequence
  Description of Artificial Sequence: Synthetic oligonucleotide
guacccaugcuaaauaaga

SEQ ID NO: 1965428 - RNA, 19 nt, Artificial Sequence
  Description of Artificial Sequence: Synthetic oligonucleotide
auuacucaugccuuuucua

SEQ ID NO: 1965429 - RNA, 19 nt, Artificial Sequence
  Description of Artificial Sequence: Synthetic oligonucleotide
uuccucuuaccucauuaau

SEQ ID NO: 1965430 - RNA, 19 nt, Artificial Sequence
  Description of Artificial Sequence: Synthetic oligonucleotide
gcauuuguaacauuugaaa

SEQ ID NO: 1965431 - RNA, 19 nt, Artificial Sequence
  Description of Artificial Sequence: Synthetic oligonucleotide
cuguaauguccauaucuuc

SEQ ID NO: 1965432 - RNA, 19 nt, Artificial Sequence
  Description of Artificial Sequence: Synthetic oligonucleotide
uaauguccauaucuucuau

SEQ ID NO: 1965433 - RNA, 19 nt, Artificial Sequence
  Description of Artificial Sequence: Synthetic oligonucleotide
auauuucuaugauuacuuu

SEQ ID NO: 1965434 - RNA, 19 nt, Artificial Sequence
  Description of Artificial Sequence: Synthetic oligonucleotide
aaaucagagugaucuuauu

SEQ ID NO: 1965435 - RNA, 19 nt, Artificial Sequence
  Description of Artificial Sequence: Synthetic oligonucleotide
agaacccucaucaauuagu

SEQ ID NO: 1965436 - RNA, 19 nt, Artificial Sequence
  Description of Artificial Sequence: Synthetic oligonucleotide
uccucccugaagaccauca

SEQ ID NO: 1965437 - RNA, 19 nt, Artificial Sequence
  Description of Artificial Sequence: Synthetic oligonucleotide
uggauucacuuuagcaccu

SEQ ID NO: 1965438 - RNA, 19 nt, Artificial Sequence
  Description of Artificial Sequence: Synthetic oligonucleotide
aaauccaccuuugcaaaua

SEQ ID NO: 1965439 - RNA, 19 nt, Artificial Sequence
  Description of Artificial Sequence: Synthetic oligonucleotide
uguaugccuguuugcgaag

SEQ ID NO: 1965440 - RNA, 19 nt, Artificial Sequence
  Description of Artificial Sequence: Synthetic oligonucleotide
gagugagaagccucguuca

SEQ ID NO: 1965441 - RNA, 19 nt, Artificial Sequence
  Description of Artificial Sequence: Synthetic oligonucleotide
gauggcugucacccggcgg

SEQ ID NO: 1965442 - RNA, 19 nt, Artificial Sequence
  Description of Artificial Sequence: Synthetic oligonucleotide
agacaaugcaaaacaggag

SEQ ID NO: 1965443 - RNA, 19 nt, Artificial Sequence
  Description of Artificial Sequence: Synthetic oligonucleotide
aguaaugcucucauagccu

SEQ ID NO: 1965444 - RNA, 19 nt, Artificial Sequence
  Description of Artificial Sequence: Synthetic oligonucleotide
uuucuaguaaauggcccac

SEQ ID NO: 1965445 - RNA, 19 nt, Artificial Sequence
  Description of Artificial Sequence: Synthetic oligonucleotide
cucucauagccuagcuucc

SEQ ID NO: 1965446 - RNA, 19 nt, Artificial Sequence
  Description of Artificial Sequence: Synthetic oligonucleotide
aaguacuccauaauucaua

SEQ ID NO: 1965447 - RNA, 19 nt, Artificial Sequence
  Description of Artificial Sequence: Synthetic oligonucleotide
cauauuucuaugauuacuu

SEQ ID NO: 1965448 - RNA, 19 nt, Artificial Sequence
  Description of Artificial Sequence: Synthetic oligonucleotide
agaugcaucucuauuuccu

SEQ ID NO: 1965449 - RNA, 19 nt, Artificial Sequence
  Description of Artificial Sequence: Synthetic oligonucleotide
uuugugguucagacuuucu

SEQ ID NO: 1965450 - RNA, 19 nt, Artificial Sequence
  Description of Artificial Sequence: Synthetic oligonucleotide
auguacccaugcuaaauaa

SEQ ID NO: 1965451 - RNA, 19 nt, Artificial Sequence
  Description of Artificial Sequence: Synthetic oligonucleotide
agauaaaagcuaguuuuaa

SEQ ID NO: 1965452 - RNA, 19 nt, Artificial Sequence
  Description of Artificial Sequence: Synthetic oligonucleotide
gaagaccaucauucccagg

SEQ ID NO: 1965453 - RNA, 19 nt, Artificial Sequence
  Description of Artificial Sequence: Synthetic oligonucleotide
ccagcuagaacccucauca

SEQ ID NO: 1965454 - RNA, 19 nt, Artificial Sequence
  Description of Artificial Sequence: Synthetic oligonucleotide
agugaucuuauuauauaau

SEQ ID NO: 1965455 - RNA, 19 nt, Artificial Sequence
  Description of Artificial Sequence: Synthetic oligonucleotide
uguucuuggucuucacaau

SEQ ID NO: 1965456 - RNA, 19 nt, Artificial Sequence
  Description of Artificial Sequence: Synthetic oligonucleotide
guguacaaaggagaugcug

SEQ ID NO: 1965457 - RNA, 19 nt, Artificial Sequence
  Description of Artificial Sequence: Synthetic oligonucleotide
uucuaugauuacuuuccuu

SEQ ID NO: 1965458 - RNA, 19 nt, Artificial Sequence
  Description of Artificial Sequence: Synthetic oligonucleotide
auauguacccaugcuaaau

SEQ ID NO: 1965459 - RNA, 19 nt, Artificial Sequence
  Description of Artificial Sequence: Synthetic oligonucleotide
caccuuugcaaauaauuaa

SEQ ID NO: 1965460 - RNA, 19 nt, Artificial Sequence
  Description of Artificial Sequence: Synthetic oligonucleotide
cuauuuccucccugaagac

SEQ ID NO: 1965461 - RNA, 19 nt, Artificial Sequence
  Description of Artificial Sequence: Synthetic oligonucleotide
aucauucccaggugggagu

SEQ ID NO: 1965462 - RNA, 19 nt, Artificial Sequence
  Description of Artificial Sequence: Synthetic oligonucleotide
guucuguaugccuguuugc

SEQ ID NO: 1965463 - RNA, 19 nt, Artificial Sequence
  Description of Artificial Sequence: Synthetic oligonucleotide
acucaugccuuuucuagua

SEQ ID NO: 1965464 - RNA, 19 nt, Artificial Sequence
  Description of Artificial Sequence: Synthetic oligonucleotide
ucucuauuuccucccugaa

SEQ ID NO: 1965465 - RNA, 19 nt, Artificial Sequence
  Description of Artificial Sequence: Synthetic oligonucleotide
augcacaugcgguacugcu

SEQ ID NO: 1965466 - RNA, 19 nt, Artificial Sequence
  Description of Artificial Sequence: Synthetic oligonucleotide
caucauucccaggugggag

SEQ ID NO: 1965467 - RNA, 19 nt, Artificial Sequence
  Description of Artificial Sequence: Synthetic oligonucleotide
ugguucagacuuucuugug

SEQ ID NO: 1965468 - RNA, 19 nt, Artificial Sequence
  Description of Artificial Sequence: Synthetic oligonucleotide
gcugguuugugguucagac

SEQ ID NO: 1965469 - RNA, 19 nt, Artificial Sequence
  Description of Artificial Sequence: Synthetic oligonucleotide
guaaugcucucauagccua

SEQ ID NO: 1965470 - RNA, 19 nt, Artificial Sequence
  Description of Artificial Sequence: Synthetic oligonucleotide
cuucaacagaaaaguauaa

SEQ ID NO: 1965471 - RNA, 19 nt, Artificial Sequence
  Description of Artificial Sequence: Synthetic oligonucleotide
acuguaauguccauaucuu

SEQ ID NO: 1965472 - RNA, 19 nt, Artificial Sequence
  Description of Artificial Sequence: Synthetic oligonucleotide
agaccaucauucccaggug

SEQ ID NO: 1965473 - RNA, 19 nt, Artificial Sequence
  Description of Artificial Sequence: Synthetic oligonucleotide
ggcaaauauauuaacauau

SEQ ID NO: 1965474 - RNA, 19 nt, Artificial Sequence
  Description of Artificial Sequence: Synthetic oligonucleotide
augaaacuggauucacuuu

SEQ ID NO: 1965475 - RNA, 19 nt, Artificial Sequence
  Description of Artificial Sequence: Synthetic oligonucleotide
aguuauuaugaaacuggau

SEQ ID NO: 1965476 - RNA, 19 nt, Artificial Sequence
  Description of Artificial Sequence: Synthetic oligonucleotide
aauggcccacuaauaaaau

SEQ ID NO: 1965477 - RNA, 19 nt, Artificial Sequence
  Description of Artificial Sequence: Synthetic oligonucleotide
acuauaguacagucuuauu

SEQ ID NO: 1965478 - RNA, 19 nt, Artificial Sequence
  Description of Artificial Sequence: Synthetic oligonucleotide
uucucaaaucagagugauc

SEQ ID NO: 1965479 - RNA, 19 nt, Artificial Sequence
  Description of Artificial Sequence: Synthetic oligonucleotide
gccuuuucuaguaaauggc

SEQ ID NO: 1965480 - RNA, 19 nt, Artificial Sequence
  Description of Artificial Sequence: Synthetic oligonucleotide
auauaguaaugcucucaua

SEQ ID NO: 1965481 - RNA, 19 nt, Artificial Sequence
  Description of Artificial Sequence: Synthetic oligonucleotide
ccugaagaccaucauuccc

SEQ ID NO: 1965482 - RNA, 19 nt, Artificial Sequence
  Description of Artificial Sequence: Synthetic oligonucleotide
ugguaccacuuaauguaaa

SEQ ID NO: 1965483 - RNA, 19 nt, Artificial Sequence
  Description of Artificial Sequence: Synthetic oligonucleotide
ugauuacuuuccuucccuu

SEQ ID NO: 1965484 - RNA, 19 nt, Artificial Sequence
  Description of Artificial Sequence: Synthetic oligonucleotide
aguaaauggcccacuaaua

SEQ ID NO: 1965485 - RNA, 19 nt, Artificial Sequence
  Description of Artificial Sequence: Synthetic oligonucleotide
ugcgaagaugcaucucuau

SEQ ID NO: 1965486 - RNA, 19 nt, Artificial Sequence
  Description of Artificial Sequence: Synthetic oligonucleotide
cccuuuucucaaaucagag

SEQ ID NO: 1965487 - RNA, 19 nt, Artificial Sequence
  Description of Artificial Sequence: Synthetic oligonucleotide
cagauaaaagcuaguuuua

SEQ ID NO: 1965488 - RNA, 19 nt, Artificial Sequence
  Description of Artificial Sequence: Synthetic oligonucleotide
auucacuuuagcaccuaga

SEQ ID NO: 1965489 - RNA, 19 nt, Artificial Sequence
  Description of Artificial Sequence: Synthetic oligonucleotide
aaauaacauucaaucugua

SEQ ID NO: 1965490 - RNA, 19 nt, Artificial Sequence
  Description of Artificial Sequence: Synthetic oligonucleotide
ucauucccaggugggagug

SEQ ID NO: 1965491 - RNA, 19 nt, Artificial Sequence
  Description of Artificial Sequence: Synthetic oligonucleotide
cuguaugccuguuugcgaa

SEQ ID NO: 1965492 - RNA, 19 nt, Artificial Sequence
  Description of Artificial Sequence: Synthetic oligonucleotide
agugagaagccucguucau

SEQ ID NO: 1965493 - RNA, 19 nt, Artificial Sequence
  Description of Artificial Sequence: Synthetic oligonucleotide
gccucuaagaggcacagaa

SEQ ID NO: 1965494 - RNA, 19 nt, Artificial Sequence
  Description of Artificial Sequence: Synthetic oligonucleotide
cccacuaauaaaauaucca

SEQ ID NO: 1965495 - RNA, 19 nt, Artificial Sequence
  Description of Artificial Sequence: Synthetic oligonucleotide
ucuaugccucuaagaggca

SEQ ID NO: 1965496 - RNA, 19 nt, Artificial Sequence
  Description of Artificial Sequence: Synthetic oligonucleotide
auggcccacuaauaaaaua

SEQ ID NO: 1965497 - RNA, 19 nt, Artificial Sequence
  Description of Artificial Sequence: Synthetic oligonucleotide
augacuuacugaacaacaa

SEQ ID NO: 1965498 - RNA, 19 nt, Artificial Sequence
  Description of Artificial Sequence: Synthetic oligonucleotide
uucuaguaaauggcccacu

SEQ ID NO: 1965499 - RNA, 19 nt, Artificial Sequence
  Description of Artificial Sequence: Synthetic oligonucleotide
gcccacuaauaaaauaucc

SEQ ID NO: 1965500 - RNA, 19 nt, Artificial Sequence
  Description of Artificial Sequence: Synthetic oligonucleotide
uaugccuguuugcgaagau

SEQ ID NO: 1965501 - RNA, 19 nt, Artificial Sequence
  Description of Artificial Sequence: Synthetic oligonucleotide
caucucuauuuccucccug

SEQ ID NO: 1965502 - RNA, 19 nt, Artificial Sequence
  Description of Artificial Sequence: Synthetic oligonucleotide
ucucauagccuagcuucca

SEQ ID NO: 1965503 - RNA, 19 nt, Artificial Sequence
  Description of Artificial Sequence: Synthetic oligonucleotide
cauagccuagcuuccaucu

SEQ ID NO: 1965504 - RNA, 19 nt, Artificial Sequence
  Description of Artificial Sequence: Synthetic oligonucleotide
cuuguguugauggcuguca

SEQ ID NO: 1965505 - RNA, 19 nt, Artificial Sequence
  Description of Artificial Sequence: Synthetic oligonucleotide
uugcgaagaugcaucucua

SEQ ID NO: 1965506 - RNA, 19 nt, Artificial Sequence
  Description of Artificial Sequence: Synthetic oligonucleotide
cuaguaaauggcccacuaa

SEQ ID NO: 1965507 - RNA, 19 nt, Artificial Sequence
  Description of Artificial Sequence: Synthetic oligonucleotide
ggagccauacaaaacccac

SEQ ID NO: 1965508 - RNA, 19 nt, Artificial Sequence
  Description of Artificial Sequence: Synthetic oligonucleotide
acagucuuauuagaauaua

SEQ ID NO: 1965509 - RNA, 19 nt, Artificial Sequence
  Description of Artificial Sequence: Synthetic oligonucleotide
ucuuguguugauggcuguc

SEQ ID NO: 1965510 - RNA, 19 nt, Artificial Sequence
  Description of Artificial Sequence: Synthetic oligonucleotide
cacagaaucugggauuuga

SEQ ID NO: 1965511 - RNA, 19 nt, Artificial Sequence
  Description of Artificial Sequence: Synthetic oligonucleotide
augccucuaagaggcacag

SEQ ID NO: 1965512 - RNA, 19 nt, Artificial Sequence
  Description of Artificial Sequence: Synthetic oligonucleotide
guuugugguucagacuuuc

SEQ ID NO: 1965513 - RNA, 19 nt, Artificial Sequence
  Description of Artificial Sequence: Synthetic oligonucleotide
cuagaacccucaucaauua

SEQ ID NO: 1965514 - RNA, 19 nt, Artificial Sequence
  Description of Artificial Sequence: Synthetic oligonucleotide
caaugcaaaacaggagcca

SEQ ID NO: 1965515 - RNA, 19 nt, Artificial Sequence
  Description of Artificial Sequence: Synthetic oligonucleotide
cagagugaucuuauuauau

SEQ ID NO: 1965516 - RNA, 19 nt, Artificial Sequence
  Description of Artificial Sequence: Synthetic oligonucleotide
gagaagccucguucauggc

SEQ ID NO: 1965517 - RNA, 19 nt, Artificial Sequence
  Description of Artificial Sequence: Synthetic oligonucleotide
caaaucagagugaucuuau

SEQ ID NO: 1965518 - RNA, 19 nt, Artificial Sequence
  Description of Artificial Sequence: Synthetic oligonucleotide
cuuuuccuauucugcacaa

SEQ ID NO: 1965519 - RNA, 19 nt, Artificial Sequence
  Description of Artificial Sequence: Synthetic oligonucleotide
gcacaugcgguacugcuca

SEQ ID NO: 1965520 - RNA, 19 nt, Artificial Sequence
  Description of Artificial Sequence: Synthetic oligonucleotide
cuuaccucauuaauauaau

SEQ ID NO: 1965521 - RNA, 19 nt, Artificial Sequence
  Description of Artificial Sequence: Synthetic oligonucleotide
cuuucuuguguugauggcu

SEQ ID NO: 1965522 - RNA, 19 nt, Artificial Sequence
  Description of Artificial Sequence: Synthetic oligonucleotide
cugaacaacaaugacuuuu

SEQ ID NO: 1965523 - RNA, 19 nt, Artificial Sequence
  Description of Artificial Sequence: Synthetic oligonucleotide
acuuuagcaccuagaaguu

SEQ ID NO: 1965524 - RNA, 19 nt, Artificial Sequence
  Description of Artificial Sequence: Synthetic oligonucleotide
auagccuagcuuccaucuu

SEQ ID NO: 1965525 - RNA, 19 nt, Artificial Sequence
  Description of Artificial Sequence: Synthetic oligonucleotide
cuagaaguuuggcauuugu

SEQ ID NO: 1965526 - RNA, 19 nt, Artificial Sequence
  Description of Artificial Sequence: Synthetic oligonucleotide
cgcuguuuguucuguaugc

SEQ ID NO: 1965527 - RNA, 19 nt, Artificial Sequence
  Description of Artificial Sequence: Synthetic oligonucleotide
guaacauuugaaaguguau

SEQ ID NO: 1965528 - RNA, 19 nt, Artificial Sequence
  Description of Artificial Sequence: Synthetic oligonucleotide
ccauacaaaacccacugua

SEQ ID NO: 1965529 - RNA, 19 nt, Artificial Sequence
  Description of Artificial Sequence: Synthetic oligonucleotide
ggcauuuguaacauuugaa

SEQ ID NO: 1965530 - RNA, 19 nt, Artificial Sequence
  Description of Artificial Sequence: Synthetic oligonucleotide
gcaccuagaaguuuggcau

SEQ ID NO: 1965531 - RNA, 19 nt, Artificial Sequence
  Description of Artificial Sequence: Synthetic oligonucleotide
cuguuuguucuguaugccu

SEQ ID NO: 1965532 - RNA, 19 nt, Artificial Sequence
  Description of Artificial Sequence: Synthetic oligonucleotide
cuucagauaaaagcuaguu

SEQ ID NO: 1965533 - RNA, 19 nt, Artificial Sequence
  Description of Artificial Sequence: Synthetic oligonucleotide
ucacccggcggugucgcug

SEQ ID NO: 1965534 - RNA, 19 nt, Artificial Sequence
  Description of Artificial Sequence: Synthetic oligonucleotide
auaaugcauuaaaccauuu

SEQ ID NO: 1965535 - RNA, 19 nt, Artificial Sequence
  Description of Artificial Sequence: Synthetic oligonucleotide
ugcucaggcgucagcucau

SEQ ID NO: 1965536 - RNA, 19 nt, Artificial Sequence
  Description of Artificial Sequence: Synthetic oligonucleotide
ugucacccggcggugucgc

SEQ ID NO: 1965537 - RNA, 19 nt, Artificial Sequence
  Description of Artificial Sequence: Synthetic oligonucleotide
accuagaaguuuggcauuu

SEQ ID NO: 1965538 - RNA, 19 nt, Artificial Sequence
  Description of Artificial Sequence: Synthetic oligonucleotide
ccacuaauaaaauauccau

SEQ ID NO: 1965539 - RNA, 19 nt, Artificial Sequence
  Description of Artificial Sequence: Synthetic oligonucleotide
guaugccuguuugcgaaga

SEQ ID NO: 1965540 - RNA, 19 nt, Artificial Sequence
  Description of Artificial Sequence: Synthetic oligonucleotide
aggucccuuuuaaaaguca

SEQ ID NO: 1965541 - RNA, 19 nt, Artificial Sequence
  Description of Artificial Sequence: Synthetic oligonucleotide
ggugucgcuguuuguucug

SEQ ID NO: 1965542 - RNA, 19 nt, Artificial Sequence
  Description of Artificial Sequence: Synthetic oligonucleotide
ggauuugaauuaaggcuga

SEQ ID NO: 1965543 - RNA, 19 nt, Artificial Sequence
  Description of Artificial Sequence: Synthetic oligonucleotide
cagaaucugggauuugaau

SEQ ID NO: 1965544 - RNA, 19 nt, Artificial Sequence
  Description of Artificial Sequence: Synthetic oligonucleotide
gaacccucaucaauuaguu

SEQ ID NO: 1965545 - RNA, 19 nt, Artificial Sequence
  Description of Artificial Sequence: Synthetic oligonucleotide
aguguacaaaggagaugcu

SEQ ID NO: 1965546 - RNA, 19 nt, Artificial Sequence
  Description of Artificial Sequence: Synthetic oligonucleotide
cucaucaauuaguuauuau

SEQ ID NO: 1965547 - RNA, 19 nt, Artificial Sequence
  Description of Artificial Sequence: Synthetic oligonucleotide
guacugcucaggcgucagc

SEQ ID NO: 1965548 - RNA, 19 nt, Artificial Sequence
  Description of Artificial Sequence: Synthetic oligonucleotide
ccaugugauaaauacuaua

SEQ ID NO: 1965549 - RNA, 19 nt, Artificial Sequence
  Description of Artificial Sequence: Synthetic oligonucleotide
cccugaagaccaucauucc

SEQ ID NO: 1965550 - RNA, 19 nt, Artificial Sequence
  Description of Artificial Sequence: Synthetic oligonucleotide
uagcuuccaucuucagaua

SEQ ID NO: 1965551 - RNA, 19 nt, Artificial Sequence
  Description of Artificial Sequence: Synthetic oligonucleotide
ugucgcuguuuguucugua

SEQ ID NO: 1965552 - RNA, 19 nt, Artificial Sequence
  Description of Artificial Sequence: Synthetic oligonucleotide
uaccauguucuuggucuuc

SEQ ID NO: 1965553 - RNA, 19 nt, Artificial Sequence
  Description of Artificial Sequence: Synthetic oligonucleotide
gaagccucguucauggcuu

SEQ ID NO: 1965554 - RNA, 19 nt, Artificial Sequence
  Description of Artificial Sequence: Synthetic oligonucleotide
ccucuuaccucauuaauau

SEQ ID NO: 1965555 - RNA, 19 nt, Artificial Sequence
  Description of Artificial Sequence: Synthetic oligonucleotide
agccuagcuuccaucuuca

SEQ ID NO: 1965556 - RNA, 19 nt, Artificial Sequence
  Description of Artificial Sequence: Synthetic oligonucleotide
cuuuggacuggaugcacau

SEQ ID NO: 1965557 - RNA, 19 nt, Artificial Sequence
  Description of Artificial Sequence: Synthetic oligonucleotide
guuugcgaagaugcaucuc

SEQ ID NO: 1965558 - RNA, 19 nt, Artificial Sequence
  Description of Artificial Sequence: Synthetic oligonucleotide
gccucguucauggcuuugg

SEQ ID NO: 1965559 - RNA, 19 nt, Artificial Sequence
  Description of Artificial Sequence: Synthetic oligonucleotide
aaagcacauuacacaucuu

SEQ ID NO: 1965560 - RNA, 19 nt, Artificial Sequence
  Description of Artificial Sequence: Synthetic oligonucleotide
auacuauaguacagucuua

SEQ ID NO: 1965561 - RNA, 19 nt, Artificial Sequence
  Description of Artificial Sequence: Synthetic oligonucleotide
gagccauacaaaacccacu

SEQ ID NO: 1965562 - RNA, 19 nt, Artificial Sequence
  Description of Artificial Sequence: Synthetic oligonucleotide
cucuuaccucauuaauaua

SEQ ID NO: 1965563 - RNA, 19 nt, Artificial Sequence
  Description of Artificial Sequence: Synthetic oligonucleotide
ggugggagugagaagccuc

SEQ ID NO: 1965564 - RNA, 19 nt, Artificial Sequence
  Description of Artificial Sequence: Synthetic oligonucleotide
cugucacccggcggugucg

SEQ ID NO: 1965565 - RNA, 19 nt, Artificial Sequence
  Description of Artificial Sequence: Synthetic oligonucleotide
aggugggagugagaagccu

SEQ ID NO: 1965566 - RNA, 19 nt, Artificial Sequence
  Description of Artificial Sequence: Synthetic oligonucleotide
cacaugcgguacugcucag

SEQ ID NO: 1965567 - RNA, 19 nt, Artificial Sequence
  Description of Artificial Sequence: Synthetic oligonucleotide
cauaucuucuaugccucua

SEQ ID NO: 1965568 - RNA, 19 nt, Artificial Sequence
  Description of Artificial Sequence: Synthetic oligonucleotide
ggcccacuaauaaaauauc

SEQ ID NO: 1965569 - RNA, 19 nt, Artificial Sequence
  Description of Artificial Sequence: Synthetic oligonucleotide
cucaugccuuuucuaguaa

SEQ ID NO: 1965570 - RNA, 19 nt, Artificial Sequence
  Description of Artificial Sequence: Synthetic oligonucleotide
ugggagugagaagccucgu

SEQ ID NO: 1965571 - RNA, 19 nt, Artificial Sequence
  Description of Artificial Sequence: Synthetic oligonucleotide
ggcgucagcucaucugcac

SEQ ID NO: 1965572 - RNA, 19 nt, Artificial Sequence
  Description of Artificial Sequence: Synthetic oligonucleotide
cugcacaaguguuucucgu

SEQ ID NO: 1965573 - RNA, 19 nt, Artificial Sequence
  Description of Artificial Sequence: Synthetic oligonucleotide
caaauaccauguucuuggu

SEQ ID NO: 1965574 - RNA, 19 nt, Artificial Sequence
  Description of Artificial Sequence: Synthetic oligonucleotide
gucgcuguuuguucuguau

SEQ ID NO: 1965575 - RNA, 19 nt, Artificial Sequence
  Description of Artificial Sequence: Synthetic oligonucleotide
ugccucuaagaggcacaga

SEQ ID NO: 1965576 - RNA, 19 nt, Artificial Sequence
  Description of Artificial Sequence: Synthetic oligonucleotide
cccacuguaauguccauau

SEQ ID NO: 1965577 - RNA, 19 nt, Artificial Sequence
  Description of Artificial Sequence: Synthetic oligonucleotide
gcgucagcucaucugcaca

SEQ ID NO: 1965578 - RNA, 19 nt, Artificial Sequence
  Description of Artificial Sequence: Synthetic oligonucleotide
cagacuuucuuguguugau

SEQ ID NO: 1965579 - RNA, 19 nt, Artificial Sequence
  Description of Artificial Sequence: Synthetic oligonucleotide
cccagcuagaacccucauc

SEQ ID NO: 1965580 - RNA, 19 nt, Artificial Sequence
  Description of Artificial Sequence: Synthetic oligonucleotide
gcuuuggacuggaugcaca

SEQ ID NO: 1965581 - RNA, 19 nt, Artificial Sequence
  Description of Artificial Sequence: Synthetic oligonucleotide
gcggugucgcuguuuguuc

SEQ ID NO: 1965582 - RNA, 19 nt, Artificial Sequence
  Description of Artificial Sequence: Synthetic oligonucleotide
cagcuagaacccucaucaa

SEQ ID NO: 1965583 - RNA, 19 nt, Artificial Sequence
  Description of Artificial Sequence: Synthetic oligonucleotide
agccucguucauggcuuug

SEQ ID NO: 1965584 - RNA, 19 nt, Artificial Sequence
  Description of Artificial Sequence: Synthetic oligonucleotide
cucccugaagaccaucauu

SEQ ID NO: 1965585 - RNA, 19 nt, Artificial Sequence
  Description of Artificial Sequence: Synthetic oligonucleotide
cucauagccuagcuuccau

SEQ ID NO: 1965586 - RNA, 19 nt, Artificial Sequence
  Description of Artificial Sequence: Synthetic oligonucleotide
ccggcggugucgcuguuug

SEQ ID NO: 1965587 - RNA, 19 nt, Artificial Sequence
  Description of Artificial Sequence: Synthetic oligonucleotide
cgaagaugcaucucuauuu

SEQ ID NO: 1965588 - RNA, 19 nt, Artificial Sequence
  Description of Artificial Sequence: Synthetic oligonucleotide
gcgaagaugcaucucuauu

SEQ ID NO: 1965589 - RNA, 19 nt, Artificial Sequence
  Description of Artificial Sequence: Synthetic oligonucleotide
gccauacaaaacccacugu

SEQ ID NO: 1965590 - RNA, 19 nt, Artificial Sequence
  Description of Artificial Sequence: Synthetic oligonucleotide
gcugucacccggcgguguc

SEQ ID NO: 1965591 - RNA, 19 nt, Artificial Sequence
  Description of Artificial Sequence: Synthetic oligonucleotide
cuuuagcaccuagaaguuu

SEQ ID NO: 1965592 - RNA, 19 nt, Artificial Sequence
  Description of Artificial Sequence: Synthetic oligonucleotide
ccacuguaauguccauauc

SEQ ID NO: 1965593 - RNA, 19 nt, Artificial Sequence
  Description of Artificial Sequence: Synthetic oligonucleotide
cucaggcgucagcucaucu

SEQ ID NO: 1965594 - RNA, 19 nt, Artificial Sequence
  Description of Artificial Sequence: Synthetic oligonucleotide
cauucccaggugggaguga

SEQ ID NO: 1965595 - RNA, 19 nt, Artificial Sequence
  Description of Artificial Sequence: Synthetic oligonucleotide
gugucgcuguuuguucugu

SEQ ID NO: 1965596 - RNA, 19 nt, Artificial Sequence
  Description of Artificial Sequence: Synthetic oligonucleotide
gccuguuugcgaagaugca

SEQ ID NO: 1965597 - RNA, 19 nt, Artificial Sequence
  Description of Artificial Sequence: Synthetic oligonucleotide
gcacagaaucugggauuug

SEQ ID NO: 1965598 - RNA, 19 nt, Artificial Sequence
  Description of Artificial Sequence: Synthetic oligonucleotide
ccaucauucccagguggga

SEQ ID NO: 1965599 - RNA, 19 nt, Artificial Sequence
  Description of Artificial Sequence: Synthetic oligonucleotide
ggauucacuuuagcaccua

SEQ ID NO: 1965600 - RNA, 19 nt, Artificial Sequence
  Description of Artificial Sequence: Synthetic oligonucleotide
ccaugcuaaauaagacaau

SEQ ID NO: 1965601 - RNA, 19 nt, Artificial Sequence
  Description of Artificial Sequence: Synthetic oligonucleotide
gggagugagaagccucguu

SEQ ID NO: 1965602 - RNA, 19 nt, Artificial Sequence
  Description of Artificial Sequence: Synthetic oligonucleotide
ccucuaagaggcacagaau

SEQ ID NO: 1965603 - RNA, 19 nt, Artificial Sequence
  Description of Artificial Sequence: Synthetic oligonucleotide
ggcggugucgcuguuuguu

SEQ ID NO: 1965604 - RNA, 19 nt, Artificial Sequence
  Description of Artificial Sequence: Synthetic oligonucleotide
cacccggcggugucgcugu

SEQ ID NO: 1965605 - RNA, 19 nt, Artificial Sequence
  Description of Artificial Sequence: Synthetic oligonucleotide
cccucaucaauuaguuauu

SEQ ID NO: 1965606 - RNA, 19 nt, Artificial Sequence
  Description of Artificial Sequence: Synthetic oligonucleotide
gcucaggcgucagcucauc

SEQ ID NO: 1965607 - RNA, 19 nt, Artificial Sequence
  Description of Artificial Sequence: Synthetic oligonucleotide
gucacccggcggugucgcu

SEQ ID NO: 1965608 - RNA, 19 nt, Artificial Sequence
  Description of Artificial Sequence: Synthetic oligonucleotide
cggugucgcuguuuguucu

SEQ ID NO: 1965609 - RNA, 19 nt, Artificial Sequence
  Description of Artificial Sequence: Synthetic oligonucleotide
ccucccugaagaccaucau

SEQ ID NO: 1965610 - RNA, 19 nt, Artificial Sequence
  Description of Artificial Sequence: Synthetic oligonucleotide
acccggcggugucgcuguu

SEQ ID NO: 1965611 - RNA, 19 nt, Artificial Sequence
  Description of Artificial Sequence: Synthetic oligonucleotide
ggcugucacccggcggugu

SEQ ID NO: 1965612 - RNA, 19 nt, Artificial Sequence
  Description of Artificial Sequence: Synthetic oligonucleotide
cggcggugucgcuguuugu

SEQ ID NO: 1965613 - RNA, 19 nt, Artificial Sequence
  Description of Artificial Sequence: Synthetic oligonucleotide
cccggcggugucgcuguuu

SEQ ID NO: 1965614 - RNA, 19 nt, Artificial Sequence
  Description of Artificial Sequence: Synthetic oligonucleotide
caguguaacacucagagag

SEQ ID NO: 1965615 - RNA, 19 nt, Artificial Sequence
  Description of Artificial Sequence: Synthetic oligonucleotide
aagaacaggcgucacuggc

SEQ ID NO: 1965616 - RNA, 19 nt, Artificial Sequence
  Description of Artificial Sequence: Synthetic oligonucleotide
caagguauaggcuaggcag

SEQ ID NO: 1965617 - RNA, 19 nt, Artificial Sequence
  Description of Artificial Sequence: Synthetic oligonucleotide
aaggacucggaguuggggc

SEQ ID NO: 1965618 - RNA, 19 nt, Artificial Sequence
  Description of Artificial Sequence: Synthetic oligonucleotide
agagaggucucccucaacc

SEQ ID NO: 1965619 - RNA, 19 nt, Artificial Sequence
  Description of Artificial Sequence: Synthetic oligonucleotide
uguguguuaaagcagugca

SEQ ID NO: 1965620 - RNA, 19 nt, Artificial Sequence
  Description of Artificial Sequence: Synthetic oligonucleotide
aauggacucagcccggaac

SEQ ID NO: 1965621 - RNA, 19 nt, Artificial Sequence
  Description of Artificial Sequence: Synthetic oligonucleotide
gaugguuuucaacuggucc

SEQ ID NO: 1965622 - RNA, 19 nt, Artificial Sequence
  Description of Artificial Sequence: Synthetic oligonucleotide
aaggauaaggacucggagu

SEQ ID NO: 1965623 - RNA, 19 nt, Artificial Sequence
  Description of Artificial Sequence: Synthetic oligonucleotide
gaugcagugggucaucucc

SEQ ID NO: 1965624 - RNA, 19 nt, Artificial Sequence
  Description of Artificial Sequence: Synthetic oligonucleotide
uugauaggcaggaucagug

SEQ ID NO: 1965625 - RNA, 19 nt, Artificial Sequence
  Description of Artificial Sequence: Synthetic oligonucleotide
uuucaacugguccuggugc

SEQ ID NO: 1965626 - RNA, 19 nt, Artificial Sequence
  Description of Artificial Sequence: Synthetic oligonucleotide
ugugcaaaggccuggaagu

SEQ ID NO: 1965627 - RNA, 19 nt, Artificial Sequence
  Description of Artificial Sequence: Synthetic oligonucleotide
uaaagcagugcacuaguug

SEQ ID NO: 1965628 - RNA, 19 nt, Artificial Sequence
  Description of Artificial Sequence: Synthetic oligonucleotide
aaugauguacuggacaccu

SEQ ID NO: 1965629 - RNA, 19 nt, Artificial Sequence
  Description of Artificial Sequence: Synthetic oligonucleotide
aauggcagcaguugugaug

SEQ ID NO: 1965630 - RNA, 19 nt, Artificial Sequence
  Description of Artificial Sequence: Synthetic oligonucleotide
aguugugaugguuuucaac

SEQ ID NO: 1965631 - RNA, 19 nt, Artificial Sequence
  Description of Artificial Sequence: Synthetic oligonucleotide
aguuggaugauacgucugg

SEQ ID NO: 1965632 - RNA, 19 nt, Artificial Sequence
  Description of Artificial Sequence: Synthetic oligonucleotide
agcuagugcagcuuucagc

SEQ ID NO: 1965633 - RNA, 19 nt, Artificial Sequence
  Description of Artificial Sequence: Synthetic oligonucleotide
gaagaucacagcauugggg

SEQ ID NO: 1965634 - RNA, 19 nt, Artificial Sequence
  Description of Artificial Sequence: Synthetic oligonucleotide
aggcacaauggacucagcc

SEQ ID NO: 1965635 - RNA, 19 nt, Artificial Sequence
  Description of Artificial Sequence: Synthetic oligonucleotide
ucagagaggaguugauagg

SEQ ID NO: 1965636 - RNA, 19 nt, Artificial Sequence
  Description of Artificial Sequence: Synthetic oligonucleotide
aaccccguagacccgggcc

SEQ ID NO: 1965637 - RNA, 19 nt, Artificial Sequence
  Description of Artificial Sequence: Synthetic oligonucleotide
uguguuaaagcagugcacu

SEQ ID NO: 1965638 - RNA, 19 nt, Artificial Sequence
  Description of Artificial Sequence: Synthetic oligonucleotide
uguuaaagcagugcacuag

SEQ ID NO: 1965639 - RNA, 19 nt, Artificial Sequence
  Description of Artificial Sequence: Synthetic oligonucleotide
gugaaguccuugcuaaugg

SEQ ID NO: 1965640 - RNA, 19 nt, Artificial Sequence
  Description of Artificial Sequence: Synthetic oligonucleotide
guacuggacaccuccaggg

SEQ ID NO: 1965641 - RNA, 19 nt, Artificial Sequence
  Description of Artificial Sequence: Synthetic oligonucleotide
gguggcaugaaacugguug

SEQ ID NO: 1965642 - RNA, 19 nt, Artificial Sequence
  Description of Artificial Sequence: Synthetic oligonucleotide
ucagcccggaacuugagca

SEQ ID NO: 1965643 - RNA, 19 nt, Artificial Sequence
  Description of Artificial Sequence: Synthetic oligonucleotide
uauagcugaggcugagggg

SEQ ID NO: 1965644 - RNA, 19 nt, Artificial Sequence
  Description of Artificial Sequence: Synthetic oligonucleotide
aaagguguaugccaccuuu

SEQ ID NO: 1965645 - RNA, 19 nt, Artificial Sequence
  Description of Artificial Sequence: Synthetic oligonucleotide
aacuugagcaggguacugg

SEQ ID NO: 1965646 - RNA, 19 nt, Artificial Sequence
  Description of Artificial Sequence: Synthetic oligonucleotide
cacggugucauccagggug

SEQ ID NO: 1965647 - RNA, 19 nt, Artificial Sequence
  Description of Artificial Sequence: Synthetic oligonucleotide
gugaagaucacagcauugg

SEQ ID NO: 1965648 - RNA, 19 nt, Artificial Sequence
  Description of Artificial Sequence: Synthetic oligonucleotide
guucucugaggccacaugc

SEQ ID NO: 1965649 - RNA, 19 nt, Artificial Sequence
  Description of Artificial Sequence: Synthetic oligonucleotide
aggacucggaguuggggcc

SEQ ID NO: 1965650 - RNA, 19 nt, Artificial Sequence
  Description of Artificial Sequence: Synthetic oligonucleotide
aaggcugcggcaugcacug

SEQ ID NO: 1965651 - RNA, 19 nt, Artificial Sequence
  Description of Artificial Sequence: Synthetic oligonucleotide
aagguauaggcuaggcagg

SEQ ID NO: 1965652 - RNA, 19 nt, Artificial Sequence
  Description of Artificial Sequence: Synthetic oligonucleotide
aaacugguugcuguccuuc

SEQ ID NO: 1965653 - RNA, 19 nt, Artificial Sequence
  Description of Artificial Sequence: Synthetic oligonucleotide
aaguccuugcuaauggcag

SEQ ID NO: 1965654 - RNA, 19 nt, Artificial Sequence
  Description of Artificial Sequence: Synthetic oligonucleotide
gaaguuguucucugaggcc

SEQ ID NO: 1965655 - RNA, 19 nt, Artificial Sequence
  Description of Artificial Sequence: Synthetic oligonucleotide
ggaucagugcuucaucucg

SEQ ID NO: 1965656 - RNA, 19 nt, Artificial Sequence
  Description of Artificial Sequence: Synthetic oligonucleotide
gcugucuaggacuugaggc

SEQ ID NO: 1965657 - RNA, 19 nt, Artificial Sequence
  Description of Artificial Sequence: Synthetic oligonucleotide
aggauaaggacucggaguu

SEQ ID NO: 1965658 - RNA, 19 nt, Artificial Sequence
  Description of Artificial Sequence: Synthetic oligonucleotide
acgaaucucccucaagcag

SEQ ID NO: 1965659 - RNA, 19 nt, Artificial Sequence
  Description of Artificial Sequence: Synthetic oligonucleotide
uguaacacucagagaggag

SEQ ID NO: 1965660 - RNA, 19 nt, Artificial Sequence
  Description of Artificial Sequence: Synthetic oligonucleotide
gcacaauggacucagcccg

SEQ ID NO: 1965661 - RNA, 19 nt, Artificial Sequence
  Description of Artificial Sequence: Synthetic oligonucleotide
uguaugccaccuuugucug

SEQ ID NO: 1965662 - RNA, 19 nt, Artificial Sequence
  Description of Artificial Sequence: Synthetic oligonucleotide
acuaguuggaugauacguc

SEQ ID NO: 1965663 - RNA, 19 nt, Artificial Sequence
  Description of Artificial Sequence: Synthetic oligonucleotide
ugugaaguccuugcuaaug

SEQ ID NO: 1965664 - RNA, 19 nt, Artificial Sequence
  Description of Artificial Sequence: Synthetic oligonucleotide
caaggauaaggacucggag

SEQ ID NO: 1965665 - RNA, 19 nt, Artificial Sequence
  Description of Artificial Sequence: Synthetic oligonucleotide
aaaggccuggaagucccgc

SEQ ID NO: 1965666 - RNA, 19 nt, Artificial Sequence
  Description of Artificial Sequence: Synthetic oligonucleotide
acuggcagccccuuuagga

SEQ ID NO: 1965667 - RNA, 19 nt, Artificial Sequence
  Description of Artificial Sequence: Synthetic oligonucleotide
ugauaggcaggaucagugc

SEQ ID NO: 1965668 - RNA, 19 nt, Artificial Sequence
  Description of Artificial Sequence: Synthetic oligonucleotide
gagcauucgagcugucuag

SEQ ID NO: 1965669 - RNA, 19 nt, Artificial Sequence
  Description of Artificial Sequence: Synthetic oligonucleotide
gaagaacaggcgucacugg

SEQ ID NO: 1965670 - RNA, 19 nt, Artificial Sequence
  Description of Artificial Sequence: Synthetic oligonucleotide
cucggcacucaccacaagg

SEQ ID NO: 1965671 - RNA, 19 nt, Artificial Sequence
  Description of Artificial Sequence: Synthetic oligonucleotide
ugaaguccuugcuaauggc

SEQ ID NO: 1965672 - RNA, 19 nt, Artificial Sequence
  Description of Artificial Sequence: Synthetic oligonucleotide
gaacaggcgucacuggcag

SEQ ID NO: 1965673 - RNA, 19 nt, Artificial Sequence
  Description of Artificial Sequence: Synthetic oligonucleotide
aggguacuggucuccacac

SEQ ID NO: 1965674 - RNA, 19 nt, Artificial Sequence
  Description of Artificial Sequence: Synthetic oligonucleotide
ucggcacucaccacaagga

SEQ ID NO: 1965675 - RNA, 19 nt, Artificial Sequence
  Description of Artificial Sequence: Synthetic oligonucleotide
ucuuggaugcaguggguca

SEQ ID NO: 1965676 - RNA, 19 nt, Artificial Sequence
  Description of Artificial Sequence: Synthetic oligonucleotide
gaugcggucuucugugaag

SEQ ID NO: 1965677 - RNA, 19 nt, Artificial Sequence
  Description of Artificial Sequence: Synthetic oligonucleotide
gaguugauaggcaggauca

SEQ ID NO: 1965678 - RNA, 19 nt, Artificial Sequence
  Description of Artificial Sequence: Synthetic oligonucleotide
ugggccuagcagaugagca

SEQ ID NO: 1965679 - RNA, 19 nt, Artificial Sequence
  Description of Artificial Sequence: Synthetic oligonucleotide
cgaccauucagccagaugc

SEQ ID NO: 1965680 - RNA, 19 nt, Artificial Sequence
  Description of Artificial Sequence: Synthetic oligonucleotide
ugcuaauggcagcaguugu

SEQ ID NO: 1965681 - RNA, 19 nt, Artificial Sequence
  Description of Artificial Sequence: Synthetic oligonucleotide
agcugucuaggacuugagg

SEQ ID NO: 1965682 - RNA, 19 nt, Artificial Sequence
  Description of Artificial Sequence: Synthetic oligonucleotide
cagagaggaguugauaggc

SEQ ID NO: 1965683 - RNA, 19 nt, Artificial Sequence
  Description of Artificial Sequence: Synthetic oligonucleotide
cucaagcaggccuggagcc

SEQ ID NO: 1965684 - RNA, 19 nt, Artificial Sequence
  Description of Artificial Sequence: Synthetic oligonucleotide
caugcgcucaggcacaaug

SEQ ID NO: 1965685 - RNA, 19 nt, Artificial Sequence
  Description of Artificial Sequence: Synthetic oligonucleotide
auggacucagcccggaacu

SEQ ID NO: 1965686 - RNA, 19 nt, Artificial Sequence
  Description of Artificial Sequence: Synthetic oligonucleotide
uuugucugcccauggugug

SEQ ID NO: 1965687 - RNA, 19 nt, Artificial Sequence
  Description of Artificial Sequence: Synthetic oligonucleotide
uccucucgaccauucagcc

SEQ ID NO: 1965688 - RNA, 19 nt, Artificial Sequence
  Description of Artificial Sequence: Synthetic oligonucleotide
ugucuaggacuugaggccc

SEQ ID NO: 1965689 - RNA, 19 nt, Artificial Sequence
  Description of Artificial Sequence: Synthetic oligonucleotide
aguguaacacucagagagg

SEQ ID NO: 1965690 - RNA, 19 nt, Artificial Sequence
  Description of Artificial Sequence: Synthetic oligonucleotide
ggaaagcugugccucacgg

SEQ ID NO: 1965691 - RNA, 19 nt, Artificial Sequence
  Description of Artificial Sequence: Synthetic oligonucleotide
gacgaaucucccucaagca

SEQ ID NO: 1965692 - RNA, 19 nt, Artificial Sequence
  Description of Artificial Sequence: Synthetic oligonucleotide
uucaacugguccuggugca

SEQ ID NO: 1965693 - RNA, 19 nt, Artificial Sequence
  Description of Artificial Sequence: Synthetic oligonucleotide
aaaggcugcggcaugcacu

SEQ ID NO: 1965694 - RNA, 19 nt, Artificial Sequence
  Description of Artificial Sequence: Synthetic oligonucleotide
ggcacaauggacucagccc

SEQ ID NO: 1965695 - RNA, 19 nt, Artificial Sequence
  Description of Artificial Sequence: Synthetic oligonucleotide
guguaugccaccuuugucu

SEQ ID NO: 1965696 - RNA, 19 nt, Artificial Sequence
  Description of Artificial Sequence: Synthetic oligonucleotide
cauucgagcugucuaggac

SEQ ID NO: 1965697 - RNA, 19 nt, Artificial Sequence
  Description of Artificial Sequence: Synthetic oligonucleotide
agcauuggggcccgcauca

SEQ ID NO: 1965698 - RNA, 19 nt, Artificial Sequence
  Description of Artificial Sequence: Synthetic oligonucleotide
caugaaacugguugcuguc

SEQ ID NO: 1965699 - RNA, 19 nt, Artificial Sequence
  Description of Artificial Sequence: Synthetic oligonucleotide
acugccugagccccgccgg

SEQ ID NO: 1965700 - RNA, 19 nt, Artificial Sequence
  Description of Artificial Sequence: Synthetic oligonucleotide
aucuccugugcuccuccgc

SEQ ID NO: 1965701 - RNA, 19 nt, Artificial Sequence
  Description of Artificial Sequence: Synthetic oligonucleotide
uugcuaauggcagcaguug

SEQ ID NO: 1965702 - RNA, 19 nt, Artificial Sequence
  Description of Artificial Sequence: Synthetic oligonucleotide
gaccauucagccagaugcg

SEQ ID NO: 1965703 - RNA, 19 nt, Artificial Sequence
  Description of Artificial Sequence: Synthetic oligonucleotide
cagcucaucagagagaaga

SEQ ID NO: 1965704 - RNA, 19 nt, Artificial Sequence
  Description of Artificial Sequence: Synthetic oligonucleotide
uguuguggcaggccaucug

SEQ ID NO: 1965705 - RNA, 19 nt, Artificial Sequence
  Description of Artificial Sequence: Synthetic oligonucleotide
aacacucagagaggaguug

SEQ ID NO: 1965706 - RNA, 19 nt, Artificial Sequence
  Description of Artificial Sequence: Synthetic oligonucleotide
ucacuggcagccccuuuag

SEQ ID NO: 1965707 - RNA, 19 nt, Artificial Sequence
  Description of Artificial Sequence: Synthetic oligonucleotide
gaggucucccucaaccccg

SEQ ID NO: 1965708 - RNA, 19 nt, Artificial Sequence
  Description of Artificial Sequence: Synthetic oligonucleotide
aagugcauccccaucuccu

SEQ ID NO: 1965709 - RNA, 19 nt, Artificial Sequence
  Description of Artificial Sequence: Synthetic oligonucleotide
uagacccgggccaagguau

SEQ ID NO: 1965710 - RNA, 19 nt, Artificial Sequence
  Description of Artificial Sequence: Synthetic oligonucleotide
gccacaugcaccuuauagc

SEQ ID NO: 1965711 - RNA, 19 nt, Artificial Sequence
  Description of Artificial Sequence: Synthetic oligonucleotide
cuugucuccauuuguugca

SEQ ID NO: 1965712 - RNA, 19 nt, Artificial Sequence
  Description of Artificial Sequence: Synthetic oligonucleotide
cacaaggauaaggacucgg

SEQ ID NO: 1965713 - RNA, 19 nt, Artificial Sequence
  Description of Artificial Sequence: Synthetic oligonucleotide
ugcgcucaggcacaaugga

SEQ ID NO: 1965714 - RNA, 19 nt, Artificial Sequence
  Description of Artificial Sequence: Synthetic oligonucleotide
acggcugccacaaacucag

SEQ ID NO: 1965715 - RNA, 19 nt, Artificial Sequence
  Description of Artificial Sequence: Synthetic oligonucleotide
ugcaaaggccuggaagucc

SEQ ID NO: 1965716 - RNA, 19 nt, Artificial Sequence
  Description of Artificial Sequence: Synthetic oligonucleotide
gaaguccuugcuaauggca

SEQ ID NO: 1965717 - RNA, 19 nt, Artificial Sequence
  Description of Artificial Sequence: Synthetic oligonucleotide
uuaaagcagugcacuaguu

SEQ ID NO: 1965718 - RNA, 19 nt, Artificial Sequence
  Description of Artificial Sequence: Synthetic oligonucleotide
ugcuccuccgcuuccgagc

SEQ ID NO: 1965719 - RNA, 19 nt, Artificial Sequence
  Description of Artificial Sequence: Synthetic oligonucleotide
ggaguugauaggcaggauc

SEQ ID NO: 1965720 - RNA, 19 nt, Artificial Sequence
  Description of Artificial Sequence: Synthetic oligonucleotide
cagaugagcauucgagcug

SEQ ID NO: 1965721 - RNA, 19 nt, Artificial Sequence
  Description of Artificial Sequence: Synthetic oligonucleotide
uaaaggcugcggcaugcac

SEQ ID NO: 1965722 - RNA, 19 nt, Artificial Sequence
  Description of Artificial Sequence: Synthetic oligonucleotide
agaugagcauucgagcugu

SEQ ID NO: 1965723 - RNA, 19 nt, Artificial Sequence
  Description of Artificial Sequence: Synthetic oligonucleotide
ugcuguccuuuccaucugc

SEQ ID NO: 1965724 - RNA, 19 nt, Artificial Sequence
  Description of Artificial Sequence: Synthetic oligonucleotide
ucaagcaggccuggagccg

SEQ ID NO: 1965725 - RNA, 19 nt, Artificial Sequence
  Description of Artificial Sequence: Synthetic oligonucleotide
cuuauagcugaggcugagg

SEQ ID NO: 1965726 - RNA, 19 nt, Artificial Sequence
  Description of Artificial Sequence: Synthetic oligonucleotide
uaucgaggcagguggcaug

SEQ ID NO: 1965727 - RNA, 19 nt, Artificial Sequence
  Description of Artificial Sequence: Synthetic oligonucleotide
caugcacugccugagcccc

SEQ ID NO: 1965728 - RNA, 19 nt, Artificial Sequence
  Description of Artificial Sequence: Synthetic oligonucleotide
gaggucagggguccuguug

SEQ ID NO: 1965729 - RNA, 19 nt, Artificial Sequence
  Description of Artificial Sequence: Synthetic oligonucleotide
ucgaccauucagccagaug

SEQ ID NO: 1965730 - RNA, 19 nt, Artificial Sequence
  Description of Artificial Sequence: Synthetic oligonucleotide
gagagaagaacaggcguca

SEQ ID NO: 1965731 - RNA, 19 nt, Artificial Sequence
  Description of Artificial Sequence: Synthetic oligonucleotide
acgucuggaggugucauug

SEQ ID NO: 1965732 - RNA, 19 nt, Artificial Sequence
  Description of Artificial Sequence: Synthetic oligonucleotide
gaggaguugauaggcagga

SEQ ID NO: 1965733 - RNA, 19 nt, Artificial Sequence
  Description of Artificial Sequence: Synthetic oligonucleotide
agcauucgagcugucuagg

SEQ ID NO: 1965734 - RNA, 19 nt, Artificial Sequence
  Description of Artificial Sequence: Synthetic oligonucleotide
cacaauggacucagcccgg

SEQ ID NO: 1965735 - RNA, 19 nt, Artificial Sequence
  Description of Artificial Sequence: Synthetic oligonucleotide
aucugccacuccacgaagc

SEQ ID NO: 1965736 - RNA, 19 nt, Artificial Sequence
  Description of Artificial Sequence: Synthetic oligonucleotide
agagaagaacaggcgucac

SEQ ID NO: 1965737 - RNA, 19 nt, Artificial Sequence
  Description of Artificial Sequence: Synthetic oligonucleotide
aagguguaugccaccuuug

SEQ ID NO: 1965738 - RNA, 19 nt, Artificial Sequence
  Description of Artificial Sequence: Synthetic oligonucleotide
guguguguuaaagcagugc

SEQ ID NO: 1965739 - RNA, 19 nt, Artificial Sequence
  Description of Artificial Sequence: Synthetic oligonucleotide
caggcgacgaaucucccuc

SEQ ID NO: 1965740 - RNA, 19 nt, Artificial Sequence
  Description of Artificial Sequence: Synthetic oligonucleotide
ugccaagccugcagcagug

SEQ ID NO: 1965741 - RNA, 19 nt, Artificial Sequence
  Description of Artificial Sequence: Synthetic oligonucleotide
gagguaggagauggguggg

SEQ ID NO: 1965742 - RNA, 19 nt, Artificial Sequence
  Description of Artificial Sequence: Synthetic oligonucleotide
ggggaaguuguucucugag

SEQ ID NO: 1965743 - RNA, 19 nt, Artificial Sequence
  Description of Artificial Sequence: Synthetic oligonucleotide
ugauacgucuggagguguc

SEQ ID NO: 1965744 - RNA, 19 nt, Artificial Sequence
  Description of Artificial Sequence: Synthetic oligonucleotide
acaaggauaaggacucgga

SEQ ID NO: 1965745 - RNA, 19 nt, Artificial Sequence
  Description of Artificial Sequence: Synthetic oligonucleotide
gcuagugcagcuuucagcu

SEQ ID NO: 1965746 - RNA, 19 nt, Artificial Sequence
  Description of Artificial Sequence: Synthetic oligonucleotide
uggugcaguguaacacuca

SEQ ID NO: 1965747 - RNA, 19 nt, Artificial Sequence
  Description of Artificial Sequence: Synthetic oligonucleotide
ggugcuaucugcugggcga

SEQ ID NO: 1965748 - RNA, 19 nt, Artificial Sequence
  Description of Artificial Sequence: Synthetic oligonucleotide
aguugauaggcaggaucag

SEQ ID NO: 1965749 - RNA, 19 nt, Artificial Sequence
  Description of Artificial Sequence: Synthetic oligonucleotide
aggcgucacuggcagcccc

SEQ ID NO: 1965750 - RNA, 19 nt, Artificial Sequence
  Description of Artificial Sequence: Synthetic oligonucleotide
uucgagcugucuaggacuu

SEQ ID NO: 1965751 - RNA, 19 nt, Artificial Sequence
  Description of Artificial Sequence: Synthetic oligonucleotide
guacuggucuccacacugg

SEQ ID NO: 1965752 - RNA, 19 nt, Artificial Sequence
  Description of Artificial Sequence: Synthetic oligonucleotide
gcuaggcaggcguagcccg

SEQ ID NO: 1965753 - RNA, 19 nt, Artificial Sequence
  Description of Artificial Sequence: Synthetic oligonucleotide
ucaaccccguagacccggg

SEQ ID NO: 1965754 - RNA, 19 nt, Artificial Sequence
  Description of Artificial Sequence: Synthetic oligonucleotide
gaggcugaggggaagugca

SEQ ID NO: 1965755 - RNA, 19 nt, Artificial Sequence
  Description of Artificial Sequence: Synthetic oligonucleotide
acacucagagaggaguuga

SEQ ID NO: 1965756 - RNA, 19 nt, Artificial Sequence
  Description of Artificial Sequence: Synthetic oligonucleotide
aguggggaaguuguucucu

SEQ ID NO: 1965757 - RNA, 19 nt, Artificial Sequence
  Description of Artificial Sequence: Synthetic oligonucleotide
cuggugcaguguaacacuc

SEQ ID NO: 1965758 - RNA, 19 nt, Artificial Sequence
  Description of Artificial Sequence: Synthetic oligonucleotide
ggugucauugagguaggag

SEQ ID NO: 1965759 - RNA, 19 nt, Artificial Sequence
  Description of Artificial Sequence: Synthetic oligonucleotide
auaggcuaggcaggcguag

SEQ ID NO: 1965760 - RNA, 19 nt, Artificial Sequence
  Description of Artificial Sequence: Synthetic oligonucleotide
augcgcucaggcacaaugg

SEQ ID NO: 1965761 - RNA, 19 nt, Artificial Sequence
  Description of Artificial Sequence: Synthetic oligonucleotide
gcugaggggaagugcaucc

SEQ ID NO: 1965762 - RNA, 19 nt, Artificial Sequence
  Description of Artificial Sequence: Synthetic oligonucleotide
uggggcccgcaucaaaggu

SEQ ID NO: 1965763 - RNA, 19 nt, Artificial Sequence
  Description of Artificial Sequence: Synthetic oligonucleotide
guauaggcuaggcaggcgu

SEQ ID NO: 1965764 - RNA, 19 nt, Artificial Sequence
  Description of Artificial Sequence: Synthetic oligonucleotide
cuagcagaugagcauucga

SEQ ID NO: 1965765 - RNA, 19 nt, Artificial Sequence
  Description of Artificial Sequence: Synthetic oligonucleotide
guguguuaaagcagugcac

SEQ ID NO: 1965766 - RNA, 19 nt, Artificial Sequence
  Description of Artificial Sequence: Synthetic oligonucleotide
ugagcaggguacuggucuc

SEQ ID NO: 1965767 - RNA, 19 nt, Artificial Sequence
  Description of Artificial Sequence: Synthetic oligonucleotide
aagcagugcacuaguugga

SEQ ID NO: 1965768 - RNA, 19 nt, Artificial Sequence
  Description of Artificial Sequence: Synthetic oligonucleotide
cgacgaaucucccucaagc

SEQ ID NO: 1965769 - RNA, 19 nt, Artificial Sequence
  Description of Artificial Sequence: Synthetic oligonucleotide
agaacaggcgucacuggca

SEQ ID NO: 1965770 - RNA, 19 nt, Artificial Sequence
  Description of Artificial Sequence: Synthetic oligonucleotide
uccgaccugaguggcaaug

SEQ ID NO: 1965771 - RNA, 19 nt, Artificial Sequence
  Description of Artificial Sequence: Synthetic oligonucleotide
cucaaccccguagacccgg

SEQ ID NO: 1965772 - RNA, 19 nt, Artificial Sequence
  Description of Artificial Sequence: Synthetic oligonucleotide
gauacgucuggagguguca

SEQ ID NO: 1965773 - RNA, 19 nt, Artificial Sequence
  Description of Artificial Sequence: Synthetic oligonucleotide
cuugagcaggguacugguc

SEQ ID NO: 1965774 - RNA, 19 nt, Artificial Sequence
  Description of Artificial Sequence: Synthetic oligonucleotide
gauguacuggacaccucca

SEQ ID NO: 1965775 - RNA, 19 nt, Artificial Sequence
  Description of Artificial Sequence: Synthetic oligonucleotide
ugucugcccauggugugug

SEQ ID NO: 1965776 - RNA, 19 nt, Artificial Sequence
  Description of Artificial Sequence: Synthetic oligonucleotide
agguaucgaggcagguggc

SEQ ID NO: 1965777 - RNA, 19 nt, Artificial Sequence
  Description of Artificial Sequence: Synthetic oligonucleotide
gucagggguccuguugugg

SEQ ID NO: 1965778 - RNA, 19 nt, Artificial Sequence
  Description of Artificial Sequence: Synthetic oligonucleotide
agaugcggucuucugugaa

SEQ ID NO: 1965779 - RNA, 19 nt, Artificial Sequence
  Description of Artificial Sequence: Synthetic oligonucleotide
gaacuugagcaggguacug

SEQ ID NO: 1965780 - RNA, 19 nt, Artificial Sequence
  Description of Artificial Sequence: Synthetic oligonucleotide
uaggcaggaucagugcuuc

SEQ ID NO: 1965781 - RNA, 19 nt, Artificial Sequence
  Description of Artificial Sequence: Synthetic oligonucleotide
ggaugauacgucuggaggu

SEQ ID NO: 1965782 - RNA, 19 nt, Artificial Sequence
  Description of Artificial Sequence: Synthetic oligonucleotide
ggugaagaucacagcauug

SEQ ID NO: 1965783 - RNA, 19 nt, Artificial Sequence
  Description of Artificial Sequence: Synthetic oligonucleotide
cuaggcaggcguagcccgc

SEQ ID NO: 1965784 - RNA, 19 nt, Artificial Sequence
  Description of Artificial Sequence: Synthetic oligonucleotide
aggcguagcccgcugcuga

SEQ ID NO: 1965785 - RNA, 19 nt, Artificial Sequence
  Description of Artificial Sequence: Synthetic oligonucleotide
gcacuaguuggaugauacg

SEQ ID NO: 1965786 - RNA, 19 nt, Artificial Sequence
  Description of Artificial Sequence: Synthetic oligonucleotide
cagagagaagaacaggcgu

SEQ ID NO: 1965787 - RNA, 19 nt, Artificial Sequence
  Description of Artificial Sequence: Synthetic oligonucleotide
gagaagaacaggcgucacu

SEQ ID NO: 1965788 - RNA, 19 nt, Artificial Sequence
  Description of Artificial Sequence: Synthetic oligonucleotide
cacuaguuggaugauacgu

SEQ ID NO: 1965789 - RNA, 19 nt, Artificial Sequence
  Description of Artificial Sequence: Synthetic oligonucleotide
acuggucuccacacugguc

SEQ ID NO: 1965790 - RNA, 19 nt, Artificial Sequence
  Description of Artificial Sequence: Synthetic oligonucleotide
augcggucuucugugaagu

SEQ ID NO: 1965791 - RNA, 19 nt, Artificial Sequence
  Description of Artificial Sequence: Synthetic oligonucleotide
cuucaugcgcucaggcaca

SEQ ID NO: 1965792 - RNA, 19 nt, Artificial Sequence
  Description of Artificial Sequence: Synthetic oligonucleotide
cucuuggaugcaguggguc

SEQ ID NO: 1965793 - RNA, 19 nt, Artificial Sequence
  Description of Artificial Sequence: Synthetic oligonucleotide
guccuguuguggcaggcca

SEQ ID NO: 1965794 - RNA, 19 nt, Artificial Sequence
  Description of Artificial Sequence: Synthetic oligonucleotide
uaggcuaggcaggcguagc

SEQ ID NO: 1965795 - RNA, 19 nt, Artificial Sequence
  Description of Artificial Sequence: Synthetic oligonucleotide
gcuaauggcagcaguugug

SEQ ID NO: 1965796 - RNA, 19 nt, Artificial Sequence
  Description of Artificial Sequence: Synthetic oligonucleotide
ccugguccgaccugagugg

SEQ ID NO: 1965797 - RNA, 19 nt, Artificial Sequence
  Description of Artificial Sequence: Synthetic oligonucleotide
gguguaugccaccuuuguc

SEQ ID NO: 1965798 - RNA, 19 nt, Artificial Sequence
  Description of Artificial Sequence: Synthetic oligonucleotide
cacugccugagccccgccg

SEQ ID NO: 1965799 - RNA, 19 nt, Artificial Sequence
  Description of Artificial Sequence: Synthetic oligonucleotide
cugggccuagcagaugagc

SEQ ID NO: 1965800 - RNA, 19 nt, Artificial Sequence
  Description of Artificial Sequence: Synthetic oligonucleotide
gccaucugggccuagcaga

SEQ ID NO: 1965801 - RNA, 19 nt, Artificial Sequence
  Description of Artificial Sequence: Synthetic oligonucleotide
guaugccaccuuugucugc

SEQ ID NO: 1965802 - RNA, 19 nt, Artificial Sequence
  Description of Artificial Sequence: Synthetic oligonucleotide
ugggcgaugcuguccuuuc

SEQ ID NO: 1965803 - RNA, 19 nt, Artificial Sequence
  Description of Artificial Sequence: Synthetic oligonucleotide
uccuguuguggcaggccau

SEQ ID NO: 1965804 - RNA, 19 nt, Artificial Sequence
  Description of Artificial Sequence: Synthetic oligonucleotide
agccccuuuaggaacuugu

SEQ ID NO: 1965805 - RNA, 19 nt, Artificial Sequence
  Description of Artificial Sequence: Synthetic oligonucleotide
gcaguugugaugguuuuca

SEQ ID NO: 1965806 - RNA, 19 nt, Artificial Sequence
  Description of Artificial Sequence: Synthetic oligonucleotide
cuugcuaauggcagcaguu

SEQ ID NO: 1965807 - RNA, 19 nt, Artificial Sequence
  Description of Artificial Sequence: Synthetic oligonucleotide
cggaacuugagcaggguac

SEQ ID NO: 1965808 - RNA, 19 nt, Artificial Sequence
  Description of Artificial Sequence: Synthetic oligonucleotide
gcagaugagcauucgagcu

SEQ ID NO: 1965809 - RNA, 19 nt, Artificial Sequence
  Description of Artificial Sequence: Synthetic oligonucleotide
cccaucugcuucuucucgg

SEQ ID NO: 1965810 - RNA, 19 nt, Artificial Sequence
  Description of Artificial Sequence: Synthetic oligonucleotide
guuggaugauacgucugga

SEQ ID NO: 1965811 - RNA, 19 nt, Artificial Sequence
  Description of Artificial Sequence: Synthetic oligonucleotide
aucgaggcagguggcauga

SEQ ID NO: 1965812 - RNA, 19 nt, Artificial Sequence
  Description of Artificial Sequence: Synthetic oligonucleotide
gucuucugugaaguccuug

SEQ ID NO: 1965813 - RNA, 19 nt, Artificial Sequence
  Description of Artificial Sequence: Synthetic oligonucleotide
agggugaagaucacagcau

SEQ ID NO: 1965814 - RNA, 19 nt, Artificial Sequence
  Description of Artificial Sequence: Synthetic oligonucleotide
cuagugcagcuuucagcuc

SEQ ID NO: 1965815 - RNA, 19 nt, Artificial Sequence
  Description of Artificial Sequence: Synthetic oligonucleotide
cugaggggaagugcauccc

SEQ ID NO: 1965816 - RNA, 19 nt, Artificial Sequence
  Description of Artificial Sequence: Synthetic oligonucleotide
ugcuucuucucggcacuca

SEQ ID NO: 1965817 - RNA, 19 nt, Artificial Sequence
  Description of Artificial Sequence: Synthetic oligonucleotide
ugcccaugguguguguuaa

SEQ ID NO: 1965818 - RNA, 19 nt, Artificial Sequence
  Description of Artificial Sequence: Synthetic oligonucleotide
cccugguccgaccugagug

SEQ ID NO: 1965819 - RNA, 19 nt, Artificial Sequence
  Description of Artificial Sequence: Synthetic oligonucleotide
gcaugcacugccugagccc

SEQ ID NO: 1965820 - RNA, 19 nt, Artificial Sequence
  Description of Artificial Sequence: Synthetic oligonucleotide
aggccaucugggccuagca

SEQ ID NO: 1965821 - RNA, 19 nt, Artificial Sequence
  Description of Artificial Sequence: Synthetic oligonucleotide
agugccacucuggugcuau

SEQ ID NO: 1965822 - RNA, 19 nt, Artificial Sequence
  Description of Artificial Sequence: Synthetic oligonucleotide
caggaucagugcuucaucu

SEQ ID NO: 1965823 - RNA, 19 nt, Artificial Sequence
  Description of Artificial Sequence: Synthetic oligonucleotide
cugcaugcccacagugcug

SEQ ID NO: 1965824 - RNA, 19 nt, Artificial Sequence
  Description of Artificial Sequence: Synthetic oligonucleotide
augauacgucuggaggugu

SEQ ID NO: 1965825 - RNA, 19 nt, Artificial Sequence
  Description of Artificial Sequence: Synthetic oligonucleotide
agcagugcacuaguuggau

SEQ ID NO: 1965826 - RNA, 19 nt, Artificial Sequence
  Description of Artificial Sequence: Synthetic oligonucleotide
ugguccuggugcaguguaa

SEQ ID NO: 1965827 - RNA, 19 nt, Artificial Sequence
  Description of Artificial Sequence: Synthetic oligonucleotide
ccacucuggugcuaucugc

SEQ ID NO: 1965828 - RNA, 19 nt, Artificial Sequence
  Description of Artificial Sequence: Synthetic oligonucleotide
auaggcaggaucagugcuu

SEQ ID NO: 1965829 - RNA, 19 nt, Artificial Sequence
  Description of Artificial Sequence: Synthetic oligonucleotide
ggccaucugggccuagcag

SEQ ID NO: 1965830 - RNA, 19 nt, Artificial Sequence
  Description of Artificial Sequence: Synthetic oligonucleotide
gcggucuucugugaagucc

SEQ ID NO: 1965831 - RNA, 19 nt, Artificial Sequence
  Description of Artificial Sequence: Synthetic oligonucleotide
cagggcugggcuccauagc

SEQ ID NO: 1965832 - RNA, 19 nt, Artificial Sequence
  Description of Artificial Sequence: Synthetic oligonucleotide
acucagagaggaguugaua

SEQ ID NO: 1965833 - RNA, 19 nt, Artificial Sequence
  Description of Artificial Sequence: Synthetic oligonucleotide
ucccgcucuuggaugcagu

SEQ ID NO: 1965834 - RNA, 19 nt, Artificial Sequence
  Description of Artificial Sequence: Synthetic oligonucleotide
ugguccgaccugaguggca

SEQ ID NO: 1965835 - RNA, 19 nt, Artificial Sequence
  Description of Artificial Sequence: Synthetic oligonucleotide
cugccacuccacgaagccc

SEQ ID NO: 1965836 - RNA, 19 nt, Artificial Sequence
  Description of Artificial Sequence: Synthetic oligonucleotide
gagcaggguacuggucucc

SEQ ID NO: 1965837 - RNA, 19 nt, Artificial Sequence
  Description of Artificial Sequence: Synthetic oligonucleotide
guugauaggcaggaucagu

SEQ ID NO: 1965838 - RNA, 19 nt, Artificial Sequence
  Description of Artificial Sequence: Synthetic oligonucleotide
acccgggccaagguauagg

SEQ ID NO: 1965839 - RNA, 19 nt, Artificial Sequence
  Description of Artificial Sequence: Synthetic oligonucleotide
uucagccagaugcggucuu

SEQ ID NO: 1965840 - RNA, 19 nt, Artificial Sequence
  Description of Artificial Sequence: Synthetic oligonucleotide
ugcggucuucugugaaguc

SEQ ID NO: 1965841 - RNA, 19 nt, Artificial Sequence
  Description of Artificial Sequence: Synthetic oligonucleotide
ggcugcggcaugcacugcc

SEQ ID NO: 1965842 - RNA, 19 nt, Artificial Sequence
  Description of Artificial Sequence: Synthetic oligonucleotide
cauccagggugaagaucac

SEQ ID NO: 1965843 - RNA, 19 nt, Artificial Sequence
  Description of Artificial Sequence: Synthetic oligonucleotide
gugcuccuccgcuuccgag

SEQ ID NO: 1965844 - RNA, 19 nt, Artificial Sequence
  Description of Artificial Sequence: Synthetic oligonucleotide
auccuccucucgaccauuc

SEQ ID NO: 1965845 - RNA, 19 nt, Artificial Sequence
  Description of Artificial Sequence: Synthetic oligonucleotide
gcagugcacuaguuggaug

SEQ ID NO: 1965846 - RNA, 19 nt, Artificial Sequence
  Description of Artificial Sequence: Synthetic oligonucleotide
cugguccgaccugaguggc

SEQ ID NO: 1965847 - RNA, 19 nt, Artificial Sequence
  Description of Artificial Sequence: Synthetic oligonucleotide
guuuucaacugguccuggu

SEQ ID NO: 1965848 - RNA, 19 nt, Artificial Sequence
  Description of Artificial Sequence: Synthetic oligonucleotide
guagacccgggccaaggua

SEQ ID NO: 1965849 - RNA, 19 nt, Artificial Sequence
  Description of Artificial Sequence: Synthetic oligonucleotide
gcaugaaacugguugcugu

SEQ ID NO: 1965850 - RNA, 19 nt, Artificial Sequence
  Description of Artificial Sequence: Synthetic oligonucleotide
uuccgagccaggcgacgaa

SEQ ID NO: 1965851 - RNA, 19 nt, Artificial Sequence
  Description of Artificial Sequence: Synthetic oligonucleotide
cuugaggcccugguccgac

SEQ ID NO: 1965852 - RNA, 19 nt, Artificial Sequence
  Description of Artificial Sequence: Synthetic oligonucleotide
uacgucuggaggugucauu

SEQ ID NO: 1965853 - RNA, 19 nt, Artificial Sequence
  Description of Artificial Sequence: Synthetic oligonucleotide
cucccucaaccccguagac

SEQ ID NO: 1965854 - RNA, 19 nt, Artificial Sequence
  Description of Artificial Sequence: Synthetic oligonucleotide
cccgggccaagguauaggc

SEQ ID NO: 1965855 - RNA, 19 nt, Artificial Sequence
  Description of Artificial Sequence: Synthetic oligonucleotide
auacgucuggaggugucau

SEQ ID NO: 1965856 - RNA, 19 nt, Artificial Sequence
  Description of Artificial Sequence: Synthetic oligonucleotide
gagccaggcgacgaaucuc

SEQ ID NO: 1965857 - RNA, 19 nt, Artificial Sequence
  Description of Artificial Sequence: Synthetic oligonucleotide
cucacggcugccacaaacu

SEQ ID NO: 1965858 - RNA, 19 nt, Artificial Sequence
  Description of Artificial Sequence: Synthetic oligonucleotide
gcuccauagcuagugcagc

SEQ ID NO: 1965859 - RNA, 19 nt, Artificial Sequence
  Description of Artificial Sequence: Synthetic oligonucleotide
gacccgggccaagguauag

SEQ ID NO: 1965860 - RNA, 19 nt, Artificial Sequence
  Description of Artificial Sequence: Synthetic oligonucleotide
ccgcaucaaagguguaugc

SEQ ID NO: 1965861 - RNA, 19 nt, Artificial Sequence
  Description of Artificial Sequence: Synthetic oligonucleotide
acggugucauccaggguga

SEQ ID NO: 1965862 - RNA, 19 nt, Artificial Sequence
  Description of Artificial Sequence: Synthetic oligonucleotide
gcaggaucagugcuucauc

SEQ ID NO: 1965863 - RNA, 19 nt, Artificial Sequence
  Description of Artificial Sequence: Synthetic oligonucleotide
cucggaguuggggccagug

SEQ ID NO: 1965864 - RNA, 19 nt, Artificial Sequence
  Description of Artificial Sequence: Synthetic oligonucleotide
ccucacggcugccacaaac

SEQ ID NO: 1965865 - RNA, 19 nt, Artificial Sequence
  Description of Artificial Sequence: Synthetic oligonucleotide
cugccugagccccgccggg

SEQ ID NO: 1965866 - RNA, 19 nt, Artificial Sequence
  Description of Artificial Sequence: Synthetic oligonucleotide
cacucuggugcuaucugcu

SEQ ID NO: 1965867 - RNA, 19 nt, Artificial Sequence
  Description of Artificial Sequence: Synthetic oligonucleotide
accuuauagcugaggcuga

SEQ ID NO: 1965868 - RNA, 19 nt, Artificial Sequence
  Description of Artificial Sequence: Synthetic oligonucleotide
guccuucauggucagcugu

SEQ ID NO: 1965869 - RNA, 19 nt, Artificial Sequence
  Description of Artificial Sequence: Synthetic oligonucleotide
gaggcccugguccgaccug

SEQ ID NO: 1965870 - RNA, 19 nt, Artificial Sequence
  Description of Artificial Sequence: Synthetic oligonucleotide
gccacucuggugcuaucug

SEQ ID NO: 1965871 - RNA, 19 nt, Artificial Sequence
  Description of Artificial Sequence: Synthetic oligonucleotide
agugcacuaguuggaugau

SEQ ID NO: 1965872 - RNA, 19 nt, Artificial Sequence
  Description of Artificial Sequence: Synthetic oligonucleotide
gcaguguaacacucagaga

SEQ ID NO: 1965873 - RNA, 19 nt, Artificial Sequence
  Description of Artificial Sequence: Synthetic oligonucleotide
gugcaaaggccuggaaguc

SEQ ID NO: 1965874 - RNA, 19 nt, Artificial Sequence
  Description of Artificial Sequence: Synthetic oligonucleotide
gagaugggugggaagguau

SEQ ID NO: 1965875 - RNA, 19 nt, Artificial Sequence
  Description of Artificial Sequence: Synthetic oligonucleotide
ccguggcugccccacaucc

SEQ ID NO: 1965876 - RNA, 19 nt, Artificial Sequence
  Description of Artificial Sequence: Synthetic oligonucleotide
agcaggguacuggucucca

SEQ ID NO: 1965877 - RNA, 19 nt, Artificial Sequence
  Description of Artificial Sequence: Synthetic oligonucleotide
cagagaggucucccucaac

SEQ ID NO: 1965878 - RNA, 19 nt, Artificial Sequence
  Description of Artificial Sequence: Synthetic oligonucleotide
ccaagguauaggcuaggca

SEQ ID NO: 1965879 - RNA, 19 nt, Artificial Sequence
  Description of Artificial Sequence: Synthetic oligonucleotide
cuccauagcuagugcagcu

SEQ ID NO: 1965880 - RNA, 19 nt, Artificial Sequence
  Description of Artificial Sequence: Synthetic oligonucleotide
caaccccguagacccgggc

SEQ ID NO: 1965881 - RNA, 19 nt, Artificial Sequence
  Description of Artificial Sequence: Synthetic oligonucleotide
uaggcaggcguagcccgcu

SEQ ID NO: 1965882 - RNA, 19 nt, Artificial Sequence
  Description of Artificial Sequence: Synthetic oligonucleotide
gcgacgaaucucccucaag

SEQ ID NO: 1965883 - RNA, 19 nt, Artificial Sequence
  Description of Artificial Sequence: Synthetic oligonucleotide
agguaggagauggguggga

SEQ ID NO: 1965884 - RNA, 19 nt, Artificial Sequence
  Description of Artificial Sequence: Synthetic oligonucleotide
ggauaaggacucggaguug

SEQ ID NO: 1965885 - RNA, 19 nt, Artificial Sequence
  Description of Artificial Sequence: Synthetic oligonucleotide
cccgcaucaaagguguaug

SEQ ID NO: 1965886 - RNA, 19 nt, Artificial Sequence
  Description of Artificial Sequence: Synthetic oligonucleotide
acugguccuggugcagugu

SEQ ID NO: 1965887 - RNA, 19 nt, Artificial Sequence
  Description of Artificial Sequence: Synthetic oligonucleotide
gacucggaguuggggccag

SEQ ID NO: 1965888 - RNA, 19 nt, Artificial Sequence
  Description of Artificial Sequence: Synthetic oligonucleotide
gcauucgagcugucuagga

SEQ ID NO: 1965889 - RNA, 19 nt, Artificial Sequence
  Description of Artificial Sequence: Synthetic oligonucleotide
uccgagccaggcgacgaau

SEQ ID NO: 1965890 - RNA, 19 nt, Artificial Sequence
  Description of Artificial Sequence: Synthetic oligonucleotide
uucaugcgcucaggcacaa

SEQ ID NO: 1965891 - RNA, 19 nt, Artificial Sequence
  Description of Artificial Sequence: Synthetic oligonucleotide
agccccgccgggccacuuc

SEQ ID NO: 1965892 - RNA, 19 nt, Artificial Sequence
  Description of Artificial Sequence: Synthetic oligonucleotide
cucccucaagcaggccugg

SEQ ID NO: 1965893 - RNA, 19 nt, Artificial Sequence
  Description of Artificial Sequence: Synthetic oligonucleotide
ucgagcugucuaggacuug

SEQ ID NO: 1965894 - RNA, 19 nt, Artificial Sequence
  Description of Artificial Sequence: Synthetic oligonucleotide
ggacucagcccggaacuug

SEQ ID NO: 1965895 - RNA, 19 nt, Artificial Sequence
  Description of Artificial Sequence: Synthetic oligonucleotide
agccguggcugccccacau

SEQ ID NO: 1965896 - RNA, 19 nt, Artificial Sequence
  Description of Artificial Sequence: Synthetic oligonucleotide
acucagcccggaacuugag

SEQ ID NO: 1965897 - RNA, 19 nt, Artificial Sequence
  Description of Artificial Sequence: Synthetic oligonucleotide
caguugugaugguuuucaa

SEQ ID NO: 1965898 - RNA, 19 nt, Artificial Sequence
  Description of Artificial Sequence: Synthetic oligonucleotide
cuuccgagccaggcgacga

SEQ ID NO: 1965899 - RNA, 19 nt, Artificial Sequence
  Description of Artificial Sequence: Synthetic oligonucleotide
ccauaaaggcugcggcaug

SEQ ID NO: 1965900 - RNA, 19 nt, Artificial Sequence
  Description of Artificial Sequence: Synthetic oligonucleotide
ggggcccgcaucaaaggug

SEQ ID NO: 1965901 - RNA, 19 nt, Artificial Sequence
  Description of Artificial Sequence: Synthetic oligonucleotide
ggcguagcccgcugcugag

SEQ ID NO: 1965902 - RNA, 19 nt, Artificial Sequence
  Description of Artificial Sequence: Synthetic oligonucleotide
ccuuauagcugaggcugag

SEQ ID NO: 1965903 - RNA, 19 nt, Artificial Sequence
  Description of Artificial Sequence: Synthetic oligonucleotide
gguaucgaggcagguggca

SEQ ID NO: 1965904 - RNA, 19 nt, Artificial Sequence
  Description of Artificial Sequence: Synthetic oligonucleotide
cauuggggcccgcaucaaa

SEQ ID NO: 1965905 - RNA, 19 nt, Artificial Sequence
  Description of Artificial Sequence: Synthetic oligonucleotide
gcggcaugcacugccugag

SEQ ID NO: 1965906 - RNA, 19 nt, Artificial Sequence
  Description of Artificial Sequence: Synthetic oligonucleotide
aggcaggaucagugcuuca

SEQ ID NO: 1965907 - RNA, 19 nt, Artificial Sequence
  Description of Artificial Sequence: Synthetic oligonucleotide
ggggaagugcauccccauc

SEQ ID NO: 1965908 - RNA, 19 nt, Artificial Sequence
  Description of Artificial Sequence: Synthetic oligonucleotide
aggaguugauaggcaggau

SEQ ID NO: 1965909 - RNA, 19 nt, Artificial Sequence
  Description of Artificial Sequence: Synthetic oligonucleotide
acuugaggcccugguccga

SEQ ID NO: 1965910 - RNA, 19 nt, Artificial Sequence
  Description of Artificial Sequence: Synthetic oligonucleotide
cugguccuggugcagugua

SEQ ID NO: 1965911 - RNA, 19 nt, Artificial Sequence
  Description of Artificial Sequence: Synthetic oligonucleotide
ggcacucaccacaaggaua

SEQ ID NO: 1965912 - RNA, 19 nt, Artificial Sequence
  Description of Artificial Sequence: Synthetic oligonucleotide
gucccgcucuuggaugcag

SEQ ID NO: 1965913 - RNA, 19 nt, Artificial Sequence
  Description of Artificial Sequence: Synthetic oligonucleotide
agugcagcuuucagcucau

SEQ ID NO: 1965914 - RNA, 19 nt, Artificial Sequence
  Description of Artificial Sequence: Synthetic oligonucleotide
cucaggcacaauggacuca

SEQ ID NO: 1965915 - RNA, 19 nt, Artificial Sequence
  Description of Artificial Sequence: Synthetic oligonucleotide
cagguggcaugaaacuggu

SEQ ID NO: 1965916 - RNA, 19 nt, Artificial Sequence
  Description of Artificial Sequence: Synthetic oligonucleotide
ggaacuugagcaggguacu

SEQ ID NO: 1965917 - RNA, 19 nt, Artificial Sequence
  Description of Artificial Sequence: Synthetic oligonucleotide
gaugagcauucgagcuguc

SEQ ID NO: 1965918 - RNA, 19 nt, Artificial Sequence
  Description of Artificial Sequence: Synthetic oligonucleotide
aggcaggcguagcccgcug

SEQ ID NO: 1965919 - RNA, 19 nt, Artificial Sequence
  Description of Artificial Sequence: Synthetic oligonucleotide
ggaugcagugggucaucuc

SEQ ID NO: 1965920 - RNA, 19 nt, Artificial Sequence
  Description of Artificial Sequence: Synthetic oligonucleotide
caucugggccuagcagaug

SEQ ID NO: 1965921 - RNA, 19 nt, Artificial Sequence
  Description of Artificial Sequence: Synthetic oligonucleotide
cccgcucuuggaugcagug

SEQ ID NO: 1965922 - RNA, 19 nt, Artificial Sequence
  Description of Artificial Sequence: Synthetic oligonucleotide
uggagccguggcugcccca

SEQ ID NO: 1965923 - RNA, 19 nt, Artificial Sequence
  Description of Artificial Sequence: Synthetic oligonucleotide
ccaucugccacuccacgaa

SEQ ID NO: 1965924 - RNA, 19 nt, Artificial Sequence
  Description of Artificial Sequence: Synthetic oligonucleotide
aggugucauugagguagga

SEQ ID NO: 1965925 - RNA, 19 nt, Artificial Sequence
  Description of Artificial Sequence: Synthetic oligonucleotide
aagcaggccuggagccgug

SEQ ID NO: 1965926 - RNA, 19 nt, Artificial Sequence
  Description of Artificial Sequence: Synthetic oligonucleotide
ccgccgggccacuucagag

SEQ ID NO: 1965927 - RNA, 19 nt, Artificial Sequence
  Description of Artificial Sequence: Synthetic oligonucleotide
ccgcucuuggaugcagugg

SEQ ID NO: 1965928 - RNA, 19 nt, Artificial Sequence
  Description of Artificial Sequence: Synthetic oligonucleotide
gggugaagaucacagcauu

SEQ ID NO: 1965929 - RNA, 19 nt, Artificial Sequence
  Description of Artificial Sequence: Synthetic oligonucleotide
cuuggaugcagugggucau

SEQ ID NO: 1965930 - RNA, 19 nt, Artificial Sequence
  Description of Artificial Sequence: Synthetic oligonucleotide
caggcguagcccgcugcug

SEQ ID NO: 1965931 - RNA, 19 nt, Artificial Sequence
  Description of Artificial Sequence: Synthetic oligonucleotide
ccccauaaaggcugcggca

SEQ ID NO: 1965932 - RNA, 19 nt, Artificial Sequence
  Description of Artificial Sequence: Synthetic oligonucleotide
gguccgaccugaguggcaa

SEQ ID NO: 1965933 - RNA, 19 nt, Artificial Sequence
  Description of Artificial Sequence: Synthetic oligonucleotide
guaucgaggcagguggcau

SEQ ID NO: 1965934 - RNA, 19 nt, Artificial Sequence
  Description of Artificial Sequence: Synthetic oligonucleotide
ccucaaccccguagacccg

SEQ ID NO: 1965935 - RNA, 19 nt, Artificial Sequence
  Description of Artificial Sequence: Synthetic oligonucleotide
gcgcucaggcacaauggac

SEQ ID NO: 1965936 - RNA, 19 nt, Artificial Sequence
  Description of Artificial Sequence: Synthetic oligonucleotide
ccuggugcaguguaacacu

SEQ ID NO: 1965937 - RNA, 19 nt, Artificial Sequence
  Description of Artificial Sequence: Synthetic oligonucleotide
ccacaaggauaaggacucg

SEQ ID NO: 1965938 - RNA, 19 nt, Artificial Sequence
  Description of Artificial Sequence: Synthetic oligonucleotide
gugcacuaguuggaugaua

SEQ ID NO: 1965939 - RNA, 19 nt, Artificial Sequence
  Description of Artificial Sequence: Synthetic oligonucleotide
cuaucugcugggcgaugcu

SEQ ID NO: 1965940 - RNA, 19 nt, Artificial Sequence
  Description of Artificial Sequence: Synthetic oligonucleotide
ccaccuuugucugcccaug

SEQ ID NO: 1965941 - RNA, 19 nt, Artificial Sequence
  Description of Artificial Sequence: Synthetic oligonucleotide
ggggaaagcugugccucac

SEQ ID NO: 1965942 - RNA, 19 nt, Artificial Sequence
  Description of Artificial Sequence: Synthetic oligonucleotide
ccguagacccgggccaagg

SEQ ID NO: 1965943 - RNA, 19 nt, Artificial Sequence
  Description of Artificial Sequence: Synthetic oligonucleotide
cagccccuuuaggaacuug

SEQ ID NO: 1965944 - RNA, 19 nt, Artificial Sequence
  Description of Artificial Sequence: Synthetic oligonucleotide
cacucagagaggaguugau

SEQ ID NO: 1965945 - RNA, 19 nt, Artificial Sequence
  Description of Artificial Sequence: Synthetic oligonucleotide
ccgagccaggcgacgaauc

SEQ ID NO: 1965946 - RNA, 19 nt, Artificial Sequence
  Description of Artificial Sequence: Synthetic oligonucleotide
aggucucccucaaccccgu

SEQ ID NO: 1965947 - RNA, 19 nt, Artificial Sequence
  Description of Artificial Sequence: Synthetic oligonucleotide
aggccacaugcaccuuaua

SEQ ID NO: 1965948 - RNA, 19 nt, Artificial Sequence
  Description of Artificial Sequence: Synthetic oligonucleotide
cugagccccgccgggccac

SEQ ID NO: 1965949 - RNA, 19 nt, Artificial Sequence
  Description of Artificial Sequence: Synthetic oligonucleotide
gccuagcagaugagcauuc

SEQ ID NO: 1965950 - RNA, 19 nt, Artificial Sequence
  Description of Artificial Sequence: Synthetic oligonucleotide
ccccuuuaggaacuugucu

SEQ ID NO: 1965951 - RNA, 19 nt, Artificial Sequence
  Description of Artificial Sequence: Synthetic oligonucleotide
gcguagcccgcugcugagg

SEQ ID NO: 1965952 - RNA, 19 nt, Artificial Sequence
  Description of Artificial Sequence: Synthetic oligonucleotide
cauccccaucuccugugcu

SEQ ID NO: 1965953 - RNA, 19 nt, Artificial Sequence
  Description of Artificial Sequence: Synthetic oligonucleotide
ccucucgaccauucagcca

SEQ ID NO: 1965954 - RNA, 19 nt, Artificial Sequence
  Description of Artificial Sequence: Synthetic oligonucleotide
ccauucagccagaugcggu

SEQ ID NO: 1965955 - RNA, 19 nt, Artificial Sequence
  Description of Artificial Sequence: Synthetic oligonucleotide
ggcaggaucagugcuucau

SEQ ID NO: 1965956 - RNA, 19 nt, Artificial Sequence
  Description of Artificial Sequence: Synthetic oligonucleotide
gggccuagcagaugagcau

SEQ ID NO: 1965957 - RNA, 19 nt, Artificial Sequence
  Description of Artificial Sequence: Synthetic oligonucleotide
ucgaggcagguggcaugaa

SEQ ID NO: 1965958 - RNA, 19 nt, Artificial Sequence
  Description of Artificial Sequence: Synthetic oligonucleotide
gugccacucuggugcuauc

SEQ ID NO: 1965959 - RNA, 19 nt, Artificial Sequence
  Description of Artificial Sequence: Synthetic oligonucleotide
gcugugcaaaggccuggaa

SEQ ID NO: 1965960 - RNA, 19 nt, Artificial Sequence
  Description of Artificial Sequence: Synthetic oligonucleotide
caggccuggagccguggcu

SEQ ID NO: 1965961 - RNA, 19 nt, Artificial Sequence
  Description of Artificial Sequence: Synthetic oligonucleotide
ggacucggaguuggggcca

SEQ ID NO: 1965962 - RNA, 19 nt, Artificial Sequence
  Description of Artificial Sequence: Synthetic oligonucleotide
agacccgggccaagguaua

SEQ ID NO: 1965963 - RNA, 19 nt, Artificial Sequence
  Description of Artificial Sequence: Synthetic oligonucleotide
ggccuggaagucccgcucu

SEQ ID NO: 1965964 - RNA, 19 nt, Artificial Sequence
  Description of Artificial Sequence: Synthetic oligonucleotide
gcuguccuucauggucagc

SEQ ID NO: 1965965 - RNA, 19 nt, Artificial Sequence
  Description of Artificial Sequence: Synthetic oligonucleotide
cguagcccgcugcugagga

SEQ ID NO: 1965966 - RNA, 19 nt, Artificial Sequence
  Description of Artificial Sequence: Synthetic oligonucleotide
cuguuguggcaggccaucu

SEQ ID NO: 1965967 - RNA, 19 nt, Artificial Sequence
  Description of Artificial Sequence: Synthetic oligonucleotide
ggguacuggucuccacacu

SEQ ID NO: 1965968 - RNA, 19 nt, Artificial Sequence
  Description of Artificial Sequence: Synthetic oligonucleotide
cggucuucugugaaguccu

SEQ ID NO: 1965969 - RNA, 19 nt, Artificial Sequence
  Description of Artificial Sequence: Synthetic oligonucleotide
gcaggcguagcccgcugcu

SEQ ID NO: 1965970 - RNA, 19 nt, Artificial Sequence
  Description of Artificial Sequence: Synthetic oligonucleotide
acucggaguuggggccagu

SEQ ID NO: 1965971 - RNA, 19 nt, Artificial Sequence
  Description of Artificial Sequence: Synthetic oligonucleotide
ggccuagcagaugagcauu

SEQ ID NO: 1965972 - RNA, 19 nt, Artificial Sequence
  Description of Artificial Sequence: Synthetic oligonucleotide
gccguggcugccccacauc

SEQ ID NO: 1965973 - RNA, 19 nt, Artificial Sequence
  Description of Artificial Sequence: Synthetic oligonucleotide
gugcuaucugcugggcgau

SEQ ID NO: 1965974 - RNA, 19 nt, Artificial Sequence
  Description of Artificial Sequence: Synthetic oligonucleotide
gcgaugcuguccuuuccau

SEQ ID NO: 1965975 - RNA, 19 nt, Artificial Sequence
  Description of Artificial Sequence: Synthetic oligonucleotide
cccauaaaggcugcggcau

SEQ ID NO: 1965976 - RNA, 19 nt, Artificial Sequence
  Description of Artificial Sequence: Synthetic oligonucleotide
gccaccuuugucugcccau

SEQ ID NO: 1965977 - RNA, 19 nt, Artificial Sequence
  Description of Artificial Sequence: Synthetic oligonucleotide
ccaucugggccuagcagau

SEQ ID NO: 1965978 - RNA, 19 nt, Artificial Sequence
  Description of Artificial Sequence: Synthetic oligonucleotide
ccauagcuagugcagcuuu

SEQ ID NO: 1965979 - RNA, 19 nt, Artificial Sequence
  Description of Artificial Sequence: Synthetic oligonucleotide
ccgaccugaguggcaauga

SEQ ID NO: 1965980 - RNA, 19 nt, Artificial Sequence
  Description of Artificial Sequence: Synthetic oligonucleotide
ccuuuccaucugccuguuc

SEQ ID NO: 1965981 - RNA, 19 nt, Artificial Sequence
  Description of Artificial Sequence: Synthetic oligonucleotide
guagcccgcugcugaggau

SEQ ID NO: 1965982 - RNA, 19 nt, Artificial Sequence
  Description of Artificial Sequence: Synthetic oligonucleotide
gccccgccgggccacuuca

SEQ ID NO: 1965983 - RNA, 19 nt, Artificial Sequence
  Description of Artificial Sequence: Synthetic oligonucleotide
gucugcccauggugugugu

SEQ ID NO: 1965984 - RNA, 19 nt, Artificial Sequence
  Description of Artificial Sequence: Synthetic oligonucleotide
ggcccugguccgaccugag

SEQ ID NO: 1965985 - RNA, 19 nt, Artificial Sequence
  Description of Artificial Sequence: Synthetic oligonucleotide
cuccugugcuccuccgcuu

SEQ ID NO: 1965986 - RNA, 19 nt, Artificial Sequence
  Description of Artificial Sequence: Synthetic oligonucleotide
cugggcgaugcuguccuuu

SEQ ID NO: 1965987 - RNA, 19 nt, Artificial Sequence
  Description of Artificial Sequence: Synthetic oligonucleotide
ccaggcgacgaaucucccu

SEQ ID NO: 1965988 - RNA, 19 nt, Artificial Sequence
  Description of Artificial Sequence: Synthetic oligonucleotide
cgcuuccgagccaggcgac

SEQ ID NO: 1965989 - RNA, 19 nt, Artificial Sequence
  Description of Artificial Sequence: Synthetic oligonucleotide
cgccgggccacuucagaga

SEQ ID NO: 1965990 - RNA, 19 nt, Artificial Sequence
  Description of Artificial Sequence: Synthetic oligonucleotide
gcccgcaucaaagguguau

SEQ ID NO: 1965991 - RNA, 19 nt, Artificial Sequence
  Description of Artificial Sequence: Synthetic oligonucleotide
gcucuuggaugcagugggu

SEQ ID NO: 1965992 - RNA, 19 nt, Artificial Sequence
  Description of Artificial Sequence: Synthetic oligonucleotide
guccgaccugaguggcaau

SEQ ID NO: 1965993 - RNA, 19 nt, Artificial Sequence
  Description of Artificial Sequence: Synthetic oligonucleotide
cauccuccucucgaccauu

SEQ ID NO: 1965994 - RNA, 19 nt, Artificial Sequence
  Description of Artificial Sequence: Synthetic oligonucleotide
cccgccgggccacuucaga

SEQ ID NO: 1965995 - RNA, 19 nt, Artificial Sequence
  Description of Artificial Sequence: Synthetic oligonucleotide
ccgggccaagguauaggcu

SEQ ID NO: 1965996 - RNA, 19 nt, Artificial Sequence
  Description of Artificial Sequence: Synthetic oligonucleotide
ccacaaacucagccacggu

SEQ ID NO: 1965997 - RNA, 19 nt, Artificial Sequence
  Description of Artificial Sequence: Synthetic oligonucleotide
ccccgccgggccacuucag

SEQ ID NO: 1965998 - RNA, 19 nt, Artificial Sequence
  Description of Artificial Sequence: Synthetic oligonucleotide
gcccugguccgaccugagu

SEQ ID NO: 1965999 - RNA, 19 nt, Artificial Sequence
  Description of Artificial Sequence: Synthetic oligonucleotide
ggucucccucaaccccgua

SEQ ID NO: 1966000 - RNA, 19 nt, Artificial Sequence
  Description of Artificial Sequence: Synthetic oligonucleotide
cagugccacucuggugcua

SEQ ID NO: 1966001 - RNA, 19 nt, Artificial Sequence
  Description of Artificial Sequence: Synthetic oligonucleotide
cguagacccgggccaaggu

SEQ ID NO: 1966002 - RNA, 19 nt, Artificial Sequence
  Description of Artificial Sequence: Synthetic oligonucleotide
cgaccugaguggcaaugau

SEQ ID NO: 1966003 - RNA, 19 nt, Artificial Sequence
  Description of Artificial Sequence: Synthetic oligonucleotide
cggcacucaccacaaggau

SEQ ID NO: 1966004 - RNA, 19 nt, Artificial Sequence
  Description of Artificial Sequence: Synthetic oligonucleotide
gccucacggcugccacaaa

SEQ ID NO: 1966005 - RNA, 19 nt, Artificial Sequence
  Description of Artificial Sequence: Synthetic oligonucleotide
ggcccgcaucaaaggugua

SEQ ID NO: 1966006 - RNA, 19 nt, Artificial Sequence
  Description of Artificial Sequence: Synthetic oligonucleotide
ccuccagggcugggcucca

SEQ ID NO: 1966007 - RNA, 19 nt, Artificial Sequence
  Description of Artificial Sequence: Synthetic oligonucleotide
gagccccgccgggccacuu

SEQ ID NO: 1966008 - RNA, 19 nt, Artificial Sequence
  Description of Artificial Sequence: Synthetic oligonucleotide
gauacuauaaggcaaaggc

SEQ ID NO: 1966009 - RNA, 19 nt, Artificial Sequence
  Description of Artificial Sequence: Synthetic oligonucleotide
aaaaggaauaauccgagag

SEQ ID NO: 1966010 - RNA, 19 nt, Artificial Sequence
  Description of Artificial Sequence: Synthetic oligonucleotide
aauucuuucaucuguaaug

SEQ ID NO: 1966011 - RNA, 19 nt, Artificial Sequence
  Description of Artificial Sequence: Synthetic oligonucleotide
aaacagaacuucuaccgcc

SEQ ID NO: 1966012 - RNA, 19 nt, Artificial Sequence
  Description of Artificial Sequence: Synthetic oligonucleotide
uuggagauauuuaagacag

SEQ ID NO: 1966013 - RNA, 19 nt, Artificial Sequence
  Description of Artificial Sequence: Synthetic oligonucleotide
ugacaugugacaaaugagg

SEQ ID NO: 1966014 - RNA, 19 nt, Artificial Sequence
  Description of Artificial Sequence: Synthetic oligonucleotide
aauuuuccauaauaucacc

SEQ ID NO: 1966015 - RNA, 19 nt, Artificial Sequence
  Description of Artificial Sequence: Synthetic oligonucleotide
aggaacaagaguuucacac

SEQ ID NO: 1966016 - RNA, 19 nt, Artificial Sequence
  Description of Artificial Sequence: Synthetic oligonucleotide
uuuuaaaguuuuaaaagga

SEQ ID NO: 1966017 - RNA, 19 nt, Artificial Sequence
  Description of Artificial Sequence: Synthetic oligonucleotide
acaaaugaggaaaagaugg

SEQ ID NO: 1966018 - RNA, 19 nt, Artificial Sequence
  Description of Artificial Sequence: Synthetic oligonucleotide
uaaacaaacagacuucuga

SEQ ID NO: 1966019 - RNA, 19 nt, Artificial Sequence
  Description of Artificial Sequence: Synthetic oligonucleotide
uuaaaaggaauaauccgag

SEQ ID NO: 1966020 - RNA, 19 nt, Artificial Sequence
  Description of Artificial Sequence: Synthetic oligonucleotide
aagacagucccugugauac

SEQ ID NO: 1966021 - RNA, 19 nt, Artificial Sequence
  Description of Artificial Sequence: Synthetic oligonucleotide
ucugauaggauacuauaag

SEQ ID NO: 1966022 - RNA, 19 nt, Artificial Sequence
  Description of Artificial Sequence: Synthetic oligonucleotide
uuuugagacagccaggaug

SEQ ID NO: 1966023 - RNA, 19 nt, Artificial Sequence
  Description of Artificial Sequence: Synthetic oligonucleotide
uuuaaucugcucuuggucc

SEQ ID NO: 1966024 - RNA, 19 nt, Artificial Sequence
  Description of Artificial Sequence: Synthetic oligonucleotide
ucuuucaucuguaaugaag

SEQ ID NO: 1966025 - RNA, 19 nt, Artificial Sequence
  Description of Artificial Sequence: Synthetic oligonucleotide
cuucugacgaaucugauag

SEQ ID NO: 1966026 - RNA, 19 nt, Artificial Sequence
  Description of Artificial Sequence: Synthetic oligonucleotide
uacuauaaggcaaaggcac

SEQ ID NO: 1966027 - RNA, 19 nt, Artificial Sequence
  Description of Artificial Sequence: Synthetic oligonucleotide
aaggcaaaggcacucggac

SEQ ID NO: 1966028 - RNA, 19 nt, Artificial Sequence
  Description of Artificial Sequence: Synthetic oligonucleotide
uguaaugaagaugucaaag

SEQ ID NO: 1966029 - RNA, 19 nt, Artificial Sequence
  Description of Artificial Sequence: Synthetic oligonucleotide
uguuucuucacacucgucu

SEQ ID NO: 1966030 - RNA, 19 nt, Artificial Sequence
  Description of Artificial Sequence: Synthetic oligonucleotide
ucuuuggacagauucuugg

SEQ ID NO: 1966031 - RNA, 19 nt, Artificial Sequence
  Description of Artificial Sequence: Synthetic oligonucleotide
ucuguaaugaagaugucaa

SEQ ID NO: 1966032 - RNA, 19 nt, Artificial Sequence
  Description of Artificial Sequence: Synthetic oligonucleotide
aaaggaauaauccgagaga

SEQ ID NO: 1966033 - RNA, 19 nt, Artificial Sequence
  Description of Artificial Sequence: Synthetic oligonucleotide
uuugagacagccaggaugu

SEQ ID NO: 1966034 - RNA, 19 nt, Artificial Sequence
  Description of Artificial Sequence: Synthetic oligonucleotide
uguuuggagauauuuaaga

SEQ ID NO: 1966035 - RNA, 19 nt, Artificial Sequence
  Description of Artificial Sequence: Synthetic oligonucleotide
aaaagaugggaagggaaac

SEQ ID NO: 1966036 - RNA, 19 nt, Artificial Sequence
  Description of Artificial Sequence: Synthetic oligonucleotide
agauacuggaacuuucuuc

SEQ ID NO: 1966037 - RNA, 19 nt, Artificial Sequence
  Description of Artificial Sequence: Synthetic oligonucleotide
gauaggauacuauaaggca

SEQ ID NO: 1966038 - RNA, 19 nt, Artificial Sequence
  Description of Artificial Sequence: Synthetic oligonucleotide
guccagauguuccagagcg

SEQ ID NO: 1966039 - RNA, 19 nt, Artificial Sequence
  Description of Artificial Sequence: Synthetic oligonucleotide
augaagaugucaaagcuac

SEQ ID NO: 1966040 - RNA, 19 nt, Artificial Sequence
  Description of Artificial Sequence: Synthetic oligonucleotide
cucauucccauucauaagc

SEQ ID NO: 1966041 - RNA, 19 nt, Artificial Sequence
  Description of Artificial Sequence: Synthetic oligonucleotide
uuucuuuucaugcuacgga

SEQ ID NO: 1966042 - RNA, 19 nt, Artificial Sequence
  Description of Artificial Sequence: Synthetic oligonucleotide
ugcuaagucauccuucuug

SEQ ID NO: 1966043 - RNA, 19 nt, Artificial Sequence
  Description of Artificial Sequence: Synthetic oligonucleotide
uuuucauccugacauguga

SEQ ID NO: 1966044 - RNA, 19 nt, Artificial Sequence
  Description of Artificial Sequence: Synthetic oligonucleotide
uuuuacuucuauugguacc

SEQ ID NO: 1966045 - RNA, 19 nt, Artificial Sequence
  Description of Artificial Sequence: Synthetic oligonucleotide
uuuucaacaaugugcugag

SEQ ID NO: 1966046 - RNA, 19 nt, Artificial Sequence
  Description of Artificial Sequence: Synthetic oligonucleotide
acaaacagacuucugacga

SEQ ID NO: 1966047 - RNA, 19 nt, Artificial Sequence
  Description of Artificial Sequence: Synthetic oligonucleotide
uuggacauuuuccuuaaca

SEQ ID NO: 1966048 - RNA, 19 nt, Artificial Sequence
  Description of Artificial Sequence: Synthetic oligonucleotide
uucaacaaugugcugaguc

SEQ ID NO: 1966049 - RNA, 19 nt, Artificial Sequence
  Description of Artificial Sequence: Synthetic oligonucleotide
uucgaauucuuucaucugu

SEQ ID NO: 1966050 - RNA, 19 nt, Artificial Sequence
  Description of Artificial Sequence: Synthetic oligonucleotide
ugauacaucggucaaucuc

SEQ ID NO: 1966051 - RNA, 19 nt, Artificial Sequence
  Description of Artificial Sequence: Synthetic oligonucleotide
uuuacuucuauugguacca

SEQ ID NO: 1966052 - RNA, 19 nt, Artificial Sequence
  Description of Artificial Sequence: Synthetic oligonucleotide
uucucauucccauucauaa

SEQ ID NO: 1966053 - RNA, 19 nt, Artificial Sequence
  Description of Artificial Sequence: Synthetic oligonucleotide
ucuaccgcccuuuuaaucu

SEQ ID NO: 1966054 - RNA, 19 nt, Artificial Sequence
  Description of Artificial Sequence: Synthetic oligonucleotide
aaucugauaggauacuaua

SEQ ID NO: 1966055 - RNA, 19 nt, Artificial Sequence
  Description of Artificial Sequence: Synthetic oligonucleotide
uucuauugguaccaguugu

SEQ ID NO: 1966056 - RNA, 19 nt, Artificial Sequence
  Description of Artificial Sequence: Synthetic oligonucleotide
aaagcuacccaagaggcga

SEQ ID NO: 1966057 - RNA, 19 nt, Artificial Sequence
  Description of Artificial Sequence: Synthetic oligonucleotide
augaggaaaagaugggaag

SEQ ID NO: 1966058 - RNA, 19 nt, Artificial Sequence
  Description of Artificial Sequence: Synthetic oligonucleotide
caaaugaggaaaagauggg

SEQ ID NO: 1966059 - RNA, 19 nt, Artificial Sequence
  Description of Artificial Sequence: Synthetic oligonucleotide
aacagaacuucuaccgccc

SEQ ID NO: 1966060 - RNA, 19 nt, Artificial Sequence
  Description of Artificial Sequence: Synthetic oligonucleotide
auauuuaagacagucccug

SEQ ID NO: 1966061 - RNA, 19 nt, Artificial Sequence
  Description of Artificial Sequence: Synthetic oligonucleotide
aaggaauaauccgagagau

SEQ ID NO: 1966062 - RNA, 19 nt, Artificial Sequence
  Description of Artificial Sequence: Synthetic oligonucleotide
aagaugucaaagcuaccca

SEQ ID NO: 1966063 - RNA, 19 nt, Artificial Sequence
  Description of Artificial Sequence: Synthetic oligonucleotide
acaucggucaaucucuuug

SEQ ID NO: 1966064 - RNA, 19 nt, Artificial Sequence
  Description of Artificial Sequence: Synthetic oligonucleotide
uuuuccauaauaucaccau

SEQ ID NO: 1966065 - RNA, 19 nt, Artificial Sequence
  Description of Artificial Sequence: Synthetic oligonucleotide
aaggauaagguguuuucau

SEQ ID NO: 1966066 - RNA, 19 nt, Artificial Sequence
  Description of Artificial Sequence: Synthetic oligonucleotide
guuuggagauauuuaagac

SEQ ID NO: 1966067 - RNA, 19 nt, Artificial Sequence
  Description of Artificial Sequence: Synthetic oligonucleotide
aagguguuuucauccugac

SEQ ID NO: 1966068 - RNA, 19 nt, Artificial Sequence
  Description of Artificial Sequence: Synthetic oligonucleotide
ucuauugguaccaguugug

SEQ ID NO: 1966069 - RNA, 19 nt, Artificial Sequence
  Description of Artificial Sequence: Synthetic oligonucleotide
uggaauuguuucuucacac

SEQ ID NO: 1966070 - RNA, 19 nt, Artificial Sequence
  Description of Artificial Sequence: Synthetic oligonucleotide
auucauaagcaacucauuu

SEQ ID NO: 1966071 - RNA, 19 nt, Artificial Sequence
  Description of Artificial Sequence: Synthetic oligonucleotide
auuuaagacagucccugug

SEQ ID NO: 1966072 - RNA, 19 nt, Artificial Sequence
  Description of Artificial Sequence: Synthetic oligonucleotide
uaagguguuuucauccuga

SEQ ID NO: 1966073 - RNA, 19 nt, Artificial Sequence
  Description of Artificial Sequence: Synthetic oligonucleotide
aggauaagguguuuucauc

SEQ ID NO: 1966074 - RNA, 19 nt, Artificial Sequence
  Description of Artificial Sequence: Synthetic oligonucleotide
aacaaugugcugagucucc

SEQ ID NO: 1966075 - RNA, 19 nt, Artificial Sequence
  Description of Artificial Sequence: Synthetic oligonucleotide
caggauguuuucaacaaug

SEQ ID NO: 1966076 - RNA, 19 nt, Artificial Sequence
  Description of Artificial Sequence: Synthetic oligonucleotide
aauaauccgagagauguuu

SEQ ID NO: 1966077 - RNA, 19 nt, Artificial Sequence
  Description of Artificial Sequence: Synthetic oligonucleotide
uauaaggcaaaggcacucg

SEQ ID NO: 1966078 - RNA, 19 nt, Artificial Sequence
  Description of Artificial Sequence: Synthetic oligonucleotide
ucuugcaucuucauguuuu

SEQ ID NO: 1966079 - RNA, 19 nt, Artificial Sequence
  Description of Artificial Sequence: Synthetic oligonucleotide
uuucuugcccuuaagggua

SEQ ID NO: 1966080 - RNA, 19 nt, Artificial Sequence
  Description of Artificial Sequence: Synthetic oligonucleotide
uucucaguuuucaggaaca

SEQ ID NO: 1966081 - RNA, 19 nt, Artificial Sequence
  Description of Artificial Sequence: Synthetic oligonucleotide
gagauauuuaagacagucc

SEQ ID NO: 1966082 - RNA, 19 nt, Artificial Sequence
  Description of Artificial Sequence: Synthetic oligonucleotide
ucuuucgcuggaauuuucc

SEQ ID NO: 1966083 - RNA, 19 nt, Artificial Sequence
  Description of Artificial Sequence: Synthetic oligonucleotide
cuuaaggguaucuggauca

SEQ ID NO: 1966084 - RNA, 19 nt, Artificial Sequence
  Description of Artificial Sequence: Synthetic oligonucleotide
uuggacagauucuuggcca

SEQ ID NO: 1966085 - RNA, 19 nt, Artificial Sequence
  Description of Artificial Sequence: Synthetic oligonucleotide
ugacgaaucugauaggaua

SEQ ID NO: 1966086 - RNA, 19 nt, Artificial Sequence
  Description of Artificial Sequence: Synthetic oligonucleotide
acuucuaccgcccuuuuaa

SEQ ID NO: 1966087 - RNA, 19 nt, Artificial Sequence
  Description of Artificial Sequence: Synthetic oligonucleotide
ucugacgaaucugauagga

SEQ ID NO: 1966088 - RNA, 19 nt, Artificial Sequence
  Description of Artificial Sequence: Synthetic oligonucleotide
auaaggcaaaggcacucgg

SEQ ID NO: 1966089 - RNA, 19 nt, Artificial Sequence
  Description of Artificial Sequence: Synthetic oligonucleotide
guuuucaacaaugugcuga

SEQ ID NO: 1966090 - RNA, 19 nt, Artificial Sequence
  Description of Artificial Sequence: Synthetic oligonucleotide
uaggauacuauaaggcaaa

SEQ ID NO: 1966091 - RNA, 19 nt, Artificial Sequence
  Description of Artificial Sequence: Synthetic oligonucleotide
uucuuuucaugcuacggaa

SEQ ID NO: 1966092 - RNA, 19 nt, Artificial Sequence
  Description of Artificial Sequence: Synthetic oligonucleotide
uucauaagcaacucauuuu

SEQ ID NO: 1966093 - RNA, 19 nt, Artificial Sequence
  Description of Artificial Sequence: Synthetic oligonucleotide
ugugcugagucuccauucc

SEQ ID NO: 1966094 - RNA, 19 nt, Artificial Sequence
  Description of Artificial Sequence: Synthetic oligonucleotide
uuaaucugcucuuggucca

SEQ ID NO: 1966095 - RNA, 19 nt, Artificial Sequence
  Description of Artificial Sequence: Synthetic oligonucleotide
uccauaauaucaccauuaa

SEQ ID NO: 1966096 - RNA, 19 nt, Artificial Sequence
  Description of Artificial Sequence: Synthetic oligonucleotide
auguuuucaacaaugugcu

SEQ ID NO: 1966097 - RNA, 19 nt, Artificial Sequence
  Description of Artificial Sequence: Synthetic oligonucleotide
ucaugcuacggaaggauaa

SEQ ID NO: 1966098 - RNA, 19 nt, Artificial Sequence
  Description of Artificial Sequence: Synthetic oligonucleotide
aguacugcaagaaccaugu

SEQ ID NO: 1966099 - RNA, 19 nt, Artificial Sequence
  Description of Artificial Sequence: Synthetic oligonucleotide
ucucauucccauucauaag

SEQ ID NO: 1966100 - RNA, 19 nt, Artificial Sequence
  Description of Artificial Sequence: Synthetic oligonucleotide
caaacagaacuucuaccgc

SEQ ID NO: 1966101 - RNA, 19 nt, Artificial Sequence
  Description of Artificial Sequence: Synthetic oligonucleotide
agauguuccagagcggccg

SEQ ID NO: 1966102 - RNA, 19 nt, Artificial Sequence
  Description of Artificial Sequence: Synthetic oligonucleotide
ugugauacaucggucaauc

SEQ ID NO: 1966103 - RNA, 19 nt, Artificial Sequence
  Description of Artificial Sequence: Synthetic oligonucleotide
uauugguaccaguugugga

SEQ ID NO: 1966104 - RNA, 19 nt, Artificial Sequence
  Description of Artificial Sequence: Synthetic oligonucleotide
cauguuuggagauauuuaa

SEQ ID NO: 1966105 - RNA, 19 nt, Artificial Sequence
  Description of Artificial Sequence: Synthetic oligonucleotide
caucggucaaucucuuugg

SEQ ID NO: 1966106 - RNA, 19 nt, Artificial Sequence
  Description of Artificial Sequence: Synthetic oligonucleotide
cagucccugugauacaucg

SEQ ID NO: 1966107 - RNA, 19 nt, Artificial Sequence
  Description of Artificial Sequence: Synthetic oligonucleotide
aauucucauucccauucau

SEQ ID NO: 1966108 - RNA, 19 nt, Artificial Sequence
  Description of Artificial Sequence: Synthetic oligonucleotide
ugcuacggaaggauaaggu

SEQ ID NO: 1966109 - RNA, 19 nt, Artificial Sequence
  Description of Artificial Sequence: Synthetic oligonucleotide
ugaccaauacgcacaguac

SEQ ID NO: 1966110 - RNA, 19 nt, Artificial Sequence
  Description of Artificial Sequence: Synthetic oligonucleotide
gacgaaucugauaggauac

SEQ ID NO: 1966111 - RNA, 19 nt, Artificial Sequence
  Description of Artificial Sequence: Synthetic oligonucleotide
aagaaccauguuuggagau

SEQ ID NO: 1966112 - RNA, 19 nt, Artificial Sequence
  Description of Artificial Sequence: Synthetic oligonucleotide
ugugacaaaugaggaaaag

SEQ ID NO: 1966113 - RNA, 19 nt, Artificial Sequence
  Description of Artificial Sequence: Synthetic oligonucleotide
auaagguguuuucauccug

SEQ ID NO: 1966114 - RNA, 19 nt, Artificial Sequence
  Description of Artificial Sequence: Synthetic oligonucleotide
agaggcgaagcuuggcuuc

SEQ ID NO: 1966115 - RNA, 19 nt, Artificial Sequence
  Description of Artificial Sequence: Synthetic oligonucleotide
ucaggaacaagaguuucac

SEQ ID NO: 1966116 - RNA, 19 nt, Artificial Sequence
  Description of Artificial Sequence: Synthetic oligonucleotide
cuauugguaccaguugugg

SEQ ID NO: 1966117 - RNA, 19 nt, Artificial Sequence
  Description of Artificial Sequence: Synthetic oligonucleotide
uguuuucauccugacaugu

SEQ ID NO: 1966118 - RNA, 19 nt, Artificial Sequence
  Description of Artificial Sequence: Synthetic oligonucleotide
uugacuuggagugugcaaa

SEQ ID NO: 1966119 - RNA, 19 nt, Artificial Sequence
  Description of Artificial Sequence: Synthetic oligonucleotide
acagacuucugacgaaucu

SEQ ID NO: 1966120 - RNA, 19 nt, Artificial Sequence
  Description of Artificial Sequence: Synthetic oligonucleotide
uuaagacagucccugugau

SEQ ID NO: 1966121 - RNA, 19 nt, Artificial Sequence
  Description of Artificial Sequence: Synthetic oligonucleotide
uaaggcaaaggcacucgga

SEQ ID NO: 1966122 - RNA, 19 nt, Artificial Sequence
  Description of Artificial Sequence: Synthetic oligonucleotide
aucuguaaugaagauguca

SEQ ID NO: 1966123 - RNA, 19 nt, Artificial Sequence
  Description of Artificial Sequence: Synthetic oligonucleotide
caaagcuacccaagaggcg

SEQ ID NO: 1966124 - RNA, 19 nt, Artificial Sequence
  Description of Artificial Sequence: Synthetic oligonucleotide
cuucuauugguaccaguug

SEQ ID NO: 1966125 - RNA, 19 nt, Artificial Sequence
  Description of Artificial Sequence: Synthetic oligonucleotide
gauacaucggucaaucucu

SEQ ID NO: 1966126 - RNA, 19 nt, Artificial Sequence
  Description of Artificial Sequence: Synthetic oligonucleotide
uucauccugacaugugaca

SEQ ID NO: 1966127 - RNA, 19 nt, Artificial Sequence
  Description of Artificial Sequence: Synthetic oligonucleotide
uauuuaagacagucccugu

SEQ ID NO: 1966128 - RNA, 19 nt, Artificial Sequence
  Description of Artificial Sequence: Synthetic oligonucleotide
cucgcaguucuuucgcugg

SEQ ID NO: 1966129 - RNA, 19 nt, Artificial Sequence
  Description of Artificial Sequence: Synthetic oligonucleotide
gguguuuucauccugacau

SEQ ID NO: 1966130 - RNA, 19 nt, Artificial Sequence
  Description of Artificial Sequence: Synthetic oligonucleotide
uucgcuggaauuuuccaua

SEQ ID NO: 1966131 - RNA, 19 nt, Artificial Sequence
  Description of Artificial Sequence: Synthetic oligonucleotide
acuuuugagacagccagga

SEQ ID NO: 1966132 - RNA, 19 nt, Artificial Sequence
  Description of Artificial Sequence: Synthetic oligonucleotide
auacuauaaggcaaaggca

SEQ ID NO: 1966133 - RNA, 19 nt, Artificial Sequence
  Description of Artificial Sequence: Synthetic oligonucleotide
acucgucuguucuuucagg

SEQ ID NO: 1966134 - RNA, 19 nt, Artificial Sequence
  Description of Artificial Sequence: Synthetic oligonucleotide
ucuggaucaggucucuuuu

SEQ ID NO: 1966135 - RNA, 19 nt, Artificial Sequence
  Description of Artificial Sequence: Synthetic oligonucleotide
auaggauacuauaaggcaa

SEQ ID NO: 1966136 - RNA, 19 nt, Artificial Sequence
  Description of Artificial Sequence: Synthetic oligonucleotide
agaugucaaagcuacccaa

SEQ ID NO: 1966137 - RNA, 19 nt, Artificial Sequence
  Description of Artificial Sequence: Synthetic oligonucleotide
ugggcaaaugccuucgaau

SEQ ID NO: 1966138 - RNA, 19 nt, Artificial Sequence
  Description of Artificial Sequence: Synthetic oligonucleotide
agugugaccaauacgcaca

SEQ ID NO: 1966139 - RNA, 19 nt, Artificial Sequence
  Description of Artificial Sequence: Synthetic oligonucleotide
gcugguuucacuugcuaag

SEQ ID NO: 1966140 - RNA, 19 nt, Artificial Sequence
  Description of Artificial Sequence: Synthetic oligonucleotide
uucugacgaaucugauagg

SEQ ID NO: 1966141 - RNA, 19 nt, Artificial Sequence
  Description of Artificial Sequence: Synthetic oligonucleotide
aacagacuucugacgaauc

SEQ ID NO: 1966142 - RNA, 19 nt, Artificial Sequence
  Description of Artificial Sequence: Synthetic oligonucleotide
gaaggauaagguguuuuca

SEQ ID NO: 1966143 - RNA, 19 nt, Artificial Sequence
  Description of Artificial Sequence: Synthetic oligonucleotide
uggacagauucuuggccag

SEQ ID NO: 1966144 - RNA, 19 nt, Artificial Sequence
  Description of Artificial Sequence: Synthetic oligonucleotide
ggagauauuuaagacaguc

SEQ ID NO: 1966145 - RNA, 19 nt, Artificial Sequence
  Description of Artificial Sequence: Synthetic oligonucleotide
acaugugacaaaugaggaa

SEQ ID NO: 1966146 - RNA, 19 nt, Artificial Sequence
  Description of Artificial Sequence: Synthetic oligonucleotide
gugcaaacagaacuucuac

SEQ ID NO: 1966147 - RNA, 19 nt, Artificial Sequence
  Description of Artificial Sequence: Synthetic oligonucleotide
gugaccaauacgcacagua

SEQ ID NO: 1966148 - RNA, 19 nt, Artificial Sequence
  Description of Artificial Sequence: Synthetic oligonucleotide
uuucaugcuacggaaggau

SEQ ID NO: 1966149 - RNA, 19 nt, Artificial Sequence
  Description of Artificial Sequence: Synthetic oligonucleotide
caguacugcaagaaccaug

SEQ ID NO: 1966150 - RNA, 19 nt, Artificial Sequence
  Description of Artificial Sequence: Synthetic oligonucleotide
auaaauucucauucccauu

SEQ ID NO: 1966151 - RNA, 19 nt, Artificial Sequence
  Description of Artificial Sequence: Synthetic oligonucleotide
aagaggcgaagcuuggcuu

SEQ ID NO: 1966152 - RNA, 19 nt, Artificial Sequence
  Description of Artificial Sequence: Synthetic oligonucleotide
gauguuccagagcggccgg

SEQ ID NO: 1966153 - RNA, 19 nt, Artificial Sequence
  Description of Artificial Sequence: Synthetic oligonucleotide
cacuuuugagacagccagg

SEQ ID NO: 1966154 - RNA, 19 nt, Artificial Sequence
  Description of Artificial Sequence: Synthetic oligonucleotide
uggagugugcaaacagaac

SEQ ID NO: 1966155 - RNA, 19 nt, Artificial Sequence
  Description of Artificial Sequence: Synthetic oligonucleotide
ccuuuucuugcccuuaagg

SEQ ID NO: 1966156 - RNA, 19 nt, Artificial Sequence
  Description of Artificial Sequence: Synthetic oligonucleotide
auguuuggagauauuuaag

SEQ ID NO: 1966157 - RNA, 19 nt, Artificial Sequence
  Description of Artificial Sequence: Synthetic oligonucleotide
ugcugguuucacuugcuaa

SEQ ID NO: 1966158 - RNA, 19 nt, Artificial Sequence
  Description of Artificial Sequence: Synthetic oligonucleotide
ggaauaauccgagagaugu

SEQ ID NO: 1966159 - RNA, 19 nt, Artificial Sequence
  Description of Artificial Sequence: Synthetic oligonucleotide
ggucaaucucuuuggacag

SEQ ID NO: 1966160 - RNA, 19 nt, Artificial Sequence
  Description of Artificial Sequence: Synthetic oligonucleotide
cagugugaccaauacgcac

SEQ ID NO: 1966161 - RNA, 19 nt, Artificial Sequence
  Description of Artificial Sequence: Synthetic oligonucleotide
uccuuuucuugcccuuaag

SEQ ID NO: 1966162 - RNA, 19 nt, Artificial Sequence
  Description of Artificial Sequence: Synthetic oligonucleotide
uuaaggguaucuggaucag

SEQ ID NO: 1966163 - RNA, 19 nt, Artificial Sequence
  Description of Artificial Sequence: Synthetic oligonucleotide
ugaaagcacuuuugagaca

SEQ ID NO: 1966164 - RNA, 19 nt, Artificial Sequence
  Description of Artificial Sequence: Synthetic oligonucleotide
cuuggagugugcaaacaga

SEQ ID NO: 1966165 - RNA, 19 nt, Artificial Sequence
  Description of Artificial Sequence: Synthetic oligonucleotide
gaccaauacgcacaguacu

SEQ ID NO: 1966166 - RNA, 19 nt, Artificial Sequence
  Description of Artificial Sequence: Synthetic oligonucleotide
ugggcuuuuccuccuggga

SEQ ID NO: 1966167 - RNA, 19 nt, Artificial Sequence
  Description of Artificial Sequence: Synthetic oligonucleotide
accaauacgcacaguacug

SEQ ID NO: 1966168 - RNA, 19 nt, Artificial Sequence
  Description of Artificial Sequence: Synthetic oligonucleotide
uccagagcggccggggucg

SEQ ID NO: 1966169 - RNA, 19 nt, Artificial Sequence
  Description of Artificial Sequence: Synthetic oligonucleotide
ccaguuguggaauuguuuc

SEQ ID NO: 1966170 - RNA, 19 nt, Artificial Sequence
  Description of Artificial Sequence: Synthetic oligonucleotide
ggagugugcaaacagaacu

SEQ ID NO: 1966171 - RNA, 19 nt, Artificial Sequence
  Description of Artificial Sequence: Synthetic oligonucleotide
acagauucuuggccagaag

SEQ ID NO: 1966172 - RNA, 19 nt, Artificial Sequence
  Description of Artificial Sequence: Synthetic oligonucleotide
acucgcaguucuuucgcug

SEQ ID NO: 1966173 - RNA, 19 nt, Artificial Sequence
  Description of Artificial Sequence: Synthetic oligonucleotide
uucuaccgcccuuuuaauc

SEQ ID NO: 1966174 - RNA, 19 nt, Artificial Sequence
  Description of Artificial Sequence: Synthetic oligonucleotide
gauaagguguuuucauccu

SEQ ID NO: 1966175 - RNA, 19 nt, Artificial Sequence
  Description of Artificial Sequence: Synthetic oligonucleotide
cuacggaaggauaaggugu

SEQ ID NO: 1966176 - RNA, 19 nt, Artificial Sequence
  Description of Artificial Sequence: Synthetic oligonucleotide
uucaugcuacggaaggaua

SEQ ID NO: 1966177 - RNA, 19 nt, Artificial Sequence
  Description of Artificial Sequence: Synthetic oligonucleotide
augcuacggaaggauaagg

SEQ ID NO: 1966178 - RNA, 19 nt, Artificial Sequence
  Description of Artificial Sequence: Synthetic oligonucleotide
cuauaaggcaaaggcacuc

SEQ ID NO: 1966179 - RNA, 19 nt, Artificial Sequence
  Description of Artificial Sequence: Synthetic oligonucleotide
ucacuugcuaagucauccu

SEQ ID NO: 1966180 - RNA, 19 nt, Artificial Sequence
  Description of Artificial Sequence: Synthetic oligonucleotide
aauacgcacaguacugcaa

SEQ ID NO: 1966181 - RNA, 19 nt, Artificial Sequence
  Description of Artificial Sequence: Synthetic oligonucleotide
acuucugacgaaucugaua

SEQ ID NO: 1966182 - RNA, 19 nt, Artificial Sequence
  Description of Artificial Sequence: Synthetic oligonucleotide
accauguuuggagauauuu

SEQ ID NO: 1966183 - RNA, 19 nt, Artificial Sequence
  Description of Artificial Sequence: Synthetic oligonucleotide
caagaaccauguuuggaga

SEQ ID NO: 1966184 - RNA, 19 nt, Artificial Sequence
  Description of Artificial Sequence: Synthetic oligonucleotide
gcacaguacugcaagaacc

SEQ ID NO: 1966185 - RNA, 19 nt, Artificial Sequence
  Description of Artificial Sequence: Synthetic oligonucleotide
caugcuacggaaggauaag

SEQ ID NO: 1966186 - RNA, 19 nt, Artificial Sequence
  Description of Artificial Sequence: Synthetic oligonucleotide
gauauuuaagacagucccu

SEQ ID NO: 1966187 - RNA, 19 nt, Artificial Sequence
  Description of Artificial Sequence: Synthetic oligonucleotide
cagacuucugacgaaucug

SEQ ID NO: 1966188 - RNA, 19 nt, Artificial Sequence
  Description of Artificial Sequence: Synthetic oligonucleotide
ugccuuccuaugugugugg

SEQ ID NO: 1966189 - RNA, 19 nt, Artificial Sequence
  Description of Artificial Sequence: Synthetic oligonucleotide
uccugggaucuuguggccg

SEQ ID NO: 1966190 - RNA, 19 nt, Artificial Sequence
  Description of Artificial Sequence: Synthetic oligonucleotide
uggaguacugcugguuuca

SEQ ID NO: 1966191 - RNA, 19 nt, Artificial Sequence
  Description of Artificial Sequence: Synthetic oligonucleotide
agacuucugacgaaucuga

SEQ ID NO: 1966192 - RNA, 19 nt, Artificial Sequence
  Description of Artificial Sequence: Synthetic oligonucleotide
guaaacaaacagacuucug

SEQ ID NO: 1966193 - RNA, 19 nt, Artificial Sequence
  Description of Artificial Sequence: Synthetic oligonucleotide
aucugauaggauacuauaa

SEQ ID NO: 1966194 - RNA, 19 nt, Artificial Sequence
  Description of Artificial Sequence: Synthetic oligonucleotide
caacaaugugcugagucuc

SEQ ID NO: 1966195 - RNA, 19 nt, Artificial Sequence
  Description of Artificial Sequence: Synthetic oligonucleotide
cuuaacacuuuugcuuuuc

SEQ ID NO: 1966196 - RNA, 19 nt, Artificial Sequence
  Description of Artificial Sequence: Synthetic oligonucleotide
gaacaagaguuucacacuu

SEQ ID NO: 1966197 - RNA, 19 nt, Artificial Sequence
  Description of Artificial Sequence: Synthetic oligonucleotide
acuauaaggcaaaggcacu

SEQ ID NO: 1966198 - RNA, 19 nt, Artificial Sequence
  Description of Artificial Sequence: Synthetic oligonucleotide
gcgaagcuuggcuucauag

SEQ ID NO: 1966199 - RNA, 19 nt, Artificial Sequence
  Description of Artificial Sequence: Synthetic oligonucleotide
cuggaauuuuccauaauau

SEQ ID NO: 1966200 - RNA, 19 nt, Artificial Sequence
  Description of Artificial Sequence: Synthetic oligonucleotide
uggagauauuuaagacagu

SEQ ID NO: 1966201 - RNA, 19 nt, Artificial Sequence
  Description of Artificial Sequence: Synthetic oligonucleotide
aucuggaucaggucucuuu

SEQ ID NO: 1966202 - RNA, 19 nt, Artificial Sequence
  Description of Artificial Sequence: Synthetic oligonucleotide
aggcaaaggcacucggacu

SEQ ID NO: 1966203 - RNA, 19 nt, Artificial Sequence
  Description of Artificial Sequence: Synthetic oligonucleotide
aagcuuggcuucauaggcu

SEQ ID NO: 1966204 - RNA, 19 nt, Artificial Sequence
  Description of Artificial Sequence: Synthetic oligonucleotide
uucuuucgcuggaauuuuc

SEQ ID NO: 1966205 - RNA, 19 nt, Artificial Sequence
  Description of Artificial Sequence: Synthetic oligonucleotide
gcuggaauuuuccauaaua

SEQ ID NO: 1966206 - RNA, 19 nt, Artificial Sequence
  Description of Artificial Sequence: Synthetic oligonucleotide
uccuugacuuggagugugc

SEQ ID NO: 1966207 - RNA, 19 nt, Artificial Sequence
  Description of Artificial Sequence: Synthetic oligonucleotide
acacucgucuguucuuuca

SEQ ID NO: 1966208 - RNA, 19 nt, Artificial Sequence
  Description of Artificial Sequence: Synthetic oligonucleotide
uaagacagucccugugaua

SEQ ID NO: 1966209 - RNA, 19 nt, Artificial Sequence
  Description of Artificial Sequence: Synthetic oligonucleotide
uccugacaugugacaaaug

SEQ ID NO: 1966210 - RNA, 19 nt, Artificial Sequence
  Description of Artificial Sequence: Synthetic oligonucleotide
cuuuuaaucugcucuuggu

SEQ ID NO: 1966211 - RNA, 19 nt, Artificial Sequence
  Description of Artificial Sequence: Synthetic oligonucleotide
auacuggaacuuucuuccu

SEQ ID NO: 1966212 - RNA, 19 nt, Artificial Sequence
  Description of Artificial Sequence: Synthetic oligonucleotide
aacuucuaccgcccuuuua

SEQ ID NO: 1966213 - RNA, 19 nt, Artificial Sequence
  Description of Artificial Sequence: Synthetic oligonucleotide
aucggucaaucucuuugga

SEQ ID NO: 1966214 - RNA, 19 nt, Artificial Sequence
  Description of Artificial Sequence: Synthetic oligonucleotide
ucgcuggaauuuuccauaa

SEQ ID NO: 1966215 - RNA, 19 nt, Artificial Sequence
  Description of Artificial Sequence: Synthetic oligonucleotide
cuugcuaagucauccuucu

SEQ ID NO: 1966216 - RNA, 19 nt, Artificial Sequence
  Description of Artificial Sequence: Synthetic oligonucleotide
uucccugugccauuuucuu

SEQ ID NO: 1966217 - RNA, 19 nt, Artificial Sequence
  Description of Artificial Sequence: Synthetic oligonucleotide
aggauacuauaaggcaaag

SEQ ID NO: 1966218 - RNA, 19 nt, Artificial Sequence
  Description of Artificial Sequence: Synthetic oligonucleotide
uaccaguuguggaauuguu

SEQ ID NO: 1966219 - RNA, 19 nt, Artificial Sequence
  Description of Artificial Sequence: Synthetic oligonucleotide
uaccgcccuuuuaaucugc

SEQ ID NO: 1966220 - RNA, 19 nt, Artificial Sequence
  Description of Artificial Sequence: Synthetic oligonucleotide
acuucucaguuuucaggaa

SEQ ID NO: 1966221 - RNA, 19 nt, Artificial Sequence
  Description of Artificial Sequence: Synthetic oligonucleotide
guacugcugguuucacuug

SEQ ID NO: 1966222 - RNA, 19 nt, Artificial Sequence
  Description of Artificial Sequence: Synthetic oligonucleotide
uuuccuugacuuggagugu

SEQ ID NO: 1966223 - RNA, 19 nt, Artificial Sequence
  Description of Artificial Sequence: Synthetic oligonucleotide
cuggaguacugcugguuuc

SEQ ID NO: 1966224 - RNA, 19 nt, Artificial Sequence
  Description of Artificial Sequence: Synthetic oligonucleotide
cuaccgcccuuuuaaucug

SEQ ID NO: 1966225 - RNA, 19 nt, Artificial Sequence
  Description of Artificial Sequence: Synthetic oligonucleotide
ggcuucauaggcuuuauau

SEQ ID NO: 1966226 - RNA, 19 nt, Artificial Sequence
  Description of Artificial Sequence: Synthetic oligonucleotide
uugguaccaguuguggaau

SEQ ID NO: 1966227 - RNA, 19 nt, Artificial Sequence
  Description of Artificial Sequence: Synthetic oligonucleotide
ucccugugauacaucgguc

SEQ ID NO: 1966228 - RNA, 19 nt, Artificial Sequence
  Description of Artificial Sequence: Synthetic oligonucleotide
uuccagagcggccgggguc

SEQ ID NO: 1966229 - RNA, 19 nt, Artificial Sequence
  Description of Artificial Sequence: Synthetic oligonucleotide
ucggacucgcaguucuuuc

SEQ ID NO: 1966230 - RNA, 19 nt, Artificial Sequence
  Description of Artificial Sequence: Synthetic oligonucleotide
gucccugugauacaucggu

SEQ ID NO: 1966231 - RNA, 19 nt, Artificial Sequence
  Description of Artificial Sequence: Synthetic oligonucleotide
ucgcaguucuuucgcugga

SEQ ID NO: 1966232 - RNA, 19 nt, Artificial Sequence
  Description of Artificial Sequence: Synthetic oligonucleotide
aggaauaauccgagagaug

SEQ ID NO: 1966233 - RNA, 19 nt, Artificial Sequence
  Description of Artificial Sequence: Synthetic oligonucleotide
gaaucugauaggauacuau

SEQ ID NO: 1966234 - RNA, 19 nt, Artificial Sequence
  Description of Artificial Sequence: Synthetic oligonucleotide
ccuuucuuuucaugcuacg

SEQ ID NO: 1966235 - RNA, 19 nt, Artificial Sequence
  Description of Artificial Sequence: Synthetic oligonucleotide
cuugacuuggagugugcaa

SEQ ID NO: 1966236 - RNA, 19 nt, Artificial Sequence
  Description of Artificial Sequence: Synthetic oligonucleotide
uucacacucgucuguucuu

SEQ ID NO: 1966237 - RNA, 19 nt, Artificial Sequence
  Description of Artificial Sequence: Synthetic oligonucleotide
uugcaucuucauguuuucu

SEQ ID NO: 1966238 - RNA, 19 nt, Artificial Sequence
  Description of Artificial Sequence: Synthetic oligonucleotide
ucgucuguucuuucagguu

SEQ ID NO: 1966239 - RNA, 19 nt, Artificial Sequence
  Description of Artificial Sequence: Synthetic oligonucleotide
aggcacucggacucgcagu

SEQ ID NO: 1966240 - RNA, 19 nt, Artificial Sequence
  Description of Artificial Sequence: Synthetic oligonucleotide
ccagauguuccagagcggc

SEQ ID NO: 1966241 - RNA, 19 nt, Artificial Sequence
  Description of Artificial Sequence: Synthetic oligonucleotide
cuguaaugaagaugucaaa

SEQ ID NO: 1966242 - RNA, 19 nt, Artificial Sequence
  Description of Artificial Sequence: Synthetic oligonucleotide
acgaaucugauaggauacu

SEQ ID NO: 1966243 - RNA, 19 nt, Artificial Sequence
  Description of Artificial Sequence: Synthetic oligonucleotide
uuccuaugugugugggcaa

SEQ ID NO: 1966244 - RNA, 19 nt, Artificial Sequence
  Description of Artificial Sequence: Synthetic oligonucleotide
uucuugcccuuaaggguau

SEQ ID NO: 1966245 - RNA, 19 nt, Artificial Sequence
  Description of Artificial Sequence: Synthetic oligonucleotide
agaaccauguuuggagaua

SEQ ID NO: 1966246 - RNA, 19 nt, Artificial Sequence
  Description of Artificial Sequence: Synthetic oligonucleotide
agucccugugauacaucgg

SEQ ID NO: 1966247 - RNA, 19 nt, Artificial Sequence
  Description of Artificial Sequence: Synthetic oligonucleotide
caucuguaaugaagauguc

SEQ ID NO: 1966248 - RNA, 19 nt, Artificial Sequence
  Description of Artificial Sequence: Synthetic oligonucleotide
gugauucacagucaucuuu

SEQ ID NO: 1966249 - RNA, 19 nt, Artificial Sequence
  Description of Artificial Sequence: Synthetic oligonucleotide
ggaacaagaguuucacacu

SEQ ID NO: 1966250 - RNA, 19 nt, Artificial Sequence
  Description of Artificial Sequence: Synthetic oligonucleotide
gguaccaguuguggaauug

SEQ ID NO: 1966251 - RNA, 19 nt, Artificial Sequence
  Description of Artificial Sequence: Synthetic oligonucleotide
cuucacacucgucuguucu

SEQ ID NO: 1966252 - RNA, 19 nt, Artificial Sequence
  Description of Artificial Sequence: Synthetic oligonucleotide
caggugauucacagucauc

SEQ ID NO: 1966253 - RNA, 19 nt, Artificial Sequence
  Description of Artificial Sequence: Synthetic oligonucleotide
gaaccauguuuggagauau

SEQ ID NO: 1966254 - RNA, 19 nt, Artificial Sequence
  Description of Artificial Sequence: Synthetic oligonucleotide
gguaucuggaucaggucuc

SEQ ID NO: 1966255 - RNA, 19 nt, Artificial Sequence
  Description of Artificial Sequence: Synthetic oligonucleotide
ucacacucgucuguucuuu

SEQ ID NO: 1966256 - RNA, 19 nt, Artificial Sequence
  Description of Artificial Sequence: Synthetic oligonucleotide
cauucccauucauaagcaa

SEQ ID NO: 1966257 - RNA, 19 nt, Artificial Sequence
  Description of Artificial Sequence: Synthetic oligonucleotide
uggccauuucucuggcaau

SEQ ID NO: 1966258 - RNA, 19 nt, Artificial Sequence
  Description of Artificial Sequence: Synthetic oligonucleotide
gaagggaaacagacuucuc

SEQ ID NO: 1966259 - RNA, 19 nt, Artificial Sequence
  Description of Artificial Sequence: Synthetic oligonucleotide
gagacagccaggauguuuu

SEQ ID NO: 1966260 - RNA, 19 nt, Artificial Sequence
  Description of Artificial Sequence: Synthetic oligonucleotide
auaauccgagagauguuuu

SEQ ID NO: 1966261 - RNA, 19 nt, Artificial Sequence
  Description of Artificial Sequence: Synthetic oligonucleotide
agacagucccugugauaca

SEQ ID NO: 1966262 - RNA, 19 nt, Artificial Sequence
  Description of Artificial Sequence: Synthetic oligonucleotide
cucgucuguucuuucaggu

SEQ ID NO: 1966263 - RNA, 19 nt, Artificial Sequence
  Description of Artificial Sequence: Synthetic oligonucleotide
caggaacaagaguuucaca

SEQ ID NO: 1966264 - RNA, 19 nt, Artificial Sequence
  Description of Artificial Sequence: Synthetic oligonucleotide
accaguuguggaauuguuu

SEQ ID NO: 1966265 - RNA, 19 nt, Artificial Sequence
  Description of Artificial Sequence: Synthetic oligonucleotide
gguugugcuuuuacuuugc

SEQ ID NO: 1966266 - RNA, 19 nt, Artificial Sequence
  Description of Artificial Sequence: Synthetic oligonucleotide
caaaggcacucggacucgc

SEQ ID NO: 1966267 - RNA, 19 nt, Artificial Sequence
  Description of Artificial Sequence: Synthetic oligonucleotide
acgcacaguacugcaagaa

SEQ ID NO: 1966268 - RNA, 19 nt, Artificial Sequence
  Description of Artificial Sequence: Synthetic oligonucleotide
uugcuaagucauccuucuu

SEQ ID NO: 1966269 - RNA, 19 nt, Artificial Sequence
  Description of Artificial Sequence: Synthetic oligonucleotide
gcuuuuacuuugcugggcu

SEQ ID NO: 1966270 - RNA, 19 nt, Artificial Sequence
  Description of Artificial Sequence: Synthetic oligonucleotide
uacaucggucaaucucuuu

SEQ ID NO: 1966271 - RNA, 19 nt, Artificial Sequence
  Description of Artificial Sequence: Synthetic oligonucleotide
acagucccugugauacauc

SEQ ID NO: 1966272 - RNA, 19 nt, Artificial Sequence
  Description of Artificial Sequence: Synthetic oligonucleotide
gugggcaaaugccuucgaa

SEQ ID NO: 1966273 - RNA, 19 nt, Artificial Sequence
  Description of Artificial Sequence: Synthetic oligonucleotide
gggaucuuguggccguccc

SEQ ID NO: 1966274 - RNA, 19 nt, Artificial Sequence
  Description of Artificial Sequence: Synthetic oligonucleotide
agcggccggggucgcuugc

SEQ ID NO: 1966275 - RNA, 19 nt, Artificial Sequence
  Description of Artificial Sequence: Synthetic oligonucleotide
uguggccgucccuggagua

SEQ ID NO: 1966276 - RNA, 19 nt, Artificial Sequence
  Description of Artificial Sequence: Synthetic oligonucleotide
cuacccaagaggcgaagcu

SEQ ID NO: 1966277 - RNA, 19 nt, Artificial Sequence
  Description of Artificial Sequence: Synthetic oligonucleotide
cccugugauacaucgguca

SEQ ID NO: 1966278 - RNA, 19 nt, Artificial Sequence
  Description of Artificial Sequence: Synthetic oligonucleotide
gagugugcaaacagaacuu

SEQ ID NO: 1966279 - RNA, 19 nt, Artificial Sequence
  Description of Artificial Sequence: Synthetic oligonucleotide
caguuguggaauuguuucu

SEQ ID NO: 1966280 - RNA, 19 nt, Artificial Sequence
  Description of Artificial Sequence: Synthetic oligonucleotide
ugugaccaauacgcacagu

SEQ ID NO: 1966281 - RNA, 19 nt, Artificial Sequence
  Description of Artificial Sequence: Synthetic oligonucleotide
ccuuccuaugugugugggc

SEQ ID NO: 1966282 - RNA, 19 nt, Artificial Sequence
  Description of Artificial Sequence: Synthetic oligonucleotide
agcuacccaagaggcgaag

SEQ ID NO: 1966283 - RNA, 19 nt, Artificial Sequence
  Description of Artificial Sequence: Synthetic oligonucleotide
cccaagaggcgaagcuugg

SEQ ID NO: 1966284 - RNA, 19 nt, Artificial Sequence
  Description of Artificial Sequence: Synthetic oligonucleotide
uggccgucccuggaguacu

SEQ ID NO: 1966285 - RNA, 19 nt, Artificial Sequence
  Description of Artificial Sequence: Synthetic oligonucleotide
cggacucgcaguucuuucg

SEQ ID NO: 1966286 - RNA, 19 nt, Artificial Sequence
  Description of Artificial Sequence: Synthetic oligonucleotide
ccauguuuggagauauuua

SEQ ID NO: 1966287 - RNA, 19 nt, Artificial Sequence
  Description of Artificial Sequence: Synthetic oligonucleotide
aagcuacccaagaggcgaa

SEQ ID NO: 1966288 - RNA, 19 nt, Artificial Sequence
  Description of Artificial Sequence: Synthetic oligonucleotide
gggcaaaugccuucgaauu

SEQ ID NO: 1966289 - RNA, 19 nt, Artificial Sequence
  Description of Artificial Sequence: Synthetic oligonucleotide
gcuacccaagaggcgaagc

SEQ ID NO: 1966290 - RNA, 19 nt, Artificial Sequence
  Description of Artificial Sequence: Synthetic oligonucleotide
gacucgcaguucuuucgcu

SEQ ID NO: 1966291 - RNA, 19 nt, Artificial Sequence
  Description of Artificial Sequence: Synthetic oligonucleotide
aguuucacacuuggccauu

SEQ ID NO: 1966292 - RNA, 19 nt, Artificial Sequence
  Description of Artificial Sequence: Synthetic oligonucleotide
gccuuccuauguguguggg

SEQ ID NO: 1966293 - RNA, 19 nt, Artificial Sequence
  Description of Artificial Sequence: Synthetic oligonucleotide
gugauacaucggucaaucu

SEQ ID NO: 1966294 - RNA, 19 nt, Artificial Sequence
  Description of Artificial Sequence: Synthetic oligonucleotide
gaauaauccgagagauguu

SEQ ID NO: 1966295 - RNA, 19 nt, Artificial Sequence
  Description of Artificial Sequence: Synthetic oligonucleotide
cuuggccagaagguucaca

SEQ ID NO: 1966296 - RNA, 19 nt, Artificial Sequence
  Description of Artificial Sequence: Synthetic oligonucleotide
cccauucauaagcaacuca

SEQ ID NO: 1966297 - RNA, 19 nt, Artificial Sequence
  Description of Artificial Sequence: Synthetic oligonucleotide
cugacgaaucugauaggau

SEQ ID NO: 1966298 - RNA, 19 nt, Artificial Sequence
  Description of Artificial Sequence: Synthetic oligonucleotide
gcccuuaaggguaucugga

SEQ ID NO: 1966299 - RNA, 19 nt, Artificial Sequence
  Description of Artificial Sequence: Synthetic oligonucleotide
gggaagggaaacagacuuc

SEQ ID NO: 1966300 - RNA, 19 nt, Artificial Sequence
  Description of Artificial Sequence: Synthetic oligonucleotide
auacaucggucaaucucuu

SEQ ID NO: 1966301 - RNA, 19 nt, Artificial Sequence
  Description of Artificial Sequence: Synthetic oligonucleotide
cugguuucacuugcuaagu

SEQ ID NO: 1966302 - RNA, 19 nt, Artificial Sequence
  Description of Artificial Sequence: Synthetic oligonucleotide
guggccgucccuggaguac

SEQ ID NO: 1966303 - RNA, 19 nt, Artificial Sequence
  Description of Artificial Sequence: Synthetic oligonucleotide
uaucuggaucaggucucuu

SEQ ID NO: 1966304 - RNA, 19 nt, Artificial Sequence
  Description of Artificial Sequence: Synthetic oligonucleotide
gagcggccggggucgcuug

SEQ ID NO: 1966305 - RNA, 19 nt, Artificial Sequence
  Description of Artificial Sequence: Synthetic oligonucleotide
accgcccuuuuaaucugcu

SEQ ID NO: 1966306 - RNA, 19 nt, Artificial Sequence
  Description of Artificial Sequence: Synthetic oligonucleotide
cagaagguucacagauacu

SEQ ID NO: 1966307 - RNA, 19 nt, Artificial Sequence
  Description of Artificial Sequence: Synthetic oligonucleotide
gcucuugguccagauguuc

SEQ ID NO: 1966308 - RNA, 19 nt, Artificial Sequence
  Description of Artificial Sequence: Synthetic oligonucleotide
ccaagaggcgaagcuuggc

SEQ ID NO: 1966309 - RNA, 19 nt, Artificial Sequence
  Description of Artificial Sequence: Synthetic oligonucleotide
cuugcccuuaaggguaucu

SEQ ID NO: 1966310 - RNA, 19 nt, Artificial Sequence
  Description of Artificial Sequence: Synthetic oligonucleotide
ccugugauacaucggucaa

SEQ ID NO: 1966311 - RNA, 19 nt, Artificial Sequence
  Description of Artificial Sequence: Synthetic oligonucleotide
cuucuaccgcccuuuuaau

SEQ ID NO: 1966312 - RNA, 19 nt, Artificial Sequence
  Description of Artificial Sequence: Synthetic oligonucleotide
agucuccauuccaguguga

SEQ ID NO: 1966313 - RNA, 19 nt, Artificial Sequence
  Description of Artificial Sequence: Synthetic oligonucleotide
guaucuggaucaggucucu

SEQ ID NO: 1966314 - RNA, 19 nt, Artificial Sequence
  Description of Artificial Sequence: Synthetic oligonucleotide
ggaguacugcugguuucac

SEQ ID NO: 1966315 - RNA, 19 nt, Artificial Sequence
  Description of Artificial Sequence: Synthetic oligonucleotide
cuuuugagacagccaggau

SEQ ID NO: 1966316 - RNA, 19 nt, Artificial Sequence
  Description of Artificial Sequence: Synthetic oligonucleotide
agagcggccggggucgcuu

SEQ ID NO: 1966317 - RNA, 19 nt, Artificial Sequence
  Description of Artificial Sequence: Synthetic oligonucleotide
acggaaggauaagguguuu

SEQ ID NO: 1966318 - RNA, 19 nt, Artificial Sequence
  Description of Artificial Sequence: Synthetic oligonucleotide
caaugugcugagucuccau

SEQ ID NO: 1966319 - RNA, 19 nt, Artificial Sequence
  Description of Artificial Sequence: Synthetic oligonucleotide
gaacuucuaccgcccuuuu

SEQ ID NO: 1966320 - RNA, 19 nt, Artificial Sequence
  Description of Artificial Sequence: Synthetic oligonucleotide
ggccggggucgcuugcaug

SEQ ID NO: 1966321 - RNA, 19 nt, Artificial Sequence
  Description of Artificial Sequence: Synthetic oligonucleotide
ggugauucacagucaucuu

SEQ ID NO: 1966322 - RNA, 19 nt, Artificial Sequence
  Description of Artificial Sequence: Synthetic oligonucleotide
ggaucuuguggccgucccu

SEQ ID NO: 1966323 - RNA, 19 nt, Artificial Sequence
  Description of Artificial Sequence: Synthetic oligonucleotide
cugugauacaucggucaau

SEQ ID NO: 1966324 - RNA, 19 nt, Artificial Sequence
  Description of Artificial Sequence: Synthetic oligonucleotide
ggcacucggacucgcaguu

SEQ ID NO: 1966325 - RNA, 19 nt, Artificial Sequence
  Description of Artificial Sequence: Synthetic oligonucleotide
cagaacuucuaccgcccuu

SEQ ID NO: 1966326 - RNA, 19 nt, Artificial Sequence
  Description of Artificial Sequence: Synthetic oligonucleotide
guuucacacuuggccauuu

SEQ ID NO: 1966327 - RNA, 19 nt, Artificial Sequence
  Description of Artificial Sequence: Synthetic oligonucleotide
ccgcccuuuuaaucugcuc

SEQ ID NO: 1966328 - RNA, 19 nt, Artificial Sequence
  Description of Artificial Sequence: Synthetic oligonucleotide
ggcgaagcuuggcuucaua

SEQ ID NO: 1966329 - RNA, 19 nt, Artificial Sequence
  Description of Artificial Sequence: Synthetic oligonucleotide
gccagaagguucacagaua

SEQ ID NO: 1966330 - RNA, 19 nt, Artificial Sequence
  Description of Artificial Sequence: Synthetic oligonucleotide
cggggucgcuugcauggcg

SEQ ID NO: 1966331 - RNA, 19 nt, Artificial Sequence
  Description of Artificial Sequence: Synthetic oligonucleotide
acucggacucgcaguucuu

SEQ ID NO: 1966332 - RNA, 19 nt, Artificial Sequence
  Description of Artificial Sequence: Synthetic oligonucleotide
aggcgaagcuuggcuucau

SEQ ID NO: 1966333 - RNA, 19 nt, Artificial Sequence
  Description of Artificial Sequence: Synthetic oligonucleotide
ccuggaguacugcugguuu

SEQ ID NO: 1966334 - RNA, 19 nt, Artificial Sequence
  Description of Artificial Sequence: Synthetic oligonucleotide
gccgucccuggaguacugc

SEQ ID NO: 1966335 - RNA, 19 nt, Artificial Sequence
  Description of Artificial Sequence: Synthetic oligonucleotide
cccuuaaggguaucuggau

SEQ ID NO: 1966336 - RNA, 19 nt, Artificial Sequence
  Description of Artificial Sequence: Synthetic oligonucleotide
cucggacucgcaguucuuu

SEQ ID NO: 1966337 - RNA, 19 nt, Artificial Sequence
  Description of Artificial Sequence: Synthetic oligonucleotide
ccugggaucuuguggccgu

SEQ ID NO: 1966338 - RNA, 19 nt, Artificial Sequence
  Description of Artificial Sequence: Synthetic oligonucleotide
cugugccauuuucuugcau

SEQ ID NO: 1966339 - RNA, 19 nt, Artificial Sequence
  Description of Artificial Sequence: Synthetic oligonucleotide
ccaggauguuuucaacaau

SEQ ID NO: 1966340 - RNA, 19 nt, Artificial Sequence
  Description of Artificial Sequence: Synthetic oligonucleotide
ggccgucccuggaguacug

SEQ ID NO: 1966341 - RNA, 19 nt, Artificial Sequence
  Description of Artificial Sequence: Synthetic oligonucleotide
gcacucggacucgcaguuc

SEQ ID NO: 1966342 - RNA, 19 nt, Artificial Sequence
  Description of Artificial Sequence: Synthetic oligonucleotide
ccggggucgcuugcauggc

SEQ ID NO: 1966343 - RNA, 19 nt, Artificial Sequence
  Description of Artificial Sequence: Synthetic oligonucleotide
ccgucccuggaguacugcu

SEQ ID NO: 1966344 - RNA, 19 nt, Artificial Sequence
  Description of Artificial Sequence: Synthetic oligonucleotide
cuguagcuggcagggccuu

SEQ ID NO: 1966345 - RNA, 19 nt, Artificial Sequence
  Description of Artificial Sequence: Synthetic oligonucleotide
ccuaugugugugggcaaau

SEQ ID NO: 1966346 - RNA, 19 nt, Artificial Sequence
  Description of Artificial Sequence: Synthetic oligonucleotide
ccagagcggccggggucgc

SEQ ID NO: 1966347 - RNA, 19 nt, Artificial Sequence
  Description of Artificial Sequence: Synthetic oligonucleotide
cagagcggccggggucgcu

SEQ ID NO: 1966348 - RNA, 19 nt, Artificial Sequence
  Description of Artificial Sequence: Synthetic oligonucleotide
aauucggucaccuccuugc

SEQ ID NO: 1966349 - RNA, 19 nt, Artificial Sequence
  Description of Artificial Sequence: Synthetic oligonucleotide
aaggcacggacuuugcugc

SEQ ID NO: 1966350 - RNA, 19 nt, Artificial Sequence
  Description of Artificial Sequence: Synthetic oligonucleotide
aucgaaggcuuccagaccc

SEQ ID NO: 1966351 - RNA, 19 nt, Artificial Sequence
  Description of Artificial Sequence: Synthetic oligonucleotide
ugaggagucauucagcugu

SEQ ID NO: 1966352 - RNA, 19 nt, Artificial Sequence
  Description of Artificial Sequence: Synthetic oligonucleotide
uuuguuggcugcuucauag

SEQ ID NO: 1966353 - RNA, 19 nt, Artificial Sequence
  Description of Artificial Sequence: Synthetic oligonucleotide
aaugacugaggagucauuc

SEQ ID NO: 1966354 - RNA, 19 nt, Artificial Sequence
  Description of Artificial Sequence: Synthetic oligonucleotide
acggacaucauccugcagg

SEQ ID NO: 1966355 - RNA, 19 nt, Artificial Sequence
  Description of Artificial Sequence: Synthetic oligonucleotide
uccagcaugagccaguacu

SEQ ID NO: 1966356 - RNA, 19 nt, Artificial Sequence
  Description of Artificial Sequence: Synthetic oligonucleotide
uccgaagguaccaagguug

SEQ ID NO: 1966357 - RNA, 19 nt, Artificial Sequence
  Description of Artificial Sequence: Synthetic oligonucleotide
uccacuaccugauagggca

SEQ ID NO: 1966358 - RNA, 19 nt, Artificial Sequence
  Description of Artificial Sequence: Synthetic oligonucleotide
uucauagaggucugcacgg

SEQ ID NO: 1966359 - RNA, 19 nt, Artificial Sequence
  Description of Artificial Sequence: Synthetic oligonucleotide
uguucgguacacauugggg

SEQ ID NO: 1966360 - RNA, 19 nt, Artificial Sequence
  Description of Artificial Sequence: Synthetic oligonucleotide
caagguuaggcuuuugacc

SEQ ID NO: 1966361 - RNA, 19 nt, Artificial Sequence
  Description of Artificial Sequence: Synthetic oligonucleotide
uccaaacuuucccucacgg

SEQ ID NO: 1966362 - RNA, 19 nt, Artificial Sequence
  Description of Artificial Sequence: Synthetic oligonucleotide
ucauggguggguaauaggu

SEQ ID NO: 1966363 - RNA, 19 nt, Artificial Sequence
  Description of Artificial Sequence: Synthetic oligonucleotide
caaacuuucccucacggac

SEQ ID NO: 1966364 - RNA, 19 nt, Artificial Sequence
  Description of Artificial Sequence: Synthetic oligonucleotide
ugagguacauggcagcugc

SEQ ID NO: 1966365 - RNA, 19 nt, Artificial Sequence
  Description of Artificial Sequence: Synthetic oligonucleotide
acaugucuuguacugguac

SEQ ID NO: 1966366 - RNA, 19 nt, Artificial Sequence
  Description of Artificial Sequence: Synthetic oligonucleotide
ugagugucgcaucagguca

SEQ ID NO: 1966367 - RNA, 19 nt, Artificial Sequence
  Description of Artificial Sequence: Synthetic oligonucleotide
gaugaggugcaccagccag

SEQ ID NO: 1966368 - RNA, 19 nt, Artificial Sequence
  Description of Artificial Sequence: Synthetic oligonucleotide
uguuggcugcuucauagag

SEQ ID NO: 1966369 - RNA, 19 nt, Artificial Sequence
  Description of Artificial Sequence: Synthetic oligonucleotide
uaccugauagggcagggag

SEQ ID NO: 1966370 - RNA, 19 nt, Artificial Sequence
  Description of Artificial Sequence: Synthetic oligonucleotide
aauuugaucucagcccuuc

SEQ ID NO: 1966371 - RNA, 19 nt, Artificial Sequence
  Description of Artificial Sequence: Synthetic oligonucleotide
agguguucgguacacauug

SEQ ID NO: 1966372 - RNA, 19 nt, Artificial Sequence
  Description of Artificial Sequence: Synthetic oligonucleotide
uacuuguugcagaauucgg

SEQ ID NO: 1966373 - RNA, 19 nt, Artificial Sequence
  Description of Artificial Sequence: Synthetic oligonucleotide
aucucagcccuucugacag

SEQ ID NO: 1966374 - RNA, 19 nt, Artificial Sequence
  Description of Artificial Sequence: Synthetic oligonucleotide
uggaagucgaggaaggcac

SEQ ID NO: 1966375 - RNA, 19 nt, Artificial Sequence
  Description of Artificial Sequence: Synthetic oligonucleotide
aauaggugaugaccucuuc

SEQ ID NO: 1966376 - RNA, 19 nt, Artificial Sequence
  Description of Artificial Sequence: Synthetic oligonucleotide
ucccucacggacaauguag

SEQ ID NO: 1966377 - RNA, 19 nt, Artificial Sequence
  Description of Artificial Sequence: Synthetic oligonucleotide
ugaauggccggucuuugcc

SEQ ID NO: 1966378 - RNA, 19 nt, Artificial Sequence
  Description of Artificial Sequence: Synthetic oligonucleotide
uggguaauaggugaugacc

SEQ ID NO: 1966379 - RNA, 19 nt, Artificial Sequence
  Description of Artificial Sequence: Synthetic oligonucleotide
uuugaucucagcccuucug

SEQ ID NO: 1966380 - RNA, 19 nt, Artificial Sequence
  Description of Artificial Sequence: Synthetic oligonucleotide
ucugcgccgagauuggcgg

SEQ ID NO: 1966381 - RNA, 19 nt, Artificial Sequence
  Description of Artificial Sequence: Synthetic oligonucleotide
caauguagucaaaggaagc

SEQ ID NO: 1966382 - RNA, 19 nt, Artificial Sequence
  Description of Artificial Sequence: Synthetic oligonucleotide
uagucaaaggaagccaagg

SEQ ID NO: 1966383 - RNA, 19 nt, Artificial Sequence
  Description of Artificial Sequence: Synthetic oligonucleotide
gucuuguacugguacaggg

SEQ ID NO: 1966384 - RNA, 19 nt, Artificial Sequence
  Description of Artificial Sequence: Synthetic oligonucleotide
aagguuggauucgugagug

SEQ ID NO: 1966385 - RNA, 19 nt, Artificial Sequence
  Description of Artificial Sequence: Synthetic oligonucleotide
cuuguugcagaauucgguc

SEQ ID NO: 1966386 - RNA, 19 nt, Artificial Sequence
  Description of Artificial Sequence: Synthetic oligonucleotide
ucuacagcuccaaacuuuc

SEQ ID NO: 1966387 - RNA, 19 nt, Artificial Sequence
  Description of Artificial Sequence: Synthetic oligonucleotide
agcuguugcaagcugucuc

SEQ ID NO: 1966388 - RNA, 19 nt, Artificial Sequence
  Description of Artificial Sequence: Synthetic oligonucleotide
cacggugugguacagcccg

SEQ ID NO: 1966389 - RNA, 19 nt, Artificial Sequence
  Description of Artificial Sequence: Synthetic oligonucleotide
ucuuguacugguacagggu

SEQ ID NO: 1966390 - RNA, 19 nt, Artificial Sequence
  Description of Artificial Sequence: Synthetic oligonucleotide
agucgaggaaggcacggac

SEQ ID NO: 1966391 - RNA, 19 nt, Artificial Sequence
  Description of Artificial Sequence: Synthetic oligonucleotide
uucauggguggguaauagg

SEQ ID NO: 1966392 - RNA, 19 nt, Artificial Sequence
  Description of Artificial Sequence: Synthetic oligonucleotide
ucacggacaauguagucaa

SEQ ID NO: 1966393 - RNA, 19 nt, Artificial Sequence
  Description of Artificial Sequence: Synthetic oligonucleotide
gcugucacccauuuguugg

SEQ ID NO: 1966394 - RNA, 19 nt, Artificial Sequence
  Description of Artificial Sequence: Synthetic oligonucleotide
ugcacccacauacuuggcc

SEQ ID NO: 1966395 - RNA, 19 nt, Artificial Sequence
  Description of Artificial Sequence: Synthetic oligonucleotide
ucgugagugucgcaucagg

SEQ ID NO: 1966396 - RNA, 19 nt, Artificial Sequence
  Description of Artificial Sequence: Synthetic oligonucleotide
cuuguacugguacaggguc

SEQ ID NO: 1966397 - RNA, 19 nt, Artificial Sequence
  Description of Artificial Sequence: Synthetic oligonucleotide
augaauggccggucuuugc

SEQ ID NO: 1966398 - RNA, 19 nt, Artificial Sequence
  Description of Artificial Sequence: Synthetic oligonucleotide
gagauuggcggccaggguc

SEQ ID NO: 1966399 - RNA, 19 nt, Artificial Sequence
  Description of Artificial Sequence: Synthetic oligonucleotide
acagcugcgcagccgagcg

SEQ ID NO: 1966400 - RNA, 19 nt, Artificial Sequence
  Description of Artificial Sequence: Synthetic oligonucleotide
uuguugcagaauucgguca

SEQ ID NO: 1966401 - RNA, 19 nt, Artificial Sequence
  Description of Artificial Sequence: Synthetic oligonucleotide
aggguucaccuccacuacc

SEQ ID NO: 1966402 - RNA, 19 nt, Artificial Sequence
  Description of Artificial Sequence: Synthetic oligonucleotide
aggcgcaccggcucaagcc

SEQ ID NO: 1966403 - RNA, 19 nt, Artificial Sequence
  Description of Artificial Sequence: Synthetic oligonucleotide
agguaccaagguuggauuc

SEQ ID NO: 1966404 - RNA, 19 nt, Artificial Sequence
  Description of Artificial Sequence: Synthetic oligonucleotide
acuggcgccacuucaucuc

SEQ ID NO: 1966405 - RNA, 19 nt, Artificial Sequence
  Description of Artificial Sequence: Synthetic oligonucleotide
accuccacuaccugauagg

SEQ ID NO: 1966406 - RNA, 19 nt, Artificial Sequence
  Description of Artificial Sequence: Synthetic oligonucleotide
auucggucaccuccuugcc

SEQ ID NO: 1966407 - RNA, 19 nt, Artificial Sequence
  Description of Artificial Sequence: Synthetic oligonucleotide
guuggauucgugagugucg

SEQ ID NO: 1966408 - RNA, 19 nt, Artificial Sequence
  Description of Artificial Sequence: Synthetic oligonucleotide
cucucagcacaccauacac

SEQ ID NO: 1966409 - RNA, 19 nt, Artificial Sequence
  Description of Artificial Sequence: Synthetic oligonucleotide
uucaccuccacuaccugau

SEQ ID NO: 1966410 - RNA, 19 nt, Artificial Sequence
  Description of Artificial Sequence: Synthetic oligonucleotide
cugauaaugacugaggagu

SEQ ID NO: 1966411 - RNA, 19 nt, Artificial Sequence
  Description of Artificial Sequence: Synthetic oligonucleotide
aauggccggucuuugccca

SEQ ID NO: 1966412 - RNA, 19 nt, Artificial Sequence
  Description of Artificial Sequence: Synthetic oligonucleotide
ucacccauuuguuggcugc

SEQ ID NO: 1966413 - RNA, 19 nt, Artificial Sequence
  Description of Artificial Sequence: Synthetic oligonucleotide
caacucugcgccgagauug

SEQ ID NO: 1966414 - RNA, 19 nt, Artificial Sequence
  Description of Artificial Sequence: Synthetic oligonucleotide
acaggguucaccuccacua

SEQ ID NO: 1966415 - RNA, 19 nt, Artificial Sequence
  Description of Artificial Sequence: Synthetic oligonucleotide
agcaagguuaggcuuuuga

SEQ ID NO: 1966416 - RNA, 19 nt, Artificial Sequence
  Description of Artificial Sequence: Synthetic oligonucleotide
aagguaccaagguuggauu

SEQ ID NO: 1966417 - RNA, 19 nt, Artificial Sequence
  Description of Artificial Sequence: Synthetic oligonucleotide
aaacuuucccucacggaca

SEQ ID NO: 1966418 - RNA, 19 nt, Artificial Sequence
  Description of Artificial Sequence: Synthetic oligonucleotide
gaauggccggucuuugccc

SEQ ID NO: 1966419 - RNA, 19 nt, Artificial Sequence
  Description of Artificial Sequence: Synthetic oligonucleotide
gaagucgaggaaggcacgg

SEQ ID NO: 1966420 - RNA, 19 nt, Artificial Sequence
  Description of Artificial Sequence: Synthetic oligonucleotide
acggacaauguagucaaag

SEQ ID NO: 1966421 - RNA, 19 nt, Artificial Sequence
  Description of Artificial Sequence: Synthetic oligonucleotide
cagucaucggcccacuggc

SEQ ID NO: 1966422 - RNA, 19 nt, Artificial Sequence
  Description of Artificial Sequence: Synthetic oligonucleotide
uuggauucgugagugucgc

SEQ ID NO: 1966423 - RNA, 19 nt, Artificial Sequence
  Description of Artificial Sequence: Synthetic oligonucleotide
agguuaggcuuuugacccc

SEQ ID NO: 1966424 - RNA, 19 nt, Artificial Sequence
  Description of Artificial Sequence: Synthetic oligonucleotide
augucuuguacugguacag

SEQ ID NO: 1966425 - RNA, 19 nt, Artificial Sequence
  Description of Artificial Sequence: Synthetic oligonucleotide
aggucagcaagguuaggcu

SEQ ID NO: 1966426 - RNA, 19 nt, Artificial Sequence
  Description of Artificial Sequence: Synthetic oligonucleotide
aggugcaccagccagucau

SEQ ID NO: 1966427 - RNA, 19 nt, Artificial Sequence
  Description of Artificial Sequence: Synthetic oligonucleotide
uugcccacggcugucaccc

SEQ ID NO: 1966428 - RNA, 19 nt, Artificial Sequence
  Description of Artificial Sequence: Synthetic oligonucleotide
agcaugagccaguacuugu

SEQ ID NO: 1966429 - RNA, 19 nt, Artificial Sequence
  Description of Artificial Sequence: Synthetic oligonucleotide
uccauccgaagguaccaag

SEQ ID NO: 1966430 - RNA, 19 nt, Artificial Sequence
  Description of Artificial Sequence: Synthetic oligonucleotide
ugauagggcagggagugga

SEQ ID NO: 1966431 - RNA, 19 nt, Artificial Sequence
  Description of Artificial Sequence: Synthetic oligonucleotide
aacuuucccucacggacaa

SEQ ID NO: 1966432 - RNA, 19 nt, Artificial Sequence
  Description of Artificial Sequence: Synthetic oligonucleotide
auucgugagugucgcauca

SEQ ID NO: 1966433 - RNA, 19 nt, Artificial Sequence
  Description of Artificial Sequence: Synthetic oligonucleotide
guugcaagcugucuccuuc

SEQ ID NO: 1966434 - RNA, 19 nt, Artificial Sequence
  Description of Artificial Sequence: Synthetic oligonucleotide
ucggccaaggcgcaccggc

SEQ ID NO: 1966435 - RNA, 19 nt, Artificial Sequence
  Description of Artificial Sequence: Synthetic oligonucleotide
auaaugacugaggagucau

SEQ ID NO: 1966436 - RNA, 19 nt, Artificial Sequence
  Description of Artificial Sequence: Synthetic oligonucleotide
ugaucucagcccuucugac

SEQ ID NO: 1966437 - RNA, 19 nt, Artificial Sequence
  Description of Artificial Sequence: Synthetic oligonucleotide
uugaggcgcuugcugauga

SEQ ID NO: 1966438 - RNA, 19 nt, Artificial Sequence
  Description of Artificial Sequence: Synthetic oligonucleotide
uaauaggugaugaccucuu

SEQ ID NO: 1966439 - RNA, 19 nt, Artificial Sequence
  Description of Artificial Sequence: Synthetic oligonucleotide
uacugguacagggucagcu

SEQ ID NO: 1966440 - RNA, 19 nt, Artificial Sequence
  Description of Artificial Sequence: Synthetic oligonucleotide
uccuguaggaggagaauuu

SEQ ID NO: 1966441 - RNA, 19 nt, Artificial Sequence
  Description of Artificial Sequence: Synthetic oligonucleotide
ugcugaugagguacauggc

SEQ ID NO: 1966442 - RNA, 19 nt, Artificial Sequence
  Description of Artificial Sequence: Synthetic oligonucleotide
gaauucggucaccuccuug

SEQ ID NO: 1966443 - RNA, 19 nt, Artificial Sequence
  Description of Artificial Sequence: Synthetic oligonucleotide
agauuggcggccagggucg

SEQ ID NO: 1966444 - RNA, 19 nt, Artificial Sequence
  Description of Artificial Sequence: Synthetic oligonucleotide
cacauacuuggccauggug

SEQ ID NO: 1966445 - RNA, 19 nt, Artificial Sequence
  Description of Artificial Sequence: Synthetic oligonucleotide
uagaggucugcacggacau

SEQ ID NO: 1966446 - RNA, 19 nt, Artificial Sequence
  Description of Artificial Sequence: Synthetic oligonucleotide
cuggauggagacagcugcg

SEQ ID NO: 1966447 - RNA, 19 nt, Artificial Sequence
  Description of Artificial Sequence: Synthetic oligonucleotide
acaccauacacugccaggu

SEQ ID NO: 1966448 - RNA, 19 nt, Artificial Sequence
  Description of Artificial Sequence: Synthetic oligonucleotide
ggagucauucagcuguugc

SEQ ID NO: 1966449 - RNA, 19 nt, Artificial Sequence
  Description of Artificial Sequence: Synthetic oligonucleotide
ucacucucagcacaccaua

SEQ ID NO: 1966450 - RNA, 19 nt, Artificial Sequence
  Description of Artificial Sequence: Synthetic oligonucleotide
cuugcccuggucauucaug

SEQ ID NO: 1966451 - RNA, 19 nt, Artificial Sequence
  Description of Artificial Sequence: Synthetic oligonucleotide
gauaaugacugaggaguca

SEQ ID NO: 1966452 - RNA, 19 nt, Artificial Sequence
  Description of Artificial Sequence: Synthetic oligonucleotide
cucugcgccgagauuggcg

SEQ ID NO: 1966453 - RNA, 19 nt, Artificial Sequence
  Description of Artificial Sequence: Synthetic oligonucleotide
cucaagcccagaacccacg

SEQ ID NO: 1966454 - RNA, 19 nt, Artificial Sequence
  Description of Artificial Sequence: Synthetic oligonucleotide
ugcuucauagaggucugca

SEQ ID NO: 1966455 - RNA, 19 nt, Artificial Sequence
  Description of Artificial Sequence: Synthetic oligonucleotide
agggcgcugauaaugacug

SEQ ID NO: 1966456 - RNA, 19 nt, Artificial Sequence
  Description of Artificial Sequence: Synthetic oligonucleotide
aauggcccgcuccauccga

SEQ ID NO: 1966457 - RNA, 19 nt, Artificial Sequence
  Description of Artificial Sequence: Synthetic oligonucleotide
gauucgugagugucgcauc

SEQ ID NO: 1966458 - RNA, 19 nt, Artificial Sequence
  Description of Artificial Sequence: Synthetic oligonucleotide
gguaccaagguuggauucg

SEQ ID NO: 1966459 - RNA, 19 nt, Artificial Sequence
  Description of Artificial Sequence: Synthetic oligonucleotide
cggacuuugcugcagaagg

SEQ ID NO: 1966460 - RNA, 19 nt, Artificial Sequence
  Description of Artificial Sequence: Synthetic oligonucleotide
gagcgcgccgcccagggcc

SEQ ID NO: 1966461 - RNA, 19 nt, Artificial Sequence
  Description of Artificial Sequence: Synthetic oligonucleotide
aaggccucggcagguguuc

SEQ ID NO: 1966462 - RNA, 19 nt, Artificial Sequence
  Description of Artificial Sequence: Synthetic oligonucleotide
gcaagguuaggcuuuugac

SEQ ID NO: 1966463 - RNA, 19 nt, Artificial Sequence
  Description of Artificial Sequence: Synthetic oligonucleotide
gucaucggcccacuggcgc

SEQ ID NO: 1966464 - RNA, 19 nt, Artificial Sequence
  Description of Artificial Sequence: Synthetic oligonucleotide
gcuguugcaagcugucucc

SEQ ID NO: 1966465 - RNA, 19 nt, Artificial Sequence
  Description of Artificial Sequence: Synthetic oligonucleotide
aaccgcgggcuccccuugc

SEQ ID NO: 1966466 - RNA, 19 nt, Artificial Sequence
  Description of Artificial Sequence: Synthetic oligonucleotide
cugucacccauuuguuggc

SEQ ID NO: 1966467 - RNA, 19 nt, Artificial Sequence
  Description of Artificial Sequence: Synthetic oligonucleotide
cauagaggucugcacggac

SEQ ID NO: 1966468 - RNA, 19 nt, Artificial Sequence
  Description of Artificial Sequence: Synthetic oligonucleotide
caucgaaggcuuccagacc

SEQ ID NO: 1966469 - RNA, 19 nt, Artificial Sequence
  Description of Artificial Sequence: Synthetic oligonucleotide
uggauggagacagcugcgc

SEQ ID NO: 1966470 - RNA, 19 nt, Artificial Sequence
  Description of Artificial Sequence: Synthetic oligonucleotide
cucacggacaauguaguca

SEQ ID NO: 1966471 - RNA, 19 nt, Artificial Sequence
  Description of Artificial Sequence: Synthetic oligonucleotide
acuaccugauagggcaggg

SEQ ID NO: 1966472 - RNA, 19 nt, Artificial Sequence
  Description of Artificial Sequence: Synthetic oligonucleotide
agaacccacgcaacgcgcg

SEQ ID NO: 1966473 - RNA, 19 nt, Artificial Sequence
  Description of Artificial Sequence: Synthetic oligonucleotide
cagaacccacgcaacgcgc

SEQ ID NO: 1966474 - RNA, 19 nt, Artificial Sequence
  Description of Artificial Sequence: Synthetic oligonucleotide
cuacagcuccaaacuuucc

SEQ ID NO: 1966475 - RNA, 19 nt, Artificial Sequence
  Description of Artificial Sequence: Synthetic oligonucleotide
auuugaucucagcccuucu

SEQ ID NO: 1966476 - RNA, 19 nt, Artificial Sequence
  Description of Artificial Sequence: Synthetic oligonucleotide
cacucucagcacaccauac

SEQ ID NO: 1966477 - RNA, 19 nt, Artificial Sequence
  Description of Artificial Sequence: Synthetic oligonucleotide
auagaggucugcacggaca

SEQ ID NO: 1966478 - RNA, 19 nt, Artificial Sequence
  Description of Artificial Sequence: Synthetic oligonucleotide
guggguaauaggugaugac

SEQ ID NO: 1966479 - RNA, 19 nt, Artificial Sequence
  Description of Artificial Sequence: Synthetic oligonucleotide
ccauccgaagguaccaagg

SEQ ID NO: 1966480 - RNA, 19 nt, Artificial Sequence
  Description of Artificial Sequence: Synthetic oligonucleotide
agaagggacaugucuugua

SEQ ID NO: 1966481 - RNA, 19 nt, Artificial Sequence
  Description of Artificial Sequence: Synthetic oligonucleotide
guucaccuccacuaccuga

SEQ ID NO: 1966482 - RNA, 19 nt, Artificial Sequence
  Description of Artificial Sequence: Synthetic oligonucleotide
uggugaagccggcccaacu

SEQ ID NO: 1966483 - RNA, 19 nt, Artificial Sequence
  Description of Artificial Sequence: Synthetic oligonucleotide
gcaccagccagucaucggc

SEQ ID NO: 1966484 - RNA, 19 nt, Artificial Sequence
  Description of Artificial Sequence: Synthetic oligonucleotide
ggcgcugauaaugacugag

SEQ ID NO: 1966485 - RNA, 19 nt, Artificial Sequence
  Description of Artificial Sequence: Synthetic oligonucleotide
gaagguaccaagguuggau

SEQ ID NO: 1966486 - RNA, 19 nt, Artificial Sequence
  Description of Artificial Sequence: Synthetic oligonucleotide
gaacccacgcaacgcgcgc

SEQ ID NO: 1966487 - RNA, 19 nt, Artificial Sequence
  Description of Artificial Sequence: Synthetic oligonucleotide
ccggcucaagcccagaacc

SEQ ID NO: 1966488 - RNA, 19 nt, Artificial Sequence
  Description of Artificial Sequence: Synthetic oligonucleotide
ugcgcagccgagcgcucgg

SEQ ID NO: 1966489 - RNA, 19 nt, Artificial Sequence
  Description of Artificial Sequence: Synthetic oligonucleotide
uaccaagguuggauucgug

SEQ ID NO: 1966490 - RNA, 19 nt, Artificial Sequence
  Description of Artificial Sequence: Synthetic oligonucleotide
cacugccaggucagcaagg

SEQ ID NO: 1966491 - RNA, 19 nt, Artificial Sequence
  Description of Artificial Sequence: Synthetic oligonucleotide
ugcagguggugccugcuuu

SEQ ID NO: 1966492 - RNA, 19 nt, Artificial Sequence
  Description of Artificial Sequence: Synthetic oligonucleotide
gcagaagggacaugucuug

SEQ ID NO: 1966493 - RNA, 19 nt, Artificial Sequence
  Description of Artificial Sequence: Synthetic oligonucleotide
caugaauggccggucuuug

SEQ ID NO: 1966494 - RNA, 19 nt, Artificial Sequence
  Description of Artificial Sequence: Synthetic oligonucleotide
uggguggguaauaggugau

SEQ ID NO: 1966495 - RNA, 19 nt, Artificial Sequence
  Description of Artificial Sequence: Synthetic oligonucleotide
gguaauaggugaugaccuc

SEQ ID NO: 1966496 - RNA, 19 nt, Artificial Sequence
  Description of Artificial Sequence: Synthetic oligonucleotide
caucacucucagcacacca

SEQ ID NO: 1966497 - RNA, 19 nt, Artificial Sequence
  Description of Artificial Sequence: Synthetic oligonucleotide
agggucgugugcgcggccc

SEQ ID NO: 1966498 - RNA, 19 nt, Artificial Sequence
  Description of Artificial Sequence: Synthetic oligonucleotide
agcccuucugacaggguuc

SEQ ID NO: 1966499 - RNA, 19 nt, Artificial Sequence
  Description of Artificial Sequence: Synthetic oligonucleotide
uucgugagugucgcaucag

SEQ ID NO: 1966500 - RNA, 19 nt, Artificial Sequence
  Description of Artificial Sequence: Synthetic oligonucleotide
uucccaccauacauccgcu

SEQ ID NO: 1966501 - RNA, 19 nt, Artificial Sequence
  Description of Artificial Sequence: Synthetic oligonucleotide
ugaggcgcuugcugaugag

SEQ ID NO: 1966502 - RNA, 19 nt, Artificial Sequence
  Description of Artificial Sequence: Synthetic oligonucleotide
ccagaacccacgcaacgcg

SEQ ID NO: 1966503 - RNA, 19 nt, Artificial Sequence
  Description of Artificial Sequence: Synthetic oligonucleotide
ugcagguggcuggauggag

SEQ ID NO: 1966504 - RNA, 19 nt, Artificial Sequence
  Description of Artificial Sequence: Synthetic oligonucleotide
ugagggcgcugauaaugac

SEQ ID NO: 1966505 - RNA, 19 nt, Artificial Sequence
  Description of Artificial Sequence: Synthetic oligonucleotide
ucgugugcgcggccccucg

SEQ ID NO: 1966506 - RNA, 19 nt, Artificial Sequence
  Description of Artificial Sequence: Synthetic oligonucleotide
gucacccauuuguuggcug

SEQ ID NO: 1966507 - RNA, 19 nt, Artificial Sequence
  Description of Artificial Sequence: Synthetic oligonucleotide
caccagccagucaucggcc

SEQ ID NO: 1966508 - RNA, 19 nt, Artificial Sequence
  Description of Artificial Sequence: Synthetic oligonucleotide
acggacuuugcugcagaag

SEQ ID NO: 1966509 - RNA, 19 nt, Artificial Sequence
  Description of Artificial Sequence: Synthetic oligonucleotide
auacacugccaggucagca

SEQ ID NO: 1966510 - RNA, 19 nt, Artificial Sequence
  Description of Artificial Sequence: Synthetic oligonucleotide
uacauggcagcugcaccca

SEQ ID NO: 1966511 - RNA, 19 nt, Artificial Sequence
  Description of Artificial Sequence: Synthetic oligonucleotide
cacuaccugauagggcagg

SEQ ID NO: 1966512 - RNA, 19 nt, Artificial Sequence
  Description of Artificial Sequence: Synthetic oligonucleotide
ggacuuugcugcagaaggg

SEQ ID NO: 1966513 - RNA, 19 nt, Artificial Sequence
  Description of Artificial Sequence: Synthetic oligonucleotide
caccauacauccgcugggc

SEQ ID NO: 1966514 - RNA, 19 nt, Artificial Sequence
  Description of Artificial Sequence: Synthetic oligonucleotide
aggaaggcacggacuuugc

SEQ ID NO: 1966515 - RNA, 19 nt, Artificial Sequence
  Description of Artificial Sequence: Synthetic oligonucleotide
caauggcccgcuccauccg

SEQ ID NO: 1966516 - RNA, 19 nt, Artificial Sequence
  Description of Artificial Sequence: Synthetic oligonucleotide
ggccucuacagcuccaaac

SEQ ID NO: 1966517 - RNA, 19 nt, Artificial Sequence
  Description of Artificial Sequence: Synthetic oligonucleotide
ggugaagccggcccaacuc

SEQ ID NO: 1966518 - RNA, 19 nt, Artificial Sequence
  Description of Artificial Sequence: Synthetic oligonucleotide
caggguucaccuccacuac

SEQ ID NO: 1966519 - RNA, 19 nt, Artificial Sequence
  Description of Artificial Sequence: Synthetic oligonucleotide
gugccugcuuuugaggcgc

SEQ ID NO: 1966520 - RNA, 19 nt, Artificial Sequence
  Description of Artificial Sequence: Synthetic oligonucleotide
ucgaaggcuuccagacccu

SEQ ID NO: 1966521 - RNA, 19 nt, Artificial Sequence
  Description of Artificial Sequence: Synthetic oligonucleotide
ucccaccauacauccgcug

SEQ ID NO: 1966522 - RNA, 19 nt, Artificial Sequence
  Description of Artificial Sequence: Synthetic oligonucleotide
ccgaagguaccaagguugg

SEQ ID NO: 1966523 - RNA, 19 nt, Artificial Sequence
  Description of Artificial Sequence: Synthetic oligonucleotide
gaagccggcccaacucugc

SEQ ID NO: 1966524 - RNA, 19 nt, Artificial Sequence
  Description of Artificial Sequence: Synthetic oligonucleotide
ugcuuuugaggcgcuugcu

SEQ ID NO: 1966525 - RNA, 19 nt, Artificial Sequence
  Description of Artificial Sequence: Synthetic oligonucleotide
gaggucuugagggcgcuga

SEQ ID NO: 1966526 - RNA, 19 nt, Artificial Sequence
  Description of Artificial Sequence: Synthetic oligonucleotide
caggggcugcccugaaacc

SEQ ID NO: 1966527 - RNA, 19 nt, Artificial Sequence
  Description of Artificial Sequence: Synthetic oligonucleotide
gguuggauucgugaguguc

SEQ ID NO: 1966528 - RNA, 19 nt, Artificial Sequence
  Description of Artificial Sequence: Synthetic oligonucleotide
ugucacccauuuguuggcu

SEQ ID NO: 1966529 - RNA, 19 nt, Artificial Sequence
  Description of Artificial Sequence: Synthetic oligonucleotide
auggccggucuuugcccac

SEQ ID NO: 1966530 - RNA, 19 nt, Artificial Sequence
  Description of Artificial Sequence: Synthetic oligonucleotide
ccuccacuaccugauaggg

SEQ ID NO: 1966531 - RNA, 19 nt, Artificial Sequence
  Description of Artificial Sequence: Synthetic oligonucleotide
acaucauccugcagguggu

SEQ ID NO: 1966532 - RNA, 19 nt, Artificial Sequence
  Description of Artificial Sequence: Synthetic oligonucleotide
uguugcaagcugucuccuu

SEQ ID NO: 1966533 - RNA, 19 nt, Artificial Sequence
  Description of Artificial Sequence: Synthetic oligonucleotide
ggcugucacccauuuguug

SEQ ID NO: 1966534 - RNA, 19 nt, Artificial Sequence
  Description of Artificial Sequence: Synthetic oligonucleotide
cauacacugccaggucagc

SEQ ID NO: 1966535 - RNA, 19 nt, Artificial Sequence
  Description of Artificial Sequence: Synthetic oligonucleotide
ccaccauacauccgcuggg

SEQ ID NO: 1966536 - RNA, 19 nt, Artificial Sequence
  Description of Artificial Sequence: Synthetic oligonucleotide
gcccagaacccacgcaacg

SEQ ID NO: 1966537 - RNA, 19 nt, Artificial Sequence
  Description of Artificial Sequence: Synthetic oligonucleotide
uuccguccuggcuuccuuc

SEQ ID NO: 1966538 - RNA, 19 nt, Artificial Sequence
  Description of Artificial Sequence: Synthetic oligonucleotide
aucacucucagcacaccau

SEQ ID NO: 1966539 - RNA, 19 nt, Artificial Sequence
  Description of Artificial Sequence: Synthetic oligonucleotide
auacauccgcugggccucc

SEQ ID NO: 1966540 - RNA, 19 nt, Artificial Sequence
  Description of Artificial Sequence: Synthetic oligonucleotide
agucaucggcccacuggcg

SEQ ID NO: 1966541 - RNA, 19 nt, Artificial Sequence
  Description of Artificial Sequence: Synthetic oligonucleotide
accgcgggcuccccuugcg

SEQ ID NO: 1966542 - RNA, 19 nt, Artificial Sequence
  Description of Artificial Sequence: Synthetic oligonucleotide
aggcgcuugcugaugaggu

SEQ ID NO: 1966543 - RNA, 19 nt, Artificial Sequence
  Description of Artificial Sequence: Synthetic oligonucleotide
uggauucgugagugucgca

SEQ ID NO: 1966544 - RNA, 19 nt, Artificial Sequence
  Description of Artificial Sequence: Synthetic oligonucleotide
gcgcugauaaugacugagg

SEQ ID NO: 1966545 - RNA, 19 nt, Artificial Sequence
  Description of Artificial Sequence: Synthetic oligonucleotide
ggaagucgaggaaggcacg

SEQ ID NO: 1966546 - RNA, 19 nt, Artificial Sequence
  Description of Artificial Sequence: Synthetic oligonucleotide
ggcgcaccggcucaagccc

SEQ ID NO: 1966547 - RNA, 19 nt, Artificial Sequence
  Description of Artificial Sequence: Synthetic oligonucleotide
uugcggaccgcggggcccg

SEQ ID NO: 1966548 - RNA, 19 nt, Artificial Sequence
  Description of Artificial Sequence: Synthetic oligonucleotide
caccauacacugccagguc

SEQ ID NO: 1966549 - RNA, 19 nt, Artificial Sequence
  Description of Artificial Sequence: Synthetic oligonucleotide
auggccuucaugggugggu

SEQ ID NO: 1966550 - RNA, 19 nt, Artificial Sequence
  Description of Artificial Sequence: Synthetic oligonucleotide
cuuugcccacggcugucac

SEQ ID NO: 1966551 - RNA, 19 nt, Artificial Sequence
  Description of Artificial Sequence: Synthetic oligonucleotide
ggguaauaggugaugaccu

SEQ ID NO: 1966552 - RNA, 19 nt, Artificial Sequence
  Description of Artificial Sequence: Synthetic oligonucleotide
cugauagggcagggagugg

SEQ ID NO: 1966553 - RNA, 19 nt, Artificial Sequence
  Description of Artificial Sequence: Synthetic oligonucleotide
cuccccuugcggaccgcgg

SEQ ID NO: 1966554 - RNA, 19 nt, Artificial Sequence
  Description of Artificial Sequence: Synthetic oligonucleotide
accugauagggcagggagu

SEQ ID NO: 1966555 - RNA, 19 nt, Artificial Sequence
  Description of Artificial Sequence: Synthetic oligonucleotide
cauccgcugggccuccuuc

SEQ ID NO: 1966556 - RNA, 19 nt, Artificial Sequence
  Description of Artificial Sequence: Synthetic oligonucleotide
uggccggucuuugcccacg

SEQ ID NO: 1966557 - RNA, 19 nt, Artificial Sequence
  Description of Artificial Sequence: Synthetic oligonucleotide
augaggugcaccagccagu

SEQ ID NO: 1966558 - RNA, 19 nt, Artificial Sequence
  Description of Artificial Sequence: Synthetic oligonucleotide
agguuggauucgugagugu

SEQ ID NO: 1966559 - RNA, 19 nt, Artificial Sequence
  Description of Artificial Sequence: Synthetic oligonucleotide
cauccgaagguaccaaggu

SEQ ID NO: 1966560 - RNA, 19 nt, Artificial Sequence
  Description of Artificial Sequence: Synthetic oligonucleotide
aggucaucgaaggcuucca

SEQ ID NO: 1966561 - RNA, 19 nt, Artificial Sequence
  Description of Artificial Sequence: Synthetic oligonucleotide
cuugcggaccgcggggccc

SEQ ID NO: 1966562 - RNA, 19 nt, Artificial Sequence
  Description of Artificial Sequence: Synthetic oligonucleotide
ucggcgcggagguccuggg

SEQ ID NO: 1966563 - RNA, 19 nt, Artificial Sequence
  Description of Artificial Sequence: Synthetic oligonucleotide
gguguucgguacacauugg

SEQ ID NO: 1966564 - RNA, 19 nt, Artificial Sequence
  Description of Artificial Sequence: Synthetic oligonucleotide
cgccacuucaucucuuccg

SEQ ID NO: 1966565 - RNA, 19 nt, Artificial Sequence
  Description of Artificial Sequence: Synthetic oligonucleotide
uggcccgcuccauccgaag

SEQ ID NO: 1966566 - RNA, 19 nt, Artificial Sequence
  Description of Artificial Sequence: Synthetic oligonucleotide
ggauggagacagcugcgca

SEQ ID NO: 1966567 - RNA, 19 nt, Artificial Sequence
  Description of Artificial Sequence: Synthetic oligonucleotide
ggcccgcuccauccgaagg

SEQ ID NO: 1966568 - RNA, 19 nt, Artificial Sequence
  Description of Artificial Sequence: Synthetic oligonucleotide
gugaagccggcccaacucu

SEQ ID NO: 1966569 - RNA, 19 nt, Artificial Sequence
  Description of Artificial Sequence: Synthetic oligonucleotide
guacagcccgagcgcgccg

SEQ ID NO: 1966570 - RNA, 19 nt, Artificial Sequence
  Description of Artificial Sequence: Synthetic oligonucleotide
cucggcgcggagguccugg

SEQ ID NO: 1966571 - RNA, 19 nt, Artificial Sequence
  Description of Artificial Sequence: Synthetic oligonucleotide
gagggcgcugauaaugacu

SEQ ID NO: 1966572 - RNA, 19 nt, Artificial Sequence
  Description of Artificial Sequence: Synthetic oligonucleotide
gcggccagggucgugugcg

SEQ ID NO: 1966573 - RNA, 19 nt, Artificial Sequence
  Description of Artificial Sequence: Synthetic oligonucleotide
gauagggcagggaguggaa

SEQ ID NO: 1966574 - RNA, 19 nt, Artificial Sequence
  Description of Artificial Sequence: Synthetic oligonucleotide
caccaggaugggcaccuuc

SEQ ID NO: 1966575 - RNA, 19 nt, Artificial Sequence
  Description of Artificial Sequence: Synthetic oligonucleotide
gccggcccaacucugcgcc

SEQ ID NO: 1966576 - RNA, 19 nt, Artificial Sequence
  Description of Artificial Sequence: Synthetic oligonucleotide
ccugaaaccagggaggucu

SEQ ID NO: 1966577 - RNA, 19 nt, Artificial Sequence
  Description of Artificial Sequence: Synthetic oligonucleotide
ccgagauuggcggccaggg

SEQ ID NO: 1966578 - RNA, 19 nt, Artificial Sequence
  Description of Artificial Sequence: Synthetic oligonucleotide
gguacagcccgagcgcgcc

SEQ ID NO: 1966579 - RNA, 19 nt, Artificial Sequence
  Description of Artificial Sequence: Synthetic oligonucleotide
aggagucauucagcuguug

SEQ ID NO: 1966580 - RNA, 19 nt, Artificial Sequence
  Description of Artificial Sequence: Synthetic oligonucleotide
gugugcgcggccccucggc

SEQ ID NO: 1966581 - RNA, 19 nt, Artificial Sequence
  Description of Artificial Sequence: Synthetic oligonucleotide
agcaaccgcgggcuccccu

SEQ ID NO: 1966582 - RNA, 19 nt, Artificial Sequence
  Description of Artificial Sequence: Synthetic oligonucleotide
uggccuucaugggugggua

SEQ ID NO: 1966583 - RNA, 19 nt, Artificial Sequence
  Description of Artificial Sequence: Synthetic oligonucleotide
gacaugucuuguacuggua

SEQ ID NO: 1966584 - RNA, 19 nt, Artificial Sequence
  Description of Artificial Sequence: Synthetic oligonucleotide
gccagggucgugugcgcgg

SEQ ID NO: 1966585 - RNA, 19 nt, Artificial Sequence
  Description of Artificial Sequence: Synthetic oligonucleotide
gcgcuugcugaugagguac

SEQ ID NO: 1966586 - RNA, 19 nt, Artificial Sequence
  Description of Artificial Sequence: Synthetic oligonucleotide
cacggacaucauccugcag

SEQ ID NO: 1966587 - RNA, 19 nt, Artificial Sequence
  Description of Artificial Sequence: Synthetic oligonucleotide
ccauuuguuggcugcuuca

SEQ ID NO: 1966588 - RNA, 19 nt, Artificial Sequence
  Description of Artificial Sequence: Synthetic oligonucleotide
cccagaacccacgcaacgc

SEQ ID NO: 1966589 - RNA, 19 nt, Artificial Sequence
  Description of Artificial Sequence: Synthetic oligonucleotide
cagccagucaucggcccac

SEQ ID NO: 1966590 - RNA, 19 nt, Artificial Sequence
  Description of Artificial Sequence: Synthetic oligonucleotide
ccaaacuuucccucacgga

SEQ ID NO: 1966591 - RNA, 19 nt, Artificial Sequence
  Description of Artificial Sequence: Synthetic oligonucleotide
gcagccgagcgcucggcgc

SEQ ID NO: 1966592 - RNA, 19 nt, Artificial Sequence
  Description of Artificial Sequence: Synthetic oligonucleotide
ugccaccgcacgguguggu

SEQ ID NO: 1966593 - RNA, 19 nt, Artificial Sequence
  Description of Artificial Sequence: Synthetic oligonucleotide
ccugcuuuugaggcgcuug

SEQ ID NO: 1966594 - RNA, 19 nt, Artificial Sequence
  Description of Artificial Sequence: Synthetic oligonucleotide
cugcgcagccgagcgcucg

SEQ ID NO: 1966595 - RNA, 19 nt, Artificial Sequence
  Description of Artificial Sequence: Synthetic oligonucleotide
cugcgccgagauuggcggc

SEQ ID NO: 1966596 - RNA, 19 nt, Artificial Sequence
  Description of Artificial Sequence: Synthetic oligonucleotide
cacggcugucacccauuug

SEQ ID NO: 1966597 - RNA, 19 nt, Artificial Sequence
  Description of Artificial Sequence: Synthetic oligonucleotide
gggaguggaagucgaggaa

SEQ ID NO: 1966598 - RNA, 19 nt, Artificial Sequence
  Description of Artificial Sequence: Synthetic oligonucleotide
cuaccugauagggcaggga

SEQ ID NO: 1966599 - RNA, 19 nt, Artificial Sequence
  Description of Artificial Sequence: Synthetic oligonucleotide
ugggcgcgcaggugccacc

SEQ ID NO: 1966600 - RNA, 19 nt, Artificial Sequence
  Description of Artificial Sequence: Synthetic oligonucleotide
gcgcaggugccaccgcacg

SEQ ID NO: 1966601 - RNA, 19 nt, Artificial Sequence
  Description of Artificial Sequence: Synthetic oligonucleotide
ggucugcacggacaucauc

SEQ ID NO: 1966602 - RNA, 19 nt, Artificial Sequence
  Description of Artificial Sequence: Synthetic oligonucleotide
ggguggguaauaggugaug

SEQ ID NO: 1966603 - RNA, 19 nt, Artificial Sequence
  Description of Artificial Sequence: Synthetic oligonucleotide
gggagaugaggugcaccag

SEQ ID NO: 1966604 - RNA, 19 nt, Artificial Sequence
  Description of Artificial Sequence: Synthetic oligonucleotide
ggcgccacuucaucucuuc

SEQ ID NO: 1966605 - RNA, 19 nt, Artificial Sequence
  Description of Artificial Sequence: Synthetic oligonucleotide
caccgcacggugugguaca

SEQ ID NO: 1966606 - RNA, 19 nt, Artificial Sequence
  Description of Artificial Sequence: Synthetic oligonucleotide
ccacuaccugauagggcag

SEQ ID NO: 1966607 - RNA, 19 nt, Artificial Sequence
  Description of Artificial Sequence: Synthetic oligonucleotide
cgcuccauccgaagguacc

SEQ ID NO: 1966608 - RNA, 19 nt, Artificial Sequence
  Description of Artificial Sequence: Synthetic oligonucleotide
gccgcccuggugaagccgg

SEQ ID NO: 1966609 - RNA, 19 nt, Artificial Sequence
  Description of Artificial Sequence: Synthetic oligonucleotide
ggcacggacuuugcugcag

SEQ ID NO: 1966610 - RNA, 19 nt, Artificial Sequence
  Description of Artificial Sequence: Synthetic oligonucleotide
accgcacggugugguacag

SEQ ID NO: 1966611 - RNA, 19 nt, Artificial Sequence
  Description of Artificial Sequence: Synthetic oligonucleotide
ggcugcccugaaaccaggg

SEQ ID NO: 1966612 - RNA, 19 nt, Artificial Sequence
  Description of Artificial Sequence: Synthetic oligonucleotide
ggauucgugagugucgcau

SEQ ID NO: 1966613 - RNA, 19 nt, Artificial Sequence
  Description of Artificial Sequence: Synthetic oligonucleotide
guaccaagguuggauucgu

SEQ ID NO: 1966614 - RNA, 19 nt, Artificial Sequence
  Description of Artificial Sequence: Synthetic oligonucleotide
caaccgcgggcuccccuug

SEQ ID NO: 1966615 - RNA, 19 nt, Artificial Sequence
  Description of Artificial Sequence: Synthetic oligonucleotide
gucgaggaaggcacggacu

SEQ ID NO: 1966616 - RNA, 19 nt, Artificial Sequence
  Description of Artificial Sequence: Synthetic oligonucleotide
cacggacuuugcugcagaa

SEQ ID NO: 1966617 - RNA, 19 nt, Artificial Sequence
  Description of Artificial Sequence: Synthetic oligonucleotide
gccgagauuggcggccagg

SEQ ID NO: 1966618 - RNA, 19 nt, Artificial Sequence
  Description of Artificial Sequence: Synthetic oligonucleotide
agccaaggccucggcaggu

SEQ ID NO: 1966619 - RNA, 19 nt, Artificial Sequence
  Description of Artificial Sequence: Synthetic oligonucleotide
gcgccacuucaucucuucc

SEQ ID NO: 1966620 - RNA, 19 nt, Artificial Sequence
  Description of Artificial Sequence: Synthetic oligonucleotide
cuuccaggggcugcccuga

SEQ ID NO: 1966621 - RNA, 19 nt, Artificial Sequence
  Description of Artificial Sequence: Synthetic oligonucleotide
ccucacggacaauguaguc

SEQ ID NO: 1966622 - RNA, 19 nt, Artificial Sequence
  Description of Artificial Sequence: Synthetic oligonucleotide
ggccggucuuugcccacgg

SEQ ID NO: 1966623 - RNA, 19 nt, Artificial Sequence
  Description of Artificial Sequence: Synthetic oligonucleotide
uuccaggggcugcccugaa

SEQ ID NO: 1966624 - RNA, 19 nt, Artificial Sequence
  Description of Artificial Sequence: Synthetic oligonucleotide
cauuuguuggcugcuucau

SEQ ID NO: 1966625 - RNA, 19 nt, Artificial Sequence
  Description of Artificial Sequence: Synthetic oligonucleotide
ggucagcaagguuaggcuu

SEQ ID NO: 1966626 - RNA, 19 nt, Artificial Sequence
  Description of Artificial Sequence: Synthetic oligonucleotide
cggcucaagcccagaaccc

SEQ ID NO: 1966627 - RNA, 19 nt, Artificial Sequence
  Description of Artificial Sequence: Synthetic oligonucleotide
gucuuugcccacggcuguc

SEQ ID NO: 1966628 - RNA, 19 nt, Artificial Sequence
  Description of Artificial Sequence: Synthetic oligonucleotide
gcacggacuuugcugcaga

SEQ ID NO: 1966629 - RNA, 19 nt, Artificial Sequence
  Description of Artificial Sequence: Synthetic oligonucleotide
ggcagggaguggaagucga

SEQ ID NO: 1966630 - RNA, 19 nt, Artificial Sequence
  Description of Artificial Sequence: Synthetic oligonucleotide
gcagguggcuggauggaga

SEQ ID NO: 1966631 - RNA, 19 nt, Artificial Sequence
  Description of Artificial Sequence: Synthetic oligonucleotide
gcagggaguggaagucgag

SEQ ID NO: 1966632 - RNA, 19 nt, Artificial Sequence
  Description of Artificial Sequence: Synthetic oligonucleotide
cugggcgcgcaggugccac

SEQ ID NO: 1966633 - RNA, 19 nt, Artificial Sequence
  Description of Artificial Sequence: Synthetic oligonucleotide
ggccagggucgugugcgcg

SEQ ID NO: 1966634 - RNA, 19 nt, Artificial Sequence
  Description of Artificial Sequence: Synthetic oligonucleotide
ccacuucaucucuuccguc

SEQ ID NO: 1966635 - RNA, 19 nt, Artificial Sequence
  Description of Artificial Sequence: Synthetic oligonucleotide
cagggucgugugcgcggcc

SEQ ID NO: 1966636 - RNA, 19 nt, Artificial Sequence
  Description of Artificial Sequence: Synthetic oligonucleotide
gggcuccccuugcggaccg

SEQ ID NO: 1966637 - RNA, 19 nt, Artificial Sequence
  Description of Artificial Sequence: Synthetic oligonucleotide
cucggccaaggcgcaccgg

SEQ ID NO: 1966638 - RNA, 19 nt, Artificial Sequence
  Description of Artificial Sequence: Synthetic oligonucleotide
gcuccccuugcggaccgcg

SEQ ID NO: 1966639 - RNA, 19 nt, Artificial Sequence
  Description of Artificial Sequence: Synthetic oligonucleotide
gugccaccgcacggugugg

SEQ ID NO: 1966640 - RNA, 19 nt, Artificial Sequence
  Description of Artificial Sequence: Synthetic oligonucleotide
auuggcggccagggucgug

SEQ ID NO: 1966641 - RNA, 19 nt, Artificial Sequence
  Description of Artificial Sequence: Synthetic oligonucleotide
ggucuuugcccacggcugu

SEQ ID NO: 1966642 - RNA, 19 nt, Artificial Sequence
  Description of Artificial Sequence: Synthetic oligonucleotide
ggguucaccuccacuaccu

SEQ ID NO: 1966643 - RNA, 19 nt, Artificial Sequence
  Description of Artificial Sequence: Synthetic oligonucleotide
gccaaggcgcaccggcuca

SEQ ID NO: 1966644 - RNA, 19 nt, Artificial Sequence
  Description of Artificial Sequence: Synthetic oligonucleotide
gagugucgcaucaggucau

SEQ ID NO: 1966645 - RNA, 19 nt, Artificial Sequence
  Description of Artificial Sequence: Synthetic oligonucleotide
ccccuugcggaccgcgggg

SEQ ID NO: 1966646 - RNA, 19 nt, Artificial Sequence
  Description of Artificial Sequence: Synthetic oligonucleotide
cagaagggacaugucuugu

SEQ ID NO: 1966647 - RNA, 19 nt, Artificial Sequence
  Description of Artificial Sequence: Synthetic oligonucleotide
caccggcucaagcccagaa

SEQ ID NO: 1966648 - RNA, 19 nt, Artificial Sequence
  Description of Artificial Sequence: Synthetic oligonucleotide
ugcccacggcugucaccca

SEQ ID NO: 1966649 - RNA, 19 nt, Artificial Sequence
  Description of Artificial Sequence: Synthetic oligonucleotide
gggucgugugcgcggcccc

SEQ ID NO: 1966650 - RNA, 19 nt, Artificial Sequence
  Description of Artificial Sequence: Synthetic oligonucleotide
gcccacuggcgccacuuca

SEQ ID NO: 1966651 - RNA, 19 nt, Artificial Sequence
  Description of Artificial Sequence: Synthetic oligonucleotide
gcgcucggcgcggaggucc

SEQ ID NO: 1966652 - RNA, 19 nt, Artificial Sequence
  Description of Artificial Sequence: Synthetic oligonucleotide
cuggcgccacuucaucucu

SEQ ID NO: 1966653 - RNA, 19 nt, Artificial Sequence
  Description of Artificial Sequence: Synthetic oligonucleotide
agcgcucggcgcggagguc

SEQ ID NO: 1966654 - RNA, 19 nt, Artificial Sequence
  Description of Artificial Sequence: Synthetic oligonucleotide
ccgagcgcgccgcccaggg

SEQ ID NO: 1966655 - RNA, 19 nt, Artificial Sequence
  Description of Artificial Sequence: Synthetic oligonucleotide
ccaccgcacggugugguac

SEQ ID NO: 1966656 - RNA, 19 nt, Artificial Sequence
  Description of Artificial Sequence: Synthetic oligonucleotide
cacggacaauguagucaaa

SEQ ID NO: 1966657 - RNA, 19 nt, Artificial Sequence
  Description of Artificial Sequence: Synthetic oligonucleotide
gcccuucugacaggguuca

SEQ ID NO: 1966658 - RNA, 19 nt, Artificial Sequence
  Description of Artificial Sequence: Synthetic oligonucleotide
ccuugcggaccgcggggcc

SEQ ID NO: 1966659 - RNA, 19 nt, Artificial Sequence
  Description of Artificial Sequence: Synthetic oligonucleotide
acggugugguacagcccga

SEQ ID NO: 1966660 - RNA, 19 nt, Artificial Sequence
  Description of Artificial Sequence: Synthetic oligonucleotide
ccacuggcgccacuucauc

SEQ ID NO: 1966661 - RNA, 19 nt, Artificial Sequence
  Description of Artificial Sequence: Synthetic oligonucleotide
gcgggcuccccuugcggac

SEQ ID NO: 1966662 - RNA, 19 nt, Artificial Sequence
  Description of Artificial Sequence: Synthetic oligonucleotide
auggcccgcuccauccgaa

SEQ ID NO: 1966663 - RNA, 19 nt, Artificial Sequence
  Description of Artificial Sequence: Synthetic oligonucleotide
ccagggucgugugcgcggc

SEQ ID NO: 1966664 - RNA, 19 nt, Artificial Sequence
  Description of Artificial Sequence: Synthetic oligonucleotide
cccucggccaaggcgcacc

SEQ ID NO: 1966665 - RNA, 19 nt, Artificial Sequence
  Description of Artificial Sequence: Synthetic oligonucleotide
ccggucuuugcccacggcu

SEQ ID NO: 1966666 - RNA, 19 nt, Artificial Sequence
  Description of Artificial Sequence: Synthetic oligonucleotide
gaggagucauucagcuguu

SEQ ID NO: 1966667 - RNA, 19 nt, Artificial Sequence
  Description of Artificial Sequence: Synthetic oligonucleotide
gccggucuuugcccacggc

SEQ ID NO: 1966668 - RNA, 19 nt, Artificial Sequence
  Description of Artificial Sequence: Synthetic oligonucleotide
gggcgcugauaaugacuga

SEQ ID NO: 1966669 - RNA, 19 nt, Artificial Sequence
  Description of Artificial Sequence: Synthetic oligonucleotide
ugcggaccgcggggcccgg

SEQ ID NO: 1966670 - RNA, 19 nt, Artificial Sequence
  Description of Artificial Sequence: Synthetic oligonucleotide
gucgugugcgcggccccuc

SEQ ID NO: 1966671 - RNA, 19 nt, Artificial Sequence
  Description of Artificial Sequence: Synthetic oligonucleotide
cugaaaccagggaggucuu

SEQ ID NO: 1966672 - RNA, 19 nt, Artificial Sequence
  Description of Artificial Sequence: Synthetic oligonucleotide
cgugagugucgcaucaggu

SEQ ID NO: 1966673 - RNA, 19 nt, Artificial Sequence
  Description of Artificial Sequence: Synthetic oligonucleotide
gggccagcgccgccgcccc

SEQ ID NO: 1966674 - RNA, 19 nt, Artificial Sequence
  Description of Artificial Sequence: Synthetic oligonucleotide
ccggcccaacucugcgccg

SEQ ID NO: 1966675 - RNA, 19 nt, Artificial Sequence
  Description of Artificial Sequence: Synthetic oligonucleotide
ggccuucauggguggguaa

SEQ ID NO: 1966676 - RNA, 19 nt, Artificial Sequence
  Description of Artificial Sequence: Synthetic oligonucleotide
caaggccucggcagguguu

SEQ ID NO: 1966677 - RNA, 19 nt, Artificial Sequence
  Description of Artificial Sequence: Synthetic oligonucleotide
ccgcgggcuccccuugcgg

SEQ ID NO: 1966678 - RNA, 19 nt, Artificial Sequence
  Description of Artificial Sequence: Synthetic oligonucleotide
cacccauuuguuggcugcu

SEQ ID NO: 1966679 - RNA, 19 nt, Artificial Sequence
  Description of Artificial Sequence: Synthetic oligonucleotide
cagcugcacccacauacuu

SEQ ID NO: 1966680 - RNA, 19 nt, Artificial Sequence
  Description of Artificial Sequence: Synthetic oligonucleotide
gguggccucuacagcucca

SEQ ID NO: 1966681 - RNA, 19 nt, Artificial Sequence
  Description of Artificial Sequence: Synthetic oligonucleotide
cuuccguccuggcuuccuu

SEQ ID NO: 1966682 - RNA, 19 nt, Artificial Sequence
  Description of Artificial Sequence: Synthetic oligonucleotide
cccuggugaagccggccca

SEQ ID NO: 1966683 - RNA, 19 nt, Artificial Sequence
  Description of Artificial Sequence: Synthetic oligonucleotide
cgcgcaggugccaccgcac

SEQ ID NO: 1966684 - RNA, 19 nt, Artificial Sequence
  Description of Artificial Sequence: Synthetic oligonucleotide
gauuggcggccagggucgu

SEQ ID NO: 1966685 - RNA, 19 nt, Artificial Sequence
  Description of Artificial Sequence: Synthetic oligonucleotide
cccaacucugcgccgagau

SEQ ID NO: 1966686 - RNA, 19 nt, Artificial Sequence
  Description of Artificial Sequence: Synthetic oligonucleotide
cagcaaccgcgggcucccc

SEQ ID NO: 1966687 - RNA, 19 nt, Artificial Sequence
  Description of Artificial Sequence: Synthetic oligonucleotide
gcccugaaaccagggaggu

SEQ ID NO: 1966688 - RNA, 19 nt, Artificial Sequence
  Description of Artificial Sequence: Synthetic oligonucleotide
cgcuugcugaugagguaca

SEQ ID NO: 1966689 - RNA, 19 nt, Artificial Sequence
  Description of Artificial Sequence: Synthetic oligonucleotide
gccuucauggguggguaau

SEQ ID NO: 1966690 - RNA, 19 nt, Artificial Sequence
  Description of Artificial Sequence: Synthetic oligonucleotide
cgugugcgcggccccucgg

SEQ ID NO: 1966691 - RNA, 19 nt, Artificial Sequence
  Description of Artificial Sequence: Synthetic oligonucleotide
cugccgccgcccuggugaa

SEQ ID NO: 1966692 - RNA, 19 nt, Artificial Sequence
  Description of Artificial Sequence: Synthetic oligonucleotide
cccugaaaccagggagguc

SEQ ID NO: 1966693 - RNA, 19 nt, Artificial Sequence
  Description of Artificial Sequence: Synthetic oligonucleotide
gaccgcggggcccgggcuu

SEQ ID NO: 1966694 - RNA, 19 nt, Artificial Sequence
  Description of Artificial Sequence: Synthetic oligonucleotide
ccucuacagcuccaaacuu

SEQ ID NO: 1966695 - RNA, 19 nt, Artificial Sequence
  Description of Artificial Sequence: Synthetic oligonucleotide
gcaaccgcgggcuccccuu

SEQ ID NO: 1966696 - RNA, 19 nt, Artificial Sequence
  Description of Artificial Sequence: Synthetic oligonucleotide
ccgcccuggugaagccggc

SEQ ID NO: 1966697 - RNA, 19 nt, Artificial Sequence
  Description of Artificial Sequence: Synthetic oligonucleotide
gcggagguccugggcgcgc

SEQ ID NO: 1966698 - RNA, 19 nt, Artificial Sequence
  Description of Artificial Sequence: Synthetic oligonucleotide
gcggccccucggccaaggc

SEQ ID NO: 1966699 - RNA, 19 nt, Artificial Sequence
  Description of Artificial Sequence: Synthetic oligonucleotide
gcccgagcgcgccgcccag

SEQ ID NO: 1966700 - RNA, 19 nt, Artificial Sequence
  Description of Artificial Sequence: Synthetic oligonucleotide
gcgcaccggcucaagccca

SEQ ID NO: 1966701 - RNA, 19 nt, Artificial Sequence
  Description of Artificial Sequence: Synthetic oligonucleotide
cgcgggcuccccuugcgga

SEQ ID NO: 1966702 - RNA, 19 nt, Artificial Sequence
  Description of Artificial Sequence: Synthetic oligonucleotide
cggcagguguucgguacac

SEQ ID NO: 1966703 - RNA, 19 nt, Artificial Sequence
  Description of Artificial Sequence: Synthetic oligonucleotide
ccaugaauggccggucuuu

SEQ ID NO: 1966704 - RNA, 19 nt, Artificial Sequence
  Description of Artificial Sequence: Synthetic oligonucleotide
gccaccgcacgguguggua

SEQ ID NO: 1966705 - RNA, 19 nt, Artificial Sequence
  Description of Artificial Sequence: Synthetic oligonucleotide
gccucggcagguguucggu

SEQ ID NO: 1966706 - RNA, 19 nt, Artificial Sequence
  Description of Artificial Sequence: Synthetic oligonucleotide
cccgggcuuccugccgccg

SEQ ID NO: 1966707 - RNA, 19 nt, Artificial Sequence
  Description of Artificial Sequence: Synthetic oligonucleotide
gcgcagccgagcgcucggc

SEQ ID NO: 1966708 - RNA, 19 nt, Artificial Sequence
  Description of Artificial Sequence: Synthetic oligonucleotide
ccccaugaauggccggucu

SEQ ID NO: 1966709 - RNA, 19 nt, Artificial Sequence
  Description of Artificial Sequence: Synthetic oligonucleotide
ccucggcagguguucggua

SEQ ID NO: 1966710 - RNA, 19 nt, Artificial Sequence
  Description of Artificial Sequence: Synthetic oligonucleotide
cgcggagguccugggcgcg

SEQ ID NO: 1966711 - RNA, 19 nt, Artificial Sequence
  Description of Artificial Sequence: Synthetic oligonucleotide
cgccgcccuggugaagccg

SEQ ID NO: 1966712 - RNA, 19 nt, Artificial Sequence
  Description of Artificial Sequence: Synthetic oligonucleotide
cccaugaauggccggucuu

SEQ ID NO: 1966713 - RNA, 19 nt, Artificial Sequence
  Description of Artificial Sequence: Synthetic oligonucleotide
gcgccgagauuggcggcca

SEQ ID NO: 1966714 - RNA, 19 nt, Artificial Sequence
  Description of Artificial Sequence: Synthetic oligonucleotide
gcccacggcugucacccau

SEQ ID NO: 1966715 - RNA, 19 nt, Artificial Sequence
  Description of Artificial Sequence: Synthetic oligonucleotide
gggaggucuugagggcgcu

SEQ ID NO: 1966716 - RNA, 19 nt, Artificial Sequence
  Description of Artificial Sequence: Synthetic oligonucleotide
cccuucugacaggguucac

SEQ ID NO: 1966717 - RNA, 19 nt, Artificial Sequence
  Description of Artificial Sequence: Synthetic oligonucleotide
cgagcgcgccgcccagggc

SEQ ID NO: 1966718 - RNA, 19 nt, Artificial Sequence
  Description of Artificial Sequence: Synthetic oligonucleotide
cccgcuccauccgaaggua

SEQ ID NO: 1966719 - RNA, 19 nt, Artificial Sequence
  Description of Artificial Sequence: Synthetic oligonucleotide
ggucgugugcgcggccccu

SEQ ID NO: 1966720 - RNA, 19 nt, Artificial Sequence
  Description of Artificial Sequence: Synthetic oligonucleotide
ggcuccccuugcggaccgc

SEQ ID NO: 1966721 - RNA, 19 nt, Artificial Sequence
  Description of Artificial Sequence: Synthetic oligonucleotide
cgccgagauuggcggccag

SEQ ID NO: 1966722 - RNA, 19 nt, Artificial Sequence
  Description of Artificial Sequence: Synthetic oligonucleotide
ccaacucugcgccgagauu

SEQ ID NO: 1966723 - RNA, 19 nt, Artificial Sequence
  Description of Artificial Sequence: Synthetic oligonucleotide
ccaaggcgcaccggcucaa

SEQ ID NO: 1966724 - RNA, 19 nt, Artificial Sequence
  Description of Artificial Sequence: Synthetic oligonucleotide
cgagauuggcggccagggu

SEQ ID NO: 1966725 - RNA, 19 nt, Artificial Sequence
  Description of Artificial Sequence: Synthetic oligonucleotide
ccccagcaaccgcgggcuc

SEQ ID NO: 1966726 - RNA, 19 nt, Artificial Sequence
  Description of Artificial Sequence: Synthetic oligonucleotide
gccccucggccaaggcgca

SEQ ID NO: 1966727 - RNA, 19 nt, Artificial Sequence
  Description of Artificial Sequence: Synthetic oligonucleotide
cgcggccccucggccaagg

SEQ ID NO: 1966728 - RNA, 19 nt, Artificial Sequence
  Description of Artificial Sequence: Synthetic oligonucleotide
ccacggcugucacccauuu

SEQ ID NO: 1966729 - RNA, 19 nt, Artificial Sequence
  Description of Artificial Sequence: Synthetic oligonucleotide
cccacggcugucacccauu

SEQ ID NO: 1966730 - RNA, 19 nt, Artificial Sequence
  Description of Artificial Sequence: Synthetic oligonucleotide
ccccucggccaaggcgcac

SEQ ID NO: 1966731 - RNA, 19 nt, Artificial Sequence
  Description of Artificial Sequence: Synthetic oligonucleotide
cggcugucacccauuuguu

SEQ ID NO: 1966732 - RNA, 19 nt, Artificial Sequence
  Description of Artificial Sequence: Synthetic oligonucleotide
cgcucggcgcggagguccu

SEQ ID NO: 1966733 - RNA, 19 nt, Artificial Sequence
  Description of Artificial Sequence: Synthetic oligonucleotide
aaucaagacaccuugaacg

SEQ ID NO: 1966734 - RNA, 19 nt, Artificial Sequence
  Description of Artificial Sequence: Synthetic oligonucleotide
auaauuuuggaauugcugg

SEQ ID NO: 1966735 - RNA, 19 nt, Artificial Sequence
  Description of Artificial Sequence: Synthetic oligonucleotide
ugauuuagaagacugagag

SEQ ID NO: 1966736 - RNA, 19 nt, Artificial Sequence
  Description of Artificial Sequence: Synthetic oligonucleotide
aaaucuugcuuacaagacc

SEQ ID NO: 1966737 - RNA, 19 nt, Artificial Sequence
  Description of Artificial Sequence: Synthetic oligonucleotide
gaugauaucacacaucaug

SEQ ID NO: 1966738 - RNA, 19 nt, Artificial Sequence
  Description of Artificial Sequence: Synthetic oligonucleotide
guuaacgucauuucaaagg

SEQ ID NO: 1966739 - RNA, 19 nt, Artificial Sequence
  Description of Artificial Sequence: Synthetic oligonucleotide
ucauuaguugcaaagguag

SEQ ID NO: 1966740 - RNA, 19 nt, Artificial Sequence
  Description of Artificial Sequence: Synthetic oligonucleotide
aaaguuagcacccgaggcg

SEQ ID NO: 1966741 - RNA, 19 nt, Artificial Sequence
  Description of Artificial Sequence: Synthetic oligonucleotide
ugugaugauguacugaaag

SEQ ID NO: 1966742 - RNA, 19 nt, Artificial Sequence
  Description of Artificial Sequence: Synthetic oligonucleotide
aaaucaagacaccuugaac

SEQ ID NO: 1966743 - RNA, 19 nt, Artificial Sequence
  Description of Artificial Sequence: Synthetic oligonucleotide
uguacuacccuuuaggaca

SEQ ID NO: 1966744 - RNA, 19 nt, Artificial Sequence
  Description of Artificial Sequence: Synthetic oligonucleotide
uagaugauaucacacauca

SEQ ID NO: 1966745 - RNA, 19 nt, Artificial Sequence
  Description of Artificial Sequence: Synthetic oligonucleotide
aaugcgaucaccaguaagg

SEQ ID NO: 1966746 - RNA, 19 nt, Artificial Sequence
  Description of Artificial Sequence: Synthetic oligonucleotide
guaaggaccaucuccaugg

SEQ ID NO: 1966747 - RNA, 19 nt, Artificial Sequence
  Description of Artificial Sequence: Synthetic oligonucleotide
uuuauuucccucucaauug

SEQ ID NO: 1966748 - RNA, 19 nt, Artificial Sequence
  Description of Artificial Sequence: Synthetic oligonucleotide
aaugacgggcuucuugacc

SEQ ID NO: 1966749 - RNA, 19 nt, Artificial Sequence
  Description of Artificial Sequence: Synthetic oligonucleotide
aaaaucuugcuuacaagac

SEQ ID NO: 1966750 - RNA, 19 nt, Artificial Sequence
  Description of Artificial Sequence: Synthetic oligonucleotide
aucaagacaccuugaacgc

SEQ ID NO: 1966751 - RNA, 19 nt, Artificial Sequence
  Description of Artificial Sequence: Synthetic oligonucleotide
auuuagaagacugagagau

SEQ ID NO: 1966752 - RNA, 19 nt, Artificial Sequence
  Description of Artificial Sequence: Synthetic oligonucleotide
auucuuucgccauugcuac

SEQ ID NO: 1966753 - RNA, 19 nt, Artificial Sequence
  Description of Artificial Sequence: Synthetic oligonucleotide
augacgggcuucuugaccc

SEQ ID NO: 1966754 - RNA, 19 nt, Artificial Sequence
  Description of Artificial Sequence: Synthetic oligonucleotide
acuauaauuuuggaauugc

SEQ ID NO: 1966755 - RNA, 19 nt, Artificial Sequence
  Description of Artificial Sequence: Synthetic oligonucleotide
gaaaguuagcacccgaggc

SEQ ID NO: 1966756 - RNA, 19 nt, Artificial Sequence
  Description of Artificial Sequence: Synthetic oligonucleotide
uuuggggcgguucaacugg

SEQ ID NO: 1966757 - RNA, 19 nt, Artificial Sequence
  Description of Artificial Sequence: Synthetic oligonucleotide
aagagcauaaccauugaca

SEQ ID NO: 1966758 - RNA, 19 nt, Artificial Sequence
  Description of Artificial Sequence: Synthetic oligonucleotide
aaaugcgaucaccaguaag

SEQ ID NO: 1966759 - RNA, 19 nt, Artificial Sequence
  Description of Artificial Sequence: Synthetic oligonucleotide
agcauaaccauugacagcu

SEQ ID NO: 1966760 - RNA, 19 nt, Artificial Sequence
  Description of Artificial Sequence: Synthetic oligonucleotide
ucaaccaguguuucaacag

SEQ ID NO: 1966761 - RNA, 19 nt, Artificial Sequence
  Description of Artificial Sequence: Synthetic oligonucleotide
ucuguuaacgucauuucaa

SEQ ID NO: 1966762 - RNA, 19 nt, Artificial Sequence
  Description of Artificial Sequence: Synthetic oligonucleotide
auggcaaguucacagcccc

SEQ ID NO: 1966763 - RNA, 19 nt, Artificial Sequence
  Description of Artificial Sequence: Synthetic oligonucleotide
gauaucacacaucauggca

SEQ ID NO: 1966764 - RNA, 19 nt, Artificial Sequence
  Description of Artificial Sequence: Synthetic oligonucleotide
cuuuaggacaauuuauuuc

SEQ ID NO: 1966765 - RNA, 19 nt, Artificial Sequence
  Description of Artificial Sequence: Synthetic oligonucleotide
uacaagaccugcuugcuug

SEQ ID NO: 1966766 - RNA, 19 nt, Artificial Sequence
  Description of Artificial Sequence: Synthetic oligonucleotide
aggacaauuuauuucccuc

SEQ ID NO: 1966767 - RNA, 19 nt, Artificial Sequence
  Description of Artificial Sequence: Synthetic oligonucleotide
aaucuugcuuacaagaccu

SEQ ID NO: 1966768 - RNA, 19 nt, Artificial Sequence
  Description of Artificial Sequence: Synthetic oligonucleotide
auuuccuugauguccgcuc

SEQ ID NO: 1966769 - RNA, 19 nt, Artificial Sequence
  Description of Artificial Sequence: Synthetic oligonucleotide
agcauugagugcuuugggg

SEQ ID NO: 1966770 - RNA, 19 nt, Artificial Sequence
  Description of Artificial Sequence: Synthetic oligonucleotide
cagauuucugauuuagaag

SEQ ID NO: 1966771 - RNA, 19 nt, Artificial Sequence
  Description of Artificial Sequence: Synthetic oligonucleotide
aacgucauuucaaaggcug

SEQ ID NO: 1966772 - RNA, 19 nt, Artificial Sequence
  Description of Artificial Sequence: Synthetic oligonucleotide
agcauagaugauaucacac

SEQ ID NO: 1966773 - RNA, 19 nt, Artificial Sequence
  Description of Artificial Sequence: Synthetic oligonucleotide
uucgccauugcuacuauaa

SEQ ID NO: 1966774 - RNA, 19 nt, Artificial Sequence
  Description of Artificial Sequence: Synthetic oligonucleotide
accauugacagcugcaaug

SEQ ID NO: 1966775 - RNA, 19 nt, Artificial Sequence
  Description of Artificial Sequence: Synthetic oligonucleotide
aaggcuuagcugccagccc

SEQ ID NO: 1966776 - RNA, 19 nt, Artificial Sequence
  Description of Artificial Sequence: Synthetic oligonucleotide
gaauagaagagcuucuucu

SEQ ID NO: 1966777 - RNA, 19 nt, Artificial Sequence
  Description of Artificial Sequence: Synthetic oligonucleotide
aauuuauuucccucucaau

SEQ ID NO: 1966778 - RNA, 19 nt, Artificial Sequence
  Description of Artificial Sequence: Synthetic oligonucleotide
accagcauagaugauauca

SEQ ID NO: 1966779 - RNA, 19 nt, Artificial Sequence
  Description of Artificial Sequence: Synthetic oligonucleotide
ugauaucacacaucauggc

SEQ ID NO: 1966780 - RNA, 19 nt, Artificial Sequence
  Description of Artificial Sequence: Synthetic oligonucleotide
auugacagcugcaaugacg

SEQ ID NO: 1966781 - RNA, 19 nt, Artificial Sequence
  Description of Artificial Sequence: Synthetic oligonucleotide
uugaacgcuucccagauuu

SEQ ID NO: 1966782 - RNA, 19 nt, Artificial Sequence
  Description of Artificial Sequence: Synthetic oligonucleotide
gcaaagguagaauagaaga

SEQ ID NO: 1966783 - RNA, 19 nt, Artificial Sequence
  Description of Artificial Sequence: Synthetic oligonucleotide
cauugagugcuuuggggcg

SEQ ID NO: 1966784 - RNA, 19 nt, Artificial Sequence
  Description of Artificial Sequence: Synthetic oligonucleotide
ucaccaguaaggaccaucu

SEQ ID NO: 1966785 - RNA, 19 nt, Artificial Sequence
  Description of Artificial Sequence: Synthetic oligonucleotide
cauugcuacuauaauuuug

SEQ ID NO: 1966786 - RNA, 19 nt, Artificial Sequence
  Description of Artificial Sequence: Synthetic oligonucleotide
uguuugguucugcauuucc

SEQ ID NO: 1966787 - RNA, 19 nt, Artificial Sequence
  Description of Artificial Sequence: Synthetic oligonucleotide
aaacugggcuuucucacca

SEQ ID NO: 1966788 - RNA, 19 nt, Artificial Sequence
  Description of Artificial Sequence: Synthetic oligonucleotide
cauuucaaaggcugcauuc

SEQ ID NO: 1966789 - RNA, 19 nt, Artificial Sequence
  Description of Artificial Sequence: Synthetic oligonucleotide
ugacuugccaacugcacga

SEQ ID NO: 1966790 - RNA, 19 nt, Artificial Sequence
  Description of Artificial Sequence: Synthetic oligonucleotide
uggaguaacaguccuggaa

SEQ ID NO: 1966791 - RNA, 19 nt, Artificial Sequence
  Description of Artificial Sequence: Synthetic oligonucleotide
uaucacacaucauggcaag

SEQ ID NO: 1966792 - RNA, 19 nt, Artificial Sequence
  Description of Artificial Sequence: Synthetic oligonucleotide
uuaggacaauuuauuuccc

SEQ ID NO: 1966793 - RNA, 19 nt, Artificial Sequence
  Description of Artificial Sequence: Synthetic oligonucleotide
caggccauugcaaagagca

SEQ ID NO: 1966794 - RNA, 19 nt, Artificial Sequence
  Description of Artificial Sequence: Synthetic oligonucleotide
gugacuugccaacugcacg

SEQ ID NO: 1966795 - RNA, 19 nt, Artificial Sequence
  Description of Artificial Sequence: Synthetic oligonucleotide
ugcaaugacgggcuucuug

SEQ ID NO: 1966796 - RNA, 19 nt, Artificial Sequence
  Description of Artificial Sequence: Synthetic oligonucleotide
aguacgaguaccugagcug

SEQ ID NO: 1966797 - RNA, 19 nt, Artificial Sequence
  Description of Artificial Sequence: Synthetic oligonucleotide
augguugcaggccacacca

SEQ ID NO: 1966798 - RNA, 19 nt, Artificial Sequence
  Description of Artificial Sequence: Synthetic oligonucleotide
ugguugagcuccucgauca

SEQ ID NO: 1966799 - RNA, 19 nt, Artificial Sequence
  Description of Artificial Sequence: Synthetic oligonucleotide
uucaaccaguguuucaaca

SEQ ID NO: 1966800 - RNA, 19 nt, Artificial Sequence
  Description of Artificial Sequence: Synthetic oligonucleotide
cauugcaaagagcauugag

SEQ ID NO: 1966801 - RNA, 19 nt, Artificial Sequence
  Description of Artificial Sequence: Synthetic oligonucleotide
uacuauaauuuuggaauug

SEQ ID NO: 1966802 - RNA, 19 nt, Artificial Sequence
  Description of Artificial Sequence: Synthetic oligonucleotide
cuuauuuccuucuguuaac

SEQ ID NO: 1966803 - RNA, 19 nt, Artificial Sequence
  Description of Artificial Sequence: Synthetic oligonucleotide
caaccaguguuucaacagg

SEQ ID NO: 1966804 - RNA, 19 nt, Artificial Sequence
  Description of Artificial Sequence: Synthetic oligonucleotide
accagugagcacaauggcc

SEQ ID NO: 1966805 - RNA, 19 nt, Artificial Sequence
  Description of Artificial Sequence: Synthetic oligonucleotide
cugaaaguuagcacccgag

SEQ ID NO: 1966806 - RNA, 19 nt, Artificial Sequence
  Description of Artificial Sequence: Synthetic oligonucleotide
ugauguccgcuccagcugc

SEQ ID NO: 1966807 - RNA, 19 nt, Artificial Sequence
  Description of Artificial Sequence: Synthetic oligonucleotide
ugcuuacaagaccugcuug

SEQ ID NO: 1966808 - RNA, 19 nt, Artificial Sequence
  Description of Artificial Sequence: Synthetic oligonucleotide
aucacugugaugguugcag

SEQ ID NO: 1966809 - RNA, 19 nt, Artificial Sequence
  Description of Artificial Sequence: Synthetic oligonucleotide
ucaccagcauagaugauau

SEQ ID NO: 1966810 - RNA, 19 nt, Artificial Sequence
  Description of Artificial Sequence: Synthetic oligonucleotide
auagaugauaucacacauc

SEQ ID NO: 1966811 - RNA, 19 nt, Artificial Sequence
  Description of Artificial Sequence: Synthetic oligonucleotide
ugcaaagagcauugagugc

SEQ ID NO: 1966812 - RNA, 19 nt, Artificial Sequence
  Description of Artificial Sequence: Synthetic oligonucleotide
uucccucucaauugacagg

SEQ ID NO: 1966813 - RNA, 19 nt, Artificial Sequence
  Description of Artificial Sequence: Synthetic oligonucleotide
gauuuagaagacugagaga

SEQ ID NO: 1966814 - RNA, 19 nt, Artificial Sequence
  Description of Artificial Sequence: Synthetic oligonucleotide
aggaucauucucaaagguc

SEQ ID NO: 1966815 - RNA, 19 nt, Artificial Sequence
  Description of Artificial Sequence: Synthetic oligonucleotide
uuagcugccagcccucagu

SEQ ID NO: 1966816 - RNA, 19 nt, Artificial Sequence
  Description of Artificial Sequence: Synthetic oligonucleotide
gaacuugcuggaguaacag

SEQ ID NO: 1966817 - RNA, 19 nt, Artificial Sequence
  Description of Artificial Sequence: Synthetic oligonucleotide
gacaauuuauuucccucuc

SEQ ID NO: 1966818 - RNA, 19 nt, Artificial Sequence
  Description of Artificial Sequence: Synthetic oligonucleotide
ucucaauugacaggcugag

SEQ ID NO: 1966819 - RNA, 19 nt, Artificial Sequence
  Description of Artificial Sequence: Synthetic oligonucleotide
acaaggcuuagcugccagc

SEQ ID NO: 1966820 - RNA, 19 nt, Artificial Sequence
  Description of Artificial Sequence: Synthetic oligonucleotide
ucuugcuuacaagaccugc

SEQ ID NO: 1966821 - RNA, 19 nt, Artificial Sequence
  Description of Artificial Sequence: Synthetic oligonucleotide
acagcgagcugcaagcucg

SEQ ID NO: 1966822 - RNA, 19 nt, Artificial Sequence
  Description of Artificial Sequence: Synthetic oligonucleotide
gguagaauagaagagcuuc

SEQ ID NO: 1966823 - RNA, 19 nt, Artificial Sequence
  Description of Artificial Sequence: Synthetic oligonucleotide
acaauuuauuucccucuca

SEQ ID NO: 1966824 - RNA, 19 nt, Artificial Sequence
  Description of Artificial Sequence: Synthetic oligonucleotide
uccccagcaggauuucugg

SEQ ID NO: 1966825 - RNA, 19 nt, Artificial Sequence
  Description of Artificial Sequence: Synthetic oligonucleotide
accaagagcauaaccauug

SEQ ID NO: 1966826 - RNA, 19 nt, Artificial Sequence
  Description of Artificial Sequence: Synthetic oligonucleotide
ucacugugaugguugcagg

SEQ ID NO: 1966827 - RNA, 19 nt, Artificial Sequence
  Description of Artificial Sequence: Synthetic oligonucleotide
agauucuuucgccauugcu

SEQ ID NO: 1966828 - RNA, 19 nt, Artificial Sequence
  Description of Artificial Sequence: Synthetic oligonucleotide
aggaacuugcuggaguaac

SEQ ID NO: 1966829 - RNA, 19 nt, Artificial Sequence
  Description of Artificial Sequence: Synthetic oligonucleotide
uuugguucugcauuuccuu

SEQ ID NO: 1966830 - RNA, 19 nt, Artificial Sequence
  Description of Artificial Sequence: Synthetic oligonucleotide
ucuccggucauuaguugca

SEQ ID NO: 1966831 - RNA, 19 nt, Artificial Sequence
  Description of Artificial Sequence: Synthetic oligonucleotide
uucgggaggaacuguggcc

SEQ ID NO: 1966832 - RNA, 19 nt, Artificial Sequence
  Description of Artificial Sequence: Synthetic oligonucleotide
gaguaacaguccuggaaug

SEQ ID NO: 1966833 - RNA, 19 nt, Artificial Sequence
  Description of Artificial Sequence: Synthetic oligonucleotide
uaggacaauuuauuucccu

SEQ ID NO: 1966834 - RNA, 19 nt, Artificial Sequence
  Description of Artificial Sequence: Synthetic oligonucleotide
auuaguugcaaagguagaa

SEQ ID NO: 1966835 - RNA, 19 nt, Artificial Sequence
  Description of Artificial Sequence: Synthetic oligonucleotide
ugcuugcuuggcauccugg

SEQ ID NO: 1966836 - RNA, 19 nt, Artificial Sequence
  Description of Artificial Sequence: Synthetic oligonucleotide
gaugguugcaggccacacc

SEQ ID NO: 1966837 - RNA, 19 nt, Artificial Sequence
  Description of Artificial Sequence: Synthetic oligonucleotide
ccagugagcacaauggccc

SEQ ID NO: 1966838 - RNA, 19 nt, Artificial Sequence
  Description of Artificial Sequence: Synthetic oligonucleotide
aaguuagcacccgaggcga

SEQ ID NO: 1966839 - RNA, 19 nt, Artificial Sequence
  Description of Artificial Sequence: Synthetic oligonucleotide
aaguuggcuuuccuuuucu

SEQ ID NO: 1966840 - RNA, 19 nt, Artificial Sequence
  Description of Artificial Sequence: Synthetic oligonucleotide
uuaguugcaaagguagaau

SEQ ID NO: 1966841 - RNA, 19 nt, Artificial Sequence
  Description of Artificial Sequence: Synthetic oligonucleotide
gagcauaaccauugacagc

SEQ ID NO: 1966842 - RNA, 19 nt, Artificial Sequence
  Description of Artificial Sequence: Synthetic oligonucleotide
aauugacaggcugagcuuu

SEQ ID NO: 1966843 - RNA, 19 nt, Artificial Sequence
  Description of Artificial Sequence: Synthetic oligonucleotide
cauggcaaguucacagccc

SEQ ID NO: 1966844 - RNA, 19 nt, Artificial Sequence
  Description of Artificial Sequence: Synthetic oligonucleotide
auggcuagugacuugccaa

SEQ ID NO: 1966845 - RNA, 19 nt, Artificial Sequence
  Description of Artificial Sequence: Synthetic oligonucleotide
ucaggauggcacaaggcuu

SEQ ID NO: 1966846 - RNA, 19 nt, Artificial Sequence
  Description of Artificial Sequence: Synthetic oligonucleotide
agugcuuuggggcgguuca

SEQ ID NO: 1966847 - RNA, 19 nt, Artificial Sequence
  Description of Artificial Sequence: Synthetic oligonucleotide
uucuugacccgggugaucu

SEQ ID NO: 1966848 - RNA, 19 nt, Artificial Sequence
  Description of Artificial Sequence: Synthetic oligonucleotide
aguaccugagcuguggcca

SEQ ID NO: 1966849 - RNA, 19 nt, Artificial Sequence
  Description of Artificial Sequence: Synthetic oligonucleotide
gcgaucaccaguaaggacc

SEQ ID NO: 1966850 - RNA, 19 nt, Artificial Sequence
  Description of Artificial Sequence: Synthetic oligonucleotide
aggcugcauucacagauuc

SEQ ID NO: 1966851 - RNA, 19 nt, Artificial Sequence
  Description of Artificial Sequence: Synthetic oligonucleotide
ucaggaacuugcuggagua

SEQ ID NO: 1966852 - RNA, 19 nt, Artificial Sequence
  Description of Artificial Sequence: Synthetic oligonucleotide
aucaccaguaaggaccauc

SEQ ID NO: 1966853 - RNA, 19 nt, Artificial Sequence
  Description of Artificial Sequence: Synthetic oligonucleotide
guacugaaaguuagcaccc

SEQ ID NO: 1966854 - RNA, 19 nt, Artificial Sequence
  Description of Artificial Sequence: Synthetic oligonucleotide
agauugguuuccaucacug

SEQ ID NO: 1966855 - RNA, 19 nt, Artificial Sequence
  Description of Artificial Sequence: Synthetic oligonucleotide
gcauugagugcuuuggggc

SEQ ID NO: 1966856 - RNA, 19 nt, Artificial Sequence
  Description of Artificial Sequence: Synthetic oligonucleotide
ugcuuggcauccugggccg

SEQ ID NO: 1966857 - RNA, 19 nt, Artificial Sequence
  Description of Artificial Sequence: Synthetic oligonucleotide
aguuggcuuuccuuuucuc

SEQ ID NO: 1966858 - RNA, 19 nt, Artificial Sequence
  Description of Artificial Sequence: Synthetic oligonucleotide
caagagcauaaccauugac

SEQ ID NO: 1966859 - RNA, 19 nt, Artificial Sequence
  Description of Artificial Sequence: Synthetic oligonucleotide
gacaccuugaacgcuuccc

SEQ ID NO: 1966860 - RNA, 19 nt, Artificial Sequence
  Description of Artificial Sequence: Synthetic oligonucleotide
cacaucauggcaaguucac

SEQ ID NO: 1966861 - RNA, 19 nt, Artificial Sequence
  Description of Artificial Sequence: Synthetic oligonucleotide
gcuuacaagaccugcuugc

SEQ ID NO: 1966862 - RNA, 19 nt, Artificial Sequence
  Description of Artificial Sequence: Synthetic oligonucleotide
uucucuccggucauuaguu

SEQ ID NO: 1966863 - RNA, 19 nt, Artificial Sequence
  Description of Artificial Sequence: Synthetic oligonucleotide
acugaaaguuagcacccga

SEQ ID NO: 1966864 - RNA, 19 nt, Artificial Sequence
  Description of Artificial Sequence: Synthetic oligonucleotide
uccagcuuauuuccuucug

SEQ ID NO: 1966865 - RNA, 19 nt, Artificial Sequence
  Description of Artificial Sequence: Synthetic oligonucleotide
aucaggccauugcaaagag

SEQ ID NO: 1966866 - RNA, 19 nt, Artificial Sequence
  Description of Artificial Sequence: Synthetic oligonucleotide
agugacuugccaacugcac

SEQ ID NO: 1966867 - RNA, 19 nt, Artificial Sequence
  Description of Artificial Sequence: Synthetic oligonucleotide
gcugcaaaugccuucuccc

SEQ ID NO: 1966868 - RNA, 19 nt, Artificial Sequence
  Description of Artificial Sequence: Synthetic oligonucleotide
gcaggaucauucucaaagg

SEQ ID NO: 1966869 - RNA, 19 nt, Artificial Sequence
  Description of Artificial Sequence: Synthetic oligonucleotide
ucuccacaaaugcagccau

SEQ ID NO: 1966870 - RNA, 19 nt, Artificial Sequence
  Description of Artificial Sequence: Synthetic oligonucleotide
acaccuugaacgcuuccca

SEQ ID NO: 1966871 - RNA, 19 nt, Artificial Sequence
  Description of Artificial Sequence: Synthetic oligonucleotide
agaagacugagagauuggu

SEQ ID NO: 1966872 - RNA, 19 nt, Artificial Sequence
  Description of Artificial Sequence: Synthetic oligonucleotide
cuucgggaggaacuguggc

SEQ ID NO: 1966873 - RNA, 19 nt, Artificial Sequence
  Description of Artificial Sequence: Synthetic oligonucleotide
cugauuuagaagacugaga

SEQ ID NO: 1966874 - RNA, 19 nt, Artificial Sequence
  Description of Artificial Sequence: Synthetic oligonucleotide
uacugaaaguuagcacccg

SEQ ID NO: 1966875 - RNA, 19 nt, Artificial Sequence
  Description of Artificial Sequence: Synthetic oligonucleotide
gaguaccugagcuguggcc

SEQ ID NO: 1966876 - RNA, 19 nt, Artificial Sequence
  Description of Artificial Sequence: Synthetic oligonucleotide
aaccaguguuucaacagga

SEQ ID NO: 1966877 - RNA, 19 nt, Artificial Sequence
  Description of Artificial Sequence: Synthetic oligonucleotide
auaucacacaucauggcaa

SEQ ID NO: 1966878 - RNA, 19 nt, Artificial Sequence
  Description of Artificial Sequence: Synthetic oligonucleotide
cucgggguagcagagcacg

SEQ ID NO: 1966879 - RNA, 19 nt, Artificial Sequence
  Description of Artificial Sequence: Synthetic oligonucleotide
accugcuugcuuggcaucc

SEQ ID NO: 1966880 - RNA, 19 nt, Artificial Sequence
  Description of Artificial Sequence: Synthetic oligonucleotide
uugcaggccacaccacgag

SEQ ID NO: 1966881 - RNA, 19 nt, Artificial Sequence
  Description of Artificial Sequence: Synthetic oligonucleotide
uccagggcuugguugagcu

SEQ ID NO: 1966882 - RNA, 19 nt, Artificial Sequence
  Description of Artificial Sequence: Synthetic oligonucleotide
acgaguacgaguaccugag

SEQ ID NO: 1966883 - RNA, 19 nt, Artificial Sequence
  Description of Artificial Sequence: Synthetic oligonucleotide
cacaccacgaguacgagua

SEQ ID NO: 1966884 - RNA, 19 nt, Artificial Sequence
  Description of Artificial Sequence: Synthetic oligonucleotide
acgucauuucaaaggcugc

SEQ ID NO: 1966885 - RNA, 19 nt, Artificial Sequence
  Description of Artificial Sequence: Synthetic oligonucleotide
auugagugcuuuggggcgg

SEQ ID NO: 1966886 - RNA, 19 nt, Artificial Sequence
  Description of Artificial Sequence: Synthetic oligonucleotide
cauucucaaaggucuccag

SEQ ID NO: 1966887 - RNA, 19 nt, Artificial Sequence
  Description of Artificial Sequence: Synthetic oligonucleotide
aagcgccggaguucuggac

SEQ ID NO: 1966888 - RNA, 19 nt, Artificial Sequence
  Description of Artificial Sequence: Synthetic oligonucleotide
cauuccuucucuccgguca

SEQ ID NO: 1966889 - RNA, 19 nt, Artificial Sequence
  Description of Artificial Sequence: Synthetic oligonucleotide
gaccgaggacaacagcgag

SEQ ID NO: 1966890 - RNA, 19 nt, Artificial Sequence
  Description of Artificial Sequence: Synthetic oligonucleotide
uuuagaagacugagagauu

SEQ ID NO: 1966891 - RNA, 19 nt, Artificial Sequence
  Description of Artificial Sequence: Synthetic oligonucleotide
cuggaucagccccacacug

SEQ ID NO: 1966892 - RNA, 19 nt, Artificial Sequence
  Description of Artificial Sequence: Synthetic oligonucleotide
cacacaucauggcaaguuc

SEQ ID NO: 1966893 - RNA, 19 nt, Artificial Sequence
  Description of Artificial Sequence: Synthetic oligonucleotide
uugcuacuauaauuuugga

SEQ ID NO: 1966894 - RNA, 19 nt, Artificial Sequence
  Description of Artificial Sequence: Synthetic oligonucleotide
auggcacaaggcuuagcug

SEQ ID NO: 1966895 - RNA, 19 nt, Artificial Sequence
  Description of Artificial Sequence: Synthetic oligonucleotide
aggcuuagcugccagcccu

SEQ ID NO: 1966896 - RNA, 19 nt, Artificial Sequence
  Description of Artificial Sequence: Synthetic oligonucleotide
auaaccauugacagcugca

SEQ ID NO: 1966897 - RNA, 19 nt, Artificial Sequence
  Description of Artificial Sequence: Synthetic oligonucleotide
aacgcuucccagauuucug

SEQ ID NO: 1966898 - RNA, 19 nt, Artificial Sequence
  Description of Artificial Sequence: Synthetic oligonucleotide
aacugggcuuucucaccag

SEQ ID NO: 1966899 - RNA, 19 nt, Artificial Sequence
  Description of Artificial Sequence: Synthetic oligonucleotide
uggcuagugacuugccaac

SEQ ID NO: 1966900 - RNA, 19 nt, Artificial Sequence
  Description of Artificial Sequence: Synthetic oligonucleotide
gaucaggccauugcaaaga

SEQ ID NO: 1966901 - RNA, 19 nt, Artificial Sequence
  Description of Artificial Sequence: Synthetic oligonucleotide
uaaggaccaucuccauggc

SEQ ID NO: 1966902 - RNA, 19 nt, Artificial Sequence
  Description of Artificial Sequence: Synthetic oligonucleotide
ucgggaggaacuguggccu

SEQ ID NO: 1966903 - RNA, 19 nt, Artificial Sequence
  Description of Artificial Sequence: Synthetic oligonucleotide
acgcaaggccgccauggcg

SEQ ID NO: 1966904 - RNA, 19 nt, Artificial Sequence
  Description of Artificial Sequence: Synthetic oligonucleotide
ugcgaucaccaguaaggac

SEQ ID NO: 1966905 - RNA, 19 nt, Artificial Sequence
  Description of Artificial Sequence: Synthetic oligonucleotide
uuagcacccgaggcgaagc

SEQ ID NO: 1966906 - RNA, 19 nt, Artificial Sequence
  Description of Artificial Sequence: Synthetic oligonucleotide
gcauagaugauaucacaca

SEQ ID NO: 1966907 - RNA, 19 nt, Artificial Sequence
  Description of Artificial Sequence: Synthetic oligonucleotide
ucacacaucauggcaaguu

SEQ ID NO: 1966908 - RNA, 19 nt, Artificial Sequence
  Description of Artificial Sequence: Synthetic oligonucleotide
acgaguaccugagcugugg

SEQ ID NO: 1966909 - RNA, 19 nt, Artificial Sequence
  Description of Artificial Sequence: Synthetic oligonucleotide
caucuccauggcuagugac

SEQ ID NO: 1966910 - RNA, 19 nt, Artificial Sequence
  Description of Artificial Sequence: Synthetic oligonucleotide
caagcucgggguagcagag

SEQ ID NO: 1966911 - RNA, 19 nt, Artificial Sequence
  Description of Artificial Sequence: Synthetic oligonucleotide
cauuaguugcaaagguaga

SEQ ID NO: 1966912 - RNA, 19 nt, Artificial Sequence
  Description of Artificial Sequence: Synthetic oligonucleotide
uagcacccgaggcgaagcg

SEQ ID NO: 1966913 - RNA, 19 nt, Artificial Sequence
  Description of Artificial Sequence: Synthetic oligonucleotide
agcgccggaguucuggaca

SEQ ID NO: 1966914 - RNA, 19 nt, Artificial Sequence
  Description of Artificial Sequence: Synthetic oligonucleotide
uagaauagaagagcuucuu

SEQ ID NO: 1966915 - RNA, 19 nt, Artificial Sequence
  Description of Artificial Sequence: Synthetic oligonucleotide
aagacaccuugaacgcuuc

SEQ ID NO: 1966916 - RNA, 19 nt, Artificial Sequence
  Description of Artificial Sequence: Synthetic oligonucleotide
uuacaagaccugcuugcuu

SEQ ID NO: 1966917 - RNA, 19 nt, Artificial Sequence
  Description of Artificial Sequence: Synthetic oligonucleotide
aaaggucuccagggcuugg

SEQ ID NO: 1966918 - RNA, 19 nt, Artificial Sequence
  Description of Artificial Sequence: Synthetic oligonucleotide
agaccugcuugcuuggcau

SEQ ID NO: 1966919 - RNA, 19 nt, Artificial Sequence
  Description of Artificial Sequence: Synthetic oligonucleotide
ucaagacaccuugaacgcu

SEQ ID NO: 1966920 - RNA, 19 nt, Artificial Sequence
  Description of Artificial Sequence: Synthetic oligonucleotide
aagccuucgggaggaacug

SEQ ID NO: 1966921 - RNA, 19 nt, Artificial Sequence
  Description of Artificial Sequence: Synthetic oligonucleotide
uccugggccgaaaugcgau

SEQ ID NO: 1966922 - RNA, 19 nt, Artificial Sequence
  Description of Artificial Sequence: Synthetic oligonucleotide
cagcauagaugauaucaca

SEQ ID NO: 1966923 - RNA, 19 nt, Artificial Sequence
  Description of Artificial Sequence: Synthetic oligonucleotide
cuguuaacgucauuucaaa

SEQ ID NO: 1966924 - RNA, 19 nt, Artificial Sequence
  Description of Artificial Sequence: Synthetic oligonucleotide
ugccaacugcacgagugag

SEQ ID NO: 1966925 - RNA, 19 nt, Artificial Sequence
  Description of Artificial Sequence: Synthetic oligonucleotide
ccggucauuaguugcaaag

SEQ ID NO: 1966926 - RNA, 19 nt, Artificial Sequence
  Description of Artificial Sequence: Synthetic oligonucleotide
caccuugaacgcuucccag

SEQ ID NO: 1966927 - RNA, 19 nt, Artificial Sequence
  Description of Artificial Sequence: Synthetic oligonucleotide
acacaucauggcaaguuca

SEQ ID NO: 1966928 - RNA, 19 nt, Artificial Sequence
  Description of Artificial Sequence: Synthetic oligonucleotide
cacgaguacgaguaccuga

SEQ ID NO: 1966929 - RNA, 19 nt, Artificial Sequence
  Description of Artificial Sequence: Synthetic oligonucleotide
acgcuucccagauuucuga

SEQ ID NO: 1966930 - RNA, 19 nt, Artificial Sequence
  Description of Artificial Sequence: Synthetic oligonucleotide
guagcagagcacgcaaggc

SEQ ID NO: 1966931 - RNA, 19 nt, Artificial Sequence
  Description of Artificial Sequence: Synthetic oligonucleotide
acaccacgaguacgaguac

SEQ ID NO: 1966932 - RNA, 19 nt, Artificial Sequence
  Description of Artificial Sequence: Synthetic oligonucleotide
ucgccauugcuacuauaau

SEQ ID NO: 1966933 - RNA, 19 nt, Artificial Sequence
  Description of Artificial Sequence: Synthetic oligonucleotide
ccagcauagaugauaucac

SEQ ID NO: 1966934 - RNA, 19 nt, Artificial Sequence
  Description of Artificial Sequence: Synthetic oligonucleotide
uuuccaucacugugauggu

SEQ ID NO: 1966935 - RNA, 19 nt, Artificial Sequence
  Description of Artificial Sequence: Synthetic oligonucleotide
auuucccucucaauugaca

SEQ ID NO: 1966936 - RNA, 19 nt, Artificial Sequence
  Description of Artificial Sequence: Synthetic oligonucleotide
cggaccgaggacaacagcg

SEQ ID NO: 1966937 - RNA, 19 nt, Artificial Sequence
  Description of Artificial Sequence: Synthetic oligonucleotide
ggaacuguggccuguacua

SEQ ID NO: 1966938 - RNA, 19 nt, Artificial Sequence
  Description of Artificial Sequence: Synthetic oligonucleotide
gcauccugggccgaaaugc

SEQ ID NO: 1966939 - RNA, 19 nt, Artificial Sequence
  Description of Artificial Sequence: Synthetic oligonucleotide
ugacgggcuucuugacccg

SEQ ID NO: 1966940 - RNA, 19 nt, Artificial Sequence
  Description of Artificial Sequence: Synthetic oligonucleotide
caggauuucuggcugucca

SEQ ID NO: 1966941 - RNA, 19 nt, Artificial Sequence
  Description of Artificial Sequence: Synthetic oligonucleotide
agcacccgaggcgaagcgc

SEQ ID NO: 1966942 - RNA, 19 nt, Artificial Sequence
  Description of Artificial Sequence: Synthetic oligonucleotide
uacgaguaccugagcugug

SEQ ID NO: 1966943 - RNA, 19 nt, Artificial Sequence
  Description of Artificial Sequence: Synthetic oligonucleotide
gggcgguucaacuggauca

SEQ ID NO: 1966944 - RNA, 19 nt, Artificial Sequence
  Description of Artificial Sequence: Synthetic oligonucleotide
cccucaguggucuuugaag

SEQ ID NO: 1966945 - RNA, 19 nt, Artificial Sequence
  Description of Artificial Sequence: Synthetic oligonucleotide
cagugagcacaauggcccc

SEQ ID NO: 1966946 - RNA, 19 nt, Artificial Sequence
  Description of Artificial Sequence: Synthetic oligonucleotide
auugacaggcugagcuuuc

SEQ ID NO: 1966947 - RNA, 19 nt, Artificial Sequence
  Description of Artificial Sequence: Synthetic oligonucleotide
ggcuugguugagcuccucg

SEQ ID NO: 1966948 - RNA, 19 nt, Artificial Sequence
  Description of Artificial Sequence: Synthetic oligonucleotide
cuugcuuacaagaccugcu

SEQ ID NO: 1966949 - RNA, 19 nt, Artificial Sequence
  Description of Artificial Sequence: Synthetic oligonucleotide
uuucugcacauuggauggc

SEQ ID NO: 1966950 - RNA, 19 nt, Artificial Sequence
  Description of Artificial Sequence: Synthetic oligonucleotide
ugaacgcuucccagauuuc

SEQ ID NO: 1966951 - RNA, 19 nt, Artificial Sequence
  Description of Artificial Sequence: Synthetic oligonucleotide
agcugcaaugacgggcuuc

SEQ ID NO: 1966952 - RNA, 19 nt, Artificial Sequence
  Description of Artificial Sequence: Synthetic oligonucleotide
gauugguuuccaucacugu

SEQ ID NO: 1966953 - RNA, 19 nt, Artificial Sequence
  Description of Artificial Sequence: Synthetic oligonucleotide
cacauuggauggcuucuuc

SEQ ID NO: 1966954 - RNA, 19 nt, Artificial Sequence
  Description of Artificial Sequence: Synthetic oligonucleotide
gucauuaguugcaaaggua

SEQ ID NO: 1966955 - RNA, 19 nt, Artificial Sequence
  Description of Artificial Sequence: Synthetic oligonucleotide
caaugacgggcuucuugac

SEQ ID NO: 1966956 - RNA, 19 nt, Artificial Sequence
  Description of Artificial Sequence: Synthetic oligonucleotide
uccgcuccagcugcaaaug

SEQ ID NO: 1966957 - RNA, 19 nt, Artificial Sequence
  Description of Artificial Sequence: Synthetic oligonucleotide
gaacuguggccuguacuac

SEQ ID NO: 1966958 - RNA, 19 nt, Artificial Sequence
  Description of Artificial Sequence: Synthetic oligonucleotide
ucgggguagcagagcacgc

SEQ ID NO: 1966959 - RNA, 19 nt, Artificial Sequence
  Description of Artificial Sequence: Synthetic oligonucleotide
cucaauugacaggcugagc

SEQ ID NO: 1966960 - RNA, 19 nt, Artificial Sequence
  Description of Artificial Sequence: Synthetic oligonucleotide
augcgaucaccaguaagga

SEQ ID NO: 1966961 - RNA, 19 nt, Artificial Sequence
  Description of Artificial Sequence: Synthetic oligonucleotide
gcuagugacuugccaacug

SEQ ID NO: 1966962 - RNA, 19 nt, Artificial Sequence
  Description of Artificial Sequence: Synthetic oligonucleotide
ugaugguugcaggccacac

SEQ ID NO: 1966963 - RNA, 19 nt, Artificial Sequence
  Description of Artificial Sequence: Synthetic oligonucleotide
ggaguaacaguccuggaau

SEQ ID NO: 1966964 - RNA, 19 nt, Artificial Sequence
  Description of Artificial Sequence: Synthetic oligonucleotide
acaucauggcaaguucaca

SEQ ID NO: 1966965 - RNA, 19 nt, Artificial Sequence
  Description of Artificial Sequence: Synthetic oligonucleotide
uuccuucuguuaacgucau

SEQ ID NO: 1966966 - RNA, 19 nt, Artificial Sequence
  Description of Artificial Sequence: Synthetic oligonucleotide
gccauugcaaagagcauug

SEQ ID NO: 1966967 - RNA, 19 nt, Artificial Sequence
  Description of Artificial Sequence: Synthetic oligonucleotide
aaagagcauugagugcuuu

SEQ ID NO: 1966968 - RNA, 19 nt, Artificial Sequence
  Description of Artificial Sequence: Synthetic oligonucleotide
guuagcacccgaggcgaag

SEQ ID NO: 1966969 - RNA, 19 nt, Artificial Sequence
  Description of Artificial Sequence: Synthetic oligonucleotide
gcgagcugcaagcucgggg

SEQ ID NO: 1966970 - RNA, 19 nt, Artificial Sequence
  Description of Artificial Sequence: Synthetic oligonucleotide
accacgaguacgaguaccu

SEQ ID NO: 1966971 - RNA, 19 nt, Artificial Sequence
  Description of Artificial Sequence: Synthetic oligonucleotide
ggucauuaguugcaaaggu

SEQ ID NO: 1966972 - RNA, 19 nt, Artificial Sequence
  Description of Artificial Sequence: Synthetic oligonucleotide
uugacccgggugaucuggu

SEQ ID NO: 1966973 - RNA, 19 nt, Artificial Sequence
  Description of Artificial Sequence: Synthetic oligonucleotide
uguccaaacugggcuuucu

SEQ ID NO: 1966974 - RNA, 19 nt, Artificial Sequence
  Description of Artificial Sequence: Synthetic oligonucleotide
uuggggcgguucaacugga

SEQ ID NO: 1966975 - RNA, 19 nt, Artificial Sequence
  Description of Artificial Sequence: Synthetic oligonucleotide
uucuuucgccauugcuacu

SEQ ID NO: 1966976 - RNA, 19 nt, Artificial Sequence
  Description of Artificial Sequence: Synthetic oligonucleotide
cuucccagauuucugauuu

SEQ ID NO: 1966977 - RNA, 19 nt, Artificial Sequence
  Description of Artificial Sequence: Synthetic oligonucleotide
gaagcgccggaguucugga

SEQ ID NO: 1966978 - RNA, 19 nt, Artificial Sequence
  Description of Artificial Sequence: Synthetic oligonucleotide
agccccacacugcuauucu

SEQ ID NO: 1966979 - RNA, 19 nt, Artificial Sequence
  Description of Artificial Sequence: Synthetic oligonucleotide
cucgaucaggccauugcaa

SEQ ID NO: 1966980 - RNA, 19 nt, Artificial Sequence
  Description of Artificial Sequence: Synthetic oligonucleotide
aggccacaccacgaguacg

SEQ ID NO: 1966981 - RNA, 19 nt, Artificial Sequence
  Description of Artificial Sequence: Synthetic oligonucleotide
gaaaugcgaucaccaguaa

SEQ ID NO: 1966982 - RNA, 19 nt, Artificial Sequence
  Description of Artificial Sequence: Synthetic oligonucleotide
gcaaaugccuucuccccac

SEQ ID NO: 1966983 - RNA, 19 nt, Artificial Sequence
  Description of Artificial Sequence: Synthetic oligonucleotide
uguccgcuccagcugcaaa

SEQ ID NO: 1966984 - RNA, 19 nt, Artificial Sequence
  Description of Artificial Sequence: Synthetic oligonucleotide
gcaagcucgggguagcaga

SEQ ID NO: 1966985 - RNA, 19 nt, Artificial Sequence
  Description of Artificial Sequence: Synthetic oligonucleotide
gacgggcuucuugacccgg

SEQ ID NO: 1966986 - RNA, 19 nt, Artificial Sequence
  Description of Artificial Sequence: Synthetic oligonucleotide
uccggucauuaguugcaaa

SEQ ID NO: 1966987 - RNA, 19 nt, Artificial Sequence
  Description of Artificial Sequence: Synthetic oligonucleotide
gaggaacuguggccuguac

SEQ ID NO: 1966988 - RNA, 19 nt, Artificial Sequence
  Description of Artificial Sequence: Synthetic oligonucleotide
uuucgccauugcuacuaua

SEQ ID NO: 1966989 - RNA, 19 nt, Artificial Sequence
  Description of Artificial Sequence: Synthetic oligonucleotide
guugcaggccacaccacga

SEQ ID NO: 1966990 - RNA, 19 nt, Artificial Sequence
  Description of Artificial Sequence: Synthetic oligonucleotide
gaacgcuucccagauuucu

SEQ ID NO: 1966991 - RNA, 19 nt, Artificial Sequence
  Description of Artificial Sequence: Synthetic oligonucleotide
guaccugagcuguggccac

SEQ ID NO: 1966992 - RNA, 19 nt, Artificial Sequence
  Description of Artificial Sequence: Synthetic oligonucleotide
aggacaacagcgagcugca

SEQ ID NO: 1966993 - RNA, 19 nt, Artificial Sequence
  Description of Artificial Sequence: Synthetic oligonucleotide
acuacccuuuaggacaauu

SEQ ID NO: 1966994 - RNA, 19 nt, Artificial Sequence
  Description of Artificial Sequence: Synthetic oligonucleotide
guacgaguaccugagcugu

SEQ ID NO: 1966995 - RNA, 19 nt, Artificial Sequence
  Description of Artificial Sequence: Synthetic oligonucleotide
caaaggucuccagggcuug

SEQ ID NO: 1966996 - RNA, 19 nt, Artificial Sequence
  Description of Artificial Sequence: Synthetic oligonucleotide
ccuucgggaggaacugugg

SEQ ID NO: 1966997 - RNA, 19 nt, Artificial Sequence
  Description of Artificial Sequence: Synthetic oligonucleotide
cgguucaacuggaucagcc

SEQ ID NO: 1966998 - RNA, 19 nt, Artificial Sequence
  Description of Artificial Sequence: Synthetic oligonucleotide
caggaucauucucaaaggu

SEQ ID NO: 1966999 - RNA, 19 nt, Artificial Sequence
  Description of Artificial Sequence: Synthetic oligonucleotide
guuugguucugcauuuccu

SEQ ID NO: 1967000 - RNA, 19 nt, Artificial Sequence
  Description of Artificial Sequence: Synthetic oligonucleotide
acacugcuauucuuuccuu

SEQ ID NO: 1967001 - RNA, 19 nt, Artificial Sequence
  Description of Artificial Sequence: Synthetic oligonucleotide
uucccagauuucugauuua

SEQ ID NO: 1967002 - RNA, 19 nt, Artificial Sequence
  Description of Artificial Sequence: Synthetic oligonucleotide
gccggaguucuggacagcg

SEQ ID NO: 1967003 - RNA, 19 nt, Artificial Sequence
  Description of Artificial Sequence: Synthetic oligonucleotide
gaccugcuugcuuggcauc

SEQ ID NO: 1967004 - RNA, 19 nt, Artificial Sequence
  Description of Artificial Sequence: Synthetic oligonucleotide
cugcuugcuuggcauccug

SEQ ID NO: 1967005 - RNA, 19 nt, Artificial Sequence
  Description of Artificial Sequence: Synthetic oligonucleotide
ccacacugcuauucuuucc

SEQ ID NO: 1967006 - RNA, 19 nt, Artificial Sequence
  Description of Artificial Sequence: Synthetic oligonucleotide
ggcgguucaacuggaucag

SEQ ID NO: 1967007 - RNA, 19 nt, Artificial Sequence
  Description of Artificial Sequence: Synthetic oligonucleotide
cggucauuaguugcaaagg

SEQ ID NO: 1967008 - RNA, 19 nt, Artificial Sequence
  Description of Artificial Sequence: Synthetic oligonucleotide
agcggaccgaggacaacag

SEQ ID NO: 1967009 - RNA, 19 nt, Artificial Sequence
  Description of Artificial Sequence: Synthetic oligonucleotide
cacccgaggcgaagcgccg

SEQ ID NO: 1967010 - RNA, 19 nt, Artificial Sequence
  Description of Artificial Sequence: Synthetic oligonucleotide
cgaaaugcgaucaccagua

SEQ ID NO: 1967011 - RNA, 19 nt, Artificial Sequence
  Description of Artificial Sequence: Synthetic oligonucleotide
aggauggcacaaggcuuag

SEQ ID NO: 1967012 - RNA, 19 nt, Artificial Sequence
  Description of Artificial Sequence: Synthetic oligonucleotide
acagcggaccgaggacaac

SEQ ID NO: 1967013 - RNA, 19 nt, Artificial Sequence
  Description of Artificial Sequence: Synthetic oligonucleotide
gagugcuuuggggcgguuc

SEQ ID NO: 1967014 - RNA, 19 nt, Artificial Sequence
  Description of Artificial Sequence: Synthetic oligonucleotide
agguagaauagaagagcuu

SEQ ID NO: 1967015 - RNA, 19 nt, Artificial Sequence
  Description of Artificial Sequence: Synthetic oligonucleotide
gccauugcuacuauaauuu

SEQ ID NO: 1967016 - RNA, 19 nt, Artificial Sequence
  Description of Artificial Sequence: Synthetic oligonucleotide
cuacccuuuaggacaauuu

SEQ ID NO: 1967017 - RNA, 19 nt, Artificial Sequence
  Description of Artificial Sequence: Synthetic oligonucleotide
ugacccgggugaucugguc

SEQ ID NO: 1967018 - RNA, 19 nt, Artificial Sequence
  Description of Artificial Sequence: Synthetic oligonucleotide
uugagugcuuuggggcggu

SEQ ID NO: 1967019 - RNA, 19 nt, Artificial Sequence
  Description of Artificial Sequence: Synthetic oligonucleotide
cuuacaagaccugcuugcu

SEQ ID NO: 1967020 - RNA, 19 nt, Artificial Sequence
  Description of Artificial Sequence: Synthetic oligonucleotide
caccaguaaggaccaucuc

SEQ ID NO: 1967021 - RNA, 19 nt, Artificial Sequence
  Description of Artificial Sequence: Synthetic oligonucleotide
cgaucaggccauugcaaag

SEQ ID NO: 1967022 - RNA, 19 nt, Artificial Sequence
  Description of Artificial Sequence: Synthetic oligonucleotide
agcacgcaaggccgccaug

SEQ ID NO: 1967023 - RNA, 19 nt, Artificial Sequence
  Description of Artificial Sequence: Synthetic oligonucleotide
guacuacccuuuaggacaa

SEQ ID NO: 1967024 - RNA, 19 nt, Artificial Sequence
  Description of Artificial Sequence: Synthetic oligonucleotide
ggccuguacuacccuuuag

SEQ ID NO: 1967025 - RNA, 19 nt, Artificial Sequence
  Description of Artificial Sequence: Synthetic oligonucleotide
cagcggaccgaggacaaca

SEQ ID NO: 1967026 - RNA, 19 nt, Artificial Sequence
  Description of Artificial Sequence: Synthetic oligonucleotide
cugggccgaaaugcgauca

SEQ ID NO: 1967027 - RNA, 19 nt, Artificial Sequence
  Description of Artificial Sequence: Synthetic oligonucleotide
ggccgaaaugcgaucacca

SEQ ID NO: 1967028 - RNA, 19 nt, Artificial Sequence
  Description of Artificial Sequence: Synthetic oligonucleotide
cagagcacgcaaggccgcc

SEQ ID NO: 1967029 - RNA, 19 nt, Artificial Sequence
  Description of Artificial Sequence: Synthetic oligonucleotide
acgggcuucuugacccggg

SEQ ID NO: 1967030 - RNA, 19 nt, Artificial Sequence
  Description of Artificial Sequence: Synthetic oligonucleotide
ggggcgguucaacuggauc

SEQ ID NO: 1967031 - RNA, 19 nt, Artificial Sequence
  Description of Artificial Sequence: Synthetic oligonucleotide
ggaucagccccacacugcu

SEQ ID NO: 1967032 - RNA, 19 nt, Artificial Sequence
  Description of Artificial Sequence: Synthetic oligonucleotide
cccacacugcuauucuuuc

SEQ ID NO: 1967033 - RNA, 19 nt, Artificial Sequence
  Description of Artificial Sequence: Synthetic oligonucleotide
ccccaccaagagcauaacc

SEQ ID NO: 1967034 - RNA, 19 nt, Artificial Sequence
  Description of Artificial Sequence: Synthetic oligonucleotide
gcacccgaggcgaagcgcc

SEQ ID NO: 1967035 - RNA, 19 nt, Artificial Sequence
  Description of Artificial Sequence: Synthetic oligonucleotide
agcgagcugcaagcucggg

SEQ ID NO: 1967036 - RNA, 19 nt, Artificial Sequence
  Description of Artificial Sequence: Synthetic oligonucleotide
gucauuucaaaggcugcau

SEQ ID NO: 1967037 - RNA, 19 nt, Artificial Sequence
  Description of Artificial Sequence: Synthetic oligonucleotide
cugccagcccucagugguc

SEQ ID NO: 1967038 - RNA, 19 nt, Artificial Sequence
  Description of Artificial Sequence: Synthetic oligonucleotide
gacagcggaccgaggacaa

SEQ ID NO: 1967039 - RNA, 19 nt, Artificial Sequence
  Description of Artificial Sequence: Synthetic oligonucleotide
ggauuucuggcuguccaaa

SEQ ID NO: 1967040 - RNA, 19 nt, Artificial Sequence
  Description of Artificial Sequence: Synthetic oligonucleotide
uccuucuguuaacgucauu

SEQ ID NO: 1967041 - RNA, 19 nt, Artificial Sequence
  Description of Artificial Sequence: Synthetic oligonucleotide
cugcuauucuuuccuuucu

SEQ ID NO: 1967042 - RNA, 19 nt, Artificial Sequence
  Description of Artificial Sequence: Synthetic oligonucleotide
gaggcgaagcgccggaguu

SEQ ID NO: 1967043 - RNA, 19 nt, Artificial Sequence
  Description of Artificial Sequence: Synthetic oligonucleotide
caccagcauagaugauauc

SEQ ID NO: 1967044 - RNA, 19 nt, Artificial Sequence
  Description of Artificial Sequence: Synthetic oligonucleotide
guaacaguccuggaauguu

SEQ ID NO: 1967045 - RNA, 19 nt, Artificial Sequence
  Description of Artificial Sequence: Synthetic oligonucleotide
gcgccggaguucuggacag

SEQ ID NO: 1967046 - RNA, 19 nt, Artificial Sequence
  Description of Artificial Sequence: Synthetic oligonucleotide
ccucaguggucuuugaagu

SEQ ID NO: 1967047 - RNA, 19 nt, Artificial Sequence
  Description of Artificial Sequence: Synthetic oligonucleotide
uggggcgguucaacuggau

SEQ ID NO: 1967048 - RNA, 19 nt, Artificial Sequence
  Description of Artificial Sequence: Synthetic oligonucleotide
auccugggccgaaaugcga

SEQ ID NO: 1967049 - RNA, 19 nt, Artificial Sequence
  Description of Artificial Sequence: Synthetic oligonucleotide
uaccugagcuguggccaca

SEQ ID NO: 1967050 - RNA, 19 nt, Artificial Sequence
  Description of Artificial Sequence: Synthetic oligonucleotide
agagcacgcaaggccgcca

SEQ ID NO: 1967051 - RNA, 19 nt, Artificial Sequence
  Description of Artificial Sequence: Synthetic oligonucleotide
caauugacaggcugagcuu

SEQ ID NO: 1967052 - RNA, 19 nt, Artificial Sequence
  Description of Artificial Sequence: Synthetic oligonucleotide
gggccgaaaugcgaucacc

SEQ ID NO: 1967053 - RNA, 19 nt, Artificial Sequence
  Description of Artificial Sequence: Synthetic oligonucleotide
ccggaguucuggacagcgg

SEQ ID NO: 1967054 - RNA, 19 nt, Artificial Sequence
  Description of Artificial Sequence: Synthetic oligonucleotide
gggguagcagagcacgcaa

SEQ ID NO: 1967055 - RNA, 19 nt, Artificial Sequence
  Description of Artificial Sequence: Synthetic oligonucleotide
ggaccgaggacaacagcga

SEQ ID NO: 1967056 - RNA, 19 nt, Artificial Sequence
  Description of Artificial Sequence: Synthetic oligonucleotide
ccucgaucaggccauugca

SEQ ID NO: 1967057 - RNA, 19 nt, Artificial Sequence
  Description of Artificial Sequence: Synthetic oligonucleotide
cgagugagucucugagugc

SEQ ID NO: 1967058 - RNA, 19 nt, Artificial Sequence
  Description of Artificial Sequence: Synthetic oligonucleotide
cccgcaccugggauggucc

SEQ ID NO: 1967059 - RNA, 19 nt, Artificial Sequence
  Description of Artificial Sequence: Synthetic oligonucleotide
gugaugguugcaggccaca

SEQ ID NO: 1967060 - RNA, 19 nt, Artificial Sequence
  Description of Artificial Sequence: Synthetic oligonucleotide
gauguccgcuccagcugca

SEQ ID NO: 1967061 - RNA, 19 nt, Artificial Sequence
  Description of Artificial Sequence: Synthetic oligonucleotide
gcauuuccuugauguccgc

SEQ ID NO: 1967062 - RNA, 19 nt, Artificial Sequence
  Description of Artificial Sequence: Synthetic oligonucleotide
ucagccccacacugcuauu

SEQ ID NO: 1967063 - RNA, 19 nt, Artificial Sequence
  Description of Artificial Sequence: Synthetic oligonucleotide
gccuucgggaggaacugug

SEQ ID NO: 1967064 - RNA, 19 nt, Artificial Sequence
  Description of Artificial Sequence: Synthetic oligonucleotide
cccagauuucugauuuaga

SEQ ID NO: 1967065 - RNA, 19 nt, Artificial Sequence
  Description of Artificial Sequence: Synthetic oligonucleotide
cgaagcgccggaguucugg

SEQ ID NO: 1967066 - RNA, 19 nt, Artificial Sequence
  Description of Artificial Sequence: Synthetic oligonucleotide
agccuucgggaggaacugu

SEQ ID NO: 1967067 - RNA, 19 nt, Artificial Sequence
  Description of Artificial Sequence: Synthetic oligonucleotide
cuccucgaucaggccauug

SEQ ID NO: 1967068 - RNA, 19 nt, Artificial Sequence
  Description of Artificial Sequence: Synthetic oligonucleotide
gagcugcaagcucggggua

SEQ ID NO: 1967069 - RNA, 19 nt, Artificial Sequence
  Description of Artificial Sequence: Synthetic oligonucleotide
cgaguaccugagcuguggc

SEQ ID NO: 1967070 - RNA, 19 nt, Artificial Sequence
  Description of Artificial Sequence: Synthetic oligonucleotide
gcucaggaacuugcuggag

SEQ ID NO: 1967071 - RNA, 19 nt, Artificial Sequence
  Description of Artificial Sequence: Synthetic oligonucleotide
ccaagagcauaaccauuga

SEQ ID NO: 1967072 - RNA, 19 nt, Artificial Sequence
  Description of Artificial Sequence: Synthetic oligonucleotide
aggccauugcaaagagcau

SEQ ID NO: 1967073 - RNA, 19 nt, Artificial Sequence
  Description of Artificial Sequence: Synthetic oligonucleotide
cacugcuauucuuuccuuu

SEQ ID NO: 1967074 - RNA, 19 nt, Artificial Sequence
  Description of Artificial Sequence: Synthetic oligonucleotide
gcggaccgaggacaacagc

SEQ ID NO: 1967075 - RNA, 19 nt, Artificial Sequence
  Description of Artificial Sequence: Synthetic oligonucleotide
gcuuuggggcgguucaacu

SEQ ID NO: 1967076 - RNA, 19 nt, Artificial Sequence
  Description of Artificial Sequence: Synthetic oligonucleotide
cgaucaccaguaaggacca

SEQ ID NO: 1967077 - RNA, 19 nt, Artificial Sequence
  Description of Artificial Sequence: Synthetic oligonucleotide
cccuuuaggacaauuuauu

SEQ ID NO: 1967078 - RNA, 19 nt, Artificial Sequence
  Description of Artificial Sequence: Synthetic oligonucleotide
cugagagauugguuuccau

SEQ ID NO: 1967079 - RNA, 19 nt, Artificial Sequence
  Description of Artificial Sequence: Synthetic oligonucleotide
aguuagcacccgaggcgaa

SEQ ID NO: 1967080 - RNA, 19 nt, Artificial Sequence
  Description of Artificial Sequence: Synthetic oligonucleotide
agggcuugguugagcuccu

SEQ ID NO: 1967081 - RNA, 19 nt, Artificial Sequence
  Description of Artificial Sequence: Synthetic oligonucleotide
gagcacgcaaggccgccau

SEQ ID NO: 1967082 - RNA, 19 nt, Artificial Sequence
  Description of Artificial Sequence: Synthetic oligonucleotide
ccagcuuauuuccuucugu

SEQ ID NO: 1967083 - RNA, 19 nt, Artificial Sequence
  Description of Artificial Sequence: Synthetic oligonucleotide
caggaacuugcuggaguaa

SEQ ID NO: 1967084 - RNA, 19 nt, Artificial Sequence
  Description of Artificial Sequence: Synthetic oligonucleotide
cagcaggaucauucucaaa

SEQ ID NO: 1967085 - RNA, 19 nt, Artificial Sequence
  Description of Artificial Sequence: Synthetic oligonucleotide
ccugggccgaaaugcgauc

SEQ ID NO: 1967086 - RNA, 19 nt, Artificial Sequence
  Description of Artificial Sequence: Synthetic oligonucleotide
cgucauuucaaaggcugca

SEQ ID NO: 1967087 - RNA, 19 nt, Artificial Sequence
  Description of Artificial Sequence: Synthetic oligonucleotide
caacuggaucagccccaca

SEQ ID NO: 1967088 - RNA, 19 nt, Artificial Sequence
  Description of Artificial Sequence: Synthetic oligonucleotide
gcuuucucaccagcauaga

SEQ ID NO: 1967089 - RNA, 19 nt, Artificial Sequence
  Description of Artificial Sequence: Synthetic oligonucleotide
cuccggucauuaguugcaa

SEQ ID NO: 1967090 - RNA, 19 nt, Artificial Sequence
  Description of Artificial Sequence: Synthetic oligonucleotide
cgagcugcaagcucggggu

SEQ ID NO: 1967091 - RNA, 19 nt, Artificial Sequence
  Description of Artificial Sequence: Synthetic oligonucleotide
ccacgaguacgaguaccug

SEQ ID NO: 1967092 - RNA, 19 nt, Artificial Sequence
  Description of Artificial Sequence: Synthetic oligonucleotide
gcgguucaacuggaucagc

SEQ ID NO: 1967093 - RNA, 19 nt, Artificial Sequence
  Description of Artificial Sequence: Synthetic oligonucleotide
caguaaggaccaucuccau

SEQ ID NO: 1967094 - RNA, 19 nt, Artificial Sequence
  Description of Artificial Sequence: Synthetic oligonucleotide
cuuucgccauugcuacuau

SEQ ID NO: 1967095 - RNA, 19 nt, Artificial Sequence
  Description of Artificial Sequence: Synthetic oligonucleotide
gcccucaguggucuuugaa

SEQ ID NO: 1967096 - RNA, 19 nt, Artificial Sequence
  Description of Artificial Sequence: Synthetic oligonucleotide
uacuacccuuuaggacaau

SEQ ID NO: 1967097 - RNA, 19 nt, Artificial Sequence
  Description of Artificial Sequence: Synthetic oligonucleotide
caacugcacgagugagucu

SEQ ID NO: 1967098 - RNA, 19 nt, Artificial Sequence
  Description of Artificial Sequence: Synthetic oligonucleotide
ccuugaacgcuucccagau

SEQ ID NO: 1967099 - RNA, 19 nt, Artificial Sequence
  Description of Artificial Sequence: Synthetic oligonucleotide
ccgcaccugggaugguccc

SEQ ID NO: 1967100 - RNA, 19 nt, Artificial Sequence
  Description of Artificial Sequence: Synthetic oligonucleotide
ggcuuagcugccagcccuc

SEQ ID NO: 1967101 - RNA, 19 nt, Artificial Sequence
  Description of Artificial Sequence: Synthetic oligonucleotide
caacagcgagcugcaagcu

SEQ ID NO: 1967102 - RNA, 19 nt, Artificial Sequence
  Description of Artificial Sequence: Synthetic oligonucleotide
cuugaacgcuucccagauu

SEQ ID NO: 1967103 - RNA, 19 nt, Artificial Sequence
  Description of Artificial Sequence: Synthetic oligonucleotide
ggcuguccaaacugggcuu

SEQ ID NO: 1967104 - RNA, 19 nt, Artificial Sequence
  Description of Artificial Sequence: Synthetic oligonucleotide
cugcaagcucgggguagca

SEQ ID NO: 1967105 - RNA, 19 nt, Artificial Sequence
  Description of Artificial Sequence: Synthetic oligonucleotide
ggcuagugacuugccaacu

SEQ ID NO: 1967106 - RNA, 19 nt, Artificial Sequence
  Description of Artificial Sequence: Synthetic oligonucleotide
ugagugcuuuggggcgguu

SEQ ID NO: 1967107 - RNA, 19 nt, Artificial Sequence
  Description of Artificial Sequence: Synthetic oligonucleotide
gcuuagcugccagcccuca

SEQ ID NO: 1967108 - RNA, 19 nt, Artificial Sequence
  Description of Artificial Sequence: Synthetic oligonucleotide
gcucgggguagcagagcac

SEQ ID NO: 1967109 - RNA, 19 nt, Artificial Sequence
  Description of Artificial Sequence: Synthetic oligonucleotide
ggaggaacuguggccugua

SEQ ID NO: 1967110 - RNA, 19 nt, Artificial Sequence
  Description of Artificial Sequence: Synthetic oligonucleotide
gccaacugcacgagugagu

SEQ ID NO: 1967111 - RNA, 19 nt, Artificial Sequence
  Description of Artificial Sequence: Synthetic oligonucleotide
ccauugcaaagagcauuga

SEQ ID NO: 1967112 - RNA, 19 nt, Artificial Sequence
  Description of Artificial Sequence: Synthetic oligonucleotide
cgccauugcuacuauaauu

SEQ ID NO: 1967113 - RNA, 19 nt, Artificial Sequence
  Description of Artificial Sequence: Synthetic oligonucleotide
gcaaggccgccauggcgua

SEQ ID NO: 1967114 - RNA, 19 nt, Artificial Sequence
  Description of Artificial Sequence: Synthetic oligonucleotide
ccacaccacgaguacgagu

SEQ ID NO: 1967115 - RNA, 19 nt, Artificial Sequence
  Description of Artificial Sequence: Synthetic oligonucleotide
ccgggugaucuggucccag

SEQ ID NO: 1967116 - RNA, 19 nt, Artificial Sequence
  Description of Artificial Sequence: Synthetic oligonucleotide
cgcaccugggauggucccc

SEQ ID NO: 1967117 - RNA, 19 nt, Artificial Sequence
  Description of Artificial Sequence: Synthetic oligonucleotide
cgggaggaacuguggccug

SEQ ID NO: 1967118 - RNA, 19 nt, Artificial Sequence
  Description of Artificial Sequence: Synthetic oligonucleotide
cccgaggcgaagcgccgga

SEQ ID NO: 1967119 - RNA, 19 nt, Artificial Sequence
  Description of Artificial Sequence: Synthetic oligonucleotide
gcuuggcauccugggccga

SEQ ID NO: 1967120 - RNA, 19 nt, Artificial Sequence
  Description of Artificial Sequence: Synthetic oligonucleotide
gcgaagcgccggaguucug

SEQ ID NO: 1967121 - RNA, 19 nt, Artificial Sequence
  Description of Artificial Sequence: Synthetic oligonucleotide
cgcuucccagauuucugau

SEQ ID NO: 1967122 - RNA, 19 nt, Artificial Sequence
  Description of Artificial Sequence: Synthetic oligonucleotide
ccugcuugcuuggcauccu

SEQ ID NO: 1967123 - RNA, 19 nt, Artificial Sequence
  Description of Artificial Sequence: Synthetic oligonucleotide
cgggugaucuggucccagu

SEQ ID NO: 1967124 - RNA, 19 nt, Artificial Sequence
  Description of Artificial Sequence: Synthetic oligonucleotide
cagcugcaaugacgggcuu

SEQ ID NO: 1967125 - RNA, 19 nt, Artificial Sequence
  Description of Artificial Sequence: Synthetic oligonucleotide
cgccggaguucuggacagc

SEQ ID NO: 1967126 - RNA, 19 nt, Artificial Sequence
  Description of Artificial Sequence: Synthetic oligonucleotide
cccgggugaucugguccca

SEQ ID NO: 1967127 - RNA, 19 nt, Artificial Sequence
  Description of Artificial Sequence: Synthetic oligonucleotide
cugcaaugacgggcuucuu

SEQ ID NO: 1967128 - RNA, 19 nt, Artificial Sequence
  Description of Artificial Sequence: Synthetic oligonucleotide
gcuccucgaucaggccauu

SEQ ID NO: 1967129 - RNA, 19 nt, Artificial Sequence
  Description of Artificial Sequence: Synthetic oligonucleotide
aguagauaggcucaaaggc

SEQ ID NO: 1967130 - RNA, 19 nt, Artificial Sequence
  Description of Artificial Sequence: Synthetic oligonucleotide
acuucuuacagauggaaac

SEQ ID NO: 1967131 - RNA, 19 nt, Artificial Sequence
  Description of Artificial Sequence: Synthetic oligonucleotide
acgccuguaacccagaagc

SEQ ID NO: 1967132 - RNA, 19 nt, Artificial Sequence
  Description of Artificial Sequence: Synthetic oligonucleotide
acuagaagguaacagcacc

SEQ ID NO: 1967133 - RNA, 19 nt, Artificial Sequence
  Description of Artificial Sequence: Synthetic oligonucleotide
aauggacccagucagcacg

SEQ ID NO: 1967134 - RNA, 19 nt, Artificial Sequence
  Description of Artificial Sequence: Synthetic oligonucleotide
uauucuuucucgaaaggag

SEQ ID NO: 1967135 - RNA, 19 nt, Artificial Sequence
  Description of Artificial Sequence: Synthetic oligonucleotide
uccacuagccaguagauag

SEQ ID NO: 1967136 - RNA, 19 nt, Artificial Sequence
  Description of Artificial Sequence: Synthetic oligonucleotide
aaaccagcggaucacauug

SEQ ID NO: 1967137 - RNA, 19 nt, Artificial Sequence
  Description of Artificial Sequence: Synthetic oligonucleotide
ugugaguuauucuuucucg

SEQ ID NO: 1967138 - RNA, 19 nt, Artificial Sequence
  Description of Artificial Sequence: Synthetic oligonucleotide
  modified_base (10)..(10): a, c, u, g, unknown or other
ugucauuucngccuggggu

SEQ ID NO: 1967139 - RNA, 19 nt, Artificial Sequence
  Description of Artificial Sequence: Synthetic oligonucleotide
ucucgaaaggagaagguag

SEQ ID NO: 1967140 - RNA, 19 nt, Artificial Sequence
  Description of Artificial Sequence: Synthetic oligonucleotide
guagcgaugauuauagugg

SEQ ID NO: 1967141 - RNA, 19 nt, Artificial Sequence
  Description of Artificial Sequence: Synthetic oligonucleotide
cacacaauuguuuagccag

SEQ ID NO: 1967142 - RNA, 19 nt, Artificial Sequence
  Description of Artificial Sequence: Synthetic oligonucleotide
auuauaguggcccacacaa

SEQ ID NO: 1967143 - RNA, 19 nt, Artificial Sequence
  Description of Artificial Sequence: Synthetic oligonucleotide
uucgaugcuagucucaccc

SEQ ID NO: 1967144 - RNA, 19 nt, Artificial Sequence
  Description of Artificial Sequence: Synthetic oligonucleotide
acacaccuauuacagaugc

SEQ ID NO: 1967145 - RNA, 19 nt, Artificial Sequence
  Description of Artificial Sequence: Synthetic oligonucleotide
auuccuaaauacucugccc

SEQ ID NO: 1967146 - RNA, 19 nt, Artificial Sequence
  Description of Artificial Sequence: Synthetic oligonucleotide
caaguuguggcucacacag

SEQ ID NO: 1967147 - RNA, 19 nt, Artificial Sequence
  Description of Artificial Sequence: Synthetic oligonucleotide
aaugccagcagagucgugg

SEQ ID NO: 1967148 - RNA, 19 nt, Artificial Sequence
  Description of Artificial Sequence: Synthetic oligonucleotide
gacgaugaggaucagauuc

SEQ ID NO: 1967149 - RNA, 19 nt, Artificial Sequence
  Description of Artificial Sequence: Synthetic oligonucleotide
aguagcgaugauuauagug

SEQ ID NO: 1967150 - RNA, 19 nt, Artificial Sequence
  Description of Artificial Sequence: Synthetic oligonucleotide
gaaguagcgaugauuauag

SEQ ID NO: 1967151 - RNA, 19 nt, Artificial Sequence
  Description of Artificial Sequence: Synthetic oligonucleotide
aagcagauuccgcuggccc

SEQ ID NO: 1967152 - RNA, 19 nt, Artificial Sequence
  Description of Artificial Sequence: Synthetic oligonucleotide
aaaagcagauuccgcuggc

SEQ ID NO: 1967153 - RNA, 19 nt, Artificial Sequence
  Description of Artificial Sequence: Synthetic oligonucleotide
auagcuacaguagacacag

SEQ ID NO: 1967154 - RNA, 19 nt, Artificial Sequence
  Description of Artificial Sequence: Synthetic oligonucleotide
uagguucgaaggaugaggg

SEQ ID NO: 1967155 - RNA, 19 nt, Artificial Sequence
  Description of Artificial Sequence: Synthetic oligonucleotide
uagacaagacucuugugag

SEQ ID NO: 1967156 - RNA, 19 nt, Artificial Sequence
  Description of Artificial Sequence: Synthetic oligonucleotide
uuccuaaauacucugcccu

SEQ ID NO: 1967157 - RNA, 19 nt, Artificial Sequence
  Description of Artificial Sequence: Synthetic oligonucleotide
  modified_base (17)..(17): a, c, u, g, unknown or other
guagcaaugucauuucngc

SEQ ID NO: 1967158 - RNA, 19 nt, Artificial Sequence
  Description of Artificial Sequence: Synthetic oligonucleotide
gaucacauuguccacuagc

SEQ ID NO: 1967159 - RNA, 19 nt, Artificial Sequence
  Description of Artificial Sequence: Synthetic oligonucleotide
aaggucccaacuuccauag

SEQ ID NO: 1967160 - RNA, 19 nt, Artificial Sequence
  Description of Artificial Sequence: Synthetic oligonucleotide
caaaccuugccauaacgcc

SEQ ID NO: 1967161 - RNA, 19 nt, Artificial Sequence
  Description of Artificial Sequence: Synthetic oligonucleotide
aggagacgcaggcagaggc

SEQ ID NO: 1967162 - RNA, 19 nt, Artificial Sequence
  Description of Artificial Sequence: Synthetic oligonucleotide
  modified_base (15)..(15): a, c, u, g, unknown or other
agcaaugucauuucngccu

SEQ ID NO: 1967163 - RNA, 19 nt, Artificial Sequence
  Description of Artificial Sequence: Synthetic oligonucleotide
caguagauaggcucaaagg

SEQ ID NO: 1967164 - RNA, 19 nt, Artificial Sequence
  Description of Artificial Sequence: Synthetic oligonucleotide
guagacaagacucuuguga

SEQ ID NO: 1967165 - RNA, 19 nt, Artificial Sequence
  Description of Artificial Sequence: Synthetic oligonucleotide
acccgugucagccaaugcc

SEQ ID NO: 1967166 - RNA, 19 nt, Artificial Sequence
  Description of Artificial Sequence: Synthetic oligonucleotide
ugacuguagaagaaaugcc

SEQ ID NO: 1967167 - RNA, 19 nt, Artificial Sequence
  Description of Artificial Sequence: Synthetic oligonucleotide
ugaggaucagauuccagug

SEQ ID NO: 1967168 - RNA, 19 nt, Artificial Sequence
  Description of Artificial Sequence: Synthetic oligonucleotide
aauuguuuagccaggggca

SEQ ID NO: 1967169 - RNA, 19 nt, Artificial Sequence
  Description of Artificial Sequence: Synthetic oligonucleotide
gugacuagaagguaacagc

SEQ ID NO: 1967170 - RNA, 19 nt, Artificial Sequence
  Description of Artificial Sequence: Synthetic oligonucleotide
cuuucucgaaaggagaagg

SEQ ID NO: 1967171 - RNA, 19 nt, Artificial Sequence
  Description of Artificial Sequence: Synthetic oligonucleotide
uucuuacagauggaaaccg

SEQ ID NO: 1967172 - RNA, 19 nt, Artificial Sequence
  Description of Artificial Sequence: Synthetic oligonucleotide
ugguaagucucgauggcag

SEQ ID NO: 1967173 - RNA, 19 nt, Artificial Sequence
  Description of Artificial Sequence: Synthetic oligonucleotide
cuagaagguaacagcaccc

SEQ ID NO: 1967174 - RNA, 19 nt, Artificial Sequence
  Description of Artificial Sequence: Synthetic oligonucleotide
uacagauggaaaccguagc

SEQ ID NO: 1967175 - RNA, 19 nt, Artificial Sequence
  Description of Artificial Sequence: Synthetic oligonucleotide
agaaaugccagcagagucg

SEQ ID NO: 1967176 - RNA, 19 nt, Artificial Sequence
  Description of Artificial Sequence: Synthetic oligonucleotide
ugguaguaauggaagacga

SEQ ID NO: 1967177 - RNA, 19 nt, Artificial Sequence
  Description of Artificial Sequence: Synthetic oligonucleotide
cuagccaguagauaggcuc

SEQ ID NO: 1967178 - RNA, 19 nt, Artificial Sequence
  Description of Artificial Sequence: Synthetic oligonucleotide
aguaauggaagacgaugag

SEQ ID NO: 1967179 - RNA, 19 nt, Artificial Sequence
  Description of Artificial Sequence: Synthetic oligonucleotide
  modified_base (12)..(12): a, c, u, g, unknown or other
aaugucauuucngccuggg

SEQ ID NO: 1967180 - RNA, 19 nt, Artificial Sequence
  Description of Artificial Sequence: Synthetic oligonucleotide
uauaguggcccacacaauu

SEQ ID NO: 1967181 - RNA, 19 nt, Artificial Sequence
  Description of Artificial Sequence: Synthetic oligonucleotide
aagguaacagcacccgugu

SEQ ID NO: 1967182 - RNA, 19 nt, Artificial Sequence
  Description of Artificial Sequence: Synthetic oligonucleotide
guaguaauggaagacgaug

SEQ ID NO: 1967183 - RNA, 19 nt, Artificial Sequence
  Description of Artificial Sequence: Synthetic oligonucleotide
cucgaaaggagaagguagg

SEQ ID NO: 1967184 - RNA, 19 nt, Artificial Sequence
  Description of Artificial Sequence: Synthetic oligonucleotide
agacauaacaagcaucaaa

SEQ ID NO: 1967185 - RNA, 19 nt, Artificial Sequence
  Description of Artificial Sequence: Synthetic oligonucleotide
guagguucgaaggaugagg

SEQ ID NO: 1967186 - RNA, 19 nt, Artificial Sequence
  Description of Artificial Sequence: Synthetic oligonucleotide
acaccuauuacagaugcug

SEQ ID NO: 1967187 - RNA, 19 nt, Artificial Sequence
  Description of Artificial Sequence: Synthetic oligonucleotide
caugccauaugguuagggc

SEQ ID NO: 1967188 - RNA, 19 nt, Artificial Sequence
  Description of Artificial Sequence: Synthetic oligonucleotide
acagauggaaaccguagca

SEQ ID NO: 1967189 - RNA, 19 nt, Artificial Sequence
  Description of Artificial Sequence: Synthetic oligonucleotide
ugaguagguucgaaggaug

SEQ ID NO: 1967190 - RNA, 19 nt, Artificial Sequence
  Description of Artificial Sequence: Synthetic oligonucleotide
gauggccugguaguaaugg

SEQ ID NO: 1967191 - RNA, 19 nt, Artificial Sequence
  Description of Artificial Sequence: Synthetic oligonucleotide
cuaaauacucugcccuugg

SEQ ID NO: 1967192 - RNA, 19 nt, Artificial Sequence
  Description of Artificial Sequence: Synthetic oligonucleotide
  modified_base (9)..(9): a, c, u, g, unknown or other
gucauuucngccuggggug

SEQ ID NO: 1967193 - RNA, 19 nt, Artificial Sequence
  Description of Artificial Sequence: Synthetic oligonucleotide
acaauuguuuagccagggg

SEQ ID NO: 1967194 - RNA, 19 nt, Artificial Sequence
  Description of Artificial Sequence: Synthetic oligonucleotide
ugccauaugguuagggcac

SEQ ID NO: 1967195 - RNA, 19 nt, Artificial Sequence
  Description of Artificial Sequence: Synthetic oligonucleotide
uugugaguuauucuuucuc

SEQ ID NO: 1967196 - RNA, 19 nt, Artificial Sequence
  Description of Artificial Sequence: Synthetic oligonucleotide
gacccaaaagcagauuccg

SEQ ID NO: 1967197 - RNA, 19 nt, Artificial Sequence
  Description of Artificial Sequence: Synthetic oligonucleotide
auaugguuagggcacccag

SEQ ID NO: 1967198 - RNA, 19 nt, Artificial Sequence
  Description of Artificial Sequence: Synthetic oligonucleotide
ucagccaaugccuuccugu

SEQ ID NO: 1967199 - RNA, 19 nt, Artificial Sequence
  Description of Artificial Sequence: Synthetic oligonucleotide
acaccuaggaacaccuucc

SEQ ID NO: 1967200 - RNA, 19 nt, Artificial Sequence
  Description of Artificial Sequence: Synthetic oligonucleotide
agucgugguacugaguagg

SEQ ID NO: 1967201 - RNA, 19 nt, Artificial Sequence
  Description of Artificial Sequence: Synthetic oligonucleotide
aaccguagcaaugucauuu

SEQ ID NO: 1967202 - RNA, 19 nt, Artificial Sequence
  Description of Artificial Sequence: Synthetic oligonucleotide
aggauuccuaaauacucug

SEQ ID NO: 1967203 - RNA, 19 nt, Artificial Sequence
  Description of Artificial Sequence: Synthetic oligonucleotide
agagucgugguacugagua

SEQ ID NO: 1967204 - RNA, 19 nt, Artificial Sequence
  Description of Artificial Sequence: Synthetic oligonucleotide
augccauaugguuagggca

SEQ ID NO: 1967205 - RNA, 19 nt, Artificial Sequence
  Description of Artificial Sequence: Synthetic oligonucleotide
agguagacaagacucuugu

SEQ ID NO: 1967206 - RNA, 19 nt, Artificial Sequence
  Description of Artificial Sequence: Synthetic oligonucleotide
gaagguaacagcacccgug

SEQ ID NO: 1967207 - RNA, 19 nt, Artificial Sequence
  Description of Artificial Sequence: Synthetic oligonucleotide
ugccuuucgaugcuagucu

SEQ ID NO: 1967208 - RNA, 19 nt, Artificial Sequence
  Description of Artificial Sequence: Synthetic oligonucleotide
ucuugugaguuauucuuuc

SEQ ID NO: 1967209 - RNA, 19 nt, Artificial Sequence
  Description of Artificial Sequence: Synthetic oligonucleotide
ucuuacagauggaaaccgu

SEQ ID NO: 1967210 - RNA, 19 nt, Artificial Sequence
  Description of Artificial Sequence: Synthetic oligonucleotide
aguuguaaggauuccuaaa

SEQ ID NO: 1967211 - RNA, 19 nt, Artificial Sequence
  Description of Artificial Sequence: Synthetic oligonucleotide
aaaccuugccauaacgcca

SEQ ID NO: 1967212 - RNA, 19 nt, Artificial Sequence
  Description of Artificial Sequence: Synthetic oligonucleotide
acgaugaggaucagauucc

SEQ ID NO: 1967213 - RNA, 19 nt, Artificial Sequence
  Description of Artificial Sequence: Synthetic oligonucleotide
guaagucucgauggcagcg

SEQ ID NO: 1967214 - RNA, 19 nt, Artificial Sequence
  Description of Artificial Sequence: Synthetic oligonucleotide
ugauuauaguggcccacac

SEQ ID NO: 1967215 - RNA, 19 nt, Artificial Sequence
  Description of Artificial Sequence: Synthetic oligonucleotide
caccuauuacagaugcugc

SEQ ID NO: 1967216 - RNA, 19 nt, Artificial Sequence
  Description of Artificial Sequence: Synthetic oligonucleotide
uguucgggcugguuugggg

SEQ ID NO: 1967217 - RNA, 19 nt, Artificial Sequence
  Description of Artificial Sequence: Synthetic oligonucleotide
accguagcaaugucauuuc

SEQ ID NO: 1967218 - RNA, 19 nt, Artificial Sequence
  Description of Artificial Sequence: Synthetic oligonucleotide
uuagccaggggcagugaug

SEQ ID NO: 1967219 - RNA, 19 nt, Artificial Sequence
  Description of Artificial Sequence: Synthetic oligonucleotide
uaggugacuagaagguaac

SEQ ID NO: 1967220 - RNA, 19 nt, Artificial Sequence
  Description of Artificial Sequence: Synthetic oligonucleotide
ucccaacucauuccauucc

SEQ ID NO: 1967221 - RNA, 19 nt, Artificial Sequence
  Description of Artificial Sequence: Synthetic oligonucleotide
accuauuacagaugcugca

SEQ ID NO: 1967222 - RNA, 19 nt, Artificial Sequence
  Description of Artificial Sequence: Synthetic oligonucleotide
agauggaaaccguagcaau

SEQ ID NO: 1967223 - RNA, 19 nt, Artificial Sequence
  Description of Artificial Sequence: Synthetic oligonucleotide
uggccuguaaccgacgucu

SEQ ID NO: 1967224 - RNA, 19 nt, Artificial Sequence
  Description of Artificial Sequence: Synthetic oligonucleotide
ucaaguuguggcucacaca

SEQ ID NO: 1967225 - RNA, 19 nt, Artificial Sequence
  Description of Artificial Sequence: Synthetic oligonucleotide
gguaaaugcacuucuuaca

SEQ ID NO: 1967226 - RNA, 19 nt, Artificial Sequence
  Description of Artificial Sequence: Synthetic oligonucleotide
uaguuguaaggauuccuaa

SEQ ID NO: 1967227 - RNA, 19 nt, Artificial Sequence
  Description of Artificial Sequence: Synthetic oligonucleotide
agugagcagucacccaagg

SEQ ID NO: 1967228 - RNA, 19 nt, Artificial Sequence
  Description of Artificial Sequence: Synthetic oligonucleotide
guagauaggcucaaaggca

SEQ ID NO: 1967229 - RNA, 19 nt, Artificial Sequence
  Description of Artificial Sequence: Synthetic oligonucleotide
accagagguagacaagacu

SEQ ID NO: 1967230 - RNA, 19 nt, Artificial Sequence
  Description of Artificial Sequence: Synthetic oligonucleotide
aacgccagcgcuguaccag

SEQ ID NO: 1967231 - RNA, 19 nt, Artificial Sequence
  Description of Artificial Sequence: Synthetic oligonucleotide
uaaccgacgucucuccuuc

SEQ ID NO: 1967232 - RNA, 19 nt, Artificial Sequence
  Description of Artificial Sequence: Synthetic oligonucleotide
  modified_base (8)..(8): a, c, u, g, unknown or other
ucauuucngccuggggugg

SEQ ID NO: 1967233 - RNA, 19 nt, Artificial Sequence
  Description of Artificial Sequence: Synthetic oligonucleotide
ugcccuuggccuguaaccg

SEQ ID NO: 1967234 - RNA, 19 nt, Artificial Sequence
  Description of Artificial Sequence: Synthetic oligonucleotide
gcuagucucaccccgacug

SEQ ID NO: 1967235 - RNA, 19 nt, Artificial Sequence
  Description of Artificial Sequence: Synthetic oligonucleotide
ggugacuagaagguaacag

SEQ ID NO: 1967236 - RNA, 19 nt, Artificial Sequence
  Description of Artificial Sequence: Synthetic oligonucleotide
gguucgaaggaugaggggc

SEQ ID NO: 1967237 - RNA, 19 nt, Artificial Sequence
  Description of Artificial Sequence: Synthetic oligonucleotide
gacugaugagaauggcaug

SEQ ID NO: 1967238 - RNA, 19 nt, Artificial Sequence
  Description of Artificial Sequence: Synthetic oligonucleotide
auuguuuagccaggggcag

SEQ ID NO: 1967239 - RNA, 19 nt, Artificial Sequence
  Description of Artificial Sequence: Synthetic oligonucleotide
gaugauuauaguggcccac

SEQ ID NO: 1967240 - RNA, 19 nt, Artificial Sequence
  Description of Artificial Sequence: Synthetic oligonucleotide
auggaaaccguagcaaugu

SEQ ID NO: 1967241 - RNA, 19 nt, Artificial Sequence
  Description of Artificial Sequence: Synthetic oligonucleotide
guaagccucccggaaaagg

SEQ ID NO: 1967242 - RNA, 19 nt, Artificial Sequence
  Description of Artificial Sequence: Synthetic oligonucleotide
uguuuagccaggggcagug

SEQ ID NO: 1967243 - RNA, 19 nt, Artificial Sequence
  Description of Artificial Sequence: Synthetic oligonucleotide
uaguggcccacacaauugu

SEQ ID NO: 1967244 - RNA, 19 nt, Artificial Sequence
  Description of Artificial Sequence: Synthetic oligonucleotide
caccgaacugcacaggaac

SEQ ID NO: 1967245 - RNA, 19 nt, Artificial Sequence
  Description of Artificial Sequence: Synthetic oligonucleotide
uggccugguaguaauggaa

SEQ ID NO: 1967246 - RNA, 19 nt, Artificial Sequence
  Description of Artificial Sequence: Synthetic oligonucleotide
ggguaaaugcacuucuuac

SEQ ID NO: 1967247 - RNA, 19 nt, Artificial Sequence
  Description of Artificial Sequence: Synthetic oligonucleotide
gagagacauaacaagcauc

SEQ ID NO: 1967248 - RNA, 19 nt, Artificial Sequence
  Description of Artificial Sequence: Synthetic oligonucleotide
cacaauuguuuagccaggg

SEQ ID NO: 1967249 - RNA, 19 nt, Artificial Sequence
  Description of Artificial Sequence: Synthetic oligonucleotide
accgaacugcacaggaacc

SEQ ID NO: 1967250 - RNA, 19 nt, Artificial Sequence
  Description of Artificial Sequence: Synthetic oligonucleotide
uuuagccaggggcagugau

SEQ ID NO: 1967251 - RNA, 19 nt, Artificial Sequence
  Description of Artificial Sequence: Synthetic oligonucleotide
gugguacugaguagguucg

SEQ ID NO: 1967252 - RNA, 19 nt, Artificial Sequence
  Description of Artificial Sequence: Synthetic oligonucleotide
cacaccuaggaacaccuuc

SEQ ID NO: 1967253 - RNA, 19 nt, Artificial Sequence
  Description of Artificial Sequence: Synthetic oligonucleotide
gacgccuguaacccagaag

SEQ ID NO: 1967254 - RNA, 19 nt, Artificial Sequence
  Description of Artificial Sequence: Synthetic oligonucleotide
agaagguaacagcacccgu

SEQ ID NO: 1967255 - RNA, 19 nt, Artificial Sequence
  Description of Artificial Sequence: Synthetic oligonucleotide
agcgaugauuauaguggcc

SEQ ID NO: 1967256 - RNA, 19 nt, Artificial Sequence
  Description of Artificial Sequence: Synthetic oligonucleotide
accccgacugaugagaaug

SEQ ID NO: 1967257 - RNA, 19 nt, Artificial Sequence
  Description of Artificial Sequence: Synthetic oligonucleotide
uuccauucccaugggguag

SEQ ID NO: 1967258 - RNA, 19 nt, Artificial Sequence
  Description of Artificial Sequence: Synthetic oligonucleotide
agguucgaaggaugagggg

SEQ ID NO: 1967259 - RNA, 19 nt, Artificial Sequence
  Description of Artificial Sequence: Synthetic oligonucleotide
cauagcuacaguagacaca

SEQ ID NO: 1967260 - RNA, 19 nt, Artificial Sequence
  Description of Artificial Sequence: Synthetic oligonucleotide
agugacuguagaagaaaug

SEQ ID NO: 1967261 - RNA, 19 nt, Artificial Sequence
  Description of Artificial Sequence: Synthetic oligonucleotide
uauccgaggaggcguggug

SEQ ID NO: 1967262 - RNA, 19 nt, Artificial Sequence
  Description of Artificial Sequence: Synthetic oligonucleotide
  modified_base (3)..(3): a, c, u, g, unknown or other
ucngccuggggugguaucc

SEQ ID NO: 1967263 - RNA, 19 nt, Artificial Sequence
  Description of Artificial Sequence: Synthetic oligonucleotide
cauaacgccagcgcuguac

SEQ ID NO: 1967264 - RNA, 19 nt, Artificial Sequence
  Description of Artificial Sequence: Synthetic oligonucleotide
augcuagucucaccccgac

SEQ ID NO: 1967265 - RNA, 19 nt, Artificial Sequence
  Description of Artificial Sequence: Synthetic oligonucleotide
gguaacagcacccguguca

SEQ ID NO: 1967266 - RNA, 19 nt, Artificial Sequence
  Description of Artificial Sequence: Synthetic oligonucleotide
gcgaugauuauaguggccc

SEQ ID NO: 1967267 - RNA, 19 nt, Artificial Sequence
  Description of Artificial Sequence: Synthetic oligonucleotide
auuccauucccauggggua

SEQ ID NO: 1967268 - RNA, 19 nt, Artificial Sequence
  Description of Artificial Sequence: Synthetic oligonucleotide
aguagguucgaaggaugag

SEQ ID NO: 1967269 - RNA, 19 nt, Artificial Sequence
  Description of Artificial Sequence: Synthetic oligonucleotide
ggcagcguaagccucccgg

SEQ ID NO: 1967270 - RNA, 19 nt, Artificial Sequence
  Description of Artificial Sequence: Synthetic oligonucleotide
uguaaccgacgucucuccu

SEQ ID NO: 1967271 - RNA, 19 nt, Artificial Sequence
  Description of Artificial Sequence: Synthetic oligonucleotide
gacuagaagguaacagcac

SEQ ID NO: 1967272 - RNA, 19 nt, Artificial Sequence
  Description of Artificial Sequence: Synthetic oligonucleotide
uuccgcuggccccgcaugg

SEQ ID NO: 1967273 - RNA, 19 nt, Artificial Sequence
  Description of Artificial Sequence: Synthetic oligonucleotide
cuguaaccgacgucucucc

SEQ ID NO: 1967274 - RNA, 19 nt, Artificial Sequence
  Description of Artificial Sequence: Synthetic oligonucleotide
uuucgaugcuagucucacc

SEQ ID NO: 1967275 - RNA, 19 nt, Artificial Sequence
  Description of Artificial Sequence: Synthetic oligonucleotide
acccaaaagcagauuccgc

SEQ ID NO: 1967276 - RNA, 19 nt, Artificial Sequence
  Description of Artificial Sequence: Synthetic oligonucleotide
gagucgugguacugaguag

SEQ ID NO: 1967277 - RNA, 19 nt, Artificial Sequence
  Description of Artificial Sequence: Synthetic oligonucleotide
cuuacagauggaaaccgua

SEQ ID NO: 1967278 - RNA, 19 nt, Artificial Sequence
  Description of Artificial Sequence: Synthetic oligonucleotide
gcgggcaggacccaaaagc

SEQ ID NO: 1967279 - RNA, 19 nt, Artificial Sequence
  Description of Artificial Sequence: Synthetic oligonucleotide
uucucgaaaggagaaggua

SEQ ID NO: 1967280 - RNA, 19 nt, Artificial Sequence
  Description of Artificial Sequence: Synthetic oligonucleotide
gagguagacaagacucuug

SEQ ID NO: 1967281 - RNA, 19 nt, Artificial Sequence
  Description of Artificial Sequence: Synthetic oligonucleotide
cagucacccaaggaggagg

SEQ ID NO: 1967282 - RNA, 19 nt, Artificial Sequence
  Description of Artificial Sequence: Synthetic oligonucleotide
uuauaguggcccacacaau

SEQ ID NO: 1967283 - RNA, 19 nt, Artificial Sequence
  Description of Artificial Sequence: Synthetic oligonucleotide
  modified_base (13)..(13): a, c, u, g, unknown or other
caaugucauuucngccugg

SEQ ID NO: 1967284 - RNA, 19 nt, Artificial Sequence
  Description of Artificial Sequence: Synthetic oligonucleotide
cauuccauucccauggggu

SEQ ID NO: 1967285 - RNA, 19 nt, Artificial Sequence
  Description of Artificial Sequence: Synthetic oligonucleotide
uaugccuuucgaugcuagu

SEQ ID NO: 1967286 - RNA, 19 nt, Artificial Sequence
  Description of Artificial Sequence: Synthetic oligonucleotide
uguguucgggcugguuugg

SEQ ID NO: 1967287 - RNA, 19 nt, Artificial Sequence
  Description of Artificial Sequence: Synthetic oligonucleotide
ccaacuuccauagcuacag

SEQ ID NO: 1967288 - RNA, 19 nt, Artificial Sequence
  Description of Artificial Sequence: Synthetic oligonucleotide
guccaagcagccauaguug

SEQ ID NO: 1967289 - RNA, 19 nt, Artificial Sequence
  Description of Artificial Sequence: Synthetic oligonucleotide
gaaaccguagcaaugucau

SEQ ID NO: 1967290 - RNA, 19 nt, Artificial Sequence
  Description of Artificial Sequence: Synthetic oligonucleotide
ccaguagauaggcucaaag

SEQ ID NO: 1967291 - RNA, 19 nt, Artificial Sequence
  Description of Artificial Sequence: Synthetic oligonucleotide
gagucuggugguaagucuc

SEQ ID NO: 1967292 - RNA, 19 nt, Artificial Sequence
  Description of Artificial Sequence: Synthetic oligonucleotide
cagauuccagugacuguag

SEQ ID NO: 1967293 - RNA, 19 nt, Artificial Sequence
  Description of Artificial Sequence: Synthetic oligonucleotide
agauaagcaauggccacaa

SEQ ID NO: 1967294 - RNA, 19 nt, Artificial Sequence
  Description of Artificial Sequence: Synthetic oligonucleotide
ucgaaaggagaagguaggu

SEQ ID NO: 1967295 - RNA, 19 nt, Artificial Sequence
  Description of Artificial Sequence: Synthetic oligonucleotide
uucccaugggguaggugac

SEQ ID NO: 1967296 - RNA, 19 nt, Artificial Sequence
  Description of Artificial Sequence: Synthetic oligonucleotide
gucccaacucauuccauuc

SEQ ID NO: 1967297 - RNA, 19 nt, Artificial Sequence
  Description of Artificial Sequence: Synthetic oligonucleotide
ugguauccgaggaggcgug

SEQ ID NO: 1967298 - RNA, 19 nt, Artificial Sequence
  Description of Artificial Sequence: Synthetic oligonucleotide
guaggugacuagaagguaa

SEQ ID NO: 1967299 - RNA, 19 nt, Artificial Sequence
  Description of Artificial Sequence: Synthetic oligonucleotide
uccuaaauacucugcccuu

SEQ ID NO: 1967300 - RNA, 19 nt, Artificial Sequence
  Description of Artificial Sequence: Synthetic oligonucleotide
agucuggugguaagucucg

SEQ ID NO: 1967301 - RNA, 19 nt, Artificial Sequence
  Description of Artificial Sequence: Synthetic oligonucleotide
gcaaaccuugccauaacgc

SEQ ID NO: 1967302 - RNA, 19 nt, Artificial Sequence
  Description of Artificial Sequence: Synthetic oligonucleotide
uggaaaccguagcaauguc

SEQ ID NO: 1967303 - RNA, 19 nt, Artificial Sequence
  Description of Artificial Sequence: Synthetic oligonucleotide
uaagucucgauggcagcgu

SEQ ID NO: 1967304 - RNA, 19 nt, Artificial Sequence
  Description of Artificial Sequence: Synthetic oligonucleotide
agguaacagcacccguguc

SEQ ID NO: 1967305 - RNA, 19 nt, Artificial Sequence
  Description of Artificial Sequence: Synthetic oligonucleotide
ccauagcuacaguagacac

SEQ ID NO: 1967306 - RNA, 19 nt, Artificial Sequence
  Description of Artificial Sequence: Synthetic oligonucleotide
cagcacgaucaccagcacc

SEQ ID NO: 1967307 - RNA, 19 nt, Artificial Sequence
  Description of Artificial Sequence: Synthetic oligonucleotide
gugccaccgaacugcacag

SEQ ID NO: 1967308 - RNA, 19 nt, Artificial Sequence
  Description of Artificial Sequence: Synthetic oligonucleotide
caauggacccagucagcac

SEQ ID NO: 1967309 - RNA, 19 nt, Artificial Sequence
  Description of Artificial Sequence: Synthetic oligonucleotide
auggccugguaguaaugga

SEQ ID NO: 1967310 - RNA, 19 nt, Artificial Sequence
  Description of Artificial Sequence: Synthetic oligonucleotide
uccaaaccagcggaucaca

SEQ ID NO: 1967311 - RNA, 19 nt, Artificial Sequence
  Description of Artificial Sequence: Synthetic oligonucleotide
auaugccuuucgaugcuag

SEQ ID NO: 1967312 - RNA, 19 nt, Artificial Sequence
  Description of Artificial Sequence: Synthetic oligonucleotide
gaguagguucgaaggauga

SEQ ID NO: 1967313 - RNA, 19 nt, Artificial Sequence
  Description of Artificial Sequence: Synthetic oligonucleotide
  modified_base (18)..(18): a, c, u, g, unknown or other
cguagcaaugucauuucng

SEQ ID NO: 1967314 - RNA, 19 nt, Artificial Sequence
  Description of Artificial Sequence: Synthetic oligonucleotide
aaaccguagcaaugucauu

SEQ ID NO: 1967315 - RNA, 19 nt, Artificial Sequence
  Description of Artificial Sequence: Synthetic oligonucleotide
aggucccaacuuccauagc

SEQ ID NO: 1967316 - RNA, 19 nt, Artificial Sequence
  Description of Artificial Sequence: Synthetic oligonucleotide
gguaagucucgauggcagc

SEQ ID NO: 1967317 - RNA, 19 nt, Artificial Sequence
  Description of Artificial Sequence: Synthetic oligonucleotide
uucgaaggaugaggggcag

SEQ ID NO: 1967318 - RNA, 19 nt, Artificial Sequence
  Description of Artificial Sequence: Synthetic oligonucleotide
ggcagcgacgccuguaacc

SEQ ID NO: 1967319 - RNA, 19 nt, Artificial Sequence
  Description of Artificial Sequence: Synthetic oligonucleotide
agcguaagccucccggaaa

SEQ ID NO: 1967320 - RNA, 19 nt, Artificial Sequence
  Description of Artificial Sequence: Synthetic oligonucleotide
gaagacgaugaggaucaga

SEQ ID NO: 1967321 - RNA, 19 nt, Artificial Sequence
  Description of Artificial Sequence: Synthetic oligonucleotide
aggaggcguggugauggcc

SEQ ID NO: 1967322 - RNA, 19 nt, Artificial Sequence
  Description of Artificial Sequence: Synthetic oligonucleotide
auuccgcuggccccgcaug

SEQ ID NO: 1967323 - RNA, 19 nt, Artificial Sequence
  Description of Artificial Sequence: Synthetic oligonucleotide
ugcuagucucaccccgacu

SEQ ID NO: 1967324 - RNA, 19 nt, Artificial Sequence
  Description of Artificial Sequence: Synthetic oligonucleotide
ucaccccgacugaugagaa

SEQ ID NO: 1967325 - RNA, 19 nt, Artificial Sequence
  Description of Artificial Sequence: Synthetic oligonucleotide
gguagacaagacucuugug

SEQ ID NO: 1967326 - RNA, 19 nt, Artificial Sequence
  Description of Artificial Sequence: Synthetic oligonucleotide
ggauuccuaaauacucugc

SEQ ID NO: 1967327 - RNA, 19 nt, Artificial Sequence
  Description of Artificial Sequence: Synthetic oligonucleotide
gacaagacucuugugaguu

SEQ ID NO: 1967328 - RNA, 19 nt, Artificial Sequence
  Description of Artificial Sequence: Synthetic oligonucleotide
gcagagucgugguacugag

SEQ ID NO: 1967329 - RNA, 19 nt, Artificial Sequence
  Description of Artificial Sequence: Synthetic oligonucleotide
uuggccuguaaccgacguc

SEQ ID NO: 1967330 - RNA, 19 nt, Artificial Sequence
  Description of Artificial Sequence: Synthetic oligonucleotide
guucgaaggaugaggggca

SEQ ID NO: 1967331 - RNA, 19 nt, Artificial Sequence
  Description of Artificial Sequence: Synthetic oligonucleotide
ucccggaaaaggucccaac

SEQ ID NO: 1967332 - RNA, 19 nt, Artificial Sequence
  Description of Artificial Sequence: Synthetic oligonucleotide
gaugcuagucucaccccga

SEQ ID NO: 1967333 - RNA, 19 nt, Artificial Sequence
  Description of Artificial Sequence: Synthetic oligonucleotide
cccacacaauuguuuagcc

SEQ ID NO: 1967334 - RNA, 19 nt, Artificial Sequence
  Description of Artificial Sequence: Synthetic oligonucleotide
auggcaugccauaugguua

SEQ ID NO: 1967335 - RNA, 19 nt, Artificial Sequence
  Description of Artificial Sequence: Synthetic oligonucleotide
gcagcgacgccuguaaccc

SEQ ID NO: 1967336 - RNA, 19 nt, Artificial Sequence
  Description of Artificial Sequence: Synthetic oligonucleotide
ggucccaacuuccauagcu

SEQ ID NO: 1967337 - RNA, 19 nt, Artificial Sequence
  Description of Artificial Sequence: Synthetic oligonucleotide
agagguagacaagacucuu

SEQ ID NO: 1967338 - RNA, 19 nt, Artificial Sequence
  Description of Artificial Sequence: Synthetic oligonucleotide
agccauaguuguaaggauu

SEQ ID NO: 1967339 - RNA, 19 nt, Artificial Sequence
  Description of Artificial Sequence: Synthetic oligonucleotide
ggaaaccguagcaauguca

SEQ ID NO: 1967340 - RNA, 19 nt, Artificial Sequence
  Description of Artificial Sequence: Synthetic oligonucleotide
accuugccauaacgccagc

SEQ ID NO: 1967341 - RNA, 19 nt, Artificial Sequence
  Description of Artificial Sequence: Synthetic oligonucleotide
gugagcagucacccaagga

SEQ ID NO: 1967342 - RNA, 19 nt, Artificial Sequence
  Description of Artificial Sequence: Synthetic oligonucleotide
gccaaugccuuccuguguc

SEQ ID NO: 1967343 - RNA, 19 nt, Artificial Sequence
  Description of Artificial Sequence: Synthetic oligonucleotide
agggcagcgacgccuguaa

SEQ ID NO: 1967344 - RNA, 19 nt, Artificial Sequence
  Description of Artificial Sequence: Synthetic oligonucleotide
gccuguaacccagaagcag

SEQ ID NO: 1967345 - RNA, 19 nt, Artificial Sequence
  Description of Artificial Sequence: Synthetic oligonucleotide
caugggguaggugacuaga

SEQ ID NO: 1967346 - RNA, 19 nt, Artificial Sequence
  Description of Artificial Sequence: Synthetic oligonucleotide
uaacgccagcgcuguacca

SEQ ID NO: 1967347 - RNA, 19 nt, Artificial Sequence
  Description of Artificial Sequence: Synthetic oligonucleotide
cuucagcacacaccuauua

SEQ ID NO: 1967348 - RNA, 19 nt, Artificial Sequence
  Description of Artificial Sequence: Synthetic oligonucleotide
gagccagugccaccgaacu

SEQ ID NO: 1967349 - RNA, 19 nt, Artificial Sequence
  Description of Artificial Sequence: Synthetic oligonucleotide
cauaguuguaaggauuccu

SEQ ID NO: 1967350 - RNA, 19 nt, Artificial Sequence
  Description of Artificial Sequence: Synthetic oligonucleotide
uuguuuagccaggggcagu

SEQ ID NO: 1967351 - RNA, 19 nt, Artificial Sequence
  Description of Artificial Sequence: Synthetic oligonucleotide
acaagacucuugugaguua

SEQ ID NO: 1967352 - RNA, 19 nt, Artificial Sequence
  Description of Artificial Sequence: Synthetic oligonucleotide
cagauggaaaccguagcaa

SEQ ID NO: 1967353 - RNA, 19 nt, Artificial Sequence
  Description of Artificial Sequence: Synthetic oligonucleotide
gcaugccauaugguuaggg

SEQ ID NO: 1967354 - RNA, 19 nt, Artificial Sequence
  Description of Artificial Sequence: Synthetic oligonucleotide
gacgcaggcagaggcgggc

SEQ ID NO: 1967355 - RNA, 19 nt, Artificial Sequence
  Description of Artificial Sequence: Synthetic oligonucleotide
agcgcuguaccaggccccg

SEQ ID NO: 1967356 - RNA, 19 nt, Artificial Sequence
  Description of Artificial Sequence: Synthetic oligonucleotide
gcagauuccgcuggccccg

SEQ ID NO: 1967357 - RNA, 19 nt, Artificial Sequence
  Description of Artificial Sequence: Synthetic oligonucleotide
cucaccccgacugaugaga

SEQ ID NO: 1967358 - RNA, 19 nt, Artificial Sequence
  Description of Artificial Sequence: Synthetic oligonucleotide
gcccacacaauuguuuagc

SEQ ID NO: 1967359 - RNA, 19 nt, Artificial Sequence
  Description of Artificial Sequence: Synthetic oligonucleotide
gcacacaccuauuacagau

SEQ ID NO: 1967360 - RNA, 19 nt, Artificial Sequence
  Description of Artificial Sequence: Synthetic oligonucleotide
ggcccacacaauuguuuag

SEQ ID NO: 1967361 - RNA, 19 nt, Artificial Sequence
  Description of Artificial Sequence: Synthetic oligonucleotide
ugccaccgaacugcacagg

SEQ ID NO: 1967362 - RNA, 19 nt, Artificial Sequence
  Description of Artificial Sequence: Synthetic oligonucleotide
cgaugcuagucucaccccg

SEQ ID NO: 1967363 - RNA, 19 nt, Artificial Sequence
  Description of Artificial Sequence: Synthetic oligonucleotide
aaccagcggaucacauugu

SEQ ID NO: 1967364 - RNA, 19 nt, Artificial Sequence
  Description of Artificial Sequence: Synthetic oligonucleotide
  modified_base (5)..(5): a, c, u, g, unknown or other
uuucngccuggggugguau

SEQ ID NO: 1967365 - RNA, 19 nt, Artificial Sequence
  Description of Artificial Sequence: Synthetic oligonucleotide
aaccgacgucucuccuucu

SEQ ID NO: 1967366 - RNA, 19 nt, Artificial Sequence
  Description of Artificial Sequence: Synthetic oligonucleotide
aggugacuagaagguaaca

SEQ ID NO: 1967367 - RNA, 19 nt, Artificial Sequence
  Description of Artificial Sequence: Synthetic oligonucleotide
ccuaggaacaccuuccagu

SEQ ID NO: 1967368 - RNA, 19 nt, Artificial Sequence
  Description of Artificial Sequence: Synthetic oligonucleotide
guucgggcugguuuggggu

SEQ ID NO: 1967369 - RNA, 19 nt, Artificial Sequence
  Description of Artificial Sequence: Synthetic oligonucleotide
gggguaaaugcacuucuua

SEQ ID NO: 1967370 - RNA, 19 nt, Artificial Sequence
  Description of Artificial Sequence: Synthetic oligonucleotide
uagucucaccccgacugau

SEQ ID NO: 1967371 - RNA, 19 nt, Artificial Sequence
  Description of Artificial Sequence: Synthetic oligonucleotide
cuagucucaccccgacuga

SEQ ID NO: 1967372 - RNA, 19 nt, Artificial Sequence
  Description of Artificial Sequence: Synthetic oligonucleotide
gauaugccuuucgaugcua

SEQ ID NO: 1967373 - RNA, 19 nt, Artificial Sequence
  Description of Artificial Sequence: Synthetic oligonucleotide
cagugguguguucgggcug

SEQ ID NO: 1967374 - RNA, 19 nt, Artificial Sequence
  Description of Artificial Sequence: Synthetic oligonucleotide
cagagguagacaagacucu

SEQ ID NO: 1967375 - RNA, 19 nt, Artificial Sequence
  Description of Artificial Sequence: Synthetic oligonucleotide
cauaugguuagggcaccca

SEQ ID NO: 1967376 - RNA, 19 nt, Artificial Sequence
  Description of Artificial Sequence: Synthetic oligonucleotide
  modified_base (2)..(2): a, c, u, g, unknown or other
cngccuggggugguauccg

SEQ ID NO: 1967377 - RNA, 19 nt, Artificial Sequence
  Description of Artificial Sequence: Synthetic oligonucleotide
cacccgugucagccaaugc

SEQ ID NO: 1967378 - RNA, 19 nt, Artificial Sequence
  Description of Artificial Sequence: Synthetic oligonucleotide
ggcugguuugggguaaaug

SEQ ID NO: 1967379 - RNA, 19 nt, Artificial Sequence
  Description of Artificial Sequence: Synthetic oligonucleotide
ccccgacugaugagaaugg

SEQ ID NO: 1967380 - RNA, 19 nt, Artificial Sequence
  Description of Artificial Sequence: Synthetic oligonucleotide
accgacgucucuccuucuu

SEQ ID NO: 1967381 - RNA, 19 nt, Artificial Sequence
  Description of Artificial Sequence: Synthetic oligonucleotide
gccaccgaacugcacagga

SEQ ID NO: 1967382 - RNA, 19 nt, Artificial Sequence
  Description of Artificial Sequence: Synthetic oligonucleotide
guguucgggcugguuuggg

SEQ ID NO: 1967383 - RNA, 19 nt, Artificial Sequence
  Description of Artificial Sequence: Synthetic oligonucleotide
ccacacaauuguuuagcca

SEQ ID NO: 1967384 - RNA, 19 nt, Artificial Sequence
  Description of Artificial Sequence: Synthetic oligonucleotide
ccgacugaugagaauggca

SEQ ID NO: 1967385 - RNA, 19 nt, Artificial Sequence
  Description of Artificial Sequence: Synthetic oligonucleotide
agacgcaggcagaggcggg

SEQ ID NO: 1967386 - RNA, 19 nt, Artificial Sequence
  Description of Artificial Sequence: Synthetic oligonucleotide
cauucccaugggguaggug

SEQ ID NO: 1967387 - RNA, 19 nt, Artificial Sequence
  Description of Artificial Sequence: Synthetic oligonucleotide
gguaggugguggagucugg

SEQ ID NO: 1967388 - RNA, 19 nt, Artificial Sequence
  Description of Artificial Sequence: Synthetic oligonucleotide
ccaaugccuuccugugucc

SEQ ID NO: 1967389 - RNA, 19 nt, Artificial Sequence
  Description of Artificial Sequence: Synthetic oligonucleotide
ggagucuggugguaagucu

SEQ ID NO: 1967390 - RNA, 19 nt, Artificial Sequence
  Description of Artificial Sequence: Synthetic oligonucleotide
caagacucuugugaguuau

SEQ ID NO: 1967391 - RNA, 19 nt, Artificial Sequence
  Description of Artificial Sequence: Synthetic oligonucleotide
guaaccgacgucucuccuu

SEQ ID NO: 1967392 - RNA, 19 nt, Artificial Sequence
  Description of Artificial Sequence: Synthetic oligonucleotide
gguauccgaggaggcgugg

SEQ ID NO: 1967393 - RNA, 19 nt, Artificial Sequence
  Description of Artificial Sequence: Synthetic oligonucleotide
ggcgggcaggacccaaaag

SEQ ID NO: 1967394 - RNA, 19 nt, Artificial Sequence
  Description of Artificial Sequence: Synthetic oligonucleotide
gcgcaggcaaaccuugcca

SEQ ID NO: 1967395 - RNA, 19 nt, Artificial Sequence
  Description of Artificial Sequence: Synthetic oligonucleotide
cugaguagguucgaaggau

SEQ ID NO: 1967396 - RNA, 19 nt, Artificial Sequence
  Description of Artificial Sequence: Synthetic oligonucleotide
cccuuggccuguaaccgac

SEQ ID NO: 1967397 - RNA, 19 nt, Artificial Sequence
  Description of Artificial Sequence: Synthetic oligonucleotide
ucgggcugguuugggguaa

SEQ ID NO: 1967398 - RNA, 19 nt, Artificial Sequence
  Description of Artificial Sequence: Synthetic oligonucleotide
gguacugaguagguucgaa

SEQ ID NO: 1967399 - RNA, 19 nt, Artificial Sequence
  Description of Artificial Sequence: Synthetic oligonucleotide
gauuccgcuggccccgcau

SEQ ID NO: 1967400 - RNA, 19 nt, Artificial Sequence
  Description of Artificial Sequence: Synthetic oligonucleotide
  modified_base (6)..(6): a, c, u, g, unknown or other
auuucngccugggguggua

SEQ ID NO: 1967401 - RNA, 19 nt, Artificial Sequence
  Description of Artificial Sequence: Synthetic oligonucleotide
cagcguaagccucccggaa

SEQ ID NO: 1967402 - RNA, 19 nt, Artificial Sequence
  Description of Artificial Sequence: Synthetic oligonucleotide
gccauaugguuagggcacc

SEQ ID NO: 1967403 - RNA, 19 nt, Artificial Sequence
  Description of Artificial Sequence: Synthetic oligonucleotide
aguggcccacacaauuguu

SEQ ID NO: 1967404 - RNA, 19 nt, Artificial Sequence
  Description of Artificial Sequence: Synthetic oligonucleotide
ccuuucgaugcuagucuca

SEQ ID NO: 1967405 - RNA, 19 nt, Artificial Sequence
  Description of Artificial Sequence: Synthetic oligonucleotide
cagugccaccgaacugcac

SEQ ID NO: 1967406 - RNA, 19 nt, Artificial Sequence
  Description of Artificial Sequence: Synthetic oligonucleotide
gcagugguguguucgggcu

SEQ ID NO: 1967407 - RNA, 19 nt, Artificial Sequence
  Description of Artificial Sequence: Synthetic oligonucleotide
cacaccuauuacagaugcu

SEQ ID NO: 1967408 - RNA, 19 nt, Artificial Sequence
  Description of Artificial Sequence: Synthetic oligonucleotide
ccaugggguaggugacuag

SEQ ID NO: 1967409 - RNA, 19 nt, Artificial Sequence
  Description of Artificial Sequence: Synthetic oligonucleotide
ccauaugguuagggcaccc

SEQ ID NO: 1967410 - RNA, 19 nt, Artificial Sequence
  Description of Artificial Sequence: Synthetic oligonucleotide
agauuccgcuggccccgca

SEQ ID NO: 1967411 - RNA, 19 nt, Artificial Sequence
  Description of Artificial Sequence: Synthetic oligonucleotide
cagauuccgcuggccccgc

SEQ ID NO: 1967412 - RNA, 19 nt, Artificial Sequence
  Description of Artificial Sequence: Synthetic oligonucleotide
gucgugguacugaguaggu

SEQ ID NO: 1967413 - RNA, 19 nt, Artificial Sequence
  Description of Artificial Sequence: Synthetic oligonucleotide
gcaggcaaaccuugccaua

SEQ ID NO: 1967414 - RNA, 19 nt, Artificial Sequence
  Description of Artificial Sequence: Synthetic oligonucleotide
gaggagggucccaacucau

SEQ ID NO: 1967415 - RNA, 19 nt, Artificial Sequence
  Description of Artificial Sequence: Synthetic oligonucleotide
guauccgaggaggcguggu

SEQ ID NO: 1967416 - RNA, 19 nt, Artificial Sequence
  Description of Artificial Sequence: Synthetic oligonucleotide
cccgugucagccaaugccu

SEQ ID NO: 1967417 - RNA, 19 nt, Artificial Sequence
  Description of Artificial Sequence: Synthetic oligonucleotide
  modified_base (19)..(19): a, c, u, g, unknown or other
ccguagcaaugucauuucn

SEQ ID NO: 1967418 - RNA, 19 nt, Artificial Sequence
  Description of Artificial Sequence: Synthetic oligonucleotide
cucccggaaaaggucccaa

SEQ ID NO: 1967419 - RNA, 19 nt, Artificial Sequence
  Description of Artificial Sequence: Synthetic oligonucleotide
cccggaaaaggucccaacu

SEQ ID NO: 1967420 - RNA, 19 nt, Artificial Sequence
  Description of Artificial Sequence: Synthetic oligonucleotide
ggaucagauuccagugacu

SEQ ID NO: 1967421 - RNA, 19 nt, Artificial Sequence
  Description of Artificial Sequence: Synthetic oligonucleotide
  modified_base (7)..(7): a, c, u, g, unknown or other
cauuucngccugggguggu

SEQ ID NO: 1967422 - RNA, 19 nt, Artificial Sequence
  Description of Artificial Sequence: Synthetic oligonucleotide
gccauaacgccagcgcugu

SEQ ID NO: 1967423 - RNA, 19 nt, Artificial Sequence
  Description of Artificial Sequence: Synthetic oligonucleotide
gggcagcgacgccuguaac

SEQ ID NO: 1967424 - RNA, 19 nt, Artificial Sequence
  Description of Artificial Sequence: Synthetic oligonucleotide
gccuguaaccgacgucucu

SEQ ID NO: 1967425 - RNA, 19 nt, Artificial Sequence
  Description of Artificial Sequence: Synthetic oligonucleotide
ccggaaaaggucccaacuu

SEQ ID NO: 1967426 - RNA, 19 nt, Artificial Sequence
  Description of Artificial Sequence: Synthetic oligonucleotide
cggaucacauuguccacua

SEQ ID NO: 1967427 - RNA, 19 nt, Artificial Sequence
  Description of Artificial Sequence: Synthetic oligonucleotide
ggccuguaaccgacgucuc

SEQ ID NO: 1967428 - RNA, 19 nt, Artificial Sequence
  Description of Artificial Sequence: Synthetic oligonucleotide
agcacccgugucagccaau

SEQ ID NO: 1967429 - RNA, 19 nt, Artificial Sequence
  Description of Artificial Sequence: Synthetic oligonucleotide
cgcuguaccaggccccgga

SEQ ID NO: 1967430 - RNA, 19 nt, Artificial Sequence
  Description of Artificial Sequence: Synthetic oligonucleotide
cgccagcgcuguaccaggc

SEQ ID NO: 1967431 - RNA, 19 nt, Artificial Sequence
  Description of Artificial Sequence: Synthetic oligonucleotide
ccgaggaggcguggugaug

SEQ ID NO: 1967432 - RNA, 19 nt, Artificial Sequence
  Description of Artificial Sequence: Synthetic oligonucleotide
caccccgacugaugagaau

SEQ ID NO: 1967433 - RNA, 19 nt, Artificial Sequence
  Description of Artificial Sequence: Synthetic oligonucleotide
cccaugggguaggugacua

SEQ ID NO: 1967434 - RNA, 19 nt, Artificial Sequence
  Description of Artificial Sequence: Synthetic oligonucleotide
cgacgucucuccuucuugu

SEQ ID NO: 1967435 - RNA, 19 nt, Artificial Sequence
  Description of Artificial Sequence: Synthetic oligonucleotide
ggcguggugauggccuggu

SEQ ID NO: 1967436 - RNA, 19 nt, Artificial Sequence
  Description of Artificial Sequence: Synthetic oligonucleotide
gcgacgccuguaacccaga

SEQ ID NO: 1967437 - RNA, 19 nt, Artificial Sequence
  Description of Artificial Sequence: Synthetic oligonucleotide
ccacuccaaaccagcggau

SEQ ID NO: 1967438 - RNA, 19 nt, Artificial Sequence
  Description of Artificial Sequence: Synthetic oligonucleotide
cgacgccuguaacccagaa

SEQ ID NO: 1967439 - RNA, 19 nt, Artificial Sequence
  Description of Artificial Sequence: Synthetic oligonucleotide
ccauaacgccagcgcugua

SEQ ID NO: 1967440 - RNA, 19 nt, Artificial Sequence
  Description of Artificial Sequence: Synthetic oligonucleotide
acuacaagaagccaggagc

SEQ ID NO: 1967441 - RNA, 19 nt, Artificial Sequence
  Description of Artificial Sequence: Synthetic oligonucleotide
caagcuauagcucagaggc

SEQ ID NO: 1967442 - RNA, 19 nt, Artificial Sequence
  Description of Artificial Sequence: Synthetic oligonucleotide
ucaucaacuucccagaccc

SEQ ID NO: 1967443 - RNA, 19 nt, Artificial Sequence
  Description of Artificial Sequence: Synthetic oligonucleotide
agugguuacacacucaaag

SEQ ID NO: 1967444 - RNA, 19 nt, Artificial Sequence
  Description of Artificial Sequence: Synthetic oligonucleotide
auacaguggacucaugacc

SEQ ID NO: 1967445 - RNA, 19 nt, Artificial Sequence
  Description of Artificial Sequence: Synthetic oligonucleotide
aaaagcaacgugcggaaag

SEQ ID NO: 1967446 - RNA, 19 nt, Artificial Sequence
  Description of Artificial Sequence: Synthetic oligonucleotide
aaaugcaagugguagcauc

SEQ ID NO: 1967447 - RNA, 19 nt, Artificial Sequence
  Description of Artificial Sequence: Synthetic oligonucleotide
caagcaacgucguaaaugg

SEQ ID NO: 1967448 - RNA, 19 nt, Artificial Sequence
  Description of Artificial Sequence: Synthetic oligonucleotide
ucagcugacaccaagcaac

SEQ ID NO: 1967449 - RNA, 19 nt, Artificial Sequence
  Description of Artificial Sequence: Synthetic oligonucleotide
ucguaaaugguccuggugu

SEQ ID NO: 1967450 - RNA, 19 nt, Artificial Sequence
  Description of Artificial Sequence: Synthetic oligonucleotide
acacucuuaucucugcugc

SEQ ID NO: 1967451 - RNA, 19 nt, Artificial Sequence
  Description of Artificial Sequence: Synthetic oligonucleotide
ggacucaugaccuucaagg

SEQ ID NO: 1967452 - RNA, 19 nt, Artificial Sequence
  Description of Artificial Sequence: Synthetic oligonucleotide
ucagagagaagguaggcug

SEQ ID NO: 1967453 - RNA, 19 nt, Artificial Sequence
  Description of Artificial Sequence: Synthetic oligonucleotide
agguacuggcgccagaugc

SEQ ID NO: 1967454 - RNA, 19 nt, Artificial Sequence
  Description of Artificial Sequence: Synthetic oligonucleotide
aaagcaacgugcggaaagc

SEQ ID NO: 1967455 - RNA, 19 nt, Artificial Sequence
  Description of Artificial Sequence: Synthetic oligonucleotide
cugggaaugggccugaugc

SEQ ID NO: 1967456 - RNA, 19 nt, Artificial Sequence
  Description of Artificial Sequence: Synthetic oligonucleotide
aaauccaguugucacccuc

SEQ ID NO: 1967457 - RNA, 19 nt, Artificial Sequence
  Description of Artificial Sequence: Synthetic oligonucleotide
gaguugaggacacugacac

SEQ ID NO: 1967458 - RNA, 19 nt, Artificial Sequence
  Description of Artificial Sequence: Synthetic oligonucleotide
aucaucacuacaagaagcc

SEQ ID NO: 1967459 - RNA, 19 nt, Artificial Sequence
  Description of Artificial Sequence: Synthetic oligonucleotide
aaaccacaugcuuaacguc

SEQ ID NO: 1967460 - RNA, 19 nt, Artificial Sequence
  Description of Artificial Sequence: Synthetic oligonucleotide
caucaucacuacaagaagc

SEQ ID NO: 1967461 - RNA, 19 nt, Artificial Sequence
  Description of Artificial Sequence: Synthetic oligonucleotide
uguaugagaguugaggaca

SEQ ID NO: 1967462 - RNA, 19 nt, Artificial Sequence
  Description of Artificial Sequence: Synthetic oligonucleotide
ucaagcuauagcucagagg

SEQ ID NO: 1967463 - RNA, 19 nt, Artificial Sequence
  Description of Artificial Sequence: Synthetic oligonucleotide
ucuuccaaaugcaaguggu

SEQ ID NO: 1967464 - RNA, 19 nt, Artificial Sequence
  Description of Artificial Sequence: Synthetic oligonucleotide
aagugguagcaucaaagcu

SEQ ID NO: 1967465 - RNA, 19 nt, Artificial Sequence
  Description of Artificial Sequence: Synthetic oligonucleotide
cucaagagugguuacacac

SEQ ID NO: 1967466 - RNA, 19 nt, Artificial Sequence
  Description of Artificial Sequence: Synthetic oligonucleotide
accagcgaauccuucaugg

SEQ ID NO: 1967467 - RNA, 19 nt, Artificial Sequence
  Description of Artificial Sequence: Synthetic oligonucleotide
cugacaccaagcaacgucg

SEQ ID NO: 1967468 - RNA, 19 nt, Artificial Sequence
  Description of Artificial Sequence: Synthetic oligonucleotide
aauccuucauggcggcggc

SEQ ID NO: 1967469 - RNA, 19 nt, Artificial Sequence
  Description of Artificial Sequence: Synthetic oligonucleotide
cagaugagcugucagagag

SEQ ID NO: 1967470 - RNA, 19 nt, Artificial Sequence
  Description of Artificial Sequence: Synthetic oligonucleotide
uucacuguaucaucguagc

SEQ ID NO: 1967471 - RNA, 19 nt, Artificial Sequence
  Description of Artificial Sequence: Synthetic oligonucleotide
uucauugccugguagguac

SEQ ID NO: 1967472 - RNA, 19 nt, Artificial Sequence
  Description of Artificial Sequence: Synthetic oligonucleotide
agcagacccagucaucccc

SEQ ID NO: 1967473 - RNA, 19 nt, Artificial Sequence
  Description of Artificial Sequence: Synthetic oligonucleotide
cuugaccucauuuucauga

SEQ ID NO: 1967474 - RNA, 19 nt, Artificial Sequence
  Description of Artificial Sequence: Synthetic oligonucleotide
cucaugaccuucaagggug

SEQ ID NO: 1967475 - RNA, 19 nt, Artificial Sequence
  Description of Artificial Sequence: Synthetic oligonucleotide
cuuaaggugagaaggagga

SEQ ID NO: 1967476 - RNA, 19 nt, Artificial Sequence
  Description of Artificial Sequence: Synthetic oligonucleotide
ugcaaauccaguugucacc

SEQ ID NO: 1967477 - RNA, 19 nt, Artificial Sequence
  Description of Artificial Sequence: Synthetic oligonucleotide
uuccaaaugcaagugguag

SEQ ID NO: 1967478 - RNA, 19 nt, Artificial Sequence
  Description of Artificial Sequence: Synthetic oligonucleotide
cuucacuguaucaucguag

SEQ ID NO: 1967479 - RNA, 19 nt, Artificial Sequence
  Description of Artificial Sequence: Synthetic oligonucleotide
ucaaauacucggauggcau

SEQ ID NO: 1967480 - RNA, 19 nt, Artificial Sequence
  Description of Artificial Sequence: Synthetic oligonucleotide
ugggugccaaaccacaugc

SEQ ID NO: 1967481 - RNA, 19 nt, Artificial Sequence
  Description of Artificial Sequence: Synthetic oligonucleotide
gauuuuacggucgccgccg

SEQ ID NO: 1967482 - RNA, 19 nt, Artificial Sequence
  Description of Artificial Sequence: Synthetic oligonucleotide
ucuggugauacucccagaa

SEQ ID NO: 1967483 - RNA, 19 nt, Artificial Sequence
  Description of Artificial Sequence: Synthetic oligonucleotide
acgcugaaaagcaacgugc

SEQ ID NO: 1967484 - RNA, 19 nt, Artificial Sequence
  Description of Artificial Sequence: Synthetic oligonucleotide
ugcagaugagcugucagag

SEQ ID NO: 1967485 - RNA, 19 nt, Artificial Sequence
  Description of Artificial Sequence: Synthetic oligonucleotide
caucguagcuggcagaagc

SEQ ID NO: 1967486 - RNA, 19 nt, Artificial Sequence
  Description of Artificial Sequence: Synthetic oligonucleotide
aaauacucggauggcauca

SEQ ID NO: 1967487 - RNA, 19 nt, Artificial Sequence
  Description of Artificial Sequence: Synthetic oligonucleotide
aaugcaagugguagcauca

SEQ ID NO: 1967488 - RNA, 19 nt, Artificial Sequence
  Description of Artificial Sequence: Synthetic oligonucleotide
gaccucauuuucaugaccc

SEQ ID NO: 1967489 - RNA, 19 nt, Artificial Sequence
  Description of Artificial Sequence: Synthetic oligonucleotide
gauacauuuccagcugggg

SEQ ID NO: 1967490 - RNA, 19 nt, Artificial Sequence
  Description of Artificial Sequence: Synthetic oligonucleotide
auacauuuccagcuggggu

SEQ ID NO: 1967491 - RNA, 19 nt, Artificial Sequence
  Description of Artificial Sequence: Synthetic oligonucleotide
gacgcugaaaagcaacgug

SEQ ID NO: 1967492 - RNA, 19 nt, Artificial Sequence
  Description of Artificial Sequence: Synthetic oligonucleotide
gaauccuucauggcggcgg

SEQ ID NO: 1967493 - RNA, 19 nt, Artificial Sequence
  Description of Artificial Sequence: Synthetic oligonucleotide
ucaagagugguuacacacu

SEQ ID NO: 1967494 - RNA, 19 nt, Artificial Sequence
  Description of Artificial Sequence: Synthetic oligonucleotide
gcuggcagaagcuaaaagc

SEQ ID NO: 1967495 - RNA, 19 nt, Artificial Sequence
  Description of Artificial Sequence: Synthetic oligonucleotide
ugacuugaccucauuuuca

SEQ ID NO: 1967496 - RNA, 19 nt, Artificial Sequence
  Description of Artificial Sequence: Synthetic oligonucleotide
guagccaggagguugccag

SEQ ID NO: 1967497 - RNA, 19 nt, Artificial Sequence
  Description of Artificial Sequence: Synthetic oligonucleotide
ugagaguugaggacacuga

SEQ ID NO: 1967498 - RNA, 19 nt, Artificial Sequence
  Description of Artificial Sequence: Synthetic oligonucleotide
agacuugcaaauccaguug

SEQ ID NO: 1967499 - RNA, 19 nt, Artificial Sequence
  Description of Artificial Sequence: Synthetic oligonucleotide
aauccaguugucacccucg

SEQ ID NO: 1967500 - RNA, 19 nt, Artificial Sequence
  Description of Artificial Sequence: Synthetic oligonucleotide
cauacaguggacucaugac

SEQ ID NO: 1967501 - RNA, 19 nt, Artificial Sequence
  Description of Artificial Sequence: Synthetic oligonucleotide
agaaaggacagacuugcaa

SEQ ID NO: 1967502 - RNA, 19 nt, Artificial Sequence
  Description of Artificial Sequence: Synthetic oligonucleotide
ccagaugcggauuuuacgg

SEQ ID NO: 1967503 - RNA, 19 nt, Artificial Sequence
  Description of Artificial Sequence: Synthetic oligonucleotide
uugcaaauccaguugucac

SEQ ID NO: 1967504 - RNA, 19 nt, Artificial Sequence
  Description of Artificial Sequence: Synthetic oligonucleotide
agcuccauacaguggacuc

SEQ ID NO: 1967505 - RNA, 19 nt, Artificial Sequence
  Description of Artificial Sequence: Synthetic oligonucleotide
uguaucaucguagcuggca

SEQ ID NO: 1967506 - RNA, 19 nt, Artificial Sequence
  Description of Artificial Sequence: Synthetic oligonucleotide
agcaacgucguaaaugguc

SEQ ID NO: 1967507 - RNA, 19 nt, Artificial Sequence
  Description of Artificial Sequence: Synthetic oligonucleotide
ucggauggcaucaucccca

SEQ ID NO: 1967508 - RNA, 19 nt, Artificial Sequence
  Description of Artificial Sequence: Synthetic oligonucleotide
ugucagcugacaccaagca

SEQ ID NO: 1967509 - RNA, 19 nt, Artificial Sequence
  Description of Artificial Sequence: Synthetic oligonucleotide
guaucaucguagcuggcag

SEQ ID NO: 1967510 - RNA, 19 nt, Artificial Sequence
  Description of Artificial Sequence: Synthetic oligonucleotide
caagucaagcuauagcuca

SEQ ID NO: 1967511 - RNA, 19 nt, Artificial Sequence
  Description of Artificial Sequence: Synthetic oligonucleotide
gagguugccagauggugcc

SEQ ID NO: 1967512 - RNA, 19 nt, Artificial Sequence
  Description of Artificial Sequence: Synthetic oligonucleotide
caucacugcaagaugccag

SEQ ID NO: 1967513 - RNA, 19 nt, Artificial Sequence
  Description of Artificial Sequence: Synthetic oligonucleotide
aaugguccugguguggaag

SEQ ID NO: 1967514 - RNA, 19 nt, Artificial Sequence
  Description of Artificial Sequence: Synthetic oligonucleotide
gaugcggauuuuacggucg

SEQ ID NO: 1967515 - RNA, 19 nt, Artificial Sequence
  Description of Artificial Sequence: Synthetic oligonucleotide
aucacuacaagaagccagg

SEQ ID NO: 1967516 - RNA, 19 nt, Artificial Sequence
  Description of Artificial Sequence: Synthetic oligonucleotide
uuaacguccuguguaugag

SEQ ID NO: 1967517 - RNA, 19 nt, Artificial Sequence
  Description of Artificial Sequence: Synthetic oligonucleotide
aguugucacccucggugcc

SEQ ID NO: 1967518 - RNA, 19 nt, Artificial Sequence
  Description of Artificial Sequence: Synthetic oligonucleotide
gugguagcaucaaagcugg

SEQ ID NO: 1967519 - RNA, 19 nt, Artificial Sequence
  Description of Artificial Sequence: Synthetic oligonucleotide
ugcaagaugccagacgcug

SEQ ID NO: 1967520 - RNA, 19 nt, Artificial Sequence
  Description of Artificial Sequence: Synthetic oligonucleotide
acucaugaccuucaagggu

SEQ ID NO: 1967521 - RNA, 19 nt, Artificial Sequence
  Description of Artificial Sequence: Synthetic oligonucleotide
agagugguuacacacucaa

SEQ ID NO: 1967522 - RNA, 19 nt, Artificial Sequence
  Description of Artificial Sequence: Synthetic oligonucleotide
ugaccucauuuucaugacc

SEQ ID NO: 1967523 - RNA, 19 nt, Artificial Sequence
  Description of Artificial Sequence: Synthetic oligonucleotide
agagaagguaggcugcugu

SEQ ID NO: 1967524 - RNA, 19 nt, Artificial Sequence
  Description of Artificial Sequence: Synthetic oligonucleotide
guugacauccugggaaugg

SEQ ID NO: 1967525 - RNA, 19 nt, Artificial Sequence
  Description of Artificial Sequence: Synthetic oligonucleotide
aaagcgguggccaccuuag

SEQ ID NO: 1967526 - RNA, 19 nt, Artificial Sequence
  Description of Artificial Sequence: Synthetic oligonucleotide
ucaugaccuucaagggugg

SEQ ID NO: 1967527 - RNA, 19 nt, Artificial Sequence
  Description of Artificial Sequence: Synthetic oligonucleotide
cauggcggcggccuuaagg

SEQ ID NO: 1967528 - RNA, 19 nt, Artificial Sequence
  Description of Artificial Sequence: Synthetic oligonucleotide
agcgaauccuucauggcgg

SEQ ID NO: 1967529 - RNA, 19 nt, Artificial Sequence
  Description of Artificial Sequence: Synthetic oligonucleotide
uuuccgaacagugcgcuga

SEQ ID NO: 1967530 - RNA, 19 nt, Artificial Sequence
  Description of Artificial Sequence: Synthetic oligonucleotide
uggacucaugaccuucaag

SEQ ID NO: 1967531 - RNA, 19 nt, Artificial Sequence
  Description of Artificial Sequence: Synthetic oligonucleotide
aagcuauagcucagaggcc

SEQ ID NO: 1967532 - RNA, 19 nt, Artificial Sequence
  Description of Artificial Sequence: Synthetic oligonucleotide
caagagugguuacacacuc

SEQ ID NO: 1967533 - RNA, 19 nt, Artificial Sequence
  Description of Artificial Sequence: Synthetic oligonucleotide
ugccugguagguacuggcg

SEQ ID NO: 1967534 - RNA, 19 nt, Artificial Sequence
  Description of Artificial Sequence: Synthetic oligonucleotide
gucaagcuauagcucagag

SEQ ID NO: 1967535 - RNA, 19 nt, Artificial Sequence
  Description of Artificial Sequence: Synthetic oligonucleotide
gacagacuugcaaauccag

SEQ ID NO: 1967536 - RNA, 19 nt, Artificial Sequence
  Description of Artificial Sequence: Synthetic oligonucleotide
uccccaucaucacuacaag

SEQ ID NO: 1967537 - RNA, 19 nt, Artificial Sequence
  Description of Artificial Sequence: Synthetic oligonucleotide
auggcggcggccuuaaggu

SEQ ID NO: 1967538 - RNA, 19 nt, Artificial Sequence
  Description of Artificial Sequence: Synthetic oligonucleotide
agcuauagcucagaggccu

SEQ ID NO: 1967539 - RNA, 19 nt, Artificial Sequence
  Description of Artificial Sequence: Synthetic oligonucleotide
augagaguugaggacacug

SEQ ID NO: 1967540 - RNA, 19 nt, Artificial Sequence
  Description of Artificial Sequence: Synthetic oligonucleotide
uccuguguaugagaguuga

SEQ ID NO: 1967541 - RNA, 19 nt, Artificial Sequence
  Description of Artificial Sequence: Synthetic oligonucleotide
cuggauccuccucaaauac

SEQ ID NO: 1967542 - RNA, 19 nt, Artificial Sequence
  Description of Artificial Sequence: Synthetic oligonucleotide
ugccaaaccacaugcuuaa

SEQ ID NO: 1967543 - RNA, 19 nt, Artificial Sequence
  Description of Artificial Sequence: Synthetic oligonucleotide
aagcaacgugcggaaagcg

SEQ ID NO: 1967544 - RNA, 19 nt, Artificial Sequence
  Description of Artificial Sequence: Synthetic oligonucleotide
ugacauccugggaaugggc

SEQ ID NO: 1967545 - RNA, 19 nt, Artificial Sequence
  Description of Artificial Sequence: Synthetic oligonucleotide
aggacacugacacauucau

SEQ ID NO: 1967546 - RNA, 19 nt, Artificial Sequence
  Description of Artificial Sequence: Synthetic oligonucleotide
augcuuaacguccugugua

SEQ ID NO: 1967547 - RNA, 19 nt, Artificial Sequence
  Description of Artificial Sequence: Synthetic oligonucleotide
guguggaagccugacaaag

SEQ ID NO: 1967548 - RNA, 19 nt, Artificial Sequence
  Description of Artificial Sequence: Synthetic oligonucleotide
gccagaugcgcacaguacg

SEQ ID NO: 1967549 - RNA, 19 nt, Artificial Sequence
  Description of Artificial Sequence: Synthetic oligonucleotide
cuuaacguccuguguauga

SEQ ID NO: 1967550 - RNA, 19 nt, Artificial Sequence
  Description of Artificial Sequence: Synthetic oligonucleotide
auuuuacggucgccgccgc

SEQ ID NO: 1967551 - RNA, 19 nt, Artificial Sequence
  Description of Artificial Sequence: Synthetic oligonucleotide
gaagguaggcugcugugga

SEQ ID NO: 1967552 - RNA, 19 nt, Artificial Sequence
  Description of Artificial Sequence: Synthetic oligonucleotide
augcggauuuuacggucgc

SEQ ID NO: 1967553 - RNA, 19 nt, Artificial Sequence
  Description of Artificial Sequence: Synthetic oligonucleotide
cacuacaagaagccaggag

SEQ ID NO: 1967554 - RNA, 19 nt, Artificial Sequence
  Description of Artificial Sequence: Synthetic oligonucleotide
gggucaaaggccaagcucc

SEQ ID NO: 1967555 - RNA, 19 nt, Artificial Sequence
  Description of Artificial Sequence: Synthetic oligonucleotide
uugccugguagguacuggc

SEQ ID NO: 1967556 - RNA, 19 nt, Artificial Sequence
  Description of Artificial Sequence: Synthetic oligonucleotide
agauacauuuccagcuggg

SEQ ID NO: 1967557 - RNA, 19 nt, Artificial Sequence
  Description of Artificial Sequence: Synthetic oligonucleotide
uggggucagagccacugca

SEQ ID NO: 1967558 - RNA, 19 nt, Artificial Sequence
  Description of Artificial Sequence: Synthetic oligonucleotide
uggauccuccucaaauacu

SEQ ID NO: 1967559 - RNA, 19 nt, Artificial Sequence
  Description of Artificial Sequence: Synthetic oligonucleotide
cacugcaagaugccagacg

SEQ ID NO: 1967560 - RNA, 19 nt, Artificial Sequence
  Description of Artificial Sequence: Synthetic oligonucleotide
aacgugcggaaagcggugg

SEQ ID NO: 1967561 - RNA, 19 nt, Artificial Sequence
  Description of Artificial Sequence: Synthetic oligonucleotide
gcaagugguagcaucaaag

SEQ ID NO: 1967562 - RNA, 19 nt, Artificial Sequence
  Description of Artificial Sequence: Synthetic oligonucleotide
agacccacacacucuuauc

SEQ ID NO: 1967563 - RNA, 19 nt, Artificial Sequence
  Description of Artificial Sequence: Synthetic oligonucleotide
ccaaaccacaugcuuaacg

SEQ ID NO: 1967564 - RNA, 19 nt, Artificial Sequence
  Description of Artificial Sequence: Synthetic oligonucleotide
ccuuaaggugagaaggagg

SEQ ID NO: 1967565 - RNA, 19 nt, Artificial Sequence
  Description of Artificial Sequence: Synthetic oligonucleotide
aacgucguaaaugguccug

SEQ ID NO: 1967566 - RNA, 19 nt, Artificial Sequence
  Description of Artificial Sequence: Synthetic oligonucleotide
ccacuuuccgaacagugcg

SEQ ID NO: 1967567 - RNA, 19 nt, Artificial Sequence
  Description of Artificial Sequence: Synthetic oligonucleotide
guacggucaucacugcaag

SEQ ID NO: 1967568 - RNA, 19 nt, Artificial Sequence
  Description of Artificial Sequence: Synthetic oligonucleotide
aacagugcgcugauggccu

SEQ ID NO: 1967569 - RNA, 19 nt, Artificial Sequence
  Description of Artificial Sequence: Synthetic oligonucleotide
guaaaugguccuggugugg

SEQ ID NO: 1967570 - RNA, 19 nt, Artificial Sequence
  Description of Artificial Sequence: Synthetic oligonucleotide
ucacuguaucaucguagcu

SEQ ID NO: 1967571 - RNA, 19 nt, Artificial Sequence
  Description of Artificial Sequence: Synthetic oligonucleotide
ggucaucacugcaagaugc

SEQ ID NO: 1967572 - RNA, 19 nt, Artificial Sequence
  Description of Artificial Sequence: Synthetic oligonucleotide
caaaccacaugcuuaacgu

SEQ ID NO: 1967573 - RNA, 19 nt, Artificial Sequence
  Description of Artificial Sequence: Synthetic oligonucleotide
ucaucacuacaagaagcca

SEQ ID NO: 1967574 - RNA, 19 nt, Artificial Sequence
  Description of Artificial Sequence: Synthetic oligonucleotide
ggccagguaauuuccacag

SEQ ID NO: 1967575 - RNA, 19 nt, Artificial Sequence
  Description of Artificial Sequence: Synthetic oligonucleotide
ugcgcugauggccuucaga

SEQ ID NO: 1967576 - RNA, 19 nt, Artificial Sequence
  Description of Artificial Sequence: Synthetic oligonucleotide
aagucaagcuauagcucag

SEQ ID NO: 1967577 - RNA, 19 nt, Artificial Sequence
  Description of Artificial Sequence: Synthetic oligonucleotide
cagcugacaccaagcaacg

SEQ ID NO: 1967578 - RNA, 19 nt, Artificial Sequence
  Description of Artificial Sequence: Synthetic oligonucleotide
uaucaucguagcuggcaga

SEQ ID NO: 1967579 - RNA, 19 nt, Artificial Sequence
  Description of Artificial Sequence: Synthetic oligonucleotide
gucguaaaugguccuggug

SEQ ID NO: 1967580 - RNA, 19 nt, Artificial Sequence
  Description of Artificial Sequence: Synthetic oligonucleotide
gacacggcucugcagcacc

SEQ ID NO: 1967581 - RNA, 19 nt, Artificial Sequence
  Description of Artificial Sequence: Synthetic oligonucleotide
aguccgggugcgccgagac

SEQ ID NO: 1967582 - RNA, 19 nt, Artificial Sequence
  Description of Artificial Sequence: Synthetic oligonucleotide
ugcuuaacguccuguguau

SEQ ID NO: 1967583 - RNA, 19 nt, Artificial Sequence
  Description of Artificial Sequence: Synthetic oligonucleotide
ccgaacagugcgcugaugg

SEQ ID NO: 1967584 - RNA, 19 nt, Artificial Sequence
  Description of Artificial Sequence: Synthetic oligonucleotide
uuuacggucgccgccgcac

SEQ ID NO: 1967585 - RNA, 19 nt, Artificial Sequence
  Description of Artificial Sequence: Synthetic oligonucleotide
acgucguaaaugguccugg

SEQ ID NO: 1967586 - RNA, 19 nt, Artificial Sequence
  Description of Artificial Sequence: Synthetic oligonucleotide
uuacggucgccgccgcacg

SEQ ID NO: 1967587 - RNA, 19 nt, Artificial Sequence
  Description of Artificial Sequence: Synthetic oligonucleotide
agaugccagacgcuggcca

SEQ ID NO: 1967588 - RNA, 19 nt, Artificial Sequence
  Description of Artificial Sequence: Synthetic oligonucleotide
cucggauggcaucaucccc

SEQ ID NO: 1967589 - RNA, 19 nt, Artificial Sequence
  Description of Artificial Sequence: Synthetic oligonucleotide
gaggccagguaauuuccac

SEQ ID NO: 1967590 - RNA, 19 nt, Artificial Sequence
  Description of Artificial Sequence: Synthetic oligonucleotide
auccaguugucacccucgg

SEQ ID NO: 1967591 - RNA, 19 nt, Artificial Sequence
  Description of Artificial Sequence: Synthetic oligonucleotide
ugacccucaagagugguua

SEQ ID NO: 1967592 - RNA, 19 nt, Artificial Sequence
  Description of Artificial Sequence: Synthetic oligonucleotide
gacccacacacucuuaucu

SEQ ID NO: 1967593 - RNA, 19 nt, Artificial Sequence
  Description of Artificial Sequence: Synthetic oligonucleotide
cuggugauacucccagaag

SEQ ID NO: 1967594 - RNA, 19 nt, Artificial Sequence
  Description of Artificial Sequence: Synthetic oligonucleotide
ugcgccgagacacggcucu

SEQ ID NO: 1967595 - RNA, 19 nt, Artificial Sequence
  Description of Artificial Sequence: Synthetic oligonucleotide
gaggacgcugaaaagcaac

SEQ ID NO: 1967596 - RNA, 19 nt, Artificial Sequence
  Description of Artificial Sequence: Synthetic oligonucleotide
cuucaucaacuucccagac

SEQ ID NO: 1967597 - RNA, 19 nt, Artificial Sequence
  Description of Artificial Sequence: Synthetic oligonucleotide
aagugcagauacauuucca

SEQ ID NO: 1967598 - RNA, 19 nt, Artificial Sequence
  Description of Artificial Sequence: Synthetic oligonucleotide
ugcaagugguagcaucaaa

SEQ ID NO: 1967599 - RNA, 19 nt, Artificial Sequence
  Description of Artificial Sequence: Synthetic oligonucleotide
agcaacgugcggaaagcgg

SEQ ID NO: 1967600 - RNA, 19 nt, Artificial Sequence
  Description of Artificial Sequence: Synthetic oligonucleotide
gaugccagacgcuggccac

SEQ ID NO: 1967601 - RNA, 19 nt, Artificial Sequence
  Description of Artificial Sequence: Synthetic oligonucleotide
agguaggcugcuguggauc

SEQ ID NO: 1967602 - RNA, 19 nt, Artificial Sequence
  Description of Artificial Sequence: Synthetic oligonucleotide
gacuugcaaauccaguugu

SEQ ID NO: 1967603 - RNA, 19 nt, Artificial Sequence
  Description of Artificial Sequence: Synthetic oligonucleotide
acggucaucacugcaagau

SEQ ID NO: 1967604 - RNA, 19 nt, Artificial Sequence
  Description of Artificial Sequence: Synthetic oligonucleotide
uccgggugcgccgagacac

SEQ ID NO: 1967605 - RNA, 19 nt, Artificial Sequence
  Description of Artificial Sequence: Synthetic oligonucleotide
uacaagaagccaggagccc

SEQ ID NO: 1967606 - RNA, 19 nt, Artificial Sequence
  Description of Artificial Sequence: Synthetic oligonucleotide
cacuuuccgaacagugcgc

SEQ ID NO: 1967607 - RNA, 19 nt, Artificial Sequence
  Description of Artificial Sequence: Synthetic oligonucleotide
acaccaagcaacgucguaa

SEQ ID NO: 1967608 - RNA, 19 nt, Artificial Sequence
  Description of Artificial Sequence: Synthetic oligonucleotide
acaagaagccaggagcccu

SEQ ID NO: 1967609 - RNA, 19 nt, Artificial Sequence
  Description of Artificial Sequence: Synthetic oligonucleotide
auugccugguagguacugg

SEQ ID NO: 1967610 - RNA, 19 nt, Artificial Sequence
  Description of Artificial Sequence: Synthetic oligonucleotide
agcgguggccaccuuagga

SEQ ID NO: 1967611 - RNA, 19 nt, Artificial Sequence
  Description of Artificial Sequence: Synthetic oligonucleotide
acugcaagccaccccuugu

SEQ ID NO: 1967612 - RNA, 19 nt, Artificial Sequence
  Description of Artificial Sequence: Synthetic oligonucleotide
ccaggagguugccagaugg

SEQ ID NO: 1967613 - RNA, 19 nt, Artificial Sequence
  Description of Artificial Sequence: Synthetic oligonucleotide
gguuacacacucaaaguca

SEQ ID NO: 1967614 - RNA, 19 nt, Artificial Sequence
  Description of Artificial Sequence: Synthetic oligonucleotide
cuuaggaccccgcggucgc

SEQ ID NO: 1967615 - RNA, 19 nt, Artificial Sequence
  Description of Artificial Sequence: Synthetic oligonucleotide
gaugcgcacaguacgguca

SEQ ID NO: 1967616 - RNA, 19 nt, Artificial Sequence
  Description of Artificial Sequence: Synthetic oligonucleotide
gauggugcccaagccacug

SEQ ID NO: 1967617 - RNA, 19 nt, Artificial Sequence
  Description of Artificial Sequence: Synthetic oligonucleotide
aggccagguaauuuccaca

SEQ ID NO: 1967618 - RNA, 19 nt, Artificial Sequence
  Description of Artificial Sequence: Synthetic oligonucleotide
gcaacgucguaaauggucc

SEQ ID NO: 1967619 - RNA, 19 nt, Artificial Sequence
  Description of Artificial Sequence: Synthetic oligonucleotide
agcagcgggaguccgggug

SEQ ID NO: 1967620 - RNA, 19 nt, Artificial Sequence
  Description of Artificial Sequence: Synthetic oligonucleotide
aguacggucaucacugcaa

SEQ ID NO: 1967621 - RNA, 19 nt, Artificial Sequence
  Description of Artificial Sequence: Synthetic oligonucleotide
ugguacagcuucacuguau

SEQ ID NO: 1967622 - RNA, 19 nt, Artificial Sequence
  Description of Artificial Sequence: Synthetic oligonucleotide
acuugcaaauccaguuguc

SEQ ID NO: 1967623 - RNA, 19 nt, Artificial Sequence
  Description of Artificial Sequence: Synthetic oligonucleotide
aggaggacgcugaaaagca

SEQ ID NO: 1967624 - RNA, 19 nt, Artificial Sequence
  Description of Artificial Sequence: Synthetic oligonucleotide
ugcaagccaccccuuguuc

SEQ ID NO: 1967625 - RNA, 19 nt, Artificial Sequence
  Description of Artificial Sequence: Synthetic oligonucleotide
uuaaggugagaaggaggac

SEQ ID NO: 1967626 - RNA, 19 nt, Artificial Sequence
  Description of Artificial Sequence: Synthetic oligonucleotide
aggagguugccagauggug

SEQ ID NO: 1967627 - RNA, 19 nt, Artificial Sequence
  Description of Artificial Sequence: Synthetic oligonucleotide
gcuccuugggauuccaagc

SEQ ID NO: 1967628 - RNA, 19 nt, Artificial Sequence
  Description of Artificial Sequence: Synthetic oligonucleotide
aagcgguggccaccuuagg

SEQ ID NO: 1967629 - RNA, 19 nt, Artificial Sequence
  Description of Artificial Sequence: Synthetic oligonucleotide
ggauuuuacggucgccgcc

SEQ ID NO: 1967630 - RNA, 19 nt, Artificial Sequence
  Description of Artificial Sequence: Synthetic oligonucleotide
agacccagucauccccuuc

SEQ ID NO: 1967631 - RNA, 19 nt, Artificial Sequence
  Description of Artificial Sequence: Synthetic oligonucleotide
auuccaagccacacaguug

SEQ ID NO: 1967632 - RNA, 19 nt, Artificial Sequence
  Description of Artificial Sequence: Synthetic oligonucleotide
ggcuccuugggauuccaag

SEQ ID NO: 1967633 - RNA, 19 nt, Artificial Sequence
  Description of Artificial Sequence: Synthetic oligonucleotide
uagguacuggcgccagaug

SEQ ID NO: 1967634 - RNA, 19 nt, Artificial Sequence
  Description of Artificial Sequence: Synthetic oligonucleotide
ugacaccaagcaacgucgu

SEQ ID NO: 1967635 - RNA, 19 nt, Artificial Sequence
  Description of Artificial Sequence: Synthetic oligonucleotide
uauagcucagaggccugca

SEQ ID NO: 1967636 - RNA, 19 nt, Artificial Sequence
  Description of Artificial Sequence: Synthetic oligonucleotide
gcggauuuuacggucgccg

SEQ ID NO: 1967637 - RNA, 19 nt, Artificial Sequence
  Description of Artificial Sequence: Synthetic oligonucleotide
cucggugccccagaugcgg

SEQ ID NO: 1967638 - RNA, 19 nt, Artificial Sequence
  Description of Artificial Sequence: Synthetic oligonucleotide
uccccgugggguuccaggc

SEQ ID NO: 1967639 - RNA, 19 nt, Artificial Sequence
  Description of Artificial Sequence: Synthetic oligonucleotide
ggaagccugacaaagugca

SEQ ID NO: 1967640 - RNA, 19 nt, Artificial Sequence
  Description of Artificial Sequence: Synthetic oligonucleotide
guagccagggccccuguca

SEQ ID NO: 1967641 - RNA, 19 nt, Artificial Sequence
  Description of Artificial Sequence: Synthetic oligonucleotide
cccagaugcggauuuuacg

SEQ ID NO: 1967642 - RNA, 19 nt, Artificial Sequence
  Description of Artificial Sequence: Synthetic oligonucleotide
ccaagcaacgucguaaaug

SEQ ID NO: 1967643 - RNA, 19 nt, Artificial Sequence
  Description of Artificial Sequence: Synthetic oligonucleotide
ucccagacccacacacucu

SEQ ID NO: 1967644 - RNA, 19 nt, Artificial Sequence
  Description of Artificial Sequence: Synthetic oligonucleotide
aucaucguagcuggcagaa

SEQ ID NO: 1967645 - RNA, 19 nt, Artificial Sequence
  Description of Artificial Sequence: Synthetic oligonucleotide
acuuuccgaacagugcgcu

SEQ ID NO: 1967646 - RNA, 19 nt, Artificial Sequence
  Description of Artificial Sequence: Synthetic oligonucleotide
guaugagaguugaggacac

SEQ ID NO: 1967647 - RNA, 19 nt, Artificial Sequence
  Description of Artificial Sequence: Synthetic oligonucleotide
gguagcaucaaagcuggca

SEQ ID NO: 1967648 - RNA, 19 nt, Artificial Sequence
  Description of Artificial Sequence: Synthetic oligonucleotide
ccagaugcgcacaguacgg

SEQ ID NO: 1967649 - RNA, 19 nt, Artificial Sequence
  Description of Artificial Sequence: Synthetic oligonucleotide
gguacuggcgccagaugcg

SEQ ID NO: 1967650 - RNA, 19 nt, Artificial Sequence
  Description of Artificial Sequence: Synthetic oligonucleotide
aguugaggacacugacaca

SEQ ID NO: 1967651 - RNA, 19 nt, Artificial Sequence
  Description of Artificial Sequence: Synthetic oligonucleotide
ugaugcagaugagcuguca

SEQ ID NO: 1967652 - RNA, 19 nt, Artificial Sequence
  Description of Artificial Sequence: Synthetic oligonucleotide
cuauagcucagaggccugc

SEQ ID NO: 1967653 - RNA, 19 nt, Artificial Sequence
  Description of Artificial Sequence: Synthetic oligonucleotide
gaaagcgguggccaccuua

SEQ ID NO: 1967654 - RNA, 19 nt, Artificial Sequence
  Description of Artificial Sequence: Synthetic oligonucleotide
uacggucaucacugcaaga

SEQ ID NO: 1967655 - RNA, 19 nt, Artificial Sequence
  Description of Artificial Sequence: Synthetic oligonucleotide
accaggccacuuuccgaac

SEQ ID NO: 1967656 - RNA, 19 nt, Artificial Sequence
  Description of Artificial Sequence: Synthetic oligonucleotide
ggucagagccacugcaagc

SEQ ID NO: 1967657 - RNA, 19 nt, Artificial Sequence
  Description of Artificial Sequence: Synthetic oligonucleotide
ucacuacaagaagccagga

SEQ ID NO: 1967658 - RNA, 19 nt, Artificial Sequence
  Description of Artificial Sequence: Synthetic oligonucleotide
caggccacuuuccgaacag

SEQ ID NO: 1967659 - RNA, 19 nt, Artificial Sequence
  Description of Artificial Sequence: Synthetic oligonucleotide
uuuuacggucgccgccgca

SEQ ID NO: 1967660 - RNA, 19 nt, Artificial Sequence
  Description of Artificial Sequence: Synthetic oligonucleotide
uccaguugucacccucggu

SEQ ID NO: 1967661 - RNA, 19 nt, Artificial Sequence
  Description of Artificial Sequence: Synthetic oligonucleotide
agccaccccuuguucauug

SEQ ID NO: 1967662 - RNA, 19 nt, Artificial Sequence
  Description of Artificial Sequence: Synthetic oligonucleotide
gaggacacugacacauuca

SEQ ID NO: 1967663 - RNA, 19 nt, Artificial Sequence
  Description of Artificial Sequence: Synthetic oligonucleotide
caacgugcggaaagcggug

SEQ ID NO: 1967664 - RNA, 19 nt, Artificial Sequence
  Description of Artificial Sequence: Synthetic oligonucleotide
accuuaggaccccgcgguc

SEQ ID NO: 1967665 - RNA, 19 nt, Artificial Sequence
  Description of Artificial Sequence: Synthetic oligonucleotide
gggucagagccacugcaag

SEQ ID NO: 1967666 - RNA, 19 nt, Artificial Sequence
  Description of Artificial Sequence: Synthetic oligonucleotide
gacuugaccucauuuucau

SEQ ID NO: 1967667 - RNA, 19 nt, Artificial Sequence
  Description of Artificial Sequence: Synthetic oligonucleotide
cuuuccgaacagugcgcug

SEQ ID NO: 1967668 - RNA, 19 nt, Artificial Sequence
  Description of Artificial Sequence: Synthetic oligonucleotide
guacagcuucacuguauca

SEQ ID NO: 1967669 - RNA, 19 nt, Artificial Sequence
  Description of Artificial Sequence: Synthetic oligonucleotide
uccauacaguggacucaug

SEQ ID NO: 1967670 - RNA, 19 nt, Artificial Sequence
  Description of Artificial Sequence: Synthetic oligonucleotide
cgcugaaaagcaacgugcg

SEQ ID NO: 1967671 - RNA, 19 nt, Artificial Sequence
  Description of Artificial Sequence: Synthetic oligonucleotide
gggaaugggccugaugcag

SEQ ID NO: 1967672 - RNA, 19 nt, Artificial Sequence
  Description of Artificial Sequence: Synthetic oligonucleotide
gagacacggcucugcagca

SEQ ID NO: 1967673 - RNA, 19 nt, Artificial Sequence
  Description of Artificial Sequence: Synthetic oligonucleotide
agucaagcuauagcucaga

SEQ ID NO: 1967674 - RNA, 19 nt, Artificial Sequence
  Description of Artificial Sequence: Synthetic oligonucleotide
cagacuugcaaauccaguu

SEQ ID NO: 1967675 - RNA, 19 nt, Artificial Sequence
  Description of Artificial Sequence: Synthetic oligonucleotide
cauccugggaaugggccug

SEQ ID NO: 1967676 - RNA, 19 nt, Artificial Sequence
  Description of Artificial Sequence: Synthetic oligonucleotide
gucagcugacaccaagcaa

SEQ ID NO: 1967677 - RNA, 19 nt, Artificial Sequence
  Description of Artificial Sequence: Synthetic oligonucleotide
gccaccuuaggaccccgcg

SEQ ID NO: 1967678 - RNA, 19 nt, Artificial Sequence
  Description of Artificial Sequence: Synthetic oligonucleotide
gccugguagguacuggcgc

SEQ ID NO: 1967679 - RNA, 19 nt, Artificial Sequence
  Description of Artificial Sequence: Synthetic oligonucleotide
ucacugcaagaugccagac

SEQ ID NO: 1967680 - RNA, 19 nt, Artificial Sequence
  Description of Artificial Sequence: Synthetic oligonucleotide
ugcggauuuuacggucgcc

SEQ ID NO: 1967681 - RNA, 19 nt, Artificial Sequence
  Description of Artificial Sequence: Synthetic oligonucleotide
agacacggcucugcagcac

SEQ ID NO: 1967682 - RNA, 19 nt, Artificial Sequence
  Description of Artificial Sequence: Synthetic oligonucleotide
auacucccagaaggccacc

SEQ ID NO: 1967683 - RNA, 19 nt, Artificial Sequence
  Description of Artificial Sequence: Synthetic oligonucleotide
cagcagacccagucauccc

SEQ ID NO: 1967684 - RNA, 19 nt, Artificial Sequence
  Description of Artificial Sequence: Synthetic oligonucleotide
gcgguggccaccuuaggac

SEQ ID NO: 1967685 - RNA, 19 nt, Artificial Sequence
  Description of Artificial Sequence: Synthetic oligonucleotide
ccauacaguggacucauga

SEQ ID NO: 1967686 - RNA, 19 nt, Artificial Sequence
  Description of Artificial Sequence: Synthetic oligonucleotide
ucacccucggugccccaga

SEQ ID NO: 1967687 - RNA, 19 nt, Artificial Sequence
  Description of Artificial Sequence: Synthetic oligonucleotide
uggcgccagaugcgcacag

SEQ ID NO: 1967688 - RNA, 19 nt, Artificial Sequence
  Description of Artificial Sequence: Synthetic oligonucleotide
accacaugcuuaacguccu

SEQ ID NO: 1967689 - RNA, 19 nt, Artificial Sequence
  Description of Artificial Sequence: Synthetic oligonucleotide
ugguagguacuggcgccag

SEQ ID NO: 1967690 - RNA, 19 nt, Artificial Sequence
  Description of Artificial Sequence: Synthetic oligonucleotide
uuccgaacagugcgcugau

SEQ ID NO: 1967691 - RNA, 19 nt, Artificial Sequence
  Description of Artificial Sequence: Synthetic oligonucleotide
agguugccagauggugccc

SEQ ID NO: 1967692 - RNA, 19 nt, Artificial Sequence
  Description of Artificial Sequence: Synthetic oligonucleotide
cacaguugacauccuggga

SEQ ID NO: 1967693 - RNA, 19 nt, Artificial Sequence
  Description of Artificial Sequence: Synthetic oligonucleotide
ucggugccccagaugcgga

SEQ ID NO: 1967694 - RNA, 19 nt, Artificial Sequence
  Description of Artificial Sequence: Synthetic oligonucleotide
ccaaaugcaagugguagca

SEQ ID NO: 1967695 - RNA, 19 nt, Artificial Sequence
  Description of Artificial Sequence: Synthetic oligonucleotide
gccacuuuccgaacagugc

SEQ ID NO: 1967696 - RNA, 19 nt, Artificial Sequence
  Description of Artificial Sequence: Synthetic oligonucleotide
acguccuguguaugagagu

SEQ ID NO: 1967697 - RNA, 19 nt, Artificial Sequence
  Description of Artificial Sequence: Synthetic oligonucleotide
aagcaacgucguaaauggu

SEQ ID NO: 1967698 - RNA, 19 nt, Artificial Sequence
  Description of Artificial Sequence: Synthetic oligonucleotide
accaagcaacgucguaaau

SEQ ID NO: 1967699 - RNA, 19 nt, Artificial Sequence
  Description of Artificial Sequence: Synthetic oligonucleotide
caccagcgaauccuucaug

SEQ ID NO: 1967700 - RNA, 19 nt, Artificial Sequence
  Description of Artificial Sequence: Synthetic oligonucleotide
caccaagcaacgucguaaa

SEQ ID NO: 1967701 - RNA, 19 nt, Artificial Sequence
  Description of Artificial Sequence: Synthetic oligonucleotide
ucguagcuggcagaagcua

SEQ ID NO: 1967702 - RNA, 19 nt, Artificial Sequence
  Description of Artificial Sequence: Synthetic oligonucleotide
agaugagcugucagagaga

SEQ ID NO: 1967703 - RNA, 19 nt, Artificial Sequence
  Description of Artificial Sequence: Synthetic oligonucleotide
caugcuuaacguccugugu

SEQ ID NO: 1967704 - RNA, 19 nt, Artificial Sequence
  Description of Artificial Sequence: Synthetic oligonucleotide
uagcuggcagaagcuaaaa

SEQ ID NO: 1967705 - RNA, 19 nt, Artificial Sequence
  Description of Artificial Sequence: Synthetic oligonucleotide
cacucuuaucucugcugca

SEQ ID NO: 1967706 - RNA, 19 nt, Artificial Sequence
  Description of Artificial Sequence: Synthetic oligonucleotide
gacaccaagcaacgucgua

SEQ ID NO: 1967707 - RNA, 19 nt, Artificial Sequence
  Description of Artificial Sequence: Synthetic oligonucleotide
uacggucgccgccgcacga

SEQ ID NO: 1967708 - RNA, 19 nt, Artificial Sequence
  Description of Artificial Sequence: Synthetic oligonucleotide
cugaugcagaugagcuguc

SEQ ID NO: 1967709 - RNA, 19 nt, Artificial Sequence
  Description of Artificial Sequence: Synthetic oligonucleotide
gcaagccaccccuuguuca

SEQ ID NO: 1967710 - RNA, 19 nt, Artificial Sequence
  Description of Artificial Sequence: Synthetic oligonucleotide
ccaccuuaggaccccgcgg

SEQ ID NO: 1967711 - RNA, 19 nt, Artificial Sequence
  Description of Artificial Sequence: Synthetic oligonucleotide
uggcggcggccuuaaggug

SEQ ID NO: 1967712 - RNA, 19 nt, Artificial Sequence
  Description of Artificial Sequence: Synthetic oligonucleotide
caugaccuucaaggguggc

SEQ ID NO: 1967713 - RNA, 19 nt, Artificial Sequence
  Description of Artificial Sequence: Synthetic oligonucleotide
gccccugucagcugacacc

SEQ ID NO: 1967714 - RNA, 19 nt, Artificial Sequence
  Description of Artificial Sequence: Synthetic oligonucleotide
agaggccagguaauuucca

SEQ ID NO: 1967715 - RNA, 19 nt, Artificial Sequence
  Description of Artificial Sequence: Synthetic oligonucleotide
gaaugggccugaugcagau

SEQ ID NO: 1967716 - RNA, 19 nt, Artificial Sequence
  Description of Artificial Sequence: Synthetic oligonucleotide
gagccacugcaagccaccc

SEQ ID NO: 1967717 - RNA, 19 nt, Artificial Sequence
  Description of Artificial Sequence: Synthetic oligonucleotide
ugccagacgcuggccacug

SEQ ID NO: 1967718 - RNA, 19 nt, Artificial Sequence
  Description of Artificial Sequence: Synthetic oligonucleotide
guagcuggcagaagcuaaa

SEQ ID NO: 1967719 - RNA, 19 nt, Artificial Sequence
  Description of Artificial Sequence: Synthetic oligonucleotide
agugcgcugauggccuuca

SEQ ID NO: 1967720 - RNA, 19 nt, Artificial Sequence
  Description of Artificial Sequence: Synthetic oligonucleotide
caguacggucaucacugca

SEQ ID NO: 1967721 - RNA, 19 nt, Artificial Sequence
  Description of Artificial Sequence: Synthetic oligonucleotide
cuuaucucugcugcaggua

SEQ ID NO: 1967722 - RNA, 19 nt, Artificial Sequence
  Description of Artificial Sequence: Synthetic oligonucleotide
aggguccccgugggguucc

SEQ ID NO: 1967723 - RNA, 19 nt, Artificial Sequence
  Description of Artificial Sequence: Synthetic oligonucleotide
gacaaagugcagauacauu

SEQ ID NO: 1967724 - RNA, 19 nt, Artificial Sequence
  Description of Artificial Sequence: Synthetic oligonucleotide
gggccugaugcagaugagc

SEQ ID NO: 1967725 - RNA, 19 nt, Artificial Sequence
  Description of Artificial Sequence: Synthetic oligonucleotide
gagugguuacacacucaaa

SEQ ID NO: 1967726 - RNA, 19 nt, Artificial Sequence
  Description of Artificial Sequence: Synthetic oligonucleotide
cggauuuuacggucgccgc

SEQ ID NO: 1967727 - RNA, 19 nt, Artificial Sequence
  Description of Artificial Sequence: Synthetic oligonucleotide
gucuggugauacucccaga

SEQ ID NO: 1967728 - RNA, 19 nt, Artificial Sequence
  Description of Artificial Sequence: Synthetic oligonucleotide
cgaacagugcgcugauggc

SEQ ID NO: 1967729 - RNA, 19 nt, Artificial Sequence
  Description of Artificial Sequence: Synthetic oligonucleotide
uaggaccccgcggucgcca

SEQ ID NO: 1967730 - RNA, 19 nt, Artificial Sequence
  Description of Artificial Sequence: Synthetic oligonucleotide
caccuuaggaccccgcggu

SEQ ID NO: 1967731 - RNA, 19 nt, Artificial Sequence
  Description of Artificial Sequence: Synthetic oligonucleotide
ucauggcggcggccuuaag

SEQ ID NO: 1967732 - RNA, 19 nt, Artificial Sequence
  Description of Artificial Sequence: Synthetic oligonucleotide
ccucaaauacucggauggc

SEQ ID NO: 1967733 - RNA, 19 nt, Artificial Sequence
  Description of Artificial Sequence: Synthetic oligonucleotide
uuaggaccccgcggucgcc

SEQ ID NO: 1967734 - RNA, 19 nt, Artificial Sequence
  Description of Artificial Sequence: Synthetic oligonucleotide
guagguacuggcgccagau

SEQ ID NO: 1967735 - RNA, 19 nt, Artificial Sequence
  Description of Artificial Sequence: Synthetic oligonucleotide
augcaagugguagcaucaa

SEQ ID NO: 1967736 - RNA, 19 nt, Artificial Sequence
  Description of Artificial Sequence: Synthetic oligonucleotide
caucaacuucccagaccca

SEQ ID NO: 1967737 - RNA, 19 nt, Artificial Sequence
  Description of Artificial Sequence: Synthetic oligonucleotide
gcagaugagcugucagaga

SEQ ID NO: 1967738 - RNA, 19 nt, Artificial Sequence
  Description of Artificial Sequence: Synthetic oligonucleotide
uggcuccuugggauuccaa

SEQ ID NO: 1967739 - RNA, 19 nt, Artificial Sequence
  Description of Artificial Sequence: Synthetic oligonucleotide
gcgaauccuucauggcggc

SEQ ID NO: 1967740 - RNA, 19 nt, Artificial Sequence
  Description of Artificial Sequence: Synthetic oligonucleotide
aggaccccgcggucgccag

SEQ ID NO: 1967741 - RNA, 19 nt, Artificial Sequence
  Description of Artificial Sequence: Synthetic oligonucleotide
ccgcacgaggccagcaggg

SEQ ID NO: 1967742 - RNA, 19 nt, Artificial Sequence
  Description of Artificial Sequence: Synthetic oligonucleotide
ggaccaggccacuuuccga

SEQ ID NO: 1967743 - RNA, 19 nt, Artificial Sequence
  Description of Artificial Sequence: Synthetic oligonucleotide
ccccacaggcuguagccag

SEQ ID NO: 1967744 - RNA, 19 nt, Artificial Sequence
  Description of Artificial Sequence: Synthetic oligonucleotide
guugccagauggugcccaa

SEQ ID NO: 1967745 - RNA, 19 nt, Artificial Sequence
  Description of Artificial Sequence: Synthetic oligonucleotide
gcggucgccagauguccag

SEQ ID NO: 1967746 - RNA, 19 nt, Artificial Sequence
  Description of Artificial Sequence: Synthetic oligonucleotide
agcgggaguccgggugcgc

SEQ ID NO: 1967747 - RNA, 19 nt, Artificial Sequence
  Description of Artificial Sequence: Synthetic oligonucleotide
ggaaugggccugaugcaga

SEQ ID NO: 1967748 - RNA, 19 nt, Artificial Sequence
  Description of Artificial Sequence: Synthetic oligonucleotide
caguugacauccugggaau

SEQ ID NO: 1967749 - RNA, 19 nt, Artificial Sequence
  Description of Artificial Sequence: Synthetic oligonucleotide
acggucgccgccgcacgag

SEQ ID NO: 1967750 - RNA, 19 nt, Artificial Sequence
  Description of Artificial Sequence: Synthetic oligonucleotide
guggacucaugaccuucaa

SEQ ID NO: 1967751 - RNA, 19 nt, Artificial Sequence
  Description of Artificial Sequence: Synthetic oligonucleotide
gcgcacaguacggucauca

SEQ ID NO: 1967752 - RNA, 19 nt, Artificial Sequence
  Description of Artificial Sequence: Synthetic oligonucleotide
agauggugcccaagccacu

SEQ ID NO: 1967753 - RNA, 19 nt, Artificial Sequence
  Description of Artificial Sequence: Synthetic oligonucleotide
cugacacauucauacucau

SEQ ID NO: 1967754 - RNA, 19 nt, Artificial Sequence
  Description of Artificial Sequence: Synthetic oligonucleotide
augccagacgcuggccacu

SEQ ID NO: 1967755 - RNA, 19 nt, Artificial Sequence
  Description of Artificial Sequence: Synthetic oligonucleotide
ccugguacagcuucacugu

SEQ ID NO: 1967756 - RNA, 19 nt, Artificial Sequence
  Description of Artificial Sequence: Synthetic oligonucleotide
cugguacagcuucacugua

SEQ ID NO: 1967757 - RNA, 19 nt, Artificial Sequence
  Description of Artificial Sequence: Synthetic oligonucleotide
cugguagguacuggcgcca

SEQ ID NO: 1967758 - RNA, 19 nt, Artificial Sequence
  Description of Artificial Sequence: Synthetic oligonucleotide
ccugaugcagaugagcugu

SEQ ID NO: 1967759 - RNA, 19 nt, Artificial Sequence
  Description of Artificial Sequence: Synthetic oligonucleotide
gcuccauacaguggacuca

SEQ ID NO: 1967760 - RNA, 19 nt, Artificial Sequence
  Description of Artificial Sequence: Synthetic oligonucleotide
aagccaccccuuguucauu

SEQ ID NO: 1967761 - RNA, 19 nt, Artificial Sequence
  Description of Artificial Sequence: Synthetic oligonucleotide
gcuauagcucagaggccug

SEQ ID NO: 1967762 - RNA, 19 nt, Artificial Sequence
  Description of Artificial Sequence: Synthetic oligonucleotide
gcaacgugcggaaagcggu

SEQ ID NO: 1967763 - RNA, 19 nt, Artificial Sequence
  Description of Artificial Sequence: Synthetic oligonucleotide
gccugcagucuggugauac

SEQ ID NO: 1967764 - RNA, 19 nt, Artificial Sequence
  Description of Artificial Sequence: Synthetic oligonucleotide
uggcagaggccagguaauu

SEQ ID NO: 1967765 - RNA, 19 nt, Artificial Sequence
  Description of Artificial Sequence: Synthetic oligonucleotide
ggugcgccgagacacggcu

SEQ ID NO: 1967766 - RNA, 19 nt, Artificial Sequence
  Description of Artificial Sequence: Synthetic oligonucleotide
ggcggcggccuuaagguga

SEQ ID NO: 1967767 - RNA, 19 nt, Artificial Sequence
  Description of Artificial Sequence: Synthetic oligonucleotide
caagccaccccuuguucau

SEQ ID NO: 1967768 - RNA, 19 nt, Artificial Sequence
  Description of Artificial Sequence: Synthetic oligonucleotide
gguugccagauggugccca

SEQ ID NO: 1967769 - RNA, 19 nt, Artificial Sequence
  Description of Artificial Sequence: Synthetic oligonucleotide
caucauccccacaggcugu

SEQ ID NO: 1967770 - RNA, 19 nt, Artificial Sequence
  Description of Artificial Sequence: Synthetic oligonucleotide
caacgucguaaaugguccu

SEQ ID NO: 1967771 - RNA, 19 nt, Artificial Sequence
  Description of Artificial Sequence: Synthetic oligonucleotide
ccgagacacggcucugcag

SEQ ID NO: 1967772 - RNA, 19 nt, Artificial Sequence
  Description of Artificial Sequence: Synthetic oligonucleotide
aucauccccacaggcugua

SEQ ID NO: 1967773 - RNA, 19 nt, Artificial Sequence
  Description of Artificial Sequence: Synthetic oligonucleotide
cuggcagaggccagguaau

SEQ ID NO: 1967774 - RNA, 19 nt, Artificial Sequence
  Description of Artificial Sequence: Synthetic oligonucleotide
ccucaagagugguuacaca

SEQ ID NO: 1967775 - RNA, 19 nt, Artificial Sequence
  Description of Artificial Sequence: Synthetic oligonucleotide
ggucaaaggccaagcucca

SEQ ID NO: 1967776 - RNA, 19 nt, Artificial Sequence
  Description of Artificial Sequence: Synthetic oligonucleotide
acagugcgcugauggccuu

SEQ ID NO: 1967777 - RNA, 19 nt, Artificial Sequence
  Description of Artificial Sequence: Synthetic oligonucleotide
ccugggaaugggccugaug

SEQ ID NO: 1967778 - RNA, 19 nt, Artificial Sequence
  Description of Artificial Sequence: Synthetic oligonucleotide
acacggcucugcagcacca

SEQ ID NO: 1967779 - RNA, 19 nt, Artificial Sequence
  Description of Artificial Sequence: Synthetic oligonucleotide
ugucacccucggugcccca

SEQ ID NO: 1967780 - RNA, 19 nt, Artificial Sequence
  Description of Artificial Sequence: Synthetic oligonucleotide
agggccccugucagcugac

SEQ ID NO: 1967781 - RNA, 19 nt, Artificial Sequence
  Description of Artificial Sequence: Synthetic oligonucleotide
cggucaucacugcaagaug

SEQ ID NO: 1967782 - RNA, 19 nt, Artificial Sequence
  Description of Artificial Sequence: Synthetic oligonucleotide
gccaggagguugccagaug

SEQ ID NO: 1967783 - RNA, 19 nt, Artificial Sequence
  Description of Artificial Sequence: Synthetic oligonucleotide
gguagguacuggcgccaga

SEQ ID NO: 1967784 - RNA, 19 nt, Artificial Sequence
  Description of Artificial Sequence: Synthetic oligonucleotide
ggcggccuuaaggugagaa

SEQ ID NO: 1967785 - RNA, 19 nt, Artificial Sequence
  Description of Artificial Sequence: Synthetic oligonucleotide
ggggaccaggccacuuucc

SEQ ID NO: 1967786 - RNA, 19 nt, Artificial Sequence
  Description of Artificial Sequence: Synthetic oligonucleotide
gccgagacacggcucugca

SEQ ID NO: 1967787 - RNA, 19 nt, Artificial Sequence
  Description of Artificial Sequence: Synthetic oligonucleotide
gccaccccuuguucauugc

SEQ ID NO: 1967788 - RNA, 19 nt, Artificial Sequence
  Description of Artificial Sequence: Synthetic oligonucleotide
cguagcuggcagaagcuaa

SEQ ID NO: 1967789 - RNA, 19 nt, Artificial Sequence
  Description of Artificial Sequence: Synthetic oligonucleotide
ccccugucagcugacacca

SEQ ID NO: 1967790 - RNA, 19 nt, Artificial Sequence
  Description of Artificial Sequence: Synthetic oligonucleotide
gcgccagaugcgcacagua

SEQ ID NO: 1967791 - RNA, 19 nt, Artificial Sequence
  Description of Artificial Sequence: Synthetic oligonucleotide
ugcgcacaguacggucauc

SEQ ID NO: 1967792 - RNA, 19 nt, Artificial Sequence
  Description of Artificial Sequence: Synthetic oligonucleotide
guccgggugcgccgagaca

SEQ ID NO: 1967793 - RNA, 19 nt, Artificial Sequence
  Description of Artificial Sequence: Synthetic oligonucleotide
ggucgccagauguccagcu

SEQ ID NO: 1967794 - RNA, 19 nt, Artificial Sequence
  Description of Artificial Sequence: Synthetic oligonucleotide
cagugcgcugauggccuuc

SEQ ID NO: 1967795 - RNA, 19 nt, Artificial Sequence
  Description of Artificial Sequence: Synthetic oligonucleotide
ggacacugacacauucaua

SEQ ID NO: 1967796 - RNA, 19 nt, Artificial Sequence
  Description of Artificial Sequence: Synthetic oligonucleotide
gcgggaguccgggugcgcc

SEQ ID NO: 1967797 - RNA, 19 nt, Artificial Sequence
  Description of Artificial Sequence: Synthetic oligonucleotide
caggguccccgugggguuc

SEQ ID NO: 1967798 - RNA, 19 nt, Artificial Sequence
  Description of Artificial Sequence: Synthetic oligonucleotide
cuucauggcggcggccuua

SEQ ID NO: 1967799 - RNA, 19 nt, Artificial Sequence
  Description of Artificial Sequence: Synthetic oligonucleotide
caaaugcaagugguagcau

SEQ ID NO: 1967800 - RNA, 19 nt, Artificial Sequence
  Description of Artificial Sequence: Synthetic oligonucleotide
cccgcggucgccagauguc

SEQ ID NO: 1967801 - RNA, 19 nt, Artificial Sequence
  Description of Artificial Sequence: Synthetic oligonucleotide
ccgcggucgccagaugucc

SEQ ID NO: 1967802 - RNA, 19 nt, Artificial Sequence
  Description of Artificial Sequence: Synthetic oligonucleotide
cagaugcgcacaguacggu

SEQ ID NO: 1967803 - RNA, 19 nt, Artificial Sequence
  Description of Artificial Sequence: Synthetic oligonucleotide
ccgggugcgccgagacacg

SEQ ID NO: 1967804 - RNA, 19 nt, Artificial Sequence
  Description of Artificial Sequence: Synthetic oligonucleotide
gcggcggccuuaaggugag

SEQ ID NO: 1967805 - RNA, 19 nt, Artificial Sequence
  Description of Artificial Sequence: Synthetic oligonucleotide
cgggaguccgggugcgccg

SEQ ID NO: 1967806 - RNA, 19 nt, Artificial Sequence
  Description of Artificial Sequence: Synthetic oligonucleotide
gucgccagauguccagcuu

SEQ ID NO: 1967807 - RNA, 19 nt, Artificial Sequence
  Description of Artificial Sequence: Synthetic oligonucleotide
ggauggcaucauccccaca

SEQ ID NO: 1967808 - RNA, 19 nt, Artificial Sequence
  Description of Artificial Sequence: Synthetic oligonucleotide
cggauggcaucauccccac

SEQ ID NO: 1967809 - RNA, 19 nt, Artificial Sequence
  Description of Artificial Sequence: Synthetic oligonucleotide
cgaauccuucauggcggcg

SEQ ID NO: 1967810 - RNA, 19 nt, Artificial Sequence
  Description of Artificial Sequence: Synthetic oligonucleotide
cauccccuucuuccuggua

SEQ ID NO: 1967811 - RNA, 19 nt, Artificial Sequence
  Description of Artificial Sequence: Synthetic oligonucleotide
accccgcggucgccagaug

SEQ ID NO: 1967812 - RNA, 19 nt, Artificial Sequence
  Description of Artificial Sequence: Synthetic oligonucleotide
gggugcgccgagacacggc

SEQ ID NO: 1967813 - RNA, 19 nt, Artificial Sequence
  Description of Artificial Sequence: Synthetic oligonucleotide
gaccccgcggucgccagau

SEQ ID NO: 1967814 - RNA, 19 nt, Artificial Sequence
  Description of Artificial Sequence: Synthetic oligonucleotide
gucaaaggccaagcuccau

SEQ ID NO: 1967815 - RNA, 19 nt, Artificial Sequence
  Description of Artificial Sequence: Synthetic oligonucleotide
ggaucugagccuggauccu

SEQ ID NO: 1967816 - RNA, 19 nt, Artificial Sequence
  Description of Artificial Sequence: Synthetic oligonucleotide
ccgugggguuccaggccag

SEQ ID NO: 1967817 - RNA, 19 nt, Artificial Sequence
  Description of Artificial Sequence: Synthetic oligonucleotide
gugcgccgagacacggcuc

SEQ ID NO: 1967818 - RNA, 19 nt, Artificial Sequence
  Description of Artificial Sequence: Synthetic oligonucleotide
cccuggcuccuugggauuc

SEQ ID NO: 1967819 - RNA, 19 nt, Artificial Sequence
  Description of Artificial Sequence: Synthetic oligonucleotide
gcagacccagucauccccu

SEQ ID NO: 1967820 - RNA, 19 nt, Artificial Sequence
  Description of Artificial Sequence: Synthetic oligonucleotide
ggcagaggccagguaauuu

SEQ ID NO: 1967821 - RNA, 19 nt, Artificial Sequence
  Description of Artificial Sequence: Synthetic oligonucleotide
cgccgcacgaggccagcag

SEQ ID NO: 1967822 - RNA, 19 nt, Artificial Sequence
  Description of Artificial Sequence: Synthetic oligonucleotide
cgggugcgccgagacacgg

SEQ ID NO: 1967823 - RNA, 19 nt, Artificial Sequence
  Description of Artificial Sequence: Synthetic oligonucleotide
cggucgccgccgcacgagg

SEQ ID NO: 1967824 - RNA, 19 nt, Artificial Sequence
  Description of Artificial Sequence: Synthetic oligonucleotide
cccuuguucauugccuggu

SEQ ID NO: 1967825 - RNA, 19 nt, Artificial Sequence
  Description of Artificial Sequence: Synthetic oligonucleotide
gccccagaugcggauuuua

SEQ ID NO: 1967826 - RNA, 19 nt, Artificial Sequence
  Description of Artificial Sequence: Synthetic oligonucleotide
cggucgccagauguccagc

SEQ ID NO: 1967827 - RNA, 19 nt, Artificial Sequence
  Description of Artificial Sequence: Synthetic oligonucleotide
cagacccagucauccccuu

SEQ ID NO: 1967828 - RNA, 19 nt, Artificial Sequence
  Description of Artificial Sequence: Synthetic oligonucleotide
ggaccccgcggucgccaga

SEQ ID NO: 1967829 - RNA, 19 nt, Artificial Sequence
  Description of Artificial Sequence: Synthetic oligonucleotide
cacccucggugccccagau

SEQ ID NO: 1967830 - RNA, 19 nt, Artificial Sequence
  Description of Artificial Sequence: Synthetic oligonucleotide
ccccgcggucgccagaugu

SEQ ID NO: 1967831 - RNA, 19 nt, Artificial Sequence
  Description of Artificial Sequence: Synthetic oligonucleotide
gcgccgagacacggcucug

SEQ ID NO: 1967832 - RNA, 19 nt, Artificial Sequence
  Description of Artificial Sequence: Synthetic oligonucleotide
cgcggucgccagaugucca

SEQ ID NO: 1967833 - RNA, 19 nt, Artificial Sequence
  Description of Artificial Sequence: Synthetic oligonucleotide
cggaaagcgguggccaccu

SEQ ID NO: 1967834 - RNA, 19 nt, Artificial Sequence
  Description of Artificial Sequence: Synthetic oligonucleotide
cccugucagcugacaccaa

SEQ ID NO: 1967835 - RNA, 19 nt, Artificial Sequence
  Description of Artificial Sequence: Synthetic oligonucleotide
ggaaagcgguggccaccuu

SEQ ID NO: 1967836 - RNA, 19 nt, Artificial Sequence
  Description of Artificial Sequence: Synthetic oligonucleotide
ccgccgcacgaggccagca

SEQ ID NO: 1967837 - RNA, 19 nt, Artificial Sequence
  Description of Artificial Sequence: Synthetic oligonucleotide
cggugccccagaugcggau

SEQ ID NO: 1967838 - RNA, 19 nt, Artificial Sequence
  Description of Artificial Sequence: Synthetic oligonucleotide
cggcggccuuaaggugaga

SEQ ID NO: 1967839 - RNA, 19 nt, Artificial Sequence
  Description of Artificial Sequence: Synthetic oligonucleotide
aaaggucuaacauuguuag

SEQ ID NO: 1967840 - RNA, 19 nt, Artificial Sequence
  Description of Artificial Sequence: Synthetic oligonucleotide
aaucaugucccuuuagcac

SEQ ID NO: 1967841 - RNA, 19 nt, Artificial Sequence
  Description of Artificial Sequence: Synthetic oligonucleotide
aaaggaauaugcugauucc

SEQ ID NO: 1967842 - RNA, 19 nt, Artificial Sequence
  Description of Artificial Sequence: Synthetic oligonucleotide
uugaaaaggucuaacauug

SEQ ID NO: 1967843 - RNA, 19 nt, Artificial Sequence
  Description of Artificial Sequence: Synthetic oligonucleotide
aacauuucuaacuuuagau

SEQ ID NO: 1967844 - RNA, 19 nt, Artificial Sequence
  Description of Artificial Sequence: Synthetic oligonucleotide
aguucauuuacuuuaagca

SEQ ID NO: 1967845 - RNA, 19 nt, Artificial Sequence
  Description of Artificial Sequence: Synthetic oligonucleotide
uguaauauuuccucugagg

SEQ ID NO: 1967846 - RNA, 19 nt, Artificial Sequence
  Description of Artificial Sequence: Synthetic oligonucleotide
ucuggaacaagcauuuccg

SEQ ID NO: 1967847 - RNA, 19 nt, Artificial Sequence
  Description of Artificial Sequence: Synthetic oligonucleotide
aacuuuagauauucuugcc

SEQ ID NO: 1967848 - RNA, 19 nt, Artificial Sequence
  Description of Artificial Sequence: Synthetic oligonucleotide
cuuuacauaauuaaggaca

SEQ ID NO: 1967849 - RNA, 19 nt, Artificial Sequence
  Description of Artificial Sequence: Synthetic oligonucleotide
uaaaggaauaugcugauuc

SEQ ID NO: 1967850 - RNA, 19 nt, Artificial Sequence
  Description of Artificial Sequence: Synthetic oligonucleotide
uuuugcaugauuagcauac

SEQ ID NO: 1967851 - RNA, 19 nt, Artificial Sequence
  Description of Artificial Sequence: Synthetic oligonucleotide
uuuaauugacuuuugcaug

SEQ ID NO: 1967852 - RNA, 19 nt, Artificial Sequence
  Description of Artificial Sequence: Synthetic oligonucleotide
uuuauuaauauuugugccu

SEQ ID NO: 1967853 - RNA, 19 nt, Artificial Sequence
  Description of Artificial Sequence: Synthetic oligonucleotide
gaauccuucaauaagcgag

SEQ ID NO: 1967854 - RNA, 19 nt, Artificial Sequence
  Description of Artificial Sequence: Synthetic oligonucleotide
auuacaguuugacaguuuc

SEQ ID NO: 1967855 - RNA, 19 nt, Artificial Sequence
  Description of Artificial Sequence: Synthetic oligonucleotide
uuauacaccuccaaauaag

SEQ ID NO: 1967856 - RNA, 19 nt, Artificial Sequence
  Description of Artificial Sequence: Synthetic oligonucleotide
aucaugucccuuuagcacc

SEQ ID NO: 1967857 - RNA, 19 nt, Artificial Sequence
  Description of Artificial Sequence: Synthetic oligonucleotide
ucaaugagugacauuuugg

SEQ ID NO: 1967858 - RNA, 19 nt, Artificial Sequence
  Description of Artificial Sequence: Synthetic oligonucleotide
aaugcuucaucucuauuug

SEQ ID NO: 1967859 - RNA, 19 nt, Artificial Sequence
  Description of Artificial Sequence: Synthetic oligonucleotide
uguuauaugugucaucaga

SEQ ID NO: 1967860 - RNA, 19 nt, Artificial Sequence
  Description of Artificial Sequence: Synthetic oligonucleotide
aaugagaagauguagcauu

SEQ ID NO: 1967861 - RNA, 19 nt, Artificial Sequence
  Description of Artificial Sequence: Synthetic oligonucleotide
uguugucacaaauaaaucu

SEQ ID NO: 1967862 - RNA, 19 nt, Artificial Sequence
  Description of Artificial Sequence: Synthetic oligonucleotide
gauagaaugacuugaguuc

SEQ ID NO: 1967863 - RNA, 19 nt, Artificial Sequence
  Description of Artificial Sequence: Synthetic oligonucleotide
gauucuguucauuauacac

SEQ ID NO: 1967864 - RNA, 19 nt, Artificial Sequence
  Description of Artificial Sequence: Synthetic oligonucleotide
uaacuuuagauauucuugc

SEQ ID NO: 1967865 - RNA, 19 nt, Artificial Sequence
  Description of Artificial Sequence: Synthetic oligonucleotide
ugaacaaccacuccuuuug

SEQ ID NO: 1967866 - RNA, 19 nt, Artificial Sequence
  Description of Artificial Sequence: Synthetic oligonucleotide
uucauuuacuuuaagcaac

SEQ ID NO: 1967867 - RNA, 19 nt, Artificial Sequence
  Description of Artificial Sequence: Synthetic oligonucleotide
agauguagcauucauguca

SEQ ID NO: 1967868 - RNA, 19 nt, Artificial Sequence
  Description of Artificial Sequence: Synthetic oligonucleotide
agcaguacuacacacuuuc

SEQ ID NO: 1967869 - RNA, 19 nt, Artificial Sequence
  Description of Artificial Sequence: Synthetic oligonucleotide
uuaagaguguuauaugugu

SEQ ID NO: 1967870 - RNA, 19 nt, Artificial Sequence
  Description of Artificial Sequence: Synthetic oligonucleotide
auucccaagggcuaaacag

SEQ ID NO: 1967871 - RNA, 19 nt, Artificial Sequence
  Description of Artificial Sequence: Synthetic oligonucleotide
guuuccauugccuaguagc

SEQ ID NO: 1967872 - RNA, 19 nt, Artificial Sequence
  Description of Artificial Sequence: Synthetic oligonucleotide
auuuuggcuacacagauau

SEQ ID NO: 1967873 - RNA, 19 nt, Artificial Sequence
  Description of Artificial Sequence: Synthetic oligonucleotide
uuaauugacuuuugcauga

SEQ ID NO: 1967874 - RNA, 19 nt, Artificial Sequence
  Description of Artificial Sequence: Synthetic oligonucleotide
uauaugugucaucagagaa

SEQ ID NO: 1967875 - RNA, 19 nt, Artificial Sequence
  Description of Artificial Sequence: Synthetic oligonucleotide
acuuaagaguguuauaugu

SEQ ID NO: 1967876 - RNA, 19 nt, Artificial Sequence
  Description of Artificial Sequence: Synthetic oligonucleotide
ucuuuuaauuucuuugucu

SEQ ID NO: 1967877 - RNA, 19 nt, Artificial Sequence
  Description of Artificial Sequence: Synthetic oligonucleotide
aaauaagaacagcaguacu

SEQ ID NO: 1967878 - RNA, 19 nt, Artificial Sequence
  Description of Artificial Sequence: Synthetic oligonucleotide
uuuguaucugcuaaggcau

SEQ ID NO: 1967879 - RNA, 19 nt, Artificial Sequence
  Description of Artificial Sequence: Synthetic oligonucleotide
aaaucucuguuuucugcac

SEQ ID NO: 1967880 - RNA, 19 nt, Artificial Sequence
  Description of Artificial Sequence: Synthetic oligonucleotide
aaggacaucacucuuuaaa

SEQ ID NO: 1967881 - RNA, 19 nt, Artificial Sequence
  Description of Artificial Sequence: Synthetic oligonucleotide
uaaaaucucuguuuucugc

SEQ ID NO: 1967882 - RNA, 19 nt, Artificial Sequence
  Description of Artificial Sequence: Synthetic oligonucleotide
uaauauuugugccuucuac

SEQ ID NO: 1967883 - RNA, 19 nt, Artificial Sequence
  Description of Artificial Sequence: Synthetic oligonucleotide
aauccuucaauaagcgagc

SEQ ID NO: 1967884 - RNA, 19 nt, Artificial Sequence
  Description of Artificial Sequence: Synthetic oligonucleotide
auuacagaucuuuacauaa

SEQ ID NO: 1967885 - RNA, 19 nt, Artificial Sequence
  Description of Artificial Sequence: Synthetic oligonucleotide
uccaaauaagaacagcagu

SEQ ID NO: 1967886 - RNA, 19 nt, Artificial Sequence
  Description of Artificial Sequence: Synthetic oligonucleotide
guaauauuuccucugagga

SEQ ID NO: 1967887 - RNA, 19 nt, Artificial Sequence
  Description of Artificial Sequence: Synthetic oligonucleotide
caaugagugacauuuuggc

SEQ ID NO: 1967888 - RNA, 19 nt, Artificial Sequence
  Description of Artificial Sequence: Synthetic oligonucleotide
guagcauucaugucagugg

SEQ ID NO: 1967889 - RNA, 19 nt, Artificial Sequence
  Description of Artificial Sequence: Synthetic oligonucleotide
auaagaacagcaguacuac

SEQ ID NO: 1967890 - RNA, 19 nt, Artificial Sequence
  Description of Artificial Sequence: Synthetic oligonucleotide
uagcauucaugucaguggg

SEQ ID NO: 1967891 - RNA, 19 nt, Artificial Sequence
  Description of Artificial Sequence: Synthetic oligonucleotide
aaugagugacauuuuggcu

SEQ ID NO: 1967892 - RNA, 19 nt, Artificial Sequence
  Description of Artificial Sequence: Synthetic oligonucleotide
aguacuacacacuuucucu

SEQ ID NO: 1967893 - RNA, 19 nt, Artificial Sequence
  Description of Artificial Sequence: Synthetic oligonucleotide
aagaguguuauauguguca

SEQ ID NO: 1967894 - RNA, 19 nt, Artificial Sequence
  Description of Artificial Sequence: Synthetic oligonucleotide
agugagaccuugaacaacc

SEQ ID NO: 1967895 - RNA, 19 nt, Artificial Sequence
  Description of Artificial Sequence: Synthetic oligonucleotide
ugauagaaugacuugaguu

SEQ ID NO: 1967896 - RNA, 19 nt, Artificial Sequence
  Description of Artificial Sequence: Synthetic oligonucleotide
agguuuaauugacuuuugc

SEQ ID NO: 1967897 - RNA, 19 nt, Artificial Sequence
  Description of Artificial Sequence: Synthetic oligonucleotide
auuaaaaucucuguuuucu

SEQ ID NO: 1967898 - RNA, 19 nt, Artificial Sequence
  Description of Artificial Sequence: Synthetic oligonucleotide
uacaccuccaaauaagaac

SEQ ID NO: 1967899 - RNA, 19 nt, Artificial Sequence
  Description of Artificial Sequence: Synthetic oligonucleotide
uaauuaaggacaucacucu

SEQ ID NO: 1967900 - RNA, 19 nt, Artificial Sequence
  Description of Artificial Sequence: Synthetic oligonucleotide
uucccaagggcuaaacagg

SEQ ID NO: 1967901 - RNA, 19 nt, Artificial Sequence
  Description of Artificial Sequence: Synthetic oligonucleotide
gaagauguagcauucaugu

SEQ ID NO: 1967902 - RNA, 19 nt, Artificial Sequence
  Description of Artificial Sequence: Synthetic oligonucleotide
uuugaaaaggucuaacauu

SEQ ID NO: 1967903 - RNA, 19 nt, Artificial Sequence
  Description of Artificial Sequence: Synthetic oligonucleotide
aaagguuuaauugacuuuu

SEQ ID NO: 1967904 - RNA, 19 nt, Artificial Sequence
  Description of Artificial Sequence: Synthetic oligonucleotide
agaacaaagaggaaggucu

SEQ ID NO: 1967905 - RNA, 19 nt, Artificial Sequence
  Description of Artificial Sequence: Synthetic oligonucleotide
uucuucucgacucuggaac

SEQ ID NO: 1967906 - RNA, 19 nt, Artificial Sequence
  Description of Artificial Sequence: Synthetic oligonucleotide
uuuccgaauuucuugaagu

SEQ ID NO: 1967907 - RNA, 19 nt, Artificial Sequence
  Description of Artificial Sequence: Synthetic oligonucleotide
ucauuauacaccuccaaau

SEQ ID NO: 1967908 - RNA, 19 nt, Artificial Sequence
  Description of Artificial Sequence: Synthetic oligonucleotide
ucuuuacauaauuaaggac

SEQ ID NO: 1967909 - RNA, 19 nt, Artificial Sequence
  Description of Artificial Sequence: Synthetic oligonucleotide
uuugauguacugauuuuac

SEQ ID NO: 1967910 - RNA, 19 nt, Artificial Sequence
  Description of Artificial Sequence: Synthetic oligonucleotide
uauacaccuccaaauaaga

SEQ ID NO: 1967911 - RNA, 19 nt, Artificial Sequence
  Description of Artificial Sequence: Synthetic oligonucleotide
ugauugauucuuauuugug

SEQ ID NO: 1967912 - RNA, 19 nt, Artificial Sequence
  Description of Artificial Sequence: Synthetic oligonucleotide
ucuuuaggcucaugcaugg

SEQ ID NO: 1967913 - RNA, 19 nt, Artificial Sequence
  Description of Artificial Sequence: Synthetic oligonucleotide
ucuucauaggcuuuuaguu

SEQ ID NO: 1967914 - RNA, 19 nt, Artificial Sequence
  Description of Artificial Sequence: Synthetic oligonucleotide
aguguuauaugugucauca

SEQ ID NO: 1967915 - RNA, 19 nt, Artificial Sequence
  Description of Artificial Sequence: Synthetic oligonucleotide
ucuaacuuuagauauucuu

SEQ ID NO: 1967916 - RNA, 19 nt, Artificial Sequence
  Description of Artificial Sequence: Synthetic oligonucleotide
uguugauagaaugacuuga

SEQ ID NO: 1967917 - RNA, 19 nt, Artificial Sequence
  Description of Artificial Sequence: Synthetic oligonucleotide
uaaacaggauuuauuaaua

SEQ ID NO: 1967918 - RNA, 19 nt, Artificial Sequence
  Description of Artificial Sequence: Synthetic oligonucleotide
uugacuuuugcaugauuag

SEQ ID NO: 1967919 - RNA, 19 nt, Artificial Sequence
  Description of Artificial Sequence: Synthetic oligonucleotide
uuuagcaccagaaguucug

SEQ ID NO: 1967920 - RNA, 19 nt, Artificial Sequence
  Description of Artificial Sequence: Synthetic oligonucleotide
caguuugacaguuuccucc

SEQ ID NO: 1967921 - RNA, 19 nt, Artificial Sequence
  Description of Artificial Sequence: Synthetic oligonucleotide
uucuuuaggcucaugcaug

SEQ ID NO: 1967922 - RNA, 19 nt, Artificial Sequence
  Description of Artificial Sequence: Synthetic oligonucleotide
ucauuuacuuuaagcaaca

SEQ ID NO: 1967923 - RNA, 19 nt, Artificial Sequence
  Description of Artificial Sequence: Synthetic oligonucleotide
aagcuuaauauuucuguaa

SEQ ID NO: 1967924 - RNA, 19 nt, Artificial Sequence
  Description of Artificial Sequence: Synthetic oligonucleotide
cuuaagaguguuauaugug

SEQ ID NO: 1967925 - RNA, 19 nt, Artificial Sequence
  Description of Artificial Sequence: Synthetic oligonucleotide
ccuucuacaaaucaugucc

SEQ ID NO: 1967926 - RNA, 19 nt, Artificial Sequence
  Description of Artificial Sequence: Synthetic oligonucleotide
uuccuggacaguaaguggc

SEQ ID NO: 1967927 - RNA, 19 nt, Artificial Sequence
  Description of Artificial Sequence: Synthetic oligonucleotide
aagcgagcaagcuuaauau

SEQ ID NO: 1967928 - RNA, 19 nt, Artificial Sequence
  Description of Artificial Sequence: Synthetic oligonucleotide
aagauguagcauucauguc

SEQ ID NO: 1967929 - RNA, 19 nt, Artificial Sequence
  Description of Artificial Sequence: Synthetic oligonucleotide
uucuguaaaggaauaugcu

SEQ ID NO: 1967930 - RNA, 19 nt, Artificial Sequence
  Description of Artificial Sequence: Synthetic oligonucleotide
uuauaugugucaucagaga

SEQ ID NO: 1967931 - RNA, 19 nt, Artificial Sequence
  Description of Artificial Sequence: Synthetic oligonucleotide
uuuaggcucaugcauggcu

SEQ ID NO: 1967932 - RNA, 19 nt, Artificial Sequence
  Description of Artificial Sequence: Synthetic oligonucleotide
acuuuagauauucuugccu

SEQ ID NO: 1967933 - RNA, 19 nt, Artificial Sequence
  Description of Artificial Sequence: Synthetic oligonucleotide
uguaaagugagaccuugaa

SEQ ID NO: 1967934 - RNA, 19 nt, Artificial Sequence
  Description of Artificial Sequence: Synthetic oligonucleotide
auuugugccuucuacaaau

SEQ ID NO: 1967935 - RNA, 19 nt, Artificial Sequence
  Description of Artificial Sequence: Synthetic oligonucleotide
auguacugauuuuacacug

SEQ ID NO: 1967936 - RNA, 19 nt, Artificial Sequence
  Description of Artificial Sequence: Synthetic oligonucleotide
auuauacaccuccaaauaa

SEQ ID NO: 1967937 - RNA, 19 nt, Artificial Sequence
  Description of Artificial Sequence: Synthetic oligonucleotide
cucuauuuggugauggcac

SEQ ID NO: 1967938 - RNA, 19 nt, Artificial Sequence
  Description of Artificial Sequence: Synthetic oligonucleotide
ugcaugauuagcauacuua

SEQ ID NO: 1967939 - RNA, 19 nt, Artificial Sequence
  Description of Artificial Sequence: Synthetic oligonucleotide
uuuccauugccuaguagcu

SEQ ID NO: 1967940 - RNA, 19 nt, Artificial Sequence
  Description of Artificial Sequence: Synthetic oligonucleotide
agaucuuuacauaauuaag

SEQ ID NO: 1967941 - RNA, 19 nt, Artificial Sequence
  Description of Artificial Sequence: Synthetic oligonucleotide
cuguaaaggaauaugcuga

SEQ ID NO: 1967942 - RNA, 19 nt, Artificial Sequence
  Description of Artificial Sequence: Synthetic oligonucleotide
uuugggcugguguaaagug

SEQ ID NO: 1967943 - RNA, 19 nt, Artificial Sequence
  Description of Artificial Sequence: Synthetic oligonucleotide
uucuuauuuguguugucac

SEQ ID NO: 1967944 - RNA, 19 nt, Artificial Sequence
  Description of Artificial Sequence: Synthetic oligonucleotide
aggucuaacauuguuaggu

SEQ ID NO: 1967945 - RNA, 19 nt, Artificial Sequence
  Description of Artificial Sequence: Synthetic oligonucleotide
gagaauccuucaauaagcg

SEQ ID NO: 1967946 - RNA, 19 nt, Artificial Sequence
  Description of Artificial Sequence: Synthetic oligonucleotide
uccucugaggauuugggcu

SEQ ID NO: 1967947 - RNA, 19 nt, Artificial Sequence
  Description of Artificial Sequence: Synthetic oligonucleotide
ugaggauuugggcuggugu

SEQ ID NO: 1967948 - RNA, 19 nt, Artificial Sequence
  Description of Artificial Sequence: Synthetic oligonucleotide
ucuguuuucugcacauuac

SEQ ID NO: 1967949 - RNA, 19 nt, Artificial Sequence
  Description of Artificial Sequence: Synthetic oligonucleotide
ggauuuauuaauauuugug

SEQ ID NO: 1967950 - RNA, 19 nt, Artificial Sequence
  Description of Artificial Sequence: Synthetic oligonucleotide
ucuuauuuguguugucaca

SEQ ID NO: 1967951 - RNA, 19 nt, Artificial Sequence
  Description of Artificial Sequence: Synthetic oligonucleotide
auugauucuuauuuguguu

SEQ ID NO: 1967952 - RNA, 19 nt, Artificial Sequence
  Description of Artificial Sequence: Synthetic oligonucleotide
aauuaaggacaucacucuu

SEQ ID NO: 1967953 - RNA, 19 nt, Artificial Sequence
  Description of Artificial Sequence: Synthetic oligonucleotide
uuuagauauucuugccuga

SEQ ID NO: 1967954 - RNA, 19 nt, Artificial Sequence
  Description of Artificial Sequence: Synthetic oligonucleotide
aauuacagcaaguggccuu

SEQ ID NO: 1967955 - RNA, 19 nt, Artificial Sequence
  Description of Artificial Sequence: Synthetic oligonucleotide
ugucaucagagaacaaaga

SEQ ID NO: 1967956 - RNA, 19 nt, Artificial Sequence
  Description of Artificial Sequence: Synthetic oligonucleotide
uuuggugauggcacuguug

SEQ ID NO: 1967957 - RNA, 19 nt, Artificial Sequence
  Description of Artificial Sequence: Synthetic oligonucleotide
cuucaauaagcgagcaagc

SEQ ID NO: 1967958 - RNA, 19 nt, Artificial Sequence
  Description of Artificial Sequence: Synthetic oligonucleotide
uuaaggacaucacucuuua

SEQ ID NO: 1967959 - RNA, 19 nt, Artificial Sequence
  Description of Artificial Sequence: Synthetic oligonucleotide
aguaaguggccccaaauuu

SEQ ID NO: 1967960 - RNA, 19 nt, Artificial Sequence
  Description of Artificial Sequence: Synthetic oligonucleotide
uuguugauagaaugacuug

SEQ ID NO: 1967961 - RNA, 19 nt, Artificial Sequence
  Description of Artificial Sequence: Synthetic oligonucleotide
acauuucuaacuuuagaua

SEQ ID NO: 1967962 - RNA, 19 nt, Artificial Sequence
  Description of Artificial Sequence: Synthetic oligonucleotide
gacaguuuccuccaagaga

SEQ ID NO: 1967963 - RNA, 19 nt, Artificial Sequence
  Description of Artificial Sequence: Synthetic oligonucleotide
uccaagagaauccuucaau

SEQ ID NO: 1967964 - RNA, 19 nt, Artificial Sequence
  Description of Artificial Sequence: Synthetic oligonucleotide
accuugaacaaccacuccu

SEQ ID NO: 1967965 - RNA, 19 nt, Artificial Sequence
  Description of Artificial Sequence: Synthetic oligonucleotide
cacuguuguugauagaaug

SEQ ID NO: 1967966 - RNA, 19 nt, Artificial Sequence
  Description of Artificial Sequence: Synthetic oligonucleotide
aaaaggucuaacauuguua

SEQ ID NO: 1967967 - RNA, 19 nt, Artificial Sequence
  Description of Artificial Sequence: Synthetic oligonucleotide
cuacuuugucuucugaaug

SEQ ID NO: 1967968 - RNA, 19 nt, Artificial Sequence
  Description of Artificial Sequence: Synthetic oligonucleotide
cuugcucagauccugccag

SEQ ID NO: 1967969 - RNA, 19 nt, Artificial Sequence
  Description of Artificial Sequence: Synthetic oligonucleotide
aagugagaccuugaacaac

SEQ ID NO: 1967970 - RNA, 19 nt, Artificial Sequence
  Description of Artificial Sequence: Synthetic oligonucleotide
uccauugccuaguagcugu

SEQ ID NO: 1967971 - RNA, 19 nt, Artificial Sequence
  Description of Artificial Sequence: Synthetic oligonucleotide
caaauaagaacagcaguac

SEQ ID NO: 1967972 - RNA, 19 nt, Artificial Sequence
  Description of Artificial Sequence: Synthetic oligonucleotide
uugauagaaugacuugagu

SEQ ID NO: 1967973 - RNA, 19 nt, Artificial Sequence
  Description of Artificial Sequence: Synthetic oligonucleotide
caugauuagcauacuuaag

SEQ ID NO: 1967974 - RNA, 19 nt, Artificial Sequence
  Description of Artificial Sequence: Synthetic oligonucleotide
uucauaggcuuuuaguuuu

SEQ ID NO: 1967975 - RNA, 19 nt, Artificial Sequence
  Description of Artificial Sequence: Synthetic oligonucleotide
uaaguggccccaaauuugu

SEQ ID NO: 1967976 - RNA, 19 nt, Artificial Sequence
  Description of Artificial Sequence: Synthetic oligonucleotide
uuuaagcaacauuucuaac

SEQ ID NO: 1967977 - RNA, 19 nt, Artificial Sequence
  Description of Artificial Sequence: Synthetic oligonucleotide
cuugccugauuucuucucg

SEQ ID NO: 1967978 - RNA, 19 nt, Artificial Sequence
  Description of Artificial Sequence: Synthetic oligonucleotide
acauaauuaaggacaucac

SEQ ID NO: 1967979 - RNA, 19 nt, Artificial Sequence
  Description of Artificial Sequence: Synthetic oligonucleotide
cuuccuggacaguaagugg

SEQ ID NO: 1967980 - RNA, 19 nt, Artificial Sequence
  Description of Artificial Sequence: Synthetic oligonucleotide
guaaagugagaccuugaac

SEQ ID NO: 1967981 - RNA, 19 nt, Artificial Sequence
  Description of Artificial Sequence: Synthetic oligonucleotide
uaagaguguuauauguguc

SEQ ID NO: 1967982 - RNA, 19 nt, Artificial Sequence
  Description of Artificial Sequence: Synthetic oligonucleotide
aguuuccuccaagagaauc

SEQ ID NO: 1967983 - RNA, 19 nt, Artificial Sequence
  Description of Artificial Sequence: Synthetic oligonucleotide
aaggaauaugcugauuccu

SEQ ID NO: 1967984 - RNA, 19 nt, Artificial Sequence
  Description of Artificial Sequence: Synthetic oligonucleotide
gacuuuugcaugauuagca

SEQ ID NO: 1967985 - RNA, 19 nt, Artificial Sequence
  Description of Artificial Sequence: Synthetic oligonucleotide
uaauauuuccucugaggau

SEQ ID NO: 1967986 - RNA, 19 nt, Artificial Sequence
  Description of Artificial Sequence: Synthetic oligonucleotide
ugugccuucuacaaaucau

SEQ ID NO: 1967987 - RNA, 19 nt, Artificial Sequence
  Description of Artificial Sequence: Synthetic oligonucleotide
gauugauucuuauuugugu

SEQ ID NO: 1967988 - RNA, 19 nt, Artificial Sequence
  Description of Artificial Sequence: Synthetic oligonucleotide
aggucaaugagugacauuu

SEQ ID NO: 1967989 - RNA, 19 nt, Artificial Sequence
  Description of Artificial Sequence: Synthetic oligonucleotide
auagaaugacuugaguuca

SEQ ID NO: 1967990 - RNA, 19 nt, Artificial Sequence
  Description of Artificial Sequence: Synthetic oligonucleotide
uauuuugauugauucuuau

SEQ ID NO: 1967991 - RNA, 19 nt, Artificial Sequence
  Description of Artificial Sequence: Synthetic oligonucleotide
ucuugaguguuugauguac

SEQ ID NO: 1967992 - RNA, 19 nt, Artificial Sequence
  Description of Artificial Sequence: Synthetic oligonucleotide
uugaguguuugauguacug

SEQ ID NO: 1967993 - RNA, 19 nt, Artificial Sequence
  Description of Artificial Sequence: Synthetic oligonucleotide
guugauagaaugacuugag

SEQ ID NO: 1967994 - RNA, 19 nt, Artificial Sequence
  Description of Artificial Sequence: Synthetic oligonucleotide
ugucagucaaggcuuucug

SEQ ID NO: 1967995 - RNA, 19 nt, Artificial Sequence
  Description of Artificial Sequence: Synthetic oligonucleotide
uaaagguuuaauugacuuu

SEQ ID NO: 1967996 - RNA, 19 nt, Artificial Sequence
  Description of Artificial Sequence: Synthetic oligonucleotide
aauaugcugauuccuucuu

SEQ ID NO: 1967997 - RNA, 19 nt, Artificial Sequence
  Description of Artificial Sequence: Synthetic oligonucleotide
ugagugacauuuuggcuac

SEQ ID NO: 1967998 - RNA, 19 nt, Artificial Sequence
  Description of Artificial Sequence: Synthetic oligonucleotide
uuugucuugaguguuugau

SEQ ID NO: 1967999 - RNA, 19 nt, Artificial Sequence
  Description of Artificial Sequence: Synthetic oligonucleotide
uguaaaggaauaugcugau

SEQ ID NO: 1968000 - RNA, 19 nt, Artificial Sequence
  Description of Artificial Sequence: Synthetic oligonucleotide
uucaauaagcgagcaagcu

SEQ ID NO: 1968001 - RNA, 19 nt, Artificial Sequence
  Description of Artificial Sequence: Synthetic oligonucleotide
aaauuugucaagaggucau

SEQ ID NO: 1968002 - RNA, 19 nt, Artificial Sequence
  Description of Artificial Sequence: Synthetic oligonucleotide
gaacaaccacuccuuuugg

SEQ ID NO: 1968003 - RNA, 19 nt, Artificial Sequence
  Description of Artificial Sequence: Synthetic oligonucleotide
ggacaucacucuuuaaagg

SEQ ID NO: 1968004 - RNA, 19 nt, Artificial Sequence
  Description of Artificial Sequence: Synthetic oligonucleotide
caugcauggcuuugaaaag

SEQ ID NO: 1968005 - RNA, 19 nt, Artificial Sequence
  Description of Artificial Sequence: Synthetic oligonucleotide
ucuauuuggugauggcacu

SEQ ID NO: 1968006 - RNA, 19 nt, Artificial Sequence
  Description of Artificial Sequence: Synthetic oligonucleotide
gugucaucagagaacaaag

SEQ ID NO: 1968007 - RNA, 19 nt, Artificial Sequence
  Description of Artificial Sequence: Synthetic oligonucleotide
gguuuaauugacuuuugca

SEQ ID NO: 1968008 - RNA, 19 nt, Artificial Sequence
  Description of Artificial Sequence: Synthetic oligonucleotide
uuagcaccagaaguucugg

SEQ ID NO: 1968009 - RNA, 19 nt, Artificial Sequence
  Description of Artificial Sequence: Synthetic oligonucleotide
ucucgacucuggaacaagc

SEQ ID NO: 1968010 - RNA, 19 nt, Artificial Sequence
  Description of Artificial Sequence: Synthetic oligonucleotide
cagaucuuuacauaauuaa

SEQ ID NO: 1968011 - RNA, 19 nt, Artificial Sequence
  Description of Artificial Sequence: Synthetic oligonucleotide
ucagucaaggcuuucuguu

SEQ ID NO: 1968012 - RNA, 19 nt, Artificial Sequence
  Description of Artificial Sequence: Synthetic oligonucleotide
gauguacugauuuuacacu

SEQ ID NO: 1968013 - RNA, 19 nt, Artificial Sequence
  Description of Artificial Sequence: Synthetic oligonucleotide
agaccuugaacaaccacuc

SEQ ID NO: 1968014 - RNA, 19 nt, Artificial Sequence
  Description of Artificial Sequence: Synthetic oligonucleotide
augcauggcuuugaaaagg

SEQ ID NO: 1968015 - RNA, 19 nt, Artificial Sequence
  Description of Artificial Sequence: Synthetic oligonucleotide
gaacagcaguacuacacac

SEQ ID NO: 1968016 - RNA, 19 nt, Artificial Sequence
  Description of Artificial Sequence: Synthetic oligonucleotide
aauuugucaagaggucaug

SEQ ID NO: 1968017 - RNA, 19 nt, Artificial Sequence
  Description of Artificial Sequence: Synthetic oligonucleotide
auauucuugccugauuucu

SEQ ID NO: 1968018 - RNA, 19 nt, Artificial Sequence
  Description of Artificial Sequence: Synthetic oligonucleotide
agucaaggcuuucuguucu

SEQ ID NO: 1968019 - RNA, 19 nt, Artificial Sequence
  Description of Artificial Sequence: Synthetic oligonucleotide
acaaaucaugucccuuuag

SEQ ID NO: 1968020 - RNA, 19 nt, Artificial Sequence
  Description of Artificial Sequence: Synthetic oligonucleotide
uggaacaagcauuuccgaa

SEQ ID NO: 1968021 - RNA, 19 nt, Artificial Sequence
  Description of Artificial Sequence: Synthetic oligonucleotide
uuugucaagaggucaugau

SEQ ID NO: 1968022 - RNA, 19 nt, Artificial Sequence
  Description of Artificial Sequence: Synthetic oligonucleotide
uguuuccauugccuaguag

SEQ ID NO: 1968023 - RNA, 19 nt, Artificial Sequence
  Description of Artificial Sequence: Synthetic oligonucleotide
ugccuucuacaaaucaugu

SEQ ID NO: 1968024 - RNA, 19 nt, Artificial Sequence
  Description of Artificial Sequence: Synthetic oligonucleotide
ugaguguuugauguacuga

SEQ ID NO: 1968025 - RNA, 19 nt, Artificial Sequence
  Description of Artificial Sequence: Synthetic oligonucleotide
uuacagaucuuuacauaau

SEQ ID NO: 1968026 - RNA, 19 nt, Artificial Sequence
  Description of Artificial Sequence: Synthetic oligonucleotide
uggcuacacagauauuuug

SEQ ID NO: 1968027 - RNA, 19 nt, Artificial Sequence
  Description of Artificial Sequence: Synthetic oligonucleotide
aaggcuuucuguucuucau

SEQ ID NO: 1968028 - RNA, 19 nt, Artificial Sequence
  Description of Artificial Sequence: Synthetic oligonucleotide
caucucuauuuggugaugg

SEQ ID NO: 1968029 - RNA, 19 nt, Artificial Sequence
  Description of Artificial Sequence: Synthetic oligonucleotide
ucccaagggcuaaacagga

SEQ ID NO: 1968030 - RNA, 19 nt, Artificial Sequence
  Description of Artificial Sequence: Synthetic oligonucleotide
uaugcugauuccuucuuuu

SEQ ID NO: 1968031 - RNA, 19 nt, Artificial Sequence
  Description of Artificial Sequence: Synthetic oligonucleotide
ugaaaaggucuaacauugu

SEQ ID NO: 1968032 - RNA, 19 nt, Artificial Sequence
  Description of Artificial Sequence: Synthetic oligonucleotide
guaaguggccccaaauuug

SEQ ID NO: 1968033 - RNA, 19 nt, Artificial Sequence
  Description of Artificial Sequence: Synthetic oligonucleotide
ucuaacagcagcugucauu

SEQ ID NO: 1968034 - RNA, 19 nt, Artificial Sequence
  Description of Artificial Sequence: Synthetic oligonucleotide
ucaugauucuguucauuau

SEQ ID NO: 1968035 - RNA, 19 nt, Artificial Sequence
  Description of Artificial Sequence: Synthetic oligonucleotide
acuguuguugauagaauga

SEQ ID NO: 1968036 - RNA, 19 nt, Artificial Sequence
  Description of Artificial Sequence: Synthetic oligonucleotide
ggaaugagaagauguagca

SEQ ID NO: 1968037 - RNA, 19 nt, Artificial Sequence
  Description of Artificial Sequence: Synthetic oligonucleotide
cuguuguugauagaaugac

SEQ ID NO: 1968038 - RNA, 19 nt, Artificial Sequence
  Description of Artificial Sequence: Synthetic oligonucleotide
gauuugggcugguguaaag

SEQ ID NO: 1968039 - RNA, 19 nt, Artificial Sequence
  Description of Artificial Sequence: Synthetic oligonucleotide
uuauuuguguugucacaaa

SEQ ID NO: 1968040 - RNA, 19 nt, Artificial Sequence
  Description of Artificial Sequence: Synthetic oligonucleotide
gacauuuuggcuacacaga

SEQ ID NO: 1968041 - RNA, 19 nt, Artificial Sequence
  Description of Artificial Sequence: Synthetic oligonucleotide
caugggaaugagaagaugu

SEQ ID NO: 1968042 - RNA, 19 nt, Artificial Sequence
  Description of Artificial Sequence: Synthetic oligonucleotide
gcuuaauauuucuguaaag

SEQ ID NO: 1968043 - RNA, 19 nt, Artificial Sequence
  Description of Artificial Sequence: Synthetic oligonucleotide
uucuacaaaucaugucccu

SEQ ID NO: 1968044 - RNA, 19 nt, Artificial Sequence
  Description of Artificial Sequence: Synthetic oligonucleotide
caaauuugucaagagguca

SEQ ID NO: 1968045 - RNA, 19 nt, Artificial Sequence
  Description of Artificial Sequence: Synthetic oligonucleotide
ucaugucccuuuagcacca

SEQ ID NO: 1968046 - RNA, 19 nt, Artificial Sequence
  Description of Artificial Sequence: Synthetic oligonucleotide
ugccuaguagcuguaauau

SEQ ID NO: 1968047 - RNA, 19 nt, Artificial Sequence
  Description of Artificial Sequence: Synthetic oligonucleotide
uacaaaucaugucccuuua

SEQ ID NO: 1968048 - RNA, 19 nt, Artificial Sequence
  Description of Artificial Sequence: Synthetic oligonucleotide
uauuaauauuugugccuuc

SEQ ID NO: 1968049 - RNA, 19 nt, Artificial Sequence
  Description of Artificial Sequence: Synthetic oligonucleotide
acuuuaagcaacauuucua

SEQ ID NO: 1968050 - RNA, 19 nt, Artificial Sequence
  Description of Artificial Sequence: Synthetic oligonucleotide
uugccuaguagcuguaaua

SEQ ID NO: 1968051 - RNA, 19 nt, Artificial Sequence
  Description of Artificial Sequence: Synthetic oligonucleotide
gggaaugagaagauguagc

SEQ ID NO: 1968052 - RNA, 19 nt, Artificial Sequence
  Description of Artificial Sequence: Synthetic oligonucleotide
gaauaugcugauuccuucu

SEQ ID NO: 1968053 - RNA, 19 nt, Artificial Sequence
  Description of Artificial Sequence: Synthetic oligonucleotide
cuggacaguaaguggcccc

SEQ ID NO: 1968054 - RNA, 19 nt, Artificial Sequence
  Description of Artificial Sequence: Synthetic oligonucleotide
gaguguuugauguacugau

SEQ ID NO: 1968055 - RNA, 19 nt, Artificial Sequence
  Description of Artificial Sequence: Synthetic oligonucleotide
ucaagaggucaugauucug

SEQ ID NO: 1968056 - RNA, 19 nt, Artificial Sequence
  Description of Artificial Sequence: Synthetic oligonucleotide
aagguuuaauugacuuuug

SEQ ID NO: 1968057 - RNA, 19 nt, Artificial Sequence
  Description of Artificial Sequence: Synthetic oligonucleotide
uugcaugauuagcauacuu

SEQ ID NO: 1968058 - RNA, 19 nt, Artificial Sequence
  Description of Artificial Sequence: Synthetic oligonucleotide
uugaacaaccacuccuuuu

SEQ ID NO: 1968059 - RNA, 19 nt, Artificial Sequence
  Description of Artificial Sequence: Synthetic oligonucleotide
ggcuaaacaggauuuauua

SEQ ID NO: 1968060 - RNA, 19 nt, Artificial Sequence
  Description of Artificial Sequence: Synthetic oligonucleotide
gugccuucuacaaaucaug

SEQ ID NO: 1968061 - RNA, 19 nt, Artificial Sequence
  Description of Artificial Sequence: Synthetic oligonucleotide
ugauuucuucucgacucug

SEQ ID NO: 1968062 - RNA, 19 nt, Artificial Sequence
  Description of Artificial Sequence: Synthetic oligonucleotide
cagcaugggaaugagaaga

SEQ ID NO: 1968063 - RNA, 19 nt, Artificial Sequence
  Description of Artificial Sequence: Synthetic oligonucleotide
gucagugggaugcuguguc

SEQ ID NO: 1968064 - RNA, 19 nt, Artificial Sequence
  Description of Artificial Sequence: Synthetic oligonucleotide
ucuacaaaucaugucccuu

SEQ ID NO: 1968065 - RNA, 19 nt, Artificial Sequence
  Description of Artificial Sequence: Synthetic oligonucleotide
ucagugggaugcugugucc

SEQ ID NO: 1968066 - RNA, 19 nt, Artificial Sequence
  Description of Artificial Sequence: Synthetic oligonucleotide
gcaugauuagcauacuuaa

SEQ ID NO: 1968067 - RNA, 19 nt, Artificial Sequence
  Description of Artificial Sequence: Synthetic oligonucleotide
cugucauuacaguuugaca

SEQ ID NO: 1968068 - RNA, 19 nt, Artificial Sequence
  Description of Artificial Sequence: Synthetic oligonucleotide
caagcuuaauauuucugua

SEQ ID NO: 1968069 - RNA, 19 nt, Artificial Sequence
  Description of Artificial Sequence: Synthetic oligonucleotide
gaaaaggucuaacauuguu

SEQ ID NO: 1968070 - RNA, 19 nt, Artificial Sequence
  Description of Artificial Sequence: Synthetic oligonucleotide
agaguguuauaugugucau

SEQ ID NO: 1968071 - RNA, 19 nt, Artificial Sequence
  Description of Artificial Sequence: Synthetic oligonucleotide
auuaaggacaucacucuuu

SEQ ID NO: 1968072 - RNA, 19 nt, Artificial Sequence
  Description of Artificial Sequence: Synthetic oligonucleotide
guguuauaugugucaucag

SEQ ID NO: 1968073 - RNA, 19 nt, Artificial Sequence
  Description of Artificial Sequence: Synthetic oligonucleotide
guuguugauagaaugacuu

SEQ ID NO: 1968074 - RNA, 19 nt, Artificial Sequence
  Description of Artificial Sequence: Synthetic oligonucleotide
gaccuugaacaaccacucc

SEQ ID NO: 1968075 - RNA, 19 nt, Artificial Sequence
  Description of Artificial Sequence: Synthetic oligonucleotide
ucauuacaguuugacaguu

SEQ ID NO: 1968076 - RNA, 19 nt, Artificial Sequence
  Description of Artificial Sequence: Synthetic oligonucleotide
uugucagucaaggcuuucu

SEQ ID NO: 1968077 - RNA, 19 nt, Artificial Sequence
  Description of Artificial Sequence: Synthetic oligonucleotide
cagcugucauuacaguuug

SEQ ID NO: 1968078 - RNA, 19 nt, Artificial Sequence
  Description of Artificial Sequence: Synthetic oligonucleotide
ggaauaugcugauuccuuc

SEQ ID NO: 1968079 - RNA, 19 nt, Artificial Sequence
  Description of Artificial Sequence: Synthetic oligonucleotide
aacaagcauuuccgaauuu

SEQ ID NO: 1968080 - RNA, 19 nt, Artificial Sequence
  Description of Artificial Sequence: Synthetic oligonucleotide
cauuacagaucuuuacaua

SEQ ID NO: 1968081 - RNA, 19 nt, Artificial Sequence
  Description of Artificial Sequence: Synthetic oligonucleotide
ccaaauaagaacagcagua

SEQ ID NO: 1968082 - RNA, 19 nt, Artificial Sequence
  Description of Artificial Sequence: Synthetic oligonucleotide
gguguaaagugagaccuug

SEQ ID NO: 1968083 - RNA, 19 nt, Artificial Sequence
  Description of Artificial Sequence: Synthetic oligonucleotide
acauucccaagggcuaaac

SEQ ID NO: 1968084 - RNA, 19 nt, Artificial Sequence
  Description of Artificial Sequence: Synthetic oligonucleotide
uuuugucagucaaggcuuu

SEQ ID NO: 1968085 - RNA, 19 nt, Artificial Sequence
  Description of Artificial Sequence: Synthetic oligonucleotide
cuauuuggugauggcacug

SEQ ID NO: 1968086 - RNA, 19 nt, Artificial Sequence
  Description of Artificial Sequence: Synthetic oligonucleotide
cagucaaggcuuucuguuc

SEQ ID NO: 1968087 - RNA, 19 nt, Artificial Sequence
  Description of Artificial Sequence: Synthetic oligonucleotide
acagaucuuuacauaauua

SEQ ID NO: 1968088 - RNA, 19 nt, Artificial Sequence
  Description of Artificial Sequence: Synthetic oligonucleotide
ugccugauuucuucucgac

SEQ ID NO: 1968089 - RNA, 19 nt, Artificial Sequence
  Description of Artificial Sequence: Synthetic oligonucleotide
gcaagcuuaauauuucugu

SEQ ID NO: 1968090 - RNA, 19 nt, Artificial Sequence
  Description of Artificial Sequence: Synthetic oligonucleotide
caccuccaaauaagaacag

SEQ ID NO: 1968091 - RNA, 19 nt, Artificial Sequence
  Description of Artificial Sequence: Synthetic oligonucleotide
gcauuuccgaauuucuuga

SEQ ID NO: 1968092 - RNA, 19 nt, Artificial Sequence
  Description of Artificial Sequence: Synthetic oligonucleotide
caagaggucaugauucugu

SEQ ID NO: 1968093 - RNA, 19 nt, Artificial Sequence
  Description of Artificial Sequence: Synthetic oligonucleotide
cagaaguucuggcuugcuc

SEQ ID NO: 1968094 - RNA, 19 nt, Artificial Sequence
  Description of Artificial Sequence: Synthetic oligonucleotide
guguugucacaaauaaauc

SEQ ID NO: 1968095 - RNA, 19 nt, Artificial Sequence
  Description of Artificial Sequence: Synthetic oligonucleotide
gagaagauguagcauucau

SEQ ID NO: 1968096 - RNA, 19 nt, Artificial Sequence
  Description of Artificial Sequence: Synthetic oligonucleotide
gcugucauuacaguuugac

SEQ ID NO: 1968097 - RNA, 19 nt, Artificial Sequence
  Description of Artificial Sequence: Synthetic oligonucleotide
ucaucucuauuuggugaug

SEQ ID NO: 1968098 - RNA, 19 nt, Artificial Sequence
  Description of Artificial Sequence: Synthetic oligonucleotide
cuuuugcaugauuagcaua

SEQ ID NO: 1968099 - RNA, 19 nt, Artificial Sequence
  Description of Artificial Sequence: Synthetic oligonucleotide
auuacagcaaguggccuuu

SEQ ID NO: 1968100 - RNA, 19 nt, Artificial Sequence
  Description of Artificial Sequence: Synthetic oligonucleotide
gcuaaacaggauuuauuaa

SEQ ID NO: 1968101 - RNA, 19 nt, Artificial Sequence
  Description of Artificial Sequence: Synthetic oligonucleotide
aaacagcaugggaaugaga

SEQ ID NO: 1968102 - RNA, 19 nt, Artificial Sequence
  Description of Artificial Sequence: Synthetic oligonucleotide
cucgacucuggaacaagca

SEQ ID NO: 1968103 - RNA, 19 nt, Artificial Sequence
  Description of Artificial Sequence: Synthetic oligonucleotide
agcgagcaagcuuaauauu

SEQ ID NO: 1968104 - RNA, 19 nt, Artificial Sequence
  Description of Artificial Sequence: Synthetic oligonucleotide
auggcuuugaaaaggucua

SEQ ID NO: 1968105 - RNA, 19 nt, Artificial Sequence
  Description of Artificial Sequence: Synthetic oligonucleotide
aaguggccccaaauuuguc

SEQ ID NO: 1968106 - RNA, 19 nt, Artificial Sequence
  Description of Artificial Sequence: Synthetic oligonucleotide
gacuugaguucauuuacuu

SEQ ID NO: 1968107 - RNA, 19 nt, Artificial Sequence
  Description of Artificial Sequence: Synthetic oligonucleotide
aggaauaugcugauuccuu

SEQ ID NO: 1968108 - RNA, 19 nt, Artificial Sequence
  Description of Artificial Sequence: Synthetic oligonucleotide
uuguaucugcuaaggcauu

SEQ ID NO: 1968109 - RNA, 19 nt, Artificial Sequence
  Description of Artificial Sequence: Synthetic oligonucleotide
ucaugucagugggaugcug

SEQ ID NO: 1968110 - RNA, 19 nt, Artificial Sequence
  Description of Artificial Sequence: Synthetic oligonucleotide
cuggaacaagcauuuccga

SEQ ID NO: 1968111 - RNA, 19 nt, Artificial Sequence
  Description of Artificial Sequence: Synthetic oligonucleotide
ggaacaagcauuuccgaau

SEQ ID NO: 1968112 - RNA, 19 nt, Artificial Sequence
  Description of Artificial Sequence: Synthetic oligonucleotide
cuucauaggcuuuuaguuu

SEQ ID NO: 1968113 - RNA, 19 nt, Artificial Sequence
  Description of Artificial Sequence: Synthetic oligonucleotide
auacaccuccaaauaagaa

SEQ ID NO: 1968114 - RNA, 19 nt, Artificial Sequence
  Description of Artificial Sequence: Synthetic oligonucleotide
cauucccaagggcuaaaca

SEQ ID NO: 1968115 - RNA, 19 nt, Artificial Sequence
  Description of Artificial Sequence: Synthetic oligonucleotide
aagggcuaaacaggauuua

SEQ ID NO: 1968116 - RNA, 19 nt, Artificial Sequence
  Description of Artificial Sequence: Synthetic oligonucleotide
agggcuaaacaggauuuau

SEQ ID NO: 1968117 - RNA, 19 nt, Artificial Sequence
  Description of Artificial Sequence: Synthetic oligonucleotide
acaucacucuuuaaagguu

SEQ ID NO: 1968118 - RNA, 19 nt, Artificial Sequence
  Description of Artificial Sequence: Synthetic oligonucleotide
ggaaaacagcaugggaaug

SEQ ID NO: 1968119 - RNA, 19 nt, Artificial Sequence
  Description of Artificial Sequence: Synthetic oligonucleotide
gaggaaggucuaacagcag

SEQ ID NO: 1968120 - RNA, 19 nt, Artificial Sequence
  Description of Artificial Sequence: Synthetic oligonucleotide
cuuuaggcucaugcauggc

SEQ ID NO: 1968121 - RNA, 19 nt, Artificial Sequence
  Description of Artificial Sequence: Synthetic oligonucleotide
ugcucagauccugccaggu

SEQ ID NO: 1968122 - RNA, 19 nt, Artificial Sequence
  Description of Artificial Sequence: Synthetic oligonucleotide
gaaugagaagauguagcau

SEQ ID NO: 1968123 - RNA, 19 nt, Artificial Sequence
  Description of Artificial Sequence: Synthetic oligonucleotide
ccucugaggauuugggcug

SEQ ID NO: 1968124 - RNA, 19 nt, Artificial Sequence
  Description of Artificial Sequence: Synthetic oligonucleotide
gacaguaaguggccccaaa

SEQ ID NO: 1968125 - RNA, 19 nt, Artificial Sequence
  Description of Artificial Sequence: Synthetic oligonucleotide
cuuugucuugaguguuuga

SEQ ID NO: 1968126 - RNA, 19 nt, Artificial Sequence
  Description of Artificial Sequence: Synthetic oligonucleotide
uuuuggcuacacagauauu

SEQ ID NO: 1968127 - RNA, 19 nt, Artificial Sequence
  Description of Artificial Sequence: Synthetic oligonucleotide
auccuucaauaagcgagca

SEQ ID NO: 1968128 - RNA, 19 nt, Artificial Sequence
  Description of Artificial Sequence: Synthetic oligonucleotide
uggcuuugaaaaggucuaa

SEQ ID NO: 1968129 - RNA, 19 nt, Artificial Sequence
  Description of Artificial Sequence: Synthetic oligonucleotide
gucagucaaggcuuucugu

SEQ ID NO: 1968130 - RNA, 19 nt, Artificial Sequence
  Description of Artificial Sequence: Synthetic oligonucleotide
cauuuccgaauuucuugaa

SEQ ID NO: 1968131 - RNA, 19 nt, Artificial Sequence
  Description of Artificial Sequence: Synthetic oligonucleotide
aaguucuggcuugcucaga

SEQ ID NO: 1968132 - RNA, 19 nt, Artificial Sequence
  Description of Artificial Sequence: Synthetic oligonucleotide
cuugaguguuugauguacu

SEQ ID NO: 1968133 - RNA, 19 nt, Artificial Sequence
  Description of Artificial Sequence: Synthetic oligonucleotide
cagcaaguggccuuuucua

SEQ ID NO: 1968134 - RNA, 19 nt, Artificial Sequence
  Description of Artificial Sequence: Synthetic oligonucleotide
ccaagagaauccuucaaua

SEQ ID NO: 1968135 - RNA, 19 nt, Artificial Sequence
  Description of Artificial Sequence: Synthetic oligonucleotide
caucacucuuuaaagguuu

SEQ ID NO: 1968136 - RNA, 19 nt, Artificial Sequence
  Description of Artificial Sequence: Synthetic oligonucleotide
ccuaguagcuguaauauuu

SEQ ID NO: 1968137 - RNA, 19 nt, Artificial Sequence
  Description of Artificial Sequence: Synthetic oligonucleotide
ggcuuugaaaaggucuaac

SEQ ID NO: 1968138 - RNA, 19 nt, Artificial Sequence
  Description of Artificial Sequence: Synthetic oligonucleotide
aggucaugauucuguucau

SEQ ID NO: 1968139 - RNA, 19 nt, Artificial Sequence
  Description of Artificial Sequence: Synthetic oligonucleotide
gacucuggaacaagcauuu

SEQ ID NO: 1968140 - RNA, 19 nt, Artificial Sequence
  Description of Artificial Sequence: Synthetic oligonucleotide
gccuucuacaaaucauguc

SEQ ID NO: 1968141 - RNA, 19 nt, Artificial Sequence
  Description of Artificial Sequence: Synthetic oligonucleotide
cgagcaagcuuaauauuuc

SEQ ID NO: 1968142 - RNA, 19 nt, Artificial Sequence
  Description of Artificial Sequence: Synthetic oligonucleotide
cuacacagauauuuugauu

SEQ ID NO: 1968143 - RNA, 19 nt, Artificial Sequence
  Description of Artificial Sequence: Synthetic oligonucleotide
ugggaugcuguguccuguu

SEQ ID NO: 1968144 - RNA, 19 nt, Artificial Sequence
  Description of Artificial Sequence: Synthetic oligonucleotide
uggcacuguuguugauaga

SEQ ID NO: 1968145 - RNA, 19 nt, Artificial Sequence
  Description of Artificial Sequence: Synthetic oligonucleotide
gcauacuuaagaguguuau

SEQ ID NO: 1968146 - RNA, 19 nt, Artificial Sequence
  Description of Artificial Sequence: Synthetic oligonucleotide
aucagagaacaaagaggaa

SEQ ID NO: 1968147 - RNA, 19 nt, Artificial Sequence
  Description of Artificial Sequence: Synthetic oligonucleotide
auaagcgagcaagcuuaau

SEQ ID NO: 1968148 - RNA, 19 nt, Artificial Sequence
  Description of Artificial Sequence: Synthetic oligonucleotide
gucuugaguguuugaugua

SEQ ID NO: 1968149 - RNA, 19 nt, Artificial Sequence
  Description of Artificial Sequence: Synthetic oligonucleotide
aucacucuuuaaagguuua

SEQ ID NO: 1968150 - RNA, 19 nt, Artificial Sequence
  Description of Artificial Sequence: Synthetic oligonucleotide
cugauuuuacacuguuguu

SEQ ID NO: 1968151 - RNA, 19 nt, Artificial Sequence
  Description of Artificial Sequence: Synthetic oligonucleotide
uggugauggcacuguuguu

SEQ ID NO: 1968152 - RNA, 19 nt, Artificial Sequence
  Description of Artificial Sequence: Synthetic oligonucleotide
cugaaugcuucaucucuau

SEQ ID NO: 1968153 - RNA, 19 nt, Artificial Sequence
  Description of Artificial Sequence: Synthetic oligonucleotide
ucugaggauuugggcuggu

SEQ ID NO: 1968154 - RNA, 19 nt, Artificial Sequence
  Description of Artificial Sequence: Synthetic oligonucleotide
ggcaucuuccuggacagua

SEQ ID NO: 1968155 - RNA, 19 nt, Artificial Sequence
  Description of Artificial Sequence: Synthetic oligonucleotide
gugagaccuugaacaacca

SEQ ID NO: 1968156 - RNA, 19 nt, Artificial Sequence
  Description of Artificial Sequence: Synthetic oligonucleotide
cuucucgacucuggaacaa

SEQ ID NO: 1968157 - RNA, 19 nt, Artificial Sequence
  Description of Artificial Sequence: Synthetic oligonucleotide
cuugaacaaccacuccuuu

SEQ ID NO: 1968158 - RNA, 19 nt, Artificial Sequence
  Description of Artificial Sequence: Synthetic oligonucleotide
caugucccuuuagcaccag

SEQ ID NO: 1968159 - RNA, 19 nt, Artificial Sequence
  Description of Artificial Sequence: Synthetic oligonucleotide
gcgagcaagcuuaauauuu

SEQ ID NO: 1968160 - RNA, 19 nt, Artificial Sequence
  Description of Artificial Sequence: Synthetic oligonucleotide
cauugccuaguagcuguaa

SEQ ID NO: 1968161 - RNA, 19 nt, Artificial Sequence
  Description of Artificial Sequence: Synthetic oligonucleotide
gccugauuucuucucgacu

SEQ ID NO: 1968162 - RNA, 19 nt, Artificial Sequence
  Description of Artificial Sequence: Synthetic oligonucleotide
ccgaauuucuugaagucuu

SEQ ID NO: 1968163 - RNA, 19 nt, Artificial Sequence
  Description of Artificial Sequence: Synthetic oligonucleotide
agcugucauuacaguuuga

SEQ ID NO: 1968164 - RNA, 19 nt, Artificial Sequence
  Description of Artificial Sequence: Synthetic oligonucleotide
uuacagcaaguggccuuuu

SEQ ID NO: 1968165 - RNA, 19 nt, Artificial Sequence
  Description of Artificial Sequence: Synthetic oligonucleotide
ggauuugggcugguguaaa

SEQ ID NO: 1968166 - RNA, 19 nt, Artificial Sequence
  Description of Artificial Sequence: Synthetic oligonucleotide
gucuaacagcagcugucau

SEQ ID NO: 1968167 - RNA, 19 nt, Artificial Sequence
  Description of Artificial Sequence: Synthetic oligonucleotide
cagugggaugcuguguccu

SEQ ID NO: 1968168 - RNA, 19 nt, Artificial Sequence
  Description of Artificial Sequence: Synthetic oligonucleotide
gucaaggcuuucuguucuu

SEQ ID NO: 1968169 - RNA, 19 nt, Artificial Sequence
  Description of Artificial Sequence: Synthetic oligonucleotide
gggcuaaacaggauuuauu

SEQ ID NO: 1968170 - RNA, 19 nt, Artificial Sequence
  Description of Artificial Sequence: Synthetic oligonucleotide
cagcaguacuacacacuuu

SEQ ID NO: 1968171 - RNA, 19 nt, Artificial Sequence
  Description of Artificial Sequence: Synthetic oligonucleotide
gccuaguagcuguaauauu

SEQ ID NO: 1968172 - RNA, 19 nt, Artificial Sequence
  Description of Artificial Sequence: Synthetic oligonucleotide
gcaguacuacacacuuucu

SEQ ID NO: 1968173 - RNA, 19 nt, Artificial Sequence
  Description of Artificial Sequence: Synthetic oligonucleotide
caguuuccuccaagagaau

SEQ ID NO: 1968174 - RNA, 19 nt, Artificial Sequence
  Description of Artificial Sequence: Synthetic oligonucleotide
cuaaggcauugaugacauu

SEQ ID NO: 1968175 - RNA, 19 nt, Artificial Sequence
  Description of Artificial Sequence: Synthetic oligonucleotide
ggucaaugagugacauuuu

SEQ ID NO: 1968176 - RNA, 19 nt, Artificial Sequence
  Description of Artificial Sequence: Synthetic oligonucleotide
cccaagggcuaaacaggau

SEQ ID NO: 1968177 - RNA, 19 nt, Artificial Sequence
  Description of Artificial Sequence: Synthetic oligonucleotide
gggcaucuuccuggacagu

SEQ ID NO: 1968178 - RNA, 19 nt, Artificial Sequence
  Description of Artificial Sequence: Synthetic oligonucleotide
aaaacaaggaaggucaagg

SEQ ID NO: 1968179 - RNA, 19 nt, Artificial Sequence
  Description of Artificial Sequence: Synthetic oligonucleotide
uuuauaacugguuacacgu

SEQ ID NO: 1968180 - RNA, 19 nt, Artificial Sequence
  Description of Artificial Sequence: Synthetic oligonucleotide
auagaagcuauccugacuc

SEQ ID NO: 1968181 - RNA, 19 nt, Artificial Sequence
  Description of Artificial Sequence: Synthetic oligonucleotide
aauacucugcgagagagac

SEQ ID NO: 1968182 - RNA, 19 nt, Artificial Sequence
  Description of Artificial Sequence: Synthetic oligonucleotide
ucauaauuaggcaucacca

SEQ ID NO: 1968183 - RNA, 19 nt, Artificial Sequence
  Description of Artificial Sequence: Synthetic oligonucleotide
uguacugagauaaaaucug

SEQ ID NO: 1968184 - RNA, 19 nt, Artificial Sequence
  Description of Artificial Sequence: Synthetic oligonucleotide
uuuucuuaaauacaguaau

SEQ ID NO: 1968185 - RNA, 19 nt, Artificial Sequence
  Description of Artificial Sequence: Synthetic oligonucleotide
uguuuugaagaugaguucg

SEQ ID NO: 1968186 - RNA, 19 nt, Artificial Sequence
  Description of Artificial Sequence: Synthetic oligonucleotide
uucauaauuaggcaucacc

SEQ ID NO: 1968187 - RNA, 19 nt, Artificial Sequence
  Description of Artificial Sequence: Synthetic oligonucleotide
ugaagugaggacucgauag

SEQ ID NO: 1968188 - RNA, 19 nt, Artificial Sequence
  Description of Artificial Sequence: Synthetic oligonucleotide
aaugaucacguccgcauac

SEQ ID NO: 1968189 - RNA, 19 nt, Artificial Sequence
  Description of Artificial Sequence: Synthetic oligonucleotide
ucuaggaaugaucacgucc

SEQ ID NO: 1968190 - RNA, 19 nt, Artificial Sequence
  Description of Artificial Sequence: Synthetic oligonucleotide
auuuauaacugguuacacg

SEQ ID NO: 1968191 - RNA, 19 nt, Artificial Sequence
  Description of Artificial Sequence: Synthetic oligonucleotide
ucaaagagcaccacauccg

SEQ ID NO: 1968192 - RNA, 19 nt, Artificial Sequence
  Description of Artificial Sequence: Synthetic oligonucleotide
cuaggaaugaucacguccg

SEQ ID NO: 1968193 - RNA, 19 nt, Artificial Sequence
  Description of Artificial Sequence: Synthetic oligonucleotide
aguaauuuucacaggaggc

SEQ ID NO: 1968194 - RNA, 19 nt, Artificial Sequence
  Description of Artificial Sequence: Synthetic oligonucleotide
acugagauaaaaucugcuc

SEQ ID NO: 1968195 - RNA, 19 nt, Artificial Sequence
  Description of Artificial Sequence: Synthetic oligonucleotide
uguauuuauaacugguuac

SEQ ID NO: 1968196 - RNA, 19 nt, Artificial Sequence
  Description of Artificial Sequence: Synthetic oligonucleotide
acgaucuuggcacaaacgg

SEQ ID NO: 1968197 - RNA, 19 nt, Artificial Sequence
  Description of Artificial Sequence: Synthetic oligonucleotide
aagagcaccacauccgcgg

SEQ ID NO: 1968198 - RNA, 19 nt, Artificial Sequence
  Description of Artificial Sequence: Synthetic oligonucleotide
gauguacugagauaaaauc

SEQ ID NO: 1968199 - RNA, 19 nt, Artificial Sequence
  Description of Artificial Sequence: Synthetic oligonucleotide
guuggauucauaauuaggc

SEQ ID NO: 1968200 - RNA, 19 nt, Artificial Sequence
  Description of Artificial Sequence: Synthetic oligonucleotide
uaguaguuggcacaguuug

SEQ ID NO: 1968201 - RNA, 19 nt, Artificial Sequence
  Description of Artificial Sequence: Synthetic oligonucleotide
uauaacugguuacacguug

SEQ ID NO: 1968202 - RNA, 19 nt, Artificial Sequence
  Description of Artificial Sequence: Synthetic oligonucleotide
uguguguauuuauaacugg

SEQ ID NO: 1968203 - RNA, 19 nt, Artificial Sequence
  Description of Artificial Sequence: Synthetic oligonucleotide
gaugaguucguugucaaag

SEQ ID NO: 1968204 - RNA, 19 nt, Artificial Sequence
  Description of Artificial Sequence: Synthetic oligonucleotide
acgaaugugauguacugag

SEQ ID NO: 1968205 - RNA, 19 nt, Artificial Sequence
  Description of Artificial Sequence: Synthetic oligonucleotide
ucggugauuucuuugagug

SEQ ID NO: 1968206 - RNA, 19 nt, Artificial Sequence
  Description of Artificial Sequence: Synthetic oligonucleotide
aaggcauuucaucuccgcg

SEQ ID NO: 1968207 - RNA, 19 nt, Artificial Sequence
  Description of Artificial Sequence: Synthetic oligonucleotide
uuuguugguaagcagaauu

SEQ ID NO: 1968208 - RNA, 19 nt, Artificial Sequence
  Description of Artificial Sequence: Synthetic oligonucleotide
aacaaggaaggucaaggca

SEQ ID NO: 1968209 - RNA, 19 nt, Artificial Sequence
  Description of Artificial Sequence: Synthetic oligonucleotide
acaaacggaagacuugccg

SEQ ID NO: 1968210 - RNA, 19 nt, Artificial Sequence
  Description of Artificial Sequence: Synthetic oligonucleotide
aggcauuucaucuccgcgc

SEQ ID NO: 1968211 - RNA, 19 nt, Artificial Sequence
  Description of Artificial Sequence: Synthetic oligonucleotide
auugagauagccauugguc

SEQ ID NO: 1968212 - RNA, 19 nt, Artificial Sequence
  Description of Artificial Sequence: Synthetic oligonucleotide
ugucccucaauacucugcg

SEQ ID NO: 1968213 - RNA, 19 nt, Artificial Sequence
  Description of Artificial Sequence: Synthetic oligonucleotide
guaauuuucacaggaggcg

SEQ ID NO: 1968214 - RNA, 19 nt, Artificial Sequence
  Description of Artificial Sequence: Synthetic oligonucleotide
gaagacuugccgcuggccg

SEQ ID NO: 1968215 - RNA, 19 nt, Artificial Sequence
  Description of Artificial Sequence: Synthetic oligonucleotide
caguaauuuucacaggagg

SEQ ID NO: 1968216 - RNA, 19 nt, Artificial Sequence
  Description of Artificial Sequence: Synthetic oligonucleotide
auaauuaggcaucaccagu

SEQ ID NO: 1968217 - RNA, 19 nt, Artificial Sequence
  Description of Artificial Sequence: Synthetic oligonucleotide
uugauuugcuguuccaaag

SEQ ID NO: 1968218 - RNA, 19 nt, Artificial Sequence
  Description of Artificial Sequence: Synthetic oligonucleotide
caguuugucacuuaagcuc

SEQ ID NO: 1968219 - RNA, 19 nt, Artificial Sequence
  Description of Artificial Sequence: Synthetic oligonucleotide
cauaauuaggcaucaccag

SEQ ID NO: 1968220 - RNA, 19 nt, Artificial Sequence
  Description of Artificial Sequence: Synthetic oligonucleotide
uugagauagccauuggucu

SEQ ID NO: 1968221 - RNA, 19 nt, Artificial Sequence
  Description of Artificial Sequence: Synthetic oligonucleotide
cucgauagaagcuauccug

SEQ ID NO: 1968222 - RNA, 19 nt, Artificial Sequence
  Description of Artificial Sequence: Synthetic oligonucleotide
gguguagccauugagauag

SEQ ID NO: 1968223 - RNA, 19 nt, Artificial Sequence
  Description of Artificial Sequence: Synthetic oligonucleotide
ucccucaauacucugcgag

SEQ ID NO: 1968224 - RNA, 19 nt, Artificial Sequence
  Description of Artificial Sequence: Synthetic oligonucleotide
ugaacuggcccuuuagggc

SEQ ID NO: 1968225 - RNA, 19 nt, Artificial Sequence
  Description of Artificial Sequence: Synthetic oligonucleotide
auuucuuugaguguuuuga

SEQ ID NO: 1968226 - RNA, 19 nt, Artificial Sequence
  Description of Artificial Sequence: Synthetic oligonucleotide
auugucugcaccucuagga

SEQ ID NO: 1968227 - RNA, 19 nt, Artificial Sequence
  Description of Artificial Sequence: Synthetic oligonucleotide
cacgaaaagcuucaucugg

SEQ ID NO: 1968228 - RNA, 19 nt, Artificial Sequence
  Description of Artificial Sequence: Synthetic oligonucleotide
ugagauaaaaucugcucaa

SEQ ID NO: 1968229 - RNA, 19 nt, Artificial Sequence
  Description of Artificial Sequence: Synthetic oligonucleotide
aguuugucacuuaagcucg

SEQ ID NO: 1968230 - RNA, 19 nt, Artificial Sequence
  Description of Artificial Sequence: Synthetic oligonucleotide
ucgauagaagcuauccuga

SEQ ID NO: 1968231 - RNA, 19 nt, Artificial Sequence
  Description of Artificial Sequence: Synthetic oligonucleotide
aggaaaacaaggaagguca

SEQ ID NO: 1968232 - RNA, 19 nt, Artificial Sequence
  Description of Artificial Sequence: Synthetic oligonucleotide
uacucugcgagagagacga

SEQ ID NO: 1968233 - RNA, 19 nt, Artificial Sequence
  Description of Artificial Sequence: Synthetic oligonucleotide
ugaccaaagccucucgacc

SEQ ID NO: 1968234 - RNA, 19 nt, Artificial Sequence
  Description of Artificial Sequence: Synthetic oligonucleotide
uuacacguuggauucauaa

SEQ ID NO: 1968235 - RNA, 19 nt, Artificial Sequence
  Description of Artificial Sequence: Synthetic oligonucleotide
acauccgcgggguagacag

SEQ ID NO: 1968236 - RNA, 19 nt, Artificial Sequence
  Description of Artificial Sequence: Synthetic oligonucleotide
ucugcgagagagacgagug

SEQ ID NO: 1968237 - RNA, 19 nt, Artificial Sequence
  Description of Artificial Sequence: Synthetic oligonucleotide
ugucacuuaagcucggggu

SEQ ID NO: 1968238 - RNA, 19 nt, Artificial Sequence
  Description of Artificial Sequence: Synthetic oligonucleotide
uaauuaggcaucaccagua

SEQ ID NO: 1968239 - RNA, 19 nt, Artificial Sequence
  Description of Artificial Sequence: Synthetic oligonucleotide
aagucauacacagguaucu

SEQ ID NO: 1968240 - RNA, 19 nt, Artificial Sequence
  Description of Artificial Sequence: Synthetic oligonucleotide
uggauaugcugcacgauga

SEQ ID NO: 1968241 - RNA, 19 nt, Artificial Sequence
  Description of Artificial Sequence: Synthetic oligonucleotide
aagggguguagccauugag

SEQ ID NO: 1968242 - RNA, 19 nt, Artificial Sequence
  Description of Artificial Sequence: Synthetic oligonucleotide
uugucacuuaagcucgggg

SEQ ID NO: 1968243 - RNA, 19 nt, Artificial Sequence
  Description of Artificial Sequence: Synthetic oligonucleotide
accucuaggaaugaucacg

SEQ ID NO: 1968244 - RNA, 19 nt, Artificial Sequence
  Description of Artificial Sequence: Synthetic oligonucleotide
aaacggaagacuugccgcu

SEQ ID NO: 1968245 - RNA, 19 nt, Artificial Sequence
  Description of Artificial Sequence: Synthetic oligonucleotide
ugauuugcuguuccaaagu

SEQ ID NO: 1968246 - RNA, 19 nt, Artificial Sequence
  Description of Artificial Sequence: Synthetic oligonucleotide
uccugacucaggaugacca

SEQ ID NO: 1968247 - RNA, 19 nt, Artificial Sequence
  Description of Artificial Sequence: Synthetic oligonucleotide
uugaggauguccuggauau

SEQ ID NO: 1968248 - RNA, 19 nt, Artificial Sequence
  Description of Artificial Sequence: Synthetic oligonucleotide
ugagauagccauuggucug

SEQ ID NO: 1968249 - RNA, 19 nt, Artificial Sequence
  Description of Artificial Sequence: Synthetic oligonucleotide
uuguugguaagcagaauuc

SEQ ID NO: 1968250 - RNA, 19 nt, Artificial Sequence
  Description of Artificial Sequence: Synthetic oligonucleotide
gaggcguauguacagauga

SEQ ID NO: 1968251 - RNA, 19 nt, Artificial Sequence
  Description of Artificial Sequence: Synthetic oligonucleotide
uugguaagcagaauuccuc

SEQ ID NO: 1968252 - RNA, 19 nt, Artificial Sequence
  Description of Artificial Sequence: Synthetic oligonucleotide
uguugguaagcagaauucc

SEQ ID NO: 1968253 - RNA, 19 nt, Artificial Sequence
  Description of Artificial Sequence: Synthetic oligonucleotide
uccgcauacuucuuuguug

SEQ ID NO: 1968254 - RNA, 19 nt, Artificial Sequence
  Description of Artificial Sequence: Synthetic oligonucleotide
aaugugauguacugagaua

SEQ ID NO: 1968255 - RNA, 19 nt, Artificial Sequence
  Description of Artificial Sequence: Synthetic oligonucleotide
uuucacaggaggcguaugu

SEQ ID NO: 1968256 - RNA, 19 nt, Artificial Sequence
  Description of Artificial Sequence: Synthetic oligonucleotide
uauuuauaacugguuacac

SEQ ID NO: 1968257 - RNA, 19 nt, Artificial Sequence
  Description of Artificial Sequence: Synthetic oligonucleotide
agagacgagugucugcauc

SEQ ID NO: 1968258 - RNA, 19 nt, Artificial Sequence
  Description of Artificial Sequence: Synthetic oligonucleotide
ugguaagcagaauuccuca

SEQ ID NO: 1968259 - RNA, 19 nt, Artificial Sequence
  Description of Artificial Sequence: Synthetic oligonucleotide
cucauucugccccaggagc

SEQ ID NO: 1968260 - RNA, 19 nt, Artificial Sequence
  Description of Artificial Sequence: Synthetic oligonucleotide
auacacagguaucuggacu

SEQ ID NO: 1968261 - RNA, 19 nt, Artificial Sequence
  Description of Artificial Sequence: Synthetic oligonucleotide
ucacgaaugugauguacug

SEQ ID NO: 1968262 - RNA, 19 nt, Artificial Sequence
  Description of Artificial Sequence: Synthetic oligonucleotide
uacagaugaccaaagccuc

SEQ ID NO: 1968263 - RNA, 19 nt, Artificial Sequence
  Description of Artificial Sequence: Synthetic oligonucleotide
augugauguacugagauaa

SEQ ID NO: 1968264 - RNA, 19 nt, Artificial Sequence
  Description of Artificial Sequence: Synthetic oligonucleotide
gaagcuauccugacucagg

SEQ ID NO: 1968265 - RNA, 19 nt, Artificial Sequence
  Description of Artificial Sequence: Synthetic oligonucleotide
cugguuacacguuggauuc

SEQ ID NO: 1968266 - RNA, 19 nt, Artificial Sequence
  Description of Artificial Sequence: Synthetic oligonucleotide
ucuuggcacaaacggaaga

SEQ ID NO: 1968267 - RNA, 19 nt, Artificial Sequence
  Description of Artificial Sequence: Synthetic oligonucleotide
gaugccugccucuugcgug

SEQ ID NO: 1968268 - RNA, 19 nt, Artificial Sequence
  Description of Artificial Sequence: Synthetic oligonucleotide
uaauuuucacaggaggcgu

SEQ ID NO: 1968269 - RNA, 19 nt, Artificial Sequence
  Description of Artificial Sequence: Synthetic oligonucleotide
ucaucuggaacaggucucg

SEQ ID NO: 1968270 - RNA, 19 nt, Artificial Sequence
  Description of Artificial Sequence: Synthetic oligonucleotide
  modified_base (6)..(6): a, c, u, g, unknown or other
  modified_base (10)..(10): a, c, u, g, unknown or other
cucgcngccngugcgagcg

SEQ ID NO: 1968271 - RNA, 19 nt, Artificial Sequence
  Description of Artificial Sequence: Synthetic oligonucleotide
aagaugaguucguugucaa

SEQ ID NO: 1968272 - RNA, 19 nt, Artificial Sequence
  Description of Artificial Sequence: Synthetic oligonucleotide
cucacgccgaucaggaagg

SEQ ID NO: 1968273 - RNA, 19 nt, Artificial Sequence
  Description of Artificial Sequence: Synthetic oligonucleotide
aguagaaagccaggauccc

SEQ ID NO: 1968274 - RNA, 19 nt, Artificial Sequence
  Description of Artificial Sequence: Synthetic oligonucleotide
auaugcugcacgaugaggu

SEQ ID NO: 1968275 - RNA, 19 nt, Artificial Sequence
  Description of Artificial Sequence: Synthetic oligonucleotide
gaaaacaaggaaggucaag

SEQ ID NO: 1968276 - RNA, 19 nt, Artificial Sequence
  Description of Artificial Sequence: Synthetic oligonucleotide
gcuauccugacucaggaug

SEQ ID NO: 1968277 - RNA, 19 nt, Artificial Sequence
  Description of Artificial Sequence: Synthetic oligonucleotide
cacgaucuuggcacaaacg

SEQ ID NO: 1968278 - RNA, 19 nt, Artificial Sequence
  Description of Artificial Sequence: Synthetic oligonucleotide
cuggauaugcugcacgaug

SEQ ID NO: 1968279 - RNA, 19 nt, Artificial Sequence
  Description of Artificial Sequence: Synthetic oligonucleotide
auaacugguuacacguugg

SEQ ID NO: 1968280 - RNA, 19 nt, Artificial Sequence
  Description of Artificial Sequence: Synthetic oligonucleotide
ugcaccucuaggaaugauc

SEQ ID NO: 1968281 - RNA, 19 nt, Artificial Sequence
  Description of Artificial Sequence: Synthetic oligonucleotide
uaagcucggggucaaguuc

SEQ ID NO: 1968282 - RNA, 19 nt, Artificial Sequence
  Description of Artificial Sequence: Synthetic oligonucleotide
aaagagcaccacauccgcg

SEQ ID NO: 1968283 - RNA, 19 nt, Artificial Sequence
  Description of Artificial Sequence: Synthetic oligonucleotide
uggacuguuuuccuucggu

SEQ ID NO: 1968284 - RNA, 19 nt, Artificial Sequence
  Description of Artificial Sequence: Synthetic oligonucleotide
acguuggauucauaauuag

SEQ ID NO: 1968285 - RNA, 19 nt, Artificial Sequence
  Description of Artificial Sequence: Synthetic oligonucleotide
aucaccaguaguaguuggc

SEQ ID NO: 1968286 - RNA, 19 nt, Artificial Sequence
  Description of Artificial Sequence: Synthetic oligonucleotide
aaggucccugccucuuucg

SEQ ID NO: 1968287 - RNA, 19 nt, Artificial Sequence
  Description of Artificial Sequence: Synthetic oligonucleotide
cauacuucuuuguugguaa

SEQ ID NO: 1968288 - RNA, 19 nt, Artificial Sequence
  Description of Artificial Sequence: Synthetic oligonucleotide
uucaucuccgcgcuguuuu

SEQ ID NO: 1968289 - RNA, 19 nt, Artificial Sequence
  Description of Artificial Sequence: Synthetic oligonucleotide
gggauuuggagucagggca

SEQ ID NO: 1968290 - RNA, 19 nt, Artificial Sequence
  Description of Artificial Sequence: Synthetic oligonucleotide
agauugucugcaccucuag

SEQ ID NO: 1968291 - RNA, 19 nt, Artificial Sequence
  Description of Artificial Sequence: Synthetic oligonucleotide
uucggugauuucuuugagu

SEQ ID NO: 1968292 - RNA, 19 nt, Artificial Sequence
  Description of Artificial Sequence: Synthetic oligonucleotide
uaacugguuacacguugga

SEQ ID NO: 1968293 - RNA, 19 nt, Artificial Sequence
  Description of Artificial Sequence: Synthetic oligonucleotide
caaguucuguuugauuugc

SEQ ID NO: 1968294 - RNA, 19 nt, Artificial Sequence
  Description of Artificial Sequence: Synthetic oligonucleotide
agguaucuggacuguuuuc

SEQ ID NO: 1968295 - RNA, 19 nt, Artificial Sequence
  Description of Artificial Sequence: Synthetic oligonucleotide
gaagugaggacucgauaga

SEQ ID NO: 1968296 - RNA, 19 nt, Artificial Sequence
  Description of Artificial Sequence: Synthetic oligonucleotide
ugcgugaagggguguagcc

SEQ ID NO: 1968297 - RNA, 19 nt, Artificial Sequence
  Description of Artificial Sequence: Synthetic oligonucleotide
gauucauaauuaggcauca

SEQ ID NO: 1968298 - RNA, 19 nt, Artificial Sequence
  Description of Artificial Sequence: Synthetic oligonucleotide
gaucuuggcacaaacggaa

SEQ ID NO: 1968299 - RNA, 19 nt, Artificial Sequence
  Description of Artificial Sequence: Synthetic oligonucleotide
gauuugcuguuccaaagua

SEQ ID NO: 1968300 - RNA, 19 nt, Artificial Sequence
  Description of Artificial Sequence: Synthetic oligonucleotide
agccaggaucccuucaaag

SEQ ID NO: 1968301 - RNA, 19 nt, Artificial Sequence
  Description of Artificial Sequence: Synthetic oligonucleotide
caaggcauuucaucuccgc

SEQ ID NO: 1968302 - RNA, 19 nt, Artificial Sequence
  Description of Artificial Sequence: Synthetic oligonucleotide
ucaccaguaguaguuggca

SEQ ID NO: 1968303 - RNA, 19 nt, Artificial Sequence
  Description of Artificial Sequence: Synthetic oligonucleotide
gucaaguucuguuugauuu

SEQ ID NO: 1968304 - RNA, 19 nt, Artificial Sequence
  Description of Artificial Sequence: Synthetic oligonucleotide
gugggagacaaagucauac

SEQ ID NO: 1968305 - RNA, 19 nt, Artificial Sequence
  Description of Artificial Sequence: Synthetic oligonucleotide
ucgcugaugucccucaaua

SEQ ID NO: 1968306 - RNA, 19 nt, Artificial Sequence
  Description of Artificial Sequence: Synthetic oligonucleotide
gagauagccauuggucugc

SEQ ID NO: 1968307 - RNA, 19 nt, Artificial Sequence
  Description of Artificial Sequence: Synthetic oligonucleotide
gucacuuaagcucgggguc

SEQ ID NO: 1968308 - RNA, 19 nt, Artificial Sequence
  Description of Artificial Sequence: Synthetic oligonucleotide
uuauaacugguuacacguu

SEQ ID NO: 1968309 - RNA, 19 nt, Artificial Sequence
  Description of Artificial Sequence: Synthetic oligonucleotide
uggcacaaacggaagacuu

SEQ ID NO: 1968310 - RNA, 19 nt, Artificial Sequence
  Description of Artificial Sequence: Synthetic oligonucleotide
uuuccuucggugauuucuu

SEQ ID NO: 1968311 - RNA, 19 nt, Artificial Sequence
  Description of Artificial Sequence: Synthetic oligonucleotide
gauuuggagucagggcacg

SEQ ID NO: 1968312 - RNA, 19 nt, Artificial Sequence
  Description of Artificial Sequence: Synthetic oligonucleotide
guacagaugaccaaagccu

SEQ ID NO: 1968313 - RNA, 19 nt, Artificial Sequence
  Description of Artificial Sequence: Synthetic oligonucleotide
caauguggccggcugcugg

SEQ ID NO: 1968314 - RNA, 19 nt, Artificial Sequence
  Description of Artificial Sequence: Synthetic oligonucleotide
agaagcuauccugacucag

SEQ ID NO: 1968315 - RNA, 19 nt, Artificial Sequence
  Description of Artificial Sequence: Synthetic oligonucleotide
ugggaguagaaagccagga

SEQ ID NO: 1968316 - RNA, 19 nt, Artificial Sequence
  Description of Artificial Sequence: Synthetic oligonucleotide
gagagagacgagugucugc

SEQ ID NO: 1968317 - RNA, 19 nt, Artificial Sequence
  Description of Artificial Sequence: Synthetic oligonucleotide
ucacuuaagcucgggguca

SEQ ID NO: 1968318 - RNA, 19 nt, Artificial Sequence
  Description of Artificial Sequence: Synthetic oligonucleotide
guagacagugaccgucucc

SEQ ID NO: 1968319 - RNA, 19 nt, Artificial Sequence
  Description of Artificial Sequence: Synthetic oligonucleotide
aagugaggacucgauagaa

SEQ ID NO: 1968320 - RNA, 19 nt, Artificial Sequence
  Description of Artificial Sequence: Synthetic oligonucleotide
cugggaguagaaagccagg

SEQ ID NO: 1968321 - RNA, 19 nt, Artificial Sequence
  Description of Artificial Sequence: Synthetic oligonucleotide
gauagaagcuauccugacu

SEQ ID NO: 1968322 - RNA, 19 nt, Artificial Sequence
  Description of Artificial Sequence: Synthetic oligonucleotide
ugaccgucuccuccuuccg

SEQ ID NO: 1968323 - RNA, 19 nt, Artificial Sequence
  Description of Artificial Sequence: Synthetic oligonucleotide
ugcuguuccaaaguacaaa

SEQ ID NO: 1968324 - RNA, 19 nt, Artificial Sequence
  Description of Artificial Sequence: Synthetic oligonucleotide
ccgcauacuucuuuguugg

SEQ ID NO: 1968325 - RNA, 19 nt, Artificial Sequence
  Description of Artificial Sequence: Synthetic oligonucleotide
uaggaaugaucacguccgc

SEQ ID NO: 1968326 - RNA, 19 nt, Artificial Sequence
  Description of Artificial Sequence: Synthetic oligonucleotide
aggaaggucaaggcauuuc

SEQ ID NO: 1968327 - RNA, 19 nt, Artificial Sequence
  Description of Artificial Sequence: Synthetic oligonucleotide
caggaugaccaccugcuuc

SEQ ID NO: 1968328 - RNA, 19 nt, Artificial Sequence
  Description of Artificial Sequence: Synthetic oligonucleotide
ugcgagagagacgaguguc

SEQ ID NO: 1968329 - RNA, 19 nt, Artificial Sequence
  Description of Artificial Sequence: Synthetic oligonucleotide
aagcucggggucaaguucu

SEQ ID NO: 1968330 - RNA, 19 nt, Artificial Sequence
  Description of Artificial Sequence: Synthetic oligonucleotide
gugaccgucuccuccuucc

SEQ ID NO: 1968331 - RNA, 19 nt, Artificial Sequence
  Description of Artificial Sequence: Synthetic oligonucleotide
ugaugccugccucuugcgu

SEQ ID NO: 1968332 - RNA, 19 nt, Artificial Sequence
  Description of Artificial Sequence: Synthetic oligonucleotide
gcucacgccgaucaggaag

SEQ ID NO: 1968333 - RNA, 19 nt, Artificial Sequence
  Description of Artificial Sequence: Synthetic oligonucleotide
guaguuggcacaguuuguc

SEQ ID NO: 1968334 - RNA, 19 nt, Artificial Sequence
  Description of Artificial Sequence: Synthetic oligonucleotide
cuucggugauuucuuugag

SEQ ID NO: 1968335 - RNA, 19 nt, Artificial Sequence
  Description of Artificial Sequence: Synthetic oligonucleotide
agccucucgacccuccugu

SEQ ID NO: 1968336 - RNA, 19 nt, Artificial Sequence
  Description of Artificial Sequence: Synthetic oligonucleotide
gccucuuucgcugaugucc

SEQ ID NO: 1968337 - RNA, 19 nt, Artificial Sequence
  Description of Artificial Sequence: Synthetic oligonucleotide
aaagccucucgacccuccu

SEQ ID NO: 1968338 - RNA, 19 nt, Artificial Sequence
  Description of Artificial Sequence: Synthetic oligonucleotide
cacaaacggaagacuugcc

SEQ ID NO: 1968339 - RNA, 19 nt, Artificial Sequence
  Description of Artificial Sequence: Synthetic oligonucleotide
agugaggacucgauagaag

SEQ ID NO: 1968340 - RNA, 19 nt, Artificial Sequence
  Description of Artificial Sequence: Synthetic oligonucleotide
ggauucauaauuaggcauc

SEQ ID NO: 1968341 - RNA, 19 nt, Artificial Sequence
  Description of Artificial Sequence: Synthetic oligonucleotide
agcgacgcacgcucccgcc

SEQ ID NO: 1968342 - RNA, 19 nt, Artificial Sequence
  Description of Artificial Sequence: Synthetic oligonucleotide
cguuggauucauaauuagg

SEQ ID NO: 1968343 - RNA, 19 nt, Artificial Sequence
  Description of Artificial Sequence: Synthetic oligonucleotide
uuggcacaaacggaagacu

SEQ ID NO: 1968344 - RNA, 19 nt, Artificial Sequence
  Description of Artificial Sequence: Synthetic oligonucleotide
gcgggguagacagugaccg

SEQ ID NO: 1968345 - RNA, 19 nt, Artificial Sequence
  Description of Artificial Sequence: Synthetic oligonucleotide
guagccauugagauagcca

SEQ ID NO: 1968346 - RNA, 19 nt, Artificial Sequence
  Description of Artificial Sequence: Synthetic oligonucleotide
aagccucucgacccuccug

SEQ ID NO: 1968347 - RNA, 19 nt, Artificial Sequence
  Description of Artificial Sequence: Synthetic oligonucleotide
cucucgacccuccuguguc

SEQ ID NO: 1968348 - RNA, 19 nt, Artificial Sequence
  Description of Artificial Sequence: Synthetic oligonucleotide
gagacgagugucugcaucu

SEQ ID NO: 1968349 - RNA, 19 nt, Artificial Sequence
  Description of Artificial Sequence: Synthetic oligonucleotide
gaucacguccgcauacuuc

SEQ ID NO: 1968350 - RNA, 19 nt, Artificial Sequence
  Description of Artificial Sequence: Synthetic oligonucleotide
gauucugaugccugccucu

SEQ ID NO: 1968351 - RNA, 19 nt, Artificial Sequence
  Description of Artificial Sequence: Synthetic oligonucleotide
agauagccauuggucugcc

SEQ ID NO: 1968352 - RNA, 19 nt, Artificial Sequence
  Description of Artificial Sequence: Synthetic oligonucleotide
agggguguagccauugaga

SEQ ID NO: 1968353 - RNA, 19 nt, Artificial Sequence
  Description of Artificial Sequence: Synthetic oligonucleotide
aggaggcguauguacagau

SEQ ID NO: 1968354 - RNA, 19 nt, Artificial Sequence
  Description of Artificial Sequence: Synthetic oligonucleotide
  modified_base (11)..(11): a, c, u, g, unknown or other
  modified_base (15)..(15): a, c, u, g, unknown or other
uccuccucgcngccngugc

SEQ ID NO: 1968355 - RNA, 19 nt, Artificial Sequence
  Description of Artificial Sequence: Synthetic oligonucleotide
cacguuggauucauaauua

SEQ ID NO: 1968356 - RNA, 19 nt, Artificial Sequence
  Description of Artificial Sequence: Synthetic oligonucleotide
cacaagauugucugcaccu

SEQ ID NO: 1968357 - RNA, 19 nt, Artificial Sequence
  Description of Artificial Sequence: Synthetic oligonucleotide
ggcguauguacagaugacc

SEQ ID NO: 1968358 - RNA, 19 nt, Artificial Sequence
  Description of Artificial Sequence: Synthetic oligonucleotide
uuuucacaggaggcguaug

SEQ ID NO: 1968359 - RNA, 19 nt, Artificial Sequence
  Description of Artificial Sequence: Synthetic oligonucleotide
gccauugagauagccauug

SEQ ID NO: 1968360 - RNA, 19 nt, Artificial Sequence
  Description of Artificial Sequence: Synthetic oligonucleotide
aaguugaacuggcccuuua

SEQ ID NO: 1968361 - RNA, 19 nt, Artificial Sequence
  Description of Artificial Sequence: Synthetic oligonucleotide
uccaccucauucugcccca

SEQ ID NO: 1968362 - RNA, 19 nt, Artificial Sequence
  Description of Artificial Sequence: Synthetic oligonucleotide
  modified_base (10)..(10): a, c, u, g, unknown or other
  modified_base (14)..(14): a, c, u, g, unknown or other
ccuccucgcngccngugcg

SEQ ID NO: 1968363 - RNA, 19 nt, Artificial Sequence
  Description of Artificial Sequence: Synthetic oligonucleotide
acgagugucugcaucugug

SEQ ID NO: 1968364 - RNA, 19 nt, Artificial Sequence
  Description of Artificial Sequence: Synthetic oligonucleotide
ggauaugcugcacgaugag

SEQ ID NO: 1968365 - RNA, 19 nt, Artificial Sequence
  Description of Artificial Sequence: Synthetic oligonucleotide
ugaucacguccgcauacuu

SEQ ID NO: 1968366 - RNA, 19 nt, Artificial Sequence
  Description of Artificial Sequence: Synthetic oligonucleotide
aggcguauguacagaugac

SEQ ID NO: 1968367 - RNA, 19 nt, Artificial Sequence
  Description of Artificial Sequence: Synthetic oligonucleotide
uugcgugaagggguguagc

SEQ ID NO: 1968368 - RNA, 19 nt, Artificial Sequence
  Description of Artificial Sequence: Synthetic oligonucleotide
cauugagauagccauuggu

SEQ ID NO: 1968369 - RNA, 19 nt, Artificial Sequence
  Description of Artificial Sequence: Synthetic oligonucleotide
accaaagccucucgacccu

SEQ ID NO: 1968370 - RNA, 19 nt, Artificial Sequence
  Description of Artificial Sequence: Synthetic oligonucleotide
gaaugaucacguccgcaua

SEQ ID NO: 1968371 - RNA, 19 nt, Artificial Sequence
  Description of Artificial Sequence: Synthetic oligonucleotide
aagauugucugcaccucua

SEQ ID NO: 1968372 - RNA, 19 nt, Artificial Sequence
  Description of Artificial Sequence: Synthetic oligonucleotide
cuccuuccgagagugggag

SEQ ID NO: 1968373 - RNA, 19 nt, Artificial Sequence
  Description of Artificial Sequence: Synthetic oligonucleotide
auuuucacaggaggcguau

SEQ ID NO: 1968374 - RNA, 19 nt, Artificial Sequence
  Description of Artificial Sequence: Synthetic oligonucleotide
ggcuucacgaaugugaugu

SEQ ID NO: 1968375 - RNA, 19 nt, Artificial Sequence
  Description of Artificial Sequence: Synthetic oligonucleotide
uuccgagagugggagacaa

SEQ ID NO: 1968376 - RNA, 19 nt, Artificial Sequence
  Description of Artificial Sequence: Synthetic oligonucleotide
ucuuucgcugaugucccuc

SEQ ID NO: 1968377 - RNA, 19 nt, Artificial Sequence
  Description of Artificial Sequence: Synthetic oligonucleotide
cuugcgugaagggguguag

SEQ ID NO: 1968378 - RNA, 19 nt, Artificial Sequence
  Description of Artificial Sequence: Synthetic oligonucleotide
cuggacuguuuuccuucgg

SEQ ID NO: 1968379 - RNA, 19 nt, Artificial Sequence
  Description of Artificial Sequence: Synthetic oligonucleotide
aggaaugaucacguccgca

SEQ ID NO: 1968380 - RNA, 19 nt, Artificial Sequence
  Description of Artificial Sequence: Synthetic oligonucleotide
agaugaguucguugucaaa

SEQ ID NO: 1968381 - RNA, 19 nt, Artificial Sequence
  Description of Artificial Sequence: Synthetic oligonucleotide
augccugccucuugcguga

SEQ ID NO: 1968382 - RNA, 19 nt, Artificial Sequence
  Description of Artificial Sequence: Synthetic oligonucleotide
aucuuggcacaaacggaag

SEQ ID NO: 1968383 - RNA, 19 nt, Artificial Sequence
  Description of Artificial Sequence: Synthetic oligonucleotide
cuuucgcugaugucccuca

SEQ ID NO: 1968384 - RNA, 19 nt, Artificial Sequence
  Description of Artificial Sequence: Synthetic oligonucleotide
uucacaggaggcguaugua

SEQ ID NO: 1968385 - RNA, 19 nt, Artificial Sequence
  Description of Artificial Sequence: Synthetic oligonucleotide
auacucugcgagagagacg

SEQ ID NO: 1968386 - RNA, 19 nt, Artificial Sequence
  Description of Artificial Sequence: Synthetic oligonucleotide
ccucuuucgcugauguccc

SEQ ID NO: 1968387 - RNA, 19 nt, Artificial Sequence
  Description of Artificial Sequence: Synthetic oligonucleotide
guccacgaaaagcuucauc

SEQ ID NO: 1968388 - RNA, 19 nt, Artificial Sequence
  Description of Artificial Sequence: Synthetic oligonucleotide
gaagggguguagccauuga

SEQ ID NO: 1968389 - RNA, 19 nt, Artificial Sequence
  Description of Artificial Sequence: Synthetic oligonucleotide
uggcccuuuagggccuugg

SEQ ID NO: 1968390 - RNA, 19 nt, Artificial Sequence
  Description of Artificial Sequence: Synthetic oligonucleotide
gcuggauucugaugccugc

SEQ ID NO: 1968391 - RNA, 19 nt, Artificial Sequence
  Description of Artificial Sequence: Synthetic oligonucleotide
guugguaagcagaauuccu

SEQ ID NO: 1968392 - RNA, 19 nt, Artificial Sequence
  Description of Artificial Sequence: Synthetic oligonucleotide
gacucaggaugaccaccug

SEQ ID NO: 1968393 - RNA, 19 nt, Artificial Sequence
  Description of Artificial Sequence: Synthetic oligonucleotide
gcaccucuaggaaugauca

SEQ ID NO: 1968394 - RNA, 19 nt, Artificial Sequence
  Description of Artificial Sequence: Synthetic oligonucleotide
  modified_base (2)..(2): a, c, u, g, unknown or other
  modified_base (6)..(6): a, c, u, g, unknown or other
cngccngugcgagcgacgc

SEQ ID NO: 1968395 - RNA, 19 nt, Artificial Sequence
  Description of Artificial Sequence: Synthetic oligonucleotide
ccgagagugggagacaaag

SEQ ID NO: 1968396 - RNA, 19 nt, Artificial Sequence
  Description of Artificial Sequence: Synthetic oligonucleotide
guguccacgaaaagcuuca

SEQ ID NO: 1968397 - RNA, 19 nt, Artificial Sequence
  Description of Artificial Sequence: Synthetic oligonucleotide
augaucacguccgcauacu

SEQ ID NO: 1968398 - RNA, 19 nt, Artificial Sequence
  Description of Artificial Sequence: Synthetic oligonucleotide
ucucgacccuccugugucu

SEQ ID NO: 1968399 - RNA, 19 nt, Artificial Sequence
  Description of Artificial Sequence: Synthetic oligonucleotide
  modified_base (8)..(8): a, c, u, g, unknown or other
  modified_base (12)..(12): a, c, u, g, unknown or other
uccucgcngccngugcgag

SEQ ID NO: 1968400 - RNA, 19 nt, Artificial Sequence
  Description of Artificial Sequence: Synthetic oligonucleotide
auccgcgggguagacagug

SEQ ID NO: 1968401 - RNA, 19 nt, Artificial Sequence
  Description of Artificial Sequence: Synthetic oligonucleotide
ccacaagauugucugcacc

SEQ ID NO: 1968402 - RNA, 19 nt, Artificial Sequence
  Description of Artificial Sequence: Synthetic oligonucleotide
gagugggagacaaagucau

SEQ ID NO: 1968403 - RNA, 19 nt, Artificial Sequence
  Description of Artificial Sequence: Synthetic oligonucleotide
gccguugggcugcuggugg

SEQ ID NO: 1968404 - RNA, 19 nt, Artificial Sequence
  Description of Artificial Sequence: Synthetic oligonucleotide
caauacucugcgagagaga

SEQ ID NO: 1968405 - RNA, 19 nt, Artificial Sequence
  Description of Artificial Sequence: Synthetic oligonucleotide
ugcgagcgacgcacgcucc

SEQ ID NO: 1968406 - RNA, 19 nt, Artificial Sequence
  Description of Artificial Sequence: Synthetic oligonucleotide
ucuugcgugaaggggugua

SEQ ID NO: 1968407 - RNA, 19 nt, Artificial Sequence
  Description of Artificial Sequence: Synthetic oligonucleotide
ggagcugcacgaucuuggc

SEQ ID NO: 1968408 - RNA, 19 nt, Artificial Sequence
  Description of Artificial Sequence: Synthetic oligonucleotide
ucaucuccgcgcuguuuuc

SEQ ID NO: 1968409 - RNA, 19 nt, Artificial Sequence
  Description of Artificial Sequence: Synthetic oligonucleotide
ggaaugaucacguccgcau

SEQ ID NO: 1968410 - RNA, 19 nt, Artificial Sequence
  Description of Artificial Sequence: Synthetic oligonucleotide
ucaauguggccggcugcug

SEQ ID NO: 1968411 - RNA, 19 nt, Artificial Sequence
  Description of Artificial Sequence: Synthetic oligonucleotide
caccucuaggaaugaucac

SEQ ID NO: 1968412 - RNA, 19 nt, Artificial Sequence
  Description of Artificial Sequence: Synthetic oligonucleotide
ggucaauguggccggcugc

SEQ ID NO: 1968413 - RNA, 19 nt, Artificial Sequence
  Description of Artificial Sequence: Synthetic oligonucleotide
cucaauacucugcgagaga

SEQ ID NO: 1968414 - RNA, 19 nt, Artificial Sequence
  Description of Artificial Sequence: Synthetic oligonucleotide
gugcgagcgacgcacgcuc

SEQ ID NO: 1968415 - RNA, 19 nt, Artificial Sequence
  Description of Artificial Sequence: Synthetic oligonucleotide
guaucuggacuguuuuccu

SEQ ID NO: 1968416 - RNA, 19 nt, Artificial Sequence
  Description of Artificial Sequence: Synthetic oligonucleotide
uuggcacaguuugucacuu

SEQ ID NO: 1968417 - RNA, 19 nt, Artificial Sequence
  Description of Artificial Sequence: Synthetic oligonucleotide
ggauuuggagucagggcac

SEQ ID NO: 1968418 - RNA, 19 nt, Artificial Sequence
  Description of Artificial Sequence: Synthetic oligonucleotide
cacgaaugugauguacuga

SEQ ID NO: 1968419 - RNA, 19 nt, Artificial Sequence
  Description of Artificial Sequence: Synthetic oligonucleotide
acagguaucuggacuguuu

SEQ ID NO: 1968420 - RNA, 19 nt, Artificial Sequence
  Description of Artificial Sequence: Synthetic oligonucleotide
cguugucaaaggcaucagg

SEQ ID NO: 1968421 - RNA, 19 nt, Artificial Sequence
  Description of Artificial Sequence: Synthetic oligonucleotide
ugguuacacguuggauuca

SEQ ID NO: 1968422 - RNA, 19 nt, Artificial Sequence
  Description of Artificial Sequence: Synthetic oligonucleotide
agagcccuccauugaggau

SEQ ID NO: 1968423 - RNA, 19 nt, Artificial Sequence
  Description of Artificial Sequence: Synthetic oligonucleotide
cugaagugaggacucgaua

SEQ ID NO: 1968424 - RNA, 19 nt, Artificial Sequence
  Description of Artificial Sequence: Synthetic oligonucleotide
  modified_base (2)..(2): a, c, u, g, unknown or other
cngugcgagcgacgcacgc

SEQ ID NO: 1968425 - RNA, 19 nt, Artificial Sequence
  Description of Artificial Sequence: Synthetic oligonucleotide
cauucugccccaggagcug

SEQ ID NO: 1968426 - RNA, 19 nt, Artificial Sequence
  Description of Artificial Sequence: Synthetic oligonucleotide
gagcgacgcacgcucccgc

SEQ ID NO: 1968427 - RNA, 19 nt, Artificial Sequence
  Description of Artificial Sequence: Synthetic oligonucleotide
gacgcacgcucccgccgcg

SEQ ID NO: 1968428 - RNA, 19 nt, Artificial Sequence
  Description of Artificial Sequence: Synthetic oligonucleotide
ugcacgaucuuggcacaaa

SEQ ID NO: 1968429 - RNA, 19 nt, Artificial Sequence
  Description of Artificial Sequence: Synthetic oligonucleotide
agacgagugucugcaucug

SEQ ID NO: 1968430 - RNA, 19 nt, Artificial Sequence
  Description of Artificial Sequence: Synthetic oligonucleotide
ucgacccuccugugucuug

SEQ ID NO: 1968431 - RNA, 19 nt, Artificial Sequence
  Description of Artificial Sequence: Synthetic oligonucleotide
gcacgaucuuggcacaaac

SEQ ID NO: 1968432 - RNA, 19 nt, Artificial Sequence
  Description of Artificial Sequence: Synthetic oligonucleotide
uccgcgggguagacaguga

SEQ ID NO: 1968433 - RNA, 19 nt, Artificial Sequence
  Description of Artificial Sequence: Synthetic oligonucleotide
auuucaucuccgcgcuguu

SEQ ID NO: 1968434 - RNA, 19 nt, Artificial Sequence
  Description of Artificial Sequence: Synthetic oligonucleotide
gccgccguugggcugcugg

SEQ ID NO: 1968435 - RNA, 19 nt, Artificial Sequence
  Description of Artificial Sequence: Synthetic oligonucleotide
uccuuccgagagugggaga

SEQ ID NO: 1968436 - RNA, 19 nt, Artificial Sequence
  Description of Artificial Sequence: Synthetic oligonucleotide
uccgagagugggagacaaa

SEQ ID NO: 1968437 - RNA, 19 nt, Artificial Sequence
  Description of Artificial Sequence: Synthetic oligonucleotide
ucacgccgaucaggaaggg

SEQ ID NO: 1968438 - RNA, 19 nt, Artificial Sequence
  Description of Artificial Sequence: Synthetic oligonucleotide
  modified_base (4)..(4): a, c, u, g, unknown or other
gccngugcgagcgacgcac

SEQ ID NO: 1968439 - RNA, 19 nt, Artificial Sequence
  Description of Artificial Sequence: Synthetic oligonucleotide
gucugccgcuuggagagcc

SEQ ID NO: 1968440 - RNA, 19 nt, Artificial Sequence
  Description of Artificial Sequence: Synthetic oligonucleotide
ccauugagauagccauugg

SEQ ID NO: 1968441 - RNA, 19 nt, Artificial Sequence
  Description of Artificial Sequence: Synthetic oligonucleotide
ccuuccgagagugggagac

SEQ ID NO: 1968442 - RNA, 19 nt, Artificial Sequence
  Description of Artificial Sequence: Synthetic oligonucleotide
uuucaucuccgcgcuguuu

SEQ ID NO: 1968443 - RNA, 19 nt, Artificial Sequence
  Description of Artificial Sequence: Synthetic oligonucleotide
ugauggccacaagauuguc

SEQ ID NO: 1968444 - RNA, 19 nt, Artificial Sequence
  Description of Artificial Sequence: Synthetic oligonucleotide
cauuucaucuccgcgcugu

SEQ ID NO: 1968445 - RNA, 19 nt, Artificial Sequence
  Description of Artificial Sequence: Synthetic oligonucleotide
aggacucgauagaagcuau

SEQ ID NO: 1968446 - RNA, 19 nt, Artificial Sequence
  Description of Artificial Sequence: Synthetic oligonucleotide
ucuccgcgcuguuuucuua

SEQ ID NO: 1968447 - RNA, 19 nt, Artificial Sequence
  Description of Artificial Sequence: Synthetic oligonucleotide
guagaaagccaggaucccu

SEQ ID NO: 1968448 - RNA, 19 nt, Artificial Sequence
  Description of Artificial Sequence: Synthetic oligonucleotide
uccgcgcuguuuucuuaaa

SEQ ID NO: 1968449 - RNA, 19 nt, Artificial Sequence
  Description of Artificial Sequence: Synthetic oligonucleotide
ggucugcucgcuguccccg

SEQ ID NO: 1968450 - RNA, 19 nt, Artificial Sequence
  Description of Artificial Sequence: Synthetic oligonucleotide
gcacaguuugucacuuaag

SEQ ID NO: 1968451 - RNA, 19 nt, Artificial Sequence
  Description of Artificial Sequence: Synthetic oligonucleotide
cuuaagcucggggucaagu

SEQ ID NO: 1968452 - RNA, 19 nt, Artificial Sequence
  Description of Artificial Sequence: Synthetic oligonucleotide
gacgagugucugcaucugu

SEQ ID NO: 1968453 - RNA, 19 nt, Artificial Sequence
  Description of Artificial Sequence: Synthetic oligonucleotide
gccacaagauugucugcac

SEQ ID NO: 1968454 - RNA, 19 nt, Artificial Sequence
  Description of Artificial Sequence: Synthetic oligonucleotide
ugccucuuucgcugauguc

SEQ ID NO: 1968455 - RNA, 19 nt, Artificial Sequence
  Description of Artificial Sequence: Synthetic oligonucleotide
cacgccgaucaggaagggc

SEQ ID NO: 1968456 - RNA, 19 nt, Artificial Sequence
  Description of Artificial Sequence: Synthetic oligonucleotide
acuuaagcucggggucaag

SEQ ID NO: 1968457 - RNA, 19 nt, Artificial Sequence
  Description of Artificial Sequence: Synthetic oligonucleotide
ggcauuucaucuccgcgcu

SEQ ID NO: 1968458 - RNA, 19 nt, Artificial Sequence
  Description of Artificial Sequence: Synthetic oligonucleotide
uguggccggcugcuggauu

SEQ ID NO: 1968459 - RNA, 19 nt, Artificial Sequence
  Description of Artificial Sequence: Synthetic oligonucleotide
caggaagggcucgccgccg

SEQ ID NO: 1968460 - RNA, 19 nt, Artificial Sequence
  Description of Artificial Sequence: Synthetic oligonucleotide
ggaggcguauguacagaug

SEQ ID NO: 1968461 - RNA, 19 nt, Artificial Sequence
  Description of Artificial Sequence: Synthetic oligonucleotide
ucccuucaaagagcaccac

SEQ ID NO: 1968462 - RNA, 19 nt, Artificial Sequence
  Description of Artificial Sequence: Synthetic oligonucleotide
gaaggucaaggcauuucau

SEQ ID NO: 1968463 - RNA, 19 nt, Artificial Sequence
  Description of Artificial Sequence: Synthetic oligonucleotide
  modified_base (3)..(3): a, c, u, g, unknown or other
  modified_base (7)..(7): a, c, u, g, unknown or other
gcngccngugcgagcgacg

SEQ ID NO: 1968464 - RNA, 19 nt, Artificial Sequence
  Description of Artificial Sequence: Synthetic oligonucleotide
ccugacucaggaugaccac

SEQ ID NO: 1968465 - RNA, 19 nt, Artificial Sequence
  Description of Artificial Sequence: Synthetic oligonucleotide
cagggucugcucgcugucc

SEQ ID NO: 1968466 - RNA, 19 nt, Artificial Sequence
  Description of Artificial Sequence: Synthetic oligonucleotide
cuuuagggccuuggccuuc

SEQ ID NO: 1968467 - RNA, 19 nt, Artificial Sequence
  Description of Artificial Sequence: Synthetic oligonucleotide
ggcccuuuagggccuuggc

SEQ ID NO: 1968468 - RNA, 19 nt, Artificial Sequence
  Description of Artificial Sequence: Synthetic oligonucleotide
ggggucaaguucuguuuga

SEQ ID NO: 1968469 - RNA, 19 nt, Artificial Sequence
  Description of Artificial Sequence: Synthetic oligonucleotide
cuccgcgcuguuuucuuaa

SEQ ID NO: 1968470 - RNA, 19 nt, Artificial Sequence
  Description of Artificial Sequence: Synthetic oligonucleotide
  modified_base (9)..(9): a, c, u, g, unknown or other
  modified_base (13)..(13): a, c, u, g, unknown or other
cuccucgcngccngugcga

SEQ ID NO: 1968471 - RNA, 19 nt, Artificial Sequence
  Description of Artificial Sequence: Synthetic oligonucleotide
ucacguccgcauacuucuu

SEQ ID NO: 1968472 - RNA, 19 nt, Artificial Sequence
  Description of Artificial Sequence: Synthetic oligonucleotide
uggcacaguuugucacuua

SEQ ID NO: 1968473 - RNA, 19 nt, Artificial Sequence
  Description of Artificial Sequence: Synthetic oligonucleotide
gucaauguggccggcugcu

SEQ ID NO: 1968474 - RNA, 19 nt, Artificial Sequence
  Description of Artificial Sequence: Synthetic oligonucleotide
ccucuugcgugaaggggug

SEQ ID NO: 1968475 - RNA, 19 nt, Artificial Sequence
  Description of Artificial Sequence: Synthetic oligonucleotide
cugccucuuucgcugaugu

SEQ ID NO: 1968476 - RNA, 19 nt, Artificial Sequence
  Description of Artificial Sequence: Synthetic oligonucleotide
  modified_base (5)..(5): a, c, u, g, unknown or other
  modified_base (9)..(9): a, c, u, g, unknown or other
ucgcngccngugcgagcga

SEQ ID NO: 1968477 - RNA, 19 nt, Artificial Sequence
  Description of Artificial Sequence: Synthetic oligonucleotide
gccgaucaggaagggcucg

SEQ ID NO: 1968478 - RNA, 19 nt, Artificial Sequence
  Description of Artificial Sequence: Synthetic oligonucleotide
gcgacgcacgcucccgccg

SEQ ID NO: 1968479 - RNA, 19 nt, Artificial Sequence
  Description of Artificial Sequence: Synthetic oligonucleotide
cagguaucuggacuguuuu

SEQ ID NO: 1968480 - RNA, 19 nt, Artificial Sequence
  Description of Artificial Sequence: Synthetic oligonucleotide
cgaucuuggcacaaacgga

SEQ ID NO: 1968481 - RNA, 19 nt, Artificial Sequence
  Description of Artificial Sequence: Synthetic oligonucleotide
  modified_base (3)..(3): a, c, u, g, unknown or other
ccngugcgagcgacgcacg

SEQ ID NO: 1968482 - RNA, 19 nt, Artificial Sequence
  Description of Artificial Sequence: Synthetic oligonucleotide
agcccuccauugaggaugu

SEQ ID NO: 1968483 - RNA, 19 nt, Artificial Sequence
  Description of Artificial Sequence: Synthetic oligonucleotide
gccauuggucugccgcuug

SEQ ID NO: 1968484 - RNA, 19 nt, Artificial Sequence
  Description of Artificial Sequence: Synthetic oligonucleotide
cccucaauacucugcgaga

SEQ ID NO: 1968485 - RNA, 19 nt, Artificial Sequence
  Description of Artificial Sequence: Synthetic oligonucleotide
cucggggucaaguucuguu

SEQ ID NO: 1968486 - RNA, 19 nt, Artificial Sequence
  Description of Artificial Sequence: Synthetic oligonucleotide
cucugcgagagagacgagu

SEQ ID NO: 1968487 - RNA, 19 nt, Artificial Sequence
  Description of Artificial Sequence: Synthetic oligonucleotide
cgcugaugucccucaauac

SEQ ID NO: 1968488 - RNA, 19 nt, Artificial Sequence
  Description of Artificial Sequence: Synthetic oligonucleotide
caggaggcguauguacaga

SEQ ID NO: 1968489 - RNA, 19 nt, Artificial Sequence
  Description of Artificial Sequence: Synthetic oligonucleotide
guccgcauacuucuuuguu

SEQ ID NO: 1968490 - RNA, 19 nt, Artificial Sequence
  Description of Artificial Sequence: Synthetic oligonucleotide
cccgcucacgccgaucagg

SEQ ID NO: 1968491 - RNA, 19 nt, Artificial Sequence
  Description of Artificial Sequence: Synthetic oligonucleotide
gaccuccugggaguagaaa

SEQ ID NO: 1968492 - RNA, 19 nt, Artificial Sequence
  Description of Artificial Sequence: Synthetic oligonucleotide
agccauugagauagccauu

SEQ ID NO: 1968493 - RNA, 19 nt, Artificial Sequence
  Description of Artificial Sequence: Synthetic oligonucleotide
ggguguagccauugagaua

SEQ ID NO: 1968494 - RNA, 19 nt, Artificial Sequence
  Description of Artificial Sequence: Synthetic oligonucleotide
cuuccgagagugggagaca

SEQ ID NO: 1968495 - RNA, 19 nt, Artificial Sequence
  Description of Artificial Sequence: Synthetic oligonucleotide
gccuucuguucugaaguga

SEQ ID NO: 1968496 - RNA, 19 nt, Artificial Sequence
  Description of Artificial Sequence: Synthetic oligonucleotide
gcgugaagggguguagcca

SEQ ID NO: 1968497 - RNA, 19 nt, Artificial Sequence
  Description of Artificial Sequence: Synthetic oligonucleotide
gcgagcgacgcacgcuccc

SEQ ID NO: 1968498 - RNA, 19 nt, Artificial Sequence
  Description of Artificial Sequence: Synthetic oligonucleotide
  modified_base (7)..(7): a, c, u, g, unknown or other
  modified_base (11)..(11): a, c, u, g, unknown or other
ccucgcngccngugcgagc

SEQ ID NO: 1968499 - RNA, 19 nt, Artificial Sequence
  Description of Artificial Sequence: Synthetic oligonucleotide
guuacacguuggauucaua

SEQ ID NO: 1968500 - RNA, 19 nt, Artificial Sequence
  Description of Artificial Sequence: Synthetic oligonucleotide
gagagacgagugucugcau

SEQ ID NO: 1968501 - RNA, 19 nt, Artificial Sequence
  Description of Artificial Sequence: Synthetic oligonucleotide
cgcgcuguuuucuuaaaua

SEQ ID NO: 1968502 - RNA, 19 nt, Artificial Sequence
  Description of Artificial Sequence: Synthetic oligonucleotide
gccucuugcgugaaggggu

SEQ ID NO: 1968503 - RNA, 19 nt, Artificial Sequence
  Description of Artificial Sequence: Synthetic oligonucleotide
cgcgggguagacagugacc

SEQ ID NO: 1968504 - RNA, 19 nt, Artificial Sequence
  Description of Artificial Sequence: Synthetic oligonucleotide
cugcgagagagacgagugu

SEQ ID NO: 1968505 - RNA, 19 nt, Artificial Sequence
  Description of Artificial Sequence: Synthetic oligonucleotide
ggucucggaccuccuggga

SEQ ID NO: 1968506 - RNA, 19 nt, Artificial Sequence
  Description of Artificial Sequence: Synthetic oligonucleotide
ggacucgauagaagcuauc

SEQ ID NO: 1968507 - RNA, 19 nt, Artificial Sequence
  Description of Artificial Sequence: Synthetic oligonucleotide
ccgcgggguagacagugac

SEQ ID NO: 1968508 - RNA, 19 nt, Artificial Sequence
  Description of Artificial Sequence: Synthetic oligonucleotide
cgaaugugauguacugaga

SEQ ID NO: 1968509 - RNA, 19 nt, Artificial Sequence
  Description of Artificial Sequence: Synthetic oligonucleotide
gguuacacguuggauucau

SEQ ID NO: 1968510 - RNA, 19 nt, Artificial Sequence
  Description of Artificial Sequence: Synthetic oligonucleotide
cuuuguugguaagcagaau

SEQ ID NO: 1968511 - RNA, 19 nt, Artificial Sequence
  Description of Artificial Sequence: Synthetic oligonucleotide
cugcaucuguguccacgaa

SEQ ID NO: 1968512 - RNA, 19 nt, Artificial Sequence
  Description of Artificial Sequence: Synthetic oligonucleotide
ccgcucacgccgaucagga

SEQ ID NO: 1968513 - RNA, 19 nt, Artificial Sequence
  Description of Artificial Sequence: Synthetic oligonucleotide
ccgaucaggaagggcucgc

SEQ ID NO: 1968514 - RNA, 19 nt, Artificial Sequence
  Description of Artificial Sequence: Synthetic oligonucleotide
gccucucgacccuccugug

SEQ ID NO: 1968515 - RNA, 19 nt, Artificial Sequence
  Description of Artificial Sequence: Synthetic oligonucleotide
cacauccgcgggguagaca

SEQ ID NO: 1968516 - RNA, 19 nt, Artificial Sequence
  Description of Artificial Sequence: Synthetic oligonucleotide
auguggccggcugcuggau

SEQ ID NO: 1968517 - RNA, 19 nt, Artificial Sequence
  Description of Artificial Sequence: Synthetic oligonucleotide
gcuucacgaaugugaugua

SEQ ID NO: 1968518 - RNA, 19 nt, Artificial Sequence
  Description of Artificial Sequence: Synthetic oligonucleotide
cgaucaggaagggcucgcc

SEQ ID NO: 1968519 - RNA, 19 nt, Artificial Sequence
  Description of Artificial Sequence: Synthetic oligonucleotide
caucuccgcgcuguuuucu

SEQ ID NO: 1968520 - RNA, 19 nt, Artificial Sequence
  Description of Artificial Sequence: Synthetic oligonucleotide
cacguccgcauacuucuuu

SEQ ID NO: 1968521 - RNA, 19 nt, Artificial Sequence
  Description of Artificial Sequence: Synthetic oligonucleotide
gcgagagagacgagugucu

SEQ ID NO: 1968522 - RNA, 19 nt, Artificial Sequence
  Description of Artificial Sequence: Synthetic oligonucleotide
cgagcgacgcacgcucccg

SEQ ID NO: 1968523 - RNA, 19 nt, Artificial Sequence
  Description of Artificial Sequence: Synthetic oligonucleotide
cgacgcacgcucccgccgc

SEQ ID NO: 1968524 - RNA, 19 nt, Artificial Sequence
  Description of Artificial Sequence: Synthetic oligonucleotide
cugcacgaucuuggcacaa

SEQ ID NO: 1968525 - RNA, 19 nt, Artificial Sequence
  Description of Artificial Sequence: Synthetic oligonucleotide
gggucaaguucuguuugau

SEQ ID NO: 1968526 - RNA, 19 nt, Artificial Sequence
  Description of Artificial Sequence: Synthetic oligonucleotide
cgccgaucaggaagggcuc

SEQ ID NO: 1968527 - RNA, 19 nt, Artificial Sequence
  Description of Artificial Sequence: Synthetic oligonucleotide
  modified_base (4)..(4): a, c, u, g, unknown or other
  modified_base (8)..(8): a, c, u, g, unknown or other
cgcngccngugcgagcgac

SEQ ID NO: 1968528 - RNA, 19 nt, Artificial Sequence
  Description of Artificial Sequence: Synthetic oligonucleotide
cugccgcuuggagagcccu

SEQ ID NO: 1968529 - RNA, 19 nt, Artificial Sequence
  Description of Artificial Sequence: Synthetic oligonucleotide
gccggcugcuggauucuga

SEQ ID NO: 1968530 - RNA, 19 nt, Artificial Sequence
  Description of Artificial Sequence: Synthetic oligonucleotide
cacagguaucuggacuguu

SEQ ID NO: 1968531 - RNA, 19 nt, Artificial Sequence
  Description of Artificial Sequence: Synthetic oligonucleotide
cauccgcgggguagacagu

SEQ ID NO: 1968532 - RNA, 19 nt, Artificial Sequence
  Description of Artificial Sequence: Synthetic oligonucleotide
ccgucuccuccuuccgaga

SEQ ID NO: 1968533 - RNA, 19 nt, Artificial Sequence
  Description of Artificial Sequence: Synthetic oligonucleotide
ggccggcugcuggauucug

SEQ ID NO: 1968534 - RNA, 19 nt, Artificial Sequence
  Description of Artificial Sequence: Synthetic oligonucleotide
ccccggccaugacucgcgc

SEQ ID NO: 1968535 - RNA, 19 nt, Artificial Sequence
  Description of Artificial Sequence: Synthetic oligonucleotide
ccacauccgcgggguagac

SEQ ID NO: 1968536 - RNA, 19 nt, Artificial Sequence
  Description of Artificial Sequence: Synthetic oligonucleotide
ccucucgacccuccugugu

SEQ ID NO: 1968537 - RNA, 19 nt, Artificial Sequence
  Description of Artificial Sequence: Synthetic oligonucleotide
cugcaccucuaggaaugau

SEQ ID NO: 1968538 - RNA, 19 nt, Artificial Sequence
  Description of Artificial Sequence: Synthetic oligonucleotide
cgccguugggcugcuggug

SEQ ID NO: 1968539 - RNA, 19 nt, Artificial Sequence
  Description of Artificial Sequence: Synthetic oligonucleotide
cucgacccuccugugucuu

SEQ ID NO: 1968540 - RNA, 19 nt, Artificial Sequence
  Description of Artificial Sequence: Synthetic oligonucleotide
  modified_base (19)..(19): a, c, u, g, unknown or other
gccgccccuccuccucgcn

SEQ ID NO: 1968541 - RNA, 19 nt, Artificial Sequence
  Description of Artificial Sequence: Synthetic oligonucleotide
cguccgcauacuucuuugu

SEQ ID NO: 1968542 - RNA, 19 nt, Artificial Sequence
  Description of Artificial Sequence: Synthetic oligonucleotide
ccgcuuggagagcccucca

SEQ ID NO: 1968543 - RNA, 19 nt, Artificial Sequence
  Description of Artificial Sequence: Synthetic oligonucleotide
ccgcgcuguuuucuuaaau

SEQ ID NO: 1968544 - RNA, 19 nt, Artificial Sequence
  Description of Artificial Sequence: Synthetic oligonucleotide
ggaagggcucgccgccguu

SEQ ID NO: 1968545 - RNA, 19 nt, Artificial Sequence
  Description of Artificial Sequence: Synthetic oligonucleotide
gcucggggucaaguucugu

SEQ ID NO: 1968546 - RNA, 19 nt, Artificial Sequence
  Description of Artificial Sequence: Synthetic oligonucleotide
ccgccguugggcugcuggu

SEQ ID NO: 1968547 - RNA, 19 nt, Artificial Sequence
  Description of Artificial Sequence: Synthetic oligonucleotide
cgccgccccuccuccucgc

SEQ ID NO: 1968548 - RNA, 19 nt, Artificial Sequence
  Description of Artificial Sequence: Synthetic oligonucleotide
cgcuguccccggccaugac

SEQ ID NO: 1968549 - RNA, 19 nt, Artificial Sequence
  Description of Artificial Sequence: Synthetic oligonucleotide
  modified_base (13)..(13): a, c, u, g, unknown or other
  modified_base (17)..(17): a, c, u, g, unknown or other
ccuccuccucgcngccngu

SEQ ID NO: 1968550 - RNA, 19 nt, Artificial Sequence
  Description of Artificial Sequence: Synthetic oligonucleotide
cgcucacgccgaucaggaa

SEQ ID NO: 1968551 - RNA, 19 nt, Artificial Sequence
  Description of Artificial Sequence: Synthetic oligonucleotide
cgggguagacagugaccgu

SEQ ID NO: 1968552 - RNA, 19 nt, Artificial Sequence
  Description of Artificial Sequence: Synthetic oligonucleotide
gcccuccauugaggauguc

SEQ ID NO: 1968553 - RNA, 19 nt, Artificial Sequence
  Description of Artificial Sequence: Synthetic oligonucleotide
cccugccucuuucgcugau

SEQ ID NO: 1968554 - RNA, 19 nt, Artificial Sequence
  Description of Artificial Sequence: Synthetic oligonucleotide
  modified_base (1)..(1): a, c, u, g, unknown or other
  modified_base (5)..(5): a, c, u, g, unknown or other
ngccngugcgagcgacgca

SEQ ID NO: 1968555 - RNA, 19 nt, Artificial Sequence
  Description of Artificial Sequence: Synthetic oligonucleotide
aaugaggucuuuguuacgc

SEQ ID NO: 1968556 - RNA, 19 nt, Artificial Sequence
  Description of Artificial Sequence: Synthetic oligonucleotide
ucugucauggcauagcucc

SEQ ID NO: 1968557 - RNA, 19 nt, Artificial Sequence
  Description of Artificial Sequence: Synthetic oligonucleotide
auugcgaacauuccgcacc

SEQ ID NO: 1968558 - RNA, 19 nt, Artificial Sequence
  Description of Artificial Sequence: Synthetic oligonucleotide
auuggacacaaucucaugg

SEQ ID NO: 1968559 - RNA, 19 nt, Artificial Sequence
  Description of Artificial Sequence: Synthetic oligonucleotide
agugcuagcagacuggaag

SEQ ID NO: 1968560 - RNA, 19 nt, Artificial Sequence
  Description of Artificial Sequence: Synthetic oligonucleotide
aauuguggcauacccaucu

SEQ ID NO: 1968561 - RNA, 19 nt, Artificial Sequence
  Description of Artificial Sequence: Synthetic oligonucleotide
uguagcuccacacugucug

SEQ ID NO: 1968562 - RNA, 19 nt, Artificial Sequence
  Description of Artificial Sequence: Synthetic oligonucleotide
accaucugagcucacauuc

SEQ ID NO: 1968563 - RNA, 19 nt, Artificial Sequence
  Description of Artificial Sequence: Synthetic oligonucleotide
aagggcuccacgaagcucc

SEQ ID NO: 1968564 - RNA, 19 nt, Artificial Sequence
  Description of Artificial Sequence: Synthetic oligonucleotide
guugccggcacuuagauuc

SEQ ID NO: 1968565 - RNA, 19 nt, Artificial Sequence
  Description of Artificial Sequence: Synthetic oligonucleotide
uccacuucagcauucccgg

SEQ ID NO: 1968566 - RNA, 19 nt, Artificial Sequence
  Description of Artificial Sequence: Synthetic oligonucleotide
uaggcuauuggacacaauc

SEQ ID NO: 1968567 - RNA, 19 nt, Artificial Sequence
  Description of Artificial Sequence: Synthetic oligonucleotide
ugaaagguugcgaagcgca

SEQ ID NO: 1968568 - RNA, 19 nt, Artificial Sequence
  Description of Artificial Sequence: Synthetic oligonucleotide
aaguguauccaugggaauc

SEQ ID NO: 1968569 - RNA, 19 nt, Artificial Sequence
  Description of Artificial Sequence: Synthetic oligonucleotide
ugcauugcgaacauuccgc

SEQ ID NO: 1968570 - RNA, 19 nt, Artificial Sequence
  Description of Artificial Sequence: Synthetic oligonucleotide
uuccgcaugaugcacacgc

SEQ ID NO: 1968571 - RNA, 19 nt, Artificial Sequence
  Description of Artificial Sequence: Synthetic oligonucleotide
aauggcgacagcacgcacc

SEQ ID NO: 1968572 - RNA, 19 nt, Artificial Sequence
  Description of Artificial Sequence: Synthetic oligonucleotide
gguacgauaaccucauggg

SEQ ID NO: 1968573 - RNA, 19 nt, Artificial Sequence
  Description of Artificial Sequence: Synthetic oligonucleotide
aggguguugaaguuccggc

SEQ ID NO: 1968574 - RNA, 19 nt, Artificial Sequence
  Description of Artificial Sequence: Synthetic oligonucleotide
agaaggaacgcgcauuguc

SEQ ID NO: 1968575 - RNA, 19 nt, Artificial Sequence
  Description of Artificial Sequence: Synthetic oligonucleotide
uacgauaaccucauggguc

SEQ ID NO: 1968576 - RNA, 19 nt, Artificial Sequence
  Description of Artificial Sequence: Synthetic oligonucleotide
ucuagugaaagguugcgaa

SEQ ID NO: 1968577 - RNA, 19 nt, Artificial Sequence
  Description of Artificial Sequence: Synthetic oligonucleotide
ggcacuuagauucugcagg

SEQ ID NO: 1968578 - RNA, 19 nt, Artificial Sequence
  Description of Artificial Sequence: Synthetic oligonucleotide
ucuugaagaccguuugucc

SEQ ID NO: 1968579 - RNA, 19 nt, Artificial Sequence
  Description of Artificial Sequence: Synthetic oligonucleotide
auugucuaggcuauuggac

SEQ ID NO: 1968580 - RNA, 19 nt, Artificial Sequence
  Description of Artificial Sequence: Synthetic oligonucleotide
agugugcugucaucaaagc

SEQ ID NO: 1968581 - RNA, 19 nt, Artificial Sequence
  Description of Artificial Sequence: Synthetic oligonucleotide
uugucuaggcuauuggaca

SEQ ID NO: 1968582 - RNA, 19 nt, Artificial Sequence
  Description of Artificial Sequence: Synthetic oligonucleotide
aacauuccgcaccagcucu

SEQ ID NO: 1968583 - RNA, 19 nt, Artificial Sequence
  Description of Artificial Sequence: Synthetic oligonucleotide
ugguacagcagcucaaagc

SEQ ID NO: 1968584 - RNA, 19 nt, Artificial Sequence
  Description of Artificial Sequence: Synthetic oligonucleotide
gagguagagacguaccacc

SEQ ID NO: 1968585 - RNA, 19 nt, Artificial Sequence
  Description of Artificial Sequence: Synthetic oligonucleotide
ucuaccagcacuggcagcc

SEQ ID NO: 1968586 - RNA, 19 nt, Artificial Sequence
  Description of Artificial Sequence: Synthetic oligonucleotide
acuuagauucugcagggca

SEQ ID NO: 1968587 - RNA, 19 nt, Artificial Sequence
  Description of Artificial Sequence: Synthetic oligonucleotide
uccacugacuuauugucug

SEQ ID NO: 1968588 - RNA, 19 nt, Artificial Sequence
  Description of Artificial Sequence: Synthetic oligonucleotide
aagguugcgaagcgcaaug

SEQ ID NO: 1968589 - RNA, 19 nt, Artificial Sequence
  Description of Artificial Sequence: Synthetic oligonucleotide
uguggcauacccaucugga

SEQ ID NO: 1968590 - RNA, 19 nt, Artificial Sequence
  Description of Artificial Sequence: Synthetic oligonucleotide
uuguggcauacccaucugg

SEQ ID NO: 1968591 - RNA, 19 nt, Artificial Sequence
  Description of Artificial Sequence: Synthetic oligonucleotide
gagacguaccaccucaggc

SEQ ID NO: 1968592 - RNA, 19 nt, Artificial Sequence
  Description of Artificial Sequence: Synthetic oligonucleotide
ugugcauugcgaacauucc

SEQ ID NO: 1968593 - RNA, 19 nt, Artificial Sequence
  Description of Artificial Sequence: Synthetic oligonucleotide
uguuacgcuggucuaguga

SEQ ID NO: 1968594 - RNA, 19 nt, Artificial Sequence
  Description of Artificial Sequence: Synthetic oligonucleotide
uucguagucuucauugggu

SEQ ID NO: 1968595 - RNA, 19 nt, Artificial Sequence
  Description of Artificial Sequence: Synthetic oligonucleotide
ucuccguaaggagugagag

SEQ ID NO: 1968596 - RNA, 19 nt, Artificial Sequence
  Description of Artificial Sequence: Synthetic oligonucleotide
cauggcauagcucccaaug

SEQ ID NO: 1968597 - RNA, 19 nt, Artificial Sequence
  Description of Artificial Sequence: Synthetic oligonucleotide
ugagagguagagacguacc

SEQ ID NO: 1968598 - RNA, 19 nt, Artificial Sequence
  Description of Artificial Sequence: Synthetic oligonucleotide
uuggacacaaucucaugga

SEQ ID NO: 1968599 - RNA, 19 nt, Artificial Sequence
  Description of Artificial Sequence: Synthetic oligonucleotide
acuagggugagcaggugcc

SEQ ID NO: 1968600 - RNA, 19 nt, Artificial Sequence
  Description of Artificial Sequence: Synthetic oligonucleotide
ucaagguucuugucuacca

SEQ ID NO: 1968601 - RNA, 19 nt, Artificial Sequence
  Description of Artificial Sequence: Synthetic oligonucleotide
ucuucauuggguucucgcu

SEQ ID NO: 1968602 - RNA, 19 nt, Artificial Sequence
  Description of Artificial Sequence: Synthetic oligonucleotide
auagcucccaaugaggucu

SEQ ID NO: 1968603 - RNA, 19 nt, Artificial Sequence
  Description of Artificial Sequence: Synthetic oligonucleotide
cugugcauugcgaacauuc

SEQ ID NO: 1968604 - RNA, 19 nt, Artificial Sequence
  Description of Artificial Sequence: Synthetic oligonucleotide
auaaccucaugggucagcg

SEQ ID NO: 1968605 - RNA, 19 nt, Artificial Sequence
  Description of Artificial Sequence: Synthetic oligonucleotide
guugcgaagcgcaauggcg

SEQ ID NO: 1968606 - RNA, 19 nt, Artificial Sequence
  Description of Artificial Sequence: Synthetic oligonucleotide
ucuaccaguggcagugugc

SEQ ID NO: 1968607 - RNA, 19 nt, Artificial Sequence
  Description of Artificial Sequence: Synthetic oligonucleotide
ugauguguucuugaagacc

SEQ ID NO: 1968608 - RNA, 19 nt, Artificial Sequence
  Description of Artificial Sequence: Synthetic oligonucleotide
ggguacgauaaccucaugg

SEQ ID NO: 1968609 - RNA, 19 nt, Artificial Sequence
  Description of Artificial Sequence: Synthetic oligonucleotide
uugcgaagcgcaauggcga

SEQ ID NO: 1968610 - RNA, 19 nt, Artificial Sequence
  Description of Artificial Sequence: Synthetic oligonucleotide
uguaggagcgcguccacca

SEQ ID NO: 1968611 - RNA, 19 nt, Artificial Sequence
  Description of Artificial Sequence: Synthetic oligonucleotide
gcuuucguagucuucauug

SEQ ID NO: 1968612 - RNA, 19 nt, Artificial Sequence
  Description of Artificial Sequence: Synthetic oligonucleotide
uggaccaaguguauccaug

SEQ ID NO: 1968613 - RNA, 19 nt, Artificial Sequence
  Description of Artificial Sequence: Synthetic oligonucleotide
agugcaggcacaccacggg

SEQ ID NO: 1968614 - RNA, 19 nt, Artificial Sequence
  Description of Artificial Sequence: Synthetic oligonucleotide
ggaaucacaucucgggugg

SEQ ID NO: 1968615 - RNA, 19 nt, Artificial Sequence
  Description of Artificial Sequence: Synthetic oligonucleotide
caugggaaucacaucucgg

SEQ ID NO: 1968616 - RNA, 19 nt, Artificial Sequence
  Description of Artificial Sequence: Synthetic oligonucleotide
gugcauugcgaacauuccg

SEQ ID NO: 1968617 - RNA, 19 nt, Artificial Sequence
  Description of Artificial Sequence: Synthetic oligonucleotide
acgauaaccucauggguca

SEQ ID NO: 1968618 - RNA, 19 nt, Artificial Sequence
  Description of Artificial Sequence: Synthetic oligonucleotide
cagugugcugucaucaaag

SEQ ID NO: 1968619 - RNA, 19 nt, Artificial Sequence
  Description of Artificial Sequence: Synthetic oligonucleotide
accguuuguccacuucagc

SEQ ID NO: 1968620 - RNA, 19 nt, Artificial Sequence
  Description of Artificial Sequence: Synthetic oligonucleotide
gaggucuuuguuacgcugg

SEQ ID NO: 1968621 - RNA, 19 nt, Artificial Sequence
  Description of Artificial Sequence: Synthetic oligonucleotide
ugaggucuuuguuacgcug

SEQ ID NO: 1968622 - RNA, 19 nt, Artificial Sequence
  Description of Artificial Sequence: Synthetic oligonucleotide
gucuguagcacgugcgacg

SEQ ID NO: 1968623 - RNA, 19 nt, Artificial Sequence
  Description of Artificial Sequence: Synthetic oligonucleotide
gacagcacgcaccaccuug

SEQ ID NO: 1968624 - RNA, 19 nt, Artificial Sequence
  Description of Artificial Sequence: Synthetic oligonucleotide
uggguucucgcucccagcc

SEQ ID NO: 1968625 - RNA, 19 nt, Artificial Sequence
  Description of Artificial Sequence: Synthetic oligonucleotide
uccaguugccggcacuuag

SEQ ID NO: 1968626 - RNA, 19 nt, Artificial Sequence
  Description of Artificial Sequence: Synthetic oligonucleotide
uugaagaccguuuguccac

SEQ ID NO: 1968627 - RNA, 19 nt, Artificial Sequence
  Description of Artificial Sequence: Synthetic oligonucleotide
agcucaaagccuuuccgca

SEQ ID NO: 1968628 - RNA, 19 nt, Artificial Sequence
  Description of Artificial Sequence: Synthetic oligonucleotide
ugagugggguacgauaacc

SEQ ID NO: 1968629 - RNA, 19 nt, Artificial Sequence
  Description of Artificial Sequence: Synthetic oligonucleotide
uggaagcgugccuuggucc

SEQ ID NO: 1968630 - RNA, 19 nt, Artificial Sequence
  Description of Artificial Sequence: Synthetic oligonucleotide
cuagcagacuggaagcgug

SEQ ID NO: 1968631 - RNA, 19 nt, Artificial Sequence
  Description of Artificial Sequence: Synthetic oligonucleotide
cagcccuucgcacucacgg

SEQ ID NO: 1968632 - RNA, 19 nt, Artificial Sequence
  Description of Artificial Sequence: Synthetic oligonucleotide
ggaccaaguguauccaugg

SEQ ID NO: 1968633 - RNA, 19 nt, Artificial Sequence
  Description of Artificial Sequence: Synthetic oligonucleotide
guagagacguaccaccuca

SEQ ID NO: 1968634 - RNA, 19 nt, Artificial Sequence
  Description of Artificial Sequence: Synthetic oligonucleotide
agagacguaccaccucagg

SEQ ID NO: 1968635 - RNA, 19 nt, Artificial Sequence
  Description of Artificial Sequence: Synthetic oligonucleotide
aguucuaccagcacuggca

SEQ ID NO: 1968636 - RNA, 19 nt, Artificial Sequence
  Description of Artificial Sequence: Synthetic oligonucleotide
uacgcuggucuagugaaag

SEQ ID NO: 1968637 - RNA, 19 nt, Artificial Sequence
  Description of Artificial Sequence: Synthetic oligonucleotide
uguagcacgugcgacgcug

SEQ ID NO: 1968638 - RNA, 19 nt, Artificial Sequence
  Description of Artificial Sequence: Synthetic oligonucleotide
ugcacacgcaguuucucca

SEQ ID NO: 1968639 - RNA, 19 nt, Artificial Sequence
  Description of Artificial Sequence: Synthetic oligonucleotide
ucuguagcacgugcgacgc

SEQ ID NO: 1968640 - RNA, 19 nt, Artificial Sequence
  Description of Artificial Sequence: Synthetic oligonucleotide
acugacuuauugucugugu

SEQ ID NO: 1968641 - RNA, 19 nt, Artificial Sequence
  Description of Artificial Sequence: Synthetic oligonucleotide
gacguaccaccucaggcug

SEQ ID NO: 1968642 - RNA, 19 nt, Artificial Sequence
  Description of Artificial Sequence: Synthetic oligonucleotide
guuacgcuggucuagugaa

SEQ ID NO: 1968643 - RNA, 19 nt, Artificial Sequence
  Description of Artificial Sequence: Synthetic oligonucleotide
caccuugucagucucugac

SEQ ID NO: 1968644 - RNA, 19 nt, Artificial Sequence
  Description of Artificial Sequence: Synthetic oligonucleotide
acgcaguuucuccacugac

SEQ ID NO: 1968645 - RNA, 19 nt, Artificial Sequence
  Description of Artificial Sequence: Synthetic oligonucleotide
agcucugucauggcauagc

SEQ ID NO: 1968646 - RNA, 19 nt, Artificial Sequence
  Description of Artificial Sequence: Synthetic oligonucleotide
ugcuagcagacuggaagcg

SEQ ID NO: 1968647 - RNA, 19 nt, Artificial Sequence
  Description of Artificial Sequence: Synthetic oligonucleotide
uuuguuacgcuggucuagu

SEQ ID NO: 1968648 - RNA, 19 nt, Artificial Sequence
  Description of Artificial Sequence: Synthetic oligonucleotide
ugcgacgcugccuuggccu

SEQ ID NO: 1968649 - RNA, 19 nt, Artificial Sequence
  Description of Artificial Sequence: Synthetic oligonucleotide
uugcgaacauuccgcacca

SEQ ID NO: 1968650 - RNA, 19 nt, Artificial Sequence
  Description of Artificial Sequence: Synthetic oligonucleotide
caagguucuugucuaccag

SEQ ID NO: 1968651 - RNA, 19 nt, Artificial Sequence
  Description of Artificial Sequence: Synthetic oligonucleotide
gaacauuccgcaccagcuc

SEQ ID NO: 1968652 - RNA, 19 nt, Artificial Sequence
  Description of Artificial Sequence: Synthetic oligonucleotide
acugucuguagcacgugcg

SEQ ID NO: 1968653 - RNA, 19 nt, Artificial Sequence
  Description of Artificial Sequence: Synthetic oligonucleotide
uccccaucaagguucuugu

SEQ ID NO: 1968654 - RNA, 19 nt, Artificial Sequence
  Description of Artificial Sequence: Synthetic oligonucleotide
aaggaacgcgcauugucua

SEQ ID NO: 1968655 - RNA, 19 nt, Artificial Sequence
  Description of Artificial Sequence: Synthetic oligonucleotide
cuuuguuacgcuggucuag

SEQ ID NO: 1968656 - RNA, 19 nt, Artificial Sequence
  Description of Artificial Sequence: Synthetic oligonucleotide
cauugucuaggcuauugga

SEQ ID NO: 1968657 - RNA, 19 nt, Artificial Sequence
  Description of Artificial Sequence: Synthetic oligonucleotide
ucaaagccuuuccgcauga

SEQ ID NO: 1968658 - RNA, 19 nt, Artificial Sequence
  Description of Artificial Sequence: Synthetic oligonucleotide
uggacacaaucucauggau

SEQ ID NO: 1968659 - RNA, 19 nt, Artificial Sequence
  Description of Artificial Sequence: Synthetic oligonucleotide
gcacgcaccaccuugucag

SEQ ID NO: 1968660 - RNA, 19 nt, Artificial Sequence
  Description of Artificial Sequence: Synthetic oligonucleotide
agcaguucuaccagcacug

SEQ ID NO: 1968661 - RNA, 19 nt, Artificial Sequence
  Description of Artificial Sequence: Synthetic oligonucleotide
ugggguacgauaaccucau

SEQ ID NO: 1968662 - RNA, 19 nt, Artificial Sequence
  Description of Artificial Sequence: Synthetic oligonucleotide
acggcuaccacuguauccu

SEQ ID NO: 1968663 - RNA, 19 nt, Artificial Sequence
  Description of Artificial Sequence: Synthetic oligonucleotide
cacuagggugagcaggugc

SEQ ID NO: 1968664 - RNA, 19 nt, Artificial Sequence
  Description of Artificial Sequence: Synthetic oligonucleotide
ugguccagccaucucucug

SEQ ID NO: 1968665 - RNA, 19 nt, Artificial Sequence
  Description of Artificial Sequence: Synthetic oligonucleotide
ugaugcacacgcaguuucu

SEQ ID NO: 1968666 - RNA, 19 nt, Artificial Sequence
  Description of Artificial Sequence: Synthetic oligonucleotide
uguggagucacugcccagu

SEQ ID NO: 1968667 - RNA, 19 nt, Artificial Sequence
  Description of Artificial Sequence: Synthetic oligonucleotide
aguuccggcucuccguaag

SEQ ID NO: 1968668 - RNA, 19 nt, Artificial Sequence
  Description of Artificial Sequence: Synthetic oligonucleotide
gguccuuuggcagugcuag

SEQ ID NO: 1968669 - RNA, 19 nt, Artificial Sequence
  Description of Artificial Sequence: Synthetic oligonucleotide
acccaucuggaccaagugu

SEQ ID NO: 1968670 - RNA, 19 nt, Artificial Sequence
  Description of Artificial Sequence: Synthetic oligonucleotide
uauugucuguguccuuccu

SEQ ID NO: 1968671 - RNA, 19 nt, Artificial Sequence
  Description of Artificial Sequence: Synthetic oligonucleotide
gcauugucuaggcuauugg

SEQ ID NO: 1968672 - RNA, 19 nt, Artificial Sequence
  Description of Artificial Sequence: Synthetic oligonucleotide
gaugguguugagcacggcu

SEQ ID NO: 1968673 - RNA, 19 nt, Artificial Sequence
  Description of Artificial Sequence: Synthetic oligonucleotide
agcagacuggaagcgugcc

SEQ ID NO: 1968674 - RNA, 19 nt, Artificial Sequence
  Description of Artificial Sequence: Synthetic oligonucleotide
gggaaucacaucucgggug

SEQ ID NO: 1968675 - RNA, 19 nt, Artificial Sequence
  Description of Artificial Sequence: Synthetic oligonucleotide
uagcagacuggaagcgugc

SEQ ID NO: 1968676 - RNA, 19 nt, Artificial Sequence
  Description of Artificial Sequence: Synthetic oligonucleotide
aaagguugcgaagcgcaau

SEQ ID NO: 1968677 - RNA, 19 nt, Artificial Sequence
  Description of Artificial Sequence: Synthetic oligonucleotide
cucccuccgaucaauugug

SEQ ID NO: 1968678 - RNA, 19 nt, Artificial Sequence
  Description of Artificial Sequence: Synthetic oligonucleotide
caaugaggucuuuguuacg

SEQ ID NO: 1968679 - RNA, 19 nt, Artificial Sequence
  Description of Artificial Sequence: Synthetic oligonucleotide
guggcgcggauguacgugg

SEQ ID NO: 1968680 - RNA, 19 nt, Artificial Sequence
  Description of Artificial Sequence: Synthetic oligonucleotide
aaucacaucucggguggcu

SEQ ID NO: 1968681 - RNA, 19 nt, Artificial Sequence
  Description of Artificial Sequence: Synthetic oligonucleotide
gaacgcgcauugucuaggc

SEQ ID NO: 1968682 - RNA, 19 nt, Artificial Sequence
  Description of Artificial Sequence: Synthetic oligonucleotide
uccggcucuccguaaggag

SEQ ID NO: 1968683 - RNA, 19 nt, Artificial Sequence
  Description of Artificial Sequence: Synthetic oligonucleotide
guauccuccuccagguggg

SEQ ID NO: 1968684 - RNA, 19 nt, Artificial Sequence
  Description of Artificial Sequence: Synthetic oligonucleotide
ugacuggagcaguucuacc

SEQ ID NO: 1968685 - RNA, 19 nt, Artificial Sequence
  Description of Artificial Sequence: Synthetic oligonucleotide
uauccaugggaaucacauc

SEQ ID NO: 1968686 - RNA, 19 nt, Artificial Sequence
  Description of Artificial Sequence: Synthetic oligonucleotide
aggaacgcgcauugucuag

SEQ ID NO: 1968687 - RNA, 19 nt, Artificial Sequence
  Description of Artificial Sequence: Synthetic oligonucleotide
ggcuauuggacacaaucuc

SEQ ID NO: 1968688 - RNA, 19 nt, Artificial Sequence
  Description of Artificial Sequence: Synthetic oligonucleotide
ucguagucuucauuggguu

SEQ ID NO: 1968689 - RNA, 19 nt, Artificial Sequence
  Description of Artificial Sequence: Synthetic oligonucleotide
auuguggcauacccaucug

SEQ ID NO: 1968690 - RNA, 19 nt, Artificial Sequence
  Description of Artificial Sequence: Synthetic oligonucleotide
ucugacuggagcaguucua

SEQ ID NO: 1968691 - RNA, 19 nt, Artificial Sequence
  Description of Artificial Sequence: Synthetic oligonucleotide
gauaaccucaugggucagc

SEQ ID NO: 1968692 - RNA, 19 nt, Artificial Sequence
  Description of Artificial Sequence: Synthetic oligonucleotide
gguucuugucuaccagugg

SEQ ID NO: 1968693 - RNA, 19 nt, Artificial Sequence
  Description of Artificial Sequence: Synthetic oligonucleotide
uuguagcuccacacugucu

SEQ ID NO: 1968694 - RNA, 19 nt, Artificial Sequence
  Description of Artificial Sequence: Synthetic oligonucleotide
aggcuauuggacacaaucu

SEQ ID NO: 1968695 - RNA, 19 nt, Artificial Sequence
  Description of Artificial Sequence: Synthetic oligonucleotide
cucauggaugguguugagc

SEQ ID NO: 1968696 - RNA, 19 nt, Artificial Sequence
  Description of Artificial Sequence: Synthetic oligonucleotide
cacugucuguagcacgugc

SEQ ID NO: 1968697 - RNA, 19 nt, Artificial Sequence
  Description of Artificial Sequence: Synthetic oligonucleotide
acgcuggucuagugaaagg

SEQ ID NO: 1968698 - RNA, 19 nt, Artificial Sequence
  Description of Artificial Sequence: Synthetic oligonucleotide
ucacaucucggguggcuga

SEQ ID NO: 1968699 - RNA, 19 nt, Artificial Sequence
  Description of Artificial Sequence: Synthetic oligonucleotide
acgcgcauugucuaggcua

SEQ ID NO: 1968700 - RNA, 19 nt, Artificial Sequence
  Description of Artificial Sequence: Synthetic oligonucleotide
aacgcgcauugucuaggcu

SEQ ID NO: 1968701 - RNA, 19 nt, Artificial Sequence
  Description of Artificial Sequence: Synthetic oligonucleotide
aaggagugagagguagaga

SEQ ID NO: 1968702 - RNA, 19 nt, Artificial Sequence
  Description of Artificial Sequence: Synthetic oligonucleotide
cauugcgaacauuccgcac

SEQ ID NO: 1968703 - RNA, 19 nt, Artificial Sequence
  Description of Artificial Sequence: Synthetic oligonucleotide
acacgcaguuucuccacug

SEQ ID NO: 1968704 - RNA, 19 nt, Artificial Sequence
  Description of Artificial Sequence: Synthetic oligonucleotide
ggcauagcucccaaugagg

SEQ ID NO: 1968705 - RNA, 19 nt, Artificial Sequence
  Description of Artificial Sequence: Synthetic oligonucleotide
ucucauggaugguguugag

SEQ ID NO: 1968706 - RNA, 19 nt, Artificial Sequence
  Description of Artificial Sequence: Synthetic oligonucleotide
cugacuggagcaguucuac

SEQ ID NO: 1968707 - RNA, 19 nt, Artificial Sequence
  Description of Artificial Sequence: Synthetic oligonucleotide
caguucuaccagcacuggc

SEQ ID NO: 1968708 - RNA, 19 nt, Artificial Sequence
  Description of Artificial Sequence: Synthetic oligonucleotide
ugucuguagcacgugcgac

SEQ ID NO: 1968709 - RNA, 19 nt, Artificial Sequence
  Description of Artificial Sequence: Synthetic oligonucleotide
guuccggcucuccguaagg

SEQ ID NO: 1968710 - RNA, 19 nt, Artificial Sequence
  Description of Artificial Sequence: Synthetic oligonucleotide
gaaggaacgcgcauugucu

SEQ ID NO: 1968711 - RNA, 19 nt, Artificial Sequence
  Description of Artificial Sequence: Synthetic oligonucleotide
ucauuggguucucgcuccc

SEQ ID NO: 1968712 - RNA, 19 nt, Artificial Sequence
  Description of Artificial Sequence: Synthetic oligonucleotide
gguguugaaguuccggcuc

SEQ ID NO: 1968713 - RNA, 19 nt, Artificial Sequence
  Description of Artificial Sequence: Synthetic oligonucleotide
gacuuauugucuguguccu

SEQ ID NO: 1968714 - RNA, 19 nt, Artificial Sequence
  Description of Artificial Sequence: Synthetic oligonucleotide
gcagaaggaacgcgcauug

SEQ ID NO: 1968715 - RNA, 19 nt, Artificial Sequence
  Description of Artificial Sequence: Synthetic oligonucleotide
caucaagguucuugucuac

SEQ ID NO: 1968716 - RNA, 19 nt, Artificial Sequence
  Description of Artificial Sequence: Synthetic oligonucleotide
gacuggaagcgugccuugg

SEQ ID NO: 1968717 - RNA, 19 nt, Artificial Sequence
  Description of Artificial Sequence: Synthetic oligonucleotide
uuguuacgcuggucuagug

SEQ ID NO: 1968718 - RNA, 19 nt, Artificial Sequence
  Description of Artificial Sequence: Synthetic oligonucleotide
ugcgaagcgcaauggcgac

SEQ ID NO: 1968719 - RNA, 19 nt, Artificial Sequence
  Description of Artificial Sequence: Synthetic oligonucleotide
uccacacugucuguagcac

SEQ ID NO: 1968720 - RNA, 19 nt, Artificial Sequence
  Description of Artificial Sequence: Synthetic oligonucleotide
uccgcaugaugcacacgca

SEQ ID NO: 1968721 - RNA, 19 nt, Artificial Sequence
  Description of Artificial Sequence: Synthetic oligonucleotide
uuguccacuucagcauucc

SEQ ID NO: 1968722 - RNA, 19 nt, Artificial Sequence
  Description of Artificial Sequence: Synthetic oligonucleotide
cugucauggcauagcuccc

SEQ ID NO: 1968723 - RNA, 19 nt, Artificial Sequence
  Description of Artificial Sequence: Synthetic oligonucleotide
gguugcgaagcgcaauggc

SEQ ID NO: 1968724 - RNA, 19 nt, Artificial Sequence
  Description of Artificial Sequence: Synthetic oligonucleotide
gugaaagguugcgaagcgc

SEQ ID NO: 1968725 - RNA, 19 nt, Artificial Sequence
  Description of Artificial Sequence: Synthetic oligonucleotide
agguugcgaagcgcaaugg

SEQ ID NO: 1968726 - RNA, 19 nt, Artificial Sequence
  Description of Artificial Sequence: Synthetic oligonucleotide
gaaguuccggcucuccgua

SEQ ID NO: 1968727 - RNA, 19 nt, Artificial Sequence
  Description of Artificial Sequence: Synthetic oligonucleotide
agcacgcaccaccuuguca

SEQ ID NO: 1968728 - RNA, 19 nt, Artificial Sequence
  Description of Artificial Sequence: Synthetic oligonucleotide
aucacaucucggguggcug

SEQ ID NO: 1968729 - RNA, 19 nt, Artificial Sequence
  Description of Artificial Sequence: Synthetic oligonucleotide
aucucggguggcugacuuc

SEQ ID NO: 1968730 - RNA, 19 nt, Artificial Sequence
  Description of Artificial Sequence: Synthetic oligonucleotide
ggcuccacgaagcuccuug

SEQ ID NO: 1968731 - RNA, 19 nt, Artificial Sequence
  Description of Artificial Sequence: Synthetic oligonucleotide
guacgauaaccucaugggu

SEQ ID NO: 1968732 - RNA, 19 nt, Artificial Sequence
  Description of Artificial Sequence: Synthetic oligonucleotide
acgaagcuccuuguagcuc

SEQ ID NO: 1968733 - RNA, 19 nt, Artificial Sequence
  Description of Artificial Sequence: Synthetic oligonucleotide
cuccacacugucuguagca

SEQ ID NO: 1968734 - RNA, 19 nt, Artificial Sequence
  Description of Artificial Sequence: Synthetic oligonucleotide
ugaagaccguuuguccacu

SEQ ID NO: 1968735 - RNA, 19 nt, Artificial Sequence
  Description of Artificial Sequence: Synthetic oligonucleotide
gcacugacuggcuggaggc

SEQ ID NO: 1968736 - RNA, 19 nt, Artificial Sequence
  Description of Artificial Sequence: Synthetic oligonucleotide
uuacgcuggucuagugaaa

SEQ ID NO: 1968737 - RNA, 19 nt, Artificial Sequence
  Description of Artificial Sequence: Synthetic oligonucleotide
gaugcacacgcaguuucuc

SEQ ID NO: 1968738 - RNA, 19 nt, Artificial Sequence
  Description of Artificial Sequence: Synthetic oligonucleotide
uucuccccaucaagguucu

SEQ ID NO: 1968739 - RNA, 19 nt, Artificial Sequence
  Description of Artificial Sequence: Synthetic oligonucleotide
gugggguacgauaaccuca

SEQ ID NO: 1968740 - RNA, 19 nt, Artificial Sequence
  Description of Artificial Sequence: Synthetic oligonucleotide
uggagucacugcccagugu

SEQ ID NO: 1968741 - RNA, 19 nt, Artificial Sequence
  Description of Artificial Sequence: Synthetic oligonucleotide
cuauuggacacaaucucau

SEQ ID NO: 1968742 - RNA, 19 nt, Artificial Sequence
  Description of Artificial Sequence: Synthetic oligonucleotide
gcuccuuguagcuccacac

SEQ ID NO: 1968743 - RNA, 19 nt, Artificial Sequence
  Description of Artificial Sequence: Synthetic oligonucleotide
cucugucauggcauagcuc

SEQ ID NO: 1968744 - RNA, 19 nt, Artificial Sequence
  Description of Artificial Sequence: Synthetic oligonucleotide
guugaaguuccggcucucc

SEQ ID NO: 1968745 - RNA, 19 nt, Artificial Sequence
  Description of Artificial Sequence: Synthetic oligonucleotide
ggaacgcgcauugucuagg

SEQ ID NO: 1968746 - RNA, 19 nt, Artificial Sequence
  Description of Artificial Sequence: Synthetic oligonucleotide
uggcccacguccaguugcc

SEQ ID NO: 1968747 - RNA, 19 nt, Artificial Sequence
  Description of Artificial Sequence: Synthetic oligonucleotide
uuuccgcaugaugcacacg

SEQ ID NO: 1968748 - RNA, 19 nt, Artificial Sequence
  Description of Artificial Sequence: Synthetic oligonucleotide
ccaaguguauccaugggaa

SEQ ID NO: 1968749 - RNA, 19 nt, Artificial Sequence
  Description of Artificial Sequence: Synthetic oligonucleotide
uggguccuuuggcagugcu

SEQ ID NO: 1968750 - RNA, 19 nt, Artificial Sequence
  Description of Artificial Sequence: Synthetic oligonucleotide
cacugacuuauugucugug

SEQ ID NO: 1968751 - RNA, 19 nt, Artificial Sequence
  Description of Artificial Sequence: Synthetic oligonucleotide
guaggagcgcguccaccag

SEQ ID NO: 1968752 - RNA, 19 nt, Artificial Sequence
  Description of Artificial Sequence: Synthetic oligonucleotide
gcuauuggacacaaucuca

SEQ ID NO: 1968753 - RNA, 19 nt, Artificial Sequence
  Description of Artificial Sequence: Synthetic oligonucleotide
cucacggagucgccgccgg

SEQ ID NO: 1968754 - RNA, 19 nt, Artificial Sequence
  Description of Artificial Sequence: Synthetic oligonucleotide
gcgaacauuccgcaccagc

SEQ ID NO: 1968755 - RNA, 19 nt, Artificial Sequence
  Description of Artificial Sequence: Synthetic oligonucleotide
cagcccacgcuccuugcgc

SEQ ID NO: 1968756 - RNA, 19 nt, Artificial Sequence
  Description of Artificial Sequence: Synthetic oligonucleotide
uagauucugcagggcacca

SEQ ID NO: 1968757 - RNA, 19 nt, Artificial Sequence
  Description of Artificial Sequence: Synthetic oligonucleotide
agauucugcagggcaccag

SEQ ID NO: 1968758 - RNA, 19 nt, Artificial Sequence
  Description of Artificial Sequence: Synthetic oligonucleotide
agucacugcccaguguccu

SEQ ID NO: 1968759 - RNA, 19 nt, Artificial Sequence
  Description of Artificial Sequence: Synthetic oligonucleotide
cauuccucaggcagccuga

SEQ ID NO: 1968760 - RNA, 19 nt, Artificial Sequence
  Description of Artificial Sequence: Synthetic oligonucleotide
gcgcaauggcgacagcacg

SEQ ID NO: 1968761 - RNA, 19 nt, Artificial Sequence
  Description of Artificial Sequence: Synthetic oligonucleotide
gggcacuagggugagcagg

SEQ ID NO: 1968762 - RNA, 19 nt, Artificial Sequence
  Description of Artificial Sequence: Synthetic oligonucleotide
aagcuccuuguagcuccac

SEQ ID NO: 1968763 - RNA, 19 nt, Artificial Sequence
  Description of Artificial Sequence: Synthetic oligonucleotide
uagcacgugcgacgcugcc

SEQ ID NO: 1968764 - RNA, 19 nt, Artificial Sequence
  Description of Artificial Sequence: Synthetic oligonucleotide
agguagagacguaccaccu

SEQ ID NO: 1968765 - RNA, 19 nt, Artificial Sequence
  Description of Artificial Sequence: Synthetic oligonucleotide
caggugccugugcauugcg

SEQ ID NO: 1968766 - RNA, 19 nt, Artificial Sequence
  Description of Artificial Sequence: Synthetic oligonucleotide
uuccggcucuccguaagga

SEQ ID NO: 1968767 - RNA, 19 nt, Artificial Sequence
  Description of Artificial Sequence: Synthetic oligonucleotide
gucuagugaaagguugcga

SEQ ID NO: 1968768 - RNA, 19 nt, Artificial Sequence
  Description of Artificial Sequence: Synthetic oligonucleotide
ccguuuguccacuucagca

SEQ ID NO: 1968769 - RNA, 19 nt, Artificial Sequence
  Description of Artificial Sequence: Synthetic oligonucleotide
ugccuuggccucccgcacu

SEQ ID NO: 1968770 - RNA, 19 nt, Artificial Sequence
  Description of Artificial Sequence: Synthetic oligonucleotide
uugccggcacuuagauucu

SEQ ID NO: 1968771 - RNA, 19 nt, Artificial Sequence
  Description of Artificial Sequence: Synthetic oligonucleotide
cugucuguagcacgugcga

SEQ ID NO: 1968772 - RNA, 19 nt, Artificial Sequence
  Description of Artificial Sequence: Synthetic oligonucleotide
guugagcacggcuaccacu

SEQ ID NO: 1968773 - RNA, 19 nt, Artificial Sequence
  Description of Artificial Sequence: Synthetic oligonucleotide
cauguaggagcgcguccac

SEQ ID NO: 1968774 - RNA, 19 nt, Artificial Sequence
  Description of Artificial Sequence: Synthetic oligonucleotide
uaaccucaugggucagcgu

SEQ ID NO: 1968775 - RNA, 19 nt, Artificial Sequence
  Description of Artificial Sequence: Synthetic oligonucleotide
aaguuccggcucuccguaa

SEQ ID NO: 1968776 - RNA, 19 nt, Artificial Sequence
  Description of Artificial Sequence: Synthetic oligonucleotide
gugccugugcauugcgaac

SEQ ID NO: 1968777 - RNA, 19 nt, Artificial Sequence
  Description of Artificial Sequence: Synthetic oligonucleotide
ccacacugucuguagcacg

SEQ ID NO: 1968778 - RNA, 19 nt, Artificial Sequence
  Description of Artificial Sequence: Synthetic oligonucleotide
acucacggagucgccgccg

SEQ ID NO: 1968779 - RNA, 19 nt, Artificial Sequence
  Description of Artificial Sequence: Synthetic oligonucleotide
ucauggcauagcucccaau

SEQ ID NO: 1968780 - RNA, 19 nt, Artificial Sequence
  Description of Artificial Sequence: Synthetic oligonucleotide
ugcccaguguccuccgcuc

SEQ ID NO: 1968781 - RNA, 19 nt, Artificial Sequence
  Description of Artificial Sequence: Synthetic oligonucleotide
acgggccugcagaaggaac

SEQ ID NO: 1968782 - RNA, 19 nt, Artificial Sequence
  Description of Artificial Sequence: Synthetic oligonucleotide
caucuggaccaaguguauc

SEQ ID NO: 1968783 - RNA, 19 nt, Artificial Sequence
  Description of Artificial Sequence: Synthetic oligonucleotide
cucuccguaaggagugaga

SEQ ID NO: 1968784 - RNA, 19 nt, Artificial Sequence
  Description of Artificial Sequence: Synthetic oligonucleotide
gcccuucgcacucacggag

SEQ ID NO: 1968785 - RNA, 19 nt, Artificial Sequence
  Description of Artificial Sequence: Synthetic oligonucleotide
cugacuggcuggaggccac

SEQ ID NO: 1968786 - RNA, 19 nt, Artificial Sequence
  Description of Artificial Sequence: Synthetic oligonucleotide
uggcauuccuuuggguccu

SEQ ID NO: 1968787 - RNA, 19 nt, Artificial Sequence
  Description of Artificial Sequence: Synthetic oligonucleotide
ggugccugugcauugcgaa

SEQ ID NO: 1968788 - RNA, 19 nt, Artificial Sequence
  Description of Artificial Sequence: Synthetic oligonucleotide
ggaagcgugccuuggucca

SEQ ID NO: 1968789 - RNA, 19 nt, Artificial Sequence
  Description of Artificial Sequence: Synthetic oligonucleotide
acgugcgacgcugccuugg

SEQ ID NO: 1968790 - RNA, 19 nt, Artificial Sequence
  Description of Artificial Sequence: Synthetic oligonucleotide
agcccacgcuccuugcgca

SEQ ID NO: 1968791 - RNA, 19 nt, Artificial Sequence
  Description of Artificial Sequence: Synthetic oligonucleotide
ccuccgaucaauuguggca

SEQ ID NO: 1968792 - RNA, 19 nt, Artificial Sequence
  Description of Artificial Sequence: Synthetic oligonucleotide
ucucgcucccagccugagu

SEQ ID NO: 1968793 - RNA, 19 nt, Artificial Sequence
  Description of Artificial Sequence: Synthetic oligonucleotide
accguggcgcggauguacg

SEQ ID NO: 1968794 - RNA, 19 nt, Artificial Sequence
  Description of Artificial Sequence: Synthetic oligonucleotide
acgcaccaccuugucaguc

SEQ ID NO: 1968795 - RNA, 19 nt, Artificial Sequence
  Description of Artificial Sequence: Synthetic oligonucleotide
guaaggagugagagguaga

SEQ ID NO: 1968796 - RNA, 19 nt, Artificial Sequence
  Description of Artificial Sequence: Synthetic oligonucleotide
cacuggcagcccacgcucc

SEQ ID NO: 1968797 - RNA, 19 nt, Artificial Sequence
  Description of Artificial Sequence: Synthetic oligonucleotide
gauguacguggcccacguc

SEQ ID NO: 1968798 - RNA, 19 nt, Artificial Sequence
  Description of Artificial Sequence: Synthetic oligonucleotide
ggcauguaggagcgcgucc

SEQ ID NO: 1968799 - RNA, 19 nt, Artificial Sequence
  Description of Artificial Sequence: Synthetic oligonucleotide
acuuauugucuguguccuu

SEQ ID NO: 1968800 - RNA, 19 nt, Artificial Sequence
  Description of Artificial Sequence: Synthetic oligonucleotide
agcacggcuaccacuguau

SEQ ID NO: 1968801 - RNA, 19 nt, Artificial Sequence
  Description of Artificial Sequence: Synthetic oligonucleotide
cacggagucgccgccgggc

SEQ ID NO: 1968802 - RNA, 19 nt, Artificial Sequence
  Description of Artificial Sequence: Synthetic oligonucleotide
cauacccaucuggaccaag

SEQ ID NO: 1968803 - RNA, 19 nt, Artificial Sequence
  Description of Artificial Sequence: Synthetic oligonucleotide
uguccuccgcucccuccga

SEQ ID NO: 1968804 - RNA, 19 nt, Artificial Sequence
  Description of Artificial Sequence: Synthetic oligonucleotide
cagccugauguguucuuga

SEQ ID NO: 1968805 - RNA, 19 nt, Artificial Sequence
  Description of Artificial Sequence: Synthetic oligonucleotide
ggggcuuucguagucuuca

SEQ ID NO: 1968806 - RNA, 19 nt, Artificial Sequence
  Description of Artificial Sequence: Synthetic oligonucleotide
cacucacggagucgccgcc

SEQ ID NO: 1968807 - RNA, 19 nt, Artificial Sequence
  Description of Artificial Sequence: Synthetic oligonucleotide
uggcugacuucuccccauc

SEQ ID NO: 1968808 - RNA, 19 nt, Artificial Sequence
  Description of Artificial Sequence: Synthetic oligonucleotide
acagcacgcaccaccuugu

SEQ ID NO: 1968809 - RNA, 19 nt, Artificial Sequence
  Description of Artificial Sequence: Synthetic oligonucleotide
gagugggguacgauaaccu

SEQ ID NO: 1968810 - RNA, 19 nt, Artificial Sequence
  Description of Artificial Sequence: Synthetic oligonucleotide
cgcaauggcgacagcacgc

SEQ ID NO: 1968811 - RNA, 19 nt, Artificial Sequence
  Description of Artificial Sequence: Synthetic oligonucleotide
aguugccggcacuuagauu

SEQ ID NO: 1968812 - RNA, 19 nt, Artificial Sequence
  Description of Artificial Sequence: Synthetic oligonucleotide
gcauugcgaacauuccgca

SEQ ID NO: 1968813 - RNA, 19 nt, Artificial Sequence
  Description of Artificial Sequence: Synthetic oligonucleotide
guggcagugugcugucauc

SEQ ID NO: 1968814 - RNA, 19 nt, Artificial Sequence
  Description of Artificial Sequence: Synthetic oligonucleotide
ccugagugggguacgauaa

SEQ ID NO: 1968815 - RNA, 19 nt, Artificial Sequence
  Description of Artificial Sequence: Synthetic oligonucleotide
cuaccacuguauccuccuc

SEQ ID NO: 1968816 - RNA, 19 nt, Artificial Sequence
  Description of Artificial Sequence: Synthetic oligonucleotide
cugcccacagcugacugca

SEQ ID NO: 1968817 - RNA, 19 nt, Artificial Sequence
  Description of Artificial Sequence: Synthetic oligonucleotide
cacugacuggcuggaggcc

SEQ ID NO: 1968818 - RNA, 19 nt, Artificial Sequence
  Description of Artificial Sequence: Synthetic oligonucleotide
uccgaucaauuguggcaua

SEQ ID NO: 1968819 - RNA, 19 nt, Artificial Sequence
  Description of Artificial Sequence: Synthetic oligonucleotide
caauggcgacagcacgcac

SEQ ID NO: 1968820 - RNA, 19 nt, Artificial Sequence
  Description of Artificial Sequence: Synthetic oligonucleotide
gaagcgcaauggcgacagc

SEQ ID NO: 1968821 - RNA, 19 nt, Artificial Sequence
  Description of Artificial Sequence: Synthetic oligonucleotide
gccugcagaaggaacgcgc

SEQ ID NO: 1968822 - RNA, 19 nt, Artificial Sequence
  Description of Artificial Sequence: Synthetic oligonucleotide
gcacucacggagucgccgc

SEQ ID NO: 1968823 - RNA, 19 nt, Artificial Sequence
  Description of Artificial Sequence: Synthetic oligonucleotide
cucagaggucuccccugug

SEQ ID NO: 1968824 - RNA, 19 nt, Artificial Sequence
  Description of Artificial Sequence: Synthetic oligonucleotide
ccgcaugaugcacacgcag

SEQ ID NO: 1968825 - RNA, 19 nt, Artificial Sequence
  Description of Artificial Sequence: Synthetic oligonucleotide
cccuccgaucaauuguggc

SEQ ID NO: 1968826 - RNA, 19 nt, Artificial Sequence
  Description of Artificial Sequence: Synthetic oligonucleotide
acguccaguugccggcacu

SEQ ID NO: 1968827 - RNA, 19 nt, Artificial Sequence
  Description of Artificial Sequence: Synthetic oligonucleotide
guagcacgugcgacgcugc

SEQ ID NO: 1968828 - RNA, 19 nt, Artificial Sequence
  Description of Artificial Sequence: Synthetic oligonucleotide
uucucgcucccagccugag

SEQ ID NO: 1968829 - RNA, 19 nt, Artificial Sequence
  Description of Artificial Sequence: Synthetic oligonucleotide
caccguggcgcggauguac

SEQ ID NO: 1968830 - RNA, 19 nt, Artificial Sequence
  Description of Artificial Sequence: Synthetic oligonucleotide
gaggucuccccuguggagu

SEQ ID NO: 1968831 - RNA, 19 nt, Artificial Sequence
  Description of Artificial Sequence: Synthetic oligonucleotide
gucacugcccaguguccuc

SEQ ID NO: 1968832 - RNA, 19 nt, Artificial Sequence
  Description of Artificial Sequence: Synthetic oligonucleotide
ugcgaacauuccgcaccag

SEQ ID NO: 1968833 - RNA, 19 nt, Artificial Sequence
  Description of Artificial Sequence: Synthetic oligonucleotide
acguaccaccucaggcugg

SEQ ID NO: 1968834 - RNA, 19 nt, Artificial Sequence
  Description of Artificial Sequence: Synthetic oligonucleotide
cagugccaccagugcaggc

SEQ ID NO: 1968835 - RNA, 19 nt, Artificial Sequence
  Description of Artificial Sequence: Synthetic oligonucleotide
cacaucucggguggcugac

SEQ ID NO: 1968836 - RNA, 19 nt, Artificial Sequence
  Description of Artificial Sequence: Synthetic oligonucleotide
cagcacuggcagcccacgc

SEQ ID NO: 1968837 - RNA, 19 nt, Artificial Sequence
  Description of Artificial Sequence: Synthetic oligonucleotide
uagcuccacacugucugua

SEQ ID NO: 1968838 - RNA, 19 nt, Artificial Sequence
  Description of Artificial Sequence: Synthetic oligonucleotide
ugcggcuuccaggguguug

SEQ ID NO: 1968839 - RNA, 19 nt, Artificial Sequence
  Description of Artificial Sequence: Synthetic oligonucleotide
gcaguucuaccagcacugg

SEQ ID NO: 1968840 - RNA, 19 nt, Artificial Sequence
  Description of Artificial Sequence: Synthetic oligonucleotide
cacgaagcuccuuguagcu

SEQ ID NO: 1968841 - RNA, 19 nt, Artificial Sequence
  Description of Artificial Sequence: Synthetic oligonucleotide
gucauggcauagcucccaa

SEQ ID NO: 1968842 - RNA, 19 nt, Artificial Sequence
  Description of Artificial Sequence: Synthetic oligonucleotide
caccagcucugucauggca

SEQ ID NO: 1968843 - RNA, 19 nt, Artificial Sequence
  Description of Artificial Sequence: Synthetic oligonucleotide
cucccgcacugacuggcug

SEQ ID NO: 1968844 - RNA, 19 nt, Artificial Sequence
  Description of Artificial Sequence: Synthetic oligonucleotide
uccgcucccuccgaucaau

SEQ ID NO: 1968845 - RNA, 19 nt, Artificial Sequence
  Description of Artificial Sequence: Synthetic oligonucleotide
gguggcugacuucucccca

SEQ ID NO: 1968846 - RNA, 19 nt, Artificial Sequence
  Description of Artificial Sequence: Synthetic oligonucleotide
cagcucugucauggcauag

SEQ ID NO: 1968847 - RNA, 19 nt, Artificial Sequence
  Description of Artificial Sequence: Synthetic oligonucleotide
gaagcuccuuguagcucca

SEQ ID NO: 1968848 - RNA, 19 nt, Artificial Sequence
  Description of Artificial Sequence: Synthetic oligonucleotide
gugcgacgcugccuuggcc

SEQ ID NO: 1968849 - RNA, 19 nt, Artificial Sequence
  Description of Artificial Sequence: Synthetic oligonucleotide
cguagucuucauuggguuc

SEQ ID NO: 1968850 - RNA, 19 nt, Artificial Sequence
  Description of Artificial Sequence: Synthetic oligonucleotide
uagcucccaaugaggucuu

SEQ ID NO: 1968851 - RNA, 19 nt, Artificial Sequence
  Description of Artificial Sequence: Synthetic oligonucleotide
cuccgaucaauuguggcau

SEQ ID NO: 1968852 - RNA, 19 nt, Artificial Sequence
  Description of Artificial Sequence: Synthetic oligonucleotide
caaguguauccaugggaau

SEQ ID NO: 1968853 - RNA, 19 nt, Artificial Sequence
  Description of Artificial Sequence: Synthetic oligonucleotide
gcucccuccgaucaauugu

SEQ ID NO: 1968854 - RNA, 19 nt, Artificial Sequence
  Description of Artificial Sequence: Synthetic oligonucleotide
auguguucuugaagaccgu

SEQ ID NO: 1968855 - RNA, 19 nt, Artificial Sequence
  Description of Artificial Sequence: Synthetic oligonucleotide
cccaucaagguucuugucu

SEQ ID NO: 1968856 - RNA, 19 nt, Artificial Sequence
  Description of Artificial Sequence: Synthetic oligonucleotide
gcuaccacuguauccuccu

SEQ ID NO: 1968857 - RNA, 19 nt, Artificial Sequence
  Description of Artificial Sequence: Synthetic oligonucleotide
cggcacuuagauucugcag

SEQ ID NO: 1968858 - RNA, 19 nt, Artificial Sequence
  Description of Artificial Sequence: Synthetic oligonucleotide
gcgcggauguacguggccc

SEQ ID NO: 1968859 - RNA, 19 nt, Artificial Sequence
  Description of Artificial Sequence: Synthetic oligonucleotide
ggauguacguggcccacgu

SEQ ID NO: 1968860 - RNA, 19 nt, Artificial Sequence
  Description of Artificial Sequence: Synthetic oligonucleotide
ccgaucaauuguggcauac

SEQ ID NO: 1968861 - RNA, 19 nt, Artificial Sequence
  Description of Artificial Sequence: Synthetic oligonucleotide
gcaauggcgacagcacgca

SEQ ID NO: 1968862 - RNA, 19 nt, Artificial Sequence
  Description of Artificial Sequence: Synthetic oligonucleotide
acaucucggguggcugacu

SEQ ID NO: 1968863 - RNA, 19 nt, Artificial Sequence
  Description of Artificial Sequence: Synthetic oligonucleotide
ggcgcggauguacguggcc

SEQ ID NO: 1968864 - RNA, 19 nt, Artificial Sequence
  Description of Artificial Sequence: Synthetic oligonucleotide
ccuguggagucacugccca

SEQ ID NO: 1968865 - RNA, 19 nt, Artificial Sequence
  Description of Artificial Sequence: Synthetic oligonucleotide
agggcauguaggagcgcgu

SEQ ID NO: 1968866 - RNA, 19 nt, Artificial Sequence
  Description of Artificial Sequence: Synthetic oligonucleotide
cacguccaguugccggcac

SEQ ID NO: 1968867 - RNA, 19 nt, Artificial Sequence
  Description of Artificial Sequence: Synthetic oligonucleotide
agugagagguagagacgua

SEQ ID NO: 1968868 - RNA, 19 nt, Artificial Sequence
  Description of Artificial Sequence: Synthetic oligonucleotide
cgcauugucuaggcuauug

SEQ ID NO: 1968869 - RNA, 19 nt, Artificial Sequence
  Description of Artificial Sequence: Synthetic oligonucleotide
cagcacgcaccaccuuguc

SEQ ID NO: 1968870 - RNA, 19 nt, Artificial Sequence
  Description of Artificial Sequence: Synthetic oligonucleotide
ccggcacuuagauucugca

SEQ ID NO: 1968871 - RNA, 19 nt, Artificial Sequence
  Description of Artificial Sequence: Synthetic oligonucleotide
gccggcacuuagauucugc

SEQ ID NO: 1968872 - RNA, 19 nt, Artificial Sequence
  Description of Artificial Sequence: Synthetic oligonucleotide
cagacuggaagcgugccuu

SEQ ID NO: 1968873 - RNA, 19 nt, Artificial Sequence
  Description of Artificial Sequence: Synthetic oligonucleotide
gcccaguguccuccgcucc

SEQ ID NO: 1968874 - RNA, 19 nt, Artificial Sequence
  Description of Artificial Sequence: Synthetic oligonucleotide
cuccacgaagcuccuugua

SEQ ID NO: 1968875 - RNA, 19 nt, Artificial Sequence
  Description of Artificial Sequence: Synthetic oligonucleotide
agcgcguccaccagcccuu

SEQ ID NO: 1968876 - RNA, 19 nt, Artificial Sequence
  Description of Artificial Sequence: Synthetic oligonucleotide
caguugccggcacuuagau

SEQ ID NO: 1968877 - RNA, 19 nt, Artificial Sequence
  Description of Artificial Sequence: Synthetic oligonucleotide
cacgugcgacgcugccuug

SEQ ID NO: 1968878 - RNA, 19 nt, Artificial Sequence
  Description of Artificial Sequence: Synthetic oligonucleotide
cagugcuagcagacuggaa

SEQ ID NO: 1968879 - RNA, 19 nt, Artificial Sequence
  Description of Artificial Sequence: Synthetic oligonucleotide
gcacggcuaccacuguauc

SEQ ID NO: 1968880 - RNA, 19 nt, Artificial Sequence
  Description of Artificial Sequence: Synthetic oligonucleotide
ggcacuagggugagcaggu

SEQ ID NO: 1968881 - RNA, 19 nt, Artificial Sequence
  Description of Artificial Sequence: Synthetic oligonucleotide
ccagcacuggcagcccacg

SEQ ID NO: 1968882 - RNA, 19 nt, Artificial Sequence
  Description of Artificial Sequence: Synthetic oligonucleotide
guggcugacuucuccccau

SEQ ID NO: 1968883 - RNA, 19 nt, Artificial Sequence
  Description of Artificial Sequence: Synthetic oligonucleotide
guucucgcucccagccuga

SEQ ID NO: 1968884 - RNA, 19 nt, Artificial Sequence
  Description of Artificial Sequence: Synthetic oligonucleotide
gccuuuccgcaugaugcac

SEQ ID NO: 1968885 - RNA, 19 nt, Artificial Sequence
  Description of Artificial Sequence: Synthetic oligonucleotide
gaagaccguuuguccacuu

SEQ ID NO: 1968886 - RNA, 19 nt, Artificial Sequence
  Description of Artificial Sequence: Synthetic oligonucleotide
gggcauguaggagcgcguc

SEQ ID NO: 1968887 - RNA, 19 nt, Artificial Sequence
  Description of Artificial Sequence: Synthetic oligonucleotide
cuggaccaaguguauccau

SEQ ID NO: 1968888 - RNA, 19 nt, Artificial Sequence
  Description of Artificial Sequence: Synthetic oligonucleotide
gggguacgauaaccucaug

SEQ ID NO: 1968889 - RNA, 19 nt, Artificial Sequence
  Description of Artificial Sequence: Synthetic oligonucleotide
gcucaaagccuuuccgcau

SEQ ID NO: 1968890 - RNA, 19 nt, Artificial Sequence
  Description of Artificial Sequence: Synthetic oligonucleotide
caugaugcacacgcaguuu

SEQ ID NO: 1968891 - RNA, 19 nt, Artificial Sequence
  Description of Artificial Sequence: Synthetic oligonucleotide
caucucggguggcugacuu

SEQ ID NO: 1968892 - RNA, 19 nt, Artificial Sequence
  Description of Artificial Sequence: Synthetic oligonucleotide
acgcugccuuggccucccg

SEQ ID NO: 1968893 - RNA, 19 nt, Artificial Sequence
  Description of Artificial Sequence: Synthetic oligonucleotide
caggcacaccacgggccug

SEQ ID NO: 1968894 - RNA, 19 nt, Artificial Sequence
  Description of Artificial Sequence: Synthetic oligonucleotide
gccaucucucugaagggcu

SEQ ID NO: 1968895 - RNA, 19 nt, Artificial Sequence
  Description of Artificial Sequence: Synthetic oligonucleotide
ggagcgcguccaccagccc

SEQ ID NO: 1968896 - RNA, 19 nt, Artificial Sequence
  Description of Artificial Sequence: Synthetic oligonucleotide
ccccaucaagguucuuguc

SEQ ID NO: 1968897 - RNA, 19 nt, Artificial Sequence
  Description of Artificial Sequence: Synthetic oligonucleotide
cgcucccuccgaucaauug

SEQ ID NO: 1968898 - RNA, 19 nt, Artificial Sequence
  Description of Artificial Sequence: Synthetic oligonucleotide
cgugcgacgcugccuuggc

SEQ ID NO: 1968899 - RNA, 19 nt, Artificial Sequence
  Description of Artificial Sequence: Synthetic oligonucleotide
ggagucgccgccgggccuc

SEQ ID NO: 1968900 - RNA, 19 nt, Artificial Sequence
  Description of Artificial Sequence: Synthetic oligonucleotide
cugcaccaucugagcucac

SEQ ID NO: 1968901 - RNA, 19 nt, Artificial Sequence
  Description of Artificial Sequence: Synthetic oligonucleotide
ggcccacguccaguugccg

SEQ ID NO: 1968902 - RNA, 19 nt, Artificial Sequence
  Description of Artificial Sequence: Synthetic oligonucleotide
gcgacgcugccuuggccuc

SEQ ID NO: 1968903 - RNA, 19 nt, Artificial Sequence
  Description of Artificial Sequence: Synthetic oligonucleotide
cuaggcuauuggacacaau

SEQ ID NO: 1968904 - RNA, 19 nt, Artificial Sequence
  Description of Artificial Sequence: Synthetic oligonucleotide
ccggcucuccguaaggagu

SEQ ID NO: 1968905 - RNA, 19 nt, Artificial Sequence
  Description of Artificial Sequence: Synthetic oligonucleotide
agggcuccacgaagcuccu

SEQ ID NO: 1968906 - RNA, 19 nt, Artificial Sequence
  Description of Artificial Sequence: Synthetic oligonucleotide
cauuccgcaccagcucugu

SEQ ID NO: 1968907 - RNA, 19 nt, Artificial Sequence
  Description of Artificial Sequence: Synthetic oligonucleotide
gcacgugcgacgcugccuu

SEQ ID NO: 1968908 - RNA, 19 nt, Artificial Sequence
  Description of Artificial Sequence: Synthetic oligonucleotide
gcacuagggugagcaggug

SEQ ID NO: 1968909 - RNA, 19 nt, Artificial Sequence
  Description of Artificial Sequence: Synthetic oligonucleotide
cguggcgcggauguacgug

SEQ ID NO: 1968910 - RNA, 19 nt, Artificial Sequence
  Description of Artificial Sequence: Synthetic oligonucleotide
ggcuuucguagucuucauu

SEQ ID NO: 1968911 - RNA, 19 nt, Artificial Sequence
  Description of Artificial Sequence: Synthetic oligonucleotide
gcggauguacguggcccac

SEQ ID NO: 1968912 - RNA, 19 nt, Artificial Sequence
  Description of Artificial Sequence: Synthetic oligonucleotide
cacgggccugcagaaggaa

SEQ ID NO: 1968913 - RNA, 19 nt, Artificial Sequence
  Description of Artificial Sequence: Synthetic oligonucleotide
cccacgcuccuugcgcacc

SEQ ID NO: 1968914 - RNA, 19 nt, Artificial Sequence
  Description of Artificial Sequence: Synthetic oligonucleotide
uggcgacagcacgcaccac

SEQ ID NO: 1968915 - RNA, 19 nt, Artificial Sequence
  Description of Artificial Sequence: Synthetic oligonucleotide
cagaaggaacgcgcauugu

SEQ ID NO: 1968916 - RNA, 19 nt, Artificial Sequence
  Description of Artificial Sequence: Synthetic oligonucleotide
cggauguacguggcccacg

SEQ ID NO: 1968917 - RNA, 19 nt, Artificial Sequence
  Description of Artificial Sequence: Synthetic oligonucleotide
cacgcaccaccuugucagu

SEQ ID NO: 1968918 - RNA, 19 nt, Artificial Sequence
  Description of Artificial Sequence: Synthetic oligonucleotide
gcccacgcuccuugcgcac

SEQ ID NO: 1968919 - RNA, 19 nt, Artificial Sequence
  Description of Artificial Sequence: Synthetic oligonucleotide
gcgaagcgcaauggcgaca

SEQ ID NO: 1968920 - RNA, 19 nt, Artificial Sequence
  Description of Artificial Sequence: Synthetic oligonucleotide
ccacgggccugcagaagga

SEQ ID NO: 1968921 - RNA, 19 nt, Artificial Sequence
  Description of Artificial Sequence: Synthetic oligonucleotide
cuccgcucccuccgaucaa

SEQ ID NO: 1968922 - RNA, 19 nt, Artificial Sequence
  Description of Artificial Sequence: Synthetic oligonucleotide
cgauaaccucaugggucag

SEQ ID NO: 1968923 - RNA, 19 nt, Artificial Sequence
  Description of Artificial Sequence: Synthetic oligonucleotide
ggguccuuuggcagugcua

SEQ ID NO: 1968924 - RNA, 19 nt, Artificial Sequence
  Description of Artificial Sequence: Synthetic oligonucleotide
ucuccccaucaagguucuu

SEQ ID NO: 1968925 - RNA, 19 nt, Artificial Sequence
  Description of Artificial Sequence: Synthetic oligonucleotide
gcgugccuugguccagcca

SEQ ID NO: 1968926 - RNA, 19 nt, Artificial Sequence
  Description of Artificial Sequence: Synthetic oligonucleotide
cgcggauguacguggccca

SEQ ID NO: 1968927 - RNA, 19 nt, Artificial Sequence
  Description of Artificial Sequence: Synthetic oligonucleotide
gcugcggcuuccagggugu

SEQ ID NO: 1968928 - RNA, 19 nt, Artificial Sequence
  Description of Artificial Sequence: Synthetic oligonucleotide
ggucuccccuguggaguca

SEQ ID NO: 1968929 - RNA, 19 nt, Artificial Sequence
  Description of Artificial Sequence: Synthetic oligonucleotide
gggcuuucguagucuucau

SEQ ID NO: 1968930 - RNA, 19 nt, Artificial Sequence
  Description of Artificial Sequence: Synthetic oligonucleotide
caaagccuuuccgcaugau

SEQ ID NO: 1968931 - RNA, 19 nt, Artificial Sequence
  Description of Artificial Sequence: Synthetic oligonucleotide
cccuucgcacucacggagu

SEQ ID NO: 1968932 - RNA, 19 nt, Artificial Sequence
  Description of Artificial Sequence: Synthetic oligonucleotide
cgcguccaccagcccuucg

SEQ ID NO: 1968933 - RNA, 19 nt, Artificial Sequence
  Description of Artificial Sequence: Synthetic oligonucleotide
guaccaccucaggcuggua

SEQ ID NO: 1968934 - RNA, 19 nt, Artificial Sequence
  Description of Artificial Sequence: Synthetic oligonucleotide
cgacgcugccuuggccucc

SEQ ID NO: 1968935 - RNA, 19 nt, Artificial Sequence
  Description of Artificial Sequence: Synthetic oligonucleotide
ccacguccaguugccggca

SEQ ID NO: 1968936 - RNA, 19 nt, Artificial Sequence
  Description of Artificial Sequence: Synthetic oligonucleotide
ccgccgggccucugcacca

SEQ ID NO: 1968937 - RNA, 19 nt, Artificial Sequence
  Description of Artificial Sequence: Synthetic oligonucleotide
ccgcacugacuggcuggag

SEQ ID NO: 1968938 - RNA, 19 nt, Artificial Sequence
  Description of Artificial Sequence: Synthetic oligonucleotide
cguaccaccucaggcuggu

SEQ ID NO: 1968939 - RNA, 19 nt, Artificial Sequence
  Description of Artificial Sequence: Synthetic oligonucleotide
cacgcuccuugcgcaccgu

SEQ ID NO: 1968940 - RNA, 19 nt, Artificial Sequence
  Description of Artificial Sequence: Synthetic oligonucleotide
cgccgccgggccucugcac

SEQ ID NO: 1968941 - RNA, 19 nt, Artificial Sequence
  Description of Artificial Sequence: Synthetic oligonucleotide
ccguggcgcggauguacgu

SEQ ID NO: 1968942 - RNA, 19 nt, Artificial Sequence
  Description of Artificial Sequence: Synthetic oligonucleotide
cguccaguugccggcacuu

SEQ ID NO: 1968943 - RNA, 19 nt, Artificial Sequence
  Description of Artificial Sequence: Synthetic oligonucleotide
ccugugcauugcgaacauu

SEQ ID NO: 1968944 - RNA, 19 nt, Artificial Sequence
  Description of Artificial Sequence: Synthetic oligonucleotide
ccgcucccuccgaucaauu

SEQ ID NO: 1968945 - RNA, 19 nt, Artificial Sequence
  Description of Artificial Sequence: Synthetic oligonucleotide
cugcggcuuccaggguguu

SEQ ID NO: 1968946 - RNA, 19 nt, Artificial Sequence
  Description of Artificial Sequence: Synthetic oligonucleotide
gcgcauugucuaggcuauu

SEQ ID NO: 1968947 - RNA, 19 nt, Artificial Sequence
  Description of Artificial Sequence: Synthetic oligonucleotide
cggagucgccgccgggccu

SEQ ID NO: 1968948 - RNA, 19 nt, Artificial Sequence
  Description of Artificial Sequence: Synthetic oligonucleotide
cgacagcacgcaccaccuu

SEQ ID NO: 1968949 - RNA, 19 nt, Artificial Sequence
  Description of Artificial Sequence: Synthetic oligonucleotide
aaaacuuggaaauucacac

SEQ ID NO: 1968950 - RNA, 19 nt, Artificial Sequence
  Description of Artificial Sequence: Synthetic oligonucleotide
aagacaacaauuuucaccg

SEQ ID NO: 1968951 - RNA, 19 nt, Artificial Sequence
  Description of Artificial Sequence: Synthetic oligonucleotide
aaagacaacaauuuucacc

SEQ ID NO: 1968952 - RNA, 19 nt, Artificial Sequence
  Description of Artificial Sequence: Synthetic oligonucleotide
aaaauucuguaccuaaugc

SEQ ID NO: 1968953 - RNA, 19 nt, Artificial Sequence
  Description of Artificial Sequence: Synthetic oligonucleotide
ugaagcaauugcaagaacg

SEQ ID NO: 1968954 - RNA, 19 nt, Artificial Sequence
  Description of Artificial Sequence: Synthetic oligonucleotide
uaauuuuccaugcaaaggc

SEQ ID NO: 1968955 - RNA, 19 nt, Artificial Sequence
  Description of Artificial Sequence: Synthetic oligonucleotide
aaugcaacugaucaaaacu

SEQ ID NO: 1968956 - RNA, 19 nt, Artificial Sequence
  Description of Artificial Sequence: Synthetic oligonucleotide
auucacacuaaauucaugg

SEQ ID NO: 1968957 - RNA, 19 nt, Artificial Sequence
  Description of Artificial Sequence: Synthetic oligonucleotide
uaauguuuuaagaacagca

SEQ ID NO: 1968958 - RNA, 19 nt, Artificial Sequence
  Description of Artificial Sequence: Synthetic oligonucleotide
uuaguugucauauaacuug

SEQ ID NO: 1968959 - RNA, 19 nt, Artificial Sequence
  Description of Artificial Sequence: Synthetic oligonucleotide
agcagaaucaguuacaugu

SEQ ID NO: 1968960 - RNA, 19 nt, Artificial Sequence
  Description of Artificial Sequence: Synthetic oligonucleotide
ucagcuaaaguccugagca

SEQ ID NO: 1968961 - RNA, 19 nt, Artificial Sequence
  Description of Artificial Sequence: Synthetic oligonucleotide
uuaagaacagcaauggaga

SEQ ID NO: 1968962 - RNA, 19 nt, Artificial Sequence
  Description of Artificial Sequence: Synthetic oligonucleotide
  modified_base (4)..(4): a, c, u, g, unknown or other
auanacagcuuucuugggc

SEQ ID NO: 1968963 - RNA, 19 nt, Artificial Sequence
  Description of Artificial Sequence: Synthetic oligonucleotide
  modified_base (6)..(6): a, c, u, g, unknown or other
caauanacagcuuucuugg

SEQ ID NO: 1968964 - RNA, 19 nt, Artificial Sequence
  Description of Artificial Sequence: Synthetic oligonucleotide
  modified_base (7)..(7): a, c, u, g, unknown or other
acaauanacagcuuucuug

SEQ ID NO: 1968965 - RNA, 19 nt, Artificial Sequence
  Description of Artificial Sequence: Synthetic oligonucleotide
aaaugaauuguuaaaagca

SEQ ID NO: 1968966 - RNA, 19 nt, Artificial Sequence
  Description of Artificial Sequence: Synthetic oligonucleotide
uuuucguauaccaagcccc

SEQ ID NO: 1968967 - RNA, 19 nt, Artificial Sequence
  Description of Artificial Sequence: Synthetic oligonucleotide
gaaagugcaauguuguuag

SEQ ID NO: 1968968 - RNA, 19 nt, Artificial Sequence
  Description of Artificial Sequence: Synthetic oligonucleotide
  modified_base (11)..(11): a, c, u, g, unknown or other
uuaaacaauanacagcuuu

SEQ ID NO: 1968969 - RNA, 19 nt, Artificial Sequence
  Description of Artificial Sequence: Synthetic oligonucleotide
acaauuuucaccgucacuc

SEQ ID NO: 1968970 - RNA, 19 nt, Artificial Sequence
  Description of Artificial Sequence: Synthetic oligonucleotide
cauauaacuugcuugacag

SEQ ID NO: 1968971 - RNA, 19 nt, Artificial Sequence
  Description of Artificial Sequence: Synthetic oligonucleotide
ugaauuuaauuuuccaugc

SEQ ID NO: 1968972 - RNA, 19 nt, Artificial Sequence
  Description of Artificial Sequence: Synthetic oligonucleotide
aauugcaagaacguauugg

SEQ ID NO: 1968973 - RNA, 19 nt, Artificial Sequence
  Description of Artificial Sequence: Synthetic oligonucleotide
ugacguacaaaucacacac

SEQ ID NO: 1968974 - RNA, 19 nt, Artificial Sequence
  Description of Artificial Sequence: Synthetic oligonucleotide
aaucaagauaacguggacg

SEQ ID NO: 1968975 - RNA, 19 nt, Artificial Sequence
  Description of Artificial Sequence: Synthetic oligonucleotide
uacuucaaaagcaagggga

SEQ ID NO: 1968976 - RNA, 19 nt, Artificial Sequence
  Description of Artificial Sequence: Synthetic oligonucleotide
cuuuacucagcuaaagucc

SEQ ID NO: 1968977 - RNA, 19 nt, Artificial Sequence
  Description of Artificial Sequence: Synthetic oligonucleotide
uaaauaguaguuugggcag

SEQ ID NO: 1968978 - RNA, 19 nt, Artificial Sequence
  Description of Artificial Sequence: Synthetic oligonucleotide
aaacuuggaaauucacacg

SEQ ID NO: 1968979 - RNA, 19 nt, Artificial Sequence
  Description of Artificial Sequence: Synthetic oligonucleotide
aacuaaaacuuggaaauuc

SEQ ID NO: 1968980 - RNA, 19 nt, Artificial Sequence
  Description of Artificial Sequence: Synthetic oligonucleotide
uguuaguugucauauaacu

SEQ ID NO: 1968981 - RNA, 19 nt, Artificial Sequence
  Description of Artificial Sequence: Synthetic oligonucleotide
guaaauaguaguuugggca

SEQ ID NO: 1968982 - RNA, 19 nt, Artificial Sequence
  Description of Artificial Sequence: Synthetic oligonucleotide
auugcuaaagccugccacc

SEQ ID NO: 1968983 - RNA, 19 nt, Artificial Sequence
  Description of Artificial Sequence: Synthetic oligonucleotide
ucacucaaaauucuguacc

SEQ ID NO: 1968984 - RNA, 19 nt, Artificial Sequence
  Description of Artificial Sequence: Synthetic oligonucleotide
aagaaaacucuacacugag

SEQ ID NO: 1968985 - RNA, 19 nt, Artificial Sequence
  Description of Artificial Sequence: Synthetic oligonucleotide
cugaauuuaauuuuccaug

SEQ ID NO: 1968986 - RNA, 19 nt, Artificial Sequence
  Description of Artificial Sequence: Synthetic oligonucleotide
cacacuaaauucauggucc

SEQ ID NO: 1968987 - RNA, 19 nt, Artificial Sequence
  Description of Artificial Sequence: Synthetic oligonucleotide
aauguaaauaguaguuugg

SEQ ID NO: 1968988 - RNA, 19 nt, Artificial Sequence
  Description of Artificial Sequence: Synthetic oligonucleotide
uacuaauguuuuaagaaca

SEQ ID NO: 1968989 - RNA, 19 nt, Artificial Sequence
  Description of Artificial Sequence: Synthetic oligonucleotide
aacguauugguauugguau

SEQ ID NO: 1968990 - RNA, 19 nt, Artificial Sequence
  Description of Artificial Sequence: Synthetic oligonucleotide
aaagcuauuugcucucguc

SEQ ID NO: 1968991 - RNA, 19 nt, Artificial Sequence
  Description of Artificial Sequence: Synthetic oligonucleotide
aucaguuacaugucaggcc

SEQ ID NO: 1968992 - RNA, 19 nt, Artificial Sequence
  Description of Artificial Sequence: Synthetic oligonucleotide
uuucagaccaaaugaauug

SEQ ID NO: 1968993 - RNA, 19 nt, Artificial Sequence
  Description of Artificial Sequence: Synthetic oligonucleotide
uaccuaaugcaacugauca

SEQ ID NO: 1968994 - RNA, 19 nt, Artificial Sequence
  Description of Artificial Sequence: Synthetic oligonucleotide
uuacuaauguuuuaagaac

SEQ ID NO: 1968995 - RNA, 19 nt, Artificial Sequence
  Description of Artificial Sequence: Synthetic oligonucleotide
  modified_base (5)..(5): a, c, u, g, unknown or other
aauanacagcuuucuuggg

SEQ ID NO: 1968996 - RNA, 19 nt, Artificial Sequence
  Description of Artificial Sequence: Synthetic oligonucleotide
ucacagaggaaucauuucc

SEQ ID NO: 1968997 - RNA, 19 nt, Artificial Sequence
  Description of Artificial Sequence: Synthetic oligonucleotide
aaaucaagauaacguggac

SEQ ID NO: 1968998 - RNA, 19 nt, Artificial Sequence
  Description of Artificial Sequence: Synthetic oligonucleotide
gaaaacucuacacugagaa

SEQ ID NO: 1968999 - RNA, 19 nt, Artificial Sequence
  Description of Artificial Sequence: Synthetic oligonucleotide
acgaaagacaguuagauuu

SEQ ID NO: 1969000 - RNA, 19 nt, Artificial Sequence
  Description of Artificial Sequence: Synthetic oligonucleotide
ucaguuacaugucaggccu

SEQ ID NO: 1969001 - RNA, 19 nt, Artificial Sequence
  Description of Artificial Sequence: Synthetic oligonucleotide
auucacacgugauuucucc

SEQ ID NO: 1969002 - RNA, 19 nt, Artificial Sequence
  Description of Artificial Sequence: Synthetic oligonucleotide
aaugaacuaaaacuuggaa

SEQ ID NO: 1969003 - RNA, 19 nt, Artificial Sequence
  Description of Artificial Sequence: Synthetic oligonucleotide
auuucauccacaccugggg

SEQ ID NO: 1969004 - RNA, 19 nt, Artificial Sequence
  Description of Artificial Sequence: Synthetic oligonucleotide
ugaauuguuaaaagcaaaa

SEQ ID NO: 1969005 - RNA, 19 nt, Artificial Sequence
  Description of Artificial Sequence: Synthetic oligonucleotide
uguaaauaguaguuugggc

SEQ ID NO: 1969006 - RNA, 19 nt, Artificial Sequence
  Description of Artificial Sequence: Synthetic oligonucleotide
aucaagauaacguggacga

SEQ ID NO: 1969007 - RNA, 19 nt, Artificial Sequence
  Description of Artificial Sequence: Synthetic oligonucleotide
ugguauugguauauuacag

SEQ ID NO: 1969008 - RNA, 19 nt, Artificial Sequence
  Description of Artificial Sequence: Synthetic oligonucleotide
auugguauugguauauuac

SEQ ID NO: 1969009 - RNA, 19 nt, Artificial Sequence
  Description of Artificial Sequence: Synthetic oligonucleotide
uucaccgucacucaaaauu

SEQ ID NO: 1969010 - RNA, 19 nt, Artificial Sequence
  Description of Artificial Sequence: Synthetic oligonucleotide
gaaucaguuacaugucagg

SEQ ID NO: 1969011 - RNA, 19 nt, Artificial Sequence
  Description of Artificial Sequence: Synthetic oligonucleotide
aauucauggucccugaauu

SEQ ID NO: 1969012 - RNA, 19 nt, Artificial Sequence
  Description of Artificial Sequence: Synthetic oligonucleotide
ugcaacugaucaaaacugg

SEQ ID NO: 1969013 - RNA, 19 nt, Artificial Sequence
  Description of Artificial Sequence: Synthetic oligonucleotide
auugcaagaacguauuggu

SEQ ID NO: 1969014 - RNA, 19 nt, Artificial Sequence
  Description of Artificial Sequence: Synthetic oligonucleotide
uaacguggacgaaagacag

SEQ ID NO: 1969015 - RNA, 19 nt, Artificial Sequence
  Description of Artificial Sequence: Synthetic oligonucleotide
aaaaucaagauaacgugga

SEQ ID NO: 1969016 - RNA, 19 nt, Artificial Sequence
  Description of Artificial Sequence: Synthetic oligonucleotide
gauaacguggacgaaagac

SEQ ID NO: 1969017 - RNA, 19 nt, Artificial Sequence
  Description of Artificial Sequence: Synthetic oligonucleotide
aaaaccucagccccuucuc

SEQ ID NO: 1969018 - RNA, 19 nt, Artificial Sequence
  Description of Artificial Sequence: Synthetic oligonucleotide
cuuguuaucucuaaagaga

SEQ ID NO: 1969019 - RNA, 19 nt, Artificial Sequence
  Description of Artificial Sequence: Synthetic oligonucleotide
ucauauaacuugcuugaca

SEQ ID NO: 1969020 - RNA, 19 nt, Artificial Sequence
  Description of Artificial Sequence: Synthetic oligonucleotide
auuacagcuacuuacuaau

SEQ ID NO: 1969021 - RNA, 19 nt, Artificial Sequence
  Description of Artificial Sequence: Synthetic oligonucleotide
uuacaugucaggccugggg

SEQ ID NO: 1969022 - RNA, 19 nt, Artificial Sequence
  Description of Artificial Sequence: Synthetic oligonucleotide
ucuggugcuaguuugauuu

SEQ ID NO: 1969023 - RNA, 19 nt, Artificial Sequence
  Description of Artificial Sequence: Synthetic oligonucleotide
acacauucuggguagcuac

SEQ ID NO: 1969024 - RNA, 19 nt, Artificial Sequence
  Description of Artificial Sequence: Synthetic oligonucleotide
uucucagacauucacacua

SEQ ID NO: 1969025 - RNA, 19 nt, Artificial Sequence
  Description of Artificial Sequence: Synthetic oligonucleotide
uugguauugguauauuaca

SEQ ID NO: 1969026 - RNA, 19 nt, Artificial Sequence
  Description of Artificial Sequence: Synthetic oligonucleotide
uauugcuaaagccugccac

SEQ ID NO: 1969027 - RNA, 19 nt, Artificial Sequence
  Description of Artificial Sequence: Synthetic oligonucleotide
  modified_base (3)..(3): a, c, u, g, unknown or other
uanacagcuuucuugggcu

SEQ ID NO: 1969028 - RNA, 19 nt, Artificial Sequence
  Description of Artificial Sequence: Synthetic oligonucleotide
agaaugaacuaaaacuugg

SEQ ID NO: 1969029 - RNA, 19 nt, Artificial Sequence
  Description of Artificial Sequence: Synthetic oligonucleotide
uuuucagaccaaaugaauu

SEQ ID NO: 1969030 - RNA, 19 nt, Artificial Sequence
  Description of Artificial Sequence: Synthetic oligonucleotide
ugcaagaacguauugguau

SEQ ID NO: 1969031 - RNA, 19 nt, Artificial Sequence
  Description of Artificial Sequence: Synthetic oligonucleotide
uuuacucagcuaaaguccu

SEQ ID NO: 1969032 - RNA, 19 nt, Artificial Sequence
  Description of Artificial Sequence: Synthetic oligonucleotide
aagcuauuugcucucguca

SEQ ID NO: 1969033 - RNA, 19 nt, Artificial Sequence
  Description of Artificial Sequence: Synthetic oligonucleotide
cugcauuugugaaagacac

SEQ ID NO: 1969034 - RNA, 19 nt, Artificial Sequence
  Description of Artificial Sequence: Synthetic oligonucleotide
ucacacuaaauucaugguc

SEQ ID NO: 1969035 - RNA, 19 nt, Artificial Sequence
  Description of Artificial Sequence: Synthetic oligonucleotide
agaggaaucauuuccaauu

SEQ ID NO: 1969036 - RNA, 19 nt, Artificial Sequence
  Description of Artificial Sequence: Synthetic oligonucleotide
cugguuuucguauaccaag

SEQ ID NO: 1969037 - RNA, 19 nt, Artificial Sequence
  Description of Artificial Sequence: Synthetic oligonucleotide
cugagaaugaacuaaaacu

SEQ ID NO: 1969038 - RNA, 19 nt, Artificial Sequence
  Description of Artificial Sequence: Synthetic oligonucleotide
ugaaagacacucugcugcg

SEQ ID NO: 1969039 - RNA, 19 nt, Artificial Sequence
  Description of Artificial Sequence: Synthetic oligonucleotide
aaugaauuguuaaaagcaa

SEQ ID NO: 1969040 - RNA, 19 nt, Artificial Sequence
  Description of Artificial Sequence: Synthetic oligonucleotide
auguaaauaguaguuuggg

SEQ ID NO: 1969041 - RNA, 19 nt, Artificial Sequence
  Description of Artificial Sequence: Synthetic oligonucleotide
ucugggaauguaaauagua

SEQ ID NO: 1969042 - RNA, 19 nt, Artificial Sequence
  Description of Artificial Sequence: Synthetic oligonucleotide
aagccugccaccuguccgc

SEQ ID NO: 1969043 - RNA, 19 nt, Artificial Sequence
  Description of Artificial Sequence: Synthetic oligonucleotide
aacuucacucaaucagcac

SEQ ID NO: 1969044 - RNA, 19 nt, Artificial Sequence
  Description of Artificial Sequence: Synthetic oligonucleotide
acacuaaauucaugguccc

SEQ ID NO: 1969045 - RNA, 19 nt, Artificial Sequence
  Description of Artificial Sequence: Synthetic oligonucleotide
ucccuuguuaucucuaaag

SEQ ID NO: 1969046 - RNA, 19 nt, Artificial Sequence
  Description of Artificial Sequence: Synthetic oligonucleotide
ugcaaaggcaaugauuucc

SEQ ID NO: 1969047 - RNA, 19 nt, Artificial Sequence
  Description of Artificial Sequence: Synthetic oligonucleotide
aaauucauggucccugaau

SEQ ID NO: 1969048 - RNA, 19 nt, Artificial Sequence
  Description of Artificial Sequence: Synthetic oligonucleotide
agcugugacguacaaauca

SEQ ID NO: 1969049 - RNA, 19 nt, Artificial Sequence
  Description of Artificial Sequence: Synthetic oligonucleotide
aagauaacguggacgaaag

SEQ ID NO: 1969050 - RNA, 19 nt, Artificial Sequence
  Description of Artificial Sequence: Synthetic oligonucleotide
auuuguuuggcauucucaa

SEQ ID NO: 1969051 - RNA, 19 nt, Artificial Sequence
  Description of Artificial Sequence: Synthetic oligonucleotide
acugaucaaaacuggauau

SEQ ID NO: 1969052 - RNA, 19 nt, Artificial Sequence
  Description of Artificial Sequence: Synthetic oligonucleotide
uacuuacuaauguuuuaag

SEQ ID NO: 1969053 - RNA, 19 nt, Artificial Sequence
  Description of Artificial Sequence: Synthetic oligonucleotide
ucacucaaucagcacacag

SEQ ID NO: 1969054 - RNA, 19 nt, Artificial Sequence
  Description of Artificial Sequence: Synthetic oligonucleotide
aaauucacacgugauuucu

SEQ ID NO: 1969055 - RNA, 19 nt, Artificial Sequence
  Description of Artificial Sequence: Synthetic oligonucleotide
guggacgaaagacaguuag

SEQ ID NO: 1969056 - RNA, 19 nt, Artificial Sequence
  Description of Artificial Sequence: Synthetic oligonucleotide
cuggguagcuaccugagcc

SEQ ID NO: 1969057 - RNA, 19 nt, Artificial Sequence
  Description of Artificial Sequence: Synthetic oligonucleotide
  modified_base (9)..(9): a, c, u, g, unknown or other
aaacaauanacagcuuucu

SEQ ID NO: 1969058 - RNA, 19 nt, Artificial Sequence
  Description of Artificial Sequence: Synthetic oligonucleotide
aaucacacacauucugggu

SEQ ID NO: 1969059 - RNA, 19 nt, Artificial Sequence
  Description of Artificial Sequence: Synthetic oligonucleotide
uauuacagcuacuuacuaa

SEQ ID NO: 1969060 - RNA, 19 nt, Artificial Sequence
  Description of Artificial Sequence: Synthetic oligonucleotide
guuuucguauaccaagccc

SEQ ID NO: 1969061 - RNA, 19 nt, Artificial Sequence
  Description of Artificial Sequence: Synthetic oligonucleotide
uauaacuugcuugacaguu

SEQ ID NO: 1969062 - RNA, 19 nt, Artificial Sequence
  Description of Artificial Sequence: Synthetic oligonucleotide
  modified_base (8)..(8): a, c, u, g, unknown or other
aacaauanacagcuuucuu

SEQ ID NO: 1969063 - RNA, 19 nt, Artificial Sequence
  Description of Artificial Sequence: Synthetic oligonucleotide
ugguuuucguauaccaagc

SEQ ID NO: 1969064 - RNA, 19 nt, Artificial Sequence
  Description of Artificial Sequence: Synthetic oligonucleotide
aaagaaaacucuacacuga

SEQ ID NO: 1969065 - RNA, 19 nt, Artificial Sequence
  Description of Artificial Sequence: Synthetic oligonucleotide
ucauauacagaaagugcaa

SEQ ID NO: 1969066 - RNA, 19 nt, Artificial Sequence
  Description of Artificial Sequence: Synthetic oligonucleotide
aagaacguauugguauugg

SEQ ID NO: 1969067 - RNA, 19 nt, Artificial Sequence
  Description of Artificial Sequence: Synthetic oligonucleotide
uacaugucaggccuggggu

SEQ ID NO: 1969068 - RNA, 19 nt, Artificial Sequence
  Description of Artificial Sequence: Synthetic oligonucleotide
ggauacacuucucacagag

SEQ ID NO: 1969069 - RNA, 19 nt, Artificial Sequence
  Description of Artificial Sequence: Synthetic oligonucleotide
ucaaaacuggauauugcua

SEQ ID NO: 1969070 - RNA, 19 nt, Artificial Sequence
  Description of Artificial Sequence: Synthetic oligonucleotide
uaaugcaacugaucaaaac

SEQ ID NO: 1969071 - RNA, 19 nt, Artificial Sequence
  Description of Artificial Sequence: Synthetic oligonucleotide
uuguuaguugucauauaac

SEQ ID NO: 1969072 - RNA, 19 nt, Artificial Sequence
  Description of Artificial Sequence: Synthetic oligonucleotide
acuaaauucauggucccug

SEQ ID NO: 1969073 - RNA, 19 nt, Artificial Sequence
  Description of Artificial Sequence: Synthetic oligonucleotide
caccuguccgcuaacagcc

SEQ ID NO: 1969074 - RNA, 19 nt, Artificial Sequence
  Description of Artificial Sequence: Synthetic oligonucleotide
ugugaaagacacucugcug

SEQ ID NO: 1969075 - RNA, 19 nt, Artificial Sequence
  Description of Artificial Sequence: Synthetic oligonucleotide
ucaccgucacucaaaauuc

SEQ ID NO: 1969076 - RNA, 19 nt, Artificial Sequence
  Description of Artificial Sequence: Synthetic oligonucleotide
uguaccuaaugcaacugau

SEQ ID NO: 1969077 - RNA, 19 nt, Artificial Sequence
  Description of Artificial Sequence: Synthetic oligonucleotide
acagcauggacugacagga

SEQ ID NO: 1969078 - RNA, 19 nt, Artificial Sequence
  Description of Artificial Sequence: Synthetic oligonucleotide
ucagacauucacacuaaau

SEQ ID NO: 1969079 - RNA, 19 nt, Artificial Sequence
  Description of Artificial Sequence: Synthetic oligonucleotide
gguauugguauauuacagc

SEQ ID NO: 1969080 - RNA, 19 nt, Artificial Sequence
  Description of Artificial Sequence: Synthetic oligonucleotide
gccaugaaaagcuauuugc

SEQ ID NO: 1969081 - RNA, 19 nt, Artificial Sequence
  Description of Artificial Sequence: Synthetic oligonucleotide
gauauugcuaaagccugcc

SEQ ID NO: 1969082 - RNA, 19 nt, Artificial Sequence
  Description of Artificial Sequence: Synthetic oligonucleotide
uacgcaaggccaugaaaag

SEQ ID NO: 1969083 - RNA, 19 nt, Artificial Sequence
  Description of Artificial Sequence: Synthetic oligonucleotide
aauuuucaccgucacucaa

SEQ ID NO: 1969084 - RNA, 19 nt, Artificial Sequence
  Description of Artificial Sequence: Synthetic oligonucleotide
uauugguauugguauauua

SEQ ID NO: 1969085 - RNA, 19 nt, Artificial Sequence
  Description of Artificial Sequence: Synthetic oligonucleotide
acuaauguuuuaagaacag

SEQ ID NO: 1969086 - RNA, 19 nt, Artificial Sequence
  Description of Artificial Sequence: Synthetic oligonucleotide
aaaagcuauuugcucucgu

SEQ ID NO: 1969087 - RNA, 19 nt, Artificial Sequence
  Description of Artificial Sequence: Synthetic oligonucleotide
uuuucaccgucacucaaaa

SEQ ID NO: 1969088 - RNA, 19 nt, Artificial Sequence
  Description of Artificial Sequence: Synthetic oligonucleotide
uguagucucuuuacucagc

SEQ ID NO: 1969089 - RNA, 19 nt, Artificial Sequence
  Description of Artificial Sequence: Synthetic oligonucleotide
gacaacaauuuucaccguc

SEQ ID NO: 1969090 - RNA, 19 nt, Artificial Sequence
  Description of Artificial Sequence: Synthetic oligonucleotide
cuaauguuuuaagaacagc

SEQ ID NO: 1969091 - RNA, 19 nt, Artificial Sequence
  Description of Artificial Sequence: Synthetic oligonucleotide
agcaauggagaaaauaagu

SEQ ID NO: 1969092 - RNA, 19 nt, Artificial Sequence
  Description of Artificial Sequence: Synthetic oligonucleotide
uuucguauaccaagcccca

SEQ ID NO: 1969093 - RNA, 19 nt, Artificial Sequence
  Description of Artificial Sequence: Synthetic oligonucleotide
uggguagcuaccugagccg

SEQ ID NO: 1969094 - RNA, 19 nt, Artificial Sequence
  Description of Artificial Sequence: Synthetic oligonucleotide
uggaaauucacacgugauu

SEQ ID NO: 1969095 - RNA, 19 nt, Artificial Sequence
  Description of Artificial Sequence: Synthetic oligonucleotide
acuucaaaagcaaggggag

SEQ ID NO: 1969096 - RNA, 19 nt, Artificial Sequence
  Description of Artificial Sequence: Synthetic oligonucleotide
accaaaugaauuguuaaaa

SEQ ID NO: 1969097 - RNA, 19 nt, Artificial Sequence
  Description of Artificial Sequence: Synthetic oligonucleotide
guauugguauauuacagcu

SEQ ID NO: 1969098 - RNA, 19 nt, Artificial Sequence
  Description of Artificial Sequence: Synthetic oligonucleotide
ucguauaccaagccccaca

SEQ ID NO: 1969099 - RNA, 19 nt, Artificial Sequence
  Description of Artificial Sequence: Synthetic oligonucleotide
uuacagcuacuuacuaaug

SEQ ID NO: 1969100 - RNA, 19 nt, Artificial Sequence
  Description of Artificial Sequence: Synthetic oligonucleotide
agcuaccugagccgaaacg

SEQ ID NO: 1969101 - RNA, 19 nt, Artificial Sequence
  Description of Artificial Sequence: Synthetic oligonucleotide
ugugcuuuccaaagacaac

SEQ ID NO: 1969102 - RNA, 19 nt, Artificial Sequence
  Description of Artificial Sequence: Synthetic oligonucleotide
  modified_base (2)..(2): a, c, u, g, unknown or other
anacagcuuucuugggcug

SEQ ID NO: 1969103 - RNA, 19 nt, Artificial Sequence
  Description of Artificial Sequence: Synthetic oligonucleotide
cucuacacugagaaugaac

SEQ ID NO: 1969104 - RNA, 19 nt, Artificial Sequence
  Description of Artificial Sequence: Synthetic oligonucleotide
agaaucaguuacaugucag

SEQ ID NO: 1969105 - RNA, 19 nt, Artificial Sequence
  Description of Artificial Sequence: Synthetic oligonucleotide
uucuggguagcuaccugag

SEQ ID NO: 1969106 - RNA, 19 nt, Artificial Sequence
  Description of Artificial Sequence: Synthetic oligonucleotide
uggacugacaggaaacaua

SEQ ID NO: 1969107 - RNA, 19 nt, Artificial Sequence
  Description of Artificial Sequence: Synthetic oligonucleotide
agccgaaacgccuuuccag

SEQ ID NO: 1969108 - RNA, 19 nt, Artificial Sequence
  Description of Artificial Sequence: Synthetic oligonucleotide
aauaguaguuugggcagcu

SEQ ID NO: 1969109 - RNA, 19 nt, Artificial Sequence
  Description of Artificial Sequence: Synthetic oligonucleotide
auaacguggacgaaagaca

SEQ ID NO: 1969110 - RNA, 19 nt, Artificial Sequence
  Description of Artificial Sequence: Synthetic oligonucleotide
ugacaggaaacauacuguu

SEQ ID NO: 1969111 - RNA, 19 nt, Artificial Sequence
  Description of Artificial Sequence: Synthetic oligonucleotide
gucacucaaaauucuguac

SEQ ID NO: 1969112 - RNA, 19 nt, Artificial Sequence
  Description of Artificial Sequence: Synthetic oligonucleotide
auucuggguagcuaccuga

SEQ ID NO: 1969113 - RNA, 19 nt, Artificial Sequence
  Description of Artificial Sequence: Synthetic oligonucleotide
ccuuguuaucucuaaagag

SEQ ID NO: 1969114 - RNA, 19 nt, Artificial Sequence
  Description of Artificial Sequence: Synthetic oligonucleotide
ugucacacaccaacauuca

SEQ ID NO: 1969115 - RNA, 19 nt, Artificial Sequence
  Description of Artificial Sequence: Synthetic oligonucleotide
augcaacugaucaaaacug

SEQ ID NO: 1969116 - RNA, 19 nt, Artificial Sequence
  Description of Artificial Sequence: Synthetic oligonucleotide
cuuggaaauucacacguga

SEQ ID NO: 1969117 - RNA, 19 nt, Artificial Sequence
  Description of Artificial Sequence: Synthetic oligonucleotide
cucagcuaaaguccugagc

SEQ ID NO: 1969118 - RNA, 19 nt, Artificial Sequence
  Description of Artificial Sequence: Synthetic oligonucleotide
acuaaaacuuggaaauuca

SEQ ID NO: 1969119 - RNA, 19 nt, Artificial Sequence
  Description of Artificial Sequence: Synthetic oligonucleotide
aaguccugagcagaaucag

SEQ ID NO: 1969120 - RNA, 19 nt, Artificial Sequence
  Description of Artificial Sequence: Synthetic oligonucleotide
uaagaacagcaauggagaa

SEQ ID NO: 1969121 - RNA, 19 nt, Artificial Sequence
  Description of Artificial Sequence: Synthetic oligonucleotide
acagcuacuuacuaauguu

SEQ ID NO: 1969122 - RNA, 19 nt, Artificial Sequence
  Description of Artificial Sequence: Synthetic oligonucleotide
uucagaccaaaugaauugu

SEQ ID NO: 1969123 - RNA, 19 nt, Artificial Sequence
  Description of Artificial Sequence: Synthetic oligonucleotide
ugguauauuacagcuacuu

SEQ ID NO: 1969124 - RNA, 19 nt, Artificial Sequence
  Description of Artificial Sequence: Synthetic oligonucleotide
ucaaaagcaaggggagaag

SEQ ID NO: 1969125 - RNA, 19 nt, Artificial Sequence
  Description of Artificial Sequence: Synthetic oligonucleotide
aaauacgcaaggccaugaa

SEQ ID NO: 1969126 - RNA, 19 nt, Artificial Sequence
  Description of Artificial Sequence: Synthetic oligonucleotide
acgcaaggccaugaaaagc

SEQ ID NO: 1969127 - RNA, 19 nt, Artificial Sequence
  Description of Artificial Sequence: Synthetic oligonucleotide
accuccuucgguuccacug

SEQ ID NO: 1969128 - RNA, 19 nt, Artificial Sequence
  Description of Artificial Sequence: Synthetic oligonucleotide
aguuacaugucaggccugg

SEQ ID NO: 1969129 - RNA, 19 nt, Artificial Sequence
  Description of Artificial Sequence: Synthetic oligonucleotide
uaaagccugccaccugucc

SEQ ID NO: 1969130 - RNA, 19 nt, Artificial Sequence
  Description of Artificial Sequence: Synthetic oligonucleotide
agaacguauugguauuggu

SEQ ID NO: 1969131 - RNA, 19 nt, Artificial Sequence
  Description of Artificial Sequence: Synthetic oligonucleotide
aacucuacacugagaauga

SEQ ID NO: 1969132 - RNA, 19 nt, Artificial Sequence
  Description of Artificial Sequence: Synthetic oligonucleotide
agcaauugcaagaacguau

SEQ ID NO: 1969133 - RNA, 19 nt, Artificial Sequence
  Description of Artificial Sequence: Synthetic oligonucleotide
auacgcaaggccaugaaaa

SEQ ID NO: 1969134 - RNA, 19 nt, Artificial Sequence
  Description of Artificial Sequence: Synthetic oligonucleotide
agaaagugcaauguuguua

SEQ ID NO: 1969135 - RNA, 19 nt, Artificial Sequence
  Description of Artificial Sequence: Synthetic oligonucleotide
aauauuuguuuggcauucu

SEQ ID NO: 1969136 - RNA, 19 nt, Artificial Sequence
  Description of Artificial Sequence: Synthetic oligonucleotide
aagugcaauguuguuaguu

SEQ ID NO: 1969137 - RNA, 19 nt, Artificial Sequence
  Description of Artificial Sequence: Synthetic oligonucleotide
ucgucaucugggaauguaa

SEQ ID NO: 1969138 - RNA, 19 nt, Artificial Sequence
  Description of Artificial Sequence: Synthetic oligonucleotide
caaagacaacaauuuucac

SEQ ID NO: 1969139 - RNA, 19 nt, Artificial Sequence
  Description of Artificial Sequence: Synthetic oligonucleotide
ugagcagaaucaguuacau

SEQ ID NO: 1969140 - RNA, 19 nt, Artificial Sequence
  Description of Artificial Sequence: Synthetic oligonucleotide
uuaucucuaaagagacuuu

SEQ ID NO: 1969141 - RNA, 19 nt, Artificial Sequence
  Description of Artificial Sequence: Synthetic oligonucleotide
uaaauucauggucccugaa

SEQ ID NO: 1969142 - RNA, 19 nt, Artificial Sequence
  Description of Artificial Sequence: Synthetic oligonucleotide
agcuauuugcucucgucau

SEQ ID NO: 1969143 - RNA, 19 nt, Artificial Sequence
  Description of Artificial Sequence: Synthetic oligonucleotide
auauuacagcuacuuacua

SEQ ID NO: 1969144 - RNA, 19 nt, Artificial Sequence
  Description of Artificial Sequence: Synthetic oligonucleotide
agcauggacugacaggaaa

SEQ ID NO: 1969145 - RNA, 19 nt, Artificial Sequence
  Description of Artificial Sequence: Synthetic oligonucleotide
caacaauuuucaccgucac

SEQ ID NO: 1969146 - RNA, 19 nt, Artificial Sequence
  Description of Artificial Sequence: Synthetic oligonucleotide
ucucaagaccucuggugcu

SEQ ID NO: 1969147 - RNA, 19 nt, Artificial Sequence
  Description of Artificial Sequence: Synthetic oligonucleotide
auauugcuaaagccugcca

SEQ ID NO: 1969148 - RNA, 19 nt, Artificial Sequence
  Description of Artificial Sequence: Synthetic oligonucleotide
gaacuucacucaaucagca

SEQ ID NO: 1969149 - RNA, 19 nt, Artificial Sequence
  Description of Artificial Sequence: Synthetic oligonucleotide
gaacguauugguauuggua

SEQ ID NO: 1969150 - RNA, 19 nt, Artificial Sequence
  Description of Artificial Sequence: Synthetic oligonucleotide
uguccgcuaacagccacag

SEQ ID NO: 1969151 - RNA, 19 nt, Artificial Sequence
  Description of Artificial Sequence: Synthetic oligonucleotide
gugacguacaaaucacaca

SEQ ID NO: 1969152 - RNA, 19 nt, Artificial Sequence
  Description of Artificial Sequence: Synthetic oligonucleotide
gguuccacugcauuuguga

SEQ ID NO: 1969153 - RNA, 19 nt, Artificial Sequence
  Description of Artificial Sequence: Synthetic oligonucleotide
cuaaauucauggucccuga

SEQ ID NO: 1969154 - RNA, 19 nt, Artificial Sequence
  Description of Artificial Sequence: Synthetic oligonucleotide
ggacugacaggaaacauac

SEQ ID NO: 1969155 - RNA, 19 nt, Artificial Sequence
  Description of Artificial Sequence: Synthetic oligonucleotide
gguuuucguauaccaagcc

SEQ ID NO: 1969156 - RNA, 19 nt, Artificial Sequence
  Description of Artificial Sequence: Synthetic oligonucleotide
gccgaaacgccuuuccagg

SEQ ID NO: 1969157 - RNA, 19 nt, Artificial Sequence
  Description of Artificial Sequence: Synthetic oligonucleotide
aaugauuuccagagugaua

SEQ ID NO: 1969158 - RNA, 19 nt, Artificial Sequence
  Description of Artificial Sequence: Synthetic oligonucleotide
uugcaagaacguauuggua

SEQ ID NO: 1969159 - RNA, 19 nt, Artificial Sequence
  Description of Artificial Sequence: Synthetic oligonucleotide
gcauucucaagaccucugg

SEQ ID NO: 1969160 - RNA, 19 nt, Artificial Sequence
  Description of Artificial Sequence: Synthetic oligonucleotide
caauugcaagaacguauug

SEQ ID NO: 1969161 - RNA, 19 nt, Artificial Sequence
  Description of Artificial Sequence: Synthetic oligonucleotide
cuacuuacuaauguuuuaa

SEQ ID NO: 1969162 - RNA, 19 nt, Artificial Sequence
  Description of Artificial Sequence: Synthetic oligonucleotide
agcuaaaguccugagcaga

SEQ ID NO: 1969163 - RNA, 19 nt, Artificial Sequence
  Description of Artificial Sequence: Synthetic oligonucleotide
uuggcauucucaagaccuc

SEQ ID NO: 1969164 - RNA, 19 nt, Artificial Sequence
  Description of Artificial Sequence: Synthetic oligonucleotide
gcuaccugagccgaaacgc

SEQ ID NO: 1969165 - RNA, 19 nt, Artificial Sequence
  Description of Artificial Sequence: Synthetic oligonucleotide
accuaaugcaacugaucaa

SEQ ID NO: 1969166 - RNA, 19 nt, Artificial Sequence
  Description of Artificial Sequence: Synthetic oligonucleotide
ucucccuuguuaucucuaa

SEQ ID NO: 1969167 - RNA, 19 nt, Artificial Sequence
  Description of Artificial Sequence: Synthetic oligonucleotide
cagcuaaaguccugagcag

SEQ ID NO: 1969168 - RNA, 19 nt, Artificial Sequence
  Description of Artificial Sequence: Synthetic oligonucleotide
uugcuaaagccugccaccu

SEQ ID NO: 1969169 - RNA, 19 nt, Artificial Sequence
  Description of Artificial Sequence: Synthetic oligonucleotide
cacaccuggggucaggaca

SEQ ID NO: 1969170 - RNA, 19 nt, Artificial Sequence
  Description of Artificial Sequence: Synthetic oligonucleotide
aagcaauugcaagaacgua

SEQ ID NO: 1969171 - RNA, 19 nt, Artificial Sequence
  Description of Artificial Sequence: Synthetic oligonucleotide
caagaacguauugguauug

SEQ ID NO: 1969172 - RNA, 19 nt, Artificial Sequence
  Description of Artificial Sequence: Synthetic oligonucleotide
uguuguuaguugucauaua

SEQ ID NO: 1969173 - RNA, 19 nt, Artificial Sequence
  Description of Artificial Sequence: Synthetic oligonucleotide
ugcuaaagccugccaccug

SEQ ID NO: 1969174 - RNA, 19 nt, Artificial Sequence
  Description of Artificial Sequence: Synthetic oligonucleotide
acguggacgaaagacaguu

SEQ ID NO: 1969175 - RNA, 19 nt, Artificial Sequence
  Description of Artificial Sequence: Synthetic oligonucleotide
ggccaugaaaagcuauuug

SEQ ID NO: 1969176 - RNA, 19 nt, Artificial Sequence
  Description of Artificial Sequence: Synthetic oligonucleotide
caauuuucaccgucacuca

SEQ ID NO: 1969177 - RNA, 19 nt, Artificial Sequence
  Description of Artificial Sequence: Synthetic oligonucleotide
ucaagaccucuggugcuag

SEQ ID NO: 1969178 - RNA, 19 nt, Artificial Sequence
  Description of Artificial Sequence: Synthetic oligonucleotide
auuuuccaugcaaaggcaa

SEQ ID NO: 1969179 - RNA, 19 nt, Artificial Sequence
  Description of Artificial Sequence: Synthetic oligonucleotide
gaaagacacucugcugcgc

SEQ ID NO: 1969180 - RNA, 19 nt, Artificial Sequence
  Description of Artificial Sequence: Synthetic oligonucleotide
agauaacguggacgaaaga

SEQ ID NO: 1969181 - RNA, 19 nt, Artificial Sequence
  Description of Artificial Sequence: Synthetic oligonucleotide
cauucuggguagcuaccug

SEQ ID NO: 1969182 - RNA, 19 nt, Artificial Sequence
  Description of Artificial Sequence: Synthetic oligonucleotide
cuggggucaggacagagaa

SEQ ID NO: 1969183 - RNA, 19 nt, Artificial Sequence
  Description of Artificial Sequence: Synthetic oligonucleotide
cugagcagaaucaguuaca

SEQ ID NO: 1969184 - RNA, 19 nt, Artificial Sequence
  Description of Artificial Sequence: Synthetic oligonucleotide
cugacaggaaacauacugu

SEQ ID NO: 1969185 - RNA, 19 nt, Artificial Sequence
  Description of Artificial Sequence: Synthetic oligonucleotide
aaacgccuuuccagguuuc

SEQ ID NO: 1969186 - RNA, 19 nt, Artificial Sequence
  Description of Artificial Sequence: Synthetic oligonucleotide
uaguuugggcagcugcuuu

SEQ ID NO: 1969187 - RNA, 19 nt, Artificial Sequence
  Description of Artificial Sequence: Synthetic oligonucleotide
agaaaacucuacacugaga

SEQ ID NO: 1969188 - RNA, 19 nt, Artificial Sequence
  Description of Artificial Sequence: Synthetic oligonucleotide
agacacucugcugcgccgg

SEQ ID NO: 1969189 - RNA, 19 nt, Artificial Sequence
  Description of Artificial Sequence: Synthetic oligonucleotide
ucgguuccacugcauuugu

SEQ ID NO: 1969190 - RNA, 19 nt, Artificial Sequence
  Description of Artificial Sequence: Synthetic oligonucleotide
aagaccucuggugcuaguu

SEQ ID NO: 1969191 - RNA, 19 nt, Artificial Sequence
  Description of Artificial Sequence: Synthetic oligonucleotide
cagaccaaaugaauuguua

SEQ ID NO: 1969192 - RNA, 19 nt, Artificial Sequence
  Description of Artificial Sequence: Synthetic oligonucleotide
guaccuaaugcaacugauc

SEQ ID NO: 1969193 - RNA, 19 nt, Artificial Sequence
  Description of Artificial Sequence: Synthetic oligonucleotide
cuaaugcaacugaucaaaa

SEQ ID NO: 1969194 - RNA, 19 nt, Artificial Sequence
  Description of Artificial Sequence: Synthetic oligonucleotide
cuguaccuaaugcaacuga

SEQ ID NO: 1969195 - RNA, 19 nt, Artificial Sequence
  Description of Artificial Sequence: Synthetic oligonucleotide
acacgugauuucuccuucu

SEQ ID NO: 1969196 - RNA, 19 nt, Artificial Sequence
  Description of Artificial Sequence: Synthetic oligonucleotide
acauucuggguagcuaccu

SEQ ID NO: 1969197 - RNA, 19 nt, Artificial Sequence
  Description of Artificial Sequence: Synthetic oligonucleotide
cuggaacuucacucaauca

SEQ ID NO: 1969198 - RNA, 19 nt, Artificial Sequence
  Description of Artificial Sequence: Synthetic oligonucleotide
uggcauucucaagaccucu

SEQ ID NO: 1969199 - RNA, 19 nt, Artificial Sequence
  Description of Artificial Sequence: Synthetic oligonucleotide
gguauauuacagcuacuua

SEQ ID NO: 1969200 - RNA, 19 nt, Artificial Sequence
  Description of Artificial Sequence: Synthetic oligonucleotide
guugucauauaacuugcuu

SEQ ID NO: 1969201 - RNA, 19 nt, Artificial Sequence
  Description of Artificial Sequence: Synthetic oligonucleotide
agugacuugggaaccuccu

SEQ ID NO: 1969202 - RNA, 19 nt, Artificial Sequence
  Description of Artificial Sequence: Synthetic oligonucleotide
auggucccugaauuuaauu

SEQ ID NO: 1969203 - RNA, 19 nt, Artificial Sequence
  Description of Artificial Sequence: Synthetic oligonucleotide
uagcuaccugagccgaaac

SEQ ID NO: 1969204 - RNA, 19 nt, Artificial Sequence
  Description of Artificial Sequence: Synthetic oligonucleotide
guuacaugucaggccuggg

SEQ ID NO: 1969205 - RNA, 19 nt, Artificial Sequence
  Description of Artificial Sequence: Synthetic oligonucleotide
agacaacaauuuucaccgu

SEQ ID NO: 1969206 - RNA, 19 nt, Artificial Sequence
  Description of Artificial Sequence: Synthetic oligonucleotide
acguauugguauugguaua

SEQ ID NO: 1969207 - RNA, 19 nt, Artificial Sequence
  Description of Artificial Sequence: Synthetic oligonucleotide
gucauauaacuugcuugac

SEQ ID NO: 1969208 - RNA, 19 nt, Artificial Sequence
  Description of Artificial Sequence: Synthetic oligonucleotide
gaaucauuuccaauuucau

SEQ ID NO: 1969209 - RNA, 19 nt, Artificial Sequence
  Description of Artificial Sequence: Synthetic oligonucleotide
accgucacucaaaauucug

SEQ ID NO: 1969210 - RNA, 19 nt, Artificial Sequence
  Description of Artificial Sequence: Synthetic oligonucleotide
aacgccuuuccagguuucu

SEQ ID NO: 1969211 - RNA, 19 nt, Artificial Sequence
  Description of Artificial Sequence: Synthetic oligonucleotide
guauaccaagccccacaac

SEQ ID NO: 1969212 - RNA, 19 nt, Artificial Sequence
  Description of Artificial Sequence: Synthetic oligonucleotide
gagccgaaacgccuuucca

SEQ ID NO: 1969213 - RNA, 19 nt, Artificial Sequence
  Description of Artificial Sequence: Synthetic oligonucleotide
agaccucuggugcuaguuu

SEQ ID NO: 1969214 - RNA, 19 nt, Artificial Sequence
  Description of Artificial Sequence: Synthetic oligonucleotide
aggcaaugauuuccagagu

SEQ ID NO: 1969215 - RNA, 19 nt, Artificial Sequence
  Description of Artificial Sequence: Synthetic oligonucleotide
gacguacaaaucacacaca

SEQ ID NO: 1969216 - RNA, 19 nt, Artificial Sequence
  Description of Artificial Sequence: Synthetic oligonucleotide
cauggacugacaggaaaca

SEQ ID NO: 1969217 - RNA, 19 nt, Artificial Sequence
  Description of Artificial Sequence: Synthetic oligonucleotide
caacugaucaaaacuggau

SEQ ID NO: 1969218 - RNA, 19 nt, Artificial Sequence
  Description of Artificial Sequence: Synthetic oligonucleotide
ggaaauucacacgugauuu

SEQ ID NO: 1969219 - RNA, 19 nt, Artificial Sequence
  Description of Artificial Sequence: Synthetic oligonucleotide
acucaaaauucuguaccua

SEQ ID NO: 1969220 - RNA, 19 nt, Artificial Sequence
  Description of Artificial Sequence: Synthetic oligonucleotide
aacguggacgaaagacagu

SEQ ID NO: 1969221 - RNA, 19 nt, Artificial Sequence
  Description of Artificial Sequence: Synthetic oligonucleotide
uucacucaaucagcacaca

SEQ ID NO: 1969222 - RNA, 19 nt, Artificial Sequence
  Description of Artificial Sequence: Synthetic oligonucleotide
cucuuuacucagcuaaagu

SEQ ID NO: 1969223 - RNA, 19 nt, Artificial Sequence
  Description of Artificial Sequence: Synthetic oligonucleotide
aucugggaauguaaauagu

SEQ ID NO: 1969224 - RNA, 19 nt, Artificial Sequence
  Description of Artificial Sequence: Synthetic oligonucleotide
uuucaccgucacucaaaau

SEQ ID NO: 1969225 - RNA, 19 nt, Artificial Sequence
  Description of Artificial Sequence: Synthetic oligonucleotide
guuaguugucauauaacuu

SEQ ID NO: 1969226 - RNA, 19 nt, Artificial Sequence
  Description of Artificial Sequence: Synthetic oligonucleotide
caaauacgcaaggccauga

SEQ ID NO: 1969227 - RNA, 19 nt, Artificial Sequence
  Description of Artificial Sequence: Synthetic oligonucleotide
ggauauugcuaaagccugc

SEQ ID NO: 1969228 - RNA, 19 nt, Artificial Sequence
  Description of Artificial Sequence: Synthetic oligonucleotide
auaacuugcuugacaguuu

SEQ ID NO: 1969229 - RNA, 19 nt, Artificial Sequence
  Description of Artificial Sequence: Synthetic oligonucleotide
uucguauaccaagccccac

SEQ ID NO: 1969230 - RNA, 19 nt, Artificial Sequence
  Description of Artificial Sequence: Synthetic oligonucleotide
acacaccaacauucaggcu

SEQ ID NO: 1969231 - RNA, 19 nt, Artificial Sequence
  Description of Artificial Sequence: Synthetic oligonucleotide
gcugugacguacaaaucac

SEQ ID NO: 1969232 - RNA, 19 nt, Artificial Sequence
  Description of Artificial Sequence: Synthetic oligonucleotide
cuacacugagaaugaacua

SEQ ID NO: 1969233 - RNA, 19 nt, Artificial Sequence
  Description of Artificial Sequence: Synthetic oligonucleotide
auggagaaaauaaguuauu

SEQ ID NO: 1969234 - RNA, 19 nt, Artificial Sequence
  Description of Artificial Sequence: Synthetic oligonucleotide
uagucucuuuacucagcua

SEQ ID NO: 1969235 - RNA, 19 nt, Artificial Sequence
  Description of Artificial Sequence: Synthetic oligonucleotide
gacgaaagacaguuagauu

SEQ ID NO: 1969236 - RNA, 19 nt, Artificial Sequence
  Description of Artificial Sequence: Synthetic oligonucleotide
ugcgccggggauacacuuc

SEQ ID NO: 1969237 - RNA, 19 nt, Artificial Sequence
  Description of Artificial Sequence: Synthetic oligonucleotide
caguuacaugucaggccug

SEQ ID NO: 1969238 - RNA, 19 nt, Artificial Sequence
  Description of Artificial Sequence: Synthetic oligonucleotide
ccccaaauacgcaaggcca

SEQ ID NO: 1969239 - RNA, 19 nt, Artificial Sequence
  Description of Artificial Sequence: Synthetic oligonucleotide
gagaagccugguuuucgua

SEQ ID NO: 1969240 - RNA, 19 nt, Artificial Sequence
  Description of Artificial Sequence: Synthetic oligonucleotide
gcauggacugacaggaaac

SEQ ID NO: 1969241 - RNA, 19 nt, Artificial Sequence
  Description of Artificial Sequence: Synthetic oligonucleotide
cagacagcugugacguaca

SEQ ID NO: 1969242 - RNA, 19 nt, Artificial Sequence
  Description of Artificial Sequence: Synthetic oligonucleotide
aggccaugaaaagcuauuu

SEQ ID NO: 1969243 - RNA, 19 nt, Artificial Sequence
  Description of Artificial Sequence: Synthetic oligonucleotide
gccccaagccaccucagug

SEQ ID NO: 1969244 - RNA, 19 nt, Artificial Sequence
  Description of Artificial Sequence: Synthetic oligonucleotide
gcagacagcugugacguac

SEQ ID NO: 1969245 - RNA, 19 nt, Artificial Sequence
  Description of Artificial Sequence: Synthetic oligonucleotide
cauauacagaaagugcaau

SEQ ID NO: 1969246 - RNA, 19 nt, Artificial Sequence
  Description of Artificial Sequence: Synthetic oligonucleotide
caaaaccucagccccuucu

SEQ ID NO: 1969247 - RNA, 19 nt, Artificial Sequence
  Description of Artificial Sequence: Synthetic oligonucleotide
gccaccuguccgcuaacag

SEQ ID NO: 1969248 - RNA, 19 nt, Artificial Sequence
  Description of Artificial Sequence: Synthetic oligonucleotide
ggacgaaagacaguuagau

SEQ ID NO: 1969249 - RNA, 19 nt, Artificial Sequence
  Description of Artificial Sequence: Synthetic oligonucleotide
agacagcugugacguacaa

SEQ ID NO: 1969250 - RNA, 19 nt, Artificial Sequence
  Description of Artificial Sequence: Synthetic oligonucleotide
gcuaaagccugccaccugu

SEQ ID NO: 1969251 - RNA, 19 nt, Artificial Sequence
  Description of Artificial Sequence: Synthetic oligonucleotide
gggaauguaaauaguaguu

SEQ ID NO: 1969252 - RNA, 19 nt, Artificial Sequence
  Description of Artificial Sequence: Synthetic oligonucleotide
uccuucgguuccacugcau

SEQ ID NO: 1969253 - RNA, 19 nt, Artificial Sequence
  Description of Artificial Sequence: Synthetic oligonucleotide
ggaauguaaauaguaguuu

SEQ ID NO: 1969254 - RNA, 19 nt, Artificial Sequence
  Description of Artificial Sequence: Synthetic oligonucleotide
guagcuaccugagccgaaa

SEQ ID NO: 1969255 - RNA, 19 nt, Artificial Sequence
  Description of Artificial Sequence: Synthetic oligonucleotide
cucaaucagcacacagcaa

SEQ ID NO: 1969256 - RNA, 19 nt, Artificial Sequence
  Description of Artificial Sequence: Synthetic oligonucleotide
gcagaaucaguuacauguc

SEQ ID NO: 1969257 - RNA, 19 nt, Artificial Sequence
  Description of Artificial Sequence: Synthetic oligonucleotide
ggcauucucaagaccucug

SEQ ID NO: 1969258 - RNA, 19 nt, Artificial Sequence
  Description of Artificial Sequence: Synthetic oligonucleotide
guccgcuaacagccacagg

SEQ ID NO: 1969259 - RNA, 19 nt, Artificial Sequence
  Description of Artificial Sequence: Synthetic oligonucleotide
ccggggauacacuucucac

SEQ ID NO: 1969260 - RNA, 19 nt, Artificial Sequence
  Description of Artificial Sequence: Synthetic oligonucleotide
cagcuacuuacuaauguuu

SEQ ID NO: 1969261 - RNA, 19 nt, Artificial Sequence
  Description of Artificial Sequence: Synthetic oligonucleotide
gucucuuuacucagcuaaa

SEQ ID NO: 1969262 - RNA, 19 nt, Artificial Sequence
  Description of Artificial Sequence: Synthetic oligonucleotide
acucuacacugagaaugaa

SEQ ID NO: 1969263 - RNA, 19 nt, Artificial Sequence
  Description of Artificial Sequence: Synthetic oligonucleotide
cucccuuguuaucucuaaa

SEQ ID NO: 1969264 - RNA, 19 nt, Artificial Sequence
  Description of Artificial Sequence: Synthetic oligonucleotide
gccggggauacacuucuca

SEQ ID NO: 1969265 - RNA, 19 nt, Artificial Sequence
  Description of Artificial Sequence: Synthetic oligonucleotide
ccaaauacgcaaggccaug

SEQ ID NO: 1969266 - RNA, 19 nt, Artificial Sequence
  Description of Artificial Sequence: Synthetic oligonucleotide
gaaccuccuucgguuccac

SEQ ID NO: 1969267 - RNA, 19 nt, Artificial Sequence
  Description of Artificial Sequence: Synthetic oligonucleotide
cuucgguuccacugcauuu

SEQ ID NO: 1969268 - RNA, 19 nt, Artificial Sequence
  Description of Artificial Sequence: Synthetic oligonucleotide
ccugguuuucguauaccaa

SEQ ID NO: 1969269 - RNA, 19 nt, Artificial Sequence
  Description of Artificial Sequence: Synthetic oligonucleotide
cacacauucuggguagcua

SEQ ID NO: 1969270 - RNA, 19 nt, Artificial Sequence
  Description of Artificial Sequence: Synthetic oligonucleotide
cagccccaagccaccucag

SEQ ID NO: 1969271 - RNA, 19 nt, Artificial Sequence
  Description of Artificial Sequence: Synthetic oligonucleotide
cccuucucagacauucaca

SEQ ID NO: 1969272 - RNA, 19 nt, Artificial Sequence
  Description of Artificial Sequence: Synthetic oligonucleotide
caugucaggccugggguua

SEQ ID NO: 1969273 - RNA, 19 nt, Artificial Sequence
  Description of Artificial Sequence: Synthetic oligonucleotide
cucgucaucugggaaugua

SEQ ID NO: 1969274 - RNA, 19 nt, Artificial Sequence
  Description of Artificial Sequence: Synthetic oligonucleotide
caccgucacucaaaauucu

SEQ ID NO: 1969275 - RNA, 19 nt, Artificial Sequence
  Description of Artificial Sequence: Synthetic oligonucleotide
cuggugcuaguuugauuua

SEQ ID NO: 1969276 - RNA, 19 nt, Artificial Sequence
  Description of Artificial Sequence: Synthetic oligonucleotide
gcaagaacguauugguauu

SEQ ID NO: 1969277 - RNA, 19 nt, Artificial Sequence
  Description of Artificial Sequence: Synthetic oligonucleotide
ccuguccgcuaacagccac

SEQ ID NO: 1969278 - RNA, 19 nt, Artificial Sequence
  Description of Artificial Sequence: Synthetic oligonucleotide
gcucucgucaucugggaau

SEQ ID NO: 1969279 - RNA, 19 nt, Artificial Sequence
  Description of Artificial Sequence: Synthetic oligonucleotide
ugcagacagcugugacgua

SEQ ID NO: 1969280 - RNA, 19 nt, Artificial Sequence
  Description of Artificial Sequence: Synthetic oligonucleotide
cugaucaaaacuggauauu

SEQ ID NO: 1969281 - RNA, 19 nt, Artificial Sequence
  Description of Artificial Sequence: Synthetic oligonucleotide
ugucaggccugggguuacu

SEQ ID NO: 1969282 - RNA, 19 nt, Artificial Sequence
  Description of Artificial Sequence: Synthetic oligonucleotide
cgucacucaaaauucugua

SEQ ID NO: 1969283 - RNA, 19 nt, Artificial Sequence
  Description of Artificial Sequence: Synthetic oligonucleotide
acgccuuuccagguuucuu

SEQ ID NO: 1969284 - RNA, 19 nt, Artificial Sequence
  Description of Artificial Sequence: Synthetic oligonucleotide
gacugacaggaaacauacu

SEQ ID NO: 1969285 - RNA, 19 nt, Artificial Sequence
  Description of Artificial Sequence: Synthetic oligonucleotide
ccgcuaacagccacaggca

SEQ ID NO: 1969286 - RNA, 19 nt, Artificial Sequence
  Description of Artificial Sequence: Synthetic oligonucleotide
cacuaaauucauggucccu

SEQ ID NO: 1969287 - RNA, 19 nt, Artificial Sequence
  Description of Artificial Sequence: Synthetic oligonucleotide
cggggauacacuucucaca

SEQ ID NO: 1969288 - RNA, 19 nt, Artificial Sequence
  Description of Artificial Sequence: Synthetic oligonucleotide
ccaugcaaaggcaaugauu

SEQ ID NO: 1969289 - RNA, 19 nt, Artificial Sequence
  Description of Artificial Sequence: Synthetic oligonucleotide
cguauaccaagccccacaa

SEQ ID NO: 1969290 - RNA, 19 nt, Artificial Sequence
  Description of Artificial Sequence: Synthetic oligonucleotide
cuaaaguccugagcagaau

SEQ ID NO: 1969291 - RNA, 19 nt, Artificial Sequence
  Description of Artificial Sequence: Synthetic oligonucleotide
ggaaccuccuucgguucca

SEQ ID NO: 1969292 - RNA, 19 nt, Artificial Sequence
  Description of Artificial Sequence: Synthetic oligonucleotide
guaguuugggcagcugcuu

SEQ ID NO: 1969293 - RNA, 19 nt, Artificial Sequence
  Description of Artificial Sequence: Synthetic oligonucleotide
guauugguauugguauauu

SEQ ID NO: 1969294 - RNA, 19 nt, Artificial Sequence
  Description of Artificial Sequence: Synthetic oligonucleotide
ccgucacucaaaauucugu

SEQ ID NO: 1969295 - RNA, 19 nt, Artificial Sequence
  Description of Artificial Sequence: Synthetic oligonucleotide
accuguccgcuaacagcca

SEQ ID NO: 1969296 - RNA, 19 nt, Artificial Sequence
  Description of Artificial Sequence: Synthetic oligonucleotide
agccugccaccuguccgcu

SEQ ID NO: 1969297 - RNA, 19 nt, Artificial Sequence
  Description of Artificial Sequence: Synthetic oligonucleotide
cucuggugcuaguuugauu

SEQ ID NO: 1969298 - RNA, 19 nt, Artificial Sequence
  Description of Artificial Sequence: Synthetic oligonucleotide
cccaaauacgcaaggccau

SEQ ID NO: 1969299 - RNA, 19 nt, Artificial Sequence
  Description of Artificial Sequence: Synthetic oligonucleotide
gcaagugacuugggaaccu

SEQ ID NO: 1969300 - RNA, 19 nt, Artificial Sequence
  Description of Artificial Sequence: Synthetic oligonucleotide
caagaccucuggugcuagu

SEQ ID NO: 1969301 - RNA, 19 nt, Artificial Sequence
  Description of Artificial Sequence: Synthetic oligonucleotide
ccaagccaccucaguguca

SEQ ID NO: 1969302 - RNA, 19 nt, Artificial Sequence
  Description of Artificial Sequence: Synthetic oligonucleotide
gguagcuaccugagccgaa

SEQ ID NO: 1969303 - RNA, 19 nt, Artificial Sequence
  Description of Artificial Sequence: Synthetic oligonucleotide
gcaaggccaugaaaagcua

SEQ ID NO: 1969304 - RNA, 19 nt, Artificial Sequence
  Description of Artificial Sequence: Synthetic oligonucleotide
cgguuccacugcauuugug

SEQ ID NO: 1969305 - RNA, 19 nt, Artificial Sequence
  Description of Artificial Sequence: Synthetic oligonucleotide
cugcgccggggauacacuu

SEQ ID NO: 1969306 - RNA, 19 nt, Artificial Sequence
  Description of Artificial Sequence: Synthetic oligonucleotide
ccgaaacgccuuuccaggu

SEQ ID NO: 1969307 - RNA, 19 nt, Artificial Sequence
  Description of Artificial Sequence: Synthetic oligonucleotide
ccuucgguuccacugcauu

SEQ ID NO: 1969308 - RNA, 19 nt, Artificial Sequence
  Description of Artificial Sequence: Synthetic oligonucleotide
gccccuucucagacauuca

SEQ ID NO: 1969309 - RNA, 19 nt, Artificial Sequence
  Description of Artificial Sequence: Synthetic oligonucleotide
cguggacgaaagacaguua

SEQ ID NO: 1969310 - RNA, 19 nt, Artificial Sequence
  Description of Artificial Sequence: Synthetic oligonucleotide
caccuggggucaggacaga

SEQ ID NO: 1969311 - RNA, 19 nt, Artificial Sequence
  Description of Artificial Sequence: Synthetic oligonucleotide
gcugcgccggggauacacu

SEQ ID NO: 1969312 - RNA, 19 nt, Artificial Sequence
  Description of Artificial Sequence: Synthetic oligonucleotide
cgaaacgccuuuccagguu

SEQ ID NO: 1969313 - RNA, 19 nt, Artificial Sequence
  Description of Artificial Sequence: Synthetic oligonucleotide
ccucuggugcuaguuugau

SEQ ID NO: 1969314 - RNA, 19 nt, Artificial Sequence
  Description of Artificial Sequence: Synthetic oligonucleotide
cgccggggauacacuucuc

SEQ ID NO: 1969315 - RNA, 19 nt, Artificial Sequence
  Description of Artificial Sequence: Synthetic oligonucleotide
caccaacauucaggcuuuu

SEQ ID NO: 1969316 - RNA, 19 nt, Artificial Sequence
  Description of Artificial Sequence: Synthetic oligonucleotide
uucgucacuacuaagaugg

SEQ ID NO: 1969317 - RNA, 19 nt, Artificial Sequence
  Description of Artificial Sequence: Synthetic oligonucleotide
uugauuauuauaaugggcc

SEQ ID NO: 1969318 - RNA, 19 nt, Artificial Sequence
  Description of Artificial Sequence: Synthetic oligonucleotide
acguauauuauuuauugcc

SEQ ID NO: 1969319 - RNA, 19 nt, Artificial Sequence
  Description of Artificial Sequence: Synthetic oligonucleotide
aauucuagagcccuugugg

SEQ ID NO: 1969320 - RNA, 19 nt, Artificial Sequence
  Description of Artificial Sequence: Synthetic oligonucleotide
uguuuuggaaucugaaugg

SEQ ID NO: 1969321 - RNA, 19 nt, Artificial Sequence
  Description of Artificial Sequence: Synthetic oligonucleotide
gauaagaacacguauauua

SEQ ID NO: 1969322 - RNA, 19 nt, Artificial Sequence
  Description of Artificial Sequence: Synthetic oligonucleotide
ucuugauuauuauaauggg

SEQ ID NO: 1969323 - RNA, 19 nt, Artificial Sequence
  Description of Artificial Sequence: Synthetic oligonucleotide
uuaagcauaggcuagcccu

SEQ ID NO: 1969324 - RNA, 19 nt, Artificial Sequence
  Description of Artificial Sequence: Synthetic oligonucleotide
uauuuauugccacugugug

SEQ ID NO: 1969325 - RNA, 19 nt, Artificial Sequence
  Description of Artificial Sequence: Synthetic oligonucleotide
aaauuuggaggucacccag

SEQ ID NO: 1969326 - RNA, 19 nt, Artificial Sequence
  Description of Artificial Sequence: Synthetic oligonucleotide
cuugauuauuauaaugggc

SEQ ID NO: 1969327 - RNA, 19 nt, Artificial Sequence
  Description of Artificial Sequence: Synthetic oligonucleotide
uggguuaccaccccuaucc

SEQ ID NO: 1969328 - RNA, 19 nt, Artificial Sequence
  Description of Artificial Sequence: Synthetic oligonucleotide
uuauuuauugccacugugu

SEQ ID NO: 1969329 - RNA, 19 nt, Artificial Sequence
  Description of Artificial Sequence: Synthetic oligonucleotide
acacguauauuauuuauug

SEQ ID NO: 1969330 - RNA, 19 nt, Artificial Sequence
  Description of Artificial Sequence: Synthetic oligonucleotide
uauuauaaugggccaaagc

SEQ ID NO: 1969331 - RNA, 19 nt, Artificial Sequence
  Description of Artificial Sequence: Synthetic oligonucleotide
uuauuuaaggaggugagac

SEQ ID NO: 1969332 - RNA, 19 nt, Artificial Sequence
  Description of Artificial Sequence: Synthetic oligonucleotide
uggaaggucacacccauug

SEQ ID NO: 1969333 - RNA, 19 nt, Artificial Sequence
  Description of Artificial Sequence: Synthetic oligonucleotide
auuauuuauugccacugug

SEQ ID NO: 1969334 - RNA, 19 nt, Artificial Sequence
  Description of Artificial Sequence: Synthetic oligonucleotide
aauacuuggguggguaacg

SEQ ID NO: 1969335 - RNA, 19 nt, Artificial Sequence
  Description of Artificial Sequence: Synthetic oligonucleotide
uauauuauuuauugccacu

SEQ ID NO: 1969336 - RNA, 19 nt, Artificial Sequence
  Description of Artificial Sequence: Synthetic oligonucleotide
auuuauugccacugugugg

SEQ ID NO: 1969337 - RNA, 19 nt, Artificial Sequence
  Description of Artificial Sequence: Synthetic oligonucleotide
aaauucuagagcccuugug

SEQ ID NO: 1969338 - RNA, 19 nt, Artificial Sequence
  Description of Artificial Sequence: Synthetic oligonucleotide
acucuugauuauuauaaug

SEQ ID NO: 1969339 - RNA, 19 nt, Artificial Sequence
  Description of Artificial Sequence: Synthetic oligonucleotide
aggcuuuugaccuuccuag

SEQ ID NO: 1969340 - RNA, 19 nt, Artificial Sequence
  Description of Artificial Sequence: Synthetic oligonucleotide
uuguuauuuaaggagguga

SEQ ID NO: 1969341 - RNA, 19 nt, Artificial Sequence
  Description of Artificial Sequence: Synthetic oligonucleotide
guuuuggucauguagcgac

SEQ ID NO: 1969342 - RNA, 19 nt, Artificial Sequence
  Description of Artificial Sequence: Synthetic oligonucleotide
uuaaggaggugagacagag

SEQ ID NO: 1969343 - RNA, 19 nt, Artificial Sequence
  Description of Artificial Sequence: Synthetic oligonucleotide
gaggcgagcaugcaggcgg

SEQ ID NO: 1969344 - RNA, 19 nt, Artificial Sequence
  Description of Artificial Sequence: Synthetic oligonucleotide
uggguaacggaugaaaagc

SEQ ID NO: 1969345 - RNA, 19 nt, Artificial Sequence
  Description of Artificial Sequence: Synthetic oligonucleotide
acagaagagcccuaggcug

SEQ ID NO: 1969346 - RNA, 19 nt, Artificial Sequence
  Description of Artificial Sequence: Synthetic oligonucleotide
aagucugacagucgcuguc

SEQ ID NO: 1969347 - RNA, 19 nt, Artificial Sequence
  Description of Artificial Sequence: Synthetic oligonucleotide
uguaccaagcaccaagcaa

SEQ ID NO: 1969348 - RNA, 19 nt, Artificial Sequence
  Description of Artificial Sequence: Synthetic oligonucleotide
guauagagcucaaauuugg

SEQ ID NO: 1969349 - RNA, 19 nt, Artificial Sequence
  Description of Artificial Sequence: Synthetic oligonucleotide
auuaccucggguuuccuca

SEQ ID NO: 1969350 - RNA, 19 nt, Artificial Sequence
  Description of Artificial Sequence: Synthetic oligonucleotide
aauguuucaggugcccagg

SEQ ID NO: 1969351 - RNA, 19 nt, Artificial Sequence
  Description of Artificial Sequence: Synthetic oligonucleotide
ucucaggucugcuuggaag

SEQ ID NO: 1969352 - RNA, 19 nt, Artificial Sequence
  Description of Artificial Sequence: Synthetic oligonucleotide
ugggcaaacccugagaucu

SEQ ID NO: 1969353 - RNA, 19 nt, Artificial Sequence
  Description of Artificial Sequence: Synthetic oligonucleotide
uauuuaaggaggugagaca

SEQ ID NO: 1969354 - RNA, 19 nt, Artificial Sequence
  Description of Artificial Sequence: Synthetic oligonucleotide
agagcucaaauuuggaggu

SEQ ID NO: 1969355 - RNA, 19 nt, Artificial Sequence
  Description of Artificial Sequence: Synthetic oligonucleotide
uauuauuuauugccacugu

SEQ ID NO: 1969356 - RNA, 19 nt, Artificial Sequence
  Description of Artificial Sequence: Synthetic oligonucleotide
accaccccuauccugaggg

SEQ ID NO: 1969357 - RNA, 19 nt, Artificial Sequence
  Description of Artificial Sequence: Synthetic oligonucleotide
aaugaggggcaucugcgca

SEQ ID NO: 1969358 - RNA, 19 nt, Artificial Sequence
  Description of Artificial Sequence: Synthetic oligonucleotide
uaaacucuugauuauuaua

SEQ ID NO: 1969359 - RNA, 19 nt, Artificial Sequence
  Description of Artificial Sequence: Synthetic oligonucleotide
aagaacacguauauuauuu

SEQ ID NO: 1969360 - RNA, 19 nt, Artificial Sequence
  Description of Artificial Sequence: Synthetic oligonucleotide
guaacggaugaaaagccgg

SEQ ID NO: 1969361 - RNA, 19 nt, Artificial Sequence
  Description of Artificial Sequence: Synthetic oligonucleotide
aaccugugcugcuuagagg

SEQ ID NO: 1969362 - RNA, 19 nt, Artificial Sequence
  Description of Artificial Sequence: Synthetic oligonucleotide
ugugggcaaacccugagau

SEQ ID NO: 1969363 - RNA, 19 nt, Artificial Sequence
  Description of Artificial Sequence: Synthetic oligonucleotide
auaggcuagcccugcauuc

SEQ ID NO: 1969364 - RNA, 19 nt, Artificial Sequence
  Description of Artificial Sequence: Synthetic oligonucleotide
uguggaauacuuggguggg

SEQ ID NO: 1969365 - RNA, 19 nt, Artificial Sequence
  Description of Artificial Sequence: Synthetic oligonucleotide
uuugugggcaaacccugag

SEQ ID NO: 1969366 - RNA, 19 nt, Artificial Sequence
  Description of Artificial Sequence: Synthetic oligonucleotide
cacguauauuauuuauugc

SEQ ID NO: 1969367 - RNA, 19 nt, Artificial Sequence
  Description of Artificial Sequence: Synthetic oligonucleotide
gauacaagucugacagucg

SEQ ID NO: 1969368 - RNA, 19 nt, Artificial Sequence
  Description of Artificial Sequence: Synthetic oligonucleotide
uuaaacucuugauuauuau

SEQ ID NO: 1969369 - RNA, 19 nt, Artificial Sequence
  Description of Artificial Sequence: Synthetic oligonucleotide
aggccuggcaugcaggaac

SEQ ID NO: 1969370 - RNA, 19 nt, Artificial Sequence
  Description of Artificial Sequence: Synthetic oligonucleotide
uggcauuguuauuuaagga

SEQ ID NO: 1969371 - RNA, 19 nt, Artificial Sequence
  Description of Artificial Sequence: Synthetic oligonucleotide
ucucccuuccacccugugg

SEQ ID NO: 1969372 - RNA, 19 nt, Artificial Sequence
  Description of Artificial Sequence: Synthetic oligonucleotide
guggguaacggaugaaaag

SEQ ID NO: 1969373 - RNA, 19 nt, Artificial Sequence
  Description of Artificial Sequence: Synthetic oligonucleotide
aagccucucucccuuccac

SEQ ID NO: 1969374 - RNA, 19 nt, Artificial Sequence
  Description of Artificial Sequence: Synthetic oligonucleotide
cacgugguaaaugaggcgc

SEQ ID NO: 1969375 - RNA, 19 nt, Artificial Sequence
  Description of Artificial Sequence: Synthetic oligonucleotide
uggucauguagcgacaggc

SEQ ID NO: 1969376 - RNA, 19 nt, Artificial Sequence
  Description of Artificial Sequence: Synthetic oligonucleotide
uggugauaagaacacguau

SEQ ID NO: 1969377 - RNA, 19 nt, Artificial Sequence
  Description of Artificial Sequence: Synthetic oligonucleotide
aauuuggaggucacccagg

SEQ ID NO: 1969378 - RNA, 19 nt, Artificial Sequence
  Description of Artificial Sequence: Synthetic oligonucleotide
aguauagagcucaaauuug

SEQ ID NO: 1969379 - RNA, 19 nt, Artificial Sequence
  Description of Artificial Sequence: Synthetic oligonucleotide
ugaauggacaggucuggca

SEQ ID NO: 1969380 - RNA, 19 nt, Artificial Sequence
  Description of Artificial Sequence: Synthetic oligonucleotide
uuauuauaaugggccaaag

SEQ ID NO: 1969381 - RNA, 19 nt, Artificial Sequence
  Description of Artificial Sequence: Synthetic oligonucleotide
ugaccuuccuagaugugga

SEQ ID NO: 1969382 - RNA, 19 nt, Artificial Sequence
  Description of Artificial Sequence: Synthetic oligonucleotide
auuccaaauucuagagccc

SEQ ID NO: 1969383 - RNA, 19 nt, Artificial Sequence
  Description of Artificial Sequence: Synthetic oligonucleotide
uuuuaagcauaggcuagcc

SEQ ID NO: 1969384 - RNA, 19 nt, Artificial Sequence
  Description of Artificial Sequence: Synthetic oligonucleotide
uccucucugcuguaugggg

SEQ ID NO: 1969385 - RNA, 19 nt, Artificial Sequence
  Description of Artificial Sequence: Synthetic oligonucleotide
caccaagcaauguuucagg

SEQ ID NO: 1969386 - RNA, 19 nt, Artificial Sequence
  Description of Artificial Sequence: Synthetic oligonucleotide
uaacggaugaaaagccggu

SEQ ID NO: 1969387 - RNA, 19 nt, Artificial Sequence
  Description of Artificial Sequence: Synthetic oligonucleotide
ucacuacuaagauggcacc

SEQ ID NO: 1969388 - RNA, 19 nt, Artificial Sequence
  Description of Artificial Sequence: Synthetic oligonucleotide
caauguuucaggugcccag

SEQ ID NO: 1969389 - RNA, 19 nt, Artificial Sequence
  Description of Artificial Sequence: Synthetic oligonucleotide
ugcuguauggggccucuag

SEQ ID NO: 1969390 - RNA, 19 nt, Artificial Sequence
  Description of Artificial Sequence: Synthetic oligonucleotide
agauggacaggguggcaac

SEQ ID NO: 1969391 - RNA, 19 nt, Artificial Sequence
  Description of Artificial Sequence: Synthetic oligonucleotide
aacggaugaaaagccgguc

SEQ ID NO: 1969392 - RNA, 19 nt, Artificial Sequence
  Description of Artificial Sequence: Synthetic oligonucleotide
cauuugugggcaaacccug

SEQ ID NO: 1969393 - RNA, 19 nt, Artificial Sequence
  Description of Artificial Sequence: Synthetic oligonucleotide
uuuaaggaggugagacaga

SEQ ID NO: 1969394 - RNA, 19 nt, Artificial Sequence
  Description of Artificial Sequence: Synthetic oligonucleotide
agcgcaggagcuucgucac

SEQ ID NO: 1969395 - RNA, 19 nt, Artificial Sequence
  Description of Artificial Sequence: Synthetic oligonucleotide
uaagaacacguauauuauu

SEQ ID NO: 1969396 - RNA, 19 nt, Artificial Sequence
  Description of Artificial Sequence: Synthetic oligonucleotide
auuauuauaaugggccaaa

SEQ ID NO: 1969397 - RNA, 19 nt, Artificial Sequence
  Description of Artificial Sequence: Synthetic oligonucleotide
uacuaagauggcaccugcc

SEQ ID NO: 1969398 - RNA, 19 nt, Artificial Sequence
  Description of Artificial Sequence: Synthetic oligonucleotide
aaaugaggcgcagggccgg

SEQ ID NO: 1969399 - RNA, 19 nt, Artificial Sequence
  Description of Artificial Sequence: Synthetic oligonucleotide
aagcaauguuucaggugcc

SEQ ID NO: 1969400 - RNA, 19 nt, Artificial Sequence
  Description of Artificial Sequence: Synthetic oligonucleotide
cuacuaagauggcaccugc

SEQ ID NO: 1969401 - RNA, 19 nt, Artificial Sequence
  Description of Artificial Sequence: Synthetic oligonucleotide
cagcuaaugauggagggug

SEQ ID NO: 1969402 - RNA, 19 nt, Artificial Sequence
  Description of Artificial Sequence: Synthetic oligonucleotide
aacacguauauuauuuauu

SEQ ID NO: 1969403 - RNA, 19 nt, Artificial Sequence
  Description of Artificial Sequence: Synthetic oligonucleotide
agcaauguuucaggugccc

SEQ ID NO: 1969404 - RNA, 19 nt, Artificial Sequence
  Description of Artificial Sequence: Synthetic oligonucleotide
gaucuugcccaucugccca

SEQ ID NO: 1969405 - RNA, 19 nt, Artificial Sequence
  Description of Artificial Sequence: Synthetic oligonucleotide
auuguuauuuaaggaggug

SEQ ID NO: 1969406 - RNA, 19 nt, Artificial Sequence
  Description of Artificial Sequence: Synthetic oligonucleotide
acuacuaagauggcaccug

SEQ ID NO: 1969407 - RNA, 19 nt, Artificial Sequence
  Description of Artificial Sequence: Synthetic oligonucleotide
gauuauuauaaugggccaa

SEQ ID NO: 1969408 - RNA, 19 nt, Artificial Sequence
  Description of Artificial Sequence: Synthetic oligonucleotide
auaagaacacguauauuau

SEQ ID NO: 1969409 - RNA, 19 nt, Artificial Sequence
  Description of Artificial Sequence: Synthetic oligonucleotide
auguuucaggugcccaggg

SEQ ID NO: 1969410 - RNA, 19 nt, Artificial Sequence
  Description of Artificial Sequence: Synthetic oligonucleotide
guuuuaagcauaggcuagc

SEQ ID NO: 1969411 - RNA, 19 nt, Artificial Sequence
  Description of Artificial Sequence: Synthetic oligonucleotide
accaagcaauguuucaggu

SEQ ID NO: 1969412 - RNA, 19 nt, Artificial Sequence
  Description of Artificial Sequence: Synthetic oligonucleotide
ccuuccuagauguggaggg

SEQ ID NO: 1969413 - RNA, 19 nt, Artificial Sequence
  Description of Artificial Sequence: Synthetic oligonucleotide
ugcuauggaggcgagcaug

SEQ ID NO: 1969414 - RNA, 19 nt, Artificial Sequence
  Description of Artificial Sequence: Synthetic oligonucleotide
uaccaagcaccaagcaaug

SEQ ID NO: 1969415 - RNA, 19 nt, Artificial Sequence
  Description of Artificial Sequence: Synthetic oligonucleotide
uauccugagggcagccuca

SEQ ID NO: 1969416 - RNA, 19 nt, Artificial Sequence
  Description of Artificial Sequence: Synthetic oligonucleotide
agaacacguauauuauuua

SEQ ID NO: 1969417 - RNA, 19 nt, Artificial Sequence
  Description of Artificial Sequence: Synthetic oligonucleotide
uguuucaggugcccaggga

SEQ ID NO: 1969418 - RNA, 19 nt, Artificial Sequence
  Description of Artificial Sequence: Synthetic oligonucleotide
agucugacagucgcugucg

SEQ ID NO: 1969419 - RNA, 19 nt, Artificial Sequence
  Description of Artificial Sequence: Synthetic oligonucleotide
cugguuuuaagcauaggcu

SEQ ID NO: 1969420 - RNA, 19 nt, Artificial Sequence
  Description of Artificial Sequence: Synthetic oligonucleotide
gguguggaauacuugggug

SEQ ID NO: 1969421 - RNA, 19 nt, Artificial Sequence
  Description of Artificial Sequence: Synthetic oligonucleotide
uuccuagauguggagggag

SEQ ID NO: 1969422 - RNA, 19 nt, Artificial Sequence
  Description of Artificial Sequence: Synthetic oligonucleotide
cacccauuguuuuggaauc

SEQ ID NO: 1969423 - RNA, 19 nt, Artificial Sequence
  Description of Artificial Sequence: Synthetic oligonucleotide
uugugggcaaacccugaga

SEQ ID NO: 1969424 - RNA, 19 nt, Artificial Sequence
  Description of Artificial Sequence: Synthetic oligonucleotide
uuucaggugcccagggaaa

SEQ ID NO: 1969425 - RNA, 19 nt, Artificial Sequence
  Description of Artificial Sequence: Synthetic oligonucleotide
uucccaaugaggggcaucu

SEQ ID NO: 1969426 - RNA, 19 nt, Artificial Sequence
  Description of Artificial Sequence: Synthetic oligonucleotide
agagugcaaccugugcccc

SEQ ID NO: 1969427 - RNA, 19 nt, Artificial Sequence
  Description of Artificial Sequence: Synthetic oligonucleotide
gguaacggaugaaaagccg

SEQ ID NO: 1969428 - RNA, 19 nt, Artificial Sequence
  Description of Artificial Sequence: Synthetic oligonucleotide
caaugaggggcaucugcgc

SEQ ID NO: 1969429 - RNA, 19 nt, Artificial Sequence
  Description of Artificial Sequence: Synthetic oligonucleotide
guuucaggugcccagggaa

SEQ ID NO: 1969430 - RNA, 19 nt, Artificial Sequence
  Description of Artificial Sequence: Synthetic oligonucleotide
agcgacaggccuggcaugc

SEQ ID NO: 1969431 - RNA, 19 nt, Artificial Sequence
  Description of Artificial Sequence: Synthetic oligonucleotide
cauguagcgacaggccugg

SEQ ID NO: 1969432 - RNA, 19 nt, Artificial Sequence
  Description of Artificial Sequence: Synthetic oligonucleotide
agcuucgucacuacuaaga

SEQ ID NO: 1969433 - RNA, 19 nt, Artificial Sequence
  Description of Artificial Sequence: Synthetic oligonucleotide
auacuuggguggguaacgg

SEQ ID NO: 1969434 - RNA, 19 nt, Artificial Sequence
  Description of Artificial Sequence: Synthetic oligonucleotide
uucucagccacgugguaaa

SEQ ID NO: 1969435 - RNA, 19 nt, Artificial Sequence
  Description of Artificial Sequence: Synthetic oligonucleotide
accuuccuagauguggagg

SEQ ID NO: 1969436 - RNA, 19 nt, Artificial Sequence
  Description of Artificial Sequence: Synthetic oligonucleotide
agcucaaauuuggagguca

SEQ ID NO: 1969437 - RNA, 19 nt, Artificial Sequence
  Description of Artificial Sequence: Synthetic oligonucleotide
uguuuuggucauguagcga

SEQ ID NO: 1969438 - RNA, 19 nt, Artificial Sequence
  Description of Artificial Sequence: Synthetic oligonucleotide
caaauuuggaggucaccca

SEQ ID NO: 1969439 - RNA, 19 nt, Artificial Sequence
  Description of Artificial Sequence: Synthetic oligonucleotide
accucggguuuccucaguc

SEQ ID NO: 1969440 - RNA, 19 nt, Artificial Sequence
  Description of Artificial Sequence: Synthetic oligonucleotide
uucuagagcccuugugggu

SEQ ID NO: 1969441 - RNA, 19 nt, Artificial Sequence
  Description of Artificial Sequence: Synthetic oligonucleotide
ccaaugaggggcaucugcg

SEQ ID NO: 1969442 - RNA, 19 nt, Artificial Sequence
  Description of Artificial Sequence: Synthetic oligonucleotide
gaacacguauauuauuuau

SEQ ID NO: 1969443 - RNA, 19 nt, Artificial Sequence
  Description of Artificial Sequence: Synthetic oligonucleotide
guauggggccucuagcuca

SEQ ID NO: 1969444 - RNA, 19 nt, Artificial Sequence
  Description of Artificial Sequence: Synthetic oligonucleotide
cuggcaugcaggaacagaa

SEQ ID NO: 1969445 - RNA, 19 nt, Artificial Sequence
  Description of Artificial Sequence: Synthetic oligonucleotide
accugccuuggucacgagg

SEQ ID NO: 1969446 - RNA, 19 nt, Artificial Sequence
  Description of Artificial Sequence: Synthetic oligonucleotide
ugacagucgcugucgcucc

SEQ ID NO: 1969447 - RNA, 19 nt, Artificial Sequence
  Description of Artificial Sequence: Synthetic oligonucleotide
gugauaagaacacguauau

SEQ ID NO: 1969448 - RNA, 19 nt, Artificial Sequence
  Description of Artificial Sequence: Synthetic oligonucleotide
uuaccucggguuuccucag

SEQ ID NO: 1969449 - RNA, 19 nt, Artificial Sequence
  Description of Artificial Sequence: Synthetic oligonucleotide
aagagcccuaggcugguuu

SEQ ID NO: 1969450 - RNA, 19 nt, Artificial Sequence
  Description of Artificial Sequence: Synthetic oligonucleotide
aggccagcuaaugauggag

SEQ ID NO: 1969451 - RNA, 19 nt, Artificial Sequence
  Description of Artificial Sequence: Synthetic oligonucleotide
ugcugcuuagaggaggcgu

SEQ ID NO: 1969452 - RNA, 19 nt, Artificial Sequence
  Description of Artificial Sequence: Synthetic oligonucleotide
gagaggccagcuaaugaug

SEQ ID NO: 1969453 - RNA, 19 nt, Artificial Sequence
  Description of Artificial Sequence: Synthetic oligonucleotide
gcucuggaaggucacaccc

SEQ ID NO: 1969454 - RNA, 19 nt, Artificial Sequence
  Description of Artificial Sequence: Synthetic oligonucleotide
cucaaauuuggaggucacc

SEQ ID NO: 1969455 - RNA, 19 nt, Artificial Sequence
  Description of Artificial Sequence: Synthetic oligonucleotide
ucuagagcccuuguggguu

SEQ ID NO: 1969456 - RNA, 19 nt, Artificial Sequence
  Description of Artificial Sequence: Synthetic oligonucleotide
agccacucugccaucaaag

SEQ ID NO: 1969457 - RNA, 19 nt, Artificial Sequence
  Description of Artificial Sequence: Synthetic oligonucleotide
uggacaggguggcaaccug

SEQ ID NO: 1969458 - RNA, 19 nt, Artificial Sequence
  Description of Artificial Sequence: Synthetic oligonucleotide
gccagcuaaugauggaggg

SEQ ID NO: 1969459 - RNA, 19 nt, Artificial Sequence
  Description of Artificial Sequence: Synthetic oligonucleotide
uguggguuaccaccccuau

SEQ ID NO: 1969460 - RNA, 19 nt, Artificial Sequence
  Description of Artificial Sequence: Synthetic oligonucleotide
gacaggucuggcaagacgu

SEQ ID NO: 1969461 - RNA, 19 nt, Artificial Sequence
  Description of Artificial Sequence: Synthetic oligonucleotide
ugcaggcggugauacaagu

SEQ ID NO: 1969462 - RNA, 19 nt, Artificial Sequence
  Description of Artificial Sequence: Synthetic oligonucleotide
cucauuaccucggguuucc

SEQ ID NO: 1969463 - RNA, 19 nt, Artificial Sequence
  Description of Artificial Sequence: Synthetic oligonucleotide
uagcccugcauuccaaauu

SEQ ID NO: 1969464 - RNA, 19 nt, Artificial Sequence
  Description of Artificial Sequence: Synthetic oligonucleotide
uggcaagacguccccuccc

SEQ ID NO: 1969465 - RNA, 19 nt, Artificial Sequence
  Description of Artificial Sequence: Synthetic oligonucleotide
uacuuggguggguaacgga

SEQ ID NO: 1969466 - RNA, 19 nt, Artificial Sequence
  Description of Artificial Sequence: Synthetic oligonucleotide
uccgcagccauuucccaau

SEQ ID NO: 1969467 - RNA, 19 nt, Artificial Sequence
  Description of Artificial Sequence: Synthetic oligonucleotide
ucccauuugugggcaaacc

SEQ ID NO: 1969468 - RNA, 19 nt, Artificial Sequence
  Description of Artificial Sequence: Synthetic oligonucleotide
gagcuucgucacuacuaag

SEQ ID NO: 1969469 - RNA, 19 nt, Artificial Sequence
  Description of Artificial Sequence: Synthetic oligonucleotide
aggaggugagacagagggc

SEQ ID NO: 1969470 - RNA, 19 nt, Artificial Sequence
  Description of Artificial Sequence: Synthetic oligonucleotide
ucggguuuccucagucuuc

SEQ ID NO: 1969471 - RNA, 19 nt, Artificial Sequence
  Description of Artificial Sequence: Synthetic oligonucleotide
gucugcuuggaagauggac

SEQ ID NO: 1969472 - RNA, 19 nt, Artificial Sequence
  Description of Artificial Sequence: Synthetic oligonucleotide
ugauaagaacacguauauu

SEQ ID NO: 1969473 - RNA, 19 nt, Artificial Sequence
  Description of Artificial Sequence: Synthetic oligonucleotide
ggugcuauggaggcgagca

SEQ ID NO: 1969474 - RNA, 19 nt, Artificial Sequence
  Description of Artificial Sequence: Synthetic oligonucleotide
ggugauaagaacacguaua

SEQ ID NO: 1969475 - RNA, 19 nt, Artificial Sequence
  Description of Artificial Sequence: Synthetic oligonucleotide
caaguauagagcucaaauu

SEQ ID NO: 1969476 - RNA, 19 nt, Artificial Sequence
  Description of Artificial Sequence: Synthetic oligonucleotide
cuggcaagacguccccucc

SEQ ID NO: 1969477 - RNA, 19 nt, Artificial Sequence
  Description of Artificial Sequence: Synthetic oligonucleotide
uuguggguuaccaccccua

SEQ ID NO: 1969478 - RNA, 19 nt, Artificial Sequence
  Description of Artificial Sequence: Synthetic oligonucleotide
guaccaagcaccaagcaau

SEQ ID NO: 1969479 - RNA, 19 nt, Artificial Sequence
  Description of Artificial Sequence: Synthetic oligonucleotide
uucaggugcccagggaaac

SEQ ID NO: 1969480 - RNA, 19 nt, Artificial Sequence
  Description of Artificial Sequence: Synthetic oligonucleotide
cguauauuauuuauugcca

SEQ ID NO: 1969481 - RNA, 19 nt, Artificial Sequence
  Description of Artificial Sequence: Synthetic oligonucleotide
gacaggguggcaaccugug

SEQ ID NO: 1969482 - RNA, 19 nt, Artificial Sequence
  Description of Artificial Sequence: Synthetic oligonucleotide
uccagauccgcagccauuu

SEQ ID NO: 1969483 - RNA, 19 nt, Artificial Sequence
  Description of Artificial Sequence: Synthetic oligonucleotide
uggaggguguguggcauug

SEQ ID NO: 1969484 - RNA, 19 nt, Artificial Sequence
  Description of Artificial Sequence: Synthetic oligonucleotide
ucgucacuacuaagauggc

SEQ ID NO: 1969485 - RNA, 19 nt, Artificial Sequence
  Description of Artificial Sequence: Synthetic oligonucleotide
gaaggucacacccauuguu

SEQ ID NO: 1969486 - RNA, 19 nt, Artificial Sequence
  Description of Artificial Sequence: Synthetic oligonucleotide
uggaggcgagcaugcaggc

SEQ ID NO: 1969487 - RNA, 19 nt, Artificial Sequence
  Description of Artificial Sequence: Synthetic oligonucleotide
ugcaaccugugccccuagc

SEQ ID NO: 1969488 - RNA, 19 nt, Artificial Sequence
  Description of Artificial Sequence: Synthetic oligonucleotide
cccuaggcugguuuuaagc

SEQ ID NO: 1969489 - RNA, 19 nt, Artificial Sequence
  Description of Artificial Sequence: Synthetic oligonucleotide
ugguaaacuguggcagcug

SEQ ID NO: 1969490 - RNA, 19 nt, Artificial Sequence
  Description of Artificial Sequence: Synthetic oligonucleotide
ggaagauggacaggguggc

SEQ ID NO: 1969491 - RNA, 19 nt, Artificial Sequence
  Description of Artificial Sequence: Synthetic oligonucleotide
cuccucucugcuguauggg

SEQ ID NO: 1969492 - RNA, 19 nt, Artificial Sequence
  Description of Artificial Sequence: Synthetic oligonucleotide
gucauguagcgacaggccu

SEQ ID NO: 1969493 - RNA, 19 nt, Artificial Sequence
  Description of Artificial Sequence: Synthetic oligonucleotide
gguuaccaccccuauccug

SEQ ID NO: 1969494 - RNA, 19 nt, Artificial Sequence
  Description of Artificial Sequence: Synthetic oligonucleotide
ggggcaucugcgcaugugc

SEQ ID NO: 1969495 - RNA, 19 nt, Artificial Sequence
  Description of Artificial Sequence: Synthetic oligonucleotide
caugcaggcggugauacaa

SEQ ID NO: 1969496 - RNA, 19 nt, Artificial Sequence
  Description of Artificial Sequence: Synthetic oligonucleotide
ccaagcaauguuucaggug

SEQ ID NO: 1969497 - RNA, 19 nt, Artificial Sequence
  Description of Artificial Sequence: Synthetic oligonucleotide
cagcgcaggagcuucguca

SEQ ID NO: 1969498 - RNA, 19 nt, Artificial Sequence
  Description of Artificial Sequence: Synthetic oligonucleotide
gguaaaugaggcgcagggc

SEQ ID NO: 1969499 - RNA, 19 nt, Artificial Sequence
  Description of Artificial Sequence: Synthetic oligonucleotide
ccacucugccaucaaaggc

SEQ ID NO: 1969500 - RNA, 19 nt, Artificial Sequence
  Description of Artificial Sequence: Synthetic oligonucleotide
ggucacacccauuguuuug

SEQ ID NO: 1969501 - RNA, 19 nt, Artificial Sequence
  Description of Artificial Sequence: Synthetic oligonucleotide
gccacgugguaaaugaggc

SEQ ID NO: 1969502 - RNA, 19 nt, Artificial Sequence
  Description of Artificial Sequence: Synthetic oligonucleotide
cugcuuagaggaggcgugg

SEQ ID NO: 1969503 - RNA, 19 nt, Artificial Sequence
  Description of Artificial Sequence: Synthetic oligonucleotide
acccugugggcccucauua

SEQ ID NO: 1969504 - RNA, 19 nt, Artificial Sequence
  Description of Artificial Sequence: Synthetic oligonucleotide
cauuucccaaugaggggca

SEQ ID NO: 1969505 - RNA, 19 nt, Artificial Sequence
  Description of Artificial Sequence: Synthetic oligonucleotide
gaggugagacagagggcag

SEQ ID NO: 1969506 - RNA, 19 nt, Artificial Sequence
  Description of Artificial Sequence: Synthetic oligonucleotide
caggcggugauacaagucu

SEQ ID NO: 1969507 - RNA, 19 nt, Artificial Sequence
  Description of Artificial Sequence: Synthetic oligonucleotide
ccuaggcugguuuuaagca

SEQ ID NO: 1969508 - RNA, 19 nt, Artificial Sequence
  Description of Artificial Sequence: Synthetic oligonucleotide
cacagaagagcccuaggcu

SEQ ID NO: 1969509 - RNA, 19 nt, Artificial Sequence
  Description of Artificial Sequence: Synthetic oligonucleotide
ggccagcuaaugauggagg

SEQ ID NO: 1969510 - RNA, 19 nt, Artificial Sequence
  Description of Artificial Sequence: Synthetic oligonucleotide
cugcgcaugugccacagaa

SEQ ID NO: 1969511 - RNA, 19 nt, Artificial Sequence
  Description of Artificial Sequence: Synthetic oligonucleotide
ugaggggcaucugcgcaug

SEQ ID NO: 1969512 - RNA, 19 nt, Artificial Sequence
  Description of Artificial Sequence: Synthetic oligonucleotide
agacguccccuccccaugu

SEQ ID NO: 1969513 - RNA, 19 nt, Artificial Sequence
  Description of Artificial Sequence: Synthetic oligonucleotide
ggcagaggaggcuuuugac

SEQ ID NO: 1969514 - RNA, 19 nt, Artificial Sequence
  Description of Artificial Sequence: Synthetic oligonucleotide
ccucucugcuguauggggc

SEQ ID NO: 1969515 - RNA, 19 nt, Artificial Sequence
  Description of Artificial Sequence: Synthetic oligonucleotide
ccuccucucugcuguaugg

SEQ ID NO: 1969516 - RNA, 19 nt, Artificial Sequence
  Description of Artificial Sequence: Synthetic oligonucleotide
ggagcuucgucacuacuaa

SEQ ID NO: 1969517 - RNA, 19 nt, Artificial Sequence
  Description of Artificial Sequence: Synthetic oligonucleotide
cuguauggggccucuagcu

SEQ ID NO: 1969518 - RNA, 19 nt, Artificial Sequence
  Description of Artificial Sequence: Synthetic oligonucleotide
gaggccagcuaaugaugga

SEQ ID NO: 1969519 - RNA, 19 nt, Artificial Sequence
  Description of Artificial Sequence: Synthetic oligonucleotide
aggugcuauggaggcgagc

SEQ ID NO: 1969520 - RNA, 19 nt, Artificial Sequence
  Description of Artificial Sequence: Synthetic oligonucleotide
gguggugauaagaacacgu

SEQ ID NO: 1969521 - RNA, 19 nt, Artificial Sequence
  Description of Artificial Sequence: Synthetic oligonucleotide
uagcgacaggccuggcaug

SEQ ID NO: 1969522 - RNA, 19 nt, Artificial Sequence
  Description of Artificial Sequence: Synthetic oligonucleotide
guggagaggccagcuaaug

SEQ ID NO: 1969523 - RNA, 19 nt, Artificial Sequence
  Description of Artificial Sequence: Synthetic oligonucleotide
gcuauggaggcgagcaugc

SEQ ID NO: 1969524 - RNA, 19 nt, Artificial Sequence
  Description of Artificial Sequence: Synthetic oligonucleotide
auccgcagccauuucccaa

SEQ ID NO: 1969525 - RNA, 19 nt, Artificial Sequence
  Description of Artificial Sequence: Synthetic oligonucleotide
auggacaggguggcaaccu

SEQ ID NO: 1969526 - RNA, 19 nt, Artificial Sequence
  Description of Artificial Sequence: Synthetic oligonucleotide
cucagccacgugguaaaug

SEQ ID NO: 1969527 - RNA, 19 nt, Artificial Sequence
  Description of Artificial Sequence: Synthetic oligonucleotide
auuugugggcaaacccuga

SEQ ID NO: 1969528 - RNA, 19 nt, Artificial Sequence
  Description of Artificial Sequence: Synthetic oligonucleotide
ggcaagacguccccucccc

SEQ ID NO: 1969529 - RNA, 19 nt, Artificial Sequence
  Description of Artificial Sequence: Synthetic oligonucleotide
accccuauccugagggcag

SEQ ID NO: 1969530 - RNA, 19 nt, Artificial Sequence
  Description of Artificial Sequence: Synthetic oligonucleotide
aggcuagcccugcauucca

SEQ ID NO: 1969531 - RNA, 19 nt, Artificial Sequence
  Description of Artificial Sequence: Synthetic oligonucleotide
caagcaccaagcaauguuu

SEQ ID NO: 1969532 - RNA, 19 nt, Artificial Sequence
  Description of Artificial Sequence: Synthetic oligonucleotide
auaaugggccaaagccucu

SEQ ID NO: 1969533 - RNA, 19 nt, Artificial Sequence
  Description of Artificial Sequence: Synthetic oligonucleotide
ucugcccacggaggccugg

SEQ ID NO: 1969534 - RNA, 19 nt, Artificial Sequence
  Description of Artificial Sequence: Synthetic oligonucleotide
uuucccaaugaggggcauc

SEQ ID NO: 1969535 - RNA, 19 nt, Artificial Sequence
  Description of Artificial Sequence: Synthetic oligonucleotide
ggaggugcuauggaggcga

SEQ ID NO: 1969536 - RNA, 19 nt, Artificial Sequence
  Description of Artificial Sequence: Synthetic oligonucleotide
ggccggaggugcuauggag

SEQ ID NO: 1969537 - RNA, 19 nt, Artificial Sequence
  Description of Artificial Sequence: Synthetic oligonucleotide
ccggaggugcuauggaggc

SEQ ID NO: 1969538 - RNA, 19 nt, Artificial Sequence
  Description of Artificial Sequence: Synthetic oligonucleotide
gcuaaugauggagggugug

SEQ ID NO: 1969539 - RNA, 19 nt, Artificial Sequence
  Description of Artificial Sequence: Synthetic oligonucleotide
ucugcgcaugugccacaga

SEQ ID NO: 1969540 - RNA, 19 nt, Artificial Sequence
  Description of Artificial Sequence: Synthetic oligonucleotide
guggugauaagaacacgua

SEQ ID NO: 1969541 - RNA, 19 nt, Artificial Sequence
  Description of Artificial Sequence: Synthetic oligonucleotide
ggagaggccagcuaaugau

SEQ ID NO: 1969542 - RNA, 19 nt, Artificial Sequence
  Description of Artificial Sequence: Synthetic oligonucleotide
aggugagacagagggcaga

SEQ ID NO: 1969543 - RNA, 19 nt, Artificial Sequence
  Description of Artificial Sequence: Synthetic oligonucleotide
aggcggugauacaagucug

SEQ ID NO: 1969544 - RNA, 19 nt, Artificial Sequence
  Description of Artificial Sequence: Synthetic oligonucleotide
agcuaaugauggagggugu

SEQ ID NO: 1969545 - RNA, 19 nt, Artificial Sequence
  Description of Artificial Sequence: Synthetic oligonucleotide
augcaggcggugauacaag

SEQ ID NO: 1969546 - RNA, 19 nt, Artificial Sequence
  Description of Artificial Sequence: Synthetic oligonucleotide
ggguguguggcauuguuau

SEQ ID NO: 1969547 - RNA, 19 nt, Artificial Sequence
  Description of Artificial Sequence: Synthetic oligonucleotide
guccccuccccauguuuug

SEQ ID NO: 1969548 - RNA, 19 nt, Artificial Sequence
  Description of Artificial Sequence: Synthetic oligonucleotide
uaccucggguuuccucagu

SEQ ID NO: 1969549 - RNA, 19 nt, Artificial Sequence
  Description of Artificial Sequence: Synthetic oligonucleotide
uggacaggucuggcaagac

SEQ ID NO: 1969550 - RNA, 19 nt, Artificial Sequence
  Description of Artificial Sequence: Synthetic oligonucleotide
acgugguaaaugaggcgca

SEQ ID NO: 1969551 - RNA, 19 nt, Artificial Sequence
  Description of Artificial Sequence: Synthetic oligonucleotide
ggucuggcaagacgucccc

SEQ ID NO: 1969552 - RNA, 19 nt, Artificial Sequence
  Description of Artificial Sequence: Synthetic oligonucleotide
gaggcguggagaggccagc

SEQ ID NO: 1969553 - RNA, 19 nt, Artificial Sequence
  Description of Artificial Sequence: Synthetic oligonucleotide
gagcucaaauuuggagguc

SEQ ID NO: 1969554 - RNA, 19 nt, Artificial Sequence
  Description of Artificial Sequence: Synthetic oligonucleotide
caaauucuagagcccuugu

SEQ ID NO: 1969555 - RNA, 19 nt, Artificial Sequence
  Description of Artificial Sequence: Synthetic oligonucleotide
cacccaggccagcaguguc

SEQ ID NO: 1969556 - RNA, 19 nt, Artificial Sequence
  Description of Artificial Sequence: Synthetic oligonucleotide
ggcuuuugaccuuccuaga

SEQ ID NO: 1969557 - RNA, 19 nt, Artificial Sequence
  Description of Artificial Sequence: Synthetic oligonucleotide
gcccacggaggccuggucc

SEQ ID NO: 1969558 - RNA, 19 nt, Artificial Sequence
  Description of Artificial Sequence: Synthetic oligonucleotide
ucauuaccucggguuuccu

SEQ ID NO: 1969559 - RNA, 19 nt, Artificial Sequence
  Description of Artificial Sequence: Synthetic oligonucleotide
aggggcaucugcgcaugug

SEQ ID NO: 1969560 - RNA, 19 nt, Artificial Sequence
  Description of Artificial Sequence: Synthetic oligonucleotide
cuaagauggcaccugccuu

SEQ ID NO: 1969561 - RNA, 19 nt, Artificial Sequence
  Description of Artificial Sequence: Synthetic oligonucleotide
ggcaaacccugagaucuug

SEQ ID NO: 1969562 - RNA, 19 nt, Artificial Sequence
  Description of Artificial Sequence: Synthetic oligonucleotide
guguggcauuguuauuuaa

SEQ ID NO: 1969563 - RNA, 19 nt, Artificial Sequence
  Description of Artificial Sequence: Synthetic oligonucleotide
gcaucugcgcaugugccac

SEQ ID NO: 1969564 - RNA, 19 nt, Artificial Sequence
  Description of Artificial Sequence: Synthetic oligonucleotide
agugcaaccugugccccua

SEQ ID NO: 1969565 - RNA, 19 nt, Artificial Sequence
  Description of Artificial Sequence: Synthetic oligonucleotide
cuucucccauuugugggca

SEQ ID NO: 1969566 - RNA, 19 nt, Artificial Sequence
  Description of Artificial Sequence: Synthetic oligonucleotide
cuuccuagauguggaggga

SEQ ID NO: 1969567 - RNA, 19 nt, Artificial Sequence
  Description of Artificial Sequence: Synthetic oligonucleotide
ccauuugugggcaaacccu

SEQ ID NO: 1969568 - RNA, 19 nt, Artificial Sequence
  Description of Artificial Sequence: Synthetic oligonucleotide
gaggugcuauggaggcgag

SEQ ID NO: 1969569 - RNA, 19 nt, Artificial Sequence
  Description of Artificial Sequence: Synthetic oligonucleotide
gccacuguguggaaguuaa

SEQ ID NO: 1969570 - RNA, 19 nt, Artificial Sequence
  Description of Artificial Sequence: Synthetic oligonucleotide
ccucacccagcgcaggagc

SEQ ID NO: 1969571 - RNA, 19 nt, Artificial Sequence
  Description of Artificial Sequence: Synthetic oligonucleotide
caccccuauccugagggca

SEQ ID NO: 1969572 - RNA, 19 nt, Artificial Sequence
  Description of Artificial Sequence: Synthetic oligonucleotide
gaggaggcguggagaggcc

SEQ ID NO: 1969573 - RNA, 19 nt, Artificial Sequence
  Description of Artificial Sequence: Synthetic oligonucleotide
acccugagaucuugcccau

SEQ ID NO: 1969574 - RNA, 19 nt, Artificial Sequence
  Description of Artificial Sequence: Synthetic oligonucleotide
cuugcucuggaaggucaca

SEQ ID NO: 1969575 - RNA, 19 nt, Artificial Sequence
  Description of Artificial Sequence: Synthetic oligonucleotide
gcaauguuucaggugccca

SEQ ID NO: 1969576 - RNA, 19 nt, Artificial Sequence
  Description of Artificial Sequence: Synthetic oligonucleotide
cauaggcuagcccugcauu

SEQ ID NO: 1969577 - RNA, 19 nt, Artificial Sequence
  Description of Artificial Sequence: Synthetic oligonucleotide
gcguggagaggccagcuaa

SEQ ID NO: 1969578 - RNA, 19 nt, Artificial Sequence
  Description of Artificial Sequence: Synthetic oligonucleotide
aggguguguggcauuguua

SEQ ID NO: 1969579 - RNA, 19 nt, Artificial Sequence
  Description of Artificial Sequence: Synthetic oligonucleotide
gcuuuugaccuuccuagau

SEQ ID NO: 1969580 - RNA, 19 nt, Artificial Sequence
  Description of Artificial Sequence: Synthetic oligonucleotide
cuuguggguuaccaccccu

SEQ ID NO: 1969581 - RNA, 19 nt, Artificial Sequence
  Description of Artificial Sequence: Synthetic oligonucleotide
gggccucuagcucaggacu

SEQ ID NO: 1969582 - RNA, 19 nt, Artificial Sequence
  Description of Artificial Sequence: Synthetic oligonucleotide
acguccccuccccauguuu

SEQ ID NO: 1969583 - RNA, 19 nt, Artificial Sequence
  Description of Artificial Sequence: Synthetic oligonucleotide
ccccuagcugcugucaccc

SEQ ID NO: 1969584 - RNA, 19 nt, Artificial Sequence
  Description of Artificial Sequence: Synthetic oligonucleotide
gugcaaccugugccccuag

SEQ ID NO: 1969585 - RNA, 19 nt, Artificial Sequence
  Description of Artificial Sequence: Synthetic oligonucleotide
ggaggcguggagaggccag

SEQ ID NO: 1969586 - RNA, 19 nt, Artificial Sequence
  Description of Artificial Sequence: Synthetic oligonucleotide
agcccuaggcugguuuuaa

SEQ ID NO: 1969587 - RNA, 19 nt, Artificial Sequence
  Description of Artificial Sequence: Synthetic oligonucleotide
cucuagcucaggacuggua

SEQ ID NO: 1969588 - RNA, 19 nt, Artificial Sequence
  Description of Artificial Sequence: Synthetic oligonucleotide
cuagcccugcauuccaaau

SEQ ID NO: 1969589 - RNA, 19 nt, Artificial Sequence
  Description of Artificial Sequence: Synthetic oligonucleotide
ggccucuagcucaggacug

SEQ ID NO: 1969590 - RNA, 19 nt, Artificial Sequence
  Description of Artificial Sequence: Synthetic oligonucleotide
gcggugauacaagucugac

SEQ ID NO: 1969591 - RNA, 19 nt, Artificial Sequence
  Description of Artificial Sequence: Synthetic oligonucleotide
uggguggguaacggaugaa

SEQ ID NO: 1969592 - RNA, 19 nt, Artificial Sequence
  Description of Artificial Sequence: Synthetic oligonucleotide
cacuacuaagauggcaccu

SEQ ID NO: 1969593 - RNA, 19 nt, Artificial Sequence
  Description of Artificial Sequence: Synthetic oligonucleotide
uagagcccuuguggguuac

SEQ ID NO: 1969594 - RNA, 19 nt, Artificial Sequence
  Description of Artificial Sequence: Synthetic oligonucleotide
gggugguguggaauacuug

SEQ ID NO: 1969595 - RNA, 19 nt, Artificial Sequence
  Description of Artificial Sequence: Synthetic oligonucleotide
gcccuaggcugguuuuaag

SEQ ID NO: 1969596 - RNA, 19 nt, Artificial Sequence
  Description of Artificial Sequence: Synthetic oligonucleotide
ggguggguaacggaugaaa

SEQ ID NO: 1969597 - RNA, 19 nt, Artificial Sequence
  Description of Artificial Sequence: Synthetic oligonucleotide
ugcccacggaggccugguc

SEQ ID NO: 1969598 - RNA, 19 nt, Artificial Sequence
  Description of Artificial Sequence: Synthetic oligonucleotide
ggcggugauacaagucuga

SEQ ID NO: 1969599 - RNA, 19 nt, Artificial Sequence
  Description of Artificial Sequence: Synthetic oligonucleotide
cucggguuuccucagucuu

SEQ ID NO: 1969600 - RNA, 19 nt, Artificial Sequence
  Description of Artificial Sequence: Synthetic oligonucleotide
aggcguggagaggccagcu

SEQ ID NO: 1969601 - RNA, 19 nt, Artificial Sequence
  Description of Artificial Sequence: Synthetic oligonucleotide
gagugcaaccugugccccu

SEQ ID NO: 1969602 - RNA, 19 nt, Artificial Sequence
  Description of Artificial Sequence: Synthetic oligonucleotide
cuauggaggcgagcaugca

SEQ ID NO: 1969603 - RNA, 19 nt, Artificial Sequence
  Description of Artificial Sequence: Synthetic oligonucleotide
cucacccagcgcaggagcu

SEQ ID NO: 1969604 - RNA, 19 nt, Artificial Sequence
  Description of Artificial Sequence: Synthetic oligonucleotide
caucugcgcaugugccaca

SEQ ID NO: 1969605 - RNA, 19 nt, Artificial Sequence
  Description of Artificial Sequence: Synthetic oligonucleotide
gcuagcccugcauuccaaa

SEQ ID NO: 1969606 - RNA, 19 nt, Artificial Sequence
  Description of Artificial Sequence: Synthetic oligonucleotide
cucugcuguauggggccuc

SEQ ID NO: 1969607 - RNA, 19 nt, Artificial Sequence
  Description of Artificial Sequence: Synthetic oligonucleotide
ggcaaguauagagcucaaa

SEQ ID NO: 1969608 - RNA, 19 nt, Artificial Sequence
  Description of Artificial Sequence: Synthetic oligonucleotide
ggguggcaaccugugcugc

SEQ ID NO: 1969609 - RNA, 19 nt, Artificial Sequence
  Description of Artificial Sequence: Synthetic oligonucleotide
ccaccccuauccugagggc

SEQ ID NO: 1969610 - RNA, 19 nt, Artificial Sequence
  Description of Artificial Sequence: Synthetic oligonucleotide
gcccucauuaccucggguu

SEQ ID NO: 1969611 - RNA, 19 nt, Artificial Sequence
  Description of Artificial Sequence: Synthetic oligonucleotide
cgugguaaaugaggcgcag

SEQ ID NO: 1969612 - RNA, 19 nt, Artificial Sequence
  Description of Artificial Sequence: Synthetic oligonucleotide
cagggccggaggugcuaug

SEQ ID NO: 1969613 - RNA, 19 nt, Artificial Sequence
  Description of Artificial Sequence: Synthetic oligonucleotide
gacagucgcugucgcuccu

SEQ ID NO: 1969614 - RNA, 19 nt, Artificial Sequence
  Description of Artificial Sequence: Synthetic oligonucleotide
cccugcauuccaaauucua

SEQ ID NO: 1969615 - RNA, 19 nt, Artificial Sequence
  Description of Artificial Sequence: Synthetic oligonucleotide
gcaagacguccccucccca

SEQ ID NO: 1969616 - RNA, 19 nt, Artificial Sequence
  Description of Artificial Sequence: Synthetic oligonucleotide
gcgagcaugcaggcgguga

SEQ ID NO: 1969617 - RNA, 19 nt, Artificial Sequence
  Description of Artificial Sequence: Synthetic oligonucleotide
cccuccccauguuuugguc

SEQ ID NO: 1969618 - RNA, 19 nt, Artificial Sequence
  Description of Artificial Sequence: Synthetic oligonucleotide
caccugccuuggucacgag

SEQ ID NO: 1969619 - RNA, 19 nt, Artificial Sequence
  Description of Artificial Sequence: Synthetic oligonucleotide
gguggcaaccugugcugcu

SEQ ID NO: 1969620 - RNA, 19 nt, Artificial Sequence
  Description of Artificial Sequence: Synthetic oligonucleotide
guggaauacuugggugggu

SEQ ID NO: 1969621 - RNA, 19 nt, Artificial Sequence
  Description of Artificial Sequence: Synthetic oligonucleotide
cgucacuacuaagauggca

SEQ ID NO: 1969622 - RNA, 19 nt, Artificial Sequence
  Description of Artificial Sequence: Synthetic oligonucleotide
gggccggaggugcuaugga

SEQ ID NO: 1969623 - RNA, 19 nt, Artificial Sequence
  Description of Artificial Sequence: Synthetic oligonucleotide
gugcuauggaggcgagcau

SEQ ID NO: 1969624 - RNA, 19 nt, Artificial Sequence
  Description of Artificial Sequence: Synthetic oligonucleotide
ggacaggguggcaaccugu

SEQ ID NO: 1969625 - RNA, 19 nt, Artificial Sequence
  Description of Artificial Sequence: Synthetic oligonucleotide
ggguuaccaccccuauccu

SEQ ID NO: 1969626 - RNA, 19 nt, Artificial Sequence
  Description of Artificial Sequence: Synthetic oligonucleotide
ccagauccgcagccauuuc

SEQ ID NO: 1969627 - RNA, 19 nt, Artificial Sequence
  Description of Artificial Sequence: Synthetic oligonucleotide
gaggggcaucugcgcaugu

SEQ ID NO: 1969628 - RNA, 19 nt, Artificial Sequence
  Description of Artificial Sequence: Synthetic oligonucleotide
ccagcgcaggagcuucguc

SEQ ID NO: 1969629 - RNA, 19 nt, Artificial Sequence
  Description of Artificial Sequence: Synthetic oligonucleotide
ggcguggagaggccagcua

SEQ ID NO: 1969630 - RNA, 19 nt, Artificial Sequence
  Description of Artificial Sequence: Synthetic oligonucleotide
cagagggcagaggaggcuu

SEQ ID NO: 1969631 - RNA, 19 nt, Artificial Sequence
  Description of Artificial Sequence: Synthetic oligonucleotide
cuccagauccgcagccauu

SEQ ID NO: 1969632 - RNA, 19 nt, Artificial Sequence
  Description of Artificial Sequence: Synthetic oligonucleotide
ccccuauccugagggcagc

SEQ ID NO: 1969633 - RNA, 19 nt, Artificial Sequence
  Description of Artificial Sequence: Synthetic oligonucleotide
cggaggugcuauggaggcg

SEQ ID NO: 1969634 - RNA, 19 nt, Artificial Sequence
  Description of Artificial Sequence: Synthetic oligonucleotide
cuggaaggucacacccauu

SEQ ID NO: 1969635 - RNA, 19 nt, Artificial Sequence
  Description of Artificial Sequence: Synthetic oligonucleotide
ggcgagcaugcaggcggug

SEQ ID NO: 1969636 - RNA, 19 nt, Artificial Sequence
  Description of Artificial Sequence: Synthetic oligonucleotide
ccugguccacugaggugga

SEQ ID NO: 1969637 - RNA, 19 nt, Artificial Sequence
  Description of Artificial Sequence: Synthetic oligonucleotide
gaagagcccuaggcugguu

SEQ ID NO: 1969638 - RNA, 19 nt, Artificial Sequence
  Description of Artificial Sequence: Synthetic oligonucleotide
cacggaggccugguccacu

SEQ ID NO: 1969639 - RNA, 19 nt, Artificial Sequence
  Description of Artificial Sequence: Synthetic oligonucleotide
cccugagaucuugcccauc

SEQ ID NO: 1969640 - RNA, 19 nt, Artificial Sequence
  Description of Artificial Sequence: Synthetic oligonucleotide
ggaggguguguggcauugu

SEQ ID NO: 1969641 - RNA, 19 nt, Artificial Sequence
  Description of Artificial Sequence: Synthetic oligonucleotide
ccuauccugagggcagccu

SEQ ID NO: 1969642 - RNA, 19 nt, Artificial Sequence
  Description of Artificial Sequence: Synthetic oligonucleotide
cugcccacggaggccuggu

SEQ ID NO: 1969643 - RNA, 19 nt, Artificial Sequence
  Description of Artificial Sequence: Synthetic oligonucleotide
cguggagaggccagcuaau

SEQ ID NO: 1969644 - RNA, 19 nt, Artificial Sequence
  Description of Artificial Sequence: Synthetic oligonucleotide
ccccuccccauguuuuggu

SEQ ID NO: 1969645 - RNA, 19 nt, Artificial Sequence
  Description of Artificial Sequence: Synthetic oligonucleotide
cgagcaugcaggcggugau

SEQ ID NO: 1969646 - RNA, 19 nt, Artificial Sequence
  Description of Artificial Sequence: Synthetic oligonucleotide
gcgcaggagcuucgucacu

SEQ ID NO: 1969647 - RNA, 19 nt, Artificial Sequence
  Description of Artificial Sequence: Synthetic oligonucleotide
gcagggccggaggugcuau

SEQ ID NO: 1969648 - RNA, 19 nt, Artificial Sequence
  Description of Artificial Sequence: Synthetic oligonucleotide
gggcaaacccugagaucuu

SEQ ID NO: 1969649 - RNA, 19 nt, Artificial Sequence
  Description of Artificial Sequence: Synthetic oligonucleotide
aaagacuuuaaccagcugc

SEQ ID NO: 1969650 - RNA, 19 nt, Artificial Sequence
  Description of Artificial Sequence: Synthetic oligonucleotide
uuugcaacaaacuaguaag

SEQ ID NO: 1969651 - RNA, 19 nt, Artificial Sequence
  Description of Artificial Sequence: Synthetic oligonucleotide
ugauuauucagcaaaacug

SEQ ID NO: 1969652 - RNA, 19 nt, Artificial Sequence
  Description of Artificial Sequence: Synthetic oligonucleotide
ucagguaagauucugagug

SEQ ID NO: 1969653 - RNA, 19 nt, Artificial Sequence
  Description of Artificial Sequence: Synthetic oligonucleotide
uauucagcaaaacugagcc

SEQ ID NO: 1969654 - RNA, 19 nt, Artificial Sequence
  Description of Artificial Sequence: Synthetic oligonucleotide
uuuaauuaggcaaaagaug

SEQ ID NO: 1969655 - RNA, 19 nt, Artificial Sequence
  Description of Artificial Sequence: Synthetic oligonucleotide
uuauuuugcaacaaacuag

SEQ ID NO: 1969656 - RNA, 19 nt, Artificial Sequence
  Description of Artificial Sequence: Synthetic oligonucleotide
aagacuucagguaagauuc

SEQ ID NO: 1969657 - RNA, 19 nt, Artificial Sequence
  Description of Artificial Sequence: Synthetic oligonucleotide
aauacuaguaaggucggcc

SEQ ID NO: 1969658 - RNA, 19 nt, Artificial Sequence
  Description of Artificial Sequence: Synthetic oligonucleotide
uuuaacaagugauaguaag

SEQ ID NO: 1969659 - RNA, 19 nt, Artificial Sequence
  Description of Artificial Sequence: Synthetic oligonucleotide
ucaaauugggauuagcacc

SEQ ID NO: 1969660 - RNA, 19 nt, Artificial Sequence
  Description of Artificial Sequence: Synthetic oligonucleotide
caauuagacaauuucaaag

SEQ ID NO: 1969661 - RNA, 19 nt, Artificial Sequence
  Description of Artificial Sequence: Synthetic oligonucleotide
aauuacauguuagaaauca

SEQ ID NO: 1969662 - RNA, 19 nt, Artificial Sequence
  Description of Artificial Sequence: Synthetic oligonucleotide
auuagacaauuucaaagac

SEQ ID NO: 1969663 - RNA, 19 nt, Artificial Sequence
  Description of Artificial Sequence: Synthetic oligonucleotide
uucauaaacuuguagugag

SEQ ID NO: 1969664 - RNA, 19 nt, Artificial Sequence
  Description of Artificial Sequence: Synthetic oligonucleotide
uauuuugcaacaaacuagu

SEQ ID NO: 1969665 - RNA, 19 nt, Artificial Sequence
  Description of Artificial Sequence: Synthetic oligonucleotide
uuucaaauugggauuagca

SEQ ID NO: 1969666 - RNA, 19 nt, Artificial Sequence
  Description of Artificial Sequence: Synthetic oligonucleotide
aaggcaaugugggaaagcc

SEQ ID NO: 1969667 - RNA, 19 nt, Artificial Sequence
  Description of Artificial Sequence: Synthetic oligonucleotide
uuuaggguccugacgaucg

SEQ ID NO: 1969668 - RNA, 19 nt, Artificial Sequence
  Description of Artificial Sequence: Synthetic oligonucleotide
uuaacaagugauaguaagc

SEQ ID NO: 1969669 - RNA, 19 nt, Artificial Sequence
  Description of Artificial Sequence: Synthetic oligonucleotide
agagcuugguaguaaauac

SEQ ID NO: 1969670 - RNA, 19 nt, Artificial Sequence
  Description of Artificial Sequence: Synthetic oligonucleotide
cuagaguagagcuugguag

SEQ ID NO: 1969671 - RNA, 19 nt, Artificial Sequence
  Description of Artificial Sequence: Synthetic oligonucleotide
aaacaaagacuucagguaa

SEQ ID NO: 1969672 - RNA, 19 nt, Artificial Sequence
  Description of Artificial Sequence: Synthetic oligonucleotide
uaguaagccagucaggaca

SEQ ID NO: 1969673 - RNA, 19 nt, Artificial Sequence
  Description of Artificial Sequence: Synthetic oligonucleotide
uagacaauuucaaagacuu

SEQ ID NO: 1969674 - RNA, 19 nt, Artificial Sequence
  Description of Artificial Sequence: Synthetic oligonucleotide
aaagacgauuaguugcuuc

SEQ ID NO: 1969675 - RNA, 19 nt, Artificial Sequence
  Description of Artificial Sequence: Synthetic oligonucleotide
ugaaugacagcgaaaccag

SEQ ID NO: 1969676 - RNA, 19 nt, Artificial Sequence
  Description of Artificial Sequence: Synthetic oligonucleotide
uaacaagugauaguaagcc

SEQ ID NO: 1969677 - RNA, 19 nt, Artificial Sequence
  Description of Artificial Sequence: Synthetic oligonucleotide
ugcaucaggacaaagaauu

SEQ ID NO: 1969678 - RNA, 19 nt, Artificial Sequence
  Description of Artificial Sequence: Synthetic oligonucleotide
aaagacuucagguaagauu

SEQ ID NO: 1969679 - RNA, 19 nt, Artificial Sequence
  Description of Artificial Sequence: Synthetic oligonucleotide
guaguaaauacuaguaagg

SEQ ID NO: 1969680 - RNA, 19 nt, Artificial Sequence
  Description of Artificial Sequence: Synthetic oligonucleotide
uuaucuucgauguuaacau

SEQ ID NO: 1969681 - RNA, 19 nt, Artificial Sequence
  Description of Artificial Sequence: Synthetic oligonucleotide
uuaggcaaaagaugcauca

SEQ ID NO: 1969682 - RNA, 19 nt, Artificial Sequence
  Description of Artificial Sequence: Synthetic oligonucleotide
aaagcccgccccuugauuc

SEQ ID NO: 1969683 - RNA, 19 nt, Artificial Sequence
  Description of Artificial Sequence: Synthetic oligonucleotide
gugauaguaagccagucag

SEQ ID NO: 1969684 - RNA, 19 nt, Artificial Sequence
  Description of Artificial Sequence: Synthetic oligonucleotide
uucuuuggcagccaagugc

SEQ ID NO: 1969685 - RNA, 19 nt, Artificial Sequence
  Description of Artificial Sequence: Synthetic oligonucleotide
uaaauacuaguaaggucgg

SEQ ID NO: 1969686 - RNA, 19 nt, Artificial Sequence
  Description of Artificial Sequence: Synthetic oligonucleotide
gguaguaaauacuaguaag

SEQ ID NO: 1969687 - RNA, 19 nt, Artificial Sequence
  Description of Artificial Sequence: Synthetic oligonucleotide
uaaacuuguagugagauuu

SEQ ID NO: 1969688 - RNA, 19 nt, Artificial Sequence
  Description of Artificial Sequence: Synthetic oligonucleotide
uucaaagacuuuaaccagc

SEQ ID NO: 1969689 - RNA, 19 nt, Artificial Sequence
  Description of Artificial Sequence: Synthetic oligonucleotide
aguucggucuuucaaauug

SEQ ID NO: 1969690 - RNA, 19 nt, Artificial Sequence
  Description of Artificial Sequence: Synthetic oligonucleotide
aaccaacuaacugacaaag

SEQ ID NO: 1969691 - RNA, 19 nt, Artificial Sequence
  Description of Artificial Sequence: Synthetic oligonucleotide
uucaaauugggauuagcac

SEQ ID NO: 1969692 - RNA, 19 nt, Artificial Sequence
  Description of Artificial Sequence: Synthetic oligonucleotide
uuucauaaccugcagcgca

SEQ ID NO: 1969693 - RNA, 19 nt, Artificial Sequence
  Description of Artificial Sequence: Synthetic oligonucleotide
auauuucauaaacuuguag

SEQ ID NO: 1969694 - RNA, 19 nt, Artificial Sequence
  Description of Artificial Sequence: Synthetic oligonucleotide
uucugaguguggcaaaggg

SEQ ID NO: 1969695 - RNA, 19 nt, Artificial Sequence
  Description of Artificial Sequence: Synthetic oligonucleotide
uaaucuagaguagagcuug

SEQ ID NO: 1969696 - RNA, 19 nt, Artificial Sequence
  Description of Artificial Sequence: Synthetic oligonucleotide
ugacgaucgggaaaagacg

SEQ ID NO: 1969697 - RNA, 19 nt, Artificial Sequence
  Description of Artificial Sequence: Synthetic oligonucleotide
ucaugaaugacagcgaaac

SEQ ID NO: 1969698 - RNA, 19 nt, Artificial Sequence
  Description of Artificial Sequence: Synthetic oligonucleotide
aaccuggccaagucgaagg

SEQ ID NO: 1969699 - RNA, 19 nt, Artificial Sequence
  Description of Artificial Sequence: Synthetic oligonucleotide
ugacagcgaaaccaguucg

SEQ ID NO: 1969700 - RNA, 19 nt, Artificial Sequence
  Description of Artificial Sequence: Synthetic oligonucleotide
cugaguagaagucuccugg

SEQ ID NO: 1969701 - RNA, 19 nt, Artificial Sequence
  Description of Artificial Sequence: Synthetic oligonucleotide
gacguuuacauuauuuugc

SEQ ID NO: 1969702 - RNA, 19 nt, Artificial Sequence
  Description of Artificial Sequence: Synthetic oligonucleotide
ugacguuuacauuauuuug

SEQ ID NO: 1969703 - RNA, 19 nt, Artificial Sequence
  Description of Artificial Sequence: Synthetic oligonucleotide
aaaacugagcccauuggag

SEQ ID NO: 1969704 - RNA, 19 nt, Artificial Sequence
  Description of Artificial Sequence: Synthetic oligonucleotide
uccagcaaagccuguaccg

SEQ ID NO: 1969705 - RNA, 19 nt, Artificial Sequence
  Description of Artificial Sequence: Synthetic oligonucleotide
acuaguaaguugcucuagg

SEQ ID NO: 1969706 - RNA, 19 nt, Artificial Sequence
  Description of Artificial Sequence: Synthetic oligonucleotide
uugaaacuccagcaaagcc

SEQ ID NO: 1969707 - RNA, 19 nt, Artificial Sequence
  Description of Artificial Sequence: Synthetic oligonucleotide
ucacacgugauuauucagc

SEQ ID NO: 1969708 - RNA, 19 nt, Artificial Sequence
  Description of Artificial Sequence: Synthetic oligonucleotide
uauuuuaacaagugauagu

SEQ ID NO: 1969709 - RNA, 19 nt, Artificial Sequence
  Description of Artificial Sequence: Synthetic oligonucleotide
ugcaauuacauguuagaaa

SEQ ID NO: 1969710 - RNA, 19 nt, Artificial Sequence
  Description of Artificial Sequence: Synthetic oligonucleotide
acaaaguaaaggcaaugug

SEQ ID NO: 1969711 - RNA, 19 nt, Artificial Sequence
  Description of Artificial Sequence: Synthetic oligonucleotide
ucuuccauagaaccuggcc

SEQ ID NO: 1969712 - RNA, 19 nt, Artificial Sequence
  Description of Artificial Sequence: Synthetic oligonucleotide
aaacugagcccauuggaga

SEQ ID NO: 1969713 - RNA, 19 nt, Artificial Sequence
  Description of Artificial Sequence: Synthetic oligonucleotide
cugacgaucgggaaaagac

SEQ ID NO: 1969714 - RNA, 19 nt, Artificial Sequence
  Description of Artificial Sequence: Synthetic oligonucleotide
gauuauucagcaaaacuga

SEQ ID NO: 1969715 - RNA, 19 nt, Artificial Sequence
  Description of Artificial Sequence: Synthetic oligonucleotide
auagaaccuggccaagucg

SEQ ID NO: 1969716 - RNA, 19 nt, Artificial Sequence
  Description of Artificial Sequence: Synthetic oligonucleotide
gaaaggcauagcuauuugc

SEQ ID NO: 1969717 - RNA, 19 nt, Artificial Sequence
  Description of Artificial Sequence: Synthetic oligonucleotide
aaaggcauagcuauuugca

SEQ ID NO: 1969718 - RNA, 19 nt, Artificial Sequence
  Description of Artificial Sequence: Synthetic oligonucleotide
agcgaaaccaguucggucu

SEQ ID NO: 1969719 - RNA, 19 nt, Artificial Sequence
  Description of Artificial Sequence: Synthetic oligonucleotide
aggcaaaagaugcaucagg

SEQ ID NO: 1969720 - RNA, 19 nt, Artificial Sequence
  Description of Artificial Sequence: Synthetic oligonucleotide
augaaugacagcgaaacca

SEQ ID NO: 1969721 - RNA, 19 nt, Artificial Sequence
  Description of Artificial Sequence: Synthetic oligonucleotide
ugagcguugacguuuacau

SEQ ID NO: 1969722 - RNA, 19 nt, Artificial Sequence
  Description of Artificial Sequence: Synthetic oligonucleotide
aagucgaaggcgguguccc

SEQ ID NO: 1969723 - RNA, 19 nt, Artificial Sequence
  Description of Artificial Sequence: Synthetic oligonucleotide
ugguuaaucuagaguagag

SEQ ID NO: 1969724 - RNA, 19 nt, Artificial Sequence
  Description of Artificial Sequence: Synthetic oligonucleotide
cauagauaaaauauccaga

SEQ ID NO: 1969725 - RNA, 19 nt, Artificial Sequence
  Description of Artificial Sequence: Synthetic oligonucleotide
uguaccguguccaggaaac

SEQ ID NO: 1969726 - RNA, 19 nt, Artificial Sequence
  Description of Artificial Sequence: Synthetic oligonucleotide
guuaaucuagaguagagcu

SEQ ID NO: 1969727 - RNA, 19 nt, Artificial Sequence
  Description of Artificial Sequence: Synthetic oligonucleotide
auuucuuccauagaaccug

SEQ ID NO: 1969728 - RNA, 19 nt, Artificial Sequence
  Description of Artificial Sequence: Synthetic oligonucleotide
aauuaggcaaaagaugcau

SEQ ID NO: 1969729 - RNA, 19 nt, Artificial Sequence
  Description of Artificial Sequence: Synthetic oligonucleotide
ugguaguaaauacuaguaa

SEQ ID NO: 1969730 - RNA, 19 nt, Artificial Sequence
  Description of Artificial Sequence: Synthetic oligonucleotide
cuaaugaccucauuucuuc

SEQ ID NO: 1969731 - RNA, 19 nt, Artificial Sequence
  Description of Artificial Sequence: Synthetic oligonucleotide
augacagcgaaaccaguuc

SEQ ID NO: 1969732 - RNA, 19 nt, Artificial Sequence
  Description of Artificial Sequence: Synthetic oligonucleotide
gauaguaagccagucagga

SEQ ID NO: 1969733 - RNA, 19 nt, Artificial Sequence
  Description of Artificial Sequence: Synthetic oligonucleotide
auucagcaaaacugagccc

SEQ ID NO: 1969734 - RNA, 19 nt, Artificial Sequence
  Description of Artificial Sequence: Synthetic oligonucleotide
gaccucauuucuuccauag

SEQ ID NO: 1969735 - RNA, 19 nt, Artificial Sequence
  Description of Artificial Sequence: Synthetic oligonucleotide
ucuucgauguuaacaucag

SEQ ID NO: 1969736 - RNA, 19 nt, Artificial Sequence
  Description of Artificial Sequence: Synthetic oligonucleotide
aaauacuaguaaggucggc

SEQ ID NO: 1969737 - RNA, 19 nt, Artificial Sequence
  Description of Artificial Sequence: Synthetic oligonucleotide
uucggucuuucaaauuggg

SEQ ID NO: 1969738 - RNA, 19 nt, Artificial Sequence
  Description of Artificial Sequence: Synthetic oligonucleotide
auaguaagccagucaggac

SEQ ID NO: 1969739 - RNA, 19 nt, Artificial Sequence
  Description of Artificial Sequence: Synthetic oligonucleotide
aagugcaagggcagguucc

SEQ ID NO: 1969740 - RNA, 19 nt, Artificial Sequence
  Description of Artificial Sequence: Synthetic oligonucleotide
acagccaaccaacuaacug

SEQ ID NO: 1969741 - RNA, 19 nt, Artificial Sequence
  Description of Artificial Sequence: Synthetic oligonucleotide
aggucggccugccaaaagc

SEQ ID NO: 1969742 - RNA, 19 nt, Artificial Sequence
  Description of Artificial Sequence: Synthetic oligonucleotide
uagaaccuggccaagucga

SEQ ID NO: 1969743 - RNA, 19 nt, Artificial Sequence
  Description of Artificial Sequence: Synthetic oligonucleotide
uucauaaccugcagcgcag

SEQ ID NO: 1969744 - RNA, 19 nt, Artificial Sequence
  Description of Artificial Sequence: Synthetic oligonucleotide
agcguugacguuuacauua

SEQ ID NO: 1969745 - RNA, 19 nt, Artificial Sequence
  Description of Artificial Sequence: Synthetic oligonucleotide
uuaguugcuucuccuuucc

SEQ ID NO: 1969746 - RNA, 19 nt, Artificial Sequence
  Description of Artificial Sequence: Synthetic oligonucleotide
agcaccucugaguagaagu

SEQ ID NO: 1969747 - RNA, 19 nt, Artificial Sequence
  Description of Artificial Sequence: Synthetic oligonucleotide
acuaguaaggucggccugc

SEQ ID NO: 1969748 - RNA, 19 nt, Artificial Sequence
  Description of Artificial Sequence: Synthetic oligonucleotide
uugacguuuacauuauuuu

SEQ ID NO: 1969749 - RNA, 19 nt, Artificial Sequence
  Description of Artificial Sequence: Synthetic oligonucleotide
uuugccuccaucaggcuaa

SEQ ID NO: 1969750 - RNA, 19 nt, Artificial Sequence
  Description of Artificial Sequence: Synthetic oligonucleotide
acugggaugguuaaucuag

SEQ ID NO: 1969751 - RNA, 19 nt, Artificial Sequence
  Description of Artificial Sequence: Synthetic oligonucleotide
uagugagauuuccaauuag

SEQ ID NO: 1969752 - RNA, 19 nt, Artificial Sequence
  Description of Artificial Sequence: Synthetic oligonucleotide
agugauaguaagccaguca

SEQ ID NO: 1969753 - RNA, 19 nt, Artificial Sequence
  Description of Artificial Sequence: Synthetic oligonucleotide
uuccuuugcuccuaaucag

SEQ ID NO: 1969754 - RNA, 19 nt, Artificial Sequence
  Description of Artificial Sequence: Synthetic oligonucleotide
agcaaaacugagcccauug

SEQ ID NO: 1969755 - RNA, 19 nt, Artificial Sequence
  Description of Artificial Sequence: Synthetic oligonucleotide
ugggauuagcaccucugag

SEQ ID NO: 1969756 - RNA, 19 nt, Artificial Sequence
  Description of Artificial Sequence: Synthetic oligonucleotide
gcuauuugcaauuacaugu

SEQ ID NO: 1969757 - RNA, 19 nt, Artificial Sequence
  Description of Artificial Sequence: Synthetic oligonucleotide
ucauuaucuucgauguuaa

SEQ ID NO: 1969758 - RNA, 19 nt, Artificial Sequence
  Description of Artificial Sequence: Synthetic oligonucleotide
gaugguuaaucuagaguag

SEQ ID NO: 1969759 - RNA, 19 nt, Artificial Sequence
  Description of Artificial Sequence: Synthetic oligonucleotide
uccuaaucaggcugcauga

SEQ ID NO: 1969760 - RNA, 19 nt, Artificial Sequence
  Description of Artificial Sequence: Synthetic oligonucleotide
cuucacaaggaacuccacc

SEQ ID NO: 1969761 - RNA, 19 nt, Artificial Sequence
  Description of Artificial Sequence: Synthetic oligonucleotide
cauguuagaaaucagaguu

SEQ ID NO: 1969762 - RNA, 19 nt, Artificial Sequence
  Description of Artificial Sequence: Synthetic oligonucleotide
uucacacgugauuauucag

SEQ ID NO: 1969763 - RNA, 19 nt, Artificial Sequence
  Description of Artificial Sequence: Synthetic oligonucleotide
uuaaucuagaguagagcuu

SEQ ID NO: 1969764 - RNA, 19 nt, Artificial Sequence
  Description of Artificial Sequence: Synthetic oligonucleotide
ucauaaacuuguagugaga

SEQ ID NO: 1969765 - RNA, 19 nt, Artificial Sequence
  Description of Artificial Sequence: Synthetic oligonucleotide
gacgauuaguugcuucucc

SEQ ID NO: 1969766 - RNA, 19 nt, Artificial Sequence
  Description of Artificial Sequence: Synthetic oligonucleotide
ucuagaguagagcuuggua

SEQ ID NO: 1969767 - RNA, 19 nt, Artificial Sequence
  Description of Artificial Sequence: Synthetic oligonucleotide
auacuaguaaggucggccu

SEQ ID NO: 1969768 - RNA, 19 nt, Artificial Sequence
  Description of Artificial Sequence: Synthetic oligonucleotide
auucacacgugauuauuca

SEQ ID NO: 1969769 - RNA, 19 nt, Artificial Sequence
  Description of Artificial Sequence: Synthetic oligonucleotide
aauugggauuagcaccucu

SEQ ID NO: 1969770 - RNA, 19 nt, Artificial Sequence
  Description of Artificial Sequence: Synthetic oligonucleotide
aacaaagacuucagguaag

SEQ ID NO: 1969771 - RNA, 19 nt, Artificial Sequence
  Description of Artificial Sequence: Synthetic oligonucleotide
ucggccugccaaaagcccg

SEQ ID NO: 1969772 - RNA, 19 nt, Artificial Sequence
  Description of Artificial Sequence: Synthetic oligonucleotide
acguuuacauuauuuugca

SEQ ID NO: 1969773 - RNA, 19 nt, Artificial Sequence
  Description of Artificial Sequence: Synthetic oligonucleotide
gcaacaaacuaguaaguug

SEQ ID NO: 1969774 - RNA, 19 nt, Artificial Sequence
  Description of Artificial Sequence: Synthetic oligonucleotide
auagcuauuugcaauuaca

SEQ ID NO: 1969775 - RNA, 19 nt, Artificial Sequence
  Description of Artificial Sequence: Synthetic oligonucleotide
guaagauucugaguguggc

SEQ ID NO: 1969776 - RNA, 19 nt, Artificial Sequence
  Description of Artificial Sequence: Synthetic oligonucleotide
uggauuuccaaguuucaua

SEQ ID NO: 1969777 - RNA, 19 nt, Artificial Sequence
  Description of Artificial Sequence: Synthetic oligonucleotide
ugugugcuucacaaggaac

SEQ ID NO: 1969778 - RNA, 19 nt, Artificial Sequence
  Description of Artificial Sequence: Synthetic oligonucleotide
ucugaguagaagucuccug

SEQ ID NO: 1969779 - RNA, 19 nt, Artificial Sequence
  Description of Artificial Sequence: Synthetic oligonucleotide
ucggccauucuuuaggguc

SEQ ID NO: 1969780 - RNA, 19 nt, Artificial Sequence
  Description of Artificial Sequence: Synthetic oligonucleotide
aaacuuguagugagauuuc

SEQ ID NO: 1969781 - RNA, 19 nt, Artificial Sequence
  Description of Artificial Sequence: Synthetic oligonucleotide
aggacagccaaccaacuaa

SEQ ID NO: 1969782 - RNA, 19 nt, Artificial Sequence
  Description of Artificial Sequence: Synthetic oligonucleotide
uguggcaaaggguaagcaa

SEQ ID NO: 1969783 - RNA, 19 nt, Artificial Sequence
  Description of Artificial Sequence: Synthetic oligonucleotide
cuccuaaucaggcugcaug

SEQ ID NO: 1969784 - RNA, 19 nt, Artificial Sequence
  Description of Artificial Sequence: Synthetic oligonucleotide
aacuaguaaguugcucuag

SEQ ID NO: 1969785 - RNA, 19 nt, Artificial Sequence
  Description of Artificial Sequence: Synthetic oligonucleotide
aggacugggaugguuaauc

SEQ ID NO: 1969786 - RNA, 19 nt, Artificial Sequence
  Description of Artificial Sequence: Synthetic oligonucleotide
uugggauuagcaccucuga

SEQ ID NO: 1969787 - RNA, 19 nt, Artificial Sequence
  Description of Artificial Sequence: Synthetic oligonucleotide
ugacaaaguaaaggcaaug

SEQ ID NO: 1969788 - RNA, 19 nt, Artificial Sequence
  Description of Artificial Sequence: Synthetic oligonucleotide
auuauucagcaaaacugag

SEQ ID NO: 1969789 - RNA, 19 nt, Artificial Sequence
  Description of Artificial Sequence: Synthetic oligonucleotide
aagaaaggcauagcuauuu

SEQ ID NO: 1969790 - RNA, 19 nt, Artificial Sequence
  Description of Artificial Sequence: Synthetic oligonucleotide
agaaaggcauagcuauuug

SEQ ID NO: 1969791 - RNA, 19 nt, Artificial Sequence
  Description of Artificial Sequence: Synthetic oligonucleotide
ugggaugguuaaucuagag

SEQ ID NO: 1969792 - RNA, 19 nt, Artificial Sequence
  Description of Artificial Sequence: Synthetic oligonucleotide
uggcaucggaggcugacag

SEQ ID NO: 1969793 - RNA, 19 nt, Artificial Sequence
  Description of Artificial Sequence: Synthetic oligonucleotide
auuaggcaaaagaugcauc

SEQ ID NO: 1969794 - RNA, 19 nt, Artificial Sequence
  Description of Artificial Sequence: Synthetic oligonucleotide
cuuguagugagauuuccaa

SEQ ID NO: 1969795 - RNA, 19 nt, Artificial Sequence
  Description of Artificial Sequence: Synthetic oligonucleotide
aucgggaaaagacgauuag

SEQ ID NO: 1969796 - RNA, 19 nt, Artificial Sequence
  Description of Artificial Sequence: Synthetic oligonucleotide
cuaaucaggcugcaugaug

SEQ ID NO: 1969797 - RNA, 19 nt, Artificial Sequence
  Description of Artificial Sequence: Synthetic oligonucleotide
aaccaguucggucuuucaa

SEQ ID NO: 1969798 - RNA, 19 nt, Artificial Sequence
  Description of Artificial Sequence: Synthetic oligonucleotide
uuuggcagccaagugcaag

SEQ ID NO: 1969799 - RNA, 19 nt, Artificial Sequence
  Description of Artificial Sequence: Synthetic oligonucleotide
ccccuuaugauuccgaugc

SEQ ID NO: 1969800 - RNA, 19 nt, Artificial Sequence
  Description of Artificial Sequence: Synthetic oligonucleotide
auaaaauauccagaagaaa

SEQ ID NO: 1969801 - RNA, 19 nt, Artificial Sequence
  Description of Artificial Sequence: Synthetic oligonucleotide
cauucuuuaggguccugac

SEQ ID NO: 1969802 - RNA, 19 nt, Artificial Sequence
  Description of Artificial Sequence: Synthetic oligonucleotide
uugcaauuacauguuagaa

SEQ ID NO: 1969803 - RNA, 19 nt, Artificial Sequence
  Description of Artificial Sequence: Synthetic oligonucleotide
agugagauuuccaauuaga

SEQ ID NO: 1969804 - RNA, 19 nt, Artificial Sequence
  Description of Artificial Sequence: Synthetic oligonucleotide
aaugacagcgaaaccaguu

SEQ ID NO: 1969805 - RNA, 19 nt, Artificial Sequence
  Description of Artificial Sequence: Synthetic oligonucleotide
uacuaguaaggucggccug

SEQ ID NO: 1969806 - RNA, 19 nt, Artificial Sequence
  Description of Artificial Sequence: Synthetic oligonucleotide
uccgaugccccacauugcu

SEQ ID NO: 1969807 - RNA, 19 nt, Artificial Sequence
  Description of Artificial Sequence: Synthetic oligonucleotide
gugagauuuccaauuagac

SEQ ID NO: 1969808 - RNA, 19 nt, Artificial Sequence
  Description of Artificial Sequence: Synthetic oligonucleotide
uuaugauuccgaugcccca

SEQ ID NO: 1969809 - RNA, 19 nt, Artificial Sequence
  Description of Artificial Sequence: Synthetic oligonucleotide
gugauuauucagcaaaacu

SEQ ID NO: 1969810 - RNA, 19 nt, Artificial Sequence
  Description of Artificial Sequence: Synthetic oligonucleotide
gauucacacgugauuauuc

SEQ ID NO: 1969811 - RNA, 19 nt, Artificial Sequence
  Description of Artificial Sequence: Synthetic oligonucleotide
ucgauguuaacaucagcuu

SEQ ID NO: 1969812 - RNA, 19 nt, Artificial Sequence
  Description of Artificial Sequence: Synthetic oligonucleotide
caaguuucauaaccugcag

SEQ ID NO: 1969813 - RNA, 19 nt, Artificial Sequence
  Description of Artificial Sequence: Synthetic oligonucleotide
caugaaugacagcgaaacc

SEQ ID NO: 1969814 - RNA, 19 nt, Artificial Sequence
  Description of Artificial Sequence: Synthetic oligonucleotide
cagccaaccaacuaacuga

SEQ ID NO: 1969815 - RNA, 19 nt, Artificial Sequence
  Description of Artificial Sequence: Synthetic oligonucleotide
agugcaagggcagguuccc

SEQ ID NO: 1969816 - RNA, 19 nt, Artificial Sequence
  Description of Artificial Sequence: Synthetic oligonucleotide
gauuagcaccucugaguag

SEQ ID NO: 1969817 - RNA, 19 nt, Artificial Sequence
  Description of Artificial Sequence: Synthetic oligonucleotide
agcgcaguucucccaaauc

SEQ ID NO: 1969818 - RNA, 19 nt, Artificial Sequence
  Description of Artificial Sequence: Synthetic oligonucleotide
acgauuaguugcuucuccu

SEQ ID NO: 1969819 - RNA, 19 nt, Artificial Sequence
  Description of Artificial Sequence: Synthetic oligonucleotide
aaauccauuuugagcguug

SEQ ID NO: 1969820 - RNA, 19 nt, Artificial Sequence
  Description of Artificial Sequence: Synthetic oligonucleotide
accccauuugccuccauca

SEQ ID NO: 1969821 - RNA, 19 nt, Artificial Sequence
  Description of Artificial Sequence: Synthetic oligonucleotide
caaaacugagcccauugga

SEQ ID NO: 1969822 - RNA, 19 nt, Artificial Sequence
  Description of Artificial Sequence: Synthetic oligonucleotide
uuaggguccugacgaucgg

SEQ ID NO: 1969823 - RNA, 19 nt, Artificial Sequence
  Description of Artificial Sequence: Synthetic oligonucleotide
gacagcgaaaccaguucgg

SEQ ID NO: 1969824 - RNA, 19 nt, Artificial Sequence
  Description of Artificial Sequence: Synthetic oligonucleotide
cuugguaguaaauacuagu

SEQ ID NO: 1969825 - RNA, 19 nt, Artificial Sequence
  Description of Artificial Sequence: Synthetic oligonucleotide
aguagagcuugguaguaaa

SEQ ID NO: 1969826 - RNA, 19 nt, Artificial Sequence
  Description of Artificial Sequence: Synthetic oligonucleotide
gggaaaagacgauuaguug

SEQ ID NO: 1969827 - RNA, 19 nt, Artificial Sequence
  Description of Artificial Sequence: Synthetic oligonucleotide
uaggcaaaagaugcaucag

SEQ ID NO: 1969828 - RNA, 19 nt, Artificial Sequence
  Description of Artificial Sequence: Synthetic oligonucleotide
ggauuuccaaguuucauaa

SEQ ID NO: 1969829 - RNA, 19 nt, Artificial Sequence
  Description of Artificial Sequence: Synthetic oligonucleotide
acuaacugacaaaguaaag

SEQ ID NO: 1969830 - RNA, 19 nt, Artificial Sequence
  Description of Artificial Sequence: Synthetic oligonucleotide
gacgaucgggaaaagacga

SEQ ID NO: 1969831 - RNA, 19 nt, Artificial Sequence
  Description of Artificial Sequence: Synthetic oligonucleotide
gcaaaacugagcccauugg

SEQ ID NO: 1969832 - RNA, 19 nt, Artificial Sequence
  Description of Artificial Sequence: Synthetic oligonucleotide
cauagaaccuggccaaguc

SEQ ID NO: 1969833 - RNA, 19 nt, Artificial Sequence
  Description of Artificial Sequence: Synthetic oligonucleotide
aaucuagaguagagcuugg

SEQ ID NO: 1969834 - RNA, 19 nt, Artificial Sequence
  Description of Artificial Sequence: Synthetic oligonucleotide
aggcauagcuauuugcaau

SEQ ID NO: 1969835 - RNA, 19 nt, Artificial Sequence
  Description of Artificial Sequence: Synthetic oligonucleotide
accaguucggucuuucaaa

SEQ ID NO: 1969836 - RNA, 19 nt, Artificial Sequence
  Description of Artificial Sequence: Synthetic oligonucleotide
agccaaccaacuaacugac

SEQ ID NO: 1969837 - RNA, 19 nt, Artificial Sequence
  Description of Artificial Sequence: Synthetic oligonucleotide
cuugauucacacgugauua

SEQ ID NO: 1969838 - RNA, 19 nt, Artificial Sequence
  Description of Artificial Sequence: Synthetic oligonucleotide
gauuuccaaguuucauaac

SEQ ID NO: 1969839 - RNA, 19 nt, Artificial Sequence
  Description of Artificial Sequence: Synthetic oligonucleotide
ucacuguggauuuguggcu

SEQ ID NO: 1969840 - RNA, 19 nt, Artificial Sequence
  Description of Artificial Sequence: Synthetic oligonucleotide
auuuugagcguugacguuu

SEQ ID NO: 1969841 - RNA, 19 nt, Artificial Sequence
  Description of Artificial Sequence: Synthetic oligonucleotide
aguaagccagucaggacag

SEQ ID NO: 1969842 - RNA, 19 nt, Artificial Sequence
  Description of Artificial Sequence: Synthetic oligonucleotide
guaaguugcucuagguccc

SEQ ID NO: 1969843 - RNA, 19 nt, Artificial Sequence
  Description of Artificial Sequence: Synthetic oligonucleotide
gguuaaucuagaguagagc

SEQ ID NO: 1969844 - RNA, 19 nt, Artificial Sequence
  Description of Artificial Sequence: Synthetic oligonucleotide
ucgggaaaagacgauuagu

SEQ ID NO: 1969845 - RNA, 19 nt, Artificial Sequence
  Description of Artificial Sequence: Synthetic oligonucleotide
gacuuuaaccagcugcuua

SEQ ID NO: 1969846 - RNA, 19 nt, Artificial Sequence
  Description of Artificial Sequence: Synthetic oligonucleotide
aaggucggccugccaaaag

SEQ ID NO: 1969847 - RNA, 19 nt, Artificial Sequence
  Description of Artificial Sequence: Synthetic oligonucleotide
guggauuuguggcuucccc

SEQ ID NO: 1969848 - RNA, 19 nt, Artificial Sequence
  Description of Artificial Sequence: Synthetic oligonucleotide
cacacgugauuauucagca

SEQ ID NO: 1969849 - RNA, 19 nt, Artificial Sequence
  Description of Artificial Sequence: Synthetic oligonucleotide
caaauugggauuagcaccu

SEQ ID NO: 1969850 - RNA, 19 nt, Artificial Sequence
  Description of Artificial Sequence: Synthetic oligonucleotide
auugggauuagcaccucug

SEQ ID NO: 1969851 - RNA, 19 nt, Artificial Sequence
  Description of Artificial Sequence: Synthetic oligonucleotide
aagccuguaccguguccag

SEQ ID NO: 1969852 - RNA, 19 nt, Artificial Sequence
  Description of Artificial Sequence: Synthetic oligonucleotide
agguaagauucugagugug

SEQ ID NO: 1969853 - RNA, 19 nt, Artificial Sequence
  Description of Artificial Sequence: Synthetic oligonucleotide
acuguggauuuguggcuuc

SEQ ID NO: 1969854 - RNA, 19 nt, Artificial Sequence
  Description of Artificial Sequence: Synthetic oligonucleotide
auaaacuuguagugagauu

SEQ ID NO: 1969855 - RNA, 19 nt, Artificial Sequence
  Description of Artificial Sequence: Synthetic oligonucleotide
uuuugagcguugacguuua

SEQ ID NO: 1969856 - RNA, 19 nt, Artificial Sequence
  Description of Artificial Sequence: Synthetic oligonucleotide
gaguagaagucuccuggca

SEQ ID NO: 1969857 - RNA, 19 nt, Artificial Sequence
  Description of Artificial Sequence: Synthetic oligonucleotide
ugaguguggcaaaggguaa

SEQ ID NO: 1969858 - RNA, 19 nt, Artificial Sequence
  Description of Artificial Sequence: Synthetic oligonucleotide
acagugaaaaggauguuua

SEQ ID NO: 1969859 - RNA, 19 nt, Artificial Sequence
  Description of Artificial Sequence: Synthetic oligonucleotide
uugauucacacgugauuau

SEQ ID NO: 1969860 - RNA, 19 nt, Artificial Sequence
  Description of Artificial Sequence: Synthetic oligonucleotide
uccagaagaaaggcauagc

SEQ ID NO: 1969861 - RNA, 19 nt, Artificial Sequence
  Description of Artificial Sequence: Synthetic oligonucleotide
ugccccacauugcuggcug

SEQ ID NO: 1969862 - RNA, 19 nt, Artificial Sequence
  Description of Artificial Sequence: Synthetic oligonucleotide
gucaggacagccaaccaac

SEQ ID NO: 1969863 - RNA, 19 nt, Artificial Sequence
  Description of Artificial Sequence: Synthetic oligonucleotide
ggcucggccauucuuuagg

SEQ ID NO: 1969864 - RNA, 19 nt, Artificial Sequence
  Description of Artificial Sequence: Synthetic oligonucleotide
uugagcguugacguuuaca

SEQ ID NO: 1969865 - RNA, 19 nt, Artificial Sequence
  Description of Artificial Sequence: Synthetic oligonucleotide
uucuuccauagaaccuggc

SEQ ID NO: 1969866 - RNA, 19 nt, Artificial Sequence
  Description of Artificial Sequence: Synthetic oligonucleotide
uguuaacaucagcuugaaa

SEQ ID NO: 1969867 - RNA, 19 nt, Artificial Sequence
  Description of Artificial Sequence: Synthetic oligonucleotide
ucggaggcugacagaagga

SEQ ID NO: 1969868 - RNA, 19 nt, Artificial Sequence
  Description of Artificial Sequence: Synthetic oligonucleotide
gguaagauucugagugugg

SEQ ID NO: 1969869 - RNA, 19 nt, Artificial Sequence
  Description of Artificial Sequence: Synthetic oligonucleotide
agacgauuaguugcuucuc

SEQ ID NO: 1969870 - RNA, 19 nt, Artificial Sequence
  Description of Artificial Sequence: Synthetic oligonucleotide
gacuucagguaagauucug

SEQ ID NO: 1969871 - RNA, 19 nt, Artificial Sequence
  Description of Artificial Sequence: Synthetic oligonucleotide
accucugaguagaagucuc

SEQ ID NO: 1969872 - RNA, 19 nt, Artificial Sequence
  Description of Artificial Sequence: Synthetic oligonucleotide
aaaagcccgccccuugauu

SEQ ID NO: 1969873 - RNA, 19 nt, Artificial Sequence
  Description of Artificial Sequence: Synthetic oligonucleotide
uaguugcuucuccuuuccc

SEQ ID NO: 1969874 - RNA, 19 nt, Artificial Sequence
  Description of Artificial Sequence: Synthetic oligonucleotide
guuucauaaccugcagcgc

SEQ ID NO: 1969875 - RNA, 19 nt, Artificial Sequence
  Description of Artificial Sequence: Synthetic oligonucleotide
caaugugggaaagcccucc

SEQ ID NO: 1969876 - RNA, 19 nt, Artificial Sequence
  Description of Artificial Sequence: Synthetic oligonucleotide
ugcagcgcaguucucccaa

SEQ ID NO: 1969877 - RNA, 19 nt, Artificial Sequence
  Description of Artificial Sequence: Synthetic oligonucleotide
uuccgaugccccacauugc

SEQ ID NO: 1969878 - RNA, 19 nt, Artificial Sequence
  Description of Artificial Sequence: Synthetic oligonucleotide
uaccguguccaggaaaccu

SEQ ID NO: 1969879 - RNA, 19 nt, Artificial Sequence
  Description of Artificial Sequence: Synthetic oligonucleotide
guggcaaaggguaagcaaa

SEQ ID NO: 1969880 - RNA, 19 nt, Artificial Sequence
  Description of Artificial Sequence: Synthetic oligonucleotide
ugauucacacgugauuauu

SEQ ID NO: 1969881 - RNA, 19 nt, Artificial Sequence
  Description of Artificial Sequence: Synthetic oligonucleotide
caucaugaaugacagcgaa

SEQ ID NO: 1969882 - RNA, 19 nt, Artificial Sequence
  Description of Artificial Sequence: Synthetic oligonucleotide
ggauuagcaccucugagua

SEQ ID NO: 1969883 - RNA, 19 nt, Artificial Sequence
  Description of Artificial Sequence: Synthetic oligonucleotide
cauuaucuucgauguuaac

SEQ ID NO: 1969884 - RNA, 19 nt, Artificial Sequence
  Description of Artificial Sequence: Synthetic oligonucleotide
gcaaaagaugcaucaggac

SEQ ID NO: 1969885 - RNA, 19 nt, Artificial Sequence
  Description of Artificial Sequence: Synthetic oligonucleotide
gcuugaaacuccagcaaag

SEQ ID NO: 1969886 - RNA, 19 nt, Artificial Sequence
  Description of Artificial Sequence: Synthetic oligonucleotide
augauggcaucggaggcug

SEQ ID NO: 1969887 - RNA, 19 nt, Artificial Sequence
  Description of Artificial Sequence: Synthetic oligonucleotide
cagcaaagccuguaccgug

SEQ ID NO: 1969888 - RNA, 19 nt, Artificial Sequence
  Description of Artificial Sequence: Synthetic oligonucleotide
gaaggacugggaugguuaa

SEQ ID NO: 1969889 - RNA, 19 nt, Artificial Sequence
  Description of Artificial Sequence: Synthetic oligonucleotide
gaucgggaaaagacgauua

SEQ ID NO: 1969890 - RNA, 19 nt, Artificial Sequence
  Description of Artificial Sequence: Synthetic oligonucleotide
ccuuugcuccuaaucaggc

SEQ ID NO: 1969891 - RNA, 19 nt, Artificial Sequence
  Description of Artificial Sequence: Synthetic oligonucleotide
uccauagaaccuggccaag

SEQ ID NO: 1969892 - RNA, 19 nt, Artificial Sequence
  Description of Artificial Sequence: Synthetic oligonucleotide
aaggcucggccauucuuua

SEQ ID NO: 1969893 - RNA, 19 nt, Artificial Sequence
  Description of Artificial Sequence: Synthetic oligonucleotide
gcaaaggguaagcaaagaa

SEQ ID NO: 1969894 - RNA, 19 nt, Artificial Sequence
  Description of Artificial Sequence: Synthetic oligonucleotide
accucauuucuuccauaga

SEQ ID NO: 1969895 - RNA, 19 nt, Artificial Sequence
  Description of Artificial Sequence: Synthetic oligonucleotide
ucuuuaggguccugacgau

SEQ ID NO: 1969896 - RNA, 19 nt, Artificial Sequence
  Description of Artificial Sequence: Synthetic oligonucleotide
aaaagacgauuaguugcuu

SEQ ID NO: 1969897 - RNA, 19 nt, Artificial Sequence
  Description of Artificial Sequence: Synthetic oligonucleotide
aagcccgccccuugauuca

SEQ ID NO: 1969898 - RNA, 19 nt, Artificial Sequence
  Description of Artificial Sequence: Synthetic oligonucleotide
cgauguuaacaucagcuug

SEQ ID NO: 1969899 - RNA, 19 nt, Artificial Sequence
  Description of Artificial Sequence: Synthetic oligonucleotide
cccauuugccuccaucagg

SEQ ID NO: 1969900 - RNA, 19 nt, Artificial Sequence
  Description of Artificial Sequence: Synthetic oligonucleotide
acagcgaaaccaguucggu

SEQ ID NO: 1969901 - RNA, 19 nt, Artificial Sequence
  Description of Artificial Sequence: Synthetic oligonucleotide
gaugccccacauugcuggc

SEQ ID NO: 1969902 - RNA, 19 nt, Artificial Sequence
  Description of Artificial Sequence: Synthetic oligonucleotide
caucaggcuaaugaccuca

SEQ ID NO: 1969903 - RNA, 19 nt, Artificial Sequence
  Description of Artificial Sequence: Synthetic oligonucleotide
cuaguaaguugcucuaggu

SEQ ID NO: 1969904 - RNA, 19 nt, Artificial Sequence
  Description of Artificial Sequence: Synthetic oligonucleotide
caaccaacuaacugacaaa

SEQ ID NO: 1969905 - RNA, 19 nt, Artificial Sequence
  Description of Artificial Sequence: Synthetic oligonucleotide
ggaaaccugcucuggcugc

SEQ ID NO: 1969906 - RNA, 19 nt, Artificial Sequence
  Description of Artificial Sequence: Synthetic oligonucleotide
ccucauuucuuccauagaa

SEQ ID NO: 1969907 - RNA, 19 nt, Artificial Sequence
  Description of Artificial Sequence: Synthetic oligonucleotide
cuaguaaggucggccugcc

SEQ ID NO: 1969908 - RNA, 19 nt, Artificial Sequence
  Description of Artificial Sequence: Synthetic oligonucleotide
ccaaccaacuaacugacaa

SEQ ID NO: 1969909 - RNA, 19 nt, Artificial Sequence
  Description of Artificial Sequence: Synthetic oligonucleotide
ccuuaugauuccgaugccc

SEQ ID NO: 1969910 - RNA, 19 nt, Artificial Sequence
  Description of Artificial Sequence: Synthetic oligonucleotide
gcggacgccaacucguucc

SEQ ID NO: 1969911 - RNA, 19 nt, Artificial Sequence
  Description of Artificial Sequence: Synthetic oligonucleotide
gacugggaugguuaaucua

SEQ ID NO: 1969912 - RNA, 19 nt, Artificial Sequence
  Description of Artificial Sequence: Synthetic oligonucleotide
cagcgaaaccaguucgguc

SEQ ID NO: 1969913 - RNA, 19 nt, Artificial Sequence
  Description of Artificial Sequence: Synthetic oligonucleotide
accguguccaggaaaccug

SEQ ID NO: 1969914 - RNA, 19 nt, Artificial Sequence
  Description of Artificial Sequence: Synthetic oligonucleotide
ggagguggccuucuuuggc

SEQ ID NO: 1969915 - RNA, 19 nt, Artificial Sequence
  Description of Artificial Sequence: Synthetic oligonucleotide
gcucggccauucuuuaggg

SEQ ID NO: 1969916 - RNA, 19 nt, Artificial Sequence
  Description of Artificial Sequence: Synthetic oligonucleotide
gcuugguaguaaauacuag

SEQ ID NO: 1969917 - RNA, 19 nt, Artificial Sequence
  Description of Artificial Sequence: Synthetic oligonucleotide
accaacuaacugacaaagu

SEQ ID NO: 1969918 - RNA, 19 nt, Artificial Sequence
  Description of Artificial Sequence: Synthetic oligonucleotide
cgaugccccacauugcugg

SEQ ID NO: 1969919 - RNA, 19 nt, Artificial Sequence
  Description of Artificial Sequence: Synthetic oligonucleotide
gggauuagcaccucugagu

SEQ ID NO: 1969920 - RNA, 19 nt, Artificial Sequence
  Description of Artificial Sequence: Synthetic oligonucleotide
agcaaagccuguaccgugu

SEQ ID NO: 1969921 - RNA, 19 nt, Artificial Sequence
  Description of Artificial Sequence: Synthetic oligonucleotide
cuauuugcaauuacauguu

SEQ ID NO: 1969922 - RNA, 19 nt, Artificial Sequence
  Description of Artificial Sequence: Synthetic oligonucleotide
aucuagaguagagcuuggu

SEQ ID NO: 1969923 - RNA, 19 nt, Artificial Sequence
  Description of Artificial Sequence: Synthetic oligonucleotide
gguucccuucauuaucuuc

SEQ ID NO: 1969924 - RNA, 19 nt, Artificial Sequence
  Description of Artificial Sequence: Synthetic oligonucleotide
uuugagcguugacguuuac

SEQ ID NO: 1969925 - RNA, 19 nt, Artificial Sequence
  Description of Artificial Sequence: Synthetic oligonucleotide
guagaagucuccuggcaau

SEQ ID NO: 1969926 - RNA, 19 nt, Artificial Sequence
  Description of Artificial Sequence: Synthetic oligonucleotide
caucggaggcugacagaag

SEQ ID NO: 1969927 - RNA, 19 nt, Artificial Sequence
  Description of Artificial Sequence: Synthetic oligonucleotide
guaaggucggccugccaaa

SEQ ID NO: 1969928 - RNA, 19 nt, Artificial Sequence
  Description of Artificial Sequence: Synthetic oligonucleotide
aucaugaaugacagcgaaa

SEQ ID NO: 1969929 - RNA, 19 nt, Artificial Sequence
  Description of Artificial Sequence: Synthetic oligonucleotide
cagugaaaaggauguuuaa

SEQ ID NO: 1969930 - RNA, 19 nt, Artificial Sequence
  Description of Artificial Sequence: Synthetic oligonucleotide
caggcuaaugaccucauuu

SEQ ID NO: 1969931 - RNA, 19 nt, Artificial Sequence
  Description of Artificial Sequence: Synthetic oligonucleotide
uaguaaggucggccugcca

SEQ ID NO: 1969932 - RNA, 19 nt, Artificial Sequence
  Description of Artificial Sequence: Synthetic oligonucleotide
gagcuugguaguaaauacu

SEQ ID NO: 1969933 - RNA, 19 nt, Artificial Sequence
  Description of Artificial Sequence: Synthetic oligonucleotide
cugggaugguuaaucuaga

SEQ ID NO: 1969934 - RNA, 19 nt, Artificial Sequence
  Description of Artificial Sequence: Synthetic oligonucleotide
aggcucggccauucuuuag

SEQ ID NO: 1969935 - RNA, 19 nt, Artificial Sequence
  Description of Artificial Sequence: Synthetic oligonucleotide
cuguggauuuguggcuucc

SEQ ID NO: 1969936 - RNA, 19 nt, Artificial Sequence
  Description of Artificial Sequence: Synthetic oligonucleotide
gaaaccugcucuggcugca

SEQ ID NO: 1969937 - RNA, 19 nt, Artificial Sequence
  Description of Artificial Sequence: Synthetic oligonucleotide
gggaugguuaaucuagagu

SEQ ID NO: 1969938 - RNA, 19 nt, Artificial Sequence
  Description of Artificial Sequence: Synthetic oligonucleotide
ucccuucauuaucuucgau

SEQ ID NO: 1969939 - RNA, 19 nt, Artificial Sequence
  Description of Artificial Sequence: Synthetic oligonucleotide
acgugauuauucagcaaaa

SEQ ID NO: 1969940 - RNA, 19 nt, Artificial Sequence
  Description of Artificial Sequence: Synthetic oligonucleotide
auguuaacaucagcuugaa

SEQ ID NO: 1969941 - RNA, 19 nt, Artificial Sequence
  Description of Artificial Sequence: Synthetic oligonucleotide
guccugacgaucgggaaaa

SEQ ID NO: 1969942 - RNA, 19 nt, Artificial Sequence
  Description of Artificial Sequence: Synthetic oligonucleotide
agaguagagcuugguagua

SEQ ID NO: 1969943 - RNA, 19 nt, Artificial Sequence
  Description of Artificial Sequence: Synthetic oligonucleotide
ugcggacgccaacucguuc

SEQ ID NO: 1969944 - RNA, 19 nt, Artificial Sequence
  Description of Artificial Sequence: Synthetic oligonucleotide
gaguagagcuugguaguaa

SEQ ID NO: 1969945 - RNA, 19 nt, Artificial Sequence
  Description of Artificial Sequence: Synthetic oligonucleotide
ccucugaguagaagucucc

SEQ ID NO: 1969946 - RNA, 19 nt, Artificial Sequence
  Description of Artificial Sequence: Synthetic oligonucleotide
uggccaagucgaaggcggu

SEQ ID NO: 1969947 - RNA, 19 nt, Artificial Sequence
  Description of Artificial Sequence: Synthetic oligonucleotide
ccauuuugagcguugacgu

SEQ ID NO: 1969948 - RNA, 19 nt, Artificial Sequence
  Description of Artificial Sequence: Synthetic oligonucleotide
cugugugcuucacaaggaa

SEQ ID NO: 1969949 - RNA, 19 nt, Artificial Sequence
  Description of Artificial Sequence: Synthetic oligonucleotide
uaaggucggccugccaaaa

SEQ ID NO: 1969950 - RNA, 19 nt, Artificial Sequence
  Description of Artificial Sequence: Synthetic oligonucleotide
cugacagaaggacugggau

SEQ ID NO: 1969951 - RNA, 19 nt, Artificial Sequence
  Description of Artificial Sequence: Synthetic oligonucleotide
caccccauuugccuccauc

SEQ ID NO: 1969952 - RNA, 19 nt, Artificial Sequence
  Description of Artificial Sequence: Synthetic oligonucleotide
gucggccugccaaaagccc

SEQ ID NO: 1969953 - RNA, 19 nt, Artificial Sequence
  Description of Artificial Sequence: Synthetic oligonucleotide
ggcugcaugauggcaucgg

SEQ ID NO: 1969954 - RNA, 19 nt, Artificial Sequence
  Description of Artificial Sequence: Synthetic oligonucleotide
gccuguaccguguccagga

SEQ ID NO: 1969955 - RNA, 19 nt, Artificial Sequence
  Description of Artificial Sequence: Synthetic oligonucleotide
ggacagccaaccaacuaac

SEQ ID NO: 1969956 - RNA, 19 nt, Artificial Sequence
  Description of Artificial Sequence: Synthetic oligonucleotide
aggcugcaugauggcaucg

SEQ ID NO: 1969957 - RNA, 19 nt, Artificial Sequence
  Description of Artificial Sequence: Synthetic oligonucleotide
auuuugcaacaaacuagua

SEQ ID NO: 1969958 - RNA, 19 nt, Artificial Sequence
  Description of Artificial Sequence: Synthetic oligonucleotide
gauuuccaauuagacaauu

SEQ ID NO: 1969959 - RNA, 19 nt, Artificial Sequence
  Description of Artificial Sequence: Synthetic oligonucleotide
cuuugcuccuaaucaggcu

SEQ ID NO: 1969960 - RNA, 19 nt, Artificial Sequence
  Description of Artificial Sequence: Synthetic oligonucleotide
ugcuccuaaucaggcugca

SEQ ID NO: 1969961 - RNA, 19 nt, Artificial Sequence
  Description of Artificial Sequence: Synthetic oligonucleotide
ccugcagcgcaguucuccc

SEQ ID NO: 1969962 - RNA, 19 nt, Artificial Sequence
  Description of Artificial Sequence: Synthetic oligonucleotide
guaccguguccaggaaacc

SEQ ID NO: 1969963 - RNA, 19 nt, Artificial Sequence
  Description of Artificial Sequence: Synthetic oligonucleotide
acgcucacuguggauuugu

SEQ ID NO: 1969964 - RNA, 19 nt, Artificial Sequence
  Description of Artificial Sequence: Synthetic oligonucleotide
agacuucagguaagauucu

SEQ ID NO: 1969965 - RNA, 19 nt, Artificial Sequence
  Description of Artificial Sequence: Synthetic oligonucleotide
caggaaaccugcucuggcu

SEQ ID NO: 1969966 - RNA, 19 nt, Artificial Sequence
  Description of Artificial Sequence: Synthetic oligonucleotide
gcaucggaggcugacagaa

SEQ ID NO: 1969967 - RNA, 19 nt, Artificial Sequence
  Description of Artificial Sequence: Synthetic oligonucleotide
gguccugacgaucgggaaa

SEQ ID NO: 1969968 - RNA, 19 nt, Artificial Sequence
  Description of Artificial Sequence: Synthetic oligonucleotide
ccguguccaggaaaccugc

SEQ ID NO: 1969969 - RNA, 19 nt, Artificial Sequence
  Description of Artificial Sequence: Synthetic oligonucleotide
agacuuuaaccagcugcuu

SEQ ID NO: 1969970 - RNA, 19 nt, Artificial Sequence
  Description of Artificial Sequence: Synthetic oligonucleotide
aaaccugcucuggcugcau

SEQ ID NO: 1969971 - RNA, 19 nt, Artificial Sequence
  Description of Artificial Sequence: Synthetic oligonucleotide
cagguaagauucugagugu

SEQ ID NO: 1969972 - RNA, 19 nt, Artificial Sequence
  Description of Artificial Sequence: Synthetic oligonucleotide
cuguaccguguccaggaaa

SEQ ID NO: 1969973 - RNA, 19 nt, Artificial Sequence
  Description of Artificial Sequence: Synthetic oligonucleotide
gaaugacagcgaaaccagu

SEQ ID NO: 1969974 - RNA, 19 nt, Artificial Sequence
  Description of Artificial Sequence: Synthetic oligonucleotide
agggcagguucccuucauu

SEQ ID NO: 1969975 - RNA, 19 nt, Artificial Sequence
  Description of Artificial Sequence: Synthetic oligonucleotide
uccugacgaucgggaaaag

SEQ ID NO: 1969976 - RNA, 19 nt, Artificial Sequence
  Description of Artificial Sequence: Synthetic oligonucleotide
gccaaaagcccgccccuug

SEQ ID NO: 1969977 - RNA, 19 nt, Artificial Sequence
  Description of Artificial Sequence: Synthetic oligonucleotide
ggcauagcuauuugcaauu

SEQ ID NO: 1969978 - RNA, 19 nt, Artificial Sequence
  Description of Artificial Sequence: Synthetic oligonucleotide
cggccauucuuuagggucc

SEQ ID NO: 1969979 - RNA, 19 nt, Artificial Sequence
  Description of Artificial Sequence: Synthetic oligonucleotide
gcaagggcagguucccuuc

SEQ ID NO: 1969980 - RNA, 19 nt, Artificial Sequence
  Description of Artificial Sequence: Synthetic oligonucleotide
ccacauugcuggcugugug

SEQ ID NO: 1969981 - RNA, 19 nt, Artificial Sequence
  Description of Artificial Sequence: Synthetic oligonucleotide
agcccgccccuugauucac

SEQ ID NO: 1969982 - RNA, 19 nt, Artificial Sequence
  Description of Artificial Sequence: Synthetic oligonucleotide
cgugauuauucagcaaaac

SEQ ID NO: 1969983 - RNA, 19 nt, Artificial Sequence
  Description of Artificial Sequence: Synthetic oligonucleotide
caaggcucggccauucuuu

SEQ ID NO: 1969984 - RNA, 19 nt, Artificial Sequence
  Description of Artificial Sequence: Synthetic oligonucleotide
gggcagguucccuucauua

SEQ ID NO: 1969985 - RNA, 19 nt, Artificial Sequence
  Description of Artificial Sequence: Synthetic oligonucleotide
caucaggacaaagaauuuu

SEQ ID NO: 1969986 - RNA, 19 nt, Artificial Sequence
  Description of Artificial Sequence: Synthetic oligonucleotide
gcugacagaaggacuggga

SEQ ID NO: 1969987 - RNA, 19 nt, Artificial Sequence
  Description of Artificial Sequence: Synthetic oligonucleotide
agguucccuucauuaucuu

SEQ ID NO: 1969988 - RNA, 19 nt, Artificial Sequence
  Description of Artificial Sequence: Synthetic oligonucleotide
agaaccuggccaagucgaa

SEQ ID NO: 1969989 - RNA, 19 nt, Artificial Sequence
  Description of Artificial Sequence: Synthetic oligonucleotide
gauuccgaugccccacauu

SEQ ID NO: 1969990 - RNA, 19 nt, Artificial Sequence
  Description of Artificial Sequence: Synthetic oligonucleotide
ccccauuugccuccaucag

SEQ ID NO: 1969991 - RNA, 19 nt, Artificial Sequence
  Description of Artificial Sequence: Synthetic oligonucleotide
acgaucgggaaaagacgau

SEQ ID NO: 1969992 - RNA, 19 nt, Artificial Sequence
  Description of Artificial Sequence: Synthetic oligonucleotide
gacagccaaccaacuaacu

SEQ ID NO: 1969993 - RNA, 19 nt, Artificial Sequence
  Description of Artificial Sequence: Synthetic oligonucleotide
aucaggcuaaugaccucau

SEQ ID NO: 1969994 - RNA, 19 nt, Artificial Sequence
  Description of Artificial Sequence: Synthetic oligonucleotide
ggacugggaugguuaaucu

SEQ ID NO: 1969995 - RNA, 19 nt, Artificial Sequence
  Description of Artificial Sequence: Synthetic oligonucleotide
ggcaaucucuggauuucca

SEQ ID NO: 1969996 - RNA, 19 nt, Artificial Sequence
  Description of Artificial Sequence: Synthetic oligonucleotide
gagcguugacguuuacauu

SEQ ID NO: 1969997 - RNA, 19 nt, Artificial Sequence
  Description of Artificial Sequence: Synthetic oligonucleotide
cccuuaugauuccgaugcc

SEQ ID NO: 1969998 - RNA, 19 nt, Artificial Sequence
  Description of Artificial Sequence: Synthetic oligonucleotide
cauuuugagcguugacguu

SEQ ID NO: 1969999 - RNA, 19 nt, Artificial Sequence
  Description of Artificial Sequence: Synthetic oligonucleotide
ccauucuuuaggguccuga

SEQ ID NO: 1970000 - RNA, 19 nt, Artificial Sequence
  Description of Artificial Sequence: Synthetic oligonucleotide
cagcugcggacgccaacuc

SEQ ID NO: 1970001 - RNA, 19 nt, Artificial Sequence
  Description of Artificial Sequence: Synthetic oligonucleotide
cacgcucacuguggauuug

SEQ ID NO: 1970002 - RNA, 19 nt, Artificial Sequence
  Description of Artificial Sequence: Synthetic oligonucleotide
ggcaucggaggcugacaga

SEQ ID NO: 1970003 - RNA, 19 nt, Artificial Sequence
  Description of Artificial Sequence: Synthetic oligonucleotide
ccgaugccccacauugcug

SEQ ID NO: 1970004 - RNA, 19 nt, Artificial Sequence
  Description of Artificial Sequence: Synthetic oligonucleotide
ggaggcugacagaaggacu

SEQ ID NO: 1970005 - RNA, 19 nt, Artificial Sequence
  Description of Artificial Sequence: Synthetic oligonucleotide
ccaagucgaaggcgguguc

SEQ ID NO: 1970006 - RNA, 19 nt, Artificial Sequence
  Description of Artificial Sequence: Synthetic oligonucleotide
cucggccauucuuuagggu

SEQ ID NO: 1970007 - RNA, 19 nt, Artificial Sequence
  Description of Artificial Sequence: Synthetic oligonucleotide
ggcagcugcggacgccaac

SEQ ID NO: 1970008 - RNA, 19 nt, Artificial Sequence
  Description of Artificial Sequence: Synthetic oligonucleotide
caguucucccaaauccauu

SEQ ID NO: 1970009 - RNA, 19 nt, Artificial Sequence
  Description of Artificial Sequence: Synthetic oligonucleotide
caaauccauuuugagcguu

SEQ ID NO: 1970010 - RNA, 19 nt, Artificial Sequence
  Description of Artificial Sequence: Synthetic oligonucleotide
cccgccccuugauucacac

SEQ ID NO: 1970011 - RNA, 19 nt, Artificial Sequence
  Description of Artificial Sequence: Synthetic oligonucleotide
caaaagcccgccccuugau

SEQ ID NO: 1970012 - RNA, 19 nt, Artificial Sequence
  Description of Artificial Sequence: Synthetic oligonucleotide
gcugcggacgccaacucgu

SEQ ID NO: 1970013 - RNA, 19 nt, Artificial Sequence
  Description of Artificial Sequence: Synthetic oligonucleotide
ccugacgaucgggaaaaga

SEQ ID NO: 1970014 - RNA, 19 nt, Artificial Sequence
  Description of Artificial Sequence: Synthetic oligonucleotide
cgccccuugauucacacgu

SEQ ID NO: 1970015 - RNA, 19 nt, Artificial Sequence
  Description of Artificial Sequence: Synthetic oligonucleotide
cauaaccugcagcgcaguu

SEQ ID NO: 1970016 - RNA, 19 nt, Artificial Sequence
  Description of Artificial Sequence: Synthetic oligonucleotide
ccaguucggucuuucaaau

SEQ ID NO: 1970017 - RNA, 19 nt, Artificial Sequence
  Description of Artificial Sequence: Synthetic oligonucleotide
cggccugccaaaagcccgc

SEQ ID NO: 1970018 - RNA, 19 nt, Artificial Sequence
  Description of Artificial Sequence: Synthetic oligonucleotide
ccuugauucacacgugauu

SEQ ID NO: 1970019 - RNA, 19 nt, Artificial Sequence
  Description of Artificial Sequence: Synthetic oligonucleotide
gcagcugcggacgccaacu

SEQ ID NO: 1970020 - RNA, 19 nt, Artificial Sequence
  Description of Artificial Sequence: Synthetic oligonucleotide
caguucggucuuucaaauu

SEQ ID NO: 1970021 - RNA, 19 nt, Artificial Sequence
  Description of Artificial Sequence: Synthetic oligonucleotide
gccccuugauucacacgug

SEQ ID NO: 1970022 - RNA, 19 nt, Artificial Sequence
  Description of Artificial Sequence: Synthetic oligonucleotide
ccaaauccauuuugagcgu

SEQ ID NO: 1970023 - RNA, 19 nt, Artificial Sequence
  Description of Artificial Sequence: Synthetic oligonucleotide
cggacgccaacucguuccc

SEQ ID NO: 1970024 - RNA, 19 nt, Artificial Sequence
  Description of Artificial Sequence: Synthetic oligonucleotide
cacuguggauuuguggcuu

SEQ ID NO: 1970025 - RNA, 19 nt, Artificial Sequence
  Description of Artificial Sequence: Synthetic oligonucleotide
gcaguucucccaaauccau

SEQ ID NO: 1970026 - RNA, 19 nt, Artificial Sequence
  Description of Artificial Sequence: Synthetic oligonucleotide
ccccacauugcuggcugug

SEQ ID NO: 1970027 - RNA, 19 nt, Artificial Sequence
  Description of Artificial Sequence: Synthetic oligonucleotide
gccaaccaacuaacugaca

SEQ ID NO: 1970028 - RNA, 19 nt, Artificial Sequence
  Description of Artificial Sequence: Synthetic oligonucleotide
ggccugccaaaagcccgcc

SEQ ID NO: 1970029 - RNA, 19 nt, Artificial Sequence
  Description of Artificial Sequence: Synthetic oligonucleotide
cagcgcaguucucccaaau

SEQ ID NO: 1970030 - RNA, 19 nt, Artificial Sequence
  Description of Artificial Sequence: Synthetic oligonucleotide
gcagcgcaguucucccaaa

SEQ ID NO: 1970031 - RNA, 19 nt, Artificial Sequence
  Description of Artificial Sequence: Synthetic oligonucleotide
ccuguaccguguccaggaa

SEQ ID NO: 1970032 - RNA, 19 nt, Artificial Sequence
  Description of Artificial Sequence: Synthetic oligonucleotide
gcguugacguuuacauuau

SEQ ID NO: 1970033 - RNA, 19 nt, Artificial Sequence
  Description of Artificial Sequence: Synthetic oligonucleotide
gcgaaaccaguucggucuu

SEQ ID NO: 1970034 - RNA, 19 nt, Artificial Sequence
  Description of Artificial Sequence: Synthetic oligonucleotide
cgauuaguugcuucuccuu

SEQ ID NO: 1970035 - RNA, 19 nt, Artificial Sequence
  Description of Artificial Sequence: Synthetic oligonucleotide
ccccaaggcucggccauuc

SEQ ID NO: 1970036 - RNA, 19 nt, Artificial Sequence
  Description of Artificial Sequence: Synthetic oligonucleotide
cugcggacgccaacucguu

SEQ ID NO: 1970037 - RNA, 19 nt, Artificial Sequence
  Description of Artificial Sequence: Synthetic oligonucleotide
cccacgcucacuguggauu

SEQ ID NO: 1970038 - RNA, 19 nt, Artificial Sequence
  Description of Artificial Sequence: Synthetic oligonucleotide
ccaaggcucggccauucuu

SEQ ID NO: 1970039 - RNA, 19 nt, Artificial Sequence
  Description of Artificial Sequence: Synthetic oligonucleotide
ccuaaucaggcugcaugau

SEQ ID NO: 1970040 - RNA, 19 nt, Artificial Sequence
  Description of Artificial Sequence: Synthetic oligonucleotide
gcuccuaaucaggcugcau

SEQ ID NO: 1970041 - RNA, 19 nt, Artificial Sequence
  Description of Artificial Sequence: Synthetic oligonucleotide
cgaucgggaaaagacgauu

SEQ ID NO: 1970042 - RNA, 19 nt, Artificial Sequence
  Description of Artificial Sequence: Synthetic oligonucleotide
ccaagugcaagggcagguu

SEQ ID NO: 1970043 - RNA, 19 nt, Artificial Sequence
  Description of Artificial Sequence: Synthetic oligonucleotide
ccuuuccuuugcuccuaau

SEQ ID NO: 1970044 - RNA, 19 nt, Artificial Sequence
  Description of Artificial Sequence: Synthetic oligonucleotide
gccccacauugcuggcugu

SEQ ID NO: 1970045 - RNA, 19 nt, Artificial Sequence
  Description of Artificial Sequence: Synthetic oligonucleotide
gcccgccccuugauucaca

SEQ ID NO: 1970046 - RNA, 19 nt, Artificial Sequence
  Description of Artificial Sequence: Synthetic oligonucleotide
cccaaggcucggccauucu

SEQ ID NO: 1970047 - RNA, 19 nt, Artificial Sequence
  Description of Artificial Sequence: Synthetic oligonucleotide
cguugacguuuacauuauu

SEQ ID NO: 1970048 - RNA, 19 nt, Artificial Sequence
  Description of Artificial Sequence: Synthetic oligonucleotide
aauuaaacacaucagcagc

SEQ ID NO: 1970049 - RNA, 19 nt, Artificial Sequence
  Description of Artificial Sequence: Synthetic oligonucleotide
ugagcaaacauccugaugc

SEQ ID NO: 1970050 - RNA, 19 nt, Artificial Sequence
  Description of Artificial Sequence: Synthetic oligonucleotide
uuuauaaugucccuuaagc

SEQ ID NO: 1970051 - RNA, 19 nt, Artificial Sequence
  Description of Artificial Sequence: Synthetic oligonucleotide
aaaacaaauucugagcugc

SEQ ID NO: 1970052 - RNA, 19 nt, Artificial Sequence
  Description of Artificial Sequence: Synthetic oligonucleotide
aaaguuguaccuugggucc

SEQ ID NO: 1970053 - RNA, 19 nt, Artificial Sequence
  Description of Artificial Sequence: Synthetic oligonucleotide
aaauuaaacacaucagcag

SEQ ID NO: 1970054 - RNA, 19 nt, Artificial Sequence
  Description of Artificial Sequence: Synthetic oligonucleotide
aaggucauagaguacaauc

SEQ ID NO: 1970055 - RNA, 19 nt, Artificial Sequence
  Description of Artificial Sequence: Synthetic oligonucleotide
uuuaguuguagcuucauca

SEQ ID NO: 1970056 - RNA, 19 nt, Artificial Sequence
  Description of Artificial Sequence: Synthetic oligonucleotide
uuaacuuucccauugugag

SEQ ID NO: 1970057 - RNA, 19 nt, Artificial Sequence
  Description of Artificial Sequence: Synthetic oligonucleotide
ugcauaaacagcaauggug

SEQ ID NO: 1970058 - RNA, 19 nt, Artificial Sequence
  Description of Artificial Sequence: Synthetic oligonucleotide
aauuucaguccuuuccuac

SEQ ID NO: 1970059 - RNA, 19 nt, Artificial Sequence
  Description of Artificial Sequence: Synthetic oligonucleotide
auuagacugaaacacacag

SEQ ID NO: 1970060 - RNA, 19 nt, Artificial Sequence
  Description of Artificial Sequence: Synthetic oligonucleotide
uguauuuguggacaucugg

SEQ ID NO: 1970061 - RNA, 19 nt, Artificial Sequence
  Description of Artificial Sequence: Synthetic oligonucleotide
uguaucuuccuucaacagg

SEQ ID NO: 1970062 - RNA, 19 nt, Artificial Sequence
  Description of Artificial Sequence: Synthetic oligonucleotide
acaugugaugacuauaaac

SEQ ID NO: 1970063 - RNA, 19 nt, Artificial Sequence
  Description of Artificial Sequence: Synthetic oligonucleotide
auagaguacaaucacacca

SEQ ID NO: 1970064 - RNA, 19 nt, Artificial Sequence
  Description of Artificial Sequence: Synthetic oligonucleotide
aaauuagacugaaacacac

SEQ ID NO: 1970065 - RNA, 19 nt, Artificial Sequence
  Description of Artificial Sequence: Synthetic oligonucleotide
uaaaacauaggccauuaac

SEQ ID NO: 1970066 - RNA, 19 nt, Artificial Sequence
  Description of Artificial Sequence: Synthetic oligonucleotide
auaacauguaucuuccuuc

SEQ ID NO: 1970067 - RNA, 19 nt, Artificial Sequence
  Description of Artificial Sequence: Synthetic oligonucleotide
ucaacugggauuuaguugu

SEQ ID NO: 1970068 - RNA, 19 nt, Artificial Sequence
  Description of Artificial Sequence: Synthetic oligonucleotide
aagaguguuaacuccacug

SEQ ID NO: 1970069 - RNA, 19 nt, Artificial Sequence
  Description of Artificial Sequence: Synthetic oligonucleotide
acaaauucugagcugcagc

SEQ ID NO: 1970070 - RNA, 19 nt, Artificial Sequence
  Description of Artificial Sequence: Synthetic oligonucleotide
guuuuaucgaaugagcugg

SEQ ID NO: 1970071 - RNA, 19 nt, Artificial Sequence
  Description of Artificial Sequence: Synthetic oligonucleotide
agaguguuaacuccacugc

SEQ ID NO: 1970072 - RNA, 19 nt, Artificial Sequence
  Description of Artificial Sequence: Synthetic oligonucleotide
uaucgaaugagcuggaugu

SEQ ID NO: 1970073 - RNA, 19 nt, Artificial Sequence
  Description of Artificial Sequence: Synthetic oligonucleotide
aagaauauuacagucccug

SEQ ID NO: 1970074 - RNA, 19 nt, Artificial Sequence
  Description of Artificial Sequence: Synthetic oligonucleotide
caagagugagcaaacaucc

SEQ ID NO: 1970075 - RNA, 19 nt, Artificial Sequence
  Description of Artificial Sequence: Synthetic oligonucleotide
uuuuauaaugucccuuaag

SEQ ID NO: 1970076 - RNA, 19 nt, Artificial Sequence
  Description of Artificial Sequence: Synthetic oligonucleotide
agaaugugagaacaggauc

SEQ ID NO: 1970077 - RNA, 19 nt, Artificial Sequence
  Description of Artificial Sequence: Synthetic oligonucleotide
uguguaauaggguugucug

SEQ ID NO: 1970078 - RNA, 19 nt, Artificial Sequence
  Description of Artificial Sequence: Synthetic oligonucleotide
uuauaaugucccuuaagca

SEQ ID NO: 1970079 - RNA, 19 nt, Artificial Sequence
  Description of Artificial Sequence: Synthetic oligonucleotide
aaacacaucagcagccugc

SEQ ID NO: 1970080 - RNA, 19 nt, Artificial Sequence
  Description of Artificial Sequence: Synthetic oligonucleotide
agaauauuacagucccugc

SEQ ID NO: 1970081 - RNA, 19 nt, Artificial Sequence
  Description of Artificial Sequence: Synthetic oligonucleotide
auuaaacacaucagcagcc

SEQ ID NO: 1970082 - RNA, 19 nt, Artificial Sequence
  Description of Artificial Sequence: Synthetic oligonucleotide
gaaugugagaacaggaucc

SEQ ID NO: 1970083 - RNA, 19 nt, Artificial Sequence
  Description of Artificial Sequence: Synthetic oligonucleotide
ucucacaucccauaaauuc

SEQ ID NO: 1970084 - RNA, 19 nt, Artificial Sequence
  Description of Artificial Sequence: Synthetic oligonucleotide
aauucacucuacugucagc

SEQ ID NO: 1970085 - RNA, 19 nt, Artificial Sequence
  Description of Artificial Sequence: Synthetic oligonucleotide
ugagugaacugcauaaaca

SEQ ID NO: 1970086 - RNA, 19 nt, Artificial Sequence
  Description of Artificial Sequence: Synthetic oligonucleotide
acugggauuuaguuguagc

SEQ ID NO: 1970087 - RNA, 19 nt, Artificial Sequence
  Description of Artificial Sequence: Synthetic oligonucleotide
ugugaugacuauaaacugu

SEQ ID NO: 1970088 - RNA, 19 nt, Artificial Sequence
  Description of Artificial Sequence: Synthetic oligonucleotide
uauuccagagccucauucg

SEQ ID NO: 1970089 - RNA, 19 nt, Artificial Sequence
  Description of Artificial Sequence: Synthetic oligonucleotide
ucaagagugagcaaacauc

SEQ ID NO: 1970090 - RNA, 19 nt, Artificial Sequence
  Description of Artificial Sequence: Synthetic oligonucleotide
auuggagcuauuccagagc

SEQ ID NO: 1970091 - RNA, 19 nt, Artificial Sequence
  Description of Artificial Sequence: Synthetic oligonucleotide
gagaccgugaauuucaguc

SEQ ID NO: 1970092 - RNA, 19 nt, Artificial Sequence
  Description of Artificial Sequence: Synthetic oligonucleotide
acugucauuacaaacuuuc

SEQ ID NO: 1970093 - RNA, 19 nt, Artificial Sequence
  Description of Artificial Sequence: Synthetic oligonucleotide
aauauuacagucccugcua

SEQ ID NO: 1970094 - RNA, 19 nt, Artificial Sequence
  Description of Artificial Sequence: Synthetic oligonucleotide
augucaagaguguuaacuc

SEQ ID NO: 1970095 - RNA, 19 nt, Artificial Sequence
  Description of Artificial Sequence: Synthetic oligonucleotide
caugccugugucaugaggg

SEQ ID NO: 1970096 - RNA, 19 nt, Artificial Sequence
  Description of Artificial Sequence: Synthetic oligonucleotide
aaacauaggccauuaacuu

SEQ ID NO: 1970097 - RNA, 19 nt, Artificial Sequence
  Description of Artificial Sequence: Synthetic oligonucleotide
accaacugcuaucagacag

SEQ ID NO: 1970098 - RNA, 19 nt, Artificial Sequence
  Description of Artificial Sequence: Synthetic oligonucleotide
caaaguuguaccuuggguc

SEQ ID NO: 1970099 - RNA, 19 nt, Artificial Sequence
  Description of Artificial Sequence: Synthetic oligonucleotide
uuaucgaaugagcuggaug

SEQ ID NO: 1970100 - RNA, 19 nt, Artificial Sequence
  Description of Artificial Sequence: Synthetic oligonucleotide
agaccgugaauuucagucc

SEQ ID NO: 1970101 - RNA, 19 nt, Artificial Sequence
  Description of Artificial Sequence: Synthetic oligonucleotide
ucugucuuuguuaacucca

SEQ ID NO: 1970102 - RNA, 19 nt, Artificial Sequence
  Description of Artificial Sequence: Synthetic oligonucleotide
aacuuucccauaguucacc

SEQ ID NO: 1970103 - RNA, 19 nt, Artificial Sequence
  Description of Artificial Sequence: Synthetic oligonucleotide
ugaaacacacagcagucga

SEQ ID NO: 1970104 - RNA, 19 nt, Artificial Sequence
  Description of Artificial Sequence: Synthetic oligonucleotide
auauuacagucccugcuac

SEQ ID NO: 1970105 - RNA, 19 nt, Artificial Sequence
  Description of Artificial Sequence: Synthetic oligonucleotide
ggaaauuagacugaaacac

SEQ ID NO: 1970106 - RNA, 19 nt, Artificial Sequence
  Description of Artificial Sequence: Synthetic oligonucleotide
aagauauagucauggcgug

SEQ ID NO: 1970107 - RNA, 19 nt, Artificial Sequence
  Description of Artificial Sequence: Synthetic oligonucleotide
uccucuaguaccaacugcu

SEQ ID NO: 1970108 - RNA, 19 nt, Artificial Sequence
  Description of Artificial Sequence: Synthetic oligonucleotide
uucagaguuuuaucgaaug

SEQ ID NO: 1970109 - RNA, 19 nt, Artificial Sequence
  Description of Artificial Sequence: Synthetic oligonucleotide
cuggaugugaacaugccug

SEQ ID NO: 1970110 - RNA, 19 nt, Artificial Sequence
  Description of Artificial Sequence: Synthetic oligonucleotide
gucccuuaagcauaguuag

SEQ ID NO: 1970111 - RNA, 19 nt, Artificial Sequence
  Description of Artificial Sequence: Synthetic oligonucleotide
ugucaagaguguuaacucc

SEQ ID NO: 1970112 - RNA, 19 nt, Artificial Sequence
  Description of Artificial Sequence: Synthetic oligonucleotide
uuagacugaaacacacagc

SEQ ID NO: 1970113 - RNA, 19 nt, Artificial Sequence
  Description of Artificial Sequence: Synthetic oligonucleotide
guucauacaaagaugguac

SEQ ID NO: 1970114 - RNA, 19 nt, Artificial Sequence
  Description of Artificial Sequence: Synthetic oligonucleotide
aucuggaauugguucauac

SEQ ID NO: 1970115 - RNA, 19 nt, Artificial Sequence
  Description of Artificial Sequence: Synthetic oligonucleotide
guaucuuccuucaacaggc

SEQ ID NO: 1970116 - RNA, 19 nt, Artificial Sequence
  Description of Artificial Sequence: Synthetic oligonucleotide
uaggccauuaacuuuccca

SEQ ID NO: 1970117 - RNA, 19 nt, Artificial Sequence
  Description of Artificial Sequence: Synthetic oligonucleotide
uguauuuguaucccacacu

SEQ ID NO: 1970118 - RNA, 19 nt, Artificial Sequence
  Description of Artificial Sequence: Synthetic oligonucleotide
auuuaguuguagcuucauc

SEQ ID NO: 1970119 - RNA, 19 nt, Artificial Sequence
  Description of Artificial Sequence: Synthetic oligonucleotide
aguaccaacugcuaucaga

SEQ ID NO: 1970120 - RNA, 19 nt, Artificial Sequence
  Description of Artificial Sequence: Synthetic oligonucleotide
uguaauaggguugucugcu

SEQ ID NO: 1970121 - RNA, 19 nt, Artificial Sequence
  Description of Artificial Sequence: Synthetic oligonucleotide
uaacauguguaauaggguu

SEQ ID NO: 1970122 - RNA, 19 nt, Artificial Sequence
  Description of Artificial Sequence: Synthetic oligonucleotide
aagcauaguuaguuguucu

SEQ ID NO: 1970123 - RNA, 19 nt, Artificial Sequence
  Description of Artificial Sequence: Synthetic oligonucleotide
acugcuuuaacauguguaa

SEQ ID NO: 1970124 - RNA, 19 nt, Artificial Sequence
  Description of Artificial Sequence: Synthetic oligonucleotide
ggaauugguucauacaaag

SEQ ID NO: 1970125 - RNA, 19 nt, Artificial Sequence
  Description of Artificial Sequence: Synthetic oligonucleotide
acaccaucugaacccaccc

SEQ ID NO: 1970126 - RNA, 19 nt, Artificial Sequence
  Description of Artificial Sequence: Synthetic oligonucleotide
acauaggccauuaacuuuc

SEQ ID NO: 1970127 - RNA, 19 nt, Artificial Sequence
  Description of Artificial Sequence: Synthetic oligonucleotide
uaucagacagugcuuggug

SEQ ID NO: 1970128 - RNA, 19 nt, Artificial Sequence
  Description of Artificial Sequence: Synthetic oligonucleotide
cuucccauuaugcugauca

SEQ ID NO: 1970129 - RNA, 19 nt, Artificial Sequence
  Description of Artificial Sequence: Synthetic oligonucleotide
augugaugacuauaaacug

SEQ ID NO: 1970130 - RNA, 19 nt, Artificial Sequence
  Description of Artificial Sequence: Synthetic oligonucleotide
ucgaaggucauagaguaca

SEQ ID NO: 1970131 - RNA, 19 nt, Artificial Sequence
  Description of Artificial Sequence: Synthetic oligonucleotide
caaucacaccaucugaacc

SEQ ID NO: 1970132 - RNA, 19 nt, Artificial Sequence
  Description of Artificial Sequence: Synthetic oligonucleotide
uuuguaucccacacuuuca

SEQ ID NO: 1970133 - RNA, 19 nt, Artificial Sequence
  Description of Artificial Sequence: Synthetic oligonucleotide
ucauacaaagaugguaccc

SEQ ID NO: 1970134 - RNA, 19 nt, Artificial Sequence
  Description of Artificial Sequence: Synthetic oligonucleotide
acaaaguuguaccuugggu

SEQ ID NO: 1970135 - RNA, 19 nt, Artificial Sequence
  Description of Artificial Sequence: Synthetic oligonucleotide
acagugagcaggugaaguc

SEQ ID NO: 1970136 - RNA, 19 nt, Artificial Sequence
  Description of Artificial Sequence: Synthetic oligonucleotide
uggagaaugugagaacagg

SEQ ID NO: 1970137 - RNA, 19 nt, Artificial Sequence
  Description of Artificial Sequence: Synthetic oligonucleotide
ugucccuuaagcauaguua

SEQ ID NO: 1970138 - RNA, 19 nt, Artificial Sequence
  Description of Artificial Sequence: Synthetic oligonucleotide
cugcaauguauuuguaucc

SEQ ID NO: 1970139 - RNA, 19 nt, Artificial Sequence
  Description of Artificial Sequence: Synthetic oligonucleotide
uaguuaguuguucuccuga

SEQ ID NO: 1970140 - RNA, 19 nt, Artificial Sequence
  Description of Artificial Sequence: Synthetic oligonucleotide
aauggugcuaccauaugga

SEQ ID NO: 1970141 - RNA, 19 nt, Artificial Sequence
  Description of Artificial Sequence: Synthetic oligonucleotide
aggauccagacuucaaauc

SEQ ID NO: 1970142 - RNA, 19 nt, Artificial Sequence
  Description of Artificial Sequence: Synthetic oligonucleotide
ucuggaauugguucauaca

SEQ ID NO: 1970143 - RNA, 19 nt, Artificial Sequence
  Description of Artificial Sequence: Synthetic oligonucleotide
aacauaggccauuaacuuu

SEQ ID NO: 1970144 - RNA, 19 nt, Artificial Sequence
  Description of Artificial Sequence: Synthetic oligonucleotide
uucauacaaagaugguacc

SEQ ID NO: 1970145 - RNA, 19 nt, Artificial Sequence
  Description of Artificial Sequence: Synthetic oligonucleotide
uaugcugaucaagagugag

SEQ ID NO: 1970146 - RNA, 19 nt, Artificial Sequence
  Description of Artificial Sequence: Synthetic oligonucleotide
cauugugagcaguauuugc

SEQ ID NO: 1970147 - RNA, 19 nt, Artificial Sequence
  Description of Artificial Sequence: Synthetic oligonucleotide
agugaacugcauaaacagc

SEQ ID NO: 1970148 - RNA, 19 nt, Artificial Sequence
  Description of Artificial Sequence: Synthetic oligonucleotide
ucugugacccuggagaaug

SEQ ID NO: 1970149 - RNA, 19 nt, Artificial Sequence
  Description of Artificial Sequence: Synthetic oligonucleotide
acuuuuauaaugucccuua

SEQ ID NO: 1970150 - RNA, 19 nt, Artificial Sequence
  Description of Artificial Sequence: Synthetic oligonucleotide
ugucugugccaacagugag

SEQ ID NO: 1970151 - RNA, 19 nt, Artificial Sequence
  Description of Artificial Sequence: Synthetic oligonucleotide
aguccaucacuuguaaaac

SEQ ID NO: 1970152 - RNA, 19 nt, Artificial Sequence
  Description of Artificial Sequence: Synthetic oligonucleotide
aacauguguaauaggguug

SEQ ID NO: 1970153 - RNA, 19 nt, Artificial Sequence
  Description of Artificial Sequence: Synthetic oligonucleotide
aauaggguugucugcugga

SEQ ID NO: 1970154 - RNA, 19 nt, Artificial Sequence
  Description of Artificial Sequence: Synthetic oligonucleotide
uuaguuguagcuucaucau

SEQ ID NO: 1970155 - RNA, 19 nt, Artificial Sequence
  Description of Artificial Sequence: Synthetic oligonucleotide
gaguguuaacuccacugcc

SEQ ID NO: 1970156 - RNA, 19 nt, Artificial Sequence
  Description of Artificial Sequence: Synthetic oligonucleotide
caagauauagucauggcgu

SEQ ID NO: 1970157 - RNA, 19 nt, Artificial Sequence
  Description of Artificial Sequence: Synthetic oligonucleotide
cacugaacagucuccacgc

SEQ ID NO: 1970158 - RNA, 19 nt, Artificial Sequence
  Description of Artificial Sequence: Synthetic oligonucleotide
gaguucucgaaggucauag

SEQ ID NO: 1970159 - RNA, 19 nt, Artificial Sequence
  Description of Artificial Sequence: Synthetic oligonucleotide
ccaagauauagucauggcg

SEQ ID NO: 1970160 - RNA, 19 nt, Artificial Sequence
  Description of Artificial Sequence: Synthetic oligonucleotide
cauuggagcuauuccagag

SEQ ID NO: 1970161 - RNA, 19 nt, Artificial Sequence
  Description of Artificial Sequence: Synthetic oligonucleotide
agucgacacuuuuauaaug

SEQ ID NO: 1970162 - RNA, 19 nt, Artificial Sequence
  Description of Artificial Sequence: Synthetic oligonucleotide
aaacacacagcagucgaca

SEQ ID NO: 1970163 - RNA, 19 nt, Artificial Sequence
  Description of Artificial Sequence: Synthetic oligonucleotide
uugcugauuccacagccug

SEQ ID NO: 1970164 - RNA, 19 nt, Artificial Sequence
  Description of Artificial Sequence: Synthetic oligonucleotide
acuacugcuccaggcaucc

SEQ ID NO: 1970165 - RNA, 19 nt, Artificial Sequence
  Description of Artificial Sequence: Synthetic oligonucleotide
gacugaaacacacagcagu

SEQ ID NO: 1970166 - RNA, 19 nt, Artificial Sequence
  Description of Artificial Sequence: Synthetic oligonucleotide
auuaacuuucccauuguga

SEQ ID NO: 1970167 - RNA, 19 nt, Artificial Sequence
  Description of Artificial Sequence: Synthetic oligonucleotide
ugauuccacagccugugac

SEQ ID NO: 1970168 - RNA, 19 nt, Artificial Sequence
  Description of Artificial Sequence: Synthetic oligonucleotide
auugguucauacaaagaug

SEQ ID NO: 1970169 - RNA, 19 nt, Artificial Sequence
  Description of Artificial Sequence: Synthetic oligonucleotide
ucacucuacugucagcacu

SEQ ID NO: 1970170 - RNA, 19 nt, Artificial Sequence
  Description of Artificial Sequence: Synthetic oligonucleotide
aucaagagugagcaaacau

SEQ ID NO: 1970171 - RNA, 19 nt, Artificial Sequence
  Description of Artificial Sequence: Synthetic oligonucleotide
gcauaaacagcaauggugc

SEQ ID NO: 1970172 - RNA, 19 nt, Artificial Sequence
  Description of Artificial Sequence: Synthetic oligonucleotide
uaacuuucccauugugagc

SEQ ID NO: 1970173 - RNA, 19 nt, Artificial Sequence
  Description of Artificial Sequence: Synthetic oligonucleotide
uccaggcauccucaaaugc

SEQ ID NO: 1970174 - RNA, 19 nt, Artificial Sequence
  Description of Artificial Sequence: Synthetic oligonucleotide
uauuuguggacaucuggau

SEQ ID NO: 1970175 - RNA, 19 nt, Artificial Sequence
  Description of Artificial Sequence: Synthetic oligonucleotide
ugaggguaccacugaacag

SEQ ID NO: 1970176 - RNA, 19 nt, Artificial Sequence
  Description of Artificial Sequence: Synthetic oligonucleotide
ucaucacuacugcuccagg

SEQ ID NO: 1970177 - RNA, 19 nt, Artificial Sequence
  Description of Artificial Sequence: Synthetic oligonucleotide
ucauucgguugucugugcc

SEQ ID NO: 1970178 - RNA, 19 nt, Artificial Sequence
  Description of Artificial Sequence: Synthetic oligonucleotide
guaccaacugcuaucagac

SEQ ID NO: 1970179 - RNA, 19 nt, Artificial Sequence
  Description of Artificial Sequence: Synthetic oligonucleotide
gaacccacccgauaacaug

SEQ ID NO: 1970180 - RNA, 19 nt, Artificial Sequence
  Description of Artificial Sequence: Synthetic oligonucleotide
uuugcugauuccacagccu

SEQ ID NO: 1970181 - RNA, 19 nt, Artificial Sequence
  Description of Artificial Sequence: Synthetic oligonucleotide
cugccaacggaacacacug

SEQ ID NO: 1970182 - RNA, 19 nt, Artificial Sequence
  Description of Artificial Sequence: Synthetic oligonucleotide
aauuagacugaaacacaca

SEQ ID NO: 1970183 - RNA, 19 nt, Artificial Sequence
  Description of Artificial Sequence: Synthetic oligonucleotide
uauagucauggcgugguga

SEQ ID NO: 1970184 - RNA, 19 nt, Artificial Sequence
  Description of Artificial Sequence: Synthetic oligonucleotide
auaguuaguuguucuccug

SEQ ID NO: 1970185 - RNA, 19 nt, Artificial Sequence
  Description of Artificial Sequence: Synthetic oligonucleotide
aaugugagaacaggaucca

SEQ ID NO: 1970186 - RNA, 19 nt, Artificial Sequence
  Description of Artificial Sequence: Synthetic oligonucleotide
ugaaguccaucacuuguaa

SEQ ID NO: 1970187 - RNA, 19 nt, Artificial Sequence
  Description of Artificial Sequence: Synthetic oligonucleotide
uguucuccccauuggagcu

SEQ ID NO: 1970188 - RNA, 19 nt, Artificial Sequence
  Description of Artificial Sequence: Synthetic oligonucleotide
ugcuaucagacagugcuug

SEQ ID NO: 1970189 - RNA, 19 nt, Artificial Sequence
  Description of Artificial Sequence: Synthetic oligonucleotide
uuucagaguuuuaucgaau

SEQ ID NO: 1970190 - RNA, 19 nt, Artificial Sequence
  Description of Artificial Sequence: Synthetic oligonucleotide
uauuacagucccugcuacc

SEQ ID NO: 1970191 - RNA, 19 nt, Artificial Sequence
  Description of Artificial Sequence: Synthetic oligonucleotide
cacaaaguuguaccuuggg

SEQ ID NO: 1970192 - RNA, 19 nt, Artificial Sequence
  Description of Artificial Sequence: Synthetic oligonucleotide
uggugcuaccauauggaac

SEQ ID NO: 1970193 - RNA, 19 nt, Artificial Sequence
  Description of Artificial Sequence: Synthetic oligonucleotide
caucacuacugcuccaggc

SEQ ID NO: 1970194 - RNA, 19 nt, Artificial Sequence
  Description of Artificial Sequence: Synthetic oligonucleotide
auaggccauuaacuuuccc

SEQ ID NO: 1970195 - RNA, 19 nt, Artificial Sequence
  Description of Artificial Sequence: Synthetic oligonucleotide
accaucugaacccacccga

SEQ ID NO: 1970196 - RNA, 19 nt, Artificial Sequence
  Description of Artificial Sequence: Synthetic oligonucleotide
gaauauuacagucccugcu

SEQ ID NO: 1970197 - RNA, 19 nt, Artificial Sequence
  Description of Artificial Sequence: Synthetic oligonucleotide
guugccaagauauagucau

SEQ ID NO: 1970198 - RNA, 19 nt, Artificial Sequence
  Description of Artificial Sequence: Synthetic oligonucleotide
aucugaacccacccgauaa

SEQ ID NO: 1970199 - RNA, 19 nt, Artificial Sequence
  Description of Artificial Sequence: Synthetic oligonucleotide
gcuuuaacauguguaauag

SEQ ID NO: 1970200 - RNA, 19 nt, Artificial Sequence
  Description of Artificial Sequence: Synthetic oligonucleotide
uuuuaucgaaugagcugga

SEQ ID NO: 1970201 - RNA, 19 nt, Artificial Sequence
  Description of Artificial Sequence: Synthetic oligonucleotide
aaacagcaauggugcuacc

SEQ ID NO: 1970202 - RNA, 19 nt, Artificial Sequence
  Description of Artificial Sequence: Synthetic oligonucleotide
ugugucaugaggguaccac

SEQ ID NO: 1970203 - RNA, 19 nt, Artificial Sequence
  Description of Artificial Sequence: Synthetic oligonucleotide
ucccauuaugcugaucaag

SEQ ID NO: 1970204 - RNA, 19 nt, Artificial Sequence
  Description of Artificial Sequence: Synthetic oligonucleotide
ucugccaacggaacacacu

SEQ ID NO: 1970205 - RNA, 19 nt, Artificial Sequence
  Description of Artificial Sequence: Synthetic oligonucleotide
cauuaacuuucccauugug

SEQ ID NO: 1970206 - RNA, 19 nt, Artificial Sequence
  Description of Artificial Sequence: Synthetic oligonucleotide
ucccauaaauucacucuac

SEQ ID NO: 1970207 - RNA, 19 nt, Artificial Sequence
  Description of Artificial Sequence: Synthetic oligonucleotide
cuccacgcuguauuugugg

SEQ ID NO: 1970208 - RNA, 19 nt, Artificial Sequence
  Description of Artificial Sequence: Synthetic oligonucleotide
agauauagucauggcgugg

SEQ ID NO: 1970209 - RNA, 19 nt, Artificial Sequence
  Description of Artificial Sequence: Synthetic oligonucleotide
uaagcauaguuaguuguuc

SEQ ID NO: 1970210 - RNA, 19 nt, Artificial Sequence
  Description of Artificial Sequence: Synthetic oligonucleotide
acccaagcaagaauauuac

SEQ ID NO: 1970211 - RNA, 19 nt, Artificial Sequence
  Description of Artificial Sequence: Synthetic oligonucleotide
ugugacuucuucccauuau

SEQ ID NO: 1970212 - RNA, 19 nt, Artificial Sequence
  Description of Artificial Sequence: Synthetic oligonucleotide
aggucauagaguacaauca

SEQ ID NO: 1970213 - RNA, 19 nt, Artificial Sequence
  Description of Artificial Sequence: Synthetic oligonucleotide
uaguuguagcuucaucauc

SEQ ID NO: 1970214 - RNA, 19 nt, Artificial Sequence
  Description of Artificial Sequence: Synthetic oligonucleotide
guguaauaggguugucugc

SEQ ID NO: 1970215 - RNA, 19 nt, Artificial Sequence
  Description of Artificial Sequence: Synthetic oligonucleotide
ggauccagacuucaaauca

SEQ ID NO: 1970216 - RNA, 19 nt, Artificial Sequence
  Description of Artificial Sequence: Synthetic oligonucleotide
uccacgcuguauuugugga

SEQ ID NO: 1970217 - RNA, 19 nt, Artificial Sequence
  Description of Artificial Sequence: Synthetic oligonucleotide
aucccauaaauucacucua

SEQ ID NO: 1970218 - RNA, 19 nt, Artificial Sequence
  Description of Artificial Sequence: Synthetic oligonucleotide
cugaaacacacagcagucg

SEQ ID NO: 1970219 - RNA, 19 nt, Artificial Sequence
  Description of Artificial Sequence: Synthetic oligonucleotide
gacuauaaacuguuucuua

SEQ ID NO: 1970220 - RNA, 19 nt, Artificial Sequence
  Description of Artificial Sequence: Synthetic oligonucleotide
gaacaugccugugucauga

SEQ ID NO: 1970221 - RNA, 19 nt, Artificial Sequence
  Description of Artificial Sequence: Synthetic oligonucleotide
guauuuguggacaucugga

SEQ ID NO: 1970222 - RNA, 19 nt, Artificial Sequence
  Description of Artificial Sequence: Synthetic oligonucleotide
uccagacuucaaaucacaa

SEQ ID NO: 1970223 - RNA, 19 nt, Artificial Sequence
  Description of Artificial Sequence: Synthetic oligonucleotide
guacaaucacaccaucuga

SEQ ID NO: 1970224 - RNA, 19 nt, Artificial Sequence
  Description of Artificial Sequence: Synthetic oligonucleotide
cacaccaucugaacccacc

SEQ ID NO: 1970225 - RNA, 19 nt, Artificial Sequence
  Description of Artificial Sequence: Synthetic oligonucleotide
uuucccauugugagcagua

SEQ ID NO: 1970226 - RNA, 19 nt, Artificial Sequence
  Description of Artificial Sequence: Synthetic oligonucleotide
ucugaacccacccgauaac

SEQ ID NO: 1970227 - RNA, 19 nt, Artificial Sequence
  Description of Artificial Sequence: Synthetic oligonucleotide
gauaacauguaucuuccuu

SEQ ID NO: 1970228 - RNA, 19 nt, Artificial Sequence
  Description of Artificial Sequence: Synthetic oligonucleotide
cauacaaagaugguaccca

SEQ ID NO: 1970229 - RNA, 19 nt, Artificial Sequence
  Description of Artificial Sequence: Synthetic oligonucleotide
acauguguaauaggguugu

SEQ ID NO: 1970230 - RNA, 19 nt, Artificial Sequence
  Description of Artificial Sequence: Synthetic oligonucleotide
caugaggguaccacugaac

SEQ ID NO: 1970231 - RNA, 19 nt, Artificial Sequence
  Description of Artificial Sequence: Synthetic oligonucleotide
gcagucgacacuuuuauaa

SEQ ID NO: 1970232 - RNA, 19 nt, Artificial Sequence
  Description of Artificial Sequence: Synthetic oligonucleotide
aacugggauuuaguuguag

SEQ ID NO: 1970233 - RNA, 19 nt, Artificial Sequence
  Description of Artificial Sequence: Synthetic oligonucleotide
cuuucagaguuuuaucgaa

SEQ ID NO: 1970234 - RNA, 19 nt, Artificial Sequence
  Description of Artificial Sequence: Synthetic oligonucleotide
gguaccacugaacagucuc

SEQ ID NO: 1970235 - RNA, 19 nt, Artificial Sequence
  Description of Artificial Sequence: Synthetic oligonucleotide
gauccagacuucaaaucac

SEQ ID NO: 1970236 - RNA, 19 nt, Artificial Sequence
  Description of Artificial Sequence: Synthetic oligonucleotide
auacaaagaugguacccaa

SEQ ID NO: 1970237 - RNA, 19 nt, Artificial Sequence
  Description of Artificial Sequence: Synthetic oligonucleotide
ugacuauaaacuguuucuu

SEQ ID NO: 1970238 - RNA, 19 nt, Artificial Sequence
  Description of Artificial Sequence: Synthetic oligonucleotide
ucgaaugagcuggauguga

SEQ ID NO: 1970239 - RNA, 19 nt, Artificial Sequence
  Description of Artificial Sequence: Synthetic oligonucleotide
ucacuacugcuccaggcau

SEQ ID NO: 1970240 - RNA, 19 nt, Artificial Sequence
  Description of Artificial Sequence: Synthetic oligonucleotide
ccauaaauucacucuacug

SEQ ID NO: 1970241 - RNA, 19 nt, Artificial Sequence
  Description of Artificial Sequence: Synthetic oligonucleotide
cuguuucuuacaaaauuaa

SEQ ID NO: 1970242 - RNA, 19 nt, Artificial Sequence
  Description of Artificial Sequence: Synthetic oligonucleotide
guauuuguaucccacacuu

SEQ ID NO: 1970243 - RNA, 19 nt, Artificial Sequence
  Description of Artificial Sequence: Synthetic oligonucleotide
caagcaagaauauuacagu

SEQ ID NO: 1970244 - RNA, 19 nt, Artificial Sequence
  Description of Artificial Sequence: Synthetic oligonucleotide
agacaugugaugacuauaa

SEQ ID NO: 1970245 - RNA, 19 nt, Artificial Sequence
  Description of Artificial Sequence: Synthetic oligonucleotide
uggauggcuucugccaacg

SEQ ID NO: 1970246 - RNA, 19 nt, Artificial Sequence
  Description of Artificial Sequence: Synthetic oligonucleotide
ugaacccacccgauaacau

SEQ ID NO: 1970247 - RNA, 19 nt, Artificial Sequence
  Description of Artificial Sequence: Synthetic oligonucleotide
cuuuccuacugucauuaca

SEQ ID NO: 1970248 - RNA, 19 nt, Artificial Sequence
  Description of Artificial Sequence: Synthetic oligonucleotide
uacagucccugcuaccacu

SEQ ID NO: 1970249 - RNA, 19 nt, Artificial Sequence
  Description of Artificial Sequence: Synthetic oligonucleotide
ccgauaacauguaucuucc

SEQ ID NO: 1970250 - RNA, 19 nt, Artificial Sequence
  Description of Artificial Sequence: Synthetic oligonucleotide
ugucugugacccuggagaa

SEQ ID NO: 1970251 - RNA, 19 nt, Artificial Sequence
  Description of Artificial Sequence: Synthetic oligonucleotide
acuuucccauaguucacca

SEQ ID NO: 1970252 - RNA, 19 nt, Artificial Sequence
  Description of Artificial Sequence: Synthetic oligonucleotide
cuucaacaggcucaauguc

SEQ ID NO: 1970253 - RNA, 19 nt, Artificial Sequence
  Description of Artificial Sequence: Synthetic oligonucleotide
cccgauaacauguaucuuc

SEQ ID NO: 1970254 - RNA, 19 nt, Artificial Sequence
  Description of Artificial Sequence: Synthetic oligonucleotide
uguaaaguuccuggaaauu

SEQ ID NO: 1970255 - RNA, 19 nt, Artificial Sequence
  Description of Artificial Sequence: Synthetic oligonucleotide
ucgacacuuuuauaauguc

SEQ ID NO: 1970256 - RNA, 19 nt, Artificial Sequence
  Description of Artificial Sequence: Synthetic oligonucleotide
aacggaacacacugcuuua

SEQ ID NO: 1970257 - RNA, 19 nt, Artificial Sequence
  Description of Artificial Sequence: Synthetic oligonucleotide
uucaguccuuuccuacugu

SEQ ID NO: 1970258 - RNA, 19 nt, Artificial Sequence
  Description of Artificial Sequence: Synthetic oligonucleotide
ugaacaugccugugucaug

SEQ ID NO: 1970259 - RNA, 19 nt, Artificial Sequence
  Description of Artificial Sequence: Synthetic oligonucleotide
gggauuuaguuguagcuuc

SEQ ID NO: 1970260 - RNA, 19 nt, Artificial Sequence
  Description of Artificial Sequence: Synthetic oligonucleotide
ugggauuuaguuguagcuu

SEQ ID NO: 1970261 - RNA, 19 nt, Artificial Sequence
  Description of Artificial Sequence: Synthetic oligonucleotide
ugcuaccacuguaaaguuc

SEQ ID NO: 1970262 - RNA, 19 nt, Artificial Sequence
  Description of Artificial Sequence: Synthetic oligonucleotide
agucauggcguggugacca

SEQ ID NO: 1970263 - RNA, 19 nt, Artificial Sequence
  Description of Artificial Sequence: Synthetic oligonucleotide
gacuucaaaucacaaaguu

SEQ ID NO: 1970264 - RNA, 19 nt, Artificial Sequence
  Description of Artificial Sequence: Synthetic oligonucleotide
cagugagcaggugaagucc

SEQ ID NO: 1970265 - RNA, 19 nt, Artificial Sequence
  Description of Artificial Sequence: Synthetic oligonucleotide
cugaucaagagugagcaaa

SEQ ID NO: 1970266 - RNA, 19 nt, Artificial Sequence
  Description of Artificial Sequence: Synthetic oligonucleotide
uccuuuccuacugucauua

SEQ ID NO: 1970267 - RNA, 19 nt, Artificial Sequence
  Description of Artificial Sequence: Synthetic oligonucleotide
uuacagucccugcuaccac

SEQ ID NO: 1970268 - RNA, 19 nt, Artificial Sequence
  Description of Artificial Sequence: Synthetic oligonucleotide
guaauaggguugucugcug

SEQ ID NO: 1970269 - RNA, 19 nt, Artificial Sequence
  Description of Artificial Sequence: Synthetic oligonucleotide
ucaguccuuuccuacuguc

SEQ ID NO: 1970270 - RNA, 19 nt, Artificial Sequence
  Description of Artificial Sequence: Synthetic oligonucleotide
gauuccacagccugugacu

SEQ ID NO: 1970271 - RNA, 19 nt, Artificial Sequence
  Description of Artificial Sequence: Synthetic oligonucleotide
aaacaaauucugagcugca

SEQ ID NO: 1970272 - RNA, 19 nt, Artificial Sequence
  Description of Artificial Sequence: Synthetic oligonucleotide
gacaaggagcaagggcugg

SEQ ID NO: 1970273 - RNA, 19 nt, Artificial Sequence
  Description of Artificial Sequence: Synthetic oligonucleotide
gauauagucauggcguggu

SEQ ID NO: 1970274 - RNA, 19 nt, Artificial Sequence
  Description of Artificial Sequence: Synthetic oligonucleotide
gaaacacacagcagucgac

SEQ ID NO: 1970275 - RNA, 19 nt, Artificial Sequence
  Description of Artificial Sequence: Synthetic oligonucleotide
ucccuuaagcauaguuagu

SEQ ID NO: 1970276 - RNA, 19 nt, Artificial Sequence
  Description of Artificial Sequence: Synthetic oligonucleotide
cauaggccauuaacuuucc

SEQ ID NO: 1970277 - RNA, 19 nt, Artificial Sequence
  Description of Artificial Sequence: Synthetic oligonucleotide
uggcagucacccuuccuca

SEQ ID NO: 1970278 - RNA, 19 nt, Artificial Sequence
  Description of Artificial Sequence: Synthetic oligonucleotide
ucccauaguucaccagugu

SEQ ID NO: 1970279 - RNA, 19 nt, Artificial Sequence
  Description of Artificial Sequence: Synthetic oligonucleotide
ggaacacacugcuuuaaca

SEQ ID NO: 1970280 - RNA, 19 nt, Artificial Sequence
  Description of Artificial Sequence: Synthetic oligonucleotide
aggguugucugcuggaguu

SEQ ID NO: 1970281 - RNA, 19 nt, Artificial Sequence
  Description of Artificial Sequence: Synthetic oligonucleotide
auaggguugucugcuggag

SEQ ID NO: 1970282 - RNA, 19 nt, Artificial Sequence
  Description of Artificial Sequence: Synthetic oligonucleotide
ucgguugucugugccaaca

SEQ ID NO: 1970283 - RNA, 19 nt, Artificial Sequence
  Description of Artificial Sequence: Synthetic oligonucleotide
caccaucugaacccacccg

SEQ ID NO: 1970284 - RNA, 19 nt, Artificial Sequence
  Description of Artificial Sequence: Synthetic oligonucleotide
auauagucauggcguggug

SEQ ID NO: 1970285 - RNA, 19 nt, Artificial Sequence
  Description of Artificial Sequence: Synthetic oligonucleotide
uggugaccacgaaacugcc

SEQ ID NO: 1970286 - RNA, 19 nt, Artificial Sequence
  Description of Artificial Sequence: Synthetic oligonucleotide
agacuucaaaucacaaagu

SEQ ID NO: 1970287 - RNA, 19 nt, Artificial Sequence
  Description of Artificial Sequence: Synthetic oligonucleotide
cauuaugcugaucaagagu

SEQ ID NO: 1970288 - RNA, 19 nt, Artificial Sequence
  Description of Artificial Sequence: Synthetic oligonucleotide
caucccauaaauucacucu

SEQ ID NO: 1970289 - RNA, 19 nt, Artificial Sequence
  Description of Artificial Sequence: Synthetic oligonucleotide
agaacaggauccagacuuc

SEQ ID NO: 1970290 - RNA, 19 nt, Artificial Sequence
  Description of Artificial Sequence: Synthetic oligonucleotide
gaggguaccacugaacagu

SEQ ID NO: 1970291 - RNA, 19 nt, Artificial Sequence
  Description of Artificial Sequence: Synthetic oligonucleotide
uucacucuacugucagcac

SEQ ID NO: 1970292 - RNA, 19 nt, Artificial Sequence
  Description of Artificial Sequence: Synthetic oligonucleotide
caagggcuggcagucaccc

SEQ ID NO: 1970293 - RNA, 19 nt, Artificial Sequence
  Description of Artificial Sequence: Synthetic oligonucleotide
guccaucacuuguaaaaca

SEQ ID NO: 1970294 - RNA, 19 nt, Artificial Sequence
  Description of Artificial Sequence: Synthetic oligonucleotide
caguauuucuugucuguga

SEQ ID NO: 1970295 - RNA, 19 nt, Artificial Sequence
  Description of Artificial Sequence: Synthetic oligonucleotide
ggcuguugccaagauauag

SEQ ID NO: 1970296 - RNA, 19 nt, Artificial Sequence
  Description of Artificial Sequence: Synthetic oligonucleotide
aagagugagcaaacauccu

SEQ ID NO: 1970297 - RNA, 19 nt, Artificial Sequence
  Description of Artificial Sequence: Synthetic oligonucleotide
aguucucgaaggucauaga

SEQ ID NO: 1970298 - RNA, 19 nt, Artificial Sequence
  Description of Artificial Sequence: Synthetic oligonucleotide
cgacacuuuuauaaugucc

SEQ ID NO: 1970299 - RNA, 19 nt, Artificial Sequence
  Description of Artificial Sequence: Synthetic oligonucleotide
cuccaggcauccucaaaug

SEQ ID NO: 1970300 - RNA, 19 nt, Artificial Sequence
  Description of Artificial Sequence: Synthetic oligonucleotide
auuucuugucugugacccu

SEQ ID NO: 1970301 - RNA, 19 nt, Artificial Sequence
  Description of Artificial Sequence: Synthetic oligonucleotide
cacccgauaacauguaucu

SEQ ID NO: 1970302 - RNA, 19 nt, Artificial Sequence
  Description of Artificial Sequence: Synthetic oligonucleotide
ccauuaugcugaucaagag

SEQ ID NO: 1970303 - RNA, 19 nt, Artificial Sequence
  Description of Artificial Sequence: Synthetic oligonucleotide
uaacuccacugccauggau

SEQ ID NO: 1970304 - RNA, 19 nt, Artificial Sequence
  Description of Artificial Sequence: Synthetic oligonucleotide
caacugcuaucagacagug

SEQ ID NO: 1970305 - RNA, 19 nt, Artificial Sequence
  Description of Artificial Sequence: Synthetic oligonucleotide
ccuuaagcauaguuaguug

SEQ ID NO: 1970306 - RNA, 19 nt, Artificial Sequence
  Description of Artificial Sequence: Synthetic oligonucleotide
aaguuguaccuuggguccu

SEQ ID NO: 1970307 - RNA, 19 nt, Artificial Sequence
  Description of Artificial Sequence: Synthetic oligonucleotide
uggagcuauuccagagccu

SEQ ID NO: 1970308 - RNA, 19 nt, Artificial Sequence
  Description of Artificial Sequence: Synthetic oligonucleotide
gcuaucagacagugcuugg

SEQ ID NO: 1970309 - RNA, 19 nt, Artificial Sequence
  Description of Artificial Sequence: Synthetic oligonucleotide
cuuuuauaaugucccuuaa

SEQ ID NO: 1970310 - RNA, 19 nt, Artificial Sequence
  Description of Artificial Sequence: Synthetic oligonucleotide
cugggauuuaguuguagcu

SEQ ID NO: 1970311 - RNA, 19 nt, Artificial Sequence
  Description of Artificial Sequence: Synthetic oligonucleotide
guaccacugaacagucucc

SEQ ID NO: 1970312 - RNA, 19 nt, Artificial Sequence
  Description of Artificial Sequence: Synthetic oligonucleotide
cucuacugucagcacuggc

SEQ ID NO: 1970313 - RNA, 19 nt, Artificial Sequence
  Description of Artificial Sequence: Synthetic oligonucleotide
uuuaucgaaugagcuggau

SEQ ID NO: 1970314 - RNA, 19 nt, Artificial Sequence
  Description of Artificial Sequence: Synthetic oligonucleotide
ggagaaugugagaacagga

SEQ ID NO: 1970315 - RNA, 19 nt, Artificial Sequence
  Description of Artificial Sequence: Synthetic oligonucleotide
uaccaacugcuaucagaca

SEQ ID NO: 1970316 - RNA, 19 nt, Artificial Sequence
  Description of Artificial Sequence: Synthetic oligonucleotide
ucauggcguggugaccacg

SEQ ID NO: 1970317 - RNA, 19 nt, Artificial Sequence
  Description of Artificial Sequence: Synthetic oligonucleotide
ugugacccuggagaaugug

SEQ ID NO: 1970318 - RNA, 19 nt, Artificial Sequence
  Description of Artificial Sequence: Synthetic oligonucleotide
cccauuaugcugaucaaga

SEQ ID NO: 1970319 - RNA, 19 nt, Artificial Sequence
  Description of Artificial Sequence: Synthetic oligonucleotide
cuucucacaucccauaaau

SEQ ID NO: 1970320 - RNA, 19 nt, Artificial Sequence
  Description of Artificial Sequence: Synthetic oligonucleotide
ggagcuauuccagagccuc

SEQ ID NO: 1970321 - RNA, 19 nt, Artificial Sequence
  Description of Artificial Sequence: Synthetic oligonucleotide
gguucauacaaagauggua

SEQ ID NO: 1970322 - RNA, 19 nt, Artificial Sequence
  Description of Artificial Sequence: Synthetic oligonucleotide
cucgaaggucauagaguac

SEQ ID NO: 1970323 - RNA, 19 nt, Artificial Sequence
  Description of Artificial Sequence: Synthetic oligonucleotide
ucaucuggaauugguucau

SEQ ID NO: 1970324 - RNA, 19 nt, Artificial Sequence
  Description of Artificial Sequence: Synthetic oligonucleotide
aguuguaccuuggguccuc

SEQ ID NO: 1970325 - RNA, 19 nt, Artificial Sequence
  Description of Artificial Sequence: Synthetic oligonucleotide
uggcguggugaccacgaaa

SEQ ID NO: 1970326 - RNA, 19 nt, Artificial Sequence
  Description of Artificial Sequence: Synthetic oligonucleotide
cacccuuccucaucacuac

SEQ ID NO: 1970327 - RNA, 19 nt, Artificial Sequence
  Description of Artificial Sequence: Synthetic oligonucleotide
cacgcuguauuuguggaca

SEQ ID NO: 1970328 - RNA, 19 nt, Artificial Sequence
  Description of Artificial Sequence: Synthetic oligonucleotide
gcuaccauauggaacaaaa

SEQ ID NO: 1970329 - RNA, 19 nt, Artificial Sequence
  Description of Artificial Sequence: Synthetic oligonucleotide
gucgacacuuuuauaaugu

SEQ ID NO: 1970330 - RNA, 19 nt, Artificial Sequence
  Description of Artificial Sequence: Synthetic oligonucleotide
cauucgguugucugugcca

SEQ ID NO: 1970331 - RNA, 19 nt, Artificial Sequence
  Description of Artificial Sequence: Synthetic oligonucleotide
auucgguugucugugccaa

SEQ ID NO: 1970332 - RNA, 19 nt, Artificial Sequence
  Description of Artificial Sequence: Synthetic oligonucleotide
gccauggauucuuucaaca

SEQ ID NO: 1970333 - RNA, 19 nt, Artificial Sequence
  Description of Artificial Sequence: Synthetic oligonucleotide
auccagacuucaaaucaca

SEQ ID NO: 1970334 - RNA, 19 nt, Artificial Sequence
  Description of Artificial Sequence: Synthetic oligonucleotide
cauggcguggugaccacga

SEQ ID NO: 1970335 - RNA, 19 nt, Artificial Sequence
  Description of Artificial Sequence: Synthetic oligonucleotide
aucagcagccugcaaugua

SEQ ID NO: 1970336 - RNA, 19 nt, Artificial Sequence
  Description of Artificial Sequence: Synthetic oligonucleotide
gaguacaaucacaccaucu

SEQ ID NO: 1970337 - RNA, 19 nt, Artificial Sequence
  Description of Artificial Sequence: Synthetic oligonucleotide
gagacaugugaugacuaua

SEQ ID NO: 1970338 - RNA, 19 nt, Artificial Sequence
  Description of Artificial Sequence: Synthetic oligonucleotide
accacgaaacugccaguau

SEQ ID NO: 1970339 - RNA, 19 nt, Artificial Sequence
  Description of Artificial Sequence: Synthetic oligonucleotide
acugcuccaggcauccuca

SEQ ID NO: 1970340 - RNA, 19 nt, Artificial Sequence
  Description of Artificial Sequence: Synthetic oligonucleotide
ugagcaggugaaguccauc

SEQ ID NO: 1970341 - RNA, 19 nt, Artificial Sequence
  Description of Artificial Sequence: Synthetic oligonucleotide
gcaauguauuuguauccca

SEQ ID NO: 1970342 - RNA, 19 nt, Artificial Sequence
  Description of Artificial Sequence: Synthetic oligonucleotide
ucccugcuaccacuguaaa

SEQ ID NO: 1970343 - RNA, 19 nt, Artificial Sequence
  Description of Artificial Sequence: Synthetic oligonucleotide
cagucacccuuccucauca

SEQ ID NO: 1970344 - RNA, 19 nt, Artificial Sequence
  Description of Artificial Sequence: Synthetic oligonucleotide
agucccugcuaccacugua

SEQ ID NO: 1970345 - RNA, 19 nt, Artificial Sequence
  Description of Artificial Sequence: Synthetic oligonucleotide
agagccucauucgguuguc

SEQ ID NO: 1970346 - RNA, 19 nt, Artificial Sequence
  Description of Artificial Sequence: Synthetic oligonucleotide
agacagugcuugguggcug

SEQ ID NO: 1970347 - RNA, 19 nt, Artificial Sequence
  Description of Artificial Sequence: Synthetic oligonucleotide
cacuacugcuccaggcauc

SEQ ID NO: 1970348 - RNA, 19 nt, Artificial Sequence
  Description of Artificial Sequence: Synthetic oligonucleotide
agcuauuccagagccucau

SEQ ID NO: 1970349 - RNA, 19 nt, Artificial Sequence
  Description of Artificial Sequence: Synthetic oligonucleotide
acagcagucgacacuuuua

SEQ ID NO: 1970350 - RNA, 19 nt, Artificial Sequence
  Description of Artificial Sequence: Synthetic oligonucleotide
gaccacgaaacugccagua

SEQ ID NO: 1970351 - RNA, 19 nt, Artificial Sequence
  Description of Artificial Sequence: Synthetic oligonucleotide
ccacccgauaacauguauc

SEQ ID NO: 1970352 - RNA, 19 nt, Artificial Sequence
  Description of Artificial Sequence: Synthetic oligonucleotide
agcagucgacacuuuuaua

SEQ ID NO: 1970353 - RNA, 19 nt, Artificial Sequence
  Description of Artificial Sequence: Synthetic oligonucleotide
gcuguauuuguggacaucu

SEQ ID NO: 1970354 - RNA, 19 nt, Artificial Sequence
  Description of Artificial Sequence: Synthetic oligonucleotide
aaugucccuuaagcauagu

SEQ ID NO: 1970355 - RNA, 19 nt, Artificial Sequence
  Description of Artificial Sequence: Synthetic oligonucleotide
uucccauugugagcaguau

SEQ ID NO: 1970356 - RNA, 19 nt, Artificial Sequence
  Description of Artificial Sequence: Synthetic oligonucleotide
gcuggagacaugugaugac

SEQ ID NO: 1970357 - RNA, 19 nt, Artificial Sequence
  Description of Artificial Sequence: Synthetic oligonucleotide
uucgguugucugugccaac

SEQ ID NO: 1970358 - RNA, 19 nt, Artificial Sequence
  Description of Artificial Sequence: Synthetic oligonucleotide
cacgaaacugccaguauuu

SEQ ID NO: 1970359 - RNA, 19 nt, Artificial Sequence
  Description of Artificial Sequence: Synthetic oligonucleotide
aggagaccgugaauuucag

SEQ ID NO: 1970360 - RNA, 19 nt, Artificial Sequence
  Description of Artificial Sequence: Synthetic oligonucleotide
ccaacagugagcaggugaa

SEQ ID NO: 1970361 - RNA, 19 nt, Artificial Sequence
  Description of Artificial Sequence: Synthetic oligonucleotide
ugcagccacaggagaccgu

SEQ ID NO: 1970362 - RNA, 19 nt, Artificial Sequence
  Description of Artificial Sequence: Synthetic oligonucleotide
acgcuguauuuguggacau

SEQ ID NO: 1970363 - RNA, 19 nt, Artificial Sequence
  Description of Artificial Sequence: Synthetic oligonucleotide
caagaauauuacagucccu

SEQ ID NO: 1970364 - RNA, 19 nt, Artificial Sequence
  Description of Artificial Sequence: Synthetic oligonucleotide
ccagacuucaaaucacaaa

SEQ ID NO: 1970365 - RNA, 19 nt, Artificial Sequence
  Description of Artificial Sequence: Synthetic oligonucleotide
ugccugugucaugagggua

SEQ ID NO: 1970366 - RNA, 19 nt, Artificial Sequence
  Description of Artificial Sequence: Synthetic oligonucleotide
ccccauuggagcuauucca

SEQ ID NO: 1970367 - RNA, 19 nt, Artificial Sequence
  Description of Artificial Sequence: Synthetic oligonucleotide
gcuggauucaacugggauu

SEQ ID NO: 1970368 - RNA, 19 nt, Artificial Sequence
  Description of Artificial Sequence: Synthetic oligonucleotide
ccucauucgguugucugug

SEQ ID NO: 1970369 - RNA, 19 nt, Artificial Sequence
  Description of Artificial Sequence: Synthetic oligonucleotide
gcaggugaaguccaucacu

SEQ ID NO: 1970370 - RNA, 19 nt, Artificial Sequence
  Description of Artificial Sequence: Synthetic oligonucleotide
ggcauccucaaaugcugga

SEQ ID NO: 1970371 - RNA, 19 nt, Artificial Sequence
  Description of Artificial Sequence: Synthetic oligonucleotide
cccugcuaccacuguaaag

SEQ ID NO: 1970372 - RNA, 19 nt, Artificial Sequence
  Description of Artificial Sequence: Synthetic oligonucleotide
gagcuauuccagagccuca

SEQ ID NO: 1970373 - RNA, 19 nt, Artificial Sequence
  Description of Artificial Sequence: Synthetic oligonucleotide
ccauugugagcaguauuug

SEQ ID NO: 1970374 - RNA, 19 nt, Artificial Sequence
  Description of Artificial Sequence: Synthetic oligonucleotide
gucccugcuaccacuguaa

SEQ ID NO: 1970375 - RNA, 19 nt, Artificial Sequence
  Description of Artificial Sequence: Synthetic oligonucleotide
cauaguucaccaguguguu

SEQ ID NO: 1970376 - RNA, 19 nt, Artificial Sequence
  Description of Artificial Sequence: Synthetic oligonucleotide
ccauaguucaccagugugu

SEQ ID NO: 1970377 - RNA, 19 nt, Artificial Sequence
  Description of Artificial Sequence: Synthetic oligonucleotide
cuucugccaacggaacaca

SEQ ID NO: 1970378 - RNA, 19 nt, Artificial Sequence
  Description of Artificial Sequence: Synthetic oligonucleotide
cguggugaccacgaaacug

SEQ ID NO: 1970379 - RNA, 19 nt, Artificial Sequence
  Description of Artificial Sequence: Synthetic oligonucleotide
cuaucagacagugcuuggu

SEQ ID NO: 1970380 - RNA, 19 nt, Artificial Sequence
  Description of Artificial Sequence: Synthetic oligonucleotide
gccaacggaacacacugcu

SEQ ID NO: 1970381 - RNA, 19 nt, Artificial Sequence
  Description of Artificial Sequence: Synthetic oligonucleotide
cuggagacaugugaugacu

SEQ ID NO: 1970382 - RNA, 19 nt, Artificial Sequence
  Description of Artificial Sequence: Synthetic oligonucleotide
cagucgacacuuuuauaau

SEQ ID NO: 1970383 - RNA, 19 nt, Artificial Sequence
  Description of Artificial Sequence: Synthetic oligonucleotide
gaaggucauagaguacaau

SEQ ID NO: 1970384 - RNA, 19 nt, Artificial Sequence
  Description of Artificial Sequence: Synthetic oligonucleotide
ucuucccauuaugcugauc

SEQ ID NO: 1970385 - RNA, 19 nt, Artificial Sequence
  Description of Artificial Sequence: Synthetic oligonucleotide
caagaguguuaacuccacu

SEQ ID NO: 1970386 - RNA, 19 nt, Artificial Sequence
  Description of Artificial Sequence: Synthetic oligonucleotide
cccaagcaagaauauuaca

SEQ ID NO: 1970387 - RNA, 19 nt, Artificial Sequence
  Description of Artificial Sequence: Synthetic oligonucleotide
gucauggcguggugaccac

SEQ ID NO: 1970388 - RNA, 19 nt, Artificial Sequence
  Description of Artificial Sequence: Synthetic oligonucleotide
caucugaacccacccgaua

SEQ ID NO: 1970389 - RNA, 19 nt, Artificial Sequence
  Description of Artificial Sequence: Synthetic oligonucleotide
cagcagucgacacuuuuau

SEQ ID NO: 1970390 - RNA, 19 nt, Artificial Sequence
  Description of Artificial Sequence: Synthetic oligonucleotide
cugucagcacuggcuguug

SEQ ID NO: 1970391 - RNA, 19 nt, Artificial Sequence
  Description of Artificial Sequence: Synthetic oligonucleotide
gaacagucuccacgcugua

SEQ ID NO: 1970392 - RNA, 19 nt, Artificial Sequence
  Description of Artificial Sequence: Synthetic oligonucleotide
cugugccaacagugagcag

SEQ ID NO: 1970393 - RNA, 19 nt, Artificial Sequence
  Description of Artificial Sequence: Synthetic oligonucleotide
cagagccucauucgguugu

SEQ ID NO: 1970394 - RNA, 19 nt, Artificial Sequence
  Description of Artificial Sequence: Synthetic oligonucleotide
ggagacaugugaugacuau

SEQ ID NO: 1970395 - RNA, 19 nt, Artificial Sequence
  Description of Artificial Sequence: Synthetic oligonucleotide
acccgauaacauguaucuu

SEQ ID NO: 1970396 - RNA, 19 nt, Artificial Sequence
  Description of Artificial Sequence: Synthetic oligonucleotide
cccauugugagcaguauuu

SEQ ID NO: 1970397 - RNA, 19 nt, Artificial Sequence
  Description of Artificial Sequence: Synthetic oligonucleotide
gccugcaauguauuuguau

SEQ ID NO: 1970398 - RNA, 19 nt, Artificial Sequence
  Description of Artificial Sequence: Synthetic oligonucleotide
cggaacacacugcuuuaac

SEQ ID NO: 1970399 - RNA, 19 nt, Artificial Sequence
  Description of Artificial Sequence: Synthetic oligonucleotide
ggcucaaugucaagagugu

SEQ ID NO: 1970400 - RNA, 19 nt, Artificial Sequence
  Description of Artificial Sequence: Synthetic oligonucleotide
gcugaucaagagugagcaa

SEQ ID NO: 1970401 - RNA, 19 nt, Artificial Sequence
  Description of Artificial Sequence: Synthetic oligonucleotide
guacccaagcaagaauauu

SEQ ID NO: 1970402 - RNA, 19 nt, Artificial Sequence
  Description of Artificial Sequence: Synthetic oligonucleotide
ggguccucuaguaccaacu

SEQ ID NO: 1970403 - RNA, 19 nt, Artificial Sequence
  Description of Artificial Sequence: Synthetic oligonucleotide
gcaagggcuggcagucacc

SEQ ID NO: 1970404 - RNA, 19 nt, Artificial Sequence
  Description of Artificial Sequence: Synthetic oligonucleotide
ccaacugcuaucagacagu

SEQ ID NO: 1970405 - RNA, 19 nt, Artificial Sequence
  Description of Artificial Sequence: Synthetic oligonucleotide
caacugggauuuaguugua

SEQ ID NO: 1970406 - RNA, 19 nt, Artificial Sequence
  Description of Artificial Sequence: Synthetic oligonucleotide
gguacccaagcaagaauau

SEQ ID NO: 1970407 - RNA, 19 nt, Artificial Sequence
  Description of Artificial Sequence: Synthetic oligonucleotide
ggagaccgugaauuucagu

SEQ ID NO: 1970408 - RNA, 19 nt, Artificial Sequence
  Description of Artificial Sequence: Synthetic oligonucleotide
accgugaauuucaguccuu

SEQ ID NO: 1970409 - RNA, 19 nt, Artificial Sequence
  Description of Artificial Sequence: Synthetic oligonucleotide
ggguugucugcuggaguuc

SEQ ID NO: 1970410 - RNA, 19 nt, Artificial Sequence
  Description of Artificial Sequence: Synthetic oligonucleotide
cccuuaagcauaguuaguu

SEQ ID NO: 1970411 - RNA, 19 nt, Artificial Sequence
  Description of Artificial Sequence: Synthetic oligonucleotide
caucuggaauugguucaua

SEQ ID NO: 1970412 - RNA, 19 nt, Artificial Sequence
  Description of Artificial Sequence: Synthetic oligonucleotide
cugugacccuggagaaugu

SEQ ID NO: 1970413 - RNA, 19 nt, Artificial Sequence
  Description of Artificial Sequence: Synthetic oligonucleotide
ccacaggagaccgugaauu

SEQ ID NO: 1970414 - RNA, 19 nt, Artificial Sequence
  Description of Artificial Sequence: Synthetic oligonucleotide
ccucaucacuacugcucca

SEQ ID NO: 1970415 - RNA, 19 nt, Artificial Sequence
  Description of Artificial Sequence: Synthetic oligonucleotide
acccacccgauaacaugua

SEQ ID NO: 1970416 - RNA, 19 nt, Artificial Sequence
  Description of Artificial Sequence: Synthetic oligonucleotide
ccacgaaacugccaguauu

SEQ ID NO: 1970417 - RNA, 19 nt, Artificial Sequence
  Description of Artificial Sequence: Synthetic oligonucleotide
ggccauuaacuuucccauu

SEQ ID NO: 1970418 - RNA, 19 nt, Artificial Sequence
  Description of Artificial Sequence: Synthetic oligonucleotide
gggcuggcagucacccuuc

SEQ ID NO: 1970419 - RNA, 19 nt, Artificial Sequence
  Description of Artificial Sequence: Synthetic oligonucleotide
gcuggcagucacccuuccu

SEQ ID NO: 1970420 - RNA, 19 nt, Artificial Sequence
  Description of Artificial Sequence: Synthetic oligonucleotide
gcguggugaccacgaaacu

SEQ ID NO: 1970421 - RNA, 19 nt, Artificial Sequence
  Description of Artificial Sequence: Synthetic oligonucleotide
gcuauuccagagccucauu

SEQ ID NO: 1970422 - RNA, 19 nt, Artificial Sequence
  Description of Artificial Sequence: Synthetic oligonucleotide
cagucccugcuaccacugu

SEQ ID NO: 1970423 - RNA, 19 nt, Artificial Sequence
  Description of Artificial Sequence: Synthetic oligonucleotide
cgcuguauuuguggacauc

SEQ ID NO: 1970424 - RNA, 19 nt, Artificial Sequence
  Description of Artificial Sequence: Synthetic oligonucleotide
ccacacuuucagaguuuua

SEQ ID NO: 1970425 - RNA, 19 nt, Artificial Sequence
  Description of Artificial Sequence: Synthetic oligonucleotide
cgauaacauguaucuuccu

SEQ ID NO: 1970426 - RNA, 19 nt, Artificial Sequence
  Description of Artificial Sequence: Synthetic oligonucleotide
ccaacggaacacacugcuu

SEQ ID NO: 1970427 - RNA, 19 nt, Artificial Sequence
  Description of Artificial Sequence: Synthetic oligonucleotide
cccacccgauaacauguau

SEQ ID NO: 1970428 - RNA, 19 nt, Artificial Sequence
  Description of Artificial Sequence: Synthetic oligonucleotide
ccgugaauuucaguccuuu

SEQ ID NO: 1970429 - RNA, 19 nt, Artificial Sequence
  Description of Artificial Sequence: Synthetic oligonucleotide
aauaauguggccccugccc

SEQ ID NO: 1970430 - RNA, 19 nt, Artificial Sequence
  Description of Artificial Sequence: Synthetic oligonucleotide
uuugucuuaauaauguggc

SEQ ID NO: 1970431 - RNA, 19 nt, Artificial Sequence
  Description of Artificial Sequence: Synthetic oligonucleotide
uuguucaccagaaauguag

SEQ ID NO: 1970432 - RNA, 19 nt, Artificial Sequence
  Description of Artificial Sequence: Synthetic oligonucleotide
uugacagaauuucugauga

SEQ ID NO: 1970433 - RNA, 19 nt, Artificial Sequence
  Description of Artificial Sequence: Synthetic oligonucleotide
ucagcuuugccaauugggg

SEQ ID NO: 1970434 - RNA, 19 nt, Artificial Sequence
  Description of Artificial Sequence: Synthetic oligonucleotide
agaauuucugaugacuucc

SEQ ID NO: 1970435 - RNA, 19 nt, Artificial Sequence
  Description of Artificial Sequence: Synthetic oligonucleotide
uuuaugugcagauagccgu

SEQ ID NO: 1970436 - RNA, 19 nt, Artificial Sequence
  Description of Artificial Sequence: Synthetic oligonucleotide
uuuuauagagcucaccauc

SEQ ID NO: 1970437 - RNA, 19 nt, Artificial Sequence
  Description of Artificial Sequence: Synthetic oligonucleotide
aagauggcauccuccaucg

SEQ ID NO: 1970438 - RNA, 19 nt, Artificial Sequence
  Description of Artificial Sequence: Synthetic oligonucleotide
uucagcugcauacacagug

SEQ ID NO: 1970439 - RNA, 19 nt, Artificial Sequence
  Description of Artificial Sequence: Synthetic oligonucleotide
accaagccgauuuaugugc

SEQ ID NO: 1970440 - RNA, 19 nt, Artificial Sequence
  Description of Artificial Sequence: Synthetic oligonucleotide
uuaagcacagccugcagag

SEQ ID NO: 1970441 - RNA, 19 nt, Artificial Sequence
  Description of Artificial Sequence: Synthetic oligonucleotide
aagaagagugucuuggaga

SEQ ID NO: 1970442 - RNA, 19 nt, Artificial Sequence
  Description of Artificial Sequence: Synthetic oligonucleotide
uacgcuuccagaaagucca

SEQ ID NO: 1970443 - RNA, 19 nt, Artificial Sequence
  Description of Artificial Sequence: Synthetic oligonucleotide
ugucuuaauaauguggccc

SEQ ID NO: 1970444 - RNA, 19 nt, Artificial Sequence
  Description of Artificial Sequence: Synthetic oligonucleotide
auacacagugccaagaugg

SEQ ID NO: 1970445 - RNA, 19 nt, Artificial Sequence
  Description of Artificial Sequence: Synthetic oligonucleotide
cuuucagcugcauacacag

SEQ ID NO: 1970446 - RNA, 19 nt, Artificial Sequence
  Description of Artificial Sequence: Synthetic oligonucleotide
auggaucucacguccaagc

SEQ ID NO: 1970447 - RNA, 19 nt, Artificial Sequence
  Description of Artificial Sequence: Synthetic oligonucleotide
guuugucuuaauaaugugg

SEQ ID NO: 1970448 - RNA, 19 nt, Artificial Sequence
  Description of Artificial Sequence: Synthetic oligonucleotide
agaggccuguuucacaugc

SEQ ID NO: 1970449 - RNA, 19 nt, Artificial Sequence
  Description of Artificial Sequence: Synthetic oligonucleotide
acuuccuuggagcagguag

SEQ ID NO: 1970450 - RNA, 19 nt, Artificial Sequence
  Description of Artificial Sequence: Synthetic oligonucleotide
uccaagaagagugucuugg

SEQ ID NO: 1970451 - RNA, 19 nt, Artificial Sequence
  Description of Artificial Sequence: Synthetic oligonucleotide
agaacaaagucagaagggg

SEQ ID NO: 1970452 - RNA, 19 nt, Artificial Sequence
  Description of Artificial Sequence: Synthetic oligonucleotide
caugccaccagccucaccc

SEQ ID NO: 1970453 - RNA, 19 nt, Artificial Sequence
  Description of Artificial Sequence: Synthetic oligonucleotide
uuaagggcccuuuacaagu

SEQ ID NO: 1970454 - RNA, 19 nt, Artificial Sequence
  Description of Artificial Sequence: Synthetic oligonucleotide
uguaugcuggcucagggac

SEQ ID NO: 1970455 - RNA, 19 nt, Artificial Sequence
  Description of Artificial Sequence: Synthetic oligonucleotide
ucuugcuucaaagucacug

SEQ ID NO: 1970456 - RNA, 19 nt, Artificial Sequence
  Description of Artificial Sequence: Synthetic oligonucleotide
auuucugaggucaccaagc

SEQ ID NO: 1970457 - RNA, 19 nt, Artificial Sequence
  Description of Artificial Sequence: Synthetic oligonucleotide
uuuaagggcccuuuacaag

SEQ ID NO: 1970458 - RNA, 19 nt, Artificial Sequence
  Description of Artificial Sequence: Synthetic oligonucleotide
uuaauaauguggccccugc

SEQ ID NO: 1970459 - RNA, 19 nt, Artificial Sequence
  Description of Artificial Sequence: Synthetic oligonucleotide
cagaacaaagucagaaggg

SEQ ID NO: 1970460 - RNA, 19 nt, Artificial Sequence
  Description of Artificial Sequence: Synthetic oligonucleotide
gaucaggccacucuguagc

SEQ ID NO: 1970461 - RNA, 19 nt, Artificial Sequence
  Description of Artificial Sequence: Synthetic oligonucleotide
agagcugcggaguccagcc

SEQ ID NO: 1970462 - RNA, 19 nt, Artificial Sequence
  Description of Artificial Sequence: Synthetic oligonucleotide
aaguuugucuuaauaaugu

SEQ ID NO: 1970463 - RNA, 19 nt, Artificial Sequence
  Description of Artificial Sequence: Synthetic oligonucleotide
gacacuguggucucccugg

SEQ ID NO: 1970464 - RNA, 19 nt, Artificial Sequence
  Description of Artificial Sequence: Synthetic oligonucleotide
uggaucauugucauuucug

SEQ ID NO: 1970465 - RNA, 19 nt, Artificial Sequence
  Description of Artificial Sequence: Synthetic oligonucleotide
ugcaguuuggaucauuguc

SEQ ID NO: 1970466 - RNA, 19 nt, Artificial Sequence
  Description of Artificial Sequence: Synthetic oligonucleotide
ugcuucacggcacuccugg

SEQ ID NO: 1970467 - RNA, 19 nt, Artificial Sequence
  Description of Artificial Sequence: Synthetic oligonucleotide
agcucugccugccugacac

SEQ ID NO: 1970468 - RNA, 19 nt, Artificial Sequence
  Description of Artificial Sequence: Synthetic oligonucleotide
aagagugucuuggagaagu

SEQ ID NO: 1970469 - RNA, 19 nt, Artificial Sequence
  Description of Artificial Sequence: Synthetic oligonucleotide
aagccagugguaugcugcc

SEQ ID NO: 1970470 - RNA, 19 nt, Artificial Sequence
  Description of Artificial Sequence: Synthetic oligonucleotide
auagagugugcugagccgc

SEQ ID NO: 1970471 - RNA, 19 nt, Artificial Sequence
  Description of Artificial Sequence: Synthetic oligonucleotide
agaaauguagccaccuugg

SEQ ID NO: 1970472 - RNA, 19 nt, Artificial Sequence
  Description of Artificial Sequence: Synthetic oligonucleotide
ugguaugcugccaggagag

SEQ ID NO: 1970473 - RNA, 19 nt, Artificial Sequence
  Description of Artificial Sequence: Synthetic oligonucleotide
uguucaccagaaauguagc

SEQ ID NO: 1970474 - RNA, 19 nt, Artificial Sequence
  Description of Artificial Sequence: Synthetic oligonucleotide
gaucauugucauuucugag

SEQ ID NO: 1970475 - RNA, 19 nt, Artificial Sequence
  Description of Artificial Sequence: Synthetic oligonucleotide
gucuuaauaauguggcccc

SEQ ID NO: 1970476 - RNA, 19 nt, Artificial Sequence
  Description of Artificial Sequence: Synthetic oligonucleotide
agugcauggaucucacguc

SEQ ID NO: 1970477 - RNA, 19 nt, Artificial Sequence
  Description of Artificial Sequence: Synthetic oligonucleotide
ucaccagaaauguagccac

SEQ ID NO: 1970478 - RNA, 19 nt, Artificial Sequence
  Description of Artificial Sequence: Synthetic oligonucleotide
auuuaugugcagauagccg

SEQ ID NO: 1970479 - RNA, 19 nt, Artificial Sequence
  Description of Artificial Sequence: Synthetic oligonucleotide
acaguaguacaccuggcug

SEQ ID NO: 1970480 - RNA, 19 nt, Artificial Sequence
  Description of Artificial Sequence: Synthetic oligonucleotide
ucaccaagccgauuuaugu

SEQ ID NO: 1970481 - RNA, 19 nt, Artificial Sequence
  Description of Artificial Sequence: Synthetic oligonucleotide
gauuccaggauacgcuucc

SEQ ID NO: 1970482 - RNA, 19 nt, Artificial Sequence
  Description of Artificial Sequence: Synthetic oligonucleotide
aggauacgcuuccagaaag

SEQ ID NO: 1970483 - RNA, 19 nt, Artificial Sequence
  Description of Artificial Sequence: Synthetic oligonucleotide
caagccagugguaugcugc

SEQ ID NO: 1970484 - RNA, 19 nt, Artificial Sequence
  Description of Artificial Sequence: Synthetic oligonucleotide
uucaccagaaauguagcca

SEQ ID NO: 1970485 - RNA, 19 nt, Artificial Sequence
  Description of Artificial Sequence: Synthetic oligonucleotide
ccagaacaaagucagaagg

SEQ ID NO: 1970486 - RNA, 19 nt, Artificial Sequence
  Description of Artificial Sequence: Synthetic oligonucleotide
uccacuaggugcaguuugg

SEQ ID NO: 1970487 - RNA, 19 nt, Artificial Sequence
  Description of Artificial Sequence: Synthetic oligonucleotide
agccagucugcuuugcugg

SEQ ID NO: 1970488 - RNA, 19 nt, Artificial Sequence
  Description of Artificial Sequence: Synthetic oligonucleotide
guagcagacaagccagugg

SEQ ID NO: 1970489 - RNA, 19 nt, Artificial Sequence
  Description of Artificial Sequence: Synthetic oligonucleotide
gugguuucuugcuucaaag

SEQ ID NO: 1970490 - RNA, 19 nt, Artificial Sequence
  Description of Artificial Sequence: Synthetic oligonucleotide
ucagaaggggcgaucacgu

SEQ ID NO: 1970491 - RNA, 19 nt, Artificial Sequence
  Description of Artificial Sequence: Synthetic oligonucleotide
accgcaucaucuuucagcu

SEQ ID NO: 1970492 - RNA, 19 nt, Artificial Sequence
  Description of Artificial Sequence: Synthetic oligonucleotide
gaaucgcugcaccacagug

SEQ ID NO: 1970493 - RNA, 19 nt, Artificial Sequence
  Description of Artificial Sequence: Synthetic oligonucleotide
aucgcugcaccacagugag

SEQ ID NO: 1970494 - RNA, 19 nt, Artificial Sequence
  Description of Artificial Sequence: Synthetic oligonucleotide
cauagagugugcugagccg

SEQ ID NO: 1970495 - RNA, 19 nt, Artificial Sequence
  Description of Artificial Sequence: Synthetic oligonucleotide
auacgcuuccagaaagucc

SEQ ID NO: 1970496 - RNA, 19 nt, Artificial Sequence
  Description of Artificial Sequence: Synthetic oligonucleotide
cagaaauguagccaccuug

SEQ ID NO: 1970497 - RNA, 19 nt, Artificial Sequence
  Description of Artificial Sequence: Synthetic oligonucleotide
caccgcaucaucuuucagc

SEQ ID NO: 1970498 - RNA, 19 nt, Artificial Sequence
  Description of Artificial Sequence: Synthetic oligonucleotide
uuaugugcagauagccgug

SEQ ID NO: 1970499 - RNA, 19 nt, Artificial Sequence
  Description of Artificial Sequence: Synthetic oligonucleotide
uaauaauguggccccugcc

SEQ ID NO: 1970500 - RNA, 19 nt, Artificial Sequence
  Description of Artificial Sequence: Synthetic oligonucleotide
ucaccaucagcuuugccaa

SEQ ID NO: 1970501 - RNA, 19 nt, Artificial Sequence
  Description of Artificial Sequence: Synthetic oligonucleotide
ucuggcccaagauuccagg

SEQ ID NO: 1970502 - RNA, 19 nt, Artificial Sequence
  Description of Artificial Sequence: Synthetic oligonucleotide
uucacaugccaccagccuc

SEQ ID NO: 1970503 - RNA, 19 nt, Artificial Sequence
  Description of Artificial Sequence: Synthetic oligonucleotide
ucacaugccaccagccuca

SEQ ID NO: 1970504 - RNA, 19 nt, Artificial Sequence
  Description of Artificial Sequence: Synthetic oligonucleotide
cuaggugcaguuuggauca

SEQ ID NO: 1970505 - RNA, 19 nt, Artificial Sequence
  Description of Artificial Sequence: Synthetic oligonucleotide
uggggagcccagaacaaag

SEQ ID NO: 1970506 - RNA, 19 nt, Artificial Sequence
  Description of Artificial Sequence: Synthetic oligonucleotide
aagauuccaggauacgcuu

SEQ ID NO: 1970507 - RNA, 19 nt, Artificial Sequence
  Description of Artificial Sequence: Synthetic oligonucleotide
cauuucugaggucaccaag

SEQ ID NO: 1970508 - RNA, 19 nt, Artificial Sequence
  Description of Artificial Sequence: Synthetic oligonucleotide
ugcaggauagcugaccaca

SEQ ID NO: 1970509 - RNA, 19 nt, Artificial Sequence
  Description of Artificial Sequence: Synthetic oligonucleotide
auaauguggccccugccca

SEQ ID NO: 1970510 - RNA, 19 nt, Artificial Sequence
  Description of Artificial Sequence: Synthetic oligonucleotide
uuucacaugccaccagccu

SEQ ID NO: 1970511 - RNA, 19 nt, Artificial Sequence
  Description of Artificial Sequence: Synthetic oligonucleotide
cacucuguagcucuaccag

SEQ ID NO: 1970512 - RNA, 19 nt, Artificial Sequence
  Description of Artificial Sequence: Synthetic oligonucleotide
ugugguuucuugcuucaaa

SEQ ID NO: 1970513 - RNA, 19 nt, Artificial Sequence
  Description of Artificial Sequence: Synthetic oligonucleotide
agugguaugcugccaggag

SEQ ID NO: 1970514 - RNA, 19 nt, Artificial Sequence
  Description of Artificial Sequence: Synthetic oligonucleotide
uccaggauacgcuuccaga

SEQ ID NO: 1970515 - RNA, 19 nt, Artificial Sequence
  Description of Artificial Sequence: Synthetic oligonucleotide
uuacugcuguuuacaaaug

SEQ ID NO: 1970516 - RNA, 19 nt, Artificial Sequence
  Description of Artificial Sequence: Synthetic oligonucleotide
gaggaguggagucuggguc

SEQ ID NO: 1970517 - RNA, 19 nt, Artificial Sequence
  Description of Artificial Sequence: Synthetic oligonucleotide
uacacagugccaagauggc

SEQ ID NO: 1970518 - RNA, 19 nt, Artificial Sequence
  Description of Artificial Sequence: Synthetic oligonucleotide
ccgauuuaugugcagauag

SEQ ID NO: 1970519 - RNA, 19 nt, Artificial Sequence
  Description of Artificial Sequence: Synthetic oligonucleotide
ugccaagauggcauccucc

SEQ ID NO: 1970520 - RNA, 19 nt, Artificial Sequence
  Description of Artificial Sequence: Synthetic oligonucleotide
gucagaaggggcgaucacg

SEQ ID NO: 1970521 - RNA, 19 nt, Artificial Sequence
  Description of Artificial Sequence: Synthetic oligonucleotide
ugguuucuugcuucaaagu

SEQ ID NO: 1970522 - RNA, 19 nt, Artificial Sequence
  Description of Artificial Sequence: Synthetic oligonucleotide
accuugguagagcagggcu

SEQ ID NO: 1970523 - RNA, 19 nt, Artificial Sequence
  Description of Artificial Sequence: Synthetic oligonucleotide
gaugccagugcauggaucu

SEQ ID NO: 1970524 - RNA, 19 nt, Artificial Sequence
  Description of Artificial Sequence: Synthetic oligonucleotide
gugcauggaucucacgucc

SEQ ID NO: 1970525 - RNA, 19 nt, Artificial Sequence
  Description of Artificial Sequence: Synthetic oligonucleotide
cauacacagugccaagaug

SEQ ID NO: 1970526 - RNA, 19 nt, Artificial Sequence
  Description of Artificial Sequence: Synthetic oligonucleotide
gagccgcuuaagcacagcc

SEQ ID NO: 1970527 - RNA, 19 nt, Artificial Sequence
  Description of Artificial Sequence: Synthetic oligonucleotide
cagaauuucugaugacuuc

SEQ ID NO: 1970528 - RNA, 19 nt, Artificial Sequence
  Description of Artificial Sequence: Synthetic oligonucleotide
cuuaagcacagccugcaga

SEQ ID NO: 1970529 - RNA, 19 nt, Artificial Sequence
  Description of Artificial Sequence: Synthetic oligonucleotide
ugagcuguccacgaggcua

SEQ ID NO: 1970530 - RNA, 19 nt, Artificial Sequence
  Description of Artificial Sequence: Synthetic oligonucleotide
gauacgcuuccagaaaguc

SEQ ID NO: 1970531 - RNA, 19 nt, Artificial Sequence
  Description of Artificial Sequence: Synthetic oligonucleotide
uuuggaucauugucauuuc

SEQ ID NO: 1970532 - RNA, 19 nt, Artificial Sequence
  Description of Artificial Sequence: Synthetic oligonucleotide
aaucgcugcaccacaguga

SEQ ID NO: 1970533 - RNA, 19 nt, Artificial Sequence
  Description of Artificial Sequence: Synthetic oligonucleotide
ucccaccacgucuacagcu

SEQ ID NO: 1970534 - RNA, 19 nt, Artificial Sequence
  Description of Artificial Sequence: Synthetic oligonucleotide
caccaagccgauuuaugug

SEQ ID NO: 1970535 - RNA, 19 nt, Artificial Sequence
  Description of Artificial Sequence: Synthetic oligonucleotide
aagccgauuuaugugcaga

SEQ ID NO: 1970536 - RNA, 19 nt, Artificial Sequence
  Description of Artificial Sequence: Synthetic oligonucleotide
ugugcacguggaaucgcug

SEQ ID NO: 1970537 - RNA, 19 nt, Artificial Sequence
  Description of Artificial Sequence: Synthetic oligonucleotide
agcugcggaguccagccag

SEQ ID NO: 1970538 - RNA, 19 nt, Artificial Sequence
  Description of Artificial Sequence: Synthetic oligonucleotide
uccugcuuguucaccagaa

SEQ ID NO: 1970539 - RNA, 19 nt, Artificial Sequence
  Description of Artificial Sequence: Synthetic oligonucleotide
cacaccguccugcugcagg

SEQ ID NO: 1970540 - RNA, 19 nt, Artificial Sequence
  Description of Artificial Sequence: Synthetic oligonucleotide
cuuaauaauguggccccug

SEQ ID NO: 1970541 - RNA, 19 nt, Artificial Sequence
  Description of Artificial Sequence: Synthetic oligonucleotide
guuuggaucauugucauuu

SEQ ID NO: 1970542 - RNA, 19 nt, Artificial Sequence
  Description of Artificial Sequence: Synthetic oligonucleotide
guugagcuguccacgaggc

SEQ ID NO: 1970543 - RNA, 19 nt, Artificial Sequence
  Description of Artificial Sequence: Synthetic oligonucleotide
ccauagagugugcugagcc

SEQ ID NO: 1970544 - RNA, 19 nt, Artificial Sequence
  Description of Artificial Sequence: Synthetic oligonucleotide
gcuguaugcuggcucaggg

SEQ ID NO: 1970545 - RNA, 19 nt, Artificial Sequence
  Description of Artificial Sequence: Synthetic oligonucleotide
uugccaauuggggagccca

SEQ ID NO: 1970546 - RNA, 19 nt, Artificial Sequence
  Description of Artificial Sequence: Synthetic oligonucleotide
gacagaauuucugaugacu

SEQ ID NO: 1970547 - RNA, 19 nt, Artificial Sequence
  Description of Artificial Sequence: Synthetic oligonucleotide
ggagcugugugugugcacg

SEQ ID NO: 1970548 - RNA, 19 nt, Artificial Sequence
  Description of Artificial Sequence: Synthetic oligonucleotide
uccucguugagcuguccac

SEQ ID NO: 1970549 - RNA, 19 nt, Artificial Sequence
  Description of Artificial Sequence: Synthetic oligonucleotide
guuucacaugccaccagcc

SEQ ID NO: 1970550 - RNA, 19 nt, Artificial Sequence
  Description of Artificial Sequence: Synthetic oligonucleotide
gacaguaguacaccuggcu

SEQ ID NO: 1970551 - RNA, 19 nt, Artificial Sequence
  Description of Artificial Sequence: Synthetic oligonucleotide
accagccucacccucggga

SEQ ID NO: 1970552 - RNA, 19 nt, Artificial Sequence
  Description of Artificial Sequence: Synthetic oligonucleotide
ucguugagcuguccacgag

SEQ ID NO: 1970553 - RNA, 19 nt, Artificial Sequence
  Description of Artificial Sequence: Synthetic oligonucleotide
gcagguagcagacaagcca

SEQ ID NO: 1970554 - RNA, 19 nt, Artificial Sequence
  Description of Artificial Sequence: Synthetic oligonucleotide
aggccuguuucacaugcca

SEQ ID NO: 1970555 - RNA, 19 nt, Artificial Sequence
  Description of Artificial Sequence: Synthetic oligonucleotide
gaucucacguccaagcucu

SEQ ID NO: 1970556 - RNA, 19 nt, Artificial Sequence
  Description of Artificial Sequence: Synthetic oligonucleotide
gauagcugaccacagguuu

SEQ ID NO: 1970557 - RNA, 19 nt, Artificial Sequence
  Description of Artificial Sequence: Synthetic oligonucleotide
gugguaugcugccaggaga

SEQ ID NO: 1970558 - RNA, 19 nt, Artificial Sequence
  Description of Artificial Sequence: Synthetic oligonucleotide
caagauuccaggauacgcu

SEQ ID NO: 1970559 - RNA, 19 nt, Artificial Sequence
  Description of Artificial Sequence: Synthetic oligonucleotide
accagaaauguagccaccu

SEQ ID NO: 1970560 - RNA, 19 nt, Artificial Sequence
  Description of Artificial Sequence: Synthetic oligonucleotide
ugccaauuggggagcccag

SEQ ID NO: 1970561 - RNA, 19 nt, Artificial Sequence
  Description of Artificial Sequence: Synthetic oligonucleotide
ucuuaauaauguggccccu

SEQ ID NO: 1970562 - RNA, 19 nt, Artificial Sequence
  Description of Artificial Sequence: Synthetic oligonucleotide
acaaagucagaaggggcga

SEQ ID NO: 1970563 - RNA, 19 nt, Artificial Sequence
  Description of Artificial Sequence: Synthetic oligonucleotide
caauuggggagcccagaac

SEQ ID NO: 1970564 - RNA, 19 nt, Artificial Sequence
  Description of Artificial Sequence: Synthetic oligonucleotide
ccaagauuccaggauacgc

SEQ ID NO: 1970565 - RNA, 19 nt, Artificial Sequence
  Description of Artificial Sequence: Synthetic oligonucleotide
agccgauuuaugugcagau

SEQ ID NO: 1970566 - RNA, 19 nt, Artificial Sequence
  Description of Artificial Sequence: Synthetic oligonucleotide
gccaccuugguagagcagg

SEQ ID NO: 1970567 - RNA, 19 nt, Artificial Sequence
  Description of Artificial Sequence: Synthetic oligonucleotide
ugcagauagccgugucccc

SEQ ID NO: 1970568 - RNA, 19 nt, Artificial Sequence
  Description of Artificial Sequence: Synthetic oligonucleotide
ugugugugugcacguggaa

SEQ ID NO: 1970569 - RNA, 19 nt, Artificial Sequence
  Description of Artificial Sequence: Synthetic oligonucleotide
gugugugcacguggaaucg

SEQ ID NO: 1970570 - RNA, 19 nt, Artificial Sequence
  Description of Artificial Sequence: Synthetic oligonucleotide
cagccagucugcuuugcug

SEQ ID NO: 1970571 - RNA, 19 nt, Artificial Sequence
  Description of Artificial Sequence: Synthetic oligonucleotide
cagacaagccagugguaug

SEQ ID NO: 1970572 - RNA, 19 nt, Artificial Sequence
  Description of Artificial Sequence: Synthetic oligonucleotide
ggugcaguuuggaucauug

SEQ ID NO: 1970573 - RNA, 19 nt, Artificial Sequence
  Description of Artificial Sequence: Synthetic oligonucleotide
uagagugugcugagccgcu

SEQ ID NO: 1970574 - RNA, 19 nt, Artificial Sequence
  Description of Artificial Sequence: Synthetic oligonucleotide
gaaggggcgaucacgucca

SEQ ID NO: 1970575 - RNA, 19 nt, Artificial Sequence
  Description of Artificial Sequence: Synthetic oligonucleotide
caagccgauuuaugugcag

SEQ ID NO: 1970576 - RNA, 19 nt, Artificial Sequence
  Description of Artificial Sequence: Synthetic oligonucleotide
aaaguccacuaggugcagu

SEQ ID NO: 1970577 - RNA, 19 nt, Artificial Sequence
  Description of Artificial Sequence: Synthetic oligonucleotide
guagccaccuugguagagc

SEQ ID NO: 1970578 - RNA, 19 nt, Artificial Sequence
  Description of Artificial Sequence: Synthetic oligonucleotide
gugcugagccgcuuaagca

SEQ ID NO: 1970579 - RNA, 19 nt, Artificial Sequence
  Description of Artificial Sequence: Synthetic oligonucleotide
cccagaacaaagucagaag

SEQ ID NO: 1970580 - RNA, 19 nt, Artificial Sequence
  Description of Artificial Sequence: Synthetic oligonucleotide
caccagaaauguagccacc

SEQ ID NO: 1970581 - RNA, 19 nt, Artificial Sequence
  Description of Artificial Sequence: Synthetic oligonucleotide
gucaccaagccgauuuaug

SEQ ID NO: 1970582 - RNA, 19 nt, Artificial Sequence
  Description of Artificial Sequence: Synthetic oligonucleotide
cugaggaguggagucuggg

SEQ ID NO: 1970583 - RNA, 19 nt, Artificial Sequence
  Description of Artificial Sequence: Synthetic oligonucleotide
uugccagccgaugccagug

SEQ ID NO: 1970584 - RNA, 19 nt, Artificial Sequence
  Description of Artificial Sequence: Synthetic oligonucleotide
gaggucaccaagccgauuu

SEQ ID NO: 1970585 - RNA, 19 nt, Artificial Sequence
  Description of Artificial Sequence: Synthetic oligonucleotide
cauggaucucacguccaag

SEQ ID NO: 1970586 - RNA, 19 nt, Artificial Sequence
  Description of Artificial Sequence: Synthetic oligonucleotide
ggaucaggccacucuguag

SEQ ID NO: 1970587 - RNA, 19 nt, Artificial Sequence
  Description of Artificial Sequence: Synthetic oligonucleotide
ugugugcacguggaaucgc

SEQ ID NO: 1970588 - RNA, 19 nt, Artificial Sequence
  Description of Artificial Sequence: Synthetic oligonucleotide
cacgcuggagcugugugug

SEQ ID NO: 1970589 - RNA, 19 nt, Artificial Sequence
  Description of Artificial Sequence: Synthetic oligonucleotide
cagcuuugccaauugggga

SEQ ID NO: 1970590 - RNA, 19 nt, Artificial Sequence
  Description of Artificial Sequence: Synthetic oligonucleotide
ugcggaguccagccagucu

SEQ ID NO: 1970591 - RNA, 19 nt, Artificial Sequence
  Description of Artificial Sequence: Synthetic oligonucleotide
agugccaagauggcauccu

SEQ ID NO: 1970592 - RNA, 19 nt, Artificial Sequence
  Description of Artificial Sequence: Synthetic oligonucleotide
gaaaguccacuaggugcag

SEQ ID NO: 1970593 - RNA, 19 nt, Artificial Sequence
  Description of Artificial Sequence: Synthetic oligonucleotide
acgucuacagcugggacuu

SEQ ID NO: 1970594 - RNA, 19 nt, Artificial Sequence
  Description of Artificial Sequence: Synthetic oligonucleotide
uuugccaauuggggagccc

SEQ ID NO: 1970595 - RNA, 19 nt, Artificial Sequence
  Description of Artificial Sequence: Synthetic oligonucleotide
gaaauguagccaccuuggu

SEQ ID NO: 1970596 - RNA, 19 nt, Artificial Sequence
  Description of Artificial Sequence: Synthetic oligonucleotide
ucucacguccaagcucugc

SEQ ID NO: 1970597 - RNA, 19 nt, Artificial Sequence
  Description of Artificial Sequence: Synthetic oligonucleotide
ucacggcacuccuggauuc

SEQ ID NO: 1970598 - RNA, 19 nt, Artificial Sequence
  Description of Artificial Sequence: Synthetic oligonucleotide
cuguuucacaugccaccag

SEQ ID NO: 1970599 - RNA, 19 nt, Artificial Sequence
  Description of Artificial Sequence: Synthetic oligonucleotide
cagugcauggaucucacgu

SEQ ID NO: 1970600 - RNA, 19 nt, Artificial Sequence
  Description of Artificial Sequence: Synthetic oligonucleotide
cacguccaagcucugccug

SEQ ID NO: 1970601 - RNA, 19 nt, Artificial Sequence
  Description of Artificial Sequence: Synthetic oligonucleotide
acguggaaucgcugcacca

SEQ ID NO: 1970602 - RNA, 19 nt, Artificial Sequence
  Description of Artificial Sequence: Synthetic oligonucleotide
auuccucguugagcugucc

SEQ ID NO: 1970603 - RNA, 19 nt, Artificial Sequence
  Description of Artificial Sequence: Synthetic oligonucleotide
gguggcacgcuccagcaca

SEQ ID NO: 1970604 - RNA, 19 nt, Artificial Sequence
  Description of Artificial Sequence: Synthetic oligonucleotide
acuggaucggcugcuucug

SEQ ID NO: 1970605 - RNA, 19 nt, Artificial Sequence
  Description of Artificial Sequence: Synthetic oligonucleotide
uugagcuguccacgaggcu

SEQ ID NO: 1970606 - RNA, 19 nt, Artificial Sequence
  Description of Artificial Sequence: Synthetic oligonucleotide
aagggcccuuuacaaguuu

SEQ ID NO: 1970607 - RNA, 19 nt, Artificial Sequence
  Description of Artificial Sequence: Synthetic oligonucleotide
gccagugguaugcugccag

SEQ ID NO: 1970608 - RNA, 19 nt, Artificial Sequence
  Description of Artificial Sequence: Synthetic oligonucleotide
gcccaugaacuucuggccc

SEQ ID NO: 1970609 - RNA, 19 nt, Artificial Sequence
  Description of Artificial Sequence: Synthetic oligonucleotide
guggaaucgcugcaccaca

SEQ ID NO: 1970610 - RNA, 19 nt, Artificial Sequence
  Description of Artificial Sequence: Synthetic oligonucleotide
cauugucauuucugagguc

SEQ ID NO: 1970611 - RNA, 19 nt, Artificial Sequence
  Description of Artificial Sequence: Synthetic oligonucleotide
acagguuuguuggcaguga

SEQ ID NO: 1970612 - RNA, 19 nt, Artificial Sequence
  Description of Artificial Sequence: Synthetic oligonucleotide
guaugcuggcucagggacc

SEQ ID NO: 1970613 - RNA, 19 nt, Artificial Sequence
  Description of Artificial Sequence: Synthetic oligonucleotide
cgauuuaugugcagauagc

SEQ ID NO: 1970614 - RNA, 19 nt, Artificial Sequence
  Description of Artificial Sequence: Synthetic oligonucleotide
aggagagcugcggagucca

SEQ ID NO: 1970615 - RNA, 19 nt, Artificial Sequence
  Description of Artificial Sequence: Synthetic oligonucleotide
cuguaugcuggcucaggga

SEQ ID NO: 1970616 - RNA, 19 nt, Artificial Sequence
  Description of Artificial Sequence: Synthetic oligonucleotide
caaagucacugccucuaga

SEQ ID NO: 1970617 - RNA, 19 nt, Artificial Sequence
  Description of Artificial Sequence: Synthetic oligonucleotide
caguaguacaccuggcugu

SEQ ID NO: 1970618 - RNA, 19 nt, Artificial Sequence
  Description of Artificial Sequence: Synthetic oligonucleotide
guggucucccuggaucagg

SEQ ID NO: 1970619 - RNA, 19 nt, Artificial Sequence
  Description of Artificial Sequence: Synthetic oligonucleotide
uucagccuguuggccacag

SEQ ID NO: 1970620 - RNA, 19 nt, Artificial Sequence
  Description of Artificial Sequence: Synthetic oligonucleotide
ccuccaucgcucuuccugc

SEQ ID NO: 1970621 - RNA, 19 nt, Artificial Sequence
  Description of Artificial Sequence: Synthetic oligonucleotide
gccacagguuuguuggcag

SEQ ID NO: 1970622 - RNA, 19 nt, Artificial Sequence
  Description of Artificial Sequence: Synthetic oligonucleotide
cucguugagcuguccacga

SEQ ID NO: 1970623 - RNA, 19 nt, Artificial Sequence
  Description of Artificial Sequence: Synthetic oligonucleotide
agggcccuuuacaaguuug

SEQ ID NO: 1970624 - RNA, 19 nt, Artificial Sequence
  Description of Artificial Sequence: Synthetic oligonucleotide
cacgcuccagcacaccguc

SEQ ID NO: 1970625 - RNA, 19 nt, Artificial Sequence
  Description of Artificial Sequence: Synthetic oligonucleotide
gaauuucugaugacuuccu

SEQ ID NO: 1970626 - RNA, 19 nt, Artificial Sequence
  Description of Artificial Sequence: Synthetic oligonucleotide
uucuugcuucaaagucacu

SEQ ID NO: 1970627 - RNA, 19 nt, Artificial Sequence
  Description of Artificial Sequence: Synthetic oligonucleotide
cguugagcuguccacgagg

SEQ ID NO: 1970628 - RNA, 19 nt, Artificial Sequence
  Description of Artificial Sequence: Synthetic oligonucleotide
ggggcuugccagccgaugc

SEQ ID NO: 1970629 - RNA, 19 nt, Artificial Sequence
  Description of Artificial Sequence: Synthetic oligonucleotide
gguagcagacaagccagug

SEQ ID NO: 1970630 - RNA, 19 nt, Artificial Sequence
  Description of Artificial Sequence: Synthetic oligonucleotide
guaguacaccuggcugugg

SEQ ID NO: 1970631 - RNA, 19 nt, Artificial Sequence
  Description of Artificial Sequence: Synthetic oligonucleotide
accacgucuacagcuggga

SEQ ID NO: 1970632 - RNA, 19 nt, Artificial Sequence
  Description of Artificial Sequence: Synthetic oligonucleotide
ccuuggagcagguagcaga

SEQ ID NO: 1970633 - RNA, 19 nt, Artificial Sequence
  Description of Artificial Sequence: Synthetic oligonucleotide
ucagggaccacaggccaua

SEQ ID NO: 1970634 - RNA, 19 nt, Artificial Sequence
  Description of Artificial Sequence: Synthetic oligonucleotide
auagcugaccacagguuuu

SEQ ID NO: 1970635 - RNA, 19 nt, Artificial Sequence
  Description of Artificial Sequence: Synthetic oligonucleotide
ugguagagcagggcuguau

SEQ ID NO: 1970636 - RNA, 19 nt, Artificial Sequence
  Description of Artificial Sequence: Synthetic oligonucleotide
cagccgaugccagugcaug

SEQ ID NO: 1970637 - RNA, 19 nt, Artificial Sequence
  Description of Artificial Sequence: Synthetic oligonucleotide
ccuggauuccucguugagc

SEQ ID NO: 1970638 - RNA, 19 nt, Artificial Sequence
  Description of Artificial Sequence: Synthetic oligonucleotide
uggcauccuccaucgcucu

SEQ ID NO: 1970639 - RNA, 19 nt, Artificial Sequence
  Description of Artificial Sequence: Synthetic oligonucleotide
uggagcugugugugugcac

SEQ ID NO: 1970640 - RNA, 19 nt, Artificial Sequence
  Description of Artificial Sequence: Synthetic oligonucleotide
gggagcccagaacaaaguc

SEQ ID NO: 1970641 - RNA, 19 nt, Artificial Sequence
  Description of Artificial Sequence: Synthetic oligonucleotide
uggcugugguuucuugcuu

SEQ ID NO: 1970642 - RNA, 19 nt, Artificial Sequence
  Description of Artificial Sequence: Synthetic oligonucleotide
caggauacgcuuccagaaa

SEQ ID NO: 1970643 - RNA, 19 nt, Artificial Sequence
  Description of Artificial Sequence: Synthetic oligonucleotide
cacgucuacagcugggacu

SEQ ID NO: 1970644 - RNA, 19 nt, Artificial Sequence
  Description of Artificial Sequence: Synthetic oligonucleotide
gcuuaagcacagccugcag

SEQ ID NO: 1970645 - RNA, 19 nt, Artificial Sequence
  Description of Artificial Sequence: Synthetic oligonucleotide
agccucacccucgggacug

SEQ ID NO: 1970646 - RNA, 19 nt, Artificial Sequence
  Description of Artificial Sequence: Synthetic oligonucleotide
agcacaccguccugcugca

SEQ ID NO: 1970647 - RNA, 19 nt, Artificial Sequence
  Description of Artificial Sequence: Synthetic oligonucleotide
gaggccuguuucacaugcc

SEQ ID NO: 1970648 - RNA, 19 nt, Artificial Sequence
  Description of Artificial Sequence: Synthetic oligonucleotide
ccagguggcacgcuccagc

SEQ ID NO: 1970649 - RNA, 19 nt, Artificial Sequence
  Description of Artificial Sequence: Synthetic oligonucleotide
accaucagcuuugccaauu

SEQ ID NO: 1970650 - RNA, 19 nt, Artificial Sequence
  Description of Artificial Sequence: Synthetic oligonucleotide
uccaucgcucuuccugcuu

SEQ ID NO: 1970651 - RNA, 19 nt, Artificial Sequence
  Description of Artificial Sequence: Synthetic oligonucleotide
gugccaagauggcauccuc

SEQ ID NO: 1970652 - RNA, 19 nt, Artificial Sequence
  Description of Artificial Sequence: Synthetic oligonucleotide
cagguccaagaagaguguc

SEQ ID NO: 1970653 - RNA, 19 nt, Artificial Sequence
  Description of Artificial Sequence: Synthetic oligonucleotide
cuggcugugguuucuugcu

SEQ ID NO: 1970654 - RNA, 19 nt, Artificial Sequence
  Description of Artificial Sequence: Synthetic oligonucleotide
cacaggccauagagugugc

SEQ ID NO: 1970655 - RNA, 19 nt, Artificial Sequence
  Description of Artificial Sequence: Synthetic oligonucleotide
ccaccuugguagagcaggg

SEQ ID NO: 1970656 - RNA, 19 nt, Artificial Sequence
  Description of Artificial Sequence: Synthetic oligonucleotide
gauuccucguugagcuguc

SEQ ID NO: 1970657 - RNA, 19 nt, Artificial Sequence
  Description of Artificial Sequence: Synthetic oligonucleotide
ccaggauacgcuuccagaa

SEQ ID NO: 1970658 - RNA, 19 nt, Artificial Sequence
  Description of Artificial Sequence: Synthetic oligonucleotide
ccucguugagcuguccacg

SEQ ID NO: 1970659 - RNA, 19 nt, Artificial Sequence
  Description of Artificial Sequence: Synthetic oligonucleotide
aggggccgacaguaguaca

SEQ ID NO: 1970660 - RNA, 19 nt, Artificial Sequence
  Description of Artificial Sequence: Synthetic oligonucleotide
uggguccaggccacuggau

SEQ ID NO: 1970661 - RNA, 19 nt, Artificial Sequence
  Description of Artificial Sequence: Synthetic oligonucleotide
acgaggcuaggggcuugcc

SEQ ID NO: 1970662 - RNA, 19 nt, Artificial Sequence
  Description of Artificial Sequence: Synthetic oligonucleotide
cagaggccuguuucacaug

SEQ ID NO: 1970663 - RNA, 19 nt, Artificial Sequence
  Description of Artificial Sequence: Synthetic oligonucleotide
gccacucuguagcucuacc

SEQ ID NO: 1970664 - RNA, 19 nt, Artificial Sequence
  Description of Artificial Sequence: Synthetic oligonucleotide
uccagccagucugcuuugc

SEQ ID NO: 1970665 - RNA, 19 nt, Artificial Sequence
  Description of Artificial Sequence: Synthetic oligonucleotide
gagugugcugagccgcuua

SEQ ID NO: 1970666 - RNA, 19 nt, Artificial Sequence
  Description of Artificial Sequence: Synthetic oligonucleotide
cuucaaagucacugccucu

SEQ ID NO: 1970667 - RNA, 19 nt, Artificial Sequence
  Description of Artificial Sequence: Synthetic oligonucleotide
accguccugcugcaggaua

SEQ ID NO: 1970668 - RNA, 19 nt, Artificial Sequence
  Description of Artificial Sequence: Synthetic oligonucleotide
caggccacucuguagcucu

SEQ ID NO: 1970669 - RNA, 19 nt, Artificial Sequence
  Description of Artificial Sequence: Synthetic oligonucleotide
cuccuggauuccucguuga

SEQ ID NO: 1970670 - RNA, 19 nt, Artificial Sequence
  Description of Artificial Sequence: Synthetic oligonucleotide
ccguccugcugcaggauag

SEQ ID NO: 1970671 - RNA, 19 nt, Artificial Sequence
  Description of Artificial Sequence: Synthetic oligonucleotide
gugugcugagccgcuuaag

SEQ ID NO: 1970672 - RNA, 19 nt, Artificial Sequence
  Description of Artificial Sequence: Synthetic oligonucleotide
cucgggacugaggagugga

SEQ ID NO: 1970673 - RNA, 19 nt, Artificial Sequence
  Description of Artificial Sequence: Synthetic oligonucleotide
cacggcacuccuggauucc

SEQ ID NO: 1970674 - RNA, 19 nt, Artificial Sequence
  Description of Artificial Sequence: Synthetic oligonucleotide
ccaucgcucuuccugcuug

SEQ ID NO: 1970675 - RNA, 19 nt, Artificial Sequence
  Description of Artificial Sequence: Synthetic oligonucleotide
ggcccaagauuccaggaua

SEQ ID NO: 1970676 - RNA, 19 nt, Artificial Sequence
  Description of Artificial Sequence: Synthetic oligonucleotide
ucgcugcaccacagugagc

SEQ ID NO: 1970677 - RNA, 19 nt, Artificial Sequence
  Description of Artificial Sequence: Synthetic oligonucleotide
gggcuugccagccgaugcc

SEQ ID NO: 1970678 - RNA, 19 nt, Artificial Sequence
  Description of Artificial Sequence: Synthetic oligonucleotide
cuugguagagcagggcugu

SEQ ID NO: 1970679 - RNA, 19 nt, Artificial Sequence
  Description of Artificial Sequence: Synthetic oligonucleotide
agggccaggggccgacagu

SEQ ID NO: 1970680 - RNA, 19 nt, Artificial Sequence
  Description of Artificial Sequence: Synthetic oligonucleotide
ggggccgacaguaguacac

SEQ ID NO: 1970681 - RNA, 19 nt, Artificial Sequence
  Description of Artificial Sequence: Synthetic oligonucleotide
ccugacacuguggucuccc

SEQ ID NO: 1970682 - RNA, 19 nt, Artificial Sequence
  Description of Artificial Sequence: Synthetic oligonucleotide
ccaagaagagugucuugga

SEQ ID NO: 1970683 - RNA, 19 nt, Artificial Sequence
  Description of Artificial Sequence: Synthetic oligonucleotide
ccaccacgucuacagcugg

SEQ ID NO: 1970684 - RNA, 19 nt, Artificial Sequence
  Description of Artificial Sequence: Synthetic oligonucleotide
cagugguaugcugccagga

SEQ ID NO: 1970685 - RNA, 19 nt, Artificial Sequence
  Description of Artificial Sequence: Synthetic oligonucleotide
gugcaguuuggaucauugu

SEQ ID NO: 1970686 - RNA, 19 nt, Artificial Sequence
  Description of Artificial Sequence: Synthetic oligonucleotide
ccgcuuaagcacagccugc

SEQ ID NO: 1970687 - RNA, 19 nt, Artificial Sequence
  Description of Artificial Sequence: Synthetic oligonucleotide
aggggcuugccagccgaug

SEQ ID NO: 1970688 - RNA, 19 nt, Artificial Sequence
  Description of Artificial Sequence: Synthetic oligonucleotide
uaggggcuugccagccgau

SEQ ID NO: 1970689 - RNA, 19 nt, Artificial Sequence
  Description of Artificial Sequence: Synthetic oligonucleotide
gcuggagcccaugaacuuc

SEQ ID NO: 1970690 - RNA, 19 nt, Artificial Sequence
  Description of Artificial Sequence: Synthetic oligonucleotide
aguccacuaggugcaguuu

SEQ ID NO: 1970691 - RNA, 19 nt, Artificial Sequence
  Description of Artificial Sequence: Synthetic oligonucleotide
gggccgacaguaguacacc

SEQ ID NO: 1970692 - RNA, 19 nt, Artificial Sequence
  Description of Artificial Sequence: Synthetic oligonucleotide
gcccaagauuccaggauac

SEQ ID NO: 1970693 - RNA, 19 nt, Artificial Sequence
  Description of Artificial Sequence: Synthetic oligonucleotide
ccaagaagaccagggccag

SEQ ID NO: 1970694 - RNA, 19 nt, Artificial Sequence
  Description of Artificial Sequence: Synthetic oligonucleotide
gagcugcggaguccagcca

SEQ ID NO: 1970695 - RNA, 19 nt, Artificial Sequence
  Description of Artificial Sequence: Synthetic oligonucleotide
ggauuccucguugagcugu

SEQ ID NO: 1970696 - RNA, 19 nt, Artificial Sequence
  Description of Artificial Sequence: Synthetic oligonucleotide
uccacgaggcuaggggcuu

SEQ ID NO: 1970697 - RNA, 19 nt, Artificial Sequence
  Description of Artificial Sequence: Synthetic oligonucleotide
ggccuguuucacaugccac

SEQ ID NO: 1970698 - RNA, 19 nt, Artificial Sequence
  Description of Artificial Sequence: Synthetic oligonucleotide
gccgacaguaguacaccug

SEQ ID NO: 1970699 - RNA, 19 nt, Artificial Sequence
  Description of Artificial Sequence: Synthetic oligonucleotide
ggcagugaacucaggccac

SEQ ID NO: 1970700 - RNA, 19 nt, Artificial Sequence
  Description of Artificial Sequence: Synthetic oligonucleotide
gugugugugcacguggaau

SEQ ID NO: 1970701 - RNA, 19 nt, Artificial Sequence
  Description of Artificial Sequence: Synthetic oligonucleotide
acgcuggagcugugugugu

SEQ ID NO: 1970702 - RNA, 19 nt, Artificial Sequence
  Description of Artificial Sequence: Synthetic oligonucleotide
cuucacggcacuccuggau

SEQ ID NO: 1970703 - RNA, 19 nt, Artificial Sequence
  Description of Artificial Sequence: Synthetic oligonucleotide
acggcacuccuggauuccu

SEQ ID NO: 1970704 - RNA, 19 nt, Artificial Sequence
  Description of Artificial Sequence: Synthetic oligonucleotide
ggucucccuggaucaggcc

SEQ ID NO: 1970705 - RNA, 19 nt, Artificial Sequence
  Description of Artificial Sequence: Synthetic oligonucleotide
gcagugaacucaggccacc

SEQ ID NO: 1970706 - RNA, 19 nt, Artificial Sequence
  Description of Artificial Sequence: Synthetic oligonucleotide
cccgcaugcuucacggcac

SEQ ID NO: 1970707 - RNA, 19 nt, Artificial Sequence
  Description of Artificial Sequence: Synthetic oligonucleotide
ggcccuuuacaaguuuguc

SEQ ID NO: 1970708 - RNA, 19 nt, Artificial Sequence
  Description of Artificial Sequence: Synthetic oligonucleotide
gguaugcugccaggagagc

SEQ ID NO: 1970709 - RNA, 19 nt, Artificial Sequence
  Description of Artificial Sequence: Synthetic oligonucleotide
cacuaggugcaguuuggau

SEQ ID NO: 1970710 - RNA, 19 nt, Artificial Sequence
  Description of Artificial Sequence: Synthetic oligonucleotide
gcugagccgcuuaagcaca

SEQ ID NO: 1970711 - RNA, 19 nt, Artificial Sequence
  Description of Artificial Sequence: Synthetic oligonucleotide
cagugaacucaggccacca

SEQ ID NO: 1970712 - RNA, 19 nt, Artificial Sequence
  Description of Artificial Sequence: Synthetic oligonucleotide
ccaagccgauuuaugugca

SEQ ID NO: 1970713 - RNA, 19 nt, Artificial Sequence
  Description of Artificial Sequence: Synthetic oligonucleotide
ccacgucuacagcugggac

SEQ ID NO: 1970714 - RNA, 19 nt, Artificial Sequence
  Description of Artificial Sequence: Synthetic oligonucleotide
agccuguuggccacagguu

SEQ ID NO: 1970715 - RNA, 19 nt, Artificial Sequence
  Description of Artificial Sequence: Synthetic oligonucleotide
guacaccuggcugugguuu

SEQ ID NO: 1970716 - RNA, 19 nt, Artificial Sequence
  Description of Artificial Sequence: Synthetic oligonucleotide
gacaagccagugguaugcu

SEQ ID NO: 1970717 - RNA, 19 nt, Artificial Sequence
  Description of Artificial Sequence: Synthetic oligonucleotide
ggcuaggggcuugccagcc

SEQ ID NO: 1970718 - RNA, 19 nt, Artificial Sequence
  Description of Artificial Sequence: Synthetic oligonucleotide
agccagugguaugcugcca

SEQ ID NO: 1970719 - RNA, 19 nt, Artificial Sequence
  Description of Artificial Sequence: Synthetic oligonucleotide
ucacugccucuagacuuuu

SEQ ID NO: 1970720 - RNA, 19 nt, Artificial Sequence
  Description of Artificial Sequence: Synthetic oligonucleotide
gcauggaucucacguccaa

SEQ ID NO: 1970721 - RNA, 19 nt, Artificial Sequence
  Description of Artificial Sequence: Synthetic oligonucleotide
gcagacaagccagugguau

SEQ ID NO: 1970722 - RNA, 19 nt, Artificial Sequence
  Description of Artificial Sequence: Synthetic oligonucleotide
caccagccucacccucggg

SEQ ID NO: 1970723 - RNA, 19 nt, Artificial Sequence
  Description of Artificial Sequence: Synthetic oligonucleotide
gugugcacguggaaucgcu

SEQ ID NO: 1970724 - RNA, 19 nt, Artificial Sequence
  Description of Artificial Sequence: Synthetic oligonucleotide
uugguagagcagggcugua

SEQ ID NO: 1970725 - RNA, 19 nt, Artificial Sequence
  Description of Artificial Sequence: Synthetic oligonucleotide
agagugugcugagccgcuu

SEQ ID NO: 1970726 - RNA, 19 nt, Artificial Sequence
  Description of Artificial Sequence: Synthetic oligonucleotide
ggaaucgcugcaccacagu

SEQ ID NO: 1970727 - RNA, 19 nt, Artificial Sequence
  Description of Artificial Sequence: Synthetic oligonucleotide
cugcggaguccagccaguc

SEQ ID NO: 1970728 - RNA, 19 nt, Artificial Sequence
  Description of Artificial Sequence: Synthetic oligonucleotide
ccagucugcuuugcuggag

SEQ ID NO: 1970729 - RNA, 19 nt, Artificial Sequence
  Description of Artificial Sequence: Synthetic oligonucleotide
gccgaugccagugcaugga

SEQ ID NO: 1970730 - RNA, 19 nt, Artificial Sequence
  Description of Artificial Sequence: Synthetic oligonucleotide
guccacgaggcuaggggcu

SEQ ID NO: 1970731 - RNA, 19 nt, Artificial Sequence
  Description of Artificial Sequence: Synthetic oligonucleotide
ccccgcaugcuucacggca

SEQ ID NO: 1970732 - RNA, 19 nt, Artificial Sequence
  Description of Artificial Sequence: Synthetic oligonucleotide
cacaugccaccagccucac

SEQ ID NO: 1970733 - RNA, 19 nt, Artificial Sequence
  Description of Artificial Sequence: Synthetic oligonucleotide
gccagucugcuuugcugga

SEQ ID NO: 1970734 - RNA, 19 nt, Artificial Sequence
  Description of Artificial Sequence: Synthetic oligonucleotide
gaguccagccagucugcuu

SEQ ID NO: 1970735 - RNA, 19 nt, Artificial Sequence
  Description of Artificial Sequence: Synthetic oligonucleotide
ggauacgcuuccagaaagu

SEQ ID NO: 1970736 - RNA, 19 nt, Artificial Sequence
  Description of Artificial Sequence: Synthetic oligonucleotide
caucgcucuuccugcuugu

SEQ ID NO: 1970737 - RNA, 19 nt, Artificial Sequence
  Description of Artificial Sequence: Synthetic oligonucleotide
gccagccgaugccagugca

SEQ ID NO: 1970738 - RNA, 19 nt, Artificial Sequence
  Description of Artificial Sequence: Synthetic oligonucleotide
ggcuugccagccgaugcca

SEQ ID NO: 1970739 - RNA, 19 nt, Artificial Sequence
  Description of Artificial Sequence: Synthetic oligonucleotide
ggaggcacgcuggagcugu

SEQ ID NO: 1970740 - RNA, 19 nt, Artificial Sequence
  Description of Artificial Sequence: Synthetic oligonucleotide
aucucacguccaagcucug

SEQ ID NO: 1970741 - RNA, 19 nt, Artificial Sequence
  Description of Artificial Sequence: Synthetic oligonucleotide
uaggugcaguuuggaucau

SEQ ID NO: 1970742 - RNA, 19 nt, Artificial Sequence
  Description of Artificial Sequence: Synthetic oligonucleotide
gacuuccuuggagcaggua

SEQ ID NO: 1970743 - RNA, 19 nt, Artificial Sequence
  Description of Artificial Sequence: Synthetic oligonucleotide
ggacugaggaguggagucu

SEQ ID NO: 1970744 - RNA, 19 nt, Artificial Sequence
  Description of Artificial Sequence: Synthetic oligonucleotide
gaggcacgcuggagcugug

SEQ ID NO: 1970745 - RNA, 19 nt, Artificial Sequence
  Description of Artificial Sequence: Synthetic oligonucleotide
ccaccgcaucaucuuucag

SEQ ID NO: 1970746 - RNA, 19 nt, Artificial Sequence
  Description of Artificial Sequence: Synthetic oligonucleotide
ggccgacaguaguacaccu

SEQ ID NO: 1970747 - RNA, 19 nt, Artificial Sequence
  Description of Artificial Sequence: Synthetic oligonucleotide
caaagucagaaggggcgau

SEQ ID NO: 1970748 - RNA, 19 nt, Artificial Sequence
  Description of Artificial Sequence: Synthetic oligonucleotide
gccgauuuaugugcagaua

SEQ ID NO: 1970749 - RNA, 19 nt, Artificial Sequence
  Description of Artificial Sequence: Synthetic oligonucleotide
agucuggguccaggccacu

SEQ ID NO: 1970750 - RNA, 19 nt, Artificial Sequence
  Description of Artificial Sequence: Synthetic oligonucleotide
cguccaagcucugccugcc

SEQ ID NO: 1970751 - RNA, 19 nt, Artificial Sequence
  Description of Artificial Sequence: Synthetic oligonucleotide
cacuccuggauuccucguu

SEQ ID NO: 1970752 - RNA, 19 nt, Artificial Sequence
  Description of Artificial Sequence: Synthetic oligonucleotide
cuccaucgcucuuccugcu

SEQ ID NO: 1970753 - RNA, 19 nt, Artificial Sequence
  Description of Artificial Sequence: Synthetic oligonucleotide
gggccaggggccgacagua

SEQ ID NO: 1970754 - RNA, 19 nt, Artificial Sequence
  Description of Artificial Sequence: Synthetic oligonucleotide
ggccacucuguagcucuac

SEQ ID NO: 1970755 - RNA, 19 nt, Artificial Sequence
  Description of Artificial Sequence: Synthetic oligonucleotide
ccgcaucaucuuucagcug

SEQ ID NO: 1970756 - RNA, 19 nt, Artificial Sequence
  Description of Artificial Sequence: Synthetic oligonucleotide
ccaggggccgacaguagua

SEQ ID NO: 1970757 - RNA, 19 nt, Artificial Sequence
  Description of Artificial Sequence: Synthetic oligonucleotide
ggucaccaagccgauuuau

SEQ ID NO: 1970758 - RNA, 19 nt, Artificial Sequence
  Description of Artificial Sequence: Synthetic oligonucleotide
ggggagcccagaacaaagu

SEQ ID NO: 1970759 - RNA, 19 nt, Artificial Sequence
  Description of Artificial Sequence: Synthetic oligonucleotide
gggcccuuuacaaguuugu

SEQ ID NO: 1970760 - RNA, 19 nt, Artificial Sequence
  Description of Artificial Sequence: Synthetic oligonucleotide
cgcuuaagcacagccugca

SEQ ID NO: 1970761 - RNA, 19 nt, Artificial Sequence
  Description of Artificial Sequence: Synthetic oligonucleotide
ccacuaggugcaguuugga

SEQ ID NO: 1970762 - RNA, 19 nt, Artificial Sequence
  Description of Artificial Sequence: Synthetic oligonucleotide
cagccucacccucgggacu

SEQ ID NO: 1970763 - RNA, 19 nt, Artificial Sequence
  Description of Artificial Sequence: Synthetic oligonucleotide
gcacuccuggauuccucgu

SEQ ID NO: 1970764 - RNA, 19 nt, Artificial Sequence
  Description of Artificial Sequence: Synthetic oligonucleotide
cccuggaucaggccacucu

SEQ ID NO: 1970765 - RNA, 19 nt, Artificial Sequence
  Description of Artificial Sequence: Synthetic oligonucleotide
ccucucccaccacgucuac

SEQ ID NO: 1970766 - RNA, 19 nt, Artificial Sequence
  Description of Artificial Sequence: Synthetic oligonucleotide
caccaucagcuuugccaau

SEQ ID NO: 1970767 - RNA, 19 nt, Artificial Sequence
  Description of Artificial Sequence: Synthetic oligonucleotide
aggccacucuguagcucua

SEQ ID NO: 1970768 - RNA, 19 nt, Artificial Sequence
  Description of Artificial Sequence: Synthetic oligonucleotide
gcacaccguccugcugcag

SEQ ID NO: 1970769 - RNA, 19 nt, Artificial Sequence
  Description of Artificial Sequence: Synthetic oligonucleotide
cggcacuccuggauuccuc

SEQ ID NO: 1970770 - RNA, 19 nt, Artificial Sequence
  Description of Artificial Sequence: Synthetic oligonucleotide
ccacgaggcuaggggcuug

SEQ ID NO: 1970771 - RNA, 19 nt, Artificial Sequence
  Description of Artificial Sequence: Synthetic oligonucleotide
ggccacuggaucggcugcu

SEQ ID NO: 1970772 - RNA, 19 nt, Artificial Sequence
  Description of Artificial Sequence: Synthetic oligonucleotide
gcugcggaguccagccagu

SEQ ID NO: 1970773 - RNA, 19 nt, Artificial Sequence
  Description of Artificial Sequence: Synthetic oligonucleotide
ccagccgaugccagugcau

SEQ ID NO: 1970774 - RNA, 19 nt, Artificial Sequence
  Description of Artificial Sequence: Synthetic oligonucleotide
cgcaugcuucacggcacuc

SEQ ID NO: 1970775 - RNA, 19 nt, Artificial Sequence
  Description of Artificial Sequence: Synthetic oligonucleotide
ccgaugccagugcauggau

SEQ ID NO: 1970776 - RNA, 19 nt, Artificial Sequence
  Description of Artificial Sequence: Synthetic oligonucleotide
cgggacugaggaguggagu

SEQ ID NO: 1970777 - RNA, 19 nt, Artificial Sequence
  Description of Artificial Sequence: Synthetic oligonucleotide
ccgcaugcuucacggcacu

SEQ ID NO: 1970778 - RNA, 19 nt, Artificial Sequence
  Description of Artificial Sequence: Synthetic oligonucleotide
caccguccugcugcaggau

SEQ ID NO: 1970779 - RNA, 19 nt, Artificial Sequence
  Description of Artificial Sequence: Synthetic oligonucleotide
cgucuacagcugggacuuc

SEQ ID NO: 1970780 - RNA, 19 nt, Artificial Sequence
  Description of Artificial Sequence: Synthetic oligonucleotide
ggccaccagguggcacgcu

SEQ ID NO: 1970781 - RNA, 19 nt, Artificial Sequence
  Description of Artificial Sequence: Synthetic oligonucleotide
aaauauuuuggccacgugg

SEQ ID NO: 1970782 - RNA, 19 nt, Artificial Sequence
  Description of Artificial Sequence: Synthetic oligonucleotide
agggcaaugaaauugauac

SEQ ID NO: 1970783 - RNA, 19 nt, Artificial Sequence
  Description of Artificial Sequence: Synthetic oligonucleotide
auauugaagacucucagcg

SEQ ID NO: 1970784 - RNA, 19 nt, Artificial Sequence
  Description of Artificial Sequence: Synthetic oligonucleotide
aauugauaaaucaaggauc

SEQ ID NO: 1970785 - RNA, 19 nt, Artificial Sequence
  Description of Artificial Sequence: Synthetic oligonucleotide
guaagaucaauccuuaugg

SEQ ID NO: 1970786 - RNA, 19 nt, Artificial Sequence
  Description of Artificial Sequence: Synthetic oligonucleotide
agauuggauauuuacgucc

SEQ ID NO: 1970787 - RNA, 19 nt, Artificial Sequence
  Description of Artificial Sequence: Synthetic oligonucleotide
aaucugcuaaguaaaaugc

SEQ ID NO: 1970788 - RNA, 19 nt, Artificial Sequence
  Description of Artificial Sequence: Synthetic oligonucleotide
uaaucugaauucaauaugc

SEQ ID NO: 1970789 - RNA, 19 nt, Artificial Sequence
  Description of Artificial Sequence: Synthetic oligonucleotide
ucugcuaaguaaaaugccg

SEQ ID NO: 1970790 - RNA, 19 nt, Artificial Sequence
  Description of Artificial Sequence: Synthetic oligonucleotide
uuuguuguuaauauauuga

SEQ ID NO: 1970791 - RNA, 19 nt, Artificial Sequence
  Description of Artificial Sequence: Synthetic oligonucleotide
aauaugcuaacacuuccuc

SEQ ID NO: 1970792 - RNA, 19 nt, Artificial Sequence
  Description of Artificial Sequence: Synthetic oligonucleotide
ugaguuagcaauucaauca

SEQ ID NO: 1970793 - RNA, 19 nt, Artificial Sequence
  Description of Artificial Sequence: Synthetic oligonucleotide
cauagauuggauauuuacg

SEQ ID NO: 1970794 - RNA, 19 nt, Artificial Sequence
  Description of Artificial Sequence: Synthetic oligonucleotide
auagauuggauauuuacgu

SEQ ID NO: 1970795 - RNA, 19 nt, Artificial Sequence
  Description of Artificial Sequence: Synthetic oligonucleotide
uuaauagaucugaaaagcc

SEQ ID NO: 1970796 - RNA, 19 nt, Artificial Sequence
  Description of Artificial Sequence: Synthetic oligonucleotide
aucgcauuuccucaaauac

SEQ ID NO: 1970797 - RNA, 19 nt, Artificial Sequence
  Description of Artificial Sequence: Synthetic oligonucleotide
aauacguucucauagcgau

SEQ ID NO: 1970798 - RNA, 19 nt, Artificial Sequence
  Description of Artificial Sequence: Synthetic oligonucleotide
uucagaaacaaagaaaucu

SEQ ID NO: 1970799 - RNA, 19 nt, Artificial Sequence
  Description of Artificial Sequence: Synthetic oligonucleotide
auaaucauguacuaaguga

SEQ ID NO: 1970800 - RNA, 19 nt, Artificial Sequence
  Description of Artificial Sequence: Synthetic oligonucleotide
aggagagcgucucaaaucc

SEQ ID NO: 1970801 - RNA, 19 nt, Artificial Sequence
  Description of Artificial Sequence: Synthetic oligonucleotide
aauaacucagcaggaaaac

SEQ ID NO: 1970802 - RNA, 19 nt, Artificial Sequence
  Description of Artificial Sequence: Synthetic oligonucleotide
auuugugaaaauuugcagu

SEQ ID NO: 1970803 - RNA, 19 nt, Artificial Sequence
  Description of Artificial Sequence: Synthetic oligonucleotide
aaaauggucgccaucauca

SEQ ID NO: 1970804 - RNA, 19 nt, Artificial Sequence
  Description of Artificial Sequence: Synthetic oligonucleotide
uccaguauaaacugguuug

SEQ ID NO: 1970805 - RNA, 19 nt, Artificial Sequence
  Description of Artificial Sequence: Synthetic oligonucleotide
uaaucauguacuaagugaa

SEQ ID NO: 1970806 - RNA, 19 nt, Artificial Sequence
  Description of Artificial Sequence: Synthetic oligonucleotide
uguacuaagugaagaauca

SEQ ID NO: 1970807 - RNA, 19 nt, Artificial Sequence
  Description of Artificial Sequence: Synthetic oligonucleotide
auaaucugaauucaauaug

SEQ ID NO: 1970808 - RNA, 19 nt, Artificial Sequence
  Description of Artificial Sequence: Synthetic oligonucleotide
uguggaguuaucaaauaug

SEQ ID NO: 1970809 - RNA, 19 nt, Artificial Sequence
  Description of Artificial Sequence: Synthetic oligonucleotide
uaugcuaacacuuccucca

SEQ ID NO: 1970810 - RNA, 19 nt, Artificial Sequence
  Description of Artificial Sequence: Synthetic oligonucleotide
auaugcuaacacuuccucc

SEQ ID NO: 1970811 - RNA, 19 nt, Artificial Sequence
  Description of Artificial Sequence: Synthetic oligonucleotide
cugaauugcucuaaguugc

SEQ ID NO: 1970812 - RNA, 19 nt, Artificial Sequence
  Description of Artificial Sequence: Synthetic oligonucleotide
ucaauaugcuaacacuucc

SEQ ID NO: 1970813 - RNA, 19 nt, Artificial Sequence
  Description of Artificial Sequence: Synthetic oligonucleotide
acugaauugcucuaaguug

SEQ ID NO: 1970814 - RNA, 19 nt, Artificial Sequence
  Description of Artificial Sequence: Synthetic oligonucleotide
aaggagagcgucucaaauc

SEQ ID NO: 1970815 - RNA, 19 nt, Artificial Sequence
  Description of Artificial Sequence: Synthetic oligonucleotide
aagaucaauccuuaugggu

SEQ ID NO: 1970816 - RNA, 19 nt, Artificial Sequence
  Description of Artificial Sequence: Synthetic oligonucleotide
uuugugaaaauuugcaguc

SEQ ID NO: 1970817 - RNA, 19 nt, Artificial Sequence
  Description of Artificial Sequence: Synthetic oligonucleotide
gauaccgugucuguaagcg

SEQ ID NO: 1970818 - RNA, 19 nt, Artificial Sequence
  Description of Artificial Sequence: Synthetic oligonucleotide
uuaauauuccgaugauggg

SEQ ID NO: 1970819 - RNA, 19 nt, Artificial Sequence
  Description of Artificial Sequence: Synthetic oligonucleotide
uaauauuccgaugaugggc

SEQ ID NO: 1970820 - RNA, 19 nt, Artificial Sequence
  Description of Artificial Sequence: Synthetic oligonucleotide
ugauaaaucaaggaucgca

SEQ ID NO: 1970821 - RNA, 19 nt, Artificial Sequence
  Description of Artificial Sequence: Synthetic oligonucleotide
uucaagggcaaugaaauug

SEQ ID NO: 1970822 - RNA, 19 nt, Artificial Sequence
  Description of Artificial Sequence: Synthetic oligonucleotide
ucgcauuuccucaaauacg

SEQ ID NO: 1970823 - RNA, 19 nt, Artificial Sequence
  Description of Artificial Sequence: Synthetic oligonucleotide
guaaagucuggacagcccg

SEQ ID NO: 1970824 - RNA, 19 nt, Artificial Sequence
  Description of Artificial Sequence: Synthetic oligonucleotide
uaagaucaauccuuauggg

SEQ ID NO: 1970825 - RNA, 19 nt, Artificial Sequence
  Description of Artificial Sequence: Synthetic oligonucleotide
aaugaaauugauaccgugu

SEQ ID NO: 1970826 - RNA, 19 nt, Artificial Sequence
  Description of Artificial Sequence: Synthetic oligonucleotide
ggcaaugaaauugauaccg

SEQ ID NO: 1970827 - RNA, 19 nt, Artificial Sequence
  Description of Artificial Sequence: Synthetic oligonucleotide
uuguuguuaauauauugaa

SEQ ID NO: 1970828 - RNA, 19 nt, Artificial Sequence
  Description of Artificial Sequence: Synthetic oligonucleotide
agcgaaacaaguaacacug

SEQ ID NO: 1970829 - RNA, 19 nt, Artificial Sequence
  Description of Artificial Sequence: Synthetic oligonucleotide
aauauuccgaugaugggcu

SEQ ID NO: 1970830 - RNA, 19 nt, Artificial Sequence
  Description of Artificial Sequence: Synthetic oligonucleotide
ucaagggcaaugaaauuga

SEQ ID NO: 1970831 - RNA, 19 nt, Artificial Sequence
  Description of Artificial Sequence: Synthetic oligonucleotide
acucauauggugcuuucuc

SEQ ID NO: 1970832 - RNA, 19 nt, Artificial Sequence
  Description of Artificial Sequence: Synthetic oligonucleotide
agguucuaaugcuagugac

SEQ ID NO: 1970833 - RNA, 19 nt, Artificial Sequence
  Description of Artificial Sequence: Synthetic oligonucleotide
caaauacguucucauagcg

SEQ ID NO: 1970834 - RNA, 19 nt, Artificial Sequence
  Description of Artificial Sequence: Synthetic oligonucleotide
cuguaaggcaccuucagug

SEQ ID NO: 1970835 - RNA, 19 nt, Artificial Sequence
  Description of Artificial Sequence: Synthetic oligonucleotide
uguuguuaauauauugaaa

SEQ ID NO: 1970836 - RNA, 19 nt, Artificial Sequence
  Description of Artificial Sequence: Synthetic oligonucleotide
acugcucaaauguagaaau

SEQ ID NO: 1970837 - RNA, 19 nt, Artificial Sequence
  Description of Artificial Sequence: Synthetic oligonucleotide
ucuguaagcguuagcaagu

SEQ ID NO: 1970838 - RNA, 19 nt, Artificial Sequence
  Description of Artificial Sequence: Synthetic oligonucleotide
uaaaucaaggaucgcauuu

SEQ ID NO: 1970839 - RNA, 19 nt, Artificial Sequence
  Description of Artificial Sequence: Synthetic oligonucleotide
aauuugcagucagagguuc

SEQ ID NO: 1970840 - RNA, 19 nt, Artificial Sequence
  Description of Artificial Sequence: Synthetic oligonucleotide
uccccacacaggaaaaugg

SEQ ID NO: 1970841 - RNA, 19 nt, Artificial Sequence
  Description of Artificial Sequence: Synthetic oligonucleotide
cauauugaagacucucagc

SEQ ID NO: 1970842 - RNA, 19 nt, Artificial Sequence
  Description of Artificial Sequence: Synthetic oligonucleotide
guuaccauauugaagacuc

SEQ ID NO: 1970843 - RNA, 19 nt, Artificial Sequence
  Description of Artificial Sequence: Synthetic oligonucleotide
cucuaaguugccuuguuac

SEQ ID NO: 1970844 - RNA, 19 nt, Artificial Sequence
  Description of Artificial Sequence: Synthetic oligonucleotide
agcguuagcaaguucucuc

SEQ ID NO: 1970845 - RNA, 19 nt, Artificial Sequence
  Description of Artificial Sequence: Synthetic oligonucleotide
aauuccauuaauagaucug

SEQ ID NO: 1970846 - RNA, 19 nt, Artificial Sequence
  Description of Artificial Sequence: Synthetic oligonucleotide
gaauugauaaaucaaggau

SEQ ID NO: 1970847 - RNA, 19 nt, Artificial Sequence
  Description of Artificial Sequence: Synthetic oligonucleotide
cucuccgcuaaccagaaag

SEQ ID NO: 1970848 - RNA, 19 nt, Artificial Sequence
  Description of Artificial Sequence: Synthetic oligonucleotide
uccgcuaaccagaaaggag

SEQ ID NO: 1970849 - RNA, 19 nt, Artificial Sequence
  Description of Artificial Sequence: Synthetic oligonucleotide
auguacuaagugaagaauc

SEQ ID NO: 1970850 - RNA, 19 nt, Artificial Sequence
  Description of Artificial Sequence: Synthetic oligonucleotide
aaaauauuuuggccacgug

SEQ ID NO: 1970851 - RNA, 19 nt, Artificial Sequence
  Description of Artificial Sequence: Synthetic oligonucleotide
uauuuacguccuuccaugg

SEQ ID NO: 1970852 - RNA, 19 nt, Artificial Sequence
  Description of Artificial Sequence: Synthetic oligonucleotide
ucuccgcuaaccagaaagg

SEQ ID NO: 1970853 - RNA, 19 nt, Artificial Sequence
  Description of Artificial Sequence: Synthetic oligonucleotide
aaaggagagcgucucaaau

SEQ ID NO: 1970854 - RNA, 19 nt, Artificial Sequence
  Description of Artificial Sequence: Synthetic oligonucleotide
ucuaaguugccuuguuacc

SEQ ID NO: 1970855 - RNA, 19 nt, Artificial Sequence
  Description of Artificial Sequence: Synthetic oligonucleotide
uuauggguacaacucuugc

SEQ ID NO: 1970856 - RNA, 19 nt, Artificial Sequence
  Description of Artificial Sequence: Synthetic oligonucleotide
ugccuuguuaccauauuga

SEQ ID NO: 1970857 - RNA, 19 nt, Artificial Sequence
  Description of Artificial Sequence: Synthetic oligonucleotide
aaccagaaaggagagcguc

SEQ ID NO: 1970858 - RNA, 19 nt, Artificial Sequence
  Description of Artificial Sequence: Synthetic oligonucleotide
auugaagacucucagcgaa

SEQ ID NO: 1970859 - RNA, 19 nt, Artificial Sequence
  Description of Artificial Sequence: Synthetic oligonucleotide
aaauugauaccgugucugu

SEQ ID NO: 1970860 - RNA, 19 nt, Artificial Sequence
  Description of Artificial Sequence: Synthetic oligonucleotide
ugaaauugauaccgugucu

SEQ ID NO: 1970861 - RNA, 19 nt, Artificial Sequence
  Description of Artificial Sequence: Synthetic oligonucleotide
uccauuaauagaucugaaa

SEQ ID NO: 1970862 - RNA, 19 nt, Artificial Sequence
  Description of Artificial Sequence: Synthetic oligonucleotide
ucauuguggaguuaucaaa

SEQ ID NO: 1970863 - RNA, 19 nt, Artificial Sequence
  Description of Artificial Sequence: Synthetic oligonucleotide
uaaagucuggacagcccgg

SEQ ID NO: 1970864 - RNA, 19 nt, Artificial Sequence
  Description of Artificial Sequence: Synthetic oligonucleotide
aaguaaaaugccgucuuca

SEQ ID NO: 1970865 - RNA, 19 nt, Artificial Sequence
  Description of Artificial Sequence: Synthetic oligonucleotide
aucugcuaaguaaaaugcc

SEQ ID NO: 1970866 - RNA, 19 nt, Artificial Sequence
  Description of Artificial Sequence: Synthetic oligonucleotide
cuuucguaaagucuggaca

SEQ ID NO: 1970867 - RNA, 19 nt, Artificial Sequence
  Description of Artificial Sequence: Synthetic oligonucleotide
guuagcaauucaaucacug

SEQ ID NO: 1970868 - RNA, 19 nt, Artificial Sequence
  Description of Artificial Sequence: Synthetic oligonucleotide
auugauaccgugucuguaa

SEQ ID NO: 1970869 - RNA, 19 nt, Artificial Sequence
  Description of Artificial Sequence: Synthetic oligonucleotide
caaugaaauugauaccgug

SEQ ID NO: 1970870 - RNA, 19 nt, Artificial Sequence
  Description of Artificial Sequence: Synthetic oligonucleotide
uucauuguggaguuaucaa

SEQ ID NO: 1970871 - RNA, 19 nt, Artificial Sequence
  Description of Artificial Sequence: Synthetic oligonucleotide
uggugcaugggaaaugccu

SEQ ID NO: 1970872 - RNA, 19 nt, Artificial Sequence
  Description of Artificial Sequence: Synthetic oligonucleotide
gcuguaaaauauuuuggcc

SEQ ID NO: 1970873 - RNA, 19 nt, Artificial Sequence
  Description of Artificial Sequence: Synthetic oligonucleotide
uugauaccgugucuguaag

SEQ ID NO: 1970874 - RNA, 19 nt, Artificial Sequence
  Description of Artificial Sequence: Synthetic oligonucleotide
aguucaagggcaaugaaau

SEQ ID NO: 1970875 - RNA, 19 nt, Artificial Sequence
  Description of Artificial Sequence: Synthetic oligonucleotide
ucucagcgaaacaaguaac

SEQ ID NO: 1970876 - RNA, 19 nt, Artificial Sequence
  Description of Artificial Sequence: Synthetic oligonucleotide
ugcucaaauguagaaauau

SEQ ID NO: 1970877 - RNA, 19 nt, Artificial Sequence
  Description of Artificial Sequence: Synthetic oligonucleotide
uaaggcaccuucagugaag

SEQ ID NO: 1970878 - RNA, 19 nt, Artificial Sequence
  Description of Artificial Sequence: Synthetic oligonucleotide
acauucggcccuguaaggc

SEQ ID NO: 1970879 - RNA, 19 nt, Artificial Sequence
  Description of Artificial Sequence: Synthetic oligonucleotide
uauugaagacucucagcga

SEQ ID NO: 1970880 - RNA, 19 nt, Artificial Sequence
  Description of Artificial Sequence: Synthetic oligonucleotide
gugaguuagcaauucaauc

SEQ ID NO: 1970881 - RNA, 19 nt, Artificial Sequence
  Description of Artificial Sequence: Synthetic oligonucleotide
aucugaaaagcccagcaua

SEQ ID NO: 1970882 - RNA, 19 nt, Artificial Sequence
  Description of Artificial Sequence: Synthetic oligonucleotide
aaguucucuccgcuaacca

SEQ ID NO: 1970883 - RNA, 19 nt, Artificial Sequence
  Description of Artificial Sequence: Synthetic oligonucleotide
cuugaugccgcuuucguaa

SEQ ID NO: 1970884 - RNA, 19 nt, Artificial Sequence
  Description of Artificial Sequence: Synthetic oligonucleotide
cuuauggguacaacucuug

SEQ ID NO: 1970885 - RNA, 19 nt, Artificial Sequence
  Description of Artificial Sequence: Synthetic oligonucleotide
uaaguaaaaugccgucuuc

SEQ ID NO: 1970886 - RNA, 19 nt, Artificial Sequence
  Description of Artificial Sequence: Synthetic oligonucleotide
aaauacguucucauagcga

SEQ ID NO: 1970887 - RNA, 19 nt, Artificial Sequence
  Description of Artificial Sequence: Synthetic oligonucleotide
ugggaauaaucugaauuca

SEQ ID NO: 1970888 - RNA, 19 nt, Artificial Sequence
  Description of Artificial Sequence: Synthetic oligonucleotide
agagguucuaaugcuagug

SEQ ID NO: 1970889 - RNA, 19 nt, Artificial Sequence
  Description of Artificial Sequence: Synthetic oligonucleotide
gaaaauggucgccaucauc

SEQ ID NO: 1970890 - RNA, 19 nt, Artificial Sequence
  Description of Artificial Sequence: Synthetic oligonucleotide
gacagcauagauuggauau

SEQ ID NO: 1970891 - RNA, 19 nt, Artificial Sequence
  Description of Artificial Sequence: Synthetic oligonucleotide
uagauuggauauuuacguc

SEQ ID NO: 1970892 - RNA, 19 nt, Artificial Sequence
  Description of Artificial Sequence: Synthetic oligonucleotide
auuuccaguauaaacuggu

SEQ ID NO: 1970893 - RNA, 19 nt, Artificial Sequence
  Description of Artificial Sequence: Synthetic oligonucleotide
uggccuugcuguaaaauau

SEQ ID NO: 1970894 - RNA, 19 nt, Artificial Sequence
  Description of Artificial Sequence: Synthetic oligonucleotide
aaugcuagugacaccaaua

SEQ ID NO: 1970895 - RNA, 19 nt, Artificial Sequence
  Description of Artificial Sequence: Synthetic oligonucleotide
augcuagugacaccaauaa

SEQ ID NO: 1970896 - RNA, 19 nt, Artificial Sequence
  Description of Artificial Sequence: Synthetic oligonucleotide
guuagcaaguucucuccgc

SEQ ID NO: 1970897 - RNA, 19 nt, Artificial Sequence
  Description of Artificial Sequence: Synthetic oligonucleotide
agucuuccuguguaagauc

SEQ ID NO: 1970898 - RNA, 19 nt, Artificial Sequence
  Description of Artificial Sequence: Synthetic oligonucleotide
uuacguccuuccauggaug

SEQ ID NO: 1970899 - RNA, 19 nt, Artificial Sequence
  Description of Artificial Sequence: Synthetic oligonucleotide
aucugaauucaauaugcua

SEQ ID NO: 1970900 - RNA, 19 nt, Artificial Sequence
  Description of Artificial Sequence: Synthetic oligonucleotide
ugacaccaauaacucagca

SEQ ID NO: 1970901 - RNA, 19 nt, Artificial Sequence
  Description of Artificial Sequence: Synthetic oligonucleotide
aguauuuucccaacuuucu

SEQ ID NO: 1970902 - RNA, 19 nt, Artificial Sequence
  Description of Artificial Sequence: Synthetic oligonucleotide
uguuaccauauugaagacu

SEQ ID NO: 1970903 - RNA, 19 nt, Artificial Sequence
  Description of Artificial Sequence: Synthetic oligonucleotide
ugaauucaauaugcuaaca

SEQ ID NO: 1970904 - RNA, 19 nt, Artificial Sequence
  Description of Artificial Sequence: Synthetic oligonucleotide
ugcuaaguaaaaugccguc

SEQ ID NO: 1970905 - RNA, 19 nt, Artificial Sequence
  Description of Artificial Sequence: Synthetic oligonucleotide
ucauuuccuucguauggca

SEQ ID NO: 1970906 - RNA, 19 nt, Artificial Sequence
  Description of Artificial Sequence: Synthetic oligonucleotide
uuccuguguaagaucaauc

SEQ ID NO: 1970907 - RNA, 19 nt, Artificial Sequence
  Description of Artificial Sequence: Synthetic oligonucleotide
guaaaauauuuuggccacg

SEQ ID NO: 1970908 - RNA, 19 nt, Artificial Sequence
  Description of Artificial Sequence: Synthetic oligonucleotide
uccucauguugccauuagc

SEQ ID NO: 1970909 - RNA, 19 nt, Artificial Sequence
  Description of Artificial Sequence: Synthetic oligonucleotide
agaucaauccuuaugggua

SEQ ID NO: 1970910 - RNA, 19 nt, Artificial Sequence
  Description of Artificial Sequence: Synthetic oligonucleotide
uaagcguuagcaaguucuc

SEQ ID NO: 1970911 - RNA, 19 nt, Artificial Sequence
  Description of Artificial Sequence: Synthetic oligonucleotide
ucacugaauugcucuaagu

SEQ ID NO: 1970912 - RNA, 19 nt, Artificial Sequence
  Description of Artificial Sequence: Synthetic oligonucleotide
ucuguauggcuuccucaug

SEQ ID NO: 1970913 - RNA, 19 nt, Artificial Sequence
  Description of Artificial Sequence: Synthetic oligonucleotide
aacaaguaacacugcucaa

SEQ ID NO: 1970914 - RNA, 19 nt, Artificial Sequence
  Description of Artificial Sequence: Synthetic oligonucleotide
agagaggcuccauuuguga

SEQ ID NO: 1970915 - RNA, 19 nt, Artificial Sequence
  Description of Artificial Sequence: Synthetic oligonucleotide
uugccauuagcagugaguu

SEQ ID NO: 1970916 - RNA, 19 nt, Artificial Sequence
  Description of Artificial Sequence: Synthetic oligonucleotide
ugcuagugacaccaauaac

SEQ ID NO: 1970917 - RNA, 19 nt, Artificial Sequence
  Description of Artificial Sequence: Synthetic oligonucleotide
aagacauguuccccacaca

SEQ ID NO: 1970918 - RNA, 19 nt, Artificial Sequence
  Description of Artificial Sequence: Synthetic oligonucleotide
gaaucuguauggcuuccuc

SEQ ID NO: 1970919 - RNA, 19 nt, Artificial Sequence
  Description of Artificial Sequence: Synthetic oligonucleotide
uuccauuaauagaucugaa

SEQ ID NO: 1970920 - RNA, 19 nt, Artificial Sequence
  Description of Artificial Sequence: Synthetic oligonucleotide
auuuacguccuuccaugga

SEQ ID NO: 1970921 - RNA, 19 nt, Artificial Sequence
  Description of Artificial Sequence: Synthetic oligonucleotide
uuuucauuguggaguuauc

SEQ ID NO: 1970922 - RNA, 19 nt, Artificial Sequence
  Description of Artificial Sequence: Synthetic oligonucleotide
uuccucauguugccauuag

SEQ ID NO: 1970923 - RNA, 19 nt, Artificial Sequence
  Description of Artificial Sequence: Synthetic oligonucleotide
auaaaucaaggaucgcauu

SEQ ID NO: 1970924 - RNA, 19 nt, Artificial Sequence
  Description of Artificial Sequence: Synthetic oligonucleotide
ugaagacucucagcgaaac

SEQ ID NO: 1970925 - RNA, 19 nt, Artificial Sequence
  Description of Artificial Sequence: Synthetic oligonucleotide
gaugcagcaauguaguauu

SEQ ID NO: 1970926 - RNA, 19 nt, Artificial Sequence
  Description of Artificial Sequence: Synthetic oligonucleotide
auuuccuucguauggcauu

SEQ ID NO: 1970927 - RNA, 19 nt, Artificial Sequence
  Description of Artificial Sequence: Synthetic oligonucleotide
guacuaagugaagaaucag

SEQ ID NO: 1970928 - RNA, 19 nt, Artificial Sequence
  Description of Artificial Sequence: Synthetic oligonucleotide
auaacucagcaggaaaacu

SEQ ID NO: 1970929 - RNA, 19 nt, Artificial Sequence
  Description of Artificial Sequence: Synthetic oligonucleotide
uaaguugccuuguuaccau

SEQ ID NO: 1970930 - RNA, 19 nt, Artificial Sequence
  Description of Artificial Sequence: Synthetic oligonucleotide
ugccgcuuucguaaagucu

SEQ ID NO: 1970931 - RNA, 19 nt, Artificial Sequence
  Description of Artificial Sequence: Synthetic oligonucleotide
gauaaaucaaggaucgcau

SEQ ID NO: 1970932 - RNA, 19 nt, Artificial Sequence
  Description of Artificial Sequence: Synthetic oligonucleotide
aaauggucgccaucaucau

SEQ ID NO: 1970933 - RNA, 19 nt, Artificial Sequence
  Description of Artificial Sequence: Synthetic oligonucleotide
ugauaccgugucuguaagc

SEQ ID NO: 1970934 - RNA, 19 nt, Artificial Sequence
  Description of Artificial Sequence: Synthetic oligonucleotide
cucagcgaaacaaguaaca

SEQ ID NO: 1970935 - RNA, 19 nt, Artificial Sequence
  Description of Artificial Sequence: Synthetic oligonucleotide
guaagcguuagcaaguucu

SEQ ID NO: 1970936 - RNA, 19 nt, Artificial Sequence
  Description of Artificial Sequence: Synthetic oligonucleotide
aauggucgccaucaucaua

SEQ ID NO: 1970937 - RNA, 19 nt, Artificial Sequence
  Description of Artificial Sequence: Synthetic oligonucleotide
uaccgugucuguaagcguu

SEQ ID NO: 1970938 - RNA, 19 nt, Artificial Sequence
  Description of Artificial Sequence: Synthetic oligonucleotide
uucaauccuuuccacucau

SEQ ID NO: 1970939 - RNA, 19 nt, Artificial Sequence
  Description of Artificial Sequence: Synthetic oligonucleotide
augccgcuuucguaaaguc

SEQ ID NO: 1970940 - RNA, 19 nt, Artificial Sequence
  Description of Artificial Sequence: Synthetic oligonucleotide
aauugauaccgugucugua

SEQ ID NO: 1970941 - RNA, 19 nt, Artificial Sequence
  Description of Artificial Sequence: Synthetic oligonucleotide
uucuaaugcuagugacacc

SEQ ID NO: 1970942 - RNA, 19 nt, Artificial Sequence
  Description of Artificial Sequence: Synthetic oligonucleotide
agugaguuagcaauucaau

SEQ ID NO: 1970943 - RNA, 19 nt, Artificial Sequence
  Description of Artificial Sequence: Synthetic oligonucleotide
uacguccuuccauggauga

SEQ ID NO: 1970944 - RNA, 19 nt, Artificial Sequence
  Description of Artificial Sequence: Synthetic oligonucleotide
cucauauggugcuuucuca

SEQ ID NO: 1970945 - RNA, 19 nt, Artificial Sequence
  Description of Artificial Sequence: Synthetic oligonucleotide
uguaagcguuagcaaguuc

SEQ ID NO: 1970946 - RNA, 19 nt, Artificial Sequence
  Description of Artificial Sequence: Synthetic oligonucleotide
cucucagcgaaacaaguaa

SEQ ID NO: 1970947 - RNA, 19 nt, Artificial Sequence
  Description of Artificial Sequence: Synthetic oligonucleotide
gaucgcauuuccucaaaua

SEQ ID NO: 1970948 - RNA, 19 nt, Artificial Sequence
  Description of Artificial Sequence: Synthetic oligonucleotide
uuccccacacaggaaaaug

SEQ ID NO: 1970949 - RNA, 19 nt, Artificial Sequence
  Description of Artificial Sequence: Synthetic oligonucleotide
ccauauugaagacucucag

SEQ ID NO: 1970950 - RNA, 19 nt, Artificial Sequence
  Description of Artificial Sequence: Synthetic oligonucleotide
agccucuauauacuucaca

SEQ ID NO: 1970951 - RNA, 19 nt, Artificial Sequence
  Description of Artificial Sequence: Synthetic oligonucleotide
aaggcaccuucagugaagu

SEQ ID NO: 1970952 - RNA, 19 nt, Artificial Sequence
  Description of Artificial Sequence: Synthetic oligonucleotide
aaauuugcagucagagguu

SEQ ID NO: 1970953 - RNA, 19 nt, Artificial Sequence
  Description of Artificial Sequence: Synthetic oligonucleotide
gcuagugacaccaauaacu

SEQ ID NO: 1970954 - RNA, 19 nt, Artificial Sequence
  Description of Artificial Sequence: Synthetic oligonucleotide
ugaugccgcuuucguaaag

SEQ ID NO: 1970955 - RNA, 19 nt, Artificial Sequence
  Description of Artificial Sequence: Synthetic oligonucleotide
ucuugaugccgcuuucgua

SEQ ID NO: 1970956 - RNA, 19 nt, Artificial Sequence
  Description of Artificial Sequence: Synthetic oligonucleotide
uuggugcaugggaaaugcc

SEQ ID NO: 1970957 - RNA, 19 nt, Artificial Sequence
  Description of Artificial Sequence: Synthetic oligonucleotide
aagcguuagcaaguucucu

SEQ ID NO: 1970958 - RNA, 19 nt, Artificial Sequence
  Description of Artificial Sequence: Synthetic oligonucleotide
gcagccucuauauacuuca

SEQ ID NO: 1970959 - RNA, 19 nt, Artificial Sequence
  Description of Artificial Sequence: Synthetic oligonucleotide
augccgucuucacagaauu

SEQ ID NO: 1970960 - RNA, 19 nt, Artificial Sequence
  Description of Artificial Sequence: Synthetic oligonucleotide
auucggcccuguaaggcac

SEQ ID NO: 1970961 - RNA, 19 nt, Artificial Sequence
  Description of Artificial Sequence: Synthetic oligonucleotide
uuugcagucagagguucua

SEQ ID NO: 1970962 - RNA, 19 nt, Artificial Sequence
  Description of Artificial Sequence: Synthetic oligonucleotide
gauuggauauuuacguccu

SEQ ID NO: 1970963 - RNA, 19 nt, Artificial Sequence
  Description of Artificial Sequence: Synthetic oligonucleotide
gcuaacacuuccuccagga

SEQ ID NO: 1970964 - RNA, 19 nt, Artificial Sequence
  Description of Artificial Sequence: Synthetic oligonucleotide
ggcaccuucagugaaguuc

SEQ ID NO: 1970965 - RNA, 19 nt, Artificial Sequence
  Description of Artificial Sequence: Synthetic oligonucleotide
auaacucucuauggccuug

SEQ ID NO: 1970966 - RNA, 19 nt, Artificial Sequence
  Description of Artificial Sequence: Synthetic oligonucleotide
auaccgugucuguaagcgu

SEQ ID NO: 1970967 - RNA, 19 nt, Artificial Sequence
  Description of Artificial Sequence: Synthetic oligonucleotide
ucauagcgaugauuguuuu

SEQ ID NO: 1970968 - RNA, 19 nt, Artificial Sequence
  Description of Artificial Sequence: Synthetic oligonucleotide
uccuuccauggaugaaaug

SEQ ID NO: 1970969 - RNA, 19 nt, Artificial Sequence
  Description of Artificial Sequence: Synthetic oligonucleotide
gcuuucguaaagucuggac

SEQ ID NO: 1970970 - RNA, 19 nt, Artificial Sequence
  Description of Artificial Sequence: Synthetic oligonucleotide
uauuccgaugaugggcuuc

SEQ ID NO: 1970971 - RNA, 19 nt, Artificial Sequence
  Description of Artificial Sequence: Synthetic oligonucleotide
ucaauccuuauggguacaa

SEQ ID NO: 1970972 - RNA, 19 nt, Artificial Sequence
  Description of Artificial Sequence: Synthetic oligonucleotide
aguuagcaauucaaucacu

SEQ ID NO: 1970973 - RNA, 19 nt, Artificial Sequence
  Description of Artificial Sequence: Synthetic oligonucleotide
ggaacauucggcccuguaa

SEQ ID NO: 1970974 - RNA, 19 nt, Artificial Sequence
  Description of Artificial Sequence: Synthetic oligonucleotide
gggcaaugaaauugauacc

SEQ ID NO: 1970975 - RNA, 19 nt, Artificial Sequence
  Description of Artificial Sequence: Synthetic oligonucleotide
ggauauuuacguccuucca

SEQ ID NO: 1970976 - RNA, 19 nt, Artificial Sequence
  Description of Artificial Sequence: Synthetic oligonucleotide
aaguugccuuguuaccaua

SEQ ID NO: 1970977 - RNA, 19 nt, Artificial Sequence
  Description of Artificial Sequence: Synthetic oligonucleotide
caauaugcuaacacuuccu

SEQ ID NO: 1970978 - RNA, 19 nt, Artificial Sequence
  Description of Artificial Sequence: Synthetic oligonucleotide
gagagcgucucaaauccaa

SEQ ID NO: 1970979 - RNA, 19 nt, Artificial Sequence
  Description of Artificial Sequence: Synthetic oligonucleotide
caauccuuauggguacaac

SEQ ID NO: 1970980 - RNA, 19 nt, Artificial Sequence
  Description of Artificial Sequence: Synthetic oligonucleotide
cuaaguaaaaugccgucuu

SEQ ID NO: 1970981 - RNA, 19 nt, Artificial Sequence
  Description of Artificial Sequence: Synthetic oligonucleotide
cugcuaaguaaaaugccgu

SEQ ID NO: 1970982 - RNA, 19 nt, Artificial Sequence
  Description of Artificial Sequence: Synthetic oligonucleotide
cacugaauugcucuaaguu

SEQ ID NO: 1970983 - RNA, 19 nt, Artificial Sequence
  Description of Artificial Sequence: Synthetic oligonucleotide
gccacgugggaauaaucug

SEQ ID NO: 1970984 - RNA, 19 nt, Artificial Sequence
  Description of Artificial Sequence: Synthetic oligonucleotide
uugaugccgcuuucguaaa

SEQ ID NO: 1970985 - RNA, 19 nt, Artificial Sequence
  Description of Artificial Sequence: Synthetic oligonucleotide
ugcucuaaguugccuuguu

SEQ ID NO: 1970986 - RNA, 19 nt, Artificial Sequence
  Description of Artificial Sequence: Synthetic oligonucleotide
caccaauaacucagcagga

SEQ ID NO: 1970987 - RNA, 19 nt, Artificial Sequence
  Description of Artificial Sequence: Synthetic oligonucleotide
uccacucauauggugcuuu

SEQ ID NO: 1970988 - RNA, 19 nt, Artificial Sequence
  Description of Artificial Sequence: Synthetic oligonucleotide
aggacgcacagcaggcgac

SEQ ID NO: 1970989 - RNA, 19 nt, Artificial Sequence
  Description of Artificial Sequence: Synthetic oligonucleotide
ccgcuaaccagaaaggaga

SEQ ID NO: 1970990 - RNA, 19 nt, Artificial Sequence
  Description of Artificial Sequence: Synthetic oligonucleotide
caugggaaaugccuuucaa

SEQ ID NO: 1970991 - RNA, 19 nt, Artificial Sequence
  Description of Artificial Sequence: Synthetic oligonucleotide
uucggcccuguaaggcacc

SEQ ID NO: 1970992 - RNA, 19 nt, Artificial Sequence
  Description of Artificial Sequence: Synthetic oligonucleotide
uggaacauucggcccugua

SEQ ID NO: 1970993 - RNA, 19 nt, Artificial Sequence
  Description of Artificial Sequence: Synthetic oligonucleotide
uggccacgugggaauaauc

SEQ ID NO: 1970994 - RNA, 19 nt, Artificial Sequence
  Description of Artificial Sequence: Synthetic oligonucleotide
gcgucucaaauccaagaca

SEQ ID NO: 1970995 - RNA, 19 nt, Artificial Sequence
  Description of Artificial Sequence: Synthetic oligonucleotide
guugccauuagcagugagu

SEQ ID NO: 1970996 - RNA, 19 nt, Artificial Sequence
  Description of Artificial Sequence: Synthetic oligonucleotide
aguugccuuguuaccauau

SEQ ID NO: 1970997 - RNA, 19 nt, Artificial Sequence
  Description of Artificial Sequence: Synthetic oligonucleotide
auacguucucauagcgaug

SEQ ID NO: 1970998 - RNA, 19 nt, Artificial Sequence
  Description of Artificial Sequence: Synthetic oligonucleotide
uuccgggcuucagaaacaa

SEQ ID NO: 1970999 - RNA, 19 nt, Artificial Sequence
  Description of Artificial Sequence: Synthetic oligonucleotide
gaugccgcuuucguaaagu

SEQ ID NO: 1971000 - RNA, 19 nt, Artificial Sequence
  Description of Artificial Sequence: Synthetic oligonucleotide
gcaccuucagugaaguuca

SEQ ID NO: 1971001 - RNA, 19 nt, Artificial Sequence
  Description of Artificial Sequence: Synthetic oligonucleotide
acucucagcgaaacaagua

SEQ ID NO: 1971002 - RNA, 19 nt, Artificial Sequence
  Description of Artificial Sequence: Synthetic oligonucleotide
gacucucagcgaaacaagu

SEQ ID NO: 1971003 - RNA, 19 nt, Artificial Sequence
  Description of Artificial Sequence: Synthetic oligonucleotide
auuugcagucagagguucu

SEQ ID NO: 1971004 - RNA, 19 nt, Artificial Sequence
  Description of Artificial Sequence: Synthetic oligonucleotide
aggaucgcauuuccucaaa

SEQ ID NO: 1971005 - RNA, 19 nt, Artificial Sequence
  Description of Artificial Sequence: Synthetic oligonucleotide
gguacaacucuugcaccug

SEQ ID NO: 1971006 - RNA, 19 nt, Artificial Sequence
  Description of Artificial Sequence: Synthetic oligonucleotide
ccacgugggaauaaucuga

SEQ ID NO: 1971007 - RNA, 19 nt, Artificial Sequence
  Description of Artificial Sequence: Synthetic oligonucleotide
cauguacuaagugaagaau

SEQ ID NO: 1971008 - RNA, 19 nt, Artificial Sequence
  Description of Artificial Sequence: Synthetic oligonucleotide
cacugcucaaauguagaaa

SEQ ID NO: 1971009 - RNA, 19 nt, Artificial Sequence
  Description of Artificial Sequence: Synthetic oligonucleotide
cgcacagcagcaaacccag

SEQ ID NO: 1971010 - RNA, 19 nt, Artificial Sequence
  Description of Artificial Sequence: Synthetic oligonucleotide
ccaauaacucagcaggaaa

SEQ ID NO: 1971011 - RNA, 19 nt, Artificial Sequence
  Description of Artificial Sequence: Synthetic oligonucleotide
ccagcauagucuuccugug

SEQ ID NO: 1971012 - RNA, 19 nt, Artificial Sequence
  Description of Artificial Sequence: Synthetic oligonucleotide
uuggccacgugggaauaau

SEQ ID NO: 1971013 - RNA, 19 nt, Artificial Sequence
  Description of Artificial Sequence: Synthetic oligonucleotide
aggcgacccagguucgcca

SEQ ID NO: 1971014 - RNA, 19 nt, Artificial Sequence
  Description of Artificial Sequence: Synthetic oligonucleotide
ugccgucuucacagaauuu

SEQ ID NO: 1971015 - RNA, 19 nt, Artificial Sequence
  Description of Artificial Sequence: Synthetic oligonucleotide
cuccgcuaaccagaaagga

SEQ ID NO: 1971016 - RNA, 19 nt, Artificial Sequence
  Description of Artificial Sequence: Synthetic oligonucleotide
aggaugcagcaauguagua

SEQ ID NO: 1971017 - RNA, 19 nt, Artificial Sequence
  Description of Artificial Sequence: Synthetic oligonucleotide
cguuagcaaguucucuccg

SEQ ID NO: 1971018 - RNA, 19 nt, Artificial Sequence
  Description of Artificial Sequence: Synthetic oligonucleotide
uccgggcuucagaaacaaa

SEQ ID NO: 1971019 - RNA, 19 nt, Artificial Sequence
  Description of Artificial Sequence: Synthetic oligonucleotide
gcuaaguaaaaugccgucu

SEQ ID NO: 1971020 - RNA, 19 nt, Artificial Sequence
  Description of Artificial Sequence: Synthetic oligonucleotide
gcaauucaaucacugaauu

SEQ ID NO: 1971021 - RNA, 19 nt, Artificial Sequence
  Description of Artificial Sequence: Synthetic oligonucleotide
caggcgacccagguucgcc

SEQ ID NO: 1971022 - RNA, 19 nt, Artificial Sequence
  Description of Artificial Sequence: Synthetic oligonucleotide
caguauaaacugguuugaa

SEQ ID NO: 1971023 - RNA, 19 nt, Artificial Sequence
  Description of Artificial Sequence: Synthetic oligonucleotide
uggucgccaucaucauaac

SEQ ID NO: 1971024 - RNA, 19 nt, Artificial Sequence
  Description of Artificial Sequence: Synthetic oligonucleotide
ucucuccgcuaaccagaaa

SEQ ID NO: 1971025 - RNA, 19 nt, Artificial Sequence
  Description of Artificial Sequence: Synthetic oligonucleotide
agcauagauuggauauuua

SEQ ID NO: 1971026 - RNA, 19 nt, Artificial Sequence
  Description of Artificial Sequence: Synthetic oligonucleotide
cgcuaaccagaaaggagag

SEQ ID NO: 1971027 - RNA, 19 nt, Artificial Sequence
  Description of Artificial Sequence: Synthetic oligonucleotide
ccagaaaggagagcgucuc

SEQ ID NO: 1971028 - RNA, 19 nt, Artificial Sequence
  Description of Artificial Sequence: Synthetic oligonucleotide
cauuuccuucguauggcau

SEQ ID NO: 1971029 - RNA, 19 nt, Artificial Sequence
  Description of Artificial Sequence: Synthetic oligonucleotide
ggaugcagcaauguaguau

SEQ ID NO: 1971030 - RNA, 19 nt, Artificial Sequence
  Description of Artificial Sequence: Synthetic oligonucleotide
ccgcuuucguaaagucugg

SEQ ID NO: 1971031 - RNA, 19 nt, Artificial Sequence
  Description of Artificial Sequence: Synthetic oligonucleotide
gacccagguucgccaucgc

SEQ ID NO: 1971032 - RNA, 19 nt, Artificial Sequence
  Description of Artificial Sequence: Synthetic oligonucleotide
gcgaaacaaguaacacugc

SEQ ID NO: 1971033 - RNA, 19 nt, Artificial Sequence
  Description of Artificial Sequence: Synthetic oligonucleotide
cgcauuuccucaaauacgu

SEQ ID NO: 1971034 - RNA, 19 nt, Artificial Sequence
  Description of Artificial Sequence: Synthetic oligonucleotide
cccgcacagcagcaaaccc

SEQ ID NO: 1971035 - RNA, 19 nt, Artificial Sequence
  Description of Artificial Sequence: Synthetic oligonucleotide
cauaacucucuauggccuu

SEQ ID NO: 1971036 - RNA, 19 nt, Artificial Sequence
  Description of Artificial Sequence: Synthetic oligonucleotide
ccgcacagcagcaaaccca

SEQ ID NO: 1971037 - RNA, 19 nt, Artificial Sequence
  Description of Artificial Sequence: Synthetic oligonucleotide
ccuguguaagaucaauccu

SEQ ID NO: 1971038 - RNA, 19 nt, Artificial Sequence
  Description of Artificial Sequence: Synthetic oligonucleotide
ucggcccuguaaggcaccu

SEQ ID NO: 1971039 - RNA, 19 nt, Artificial Sequence
  Description of Artificial Sequence: Synthetic oligonucleotide
cgucucaaauccaagacau

SEQ ID NO: 1971040 - RNA, 19 nt, Artificial Sequence
  Description of Artificial Sequence: Synthetic oligonucleotide
cagagguucuaaugcuagu

SEQ ID NO: 1971041 - RNA, 19 nt, Artificial Sequence
  Description of Artificial Sequence: Synthetic oligonucleotide
uuccacucauauggugcuu

SEQ ID NO: 1971042 - RNA, 19 nt, Artificial Sequence
  Description of Artificial Sequence: Synthetic oligonucleotide
ccucuauauacuucacaua

SEQ ID NO: 1971043 - RNA, 19 nt, Artificial Sequence
  Description of Artificial Sequence: Synthetic oligonucleotide
gcaaugaaauugauaccgu

SEQ ID NO: 1971044 - RNA, 19 nt, Artificial Sequence
  Description of Artificial Sequence: Synthetic oligonucleotide
cagcauagauuggauauuu

SEQ ID NO: 1971045 - RNA, 19 nt, Artificial Sequence
  Description of Artificial Sequence: Synthetic oligonucleotide
gcccgcacagcagcaaacc

SEQ ID NO: 1971046 - RNA, 19 nt, Artificial Sequence
  Description of Artificial Sequence: Synthetic oligonucleotide
ccacucauauggugcuuuc

SEQ ID NO: 1971047 - RNA, 19 nt, Artificial Sequence
  Description of Artificial Sequence: Synthetic oligonucleotide
acguccuuccauggaugaa

SEQ ID NO: 1971048 - RNA, 19 nt, Artificial Sequence
  Description of Artificial Sequence: Synthetic oligonucleotide
cagcauagucuuccugugu

SEQ ID NO: 1971049 - RNA, 19 nt, Artificial Sequence
  Description of Artificial Sequence: Synthetic oligonucleotide
ggucgccaucaucauaacu

SEQ ID NO: 1971050 - RNA, 19 nt, Artificial Sequence
  Description of Artificial Sequence: Synthetic oligonucleotide
accgugucuguaagcguua

SEQ ID NO: 1971051 - RNA, 19 nt, Artificial Sequence
  Description of Artificial Sequence: Synthetic oligonucleotide
uuccuucguauggcauuuu

SEQ ID NO: 1971052 - RNA, 19 nt, Artificial Sequence
  Description of Artificial Sequence: Synthetic oligonucleotide
cacucauauggugcuuucu

SEQ ID NO: 1971053 - RNA, 19 nt, Artificial Sequence
  Description of Artificial Sequence: Synthetic oligonucleotide
ggaucgcauuuccucaaau

SEQ ID NO: 1971054 - RNA, 19 nt, Artificial Sequence
  Description of Artificial Sequence: Synthetic oligonucleotide
ggagagcgucucaaaucca

SEQ ID NO: 1971055 - RNA, 19 nt, Artificial Sequence
  Description of Artificial Sequence: Synthetic oligonucleotide
ggaaaauggucgccaucau

SEQ ID NO: 1971056 - RNA, 19 nt, Artificial Sequence
  Description of Artificial Sequence: Synthetic oligonucleotide
ccuuauggguacaacucuu

SEQ ID NO: 1971057 - RNA, 19 nt, Artificial Sequence
  Description of Artificial Sequence: Synthetic oligonucleotide
ccgugucuguaagcguuag

SEQ ID NO: 1971058 - RNA, 19 nt, Artificial Sequence
  Description of Artificial Sequence: Synthetic oligonucleotide
cuguaagcguuagcaaguu

SEQ ID NO: 1971059 - RNA, 19 nt, Artificial Sequence
  Description of Artificial Sequence: Synthetic oligonucleotide
uuccgaugaugggcuucuu

SEQ ID NO: 1971060 - RNA, 19 nt, Artificial Sequence
  Description of Artificial Sequence: Synthetic oligonucleotide
cgcuuucguaaagucugga

SEQ ID NO: 1971061 - RNA, 19 nt, Artificial Sequence
  Description of Artificial Sequence: Synthetic oligonucleotide
gcgggcccgcacagcagca

SEQ ID NO: 1971062 - RNA, 19 nt, Artificial Sequence
  Description of Artificial Sequence: Synthetic oligonucleotide
cggcccuguaaggcaccuu

SEQ ID NO: 1971063 - RNA, 19 nt, Artificial Sequence
  Description of Artificial Sequence: Synthetic oligonucleotide
uugaaaaucacccagaacg

SEQ ID NO: 1971064 - RNA, 19 nt, Artificial Sequence
  Description of Artificial Sequence: Synthetic oligonucleotide
gagacuagaacccaaagcg

SEQ ID NO: 1971065 - RNA, 19 nt, Artificial Sequence
  Description of Artificial Sequence: Synthetic oligonucleotide
ucuguauuaagaaacaaac

SEQ ID NO: 1971066 - RNA, 19 nt, Artificial Sequence
  Description of Artificial Sequence: Synthetic oligonucleotide
uucucuuugaaaaucaccc

SEQ ID NO: 1971067 - RNA, 19 nt, Artificial Sequence
  Description of Artificial Sequence: Synthetic oligonucleotide
accuuaugagacuagaacc

SEQ ID NO: 1971068 - RNA, 19 nt, Artificial Sequence
  Description of Artificial Sequence: Synthetic oligonucleotide
ucauugaugauccuuagcu

SEQ ID NO: 1971069 - RNA, 19 nt, Artificial Sequence
  Description of Artificial Sequence: Synthetic oligonucleotide
aaagcucucacuuauggcu

SEQ ID NO: 1971070 - RNA, 19 nt, Artificial Sequence
  Description of Artificial Sequence: Synthetic oligonucleotide
guuaucgccacauugagcc

SEQ ID NO: 1971071 - RNA, 19 nt, Artificial Sequence
  Description of Artificial Sequence: Synthetic oligonucleotide
aaggacauaaucuuacugu

SEQ ID NO: 1971072 - RNA, 19 nt, Artificial Sequence
  Description of Artificial Sequence: Synthetic oligonucleotide
aacaagcucucgcucaugc

SEQ ID NO: 1971073 - RNA, 19 nt, Artificial Sequence
  Description of Artificial Sequence: Synthetic oligonucleotide
aaugccuuacuucuuggag

SEQ ID NO: 1971074 - RNA, 19 nt, Artificial Sequence
  Description of Artificial Sequence: Synthetic oligonucleotide
aagaguuccauccuuauua

SEQ ID NO: 1971075 - RNA, 19 nt, Artificial Sequence
  Description of Artificial Sequence: Synthetic oligonucleotide
  modified_base (4)..(4): a, c, u, g, unknown or other
ucunauacaccgaauacua

SEQ ID NO: 1971076 - RNA, 19 nt, Artificial Sequence
  Description of Artificial Sequence: Synthetic oligonucleotide
guauuaagaaacaaacagg

SEQ ID NO: 1971077 - RNA, 19 nt, Artificial Sequence
  Description of Artificial Sequence: Synthetic oligonucleotide
  modified_base (7)..(7): a, c, u, g, unknown or other
ucuucunauacaccgaaua

SEQ ID NO: 1971078 - RNA, 19 nt, Artificial Sequence
  Description of Artificial Sequence: Synthetic oligonucleotide
uuaucagaauaacuggcag

SEQ ID NO: 1971079 - RNA, 19 nt, Artificial Sequence
  Description of Artificial Sequence: Synthetic oligonucleotide
aaucguaccaaccagcauu

SEQ ID NO: 1971080 - RNA, 19 nt, Artificial Sequence
  Description of Artificial Sequence: Synthetic oligonucleotide
ucagauuuaaucgauacau

SEQ ID NO: 1971081 - RNA, 19 nt, Artificial Sequence
  Description of Artificial Sequence: Synthetic oligonucleotide
aauaacuggcagaaaacuc

SEQ ID NO: 1971082 - RNA, 19 nt, Artificial Sequence
  Description of Artificial Sequence: Synthetic oligonucleotide
ugagacuagaacccaaagc

SEQ ID NO: 1971083 - RNA, 19 nt, Artificial Sequence
  Description of Artificial Sequence: Synthetic oligonucleotide
  modified_base (2)..(2): a, c, u, g, unknown or other
unauacaccgaauacuacu

SEQ ID NO: 1971084 - RNA, 19 nt, Artificial Sequence
  Description of Artificial Sequence: Synthetic oligonucleotide
uagaaagacgaccagucug

SEQ ID NO: 1971085 - RNA, 19 nt, Artificial Sequence
  Description of Artificial Sequence: Synthetic oligonucleotide
aucaagaaugucuggguac

SEQ ID NO: 1971086 - RNA, 19 nt, Artificial Sequence
  Description of Artificial Sequence: Synthetic oligonucleotide
ucucgugcucccuugaugg

SEQ ID NO: 1971087 - RNA, 19 nt, Artificial Sequence
  Description of Artificial Sequence: Synthetic oligonucleotide
cuuaaggacauaaucuuac

SEQ ID NO: 1971088 - RNA, 19 nt, Artificial Sequence
  Description of Artificial Sequence: Synthetic oligonucleotide
aaucgauacauuuccuuca

SEQ ID NO: 1971089 - RNA, 19 nt, Artificial Sequence
  Description of Artificial Sequence: Synthetic oligonucleotide
ucugguuaucgccacauug

SEQ ID NO: 1971090 - RNA, 19 nt, Artificial Sequence
  Description of Artificial Sequence: Synthetic oligonucleotide
uaaggacauaaucuuacug

SEQ ID NO: 1971091 - RNA, 19 nt, Artificial Sequence
  Description of Artificial Sequence: Synthetic oligonucleotide
cuguauggugcaaugaugc

SEQ ID NO: 1971092 - RNA, 19 nt, Artificial Sequence
  Description of Artificial Sequence: Synthetic oligonucleotide
uugacuuccaccaucccga

SEQ ID NO: 1971093 - RNA, 19 nt, Artificial Sequence
  Description of Artificial Sequence: Synthetic oligonucleotide
gauugucuggcucaaacac

SEQ ID NO: 1971094 - RNA, 19 nt, Artificial Sequence
  Description of Artificial Sequence: Synthetic oligonucleotide
aaaccgagguuagaaagac

SEQ ID NO: 1971095 - RNA, 19 nt, Artificial Sequence
  Description of Artificial Sequence: Synthetic oligonucleotide
cugggcucagauuuaaucg

SEQ ID NO: 1971096 - RNA, 19 nt, Artificial Sequence
  Description of Artificial Sequence: Synthetic oligonucleotide
  modified_base (15)..(15): a, c, u, g, unknown or other
aggacagcucuucunauac

SEQ ID NO: 1971097 - RNA, 19 nt, Artificial Sequence
  Description of Artificial Sequence: Synthetic oligonucleotide
aauacuacuggcgacacuu

SEQ ID NO: 1971098 - RNA, 19 nt, Artificial Sequence
  Description of Artificial Sequence: Synthetic oligonucleotide
gagcuuauugcuuaaggac

SEQ ID NO: 1971099 - RNA, 19 nt, Artificial Sequence
  Description of Artificial Sequence: Synthetic oligonucleotide
ugagcuuauugcuuaagga

SEQ ID NO: 1971100 - RNA, 19 nt, Artificial Sequence
  Description of Artificial Sequence: Synthetic oligonucleotide
gaaagucucgcucaggaca

SEQ ID NO: 1971101 - RNA, 19 nt, Artificial Sequence
  Description of Artificial Sequence: Synthetic oligonucleotide
uggagaaucguaccaacca

SEQ ID NO: 1971102 - RNA, 19 nt, Artificial Sequence
  Description of Artificial Sequence: Synthetic oligonucleotide
aagacgaccagucuggcuu

SEQ ID NO: 1971103 - RNA, 19 nt, Artificial Sequence
  Description of Artificial Sequence: Synthetic oligonucleotide
auccuuauuacuccuaaca

SEQ ID NO: 1971104 - RNA, 19 nt, Artificial Sequence
  Description of Artificial Sequence: Synthetic oligonucleotide
aguuccauccuuauuacuc

SEQ ID NO: 1971105 - RNA, 19 nt, Artificial Sequence
  Description of Artificial Sequence: Synthetic oligonucleotide
ugucaacugcacaacggcg

SEQ ID NO: 1971106 - RNA, 19 nt, Artificial Sequence
  Description of Artificial Sequence: Synthetic oligonucleotide
guugacuuccaccaucccg

SEQ ID NO: 1971107 - RNA, 19 nt, Artificial Sequence
  Description of Artificial Sequence: Synthetic oligonucleotide
aacaggauugucuggcuca

SEQ ID NO: 1971108 - RNA, 19 nt, Artificial Sequence
  Description of Artificial Sequence: Synthetic oligonucleotide
gaccuuaugagacuagaac

SEQ ID NO: 1971109 - RNA, 19 nt, Artificial Sequence
  Description of Artificial Sequence: Synthetic oligonucleotide
uucauggagaaucguacca

SEQ ID NO: 1971110 - RNA, 19 nt, Artificial Sequence
  Description of Artificial Sequence: Synthetic oligonucleotide
uaaucgauacauuuccuuc

SEQ ID NO: 1971111 - RNA, 19 nt, Artificial Sequence
  Description of Artificial Sequence: Synthetic oligonucleotide
  modified_base (11)..(11): a, c, u, g, unknown or other
cagcucuucunauacaccg

SEQ ID NO: 1971112 - RNA, 19 nt, Artificial Sequence
  Description of Artificial Sequence: Synthetic oligonucleotide
  modified_base (5)..(5): a, c, u, g, unknown or other
uucunauacaccgaauacu

SEQ ID NO: 1971113 - RNA, 19 nt, Artificial Sequence
  Description of Artificial Sequence: Synthetic oligonucleotide
ucgccaaucuuucagcagc

SEQ ID NO: 1971114 - RNA, 19 nt, Artificial Sequence
  Description of Artificial Sequence: Synthetic oligonucleotide
uuggaaagcaagcuccggc

SEQ ID NO: 1971115 - RNA, 19 nt, Artificial Sequence
  Description of Artificial Sequence: Synthetic oligonucleotide
uucguaugugagcuuauug

SEQ ID NO: 1971116 - RNA, 19 nt, Artificial Sequence
  Description of Artificial Sequence: Synthetic oligonucleotide
uccuuauuacuccuaacaa

SEQ ID NO: 1971117 - RNA, 19 nt, Artificial Sequence
  Description of Artificial Sequence: Synthetic oligonucleotide
aagacuucauggagaaucg

SEQ ID NO: 1971118 - RNA, 19 nt, Artificial Sequence
  Description of Artificial Sequence: Synthetic oligonucleotide
uggaagguccacaauuagc

SEQ ID NO: 1971119 - RNA, 19 nt, Artificial Sequence
  Description of Artificial Sequence: Synthetic oligonucleotide
uuuaaucgauacauuuccu

SEQ ID NO: 1971120 - RNA, 19 nt, Artificial Sequence
  Description of Artificial Sequence: Synthetic oligonucleotide
aggguuaucacugcauugg

SEQ ID NO: 1971121 - RNA, 19 nt, Artificial Sequence
  Description of Artificial Sequence: Synthetic oligonucleotide
ugccuuacuucuuggagag

SEQ ID NO: 1971122 - RNA, 19 nt, Artificial Sequence
  Description of Artificial Sequence: Synthetic oligonucleotide
agaaagacgaccagucugg

SEQ ID NO: 1971123 - RNA, 19 nt, Artificial Sequence
  Description of Artificial Sequence: Synthetic oligonucleotide
  modified_base (6)..(6): a, c, u, g, unknown or other
cuucunauacaccgaauac

SEQ ID NO: 1971124 - RNA, 19 nt, Artificial Sequence
  Description of Artificial Sequence: Synthetic oligonucleotide
uccucaacuucacauuuca

SEQ ID NO: 1971125 - RNA, 19 nt, Artificial Sequence
  Description of Artificial Sequence: Synthetic oligonucleotide
guauuugucgacuguguug

SEQ ID NO: 1971126 - RNA, 19 nt, Artificial Sequence
  Description of Artificial Sequence: Synthetic oligonucleotide
cauuucauuucaucugggc

SEQ ID NO: 1971127 - RNA, 19 nt, Artificial Sequence
  Description of Artificial Sequence: Synthetic oligonucleotide
augccaauauuggaggggc

SEQ ID NO: 1971128 - RNA, 19 nt, Artificial Sequence
  Description of Artificial Sequence: Synthetic oligonucleotide
ugugccagagaucaagaau

SEQ ID NO: 1971129 - RNA, 19 nt, Artificial Sequence
  Description of Artificial Sequence: Synthetic oligonucleotide
uggauaucugcauggaccu

SEQ ID NO: 1971130 - RNA, 19 nt, Artificial Sequence
  Description of Artificial Sequence: Synthetic oligonucleotide
ugguuaucgccacauugag

SEQ ID NO: 1971131 - RNA, 19 nt, Artificial Sequence
  Description of Artificial Sequence: Synthetic oligonucleotide
aucagagacccugaaaguc

SEQ ID NO: 1971132 - RNA, 19 nt, Artificial Sequence
  Description of Artificial Sequence: Synthetic oligonucleotide
gaugccaauauuggagggg

SEQ ID NO: 1971133 - RNA, 19 nt, Artificial Sequence
  Description of Artificial Sequence: Synthetic oligonucleotide
acuccuaacaaaggacacc

SEQ ID NO: 1971134 - RNA, 19 nt, Artificial Sequence
  Description of Artificial Sequence: Synthetic oligonucleotide
uaugugagcuuauugcuua

SEQ ID NO: 1971135 - RNA, 19 nt, Artificial Sequence
  Description of Artificial Sequence: Synthetic oligonucleotide
ucugggcucagauuuaauc

SEQ ID NO: 1971136 - RNA, 19 nt, Artificial Sequence
  Description of Artificial Sequence: Synthetic oligonucleotide
ggguuaucagaauaacugg

SEQ ID NO: 1971137 - RNA, 19 nt, Artificial Sequence
  Description of Artificial Sequence: Synthetic oligonucleotide
ugcuuaaggacauaaucuu

SEQ ID NO: 1971138 - RNA, 19 nt, Artificial Sequence
  Description of Artificial Sequence: Synthetic oligonucleotide
cuuguucugcuccagucgc

SEQ ID NO: 1971139 - RNA, 19 nt, Artificial Sequence
  Description of Artificial Sequence: Synthetic oligonucleotide
cuucauggagaaucguacc

SEQ ID NO: 1971140 - RNA, 19 nt, Artificial Sequence
  Description of Artificial Sequence: Synthetic oligonucleotide
uuaaggacauaaucuuacu

SEQ ID NO: 1971141 - RNA, 19 nt, Artificial Sequence
  Description of Artificial Sequence: Synthetic oligonucleotide
auacaccgaauacuacugg

SEQ ID NO: 1971142 - RNA, 19 nt, Artificial Sequence
  Description of Artificial Sequence: Synthetic oligonucleotide
aaaaccgagguuagaaaga

SEQ ID NO: 1971143 - RNA, 19 nt, Artificial Sequence
  Description of Artificial Sequence: Synthetic oligonucleotide
agucgcuuaaacaagcucu

SEQ ID NO: 1971144 - RNA, 19 nt, Artificial Sequence
  Description of Artificial Sequence: Synthetic oligonucleotide
acguccuugaaguugggca

SEQ ID NO: 1971145 - RNA, 19 nt, Artificial Sequence
  Description of Artificial Sequence: Synthetic oligonucleotide
agaucaagaaugucugggu

SEQ ID NO: 1971146 - RNA, 19 nt, Artificial Sequence
  Description of Artificial Sequence: Synthetic oligonucleotide
guuccauccuuauuacucc

SEQ ID NO: 1971147 - RNA, 19 nt, Artificial Sequence
  Description of Artificial Sequence: Synthetic oligonucleotide
uguaaacuucuggauaucu

SEQ ID NO: 1971148 - RNA, 19 nt, Artificial Sequence
  Description of Artificial Sequence: Synthetic oligonucleotide
acaacggcguucuuguucu

SEQ ID NO: 1971149 - RNA, 19 nt, Artificial Sequence
  Description of Artificial Sequence: Synthetic oligonucleotide
accgaauacuacuggcgac

SEQ ID NO: 1971150 - RNA, 19 nt, Artificial Sequence
  Description of Artificial Sequence: Synthetic oligonucleotide
cuacuggcgacacuugugc

SEQ ID NO: 1971151 - RNA, 19 nt, Artificial Sequence
  Description of Artificial Sequence: Synthetic oligonucleotide
uacuguucauucuguacug

SEQ ID NO: 1971152 - RNA, 19 nt, Artificial Sequence
  Description of Artificial Sequence: Synthetic oligonucleotide
gaccuuaucuguauuaaga

SEQ ID NO: 1971153 - RNA, 19 nt, Artificial Sequence
  Description of Artificial Sequence: Synthetic oligonucleotide
ccuuaugagacuagaaccc

SEQ ID NO: 1971154 - RNA, 19 nt, Artificial Sequence
  Description of Artificial Sequence: Synthetic oligonucleotide
cauugaugauccuuagcug

SEQ ID NO: 1971155 - RNA, 19 nt, Artificial Sequence
  Description of Artificial Sequence: Synthetic oligonucleotide
cugucaacugcacaacggc

SEQ ID NO: 1971156 - RNA, 19 nt, Artificial Sequence
  Description of Artificial Sequence: Synthetic oligonucleotide
ucaagaaugucuggguaca

SEQ ID NO: 1971157 - RNA, 19 nt, Artificial Sequence
  Description of Artificial Sequence: Synthetic oligonucleotide
cuuaaacaagcucucgcuc

SEQ ID NO: 1971158 - RNA, 19 nt, Artificial Sequence
  Description of Artificial Sequence: Synthetic oligonucleotide
aucagaauaacuggcagaa

SEQ ID NO: 1971159 - RNA, 19 nt, Artificial Sequence
  Description of Artificial Sequence: Synthetic oligonucleotide
augagacuagaacccaaag

SEQ ID NO: 1971160 - RNA, 19 nt, Artificial Sequence
  Description of Artificial Sequence: Synthetic oligonucleotide
accuuaucuguauuaagaa

SEQ ID NO: 1971161 - RNA, 19 nt, Artificial Sequence
  Description of Artificial Sequence: Synthetic oligonucleotide
guaccaaccagcauuuggc

SEQ ID NO: 1971162 - RNA, 19 nt, Artificial Sequence
  Description of Artificial Sequence: Synthetic oligonucleotide
gcaaagcucucacuuaugg

SEQ ID NO: 1971163 - RNA, 19 nt, Artificial Sequence
  Description of Artificial Sequence: Synthetic oligonucleotide
gagguuagaaagacgacca

SEQ ID NO: 1971164 - RNA, 19 nt, Artificial Sequence
  Description of Artificial Sequence: Synthetic oligonucleotide
caaagcucucacuuauggc

SEQ ID NO: 1971165 - RNA, 19 nt, Artificial Sequence
  Description of Artificial Sequence: Synthetic oligonucleotide
acaagcucucgcucaugcc

SEQ ID NO: 1971166 - RNA, 19 nt, Artificial Sequence
  Description of Artificial Sequence: Synthetic oligonucleotide
gacuagaacccaaagcgac

SEQ ID NO: 1971167 - RNA, 19 nt, Artificial Sequence
  Description of Artificial Sequence: Synthetic oligonucleotide
ucuggauaucugcauggac

SEQ ID NO: 1971168 - RNA, 19 nt, Artificial Sequence
  Description of Artificial Sequence: Synthetic oligonucleotide
auggagaaucguaccaacc

SEQ ID NO: 1971169 - RNA, 19 nt, Artificial Sequence
  Description of Artificial Sequence: Synthetic oligonucleotide
  modified_base (3)..(3): a, c, u, g, unknown or other
cunauacaccgaauacuac

SEQ ID NO: 1971170 - RNA, 19 nt, Artificial Sequence
  Description of Artificial Sequence: Synthetic oligonucleotide
uacuccuaacaaaggacac

SEQ ID NO: 1971171 - RNA, 19 nt, Artificial Sequence
  Description of Artificial Sequence: Synthetic oligonucleotide
augccuuacuucuuggaga

SEQ ID NO: 1971172 - RNA, 19 nt, Artificial Sequence
  Description of Artificial Sequence: Synthetic oligonucleotide
uuuggaaagcaagcuccgg

SEQ ID NO: 1971173 - RNA, 19 nt, Artificial Sequence
  Description of Artificial Sequence: Synthetic oligonucleotide
gaguuuggaaagcaagcuc

SEQ ID NO: 1971174 - RNA, 19 nt, Artificial Sequence
  Description of Artificial Sequence: Synthetic oligonucleotide
gagaaucguaccaaccagc

SEQ ID NO: 1971175 - RNA, 19 nt, Artificial Sequence
  Description of Artificial Sequence: Synthetic oligonucleotide
cucggucugaaccacacuc

SEQ ID NO: 1971176 - RNA, 19 nt, Artificial Sequence
  Description of Artificial Sequence: Synthetic oligonucleotide
accgagguuagaaagacga

SEQ ID NO: 1971177 - RNA, 19 nt, Artificial Sequence
  Description of Artificial Sequence: Synthetic oligonucleotide
ucggucugaaccacacucc

SEQ ID NO: 1971178 - RNA, 19 nt, Artificial Sequence
  Description of Artificial Sequence: Synthetic oligonucleotide
acugucaacugcacaacgg

SEQ ID NO: 1971179 - RNA, 19 nt, Artificial Sequence
  Description of Artificial Sequence: Synthetic oligonucleotide
aacuccucaacuucacauu

SEQ ID NO: 1971180 - RNA, 19 nt, Artificial Sequence
  Description of Artificial Sequence: Synthetic oligonucleotide
cucccuugauggaaggucc

SEQ ID NO: 1971181 - RNA, 19 nt, Artificial Sequence
  Description of Artificial Sequence: Synthetic oligonucleotide
auggaagguccacaauuag

SEQ ID NO: 1971182 - RNA, 19 nt, Artificial Sequence
  Description of Artificial Sequence: Synthetic oligonucleotide
uugucgacuguguugacuu

SEQ ID NO: 1971183 - RNA, 19 nt, Artificial Sequence
  Description of Artificial Sequence: Synthetic oligonucleotide
aggacauaaucuuacuguu

SEQ ID NO: 1971184 - RNA, 19 nt, Artificial Sequence
  Description of Artificial Sequence: Synthetic oligonucleotide
acaccgaauacuacuggcg

SEQ ID NO: 1971185 - RNA, 19 nt, Artificial Sequence
  Description of Artificial Sequence: Synthetic oligonucleotide
cuuagcugcugccuguaug

SEQ ID NO: 1971186 - RNA, 19 nt, Artificial Sequence
  Description of Artificial Sequence: Synthetic oligonucleotide
uuaucgccacauugagccg

SEQ ID NO: 1971187 - RNA, 19 nt, Artificial Sequence
  Description of Artificial Sequence: Synthetic oligonucleotide
guuuggaaagcaagcuccg

SEQ ID NO: 1971188 - RNA, 19 nt, Artificial Sequence
  Description of Artificial Sequence: Synthetic oligonucleotide
ggagaaucguaccaaccag

SEQ ID NO: 1971189 - RNA, 19 nt, Artificial Sequence
  Description of Artificial Sequence: Synthetic oligonucleotide
ucuggggcaaagcucucac

SEQ ID NO: 1971190 - RNA, 19 nt, Artificial Sequence
  Description of Artificial Sequence: Synthetic oligonucleotide
gacccugaaagucucgcuc

SEQ ID NO: 1971191 - RNA, 19 nt, Artificial Sequence
  Description of Artificial Sequence: Synthetic oligonucleotide
uacuacuggcgacacuugu

SEQ ID NO: 1971192 - RNA, 19 nt, Artificial Sequence
  Description of Artificial Sequence: Synthetic oligonucleotide
cugguuaucgccacauuga

SEQ ID NO: 1971193 - RNA, 19 nt, Artificial Sequence
  Description of Artificial Sequence: Synthetic oligonucleotide
ugaaagucucgcucaggac

SEQ ID NO: 1971194 - RNA, 19 nt, Artificial Sequence
  Description of Artificial Sequence: Synthetic oligonucleotide
ggagaguuuggaaagcaag

SEQ ID NO: 1971195 - RNA, 19 nt, Artificial Sequence
  Description of Artificial Sequence: Synthetic oligonucleotide
cacugucaacugcacaacg

SEQ ID NO: 1971196 - RNA, 19 nt, Artificial Sequence
  Description of Artificial Sequence: Synthetic oligonucleotide
accaucccgacagaagaac

SEQ ID NO: 1971197 - RNA, 19 nt, Artificial Sequence
  Description of Artificial Sequence: Synthetic oligonucleotide
gaucaagaaugucugggua

SEQ ID NO: 1971198 - RNA, 19 nt, Artificial Sequence
  Description of Artificial Sequence: Synthetic oligonucleotide
uggcucaaacacugcagcc

SEQ ID NO: 1971199 - RNA, 19 nt, Artificial Sequence
  Description of Artificial Sequence: Synthetic oligonucleotide
uccaggcuccgcuugacgu

SEQ ID NO: 1971200 - RNA, 19 nt, Artificial Sequence
  Description of Artificial Sequence: Synthetic oligonucleotide
gaaaacuccaggcuccgcu

SEQ ID NO: 1971201 - RNA, 19 nt, Artificial Sequence
  Description of Artificial Sequence: Synthetic oligonucleotide
gcucagauuuaaucgauac

SEQ ID NO: 1971202 - RNA, 19 nt, Artificial Sequence
  Description of Artificial Sequence: Synthetic oligonucleotide
uuugucgacuguguugacu

SEQ ID NO: 1971203 - RNA, 19 nt, Artificial Sequence
  Description of Artificial Sequence: Synthetic oligonucleotide
uggaucagagacccugaaa

SEQ ID NO: 1971204 - RNA, 19 nt, Artificial Sequence
  Description of Artificial Sequence: Synthetic oligonucleotide
agaaucguaccaaccagca

SEQ ID NO: 1971205 - RNA, 19 nt, Artificial Sequence
  Description of Artificial Sequence: Synthetic oligonucleotide
ucgcuuaaacaagcucucg

SEQ ID NO: 1971206 - RNA, 19 nt, Artificial Sequence
  Description of Artificial Sequence: Synthetic oligonucleotide
ucuuacuguucauucugua

SEQ ID NO: 1971207 - RNA, 19 nt, Artificial Sequence
  Description of Artificial Sequence: Synthetic oligonucleotide
ucgacuguguugacuucca

SEQ ID NO: 1971208 - RNA, 19 nt, Artificial Sequence
  Description of Artificial Sequence: Synthetic oligonucleotide
aucgauacauuuccuucaa

SEQ ID NO: 1971209 - RNA, 19 nt, Artificial Sequence
  Description of Artificial Sequence: Synthetic oligonucleotide
aaccgagguuagaaagacg

SEQ ID NO: 1971210 - RNA, 19 nt, Artificial Sequence
  Description of Artificial Sequence: Synthetic oligonucleotide
accagcauuuggcgagugg

SEQ ID NO: 1971211 - RNA, 19 nt, Artificial Sequence
  Description of Artificial Sequence: Synthetic oligonucleotide
uggaccuuaugagacuaga

SEQ ID NO: 1971212 - RNA, 19 nt, Artificial Sequence
  Description of Artificial Sequence: Synthetic oligonucleotide
aacguggcagagacucucg

SEQ ID NO: 1971213 - RNA, 19 nt, Artificial Sequence
  Description of Artificial Sequence: Synthetic oligonucleotide
uguugcucacaccaccauu

SEQ ID NO: 1971214 - RNA, 19 nt, Artificial Sequence
  Description of Artificial Sequence: Synthetic oligonucleotide
agcucucucuguaaacuuc

SEQ ID NO: 1971215 - RNA, 19 nt, Artificial Sequence
  Description of Artificial Sequence: Synthetic oligonucleotide
ccaaccagcauuuggcgag

SEQ ID NO: 1971216 - RNA, 19 nt, Artificial Sequence
  Description of Artificial Sequence: Synthetic oligonucleotide
uuccauccuuauuacuccu

SEQ ID NO: 1971217 - RNA, 19 nt, Artificial Sequence
  Description of Artificial Sequence: Synthetic oligonucleotide
cauccuuauuacuccuaac

SEQ ID NO: 1971218 - RNA, 19 nt, Artificial Sequence
  Description of Artificial Sequence: Synthetic oligonucleotide
gagacccugaaagucucgc

SEQ ID NO: 1971219 - RNA, 19 nt, Artificial Sequence
  Description of Artificial Sequence: Synthetic oligonucleotide
uaucgccacauugagccgu

SEQ ID NO: 1971220 - RNA, 19 nt, Artificial Sequence
  Description of Artificial Sequence: Synthetic oligonucleotide
agaaaacuccaggcuccgc

SEQ ID NO: 1971221 - RNA, 19 nt, Artificial Sequence
  Description of Artificial Sequence: Synthetic oligonucleotide
ugggaccuuaucuguauua

SEQ ID NO: 1971222 - RNA, 19 nt, Artificial Sequence
  Description of Artificial Sequence: Synthetic oligonucleotide
gucgccaaucuuucagcag

SEQ ID NO: 1971223 - RNA, 19 nt, Artificial Sequence
  Description of Artificial Sequence: Synthetic oligonucleotide
auuugucgacuguguugac

SEQ ID NO: 1971224 - RNA, 19 nt, Artificial Sequence
  Description of Artificial Sequence: Synthetic oligonucleotide
ucuugucccuuccuuggua

SEQ ID NO: 1971225 - RNA, 19 nt, Artificial Sequence
  Description of Artificial Sequence: Synthetic oligonucleotide
ggaccuuaucuguauuaag

SEQ ID NO: 1971226 - RNA, 19 nt, Artificial Sequence
  Description of Artificial Sequence: Synthetic oligonucleotide
  modified_base (18)..(18): a, c, u, g, unknown or other
cucaggacagcucuucuna

SEQ ID NO: 1971227 - RNA, 19 nt, Artificial Sequence
  Description of Artificial Sequence: Synthetic oligonucleotide
aagcgcugcagggaggaca

SEQ ID NO: 1971228 - RNA, 19 nt, Artificial Sequence
  Description of Artificial Sequence: Synthetic oligonucleotide
auugagccgucgccaaucu

SEQ ID NO: 1971229 - RNA, 19 nt, Artificial Sequence
  Description of Artificial Sequence: Synthetic oligonucleotide
agacuagaacccaaagcga

SEQ ID NO: 1971230 - RNA, 19 nt, Artificial Sequence
  Description of Artificial Sequence: Synthetic oligonucleotide
acuacuggcgacacuugug

SEQ ID NO: 1971231 - RNA, 19 nt, Artificial Sequence
  Description of Artificial Sequence: Synthetic oligonucleotide
agggguuaucagaauaacu

SEQ ID NO: 1971232 - RNA, 19 nt, Artificial Sequence
  Description of Artificial Sequence: Synthetic oligonucleotide
aaaggacaccaggacgaga

SEQ ID NO: 1971233 - RNA, 19 nt, Artificial Sequence
  Description of Artificial Sequence: Synthetic oligonucleotide
ucccuugauggaaggucca

SEQ ID NO: 1971234 - RNA, 19 nt, Artificial Sequence
  Description of Artificial Sequence: Synthetic oligonucleotide
ucgauacauuuccuucaaa

SEQ ID NO: 1971235 - RNA, 19 nt, Artificial Sequence
  Description of Artificial Sequence: Synthetic oligonucleotide
acuagaacccaaagcgaca

SEQ ID NO: 1971236 - RNA, 19 nt, Artificial Sequence
  Description of Artificial Sequence: Synthetic oligonucleotide
cagucgcuuaaacaagcuc

SEQ ID NO: 1971237 - RNA, 19 nt, Artificial Sequence
  Description of Artificial Sequence: Synthetic oligonucleotide
gacuucauggagaaucgua

SEQ ID NO: 1971238 - RNA, 19 nt, Artificial Sequence
  Description of Artificial Sequence: Synthetic oligonucleotide
aagucucgcucaggacagc

SEQ ID NO: 1971239 - RNA, 19 nt, Artificial Sequence
  Description of Artificial Sequence: Synthetic oligonucleotide
gaaagacgaccagucuggc

SEQ ID NO: 1971240 - RNA, 19 nt, Artificial Sequence
  Description of Artificial Sequence: Synthetic oligonucleotide
uccauccuuauuacuccua

SEQ ID NO: 1971241 - RNA, 19 nt, Artificial Sequence
  Description of Artificial Sequence: Synthetic oligonucleotide
caccgaauacuacuggcga

SEQ ID NO: 1971242 - RNA, 19 nt, Artificial Sequence
  Description of Artificial Sequence: Synthetic oligonucleotide
agacccugaaagucucgcu

SEQ ID NO: 1971243 - RNA, 19 nt, Artificial Sequence
  Description of Artificial Sequence: Synthetic oligonucleotide
cagagacccugaaagucuc

SEQ ID NO: 1971244 - RNA, 19 nt, Artificial Sequence
  Description of Artificial Sequence: Synthetic oligonucleotide
aaacaagcucucgcucaug

SEQ ID NO: 1971245 - RNA, 19 nt, Artificial Sequence
  Description of Artificial Sequence: Synthetic oligonucleotide
  modified_base (17)..(17): a, c, u, g, unknown or other
ucaggacagcucuucunau

SEQ ID NO: 1971246 - RNA, 19 nt, Artificial Sequence
  Description of Artificial Sequence: Synthetic oligonucleotide
aagcucucgcucaugccca

SEQ ID NO: 1971247 - RNA, 19 nt, Artificial Sequence
  Description of Artificial Sequence: Synthetic oligonucleotide
cguaccaaccagcauuugg

SEQ ID NO: 1971248 - RNA, 19 nt, Artificial Sequence
  Description of Artificial Sequence: Synthetic oligonucleotide
  modified_base (10)..(10): a, c, u, g, unknown or other
agcucuucunauacaccga

SEQ ID NO: 1971249 - RNA, 19 nt, Artificial Sequence
  Description of Artificial Sequence: Synthetic oligonucleotide
ccuguauggugcaaugaug

SEQ ID NO: 1971250 - RNA, 19 nt, Artificial Sequence
  Description of Artificial Sequence: Synthetic oligonucleotide
cauugagccgucgccaauc

SEQ ID NO: 1971251 - RNA, 19 nt, Artificial Sequence
  Description of Artificial Sequence: Synthetic oligonucleotide
ugacguccuugaaguuggg

SEQ ID NO: 1971252 - RNA, 19 nt, Artificial Sequence
  Description of Artificial Sequence: Synthetic oligonucleotide
cacgcugcccagcaggauc

SEQ ID NO: 1971253 - RNA, 19 nt, Artificial Sequence
  Description of Artificial Sequence: Synthetic oligonucleotide
gacacuugugccagagauc

SEQ ID NO: 1971254 - RNA, 19 nt, Artificial Sequence
  Description of Artificial Sequence: Synthetic oligonucleotide
cugccuguauggugcaaug

SEQ ID NO: 1971255 - RNA, 19 nt, Artificial Sequence
  Description of Artificial Sequence: Synthetic oligonucleotide
ccagcauuuggcgaguggc

SEQ ID NO: 1971256 - RNA, 19 nt, Artificial Sequence
  Description of Artificial Sequence: Synthetic oligonucleotide
gacguccuugaaguugggc

SEQ ID NO: 1971257 - RNA, 19 nt, Artificial Sequence
  Description of Artificial Sequence: Synthetic oligonucleotide
ugccuguauggugcaauga

SEQ ID NO: 1971258 - RNA, 19 nt, Artificial Sequence
  Description of Artificial Sequence: Synthetic oligonucleotide
cagggguuaucagaauaac

SEQ ID NO: 1971259 - RNA, 19 nt, Artificial Sequence
  Description of Artificial Sequence: Synthetic oligonucleotide
ccuuauuacuccuaacaaa

SEQ ID NO: 1971260 - RNA, 19 nt, Artificial Sequence
  Description of Artificial Sequence: Synthetic oligonucleotide
gucgcuuaaacaagcucuc

SEQ ID NO: 1971261 - RNA, 19 nt, Artificial Sequence
  Description of Artificial Sequence: Synthetic oligonucleotide
ucagaauaacuggcagaaa

SEQ ID NO: 1971262 - RNA, 19 nt, Artificial Sequence
  Description of Artificial Sequence: Synthetic oligonucleotide
ggguuaucacugcauuggc

SEQ ID NO: 1971263 - RNA, 19 nt, Artificial Sequence
  Description of Artificial Sequence: Synthetic oligonucleotide
gcugcagccagccuuaaua

SEQ ID NO: 1971264 - RNA, 19 nt, Artificial Sequence
  Description of Artificial Sequence: Synthetic oligonucleotide
gccgucgccaaucuuucag

SEQ ID NO: 1971265 - RNA, 19 nt, Artificial Sequence
  Description of Artificial Sequence: Synthetic oligonucleotide
cugcacaacggcguucuug

SEQ ID NO: 1971266 - RNA, 19 nt, Artificial Sequence
  Description of Artificial Sequence: Synthetic oligonucleotide
caagaaugucuggguacag

SEQ ID NO: 1971267 - RNA, 19 nt, Artificial Sequence
  Description of Artificial Sequence: Synthetic oligonucleotide
cugcauuggccacucgguc

SEQ ID NO: 1971268 - RNA, 19 nt, Artificial Sequence
  Description of Artificial Sequence: Synthetic oligonucleotide
uggugcaaugaugccaaua

SEQ ID NO: 1971269 - RNA, 19 nt, Artificial Sequence
  Description of Artificial Sequence: Synthetic oligonucleotide
gcagagacucucgugcucc

SEQ ID NO: 1971270 - RNA, 19 nt, Artificial Sequence
  Description of Artificial Sequence: Synthetic oligonucleotide
cgcuuaaacaagcucucgc

SEQ ID NO: 1971271 - RNA, 19 nt, Artificial Sequence
  Description of Artificial Sequence: Synthetic oligonucleotide
gguuaucgccacauugagc

SEQ ID NO: 1971272 - RNA, 19 nt, Artificial Sequence
  Description of Artificial Sequence: Synthetic oligonucleotide
  modified_base (9)..(9): a, c, u, g, unknown or other
gcucuucunauacaccgaa

SEQ ID NO: 1971273 - RNA, 19 nt, Artificial Sequence
  Description of Artificial Sequence: Synthetic oligonucleotide
gccaauauuggaggggcug

SEQ ID NO: 1971274 - RNA, 19 nt, Artificial Sequence
  Description of Artificial Sequence: Synthetic oligonucleotide
ugucgacuguguugacuuc

SEQ ID NO: 1971275 - RNA, 19 nt, Artificial Sequence
  Description of Artificial Sequence: Synthetic oligonucleotide
cagagacucucgugcuccc

SEQ ID NO: 1971276 - RNA, 19 nt, Artificial Sequence
  Description of Artificial Sequence: Synthetic oligonucleotide
aucguaccaaccagcauuu

SEQ ID NO: 1971277 - RNA, 19 nt, Artificial Sequence
  Description of Artificial Sequence: Synthetic oligonucleotide
  modified_base (14)..(14): a, c, u, g, unknown or other
ggacagcucuucunauaca

SEQ ID NO: 1971278 - RNA, 19 nt, Artificial Sequence
  Description of Artificial Sequence: Synthetic oligonucleotide
acucggucugaaccacacu

SEQ ID NO: 1971279 - RNA, 19 nt, Artificial Sequence
  Description of Artificial Sequence: Synthetic oligonucleotide
ggacauaaucuuacuguuc

SEQ ID NO: 1971280 - RNA, 19 nt, Artificial Sequence
  Description of Artificial Sequence: Synthetic oligonucleotide
gucaacugcacaacggcgu

SEQ ID NO: 1971281 - RNA, 19 nt, Artificial Sequence
  Description of Artificial Sequence: Synthetic oligonucleotide
ccaaucuuucagcagcuca

SEQ ID NO: 1971282 - RNA, 19 nt, Artificial Sequence
  Description of Artificial Sequence: Synthetic oligonucleotide
gaagaacaugccagcaagu

SEQ ID NO: 1971283 - RNA, 19 nt, Artificial Sequence
  Description of Artificial Sequence: Synthetic oligonucleotide
agacuucauggagaaucgu

SEQ ID NO: 1971284 - RNA, 19 nt, Artificial Sequence
  Description of Artificial Sequence: Synthetic oligonucleotide
acauugagccgucgccaau

SEQ ID NO: 1971285 - RNA, 19 nt, Artificial Sequence
  Description of Artificial Sequence: Synthetic oligonucleotide
auacuacuggcgacacuug

SEQ ID NO: 1971286 - RNA, 19 nt, Artificial Sequence
  Description of Artificial Sequence: Synthetic oligonucleotide
aagcuccggcagcuuuucu

SEQ ID NO: 1971287 - RNA, 19 nt, Artificial Sequence
  Description of Artificial Sequence: Synthetic oligonucleotide
uuccaccaucccgacagaa

SEQ ID NO: 1971288 - RNA, 19 nt, Artificial Sequence
  Description of Artificial Sequence: Synthetic oligonucleotide
auggaccuuaugagacuag

SEQ ID NO: 1971289 - RNA, 19 nt, Artificial Sequence
  Description of Artificial Sequence: Synthetic oligonucleotide
gacucucgugcucccuuga

SEQ ID NO: 1971290 - RNA, 19 nt, Artificial Sequence
  Description of Artificial Sequence: Synthetic oligonucleotide
accaagaguuccauccuua

SEQ ID NO: 1971291 - RNA, 19 nt, Artificial Sequence
  Description of Artificial Sequence: Synthetic oligonucleotide
guugcucacaccaccauuu

SEQ ID NO: 1971292 - RNA, 19 nt, Artificial Sequence
  Description of Artificial Sequence: Synthetic oligonucleotide
cauggaccuuaugagacua

SEQ ID NO: 1971293 - RNA, 19 nt, Artificial Sequence
  Description of Artificial Sequence: Synthetic oligonucleotide
cacauugagccgucgccaa

SEQ ID NO: 1971294 - RNA, 19 nt, Artificial Sequence
  Description of Artificial Sequence: Synthetic oligonucleotide
ucgcucaggacagcucuuc

SEQ ID NO: 1971295 - RNA, 19 nt, Artificial Sequence
  Description of Artificial Sequence: Synthetic oligonucleotide
gaaucguaccaaccagcau

SEQ ID NO: 1971296 - RNA, 19 nt, Artificial Sequence
  Description of Artificial Sequence: Synthetic oligonucleotide
aucgccacauugagccguc

SEQ ID NO: 1971297 - RNA, 19 nt, Artificial Sequence
  Description of Artificial Sequence: Synthetic oligonucleotide
gagccgucgccaaucuuuc

SEQ ID NO: 1971298 - RNA, 19 nt, Artificial Sequence
  Description of Artificial Sequence: Synthetic oligonucleotide
gaauacuacuggcgacacu

SEQ ID NO: 1971299 - RNA, 19 nt, Artificial Sequence
  Description of Artificial Sequence: Synthetic oligonucleotide
gacuuccaccaucccgaca

SEQ ID NO: 1971300 - RNA, 19 nt, Artificial Sequence
  Description of Artificial Sequence: Synthetic oligonucleotide
ucauuucaucugggcucag

SEQ ID NO: 1971301 - RNA, 19 nt, Artificial Sequence
  Description of Artificial Sequence: Synthetic oligonucleotide
gcgaguggcuggaucagag

SEQ ID NO: 1971302 - RNA, 19 nt, Artificial Sequence
  Description of Artificial Sequence: Synthetic oligonucleotide
uugucccuuccuugguauu

SEQ ID NO: 1971303 - RNA, 19 nt, Artificial Sequence
  Description of Artificial Sequence: Synthetic oligonucleotide
cuugucccuuccuugguau

SEQ ID NO: 1971304 - RNA, 19 nt, Artificial Sequence
  Description of Artificial Sequence: Synthetic oligonucleotide
ccgucgccaaucuuucagc

SEQ ID NO: 1971305 - RNA, 19 nt, Artificial Sequence
  Description of Artificial Sequence: Synthetic oligonucleotide
cagauuuaaucgauacauu

SEQ ID NO: 1971306 - RNA, 19 nt, Artificial Sequence
  Description of Artificial Sequence: Synthetic oligonucleotide
ccagggguuaucagaauaa

SEQ ID NO: 1971307 - RNA, 19 nt, Artificial Sequence
  Description of Artificial Sequence: Synthetic oligonucleotide
caagcuccggcagcuuuuc

SEQ ID NO: 1971308 - RNA, 19 nt, Artificial Sequence
  Description of Artificial Sequence: Synthetic oligonucleotide
agagacucucgugcucccu

SEQ ID NO: 1971309 - RNA, 19 nt, Artificial Sequence
  Description of Artificial Sequence: Synthetic oligonucleotide
caucccgacagaagaacau

SEQ ID NO: 1971310 - RNA, 19 nt, Artificial Sequence
  Description of Artificial Sequence: Synthetic oligonucleotide
gcuuaaggacauaaucuua

SEQ ID NO: 1971311 - RNA, 19 nt, Artificial Sequence
  Description of Artificial Sequence: Synthetic oligonucleotide
ucguaccaaccagcauuug

SEQ ID NO: 1971312 - RNA, 19 nt, Artificial Sequence
  Description of Artificial Sequence: Synthetic oligonucleotide
cauuuggcgaguggcugga

SEQ ID NO: 1971313 - RNA, 19 nt, Artificial Sequence
  Description of Artificial Sequence: Synthetic oligonucleotide
ggccacucggucugaacca

SEQ ID NO: 1971314 - RNA, 19 nt, Artificial Sequence
  Description of Artificial Sequence: Synthetic oligonucleotide
gggaccuuaucuguauuaa

SEQ ID NO: 1971315 - RNA, 19 nt, Artificial Sequence
  Description of Artificial Sequence: Synthetic oligonucleotide
uugagccgucgccaaucuu

SEQ ID NO: 1971316 - RNA, 19 nt, Artificial Sequence
  Description of Artificial Sequence: Synthetic oligonucleotide
caccaucccgacagaagaa

SEQ ID NO: 1971317 - RNA, 19 nt, Artificial Sequence
  Description of Artificial Sequence: Synthetic oligonucleotide
ucgccacauugagccgucg

SEQ ID NO: 1971318 - RNA, 19 nt, Artificial Sequence
  Description of Artificial Sequence: Synthetic oligonucleotide
guaugugagcuuauugcuu

SEQ ID NO: 1971319 - RNA, 19 nt, Artificial Sequence
  Description of Artificial Sequence: Synthetic oligonucleotide
ccgagguuagaaagacgac

SEQ ID NO: 1971320 - RNA, 19 nt, Artificial Sequence
  Description of Artificial Sequence: Synthetic oligonucleotide
gguauuugucgacuguguu

SEQ ID NO: 1971321 - RNA, 19 nt, Artificial Sequence
  Description of Artificial Sequence: Synthetic oligonucleotide
gccagggguuaucagaaua

SEQ ID NO: 1971322 - RNA, 19 nt, Artificial Sequence
  Description of Artificial Sequence: Synthetic oligonucleotide
cuggaucagagacccugaa

SEQ ID NO: 1971323 - RNA, 19 nt, Artificial Sequence
  Description of Artificial Sequence: Synthetic oligonucleotide
agccgucgccaaucuuuca

SEQ ID NO: 1971324 - RNA, 19 nt, Artificial Sequence
  Description of Artificial Sequence: Synthetic oligonucleotide
cguaugugagcuuauugcu

SEQ ID NO: 1971325 - RNA, 19 nt, Artificial Sequence
  Description of Artificial Sequence: Synthetic oligonucleotide
ggaccuuaugagacuagaa

SEQ ID NO: 1971326 - RNA, 19 nt, Artificial Sequence
  Description of Artificial Sequence: Synthetic oligonucleotide
gaccagucuggcuucuguu

SEQ ID NO: 1971327 - RNA, 19 nt, Artificial Sequence
  Description of Artificial Sequence: Synthetic oligonucleotide
cagcauuuggcgaguggcu

SEQ ID NO: 1971328 - RNA, 19 nt, Artificial Sequence
  Description of Artificial Sequence: Synthetic oligonucleotide
ccgaauacuacuggcgaca

SEQ ID NO: 1971329 - RNA, 19 nt, Artificial Sequence
  Description of Artificial Sequence: Synthetic oligonucleotide
ccaucccgacagaagaaca

SEQ ID NO: 1971330 - RNA, 19 nt, Artificial Sequence
  Description of Artificial Sequence: Synthetic oligonucleotide
  modified_base (8)..(8): a, c, u, g, unknown or other
cucuucunauacaccgaau

SEQ ID NO: 1971331 - RNA, 19 nt, Artificial Sequence
  Description of Artificial Sequence: Synthetic oligonucleotide
cagggaggacacgcugccc

SEQ ID NO: 1971332 - RNA, 19 nt, Artificial Sequence
  Description of Artificial Sequence: Synthetic oligonucleotide
cuuauugcuuaaggacaua

SEQ ID NO: 1971333 - RNA, 19 nt, Artificial Sequence
  Description of Artificial Sequence: Synthetic oligonucleotide
cucgugcucccuugaugga

SEQ ID NO: 1971334 - RNA, 19 nt, Artificial Sequence
  Description of Artificial Sequence: Synthetic oligonucleotide
gcacugucaacugcacaac

SEQ ID NO: 1971335 - RNA, 19 nt, Artificial Sequence
  Description of Artificial Sequence: Synthetic oligonucleotide
cagcuucccuucguaugug

SEQ ID NO: 1971336 - RNA, 19 nt, Artificial Sequence
  Description of Artificial Sequence: Synthetic oligonucleotide
gggcaaagcucucacuuau

SEQ ID NO: 1971337 - RNA, 19 nt, Artificial Sequence
  Description of Artificial Sequence: Synthetic oligonucleotide
auggugcaaugaugccaau

SEQ ID NO: 1971338 - RNA, 19 nt, Artificial Sequence
  Description of Artificial Sequence: Synthetic oligonucleotide
caagaguuccauccuuauu

SEQ ID NO: 1971339 - RNA, 19 nt, Artificial Sequence
  Description of Artificial Sequence: Synthetic oligonucleotide
gaagcgcugcagggaggac

SEQ ID NO: 1971340 - RNA, 19 nt, Artificial Sequence
  Description of Artificial Sequence: Synthetic oligonucleotide
caacggcguucuuguucug

SEQ ID NO: 1971341 - RNA, 19 nt, Artificial Sequence
  Description of Artificial Sequence: Synthetic oligonucleotide
acgaccagucuggcuucug

SEQ ID NO: 1971342 - RNA, 19 nt, Artificial Sequence
  Description of Artificial Sequence: Synthetic oligonucleotide
cuuccaccaucccgacaga

SEQ ID NO: 1971343 - RNA, 19 nt, Artificial Sequence
  Description of Artificial Sequence: Synthetic oligonucleotide
gccagagaucaagaauguc

SEQ ID NO: 1971344 - RNA, 19 nt, Artificial Sequence
  Description of Artificial Sequence: Synthetic oligonucleotide
cgaauacuacuggcgacac

SEQ ID NO: 1971345 - RNA, 19 nt, Artificial Sequence
  Description of Artificial Sequence: Synthetic oligonucleotide
ccaggacgagacucuuguc

SEQ ID NO: 1971346 - RNA, 19 nt, Artificial Sequence
  Description of Artificial Sequence: Synthetic oligonucleotide
cccuugauggaagguccac

SEQ ID NO: 1971347 - RNA, 19 nt, Artificial Sequence
  Description of Artificial Sequence: Synthetic oligonucleotide
cuggggcaaagcucucacu

SEQ ID NO: 1971348 - RNA, 19 nt, Artificial Sequence
  Description of Artificial Sequence: Synthetic oligonucleotide
cgacacuugugccagagau

SEQ ID NO: 1971349 - RNA, 19 nt, Artificial Sequence
  Description of Artificial Sequence: Synthetic oligonucleotide
gcgacacuugugccagaga

SEQ ID NO: 1971350 - RNA, 19 nt, Artificial Sequence
  Description of Artificial Sequence: Synthetic oligonucleotide
cuucguaugugagcuuauu

SEQ ID NO: 1971351 - RNA, 19 nt, Artificial Sequence
  Description of Artificial Sequence: Synthetic oligonucleotide
gccaaucuuucagcagcuc

SEQ ID NO: 1971352 - RNA, 19 nt, Artificial Sequence
  Description of Artificial Sequence: Synthetic oligonucleotide
ggcgaguggcuggaucaga

SEQ ID NO: 1971353 - RNA, 19 nt, Artificial Sequence
  Description of Artificial Sequence: Synthetic oligonucleotide
gacgaccagucuggcuucu

SEQ ID NO: 1971354 - RNA, 19 nt, Artificial Sequence
  Description of Artificial Sequence: Synthetic oligonucleotide
gcaagucauugaugauccu

SEQ ID NO: 1971355 - RNA, 19 nt, Artificial Sequence
  Description of Artificial Sequence: Synthetic oligonucleotide
cugggaccuuaucuguauu

SEQ ID NO: 1971356 - RNA, 19 nt, Artificial Sequence
  Description of Artificial Sequence: Synthetic oligonucleotide
ccacucggucugaaccaca

SEQ ID NO: 1971357 - RNA, 19 nt, Artificial Sequence
  Description of Artificial Sequence: Synthetic oligonucleotide
ccucaacuucacauuucau

SEQ ID NO: 1971358 - RNA, 19 nt, Artificial Sequence
  Description of Artificial Sequence: Synthetic oligonucleotide
gcaagcuccggcagcuuuu

SEQ ID NO: 1971359 - RNA, 19 nt, Artificial Sequence
  Description of Artificial Sequence: Synthetic oligonucleotide
gcucucgcucaugcccaga

SEQ ID NO: 1971360 - RNA, 19 nt, Artificial Sequence
  Description of Artificial Sequence: Synthetic oligonucleotide
ccagaacguggcagagacu

SEQ ID NO: 1971361 - RNA, 19 nt, Artificial Sequence
  Description of Artificial Sequence: Synthetic oligonucleotide
cgaccagucuggcuucugu

SEQ ID NO: 1971362 - RNA, 19 nt, Artificial Sequence
  Description of Artificial Sequence: Synthetic oligonucleotide
cggcagcuuuucuggggca

SEQ ID NO: 1971363 - RNA, 19 nt, Artificial Sequence
  Description of Artificial Sequence: Synthetic oligonucleotide
gccuuacuucuuggagagu

SEQ ID NO: 1971364 - RNA, 19 nt, Artificial Sequence
  Description of Artificial Sequence: Synthetic oligonucleotide
ccuuagcugcugccuguau

SEQ ID NO: 1971365 - RNA, 19 nt, Artificial Sequence
  Description of Artificial Sequence: Synthetic oligonucleotide
  modified_base (1)..(1): a, c, u, g, unknown or other
nauacaccgaauacuacug

SEQ ID NO: 1971366 - RNA, 19 nt, Artificial Sequence
  Description of Artificial Sequence: Synthetic oligonucleotide
uaaaauaaauccaacgagg

SEQ ID NO: 1971367 - RNA, 19 nt, Artificial Sequence
  Description of Artificial Sequence: Synthetic oligonucleotide
uuuauugaacccaugagag

SEQ ID NO: 1971368 - RNA, 19 nt, Artificial Sequence
  Description of Artificial Sequence: Synthetic oligonucleotide
uuuaucaguuucuugaugg

SEQ ID NO: 1971369 - RNA, 19 nt, Artificial Sequence
  Description of Artificial Sequence: Synthetic oligonucleotide
aaaauaaauccaacgaggc

SEQ ID NO: 1971370 - RNA, 19 nt, Artificial Sequence
  Description of Artificial Sequence: Synthetic oligonucleotide
aauugcagacuucacaaac

SEQ ID NO: 1971371 - RNA, 19 nt, Artificial Sequence
  Description of Artificial Sequence: Synthetic oligonucleotide
aauaucauccaauguaaag

SEQ ID NO: 1971372 - RNA, 19 nt, Artificial Sequence
  Description of Artificial Sequence: Synthetic oligonucleotide
agauugaguuuauugaacc

SEQ ID NO: 1971373 - RNA, 19 nt, Artificial Sequence
  Description of Artificial Sequence: Synthetic oligonucleotide
aagucaacagcaauggucc

SEQ ID NO: 1971374 - RNA, 19 nt, Artificial Sequence
  Description of Artificial Sequence: Synthetic oligonucleotide
uaaaacgccaauuucaaga

SEQ ID NO: 1971375 - RNA, 19 nt, Artificial Sequence
  Description of Artificial Sequence: Synthetic oligonucleotide
acucguaugacauacccac

SEQ ID NO: 1971376 - RNA, 19 nt, Artificial Sequence
  Description of Artificial Sequence: Synthetic oligonucleotide
acaaucaccccuuuagacc

SEQ ID NO: 1971377 - RNA, 19 nt, Artificial Sequence
  Description of Artificial Sequence: Synthetic oligonucleotide
uuuaauugcagacuucaca

SEQ ID NO: 1971378 - RNA, 19 nt, Artificial Sequence
  Description of Artificial Sequence: Synthetic oligonucleotide
ucuuauacuccucauggag

SEQ ID NO: 1971379 - RNA, 19 nt, Artificial Sequence
  Description of Artificial Sequence: Synthetic oligonucleotide
agagcauuuacauuaaacu

SEQ ID NO: 1971380 - RNA, 19 nt, Artificial Sequence
  Description of Artificial Sequence: Synthetic oligonucleotide
ucaagaguggaauugggag

SEQ ID NO: 1971381 - RNA, 19 nt, Artificial Sequence
  Description of Artificial Sequence: Synthetic oligonucleotide
auacucguaugacauaccc

SEQ ID NO: 1971382 - RNA, 19 nt, Artificial Sequence
  Description of Artificial Sequence: Synthetic oligonucleotide
ugaagagugaguaggagac

SEQ ID NO: 1971383 - RNA, 19 nt, Artificial Sequence
  Description of Artificial Sequence: Synthetic oligonucleotide
uaaauaucauccaauguaa

SEQ ID NO: 1971384 - RNA, 19 nt, Artificial Sequence
  Description of Artificial Sequence: Synthetic oligonucleotide
uuuuguagcuacaaaguac

SEQ ID NO: 1971385 - RNA, 19 nt, Artificial Sequence
  Description of Artificial Sequence: Synthetic oligonucleotide
uccaauguaaagucaacag

SEQ ID NO: 1971386 - RNA, 19 nt, Artificial Sequence
  Description of Artificial Sequence: Synthetic oligonucleotide
aacuucaaauuacuccugg

SEQ ID NO: 1971387 - RNA, 19 nt, Artificial Sequence
  Description of Artificial Sequence: Synthetic oligonucleotide
aagagcauuuacauuaaac

SEQ ID NO: 1971388 - RNA, 19 nt, Artificial Sequence
  Description of Artificial Sequence: Synthetic oligonucleotide
ugagauguugacaaucacc

SEQ ID NO: 1971389 - RNA, 19 nt, Artificial Sequence
  Description of Artificial Sequence: Synthetic oligonucleotide
ucaagaauauauacaggcc

SEQ ID NO: 1971390 - RNA, 19 nt, Artificial Sequence
  Description of Artificial Sequence: Synthetic oligonucleotide
uaucaagaauauauacagg

SEQ ID NO: 1971391 - RNA, 19 nt, Artificial Sequence
  Description of Artificial Sequence: Synthetic oligonucleotide
gagauguugacaaucaccc

SEQ ID NO: 1971392 - RNA, 19 nt, Artificial Sequence
  Description of Artificial Sequence: Synthetic oligonucleotide
uuucauuccacgcuuugcc

SEQ ID NO: 1971393 - RNA, 19 nt, Artificial Sequence
  Description of Artificial Sequence: Synthetic oligonucleotide
aauuacuccugguuuuauc

SEQ ID NO: 1971394 - RNA, 19 nt, Artificial Sequence
  Description of Artificial Sequence: Synthetic oligonucleotide
agcauuuacauuaaacuuc

SEQ ID NO: 1971395 - RNA, 19 nt, Artificial Sequence
  Description of Artificial Sequence: Synthetic oligonucleotide
aaauaaauccaacgaggca

SEQ ID NO: 1971396 - RNA, 19 nt, Artificial Sequence
  Description of Artificial Sequence: Synthetic oligonucleotide
uacuaagucauucugggau

SEQ ID NO: 1971397 - RNA, 19 nt, Artificial Sequence
  Description of Artificial Sequence: Synthetic oligonucleotide
cuuauacuccucauggagg

SEQ ID NO: 1971398 - RNA, 19 nt, Artificial Sequence
  Description of Artificial Sequence: Synthetic oligonucleotide
gacaauuuucauuccacgc

SEQ ID NO: 1971399 - RNA, 19 nt, Artificial Sequence
  Description of Artificial Sequence: Synthetic oligonucleotide
aagauugaguuuauugaac

SEQ ID NO: 1971400 - RNA, 19 nt, Artificial Sequence
  Description of Artificial Sequence: Synthetic oligonucleotide
aauuucaagaccagccagg

SEQ ID NO: 1971401 - RNA, 19 nt, Artificial Sequence
  Description of Artificial Sequence: Synthetic oligonucleotide
aaacgccaauuucaagacc

SEQ ID NO: 1971402 - RNA, 19 nt, Artificial Sequence
  Description of Artificial Sequence: Synthetic oligonucleotide
aacgaggcaagauugaguu

SEQ ID NO: 1971403 - RNA, 19 nt, Artificial Sequence
  Description of Artificial Sequence: Synthetic oligonucleotide
acggaaagaacauuaauau

SEQ ID NO: 1971404 - RNA, 19 nt, Artificial Sequence
  Description of Artificial Sequence: Synthetic oligonucleotide
acaauuuucauuccacgcu

SEQ ID NO: 1971405 - RNA, 19 nt, Artificial Sequence
  Description of Artificial Sequence: Synthetic oligonucleotide
uguuuacuuacuaagucau

SEQ ID NO: 1971406 - RNA, 19 nt, Artificial Sequence
  Description of Artificial Sequence: Synthetic oligonucleotide
ucuuugaucucacuggaaa

SEQ ID NO: 1971407 - RNA, 19 nt, Artificial Sequence
  Description of Artificial Sequence: Synthetic oligonucleotide
uuuacuuacuaagucauuc

SEQ ID NO: 1971408 - RNA, 19 nt, Artificial Sequence
  Description of Artificial Sequence: Synthetic oligonucleotide
ugagagaagaaaucuacaa

SEQ ID NO: 1971409 - RNA, 19 nt, Artificial Sequence
  Description of Artificial Sequence: Synthetic oligonucleotide
guuuauugaacccaugaga

SEQ ID NO: 1971410 - RNA, 19 nt, Artificial Sequence
  Description of Artificial Sequence: Synthetic oligonucleotide
uucacuaaaacgccaauuu

SEQ ID NO: 1971411 - RNA, 19 nt, Artificial Sequence
  Description of Artificial Sequence: Synthetic oligonucleotide
aaguauucuggauacucgu

SEQ ID NO: 1971412 - RNA, 19 nt, Artificial Sequence
  Description of Artificial Sequence: Synthetic oligonucleotide
aguacaggaagccggccgc

SEQ ID NO: 1971413 - RNA, 19 nt, Artificial Sequence
  Description of Artificial Sequence: Synthetic oligonucleotide
gauugaguuuauugaaccc

SEQ ID NO: 1971414 - RNA, 19 nt, Artificial Sequence
  Description of Artificial Sequence: Synthetic oligonucleotide
uuugaucucacuggaaacc

SEQ ID NO: 1971415 - RNA, 19 nt, Artificial Sequence
  Description of Artificial Sequence: Synthetic oligonucleotide
uacuuacuaagucauucug

SEQ ID NO: 1971416 - RNA, 19 nt, Artificial Sequence
  Description of Artificial Sequence: Synthetic oligonucleotide
guaugacauacccacauug

SEQ ID NO: 1971417 - RNA, 19 nt, Artificial Sequence
  Description of Artificial Sequence: Synthetic oligonucleotide
aagcgugucaccuugcaaa

SEQ ID NO: 1971418 - RNA, 19 nt, Artificial Sequence
  Description of Artificial Sequence: Synthetic oligonucleotide
uuucuuugaucucacugga

SEQ ID NO: 1971419 - RNA, 19 nt, Artificial Sequence
  Description of Artificial Sequence: Synthetic oligonucleotide
aauccaacgaggcaagauu

SEQ ID NO: 1971420 - RNA, 19 nt, Artificial Sequence
  Description of Artificial Sequence: Synthetic oligonucleotide
uuuccaauuccaucagugc

SEQ ID NO: 1971421 - RNA, 19 nt, Artificial Sequence
  Description of Artificial Sequence: Synthetic oligonucleotide
caagaauauauacaggcca

SEQ ID NO: 1971422 - RNA, 19 nt, Artificial Sequence
  Description of Artificial Sequence: Synthetic oligonucleotide
uaugacauacccacauugu

SEQ ID NO: 1971423 - RNA, 19 nt, Artificial Sequence
  Description of Artificial Sequence: Synthetic oligonucleotide
caagaaucuggccaagcgg

SEQ ID NO: 1971424 - RNA, 19 nt, Artificial Sequence
  Description of Artificial Sequence: Synthetic oligonucleotide
aacgccaauuucaagacca

SEQ ID NO: 1971425 - RNA, 19 nt, Artificial Sequence
  Description of Artificial Sequence: Synthetic oligonucleotide
aacggaaagaacauuaaua

SEQ ID NO: 1971426 - RNA, 19 nt, Artificial Sequence
  Description of Artificial Sequence: Synthetic oligonucleotide
gguucaaugacccaucaac

SEQ ID NO: 1971427 - RNA, 19 nt, Artificial Sequence
  Description of Artificial Sequence: Synthetic oligonucleotide
gacauacccacauuguuca

SEQ ID NO: 1971428 - RNA, 19 nt, Artificial Sequence
  Description of Artificial Sequence: Synthetic oligonucleotide
ugacauacccacauuguuc

SEQ ID NO: 1971429 - RNA, 19 nt, Artificial Sequence
  Description of Artificial Sequence: Synthetic oligonucleotide
aaacggaaagaacauuaau

SEQ ID NO: 1971430 - RNA, 19 nt, Artificial Sequence
  Description of Artificial Sequence: Synthetic oligonucleotide
aucagugccaccuguaaca

SEQ ID NO: 1971431 - RNA, 19 nt, Artificial Sequence
  Description of Artificial Sequence: Synthetic oligonucleotide
agaugagauguugacaauc

SEQ ID NO: 1971432 - RNA, 19 nt, Artificial Sequence
  Description of Artificial Sequence: Synthetic oligonucleotide
ucaaggacuuguugaaacc

SEQ ID NO: 1971433 - RNA, 19 nt, Artificial Sequence
  Description of Artificial Sequence: Synthetic oligonucleotide
acaaaguacggcaggacac

SEQ ID NO: 1971434 - RNA, 19 nt, Artificial Sequence
  Description of Artificial Sequence: Synthetic oligonucleotide
cuaggccucacuaccaccg

SEQ ID NO: 1971435 - RNA, 19 nt, Artificial Sequence
  Description of Artificial Sequence: Synthetic oligonucleotide
uuacuuacuaagucauucu

SEQ ID NO: 1971436 - RNA, 19 nt, Artificial Sequence
  Description of Artificial Sequence: Synthetic oligonucleotide
acuuacuaagucauucugg

SEQ ID NO: 1971437 - RNA, 19 nt, Artificial Sequence
  Description of Artificial Sequence: Synthetic oligonucleotide
aagaaucuggccaagcggu

SEQ ID NO: 1971438 - RNA, 19 nt, Artificial Sequence
  Description of Artificial Sequence: Synthetic oligonucleotide
aguggaauugggagcaugc

SEQ ID NO: 1971439 - RNA, 19 nt, Artificial Sequence
  Description of Artificial Sequence: Synthetic oligonucleotide
uguaacaacugcccauucu

SEQ ID NO: 1971440 - RNA, 19 nt, Artificial Sequence
  Description of Artificial Sequence: Synthetic oligonucleotide
gaugcccuugcucuuauac

SEQ ID NO: 1971441 - RNA, 19 nt, Artificial Sequence
  Description of Artificial Sequence: Synthetic oligonucleotide
uuauugaacccaugagagc

SEQ ID NO: 1971442 - RNA, 19 nt, Artificial Sequence
  Description of Artificial Sequence: Synthetic oligonucleotide
auugaguuuauugaaccca

SEQ ID NO: 1971443 - RNA, 19 nt, Artificial Sequence
  Description of Artificial Sequence: Synthetic oligonucleotide
cucaaggacuuguugaaac

SEQ ID NO: 1971444 - RNA, 19 nt, Artificial Sequence
  Description of Artificial Sequence: Synthetic oligonucleotide
cacuaaaacgccaauuuca

SEQ ID NO: 1971445 - RNA, 19 nt, Artificial Sequence
  Description of Artificial Sequence: Synthetic oligonucleotide
uuguugaaacccaugguua

SEQ ID NO: 1971446 - RNA, 19 nt, Artificial Sequence
  Description of Artificial Sequence: Synthetic oligonucleotide
ggcaagauugaguuuauug

SEQ ID NO: 1971447 - RNA, 19 nt, Artificial Sequence
  Description of Artificial Sequence: Synthetic oligonucleotide
ucacuaaaacgccaauuuc

SEQ ID NO: 1971448 - RNA, 19 nt, Artificial Sequence
  Description of Artificial Sequence: Synthetic oligonucleotide
uauucuggauacucguaug

SEQ ID NO: 1971449 - RNA, 19 nt, Artificial Sequence
  Description of Artificial Sequence: Synthetic oligonucleotide
uucgggauugcaaacccac

SEQ ID NO: 1971450 - RNA, 19 nt, Artificial Sequence
  Description of Artificial Sequence: Synthetic oligonucleotide
augagauguugacaaucac

SEQ ID NO: 1971451 - RNA, 19 nt, Artificial Sequence
  Description of Artificial Sequence: Synthetic oligonucleotide
uugcagacuucacaaacgu

SEQ ID NO: 1971452 - RNA, 19 nt, Artificial Sequence
  Description of Artificial Sequence: Synthetic oligonucleotide
gaccuuucuaccaugccag

SEQ ID NO: 1971453 - RNA, 19 nt, Artificial Sequence
  Description of Artificial Sequence: Synthetic oligonucleotide
auugcagacuucacaaacg

SEQ ID NO: 1971454 - RNA, 19 nt, Artificial Sequence
  Description of Artificial Sequence: Synthetic oligonucleotide
uucugcauaugauuuucca

SEQ ID NO: 1971455 - RNA, 19 nt, Artificial Sequence
  Description of Artificial Sequence: Synthetic oligonucleotide
aucacauauccagugguuc

SEQ ID NO: 1971456 - RNA, 19 nt, Artificial Sequence
  Description of Artificial Sequence: Synthetic oligonucleotide
ucaaugacccaucaacauu

SEQ ID NO: 1971457 - RNA, 19 nt, Artificial Sequence
  Description of Artificial Sequence: Synthetic oligonucleotide
aguuuuguagcuacaaagu

SEQ ID NO: 1971458 - RNA, 19 nt, Artificial Sequence
  Description of Artificial Sequence: Synthetic oligonucleotide
uucaaugacccaucaacau

SEQ ID NO: 1971459 - RNA, 19 nt, Artificial Sequence
  Description of Artificial Sequence: Synthetic oligonucleotide
uacuccugguuuuaucaag

SEQ ID NO: 1971460 - RNA, 19 nt, Artificial Sequence
  Description of Artificial Sequence: Synthetic oligonucleotide
augguauuguccaagucag

SEQ ID NO: 1971461 - RNA, 19 nt, Artificial Sequence
  Description of Artificial Sequence: Synthetic oligonucleotide
ugaacccaugagagcaugg

SEQ ID NO: 1971462 - RNA, 19 nt, Artificial Sequence
  Description of Artificial Sequence: Synthetic oligonucleotide
ucguaugacauacccacau

SEQ ID NO: 1971463 - RNA, 19 nt, Artificial Sequence
  Description of Artificial Sequence: Synthetic oligonucleotide
caaacgucucuggagaggg

SEQ ID NO: 1971464 - RNA, 19 nt, Artificial Sequence
  Description of Artificial Sequence: Synthetic oligonucleotide
acuaggccucacuaccacc

SEQ ID NO: 1971465 - RNA, 19 nt, Artificial Sequence
  Description of Artificial Sequence: Synthetic oligonucleotide
aaacccaugguuauuuuaa

SEQ ID NO: 1971466 - RNA, 19 nt, Artificial Sequence
  Description of Artificial Sequence: Synthetic oligonucleotide
uugaguuuauugaacccau

SEQ ID NO: 1971467 - RNA, 19 nt, Artificial Sequence
  Description of Artificial Sequence: Synthetic oligonucleotide
uuguagcuacaaaguacgg

SEQ ID NO: 1971468 - RNA, 19 nt, Artificial Sequence
  Description of Artificial Sequence: Synthetic oligonucleotide
aagaauauauacaggccaa

SEQ ID NO: 1971469 - RNA, 19 nt, Artificial Sequence
  Description of Artificial Sequence: Synthetic oligonucleotide
auucuggauacucguauga

SEQ ID NO: 1971470 - RNA, 19 nt, Artificial Sequence
  Description of Artificial Sequence: Synthetic oligonucleotide
gagagcauggaucacauau

SEQ ID NO: 1971471 - RNA, 19 nt, Artificial Sequence
  Description of Artificial Sequence: Synthetic oligonucleotide
ugacaaucaccccuuuaga

SEQ ID NO: 1971472 - RNA, 19 nt, Artificial Sequence
  Description of Artificial Sequence: Synthetic oligonucleotide
uuuucuucagauagugauu

SEQ ID NO: 1971473 - RNA, 19 nt, Artificial Sequence
  Description of Artificial Sequence: Synthetic oligonucleotide
uacggcaggacacucugca

SEQ ID NO: 1971474 - RNA, 19 nt, Artificial Sequence
  Description of Artificial Sequence: Synthetic oligonucleotide
aaaguuggcuuccguauuu

SEQ ID NO: 1971475 - RNA, 19 nt, Artificial Sequence
  Description of Artificial Sequence: Synthetic oligonucleotide
uggucaagaguggaauugg

SEQ ID NO: 1971476 - RNA, 19 nt, Artificial Sequence
  Description of Artificial Sequence: Synthetic oligonucleotide
aaucuggccaagcgguuca

SEQ ID NO: 1971477 - RNA, 19 nt, Artificial Sequence
  Description of Artificial Sequence: Synthetic oligonucleotide
uuuucauuccacgcuuugc

SEQ ID NO: 1971478 - RNA, 19 nt, Artificial Sequence
  Description of Artificial Sequence: Synthetic oligonucleotide
uuguucacuaaaacgccaa

SEQ ID NO: 1971479 - RNA, 19 nt, Artificial Sequence
  Description of Artificial Sequence: Synthetic oligonucleotide
agcgugucaccuugcaaac

SEQ ID NO: 1971480 - RNA, 19 nt, Artificial Sequence
  Description of Artificial Sequence: Synthetic oligonucleotide
gcaagauugaguuuauuga

SEQ ID NO: 1971481 - RNA, 19 nt, Artificial Sequence
  Description of Artificial Sequence: Synthetic oligonucleotide
aguacggcaggacacucug

SEQ ID NO: 1971482 - RNA, 19 nt, Artificial Sequence
  Description of Artificial Sequence: Synthetic oligonucleotide
agugguucgggauugcaaa

SEQ ID NO: 1971483 - RNA, 19 nt, Artificial Sequence
  Description of Artificial Sequence: Synthetic oligonucleotide
uguuuuaauugcagacuuc

SEQ ID NO: 1971484 - RNA, 19 nt, Artificial Sequence
  Description of Artificial Sequence: Synthetic oligonucleotide
uguugaaacccaugguuau

SEQ ID NO: 1971485 - RNA, 19 nt, Artificial Sequence
  Description of Artificial Sequence: Synthetic oligonucleotide
cuaaaacgccaauuucaag

SEQ ID NO: 1971486 - RNA, 19 nt, Artificial Sequence
  Description of Artificial Sequence: Synthetic oligonucleotide
gaauauauacaggccaaga

SEQ ID NO: 1971487 - RNA, 19 nt, Artificial Sequence
  Description of Artificial Sequence: Synthetic oligonucleotide
ugggauuuguuccuuucaa

SEQ ID NO: 1971488 - RNA, 19 nt, Artificial Sequence
  Description of Artificial Sequence: Synthetic oligonucleotide
caagauugaguuuauugaa

SEQ ID NO: 1971489 - RNA, 19 nt, Artificial Sequence
  Description of Artificial Sequence: Synthetic oligonucleotide
ugccaggcagcaccaagcg

SEQ ID NO: 1971490 - RNA, 19 nt, Artificial Sequence
  Description of Artificial Sequence: Synthetic oligonucleotide
uacucguaugacauaccca

SEQ ID NO: 1971491 - RNA, 19 nt, Artificial Sequence
  Description of Artificial Sequence: Synthetic oligonucleotide
ucuaccaugccaggcagca

SEQ ID NO: 1971492 - RNA, 19 nt, Artificial Sequence
  Description of Artificial Sequence: Synthetic oligonucleotide
uuaggacaauuuucauucc

SEQ ID NO: 1971493 - RNA, 19 nt, Artificial Sequence
  Description of Artificial Sequence: Synthetic oligonucleotide
uuugccaacucuucugcau

SEQ ID NO: 1971494 - RNA, 19 nt, Artificial Sequence
  Description of Artificial Sequence: Synthetic oligonucleotide
acagugcucgcgcccaccc

SEQ ID NO: 1971495 - RNA, 19 nt, Artificial Sequence
  Description of Artificial Sequence: Synthetic oligonucleotide
uuacuaagucauucuggga

SEQ ID NO: 1971496 - RNA, 19 nt, Artificial Sequence
  Description of Artificial Sequence: Synthetic oligonucleotide
gagggcuuauccaaaguug

SEQ ID NO: 1971497 - RNA, 19 nt, Artificial Sequence
  Description of Artificial Sequence: Synthetic oligonucleotide
auggguucuauguuuacuu

SEQ ID NO: 1971498 - RNA, 19 nt, Artificial Sequence
  Description of Artificial Sequence: Synthetic oligonucleotide
ggauuuguuccuuucaaga

SEQ ID NO: 1971499 - RNA, 19 nt, Artificial Sequence
  Description of Artificial Sequence: Synthetic oligonucleotide
uugcaaacggaaagaacau

SEQ ID NO: 1971500 - RNA, 19 nt, Artificial Sequence
  Description of Artificial Sequence: Synthetic oligonucleotide
aaauccaacgaggcaagau

SEQ ID NO: 1971501 - RNA, 19 nt, Artificial Sequence
  Description of Artificial Sequence: Synthetic oligonucleotide
aacgucucuggagagggcu

SEQ ID NO: 1971502 - RNA, 19 nt, Artificial Sequence
  Description of Artificial Sequence: Synthetic oligonucleotide
auggucaagaguggaauug

SEQ ID NO: 1971503 - RNA, 19 nt, Artificial Sequence
  Description of Artificial Sequence: Synthetic oligonucleotide
gaaagaacauuaauauuua

SEQ ID NO: 1971504 - RNA, 19 nt, Artificial Sequence
  Description of Artificial Sequence: Synthetic oligonucleotide
ugguauuguccaagucagg

SEQ ID NO: 1971505 - RNA, 19 nt, Artificial Sequence
  Description of Artificial Sequence: Synthetic oligonucleotide
caguacaggaagccggccg

SEQ ID NO: 1971506 - RNA, 19 nt, Artificial Sequence
  Description of Artificial Sequence: Synthetic oligonucleotide
auaaauccaacgaggcaag

SEQ ID NO: 1971507 - RNA, 19 nt, Artificial Sequence
  Description of Artificial Sequence: Synthetic oligonucleotide
uccaaaguuggcuuccgua

SEQ ID NO: 1971508 - RNA, 19 nt, Artificial Sequence
  Description of Artificial Sequence: Synthetic oligonucleotide
uagauggucaagaguggaa

SEQ ID NO: 1971509 - RNA, 19 nt, Artificial Sequence
  Description of Artificial Sequence: Synthetic oligonucleotide
cugaagagugaguaggaga

SEQ ID NO: 1971510 - RNA, 19 nt, Artificial Sequence
  Description of Artificial Sequence: Synthetic oligonucleotide
agagggcuuauccaaaguu

SEQ ID NO: 1971511 - RNA, 19 nt, Artificial Sequence
  Description of Artificial Sequence: Synthetic oligonucleotide
ugcauaugauuuuccaauu

SEQ ID NO: 1971512 - RNA, 19 nt, Artificial Sequence
  Description of Artificial Sequence: Synthetic oligonucleotide
auccaauguaaagucaaca

SEQ ID NO: 1971513 - RNA, 19 nt, Artificial Sequence
  Description of Artificial Sequence: Synthetic oligonucleotide
auauccagugguucgggau

SEQ ID NO: 1971514 - RNA, 19 nt, Artificial Sequence
  Description of Artificial Sequence: Synthetic oligonucleotide
cauggaggcacugagagaa

SEQ ID NO: 1971515 - RNA, 19 nt, Artificial Sequence
  Description of Artificial Sequence: Synthetic oligonucleotide
ugcccaagcaccacaccug

SEQ ID NO: 1971516 - RNA, 19 nt, Artificial Sequence
  Description of Artificial Sequence: Synthetic oligonucleotide
agagcauggaucacauauc

SEQ ID NO: 1971517 - RNA, 19 nt, Artificial Sequence
  Description of Artificial Sequence: Synthetic oligonucleotide
acaaacgucucuggagagg

SEQ ID NO: 1971518 - RNA, 19 nt, Artificial Sequence
  Description of Artificial Sequence: Synthetic oligonucleotide
ccugguuuuaucaagaaua

SEQ ID NO: 1971519 - RNA, 19 nt, Artificial Sequence
  Description of Artificial Sequence: Synthetic oligonucleotide
uccugguuuuaucaagaau

SEQ ID NO: 1971520 - RNA, 19 nt, Artificial Sequence
  Description of Artificial Sequence: Synthetic oligonucleotide
gccaauuucaagaccagcc

SEQ ID NO: 1971521 - RNA, 19 nt, Artificial Sequence
  Description of Artificial Sequence: Synthetic oligonucleotide
agugcucgcgcccacccag

SEQ ID NO: 1971522 - RNA, 19 nt, Artificial Sequence
  Description of Artificial Sequence: Synthetic oligonucleotide
augacauacccacauuguu

SEQ ID NO: 1971523 - RNA, 19 nt, Artificial Sequence
  Description of Artificial Sequence: Synthetic oligonucleotide
cacaaagaugcccuugcuc

SEQ ID NO: 1971524 - RNA, 19 nt, Artificial Sequence
  Description of Artificial Sequence: Synthetic oligonucleotide
aacccaugguuauuuuaaa

SEQ ID NO: 1971525 - RNA, 19 nt, Artificial Sequence
  Description of Artificial Sequence: Synthetic oligonucleotide
acuaaaacgccaauuucaa

SEQ ID NO: 1971526 - RNA, 19 nt, Artificial Sequence
  Description of Artificial Sequence: Synthetic oligonucleotide
ugcccauucuccgagcagc

SEQ ID NO: 1971527 - RNA, 19 nt, Artificial Sequence
  Description of Artificial Sequence: Synthetic oligonucleotide
cauuaaacuucaaauuacu

SEQ ID NO: 1971528 - RNA, 19 nt, Artificial Sequence
  Description of Artificial Sequence: Synthetic oligonucleotide
augccaggcagcaccaagc

SEQ ID NO: 1971529 - RNA, 19 nt, Artificial Sequence
  Description of Artificial Sequence: Synthetic oligonucleotide
uauccagugguucgggauu

SEQ ID NO: 1971530 - RNA, 19 nt, Artificial Sequence
  Description of Artificial Sequence: Synthetic oligonucleotide
uauccaaaguuggcuuccg

SEQ ID NO: 1971531 - RNA, 19 nt, Artificial Sequence
  Description of Artificial Sequence: Synthetic oligonucleotide
cauucuccgagcagcgggc

SEQ ID NO: 1971532 - RNA, 19 nt, Artificial Sequence
  Description of Artificial Sequence: Synthetic oligonucleotide
cacauauccagugguucgg

SEQ ID NO: 1971533 - RNA, 19 nt, Artificial Sequence
  Description of Artificial Sequence: Synthetic oligonucleotide
uguucacuaaaacgccaau

SEQ ID NO: 1971534 - RNA, 19 nt, Artificial Sequence
  Description of Artificial Sequence: Synthetic oligonucleotide
guucaaugacccaucaaca

SEQ ID NO: 1971535 - RNA, 19 nt, Artificial Sequence
  Description of Artificial Sequence: Synthetic oligonucleotide
acaacugcccauucuccga

SEQ ID NO: 1971536 - RNA, 19 nt, Artificial Sequence
  Description of Artificial Sequence: Synthetic oligonucleotide
uugaaacccaugguuauuu

SEQ ID NO: 1971537 - RNA, 19 nt, Artificial Sequence
  Description of Artificial Sequence: Synthetic oligonucleotide
auacccacauuguucacua

SEQ ID NO: 1971538 - RNA, 19 nt, Artificial Sequence
  Description of Artificial Sequence: Synthetic oligonucleotide
cuggccaagcgguucaaug

SEQ ID NO: 1971539 - RNA, 19 nt, Artificial Sequence
  Description of Artificial Sequence: Synthetic oligonucleotide
uuacuccugguuuuaucaa

SEQ ID NO: 1971540 - RNA, 19 nt, Artificial Sequence
  Description of Artificial Sequence: Synthetic oligonucleotide
gaucucacuggaaaccuga

SEQ ID NO: 1971541 - RNA, 19 nt, Artificial Sequence
  Description of Artificial Sequence: Synthetic oligonucleotide
auccaacgaggcaagauug

SEQ ID NO: 1971542 - RNA, 19 nt, Artificial Sequence
  Description of Artificial Sequence: Synthetic oligonucleotide
aagcgguucaaugacccau

SEQ ID NO: 1971543 - RNA, 19 nt, Artificial Sequence
  Description of Artificial Sequence: Synthetic oligonucleotide
acccaguacaggaagccgg

SEQ ID NO: 1971544 - RNA, 19 nt, Artificial Sequence
  Description of Artificial Sequence: Synthetic oligonucleotide
ugguucgggauugcaaacc

SEQ ID NO: 1971545 - RNA, 19 nt, Artificial Sequence
  Description of Artificial Sequence: Synthetic oligonucleotide
auuguucacuaaaacgcca

SEQ ID NO: 1971546 - RNA, 19 nt, Artificial Sequence
  Description of Artificial Sequence: Synthetic oligonucleotide
gggacuaggccucacuacc

SEQ ID NO: 1971547 - RNA, 19 nt, Artificial Sequence
  Description of Artificial Sequence: Synthetic oligonucleotide
accuguaacaacugcccau

SEQ ID NO: 1971548 - RNA, 19 nt, Artificial Sequence
  Description of Artificial Sequence: Synthetic oligonucleotide
acccacauuguucacuaaa

SEQ ID NO: 1971549 - RNA, 19 nt, Artificial Sequence
  Description of Artificial Sequence: Synthetic oligonucleotide
cacaaacgucucuggagag

SEQ ID NO: 1971550 - RNA, 19 nt, Artificial Sequence
  Description of Artificial Sequence: Synthetic oligonucleotide
uugccaacucuucugcaua

SEQ ID NO: 1971551 - RNA, 19 nt, Artificial Sequence
  Description of Artificial Sequence: Synthetic oligonucleotide
gggauuuguuccuuucaag

SEQ ID NO: 1971552 - RNA, 19 nt, Artificial Sequence
  Description of Artificial Sequence: Synthetic oligonucleotide
agauggucaagaguggaau

SEQ ID NO: 1971553 - RNA, 19 nt, Artificial Sequence
  Description of Artificial Sequence: Synthetic oligonucleotide
agaaaucuacaaaagccuu

SEQ ID NO: 1971554 - RNA, 19 nt, Artificial Sequence
  Description of Artificial Sequence: Synthetic oligonucleotide
gguauuguccaagucagga

SEQ ID NO: 1971555 - RNA, 19 nt, Artificial Sequence
  Description of Artificial Sequence: Synthetic oligonucleotide
cagacuucacaaacgucuc

SEQ ID NO: 1971556 - RNA, 19 nt, Artificial Sequence
  Description of Artificial Sequence: Synthetic oligonucleotide
ugcagacuucacaaacguc

SEQ ID NO: 1971557 - RNA, 19 nt, Artificial Sequence
  Description of Artificial Sequence: Synthetic oligonucleotide
acccaugguuauuuuaaaa

SEQ ID NO: 1971558 - RNA, 19 nt, Artificial Sequence
  Description of Artificial Sequence: Synthetic oligonucleotide
guugcagaguagaugguca

SEQ ID NO: 1971559 - RNA, 19 nt, Artificial Sequence
  Description of Artificial Sequence: Synthetic oligonucleotide
caucagugccaccuguaac

SEQ ID NO: 1971560 - RNA, 19 nt, Artificial Sequence
  Description of Artificial Sequence: Synthetic oligonucleotide
cauuccacgcuuugccaac

SEQ ID NO: 1971561 - RNA, 19 nt, Artificial Sequence
  Description of Artificial Sequence: Synthetic oligonucleotide
acauauccagugguucggg

SEQ ID NO: 1971562 - RNA, 19 nt, Artificial Sequence
  Description of Artificial Sequence: Synthetic oligonucleotide
gggagagcgcucuccaugg

SEQ ID NO: 1971563 - RNA, 19 nt, Artificial Sequence
  Description of Artificial Sequence: Synthetic oligonucleotide
cuuguugaaacccaugguu

SEQ ID NO: 1971564 - RNA, 19 nt, Artificial Sequence
  Description of Artificial Sequence: Synthetic oligonucleotide
aggcaacagugcucgcgcc

SEQ ID NO: 1971565 - RNA, 19 nt, Artificial Sequence
  Description of Artificial Sequence: Synthetic oligonucleotide
aaauuacuccugguuuuau

SEQ ID NO: 1971566 - RNA, 19 nt, Artificial Sequence
  Description of Artificial Sequence: Synthetic oligonucleotide
gauccaguuuauccuggga

SEQ ID NO: 1971567 - RNA, 19 nt, Artificial Sequence
  Description of Artificial Sequence: Synthetic oligonucleotide
caaugguccuuguuuccac

SEQ ID NO: 1971568 - RNA, 19 nt, Artificial Sequence
  Description of Artificial Sequence: Synthetic oligonucleotide
ccaagcgguucaaugaccc

SEQ ID NO: 1971569 - RNA, 19 nt, Artificial Sequence
  Description of Artificial Sequence: Synthetic oligonucleotide
gacuaggccucacuaccac

SEQ ID NO: 1971570 - RNA, 19 nt, Artificial Sequence
  Description of Artificial Sequence: Synthetic oligonucleotide
ggguucuauguuuacuuac

SEQ ID NO: 1971571 - RNA, 19 nt, Artificial Sequence
  Description of Artificial Sequence: Synthetic oligonucleotide
ucguugcccaagcaccaca

SEQ ID NO: 1971572 - RNA, 19 nt, Artificial Sequence
  Description of Artificial Sequence: Synthetic oligonucleotide
gguucgggauugcaaaccc

SEQ ID NO: 1971573 - RNA, 19 nt, Artificial Sequence
  Description of Artificial Sequence: Synthetic oligonucleotide
accaccgugaauggugaag

SEQ ID NO: 1971574 - RNA, 19 nt, Artificial Sequence
  Description of Artificial Sequence: Synthetic oligonucleotide
uggguucuauguuuacuua

SEQ ID NO: 1971575 - RNA, 19 nt, Artificial Sequence
  Description of Artificial Sequence: Synthetic oligonucleotide
agcgggccgacccaggacu

SEQ ID NO: 1971576 - RNA, 19 nt, Artificial Sequence
  Description of Artificial Sequence: Synthetic oligonucleotide
caacugcccauucuccgag

SEQ ID NO: 1971577 - RNA, 19 nt, Artificial Sequence
  Description of Artificial Sequence: Synthetic oligonucleotide
acggcaggacacucugcac

SEQ ID NO: 1971578 - RNA, 19 nt, Artificial Sequence
  Description of Artificial Sequence: Synthetic oligonucleotide
uggggacuaggccucacua

SEQ ID NO: 1971579 - RNA, 19 nt, Artificial Sequence
  Description of Artificial Sequence: Synthetic oligonucleotide
ccaccuguaacaacugccc

SEQ ID NO: 1971580 - RNA, 19 nt, Artificial Sequence
  Description of Artificial Sequence: Synthetic oligonucleotide
caugagagcauggaucaca

SEQ ID NO: 1971581 - RNA, 19 nt, Artificial Sequence
  Description of Artificial Sequence: Synthetic oligonucleotide
ucgggauugcaaacccacu

SEQ ID NO: 1971582 - RNA, 19 nt, Artificial Sequence
  Description of Artificial Sequence: Synthetic oligonucleotide
cccuuuagaccuuucuacc

SEQ ID NO: 1971583 - RNA, 19 nt, Artificial Sequence
  Description of Artificial Sequence: Synthetic oligonucleotide
cuucacaaacgucucugga

SEQ ID NO: 1971584 - RNA, 19 nt, Artificial Sequence
  Description of Artificial Sequence: Synthetic oligonucleotide
aagccggccgccgggagag

SEQ ID NO: 1971585 - RNA, 19 nt, Artificial Sequence
  Description of Artificial Sequence: Synthetic oligonucleotide
ccccuuuagaccuuucuac

SEQ ID NO: 1971586 - RNA, 19 nt, Artificial Sequence
  Description of Artificial Sequence: Synthetic oligonucleotide
ccauucuccgagcagcggg

SEQ ID NO: 1971587 - RNA, 19 nt, Artificial Sequence
  Description of Artificial Sequence: Synthetic oligonucleotide
ccuuucaagagcauuuaca

SEQ ID NO: 1971588 - RNA, 19 nt, Artificial Sequence
  Description of Artificial Sequence: Synthetic oligonucleotide
accccuuuagaccuuucua

SEQ ID NO: 1971589 - RNA, 19 nt, Artificial Sequence
  Description of Artificial Sequence: Synthetic oligonucleotide
acuccugguuuuaucaaga

SEQ ID NO: 1971590 - RNA, 19 nt, Artificial Sequence
  Description of Artificial Sequence: Synthetic oligonucleotide
caaugacccaucaacauuu

SEQ ID NO: 1971591 - RNA, 19 nt, Artificial Sequence
  Description of Artificial Sequence: Synthetic oligonucleotide
cgugucaccuugcaaacgg

SEQ ID NO: 1971592 - RNA, 19 nt, Artificial Sequence
  Description of Artificial Sequence: Synthetic oligonucleotide
gucaagaguggaauuggga

SEQ ID NO: 1971593 - RNA, 19 nt, Artificial Sequence
  Description of Artificial Sequence: Synthetic oligonucleotide
gaaucuggccaagcgguuc

SEQ ID NO: 1971594 - RNA, 19 nt, Artificial Sequence
  Description of Artificial Sequence: Synthetic oligonucleotide
acgcuuugccaacucuucu

SEQ ID NO: 1971595 - RNA, 19 nt, Artificial Sequence
  Description of Artificial Sequence: Synthetic oligonucleotide
gaguggaauugggagcaug

SEQ ID NO: 1971596 - RNA, 19 nt, Artificial Sequence
  Description of Artificial Sequence: Synthetic oligonucleotide
agcgguucaaugacccauc

SEQ ID NO: 1971597 - RNA, 19 nt, Artificial Sequence
  Description of Artificial Sequence: Synthetic oligonucleotide
ugaaacccaugguuauuuu

SEQ ID NO: 1971598 - RNA, 19 nt, Artificial Sequence
  Description of Artificial Sequence: Synthetic oligonucleotide
guggaauugggagcaugcc

SEQ ID NO: 1971599 - RNA, 19 nt, Artificial Sequence
  Description of Artificial Sequence: Synthetic oligonucleotide
ggucaagaguggaauuggg

SEQ ID NO: 1971600 - RNA, 19 nt, Artificial Sequence
  Description of Artificial Sequence: Synthetic oligonucleotide
acaccuggaaggcucugaa

SEQ ID NO: 1971601 - RNA, 19 nt, Artificial Sequence
  Description of Artificial Sequence: Synthetic oligonucleotide
agagcgcucuccauggcug

SEQ ID NO: 1971602 - RNA, 19 nt, Artificial Sequence
  Description of Artificial Sequence: Synthetic oligonucleotide
ugccaguuuuguagcuaca

SEQ ID NO: 1971603 - RNA, 19 nt, Artificial Sequence
  Description of Artificial Sequence: Synthetic oligonucleotide
uauacuccucauggaggca

SEQ ID NO: 1971604 - RNA, 19 nt, Artificial Sequence
  Description of Artificial Sequence: Synthetic oligonucleotide
aaguacggcaggacacucu

SEQ ID NO: 1971605 - RNA, 19 nt, Artificial Sequence
  Description of Artificial Sequence: Synthetic oligonucleotide
caggacucguugcccaagc

SEQ ID NO: 1971606 - RNA, 19 nt, Artificial Sequence
  Description of Artificial Sequence: Synthetic oligonucleotide
ugcaaacggaaagaacauu

SEQ ID NO: 1971607 - RNA, 19 nt, Artificial Sequence
  Description of Artificial Sequence: Synthetic oligonucleotide
gugguucgggauugcaaac

SEQ ID NO: 1971608 - RNA, 19 nt, Artificial Sequence
  Description of Artificial Sequence: Synthetic oligonucleotide
cacccaguacaggaagccg

SEQ ID NO: 1971609 - RNA, 19 nt, Artificial Sequence
  Description of Artificial Sequence: Synthetic oligonucleotide
caguuucuugaugguauug

SEQ ID NO: 1971610 - RNA, 19 nt, Artificial Sequence
  Description of Artificial Sequence: Synthetic oligonucleotide
gggagcaugccaguggcag

SEQ ID NO: 1971611 - RNA, 19 nt, Artificial Sequence
  Description of Artificial Sequence: Synthetic oligonucleotide
cuucaaauuacuccugguu

SEQ ID NO: 1971612 - RNA, 19 nt, Artificial Sequence
  Description of Artificial Sequence: Synthetic oligonucleotide
ccacauuguucacuaaaac

SEQ ID NO: 1971613 - RNA, 19 nt, Artificial Sequence
  Description of Artificial Sequence: Synthetic oligonucleotide
guugcccaagcaccacacc

SEQ ID NO: 1971614 - RNA, 19 nt, Artificial Sequence
  Description of Artificial Sequence: Synthetic oligonucleotide
aggcacugagagaagaaau

SEQ ID NO: 1971615 - RNA, 19 nt, Artificial Sequence
  Description of Artificial Sequence: Synthetic oligonucleotide
gcaaacggaaagaacauua

SEQ ID NO: 1971616 - RNA, 19 nt, Artificial Sequence
  Description of Artificial Sequence: Synthetic oligonucleotide
ugguccuuguuuccacuuu

SEQ ID NO: 1971617 - RNA, 19 nt, Artificial Sequence
  Description of Artificial Sequence: Synthetic oligonucleotide
cuaccaccgugaaugguga

SEQ ID NO: 1971618 - RNA, 19 nt, Artificial Sequence
  Description of Artificial Sequence: Synthetic oligonucleotide
cugggauuuguuccuuuca

SEQ ID NO: 1971619 - RNA, 19 nt, Artificial Sequence
  Description of Artificial Sequence: Synthetic oligonucleotide
auccaaaguuggcuuccgu

SEQ ID NO: 1971620 - RNA, 19 nt, Artificial Sequence
  Description of Artificial Sequence: Synthetic oligonucleotide
ucuccgagcagcgggccga

SEQ ID NO: 1971621 - RNA, 19 nt, Artificial Sequence
  Description of Artificial Sequence: Synthetic oligonucleotide
cucgcgcccacccaguaca

SEQ ID NO: 1971622 - RNA, 19 nt, Artificial Sequence
  Description of Artificial Sequence: Synthetic oligonucleotide
aggcucugaagagugagua

SEQ ID NO: 1971623 - RNA, 19 nt, Artificial Sequence
  Description of Artificial Sequence: Synthetic oligonucleotide
ccaugguuauuuuaaaaua

SEQ ID NO: 1971624 - RNA, 19 nt, Artificial Sequence
  Description of Artificial Sequence: Synthetic oligonucleotide
augguccuuguuuccacuu

SEQ ID NO: 1971625 - RNA, 19 nt, Artificial Sequence
  Description of Artificial Sequence: Synthetic oligonucleotide
guugacaaucaccccuuua

SEQ ID NO: 1971626 - RNA, 19 nt, Artificial Sequence
  Description of Artificial Sequence: Synthetic oligonucleotide
aggacucguugcccaagca

SEQ ID NO: 1971627 - RNA, 19 nt, Artificial Sequence
  Description of Artificial Sequence: Synthetic oligonucleotide
gaccugcugauuaggacaa

SEQ ID NO: 1971628 - RNA, 19 nt, Artificial Sequence
  Description of Artificial Sequence: Synthetic oligonucleotide
accaagcgugucaccuugc

SEQ ID NO: 1971629 - RNA, 19 nt, Artificial Sequence
  Description of Artificial Sequence: Synthetic oligonucleotide
ggccaagcgguucaaugac

SEQ ID NO: 1971630 - RNA, 19 nt, Artificial Sequence
  Description of Artificial Sequence: Synthetic oligonucleotide
aaguuggcuuccguauuuu

SEQ ID NO: 1971631 - RNA, 19 nt, Artificial Sequence
  Description of Artificial Sequence: Synthetic oligonucleotide
ugggagcaugccaguggca

SEQ ID NO: 1971632 - RNA, 19 nt, Artificial Sequence
  Description of Artificial Sequence: Synthetic oligonucleotide
gauggucaagaguggaauu

SEQ ID NO: 1971633 - RNA, 19 nt, Artificial Sequence
  Description of Artificial Sequence: Synthetic oligonucleotide
gguugcagaguagaugguc

SEQ ID NO: 1971634 - RNA, 19 nt, Artificial Sequence
  Description of Artificial Sequence: Synthetic oligonucleotide
caauuuucauuccacgcuu

SEQ ID NO: 1971635 - RNA, 19 nt, Artificial Sequence
  Description of Artificial Sequence: Synthetic oligonucleotide
aaugacccaucaacauuua

SEQ ID NO: 1971636 - RNA, 19 nt, Artificial Sequence
  Description of Artificial Sequence: Synthetic oligonucleotide
cucguaugacauacccaca

SEQ ID NO: 1971637 - RNA, 19 nt, Artificial Sequence
  Description of Artificial Sequence: Synthetic oligonucleotide
uucugggauuuguuccuuu

SEQ ID NO: 1971638 - RNA, 19 nt, Artificial Sequence
  Description of Artificial Sequence: Synthetic oligonucleotide
uuccacgcuuugccaacuc

SEQ ID NO: 1971639 - RNA, 19 nt, Artificial Sequence
  Description of Artificial Sequence: Synthetic oligonucleotide
aggacuuguugaaacccau

SEQ ID NO: 1971640 - RNA, 19 nt, Artificial Sequence
  Description of Artificial Sequence: Synthetic oligonucleotide
gagagcgcucuccauggcu

SEQ ID NO: 1971641 - RNA, 19 nt, Artificial Sequence
  Description of Artificial Sequence: Synthetic oligonucleotide
aggccugucuuaauuuuau

SEQ ID NO: 1971642 - RNA, 19 nt, Artificial Sequence
  Description of Artificial Sequence: Synthetic oligonucleotide
gagagggcuuauccaaagu

SEQ ID NO: 1971643 - RNA, 19 nt, Artificial Sequence
  Description of Artificial Sequence: Synthetic oligonucleotide
ugagagcauggaucacaua

SEQ ID NO: 1971644 - RNA, 19 nt, Artificial Sequence
  Description of Artificial Sequence: Synthetic oligonucleotide
cagugguucgggauugcaa

SEQ ID NO: 1971645 - RNA, 19 nt, Artificial Sequence
  Description of Artificial Sequence: Synthetic oligonucleotide
caauuccaucagugccacc

SEQ ID NO: 1971646 - RNA, 19 nt, Artificial Sequence
  Description of Artificial Sequence: Synthetic oligonucleotide
acgccaauuucaagaccag

SEQ ID NO: 1971647 - RNA, 19 nt, Artificial Sequence
  Description of Artificial Sequence: Synthetic oligonucleotide
ccuuucuaccaugccaggc

SEQ ID NO: 1971648 - RNA, 19 nt, Artificial Sequence
  Description of Artificial Sequence: Synthetic oligonucleotide
ucgcgcccacccaguacag

SEQ ID NO: 1971649 - RNA, 19 nt, Artificial Sequence
  Description of Artificial Sequence: Synthetic oligonucleotide
caguuuauccugggaccug

SEQ ID NO: 1971650 - RNA, 19 nt, Artificial Sequence
  Description of Artificial Sequence: Synthetic oligonucleotide
auuccacgcuuugccaacu

SEQ ID NO: 1971651 - RNA, 19 nt, Artificial Sequence
  Description of Artificial Sequence: Synthetic oligonucleotide
caacgaggcaagauugagu

SEQ ID NO: 1971652 - RNA, 19 nt, Artificial Sequence
  Description of Artificial Sequence: Synthetic oligonucleotide
gguucuauguuuacuuacu

SEQ ID NO: 1971653 - RNA, 19 nt, Artificial Sequence
  Description of Artificial Sequence: Synthetic oligonucleotide
caaacccacuguuuuaauu

SEQ ID NO: 1971654 - RNA, 19 nt, Artificial Sequence
  Description of Artificial Sequence: Synthetic oligonucleotide
caagcgguucaaugaccca

SEQ ID NO: 1971655 - RNA, 19 nt, Artificial Sequence
  Description of Artificial Sequence: Synthetic oligonucleotide
guacaggaagccggccgcc

SEQ ID NO: 1971656 - RNA, 19 nt, Artificial Sequence
  Description of Artificial Sequence: Synthetic oligonucleotide
cgggauugcaaacccacug

SEQ ID NO: 1971657 - RNA, 19 nt, Artificial Sequence
  Description of Artificial Sequence: Synthetic oligonucleotide
ccugggaccugcugauuag

SEQ ID NO: 1971658 - RNA, 19 nt, Artificial Sequence
  Description of Artificial Sequence: Synthetic oligonucleotide
acgaggcaagauugaguuu

SEQ ID NO: 1971659 - RNA, 19 nt, Artificial Sequence
  Description of Artificial Sequence: Synthetic oligonucleotide
gggauugcaaacccacugu

SEQ ID NO: 1971660 - RNA, 19 nt, Artificial Sequence
  Description of Artificial Sequence: Synthetic oligonucleotide
cauacccacauuguucacu

SEQ ID NO: 1971661 - RNA, 19 nt, Artificial Sequence
  Description of Artificial Sequence: Synthetic oligonucleotide
agacacgcagggucaggua

SEQ ID NO: 1971662 - RNA, 19 nt, Artificial Sequence
  Description of Artificial Sequence: Synthetic oligonucleotide
guucgggauugcaaaccca

SEQ ID NO: 1971663 - RNA, 19 nt, Artificial Sequence
  Description of Artificial Sequence: Synthetic oligonucleotide
caagcgugucaccuugcaa

SEQ ID NO: 1971664 - RNA, 19 nt, Artificial Sequence
  Description of Artificial Sequence: Synthetic oligonucleotide
gcaaugguccuuguuucca

SEQ ID NO: 1971665 - RNA, 19 nt, Artificial Sequence
  Description of Artificial Sequence: Synthetic oligonucleotide
caggccugucuuaauuuua

SEQ ID NO: 1971666 - RNA, 19 nt, Artificial Sequence
  Description of Artificial Sequence: Synthetic oligonucleotide
ggcuuauccaaaguuggcu

SEQ ID NO: 1971667 - RNA, 19 nt, Artificial Sequence
  Description of Artificial Sequence: Synthetic oligonucleotide
ucaccccuuuagaccuuuc

SEQ ID NO: 1971668 - RNA, 19 nt, Artificial Sequence
  Description of Artificial Sequence: Synthetic oligonucleotide
ccacccaguacaggaagcc

SEQ ID NO: 1971669 - RNA, 19 nt, Artificial Sequence
  Description of Artificial Sequence: Synthetic oligonucleotide
caaaguacggcaggacacu

SEQ ID NO: 1971670 - RNA, 19 nt, Artificial Sequence
  Description of Artificial Sequence: Synthetic oligonucleotide
gagcagcgggccgacccag

SEQ ID NO: 1971671 - RNA, 19 nt, Artificial Sequence
  Description of Artificial Sequence: Synthetic oligonucleotide
cucguugcccaagcaccac

SEQ ID NO: 1971672 - RNA, 19 nt, Artificial Sequence
  Description of Artificial Sequence: Synthetic oligonucleotide
ugggccagauggguucuau

SEQ ID NO: 1971673 - RNA, 19 nt, Artificial Sequence
  Description of Artificial Sequence: Synthetic oligonucleotide
ucuggccaagcgguucaau

SEQ ID NO: 1971674 - RNA, 19 nt, Artificial Sequence
  Description of Artificial Sequence: Synthetic oligonucleotide
gagcaugccaguggcagau

SEQ ID NO: 1971675 - RNA, 19 nt, Artificial Sequence
  Description of Artificial Sequence: Synthetic oligonucleotide
guacggcaggacacucugc

SEQ ID NO: 1971676 - RNA, 19 nt, Artificial Sequence
  Description of Artificial Sequence: Synthetic oligonucleotide
gcgcccacccaguacagga

SEQ ID NO: 1971677 - RNA, 19 nt, Artificial Sequence
  Description of Artificial Sequence: Synthetic oligonucleotide
aucucacuggaaaccugau

SEQ ID NO: 1971678 - RNA, 19 nt, Artificial Sequence
  Description of Artificial Sequence: Synthetic oligonucleotide
ccgacccaggacucguugc

SEQ ID NO: 1971679 - RNA, 19 nt, Artificial Sequence
  Description of Artificial Sequence: Synthetic oligonucleotide
gggccagauggguucuaug

SEQ ID NO: 1971680 - RNA, 19 nt, Artificial Sequence
  Description of Artificial Sequence: Synthetic oligonucleotide
ggccugucuuaauuuuauc

SEQ ID NO: 1971681 - RNA, 19 nt, Artificial Sequence
  Description of Artificial Sequence: Synthetic oligonucleotide
gccaagcgguucaaugacc

SEQ ID NO: 1971682 - RNA, 19 nt, Artificial Sequence
  Description of Artificial Sequence: Synthetic oligonucleotide
ugcucgcgcccacccagua

SEQ ID NO: 1971683 - RNA, 19 nt, Artificial Sequence
  Description of Artificial Sequence: Synthetic oligonucleotide
gccuugguugcagaguaga

SEQ ID NO: 1971684 - RNA, 19 nt, Artificial Sequence
  Description of Artificial Sequence: Synthetic oligonucleotide
gccaguuuuguagcuacaa

SEQ ID NO: 1971685 - RNA, 19 nt, Artificial Sequence
  Description of Artificial Sequence: Synthetic oligonucleotide
gcccauucuccgagcagcg

SEQ ID NO: 1971686 - RNA, 19 nt, Artificial Sequence
  Description of Artificial Sequence: Synthetic oligonucleotide
ccaaaguuggcuuccguau

SEQ ID NO: 1971687 - RNA, 19 nt, Artificial Sequence
  Description of Artificial Sequence: Synthetic oligonucleotide
cuaccaugccaggcagcac

SEQ ID NO: 1971688 - RNA, 19 nt, Artificial Sequence
  Description of Artificial Sequence: Synthetic oligonucleotide
gcgugucaccuugcaaacg

SEQ ID NO: 1971689 - RNA, 19 nt, Artificial Sequence
  Description of Artificial Sequence: Synthetic oligonucleotide
caaaguuggcuuccguauu

SEQ ID NO: 1971690 - RNA, 19 nt, Artificial Sequence
  Description of Artificial Sequence: Synthetic oligonucleotide
caacagugcucgcgcccac

SEQ ID NO: 1971691 - RNA, 19 nt, Artificial Sequence
  Description of Artificial Sequence: Synthetic oligonucleotide
aaucaccccuuuagaccuu

SEQ ID NO: 1971692 - RNA, 19 nt, Artificial Sequence
  Description of Artificial Sequence: Synthetic oligonucleotide
gccgacccaggacucguug

SEQ ID NO: 1971693 - RNA, 19 nt, Artificial Sequence
  Description of Artificial Sequence: Synthetic oligonucleotide
ggagagcgcucuccauggc

SEQ ID NO: 1971694 - RNA, 19 nt, Artificial Sequence
  Description of Artificial Sequence: Synthetic oligonucleotide
ggauugcaaacccacuguu

SEQ ID NO: 1971695 - RNA, 19 nt, Artificial Sequence
  Description of Artificial Sequence: Synthetic oligonucleotide
ggccucacuaccaccguga

SEQ ID NO: 1971696 - RNA, 19 nt, Artificial Sequence
  Description of Artificial Sequence: Synthetic oligonucleotide
cguugcccaagcaccacac

SEQ ID NO: 1971697 - RNA, 19 nt, Artificial Sequence
  Description of Artificial Sequence: Synthetic oligonucleotide
ggacuaggccucacuacca

SEQ ID NO: 1971698 - RNA, 19 nt, Artificial Sequence
  Description of Artificial Sequence: Synthetic oligonucleotide
agcaugccaguggcagaug

SEQ ID NO: 1971699 - RNA, 19 nt, Artificial Sequence
  Description of Artificial Sequence: Synthetic oligonucleotide
aucaccccuuuagaccuuu

SEQ ID NO: 1971700 - RNA, 19 nt, Artificial Sequence
  Description of Artificial Sequence: Synthetic oligonucleotide
cagcgggccgacccaggac

SEQ ID NO: 1971701 - RNA, 19 nt, Artificial Sequence
  Description of Artificial Sequence: Synthetic oligonucleotide
cgaggcaagauugaguuua

SEQ ID NO: 1971702 - RNA, 19 nt, Artificial Sequence
  Description of Artificial Sequence: Synthetic oligonucleotide
gcgguucaaugacccauca

SEQ ID NO: 1971703 - RNA, 19 nt, Artificial Sequence
  Description of Artificial Sequence: Synthetic oligonucleotide
guuuacuuacuaagucauu

SEQ ID NO: 1971704 - RNA, 19 nt, Artificial Sequence
  Description of Artificial Sequence: Synthetic oligonucleotide
guugaaacccaugguuauu

SEQ ID NO: 1971705 - RNA, 19 nt, Artificial Sequence
  Description of Artificial Sequence: Synthetic oligonucleotide
caaagaugcccuugcucuu

SEQ ID NO: 1971706 - RNA, 19 nt, Artificial Sequence
  Description of Artificial Sequence: Synthetic oligonucleotide
agaguggaauugggagcau

SEQ ID NO: 1971707 - RNA, 19 nt, Artificial Sequence
  Description of Artificial Sequence: Synthetic oligonucleotide
aggaagccggccgccggga

SEQ ID NO: 1971708 - RNA, 19 nt, Artificial Sequence
  Description of Artificial Sequence: Synthetic oligonucleotide
ccagauggguucuauguuu

SEQ ID NO: 1971709 - RNA, 19 nt, Artificial Sequence
  Description of Artificial Sequence: Synthetic oligonucleotide
ccaguacaggaagccggcc

SEQ ID NO: 1971710 - RNA, 19 nt, Artificial Sequence
  Description of Artificial Sequence: Synthetic oligonucleotide
gggucagguaggcaacagu

SEQ ID NO: 1971711 - RNA, 19 nt, Artificial Sequence
  Description of Artificial Sequence: Synthetic oligonucleotide
ccaagcgugucaccuugca

SEQ ID NO: 1971712 - RNA, 19 nt, Artificial Sequence
  Description of Artificial Sequence: Synthetic oligonucleotide
acgucucuggagagggcuu

SEQ ID NO: 1971713 - RNA, 19 nt, Artificial Sequence
  Description of Artificial Sequence: Synthetic oligonucleotide
gcucgcgcccacccaguac

SEQ ID NO: 1971714 - RNA, 19 nt, Artificial Sequence
  Description of Artificial Sequence: Synthetic oligonucleotide
cuggggacuaggccucacu

SEQ ID NO: 1971715 - RNA, 19 nt, Artificial Sequence
  Description of Artificial Sequence: Synthetic oligonucleotide
cagugcucgcgcccaccca

SEQ ID NO: 1971716 - RNA, 19 nt, Artificial Sequence
  Description of Artificial Sequence: Synthetic oligonucleotide
gccagauggguucuauguu

SEQ ID NO: 1971717 - RNA, 19 nt, Artificial Sequence
  Description of Artificial Sequence: Synthetic oligonucleotide
gccggccgccgggagagcg

SEQ ID NO: 1971718 - RNA, 19 nt, Artificial Sequence
  Description of Artificial Sequence: Synthetic oligonucleotide
ccaguuuauccugggaccu

SEQ ID NO: 1971719 - RNA, 19 nt, Artificial Sequence
  Description of Artificial Sequence: Synthetic oligonucleotide
accugcugauuaggacaau

SEQ ID NO: 1971720 - RNA, 19 nt, Artificial Sequence
  Description of Artificial Sequence: Synthetic oligonucleotide
caacagcaaugguccuugu

SEQ ID NO: 1971721 - RNA, 19 nt, Artificial Sequence
  Description of Artificial Sequence: Synthetic oligonucleotide
ccaucaacauuuaguucuu

SEQ ID NO: 1971722 - RNA, 19 nt, Artificial Sequence
  Description of Artificial Sequence: Synthetic oligonucleotide
ccuugguugcagaguagau

SEQ ID NO: 1971723 - RNA, 19 nt, Artificial Sequence
  Description of Artificial Sequence: Synthetic oligonucleotide
ccggccgccgggagagcgc

SEQ ID NO: 1971724 - RNA, 19 nt, Artificial Sequence
  Description of Artificial Sequence: Synthetic oligonucleotide
gucucuggagagggcuuau

SEQ ID NO: 1971725 - RNA, 19 nt, Artificial Sequence
  Description of Artificial Sequence: Synthetic oligonucleotide
gcaccaagcgugucaccuu

SEQ ID NO: 1971726 - RNA, 19 nt, Artificial Sequence
  Description of Artificial Sequence: Synthetic oligonucleotide
cgguucaaugacccaucaa

SEQ ID NO: 1971727 - RNA, 19 nt, Artificial Sequence
  Description of Artificial Sequence: Synthetic oligonucleotide
cgcgcccacccaguacagg

SEQ ID NO: 1971728 - RNA, 19 nt, Artificial Sequence
  Description of Artificial Sequence: Synthetic oligonucleotide
cguaugacauacccacauu

SEQ ID NO: 1971729 - RNA, 19 nt, Artificial Sequence
  Description of Artificial Sequence: Synthetic oligonucleotide
gugcucgcgcccacccagu

SEQ ID NO: 1971730 - RNA, 19 nt, Artificial Sequence
  Description of Artificial Sequence: Synthetic oligonucleotide
gccgccgggagagcgcucu

SEQ ID NO: 1971731 - RNA, 19 nt, Artificial Sequence
  Description of Artificial Sequence: Synthetic oligonucleotide
gggccgacccaggacucgu

SEQ ID NO: 1971732 - RNA, 19 nt, Artificial Sequence
  Description of Artificial Sequence: Synthetic oligonucleotide
ccgggagagcgcucuccau

SEQ ID NO: 1971733 - RNA, 19 nt, Artificial Sequence
  Description of Artificial Sequence: Synthetic oligonucleotide
ggccgccgggagagcgcuc

SEQ ID NO: 1971734 - RNA, 19 nt, Artificial Sequence
  Description of Artificial Sequence: Synthetic oligonucleotide
ggccgacccaggacucguu

SEQ ID NO: 1971735 - RNA, 19 nt, Artificial Sequence
  Description of Artificial Sequence: Synthetic oligonucleotide
cggccgccgggagagcgcu

SEQ ID NO: 1971736 - RNA, 19 nt, Artificial Sequence
  Description of Artificial Sequence: Synthetic oligonucleotide
aaaucuccugaccugagcc

SEQ ID NO: 1971737 - RNA, 19 nt, Artificial Sequence
  Description of Artificial Sequence: Synthetic oligonucleotide
ucuaguuuacgauucagcg

SEQ ID NO: 1971738 - RNA, 19 nt, Artificial Sequence
  Description of Artificial Sequence: Synthetic oligonucleotide
aguuugaacuuauagugcc

SEQ ID NO: 1971739 - RNA, 19 nt, Artificial Sequence
  Description of Artificial Sequence: Synthetic oligonucleotide
uucauuuggugcuugacgg

SEQ ID NO: 1971740 - RNA, 19 nt, Artificial Sequence
  Description of Artificial Sequence: Synthetic oligonucleotide
auaacaaacacauuuaauu

SEQ ID NO: 1971741 - RNA, 19 nt, Artificial Sequence
  Description of Artificial Sequence: Synthetic oligonucleotide
uauagugcccacaaggugc

SEQ ID NO: 1971742 - RNA, 19 nt, Artificial Sequence
  Description of Artificial Sequence: Synthetic oligonucleotide
aggaacuuggcuuccaugc

SEQ ID NO: 1971743 - RNA, 19 nt, Artificial Sequence
  Description of Artificial Sequence: Synthetic oligonucleotide
uuucauuuggugcuugacg

SEQ ID NO: 1971744 - RNA, 19 nt, Artificial Sequence
  Description of Artificial Sequence: Synthetic oligonucleotide
ugaauuguaggaaugccug

SEQ ID NO: 1971745 - RNA, 19 nt, Artificial Sequence
  Description of Artificial Sequence: Synthetic oligonucleotide
aaguccagaagaaaucucc

SEQ ID NO: 1971746 - RNA, 19 nt, Artificial Sequence
  Description of Artificial Sequence: Synthetic oligonucleotide
aauucacagaauuucauuu

SEQ ID NO: 1971747 - RNA, 19 nt, Artificial Sequence
  Description of Artificial Sequence: Synthetic oligonucleotide
aagcucgugaucugaauac

SEQ ID NO: 1971748 - RNA, 19 nt, Artificial Sequence
  Description of Artificial Sequence: Synthetic oligonucleotide
gaagaagaagacuuugacc

SEQ ID NO: 1971749 - RNA, 19 nt, Artificial Sequence
  Description of Artificial Sequence: Synthetic oligonucleotide
aaguguaacgcccugcuca

SEQ ID NO: 1971750 - RNA, 19 nt, Artificial Sequence
  Description of Artificial Sequence: Synthetic oligonucleotide
uaacaaacacauuuaauuc

SEQ ID NO: 1971751 - RNA, 19 nt, Artificial Sequence
  Description of Artificial Sequence: Synthetic oligonucleotide
cauccaaaguuccugaucc

SEQ ID NO: 1971752 - RNA, 19 nt, Artificial Sequence
  Description of Artificial Sequence: Synthetic oligonucleotide
ggaguuugaacuuauagug

SEQ ID NO: 1971753 - RNA, 19 nt, Artificial Sequence
  Description of Artificial Sequence: Synthetic oligonucleotide
agaagaaaucuccugaccu

SEQ ID NO: 1971754 - RNA, 19 nt, Artificial Sequence
  Description of Artificial Sequence: Synthetic oligonucleotide
uaaaugggcaucagcauug

SEQ ID NO: 1971755 - RNA, 19 nt, Artificial Sequence
  Description of Artificial Sequence: Synthetic oligonucleotide
aacagaguacgccccacgg

SEQ ID NO: 1971756 - RNA, 19 nt, Artificial Sequence
  Description of Artificial Sequence: Synthetic oligonucleotide
ugcugcauccaucagaagu

SEQ ID NO: 1971757 - RNA, 19 nt, Artificial Sequence
  Description of Artificial Sequence: Synthetic oligonucleotide
acauuuaauucacagaauu

SEQ ID NO: 1971758 - RNA, 19 nt, Artificial Sequence
  Description of Artificial Sequence: Synthetic oligonucleotide
uugaauuguaggaaugccu

SEQ ID NO: 1971759 - RNA, 19 nt, Artificial Sequence
  Description of Artificial Sequence: Synthetic oligonucleotide
aggugcauucccuaggaac

SEQ ID NO: 1971760 - RNA, 19 nt, Artificial Sequence
  Description of Artificial Sequence: Synthetic oligonucleotide
ucuaaguccuguacaagug

SEQ ID NO: 1971761 - RNA, 19 nt, Artificial Sequence
  Description of Artificial Sequence: Synthetic oligonucleotide
uguacuugagggagcaucc

SEQ ID NO: 1971762 - RNA, 19 nt, Artificial Sequence
  Description of Artificial Sequence: Synthetic oligonucleotide
uacgauucagcgagguucg

SEQ ID NO: 1971763 - RNA, 19 nt, Artificial Sequence
  Description of Artificial Sequence: Synthetic oligonucleotide
uccuguacaaguguaacgc

SEQ ID NO: 1971764 - RNA, 19 nt, Artificial Sequence
  Description of Artificial Sequence: Synthetic oligonucleotide
uuuuaucagcuucuguuac

SEQ ID NO: 1971765 - RNA, 19 nt, Artificial Sequence
  Description of Artificial Sequence: Synthetic oligonucleotide
uuauagugcccacaaggug

SEQ ID NO: 1971766 - RNA, 19 nt, Artificial Sequence
  Description of Artificial Sequence: Synthetic oligonucleotide
acaagcgccauggagaccg

SEQ ID NO: 1971767 - RNA, 19 nt, Artificial Sequence
  Description of Artificial Sequence: Synthetic oligonucleotide
uucuaaguccuguacaagu

SEQ ID NO: 1971768 - RNA, 19 nt, Artificial Sequence
  Description of Artificial Sequence: Synthetic oligonucleotide
cuccagagcacgaagcucg

SEQ ID NO: 1971769 - RNA, 19 nt, Artificial Sequence
  Description of Artificial Sequence: Synthetic oligonucleotide
ugacggucccuguaaaugg

SEQ ID NO: 1971770 - RNA, 19 nt, Artificial Sequence
  Description of Artificial Sequence: Synthetic oligonucleotide
uuaauucacagaauuucau

SEQ ID NO: 1971771 - RNA, 19 nt, Artificial Sequence
  Description of Artificial Sequence: Synthetic oligonucleotide
gaagaaaucuccugaccug

SEQ ID NO: 1971772 - RNA, 19 nt, Artificial Sequence
  Description of Artificial Sequence: Synthetic oligonucleotide
gaagacuuugaccccaaug

SEQ ID NO: 1971773 - RNA, 19 nt, Artificial Sequence
  Description of Artificial Sequence: Synthetic oligonucleotide
uuacgauucagcgagguuc

SEQ ID NO: 1971774 - RNA, 19 nt, Artificial Sequence
  Description of Artificial Sequence: Synthetic oligonucleotide
cuguaaaugggcaucagca

SEQ ID NO: 1971775 - RNA, 19 nt, Artificial Sequence
  Description of Artificial Sequence: Synthetic oligonucleotide
caugaugggacuucuuccc

SEQ ID NO: 1971776 - RNA, 19 nt, Artificial Sequence
  Description of Artificial Sequence: Synthetic oligonucleotide
ucccauauaucuucuaagu

SEQ ID NO: 1971777 - RNA, 19 nt, Artificial Sequence
  Description of Artificial Sequence: Synthetic oligonucleotide
uguaacgcccugcucaucu

SEQ ID NO: 1971778 - RNA, 19 nt, Artificial Sequence
  Description of Artificial Sequence: Synthetic oligonucleotide
uguacaaguguaacgcccu

SEQ ID NO: 1971779 - RNA, 19 nt, Artificial Sequence
  Description of Artificial Sequence: Synthetic oligonucleotide
uaguagauccgccaucucu

SEQ ID NO: 1971780 - RNA, 19 nt, Artificial Sequence
  Description of Artificial Sequence: Synthetic oligonucleotide
ucgugaucugaauacagac

SEQ ID NO: 1971781 - RNA, 19 nt, Artificial Sequence
  Description of Artificial Sequence: Synthetic oligonucleotide
agggacaucuccugugagc

SEQ ID NO: 1971782 - RNA, 19 nt, Artificial Sequence
  Description of Artificial Sequence: Synthetic oligonucleotide
aucguccacaggcagcugc

SEQ ID NO: 1971783 - RNA, 19 nt, Artificial Sequence
  Description of Artificial Sequence: Synthetic oligonucleotide
cuguacaaguguaacgccc

SEQ ID NO: 1971784 - RNA, 19 nt, Artificial Sequence
  Description of Artificial Sequence: Synthetic oligonucleotide
aauuucauuuggugcuuga

SEQ ID NO: 1971785 - RNA, 19 nt, Artificial Sequence
  Description of Artificial Sequence: Synthetic oligonucleotide
gagaacgcgggcuaccugc

SEQ ID NO: 1971786 - RNA, 19 nt, Artificial Sequence
  Description of Artificial Sequence: Synthetic oligonucleotide
aacuuauagugcccacaag

SEQ ID NO: 1971787 - RNA, 19 nt, Artificial Sequence
  Description of Artificial Sequence: Synthetic oligonucleotide
auuguaggaaugccugcuc

SEQ ID NO: 1971788 - RNA, 19 nt, Artificial Sequence
  Description of Artificial Sequence: Synthetic oligonucleotide
uaacagaguacgccccacg

SEQ ID NO: 1971789 - RNA, 19 nt, Artificial Sequence
  Description of Artificial Sequence: Synthetic oligonucleotide
gaauuguaggaaugccugc

SEQ ID NO: 1971790 - RNA, 19 nt, Artificial Sequence
  Description of Artificial Sequence: Synthetic oligonucleotide
uguaguagauccgccaucu

SEQ ID NO: 1971791 - RNA, 19 nt, Artificial Sequence
  Description of Artificial Sequence: Synthetic oligonucleotide
cuacacaauaacaaacaca

SEQ ID NO: 1971792 - RNA, 19 nt, Artificial Sequence
  Description of Artificial Sequence: Synthetic oligonucleotide
uaauucacagaauuucauu

SEQ ID NO: 1971793 - RNA, 19 nt, Artificial Sequence
  Description of Artificial Sequence: Synthetic oligonucleotide
gauucagcgagguucgguc

SEQ ID NO: 1971794 - RNA, 19 nt, Artificial Sequence
  Description of Artificial Sequence: Synthetic oligonucleotide
guuugaauuguaggaaugc

SEQ ID NO: 1971795 - RNA, 19 nt, Artificial Sequence
  Description of Artificial Sequence: Synthetic oligonucleotide
aauggggugagcggcuugg

SEQ ID NO: 1971796 - RNA, 19 nt, Artificial Sequence
  Description of Artificial Sequence: Synthetic oligonucleotide
uucccuaggaacuuggcuu

SEQ ID NO: 1971797 - RNA, 19 nt, Artificial Sequence
  Description of Artificial Sequence: Synthetic oligonucleotide
uguaggaaugccugcuccc

SEQ ID NO: 1971798 - RNA, 19 nt, Artificial Sequence
  Description of Artificial Sequence: Synthetic oligonucleotide
gaguuugaacuuauagugc

SEQ ID NO: 1971799 - RNA, 19 nt, Artificial Sequence
  Description of Artificial Sequence: Synthetic oligonucleotide
cacaauaacaaacacauuu

SEQ ID NO: 1971800 - RNA, 19 nt, Artificial Sequence
  Description of Artificial Sequence: Synthetic oligonucleotide
ugcagauagucaccuagcu

SEQ ID NO: 1971801 - RNA, 19 nt, Artificial Sequence
  Description of Artificial Sequence: Synthetic oligonucleotide
ugcugcaauggggugagcg

SEQ ID NO: 1971802 - RNA, 19 nt, Artificial Sequence
  Description of Artificial Sequence: Synthetic oligonucleotide
uguaaaugggcaucagcau

SEQ ID NO: 1971803 - RNA, 19 nt, Artificial Sequence
  Description of Artificial Sequence: Synthetic oligonucleotide
ugccucaagggacaggcca

SEQ ID NO: 1971804 - RNA, 19 nt, Artificial Sequence
  Description of Artificial Sequence: Synthetic oligonucleotide
uucuguaguagauccgcca

SEQ ID NO: 1971805 - RNA, 19 nt, Artificial Sequence
  Description of Artificial Sequence: Synthetic oligonucleotide
ucuguaguagauccgccau

SEQ ID NO: 1971806 - RNA, 19 nt, Artificial Sequence
  Description of Artificial Sequence: Synthetic oligonucleotide
caaugucacucucuguccg

SEQ ID NO: 1971807 - RNA, 19 nt, Artificial Sequence
  Description of Artificial Sequence: Synthetic oligonucleotide
aucagcuucuguuacucga

SEQ ID NO: 1971808 - RNA, 19 nt, Artificial Sequence
  Description of Artificial Sequence: Synthetic oligonucleotide
aggucagcuuucuucuucg

SEQ ID NO: 1971809 - RNA, 19 nt, Artificial Sequence
  Description of Artificial Sequence: Synthetic oligonucleotide
agaaguccagaagaaaucu

SEQ ID NO: 1971810 - RNA, 19 nt, Artificial Sequence
  Description of Artificial Sequence: Synthetic oligonucleotide
aaucuccugaccugagcca

SEQ ID NO: 1971811 - RNA, 19 nt, Artificial Sequence
  Description of Artificial Sequence: Synthetic oligonucleotide
uugacggucccuguaaaug

SEQ ID NO: 1971812 - RNA, 19 nt, Artificial Sequence
  Description of Artificial Sequence: Synthetic oligonucleotide
aguccuguacaaguguaac

SEQ ID NO: 1971813 - RNA, 19 nt, Artificial Sequence
  Description of Artificial Sequence: Synthetic oligonucleotide
aagguuccugucuaguuua

SEQ ID NO: 1971814 - RNA, 19 nt, Artificial Sequence
  Description of Artificial Sequence: Synthetic oligonucleotide
cagaguacgccccacgggc

SEQ ID NO: 1971815 - RNA, 19 nt, Artificial Sequence
  Description of Artificial Sequence: Synthetic oligonucleotide
gaacuuggcuuccaugcug

SEQ ID NO: 1971816 - RNA, 19 nt, Artificial Sequence
  Description of Artificial Sequence: Synthetic oligonucleotide
cuucuguuacucgagcucc

SEQ ID NO: 1971817 - RNA, 19 nt, Artificial Sequence
  Description of Artificial Sequence: Synthetic oligonucleotide
uuagcuuccuccagagcac

SEQ ID NO: 1971818 - RNA, 19 nt, Artificial Sequence
  Description of Artificial Sequence: Synthetic oligonucleotide
cacaaggcgccccacaagc

SEQ ID NO: 1971819 - RNA, 19 nt, Artificial Sequence
  Description of Artificial Sequence: Synthetic oligonucleotide
ugugcaucguccacaggca

SEQ ID NO: 1971820 - RNA, 19 nt, Artificial Sequence
  Description of Artificial Sequence: Synthetic oligonucleotide
acaaguguaacgcccugcu

SEQ ID NO: 1971821 - RNA, 19 nt, Artificial Sequence
  Description of Artificial Sequence: Synthetic oligonucleotide
ugaacuuauagugcccaca

SEQ ID NO: 1971822 - RNA, 19 nt, Artificial Sequence
  Description of Artificial Sequence: Synthetic oligonucleotide
uccuuacuggcccacacau

SEQ ID NO: 1971823 - RNA, 19 nt, Artificial Sequence
  Description of Artificial Sequence: Synthetic oligonucleotide
aaugucacucucuguccga

SEQ ID NO: 1971824 - RNA, 19 nt, Artificial Sequence
  Description of Artificial Sequence: Synthetic oligonucleotide
gagaguguggccaggauuc

SEQ ID NO: 1971825 - RNA, 19 nt, Artificial Sequence
  Description of Artificial Sequence: Synthetic oligonucleotide
ucucugacuaggaggacaa

SEQ ID NO: 1971826 - RNA, 19 nt, Artificial Sequence
  Description of Artificial Sequence: Synthetic oligonucleotide
uacuggcccacacaugaug

SEQ ID NO: 1971827 - RNA, 19 nt, Artificial Sequence
  Description of Artificial Sequence: Synthetic oligonucleotide
uuugaccccaaugucacuc

SEQ ID NO: 1971828 - RNA, 19 nt, Artificial Sequence
  Description of Artificial Sequence: Synthetic oligonucleotide
ucacucucuguccgaauug

SEQ ID NO: 1971829 - RNA, 19 nt, Artificial Sequence
  Description of Artificial Sequence: Synthetic oligonucleotide
auucccuaggaacuuggcu

SEQ ID NO: 1971830 - RNA, 19 nt, Artificial Sequence
  Description of Artificial Sequence: Synthetic oligonucleotide
aguugcuuagcuuccucca

SEQ ID NO: 1971831 - RNA, 19 nt, Artificial Sequence
  Description of Artificial Sequence: Synthetic oligonucleotide
uaaguccuguacaagugua

SEQ ID NO: 1971832 - RNA, 19 nt, Artificial Sequence
  Description of Artificial Sequence: Synthetic oligonucleotide
aucucuugcugcaaugggg

SEQ ID NO: 1971833 - RNA, 19 nt, Artificial Sequence
  Description of Artificial Sequence: Synthetic oligonucleotide
guuccugucuaguuuacga

SEQ ID NO: 1971834 - RNA, 19 nt, Artificial Sequence
  Description of Artificial Sequence: Synthetic oligonucleotide
cacaugaugggacuucuuc

SEQ ID NO: 1971835 - RNA, 19 nt, Artificial Sequence
  Description of Artificial Sequence: Synthetic oligonucleotide
uuaucagcuucuguuacuc

SEQ ID NO: 1971836 - RNA, 19 nt, Artificial Sequence
  Description of Artificial Sequence: Synthetic oligonucleotide
cuaguuuacgauucagcga

SEQ ID NO: 1971837 - RNA, 19 nt, Artificial Sequence
  Description of Artificial Sequence: Synthetic oligonucleotide
gacggcgcugccucaaggg

SEQ ID NO: 1971838 - RNA, 19 nt, Artificial Sequence
  Description of Artificial Sequence: Synthetic oligonucleotide
uggugaucagcgguggccg

SEQ ID NO: 1971839 - RNA, 19 nt, Artificial Sequence
  Description of Artificial Sequence: Synthetic oligonucleotide
cauauaucuucuaaguccu

SEQ ID NO: 1971840 - RNA, 19 nt, Artificial Sequence
  Description of Artificial Sequence: Synthetic oligonucleotide
caggccacgagaacgcggg

SEQ ID NO: 1971841 - RNA, 19 nt, Artificial Sequence
  Description of Artificial Sequence: Synthetic oligonucleotide
caucucuugcugcaauggg

SEQ ID NO: 1971842 - RNA, 19 nt, Artificial Sequence
  Description of Artificial Sequence: Synthetic oligonucleotide
uuacucgagcuccagguuu

SEQ ID NO: 1971843 - RNA, 19 nt, Artificial Sequence
  Description of Artificial Sequence: Synthetic oligonucleotide
gacuuugaccccaauguca

SEQ ID NO: 1971844 - RNA, 19 nt, Artificial Sequence
  Description of Artificial Sequence: Synthetic oligonucleotide
agguuugaauuguaggaau

SEQ ID NO: 1971845 - RNA, 19 nt, Artificial Sequence
  Description of Artificial Sequence: Synthetic oligonucleotide
gagaccggcugcccgacgg

SEQ ID NO: 1971846 - RNA, 19 nt, Artificial Sequence
  Description of Artificial Sequence: Synthetic oligonucleotide
uuuggugcuugacgguccc

SEQ ID NO: 1971847 - RNA, 19 nt, Artificial Sequence
  Description of Artificial Sequence: Synthetic oligonucleotide
cuuggccaucaucauaaag

SEQ ID NO: 1971848 - RNA, 19 nt, Artificial Sequence
  Description of Artificial Sequence: Synthetic oligonucleotide
uacucgagcuccagguuug

SEQ ID NO: 1971849 - RNA, 19 nt, Artificial Sequence
  Description of Artificial Sequence: Synthetic oligonucleotide
aaggcgccccacaagcgcc

SEQ ID NO: 1971850 - RNA, 19 nt, Artificial Sequence
  Description of Artificial Sequence: Synthetic oligonucleotide
ugugugugcaucguccaca

SEQ ID NO: 1971851 - RNA, 19 nt, Artificial Sequence
  Description of Artificial Sequence: Synthetic oligonucleotide
ucaccuagcucuuccuuac

SEQ ID NO: 1971852 - RNA, 19 nt, Artificial Sequence
  Description of Artificial Sequence: Synthetic oligonucleotide
aauugccuuggggaguuug

SEQ ID NO: 1971853 - RNA, 19 nt, Artificial Sequence
  Description of Artificial Sequence: Synthetic oligonucleotide
uuggugaucagcgguggcc

SEQ ID NO: 1971854 - RNA, 19 nt, Artificial Sequence
  Description of Artificial Sequence: Synthetic oligonucleotide
caguugcuuagcuuccucc

SEQ ID NO: 1971855 - RNA, 19 nt, Artificial Sequence
  Description of Artificial Sequence: Synthetic oligonucleotide
ucgccccuaacagaguacg

SEQ ID NO: 1971856 - RNA, 19 nt, Artificial Sequence
  Description of Artificial Sequence: Synthetic oligonucleotide
caauaacaaacacauuuaa

SEQ ID NO: 1971857 - RNA, 19 nt, Artificial Sequence
  Description of Artificial Sequence: Synthetic oligonucleotide
agauccgccaucucuugcu

SEQ ID NO: 1971858 - RNA, 19 nt, Artificial Sequence
  Description of Artificial Sequence: Synthetic oligonucleotide
ugccugcucccauauaucu

SEQ ID NO: 1971859 - RNA, 19 nt, Artificial Sequence
  Description of Artificial Sequence: Synthetic oligonucleotide
acugucgagacgccgccag

SEQ ID NO: 1971860 - RNA, 19 nt, Artificial Sequence
  Description of Artificial Sequence: Synthetic oligonucleotide
uuguuucugagguccuagc

SEQ ID NO: 1971861 - RNA, 19 nt, Artificial Sequence
  Description of Artificial Sequence: Synthetic oligonucleotide
ucuugcugcaaugggguga

SEQ ID NO: 1971862 - RNA, 19 nt, Artificial Sequence
  Description of Artificial Sequence: Synthetic oligonucleotide
uugagggagcauccaaagu

SEQ ID NO: 1971863 - RNA, 19 nt, Artificial Sequence
  Description of Artificial Sequence: Synthetic oligonucleotide
cugcagauagucaccuagc

SEQ ID NO: 1971864 - RNA, 19 nt, Artificial Sequence
  Description of Artificial Sequence: Synthetic oligonucleotide
cacaaggugcauucccuag

SEQ ID NO: 1971865 - RNA, 19 nt, Artificial Sequence
  Description of Artificial Sequence: Synthetic oligonucleotide
gaagaagacuuugacccca

SEQ ID NO: 1971866 - RNA, 19 nt, Artificial Sequence
  Description of Artificial Sequence: Synthetic oligonucleotide
gaagcucgugaucugaaua

SEQ ID NO: 1971867 - RNA, 19 nt, Artificial Sequence
  Description of Artificial Sequence: Synthetic oligonucleotide
uacuugagggagcauccaa

SEQ ID NO: 1971868 - RNA, 19 nt, Artificial Sequence
  Description of Artificial Sequence: Synthetic oligonucleotide
ugggcugcagauagucacc

SEQ ID NO: 1971869 - RNA, 19 nt, Artificial Sequence
  Description of Artificial Sequence: Synthetic oligonucleotide
agcuuugaagaagaagacu

SEQ ID NO: 1971870 - RNA, 19 nt, Artificial Sequence
  Description of Artificial Sequence: Synthetic oligonucleotide
gguccuagcacuugacuug

SEQ ID NO: 1971871 - RNA, 19 nt, Artificial Sequence
  Description of Artificial Sequence: Synthetic oligonucleotide
uacaaguguaacgcccugc

SEQ ID NO: 1971872 - RNA, 19 nt, Artificial Sequence
  Description of Artificial Sequence: Synthetic oligonucleotide
uuccuuacuggcccacaca

SEQ ID NO: 1971873 - RNA, 19 nt, Artificial Sequence
  Description of Artificial Sequence: Synthetic oligonucleotide
ucauuuggugcuugacggu

SEQ ID NO: 1971874 - RNA, 19 nt, Artificial Sequence
  Description of Artificial Sequence: Synthetic oligonucleotide
uaacgcccugcucaucuug

SEQ ID NO: 1971875 - RNA, 19 nt, Artificial Sequence
  Description of Artificial Sequence: Synthetic oligonucleotide
ucucuguccgaauugccuu

SEQ ID NO: 1971876 - RNA, 19 nt, Artificial Sequence
  Description of Artificial Sequence: Synthetic oligonucleotide
uccugucuaguuuacgauu

SEQ ID NO: 1971877 - RNA, 19 nt, Artificial Sequence
  Description of Artificial Sequence: Synthetic oligonucleotide
ucgagcuccagguuugaau

SEQ ID NO: 1971878 - RNA, 19 nt, Artificial Sequence
  Description of Artificial Sequence: Synthetic oligonucleotide
gagcuuugaagaagaagac

SEQ ID NO: 1971879 - RNA, 19 nt, Artificial Sequence
  Description of Artificial Sequence: Synthetic oligonucleotide
uuccugucuaguuuacgau

SEQ ID NO: 1971880 - RNA, 19 nt, Artificial Sequence
  Description of Artificial Sequence: Synthetic oligonucleotide
ugcuugacggucccuguaa

SEQ ID NO: 1971881 - RNA, 19 nt, Artificial Sequence
  Description of Artificial Sequence: Synthetic oligonucleotide
aacgcccugcucaucuugg

SEQ ID NO: 1971882 - RNA, 19 nt, Artificial Sequence
  Description of Artificial Sequence: Synthetic oligonucleotide
agggagcauccaaaguucc

SEQ ID NO: 1971883 - RNA, 19 nt, Artificial Sequence
  Description of Artificial Sequence: Synthetic oligonucleotide
agcacuugacuugugugug

SEQ ID NO: 1971884 - RNA, 19 nt, Artificial Sequence
  Description of Artificial Sequence: Synthetic oligonucleotide
aacuuggcuuccaugcugu

SEQ ID NO: 1971885 - RNA, 19 nt, Artificial Sequence
  Description of Artificial Sequence: Synthetic oligonucleotide
cuuauagugcccacaaggu

SEQ ID NO: 1971886 - RNA, 19 nt, Artificial Sequence
  Description of Artificial Sequence: Synthetic oligonucleotide
gggacaggccacgagaacg

SEQ ID NO: 1971887 - RNA, 19 nt, Artificial Sequence
  Description of Artificial Sequence: Synthetic oligonucleotide
uuuacgauucagcgagguu

SEQ ID NO: 1971888 - RNA, 19 nt, Artificial Sequence
  Description of Artificial Sequence: Synthetic oligonucleotide
ugacuaggaggacaagguu

SEQ ID NO: 1971889 - RNA, 19 nt, Artificial Sequence
  Description of Artificial Sequence: Synthetic oligonucleotide
gacggucccuguaaauggg

SEQ ID NO: 1971890 - RNA, 19 nt, Artificial Sequence
  Description of Artificial Sequence: Synthetic oligonucleotide
cuguacuugagggagcauc

SEQ ID NO: 1971891 - RNA, 19 nt, Artificial Sequence
  Description of Artificial Sequence: Synthetic oligonucleotide
agagacugucgagacgccg

SEQ ID NO: 1971892 - RNA, 19 nt, Artificial Sequence
  Description of Artificial Sequence: Synthetic oligonucleotide
ggccgcugcagacacaagg

SEQ ID NO: 1971893 - RNA, 19 nt, Artificial Sequence
  Description of Artificial Sequence: Synthetic oligonucleotide
ccagagacugucgagacgc

SEQ ID NO: 1971894 - RNA, 19 nt, Artificial Sequence
  Description of Artificial Sequence: Synthetic oligonucleotide
ucuguuacucgagcuccag

SEQ ID NO: 1971895 - RNA, 19 nt, Artificial Sequence
  Description of Artificial Sequence: Synthetic oligonucleotide
ucgaagggucuccccaggc

SEQ ID NO: 1971896 - RNA, 19 nt, Artificial Sequence
  Description of Artificial Sequence: Synthetic oligonucleotide
cuguuacucgagcuccagg

SEQ ID NO: 1971897 - RNA, 19 nt, Artificial Sequence
  Description of Artificial Sequence: Synthetic oligonucleotide
ucccuaggaacuuggcuuc

SEQ ID NO: 1971898 - RNA, 19 nt, Artificial Sequence
  Description of Artificial Sequence: Synthetic oligonucleotide
acaagguuccugucuaguu

SEQ ID NO: 1971899 - RNA, 19 nt, Artificial Sequence
  Description of Artificial Sequence: Synthetic oligonucleotide
caaggcgccccacaagcgc

SEQ ID NO: 1971900 - RNA, 19 nt, Artificial Sequence
  Description of Artificial Sequence: Synthetic oligonucleotide
uucuguuacucgagcucca

SEQ ID NO: 1971901 - RNA, 19 nt, Artificial Sequence
  Description of Artificial Sequence: Synthetic oligonucleotide
auucgcucagcugucccuc

SEQ ID NO: 1971902 - RNA, 19 nt, Artificial Sequence
  Description of Artificial Sequence: Synthetic oligonucleotide
gugugugcaucguccacag

SEQ ID NO: 1971903 - RNA, 19 nt, Artificial Sequence
  Description of Artificial Sequence: Synthetic oligonucleotide
cauucccuaggaacuuggc

SEQ ID NO: 1971904 - RNA, 19 nt, Artificial Sequence
  Description of Artificial Sequence: Synthetic oligonucleotide
uacagacuucucucugucu

SEQ ID NO: 1971905 - RNA, 19 nt, Artificial Sequence
  Description of Artificial Sequence: Synthetic oligonucleotide
ugucuccaccuucuguagu

SEQ ID NO: 1971906 - RNA, 19 nt, Artificial Sequence
  Description of Artificial Sequence: Synthetic oligonucleotide
ccuagcucuuccuuacugg

SEQ ID NO: 1971907 - RNA, 19 nt, Artificial Sequence
  Description of Artificial Sequence: Synthetic oligonucleotide
gagcauccaaaguuccuga

SEQ ID NO: 1971908 - RNA, 19 nt, Artificial Sequence
  Description of Artificial Sequence: Synthetic oligonucleotide
auucagcgagguucgguca

SEQ ID NO: 1971909 - RNA, 19 nt, Artificial Sequence
  Description of Artificial Sequence: Synthetic oligonucleotide
acucucuguccgaauugcc

SEQ ID NO: 1971910 - RNA, 19 nt, Artificial Sequence
  Description of Artificial Sequence: Synthetic oligonucleotide
aguguaacgcccugcucau

SEQ ID NO: 1971911 - RNA, 19 nt, Artificial Sequence
  Description of Artificial Sequence: Synthetic oligonucleotide
cuuccuuacuggcccacac

SEQ ID NO: 1971912 - RNA, 19 nt, Artificial Sequence
  Description of Artificial Sequence: Synthetic oligonucleotide
gguuugaauuguaggaaug

SEQ ID NO: 1971913 - RNA, 19 nt, Artificial Sequence
  Description of Artificial Sequence: Synthetic oligonucleotide
augaugggacuucuuccca

SEQ ID NO: 1971914 - RNA, 19 nt, Artificial Sequence
  Description of Artificial Sequence: Synthetic oligonucleotide
cucgugaucugaauacaga

SEQ ID NO: 1971915 - RNA, 19 nt, Artificial Sequence
  Description of Artificial Sequence: Synthetic oligonucleotide
caagggacaggccacgaga

SEQ ID NO: 1971916 - RNA, 19 nt, Artificial Sequence
  Description of Artificial Sequence: Synthetic oligonucleotide
gagggacaucuccugugag

SEQ ID NO: 1971917 - RNA, 19 nt, Artificial Sequence
  Description of Artificial Sequence: Synthetic oligonucleotide
ucugagaguguggccagga

SEQ ID NO: 1971918 - RNA, 19 nt, Artificial Sequence
  Description of Artificial Sequence: Synthetic oligonucleotide
acacaaggcgccccacaag

SEQ ID NO: 1971919 - RNA, 19 nt, Artificial Sequence
  Description of Artificial Sequence: Synthetic oligonucleotide
ugugugcaucguccacagg

SEQ ID NO: 1971920 - RNA, 19 nt, Artificial Sequence
  Description of Artificial Sequence: Synthetic oligonucleotide
cagagcacgaagcucguga

SEQ ID NO: 1971921 - RNA, 19 nt, Artificial Sequence
  Description of Artificial Sequence: Synthetic oligonucleotide
gagcuccagguuugaauug

SEQ ID NO: 1971922 - RNA, 19 nt, Artificial Sequence
  Description of Artificial Sequence: Synthetic oligonucleotide
ccugaccugagccagguac

SEQ ID NO: 1971923 - RNA, 19 nt, Artificial Sequence
  Description of Artificial Sequence: Synthetic oligonucleotide
guagauccgccaucucuug

SEQ ID NO: 1971924 - RNA, 19 nt, Artificial Sequence
  Description of Artificial Sequence: Synthetic oligonucleotide
uucagcgagguucggucau

SEQ ID NO: 1971925 - RNA, 19 nt, Artificial Sequence
  Description of Artificial Sequence: Synthetic oligonucleotide
gggaguuugaacuuauagu

SEQ ID NO: 1971926 - RNA, 19 nt, Artificial Sequence
  Description of Artificial Sequence: Synthetic oligonucleotide
aggauucgcucagcugucc

SEQ ID NO: 1971927 - RNA, 19 nt, Artificial Sequence
  Description of Artificial Sequence: Synthetic oligonucleotide
uuggggaguuugaacuuau

SEQ ID NO: 1971928 - RNA, 19 nt, Artificial Sequence
  Description of Artificial Sequence: Synthetic oligonucleotide
gacacaaggcgccccacaa

SEQ ID NO: 1971929 - RNA, 19 nt, Artificial Sequence
  Description of Artificial Sequence: Synthetic oligonucleotide
cacucucuguccgaauugc

SEQ ID NO: 1971930 - RNA, 19 nt, Artificial Sequence
  Description of Artificial Sequence: Synthetic oligonucleotide
aguagauccgccaucucuu

SEQ ID NO: 1971931 - RNA, 19 nt, Artificial Sequence
  Description of Artificial Sequence: Synthetic oligonucleotide
cucuguccgaauugccuug

SEQ ID NO: 1971932 - RNA, 19 nt, Artificial Sequence
  Description of Artificial Sequence: Synthetic oligonucleotide
ggagcauccaaaguuccug

SEQ ID NO: 1971933 - RNA, 19 nt, Artificial Sequence
  Description of Artificial Sequence: Synthetic oligonucleotide
uggugcuugacggucccug

SEQ ID NO: 1971934 - RNA, 19 nt, Artificial Sequence
  Description of Artificial Sequence: Synthetic oligonucleotide
ccuguaaaugggcaucagc

SEQ ID NO: 1971935 - RNA, 19 nt, Artificial Sequence
  Description of Artificial Sequence: Synthetic oligonucleotide
gcuaccugcccagagacug

SEQ ID NO: 1971936 - RNA, 19 nt, Artificial Sequence
  Description of Artificial Sequence: Synthetic oligonucleotide
uggggugagcggcuuggug

SEQ ID NO: 1971937 - RNA, 19 nt, Artificial Sequence
  Description of Artificial Sequence: Synthetic oligonucleotide
cuugugugugcaucgucca

SEQ ID NO: 1971938 - RNA, 19 nt, Artificial Sequence
  Description of Artificial Sequence: Synthetic oligonucleotide
uccccaagcuucucucuga

SEQ ID NO: 1971939 - RNA, 19 nt, Artificial Sequence
  Description of Artificial Sequence: Synthetic oligonucleotide
agaccggcugcccgacggc

SEQ ID NO: 1971940 - RNA, 19 nt, Artificial Sequence
  Description of Artificial Sequence: Synthetic oligonucleotide
ugcauucccuaggaacuug

SEQ ID NO: 1971941 - RNA, 19 nt, Artificial Sequence
  Description of Artificial Sequence: Synthetic oligonucleotide
agaacgcgggcuaccugcc

SEQ ID NO: 1971942 - RNA, 19 nt, Artificial Sequence
  Description of Artificial Sequence: Synthetic oligonucleotide
ccaaugucacucucugucc

SEQ ID NO: 1971943 - RNA, 19 nt, Artificial Sequence
  Description of Artificial Sequence: Synthetic oligonucleotide
guaaaugggcaucagcauu

SEQ ID NO: 1971944 - RNA, 19 nt, Artificial Sequence
  Description of Artificial Sequence: Synthetic oligonucleotide
aaggugcauucccuaggaa

SEQ ID NO: 1971945 - RNA, 19 nt, Artificial Sequence
  Description of Artificial Sequence: Synthetic oligonucleotide
acggucccuguaaaugggc

SEQ ID NO: 1971946 - RNA, 19 nt, Artificial Sequence
  Description of Artificial Sequence: Synthetic oligonucleotide
cugacuaggaggacaaggu

SEQ ID NO: 1971947 - RNA, 19 nt, Artificial Sequence
  Description of Artificial Sequence: Synthetic oligonucleotide
ucccuguaaaugggcauca

SEQ ID NO: 1971948 - RNA, 19 nt, Artificial Sequence
  Description of Artificial Sequence: Synthetic oligonucleotide
aucagaaguccagaagaaa

SEQ ID NO: 1971949 - RNA, 19 nt, Artificial Sequence
  Description of Artificial Sequence: Synthetic oligonucleotide
cuuggugaucagcgguggc

SEQ ID NO: 1971950 - RNA, 19 nt, Artificial Sequence
  Description of Artificial Sequence: Synthetic oligonucleotide
gacuugugugugcaucguc

SEQ ID NO: 1971951 - RNA, 19 nt, Artificial Sequence
  Description of Artificial Sequence: Synthetic oligonucleotide
aagcgccauggagaccggc

SEQ ID NO: 1971952 - RNA, 19 nt, Artificial Sequence
  Description of Artificial Sequence: Synthetic oligonucleotide
aaguccuguacaaguguaa

SEQ ID NO: 1971953 - RNA, 19 nt, Artificial Sequence
  Description of Artificial Sequence: Synthetic oligonucleotide
guacaaguguaacgcccug

SEQ ID NO: 1971954 - RNA, 19 nt, Artificial Sequence
  Description of Artificial Sequence: Synthetic oligonucleotide
caaggugcauucccuagga

SEQ ID NO: 1971955 - RNA, 19 nt, Artificial Sequence
  Description of Artificial Sequence: Synthetic oligonucleotide
uagucaccuagcucuuccu

SEQ ID NO: 1971956 - RNA, 19 nt, Artificial Sequence
  Description of Artificial Sequence: Synthetic oligonucleotide
gaguacgccccacgggcgc

SEQ ID NO: 1971957 - RNA, 19 nt, Artificial Sequence
  Description of Artificial Sequence: Synthetic oligonucleotide
agacacaaggcgccccaca

SEQ ID NO: 1971958 - RNA, 19 nt, Artificial Sequence
  Description of Artificial Sequence: Synthetic oligonucleotide
cuguaguagauccgccauc

SEQ ID NO: 1971959 - RNA, 19 nt, Artificial Sequence
  Description of Artificial Sequence: Synthetic oligonucleotide
agucgccccuaacagagua

SEQ ID NO: 1971960 - RNA, 19 nt, Artificial Sequence
  Description of Artificial Sequence: Synthetic oligonucleotide
uggcccacacaugauggga

SEQ ID NO: 1971961 - RNA, 19 nt, Artificial Sequence
  Description of Artificial Sequence: Synthetic oligonucleotide
agcauccaaaguuccugau

SEQ ID NO: 1971962 - RNA, 19 nt, Artificial Sequence
  Description of Artificial Sequence: Synthetic oligonucleotide
ccuguacaaguguaacgcc

SEQ ID NO: 1971963 - RNA, 19 nt, Artificial Sequence
  Description of Artificial Sequence: Synthetic oligonucleotide
ccccuaacagaguacgccc

SEQ ID NO: 1971964 - RNA, 19 nt, Artificial Sequence
  Description of Artificial Sequence: Synthetic oligonucleotide
agaguacgccccacgggcg

SEQ ID NO: 1971965 - RNA, 19 nt, Artificial Sequence
  Description of Artificial Sequence: Synthetic oligonucleotide
gacaggccacgagaacgcg

SEQ ID NO: 1971966 - RNA, 19 nt, Artificial Sequence
  Description of Artificial Sequence: Synthetic oligonucleotide
aguacgccccacgggcgcc

SEQ ID NO: 1971967 - RNA, 19 nt, Artificial Sequence
  Description of Artificial Sequence: Synthetic oligonucleotide
acuugagggagcauccaaa

SEQ ID NO: 1971968 - RNA, 19 nt, Artificial Sequence
  Description of Artificial Sequence: Synthetic oligonucleotide
ggggugagcggcuugguga

SEQ ID NO: 1971969 - RNA, 19 nt, Artificial Sequence
  Description of Artificial Sequence: Synthetic oligonucleotide
cuaacagaguacgccccac

SEQ ID NO: 1971970 - RNA, 19 nt, Artificial Sequence
  Description of Artificial Sequence: Synthetic oligonucleotide
acaaggcgccccacaagcg

SEQ ID NO: 1971971 - RNA, 19 nt, Artificial Sequence
  Description of Artificial Sequence: Synthetic oligonucleotide
uuacuggcccacacaugau

SEQ ID NO: 1971972 - RNA, 19 nt, Artificial Sequence
  Description of Artificial Sequence: Synthetic oligonucleotide
ugcccgacggcgcugccuc

SEQ ID NO: 1971973 - RNA, 19 nt, Artificial Sequence
  Description of Artificial Sequence: Synthetic oligonucleotide
cuaaguccuguacaagugu

SEQ ID NO: 1971974 - RNA, 19 nt, Artificial Sequence
  Description of Artificial Sequence: Synthetic oligonucleotide
gucaccuagcucuuccuua

SEQ ID NO: 1971975 - RNA, 19 nt, Artificial Sequence
  Description of Artificial Sequence: Synthetic oligonucleotide
gcagauagucaccuagcuc

SEQ ID NO: 1971976 - RNA, 19 nt, Artificial Sequence
  Description of Artificial Sequence: Synthetic oligonucleotide
gggacaucuccugugagca

SEQ ID NO: 1971977 - RNA, 19 nt, Artificial Sequence
  Description of Artificial Sequence: Synthetic oligonucleotide
cugcccagagacugucgag

SEQ ID NO: 1971978 - RNA, 19 nt, Artificial Sequence
  Description of Artificial Sequence: Synthetic oligonucleotide
caaguguaacgcccugcuc

SEQ ID NO: 1971979 - RNA, 19 nt, Artificial Sequence
  Description of Artificial Sequence: Synthetic oligonucleotide
ugacuugugugugcaucgu

SEQ ID NO: 1971980 - RNA, 19 nt, Artificial Sequence
  Description of Artificial Sequence: Synthetic oligonucleotide
augccugcucccauauauc

SEQ ID NO: 1971981 - RNA, 19 nt, Artificial Sequence
  Description of Artificial Sequence: Synthetic oligonucleotide
uccagagcacgaagcucgu

SEQ ID NO: 1971982 - RNA, 19 nt, Artificial Sequence
  Description of Artificial Sequence: Synthetic oligonucleotide
agcucgugaucugaauaca

SEQ ID NO: 1971983 - RNA, 19 nt, Artificial Sequence
  Description of Artificial Sequence: Synthetic oligonucleotide
ucuuccuuacuggcccaca

SEQ ID NO: 1971984 - RNA, 19 nt, Artificial Sequence
  Description of Artificial Sequence: Synthetic oligonucleotide
cccacaagcgccauggaga

SEQ ID NO: 1971985 - RNA, 19 nt, Artificial Sequence
  Description of Artificial Sequence: Synthetic oligonucleotide
ucgagacgccgccagccuc

SEQ ID NO: 1971986 - RNA, 19 nt, Artificial Sequence
  Description of Artificial Sequence: Synthetic oligonucleotide
ugaucagcgguggccgcug

SEQ ID NO: 1971987 - RNA, 19 nt, Artificial Sequence
  Description of Artificial Sequence: Synthetic oligonucleotide
auauaucuucuaaguccug

SEQ ID NO: 1971988 - RNA, 19 nt, Artificial Sequence
  Description of Artificial Sequence: Synthetic oligonucleotide
caggauucgcucagcuguc

SEQ ID NO: 1971989 - RNA, 19 nt, Artificial Sequence
  Description of Artificial Sequence: Synthetic oligonucleotide
gauucgcucagcugucccu

SEQ ID NO: 1971990 - RNA, 19 nt, Artificial Sequence
  Description of Artificial Sequence: Synthetic oligonucleotide
ugagcggcuuggugaucag

SEQ ID NO: 1971991 - RNA, 19 nt, Artificial Sequence
  Description of Artificial Sequence: Synthetic oligonucleotide
aggaaugccugcucccaua

SEQ ID NO: 1971992 - RNA, 19 nt, Artificial Sequence
  Description of Artificial Sequence: Synthetic oligonucleotide
ucuucgccaguugcuuagc

SEQ ID NO: 1971993 - RNA, 19 nt, Artificial Sequence
  Description of Artificial Sequence: Synthetic oligonucleotide
gagcacgaagcucgugauc

SEQ ID NO: 1971994 - RNA, 19 nt, Artificial Sequence
  Description of Artificial Sequence: Synthetic oligonucleotide
gcucgugaucugaauacag

SEQ ID NO: 1971995 - RNA, 19 nt, Artificial Sequence
  Description of Artificial Sequence: Synthetic oligonucleotide
gguuccugucuaguuuacg

SEQ ID NO: 1971996 - RNA, 19 nt, Artificial Sequence
  Description of Artificial Sequence: Synthetic oligonucleotide
ggauucgcucagcuguccc

SEQ ID NO: 1971997 - RNA, 19 nt, Artificial Sequence
  Description of Artificial Sequence: Synthetic oligonucleotide
cuguccgaauugccuuggg

SEQ ID NO: 1971998 - RNA, 19 nt, Artificial Sequence
  Description of Artificial Sequence: Synthetic oligonucleotide
gucccuguaaaugggcauc

SEQ ID NO: 1971999 - RNA, 19 nt, Artificial Sequence
  Description of Artificial Sequence: Synthetic oligonucleotide
ccaagcuucucucugacua

SEQ ID NO: 1972000 - RNA, 19 nt, Artificial Sequence
  Description of Artificial Sequence: Synthetic oligonucleotide
cucucuguccgaauugccu

SEQ ID NO: 1972001 - RNA, 19 nt, Artificial Sequence
  Description of Artificial Sequence: Synthetic oligonucleotide
agguuccugucuaguuuac

SEQ ID NO: 1972002 - RNA, 19 nt, Artificial Sequence
  Description of Artificial Sequence: Synthetic oligonucleotide
gugagcggcuuggugauca

SEQ ID NO: 1972003 - RNA, 19 nt, Artificial Sequence
  Description of Artificial Sequence: Synthetic oligonucleotide
gaacgcgggcuaccugccc

SEQ ID NO: 1972004 - RNA, 19 nt, Artificial Sequence
  Description of Artificial Sequence: Synthetic oligonucleotide
cauccaucagaaguccaga

SEQ ID NO: 1972005 - RNA, 19 nt, Artificial Sequence
  Description of Artificial Sequence: Synthetic oligonucleotide
gccccuaacagaguacgcc

SEQ ID NO: 1972006 - RNA, 19 nt, Artificial Sequence
  Description of Artificial Sequence: Synthetic oligonucleotide
gcucccauauaucuucuaa

SEQ ID NO: 1972007 - RNA, 19 nt, Artificial Sequence
  Description of Artificial Sequence: Synthetic oligonucleotide
uggggaguuugaacuuaua

SEQ ID NO: 1972008 - RNA, 19 nt, Artificial Sequence
  Description of Artificial Sequence: Synthetic oligonucleotide
cccuaacagaguacgcccc

SEQ ID NO: 1972009 - RNA, 19 nt, Artificial Sequence
  Description of Artificial Sequence: Synthetic oligonucleotide
ugucacucucuguccgaau

SEQ ID NO: 1972010 - RNA, 19 nt, Artificial Sequence
  Description of Artificial Sequence: Synthetic oligonucleotide
ccacaagcgccauggagac

SEQ ID NO: 1972011 - RNA, 19 nt, Artificial Sequence
  Description of Artificial Sequence: Synthetic oligonucleotide
ucgcucagcugucccucga

SEQ ID NO: 1972012 - RNA, 19 nt, Artificial Sequence
  Description of Artificial Sequence: Synthetic oligonucleotide
ucccucgaagggucucccc

SEQ ID NO: 1972013 - RNA, 19 nt, Artificial Sequence
  Description of Artificial Sequence: Synthetic oligonucleotide
cacuugacuugugugugca

SEQ ID NO: 1972014 - RNA, 19 nt, Artificial Sequence
  Description of Artificial Sequence: Synthetic oligonucleotide
guuuacgauucagcgaggu

SEQ ID NO: 1972015 - RNA, 19 nt, Artificial Sequence
  Description of Artificial Sequence: Synthetic oligonucleotide
gcuuggugaucagcggugg

SEQ ID NO: 1972016 - RNA, 19 nt, Artificial Sequence
  Description of Artificial Sequence: Synthetic oligonucleotide
cacgagaacgcgggcuacc

SEQ ID NO: 1972017 - RNA, 19 nt, Artificial Sequence
  Description of Artificial Sequence: Synthetic oligonucleotide
cugccucaagggacaggcc

SEQ ID NO: 1972018 - RNA, 19 nt, Artificial Sequence
  Description of Artificial Sequence: Synthetic oligonucleotide
uagucgccccuaacagagu

SEQ ID NO: 1972019 - RNA, 19 nt, Artificial Sequence
  Description of Artificial Sequence: Synthetic oligonucleotide
ggacaggccacgagaacgc

SEQ ID NO: 1972020 - RNA, 19 nt, Artificial Sequence
  Description of Artificial Sequence: Synthetic oligonucleotide
acgagaacgcgggcuaccu

SEQ ID NO: 1972021 - RNA, 19 nt, Artificial Sequence
  Description of Artificial Sequence: Synthetic oligonucleotide
guaguagauccgccaucuc

SEQ ID NO: 1972022 - RNA, 19 nt, Artificial Sequence
  Description of Artificial Sequence: Synthetic oligonucleotide
ugcucccauauaucuucua

SEQ ID NO: 1972023 - RNA, 19 nt, Artificial Sequence
  Description of Artificial Sequence: Synthetic oligonucleotide
gacaagguuccugucuagu

SEQ ID NO: 1972024 - RNA, 19 nt, Artificial Sequence
  Description of Artificial Sequence: Synthetic oligonucleotide
gcacuugacuugugugugc

SEQ ID NO: 1972025 - RNA, 19 nt, Artificial Sequence
  Description of Artificial Sequence: Synthetic oligonucleotide
gauccccaagcuucucucu

SEQ ID NO: 1972026 - RNA, 19 nt, Artificial Sequence
  Description of Artificial Sequence: Synthetic oligonucleotide
gaucagcgguggccgcugc

SEQ ID NO: 1972027 - RNA, 19 nt, Artificial Sequence
  Description of Artificial Sequence: Synthetic oligonucleotide
ccaggauucgcucagcugu

SEQ ID NO: 1972028 - RNA, 19 nt, Artificial Sequence
  Description of Artificial Sequence: Synthetic oligonucleotide
cgcugcagacacaaggcgc

SEQ ID NO: 1972029 - RNA, 19 nt, Artificial Sequence
  Description of Artificial Sequence: Synthetic oligonucleotide
cugucgagacgccgccagc

SEQ ID NO: 1972030 - RNA, 19 nt, Artificial Sequence
  Description of Artificial Sequence: Synthetic oligonucleotide
agugcccacaaggugcauu

SEQ ID NO: 1972031 - RNA, 19 nt, Artificial Sequence
  Description of Artificial Sequence: Synthetic oligonucleotide
uaccugcccagagacuguc

SEQ ID NO: 1972032 - RNA, 19 nt, Artificial Sequence
  Description of Artificial Sequence: Synthetic oligonucleotide
caagguuccugucuaguuu

SEQ ID NO: 1972033 - RNA, 19 nt, Artificial Sequence
  Description of Artificial Sequence: Synthetic oligonucleotide
augucacucucuguccgaa

SEQ ID NO: 1972034 - RNA, 19 nt, Artificial Sequence
  Description of Artificial Sequence: Synthetic oligonucleotide
ggacaucuccugugagcag

SEQ ID NO: 1972035 - RNA, 19 nt, Artificial Sequence
  Description of Artificial Sequence: Synthetic oligonucleotide
cuccugugagcagcagagc

SEQ ID NO: 1972036 - RNA, 19 nt, Artificial Sequence
  Description of Artificial Sequence: Synthetic oligonucleotide
ucucucugacuaggaggac

SEQ ID NO: 1972037 - RNA, 19 nt, Artificial Sequence
  Description of Artificial Sequence: Synthetic oligonucleotide
ccucuagucgccccuaaca

SEQ ID NO: 1972038 - RNA, 19 nt, Artificial Sequence
  Description of Artificial Sequence: Synthetic oligonucleotide
aucagcgguggccgcugca

SEQ ID NO: 1972039 - RNA, 19 nt, Artificial Sequence
  Description of Artificial Sequence: Synthetic oligonucleotide
caagcgccauggagaccgg

SEQ ID NO: 1972040 - RNA, 19 nt, Artificial Sequence
  Description of Artificial Sequence: Synthetic oligonucleotide
guacuugagggagcaucca

SEQ ID NO: 1972041 - RNA, 19 nt, Artificial Sequence
  Description of Artificial Sequence: Synthetic oligonucleotide
guggccgcugcagacacaa

SEQ ID NO: 1972042 - RNA, 19 nt, Artificial Sequence
  Description of Artificial Sequence: Synthetic oligonucleotide
ccucgaagggucuccccag

SEQ ID NO: 1972043 - RNA, 19 nt, Artificial Sequence
  Description of Artificial Sequence: Synthetic oligonucleotide
ggugaucagcgguggccgc

SEQ ID NO: 1972044 - RNA, 19 nt, Artificial Sequence
  Description of Artificial Sequence: Synthetic oligonucleotide
gcccagagacugucgagac

SEQ ID NO: 1972045 - RNA, 19 nt, Artificial Sequence
  Description of Artificial Sequence: Synthetic oligonucleotide
cucugacuaggaggacaag

SEQ ID NO: 1972046 - RNA, 19 nt, Artificial Sequence
  Description of Artificial Sequence: Synthetic oligonucleotide
uggccgcugcagacacaag

SEQ ID NO: 1972047 - RNA, 19 nt, Artificial Sequence
  Description of Artificial Sequence: Synthetic oligonucleotide
acgaagcucgugaucugaa

SEQ ID NO: 1972048 - RNA, 19 nt, Artificial Sequence
  Description of Artificial Sequence: Synthetic oligonucleotide
agcgagguucggucauuuu

SEQ ID NO: 1972049 - RNA, 19 nt, Artificial Sequence
  Description of Artificial Sequence: Synthetic oligonucleotide
gcgccauggagaccggcug

SEQ ID NO: 1972050 - RNA, 19 nt, Artificial Sequence
  Description of Artificial Sequence: Synthetic oligonucleotide
uggagaccggcugcccgac

SEQ ID NO: 1972051 - RNA, 19 nt, Artificial Sequence
  Description of Artificial Sequence: Synthetic oligonucleotide
gucgccccuaacagaguac

SEQ ID NO: 1972052 - RNA, 19 nt, Artificial Sequence
  Description of Artificial Sequence: Synthetic oligonucleotide
cuugacggucccuguaaau

SEQ ID NO: 1972053 - RNA, 19 nt, Artificial Sequence
  Description of Artificial Sequence: Synthetic oligonucleotide
caucuccugugagcagcag

SEQ ID NO: 1972054 - RNA, 19 nt, Artificial Sequence
  Description of Artificial Sequence: Synthetic oligonucleotide
cacaagcgccauggagacc

SEQ ID NO: 1972055 - RNA, 19 nt, Artificial Sequence
  Description of Artificial Sequence: Synthetic oligonucleotide
gucccucgaagggucuccc

SEQ ID NO: 1972056 - RNA, 19 nt, Artificial Sequence
  Description of Artificial Sequence: Synthetic oligonucleotide
gaccccaaugucacucucu

SEQ ID NO: 1972057 - RNA, 19 nt, Artificial Sequence
  Description of Artificial Sequence: Synthetic oligonucleotide
ucagcgagguucggucauu

SEQ ID NO: 1972058 - RNA, 19 nt, Artificial Sequence
  Description of Artificial Sequence: Synthetic oligonucleotide
acuuggcuuccaugcuguu

SEQ ID NO: 1972059 - RNA, 19 nt, Artificial Sequence
  Description of Artificial Sequence: Synthetic oligonucleotide
ccuaacagaguacgcccca

SEQ ID NO: 1972060 - RNA, 19 nt, Artificial Sequence
  Description of Artificial Sequence: Synthetic oligonucleotide
uccugaccugagccaggua

SEQ ID NO: 1972061 - RNA, 19 nt, Artificial Sequence
  Description of Artificial Sequence: Synthetic oligonucleotide
agccucuagucgccccuaa

SEQ ID NO: 1972062 - RNA, 19 nt, Artificial Sequence
  Description of Artificial Sequence: Synthetic oligonucleotide
cagacacaaggcgccccac

SEQ ID NO: 1972063 - RNA, 19 nt, Artificial Sequence
  Description of Artificial Sequence: Synthetic oligonucleotide
gugcuugacggucccugua

SEQ ID NO: 1972064 - RNA, 19 nt, Artificial Sequence
  Description of Artificial Sequence: Synthetic oligonucleotide
guacgccccacgggcgccg

SEQ ID NO: 1972065 - RNA, 19 nt, Artificial Sequence
  Description of Artificial Sequence: Synthetic oligonucleotide
gcgggcuaccugcccagag

SEQ ID NO: 1972066 - RNA, 19 nt, Artificial Sequence
  Description of Artificial Sequence: Synthetic oligonucleotide
acucgagcuccagguuuga

SEQ ID NO: 1972067 - RNA, 19 nt, Artificial Sequence
  Description of Artificial Sequence: Synthetic oligonucleotide
ggagaccggcugcccgacg

SEQ ID NO: 1972068 - RNA, 19 nt, Artificial Sequence
  Description of Artificial Sequence: Synthetic oligonucleotide
ggaaugccugcucccauau

SEQ ID NO: 1972069 - RNA, 19 nt, Artificial Sequence
  Description of Artificial Sequence: Synthetic oligonucleotide
ccugcccagagacugucga

SEQ ID NO: 1972070 - RNA, 19 nt, Artificial Sequence
  Description of Artificial Sequence: Synthetic oligonucleotide
gcuugacggucccuguaaa

SEQ ID NO: 1972071 - RNA, 19 nt, Artificial Sequence
  Description of Artificial Sequence: Synthetic oligonucleotide
cuucgccaguugcuuagcu

SEQ ID NO: 1972072 - RNA, 19 nt, Artificial Sequence
  Description of Artificial Sequence: Synthetic oligonucleotide
cuuugaccccaaugucacu

SEQ ID NO: 1972073 - RNA, 19 nt, Artificial Sequence
  Description of Artificial Sequence: Synthetic oligonucleotide
gccacgagaacgcgggcua

SEQ ID NO: 1972074 - RNA, 19 nt, Artificial Sequence
  Description of Artificial Sequence: Synthetic oligonucleotide
gccucuagucgccccuaac

SEQ ID NO: 1972075 - RNA, 19 nt, Artificial Sequence
  Description of Artificial Sequence: Synthetic oligonucleotide
ccuagcacuugacuugugu

SEQ ID NO: 1972076 - RNA, 19 nt, Artificial Sequence
  Description of Artificial Sequence: Synthetic oligonucleotide
gucgagacgccgccagccu

SEQ ID NO: 1972077 - RNA, 19 nt, Artificial Sequence
  Description of Artificial Sequence: Synthetic oligonucleotide
cccucgaagggucucccca

SEQ ID NO: 1972078 - RNA, 19 nt, Artificial Sequence
  Description of Artificial Sequence: Synthetic oligonucleotide
cuaccugcccagagacugu

SEQ ID NO: 1972079 - RNA, 19 nt, Artificial Sequence
  Description of Artificial Sequence: Synthetic oligonucleotide
cgcccugcucaucuuggcc

SEQ ID NO: 1972080 - RNA, 19 nt, Artificial Sequence
  Description of Artificial Sequence: Synthetic oligonucleotide
caucguccacaggcagcug

SEQ ID NO: 1972081 - RNA, 19 nt, Artificial Sequence
  Description of Artificial Sequence: Synthetic oligonucleotide
gugaucagcgguggccgcu

SEQ ID NO: 1972082 - RNA, 19 nt, Artificial Sequence
  Description of Artificial Sequence: Synthetic oligonucleotide
uacgccccacgggcgccgc

SEQ ID NO: 1972083 - RNA, 19 nt, Artificial Sequence
  Description of Artificial Sequence: Synthetic oligonucleotide
cccuaggaacuuggcuucc

SEQ ID NO: 1972084 - RNA, 19 nt, Artificial Sequence
  Description of Artificial Sequence: Synthetic oligonucleotide
ccacaaggugcauucccua

SEQ ID NO: 1972085 - RNA, 19 nt, Artificial Sequence
  Description of Artificial Sequence: Synthetic oligonucleotide
gggugagcggcuuggugau

SEQ ID NO: 1972086 - RNA, 19 nt, Artificial Sequence
  Description of Artificial Sequence: Synthetic oligonucleotide
cgacggcgcugccucaagg

SEQ ID NO: 1972087 - RNA, 19 nt, Artificial Sequence
  Description of Artificial Sequence: Synthetic oligonucleotide
cgagcuccagguuugaauu

SEQ ID NO: 1972088 - RNA, 19 nt, Artificial Sequence
  Description of Artificial Sequence: Synthetic oligonucleotide
cgccccuaacagaguacgc

SEQ ID NO: 1972089 - RNA, 19 nt, Artificial Sequence
  Description of Artificial Sequence: Synthetic oligonucleotide
cuccugaccugagccaggu

SEQ ID NO: 1972090 - RNA, 19 nt, Artificial Sequence
  Description of Artificial Sequence: Synthetic oligonucleotide
cucgagcuccagguuugaa

SEQ ID NO: 1972091 - RNA, 19 nt, Artificial Sequence
  Description of Artificial Sequence: Synthetic oligonucleotide
uagugcccacaaggugcau

SEQ ID NO: 1972092 - RNA, 19 nt, Artificial Sequence
  Description of Artificial Sequence: Synthetic oligonucleotide
aggcgccccacaagcgcca

SEQ ID NO: 1972093 - RNA, 19 nt, Artificial Sequence
  Description of Artificial Sequence: Synthetic oligonucleotide
gcagagcuuugaagaagaa

SEQ ID NO: 1972094 - RNA, 19 nt, Artificial Sequence
  Description of Artificial Sequence: Synthetic oligonucleotide
cagcugucccucgaagggu

SEQ ID NO: 1972095 - RNA, 19 nt, Artificial Sequence
  Description of Artificial Sequence: Synthetic oligonucleotide
caccuagcucuuccuuacu

SEQ ID NO: 1972096 - RNA, 19 nt, Artificial Sequence
  Description of Artificial Sequence: Synthetic oligonucleotide
cgagaacgcgggcuaccug

SEQ ID NO: 1972097 - RNA, 19 nt, Artificial Sequence
  Description of Artificial Sequence: Synthetic oligonucleotide
cgccgccagccucuagucg

SEQ ID NO: 1972098 - RNA, 19 nt, Artificial Sequence
  Description of Artificial Sequence: Synthetic oligonucleotide
ggcugcagauagucaccua

SEQ ID NO: 1972099 - RNA, 19 nt, Artificial Sequence
  Description of Artificial Sequence: Synthetic oligonucleotide
ccacgagaacgcgggcuac

SEQ ID NO: 1972100 - RNA, 19 nt, Artificial Sequence
  Description of Artificial Sequence: Synthetic oligonucleotide
ccagagcacgaagcucgug

SEQ ID NO: 1972101 - RNA, 19 nt, Artificial Sequence
  Description of Artificial Sequence: Synthetic oligonucleotide
cgguggccgcugcagacac

SEQ ID NO: 1972102 - RNA, 19 nt, Artificial Sequence
  Description of Artificial Sequence: Synthetic oligonucleotide
ggcuuccaugcuguuuucu

SEQ ID NO: 1972103 - RNA, 19 nt, Artificial Sequence
  Description of Artificial Sequence: Synthetic oligonucleotide
ccugauccccaagcuucuc

SEQ ID NO: 1972104 - RNA, 19 nt, Artificial Sequence
  Description of Artificial Sequence: Synthetic oligonucleotide
ccgacggcgcugccucaag

SEQ ID NO: 1972105 - RNA, 19 nt, Artificial Sequence
  Description of Artificial Sequence: Synthetic oligonucleotide
cgggcuaccugcccagaga

SEQ ID NO: 1972106 - RNA, 19 nt, Artificial Sequence
  Description of Artificial Sequence: Synthetic oligonucleotide
ggugagcggcuuggugauc

SEQ ID NO: 1972107 - RNA, 19 nt, Artificial Sequence
  Description of Artificial Sequence: Synthetic oligonucleotide
gcgcugccucaagggacag

SEQ ID NO: 1972108 - RNA, 19 nt, Artificial Sequence
  Description of Artificial Sequence: Synthetic oligonucleotide
cagccucuagucgccccua

SEQ ID NO: 1972109 - RNA, 19 nt, Artificial Sequence
  Description of Artificial Sequence: Synthetic oligonucleotide
gcugcccgacggcgcugcc

SEQ ID NO: 1972110 - RNA, 19 nt, Artificial Sequence
  Description of Artificial Sequence: Synthetic oligonucleotide
ccgaauugccuuggggagu

SEQ ID NO: 1972111 - RNA, 19 nt, Artificial Sequence
  Description of Artificial Sequence: Synthetic oligonucleotide
gccccacaagcgccaugga

SEQ ID NO: 1972112 - RNA, 19 nt, Artificial Sequence
  Description of Artificial Sequence: Synthetic oligonucleotide
gaauugccuuggggaguuu

SEQ ID NO: 1972113 - RNA, 19 nt, Artificial Sequence
  Description of Artificial Sequence: Synthetic oligonucleotide
gguggccgcugcagacaca

SEQ ID NO: 1972114 - RNA, 19 nt, Artificial Sequence
  Description of Artificial Sequence: Synthetic oligonucleotide
cgagacgccgccagccucu

SEQ ID NO: 1972115 - RNA, 19 nt, Artificial Sequence
  Description of Artificial Sequence: Synthetic oligonucleotide
cgaagcucgugaucugaau

SEQ ID NO: 1972116 - RNA, 19 nt, Artificial Sequence
  Description of Artificial Sequence: Synthetic oligonucleotide
ccaggcugccacuguacuu

SEQ ID NO: 1972117 - RNA, 19 nt, Artificial Sequence
  Description of Artificial Sequence: Synthetic oligonucleotide
ccccaaugucacucucugu

SEQ ID NO: 1972118 - RNA, 19 nt, Artificial Sequence
  Description of Artificial Sequence: Synthetic oligonucleotide
gccugcucccauauaucuu

SEQ ID NO: 1972119 - RNA, 19 nt, Artificial Sequence
  Description of Artificial Sequence: Synthetic oligonucleotide
cugcccgacggcgcugccu

SEQ ID NO: 1972120 - RNA, 19 nt, Artificial Sequence
  Description of Artificial Sequence: Synthetic oligonucleotide
gggucuccccaggcugcca

SEQ ID NO: 1972121 - RNA, 19 nt, Artificial Sequence
  Description of Artificial Sequence: Synthetic oligonucleotide
cacgggcgccgccaucuuu

SEQ ID NO: 1972122 - RNA, 19 nt, Artificial Sequence
  Description of Artificial Sequence: Synthetic oligonucleotide
cgauucagcgagguucggu

SEQ ID NO: 1972123 - RNA, 19 nt, Artificial Sequence
  Description of Artificial Sequence: Synthetic oligonucleotide
cgaauugccuuggggaguu

SEQ ID NO: 1972124 - RNA, 19 nt, Artificial Sequence
  Description of Artificial Sequence: Synthetic oligonucleotide
cccacacaugaugggacuu

SEQ ID NO: 1972125 - RNA, 19 nt, Artificial Sequence
  Description of Artificial Sequence: Synthetic oligonucleotide
cccgacggcgcugccucaa

SEQ ID NO: 1972126 - RNA, 19 nt, Artificial Sequence
  Description of Artificial Sequence: Synthetic oligonucleotide
ccccacgggcgccgccauc

SEQ ID NO: 1972127 - RNA, 19 nt, Artificial Sequence
  Description of Artificial Sequence: Synthetic oligonucleotide
cgccccacgggcgccgcca

SEQ ID NO: 1972128 - RNA, 19 nt, Artificial Sequence
  Description of Artificial Sequence: Synthetic oligonucleotide
ggcgccccacaagcgccau

SEQ ID NO: 1972129 - RNA, 19 nt, Artificial Sequence
  Description of Artificial Sequence: Synthetic oligonucleotide
gccccacgggcgccgccau

SEQ ID NO: 1972130 - RNA, 19 nt, Artificial Sequence
  Description of Artificial Sequence: Synthetic oligonucleotide
cgcgggcuaccugcccaga

SEQ ID NO: 1972131 - RNA, 19 nt, Artificial Sequence
  Description of Artificial Sequence: Synthetic oligonucleotide
aaagccaagggguaguccc

SEQ ID NO: 1972132 - RNA, 19 nt, Artificial Sequence
  Description of Artificial Sequence: Synthetic oligonucleotide
ucaacaaugaggaaguccc

SEQ ID NO: 1972133 - RNA, 19 nt, Artificial Sequence
  Description of Artificial Sequence: Synthetic oligonucleotide
agaagugccaccuugcccc

SEQ ID NO: 1972134 - RNA, 19 nt, Artificial Sequence
  Description of Artificial Sequence: Synthetic oligonucleotide
acguuuuccagguagacgc

SEQ ID NO: 1972135 - RNA, 19 nt, Artificial Sequence
  Description of Artificial Sequence: Synthetic oligonucleotide
aauagggucaacaaugagg

SEQ ID NO: 1972136 - RNA, 19 nt, Artificial Sequence
  Description of Artificial Sequence: Synthetic oligonucleotide
accucaugcagauuguugc

SEQ ID NO: 1972137 - RNA, 19 nt, Artificial Sequence
  Description of Artificial Sequence: Synthetic oligonucleotide
gagaauugcacuuccgggg

SEQ ID NO: 1972138 - RNA, 19 nt, Artificial Sequence
  Description of Artificial Sequence: Synthetic oligonucleotide
uccagaguuauguggaugg

SEQ ID NO: 1972139 - RNA, 19 nt, Artificial Sequence
  Description of Artificial Sequence: Synthetic oligonucleotide
agccuuauaagagaagugc

SEQ ID NO: 1972140 - RNA, 19 nt, Artificial Sequence
  Description of Artificial Sequence: Synthetic oligonucleotide
ucgucuacgacucacuuca

SEQ ID NO: 1972141 - RNA, 19 nt, Artificial Sequence
  Description of Artificial Sequence: Synthetic oligonucleotide
aaaugcgacuggcaggugg

SEQ ID NO: 1972142 - RNA, 19 nt, Artificial Sequence
  Description of Artificial Sequence: Synthetic oligonucleotide
uguuaggacgcagacaacg

SEQ ID NO: 1972143 - RNA, 19 nt, Artificial Sequence
  Description of Artificial Sequence: Synthetic oligonucleotide
agucuuagaagccaggacu

SEQ ID NO: 1972144 - RNA, 19 nt, Artificial Sequence
  Description of Artificial Sequence: Synthetic oligonucleotide
auagaccugacucugagga

SEQ ID NO: 1972145 - RNA, 19 nt, Artificial Sequence
  Description of Artificial Sequence: Synthetic oligonucleotide
ugagcaaguagagaagugg

SEQ ID NO: 1972146 - RNA, 19 nt, Artificial Sequence
  Description of Artificial Sequence: Synthetic oligonucleotide
agggguuuaauucuucuag

SEQ ID NO: 1972147 - RNA, 19 nt, Artificial Sequence
  Description of Artificial Sequence: Synthetic oligonucleotide
uacgacucacuucaagacg

SEQ ID NO: 1972148 - RNA, 19 nt, Artificial Sequence
  Description of Artificial Sequence: Synthetic oligonucleotide
ucuacgacucacuucaaga

SEQ ID NO: 1972149 - RNA, 19 nt, Artificial Sequence
  Description of Artificial Sequence: Synthetic oligonucleotide
aacgucagcucuuccagag

SEQ ID NO: 1972150 - RNA, 19 nt, Artificial Sequence
  Description of Artificial Sequence: Synthetic oligonucleotide
ugucaagucauuacccacc

SEQ ID NO: 1972151 - RNA, 19 nt, Artificial Sequence
  Description of Artificial Sequence: Synthetic oligonucleotide
agacggagucaacaaaagc

SEQ ID NO: 1972152 - RNA, 19 nt, Artificial Sequence
  Description of Artificial Sequence: Synthetic oligonucleotide
aagcaaagaaaugcgacug

SEQ ID NO: 1972153 - RNA, 19 nt, Artificial Sequence
  Description of Artificial Sequence: Synthetic oligonucleotide
auugguguugacaaagagg

SEQ ID NO: 1972154 - RNA, 19 nt, Artificial Sequence
  Description of Artificial Sequence: Synthetic oligonucleotide
cuucccucgaccaagucag

SEQ ID NO: 1972155 - RNA, 19 nt, Artificial Sequence
  Description of Artificial Sequence: Synthetic oligonucleotide
uuuagucuucccucgacca

SEQ ID NO: 1972156 - RNA, 19 nt, Artificial Sequence
  Description of Artificial Sequence: Synthetic oligonucleotide
ucaauagggucaacaauga

SEQ ID NO: 1972157 - RNA, 19 nt, Artificial Sequence
  Description of Artificial Sequence: Synthetic oligonucleotide
agagaaguggguccguggg

SEQ ID NO: 1972158 - RNA, 19 nt, Artificial Sequence
  Description of Artificial Sequence: Synthetic oligonucleotide
gauugguguugacaaagag

SEQ ID NO: 1972159 - RNA, 19 nt, Artificial Sequence
  Description of Artificial Sequence: Synthetic oligonucleotide
aggagaagcagccuuauaa

SEQ ID NO: 1972160 - RNA, 19 nt, Artificial Sequence
  Description of Artificial Sequence: Synthetic oligonucleotide
gacggagucaacaaaagca

SEQ ID NO: 1972161 - RNA, 19 nt, Artificial Sequence
  Description of Artificial Sequence: Synthetic oligonucleotide
uuauaagagaagugccacc

SEQ ID NO: 1972162 - RNA, 19 nt, Artificial Sequence
  Description of Artificial Sequence: Synthetic oligonucleotide
agacgcugaacgcagcucg

SEQ ID NO: 1972163 - RNA, 19 nt, Artificial Sequence
  Description of Artificial Sequence: Synthetic oligonucleotide
auagggucaacaaugagga

SEQ ID NO: 1972164 - RNA, 19 nt, Artificial Sequence
  Description of Artificial Sequence: Synthetic oligonucleotide
agggucaacaaugaggaag

SEQ ID NO: 1972165 - RNA, 19 nt, Artificial Sequence
  Description of Artificial Sequence: Synthetic oligonucleotide
aaaagccaagggguagucc

SEQ ID NO: 1972166 - RNA, 19 nt, Artificial Sequence
  Description of Artificial Sequence: Synthetic oligonucleotide
ucagagaaggccucaggcc

SEQ ID NO: 1972167 - RNA, 19 nt, Artificial Sequence
  Description of Artificial Sequence: Synthetic oligonucleotide
ucggcguuacacaagcaag

SEQ ID NO: 1972168 - RNA, 19 nt, Artificial Sequence
  Description of Artificial Sequence: Synthetic oligonucleotide
ucaugcagauuguugccgg

SEQ ID NO: 1972169 - RNA, 19 nt, Artificial Sequence
  Description of Artificial Sequence: Synthetic oligonucleotide
gagcacaaaagauaucuca

SEQ ID NO: 1972170 - RNA, 19 nt, Artificial Sequence
  Description of Artificial Sequence: Synthetic oligonucleotide
agcuacguuuuccagguag

SEQ ID NO: 1972171 - RNA, 19 nt, Artificial Sequence
  Description of Artificial Sequence: Synthetic oligonucleotide
cucuaccucaugcagauug

SEQ ID NO: 1972172 - RNA, 19 nt, Artificial Sequence
  Description of Artificial Sequence: Synthetic oligonucleotide
cagagaacggacaugguuc

SEQ ID NO: 1972173 - RNA, 19 nt, Artificial Sequence
  Description of Artificial Sequence: Synthetic oligonucleotide
aguuauguggauggcaguc

SEQ ID NO: 1972174 - RNA, 19 nt, Artificial Sequence
  Description of Artificial Sequence: Synthetic oligonucleotide
ucuucccucgaccaaguca

SEQ ID NO: 1972175 - RNA, 19 nt, Artificial Sequence
  Description of Artificial Sequence: Synthetic oligonucleotide
acucugucuguucauacug

SEQ ID NO: 1972176 - RNA, 19 nt, Artificial Sequence
  Description of Artificial Sequence: Synthetic oligonucleotide
agauaucucagccuucacu

SEQ ID NO: 1972177 - RNA, 19 nt, Artificial Sequence
  Description of Artificial Sequence: Synthetic oligonucleotide
agaaguggguccguggggc

SEQ ID NO: 1972178 - RNA, 19 nt, Artificial Sequence
  Description of Artificial Sequence: Synthetic oligonucleotide
aacgcagcucgucuacgac

SEQ ID NO: 1972179 - RNA, 19 nt, Artificial Sequence
  Description of Artificial Sequence: Synthetic oligonucleotide
cucagagaaggccucaggc

SEQ ID NO: 1972180 - RNA, 19 nt, Artificial Sequence
  Description of Artificial Sequence: Synthetic oligonucleotide
agcaaagaaaugcgacugg

SEQ ID NO: 1972181 - RNA, 19 nt, Artificial Sequence
  Description of Artificial Sequence: Synthetic oligonucleotide
ucccucuucaauaggguca

SEQ ID NO: 1972182 - RNA, 19 nt, Artificial Sequence
  Description of Artificial Sequence: Synthetic oligonucleotide
gauagaccugacucugagg

SEQ ID NO: 1972183 - RNA, 19 nt, Artificial Sequence
  Description of Artificial Sequence: Synthetic oligonucleotide
agauagaccugacucugag

SEQ ID NO: 1972184 - RNA, 19 nt, Artificial Sequence
  Description of Artificial Sequence: Synthetic oligonucleotide
cucucccucuucaauaggg

SEQ ID NO: 1972185 - RNA, 19 nt, Artificial Sequence
  Description of Artificial Sequence: Synthetic oligonucleotide
agaguuauguggauggcag

SEQ ID NO: 1972186 - RNA, 19 nt, Artificial Sequence
  Description of Artificial Sequence: Synthetic oligonucleotide
ucagauagaccugacucug

SEQ ID NO: 1972187 - RNA, 19 nt, Artificial Sequence
  Description of Artificial Sequence: Synthetic oligonucleotide
agucauuacccaccagggg

SEQ ID NO: 1972188 - RNA, 19 nt, Artificial Sequence
  Description of Artificial Sequence: Synthetic oligonucleotide
gaagcagccuuauaagaga

SEQ ID NO: 1972189 - RNA, 19 nt, Artificial Sequence
  Description of Artificial Sequence: Synthetic oligonucleotide
agcacaaaagauaucucag

SEQ ID NO: 1972190 - RNA, 19 nt, Artificial Sequence
  Description of Artificial Sequence: Synthetic oligonucleotide
auuuggagggcaugcucac

SEQ ID NO: 1972191 - RNA, 19 nt, Artificial Sequence
  Description of Artificial Sequence: Synthetic oligonucleotide
uugcagagcacaaaagaua

SEQ ID NO: 1972192 - RNA, 19 nt, Artificial Sequence
  Description of Artificial Sequence: Synthetic oligonucleotide
uucacuaucugcuguuggu

SEQ ID NO: 1972193 - RNA, 19 nt, Artificial Sequence
  Description of Artificial Sequence: Synthetic oligonucleotide
cuuuagucuucccucgacc

SEQ ID NO: 1972194 - RNA, 19 nt, Artificial Sequence
  Description of Artificial Sequence: Synthetic oligonucleotide
cuacgacucacuucaagac

SEQ ID NO: 1972195 - RNA, 19 nt, Artificial Sequence
  Description of Artificial Sequence: Synthetic oligonucleotide
acgacucacuucaagacgg

SEQ ID NO: 1972196 - RNA, 19 nt, Artificial Sequence
  Description of Artificial Sequence: Synthetic oligonucleotide
ugauauugucugugauugg

SEQ ID NO: 1972197 - RNA, 19 nt, Artificial Sequence
  Description of Artificial Sequence: Synthetic oligonucleotide
uagagaaguggguccgugg

SEQ ID NO: 1972198 - RNA, 19 nt, Artificial Sequence
  Description of Artificial Sequence: Synthetic oligonucleotide
uucaagacggagucaacaa

SEQ ID NO: 1972199 - RNA, 19 nt, Artificial Sequence
  Description of Artificial Sequence: Synthetic oligonucleotide
ugcagauuguugccgggag

SEQ ID NO: 1972200 - RNA, 19 nt, Artificial Sequence
  Description of Artificial Sequence: Synthetic oligonucleotide
agcuaccucagagaaggcc

SEQ ID NO: 1972201 - RNA, 19 nt, Artificial Sequence
  Description of Artificial Sequence: Synthetic oligonucleotide
agucaacaaaagcaaagaa

SEQ ID NO: 1972202 - RNA, 19 nt, Artificial Sequence
  Description of Artificial Sequence: Synthetic oligonucleotide
cagguggucacgacggucg

SEQ ID NO: 1972203 - RNA, 19 nt, Artificial Sequence
  Description of Artificial Sequence: Synthetic oligonucleotide
agaaaugcgacuggcaggu

SEQ ID NO: 1972204 - RNA, 19 nt, Artificial Sequence
  Description of Artificial Sequence: Synthetic oligonucleotide
cagugucaagucauuaccc

SEQ ID NO: 1972205 - RNA, 19 nt, Artificial Sequence
  Description of Artificial Sequence: Synthetic oligonucleotide
acacaagcaagcuacguuu

SEQ ID NO: 1972206 - RNA, 19 nt, Artificial Sequence
  Description of Artificial Sequence: Synthetic oligonucleotide
ugauugguguugacaaaga

SEQ ID NO: 1972207 - RNA, 19 nt, Artificial Sequence
  Description of Artificial Sequence: Synthetic oligonucleotide
uucagaaaggggccaugcc

SEQ ID NO: 1972208 - RNA, 19 nt, Artificial Sequence
  Description of Artificial Sequence: Synthetic oligonucleotide
ucaugauauugucugugau

SEQ ID NO: 1972209 - RNA, 19 nt, Artificial Sequence
  Description of Artificial Sequence: Synthetic oligonucleotide
uacacaagcaagcuacguu

SEQ ID NO: 1972210 - RNA, 19 nt, Artificial Sequence
  Description of Artificial Sequence: Synthetic oligonucleotide
cugacucugaggaacccgc

SEQ ID NO: 1972211 - RNA, 19 nt, Artificial Sequence
  Description of Artificial Sequence: Synthetic oligonucleotide
ucaagacggagucaacaaa

SEQ ID NO: 1972212 - RNA, 19 nt, Artificial Sequence
  Description of Artificial Sequence: Synthetic oligonucleotide
agcccagaaaagccaaggg

SEQ ID NO: 1972213 - RNA, 19 nt, Artificial Sequence
  Description of Artificial Sequence: Synthetic oligonucleotide
aauugcacuuccggggcuc

SEQ ID NO: 1972214 - RNA, 19 nt, Artificial Sequence
  Description of Artificial Sequence: Synthetic oligonucleotide
gauaucucagccuucacuu

SEQ ID NO: 1972215 - RNA, 19 nt, Artificial Sequence
  Description of Artificial Sequence: Synthetic oligonucleotide
uucuguccaggguuguuag

SEQ ID NO: 1972216 - RNA, 19 nt, Artificial Sequence
  Description of Artificial Sequence: Synthetic oligonucleotide
aagacggagucaacaaaag

SEQ ID NO: 1972217 - RNA, 19 nt, Artificial Sequence
  Description of Artificial Sequence: Synthetic oligonucleotide
ggagaagcagccuuauaag

SEQ ID NO: 1972218 - RNA, 19 nt, Artificial Sequence
  Description of Artificial Sequence: Synthetic oligonucleotide
gacaacgucagcucuucca

SEQ ID NO: 1972219 - RNA, 19 nt, Artificial Sequence
  Description of Artificial Sequence: Synthetic oligonucleotide
cugacucaucuccugacag

SEQ ID NO: 1972220 - RNA, 19 nt, Artificial Sequence
  Description of Artificial Sequence: Synthetic oligonucleotide
cuaggucaguucagaaagg

SEQ ID NO: 1972221 - RNA, 19 nt, Artificial Sequence
  Description of Artificial Sequence: Synthetic oligonucleotide
gacaaagaggucagaauca

SEQ ID NO: 1972222 - RNA, 19 nt, Artificial Sequence
  Description of Artificial Sequence: Synthetic oligonucleotide
gcaagcuacguuuuccagg

SEQ ID NO: 1972223 - RNA, 19 nt, Artificial Sequence
  Description of Artificial Sequence: Synthetic oligonucleotide
accugacucaucuccugac

SEQ ID NO: 1972224 - RNA, 19 nt, Artificial Sequence
  Description of Artificial Sequence: Synthetic oligonucleotide
gguguugacaaagagguca

SEQ ID NO: 1972225 - RNA, 19 nt, Artificial Sequence
  Description of Artificial Sequence: Synthetic oligonucleotide
aaccugacucaucuccuga

SEQ ID NO: 1972226 - RNA, 19 nt, Artificial Sequence
  Description of Artificial Sequence: Synthetic oligonucleotide
gacgccuggccucagacca

SEQ ID NO: 1972227 - RNA, 19 nt, Artificial Sequence
  Description of Artificial Sequence: Synthetic oligonucleotide
ugacucaucuccugacagc

SEQ ID NO: 1972228 - RNA, 19 nt, Artificial Sequence
  Description of Artificial Sequence: Synthetic oligonucleotide
cguuacacaagcaagcuac

SEQ ID NO: 1972229 - RNA, 19 nt, Artificial Sequence
  Description of Artificial Sequence: Synthetic oligonucleotide
gaacggacaugguucuugc

SEQ ID NO: 1972230 - RNA, 19 nt, Artificial Sequence
  Description of Artificial Sequence: Synthetic oligonucleotide
uuaggacgcagacaacguc

SEQ ID NO: 1972231 - RNA, 19 nt, Artificial Sequence
  Description of Artificial Sequence: Synthetic oligonucleotide
ucuuuugauccagauguuc

SEQ ID NO: 1972232 - RNA, 19 nt, Artificial Sequence
  Description of Artificial Sequence: Synthetic oligonucleotide
gucagccggcuucagauag

SEQ ID NO: 1972233 - RNA, 19 nt, Artificial Sequence
  Description of Artificial Sequence: Synthetic oligonucleotide
agagaacggacaugguucu

SEQ ID NO: 1972234 - RNA, 19 nt, Artificial Sequence
  Description of Artificial Sequence: Synthetic oligonucleotide
ugacucugaggaacccgcg

SEQ ID NO: 1972235 - RNA, 19 nt, Artificial Sequence
  Description of Artificial Sequence: Synthetic oligonucleotide
uuuugauccagauguucuu

SEQ ID NO: 1972236 - RNA, 19 nt, Artificial Sequence
  Description of Artificial Sequence: Synthetic oligonucleotide
acuaucugcuguuggucug

SEQ ID NO: 1972237 - RNA, 19 nt, Artificial Sequence
  Description of Artificial Sequence: Synthetic oligonucleotide
uucugcagagaacggacau

SEQ ID NO: 1972238 - RNA, 19 nt, Artificial Sequence
  Description of Artificial Sequence: Synthetic oligonucleotide
uagucuucccucgaccaag

SEQ ID NO: 1972239 - RNA, 19 nt, Artificial Sequence
  Description of Artificial Sequence: Synthetic oligonucleotide
uuuguccguuccuuuaguc

SEQ ID NO: 1972240 - RNA, 19 nt, Artificial Sequence
  Description of Artificial Sequence: Synthetic oligonucleotide
agcaagcuacguuuuccag

SEQ ID NO: 1972241 - RNA, 19 nt, Artificial Sequence
  Description of Artificial Sequence: Synthetic oligonucleotide
cucaugcagauuguugccg

SEQ ID NO: 1972242 - RNA, 19 nt, Artificial Sequence
  Description of Artificial Sequence: Synthetic oligonucleotide
gucauuacccaccaggggu

SEQ ID NO: 1972243 - RNA, 19 nt, Artificial Sequence
  Description of Artificial Sequence: Synthetic oligonucleotide
gauggcagucuuagaagcc

SEQ ID NO: 1972244 - RNA, 19 nt, Artificial Sequence
  Description of Artificial Sequence: Synthetic oligonucleotide
gauauugucugugauuggu

SEQ ID NO: 1972245 - RNA, 19 nt, Artificial Sequence
  Description of Artificial Sequence: Synthetic oligonucleotide
agaacggacaugguucuug

SEQ ID NO: 1972246 - RNA, 19 nt, Artificial Sequence
  Description of Artificial Sequence: Synthetic oligonucleotide
acgcagacaacgucagcuc

SEQ ID NO: 1972247 - RNA, 19 nt, Artificial Sequence
  Description of Artificial Sequence: Synthetic oligonucleotide
gcgagaauugcacuuccgg

SEQ ID NO: 1972248 - RNA, 19 nt, Artificial Sequence
  Description of Artificial Sequence: Synthetic oligonucleotide
uggcagucuuagaagccag

SEQ ID NO: 1972249 - RNA, 19 nt, Artificial Sequence
  Description of Artificial Sequence: Synthetic oligonucleotide
ucuguccaggguuguuagg

SEQ ID NO: 1972250 - RNA, 19 nt, Artificial Sequence
  Description of Artificial Sequence: Synthetic oligonucleotide
gucuuagaagccaggacug

SEQ ID NO: 1972251 - RNA, 19 nt, Artificial Sequence
  Description of Artificial Sequence: Synthetic oligonucleotide
accaagucaggccaccuaa

SEQ ID NO: 1972252 - RNA, 19 nt, Artificial Sequence
  Description of Artificial Sequence: Synthetic oligonucleotide
uuagucuucccucgaccaa

SEQ ID NO: 1972253 - RNA, 19 nt, Artificial Sequence
  Description of Artificial Sequence: Synthetic oligonucleotide
ucaagucauuacccaccag

SEQ ID NO: 1972254 - RNA, 19 nt, Artificial Sequence
  Description of Artificial Sequence: Synthetic oligonucleotide
uuauguggauggcagucuu

SEQ ID NO: 1972255 - RNA, 19 nt, Artificial Sequence
  Description of Artificial Sequence: Synthetic oligonucleotide
guugccgggaguccucagg

SEQ ID NO: 1972256 - RNA, 19 nt, Artificial Sequence
  Description of Artificial Sequence: Synthetic oligonucleotide
uugccgggaguccucagga

SEQ ID NO: 1972257 - RNA, 19 nt, Artificial Sequence
  Description of Artificial Sequence: Synthetic oligonucleotide
ucauuacccaccagggguu

SEQ ID NO: 1972258 - RNA, 19 nt, Artificial Sequence
  Description of Artificial Sequence: Synthetic oligonucleotide
caauagggucaacaaugag

SEQ ID NO: 1972259 - RNA, 19 nt, Artificial Sequence
  Description of Artificial Sequence: Synthetic oligonucleotide
aagcgcugcccuugugccg

SEQ ID NO: 1972260 - RNA, 19 nt, Artificial Sequence
  Description of Artificial Sequence: Synthetic oligonucleotide
aaugcgacuggcagguggu

SEQ ID NO: 1972261 - RNA, 19 nt, Artificial Sequence
  Description of Artificial Sequence: Synthetic oligonucleotide
caaagaaaugcgacuggca

SEQ ID NO: 1972262 - RNA, 19 nt, Artificial Sequence
  Description of Artificial Sequence: Synthetic oligonucleotide
agacaacgucagcucuucc

SEQ ID NO: 1972263 - RNA, 19 nt, Artificial Sequence
  Description of Artificial Sequence: Synthetic oligonucleotide
gucuacgacucacuucaag

SEQ ID NO: 1972264 - RNA, 19 nt, Artificial Sequence
  Description of Artificial Sequence: Synthetic oligonucleotide
uuacacaagcaagcuacgu

SEQ ID NO: 1972265 - RNA, 19 nt, Artificial Sequence
  Description of Artificial Sequence: Synthetic oligonucleotide
ugugauugguguugacaaa

SEQ ID NO: 1972266 - RNA, 19 nt, Artificial Sequence
  Description of Artificial Sequence: Synthetic oligonucleotide
cagccuuauaagagaagug

SEQ ID NO: 1972267 - RNA, 19 nt, Artificial Sequence
  Description of Artificial Sequence: Synthetic oligonucleotide
cugagcaaguagagaagug

SEQ ID NO: 1972268 - RNA, 19 nt, Artificial Sequence
  Description of Artificial Sequence: Synthetic oligonucleotide
ggucgcgccgguuuggacg

SEQ ID NO: 1972269 - RNA, 19 nt, Artificial Sequence
  Description of Artificial Sequence: Synthetic oligonucleotide
uuccagaguuauguggaug

SEQ ID NO: 1972270 - RNA, 19 nt, Artificial Sequence
  Description of Artificial Sequence: Synthetic oligonucleotide
acuuccggggcucucagua

SEQ ID NO: 1972271 - RNA, 19 nt, Artificial Sequence
  Description of Artificial Sequence: Synthetic oligonucleotide
auauugucugugauuggug

SEQ ID NO: 1972272 - RNA, 19 nt, Artificial Sequence
  Description of Artificial Sequence: Synthetic oligonucleotide
ugaacgcagcucgucuacg

SEQ ID NO: 1972273 - RNA, 19 nt, Artificial Sequence
  Description of Artificial Sequence: Synthetic oligonucleotide
aacccgcgagaauugcacu

SEQ ID NO: 1972274 - RNA, 19 nt, Artificial Sequence
  Description of Artificial Sequence: Synthetic oligonucleotide
cagucuuagaagccaggac

SEQ ID NO: 1972275 - RNA, 19 nt, Artificial Sequence
  Description of Artificial Sequence: Synthetic oligonucleotide
agaaaagccaagggguagu

SEQ ID NO: 1972276 - RNA, 19 nt, Artificial Sequence
  Description of Artificial Sequence: Synthetic oligonucleotide
uuucgguauuuggagggca

SEQ ID NO: 1972277 - RNA, 19 nt, Artificial Sequence
  Description of Artificial Sequence: Synthetic oligonucleotide
uccuuuagucuucccucga

SEQ ID NO: 1972278 - RNA, 19 nt, Artificial Sequence
  Description of Artificial Sequence: Synthetic oligonucleotide
gaacccgcgagaauugcac

SEQ ID NO: 1972279 - RNA, 19 nt, Artificial Sequence
  Description of Artificial Sequence: Synthetic oligonucleotide
ccucuuuugauccagaugu

SEQ ID NO: 1972280 - RNA, 19 nt, Artificial Sequence
  Description of Artificial Sequence: Synthetic oligonucleotide
aggucaguucagaaagggg

SEQ ID NO: 1972281 - RNA, 19 nt, Artificial Sequence
  Description of Artificial Sequence: Synthetic oligonucleotide
uuugauccagauguucuuu

SEQ ID NO: 1972282 - RNA, 19 nt, Artificial Sequence
  Description of Artificial Sequence: Synthetic oligonucleotide
uucgguauuuggagggcau

SEQ ID NO: 1972283 - RNA, 19 nt, Artificial Sequence
  Description of Artificial Sequence: Synthetic oligonucleotide
guucagaaaggggccaugc

SEQ ID NO: 1972284 - RNA, 19 nt, Artificial Sequence
  Description of Artificial Sequence: Synthetic oligonucleotide
gaagccaggacugcucuca

SEQ ID NO: 1972285 - RNA, 19 nt, Artificial Sequence
  Description of Artificial Sequence: Synthetic oligonucleotide
cagauuguugccgggaguc

SEQ ID NO: 1972286 - RNA, 19 nt, Artificial Sequence
  Description of Artificial Sequence: Synthetic oligonucleotide
ucugaggaacccgcgagaa

SEQ ID NO: 1972287 - RNA, 19 nt, Artificial Sequence
  Description of Artificial Sequence: Synthetic oligonucleotide
gaagugccaccuugccccg

SEQ ID NO: 1972288 - RNA, 19 nt, Artificial Sequence
  Description of Artificial Sequence: Synthetic oligonucleotide
ucacuaucugcuguugguc

SEQ ID NO: 1972289 - RNA, 19 nt, Artificial Sequence
  Description of Artificial Sequence: Synthetic oligonucleotide
guccaagcccagaaaagcc

SEQ ID NO: 1972290 - RNA, 19 nt, Artificial Sequence
  Description of Artificial Sequence: Synthetic oligonucleotide
aacggacaugguucuugca

SEQ ID NO: 1972291 - RNA, 19 nt, Artificial Sequence
  Description of Artificial Sequence: Synthetic oligonucleotide
uguccaggguuguuaggac

SEQ ID NO: 1972292 - RNA, 19 nt, Artificial Sequence
  Description of Artificial Sequence: Synthetic oligonucleotide
acucacuucaagacggagu

SEQ ID NO: 1972293 - RNA, 19 nt, Artificial Sequence
  Description of Artificial Sequence: Synthetic oligonucleotide
auguccaagcccagaaaag

SEQ ID NO: 1972294 - RNA, 19 nt, Artificial Sequence
  Description of Artificial Sequence: Synthetic oligonucleotide
cuucaagacggagucaaca

SEQ ID NO: 1972295 - RNA, 19 nt, Artificial Sequence
  Description of Artificial Sequence: Synthetic oligonucleotide
cucagcuaccucagagaag

SEQ ID NO: 1972296 - RNA, 19 nt, Artificial Sequence
  Description of Artificial Sequence: Synthetic oligonucleotide
uggacgccuggccucagac

SEQ ID NO: 1972297 - RNA, 19 nt, Artificial Sequence
  Description of Artificial Sequence: Synthetic oligonucleotide
caagcuacguuuuccaggu

SEQ ID NO: 1972298 - RNA, 19 nt, Artificial Sequence
  Description of Artificial Sequence: Synthetic oligonucleotide
agguggucacgacggucgc

SEQ ID NO: 1972299 - RNA, 19 nt, Artificial Sequence
  Description of Artificial Sequence: Synthetic oligonucleotide
aggaacccgcgagaauugc

SEQ ID NO: 1972300 - RNA, 19 nt, Artificial Sequence
  Description of Artificial Sequence: Synthetic oligonucleotide
auggcagucuuagaagcca

SEQ ID NO: 1972301 - RNA, 19 nt, Artificial Sequence
  Description of Artificial Sequence: Synthetic oligonucleotide
cgagaauugcacuuccggg

SEQ ID NO: 1972302 - RNA, 19 nt, Artificial Sequence
  Description of Artificial Sequence: Synthetic oligonucleotide
cucccucuucaauaggguc

SEQ ID NO: 1972303 - RNA, 19 nt, Artificial Sequence
  Description of Artificial Sequence: Synthetic oligonucleotide
cucgucuacgacucacuuc

SEQ ID NO: 1972304 - RNA, 19 nt, Artificial Sequence
  Description of Artificial Sequence: Synthetic oligonucleotide
augguucuugcagagcaca

SEQ ID NO: 1972305 - RNA, 19 nt, Artificial Sequence
  Description of Artificial Sequence: Synthetic oligonucleotide
gucacgacggucgcgccgg

SEQ ID NO: 1972306 - RNA, 19 nt, Artificial Sequence
  Description of Artificial Sequence: Synthetic oligonucleotide
gcaaagaaaugcgacuggc

SEQ ID NO: 1972307 - RNA, 19 nt, Artificial Sequence
  Description of Artificial Sequence: Synthetic oligonucleotide
ugguucuugcagagcacaa

SEQ ID NO: 1972308 - RNA, 19 nt, Artificial Sequence
  Description of Artificial Sequence: Synthetic oligonucleotide
uguggauggcagucuuaga

SEQ ID NO: 1972309 - RNA, 19 nt, Artificial Sequence
  Description of Artificial Sequence: Synthetic oligonucleotide
gccuuauaagagaagugcc

SEQ ID NO: 1972310 - RNA, 19 nt, Artificial Sequence
  Description of Artificial Sequence: Synthetic oligonucleotide
gaacgcagcucgucuacga

SEQ ID NO: 1972311 - RNA, 19 nt, Artificial Sequence
  Description of Artificial Sequence: Synthetic oligonucleotide
gacucugaggaacccgcga

SEQ ID NO: 1972312 - RNA, 19 nt, Artificial Sequence
  Description of Artificial Sequence: Synthetic oligonucleotide
agguagacgcugaacgcag

SEQ ID NO: 1972313 - RNA, 19 nt, Artificial Sequence
  Description of Artificial Sequence: Synthetic oligonucleotide
acgcagcucgucuacgacu

SEQ ID NO: 1972314 - RNA, 19 nt, Artificial Sequence
  Description of Artificial Sequence: Synthetic oligonucleotide
ugucugugauugguguuga

SEQ ID NO: 1972315 - RNA, 19 nt, Artificial Sequence
  Description of Artificial Sequence: Synthetic oligonucleotide
cucucaguagcccuccgga

SEQ ID NO: 1972316 - RNA, 19 nt, Artificial Sequence
  Description of Artificial Sequence: Synthetic oligonucleotide
ccuuauaagagaagugcca

SEQ ID NO: 1972317 - RNA, 19 nt, Artificial Sequence
  Description of Artificial Sequence: Synthetic oligonucleotide
guggucacgacggucgcgc

SEQ ID NO: 1972318 - RNA, 19 nt, Artificial Sequence
  Description of Artificial Sequence: Synthetic oligonucleotide
ucucaguagcccuccggau

SEQ ID NO: 1972319 - RNA, 19 nt, Artificial Sequence
  Description of Artificial Sequence: Synthetic oligonucleotide
auaagagaagugccaccuu

SEQ ID NO: 1972320 - RNA, 19 nt, Artificial Sequence
  Description of Artificial Sequence: Synthetic oligonucleotide
auuguugccgggaguccuc

SEQ ID NO: 1972321 - RNA, 19 nt, Artificial Sequence
  Description of Artificial Sequence: Synthetic oligonucleotide
accugacucugaggaaccc

SEQ ID NO: 1972322 - RNA, 19 nt, Artificial Sequence
  Description of Artificial Sequence: Synthetic oligonucleotide
aucugcuguuggucugagg

SEQ ID NO: 1972323 - RNA, 19 nt, Artificial Sequence
  Description of Artificial Sequence: Synthetic oligonucleotide
cuaccucagagaaggccuc

SEQ ID NO: 1972324 - RNA, 19 nt, Artificial Sequence
  Description of Artificial Sequence: Synthetic oligonucleotide
gggcaugcucaccaggaag

SEQ ID NO: 1972325 - RNA, 19 nt, Artificial Sequence
  Description of Artificial Sequence: Synthetic oligonucleotide
cuucagaaccugacucauc

SEQ ID NO: 1972326 - RNA, 19 nt, Artificial Sequence
  Description of Artificial Sequence: Synthetic oligonucleotide
guagagaaguggguccgug

SEQ ID NO: 1972327 - RNA, 19 nt, Artificial Sequence
  Description of Artificial Sequence: Synthetic oligonucleotide
gucgcgccgguuuggacgc

SEQ ID NO: 1972328 - RNA, 19 nt, Artificial Sequence
  Description of Artificial Sequence: Synthetic oligonucleotide
gaggaacccgcgagaauug

SEQ ID NO: 1972329 - RNA, 19 nt, Artificial Sequence
  Description of Artificial Sequence: Synthetic oligonucleotide
ucagccggcuucagauaga

SEQ ID NO: 1972330 - RNA, 19 nt, Artificial Sequence
  Description of Artificial Sequence: Synthetic oligonucleotide
cucggcguuacacaagcaa

SEQ ID NO: 1972331 - RNA, 19 nt, Artificial Sequence
  Description of Artificial Sequence: Synthetic oligonucleotide
cuguccaggguuguuagga

SEQ ID NO: 1972332 - RNA, 19 nt, Artificial Sequence
  Description of Artificial Sequence: Synthetic oligonucleotide
caugcucaccaggaagcgc

SEQ ID NO: 1972333 - RNA, 19 nt, Artificial Sequence
  Description of Artificial Sequence: Synthetic oligonucleotide
ugcgacuggcaggugguca

SEQ ID NO: 1972334 - RNA, 19 nt, Artificial Sequence
  Description of Artificial Sequence: Synthetic oligonucleotide
gacucugucuguucauacu

SEQ ID NO: 1972335 - RNA, 19 nt, Artificial Sequence
  Description of Artificial Sequence: Synthetic oligonucleotide
gagggcaccaugugcucuc

SEQ ID NO: 1972336 - RNA, 19 nt, Artificial Sequence
  Description of Artificial Sequence: Synthetic oligonucleotide
cacccugggaauguccaag

SEQ ID NO: 1972337 - RNA, 19 nt, Artificial Sequence
  Description of Artificial Sequence: Synthetic oligonucleotide
ugcacuuccggggcucuca

SEQ ID NO: 1972338 - RNA, 19 nt, Artificial Sequence
  Description of Artificial Sequence: Synthetic oligonucleotide
cuucugcagagaacggaca

SEQ ID NO: 1972339 - RNA, 19 nt, Artificial Sequence
  Description of Artificial Sequence: Synthetic oligonucleotide
ccagguagacgcugaacgc

SEQ ID NO: 1972340 - RNA, 19 nt, Artificial Sequence
  Description of Artificial Sequence: Synthetic oligonucleotide
cuucuaggucaguucagaa

SEQ ID NO: 1972341 - RNA, 19 nt, Artificial Sequence
  Description of Artificial Sequence: Synthetic oligonucleotide
ucgaccaagucaggccacc

SEQ ID NO: 1972342 - RNA, 19 nt, Artificial Sequence
  Description of Artificial Sequence: Synthetic oligonucleotide
ugagggcaccaugugcucu

SEQ ID NO: 1972343 - RNA, 19 nt, Artificial Sequence
  Description of Artificial Sequence: Synthetic oligonucleotide
uccguuccuuuagucuucc

SEQ ID NO: 1972344 - RNA, 19 nt, Artificial Sequence
  Description of Artificial Sequence: Synthetic oligonucleotide
uccucaggaccuucacuau

SEQ ID NO: 1972345 - RNA, 19 nt, Artificial Sequence
  Description of Artificial Sequence: Synthetic oligonucleotide
cagaguuauguggauggca

SEQ ID NO: 1972346 - RNA, 19 nt, Artificial Sequence
  Description of Artificial Sequence: Synthetic oligonucleotide
aagccaagggguagucccu

SEQ ID NO: 1972347 - RNA, 19 nt, Artificial Sequence
  Description of Artificial Sequence: Synthetic oligonucleotide
aggguuguuaggacgcaga

SEQ ID NO: 1972348 - RNA, 19 nt, Artificial Sequence
  Description of Artificial Sequence: Synthetic oligonucleotide
uccccucuuuugauccaga

SEQ ID NO: 1972349 - RNA, 19 nt, Artificial Sequence
  Description of Artificial Sequence: Synthetic oligonucleotide
caugccuuguccccaucca

SEQ ID NO: 1972350 - RNA, 19 nt, Artificial Sequence
  Description of Artificial Sequence: Synthetic oligonucleotide
gcucucaguagcccuccgg

SEQ ID NO: 1972351 - RNA, 19 nt, Artificial Sequence
  Description of Artificial Sequence: Synthetic oligonucleotide
cucgaccaagucaggccac

SEQ ID NO: 1972352 - RNA, 19 nt, Artificial Sequence
  Description of Artificial Sequence: Synthetic oligonucleotide
cagacaacgucagcucuuc

SEQ ID NO: 1972353 - RNA, 19 nt, Artificial Sequence
  Description of Artificial Sequence: Synthetic oligonucleotide
augcagauuguugccggga

SEQ ID NO: 1972354 - RNA, 19 nt, Artificial Sequence
  Description of Artificial Sequence: Synthetic oligonucleotide
ggucacgacggucgcgccg

SEQ ID NO: 1972355 - RNA, 19 nt, Artificial Sequence
  Description of Artificial Sequence: Synthetic oligonucleotide
uagacgcugaacgcagcuc

SEQ ID NO: 1972356 - RNA, 19 nt, Artificial Sequence
  Description of Artificial Sequence: Synthetic oligonucleotide
acgacggucgcgccgguuu

SEQ ID NO: 1972357 - RNA, 19 nt, Artificial Sequence
  Description of Artificial Sequence: Synthetic oligonucleotide
gaccuucacuaucugcugu

SEQ ID NO: 1972358 - RNA, 19 nt, Artificial Sequence
  Description of Artificial Sequence: Synthetic oligonucleotide
gccgggaguccucaggacc

SEQ ID NO: 1972359 - RNA, 19 nt, Artificial Sequence
  Description of Artificial Sequence: Synthetic oligonucleotide
acccgcgagaauugcacuu

SEQ ID NO: 1972360 - RNA, 19 nt, Artificial Sequence
  Description of Artificial Sequence: Synthetic oligonucleotide
aggacugcucucaggagaa

SEQ ID NO: 1972361 - RNA, 19 nt, Artificial Sequence
  Description of Artificial Sequence: Synthetic oligonucleotide
cccucgaccaagucaggcc

SEQ ID NO: 1972362 - RNA, 19 nt, Artificial Sequence
  Description of Artificial Sequence: Synthetic oligonucleotide
cccagaaaagccaaggggu

SEQ ID NO: 1972363 - RNA, 19 nt, Artificial Sequence
  Description of Artificial Sequence: Synthetic oligonucleotide
gguuuggacgccuggccuc

SEQ ID NO: 1972364 - RNA, 19 nt, Artificial Sequence
  Description of Artificial Sequence: Synthetic oligonucleotide
ccucacucucaugauauug

SEQ ID NO: 1972365 - RNA, 19 nt, Artificial Sequence
  Description of Artificial Sequence: Synthetic oligonucleotide
aguagagaaguggguccgu

SEQ ID NO: 1972366 - RNA, 19 nt, Artificial Sequence
  Description of Artificial Sequence: Synthetic oligonucleotide
uuggacgccuggccucaga

SEQ ID NO: 1972367 - RNA, 19 nt, Artificial Sequence
  Description of Artificial Sequence: Synthetic oligonucleotide
uuguugccgggaguccuca

SEQ ID NO: 1972368 - RNA, 19 nt, Artificial Sequence
  Description of Artificial Sequence: Synthetic oligonucleotide
cucaggagaagcagccuua

SEQ ID NO: 1972369 - RNA, 19 nt, Artificial Sequence
  Description of Artificial Sequence: Synthetic oligonucleotide
guagacgcugaacgcagcu

SEQ ID NO: 1972370 - RNA, 19 nt, Artificial Sequence
  Description of Artificial Sequence: Synthetic oligonucleotide
cagauagaccugacucuga

SEQ ID NO: 1972371 - RNA, 19 nt, Artificial Sequence
  Description of Artificial Sequence: Synthetic oligonucleotide
guagcccuccggaugcccc

SEQ ID NO: 1972372 - RNA, 19 nt, Artificial Sequence
  Description of Artificial Sequence: Synthetic oligonucleotide
acgcugaacgcagcucguc

SEQ ID NO: 1972373 - RNA, 19 nt, Artificial Sequence
  Description of Artificial Sequence: Synthetic oligonucleotide
guccccucuuuugauccag

SEQ ID NO: 1972374 - RNA, 19 nt, Artificial Sequence
  Description of Artificial Sequence: Synthetic oligonucleotide
guuauguggauggcagucu

SEQ ID NO: 1972375 - RNA, 19 nt, Artificial Sequence
  Description of Artificial Sequence: Synthetic oligonucleotide
ggcagucuuagaagccagg

SEQ ID NO: 1972376 - RNA, 19 nt, Artificial Sequence
  Description of Artificial Sequence: Synthetic oligonucleotide
gacggucgcgccgguuugg

SEQ ID NO: 1972377 - RNA, 19 nt, Artificial Sequence
  Description of Artificial Sequence: Synthetic oligonucleotide
cugagggcaccaugugcuc

SEQ ID NO: 1972378 - RNA, 19 nt, Artificial Sequence
  Description of Artificial Sequence: Synthetic oligonucleotide
cggcguuacacaagcaagc

SEQ ID NO: 1972379 - RNA, 19 nt, Artificial Sequence
  Description of Artificial Sequence: Synthetic oligonucleotide
cagggguuuaauucuucua

SEQ ID NO: 1972380 - RNA, 19 nt, Artificial Sequence
  Description of Artificial Sequence: Synthetic oligonucleotide
gaccaagucaggccaccua

SEQ ID NO: 1972381 - RNA, 19 nt, Artificial Sequence
  Description of Artificial Sequence: Synthetic oligonucleotide
gcugccgucagccggcuuc

SEQ ID NO: 1972382 - RNA, 19 nt, Artificial Sequence
  Description of Artificial Sequence: Synthetic oligonucleotide
ugccccgccccuucuuugu

SEQ ID NO: 1972383 - RNA, 19 nt, Artificial Sequence
  Description of Artificial Sequence: Synthetic oligonucleotide
ccaagucaggccaccuaag

SEQ ID NO: 1972384 - RNA, 19 nt, Artificial Sequence
  Description of Artificial Sequence: Synthetic oligonucleotide
uggcugacucugucuguuc

SEQ ID NO: 1972385 - RNA, 19 nt, Artificial Sequence
  Description of Artificial Sequence: Synthetic oligonucleotide
gguuguuaggacgcagaca

SEQ ID NO: 1972386 - RNA, 19 nt, Artificial Sequence
  Description of Artificial Sequence: Synthetic oligonucleotide
guuaggacgcagacaacgu

SEQ ID NO: 1972387 - RNA, 19 nt, Artificial Sequence
  Description of Artificial Sequence: Synthetic oligonucleotide
ccugacucugaggaacccg

SEQ ID NO: 1972388 - RNA, 19 nt, Artificial Sequence
  Description of Artificial Sequence: Synthetic oligonucleotide
gaauugcacuuccggggcu

SEQ ID NO: 1972389 - RNA, 19 nt, Artificial Sequence
  Description of Artificial Sequence: Synthetic oligonucleotide
augccccgccccuucuuug

SEQ ID NO: 1972390 - RNA, 19 nt, Artificial Sequence
  Description of Artificial Sequence: Synthetic oligonucleotide
cagcucgucuacgacucac

SEQ ID NO: 1972391 - RNA, 19 nt, Artificial Sequence
  Description of Artificial Sequence: Synthetic oligonucleotide
cccagcugccgucagccgg

SEQ ID NO: 1972392 - RNA, 19 nt, Artificial Sequence
  Description of Artificial Sequence: Synthetic oligonucleotide
cugugguucagcaggcagu

SEQ ID NO: 1972393 - RNA, 19 nt, Artificial Sequence
  Description of Artificial Sequence: Synthetic oligonucleotide
gcagucuuagaagccagga

SEQ ID NO: 1972394 - RNA, 19 nt, Artificial Sequence
  Description of Artificial Sequence: Synthetic oligonucleotide
uggucacgacggucgcgcc

SEQ ID NO: 1972395 - RNA, 19 nt, Artificial Sequence
  Description of Artificial Sequence: Synthetic oligonucleotide
agccggcuucagauagacc

SEQ ID NO: 1972396 - RNA, 19 nt, Artificial Sequence
  Description of Artificial Sequence: Synthetic oligonucleotide
acccaccagggguuuaauu

SEQ ID NO: 1972397 - RNA, 19 nt, Artificial Sequence
  Description of Artificial Sequence: Synthetic oligonucleotide
guuuggacgccuggccuca

SEQ ID NO: 1972398 - RNA, 19 nt, Artificial Sequence
  Description of Artificial Sequence: Synthetic oligonucleotide
gaaaugcgacuggcaggug

SEQ ID NO: 1972399 - RNA, 19 nt, Artificial Sequence
  Description of Artificial Sequence: Synthetic oligonucleotide
auugcacuuccggggcucu

SEQ ID NO: 1972400 - RNA, 19 nt, Artificial Sequence
  Description of Artificial Sequence: Synthetic oligonucleotide
agcccuccggaugccccgc

SEQ ID NO: 1972401 - RNA, 19 nt, Artificial Sequence
  Description of Artificial Sequence: Synthetic oligonucleotide
ccgguuuggacgccuggcc

SEQ ID NO: 1972402 - RNA, 19 nt, Artificial Sequence
  Description of Artificial Sequence: Synthetic oligonucleotide
gcgacuggcagguggucac

SEQ ID NO: 1972403 - RNA, 19 nt, Artificial Sequence
  Description of Artificial Sequence: Synthetic oligonucleotide
ggacgccuggccucagacc

SEQ ID NO: 1972404 - RNA, 19 nt, Artificial Sequence
  Description of Artificial Sequence: Synthetic oligonucleotide
uuuggacgccuggccucag

SEQ ID NO: 1972405 - RNA, 19 nt, Artificial Sequence
  Description of Artificial Sequence: Synthetic oligonucleotide
augcgacuggcaggugguc

SEQ ID NO: 1972406 - RNA, 19 nt, Artificial Sequence
  Description of Artificial Sequence: Synthetic oligonucleotide
cuguucauacuguuuuguu

SEQ ID NO: 1972407 - RNA, 19 nt, Artificial Sequence
  Description of Artificial Sequence: Synthetic oligonucleotide
ccucgaccaagucaggcca

SEQ ID NO: 1972408 - RNA, 19 nt, Artificial Sequence
  Description of Artificial Sequence: Synthetic oligonucleotide
gguggucacgacggucgcg

SEQ ID NO: 1972409 - RNA, 19 nt, Artificial Sequence
  Description of Artificial Sequence: Synthetic oligonucleotide
ccucaggaccuucacuauc

SEQ ID NO: 1972410 - RNA, 19 nt, Artificial Sequence
  Description of Artificial Sequence: Synthetic oligonucleotide
guccguuccuuuagucuuc

SEQ ID NO: 1972411 - RNA, 19 nt, Artificial Sequence
  Description of Artificial Sequence: Synthetic oligonucleotide
gguagacgcugaacgcagc

SEQ ID NO: 1972412 - RNA, 19 nt, Artificial Sequence
  Description of Artificial Sequence: Synthetic oligonucleotide
ccuggccucagaccaccgg

SEQ ID NO: 1972413 - RNA, 19 nt, Artificial Sequence
  Description of Artificial Sequence: Synthetic oligonucleotide
cgcagcucgucuacgacuc

SEQ ID NO: 1972414 - RNA, 19 nt, Artificial Sequence
  Description of Artificial Sequence: Synthetic oligonucleotide
ccagaguuauguggauggc

SEQ ID NO: 1972415 - RNA, 19 nt, Artificial Sequence
  Description of Artificial Sequence: Synthetic oligonucleotide
cccuugugccgucucuacc

SEQ ID NO: 1972416 - RNA, 19 nt, Artificial Sequence
  Description of Artificial Sequence: Synthetic oligonucleotide
cgcgagaauugcacuuccg

SEQ ID NO: 1972417 - RNA, 19 nt, Artificial Sequence
  Description of Artificial Sequence: Synthetic oligonucleotide
ggcucucaguagcccuccg

SEQ ID NO: 1972418 - RNA, 19 nt, Artificial Sequence
  Description of Artificial Sequence: Synthetic oligonucleotide
gugccgucucuaccucaug

SEQ ID NO: 1972419 - RNA, 19 nt, Artificial Sequence
  Description of Artificial Sequence: Synthetic oligonucleotide
ccgcgagaauugcacuucc

SEQ ID NO: 1972420 - RNA, 19 nt, Artificial Sequence
  Description of Artificial Sequence: Synthetic oligonucleotide
gcugaacgcagcucgucua

SEQ ID NO: 1972421 - RNA, 19 nt, Artificial Sequence
  Description of Artificial Sequence: Synthetic oligonucleotide
ccugacucaucuccugaca

SEQ ID NO: 1972422 - RNA, 19 nt, Artificial Sequence
  Description of Artificial Sequence: Synthetic oligonucleotide
ggaacccgcgagaauugca

SEQ ID NO: 1972423 - RNA, 19 nt, Artificial Sequence
  Description of Artificial Sequence: Synthetic oligonucleotide
cacaagcaagcuacguuuu

SEQ ID NO: 1972424 - RNA, 19 nt, Artificial Sequence
  Description of Artificial Sequence: Synthetic oligonucleotide
acgccuggccucagaccac

SEQ ID NO: 1972425 - RNA, 19 nt, Artificial Sequence
  Description of Artificial Sequence: Synthetic oligonucleotide
gccaguggcccuccuucug

SEQ ID NO: 1972426 - RNA, 19 nt, Artificial Sequence
  Description of Artificial Sequence: Synthetic oligonucleotide
gccgguuuggacgccuggc

SEQ ID NO: 1972427 - RNA, 19 nt, Artificial Sequence
  Description of Artificial Sequence: Synthetic oligonucleotide
cccuccuucugcagagaac

SEQ ID NO: 1972428 - RNA, 19 nt, Artificial Sequence
  Description of Artificial Sequence: Synthetic oligonucleotide
gcguuacacaagcaagcua

SEQ ID NO: 1972429 - RNA, 19 nt, Artificial Sequence
  Description of Artificial Sequence: Synthetic oligonucleotide
gaugccccgccccuucuuu

SEQ ID NO: 1972430 - RNA, 19 nt, Artificial Sequence
  Description of Artificial Sequence: Synthetic oligonucleotide
ggcguuacacaagcaagcu

SEQ ID NO: 1972431 - RNA, 19 nt, Artificial Sequence
  Description of Artificial Sequence: Synthetic oligonucleotide
ccagauguucuuucgguau

SEQ ID NO: 1972432 - RNA, 19 nt, Artificial Sequence
  Description of Artificial Sequence: Synthetic oligonucleotide
gcccuugugccgucucuac

SEQ ID NO: 1972433 - RNA, 19 nt, Artificial Sequence
  Description of Artificial Sequence: Synthetic oligonucleotide
uacccaccagggguuuaau

SEQ ID NO: 1972434 - RNA, 19 nt, Artificial Sequence
  Description of Artificial Sequence: Synthetic oligonucleotide
ccaccagggguuuaauucu

SEQ ID NO: 1972435 - RNA, 19 nt, Artificial Sequence
  Description of Artificial Sequence: Synthetic oligonucleotide
ccuccggaugccccgcccc

SEQ ID NO: 1972436 - RNA, 19 nt, Artificial Sequence
  Description of Artificial Sequence: Synthetic oligonucleotide
cgucucuaccucaugcaga

SEQ ID NO: 1972437 - RNA, 19 nt, Artificial Sequence
  Description of Artificial Sequence: Synthetic oligonucleotide
ucucuaccucaugcagauu

SEQ ID NO: 1972438 - RNA, 19 nt, Artificial Sequence
  Description of Artificial Sequence: Synthetic oligonucleotide
gcagagcacaaaagauauc

SEQ ID NO: 1972439 - RNA, 19 nt, Artificial Sequence
  Description of Artificial Sequence: Synthetic oligonucleotide
ucacgacggucgcgccggu

SEQ ID NO: 1972440 - RNA, 19 nt, Artificial Sequence
  Description of Artificial Sequence: Synthetic oligonucleotide
acggucgcgccgguuugga

SEQ ID NO: 1972441 - RNA, 19 nt, Artificial Sequence
  Description of Artificial Sequence: Synthetic oligonucleotide
gcagguggucacgacgguc

SEQ ID NO: 1972442 - RNA, 19 nt, Artificial Sequence
  Description of Artificial Sequence: Synthetic oligonucleotide
gcagauuguugccgggagu

SEQ ID NO: 1972443 - RNA, 19 nt, Artificial Sequence
  Description of Artificial Sequence: Synthetic oligonucleotide
ccugagcaaguagagaagu

SEQ ID NO: 1972444 - RNA, 19 nt, Artificial Sequence
  Description of Artificial Sequence: Synthetic oligonucleotide
ugccccgcucggcguuaca

SEQ ID NO: 1972445 - RNA, 19 nt, Artificial Sequence
  Description of Artificial Sequence: Synthetic oligonucleotide
gacgcugaacgcagcucgu

SEQ ID NO: 1972446 - RNA, 19 nt, Artificial Sequence
  Description of Artificial Sequence: Synthetic oligonucleotide
caggagaagcagccuuaua

SEQ ID NO: 1972447 - RNA, 19 nt, Artificial Sequence
  Description of Artificial Sequence: Synthetic oligonucleotide
ggcuucagauagaccugac

SEQ ID NO: 1972448 - RNA, 19 nt, Artificial Sequence
  Description of Artificial Sequence: Synthetic oligonucleotide
cccgcgagaauugcacuuc

SEQ ID NO: 1972449 - RNA, 19 nt, Artificial Sequence
  Description of Artificial Sequence: Synthetic oligonucleotide
ggggcucucaguagcccuc

SEQ ID NO: 1972450 - RNA, 19 nt, Artificial Sequence
  Description of Artificial Sequence: Synthetic oligonucleotide
ccagggguuuaauucuucu

SEQ ID NO: 1972451 - RNA, 19 nt, Artificial Sequence
  Description of Artificial Sequence: Synthetic oligonucleotide
cugccgucagccggcuuca

SEQ ID NO: 1972452 - RNA, 19 nt, Artificial Sequence
  Description of Artificial Sequence: Synthetic oligonucleotide
ccgcucggcguuacacaag

SEQ ID NO: 1972453 - RNA, 19 nt, Artificial Sequence
  Description of Artificial Sequence: Synthetic oligonucleotide
uccggaugccccgccccuu

SEQ ID NO: 1972454 - RNA, 19 nt, Artificial Sequence
  Description of Artificial Sequence: Synthetic oligonucleotide
cugagacaugcuggguucu

SEQ ID NO: 1972455 - RNA, 19 nt, Artificial Sequence
  Description of Artificial Sequence: Synthetic oligonucleotide
caccagggguuuaauucuu

SEQ ID NO: 1972456 - RNA, 19 nt, Artificial Sequence
  Description of Artificial Sequence: Synthetic oligonucleotide
cccgcucggcguuacacaa

SEQ ID NO: 1972457 - RNA, 19 nt, Artificial Sequence
  Description of Artificial Sequence: Synthetic oligonucleotide
gccgucagccggcuucaga

SEQ ID NO: 1972458 - RNA, 19 nt, Artificial Sequence
  Description of Artificial Sequence: Synthetic oligonucleotide
ccgucagccggcuucagau

SEQ ID NO: 1972459 - RNA, 19 nt, Artificial Sequence
  Description of Artificial Sequence: Synthetic oligonucleotide
uugccccgcucggcguuac

SEQ ID NO: 1972460 - RNA, 19 nt, Artificial Sequence
  Description of Artificial Sequence: Synthetic oligonucleotide
cugaggaacccgcgagaau

SEQ ID NO: 1972461 - RNA, 19 nt, Artificial Sequence
  Description of Artificial Sequence: Synthetic oligonucleotide
gccccgcucggcguuacac

SEQ ID NO: 1972462 - RNA, 19 nt, Artificial Sequence
  Description of Artificial Sequence: Synthetic oligonucleotide
ccgggaguccucaggaccu

SEQ ID NO: 1972463 - RNA, 19 nt, Artificial Sequence
  Description of Artificial Sequence: Synthetic oligonucleotide
ccggggcucucaguagccc

SEQ ID NO: 1972464 - RNA, 19 nt, Artificial Sequence
  Description of Artificial Sequence: Synthetic oligonucleotide
cccuccggaugccccgccc

SEQ ID NO: 1972465 - RNA, 19 nt, Artificial Sequence
  Description of Artificial Sequence: Synthetic oligonucleotide
gagaacggacaugguucuu

SEQ ID NO: 1972466 - RNA, 19 nt, Artificial Sequence
  Description of Artificial Sequence: Synthetic oligonucleotide
gccuggccucagaccaccg

SEQ ID NO: 1972467 - RNA, 19 nt, Artificial Sequence
  Description of Artificial Sequence: Synthetic oligonucleotide
agcugccgucagccggcuu

SEQ ID NO: 1972468 - RNA, 19 nt, Artificial Sequence
  Description of Artificial Sequence: Synthetic oligonucleotide
ggccaguggcccuccuucu

SEQ ID NO: 1972469 - RNA, 19 nt, Artificial Sequence
  Description of Artificial Sequence: Synthetic oligonucleotide
ggguagucccugagcaagu

SEQ ID NO: 1972470 - RNA, 19 nt, Artificial Sequence
  Description of Artificial Sequence: Synthetic oligonucleotide
ccacguguuuucucuuggu

SEQ ID NO: 1972471 - RNA, 19 nt, Artificial Sequence
  Description of Artificial Sequence: Synthetic oligonucleotide
cgacucacuucaagacgga

SEQ ID NO: 1972472 - RNA, 19 nt, Artificial Sequence
  Description of Artificial Sequence: Synthetic oligonucleotide
cgacggucgcgccgguuug

SEQ ID NO: 1972473 - RNA, 19 nt, Artificial Sequence
  Description of Artificial Sequence: Synthetic oligonucleotide
cggcuucagauagaccuga

SEQ ID NO: 1972474 - RNA, 19 nt, Artificial Sequence
  Description of Artificial Sequence: Synthetic oligonucleotide
gcucggcguuacacaagca

SEQ ID NO: 1972475 - RNA, 19 nt, Artificial Sequence
  Description of Artificial Sequence: Synthetic oligonucleotide
cuugccccgcucggcguua

SEQ ID NO: 1972476 - RNA, 19 nt, Artificial Sequence
  Description of Artificial Sequence: Synthetic oligonucleotide
gccccgccccuucuuuguc

SEQ ID NO: 1972477 - RNA, 19 nt, Artificial Sequence
  Description of Artificial Sequence: Synthetic oligonucleotide
ccucuucaauagggucaac

SEQ ID NO: 1972478 - RNA, 19 nt, Artificial Sequence
  Description of Artificial Sequence: Synthetic oligonucleotide
cguuuuccagguagacgcu

SEQ ID NO: 1972479 - RNA, 19 nt, Artificial Sequence
  Description of Artificial Sequence: Synthetic oligonucleotide
cgcugaacgcagcucgucu

SEQ ID NO: 1972480 - RNA, 19 nt, Artificial Sequence
  Description of Artificial Sequence: Synthetic oligonucleotide
gcgccgguuuggacgccug

SEQ ID NO: 1972481 - RNA, 19 nt, Artificial Sequence
  Description of Artificial Sequence: Synthetic oligonucleotide
ggguucuguccaggguugu

SEQ ID NO: 1972482 - RNA, 19 nt, Artificial Sequence
  Description of Artificial Sequence: Synthetic oligonucleotide
cggucgcgccgguuuggac

SEQ ID NO: 1972483 - RNA, 19 nt, Artificial Sequence
  Description of Artificial Sequence: Synthetic oligonucleotide
ggaugccccgccccuucuu

SEQ ID NO: 1972484 - RNA, 19 nt, Artificial Sequence
  Description of Artificial Sequence: Synthetic oligonucleotide
cgucagccggcuucagaua

SEQ ID NO: 1972485 - RNA, 19 nt, Artificial Sequence
  Description of Artificial Sequence: Synthetic oligonucleotide
cgguguucccagcugccgu

SEQ ID NO: 1972486 - RNA, 19 nt, Artificial Sequence
  Description of Artificial Sequence: Synthetic oligonucleotide
cgucuacgacucacuucaa

SEQ ID NO: 1972487 - RNA, 19 nt, Artificial Sequence
  Description of Artificial Sequence: Synthetic oligonucleotide
cgaccaagucaggccaccu

SEQ ID NO: 1972488 - RNA, 19 nt, Artificial Sequence
  Description of Artificial Sequence: Synthetic oligonucleotide
cacgacggucgcgccgguu

SEQ ID NO: 1972489 - RNA, 19 nt, Artificial Sequence
  Description of Artificial Sequence: Synthetic oligonucleotide
ccgccccuucuuuguccgu

SEQ ID NO: 1972490 - RNA, 19 nt, Artificial Sequence
  Description of Artificial Sequence: Synthetic oligonucleotide
cgccccuucuuuguccguu

SEQ ID NO: 1972491 - RNA, 19 nt, Artificial Sequence
  Description of Artificial Sequence: Synthetic oligonucleotide
cgcgccgguuuggacgccu

SEQ ID NO: 1972492 - RNA, 19 nt, Artificial Sequence
  Description of Artificial Sequence: Synthetic oligonucleotide
auuaggaaagaacagagcc

SEQ ID NO: 1972493 - RNA, 19 nt, Artificial Sequence
  Description of Artificial Sequence: Synthetic oligonucleotide
aacauauuaaaaucuggcc

SEQ ID NO: 1972494 - RNA, 19 nt, Artificial Sequence
  Description of Artificial Sequence: Synthetic oligonucleotide
auuaguaauaauuacuuuc

SEQ ID NO: 1972495 - RNA, 19 nt, Artificial Sequence
  Description of Artificial Sequence: Synthetic oligonucleotide
aagacucuagaucuaagcc

SEQ ID NO: 1972496 - RNA, 19 nt, Artificial Sequence
  Description of Artificial Sequence: Synthetic oligonucleotide
uaaaguugcaaguaguugg

SEQ ID NO: 1972497 - RNA, 19 nt, Artificial Sequence
  Description of Artificial Sequence: Synthetic oligonucleotide
aaaguuaacgucuacaaaa

SEQ ID NO: 1972498 - RNA, 19 nt, Artificial Sequence
  Description of Artificial Sequence: Synthetic oligonucleotide
caaguauaaaguuauaccc

SEQ ID NO: 1972499 - RNA, 19 nt, Artificial Sequence
  Description of Artificial Sequence: Synthetic oligonucleotide
aauaagguaagcagaaagc

SEQ ID NO: 1972500 - RNA, 19 nt, Artificial Sequence
  Description of Artificial Sequence: Synthetic oligonucleotide
aauaauuacuuucaggaaa

SEQ ID NO: 1972501 - RNA, 19 nt, Artificial Sequence
  Description of Artificial Sequence: Synthetic oligonucleotide
uauauuaagacucuagauc

SEQ ID NO: 1972502 - RNA, 19 nt, Artificial Sequence
  Description of Artificial Sequence: Synthetic oligonucleotide
uuuacauguaguaaaguug

SEQ ID NO: 1972503 - RNA, 19 nt, Artificial Sequence
  Description of Artificial Sequence: Synthetic oligonucleotide
acuuuuaccauugauaccg

SEQ ID NO: 1972504 - RNA, 19 nt, Artificial Sequence
  Description of Artificial Sequence: Synthetic oligonucleotide
uuggcuacagauaauacag

SEQ ID NO: 1972505 - RNA, 19 nt, Artificial Sequence
  Description of Artificial Sequence: Synthetic oligonucleotide
ucaaguauaaaguuauacc

SEQ ID NO: 1972506 - RNA, 19 nt, Artificial Sequence
  Description of Artificial Sequence: Synthetic oligonucleotide
ucauguaacacccauuacc

SEQ ID NO: 1972507 - RNA, 19 nt, Artificial Sequence
  Description of Artificial Sequence: Synthetic oligonucleotide
auauuaagacucuagaucu

SEQ ID NO: 1972508 - RNA, 19 nt, Artificial Sequence
  Description of Artificial Sequence: Synthetic oligonucleotide
uuacauguaguaaaguugc

SEQ ID NO: 1972509 - RNA, 19 nt, Artificial Sequence
  Description of Artificial Sequence: Synthetic oligonucleotide
uuaguaauaauuacuuuca

SEQ ID NO: 1972510 - RNA, 19 nt, Artificial Sequence
  Description of Artificial Sequence: Synthetic oligonucleotide
uucauaauuaguaauaauu

SEQ ID NO: 1972511 - RNA, 19 nt, Artificial Sequence
  Description of Artificial Sequence: Synthetic oligonucleotide
aaguauaaaguuauacccc

SEQ ID NO: 1972512 - RNA, 19 nt, Artificial Sequence
  Description of Artificial Sequence: Synthetic oligonucleotide
aguaauaauuacuuucagg

SEQ ID NO: 1972513 - RNA, 19 nt, Artificial Sequence
  Description of Artificial Sequence: Synthetic oligonucleotide
auuacuuucaggaaauagc

SEQ ID NO: 1972514 - RNA, 19 nt, Artificial Sequence
  Description of Artificial Sequence: Synthetic oligonucleotide
aaacccaugaaaacaaagc

SEQ ID NO: 1972515 - RNA, 19 nt, Artificial Sequence
  Description of Artificial Sequence: Synthetic oligonucleotide
aagguaagcagaaagcagc

SEQ ID NO: 1972516 - RNA, 19 nt, Artificial Sequence
  Description of Artificial Sequence: Synthetic oligonucleotide
aauacagccauuaggaaag

SEQ ID NO: 1972517 - RNA, 19 nt, Artificial Sequence
  Description of Artificial Sequence: Synthetic oligonucleotide
aauagcaccuuacauugag

SEQ ID NO: 1972518 - RNA, 19 nt, Artificial Sequence
  Description of Artificial Sequence: Synthetic oligonucleotide
aauguagccuuauauuaag

SEQ ID NO: 1972519 - RNA, 19 nt, Artificial Sequence
  Description of Artificial Sequence: Synthetic oligonucleotide
acauauuaaaaucuggcca

SEQ ID NO: 1972520 - RNA, 19 nt, Artificial Sequence
  Description of Artificial Sequence: Synthetic oligonucleotide
uauuaaauucauaauuagu

SEQ ID NO: 1972521 - RNA, 19 nt, Artificial Sequence
  Description of Artificial Sequence: Synthetic oligonucleotide
gauaauacagccauuagga

SEQ ID NO: 1972522 - RNA, 19 nt, Artificial Sequence
  Description of Artificial Sequence: Synthetic oligonucleotide
ucauaauuaguaauaauua

SEQ ID NO: 1972523 - RNA, 19 nt, Artificial Sequence
  Description of Artificial Sequence: Synthetic oligonucleotide
caugauauugggaaguuag

SEQ ID NO: 1972524 - RNA, 19 nt, Artificial Sequence
  Description of Artificial Sequence: Synthetic oligonucleotide
uaaaguuauaccccaaacu

SEQ ID NO: 1972525 - RNA, 19 nt, Artificial Sequence
  Description of Artificial Sequence: Synthetic oligonucleotide
uaauuaguaauaauuacuu

SEQ ID NO: 1972526 - RNA, 19 nt, Artificial Sequence
  Description of Artificial Sequence: Synthetic oligonucleotide
acuagcugguauuaaauuc

SEQ ID NO: 1972527 - RNA, 19 nt, Artificial Sequence
  Description of Artificial Sequence: Synthetic oligonucleotide
auugcuacuuuauaaagcu

SEQ ID NO: 1972528 - RNA, 19 nt, Artificial Sequence
  Description of Artificial Sequence: Synthetic oligonucleotide
uugagcaauguaaacuugg

SEQ ID NO: 1972529 - RNA, 19 nt, Artificial Sequence
  Description of Artificial Sequence: Synthetic oligonucleotide
uuugaucagacucccagag

SEQ ID NO: 1972530 - RNA, 19 nt, Artificial Sequence
  Description of Artificial Sequence: Synthetic oligonucleotide
caacauauuaaaaucuggc

SEQ ID NO: 1972531 - RNA, 19 nt, Artificial Sequence
  Description of Artificial Sequence: Synthetic oligonucleotide
cauauuaaaaucuggccac

SEQ ID NO: 1972532 - RNA, 19 nt, Artificial Sequence
  Description of Artificial Sequence: Synthetic oligonucleotide
aacccaugaaaacaaagca

SEQ ID NO: 1972533 - RNA, 19 nt, Artificial Sequence
  Description of Artificial Sequence: Synthetic oligonucleotide
aucuaagccgucuaaagag

SEQ ID NO: 1972534 - RNA, 19 nt, Artificial Sequence
  Description of Artificial Sequence: Synthetic oligonucleotide
auuaaaagguguccuguac

SEQ ID NO: 1972535 - RNA, 19 nt, Artificial Sequence
  Description of Artificial Sequence: Synthetic oligonucleotide
aauuacuuucaggaaauag

SEQ ID NO: 1972536 - RNA, 19 nt, Artificial Sequence
  Description of Artificial Sequence: Synthetic oligonucleotide
aauaaaguuaacgucuaca

SEQ ID NO: 1972537 - RNA, 19 nt, Artificial Sequence
  Description of Artificial Sequence: Synthetic oligonucleotide
aguguuucgugauugguuc

SEQ ID NO: 1972538 - RNA, 19 nt, Artificial Sequence
  Description of Artificial Sequence: Synthetic oligonucleotide
agacucuagaucuaagccg

SEQ ID NO: 1972539 - RNA, 19 nt, Artificial Sequence
  Description of Artificial Sequence: Synthetic oligonucleotide
acauuuuagauaaguagcc

SEQ ID NO: 1972540 - RNA, 19 nt, Artificial Sequence
  Description of Artificial Sequence: Synthetic oligonucleotide
aaaacggggucuccaagac

SEQ ID NO: 1972541 - RNA, 19 nt, Artificial Sequence
  Description of Artificial Sequence: Synthetic oligonucleotide
cauguaguaaaguugcaag

SEQ ID NO: 1972542 - RNA, 19 nt, Artificial Sequence
  Description of Artificial Sequence: Synthetic oligonucleotide
gguagguucaaguauaaag

SEQ ID NO: 1972543 - RNA, 19 nt, Artificial Sequence
  Description of Artificial Sequence: Synthetic oligonucleotide
caauaagguaagcagaaag

SEQ ID NO: 1972544 - RNA, 19 nt, Artificial Sequence
  Description of Artificial Sequence: Synthetic oligonucleotide
uuuaguguuugauaaacau

SEQ ID NO: 1972545 - RNA, 19 nt, Artificial Sequence
  Description of Artificial Sequence: Synthetic oligonucleotide
agaaaauguagccuuauau

SEQ ID NO: 1972546 - RNA, 19 nt, Artificial Sequence
  Description of Artificial Sequence: Synthetic oligonucleotide
uguaacacccauuaccaca

SEQ ID NO: 1972547 - RNA, 19 nt, Artificial Sequence
  Description of Artificial Sequence: Synthetic oligonucleotide
aguauaaaguuauacccca

SEQ ID NO: 1972548 - RNA, 19 nt, Artificial Sequence
  Description of Artificial Sequence: Synthetic oligonucleotide
aacucuuguaccagaacgc

SEQ ID NO: 1972549 - RNA, 19 nt, Artificial Sequence
  Description of Artificial Sequence: Synthetic oligonucleotide
uuucacagggcacagaaau

SEQ ID NO: 1972550 - RNA, 19 nt, Artificial Sequence
  Description of Artificial Sequence: Synthetic oligonucleotide
uuaccauugauaccggaug

SEQ ID NO: 1972551 - RNA, 19 nt, Artificial Sequence
  Description of Artificial Sequence: Synthetic oligonucleotide
uucuaaaagggaagauugg

SEQ ID NO: 1972552 - RNA, 19 nt, Artificial Sequence
  Description of Artificial Sequence: Synthetic oligonucleotide
ucauugcuacuuuauaaag

SEQ ID NO: 1972553 - RNA, 19 nt, Artificial Sequence
  Description of Artificial Sequence: Synthetic oligonucleotide
uaagacucuagaucuaagc

SEQ ID NO: 1972554 - RNA, 19 nt, Artificial Sequence
  Description of Artificial Sequence: Synthetic oligonucleotide
ugaucagacucccagaguc

SEQ ID NO: 1972555 - RNA, 19 nt, Artificial Sequence
  Description of Artificial Sequence: Synthetic oligonucleotide
auaaaguuaacgucuacaa

SEQ ID NO: 1972556 - RNA, 19 nt, Artificial Sequence
  Description of Artificial Sequence: Synthetic oligonucleotide
aggguagcaagauuaaaag

SEQ ID NO: 1972557 - RNA, 19 nt, Artificial Sequence
  Description of Artificial Sequence: Synthetic oligonucleotide
uuauucuuuuauaugguau

SEQ ID NO: 1972558 - RNA, 19 nt, Artificial Sequence
  Description of Artificial Sequence: Synthetic oligonucleotide
uuaaaagguguccuguacu

SEQ ID NO: 1972559 - RNA, 19 nt, Artificial Sequence
  Description of Artificial Sequence: Synthetic oligonucleotide
uguagccuuauauuaagac

SEQ ID NO: 1972560 - RNA, 19 nt, Artificial Sequence
  Description of Artificial Sequence: Synthetic oligonucleotide
auuucuagccgucucuggg

SEQ ID NO: 1972561 - RNA, 19 nt, Artificial Sequence
  Description of Artificial Sequence: Synthetic oligonucleotide
cauugcuacuuuauaaagc

SEQ ID NO: 1972562 - RNA, 19 nt, Artificial Sequence
  Description of Artificial Sequence: Synthetic oligonucleotide
aaauagcugacucaugaua

SEQ ID NO: 1972563 - RNA, 19 nt, Artificial Sequence
  Description of Artificial Sequence: Synthetic oligonucleotide
uugggaaguuagcagaacc

SEQ ID NO: 1972564 - RNA, 19 nt, Artificial Sequence
  Description of Artificial Sequence: Synthetic oligonucleotide
auauugggaaguuagcaga

SEQ ID NO: 1972565 - RNA, 19 nt, Artificial Sequence
  Description of Artificial Sequence: Synthetic oligonucleotide
guaguaaaguugcaaguag

SEQ ID NO: 1972566 - RNA, 19 nt, Artificial Sequence
  Description of Artificial Sequence: Synthetic oligonucleotide
agaaaagaggaacuagcug

SEQ ID NO: 1972567 - RNA, 19 nt, Artificial Sequence
  Description of Artificial Sequence: Synthetic oligonucleotide
aauuaguaauaauuacuuu

SEQ ID NO: 1972568 - RNA, 19 nt, Artificial Sequence
  Description of Artificial Sequence: Synthetic oligonucleotide
aaggguuucacaaacccug

SEQ ID NO: 1972569 - RNA, 19 nt, Artificial Sequence
  Description of Artificial Sequence: Synthetic oligonucleotide
gaugucucauguaacaccc

SEQ ID NO: 1972570 - RNA, 19 nt, Artificial Sequence
  Description of Artificial Sequence: Synthetic oligonucleotide
uauaaaguuauaccccaaa

SEQ ID NO: 1972571 - RNA, 19 nt, Artificial Sequence
  Description of Artificial Sequence: Synthetic oligonucleotide
ugguuuacauguaguaaag

SEQ ID NO: 1972572 - RNA, 19 nt, Artificial Sequence
  Description of Artificial Sequence: Synthetic oligonucleotide
aaagcuagcagugcaauaa

SEQ ID NO: 1972573 - RNA, 19 nt, Artificial Sequence
  Description of Artificial Sequence: Synthetic oligonucleotide
uuacauugagcaauguaaa

SEQ ID NO: 1972574 - RNA, 19 nt, Artificial Sequence
  Description of Artificial Sequence: Synthetic oligonucleotide
agcaauaaaguuaacgucu

SEQ ID NO: 1972575 - RNA, 19 nt, Artificial Sequence
  Description of Artificial Sequence: Synthetic oligonucleotide
uaggguagcaagauuaaaa

SEQ ID NO: 1972576 - RNA, 19 nt, Artificial Sequence
  Description of Artificial Sequence: Synthetic oligonucleotide
uaguaauaauuacuuucag

SEQ ID NO: 1972577 - RNA, 19 nt, Artificial Sequence
  Description of Artificial Sequence: Synthetic oligonucleotide
cauugucugggacacaggg

SEQ ID NO: 1972578 - RNA, 19 nt, Artificial Sequence
  Description of Artificial Sequence: Synthetic oligonucleotide
cuuauauuaagacucuaga

SEQ ID NO: 1972579 - RNA, 19 nt, Artificial Sequence
  Description of Artificial Sequence: Synthetic oligonucleotide
ugcuugagauuucuagccg

SEQ ID NO: 1972580 - RNA, 19 nt, Artificial Sequence
  Description of Artificial Sequence: Synthetic oligonucleotide
uguuguuaggguagcaaga

SEQ ID NO: 1972581 - RNA, 19 nt, Artificial Sequence
  Description of Artificial Sequence: Synthetic oligonucleotide
uuuaccauugauaccggau

SEQ ID NO: 1972582 - RNA, 19 nt, Artificial Sequence
  Description of Artificial Sequence: Synthetic oligonucleotide
aauagcugacucaugauau

SEQ ID NO: 1972583 - RNA, 19 nt, Artificial Sequence
  Description of Artificial Sequence: Synthetic oligonucleotide
ucacaaacccuggacagcg

SEQ ID NO: 1972584 - RNA, 19 nt, Artificial Sequence
  Description of Artificial Sequence: Synthetic oligonucleotide
uccacuuuaggacauuguc

SEQ ID NO: 1972585 - RNA, 19 nt, Artificial Sequence
  Description of Artificial Sequence: Synthetic oligonucleotide
agauaaguagccaacauau

SEQ ID NO: 1972586 - RNA, 19 nt, Artificial Sequence
  Description of Artificial Sequence: Synthetic oligonucleotide
uacagaaauagcaccuuac

SEQ ID NO: 1972587 - RNA, 19 nt, Artificial Sequence
  Description of Artificial Sequence: Synthetic oligonucleotide
uucaggaaauagcugacuc

SEQ ID NO: 1972588 - RNA, 19 nt, Artificial Sequence
  Description of Artificial Sequence: Synthetic oligonucleotide
ucuaaaagggaagauuggu

SEQ ID NO: 1972589 - RNA, 19 nt, Artificial Sequence
  Description of Artificial Sequence: Synthetic oligonucleotide
auuaaaaucuggccacuca

SEQ ID NO: 1972590 - RNA, 19 nt, Artificial Sequence
  Description of Artificial Sequence: Synthetic oligonucleotide
uaguaaaguugcaaguagu

SEQ ID NO: 1972591 - RNA, 19 nt, Artificial Sequence
  Description of Artificial Sequence: Synthetic oligonucleotide
uagcaccuuacauugagca

SEQ ID NO: 1972592 - RNA, 19 nt, Artificial Sequence
  Description of Artificial Sequence: Synthetic oligonucleotide
ucaucucaaguuuucaaaa

SEQ ID NO: 1972593 - RNA, 19 nt, Artificial Sequence
  Description of Artificial Sequence: Synthetic oligonucleotide
auugauaccggaugucuca

SEQ ID NO: 1972594 - RNA, 19 nt, Artificial Sequence
  Description of Artificial Sequence: Synthetic oligonucleotide
uuaagacucuagaucuaag

SEQ ID NO: 1972595 - RNA, 19 nt, Artificial Sequence
  Description of Artificial Sequence: Synthetic oligonucleotide
uuagauaaguagccaacau

SEQ ID NO: 1972596 - RNA, 19 nt, Artificial Sequence
  Description of Artificial Sequence: Synthetic oligonucleotide
agccaaaacccaugaaaac

SEQ ID NO: 1972597 - RNA, 19 nt, Artificial Sequence
  Description of Artificial Sequence: Synthetic oligonucleotide
uagauaaguagccaacaua

SEQ ID NO: 1972598 - RNA, 19 nt, Artificial Sequence
  Description of Artificial Sequence: Synthetic oligonucleotide
uacuaaaugccuuuauuuu

SEQ ID NO: 1972599 - RNA, 19 nt, Artificial Sequence
  Description of Artificial Sequence: Synthetic oligonucleotide
cuuuaggacauugucuggg

SEQ ID NO: 1972600 - RNA, 19 nt, Artificial Sequence
  Description of Artificial Sequence: Synthetic oligonucleotide
acauugagcaauguaaacu

SEQ ID NO: 1972601 - RNA, 19 nt, Artificial Sequence
  Description of Artificial Sequence: Synthetic oligonucleotide
aacggggucuccaagacug

SEQ ID NO: 1972602 - RNA, 19 nt, Artificial Sequence
  Description of Artificial Sequence: Synthetic oligonucleotide
aggacacaagcugaggacc

SEQ ID NO: 1972603 - RNA, 19 nt, Artificial Sequence
  Description of Artificial Sequence: Synthetic oligonucleotide
cauuaggaaagaacagagc

SEQ ID NO: 1972604 - RNA, 19 nt, Artificial Sequence
  Description of Artificial Sequence: Synthetic oligonucleotide
ugggaaguuagcagaacca

SEQ ID NO: 1972605 - RNA, 19 nt, Artificial Sequence
  Description of Artificial Sequence: Synthetic oligonucleotide
ucaggaaauagcugacuca

SEQ ID NO: 1972606 - RNA, 19 nt, Artificial Sequence
  Description of Artificial Sequence: Synthetic oligonucleotide
ucuaagccgucuaaagaga

SEQ ID NO: 1972607 - RNA, 19 nt, Artificial Sequence
  Description of Artificial Sequence: Synthetic oligonucleotide
aaaagggaagauugguuua

SEQ ID NO: 1972608 - RNA, 19 nt, Artificial Sequence
  Description of Artificial Sequence: Synthetic oligonucleotide
acauccaaguuauuuaaau

SEQ ID NO: 1972609 - RNA, 19 nt, Artificial Sequence
  Description of Artificial Sequence: Synthetic oligonucleotide
gcaauguaaacuugguagg

SEQ ID NO: 1972610 - RNA, 19 nt, Artificial Sequence
  Description of Artificial Sequence: Synthetic oligonucleotide
auguaguaaaguugcaagu

SEQ ID NO: 1972611 - RNA, 19 nt, Artificial Sequence
  Description of Artificial Sequence: Synthetic oligonucleotide
aguuagcagaaccagugga

SEQ ID NO: 1972612 - RNA, 19 nt, Artificial Sequence
  Description of Artificial Sequence: Synthetic oligonucleotide
cacugcuugagauuucuag

SEQ ID NO: 1972613 - RNA, 19 nt, Artificial Sequence
  Description of Artificial Sequence: Synthetic oligonucleotide
aaaagcuacuuugaucaga

SEQ ID NO: 1972614 - RNA, 19 nt, Artificial Sequence
  Description of Artificial Sequence: Synthetic oligonucleotide
gcaguaagcagcaauaaag

SEQ ID NO: 1972615 - RNA, 19 nt, Artificial Sequence
  Description of Artificial Sequence: Synthetic oligonucleotide
ugaaaacggggucuccaag

SEQ ID NO: 1972616 - RNA, 19 nt, Artificial Sequence
  Description of Artificial Sequence: Synthetic oligonucleotide
uguaguaaaguugcaagua

SEQ ID NO: 1972617 - RNA, 19 nt, Artificial Sequence
  Description of Artificial Sequence: Synthetic oligonucleotide
acgcaaggguuucacaaac

SEQ ID NO: 1972618 - RNA, 19 nt, Artificial Sequence
  Description of Artificial Sequence: Synthetic oligonucleotide
guuggcuacagauaauaca

SEQ ID NO: 1972619 - RNA, 19 nt, Artificial Sequence
  Description of Artificial Sequence: Synthetic oligonucleotide
aggacauugucugggacac

SEQ ID NO: 1972620 - RNA, 19 nt, Artificial Sequence
  Description of Artificial Sequence: Synthetic oligonucleotide
agcaagauuaaaagguguc

SEQ ID NO: 1972621 - RNA, 19 nt, Artificial Sequence
  Description of Artificial Sequence: Synthetic oligonucleotide
uacauugagcaauguaaac

SEQ ID NO: 1972622 - RNA, 19 nt, Artificial Sequence
  Description of Artificial Sequence: Synthetic oligonucleotide
uaggacauugucugggaca

SEQ ID NO: 1972623 - RNA, 19 nt, Artificial Sequence
  Description of Artificial Sequence: Synthetic oligonucleotide
aguuauuuaaauacagaaa

SEQ ID NO: 1972624 - RNA, 19 nt, Artificial Sequence
  Description of Artificial Sequence: Synthetic oligonucleotide
aaauguagccuuauauuaa

SEQ ID NO: 1972625 - RNA, 19 nt, Artificial Sequence
  Description of Artificial Sequence: Synthetic oligonucleotide
uaaaaucuggccacucauc

SEQ ID NO: 1972626 - RNA, 19 nt, Artificial Sequence
  Description of Artificial Sequence: Synthetic oligonucleotide
cagcaauaaaguuaacguc

SEQ ID NO: 1972627 - RNA, 19 nt, Artificial Sequence
  Description of Artificial Sequence: Synthetic oligonucleotide
gacucaugauauugggaag

SEQ ID NO: 1972628 - RNA, 19 nt, Artificial Sequence
  Description of Artificial Sequence: Synthetic oligonucleotide
gcugagaucacuccauccg

SEQ ID NO: 1972629 - RNA, 19 nt, Artificial Sequence
  Description of Artificial Sequence: Synthetic oligonucleotide
augauauugggaaguuagc

SEQ ID NO: 1972630 - RNA, 19 nt, Artificial Sequence
  Description of Artificial Sequence: Synthetic oligonucleotide
uacuuuuaccauugauacc

SEQ ID NO: 1972631 - RNA, 19 nt, Artificial Sequence
  Description of Artificial Sequence: Synthetic oligonucleotide
uugguagguagguucaagu

SEQ ID NO: 1972632 - RNA, 19 nt, Artificial Sequence
  Description of Artificial Sequence: Synthetic oligonucleotide
uauugggaaguuagcagaa

SEQ ID NO: 1972633 - RNA, 19 nt, Artificial Sequence
  Description of Artificial Sequence: Synthetic oligonucleotide
gaaaacggggucuccaaga

SEQ ID NO: 1972634 - RNA, 19 nt, Artificial Sequence
  Description of Artificial Sequence: Synthetic oligonucleotide
uuucuagccgucucugggc

SEQ ID NO: 1972635 - RNA, 19 nt, Artificial Sequence
  Description of Artificial Sequence: Synthetic oligonucleotide
guaacacccauuaccacag

SEQ ID NO: 1972636 - RNA, 19 nt, Artificial Sequence
  Description of Artificial Sequence: Synthetic oligonucleotide
acuccauccgcugaagcac

SEQ ID NO: 1972637 - RNA, 19 nt, Artificial Sequence
  Description of Artificial Sequence: Synthetic oligonucleotide
aagcagaaagcagcuuuac

SEQ ID NO: 1972638 - RNA, 19 nt, Artificial Sequence
  Description of Artificial Sequence: Synthetic oligonucleotide
uaccauugauaccggaugu

SEQ ID NO: 1972639 - RNA, 19 nt, Artificial Sequence
  Description of Artificial Sequence: Synthetic oligonucleotide
aaagcaguaagcagcaaua

SEQ ID NO: 1972640 - RNA, 19 nt, Artificial Sequence
  Description of Artificial Sequence: Synthetic oligonucleotide
guagcaagauuaaaaggug

SEQ ID NO: 1972641 - RNA, 19 nt, Artificial Sequence
  Description of Artificial Sequence: Synthetic oligonucleotide
guaaaguugcaaguaguug

SEQ ID NO: 1972642 - RNA, 19 nt, Artificial Sequence
  Description of Artificial Sequence: Synthetic oligonucleotide
uaaaagguguccuguacuu

SEQ ID NO: 1972643 - RNA, 19 nt, Artificial Sequence
  Description of Artificial Sequence: Synthetic oligonucleotide
uaccggaugucucauguaa

SEQ ID NO: 1972644 - RNA, 19 nt, Artificial Sequence
  Description of Artificial Sequence: Synthetic oligonucleotide
uucuacuuuuaccauugau

SEQ ID NO: 1972645 - RNA, 19 nt, Artificial Sequence
  Description of Artificial Sequence: Synthetic oligonucleotide
gaacgcaaggguuucacaa

SEQ ID NO: 1972646 - RNA, 19 nt, Artificial Sequence
  Description of Artificial Sequence: Synthetic oligonucleotide
ucuuacuaaaugccuuuau

SEQ ID NO: 1972647 - RNA, 19 nt, Artificial Sequence
  Description of Artificial Sequence: Synthetic oligonucleotide
agauuaaaagguguccugu

SEQ ID NO: 1972648 - RNA, 19 nt, Artificial Sequence
  Description of Artificial Sequence: Synthetic oligonucleotide
ccaacauauuaaaaucugg

SEQ ID NO: 1972649 - RNA, 19 nt, Artificial Sequence
  Description of Artificial Sequence: Synthetic oligonucleotide
ggguagcaagauuaaaagg

SEQ ID NO: 1972650 - RNA, 19 nt, Artificial Sequence
  Description of Artificial Sequence: Synthetic oligonucleotide
gacagcguggcucaaggca

SEQ ID NO: 1972651 - RNA, 19 nt, Artificial Sequence
  Description of Artificial Sequence: Synthetic oligonucleotide
ugagauuucuagccgucuc

SEQ ID NO: 1972652 - RNA, 19 nt, Artificial Sequence
  Description of Artificial Sequence: Synthetic oligonucleotide
ugucucauguaacacccau

SEQ ID NO: 1972653 - RNA, 19 nt, Artificial Sequence
  Description of Artificial Sequence: Synthetic oligonucleotide
ccauuaggaaagaacagag

SEQ ID NO: 1972654 - RNA, 19 nt, Artificial Sequence
  Description of Artificial Sequence: Synthetic oligonucleotide
aguaagcagcaauaaaguu

SEQ ID NO: 1972655 - RNA, 19 nt, Artificial Sequence
  Description of Artificial Sequence: Synthetic oligonucleotide
gaaccaguggaugccagag

SEQ ID NO: 1972656 - RNA, 19 nt, Artificial Sequence
  Description of Artificial Sequence: Synthetic oligonucleotide
ugagaucacuccauccgcu

SEQ ID NO: 1972657 - RNA, 19 nt, Artificial Sequence
  Description of Artificial Sequence: Synthetic oligonucleotide
aacgcaaggguuucacaaa

SEQ ID NO: 1972658 - RNA, 19 nt, Artificial Sequence
  Description of Artificial Sequence: Synthetic oligonucleotide
uuaggacauugucugggac

SEQ ID NO: 1972659 - RNA, 19 nt, Artificial Sequence
  Description of Artificial Sequence: Synthetic oligonucleotide
ugccgaccaacuuuagaag

SEQ ID NO: 1972660 - RNA, 19 nt, Artificial Sequence
  Description of Artificial Sequence: Synthetic oligonucleotide
uaagcagaaagcagcuuua

SEQ ID NO: 1972661 - RNA, 19 nt, Artificial Sequence
  Description of Artificial Sequence: Synthetic oligonucleotide
aaaagcuagcagugcaaua

SEQ ID NO: 1972662 - RNA, 19 nt, Artificial Sequence
  Description of Artificial Sequence: Synthetic oligonucleotide
ccuuauauuaagacucuag

SEQ ID NO: 1972663 - RNA, 19 nt, Artificial Sequence
  Description of Artificial Sequence: Synthetic oligonucleotide
ucuagaucuaagccgucua

SEQ ID NO: 1972664 - RNA, 19 nt, Artificial Sequence
  Description of Artificial Sequence: Synthetic oligonucleotide
aauacagaaauagcaccuu

SEQ ID NO: 1972665 - RNA, 19 nt, Artificial Sequence
  Description of Artificial Sequence: Synthetic oligonucleotide
uagcugacucaugauauug

SEQ ID NO: 1972666 - RNA, 19 nt, Artificial Sequence
  Description of Artificial Sequence: Synthetic oligonucleotide
ucgugauugguuccuuucu

SEQ ID NO: 1972667 - RNA, 19 nt, Artificial Sequence
  Description of Artificial Sequence: Synthetic oligonucleotide
uuuuaccauugauaccgga

SEQ ID NO: 1972668 - RNA, 19 nt, Artificial Sequence
  Description of Artificial Sequence: Synthetic oligonucleotide
cuuuuaccauugauaccgg

SEQ ID NO: 1972669 - RNA, 19 nt, Artificial Sequence
  Description of Artificial Sequence: Synthetic oligonucleotide
ggaugucucauguaacacc

SEQ ID NO: 1972670 - RNA, 19 nt, Artificial Sequence
  Description of Artificial Sequence: Synthetic oligonucleotide
caaacccuggacagcgugg

SEQ ID NO: 1972671 - RNA, 19 nt, Artificial Sequence
  Description of Artificial Sequence: Synthetic oligonucleotide
ucagugccgaccaacuuua

SEQ ID NO: 1972672 - RNA, 19 nt, Artificial Sequence
  Description of Artificial Sequence: Synthetic oligonucleotide
agcuuuacauccaaguuau

SEQ ID NO: 1972673 - RNA, 19 nt, Artificial Sequence
  Description of Artificial Sequence: Synthetic oligonucleotide
gcugacucaugauauuggg

SEQ ID NO: 1972674 - RNA, 19 nt, Artificial Sequence
  Description of Artificial Sequence: Synthetic oligonucleotide
auagcaccuuacauugagc

SEQ ID NO: 1972675 - RNA, 19 nt, Artificial Sequence
  Description of Artificial Sequence: Synthetic oligonucleotide
aguuggcuacagauaauac

SEQ ID NO: 1972676 - RNA, 19 nt, Artificial Sequence
  Description of Artificial Sequence: Synthetic oligonucleotide
uggcuacagauaauacagc

SEQ ID NO: 1972677 - RNA, 19 nt, Artificial Sequence
  Description of Artificial Sequence: Synthetic oligonucleotide
cuucgguggaugcucuugg

SEQ ID NO: 1972678 - RNA, 19 nt, Artificial Sequence
  Description of Artificial Sequence: Synthetic oligonucleotide
uacauguaguaaaguugca

SEQ ID NO: 1972679 - RNA, 19 nt, Artificial Sequence
  Description of Artificial Sequence: Synthetic oligonucleotide
auaugguauuucacagggc

SEQ ID NO: 1972680 - RNA, 19 nt, Artificial Sequence
  Description of Artificial Sequence: Synthetic oligonucleotide
gggaagauugguuuacaug

SEQ ID NO: 1972681 - RNA, 19 nt, Artificial Sequence
  Description of Artificial Sequence: Synthetic oligonucleotide
ucuccugaaaacggggucu

SEQ ID NO: 1972682 - RNA, 19 nt, Artificial Sequence
  Description of Artificial Sequence: Synthetic oligonucleotide
uacauccaaguuauuuaaa

SEQ ID NO: 1972683 - RNA, 19 nt, Artificial Sequence
  Description of Artificial Sequence: Synthetic oligonucleotide
guagccuuauauuaagacu

SEQ ID NO: 1972684 - RNA, 19 nt, Artificial Sequence
  Description of Artificial Sequence: Synthetic oligonucleotide
gauuaaaagguguccugua

SEQ ID NO: 1972685 - RNA, 19 nt, Artificial Sequence
  Description of Artificial Sequence: Synthetic oligonucleotide
gugccgaccaacuuuagaa

SEQ ID NO: 1972686 - RNA, 19 nt, Artificial Sequence
  Description of Artificial Sequence: Synthetic oligonucleotide
gauaccggaugucucaugu

SEQ ID NO: 1972687 - RNA, 19 nt, Artificial Sequence
  Description of Artificial Sequence: Synthetic oligonucleotide
cuuuaguguuugauaaaca

SEQ ID NO: 1972688 - RNA, 19 nt, Artificial Sequence
  Description of Artificial Sequence: Synthetic oligonucleotide
auugggaaguuagcagaac

SEQ ID NO: 1972689 - RNA, 19 nt, Artificial Sequence
  Description of Artificial Sequence: Synthetic oligonucleotide
aacuugguagguagguuca

SEQ ID NO: 1972690 - RNA, 19 nt, Artificial Sequence
  Description of Artificial Sequence: Synthetic oligonucleotide
cauugauaccggaugucuc

SEQ ID NO: 1972691 - RNA, 19 nt, Artificial Sequence
  Description of Artificial Sequence: Synthetic oligonucleotide
aguugcaaguaguuggcua

SEQ ID NO: 1972692 - RNA, 19 nt, Artificial Sequence
  Description of Artificial Sequence: Synthetic oligonucleotide
uucuagccgucucugggcu

SEQ ID NO: 1972693 - RNA, 19 nt, Artificial Sequence
  Description of Artificial Sequence: Synthetic oligonucleotide
aaacggggucuccaagacu

SEQ ID NO: 1972694 - RNA, 19 nt, Artificial Sequence
  Description of Artificial Sequence: Synthetic oligonucleotide
gagaucacuccauccgcug

SEQ ID NO: 1972695 - RNA, 19 nt, Artificial Sequence
  Description of Artificial Sequence: Synthetic oligonucleotide
cucaucucaaguuuucaaa

SEQ ID NO: 1972696 - RNA, 19 nt, Artificial Sequence
  Description of Artificial Sequence: Synthetic oligonucleotide
uugaucagacucccagagu

SEQ ID NO: 1972697 - RNA, 19 nt, Artificial Sequence
  Description of Artificial Sequence: Synthetic oligonucleotide
gcagcaauaaaguuaacgu

SEQ ID NO: 1972698 - RNA, 19 nt, Artificial Sequence
  Description of Artificial Sequence: Synthetic oligonucleotide
agcaguaagcagcaauaaa

SEQ ID NO: 1972699 - RNA, 19 nt, Artificial Sequence
  Description of Artificial Sequence: Synthetic oligonucleotide
accgggauggccugugcuc

SEQ ID NO: 1972700 - RNA, 19 nt, Artificial Sequence
  Description of Artificial Sequence: Synthetic oligonucleotide
agaagcuuuaguguuugau

SEQ ID NO: 1972701 - RNA, 19 nt, Artificial Sequence
  Description of Artificial Sequence: Synthetic oligonucleotide
agcuaguguuucgugauug

SEQ ID NO: 1972702 - RNA, 19 nt, Artificial Sequence
  Description of Artificial Sequence: Synthetic oligonucleotide
uucacaaacccuggacagc

SEQ ID NO: 1972703 - RNA, 19 nt, Artificial Sequence
  Description of Artificial Sequence: Synthetic oligonucleotide
gguuucacaaacccuggac

SEQ ID NO: 1972704 - RNA, 19 nt, Artificial Sequence
  Description of Artificial Sequence: Synthetic oligonucleotide
uuucaggaaauagcugacu

SEQ ID NO: 1972705 - RNA, 19 nt, Artificial Sequence
  Description of Artificial Sequence: Synthetic oligonucleotide
uauaccccaaacucuugua

SEQ ID NO: 1972706 - RNA, 19 nt, Artificial Sequence
  Description of Artificial Sequence: Synthetic oligonucleotide
caauaaaguuaacgucuac

SEQ ID NO: 1972707 - RNA, 19 nt, Artificial Sequence
  Description of Artificial Sequence: Synthetic oligonucleotide
auacagaaauagcaccuua

SEQ ID NO: 1972708 - RNA, 19 nt, Artificial Sequence
  Description of Artificial Sequence: Synthetic oligonucleotide
augccagagagcaaggaca

SEQ ID NO: 1972709 - RNA, 19 nt, Artificial Sequence
  Description of Artificial Sequence: Synthetic oligonucleotide
gcuuuaguguuugauaaac

SEQ ID NO: 1972710 - RNA, 19 nt, Artificial Sequence
  Description of Artificial Sequence: Synthetic oligonucleotide
gcaagauuaaaaggugucc

SEQ ID NO: 1972711 - RNA, 19 nt, Artificial Sequence
  Description of Artificial Sequence: Synthetic oligonucleotide
agauuucuagccgucucug

SEQ ID NO: 1972712 - RNA, 19 nt, Artificial Sequence
  Description of Artificial Sequence: Synthetic oligonucleotide
aaccaguggaugccagaga

SEQ ID NO: 1972713 - RNA, 19 nt, Artificial Sequence
  Description of Artificial Sequence: Synthetic oligonucleotide
uagguagguucaaguauaa

SEQ ID NO: 1972714 - RNA, 19 nt, Artificial Sequence
  Description of Artificial Sequence: Synthetic oligonucleotide
ugauugguuccuuucucuu

SEQ ID NO: 1972715 - RNA, 19 nt, Artificial Sequence
  Description of Artificial Sequence: Synthetic oligonucleotide
accauugauaccggauguc

SEQ ID NO: 1972716 - RNA, 19 nt, Artificial Sequence
  Description of Artificial Sequence: Synthetic oligonucleotide
cuagcagugcaauaaggua

SEQ ID NO: 1972717 - RNA, 19 nt, Artificial Sequence
  Description of Artificial Sequence: Synthetic oligonucleotide
ucucccggugucuucggug

SEQ ID NO: 1972718 - RNA, 19 nt, Artificial Sequence
  Description of Artificial Sequence: Synthetic oligonucleotide
ucuucgguggaugcucuug

SEQ ID NO: 1972719 - RNA, 19 nt, Artificial Sequence
  Description of Artificial Sequence: Synthetic oligonucleotide
auugagcaauguaaacuug

SEQ ID NO: 1972720 - RNA, 19 nt, Artificial Sequence
  Description of Artificial Sequence: Synthetic oligonucleotide
agccauuaggaaagaacag

SEQ ID NO: 1972721 - RNA, 19 nt, Artificial Sequence
  Description of Artificial Sequence: Synthetic oligonucleotide
acagcguggcucaaggcag

SEQ ID NO: 1972722 - RNA, 19 nt, Artificial Sequence
  Description of Artificial Sequence: Synthetic oligonucleotide
agugccgaccaacuuuaga

SEQ ID NO: 1972723 - RNA, 19 nt, Artificial Sequence
  Description of Artificial Sequence: Synthetic oligonucleotide
cuuugaucagacucccaga

SEQ ID NO: 1972724 - RNA, 19 nt, Artificial Sequence
  Description of Artificial Sequence: Synthetic oligonucleotide
gacucuagaucuaagccgu

SEQ ID NO: 1972725 - RNA, 19 nt, Artificial Sequence
  Description of Artificial Sequence: Synthetic oligonucleotide
acucuuguaccagaacgca

SEQ ID NO: 1972726 - RNA, 19 nt, Artificial Sequence
  Description of Artificial Sequence: Synthetic oligonucleotide
cuugguagguagguucaag

SEQ ID NO: 1972727 - RNA, 19 nt, Artificial Sequence
  Description of Artificial Sequence: Synthetic oligonucleotide
caccuuacauugagcaaug

SEQ ID NO: 1972728 - RNA, 19 nt, Artificial Sequence
  Description of Artificial Sequence: Synthetic oligonucleotide
agaacgcaaggguuucaca

SEQ ID NO: 1972729 - RNA, 19 nt, Artificial Sequence
  Description of Artificial Sequence: Synthetic oligonucleotide
cucauguaacacccauuac

SEQ ID NO: 1972730 - RNA, 19 nt, Artificial Sequence
  Description of Artificial Sequence: Synthetic oligonucleotide
gcuacuuuauaaagcuuag

SEQ ID NO: 1972731 - RNA, 19 nt, Artificial Sequence
  Description of Artificial Sequence: Synthetic oligonucleotide
cauuaccacaggcuucuuc

SEQ ID NO: 1972732 - RNA, 19 nt, Artificial Sequence
  Description of Artificial Sequence: Synthetic oligonucleotide
gggaaguuagcagaaccag

SEQ ID NO: 1972733 - RNA, 19 nt, Artificial Sequence
  Description of Artificial Sequence: Synthetic oligonucleotide
cauugagcaauguaaacuu

SEQ ID NO: 1972734 - RNA, 19 nt, Artificial Sequence
  Description of Artificial Sequence: Synthetic oligonucleotide
gcuaguguuucgugauugg

SEQ ID NO: 1972735 - RNA, 19 nt, Artificial Sequence
  Description of Artificial Sequence: Synthetic oligonucleotide
ugucuucgguggaugcucu

SEQ ID NO: 1972736 - RNA, 19 nt, Artificial Sequence
  Description of Artificial Sequence: Synthetic oligonucleotide
ggcucaaggcagcacaccc

SEQ ID NO: 1972737 - RNA, 19 nt, Artificial Sequence
  Description of Artificial Sequence: Synthetic oligonucleotide
gccaacauauuaaaaucug

SEQ ID NO: 1972738 - RNA, 19 nt, Artificial Sequence
  Description of Artificial Sequence: Synthetic oligonucleotide
cugacucaugauauuggga

SEQ ID NO: 1972739 - RNA, 19 nt, Artificial Sequence
  Description of Artificial Sequence: Synthetic oligonucleotide
caguaagcagcaauaaagu

SEQ ID NO: 1972740 - RNA, 19 nt, Artificial Sequence
  Description of Artificial Sequence: Synthetic oligonucleotide
gacacaagcugaggaccgg

SEQ ID NO: 1972741 - RNA, 19 nt, Artificial Sequence
  Description of Artificial Sequence: Synthetic oligonucleotide
ugauaccggaugucucaug

SEQ ID NO: 1972742 - RNA, 19 nt, Artificial Sequence
  Description of Artificial Sequence: Synthetic oligonucleotide
gccgaccaacuuuagaagc

SEQ ID NO: 1972743 - RNA, 19 nt, Artificial Sequence
  Description of Artificial Sequence: Synthetic oligonucleotide
gagaaaauguagccuuaua

SEQ ID NO: 1972744 - RNA, 19 nt, Artificial Sequence
  Description of Artificial Sequence: Synthetic oligonucleotide
acacccauuaccacaggcu

SEQ ID NO: 1972745 - RNA, 19 nt, Artificial Sequence
  Description of Artificial Sequence: Synthetic oligonucleotide
acacaagcugaggaccggg

SEQ ID NO: 1972746 - RNA, 19 nt, Artificial Sequence
  Description of Artificial Sequence: Synthetic oligonucleotide
uuguuaggguagcaagauu

SEQ ID NO: 1972747 - RNA, 19 nt, Artificial Sequence
  Description of Artificial Sequence: Synthetic oligonucleotide
agcaccuuacauugagcaa

SEQ ID NO: 1972748 - RNA, 19 nt, Artificial Sequence
  Description of Artificial Sequence: Synthetic oligonucleotide
acaagcugaggaccgggau

SEQ ID NO: 1972749 - RNA, 19 nt, Artificial Sequence
  Description of Artificial Sequence: Synthetic oligonucleotide
cuaagccgucuaaagagaa

SEQ ID NO: 1972750 - RNA, 19 nt, Artificial Sequence
  Description of Artificial Sequence: Synthetic oligonucleotide
aggguuucacaaacccugg

SEQ ID NO: 1972751 - RNA, 19 nt, Artificial Sequence
  Description of Artificial Sequence: Synthetic oligonucleotide
gaucacuccauccgcugaa

SEQ ID NO: 1972752 - RNA, 19 nt, Artificial Sequence
  Description of Artificial Sequence: Synthetic oligonucleotide
agucagguccacugcuuga

SEQ ID NO: 1972753 - RNA, 19 nt, Artificial Sequence
  Description of Artificial Sequence: Synthetic oligonucleotide
agguucaaguauaaaguua

SEQ ID NO: 1972754 - RNA, 19 nt, Artificial Sequence
  Description of Artificial Sequence: Synthetic oligonucleotide
gaaauagcugacucaugau

SEQ ID NO: 1972755 - RNA, 19 nt, Artificial Sequence
  Description of Artificial Sequence: Synthetic oligonucleotide
aguagccaacauauuaaaa

SEQ ID NO: 1972756 - RNA, 19 nt, Artificial Sequence
  Description of Artificial Sequence: Synthetic oligonucleotide
guuagucagguccacugcu

SEQ ID NO: 1972757 - RNA, 19 nt, Artificial Sequence
  Description of Artificial Sequence: Synthetic oligonucleotide
ucaugauauugggaaguua

SEQ ID NO: 1972758 - RNA, 19 nt, Artificial Sequence
  Description of Artificial Sequence: Synthetic oligonucleotide
gagagcaaggacacaagcu

SEQ ID NO: 1972759 - RNA, 19 nt, Artificial Sequence
  Description of Artificial Sequence: Synthetic oligonucleotide
cuaaaagggaagauugguu

SEQ ID NO: 1972760 - RNA, 19 nt, Artificial Sequence
  Description of Artificial Sequence: Synthetic oligonucleotide
uuucgugauugguuccuuu

SEQ ID NO: 1972761 - RNA, 19 nt, Artificial Sequence
  Description of Artificial Sequence: Synthetic oligonucleotide
agagucucuuaaauuaaua

SEQ ID NO: 1972762 - RNA, 19 nt, Artificial Sequence
  Description of Artificial Sequence: Synthetic oligonucleotide
cagugcaauaagguaagca

SEQ ID NO: 1972763 - RNA, 19 nt, Artificial Sequence
  Description of Artificial Sequence: Synthetic oligonucleotide
guuauaccccaaacucuug

SEQ ID NO: 1972764 - RNA, 19 nt, Artificial Sequence
  Description of Artificial Sequence: Synthetic oligonucleotide
gguucaaguauaaaguuau

SEQ ID NO: 1972765 - RNA, 19 nt, Artificial Sequence
  Description of Artificial Sequence: Synthetic oligonucleotide
ugaggaccgggauggccug

SEQ ID NO: 1972766 - RNA, 19 nt, Artificial Sequence
  Description of Artificial Sequence: Synthetic oligonucleotide
guaaacuugguagguaggu

SEQ ID NO: 1972767 - RNA, 19 nt, Artificial Sequence
  Description of Artificial Sequence: Synthetic oligonucleotide
cuagaucuaagccgucuaa

SEQ ID NO: 1972768 - RNA, 19 nt, Artificial Sequence
  Description of Artificial Sequence: Synthetic oligonucleotide
ugucucccggugucuucgg

SEQ ID NO: 1972769 - RNA, 19 nt, Artificial Sequence
  Description of Artificial Sequence: Synthetic oligonucleotide
gaacuagcugguauuaaau

SEQ ID NO: 1972770 - RNA, 19 nt, Artificial Sequence
  Description of Artificial Sequence: Synthetic oligonucleotide
cagaacgcaaggguuucac

SEQ ID NO: 1972771 - RNA, 19 nt, Artificial Sequence
  Description of Artificial Sequence: Synthetic oligonucleotide
agccuuauauuaagacucu

SEQ ID NO: 1972772 - RNA, 19 nt, Artificial Sequence
  Description of Artificial Sequence: Synthetic oligonucleotide
cagaaauagcaccuuacau

SEQ ID NO: 1972773 - RNA, 19 nt, Artificial Sequence
  Description of Artificial Sequence: Synthetic oligonucleotide
ucuagccgucucugggcug

SEQ ID NO: 1972774 - RNA, 19 nt, Artificial Sequence
  Description of Artificial Sequence: Synthetic oligonucleotide
gugauugguuccuuucucu

SEQ ID NO: 1972775 - RNA, 19 nt, Artificial Sequence
  Description of Artificial Sequence: Synthetic oligonucleotide
uugauaccggaugucucau

SEQ ID NO: 1972776 - RNA, 19 nt, Artificial Sequence
  Description of Artificial Sequence: Synthetic oligonucleotide
guuaggguagcaagauuaa

SEQ ID NO: 1972777 - RNA, 19 nt, Artificial Sequence
  Description of Artificial Sequence: Synthetic oligonucleotide
auguagccuuauauuaaga

SEQ ID NO: 1972778 - RNA, 19 nt, Artificial Sequence
  Description of Artificial Sequence: Synthetic oligonucleotide
acauugucugggacacagg

SEQ ID NO: 1972779 - RNA, 19 nt, Artificial Sequence
  Description of Artificial Sequence: Synthetic oligonucleotide
gcuacagauaauacagcca

SEQ ID NO: 1972780 - RNA, 19 nt, Artificial Sequence
  Description of Artificial Sequence: Synthetic oligonucleotide
aucacuccauccgcugaag

SEQ ID NO: 1972781 - RNA, 19 nt, Artificial Sequence
  Description of Artificial Sequence: Synthetic oligonucleotide
aacccuggacagcguggcu

SEQ ID NO: 1972782 - RNA, 19 nt, Artificial Sequence
  Description of Artificial Sequence: Synthetic oligonucleotide
cugaaaacggggucuccaa

SEQ ID NO: 1972783 - RNA, 19 nt, Artificial Sequence
  Description of Artificial Sequence: Synthetic oligonucleotide
cuucaggugcugagaucac

SEQ ID NO: 1972784 - RNA, 19 nt, Artificial Sequence
  Description of Artificial Sequence: Synthetic oligonucleotide
gugucuucgguggaugcuc

SEQ ID NO: 1972785 - RNA, 19 nt, Artificial Sequence
  Description of Artificial Sequence: Synthetic oligonucleotide
cucuuguaccagaacgcaa

SEQ ID NO: 1972786 - RNA, 19 nt, Artificial Sequence
  Description of Artificial Sequence: Synthetic oligonucleotide
guauaaaguuauaccccaa

SEQ ID NO: 1972787 - RNA, 19 nt, Artificial Sequence
  Description of Artificial Sequence: Synthetic oligonucleotide
aggaaauagcugacucaug

SEQ ID NO: 1972788 - RNA, 19 nt, Artificial Sequence
  Description of Artificial Sequence: Synthetic oligonucleotide
guuguuaggguagcaagau

SEQ ID NO: 1972789 - RNA, 19 nt, Artificial Sequence
  Description of Artificial Sequence: Synthetic oligonucleotide
caaggguuucacaaacccu

SEQ ID NO: 1972790 - RNA, 19 nt, Artificial Sequence
  Description of Artificial Sequence: Synthetic oligonucleotide
uccugaaaacggggucucc

SEQ ID NO: 1972791 - RNA, 19 nt, Artificial Sequence
  Description of Artificial Sequence: Synthetic oligonucleotide
gaggaacuagcugguauua

SEQ ID NO: 1972792 - RNA, 19 nt, Artificial Sequence
  Description of Artificial Sequence: Synthetic oligonucleotide
accaacuuuagaagcuuua

SEQ ID NO: 1972793 - RNA, 19 nt, Artificial Sequence
  Description of Artificial Sequence: Synthetic oligonucleotide
guuagcagaaccaguggau

SEQ ID NO: 1972794 - RNA, 19 nt, Artificial Sequence
  Description of Artificial Sequence: Synthetic oligonucleotide
gaccuucaggugcugagau

SEQ ID NO: 1972795 - RNA, 19 nt, Artificial Sequence
  Description of Artificial Sequence: Synthetic oligonucleotide
aagguguccuguacuucau

SEQ ID NO: 1972796 - RNA, 19 nt, Artificial Sequence
  Description of Artificial Sequence: Synthetic oligonucleotide
caauguaaacuugguaggu

SEQ ID NO: 1972797 - RNA, 19 nt, Artificial Sequence
  Description of Artificial Sequence: Synthetic oligonucleotide
caggaaauagcugacucau

SEQ ID NO: 1972798 - RNA, 19 nt, Artificial Sequence
  Description of Artificial Sequence: Synthetic oligonucleotide
acucuagaucuaagccguc

SEQ ID NO: 1972799 - RNA, 19 nt, Artificial Sequence
  Description of Artificial Sequence: Synthetic oligonucleotide
aggaacuagcugguauuaa

SEQ ID NO: 1972800 - RNA, 19 nt, Artificial Sequence
  Description of Artificial Sequence: Synthetic oligonucleotide
cacaagcugaggaccggga

SEQ ID NO: 1972801 - RNA, 19 nt, Artificial Sequence
  Description of Artificial Sequence: Synthetic oligonucleotide
cuggccacucaucucaagu

SEQ ID NO: 1972802 - RNA, 19 nt, Artificial Sequence
  Description of Artificial Sequence: Synthetic oligonucleotide
acggggucuccaagacugc

SEQ ID NO: 1972803 - RNA, 19 nt, Artificial Sequence
  Description of Artificial Sequence: Synthetic oligonucleotide
ggucuccaagacugccagg

SEQ ID NO: 1972804 - RNA, 19 nt, Artificial Sequence
  Description of Artificial Sequence: Synthetic oligonucleotide
cuccugaaaacggggucuc

SEQ ID NO: 1972805 - RNA, 19 nt, Artificial Sequence
  Description of Artificial Sequence: Synthetic oligonucleotide
gcuagcagugcaauaaggu

SEQ ID NO: 1972806 - RNA, 19 nt, Artificial Sequence
  Description of Artificial Sequence: Synthetic oligonucleotide
gcuugagauuucuagccgu

SEQ ID NO: 1972807 - RNA, 19 nt, Artificial Sequence
  Description of Artificial Sequence: Synthetic oligonucleotide
gguguccuguacuucauau

SEQ ID NO: 1972808 - RNA, 19 nt, Artificial Sequence
  Description of Artificial Sequence: Synthetic oligonucleotide
cuccaagacugccaggggu

SEQ ID NO: 1972809 - RNA, 19 nt, Artificial Sequence
  Description of Artificial Sequence: Synthetic oligonucleotide
cuagccgucucugggcuga

SEQ ID NO: 1972810 - RNA, 19 nt, Artificial Sequence
  Description of Artificial Sequence: Synthetic oligonucleotide
cucagugccgaccaacuuu

SEQ ID NO: 1972811 - RNA, 19 nt, Artificial Sequence
  Description of Artificial Sequence: Synthetic oligonucleotide
gcaauaaaguuaacgucua

SEQ ID NO: 1972812 - RNA, 19 nt, Artificial Sequence
  Description of Artificial Sequence: Synthetic oligonucleotide
agguagguucaaguauaaa

SEQ ID NO: 1972813 - RNA, 19 nt, Artificial Sequence
  Description of Artificial Sequence: Synthetic oligonucleotide
ccacucaucucaaguuuuc

SEQ ID NO: 1972814 - RNA, 19 nt, Artificial Sequence
  Description of Artificial Sequence: Synthetic oligonucleotide
cagagucucuuaaauuaau

SEQ ID NO: 1972815 - RNA, 19 nt, Artificial Sequence
  Description of Artificial Sequence: Synthetic oligonucleotide
ucccggugucuucggugga

SEQ ID NO: 1972816 - RNA, 19 nt, Artificial Sequence
  Description of Artificial Sequence: Synthetic oligonucleotide
accuuacauugagcaaugu

SEQ ID NO: 1972817 - RNA, 19 nt, Artificial Sequence
  Description of Artificial Sequence: Synthetic oligonucleotide
cuaguguuucgugauuggu

SEQ ID NO: 1972818 - RNA, 19 nt, Artificial Sequence
  Description of Artificial Sequence: Synthetic oligonucleotide
agcuguuguuaggguagca

SEQ ID NO: 1972819 - RNA, 19 nt, Artificial Sequence
  Description of Artificial Sequence: Synthetic oligonucleotide
ccacuuuaggacauugucu

SEQ ID NO: 1972820 - RNA, 19 nt, Artificial Sequence
  Description of Artificial Sequence: Synthetic oligonucleotide
ccagagucucuuaaauuaa

SEQ ID NO: 1972821 - RNA, 19 nt, Artificial Sequence
  Description of Artificial Sequence: Synthetic oligonucleotide
ggacagcguggcucaaggc

SEQ ID NO: 1972822 - RNA, 19 nt, Artificial Sequence
  Description of Artificial Sequence: Synthetic oligonucleotide
ccuuacauugagcaaugua

SEQ ID NO: 1972823 - RNA, 19 nt, Artificial Sequence
  Description of Artificial Sequence: Synthetic oligonucleotide
cagugccgaccaacuuuag

SEQ ID NO: 1972824 - RNA, 19 nt, Artificial Sequence
  Description of Artificial Sequence: Synthetic oligonucleotide
gcaccuuacauugagcaau

SEQ ID NO: 1972825 - RNA, 19 nt, Artificial Sequence
  Description of Artificial Sequence: Synthetic oligonucleotide
acuugguagguagguucaa

SEQ ID NO: 1972826 - RNA, 19 nt, Artificial Sequence
  Description of Artificial Sequence: Synthetic oligonucleotide
ggguuucacaaacccugga

SEQ ID NO: 1972827 - RNA, 19 nt, Artificial Sequence
  Description of Artificial Sequence: Synthetic oligonucleotide
cgcaaggguuucacaaacc

SEQ ID NO: 1972828 - RNA, 19 nt, Artificial Sequence
  Description of Artificial Sequence: Synthetic oligonucleotide
augucucauguaacaccca

SEQ ID NO: 1972829 - RNA, 19 nt, Artificial Sequence
  Description of Artificial Sequence: Synthetic oligonucleotide
guccuguacuucauauaaa

SEQ ID NO: 1972830 - RNA, 19 nt, Artificial Sequence
  Description of Artificial Sequence: Synthetic oligonucleotide
gaccgggauggccugugcu

SEQ ID NO: 1972831 - RNA, 19 nt, Artificial Sequence
  Description of Artificial Sequence: Synthetic oligonucleotide
cacccauuaccacaggcuu

SEQ ID NO: 1972832 - RNA, 19 nt, Artificial Sequence
  Description of Artificial Sequence: Synthetic oligonucleotide
cucuagaucuaagccgucu

SEQ ID NO: 1972833 - RNA, 19 nt, Artificial Sequence
  Description of Artificial Sequence: Synthetic oligonucleotide
aggaccgggauggccugug

SEQ ID NO: 1972834 - RNA, 19 nt, Artificial Sequence
  Description of Artificial Sequence: Synthetic oligonucleotide
gguuuacauguaguaaagu

SEQ ID NO: 1972835 - RNA, 19 nt, Artificial Sequence
  Description of Artificial Sequence: Synthetic oligonucleotide
agcugguauuaaauucaua

SEQ ID NO: 1972836 - RNA, 19 nt, Artificial Sequence
  Description of Artificial Sequence: Synthetic oligonucleotide
cagagccaaaacccaugaa

SEQ ID NO: 1972837 - RNA, 19 nt, Artificial Sequence
  Description of Artificial Sequence: Synthetic oligonucleotide
ccugaaaacggggucucca

SEQ ID NO: 1972838 - RNA, 19 nt, Artificial Sequence
  Description of Artificial Sequence: Synthetic oligonucleotide
ccgggauggccugugcucc

SEQ ID NO: 1972839 - RNA, 19 nt, Artificial Sequence
  Description of Artificial Sequence: Synthetic oligonucleotide
gagcuaguguuucgugauu

SEQ ID NO: 1972840 - RNA, 19 nt, Artificial Sequence
  Description of Artificial Sequence: Synthetic oligonucleotide
cggaugucucauguaacac

SEQ ID NO: 1972841 - RNA, 19 nt, Artificial Sequence
  Description of Artificial Sequence: Synthetic oligonucleotide
ccgaccaacuuuagaagcu

SEQ ID NO: 1972842 - RNA, 19 nt, Artificial Sequence
  Description of Artificial Sequence: Synthetic oligonucleotide
cucaugauauugggaaguu

SEQ ID NO: 1972843 - RNA, 19 nt, Artificial Sequence
  Description of Artificial Sequence: Synthetic oligonucleotide
uagccgucucugggcugag

SEQ ID NO: 1972844 - RNA, 19 nt, Artificial Sequence
  Description of Artificial Sequence: Synthetic oligonucleotide
ccauugauaccggaugucu

SEQ ID NO: 1972845 - RNA, 19 nt, Artificial Sequence
  Description of Artificial Sequence: Synthetic oligonucleotide
cggugucuucgguggaugc

SEQ ID NO: 1972846 - RNA, 19 nt, Artificial Sequence
  Description of Artificial Sequence: Synthetic oligonucleotide
ggccacucaucucaaguuu

SEQ ID NO: 1972847 - RNA, 19 nt, Artificial Sequence
  Description of Artificial Sequence: Synthetic oligonucleotide
gccuuauauuaagacucua

SEQ ID NO: 1972848 - RNA, 19 nt, Artificial Sequence
  Description of Artificial Sequence: Synthetic oligonucleotide
cccauuaccacaggcuucu

SEQ ID NO: 1972849 - RNA, 19 nt, Artificial Sequence
  Description of Artificial Sequence: Synthetic oligonucleotide
cacaaacccuggacagcgu

SEQ ID NO: 1972850 - RNA, 19 nt, Artificial Sequence
  Description of Artificial Sequence: Synthetic oligonucleotide
ggcugagcuaguguuucgu

SEQ ID NO: 1972851 - RNA, 19 nt, Artificial Sequence
  Description of Artificial Sequence: Synthetic oligonucleotide
ccccucagugccgaccaac

SEQ ID NO: 1972852 - RNA, 19 nt, Artificial Sequence
  Description of Artificial Sequence: Synthetic oligonucleotide
ccggugucuucgguggaug

SEQ ID NO: 1972853 - RNA, 19 nt, Artificial Sequence
  Description of Artificial Sequence: Synthetic oligonucleotide
guuucgugauugguuccuu

SEQ ID NO: 1972854 - RNA, 19 nt, Artificial Sequence
  Description of Artificial Sequence: Synthetic oligonucleotide
gucgcuggugcaggugacu

SEQ ID NO: 1972855 - RNA, 19 nt, Artificial Sequence
  Description of Artificial Sequence: Synthetic oligonucleotide
gccacucaucucaaguuuu

SEQ ID NO: 1972856 - RNA, 19 nt, Artificial Sequence
  Description of Artificial Sequence: Synthetic oligonucleotide
gucuucgguggaugcucuu

SEQ ID NO: 1972857 - RNA, 19 nt, Artificial Sequence
  Description of Artificial Sequence: Synthetic oligonucleotide
gaggaccgggauggccugu

SEQ ID NO: 1972858 - RNA, 19 nt, Artificial Sequence
  Description of Artificial Sequence: Synthetic oligonucleotide
ccagaacgcaaggguuuca

SEQ ID NO: 1972859 - RNA, 19 nt, Artificial Sequence
  Description of Artificial Sequence: Synthetic oligonucleotide
ccacugcuugagauuucua

SEQ ID NO: 1972860 - RNA, 19 nt, Artificial Sequence
  Description of Artificial Sequence: Synthetic oligonucleotide
caagacugccaggggucuu

SEQ ID NO: 1972861 - RNA, 19 nt, Artificial Sequence
  Description of Artificial Sequence: Synthetic oligonucleotide
cccggugucuucgguggau

SEQ ID NO: 1972862 - RNA, 19 nt, Artificial Sequence
  Description of Artificial Sequence: Synthetic oligonucleotide
aaggacauacuucagacac

SEQ ID NO: 1972863 - RNA, 19 nt, Artificial Sequence
  Description of Artificial Sequence: Synthetic oligonucleotide
cuuuaguacacuuucacag

SEQ ID NO: 1972864 - RNA, 19 nt, Artificial Sequence
  Description of Artificial Sequence: Synthetic oligonucleotide
ucaaguauguccagcaacg

SEQ ID NO: 1972865 - RNA, 19 nt, Artificial Sequence
  Description of Artificial Sequence: Synthetic oligonucleotide
aaacucaugaucugggauc

SEQ ID NO: 1972866 - RNA, 19 nt, Artificial Sequence
  Description of Artificial Sequence: Synthetic oligonucleotide
acuggugucauguuaaagg

SEQ ID NO: 1972867 - RNA, 19 nt, Artificial Sequence
  Description of Artificial Sequence: Synthetic oligonucleotide
uccuccuaaaaucagagug

SEQ ID NO: 1972868 - RNA, 19 nt, Artificial Sequence
  Description of Artificial Sequence: Synthetic oligonucleotide
uguuaaaggagcacauugg

SEQ ID NO: 1972869 - RNA, 19 nt, Artificial Sequence
  Description of Artificial Sequence: Synthetic oligonucleotide
guaguugaggauuugcugg

SEQ ID NO: 1972870 - RNA, 19 nt, Artificial Sequence
  Description of Artificial Sequence: Synthetic oligonucleotide
ucacaaauuccacaaacug

SEQ ID NO: 1972871 - RNA, 19 nt, Artificial Sequence
  Description of Artificial Sequence: Synthetic oligonucleotide
uuaggcuucacaauccuca

SEQ ID NO: 1972872 - RNA, 19 nt, Artificial Sequence
  Description of Artificial Sequence: Synthetic oligonucleotide
ucaggaaguaauuucuucc

SEQ ID NO: 1972873 - RNA, 19 nt, Artificial Sequence
  Description of Artificial Sequence: Synthetic oligonucleotide
uguaaaaccacugcuuuag

SEQ ID NO: 1972874 - RNA, 19 nt, Artificial Sequence
  Description of Artificial Sequence: Synthetic oligonucleotide
ugucaacuagaccacaugc

SEQ ID NO: 1972875 - RNA, 19 nt, Artificial Sequence
  Description of Artificial Sequence: Synthetic oligonucleotide
uaaaggagcacauuggauc

SEQ ID NO: 1972876 - RNA, 19 nt, Artificial Sequence
  Description of Artificial Sequence: Synthetic oligonucleotide
uugcagauagccaucagug

SEQ ID NO: 1972877 - RNA, 19 nt, Artificial Sequence
  Description of Artificial Sequence: Synthetic oligonucleotide
acuuucacagaugugauag

SEQ ID NO: 1972878 - RNA, 19 nt, Artificial Sequence
  Description of Artificial Sequence: Synthetic oligonucleotide
auguuaaaggagcacauug

SEQ ID NO: 1972879 - RNA, 19 nt, Artificial Sequence
  Description of Artificial Sequence: Synthetic oligonucleotide
aacgaaugcccacuauugg

SEQ ID NO: 1972880 - RNA, 19 nt, Artificial Sequence
  Description of Artificial Sequence: Synthetic oligonucleotide
uucccuuugauguaguuga

SEQ ID NO: 1972881 - RNA, 19 nt, Artificial Sequence
  Description of Artificial Sequence: Synthetic oligonucleotide
uaguccauauucuauggag

SEQ ID NO: 1972882 - RNA, 19 nt, Artificial Sequence
  Description of Artificial Sequence: Synthetic oligonucleotide
uauacuuccuuuaguacac

SEQ ID NO: 1972883 - RNA, 19 nt, Artificial Sequence
  Description of Artificial Sequence: Synthetic oligonucleotide
aguacacuuucacagaugu

SEQ ID NO: 1972884 - RNA, 19 nt, Artificial Sequence
  Description of Artificial Sequence: Synthetic oligonucleotide
auagccaucaguguggaag

SEQ ID NO: 1972885 - RNA, 19 nt, Artificial Sequence
  Description of Artificial Sequence: Synthetic oligonucleotide
uuccaaucgucccugagcc

SEQ ID NO: 1972886 - RNA, 19 nt, Artificial Sequence
  Description of Artificial Sequence: Synthetic oligonucleotide
acaucagacaugucacucc

SEQ ID NO: 1972887 - RNA, 19 nt, Artificial Sequence
  Description of Artificial Sequence: Synthetic oligonucleotide
uaacgaaugcccacuauug

SEQ ID NO: 1972888 - RNA, 19 nt, Artificial Sequence
  Description of Artificial Sequence: Synthetic oligonucleotide
gauuugcuggauucggugg

SEQ ID NO: 1972889 - RNA, 19 nt, Artificial Sequence
  Description of Artificial Sequence: Synthetic oligonucleotide
gugauaguacuucucaucc

SEQ ID NO: 1972890 - RNA, 19 nt, Artificial Sequence
  Description of Artificial Sequence: Synthetic oligonucleotide
uguaguugaggauuugcug

SEQ ID NO: 1972891 - RNA, 19 nt, Artificial Sequence
  Description of Artificial Sequence: Synthetic oligonucleotide
aaguauguccagcaacgag

SEQ ID NO: 1972892 - RNA, 19 nt, Artificial Sequence
  Description of Artificial Sequence: Synthetic oligonucleotide
aagguuauagccuccuccu

SEQ ID NO: 1972893 - RNA, 19 nt, Artificial Sequence
  Description of Artificial Sequence: Synthetic oligonucleotide
aacaucagacaugucacuc

SEQ ID NO: 1972894 - RNA, 19 nt, Artificial Sequence
  Description of Artificial Sequence: Synthetic oligonucleotide
aaaacucaugaucugggau

SEQ ID NO: 1972895 - RNA, 19 nt, Artificial Sequence
  Description of Artificial Sequence: Synthetic oligonucleotide
ucauuauaggcacugcuuc

SEQ ID NO: 1972896 - RNA, 19 nt, Artificial Sequence
  Description of Artificial Sequence: Synthetic oligonucleotide
aguaccgucccuuuccagg

SEQ ID NO: 1972897 - RNA, 19 nt, Artificial Sequence
  Description of Artificial Sequence: Synthetic oligonucleotide
auuauaggcacugcuuccc

SEQ ID NO: 1972898 - RNA, 19 nt, Artificial Sequence
  Description of Artificial Sequence: Synthetic oligonucleotide
gaugugauaguacuucuca

SEQ ID NO: 1972899 - RNA, 19 nt, Artificial Sequence
  Description of Artificial Sequence: Synthetic oligonucleotide
auacuucagacacuugccg

SEQ ID NO: 1972900 - RNA, 19 nt, Artificial Sequence
  Description of Artificial Sequence: Synthetic oligonucleotide
ugcuuuaggauugaaggcc

SEQ ID NO: 1972901 - RNA, 19 nt, Artificial Sequence
  Description of Artificial Sequence: Synthetic oligonucleotide
augaucugggaucucagag

SEQ ID NO: 1972902 - RNA, 19 nt, Artificial Sequence
  Description of Artificial Sequence: Synthetic oligonucleotide
uguuggcaagguuauagcc

SEQ ID NO: 1972903 - RNA, 19 nt, Artificial Sequence
  Description of Artificial Sequence: Synthetic oligonucleotide
gagaguguaccauacuggc

SEQ ID NO: 1972904 - RNA, 19 nt, Artificial Sequence
  Description of Artificial Sequence: Synthetic oligonucleotide
ucacagaugugauaguacu

SEQ ID NO: 1972905 - RNA, 19 nt, Artificial Sequence
  Description of Artificial Sequence: Synthetic oligonucleotide
uaugcuucgaucagagagu

SEQ ID NO: 1972906 - RNA, 19 nt, Artificial Sequence
  Description of Artificial Sequence: Synthetic oligonucleotide
guauacuuccuuuaguaca

SEQ ID NO: 1972907 - RNA, 19 nt, Artificial Sequence
  Description of Artificial Sequence: Synthetic oligonucleotide
uguaugccauccugaaugg

SEQ ID NO: 1972908 - RNA, 19 nt, Artificial Sequence
  Description of Artificial Sequence: Synthetic oligonucleotide
caagguuauagccuccucc

SEQ ID NO: 1972909 - RNA, 19 nt, Artificial Sequence
  Description of Artificial Sequence: Synthetic oligonucleotide
uaaucaggaccauaugcug

SEQ ID NO: 1972910 - RNA, 19 nt, Artificial Sequence
  Description of Artificial Sequence: Synthetic oligonucleotide
gucaaauauccuucugugg

SEQ ID NO: 1972911 - RNA, 19 nt, Artificial Sequence
  Description of Artificial Sequence: Synthetic oligonucleotide
auuugcuggauucgguggg

SEQ ID NO: 1972912 - RNA, 19 nt, Artificial Sequence
  Description of Artificial Sequence: Synthetic oligonucleotide
ugucacuccugcuauagcu

SEQ ID NO: 1972913 - RNA, 19 nt, Artificial Sequence
  Description of Artificial Sequence: Synthetic oligonucleotide
ugcauagucaaauauccuu

SEQ ID NO: 1972914 - RNA, 19 nt, Artificial Sequence
  Description of Artificial Sequence: Synthetic oligonucleotide
gaugguaucugcucccagc

SEQ ID NO: 1972915 - RNA, 19 nt, Artificial Sequence
  Description of Artificial Sequence: Synthetic oligonucleotide
gaaugcccacuauuggugg

SEQ ID NO: 1972916 - RNA, 19 nt, Artificial Sequence
  Description of Artificial Sequence: Synthetic oligonucleotide
gacacuguaguaccguccc

SEQ ID NO: 1972917 - RNA, 19 nt, Artificial Sequence
  Description of Artificial Sequence: Synthetic oligonucleotide
cagauagccaucagugugg

SEQ ID NO: 1972918 - RNA, 19 nt, Artificial Sequence
  Description of Artificial Sequence: Synthetic oligonucleotide
uuuaggauugaaggccugg

SEQ ID NO: 1972919 - RNA, 19 nt, Artificial Sequence
  Description of Artificial Sequence: Synthetic oligonucleotide
uauucuauggagucaggau

SEQ ID NO: 1972920 - RNA, 19 nt, Artificial Sequence
  Description of Artificial Sequence: Synthetic oligonucleotide
acuuuaggcuucacaaucc

SEQ ID NO: 1972921 - RNA, 19 nt, Artificial Sequence
  Description of Artificial Sequence: Synthetic oligonucleotide
uuaaaggagcacauuggau

SEQ ID NO: 1972922 - RNA, 19 nt, Artificial Sequence
  Description of Artificial Sequence: Synthetic oligonucleotide
cauggaggccacuuuaggc

SEQ ID NO: 1972923 - RNA, 19 nt, Artificial Sequence
  Description of Artificial Sequence: Synthetic oligonucleotide
cucauuuguuuaugcaggg

SEQ ID NO: 1972924 - RNA, 19 nt, Artificial Sequence
  Description of Artificial Sequence: Synthetic oligonucleotide
uucacaauccucauuuguu

SEQ ID NO: 1972925 - RNA, 19 nt, Artificial Sequence
  Description of Artificial Sequence: Synthetic oligonucleotide
agggcauaugcuucgauca

SEQ ID NO: 1972926 - RNA, 19 nt, Artificial Sequence
  Description of Artificial Sequence: Synthetic oligonucleotide
uucauuauaggcacugcuu

SEQ ID NO: 1972927 - RNA, 19 nt, Artificial Sequence
  Description of Artificial Sequence: Synthetic oligonucleotide
auaaucaggaccauaugcu

SEQ ID NO: 1972928 - RNA, 19 nt, Artificial Sequence
  Description of Artificial Sequence: Synthetic oligonucleotide
cauacuggcccguuugggg

SEQ ID NO: 1972929 - RNA, 19 nt, Artificial Sequence
  Description of Artificial Sequence: Synthetic oligonucleotide
cauuauaggcacugcuucc

SEQ ID NO: 1972930 - RNA, 19 nt, Artificial Sequence
  Description of Artificial Sequence: Synthetic oligonucleotide
uuucccuaggaugaccccg

SEQ ID NO: 1972931 - RNA, 19 nt, Artificial Sequence
  Description of Artificial Sequence: Synthetic oligonucleotide
uaugcagggcauaugcuuc

SEQ ID NO: 1972932 - RNA, 19 nt, Artificial Sequence
  Description of Artificial Sequence: Synthetic oligonucleotide
auggaggccacuuuaggcu

SEQ ID NO: 1972933 - RNA, 19 nt, Artificial Sequence
  Description of Artificial Sequence: Synthetic oligonucleotide
cagaggauaguguuuuccc

SEQ ID NO: 1972934 - RNA, 19 nt, Artificial Sequence
  Description of Artificial Sequence: Synthetic oligonucleotide
guuaaaggagcacauugga

SEQ ID NO: 1972935 - RNA, 19 nt, Artificial Sequence
  Description of Artificial Sequence: Synthetic oligonucleotide
auuggaucuccagcgaugg

SEQ ID NO: 1972936 - RNA, 19 nt, Artificial Sequence
  Description of Artificial Sequence: Synthetic oligonucleotide
uuuaugcagggcauaugcu

SEQ ID NO: 1972937 - RNA, 19 nt, Artificial Sequence
  Description of Artificial Sequence: Synthetic oligonucleotide
cuuccaaucgucccugagc

SEQ ID NO: 1972938 - RNA, 19 nt, Artificial Sequence
  Description of Artificial Sequence: Synthetic oligonucleotide
uguccagcaacgagcagug

SEQ ID NO: 1972939 - RNA, 19 nt, Artificial Sequence
  Description of Artificial Sequence: Synthetic oligonucleotide
ugacacuguaguaccgucc

SEQ ID NO: 1972940 - RNA, 19 nt, Artificial Sequence
  Description of Artificial Sequence: Synthetic oligonucleotide
cacuuuaggcuucacaauc

SEQ ID NO: 1972941 - RNA, 19 nt, Artificial Sequence
  Description of Artificial Sequence: Synthetic oligonucleotide
cugcuuuaggauugaaggc

SEQ ID NO: 1972942 - RNA, 19 nt, Artificial Sequence
  Description of Artificial Sequence: Synthetic oligonucleotide
ucaugaucugggaucucag

SEQ ID NO: 1972943 - RNA, 19 nt, Artificial Sequence
  Description of Artificial Sequence: Synthetic oligonucleotide
ggccaauugccacugaagg

SEQ ID NO: 1972944 - RNA, 19 nt, Artificial Sequence
  Description of Artificial Sequence: Synthetic oligonucleotide
aggauaguguuuucccuag

SEQ ID NO: 1972945 - RNA, 19 nt, Artificial Sequence
  Description of Artificial Sequence: Synthetic oligonucleotide
gucgcaaaugcugacauac

SEQ ID NO: 1972946 - RNA, 19 nt, Artificial Sequence
  Description of Artificial Sequence: Synthetic oligonucleotide
uuaugcagggcauaugcuu

SEQ ID NO: 1972947 - RNA, 19 nt, Artificial Sequence
  Description of Artificial Sequence: Synthetic oligonucleotide
gcacauuggaucuccagcg

SEQ ID NO: 1972948 - RNA, 19 nt, Artificial Sequence
  Description of Artificial Sequence: Synthetic oligonucleotide
gucaaguauguccagcaac

SEQ ID NO: 1972949 - RNA, 19 nt, Artificial Sequence
  Description of Artificial Sequence: Synthetic oligonucleotide
uaccauacuggcccguuug

SEQ ID NO: 1972950 - RNA, 19 nt, Artificial Sequence
  Description of Artificial Sequence: Synthetic oligonucleotide
uucagacacuugccgaucc

SEQ ID NO: 1972951 - RNA, 19 nt, Artificial Sequence
  Description of Artificial Sequence: Synthetic oligonucleotide
uuggcaagguuauagccuc

SEQ ID NO: 1972952 - RNA, 19 nt, Artificial Sequence
  Description of Artificial Sequence: Synthetic oligonucleotide
ucaccuucuuggcugaccu

SEQ ID NO: 1972953 - RNA, 19 nt, Artificial Sequence
  Description of Artificial Sequence: Synthetic oligonucleotide
uacuucagacacuugccga

SEQ ID NO: 1972954 - RNA, 19 nt, Artificial Sequence
  Description of Artificial Sequence: Synthetic oligonucleotide
uucccuaggaugaccccgg

SEQ ID NO: 1972955 - RNA, 19 nt, Artificial Sequence
  Description of Artificial Sequence: Synthetic oligonucleotide
uaggcacugcuucccagcg

SEQ ID NO: 1972956 - RNA, 19 nt, Artificial Sequence
  Description of Artificial Sequence: Synthetic oligonucleotide
uggccaauugccacugaag

SEQ ID NO: 1972957 - RNA, 19 nt, Artificial Sequence
  Description of Artificial Sequence: Synthetic oligonucleotide
aacucaugaucugggaucu

SEQ ID NO: 1972958 - RNA, 19 nt, Artificial Sequence
  Description of Artificial Sequence: Synthetic oligonucleotide
cucauugcggucuggccgg

SEQ ID NO: 1972959 - RNA, 19 nt, Artificial Sequence
  Description of Artificial Sequence: Synthetic oligonucleotide
ucagaguggccaauugcca

SEQ ID NO: 1972960 - RNA, 19 nt, Artificial Sequence
  Description of Artificial Sequence: Synthetic oligonucleotide
auagucaaauauccuucug

SEQ ID NO: 1972961 - RNA, 19 nt, Artificial Sequence
  Description of Artificial Sequence: Synthetic oligonucleotide
cuuggcgugauuuccagca

SEQ ID NO: 1972962 - RNA, 19 nt, Artificial Sequence
  Description of Artificial Sequence: Synthetic oligonucleotide
cucgggacuauaaauauaa

SEQ ID NO: 1972963 - RNA, 19 nt, Artificial Sequence
  Description of Artificial Sequence: Synthetic oligonucleotide
auucgguggggcucauugc

SEQ ID NO: 1972964 - RNA, 19 nt, Artificial Sequence
  Description of Artificial Sequence: Synthetic oligonucleotide
aucaguguggaaggaggcc

SEQ ID NO: 1972965 - RNA, 19 nt, Artificial Sequence
  Description of Artificial Sequence: Synthetic oligonucleotide
acgaaugcccacuauuggu

SEQ ID NO: 1972966 - RNA, 19 nt, Artificial Sequence
  Description of Artificial Sequence: Synthetic oligonucleotide
ggugucauguuaaaggagc

SEQ ID NO: 1972967 - RNA, 19 nt, Artificial Sequence
  Description of Artificial Sequence: Synthetic oligonucleotide
ccucauuuguuuaugcagg

SEQ ID NO: 1972968 - RNA, 19 nt, Artificial Sequence
  Description of Artificial Sequence: Synthetic oligonucleotide
uuuaaaugcuggauaccuu

SEQ ID NO: 1972969 - RNA, 19 nt, Artificial Sequence
  Description of Artificial Sequence: Synthetic oligonucleotide
ugccccuuggaauuuucag

SEQ ID NO: 1972970 - RNA, 19 nt, Artificial Sequence
  Description of Artificial Sequence: Synthetic oligonucleotide
aggagcacauuggaucucc

SEQ ID NO: 1972971 - RNA, 19 nt, Artificial Sequence
  Description of Artificial Sequence: Synthetic oligonucleotide
cauugacacuguaguaccg

SEQ ID NO: 1972972 - RNA, 19 nt, Artificial Sequence
  Description of Artificial Sequence: Synthetic oligonucleotide
agaguguaccauacuggcc

SEQ ID NO: 1972973 - RNA, 19 nt, Artificial Sequence
  Description of Artificial Sequence: Synthetic oligonucleotide
uauaggcacugcuucccag

SEQ ID NO: 1972974 - RNA, 19 nt, Artificial Sequence
  Description of Artificial Sequence: Synthetic oligonucleotide
uacucgggacuauaaauau

SEQ ID NO: 1972975 - RNA, 19 nt, Artificial Sequence
  Description of Artificial Sequence: Synthetic oligonucleotide
uaguugaggauuugcugga

SEQ ID NO: 1972976 - RNA, 19 nt, Artificial Sequence
  Description of Artificial Sequence: Synthetic oligonucleotide
ucgaucagagaguguacca

SEQ ID NO: 1972977 - RNA, 19 nt, Artificial Sequence
  Description of Artificial Sequence: Synthetic oligonucleotide
accuucuuggcugaccuuc

SEQ ID NO: 1972978 - RNA, 19 nt, Artificial Sequence
  Description of Artificial Sequence: Synthetic oligonucleotide
cuccuaaaaucagaguggc

SEQ ID NO: 1972979 - RNA, 19 nt, Artificial Sequence
  Description of Artificial Sequence: Synthetic oligonucleotide
uaguacacuuucacagaug

SEQ ID NO: 1972980 - RNA, 19 nt, Artificial Sequence
  Description of Artificial Sequence: Synthetic oligonucleotide
augguaucugcucccagcu

SEQ ID NO: 1972981 - RNA, 19 nt, Artificial Sequence
  Description of Artificial Sequence: Synthetic oligonucleotide
gugagggagucgcaaaugc

SEQ ID NO: 1972982 - RNA, 19 nt, Artificial Sequence
  Description of Artificial Sequence: Synthetic oligonucleotide
ugaccuucuggagauguug

SEQ ID NO: 1972983 - RNA, 19 nt, Artificial Sequence
  Description of Artificial Sequence: Synthetic oligonucleotide
gcagauagccaucagugug

SEQ ID NO: 1972984 - RNA, 19 nt, Artificial Sequence
  Description of Artificial Sequence: Synthetic oligonucleotide
aguguaccauacuggcccg

SEQ ID NO: 1972985 - RNA, 19 nt, Artificial Sequence
  Description of Artificial Sequence: Synthetic oligonucleotide
auauucuauggagucagga

SEQ ID NO: 1972986 - RNA, 19 nt, Artificial Sequence
  Description of Artificial Sequence: Synthetic oligonucleotide
ccuccuaaaaucagagugg

SEQ ID NO: 1972987 - RNA, 19 nt, Artificial Sequence
  Description of Artificial Sequence: Synthetic oligonucleotide
ugggcagucauaaccuagu

SEQ ID NO: 1972988 - RNA, 19 nt, Artificial Sequence
  Description of Artificial Sequence: Synthetic oligonucleotide
guccauauucuauggaguc

SEQ ID NO: 1972989 - RNA, 19 nt, Artificial Sequence
  Description of Artificial Sequence: Synthetic oligonucleotide
uuuaggcuucacaauccuc

SEQ ID NO: 1972990 - RNA, 19 nt, Artificial Sequence
  Description of Artificial Sequence: Synthetic oligonucleotide
cuauugguggauuccucug

SEQ ID NO: 1972991 - RNA, 19 nt, Artificial Sequence
  Description of Artificial Sequence: Synthetic oligonucleotide
uccuaaaaucagaguggcc

SEQ ID NO: 1972992 - RNA, 19 nt, Artificial Sequence
  Description of Artificial Sequence: Synthetic oligonucleotide
uaaccuaguccauauucua

SEQ ID NO: 1972993 - RNA, 19 nt, Artificial Sequence
  Description of Artificial Sequence: Synthetic oligonucleotide
aaugcccacuauuggugga

SEQ ID NO: 1972994 - RNA, 19 nt, Artificial Sequence
  Description of Artificial Sequence: Synthetic oligonucleotide
caacuagaccacaugcuuc

SEQ ID NO: 1972995 - RNA, 19 nt, Artificial Sequence
  Description of Artificial Sequence: Synthetic oligonucleotide
gucauguuaaaggagcaca

SEQ ID NO: 1972996 - RNA, 19 nt, Artificial Sequence
  Description of Artificial Sequence: Synthetic oligonucleotide
ugagggagucgcaaaugcu

SEQ ID NO: 1972997 - RNA, 19 nt, Artificial Sequence
  Description of Artificial Sequence: Synthetic oligonucleotide
uggaauuuucaggaaguaa

SEQ ID NO: 1972998 - RNA, 19 nt, Artificial Sequence
  Description of Artificial Sequence: Synthetic oligonucleotide
cauuggaucuccagcgaug

SEQ ID NO: 1972999 - RNA, 19 nt, Artificial Sequence
  Description of Artificial Sequence: Synthetic oligonucleotide
ucucccacuuccaaucguc

SEQ ID NO: 1973000 - RNA, 19 nt, Artificial Sequence
  Description of Artificial Sequence: Synthetic oligonucleotide
gaaggacauacuucagaca

SEQ ID NO: 1973001 - RNA, 19 nt, Artificial Sequence
  Description of Artificial Sequence: Synthetic oligonucleotide
ugcagauagccaucagugu

SEQ ID NO: 1973002 - RNA, 19 nt, Artificial Sequence
  Description of Artificial Sequence: Synthetic oligonucleotide
acuucagacacuugccgau

SEQ ID NO: 1973003 - RNA, 19 nt, Artificial Sequence
  Description of Artificial Sequence: Synthetic oligonucleotide
accauacuggcccguuugg

SEQ ID NO: 1973004 - RNA, 19 nt, Artificial Sequence
  Description of Artificial Sequence: Synthetic oligonucleotide
aaccacugcuuuaggauug

SEQ ID NO: 1973005 - RNA, 19 nt, Artificial Sequence
  Description of Artificial Sequence: Synthetic oligonucleotide
cuggugucauguuaaagga

SEQ ID NO: 1973006 - RNA, 19 nt, Artificial Sequence
  Description of Artificial Sequence: Synthetic oligonucleotide
acaauccucauuuguuuau

SEQ ID NO: 1973007 - RNA, 19 nt, Artificial Sequence
  Description of Artificial Sequence: Synthetic oligonucleotide
gguauacuuccuuuaguac

SEQ ID NO: 1973008 - RNA, 19 nt, Artificial Sequence
  Description of Artificial Sequence: Synthetic oligonucleotide
auguccagcaacgagcagu

SEQ ID NO: 1973009 - RNA, 19 nt, Artificial Sequence
  Description of Artificial Sequence: Synthetic oligonucleotide
auacuggcccguuugggga

SEQ ID NO: 1973010 - RNA, 19 nt, Artificial Sequence
  Description of Artificial Sequence: Synthetic oligonucleotide
caugucacuccugcuauag

SEQ ID NO: 1973011 - RNA, 19 nt, Artificial Sequence
  Description of Artificial Sequence: Synthetic oligonucleotide
agaugugauaguacuucuc

SEQ ID NO: 1973012 - RNA, 19 nt, Artificial Sequence
  Description of Artificial Sequence: Synthetic oligonucleotide
uuugcuggauucggugggg

SEQ ID NO: 1973013 - RNA, 19 nt, Artificial Sequence
  Description of Artificial Sequence: Synthetic oligonucleotide
agcaacgagcaguguuggc

SEQ ID NO: 1973014 - RNA, 19 nt, Artificial Sequence
  Description of Artificial Sequence: Synthetic oligonucleotide
aacgagcaguguuggcaag

SEQ ID NO: 1973015 - RNA, 19 nt, Artificial Sequence
  Description of Artificial Sequence: Synthetic oligonucleotide
agaguggccaauugccacu

SEQ ID NO: 1973016 - RNA, 19 nt, Artificial Sequence
  Description of Artificial Sequence: Synthetic oligonucleotide
ucuucauuauaggcacugc

SEQ ID NO: 1973017 - RNA, 19 nt, Artificial Sequence
  Description of Artificial Sequence: Synthetic oligonucleotide
uuuucccuaggaugacccc

SEQ ID NO: 1973018 - RNA, 19 nt, Artificial Sequence
  Description of Artificial Sequence: Synthetic oligonucleotide
gucuucauuauaggcacug

SEQ ID NO: 1973019 - RNA, 19 nt, Artificial Sequence
  Description of Artificial Sequence: Synthetic oligonucleotide
cugggcagucauaaccuag

SEQ ID NO: 1973020 - RNA, 19 nt, Artificial Sequence
  Description of Artificial Sequence: Synthetic oligonucleotide
caacacacugucuucauua

SEQ ID NO: 1973021 - RNA, 19 nt, Artificial Sequence
  Description of Artificial Sequence: Synthetic oligonucleotide
uggcgugauuuccagcaca

SEQ ID NO: 1973022 - RNA, 19 nt, Artificial Sequence
  Description of Artificial Sequence: Synthetic oligonucleotide
uccagcgaugguaucugcu

SEQ ID NO: 1973023 - RNA, 19 nt, Artificial Sequence
  Description of Artificial Sequence: Synthetic oligonucleotide
ccuaaaaucagaguggcca

SEQ ID NO: 1973024 - RNA, 19 nt, Artificial Sequence
  Description of Artificial Sequence: Synthetic oligonucleotide
uguuuucccuaggaugacc

SEQ ID NO: 1973025 - RNA, 19 nt, Artificial Sequence
  Description of Artificial Sequence: Synthetic oligonucleotide
ugucauguuaaaggagcac

SEQ ID NO: 1973026 - RNA, 19 nt, Artificial Sequence
  Description of Artificial Sequence: Synthetic oligonucleotide
uugccgauccccacuggug

SEQ ID NO: 1973027 - RNA, 19 nt, Artificial Sequence
  Description of Artificial Sequence: Synthetic oligonucleotide
cagaguggccaauugccac

SEQ ID NO: 1973028 - RNA, 19 nt, Artificial Sequence
  Description of Artificial Sequence: Synthetic oligonucleotide
guaccgucccuuuccaggc

SEQ ID NO: 1973029 - RNA, 19 nt, Artificial Sequence
  Description of Artificial Sequence: Synthetic oligonucleotide
acuuggugccccuuggaau

SEQ ID NO: 1973030 - RNA, 19 nt, Artificial Sequence
  Description of Artificial Sequence: Synthetic oligonucleotide
gaggauaguguuuucccua

SEQ ID NO: 1973031 - RNA, 19 nt, Artificial Sequence
  Description of Artificial Sequence: Synthetic oligonucleotide
ggauuugcuggauucggug

SEQ ID NO: 1973032 - RNA, 19 nt, Artificial Sequence
  Description of Artificial Sequence: Synthetic oligonucleotide
auugcggucuggccggcag

SEQ ID NO: 1973033 - RNA, 19 nt, Artificial Sequence
  Description of Artificial Sequence: Synthetic oligonucleotide
acauacucgggacuauaaa

SEQ ID NO: 1973034 - RNA, 19 nt, Artificial Sequence
  Description of Artificial Sequence: Synthetic oligonucleotide
ccuaguccauauucuaugg

SEQ ID NO: 1973035 - RNA, 19 nt, Artificial Sequence
  Description of Artificial Sequence: Synthetic oligonucleotide
auugacacuguaguaccgu

SEQ ID NO: 1973036 - RNA, 19 nt, Artificial Sequence
  Description of Artificial Sequence: Synthetic oligonucleotide
aguccauauucuauggagu

SEQ ID NO: 1973037 - RNA, 19 nt, Artificial Sequence
  Description of Artificial Sequence: Synthetic oligonucleotide
aggccaacaucagacaugu

SEQ ID NO: 1973038 - RNA, 19 nt, Artificial Sequence
  Description of Artificial Sequence: Synthetic oligonucleotide
uccuguaugccauccugaa

SEQ ID NO: 1973039 - RNA, 19 nt, Artificial Sequence
  Description of Artificial Sequence: Synthetic oligonucleotide
ucagauucccuuugaugua

SEQ ID NO: 1973040 - RNA, 19 nt, Artificial Sequence
  Description of Artificial Sequence: Synthetic oligonucleotide
uguuuaugcagggcauaug

SEQ ID NO: 1973041 - RNA, 19 nt, Artificial Sequence
  Description of Artificial Sequence: Synthetic oligonucleotide
ccagcacauaaucaggacc

SEQ ID NO: 1973042 - RNA, 19 nt, Artificial Sequence
  Description of Artificial Sequence: Synthetic oligonucleotide
ggcagucauaaccuagucc

SEQ ID NO: 1973043 - RNA, 19 nt, Artificial Sequence
  Description of Artificial Sequence: Synthetic oligonucleotide
cacauaaucaggaccauau

SEQ ID NO: 1973044 - RNA, 19 nt, Artificial Sequence
  Description of Artificial Sequence: Synthetic oligonucleotide
cuuuaaaugcuggauaccu

SEQ ID NO: 1973045 - RNA, 19 nt, Artificial Sequence
  Description of Artificial Sequence: Synthetic oligonucleotide
uugacacuguaguaccguc

SEQ ID NO: 1973046 - RNA, 19 nt, Artificial Sequence
  Description of Artificial Sequence: Synthetic oligonucleotide
uggaucuccagcgauggua

SEQ ID NO: 1973047 - RNA, 19 nt, Artificial Sequence
  Description of Artificial Sequence: Synthetic oligonucleotide
augugauaguacuucucau

SEQ ID NO: 1973048 - RNA, 19 nt, Artificial Sequence
  Description of Artificial Sequence: Synthetic oligonucleotide
ccaauugccacugaaggac

SEQ ID NO: 1973049 - RNA, 19 nt, Artificial Sequence
  Description of Artificial Sequence: Synthetic oligonucleotide
gccccuuggaauuuucagg

SEQ ID NO: 1973050 - RNA, 19 nt, Artificial Sequence
  Description of Artificial Sequence: Synthetic oligonucleotide
auguaguugaggauuugcu

SEQ ID NO: 1973051 - RNA, 19 nt, Artificial Sequence
  Description of Artificial Sequence: Synthetic oligonucleotide
cagggcauaugcuucgauc

SEQ ID NO: 1973052 - RNA, 19 nt, Artificial Sequence
  Description of Artificial Sequence: Synthetic oligonucleotide
cagauucccuuugauguag

SEQ ID NO: 1973053 - RNA, 19 nt, Artificial Sequence
  Description of Artificial Sequence: Synthetic oligonucleotide
cugaaugggcacauugaca

SEQ ID NO: 1973054 - RNA, 19 nt, Artificial Sequence
  Description of Artificial Sequence: Synthetic oligonucleotide
aaccuaguccauauucuau

SEQ ID NO: 1973055 - RNA, 19 nt, Artificial Sequence
  Description of Artificial Sequence: Synthetic oligonucleotide
caucucccacuuccaaucg

SEQ ID NO: 1973056 - RNA, 19 nt, Artificial Sequence
  Description of Artificial Sequence: Synthetic oligonucleotide
auauccuucuguggcuggg

SEQ ID NO: 1973057 - RNA, 19 nt, Artificial Sequence
  Description of Artificial Sequence: Synthetic oligonucleotide
agcaguguuggcaagguua

SEQ ID NO: 1973058 - RNA, 19 nt, Artificial Sequence
  Description of Artificial Sequence: Synthetic oligonucleotide
uuguuuaugcagggcauau

SEQ ID NO: 1973059 - RNA, 19 nt, Artificial Sequence
  Description of Artificial Sequence: Synthetic oligonucleotide
aggaugguccucaucaccu

SEQ ID NO: 1973060 - RNA, 19 nt, Artificial Sequence
  Description of Artificial Sequence: Synthetic oligonucleotide
agcuuggcgugauuuccag

SEQ ID NO: 1973061 - RNA, 19 nt, Artificial Sequence
  Description of Artificial Sequence: Synthetic oligonucleotide
ucaacacacugucuucauu

SEQ ID NO: 1973062 - RNA, 19 nt, Artificial Sequence
  Description of Artificial Sequence: Synthetic oligonucleotide
guugcagauagccaucagu

SEQ ID NO: 1973063 - RNA, 19 nt, Artificial Sequence
  Description of Artificial Sequence: Synthetic oligonucleotide
aaucgucccugagccaaag

SEQ ID NO: 1973064 - RNA, 19 nt, Artificial Sequence
  Description of Artificial Sequence: Synthetic oligonucleotide
auacucgggacuauaaaua

SEQ ID NO: 1973065 - RNA, 19 nt, Artificial Sequence
  Description of Artificial Sequence: Synthetic oligonucleotide
cuuuaggauugaaggccug

SEQ ID NO: 1973066 - RNA, 19 nt, Artificial Sequence
  Description of Artificial Sequence: Synthetic oligonucleotide
ucgcaaaugcugacauacu

SEQ ID NO: 1973067 - RNA, 19 nt, Artificial Sequence
  Description of Artificial Sequence: Synthetic oligonucleotide
cgggacuauaaauauaaac

SEQ ID NO: 1973068 - RNA, 19 nt, Artificial Sequence
  Description of Artificial Sequence: Synthetic oligonucleotide
aggaccauaugcugugaaa

SEQ ID NO: 1973069 - RNA, 19 nt, Artificial Sequence
  Description of Artificial Sequence: Synthetic oligonucleotide
cucccacuuccaaucgucc

SEQ ID NO: 1973070 - RNA, 19 nt, Artificial Sequence
  Description of Artificial Sequence: Synthetic oligonucleotide
gaucucagaggauaguguu

SEQ ID NO: 1973071 - RNA, 19 nt, Artificial Sequence
  Description of Artificial Sequence: Synthetic oligonucleotide
gacacuugccgauccccac

SEQ ID NO: 1973072 - RNA, 19 nt, Artificial Sequence
  Description of Artificial Sequence: Synthetic oligonucleotide
cauacucgggacuauaaau

SEQ ID NO: 1973073 - RNA, 19 nt, Artificial Sequence
  Description of Artificial Sequence: Synthetic oligonucleotide
acgagcaguguuggcaagg

SEQ ID NO: 1973074 - RNA, 19 nt, Artificial Sequence
  Description of Artificial Sequence: Synthetic oligonucleotide
uugcaucaacacacugucu

SEQ ID NO: 1973075 - RNA, 19 nt, Artificial Sequence
  Description of Artificial Sequence: Synthetic oligonucleotide
ucuggccggcagcuuggcg

SEQ ID NO: 1973076 - RNA, 19 nt, Artificial Sequence
  Description of Artificial Sequence: Synthetic oligonucleotide
augcuucgaucagagagug

SEQ ID NO: 1973077 - RNA, 19 nt, Artificial Sequence
  Description of Artificial Sequence: Synthetic oligonucleotide
ucauaaccuaguccauauu

SEQ ID NO: 1973078 - RNA, 19 nt, Artificial Sequence
  Description of Artificial Sequence: Synthetic oligonucleotide
ucgggacuauaaauauaaa

SEQ ID NO: 1973079 - RNA, 19 nt, Artificial Sequence
  Description of Artificial Sequence: Synthetic oligonucleotide
acacuugccgauccccacu

SEQ ID NO: 1973080 - RNA, 19 nt, Artificial Sequence
  Description of Artificial Sequence: Synthetic oligonucleotide
cagacacuugccgaucccc

SEQ ID NO: 1973081 - RNA, 19 nt, Artificial Sequence
  Description of Artificial Sequence: Synthetic oligonucleotide
gcauagucaaauauccuuc

SEQ ID NO: 1973082 - RNA, 19 nt, Artificial Sequence
  Description of Artificial Sequence: Synthetic oligonucleotide
uccccugcagucacaaauu

SEQ ID NO: 1973083 - RNA, 19 nt, Artificial Sequence
  Description of Artificial Sequence: Synthetic oligonucleotide
uuggcgugauuuccagcac

SEQ ID NO: 1973084 - RNA, 19 nt, Artificial Sequence
  Description of Artificial Sequence: Synthetic oligonucleotide
aggaugaccccggucaagu

SEQ ID NO: 1973085 - RNA, 19 nt, Artificial Sequence
  Description of Artificial Sequence: Synthetic oligonucleotide
cuucauuauaggcacugcu

SEQ ID NO: 1973086 - RNA, 19 nt, Artificial Sequence
  Description of Artificial Sequence: Synthetic oligonucleotide
ccagcaacgagcaguguug

SEQ ID NO: 1973087 - RNA, 19 nt, Artificial Sequence
  Description of Artificial Sequence: Synthetic oligonucleotide
uaguaccgucccuuuccag

SEQ ID NO: 1973088 - RNA, 19 nt, Artificial Sequence
  Description of Artificial Sequence: Synthetic oligonucleotide
ggauaccuugcucuucccc

SEQ ID NO: 1973089 - RNA, 19 nt, Artificial Sequence
  Description of Artificial Sequence: Synthetic oligonucleotide
cauagucaaauauccuucu

SEQ ID NO: 1973090 - RNA, 19 nt, Artificial Sequence
  Description of Artificial Sequence: Synthetic oligonucleotide
augaccccggucaaguaug

SEQ ID NO: 1973091 - RNA, 19 nt, Artificial Sequence
  Description of Artificial Sequence: Synthetic oligonucleotide
cacuauugguggauuccuc

SEQ ID NO: 1973092 - RNA, 19 nt, Artificial Sequence
  Description of Artificial Sequence: Synthetic oligonucleotide
guaacgaaugcccacuauu

SEQ ID NO: 1973093 - RNA, 19 nt, Artificial Sequence
  Description of Artificial Sequence: Synthetic oligonucleotide
gucauaaccuaguccauau

SEQ ID NO: 1973094 - RNA, 19 nt, Artificial Sequence
  Description of Artificial Sequence: Synthetic oligonucleotide
caugaucugggaucucaga

SEQ ID NO: 1973095 - RNA, 19 nt, Artificial Sequence
  Description of Artificial Sequence: Synthetic oligonucleotide
uggcaagguuauagccucc

SEQ ID NO: 1973096 - RNA, 19 nt, Artificial Sequence
  Description of Artificial Sequence: Synthetic oligonucleotide
aauugccacugaaggacau

SEQ ID NO: 1973097 - RNA, 19 nt, Artificial Sequence
  Description of Artificial Sequence: Synthetic oligonucleotide
guaugccauccugaauggg

SEQ ID NO: 1973098 - RNA, 19 nt, Artificial Sequence
  Description of Artificial Sequence: Synthetic oligonucleotide
uggauaccuugcucuuccc

SEQ ID NO: 1973099 - RNA, 19 nt, Artificial Sequence
  Description of Artificial Sequence: Synthetic oligonucleotide
caauugccacugaaggaca

SEQ ID NO: 1973100 - RNA, 19 nt, Artificial Sequence
  Description of Artificial Sequence: Synthetic oligonucleotide
uaggaugaccccggucaag

SEQ ID NO: 1973101 - RNA, 19 nt, Artificial Sequence
  Description of Artificial Sequence: Synthetic oligonucleotide
gacauacucgggacuauaa

SEQ ID NO: 1973102 - RNA, 19 nt, Artificial Sequence
  Description of Artificial Sequence: Synthetic oligonucleotide
agucauaaccuaguccaua

SEQ ID NO: 1973103 - RNA, 19 nt, Artificial Sequence
  Description of Artificial Sequence: Synthetic oligonucleotide
acuugccgauccccacugg

SEQ ID NO: 1973104 - RNA, 19 nt, Artificial Sequence
  Description of Artificial Sequence: Synthetic oligonucleotide
gaugaccccggucaaguau

SEQ ID NO: 1973105 - RNA, 19 nt, Artificial Sequence
  Description of Artificial Sequence: Synthetic oligonucleotide
aucucccacuuccaaucgu

SEQ ID NO: 1973106 - RNA, 19 nt, Artificial Sequence
  Description of Artificial Sequence: Synthetic oligonucleotide
guuauagccuccuccuccu

SEQ ID NO: 1973107 - RNA, 19 nt, Artificial Sequence
  Description of Artificial Sequence: Synthetic oligonucleotide
cagcaacgagcaguguugg

SEQ ID NO: 1973108 - RNA, 19 nt, Artificial Sequence
  Description of Artificial Sequence: Synthetic oligonucleotide
cuagaccacaugcuucaga

SEQ ID NO: 1973109 - RNA, 19 nt, Artificial Sequence
  Description of Artificial Sequence: Synthetic oligonucleotide
uaccgucccuuuccaggcc

SEQ ID NO: 1973110 - RNA, 19 nt, Artificial Sequence
  Description of Artificial Sequence: Synthetic oligonucleotide
gguaucugcucccagcugu

SEQ ID NO: 1973111 - RNA, 19 nt, Artificial Sequence
  Description of Artificial Sequence: Synthetic oligonucleotide
caacgagcaguguuggcaa

SEQ ID NO: 1973112 - RNA, 19 nt, Artificial Sequence
  Description of Artificial Sequence: Synthetic oligonucleotide
gagucgcaaaugcugacau

SEQ ID NO: 1973113 - RNA, 19 nt, Artificial Sequence
  Description of Artificial Sequence: Synthetic oligonucleotide
ugacauacucgggacuaua

SEQ ID NO: 1973114 - RNA, 19 nt, Artificial Sequence
  Description of Artificial Sequence: Synthetic oligonucleotide
gcaacgagcaguguuggca

SEQ ID NO: 1973115 - RNA, 19 nt, Artificial Sequence
  Description of Artificial Sequence: Synthetic oligonucleotide
ggauuccucuggcaucucc

SEQ ID NO: 1973116 - RNA, 19 nt, Artificial Sequence
  Description of Artificial Sequence: Synthetic oligonucleotide
acuggcccguuuggggacc

SEQ ID NO: 1973117 - RNA, 19 nt, Artificial Sequence
  Description of Artificial Sequence: Synthetic oligonucleotide
ccacaaacugcuugcauca

SEQ ID NO: 1973118 - RNA, 19 nt, Artificial Sequence
  Description of Artificial Sequence: Synthetic oligonucleotide
gggcauaugcuucgaucag

SEQ ID NO: 1973119 - RNA, 19 nt, Artificial Sequence
  Description of Artificial Sequence: Synthetic oligonucleotide
acacuuucacagaugugau

SEQ ID NO: 1973120 - RNA, 19 nt, Artificial Sequence
  Description of Artificial Sequence: Synthetic oligonucleotide
gugucauguuaaaggagca

SEQ ID NO: 1973121 - RNA, 19 nt, Artificial Sequence
  Description of Artificial Sequence: Synthetic oligonucleotide
ggcuucacaauccucauuu

SEQ ID NO: 1973122 - RNA, 19 nt, Artificial Sequence
  Description of Artificial Sequence: Synthetic oligonucleotide
cuguaaaaccacugcuuua

SEQ ID NO: 1973123 - RNA, 19 nt, Artificial Sequence
  Description of Artificial Sequence: Synthetic oligonucleotide
auccuguaugccauccuga

SEQ ID NO: 1973124 - RNA, 19 nt, Artificial Sequence
  Description of Artificial Sequence: Synthetic oligonucleotide
aggauuugcuggauucggu

SEQ ID NO: 1973125 - RNA, 19 nt, Artificial Sequence
  Description of Artificial Sequence: Synthetic oligonucleotide
cuauggagucaggaugguc

SEQ ID NO: 1973126 - RNA, 19 nt, Artificial Sequence
  Description of Artificial Sequence: Synthetic oligonucleotide
guacacuuucacagaugug

SEQ ID NO: 1973127 - RNA, 19 nt, Artificial Sequence
  Description of Artificial Sequence: Synthetic oligonucleotide
gaccuuggugagggagucg

SEQ ID NO: 1973128 - RNA, 19 nt, Artificial Sequence
  Description of Artificial Sequence: Synthetic oligonucleotide
ccccuuggaauuuucagga

SEQ ID NO: 1973129 - RNA, 19 nt, Artificial Sequence
  Description of Artificial Sequence: Synthetic oligonucleotide
cuucagacacuugccgauc

SEQ ID NO: 1973130 - RNA, 19 nt, Artificial Sequence
  Description of Artificial Sequence: Synthetic oligonucleotide
cauaugcuucgaucagaga

SEQ ID NO: 1973131 - RNA, 19 nt, Artificial Sequence
  Description of Artificial Sequence: Synthetic oligonucleotide
aauuuccccugcagucaca

SEQ ID NO: 1973132 - RNA, 19 nt, Artificial Sequence
  Description of Artificial Sequence: Synthetic oligonucleotide
caucagacaugucacuccu

SEQ ID NO: 1973133 - RNA, 19 nt, Artificial Sequence
  Description of Artificial Sequence: Synthetic oligonucleotide
ggauugaaggccugguaua

SEQ ID NO: 1973134 - RNA, 19 nt, Artificial Sequence
  Description of Artificial Sequence: Synthetic oligonucleotide
aggacauacuucagacacu

SEQ ID NO: 1973135 - RNA, 19 nt, Artificial Sequence
  Description of Artificial Sequence: Synthetic oligonucleotide
cuccagcgaugguaucugc

SEQ ID NO: 1973136 - RNA, 19 nt, Artificial Sequence
  Description of Artificial Sequence: Synthetic oligonucleotide
agacacuugccgaucccca

SEQ ID NO: 1973137 - RNA, 19 nt, Artificial Sequence
  Description of Artificial Sequence: Synthetic oligonucleotide
guggccaauugccacugaa

SEQ ID NO: 1973138 - RNA, 19 nt, Artificial Sequence
  Description of Artificial Sequence: Synthetic oligonucleotide
cuuuaggcuucacaauccu

SEQ ID NO: 1973139 - RNA, 19 nt, Artificial Sequence
  Description of Artificial Sequence: Synthetic oligonucleotide
ccagcgaugguaucugcuc

SEQ ID NO: 1973140 - RNA, 19 nt, Artificial Sequence
  Description of Artificial Sequence: Synthetic oligonucleotide
uccuccauggaggccacuu

SEQ ID NO: 1973141 - RNA, 19 nt, Artificial Sequence
  Description of Artificial Sequence: Synthetic oligonucleotide
gcuucacaauccucauuug

SEQ ID NO: 1973142 - RNA, 19 nt, Artificial Sequence
  Description of Artificial Sequence: Synthetic oligonucleotide
ggcucauugcggucuggcc

SEQ ID NO: 1973143 - RNA, 19 nt, Artificial Sequence
  Description of Artificial Sequence: Synthetic oligonucleotide
ugcggucuggccggcagcu

SEQ ID NO: 1973144 - RNA, 19 nt, Artificial Sequence
  Description of Artificial Sequence: Synthetic oligonucleotide
cagaugugauaguacuucu

SEQ ID NO: 1973145 - RNA, 19 nt, Artificial Sequence
  Description of Artificial Sequence: Synthetic oligonucleotide
cuuggugccccuuggaauu

SEQ ID NO: 1973146 - RNA, 19 nt, Artificial Sequence
  Description of Artificial Sequence: Synthetic oligonucleotide
agucgcaaaugcugacaua

SEQ ID NO: 1973147 - RNA, 19 nt, Artificial Sequence
  Description of Artificial Sequence: Synthetic oligonucleotide
agaccacaugcuucagauu

SEQ ID NO: 1973148 - RNA, 19 nt, Artificial Sequence
  Description of Artificial Sequence: Synthetic oligonucleotide
aucgucccugagccaaagu

SEQ ID NO: 1973149 - RNA, 19 nt, Artificial Sequence
  Description of Artificial Sequence: Synthetic oligonucleotide
auacuuccuuuaguacacu

SEQ ID NO: 1973150 - RNA, 19 nt, Artificial Sequence
  Description of Artificial Sequence: Synthetic oligonucleotide
caaguauguccagcaacga

SEQ ID NO: 1973151 - RNA, 19 nt, Artificial Sequence
  Description of Artificial Sequence: Synthetic oligonucleotide
aucucagaggauaguguuu

SEQ ID NO: 1973152 - RNA, 19 nt, Artificial Sequence
  Description of Artificial Sequence: Synthetic oligonucleotide
gccaucaguguggaaggag

SEQ ID NO: 1973153 - RNA, 19 nt, Artificial Sequence
  Description of Artificial Sequence: Synthetic oligonucleotide
cuccauggaggccacuuua

SEQ ID NO: 1973154 - RNA, 19 nt, Artificial Sequence
  Description of Artificial Sequence: Synthetic oligonucleotide
ccuccucaccccaggaggc

SEQ ID NO: 1973155 - RNA, 19 nt, Artificial Sequence
  Description of Artificial Sequence: Synthetic oligonucleotide
acaugucacuccugcuaua

SEQ ID NO: 1973156 - RNA, 19 nt, Artificial Sequence
  Description of Artificial Sequence: Synthetic oligonucleotide
cagcuuggcgugauuucca

SEQ ID NO: 1973157 - RNA, 19 nt, Artificial Sequence
  Description of Artificial Sequence: Synthetic oligonucleotide
acucaugaucugggaucuc

SEQ ID NO: 1973158 - RNA, 19 nt, Artificial Sequence
  Description of Artificial Sequence: Synthetic oligonucleotide
cacuuucacagaugugaua

SEQ ID NO: 1973159 - RNA, 19 nt, Artificial Sequence
  Description of Artificial Sequence: Synthetic oligonucleotide
ggccacuuuaggcuucaca

SEQ ID NO: 1973160 - RNA, 19 nt, Artificial Sequence
  Description of Artificial Sequence: Synthetic oligonucleotide
ucccuaggaugaccccggu

SEQ ID NO: 1973161 - RNA, 19 nt, Artificial Sequence
  Description of Artificial Sequence: Synthetic oligonucleotide
ggcauaugcuucgaucaga

SEQ ID NO: 1973162 - RNA, 19 nt, Artificial Sequence
  Description of Artificial Sequence: Synthetic oligonucleotide
agauucccuuugauguagu

SEQ ID NO: 1973163 - RNA, 19 nt, Artificial Sequence
  Description of Artificial Sequence: Synthetic oligonucleotide
ggagucgcaaaugcugaca

SEQ ID NO: 1973164 - RNA, 19 nt, Artificial Sequence
  Description of Artificial Sequence: Synthetic oligonucleotide
guguuuucccuaggaugac

SEQ ID NO: 1973165 - RNA, 19 nt, Artificial Sequence
  Description of Artificial Sequence: Synthetic oligonucleotide
acucgggacuauaaauaua

SEQ ID NO: 1973166 - RNA, 19 nt, Artificial Sequence
  Description of Artificial Sequence: Synthetic oligonucleotide
auugccacugaaggacaua

SEQ ID NO: 1973167 - RNA, 19 nt, Artificial Sequence
  Description of Artificial Sequence: Synthetic oligonucleotide
ggucaaguauguccagcaa

SEQ ID NO: 1973168 - RNA, 19 nt, Artificial Sequence
  Description of Artificial Sequence: Synthetic oligonucleotide
accacugcuuuaggauuga

SEQ ID NO: 1973169 - RNA, 19 nt, Artificial Sequence
  Description of Artificial Sequence: Synthetic oligonucleotide
gcuuggcgugauuuccagc

SEQ ID NO: 1973170 - RNA, 19 nt, Artificial Sequence
  Description of Artificial Sequence: Synthetic oligonucleotide
gucccuuuccaggccaaca

SEQ ID NO: 1973171 - RNA, 19 nt, Artificial Sequence
  Description of Artificial Sequence: Synthetic oligonucleotide
ccauacuggcccguuuggg

SEQ ID NO: 1973172 - RNA, 19 nt, Artificial Sequence
  Description of Artificial Sequence: Synthetic oligonucleotide
cuuucacagaugugauagu

SEQ ID NO: 1973173 - RNA, 19 nt, Artificial Sequence
  Description of Artificial Sequence: Synthetic oligonucleotide
cuccucaccccaggaggcc

SEQ ID NO: 1973174 - RNA, 19 nt, Artificial Sequence
  Description of Artificial Sequence: Synthetic oligonucleotide
augcccacuauugguggau

SEQ ID NO: 1973175 - RNA, 19 nt, Artificial Sequence
  Description of Artificial Sequence: Synthetic oligonucleotide
gggagucgcaaaugcugac

SEQ ID NO: 1973176 - RNA, 19 nt, Artificial Sequence
  Description of Artificial Sequence: Synthetic oligonucleotide
cuugccgauccccacuggu

SEQ ID NO: 1973177 - RNA, 19 nt, Artificial Sequence
  Description of Artificial Sequence: Synthetic oligonucleotide
cccacuggugucauguuaa

SEQ ID NO: 1973178 - RNA, 19 nt, Artificial Sequence
  Description of Artificial Sequence: Synthetic oligonucleotide
ggacauacuucagacacuu

SEQ ID NO: 1973179 - RNA, 19 nt, Artificial Sequence
  Description of Artificial Sequence: Synthetic oligonucleotide
cugcuauagcugcugcaua

SEQ ID NO: 1973180 - RNA, 19 nt, Artificial Sequence
  Description of Artificial Sequence: Synthetic oligonucleotide
ggaucucagaggauagugu

SEQ ID NO: 1973181 - RNA, 19 nt, Artificial Sequence
  Description of Artificial Sequence: Synthetic oligonucleotide
ccggucaaguauguccagc

SEQ ID NO: 1973182 - RNA, 19 nt, Artificial Sequence
  Description of Artificial Sequence: Synthetic oligonucleotide
cuccuccuaaaaucagagu

SEQ ID NO: 1973183 - RNA, 19 nt, Artificial Sequence
  Description of Artificial Sequence: Synthetic oligonucleotide
gcuuuaggauugaaggccu

SEQ ID NO: 1973184 - RNA, 19 nt, Artificial Sequence
  Description of Artificial Sequence: Synthetic oligonucleotide
ccaaucgucccugagccaa

SEQ ID NO: 1973185 - RNA, 19 nt, Artificial Sequence
  Description of Artificial Sequence: Synthetic oligonucleotide
gccugguauacuuccuuua

SEQ ID NO: 1973186 - RNA, 19 nt, Artificial Sequence
  Description of Artificial Sequence: Synthetic oligonucleotide
caaucgucccugagccaaa

SEQ ID NO: 1973187 - RNA, 19 nt, Artificial Sequence
  Description of Artificial Sequence: Synthetic oligonucleotide
cauguuaaaggagcacauu

SEQ ID NO: 1973188 - RNA, 19 nt, Artificial Sequence
  Description of Artificial Sequence: Synthetic oligonucleotide
gcccacuauugguggauuc

SEQ ID NO: 1973189 - RNA, 19 nt, Artificial Sequence
  Description of Artificial Sequence: Synthetic oligonucleotide
gugccccuuggaauuuuca

SEQ ID NO: 1973190 - RNA, 19 nt, Artificial Sequence
  Description of Artificial Sequence: Synthetic oligonucleotide
gguaacgaaugcccacuau

SEQ ID NO: 1973191 - RNA, 19 nt, Artificial Sequence
  Description of Artificial Sequence: Synthetic oligonucleotide
gcuggauaccuugcucuuc

SEQ ID NO: 1973192 - RNA, 19 nt, Artificial Sequence
  Description of Artificial Sequence: Synthetic oligonucleotide
gguggggcucauugcgguc

SEQ ID NO: 1973193 - RNA, 19 nt, Artificial Sequence
  Description of Artificial Sequence: Synthetic oligonucleotide
guggggcucauugcggucu

SEQ ID NO: 1973194 - RNA, 19 nt, Artificial Sequence
  Description of Artificial Sequence: Synthetic oligonucleotide
aggccacuuuaggcuucac

SEQ ID NO: 1973195 - RNA, 19 nt, Artificial Sequence
  Description of Artificial Sequence: Synthetic oligonucleotide
ggaucuccagcgaugguau

SEQ ID NO: 1973196 - RNA, 19 nt, Artificial Sequence
  Description of Artificial Sequence: Synthetic oligonucleotide
ggcccguuuggggaccuug

SEQ ID NO: 1973197 - RNA, 19 nt, Artificial Sequence
  Description of Artificial Sequence: Synthetic oligonucleotide
cagucauaaccuaguccau

SEQ ID NO: 1973198 - RNA, 19 nt, Artificial Sequence
  Description of Artificial Sequence: Synthetic oligonucleotide
gaccccggucaaguauguc

SEQ ID NO: 1973199 - RNA, 19 nt, Artificial Sequence
  Description of Artificial Sequence: Synthetic oligonucleotide
gggguaacgaaugcccacu

SEQ ID NO: 1973200 - RNA, 19 nt, Artificial Sequence
  Description of Artificial Sequence: Synthetic oligonucleotide
gcugaccuucuggagaugu

SEQ ID NO: 1973201 - RNA, 19 nt, Artificial Sequence
  Description of Artificial Sequence: Synthetic oligonucleotide
ggguaacgaaugcccacua

SEQ ID NO: 1973202 - RNA, 19 nt, Artificial Sequence
  Description of Artificial Sequence: Synthetic oligonucleotide
cacuguaguaccgucccuu

SEQ ID NO: 1973203 - RNA, 19 nt, Artificial Sequence
  Description of Artificial Sequence: Synthetic oligonucleotide
cccggucaaguauguccag

SEQ ID NO: 1973204 - RNA, 19 nt, Artificial Sequence
  Description of Artificial Sequence: Synthetic oligonucleotide
ccucaccccaggaggccag

SEQ ID NO: 1973205 - RNA, 19 nt, Artificial Sequence
  Description of Artificial Sequence: Synthetic oligonucleotide
gcacauaaucaggaccaua

SEQ ID NO: 1973206 - RNA, 19 nt, Artificial Sequence
  Description of Artificial Sequence: Synthetic oligonucleotide
gagcaguguuggcaagguu

SEQ ID NO: 1973207 - RNA, 19 nt, Artificial Sequence
  Description of Artificial Sequence: Synthetic oligonucleotide
gcaguguuggcaagguuau

SEQ ID NO: 1973208 - RNA, 19 nt, Artificial Sequence
  Description of Artificial Sequence: Synthetic oligonucleotide
ggcaagguuauagccuccu

SEQ ID NO: 1973209 - RNA, 19 nt, Artificial Sequence
  Description of Artificial Sequence: Synthetic oligonucleotide
cgaugguaucugcucccag

SEQ ID NO: 1973210 - RNA, 19 nt, Artificial Sequence
  Description of Artificial Sequence: Synthetic oligonucleotide
gccgauccccacugguguc

SEQ ID NO: 1973211 - RNA, 19 nt, Artificial Sequence
  Description of Artificial Sequence: Synthetic oligonucleotide
ggugccccuuggaauuuuc

SEQ ID NO: 1973212 - RNA, 19 nt, Artificial Sequence
  Description of Artificial Sequence: Synthetic oligonucleotide
gcuauagcugcugcauagu

SEQ ID NO: 1973213 - RNA, 19 nt, Artificial Sequence
  Description of Artificial Sequence: Synthetic oligonucleotide
ggagcacauuggaucucca

SEQ ID NO: 1973214 - RNA, 19 nt, Artificial Sequence
  Description of Artificial Sequence: Synthetic oligonucleotide
gcgaugguaucugcuccca

SEQ ID NO: 1973215 - RNA, 19 nt, Artificial Sequence
  Description of Artificial Sequence: Synthetic oligonucleotide
ggggcucauugcggucugg

SEQ ID NO: 1973216 - RNA, 19 nt, Artificial Sequence
  Description of Artificial Sequence: Synthetic oligonucleotide
ggcgugauuuccagcacau

SEQ ID NO: 1973217 - RNA, 19 nt, Artificial Sequence
  Description of Artificial Sequence: Synthetic oligonucleotide
cugaccuucuggagauguu

SEQ ID NO: 1973218 - RNA, 19 nt, Artificial Sequence
  Description of Artificial Sequence: Synthetic oligonucleotide
gcgcugcaaagcuggucuc

SEQ ID NO: 1973219 - RNA, 19 nt, Artificial Sequence
  Description of Artificial Sequence: Synthetic oligonucleotide
ccacuauugguggauuccu

SEQ ID NO: 1973220 - RNA, 19 nt, Artificial Sequence
  Description of Artificial Sequence: Synthetic oligonucleotide
ggaugguccucaucaccuu

SEQ ID NO: 1973221 - RNA, 19 nt, Artificial Sequence
  Description of Artificial Sequence: Synthetic oligonucleotide
ccacuggugucauguuaaa

SEQ ID NO: 1973222 - RNA, 19 nt, Artificial Sequence
  Description of Artificial Sequence: Synthetic oligonucleotide
ccccacuggugucauguua

SEQ ID NO: 1973223 - RNA, 19 nt, Artificial Sequence
  Description of Artificial Sequence: Synthetic oligonucleotide
ccuguaugccauccugaau

SEQ ID NO: 1973224 - RNA, 19 nt, Artificial Sequence
  Description of Artificial Sequence: Synthetic oligonucleotide
caccuucuuggcugaccuu

SEQ ID NO: 1973225 - RNA, 19 nt, Artificial Sequence
  Description of Artificial Sequence: Synthetic oligonucleotide
gcgugauuuccagcacaua

SEQ ID NO: 1973226 - RNA, 19 nt, Artificial Sequence
  Description of Artificial Sequence: Synthetic oligonucleotide
uggcccguuuggggaccuu

SEQ ID NO: 1973227 - RNA, 19 nt, Artificial Sequence
  Description of Artificial Sequence: Synthetic oligonucleotide
guccagcaacgagcagugu

SEQ ID NO: 1973228 - RNA, 19 nt, Artificial Sequence
  Description of Artificial Sequence: Synthetic oligonucleotide
cgucccuuuccaggccaac

SEQ ID NO: 1973229 - RNA, 19 nt, Artificial Sequence
  Description of Artificial Sequence: Synthetic oligonucleotide
cgagcaguguuggcaaggu

SEQ ID NO: 1973230 - RNA, 19 nt, Artificial Sequence
  Description of Artificial Sequence: Synthetic oligonucleotide
ccgucccuuuccaggccaa

SEQ ID NO: 1973231 - RNA, 19 nt, Artificial Sequence
  Description of Artificial Sequence: Synthetic oligonucleotide
cgguggggcucauugcggu

SEQ ID NO: 1973232 - RNA, 19 nt, Artificial Sequence
  Description of Artificial Sequence: Synthetic oligonucleotide
cuggcccguuuggggaccu

SEQ ID NO: 1973233 - RNA, 19 nt, Artificial Sequence
  Description of Artificial Sequence: Synthetic oligonucleotide
cuccuccauggaggccacu

SEQ ID NO: 1973234 - RNA, 19 nt, Artificial Sequence
  Description of Artificial Sequence: Synthetic oligonucleotide
ggauucgguggggcucauu

SEQ ID NO: 1973235 - RNA, 19 nt, Artificial Sequence
  Description of Artificial Sequence: Synthetic oligonucleotide
cggcagcuuggcgugauuu

SEQ ID NO: 1973236 - RNA, 19 nt, Artificial Sequence
  Description of Artificial Sequence: Synthetic oligonucleotide
cgauccccacuggugucau

SEQ ID NO: 1973237 - RNA, 19 nt, Artificial Sequence
  Description of Artificial Sequence: Synthetic oligonucleotide
gcggucuggccggcagcuu

SEQ ID NO: 1973238 - RNA, 19 nt, Artificial Sequence
  Description of Artificial Sequence: Synthetic oligonucleotide
ccggcagcuuggcgugauu

SEQ ID NO: 1973239 - RNA, 19 nt, Artificial Sequence
  Description of Artificial Sequence: Synthetic oligonucleotide
ucugcauaggccacgauag

SEQ ID NO: 1973240 - RNA, 19 nt, Artificial Sequence
  Description of Artificial Sequence: Synthetic oligonucleotide
auaucgucggcauuguggc

SEQ ID NO: 1973241 - RNA, 19 nt, Artificial Sequence
  Description of Artificial Sequence: Synthetic oligonucleotide
cauaucgucggcauugugg

SEQ ID NO: 1973242 - RNA, 19 nt, Artificial Sequence
  Description of Artificial Sequence: Synthetic oligonucleotide
aguacuguggaguccuugc

SEQ ID NO: 1973243 - RNA, 19 nt, Artificial Sequence
  Description of Artificial Sequence: Synthetic oligonucleotide
agcacuucggccucaaagg

SEQ ID NO: 1973244 - RNA, 19 nt, Artificial Sequence
  Description of Artificial Sequence: Synthetic oligonucleotide
ucgauugaggccauccagg

SEQ ID NO: 1973245 - RNA, 19 nt, Artificial Sequence
  Description of Artificial Sequence: Synthetic oligonucleotide
uugucuuccaacacgcggc

SEQ ID NO: 1973246 - RNA, 19 nt, Artificial Sequence
  Description of Artificial Sequence: Synthetic oligonucleotide
uguagcgugaugcccaggc

SEQ ID NO: 1973247 - RNA, 19 nt, Artificial Sequence
  Description of Artificial Sequence: Synthetic oligonucleotide
aagcaggagccgcauaacg

SEQ ID NO: 1973248 - RNA, 19 nt, Artificial Sequence
  Description of Artificial Sequence: Synthetic oligonucleotide
uacuguggaguccuugccg

SEQ ID NO: 1973249 - RNA, 19 nt, Artificial Sequence
  Description of Artificial Sequence: Synthetic oligonucleotide
aguccuugccgcccgaagc

SEQ ID NO: 1973250 - RNA, 19 nt, Artificial Sequence
  Description of Artificial Sequence: Synthetic oligonucleotide
auaacgccugccccgagcg

SEQ ID NO: 1973251 - RNA, 19 nt, Artificial Sequence
  Description of Artificial Sequence: Synthetic oligonucleotide
ucuuccaacacgcggcggc

SEQ ID NO: 1973252 - RNA, 19 nt, Artificial Sequence
  Description of Artificial Sequence: Synthetic oligonucleotide
cacucuuccgagaaguagc

SEQ ID NO: 1973253 - RNA, 19 nt, Artificial Sequence
  Description of Artificial Sequence: Synthetic oligonucleotide
aagccucgggcgcauacac

SEQ ID NO: 1973254 - RNA, 19 nt, Artificial Sequence
  Description of Artificial Sequence: Synthetic oligonucleotide
uggccugucacgaugugug

SEQ ID NO: 1973255 - RNA, 19 nt, Artificial Sequence
  Description of Artificial Sequence: Synthetic oligonucleotide
ugcgaagcgaacugcagug

SEQ ID NO: 1973256 - RNA, 19 nt, Artificial Sequence
  Description of Artificial Sequence: Synthetic oligonucleotide
ucacgaugugugaagcucc

SEQ ID NO: 1973257 - RNA, 19 nt, Artificial Sequence
  Description of Artificial Sequence: Synthetic oligonucleotide
uccaucucuggauugcuca

SEQ ID NO: 1973258 - RNA, 19 nt, Artificial Sequence
  Description of Artificial Sequence: Synthetic oligonucleotide
ugucuuccaacacgcggcg

SEQ ID NO: 1973259 - RNA, 19 nt, Artificial Sequence
  Description of Artificial Sequence: Synthetic oligonucleotide
acuucggccucaaaggugg

SEQ ID NO: 1973260 - RNA, 19 nt, Artificial Sequence
  Description of Artificial Sequence: Synthetic oligonucleotide
agggucacugcuuggguuc

SEQ ID NO: 1973261 - RNA, 19 nt, Artificial Sequence
  Description of Artificial Sequence: Synthetic oligonucleotide
auuguggccugucacgaug

SEQ ID NO: 1973262 - RNA, 19 nt, Artificial Sequence
  Description of Artificial Sequence: Synthetic oligonucleotide
agccgcauaacgccugccc

SEQ ID NO: 1973263 - RNA, 19 nt, Artificial Sequence
  Description of Artificial Sequence: Synthetic oligonucleotide
acggccaccagguguagcg

SEQ ID NO: 1973264 - RNA, 19 nt, Artificial Sequence
  Description of Artificial Sequence: Synthetic oligonucleotide
agcgagaacaggugccugg

SEQ ID NO: 1973265 - RNA, 19 nt, Artificial Sequence
  Description of Artificial Sequence: Synthetic oligonucleotide
ugaagcucccacgaggcgc

SEQ ID NO: 1973266 - RNA, 19 nt, Artificial Sequence
  Description of Artificial Sequence: Synthetic oligonucleotide
ucgagcauggccacggaaa

SEQ ID NO: 1973267 - RNA, 19 nt, Artificial Sequence
  Description of Artificial Sequence: Synthetic oligonucleotide
agaagcaggagccgcauaa

SEQ ID NO: 1973268 - RNA, 19 nt, Artificial Sequence
  Description of Artificial Sequence: Synthetic oligonucleotide
uccauccccgcacagggug

SEQ ID NO: 1973269 - RNA, 19 nt, Artificial Sequence
  Description of Artificial Sequence: Synthetic oligonucleotide
ugcgcguacagcaccaccu

SEQ ID NO: 1973270 - RNA, 19 nt, Artificial Sequence
  Description of Artificial Sequence: Synthetic oligonucleotide
aggaaauucaugagcacug

SEQ ID NO: 1973271 - RNA, 19 nt, Artificial Sequence
  Description of Artificial Sequence: Synthetic oligonucleotide
gaagugcgcguacagcacc

SEQ ID NO: 1973272 - RNA, 19 nt, Artificial Sequence
  Description of Artificial Sequence: Synthetic oligonucleotide
cucgauugaggccauccag

SEQ ID NO: 1973273 - RNA, 19 nt, Artificial Sequence
  Description of Artificial Sequence: Synthetic oligonucleotide
agcaucaccgcgcaggaaa

SEQ ID NO: 1973274 - RNA, 19 nt, Artificial Sequence
  Description of Artificial Sequence: Synthetic oligonucleotide
aacgccugccccgagcgcg

SEQ ID NO: 1973275 - RNA, 19 nt, Artificial Sequence
  Description of Artificial Sequence: Synthetic oligonucleotide
gucuccgccauaucgucgg

SEQ ID NO: 1973276 - RNA, 19 nt, Artificial Sequence
  Description of Artificial Sequence: Synthetic oligonucleotide
uggcaagaggagcacguug

SEQ ID NO: 1973277 - RNA, 19 nt, Artificial Sequence
  Description of Artificial Sequence: Synthetic oligonucleotide
cuuggguuccccgacagug

SEQ ID NO: 1973278 - RNA, 19 nt, Artificial Sequence
  Description of Artificial Sequence: Synthetic oligonucleotide
auacacgcacucuuccgag

SEQ ID NO: 1973279 - RNA, 19 nt, Artificial Sequence
  Description of Artificial Sequence: Synthetic oligonucleotide
uggccaacgccccgcagcg

SEQ ID NO: 1973280 - RNA, 19 nt, Artificial Sequence
  Description of Artificial Sequence: Synthetic oligonucleotide
uucugcgaagcgaacugca

SEQ ID NO: 1973281 - RNA, 19 nt, Artificial Sequence
  Description of Artificial Sequence: Synthetic oligonucleotide
ugcacgagguccagcacug

SEQ ID NO: 1973282 - RNA, 19 nt, Artificial Sequence
  Description of Artificial Sequence: Synthetic oligonucleotide
gaacaggucugcauaggcc

SEQ ID NO: 1973283 - RNA, 19 nt, Artificial Sequence
  Description of Artificial Sequence: Synthetic oligonucleotide
gagcgcacaggccuggcag

SEQ ID NO: 1973284 - RNA, 19 nt, Artificial Sequence
  Description of Artificial Sequence: Synthetic oligonucleotide
agcgcugcgucacgguagc

SEQ ID NO: 1973285 - RNA, 19 nt, Artificial Sequence
  Description of Artificial Sequence: Synthetic oligonucleotide
ucacgguagccgccgaugc

SEQ ID NO: 1973286 - RNA, 19 nt, Artificial Sequence
  Description of Artificial Sequence: Synthetic oligonucleotide
cacggugugcagcacuucg

SEQ ID NO: 1973287 - RNA, 19 nt, Artificial Sequence
  Description of Artificial Sequence: Synthetic oligonucleotide
aucaccgcgcaggaaauuc

SEQ ID NO: 1973288 - RNA, 19 nt, Artificial Sequence
  Description of Artificial Sequence: Synthetic oligonucleotide
uccgagaaguagcgcaggc

SEQ ID NO: 1973289 - RNA, 19 nt, Artificial Sequence
  Description of Artificial Sequence: Synthetic oligonucleotide
ugcuuggguuccccgacag

SEQ ID NO: 1973290 - RNA, 19 nt, Artificial Sequence
  Description of Artificial Sequence: Synthetic oligonucleotide
gaagcucccacgaggcgcg

SEQ ID NO: 1973291 - RNA, 19 nt, Artificial Sequence
  Description of Artificial Sequence: Synthetic oligonucleotide
ugcccugcgagcacggugu

SEQ ID NO: 1973292 - RNA, 19 nt, Artificial Sequence
  Description of Artificial Sequence: Synthetic oligonucleotide
gagugcacgagguccagca

SEQ ID NO: 1973293 - RNA, 19 nt, Artificial Sequence
  Description of Artificial Sequence: Synthetic oligonucleotide
uggauugcucacaggugca

SEQ ID NO: 1973294 - RNA, 19 nt, Artificial Sequence
  Description of Artificial Sequence: Synthetic oligonucleotide
acggcguccaucguccagc

SEQ ID NO: 1973295 - RNA, 19 nt, Artificial Sequence
  Description of Artificial Sequence: Synthetic oligonucleotide
cacagguggcuucugcccg

SEQ ID NO: 1973296 - RNA, 19 nt, Artificial Sequence
  Description of Artificial Sequence: Synthetic oligonucleotide
acucuuccgagaaguagcg

SEQ ID NO: 1973297 - RNA, 19 nt, Artificial Sequence
  Description of Artificial Sequence: Synthetic oligonucleotide
cucacaggugcaagguccc

SEQ ID NO: 1973298 - RNA, 19 nt, Artificial Sequence
  Description of Artificial Sequence: Synthetic oligonucleotide
agugcacgagguccagcac

SEQ ID NO: 1973299 - RNA, 19 nt, Artificial Sequence
  Description of Artificial Sequence: Synthetic oligonucleotide
cuugagcaggucucgagca

SEQ ID NO: 1973300 - RNA, 19 nt, Artificial Sequence
  Description of Artificial Sequence: Synthetic oligonucleotide
gaagcgaacugcaguggcc

SEQ ID NO: 1973301 - RNA, 19 nt, Artificial Sequence
  Description of Artificial Sequence: Synthetic oligonucleotide
gaugcccaggcguggcgcg

SEQ ID NO: 1973302 - RNA, 19 nt, Artificial Sequence
  Description of Artificial Sequence: Synthetic oligonucleotide
uguggcuggccaacgcccc

SEQ ID NO: 1973303 - RNA, 19 nt, Artificial Sequence
  Description of Artificial Sequence: Synthetic oligonucleotide
caggucucgagcauggcca

SEQ ID NO: 1973304 - RNA, 19 nt, Artificial Sequence
  Description of Artificial Sequence: Synthetic oligonucleotide
augagcacugucuccgcca

SEQ ID NO: 1973305 - RNA, 19 nt, Artificial Sequence
  Description of Artificial Sequence: Synthetic oligonucleotide
ucucuggauugcucacagg

SEQ ID NO: 1973306 - RNA, 19 nt, Artificial Sequence
  Description of Artificial Sequence: Synthetic oligonucleotide
ugucacgaugugugaagcu

SEQ ID NO: 1973307 - RNA, 19 nt, Artificial Sequence
  Description of Artificial Sequence: Synthetic oligonucleotide
cauaacgccugccccgagc

SEQ ID NO: 1973308 - RNA, 19 nt, Artificial Sequence
  Description of Artificial Sequence: Synthetic oligonucleotide
uuguggccugucacgaugu

SEQ ID NO: 1973309 - RNA, 19 nt, Artificial Sequence
  Description of Artificial Sequence: Synthetic oligonucleotide
guagcgugaugcccaggcg

SEQ ID NO: 1973310 - RNA, 19 nt, Artificial Sequence
  Description of Artificial Sequence: Synthetic oligonucleotide
gaaagccucgggcgcauac

SEQ ID NO: 1973311 - RNA, 19 nt, Artificial Sequence
  Description of Artificial Sequence: Synthetic oligonucleotide
ucacugcuuggguuccccg

SEQ ID NO: 1973312 - RNA, 19 nt, Artificial Sequence
  Description of Artificial Sequence: Synthetic oligonucleotide
uggguuccccgacagugga

SEQ ID NO: 1973313 - RNA, 19 nt, Artificial Sequence
  Description of Artificial Sequence: Synthetic oligonucleotide
cauacacgcacucuuccga

SEQ ID NO: 1973314 - RNA, 19 nt, Artificial Sequence
  Description of Artificial Sequence: Synthetic oligonucleotide
gucacucugcaggacacag

SEQ ID NO: 1973315 - RNA, 19 nt, Artificial Sequence
  Description of Artificial Sequence: Synthetic oligonucleotide
acaggguggcuccaucucu

SEQ ID NO: 1973316 - RNA, 19 nt, Artificial Sequence
  Description of Artificial Sequence: Synthetic oligonucleotide
cacgaugugugaagcuccc

SEQ ID NO: 1973317 - RNA, 19 nt, Artificial Sequence
  Description of Artificial Sequence: Synthetic oligonucleotide
cuggccaacgccccgcagc

SEQ ID NO: 1973318 - RNA, 19 nt, Artificial Sequence
  Description of Artificial Sequence: Synthetic oligonucleotide
agcaccccgcagaaggugc

SEQ ID NO: 1973319 - RNA, 19 nt, Artificial Sequence
  Description of Artificial Sequence: Synthetic oligonucleotide
gcguccaucguccagcccc

SEQ ID NO: 1973320 - RNA, 19 nt, Artificial Sequence
  Description of Artificial Sequence: Synthetic oligonucleotide
aucgucggcauuguggccu

SEQ ID NO: 1973321 - RNA, 19 nt, Artificial Sequence
  Description of Artificial Sequence: Synthetic oligonucleotide
ucggcauuguggccuguca

SEQ ID NO: 1973322 - RNA, 19 nt, Artificial Sequence
  Description of Artificial Sequence: Synthetic oligonucleotide
uuccgagaaguagcgcagg

SEQ ID NO: 1973323 - RNA, 19 nt, Artificial Sequence
  Description of Artificial Sequence: Synthetic oligonucleotide
gcaggagccgcauaacgcc

SEQ ID NO: 1973324 - RNA, 19 nt, Artificial Sequence
  Description of Artificial Sequence: Synthetic oligonucleotide
ugcgucacgguagccgccg

SEQ ID NO: 1973325 - RNA, 19 nt, Artificial Sequence
  Description of Artificial Sequence: Synthetic oligonucleotide
ugugcagcacuucggccuc

SEQ ID NO: 1973326 - RNA, 19 nt, Artificial Sequence
  Description of Artificial Sequence: Synthetic oligonucleotide
cucuggauugcucacaggu

SEQ ID NO: 1973327 - RNA, 19 nt, Artificial Sequence
  Description of Artificial Sequence: Synthetic oligonucleotide
gcauacacgcacucuuccg

SEQ ID NO: 1973328 - RNA, 19 nt, Artificial Sequence
  Description of Artificial Sequence: Synthetic oligonucleotide
uguggaguccuugccgccc

SEQ ID NO: 1973329 - RNA, 19 nt, Artificial Sequence
  Description of Artificial Sequence: Synthetic oligonucleotide
gucacgaugugugaagcuc

SEQ ID NO: 1973330 - RNA, 19 nt, Artificial Sequence
  Description of Artificial Sequence: Synthetic oligonucleotide
auaggccacgauagugagc

SEQ ID NO: 1973331 - RNA, 19 nt, Artificial Sequence
  Description of Artificial Sequence: Synthetic oligonucleotide
aacacgcggcggcccuugc

SEQ ID NO: 1973332 - RNA, 19 nt, Artificial Sequence
  Description of Artificial Sequence: Synthetic oligonucleotide
cacuucggccucaaaggug

SEQ ID NO: 1973333 - RNA, 19 nt, Artificial Sequence
  Description of Artificial Sequence: Synthetic oligonucleotide
ugauggccgagcugccucc

SEQ ID NO: 1973334 - RNA, 19 nt, Artificial Sequence
  Description of Artificial Sequence: Synthetic oligonucleotide
cacgauagugagcggcagc

SEQ ID NO: 1973335 - RNA, 19 nt, Artificial Sequence
  Description of Artificial Sequence: Synthetic oligonucleotide
ucggccucaaagguggcac

SEQ ID NO: 1973336 - RNA, 19 nt, Artificial Sequence
  Description of Artificial Sequence: Synthetic oligonucleotide
cacgcggcggcccuugccg

SEQ ID NO: 1973337 - RNA, 19 nt, Artificial Sequence
  Description of Artificial Sequence: Synthetic oligonucleotide
aaagccucgggcgcauaca

SEQ ID NO: 1973338 - RNA, 19 nt, Artificial Sequence
  Description of Artificial Sequence: Synthetic oligonucleotide
acugucuccgccauaucgu

SEQ ID NO: 1973339 - RNA, 19 nt, Artificial Sequence
  Description of Artificial Sequence: Synthetic oligonucleotide
acacgcacucuuccgagaa

SEQ ID NO: 1973340 - RNA, 19 nt, Artificial Sequence
  Description of Artificial Sequence: Synthetic oligonucleotide
ugugaagcugcagggucac

SEQ ID NO: 1973341 - RNA, 19 nt, Artificial Sequence
  Description of Artificial Sequence: Synthetic oligonucleotide
gguuccccgacaguggagg

SEQ ID NO: 1973342 - RNA, 19 nt, Artificial Sequence
  Description of Artificial Sequence: Synthetic oligonucleotide
gaguccuugccgcccgaag

SEQ ID NO: 1973343 - RNA, 19 nt, Artificial Sequence
  Description of Artificial Sequence: Synthetic oligonucleotide
gcuugagcaggucucgagc

SEQ ID NO: 1973344 - RNA, 19 nt, Artificial Sequence
  Description of Artificial Sequence: Synthetic oligonucleotide
uacacgcacucuuccgaga

SEQ ID NO: 1973345 - RNA, 19 nt, Artificial Sequence
  Description of Artificial Sequence: Synthetic oligonucleotide
cuucugcgaagcgaacugc

SEQ ID NO: 1973346 - RNA, 19 nt, Artificial Sequence
  Description of Artificial Sequence: Synthetic oligonucleotide
gagccggcagugcugcgag

SEQ ID NO: 1973347 - RNA, 19 nt, Artificial Sequence
  Description of Artificial Sequence: Synthetic oligonucleotide
agcgaacugcaguggccgg

SEQ ID NO: 1973348 - RNA, 19 nt, Artificial Sequence
  Description of Artificial Sequence: Synthetic oligonucleotide
gcucacaggugcaaggucc

SEQ ID NO: 1973349 - RNA, 19 nt, Artificial Sequence
  Description of Artificial Sequence: Synthetic oligonucleotide
uaucgucggcauuguggcc

SEQ ID NO: 1973350 - RNA, 19 nt, Artificial Sequence
  Description of Artificial Sequence: Synthetic oligonucleotide
acacgcggcggcccuugcc

SEQ ID NO: 1973351 - RNA, 19 nt, Artificial Sequence
  Description of Artificial Sequence: Synthetic oligonucleotide
ccacggaaagccucgggcg

SEQ ID NO: 1973352 - RNA, 19 nt, Artificial Sequence
  Description of Artificial Sequence: Synthetic oligonucleotide
guagccgccgaugcccucg

SEQ ID NO: 1973353 - RNA, 19 nt, Artificial Sequence
  Description of Artificial Sequence: Synthetic oligonucleotide
cagguguagcgugaugccc

SEQ ID NO: 1973354 - RNA, 19 nt, Artificial Sequence
  Description of Artificial Sequence: Synthetic oligonucleotide
gaggccauccaggagcgca

SEQ ID NO: 1973355 - RNA, 19 nt, Artificial Sequence
  Description of Artificial Sequence: Synthetic oligonucleotide
guggaguccuugccgcccg

SEQ ID NO: 1973356 - RNA, 19 nt, Artificial Sequence
  Description of Artificial Sequence: Synthetic oligonucleotide
caggccucgauugaggcca

SEQ ID NO: 1973357 - RNA, 19 nt, Artificial Sequence
  Description of Artificial Sequence: Synthetic oligonucleotide
ugaugcccaggcguggcgc

SEQ ID NO: 1973358 - RNA, 19 nt, Artificial Sequence
  Description of Artificial Sequence: Synthetic oligonucleotide
agguguagcgugaugccca

SEQ ID NO: 1973359 - RNA, 19 nt, Artificial Sequence
  Description of Artificial Sequence: Synthetic oligonucleotide
cacgugugccaguacugug

SEQ ID NO: 1973360 - RNA, 19 nt, Artificial Sequence
  Description of Artificial Sequence: Synthetic oligonucleotide
uccaacacgcggcggcccu

SEQ ID NO: 1973361 - RNA, 19 nt, Artificial Sequence
  Description of Artificial Sequence: Synthetic oligonucleotide
gugagcggcagcucccagc

SEQ ID NO: 1973362 - RNA, 19 nt, Artificial Sequence
  Description of Artificial Sequence: Synthetic oligonucleotide
cugucuccgccauaucguc

SEQ ID NO: 1973363 - RNA, 19 nt, Artificial Sequence
  Description of Artificial Sequence: Synthetic oligonucleotide
gccucgggcgcauacacgc

SEQ ID NO: 1973364 - RNA, 19 nt, Artificial Sequence
  Description of Artificial Sequence: Synthetic oligonucleotide
cugugaagcugcaggguca

SEQ ID NO: 1973365 - RNA, 19 nt, Artificial Sequence
  Description of Artificial Sequence: Synthetic oligonucleotide
cagcgcugcgucacgguag

SEQ ID NO: 1973366 - RNA, 19 nt, Artificial Sequence
  Description of Artificial Sequence: Synthetic oligonucleotide
aaguagcgcaggcggcgga

SEQ ID NO: 1973367 - RNA, 19 nt, Artificial Sequence
  Description of Artificial Sequence: Synthetic oligonucleotide
aacgccccgcagcgagaac

SEQ ID NO: 1973368 - RNA, 19 nt, Artificial Sequence
  Description of Artificial Sequence: Synthetic oligonucleotide
gcaagaggagcacguuggg

SEQ ID NO: 1973369 - RNA, 19 nt, Artificial Sequence
  Description of Artificial Sequence: Synthetic oligonucleotide
ugcgagcacggugugcagc

SEQ ID NO: 1973370 - RNA, 19 nt, Artificial Sequence
  Description of Artificial Sequence: Synthetic oligonucleotide
uccagugcacgccgccgca

SEQ ID NO: 1973371 - RNA, 19 nt, Artificial Sequence
  Description of Artificial Sequence: Synthetic oligonucleotide
caggcguggcgcgagcucg

SEQ ID NO: 1973372 - RNA, 19 nt, Artificial Sequence
  Description of Artificial Sequence: Synthetic oligonucleotide
caggcggcggaagugcgcg

SEQ ID NO: 1973373 - RNA, 19 nt, Artificial Sequence
  Description of Artificial Sequence: Synthetic oligonucleotide
cacucugcaggacacaggu

SEQ ID NO: 1973374 - RNA, 19 nt, Artificial Sequence
  Description of Artificial Sequence: Synthetic oligonucleotide
aagugcgcguacagcacca

SEQ ID NO: 1973375 - RNA, 19 nt, Artificial Sequence
  Description of Artificial Sequence: Synthetic oligonucleotide
cgagccacggcguccaucg

SEQ ID NO: 1973376 - RNA, 19 nt, Artificial Sequence
  Description of Artificial Sequence: Synthetic oligonucleotide
acggugugcagcacuucgg

SEQ ID NO: 1973377 - RNA, 19 nt, Artificial Sequence
  Description of Artificial Sequence: Synthetic oligonucleotide
gugccaguacuguggaguc

SEQ ID NO: 1973378 - RNA, 19 nt, Artificial Sequence
  Description of Artificial Sequence: Synthetic oligonucleotide
cucgggcgcauacacgcac

SEQ ID NO: 1973379 - RNA, 19 nt, Artificial Sequence
  Description of Artificial Sequence: Synthetic oligonucleotide
ucgggcgcauacacgcacu

SEQ ID NO: 1973380 - RNA, 19 nt, Artificial Sequence
  Description of Artificial Sequence: Synthetic oligonucleotide
cuguggaguccuugccgcc

SEQ ID NO: 1973381 - RNA, 19 nt, Artificial Sequence
  Description of Artificial Sequence: Synthetic oligonucleotide
ggugugcagcacuucggcc

SEQ ID NO: 1973382 - RNA, 19 nt, Artificial Sequence
  Description of Artificial Sequence: Synthetic oligonucleotide
cuuccaacacgcggcggcc

SEQ ID NO: 1973383 - RNA, 19 nt, Artificial Sequence
  Description of Artificial Sequence: Synthetic oligonucleotide
gcaagagccaggcgcuccg

SEQ ID NO: 1973384 - RNA, 19 nt, Artificial Sequence
  Description of Artificial Sequence: Synthetic oligonucleotide
agcacgugugccaguacug

SEQ ID NO: 1973385 - RNA, 19 nt, Artificial Sequence
  Description of Artificial Sequence: Synthetic oligonucleotide
gaggcgcgcgcccuccucc

SEQ ID NO: 1973386 - RNA, 19 nt, Artificial Sequence
  Description of Artificial Sequence: Synthetic oligonucleotide
gcugcgucacgguagccgc

SEQ ID NO: 1973387 - RNA, 19 nt, Artificial Sequence
  Description of Artificial Sequence: Synthetic oligonucleotide
caaggucccugugaagcug

SEQ ID NO: 1973388 - RNA, 19 nt, Artificial Sequence
  Description of Artificial Sequence: Synthetic oligonucleotide
gagcgcaucccucgcccgc

SEQ ID NO: 1973389 - RNA, 19 nt, Artificial Sequence
  Description of Artificial Sequence: Synthetic oligonucleotide
acgagguccagcacugcug

SEQ ID NO: 1973390 - RNA, 19 nt, Artificial Sequence
  Description of Artificial Sequence: Synthetic oligonucleotide
cacaggguggcuccaucuc

SEQ ID NO: 1973391 - RNA, 19 nt, Artificial Sequence
  Description of Artificial Sequence: Synthetic oligonucleotide
agcacguuggggcgggcau

SEQ ID NO: 1973392 - RNA, 19 nt, Artificial Sequence
  Description of Artificial Sequence: Synthetic oligonucleotide
agcacugcugauggccgag

SEQ ID NO: 1973393 - RNA, 19 nt, Artificial Sequence
  Description of Artificial Sequence: Synthetic oligonucleotide
gucacgguagccgccgaug

SEQ ID NO: 1973394 - RNA, 19 nt, Artificial Sequence
  Description of Artificial Sequence: Synthetic oligonucleotide
ccuucugcgaagcgaacug

SEQ ID NO: 1973395 - RNA, 19 nt, Artificial Sequence
  Description of Artificial Sequence: Synthetic oligonucleotide
ucgcccgcagagcccagca

SEQ ID NO: 1973396 - RNA, 19 nt, Artificial Sequence
  Description of Artificial Sequence: Synthetic oligonucleotide
cacgguagccgccgaugcc

SEQ ID NO: 1973397 - RNA, 19 nt, Artificial Sequence
  Description of Artificial Sequence: Synthetic oligonucleotide
uaacgccugccccgagcgc

SEQ ID NO: 1973398 - RNA, 19 nt, Artificial Sequence
  Description of Artificial Sequence: Synthetic oligonucleotide
ugccaguacuguggagucc

SEQ ID NO: 1973399 - RNA, 19 nt, Artificial Sequence
  Description of Artificial Sequence: Synthetic oligonucleotide
uucggccucaaagguggca

SEQ ID NO: 1973400 - RNA, 19 nt, Artificial Sequence
  Description of Artificial Sequence: Synthetic oligonucleotide
agagcguguggcuggccaa

SEQ ID NO: 1973401 - RNA, 19 nt, Artificial Sequence
  Description of Artificial Sequence: Synthetic oligonucleotide
gccgcauaacgccugcccc

SEQ ID NO: 1973402 - RNA, 19 nt, Artificial Sequence
  Description of Artificial Sequence: Synthetic oligonucleotide
gguguagcgugaugcccag

SEQ ID NO: 1973403 - RNA, 19 nt, Artificial Sequence
  Description of Artificial Sequence: Synthetic oligonucleotide
cuugccgauggccaggcgu

SEQ ID NO: 1973404 - RNA, 19 nt, Artificial Sequence
  Description of Artificial Sequence: Synthetic oligonucleotide
agugcgcguacagcaccac

SEQ ID NO: 1973405 - RNA, 19 nt, Artificial Sequence
  Description of Artificial Sequence: Synthetic oligonucleotide
ccagguguagcgugaugcc

SEQ ID NO: 1973406 - RNA, 19 nt, Artificial Sequence
  Description of Artificial Sequence: Synthetic oligonucleotide
gcauaggccacgauaguga

SEQ ID NO: 1973407 - RNA, 19 nt, Artificial Sequence
  Description of Artificial Sequence: Synthetic oligonucleotide
ucgucggcauuguggccug

SEQ ID NO: 1973408 - RNA, 19 nt, Artificial Sequence
  Description of Artificial Sequence: Synthetic oligonucleotide
ucuccgccauaucgucggc

SEQ ID NO: 1973409 - RNA, 19 nt, Artificial Sequence
  Description of Artificial Sequence: Synthetic oligonucleotide
guuccccgacaguggaggc

SEQ ID NO: 1973410 - RNA, 19 nt, Artificial Sequence
  Description of Artificial Sequence: Synthetic oligonucleotide
gugcgcguacagcaccacc

SEQ ID NO: 1973411 - RNA, 19 nt, Artificial Sequence
  Description of Artificial Sequence: Synthetic oligonucleotide
guggcuggccaacgccccg

SEQ ID NO: 1973412 - RNA, 19 nt, Artificial Sequence
  Description of Artificial Sequence: Synthetic oligonucleotide
gccaacgccccgcagcgag

SEQ ID NO: 1973413 - RNA, 19 nt, Artificial Sequence
  Description of Artificial Sequence: Synthetic oligonucleotide
ccgcauaacgccugccccg

SEQ ID NO: 1973414 - RNA, 19 nt, Artificial Sequence
  Description of Artificial Sequence: Synthetic oligonucleotide
gucacugcuuggguucccc

SEQ ID NO: 1973415 - RNA, 19 nt, Artificial Sequence
  Description of Artificial Sequence: Synthetic oligonucleotide
ggccacgauagugagcggc

SEQ ID NO: 1973416 - RNA, 19 nt, Artificial Sequence
  Description of Artificial Sequence: Synthetic oligonucleotide
cucuuccgagaaguagcgc

SEQ ID NO: 1973417 - RNA, 19 nt, Artificial Sequence
  Description of Artificial Sequence: Synthetic oligonucleotide
ggcggaagugcgcguacag

SEQ ID NO: 1973418 - RNA, 19 nt, Artificial Sequence
  Description of Artificial Sequence: Synthetic oligonucleotide
cugccuggcugcucacggc

SEQ ID NO: 1973419 - RNA, 19 nt, Artificial Sequence
  Description of Artificial Sequence: Synthetic oligonucleotide
ggcuaaggucacucugcag

SEQ ID NO: 1973420 - RNA, 19 nt, Artificial Sequence
  Description of Artificial Sequence: Synthetic oligonucleotide
cagugcacgccgccgcagc

SEQ ID NO: 1973421 - RNA, 19 nt, Artificial Sequence
  Description of Artificial Sequence: Synthetic oligonucleotide
aggcgcuccgccgagugca

SEQ ID NO: 1973422 - RNA, 19 nt, Artificial Sequence
  Description of Artificial Sequence: Synthetic oligonucleotide
cagagcguguggcuggcca

SEQ ID NO: 1973423 - RNA, 19 nt, Artificial Sequence
  Description of Artificial Sequence: Synthetic oligonucleotide
agagccggcagugcugcga

SEQ ID NO: 1973424 - RNA, 19 nt, Artificial Sequence
  Description of Artificial Sequence: Synthetic oligonucleotide
uccuugccgcccgaagcgc

SEQ ID NO: 1973425 - RNA, 19 nt, Artificial Sequence
  Description of Artificial Sequence: Synthetic oligonucleotide
cccgaacaggucugcauag

SEQ ID NO: 1973426 - RNA, 19 nt, Artificial Sequence
  Description of Artificial Sequence: Synthetic oligonucleotide
cagcgcgcugccuggcugc

SEQ ID NO: 1973427 - RNA, 19 nt, Artificial Sequence
  Description of Artificial Sequence: Synthetic oligonucleotide
ucccucgcccgcagagccc

SEQ ID NO: 1973428 - RNA, 19 nt, Artificial Sequence
  Description of Artificial Sequence: Synthetic oligonucleotide
gucuuccaacacgcggcgg

SEQ ID NO: 1973429 - RNA, 19 nt, Artificial Sequence
  Description of Artificial Sequence: Synthetic oligonucleotide
ggagagcgcaucccucgcc

SEQ ID NO: 1973430 - RNA, 19 nt, Artificial Sequence
  Description of Artificial Sequence: Synthetic oligonucleotide
cuucggccucaaagguggc

SEQ ID NO: 1973431 - RNA, 19 nt, Artificial Sequence
  Description of Artificial Sequence: Synthetic oligonucleotide
ggcgcuugagcaggucucg

SEQ ID NO: 1973432 - RNA, 19 nt, Artificial Sequence
  Description of Artificial Sequence: Synthetic oligonucleotide
ugcugcgagccacggcguc

SEQ ID NO: 1973433 - RNA, 19 nt, Artificial Sequence
  Description of Artificial Sequence: Synthetic oligonucleotide
ggccgagcugccuccaggc

SEQ ID NO: 1973434 - RNA, 19 nt, Artificial Sequence
  Description of Artificial Sequence: Synthetic oligonucleotide
aggccuggcagagcgugug

SEQ ID NO: 1973435 - RNA, 19 nt, Artificial Sequence
  Description of Artificial Sequence: Synthetic oligonucleotide
ccgagcugccuccaggcgc

SEQ ID NO: 1973436 - RNA, 19 nt, Artificial Sequence
  Description of Artificial Sequence: Synthetic oligonucleotide
uggccacggaaagccucgg

SEQ ID NO: 1973437 - RNA, 19 nt, Artificial Sequence
  Description of Artificial Sequence: Synthetic oligonucleotide
cucgcgcagcacgugugcc

SEQ ID NO: 1973438 - RNA, 19 nt, Artificial Sequence
  Description of Artificial Sequence: Synthetic oligonucleotide
cgaagcgaacugcaguggc

SEQ ID NO: 1973439 - RNA, 19 nt, Artificial Sequence
  Description of Artificial Sequence: Synthetic oligonucleotide
gcaggccucgauugaggcc

SEQ ID NO: 1973440 - RNA, 19 nt, Artificial Sequence
  Description of Artificial Sequence: Synthetic oligonucleotide
ccgagaaguagcgcaggcg

SEQ ID NO: 1973441 - RNA, 19 nt, Artificial Sequence
  Description of Artificial Sequence: Synthetic oligonucleotide
gcacagaagcaggagccgc

SEQ ID NO: 1973442 - RNA, 19 nt, Artificial Sequence
  Description of Artificial Sequence: Synthetic oligonucleotide
ggccucaaagguggcacag

SEQ ID NO: 1973443 - RNA, 19 nt, Artificial Sequence
  Description of Artificial Sequence: Synthetic oligonucleotide
gagcguguggcuggccaac

SEQ ID NO: 1973444 - RNA, 19 nt, Artificial Sequence
  Description of Artificial Sequence: Synthetic oligonucleotide
gcgaagcgaacugcagugg

SEQ ID NO: 1973445 - RNA, 19 nt, Artificial Sequence
  Description of Artificial Sequence: Synthetic oligonucleotide
ggaagugcgcguacagcac

SEQ ID NO: 1973446 - RNA, 19 nt, Artificial Sequence
  Description of Artificial Sequence: Synthetic oligonucleotide
cgcauacacgcacucuucc

SEQ ID NO: 1973447 - RNA, 19 nt, Artificial Sequence
  Description of Artificial Sequence: Synthetic oligonucleotide
guagcgcaggcggcggaag

SEQ ID NO: 1973448 - RNA, 19 nt, Artificial Sequence
  Description of Artificial Sequence: Synthetic oligonucleotide
gccgaugcccucguccacg

SEQ ID NO: 1973449 - RNA, 19 nt, Artificial Sequence
  Description of Artificial Sequence: Synthetic oligonucleotide
cgcagcgagaacaggugcc

SEQ ID NO: 1973450 - RNA, 19 nt, Artificial Sequence
  Description of Artificial Sequence: Synthetic oligonucleotide
gccacggcguccaucgucc

SEQ ID NO: 1973451 - RNA, 19 nt, Artificial Sequence
  Description of Artificial Sequence: Synthetic oligonucleotide
uggaguccuugccgcccga

SEQ ID NO: 1973452 - RNA, 19 nt, Artificial Sequence
  Description of Artificial Sequence: Synthetic oligonucleotide
ggagccgcauaacgccugc

SEQ ID NO: 1973453 - RNA, 19 nt, Artificial Sequence
  Description of Artificial Sequence: Synthetic oligonucleotide
aggagccgcauaacgccug

SEQ ID NO: 1973454 - RNA, 19 nt, Artificial Sequence
  Description of Artificial Sequence: Synthetic oligonucleotide
aggccacgauagugagcgg

SEQ ID NO: 1973455 - RNA, 19 nt, Artificial Sequence
  Description of Artificial Sequence: Synthetic oligonucleotide
cauccccgcacaggguggc

SEQ ID NO: 1973456 - RNA, 19 nt, Artificial Sequence
  Description of Artificial Sequence: Synthetic oligonucleotide
cugcgaagcgaacugcagu

SEQ ID NO: 1973457 - RNA, 19 nt, Artificial Sequence
  Description of Artificial Sequence: Synthetic oligonucleotide
acggccuccagcgcugcgu

SEQ ID NO: 1973458 - RNA, 19 nt, Artificial Sequence
  Description of Artificial Sequence: Synthetic oligonucleotide
aguagcgcaggcggcggaa

SEQ ID NO: 1973459 - RNA, 19 nt, Artificial Sequence
  Description of Artificial Sequence: Synthetic oligonucleotide
acgaugugugaagcuccca

SEQ ID NO: 1973460 - RNA, 19 nt, Artificial Sequence
  Description of Artificial Sequence: Synthetic oligonucleotide
gggagagcgcaucccucgc

SEQ ID NO: 1973461 - RNA, 19 nt, Artificial Sequence
  Description of Artificial Sequence: Synthetic oligonucleotide
cccgcagcgagaacaggug

SEQ ID NO: 1973462 - RNA, 19 nt, Artificial Sequence
  Description of Artificial Sequence: Synthetic oligonucleotide
cguguggcuggccaacgcc

SEQ ID NO: 1973463 - RNA, 19 nt, Artificial Sequence
  Description of Artificial Sequence: Synthetic oligonucleotide
cugcgagcacggugugcag

SEQ ID NO: 1973464 - RNA, 19 nt, Artificial Sequence
  Description of Artificial Sequence: Synthetic oligonucleotide
gccgcccagcaucaccgcg

SEQ ID NO: 1973465 - RNA, 19 nt, Artificial Sequence
  Description of Artificial Sequence: Synthetic oligonucleotide
cagcaccccgcagaaggug

SEQ ID NO: 1973466 - RNA, 19 nt, Artificial Sequence
  Description of Artificial Sequence: Synthetic oligonucleotide
ccauccccgcacagggugg

SEQ ID NO: 1973467 - RNA, 19 nt, Artificial Sequence
  Description of Artificial Sequence: Synthetic oligonucleotide
ggcagugcugcgagccacg

SEQ ID NO: 1973468 - RNA, 19 nt, Artificial Sequence
  Description of Artificial Sequence: Synthetic oligonucleotide
agcucgcgcagcacgugug

SEQ ID NO: 1973469 - RNA, 19 nt, Artificial Sequence
  Description of Artificial Sequence: Synthetic oligonucleotide
cagcacgugugccaguacu

SEQ ID NO: 1973470 - RNA, 19 nt, Artificial Sequence
  Description of Artificial Sequence: Synthetic oligonucleotide
aggcguggcgcgagcucgc

SEQ ID NO: 1973471 - RNA, 19 nt, Artificial Sequence
  Description of Artificial Sequence: Synthetic oligonucleotide
caggcgcuccgccgagugc

SEQ ID NO: 1973472 - RNA, 19 nt, Artificial Sequence
  Description of Artificial Sequence: Synthetic oligonucleotide
ucugcccgguccccuccau

SEQ ID NO: 1973473 - RNA, 19 nt, Artificial Sequence
  Description of Artificial Sequence: Synthetic oligonucleotide
gagccgcauaacgccugcc

SEQ ID NO: 1973474 - RNA, 19 nt, Artificial Sequence
  Description of Artificial Sequence: Synthetic oligonucleotide
gccgagcugccuccaggcg

SEQ ID NO: 1973475 - RNA, 19 nt, Artificial Sequence
  Description of Artificial Sequence: Synthetic oligonucleotide
guggcgcgagcucgcgcag

SEQ ID NO: 1973476 - RNA, 19 nt, Artificial Sequence
  Description of Artificial Sequence: Synthetic oligonucleotide
ccgcagcgagaacaggugc

SEQ ID NO: 1973477 - RNA, 19 nt, Artificial Sequence
  Description of Artificial Sequence: Synthetic oligonucleotide
guguagcgugaugcccagg

SEQ ID NO: 1973478 - RNA, 19 nt, Artificial Sequence
  Description of Artificial Sequence: Synthetic oligonucleotide
uagccgccgaugcccucgu

SEQ ID NO: 1973479 - RNA, 19 nt, Artificial Sequence
  Description of Artificial Sequence: Synthetic oligonucleotide
ccgcccagcaucaccgcgc

SEQ ID NO: 1973480 - RNA, 19 nt, Artificial Sequence
  Description of Artificial Sequence: Synthetic oligonucleotide
cagcgagaacaggugccug

SEQ ID NO: 1973481 - RNA, 19 nt, Artificial Sequence
  Description of Artificial Sequence: Synthetic oligonucleotide
gcgccagccgcccagcauc

SEQ ID NO: 1973482 - RNA, 19 nt, Artificial Sequence
  Description of Artificial Sequence: Synthetic oligonucleotide
ccgaacaggucugcauagg

SEQ ID NO: 1973483 - RNA, 19 nt, Artificial Sequence
  Description of Artificial Sequence: Synthetic oligonucleotide
gcucgcgcagcacgugugc

SEQ ID NO: 1973484 - RNA, 19 nt, Artificial Sequence
  Description of Artificial Sequence: Synthetic oligonucleotide
agcgcaucccucgcccgca

SEQ ID NO: 1973485 - RNA, 19 nt, Artificial Sequence
  Description of Artificial Sequence: Synthetic oligonucleotide
ugcagcacuucggccucaa

SEQ ID NO: 1973486 - RNA, 19 nt, Artificial Sequence
  Description of Artificial Sequence: Synthetic oligonucleotide
ccuugccgcccgaagcgcc

SEQ ID NO: 1973487 - RNA, 19 nt, Artificial Sequence
  Description of Artificial Sequence: Synthetic oligonucleotide
ggcaccgcgggagagcgca

SEQ ID NO: 1973488 - RNA, 19 nt, Artificial Sequence
  Description of Artificial Sequence: Synthetic oligonucleotide
uccccgcacaggguggcuc

SEQ ID NO: 1973489 - RNA, 19 nt, Artificial Sequence
  Description of Artificial Sequence: Synthetic oligonucleotide
gcggaagugcgcguacagc

SEQ ID NO: 1973490 - RNA, 19 nt, Artificial Sequence
  Description of Artificial Sequence: Synthetic oligonucleotide
gagcacguuggggcgggca

SEQ ID NO: 1973491 - RNA, 19 nt, Artificial Sequence
  Description of Artificial Sequence: Synthetic oligonucleotide
gccgcguggcaagaggagc

SEQ ID NO: 1973492 - RNA, 19 nt, Artificial Sequence
  Description of Artificial Sequence: Synthetic oligonucleotide
gauggccgagcugccucca

SEQ ID NO: 1973493 - RNA, 19 nt, Artificial Sequence
  Description of Artificial Sequence: Synthetic oligonucleotide
cacgagguccagcacugcu

SEQ ID NO: 1973494 - RNA, 19 nt, Artificial Sequence
  Description of Artificial Sequence: Synthetic oligonucleotide
aggugcccugcgagcacgg

SEQ ID NO: 1973495 - RNA, 19 nt, Artificial Sequence
  Description of Artificial Sequence: Synthetic oligonucleotide
cacggccaccagguguagc

SEQ ID NO: 1973496 - RNA, 19 nt, Artificial Sequence
  Description of Artificial Sequence: Synthetic oligonucleotide
cugcuuggguuccccgaca

SEQ ID NO: 1973497 - RNA, 19 nt, Artificial Sequence
  Description of Artificial Sequence: Synthetic oligonucleotide
cacgaggcgcgcgcccucc

SEQ ID NO: 1973498 - RNA, 19 nt, Artificial Sequence
  Description of Artificial Sequence: Synthetic oligonucleotide
ggcgcauacacgcacucuu

SEQ ID NO: 1973499 - RNA, 19 nt, Artificial Sequence
  Description of Artificial Sequence: Synthetic oligonucleotide
gcguggcaagaggagcacg

SEQ ID NO: 1973500 - RNA, 19 nt, Artificial Sequence
  Description of Artificial Sequence: Synthetic oligonucleotide
gcacuucggccucaaaggu

SEQ ID NO: 1973501 - RNA, 19 nt, Artificial Sequence
  Description of Artificial Sequence: Synthetic oligonucleotide
gccacgauagugagcggca

SEQ ID NO: 1973502 - RNA, 19 nt, Artificial Sequence
  Description of Artificial Sequence: Synthetic oligonucleotide
ggucccugugaagcugcag

SEQ ID NO: 1973503 - RNA, 19 nt, Artificial Sequence
  Description of Artificial Sequence: Synthetic oligonucleotide
uggcgcgagcucgcgcagc

SEQ ID NO: 1973504 - RNA, 19 nt, Artificial Sequence
  Description of Artificial Sequence: Synthetic oligonucleotide
aguggccggcaccgcggga

SEQ ID NO: 1973505 - RNA, 19 nt, Artificial Sequence
  Description of Artificial Sequence: Synthetic oligonucleotide
caccccgcagaaggugcag

SEQ ID NO: 1973506 - RNA, 19 nt, Artificial Sequence
  Description of Artificial Sequence: Synthetic oligonucleotide
caggagccgcauaacgccu

SEQ ID NO: 1973507 - RNA, 19 nt, Artificial Sequence
  Description of Artificial Sequence: Synthetic oligonucleotide
gcguguggcuggccaacgc

SEQ ID NO: 1973508 - RNA, 19 nt, Artificial Sequence
  Description of Artificial Sequence: Synthetic oligonucleotide
aggcgcgcgcccuccucca

SEQ ID NO: 1973509 - RNA, 19 nt, Artificial Sequence
  Description of Artificial Sequence: Synthetic oligonucleotide
ccauaucgucggcauugug

SEQ ID NO: 1973510 - RNA, 19 nt, Artificial Sequence
  Description of Artificial Sequence: Synthetic oligonucleotide
cgccgagugcacgaggucc

SEQ ID NO: 1973511 - RNA, 19 nt, Artificial Sequence
  Description of Artificial Sequence: Synthetic oligonucleotide
cucgcccgcagagcccagc

SEQ ID NO: 1973512 - RNA, 19 nt, Artificial Sequence
  Description of Artificial Sequence: Synthetic oligonucleotide
ccgguccccuccauccccg

SEQ ID NO: 1973513 - RNA, 19 nt, Artificial Sequence
  Description of Artificial Sequence: Synthetic oligonucleotide
ggagcgcacaggccuggca

SEQ ID NO: 1973514 - RNA, 19 nt, Artificial Sequence
  Description of Artificial Sequence: Synthetic oligonucleotide
cccgcagagcccagcacuc

SEQ ID NO: 1973515 - RNA, 19 nt, Artificial Sequence
  Description of Artificial Sequence: Synthetic oligonucleotide
acgccugccccgagcgcgg

SEQ ID NO: 1973516 - RNA, 19 nt, Artificial Sequence
  Description of Artificial Sequence: Synthetic oligonucleotide
cucccacgaggcgcgcgcc

SEQ ID NO: 1973517 - RNA, 19 nt, Artificial Sequence
  Description of Artificial Sequence: Synthetic oligonucleotide
agcgcgggccgcguggcaa

SEQ ID NO: 1973518 - RNA, 19 nt, Artificial Sequence
  Description of Artificial Sequence: Synthetic oligonucleotide
gugcacgccgccgcagcac

SEQ ID NO: 1973519 - RNA, 19 nt, Artificial Sequence
  Description of Artificial Sequence: Synthetic oligonucleotide
ccggcaccgcgggagagcg

SEQ ID NO: 1973520 - RNA, 19 nt, Artificial Sequence
  Description of Artificial Sequence: Synthetic oligonucleotide
ccacgauagugagcggcag

SEQ ID NO: 1973521 - RNA, 19 nt, Artificial Sequence
  Description of Artificial Sequence: Synthetic oligonucleotide
guggccugucacgaugugu

SEQ ID NO: 1973522 - RNA, 19 nt, Artificial Sequence
  Description of Artificial Sequence: Synthetic oligonucleotide
cccgguccccuccaucccc

SEQ ID NO: 1973523 - RNA, 19 nt, Artificial Sequence
  Description of Artificial Sequence: Synthetic oligonucleotide
gcgagaacaggugccugga

SEQ ID NO: 1973524 - RNA, 19 nt, Artificial Sequence
  Description of Artificial Sequence: Synthetic oligonucleotide
gcauaacgccugccccgag

SEQ ID NO: 1973525 - RNA, 19 nt, Artificial Sequence
  Description of Artificial Sequence: Synthetic oligonucleotide
gcgcguacagcaccaccuc

SEQ ID NO: 1973526 - RNA, 19 nt, Artificial Sequence
  Description of Artificial Sequence: Synthetic oligonucleotide
ggccgcguggcaagaggag

SEQ ID NO: 1973527 - RNA, 19 nt, Artificial Sequence
  Description of Artificial Sequence: Synthetic oligonucleotide
agccgccgaugcccucguc

SEQ ID NO: 1973528 - RNA, 19 nt, Artificial Sequence
  Description of Artificial Sequence: Synthetic oligonucleotide
cuccgccauaucgucggca

SEQ ID NO: 1973529 - RNA, 19 nt, Artificial Sequence
  Description of Artificial Sequence: Synthetic oligonucleotide
ggccugucacgauguguga

SEQ ID NO: 1973530 - RNA, 19 nt, Artificial Sequence
  Description of Artificial Sequence: Synthetic oligonucleotide
ccgcguggcaagaggagca

SEQ ID NO: 1973531 - RNA, 19 nt, Artificial Sequence
  Description of Artificial Sequence: Synthetic oligonucleotide
cagggucacugcuuggguu

SEQ ID NO: 1973532 - RNA, 19 nt, Artificial Sequence
  Description of Artificial Sequence: Synthetic oligonucleotide
ccaggcgcuccgccgagug

SEQ ID NO: 1973533 - RNA, 19 nt, Artificial Sequence
  Description of Artificial Sequence: Synthetic oligonucleotide
cugcauaggccacgauagu

SEQ ID NO: 1973534 - RNA, 19 nt, Artificial Sequence
  Description of Artificial Sequence: Synthetic oligonucleotide
gcgcauacacgcacucuuc

SEQ ID NO: 1973535 - RNA, 19 nt, Artificial Sequence
  Description of Artificial Sequence: Synthetic oligonucleotide
gcagcacgugugccaguac

SEQ ID NO: 1973536 - RNA, 19 nt, Artificial Sequence
  Description of Artificial Sequence: Synthetic oligonucleotide
caacgccccgcagcgagaa

SEQ ID NO: 1973537 - RNA, 19 nt, Artificial Sequence
  Description of Artificial Sequence: Synthetic oligonucleotide
caccgcgggagagcgcauc

SEQ ID NO: 1973538 - RNA, 19 nt, Artificial Sequence
  Description of Artificial Sequence: Synthetic oligonucleotide
caccgcgcaggaaauucau

SEQ ID NO: 1973539 - RNA, 19 nt, Artificial Sequence
  Description of Artificial Sequence: Synthetic oligonucleotide
ccagcgcgcugccuggcug

SEQ ID NO: 1973540 - RNA, 19 nt, Artificial Sequence
  Description of Artificial Sequence: Synthetic oligonucleotide
gccaccagguguagcguga

SEQ ID NO: 1973541 - RNA, 19 nt, Artificial Sequence
  Description of Artificial Sequence: Synthetic oligonucleotide
ggucacucugcaggacaca

SEQ ID NO: 1973542 - RNA, 19 nt, Artificial Sequence
  Description of Artificial Sequence: Synthetic oligonucleotide
ggcguccaucguccagccc

SEQ ID NO: 1973543 - RNA, 19 nt, Artificial Sequence
  Description of Artificial Sequence: Synthetic oligonucleotide
gccugucacgaugugugaa

SEQ ID NO: 1973544 - RNA, 19 nt, Artificial Sequence
  Description of Artificial Sequence: Synthetic oligonucleotide
augcccaggcguggcgcga

SEQ ID NO: 1973545 - RNA, 19 nt, Artificial Sequence
  Description of Artificial Sequence: Synthetic oligonucleotide
cgugaugcccaggcguggc

SEQ ID NO: 1973546 - RNA, 19 nt, Artificial Sequence
  Description of Artificial Sequence: Synthetic oligonucleotide
cguggcgcgagcucgcgca

SEQ ID NO: 1973547 - RNA, 19 nt, Artificial Sequence
  Description of Artificial Sequence: Synthetic oligonucleotide
ggucacugcuuggguuccc

SEQ ID NO: 1973548 - RNA, 19 nt, Artificial Sequence
  Description of Artificial Sequence: Synthetic oligonucleotide
gccgcagcaccccgcagaa

SEQ ID NO: 1973549 - RNA, 19 nt, Artificial Sequence
  Description of Artificial Sequence: Synthetic oligonucleotide
ccccgaacaggucugcaua

SEQ ID NO: 1973550 - RNA, 19 nt, Artificial Sequence
  Description of Artificial Sequence: Synthetic oligonucleotide
ccccgcagaaggugcagca

SEQ ID NO: 1973551 - RNA, 19 nt, Artificial Sequence
  Description of Artificial Sequence: Synthetic oligonucleotide
ugcgagccacggcguccau

SEQ ID NO: 1973552 - RNA, 19 nt, Artificial Sequence
  Description of Artificial Sequence: Synthetic oligonucleotide
ggcguggcgcgagcucgcg

SEQ ID NO: 1973553 - RNA, 19 nt, Artificial Sequence
  Description of Artificial Sequence: Synthetic oligonucleotide
gcagcgagaacaggugccu

SEQ ID NO: 1973554 - RNA, 19 nt, Artificial Sequence
  Description of Artificial Sequence: Synthetic oligonucleotide
ccgccgaugcccucgucca

SEQ ID NO: 1973555 - RNA, 19 nt, Artificial Sequence
  Description of Artificial Sequence: Synthetic oligonucleotide
gcggcggaagugcgcguac

SEQ ID NO: 1973556 - RNA, 19 nt, Artificial Sequence
  Description of Artificial Sequence: Synthetic oligonucleotide
cgggccgcguggcaagagg

SEQ ID NO: 1973557 - RNA, 19 nt, Artificial Sequence
  Description of Artificial Sequence: Synthetic oligonucleotide
auccccgcacaggguggcu

SEQ ID NO: 1973558 - RNA, 19 nt, Artificial Sequence
  Description of Artificial Sequence: Synthetic oligonucleotide
gcgcgggccgcguggcaag

SEQ ID NO: 1973559 - RNA, 19 nt, Artificial Sequence
  Description of Artificial Sequence: Synthetic oligonucleotide
cguggcaagaggagcacgu

SEQ ID NO: 1973560 - RNA, 19 nt, Artificial Sequence
  Description of Artificial Sequence: Synthetic oligonucleotide
gguagccgccgaugcccuc

SEQ ID NO: 1973561 - RNA, 19 nt, Artificial Sequence
  Description of Artificial Sequence: Synthetic oligonucleotide
cuccauccccgcacagggu

SEQ ID NO: 1973562 - RNA, 19 nt, Artificial Sequence
  Description of Artificial Sequence: Synthetic oligonucleotide
gcguggcgcgagcucgcgc

SEQ ID NO: 1973563 - RNA, 19 nt, Artificial Sequence
  Description of Artificial Sequence: Synthetic oligonucleotide
gcgcaucccucgcccgcag

SEQ ID NO: 1973564 - RNA, 19 nt, Artificial Sequence
  Description of Artificial Sequence: Synthetic oligonucleotide
gcacgagguccagcacugc

SEQ ID NO: 1973565 - RNA, 19 nt, Artificial Sequence
  Description of Artificial Sequence: Synthetic oligonucleotide
ggcgcgcgcccuccuccag

SEQ ID NO: 1973566 - RNA, 19 nt, Artificial Sequence
  Description of Artificial Sequence: Synthetic oligonucleotide
gccggcaccgcgggagagc

SEQ ID NO: 1973567 - RNA, 19 nt, Artificial Sequence
  Description of Artificial Sequence: Synthetic oligonucleotide
ccggggcaagagccaggcg

SEQ ID NO: 1973568 - RNA, 19 nt, Artificial Sequence
  Description of Artificial Sequence: Synthetic oligonucleotide
gcacguuggggcgggcauc

SEQ ID NO: 1973569 - RNA, 19 nt, Artificial Sequence
  Description of Artificial Sequence: Synthetic oligonucleotide
gcgggagagcgcaucccuc

SEQ ID NO: 1973570 - RNA, 19 nt, Artificial Sequence
  Description of Artificial Sequence: Synthetic oligonucleotide
ggcuggccaacgccccgca

SEQ ID NO: 1973571 - RNA, 19 nt, Artificial Sequence
  Description of Artificial Sequence: Synthetic oligonucleotide
ggcgagcgcgggccgcgug

SEQ ID NO: 1973572 - RNA, 19 nt, Artificial Sequence
  Description of Artificial Sequence: Synthetic oligonucleotide
ccgcagagcccagcacucc

SEQ ID NO: 1973573 - RNA, 19 nt, Artificial Sequence
  Description of Artificial Sequence: Synthetic oligonucleotide
gcccugcgagcacggugug

SEQ ID NO: 1973574 - RNA, 19 nt, Artificial Sequence
  Description of Artificial Sequence: Synthetic oligonucleotide
cgcgcugccuggcugcuca

SEQ ID NO: 1973575 - RNA, 19 nt, Artificial Sequence
  Description of Artificial Sequence: Synthetic oligonucleotide
gcagagcguguggcuggcc

SEQ ID NO: 1973576 - RNA, 19 nt, Artificial Sequence
  Description of Artificial Sequence: Synthetic oligonucleotide
cgcgcgcccuccuccagug

SEQ ID NO: 1973577 - RNA, 19 nt, Artificial Sequence
  Description of Artificial Sequence: Synthetic oligonucleotide
cccugcgagcacggugugc

SEQ ID NO: 1973578 - RNA, 19 nt, Artificial Sequence
  Description of Artificial Sequence: Synthetic oligonucleotide
gcaccccgcagaaggugca

SEQ ID NO: 1973579 - RNA, 19 nt, Artificial Sequence
  Description of Artificial Sequence: Synthetic oligonucleotide
ggccggcaccgcgggagag

SEQ ID NO: 1973580 - RNA, 19 nt, Artificial Sequence
  Description of Artificial Sequence: Synthetic oligonucleotide
ccucgggcgcauacacgca

SEQ ID NO: 1973581 - RNA, 19 nt, Artificial Sequence
  Description of Artificial Sequence: Synthetic oligonucleotide
gagccacggcguccaucgu

SEQ ID NO: 1973582 - RNA, 19 nt, Artificial Sequence
  Description of Artificial Sequence: Synthetic oligonucleotide
cgcacaggguggcuccauc

SEQ ID NO: 1973583 - RNA, 19 nt, Artificial Sequence
  Description of Artificial Sequence: Synthetic oligonucleotide
cgauagugagcggcagcuc

SEQ ID NO: 1973584 - RNA, 19 nt, Artificial Sequence
  Description of Artificial Sequence: Synthetic oligonucleotide
ccgccggggcaagagccag

SEQ ID NO: 1973585 - RNA, 19 nt, Artificial Sequence
  Description of Artificial Sequence: Synthetic oligonucleotide
gccauaucgucggcauugu

SEQ ID NO: 1973586 - RNA, 19 nt, Artificial Sequence
  Description of Artificial Sequence: Synthetic oligonucleotide
cgggcgcauacacgcacuc

SEQ ID NO: 1973587 - RNA, 19 nt, Artificial Sequence
  Description of Artificial Sequence: Synthetic oligonucleotide
ccgaagcgcccacggccac

SEQ ID NO: 1973588 - RNA, 19 nt, Artificial Sequence
  Description of Artificial Sequence: Synthetic oligonucleotide
ccgcgggagagcgcauccc

SEQ ID NO: 1973589 - RNA, 19 nt, Artificial Sequence
  Description of Artificial Sequence: Synthetic oligonucleotide
ccgccgagugcacgagguc

SEQ ID NO: 1973590 - RNA, 19 nt, Artificial Sequence
  Description of Artificial Sequence: Synthetic oligonucleotide
ccaacgccccgcagcgaga

SEQ ID NO: 1973591 - RNA, 19 nt, Artificial Sequence
  Description of Artificial Sequence: Synthetic oligonucleotide
gcggcggcccuugccgaug

SEQ ID NO: 1973592 - RNA, 19 nt, Artificial Sequence
  Description of Artificial Sequence: Synthetic oligonucleotide
cagcaucaccgcgcaggaa

SEQ ID NO: 1973593 - RNA, 19 nt, Artificial Sequence
  Description of Artificial Sequence: Synthetic oligonucleotide
gcaucaccgcgcaggaaau

SEQ ID NO: 1973594 - RNA, 19 nt, Artificial Sequence
  Description of Artificial Sequence: Synthetic oligonucleotide
ggcggcggaagugcgcgua

SEQ ID NO: 1973595 - RNA, 19 nt, Artificial Sequence
  Description of Artificial Sequence: Synthetic oligonucleotide
gcgcuugagcaggucucga

SEQ ID NO: 1973596 - RNA, 19 nt, Artificial Sequence
  Description of Artificial Sequence: Synthetic oligonucleotide
gcagcacuucggccucaaa

SEQ ID NO: 1973597 - RNA, 19 nt, Artificial Sequence
  Description of Artificial Sequence: Synthetic oligonucleotide
gcgcccuccuccagugcac

SEQ ID NO: 1973598 - RNA, 19 nt, Artificial Sequence
  Description of Artificial Sequence: Synthetic oligonucleotide
gcccaggcguggcgcgagc

SEQ ID NO: 1973599 - RNA, 19 nt, Artificial Sequence
  Description of Artificial Sequence: Synthetic oligonucleotide
gugcugcgagccacggcgu

SEQ ID NO: 1973600 - RNA, 19 nt, Artificial Sequence
  Description of Artificial Sequence: Synthetic oligonucleotide
aggccucgauugaggccau

SEQ ID NO: 1973601 - RNA, 19 nt, Artificial Sequence
  Description of Artificial Sequence: Synthetic oligonucleotide
cgcguggcaagaggagcac

SEQ ID NO: 1973602 - RNA, 19 nt, Artificial Sequence
  Description of Artificial Sequence: Synthetic oligonucleotide
gugaagcugcagggucacu

SEQ ID NO: 1973603 - RNA, 19 nt, Artificial Sequence
  Description of Artificial Sequence: Synthetic oligonucleotide
cgcauaacgccugccccga

SEQ ID NO: 1973604 - RNA, 19 nt, Artificial Sequence
  Description of Artificial Sequence: Synthetic oligonucleotide
ggagcacguuggggcgggc

SEQ ID NO: 1973605 - RNA, 19 nt, Artificial Sequence
  Description of Artificial Sequence: Synthetic oligonucleotide
gcgggccgcguggcaagag

SEQ ID NO: 1973606 - RNA, 19 nt, Artificial Sequence
  Description of Artificial Sequence: Synthetic oligonucleotide
gggcgcauacacgcacucu

SEQ ID NO: 1973607 - RNA, 19 nt, Artificial Sequence
  Description of Artificial Sequence: Synthetic oligonucleotide
gccgccggggcaagagcca

SEQ ID NO: 1973608 - RNA, 19 nt, Artificial Sequence
  Description of Artificial Sequence: Synthetic oligonucleotide
ggcgcuccgccgagugcac

SEQ ID NO: 1973609 - RNA, 19 nt, Artificial Sequence
  Description of Artificial Sequence: Synthetic oligonucleotide
ccccgacaguggaggcuug

SEQ ID NO: 1973610 - RNA, 19 nt, Artificial Sequence
  Description of Artificial Sequence: Synthetic oligonucleotide
caucaccgcgcaggaaauu

SEQ ID NO: 1973611 - RNA, 19 nt, Artificial Sequence
  Description of Artificial Sequence: Synthetic oligonucleotide
gcgucacgguagccgccga

SEQ ID NO: 1973612 - RNA, 19 nt, Artificial Sequence
  Description of Artificial Sequence: Synthetic oligonucleotide
ccacgaggcgcgcgcccuc

SEQ ID NO: 1973613 - RNA, 19 nt, Artificial Sequence
  Description of Artificial Sequence: Synthetic oligonucleotide
ggucugcauaggccacgau

SEQ ID NO: 1973614 - RNA, 19 nt, Artificial Sequence
  Description of Artificial Sequence: Synthetic oligonucleotide
cgccgaugcccucguccac

SEQ ID NO: 1973615 - RNA, 19 nt, Artificial Sequence
  Description of Artificial Sequence: Synthetic oligonucleotide
cgcccgcagagcccagcac

SEQ ID NO: 1973616 - RNA, 19 nt, Artificial Sequence
  Description of Artificial Sequence: Synthetic oligonucleotide
ccucgcccgcagagcccag

SEQ ID NO: 1973617 - RNA, 19 nt, Artificial Sequence
  Description of Artificial Sequence: Synthetic oligonucleotide
cgcagcacgugugccagua

SEQ ID NO: 1973618 - RNA, 19 nt, Artificial Sequence
  Description of Artificial Sequence: Synthetic oligonucleotide
ccgccgcagcaccccgcag

SEQ ID NO: 1973619 - RNA, 19 nt, Artificial Sequence
  Description of Artificial Sequence: Synthetic oligonucleotide
ggccaacgccccgcagcga

SEQ ID NO: 1973620 - RNA, 19 nt, Artificial Sequence
  Description of Artificial Sequence: Synthetic oligonucleotide
ggccucgauugaggccauc

SEQ ID NO: 1973621 - RNA, 19 nt, Artificial Sequence
  Description of Artificial Sequence: Synthetic oligonucleotide
cgcgggagagcgcaucccu

SEQ ID NO: 1973622 - RNA, 19 nt, Artificial Sequence
  Description of Artificial Sequence: Synthetic oligonucleotide
ggugcccugcgagcacggu

SEQ ID NO: 1973623 - RNA, 19 nt, Artificial Sequence
  Description of Artificial Sequence: Synthetic oligonucleotide
cggcaccgcgggagagcgc

SEQ ID NO: 1973624 - RNA, 19 nt, Artificial Sequence
  Description of Artificial Sequence: Synthetic oligonucleotide
cggcggaagugcgcguaca

SEQ ID NO: 1973625 - RNA, 19 nt, Artificial Sequence
  Description of Artificial Sequence: Synthetic oligonucleotide
cccacgaggcgcgcgcccu

SEQ ID NO: 1973626 - RNA, 19 nt, Artificial Sequence
  Description of Artificial Sequence: Synthetic oligonucleotide
cgguagccgccgaugcccu

SEQ ID NO: 1973627 - RNA, 19 nt, Artificial Sequence
  Description of Artificial Sequence: Synthetic oligonucleotide
cccagcgcgcugccuggcu

SEQ ID NO: 1973628 - RNA, 19 nt, Artificial Sequence
  Description of Artificial Sequence: Synthetic oligonucleotide
cgccugccccgagcgcggg

SEQ ID NO: 1973629 - RNA, 19 nt, Artificial Sequence
  Description of Artificial Sequence: Synthetic oligonucleotide
cccaggcguggcgcgagcu

SEQ ID NO: 1973630 - RNA, 19 nt, Artificial Sequence
  Description of Artificial Sequence: Synthetic oligonucleotide
cgcgccagccgcccagcau

SEQ ID NO: 1973631 - RNA, 19 nt, Artificial Sequence
  Description of Artificial Sequence: Synthetic oligonucleotide
cgcgggccgcguggcaaga

SEQ ID NO: 1973632 - RNA, 19 nt, Artificial Sequence
  Description of Artificial Sequence: Synthetic oligonucleotide
gcaccgcgggagagcgcau

SEQ ID NO: 1973633 - RNA, 19 nt, Artificial Sequence
  Description of Artificial Sequence: Synthetic oligonucleotide
ccggggcagcaggugcccu

SEQ ID NO: 1973634 - RNA, 19 nt, Artificial Sequence
  Description of Artificial Sequence: Synthetic oligonucleotide
cgcggcggcccuugccgau

SEQ ID NO: 1973635 - RNA, 19 nt, Artificial Sequence
  Description of Artificial Sequence: Synthetic oligonucleotide
acucagacuagucauaucc

SEQ ID NO: 1973636 - RNA, 19 nt, Artificial Sequence
  Description of Artificial Sequence: Synthetic oligonucleotide
auauaacccacucuguacc

SEQ ID NO: 1973637 - RNA, 19 nt, Artificial Sequence
  Description of Artificial Sequence: Synthetic oligonucleotide
aaauauauuuucugccagg

SEQ ID NO: 1973638 - RNA, 19 nt, Artificial Sequence
  Description of Artificial Sequence: Synthetic oligonucleotide
uguucaguggaacaauggg

SEQ ID NO: 1973639 - RNA, 19 nt, Artificial Sequence
  Description of Artificial Sequence: Synthetic oligonucleotide
gaaauauauuuucugccag

SEQ ID NO: 1973640 - RNA, 19 nt, Artificial Sequence
  Description of Artificial Sequence: Synthetic oligonucleotide
aaucggagaagcgaccugc

SEQ ID NO: 1973641 - RNA, 19 nt, Artificial Sequence
  Description of Artificial Sequence: Synthetic oligonucleotide
agucauauccaccacacca

SEQ ID NO: 1973642 - RNA, 19 nt, Artificial Sequence
  Description of Artificial Sequence: Synthetic oligonucleotide
ugaaugccagccuugaacc

SEQ ID NO: 1973643 - RNA, 19 nt, Artificial Sequence
  Description of Artificial Sequence: Synthetic oligonucleotide
ucugcaaggagcuggagca

SEQ ID NO: 1973644 - RNA, 19 nt, Artificial Sequence
  Description of Artificial Sequence: Synthetic oligonucleotide
uaguacagcagcaggauug

SEQ ID NO: 1973645 - RNA, 19 nt, Artificial Sequence
  Description of Artificial Sequence: Synthetic oligonucleotide
cuuucugucacucaggaga

SEQ ID NO: 1973646 - RNA, 19 nt, Artificial Sequence
  Description of Artificial Sequence: Synthetic oligonucleotide
acucuguuugaccucuucc

SEQ ID NO: 1973647 - RNA, 19 nt, Artificial Sequence
  Description of Artificial Sequence: Synthetic oligonucleotide
gaagcgaccugccagcagg

SEQ ID NO: 1973648 - RNA, 19 nt, Artificial Sequence
  Description of Artificial Sequence: Synthetic oligonucleotide
gauauggucugcaaggagc

SEQ ID NO: 1973649 - RNA, 19 nt, Artificial Sequence
  Description of Artificial Sequence: Synthetic oligonucleotide
ugugaaucggagaagcgac

SEQ ID NO: 1973650 - RNA, 19 nt, Artificial Sequence
  Description of Artificial Sequence: Synthetic oligonucleotide
guuucugccgaauuucccg

SEQ ID NO: 1973651 - RNA, 19 nt, Artificial Sequence
  Description of Artificial Sequence: Synthetic oligonucleotide
aacucagacagcucgugug

SEQ ID NO: 1973652 - RNA, 19 nt, Artificial Sequence
  Description of Artificial Sequence: Synthetic oligonucleotide
uauccaccacaccagagag

SEQ ID NO: 1973653 - RNA, 19 nt, Artificial Sequence
  Description of Artificial Sequence: Synthetic oligonucleotide
auauuuucugccaggaggg

SEQ ID NO: 1973654 - RNA, 19 nt, Artificial Sequence
  Description of Artificial Sequence: Synthetic oligonucleotide
uacaaagacucugcaaugg

SEQ ID NO: 1973655 - RNA, 19 nt, Artificial Sequence
  Description of Artificial Sequence: Synthetic oligonucleotide
uuuuccgaagcuccuuccg

SEQ ID NO: 1973656 - RNA, 19 nt, Artificial Sequence
  Description of Artificial Sequence: Synthetic oligonucleotide
augagagcaaugacgagcc

SEQ ID NO: 1973657 - RNA, 19 nt, Artificial Sequence
  Description of Artificial Sequence: Synthetic oligonucleotide
acauaugauggcuccuggc

SEQ ID NO: 1973658 - RNA, 19 nt, Artificial Sequence
  Description of Artificial Sequence: Synthetic oligonucleotide
ucacucaggagacucagac

SEQ ID NO: 1973659 - RNA, 19 nt, Artificial Sequence
  Description of Artificial Sequence: Synthetic oligonucleotide
caccauauaacccacucug

SEQ ID NO: 1973660 - RNA, 19 nt, Artificial Sequence
  Description of Artificial Sequence: Synthetic oligonucleotide
cauauaacccacucuguac

SEQ ID NO: 1973661 - RNA, 19 nt, Artificial Sequence
  Description of Artificial Sequence: Synthetic oligonucleotide
agaguacaccaacucagac

SEQ ID NO: 1973662 - RNA, 19 nt, Artificial Sequence
  Description of Artificial Sequence: Synthetic oligonucleotide
ugggugacgagucacguac

SEQ ID NO: 1973663 - RNA, 19 nt, Artificial Sequence
  Description of Artificial Sequence: Synthetic oligonucleotide
agaggcagaguacaccaac

SEQ ID NO: 1973664 - RNA, 19 nt, Artificial Sequence
  Description of Artificial Sequence: Synthetic oligonucleotide
guucgcaccacucuguuug

SEQ ID NO: 1973665 - RNA, 19 nt, Artificial Sequence
  Description of Artificial Sequence: Synthetic oligonucleotide
uucccuucgggucagacuc

SEQ ID NO: 1973666 - RNA, 19 nt, Artificial Sequence
  Description of Artificial Sequence: Synthetic oligonucleotide
uguccaugaccguugaccc

SEQ ID NO: 1973667 - RNA, 19 nt, Artificial Sequence
  Description of Artificial Sequence: Synthetic oligonucleotide
agcaaugacgagccaacgg

SEQ ID NO: 1973668 - RNA, 19 nt, Artificial Sequence
  Description of Artificial Sequence: Synthetic oligonucleotide
gaaggaucccgucauugag

SEQ ID NO: 1973669 - RNA, 19 nt, Artificial Sequence
  Description of Artificial Sequence: Synthetic oligonucleotide
aaccagaucagcaggaaca

SEQ ID NO: 1973670 - RNA, 19 nt, Artificial Sequence
  Description of Artificial Sequence: Synthetic oligonucleotide
agucacguacuccugguag

SEQ ID NO: 1973671 - RNA, 19 nt, Artificial Sequence
  Description of Artificial Sequence: Synthetic oligonucleotide
guucaguggaacaaugggg

SEQ ID NO: 1973672 - RNA, 19 nt, Artificial Sequence
  Description of Artificial Sequence: Synthetic oligonucleotide
guagcggaggcccaaaagc

SEQ ID NO: 1973673 - RNA, 19 nt, Artificial Sequence
  Description of Artificial Sequence: Synthetic oligonucleotide
gagaagcggucauagaaug

SEQ ID NO: 1973674 - RNA, 19 nt, Artificial Sequence
  Description of Artificial Sequence: Synthetic oligonucleotide
gaucccgucauugagcagc

SEQ ID NO: 1973675 - RNA, 19 nt, Artificial Sequence
  Description of Artificial Sequence: Synthetic oligonucleotide
gaccguugaccccagaagc

SEQ ID NO: 1973676 - RNA, 19 nt, Artificial Sequence
  Description of Artificial Sequence: Synthetic oligonucleotide
ugaccguugaccccagaag

SEQ ID NO: 1973677 - RNA, 19 nt, Artificial Sequence
  Description of Artificial Sequence: Synthetic oligonucleotide
cauagaauggggagcguag

SEQ ID NO: 1973678 - RNA, 19 nt, Artificial Sequence
  Description of Artificial Sequence: Synthetic oligonucleotide
guggucaccauccaagggc

SEQ ID NO: 1973679 - RNA, 19 nt, Artificial Sequence
  Description of Artificial Sequence: Synthetic oligonucleotide
uaugauggcuccuggcugc

SEQ ID NO: 1973680 - RNA, 19 nt, Artificial Sequence
  Description of Artificial Sequence: Synthetic oligonucleotide
cugaaugccagccuugaac

SEQ ID NO: 1973681 - RNA, 19 nt, Artificial Sequence
  Description of Artificial Sequence: Synthetic oligonucleotide
uacaccaacucagacagcu

SEQ ID NO: 1973682 - RNA, 19 nt, Artificial Sequence
  Description of Artificial Sequence: Synthetic oligonucleotide
aaugccagccuugaaccag

SEQ ID NO: 1973683 - RNA, 19 nt, Artificial Sequence
  Description of Artificial Sequence: Synthetic oligonucleotide
gaugggcuguucuggaggg

SEQ ID NO: 1973684 - RNA, 19 nt, Artificial Sequence
  Description of Artificial Sequence: Synthetic oligonucleotide
caccaacucagacagcucg

SEQ ID NO: 1973685 - RNA, 19 nt, Artificial Sequence
  Description of Artificial Sequence: Synthetic oligonucleotide
augucugucagccccaacu

SEQ ID NO: 1973686 - RNA, 19 nt, Artificial Sequence
  Description of Artificial Sequence: Synthetic oligonucleotide
auauauuuucugccaggag

SEQ ID NO: 1973687 - RNA, 19 nt, Artificial Sequence
  Description of Artificial Sequence: Synthetic oligonucleotide
ugacgagucacguacuccu

SEQ ID NO: 1973688 - RNA, 19 nt, Artificial Sequence
  Description of Artificial Sequence: Synthetic oligonucleotide
acuagucauauccaccaca

SEQ ID NO: 1973689 - RNA, 19 nt, Artificial Sequence
  Description of Artificial Sequence: Synthetic oligonucleotide
auaugauggcuccuggcug

SEQ ID NO: 1973690 - RNA, 19 nt, Artificial Sequence
  Description of Artificial Sequence: Synthetic oligonucleotide
aacgccagggauauggucu

SEQ ID NO: 1973691 - RNA, 19 nt, Artificial Sequence
  Description of Artificial Sequence: Synthetic oligonucleotide
uauaacccacucuguaccc

SEQ ID NO: 1973692 - RNA, 19 nt, Artificial Sequence
  Description of Artificial Sequence: Synthetic oligonucleotide
auagaauggggagcguagc

SEQ ID NO: 1973693 - RNA, 19 nt, Artificial Sequence
  Description of Artificial Sequence: Synthetic oligonucleotide
gcacaagcagguuagaggc

SEQ ID NO: 1973694 - RNA, 19 nt, Artificial Sequence
  Description of Artificial Sequence: Synthetic oligonucleotide
cagacuagucauauccacc

SEQ ID NO: 1973695 - RNA, 19 nt, Artificial Sequence
  Description of Artificial Sequence: Synthetic oligonucleotide
uugaaccagaucagcagga

SEQ ID NO: 1973696 - RNA, 19 nt, Artificial Sequence
  Description of Artificial Sequence: Synthetic oligonucleotide
gaguacaccaacucagaca

SEQ ID NO: 1973697 - RNA, 19 nt, Artificial Sequence
  Description of Artificial Sequence: Synthetic oligonucleotide
agcaggauugugcggcgcc

SEQ ID NO: 1973698 - RNA, 19 nt, Artificial Sequence
  Description of Artificial Sequence: Synthetic oligonucleotide
ugugcggcgccucagcucu

SEQ ID NO: 1973699 - RNA, 19 nt, Artificial Sequence
  Description of Artificial Sequence: Synthetic oligonucleotide
uccaugagcggccuugcca

SEQ ID NO: 1973700 - RNA, 19 nt, Artificial Sequence
  Description of Artificial Sequence: Synthetic oligonucleotide
ugaggucugaaugccagcc

SEQ ID NO: 1973701 - RNA, 19 nt, Artificial Sequence
  Description of Artificial Sequence: Synthetic oligonucleotide
agagcaaugacgagccaac

SEQ ID NO: 1973702 - RNA, 19 nt, Artificial Sequence
  Description of Artificial Sequence: Synthetic oligonucleotide
cuugccacuaggccaacgc

SEQ ID NO: 1973703 - RNA, 19 nt, Artificial Sequence
  Description of Artificial Sequence: Synthetic oligonucleotide
ugaacaccuccacacacuc

SEQ ID NO: 1973704 - RNA, 19 nt, Artificial Sequence
  Description of Artificial Sequence: Synthetic oligonucleotide
gagcguagcagguaguaca

SEQ ID NO: 1973705 - RNA, 19 nt, Artificial Sequence
  Description of Artificial Sequence: Synthetic oligonucleotide
gagccaacggccuacuuca

SEQ ID NO: 1973706 - RNA, 19 nt, Artificial Sequence
  Description of Artificial Sequence: Synthetic oligonucleotide
uagaauggggagcguagca

SEQ ID NO: 1973707 - RNA, 19 nt, Artificial Sequence
  Description of Artificial Sequence: Synthetic oligonucleotide
aggagacucagacuaguca

SEQ ID NO: 1973708 - RNA, 19 nt, Artificial Sequence
  Description of Artificial Sequence: Synthetic oligonucleotide
auggucugcaaggagcugg

SEQ ID NO: 1973709 - RNA, 19 nt, Artificial Sequence
  Description of Artificial Sequence: Synthetic oligonucleotide
uuuccgaagcuccuuccga

SEQ ID NO: 1973710 - RNA, 19 nt, Artificial Sequence
  Description of Artificial Sequence: Synthetic oligonucleotide
ucgugugaaucggagaagc

SEQ ID NO: 1973711 - RNA, 19 nt, Artificial Sequence
  Description of Artificial Sequence: Synthetic oligonucleotide
guguccaugaccguugacc

SEQ ID NO: 1973712 - RNA, 19 nt, Artificial Sequence
  Description of Artificial Sequence: Synthetic oligonucleotide
gcaaugacgagccaacggc

SEQ ID NO: 1973713 - RNA, 19 nt, Artificial Sequence
  Description of Artificial Sequence: Synthetic oligonucleotide
agacagcucgugugaaucg

SEQ ID NO: 1973714 - RNA, 19 nt, Artificial Sequence
  Description of Artificial Sequence: Synthetic oligonucleotide
ugaccucuuccccacauau

SEQ ID NO: 1973715 - RNA, 19 nt, Artificial Sequence
  Description of Artificial Sequence: Synthetic oligonucleotide
gaacaugcgcaggacagcc

SEQ ID NO: 1973716 - RNA, 19 nt, Artificial Sequence
  Description of Artificial Sequence: Synthetic oligonucleotide
acgagucacguacuccugg

SEQ ID NO: 1973717 - RNA, 19 nt, Artificial Sequence
  Description of Artificial Sequence: Synthetic oligonucleotide
gaucagcaggaacaugcgc

SEQ ID NO: 1973718 - RNA, 19 nt, Artificial Sequence
  Description of Artificial Sequence: Synthetic oligonucleotide
ggucauagaauggggagcg

SEQ ID NO: 1973719 - RNA, 19 nt, Artificial Sequence
  Description of Artificial Sequence: Synthetic oligonucleotide
accauccaagggcugcgcc

SEQ ID NO: 1973720 - RNA, 19 nt, Artificial Sequence
  Description of Artificial Sequence: Synthetic oligonucleotide
acugaggccccgcacugcg

SEQ ID NO: 1973721 - RNA, 19 nt, Artificial Sequence
  Description of Artificial Sequence: Synthetic oligonucleotide
guuagaggcagaguacacc

SEQ ID NO: 1973722 - RNA, 19 nt, Artificial Sequence
  Description of Artificial Sequence: Synthetic oligonucleotide
aggaucccgucauugagca

SEQ ID NO: 1973723 - RNA, 19 nt, Artificial Sequence
  Description of Artificial Sequence: Synthetic oligonucleotide
cauauccaccacaccagag

SEQ ID NO: 1973724 - RNA, 19 nt, Artificial Sequence
  Description of Artificial Sequence: Synthetic oligonucleotide
agcucuagccguucccuuc

SEQ ID NO: 1973725 - RNA, 19 nt, Artificial Sequence
  Description of Artificial Sequence: Synthetic oligonucleotide
ucugucacucaggagacuc

SEQ ID NO: 1973726 - RNA, 19 nt, Artificial Sequence
  Description of Artificial Sequence: Synthetic oligonucleotide
ugaaucggagaagcgaccu

SEQ ID NO: 1973727 - RNA, 19 nt, Artificial Sequence
  Description of Artificial Sequence: Synthetic oligonucleotide
uuucugccgaauuucccgu

SEQ ID NO: 1973728 - RNA, 19 nt, Artificial Sequence
  Description of Artificial Sequence: Synthetic oligonucleotide
uccugcuacggccaccggc

SEQ ID NO: 1973729 - RNA, 19 nt, Artificial Sequence
  Description of Artificial Sequence: Synthetic oligonucleotide
ugggucucccuguucagug

SEQ ID NO: 1973730 - RNA, 19 nt, Artificial Sequence
  Description of Artificial Sequence: Synthetic oligonucleotide
ugucacucaggagacucag

SEQ ID NO: 1973731 - RNA, 19 nt, Artificial Sequence
  Description of Artificial Sequence: Synthetic oligonucleotide
uggccgacagcacggcugg

SEQ ID NO: 1973732 - RNA, 19 nt, Artificial Sequence
  Description of Artificial Sequence: Synthetic oligonucleotide
accccagaagcccaggcug

SEQ ID NO: 1973733 - RNA, 19 nt, Artificial Sequence
  Description of Artificial Sequence: Synthetic oligonucleotide
gacagcucgugugaaucgg

SEQ ID NO: 1973734 - RNA, 19 nt, Artificial Sequence
  Description of Artificial Sequence: Synthetic oligonucleotide
ucuagccguucccuucggg

SEQ ID NO: 1973735 - RNA, 19 nt, Artificial Sequence
  Description of Artificial Sequence: Synthetic oligonucleotide
acaccauauaacccacucu

SEQ ID NO: 1973736 - RNA, 19 nt, Artificial Sequence
  Description of Artificial Sequence: Synthetic oligonucleotide
cacaccauauaacccacuc

SEQ ID NO: 1973737 - RNA, 19 nt, Artificial Sequence
  Description of Artificial Sequence: Synthetic oligonucleotide
accguugaccccagaagcc

SEQ ID NO: 1973738 - RNA, 19 nt, Artificial Sequence
  Description of Artificial Sequence: Synthetic oligonucleotide
gaggguucgcaccacucug

SEQ ID NO: 1973739 - RNA, 19 nt, Artificial Sequence
  Description of Artificial Sequence: Synthetic oligonucleotide
aaugacgagccaacggccu

SEQ ID NO: 1973740 - RNA, 19 nt, Artificial Sequence
  Description of Artificial Sequence: Synthetic oligonucleotide
cagggauauggucugcaag

SEQ ID NO: 1973741 - RNA, 19 nt, Artificial Sequence
  Description of Artificial Sequence: Synthetic oligonucleotide
agcagcacaagcagguuag

SEQ ID NO: 1973742 - RNA, 19 nt, Artificial Sequence
  Description of Artificial Sequence: Synthetic oligonucleotide
uccacacacuccagcacgc

SEQ ID NO: 1973743 - RNA, 19 nt, Artificial Sequence
  Description of Artificial Sequence: Synthetic oligonucleotide
aagcggucauagaaugggg

SEQ ID NO: 1973744 - RNA, 19 nt, Artificial Sequence
  Description of Artificial Sequence: Synthetic oligonucleotide
ggccgggcaauauacaaag

SEQ ID NO: 1973745 - RNA, 19 nt, Artificial Sequence
  Description of Artificial Sequence: Synthetic oligonucleotide
ucuguacccacuccugcau

SEQ ID NO: 1973746 - RNA, 19 nt, Artificial Sequence
  Description of Artificial Sequence: Synthetic oligonucleotide
cuucgggucagacucuuuc

SEQ ID NO: 1973747 - RNA, 19 nt, Artificial Sequence
  Description of Artificial Sequence: Synthetic oligonucleotide
gauugugcggcgccucagc

SEQ ID NO: 1973748 - RNA, 19 nt, Artificial Sequence
  Description of Artificial Sequence: Synthetic oligonucleotide
uacuccugguagcggaggc

SEQ ID NO: 1973749 - RNA, 19 nt, Artificial Sequence
  Description of Artificial Sequence: Synthetic oligonucleotide
gggcaauauacaaagacuc

SEQ ID NO: 1973750 - RNA, 19 nt, Artificial Sequence
  Description of Artificial Sequence: Synthetic oligonucleotide
aacggccuacuucacccca

SEQ ID NO: 1973751 - RNA, 19 nt, Artificial Sequence
  Description of Artificial Sequence: Synthetic oligonucleotide
uccgaagcuccuuccgaag

SEQ ID NO: 1973752 - RNA, 19 nt, Artificial Sequence
  Description of Artificial Sequence: Synthetic oligonucleotide
gucacguacuccugguagc

SEQ ID NO: 1973753 - RNA, 19 nt, Artificial Sequence
  Description of Artificial Sequence: Synthetic oligonucleotide
cacuaggccaacgccaggg

SEQ ID NO: 1973754 - RNA, 19 nt, Artificial Sequence
  Description of Artificial Sequence: Synthetic oligonucleotide
ugcagggaugggcuguucu

SEQ ID NO: 1973755 - RNA, 19 nt, Artificial Sequence
  Description of Artificial Sequence: Synthetic oligonucleotide
uucgggucagacucuuucu

SEQ ID NO: 1973756 - RNA, 19 nt, Artificial Sequence
  Description of Artificial Sequence: Synthetic oligonucleotide
ugcggucuccagcugggcc

SEQ ID NO: 1973757 - RNA, 19 nt, Artificial Sequence
  Description of Artificial Sequence: Synthetic oligonucleotide
agaucagcaggaacaugcg

SEQ ID NO: 1973758 - RNA, 19 nt, Artificial Sequence
  Description of Artificial Sequence: Synthetic oligonucleotide
uaacccacucuguacccac

SEQ ID NO: 1973759 - RNA, 19 nt, Artificial Sequence
  Description of Artificial Sequence: Synthetic oligonucleotide
gcaauggucuccugcaacc

SEQ ID NO: 1973760 - RNA, 19 nt, Artificial Sequence
  Description of Artificial Sequence: Synthetic oligonucleotide
uucaccccacaccuuggca

SEQ ID NO: 1973761 - RNA, 19 nt, Artificial Sequence
  Description of Artificial Sequence: Synthetic oligonucleotide
agaagcggucauagaaugg

SEQ ID NO: 1973762 - RNA, 19 nt, Artificial Sequence
  Description of Artificial Sequence: Synthetic oligonucleotide
uaguccaugagcggccuug

SEQ ID NO: 1973763 - RNA, 19 nt, Artificial Sequence
  Description of Artificial Sequence: Synthetic oligonucleotide
gccaacgccagggauaugg

SEQ ID NO: 1973764 - RNA, 19 nt, Artificial Sequence
  Description of Artificial Sequence: Synthetic oligonucleotide
gaaucggagaagcgaccug

SEQ ID NO: 1973765 - RNA, 19 nt, Artificial Sequence
  Description of Artificial Sequence: Synthetic oligonucleotide
agcacaccauauaacccac

SEQ ID NO: 1973766 - RNA, 19 nt, Artificial Sequence
  Description of Artificial Sequence: Synthetic oligonucleotide
auauggucugcaaggagcu

SEQ ID NO: 1973767 - RNA, 19 nt, Artificial Sequence
  Description of Artificial Sequence: Synthetic oligonucleotide
ccaacggccuacuucaccc

SEQ ID NO: 1973768 - RNA, 19 nt, Artificial Sequence
  Description of Artificial Sequence: Synthetic oligonucleotide
ucauagaauggggagcgua

SEQ ID NO: 1973769 - RNA, 19 nt, Artificial Sequence
  Description of Artificial Sequence: Synthetic oligonucleotide
cauccugcuacggccaccg

SEQ ID NO: 1973770 - RNA, 19 nt, Artificial Sequence
  Description of Artificial Sequence: Synthetic oligonucleotide
uuccccacauaugauggcu

SEQ ID NO: 1973771 - RNA, 19 nt, Artificial Sequence
  Description of Artificial Sequence: Synthetic oligonucleotide
ucaggagacucagacuagu

SEQ ID NO: 1973772 - RNA, 19 nt, Artificial Sequence
  Description of Artificial Sequence: Synthetic oligonucleotide
acccacucuguacccacuc

SEQ ID NO: 1973773 - RNA, 19 nt, Artificial Sequence
  Description of Artificial Sequence: Synthetic oligonucleotide
uuccgaagcuccuuccgaa

SEQ ID NO: 1973774 - RNA, 19 nt, Artificial Sequence
  Description of Artificial Sequence: Synthetic oligonucleotide
ugucagccccaacuguaga

SEQ ID NO: 1973775 - RNA, 19 nt, Artificial Sequence
  Description of Artificial Sequence: Synthetic oligonucleotide
gagcaaugacgagccaacg

SEQ ID NO: 1973776 - RNA, 19 nt, Artificial Sequence
  Description of Artificial Sequence: Synthetic oligonucleotide
acuccugguagcggaggcc

SEQ ID NO: 1973777 - RNA, 19 nt, Artificial Sequence
  Description of Artificial Sequence: Synthetic oligonucleotide
ugcaugucugucagcccca

SEQ ID NO: 1973778 - RNA, 19 nt, Artificial Sequence
  Description of Artificial Sequence: Synthetic oligonucleotide
ggagaagcgaccugccagc

SEQ ID NO: 1973779 - RNA, 19 nt, Artificial Sequence
  Description of Artificial Sequence: Synthetic oligonucleotide
cucaggagacucagacuag

SEQ ID NO: 1973780 - RNA, 19 nt, Artificial Sequence
  Description of Artificial Sequence: Synthetic oligonucleotide
ggcgccucagcucuagccg

SEQ ID NO: 1973781 - RNA, 19 nt, Artificial Sequence
  Description of Artificial Sequence: Synthetic oligonucleotide
auugugcggcgccucagcu

SEQ ID NO: 1973782 - RNA, 19 nt, Artificial Sequence
  Description of Artificial Sequence: Synthetic oligonucleotide
cauaugauggcuccuggcu

SEQ ID NO: 1973783 - RNA, 19 nt, Artificial Sequence
  Description of Artificial Sequence: Synthetic oligonucleotide
gugugaaucggagaagcga

SEQ ID NO: 1973784 - RNA, 19 nt, Artificial Sequence
  Description of Artificial Sequence: Synthetic oligonucleotide
agagaagcggucauagaau

SEQ ID NO: 1973785 - RNA, 19 nt, Artificial Sequence
  Description of Artificial Sequence: Synthetic oligonucleotide
cucagacuagucauaucca

SEQ ID NO: 1973786 - RNA, 19 nt, Artificial Sequence
  Description of Artificial Sequence: Synthetic oligonucleotide
aguccaugagcggccuugc

SEQ ID NO: 1973787 - RNA, 19 nt, Artificial Sequence
  Description of Artificial Sequence: Synthetic oligonucleotide
uacccacuccugcaugucu

SEQ ID NO: 1973788 - RNA, 19 nt, Artificial Sequence
  Description of Artificial Sequence: Synthetic oligonucleotide
cugccaggagggcagguag

SEQ ID NO: 1973789 - RNA, 19 nt, Artificial Sequence
  Description of Artificial Sequence: Synthetic oligonucleotide
caggggccgggcaauauac

SEQ ID NO: 1973790 - RNA, 19 nt, Artificial Sequence
  Description of Artificial Sequence: Synthetic oligonucleotide
ugaggccccgcacugcggu

SEQ ID NO: 1973791 - RNA, 19 nt, Artificial Sequence
  Description of Artificial Sequence: Synthetic oligonucleotide
ugagugcagggaugggcug

SEQ ID NO: 1973792 - RNA, 19 nt, Artificial Sequence
  Description of Artificial Sequence: Synthetic oligonucleotide
ucggagaagcgaccugcca

SEQ ID NO: 1973793 - RNA, 19 nt, Artificial Sequence
  Description of Artificial Sequence: Synthetic oligonucleotide
cagagcaacagagcacacc

SEQ ID NO: 1973794 - RNA, 19 nt, Artificial Sequence
  Description of Artificial Sequence: Synthetic oligonucleotide
gagagcaaugacgagccaa

SEQ ID NO: 1973795 - RNA, 19 nt, Artificial Sequence
  Description of Artificial Sequence: Synthetic oligonucleotide
ccgggcaauauacaaagac

SEQ ID NO: 1973796 - RNA, 19 nt, Artificial Sequence
  Description of Artificial Sequence: Synthetic oligonucleotide
gcggucauagaauggggag

SEQ ID NO: 1973797 - RNA, 19 nt, Artificial Sequence
  Description of Artificial Sequence: Synthetic oligonucleotide
gcuaagcuccuccugcugc

SEQ ID NO: 1973798 - RNA, 19 nt, Artificial Sequence
  Description of Artificial Sequence: Synthetic oligonucleotide
aucggagaagcgaccugcc

SEQ ID NO: 1973799 - RNA, 19 nt, Artificial Sequence
  Description of Artificial Sequence: Synthetic oligonucleotide
uccagcacgcucagccaug

SEQ ID NO: 1973800 - RNA, 19 nt, Artificial Sequence
  Description of Artificial Sequence: Synthetic oligonucleotide
ggugaggucugaaugccag

SEQ ID NO: 1973801 - RNA, 19 nt, Artificial Sequence
  Description of Artificial Sequence: Synthetic oligonucleotide
gguagcggaggcccaaaag

SEQ ID NO: 1973802 - RNA, 19 nt, Artificial Sequence
  Description of Artificial Sequence: Synthetic oligonucleotide
cacucuguacccacuccug

SEQ ID NO: 1973803 - RNA, 19 nt, Artificial Sequence
  Description of Artificial Sequence: Synthetic oligonucleotide
cagacagcucgugugaauc

SEQ ID NO: 1973804 - RNA, 19 nt, Artificial Sequence
  Description of Artificial Sequence: Synthetic oligonucleotide
agaagcgaccugccagcag

SEQ ID NO: 1973805 - RNA, 19 nt, Artificial Sequence
  Description of Artificial Sequence: Synthetic oligonucleotide
gaaugccagccuugaacca

SEQ ID NO: 1973806 - RNA, 19 nt, Artificial Sequence
  Description of Artificial Sequence: Synthetic oligonucleotide
agcggaggcccaaaagccg

SEQ ID NO: 1973807 - RNA, 19 nt, Artificial Sequence
  Description of Artificial Sequence: Synthetic oligonucleotide
uccccacauaugauggcuc

SEQ ID NO: 1973808 - RNA, 19 nt, Artificial Sequence
  Description of Artificial Sequence: Synthetic oligonucleotide
cagcucgugugaaucggag

SEQ ID NO: 1973809 - RNA, 19 nt, Artificial Sequence
  Description of Artificial Sequence: Synthetic oligonucleotide
agcucgugugaaucggaga

SEQ ID NO: 1973810 - RNA, 19 nt, Artificial Sequence
  Description of Artificial Sequence: Synthetic oligonucleotide
acaugcgcaggacagccuu

SEQ ID NO: 1973811 - RNA, 19 nt, Artificial Sequence
  Description of Artificial Sequence: Synthetic oligonucleotide
caauggucuccugcaaccc

SEQ ID NO: 1973812 - RNA, 19 nt, Artificial Sequence
  Description of Artificial Sequence: Synthetic oligonucleotide
cuguuugaccucuucccca

SEQ ID NO: 1973813 - RNA, 19 nt, Artificial Sequence
  Description of Artificial Sequence: Synthetic oligonucleotide
agacucagacuagucauau

SEQ ID NO: 1973814 - RNA, 19 nt, Artificial Sequence
  Description of Artificial Sequence: Synthetic oligonucleotide
ugaaccagaucagcaggaa

SEQ ID NO: 1973815 - RNA, 19 nt, Artificial Sequence
  Description of Artificial Sequence: Synthetic oligonucleotide
guaacugaggccccgcacu

SEQ ID NO: 1973816 - RNA, 19 nt, Artificial Sequence
  Description of Artificial Sequence: Synthetic oligonucleotide
cuccccagugccgugagug

SEQ ID NO: 1973817 - RNA, 19 nt, Artificial Sequence
  Description of Artificial Sequence: Synthetic oligonucleotide
ucagacagcucgugugaau

SEQ ID NO: 1973818 - RNA, 19 nt, Artificial Sequence
  Description of Artificial Sequence: Synthetic oligonucleotide
ugccgugagugcagggaug

SEQ ID NO: 1973819 - RNA, 19 nt, Artificial Sequence
  Description of Artificial Sequence: Synthetic oligonucleotide
agugccgugagugcaggga

SEQ ID NO: 1973820 - RNA, 19 nt, Artificial Sequence
  Description of Artificial Sequence: Synthetic oligonucleotide
cuggguuguggucaccauc

SEQ ID NO: 1973821 - RNA, 19 nt, Artificial Sequence
  Description of Artificial Sequence: Synthetic oligonucleotide
agcggccuugccacuaggc

SEQ ID NO: 1973822 - RNA, 19 nt, Artificial Sequence
  Description of Artificial Sequence: Synthetic oligonucleotide
gagaguagccagggugucc

SEQ ID NO: 1973823 - RNA, 19 nt, Artificial Sequence
  Description of Artificial Sequence: Synthetic oligonucleotide
cagcacaagcagguuagag

SEQ ID NO: 1973824 - RNA, 19 nt, Artificial Sequence
  Description of Artificial Sequence: Synthetic oligonucleotide
gggcagguaguccaugagc

SEQ ID NO: 1973825 - RNA, 19 nt, Artificial Sequence
  Description of Artificial Sequence: Synthetic oligonucleotide
gccuacuucaccccacacc

SEQ ID NO: 1973826 - RNA, 19 nt, Artificial Sequence
  Description of Artificial Sequence: Synthetic oligonucleotide
acgccagggauauggucug

SEQ ID NO: 1973827 - RNA, 19 nt, Artificial Sequence
  Description of Artificial Sequence: Synthetic oligonucleotide
cagaguacaccaacucaga

SEQ ID NO: 1973828 - RNA, 19 nt, Artificial Sequence
  Description of Artificial Sequence: Synthetic oligonucleotide
augaacaccuccacacacu

SEQ ID NO: 1973829 - RNA, 19 nt, Artificial Sequence
  Description of Artificial Sequence: Synthetic oligonucleotide
ucucccuguucaguggaac

SEQ ID NO: 1973830 - RNA, 19 nt, Artificial Sequence
  Description of Artificial Sequence: Synthetic oligonucleotide
ugagagcaaugacgagcca

SEQ ID NO: 1973831 - RNA, 19 nt, Artificial Sequence
  Description of Artificial Sequence: Synthetic oligonucleotide
gugacgagucacguacucc

SEQ ID NO: 1973832 - RNA, 19 nt, Artificial Sequence
  Description of Artificial Sequence: Synthetic oligonucleotide
gugaggucugaaugccagc

SEQ ID NO: 1973833 - RNA, 19 nt, Artificial Sequence
  Description of Artificial Sequence: Synthetic oligonucleotide
agggaugggcuguucugga

SEQ ID NO: 1973834 - RNA, 19 nt, Artificial Sequence
  Description of Artificial Sequence: Synthetic oligonucleotide
auaacccacucuguaccca

SEQ ID NO: 1973835 - RNA, 19 nt, Artificial Sequence
  Description of Artificial Sequence: Synthetic oligonucleotide
caccuccacacacuccagc

SEQ ID NO: 1973836 - RNA, 19 nt, Artificial Sequence
  Description of Artificial Sequence: Synthetic oligonucleotide
gugaaucggagaagcgacc

SEQ ID NO: 1973837 - RNA, 19 nt, Artificial Sequence
  Description of Artificial Sequence: Synthetic oligonucleotide
agcggucauagaaugggga

SEQ ID NO: 1973838 - RNA, 19 nt, Artificial Sequence
  Description of Artificial Sequence: Synthetic oligonucleotide
cauccaagggcugcgccug

SEQ ID NO: 1973839 - RNA, 19 nt, Artificial Sequence
  Description of Artificial Sequence: Synthetic oligonucleotide
ccaugagcggccuugccac

SEQ ID NO: 1973840 - RNA, 19 nt, Artificial Sequence
  Description of Artificial Sequence: Synthetic oligonucleotide
caacggccuacuucacccc

SEQ ID NO: 1973841 - RNA, 19 nt, Artificial Sequence
  Description of Artificial Sequence: Synthetic oligonucleotide
guacuccugguagcggagg

SEQ ID NO: 1973842 - RNA, 19 nt, Artificial Sequence
  Description of Artificial Sequence: Synthetic oligonucleotide
cucgugugaaucggagaag

SEQ ID NO: 1973843 - RNA, 19 nt, Artificial Sequence
  Description of Artificial Sequence: Synthetic oligonucleotide
caacgccagggauaugguc

SEQ ID NO: 1973844 - RNA, 19 nt, Artificial Sequence
  Description of Artificial Sequence: Synthetic oligonucleotide
uucgcaccacucuguuuga

SEQ ID NO: 1973845 - RNA, 19 nt, Artificial Sequence
  Description of Artificial Sequence: Synthetic oligonucleotide
uauggucugcaaggagcug

SEQ ID NO: 1973846 - RNA, 19 nt, Artificial Sequence
  Description of Artificial Sequence: Synthetic oligonucleotide
acuucaccccacaccuugg

SEQ ID NO: 1973847 - RNA, 19 nt, Artificial Sequence
  Description of Artificial Sequence: Synthetic oligonucleotide
aggauugugcggcgccuca

SEQ ID NO: 1973848 - RNA, 19 nt, Artificial Sequence
  Description of Artificial Sequence: Synthetic oligonucleotide
cacacacuccagcacgcuc

SEQ ID NO: 1973849 - RNA, 19 nt, Artificial Sequence
  Description of Artificial Sequence: Synthetic oligonucleotide
ggagacucagacuagucau

SEQ ID NO: 1973850 - RNA, 19 nt, Artificial Sequence
  Description of Artificial Sequence: Synthetic oligonucleotide
ggaugagagcaaugacgag

SEQ ID NO: 1973851 - RNA, 19 nt, Artificial Sequence
  Description of Artificial Sequence: Synthetic oligonucleotide
agguaacugaggccccgca

SEQ ID NO: 1973852 - RNA, 19 nt, Artificial Sequence
  Description of Artificial Sequence: Synthetic oligonucleotide
cagagaguagccagggugu

SEQ ID NO: 1973853 - RNA, 19 nt, Artificial Sequence
  Description of Artificial Sequence: Synthetic oligonucleotide
cuguacccacuccugcaug

SEQ ID NO: 1973854 - RNA, 19 nt, Artificial Sequence
  Description of Artificial Sequence: Synthetic oligonucleotide
cccacuggccgacagcacg

SEQ ID NO: 1973855 - RNA, 19 nt, Artificial Sequence
  Description of Artificial Sequence: Synthetic oligonucleotide
gacgagucacguacuccug

SEQ ID NO: 1973856 - RNA, 19 nt, Artificial Sequence
  Description of Artificial Sequence: Synthetic oligonucleotide
ccggcagucccacuggccg

SEQ ID NO: 1973857 - RNA, 19 nt, Artificial Sequence
  Description of Artificial Sequence: Synthetic oligonucleotide
caugcgcaggacagccuug

SEQ ID NO: 1973858 - RNA, 19 nt, Artificial Sequence
  Description of Artificial Sequence: Synthetic oligonucleotide
guugaccccagaagcccag

SEQ ID NO: 1973859 - RNA, 19 nt, Artificial Sequence
  Description of Artificial Sequence: Synthetic oligonucleotide
aacaugcgcaggacagccu

SEQ ID NO: 1973860 - RNA, 19 nt, Artificial Sequence
  Description of Artificial Sequence: Synthetic oligonucleotide
ugguagcggaggcccaaaa

SEQ ID NO: 1973861 - RNA, 19 nt, Artificial Sequence
  Description of Artificial Sequence: Synthetic oligonucleotide
uugugcggcgccucagcuc

SEQ ID NO: 1973862 - RNA, 19 nt, Artificial Sequence
  Description of Artificial Sequence: Synthetic oligonucleotide
ugcuacggccaccggcagu

SEQ ID NO: 1973863 - RNA, 19 nt, Artificial Sequence
  Description of Artificial Sequence: Synthetic oligonucleotide
gggucucccuguucagugg

SEQ ID NO: 1973864 - RNA, 19 nt, Artificial Sequence
  Description of Artificial Sequence: Synthetic oligonucleotide
cacguacuccugguagcgg

SEQ ID NO: 1973865 - RNA, 19 nt, Artificial Sequence
  Description of Artificial Sequence: Synthetic oligonucleotide
gagcggccuugccacuagg

SEQ ID NO: 1973866 - RNA, 19 nt, Artificial Sequence
  Description of Artificial Sequence: Synthetic oligonucleotide
gccgugagugcagggaugg

SEQ ID NO: 1973867 - RNA, 19 nt, Artificial Sequence
  Description of Artificial Sequence: Synthetic oligonucleotide
ccuacuucaccccacaccu

SEQ ID NO: 1973868 - RNA, 19 nt, Artificial Sequence
  Description of Artificial Sequence: Synthetic oligonucleotide
ggugacgagucacguacuc

SEQ ID NO: 1973869 - RNA, 19 nt, Artificial Sequence
  Description of Artificial Sequence: Synthetic oligonucleotide
augacgagccaacggccua

SEQ ID NO: 1973870 - RNA, 19 nt, Artificial Sequence
  Description of Artificial Sequence: Synthetic oligonucleotide
ucugccaggagggcaggua

SEQ ID NO: 1973871 - RNA, 19 nt, Artificial Sequence
  Description of Artificial Sequence: Synthetic oligonucleotide
gaagaggaucuuggcuuca

SEQ ID NO: 1973872 - RNA, 19 nt, Artificial Sequence
  Description of Artificial Sequence: Synthetic oligonucleotide
cuagccguucccuucgggu

SEQ ID NO: 1973873 - RNA, 19 nt, Artificial Sequence
  Description of Artificial Sequence: Synthetic oligonucleotide
caacagagcacaccauaua

SEQ ID NO: 1973874 - RNA, 19 nt, Artificial Sequence
  Description of Artificial Sequence: Synthetic oligonucleotide
gcaaccccagagguguugg

SEQ ID NO: 1973875 - RNA, 19 nt, Artificial Sequence
  Description of Artificial Sequence: Synthetic oligonucleotide
agcagguuagaggcagagu

SEQ ID NO: 1973876 - RNA, 19 nt, Artificial Sequence
  Description of Artificial Sequence: Synthetic oligonucleotide
gagacucagacuagucaua

SEQ ID NO: 1973877 - RNA, 19 nt, Artificial Sequence
  Description of Artificial Sequence: Synthetic oligonucleotide
accaacucagacagcucgu

SEQ ID NO: 1973878 - RNA, 19 nt, Artificial Sequence
  Description of Artificial Sequence: Synthetic oligonucleotide
acggccuacuucaccccac

SEQ ID NO: 1973879 - RNA, 19 nt, Artificial Sequence
  Description of Artificial Sequence: Synthetic oligonucleotide
gcggccuugccacuaggcc

SEQ ID NO: 1973880 - RNA, 19 nt, Artificial Sequence
  Description of Artificial Sequence: Synthetic oligonucleotide
aggccaacgccagggauau

SEQ ID NO: 1973881 - RNA, 19 nt, Artificial Sequence
  Description of Artificial Sequence: Synthetic oligonucleotide
ggaacaugcgcaggacagc

SEQ ID NO: 1973882 - RNA, 19 nt, Artificial Sequence
  Description of Artificial Sequence: Synthetic oligonucleotide
ucccuucgggucagacucu

SEQ ID NO: 1973883 - RNA, 19 nt, Artificial Sequence
  Description of Artificial Sequence: Synthetic oligonucleotide
cgugugaaucggagaagcg

SEQ ID NO: 1973884 - RNA, 19 nt, Artificial Sequence
  Description of Artificial Sequence: Synthetic oligonucleotide
cggagaagcgaccugccag

SEQ ID NO: 1973885 - RNA, 19 nt, Artificial Sequence
  Description of Artificial Sequence: Synthetic oligonucleotide
uucugccgaauuucccguu

SEQ ID NO: 1973886 - RNA, 19 nt, Artificial Sequence
  Description of Artificial Sequence: Synthetic oligonucleotide
cuccauccugcuacggcca

SEQ ID NO: 1973887 - RNA, 19 nt, Artificial Sequence
  Description of Artificial Sequence: Synthetic oligonucleotide
gguuagaggcagaguacac

SEQ ID NO: 1973888 - RNA, 19 nt, Artificial Sequence
  Description of Artificial Sequence: Synthetic oligonucleotide
cagugccgugagugcaggg

SEQ ID NO: 1973889 - RNA, 19 nt, Artificial Sequence
  Description of Artificial Sequence: Synthetic oligonucleotide
uccgaaggaucccgucauu

SEQ ID NO: 1973890 - RNA, 19 nt, Artificial Sequence
  Description of Artificial Sequence: Synthetic oligonucleotide
aacccacucuguacccacu

SEQ ID NO: 1973891 - RNA, 19 nt, Artificial Sequence
  Description of Artificial Sequence: Synthetic oligonucleotide
gaggucugaaugccagccu

SEQ ID NO: 1973892 - RNA, 19 nt, Artificial Sequence
  Description of Artificial Sequence: Synthetic oligonucleotide
cagguaacugaggccccgc

SEQ ID NO: 1973893 - RNA, 19 nt, Artificial Sequence
  Description of Artificial Sequence: Synthetic oligonucleotide
ccugcuacggccaccggca

SEQ ID NO: 1973894 - RNA, 19 nt, Artificial Sequence
  Description of Artificial Sequence: Synthetic oligonucleotide
gccaacggccuacuucacc

SEQ ID NO: 1973895 - RNA, 19 nt, Artificial Sequence
  Description of Artificial Sequence: Synthetic oligonucleotide
guccaugagcggccuugcc

SEQ ID NO: 1973896 - RNA, 19 nt, Artificial Sequence
  Description of Artificial Sequence: Synthetic oligonucleotide
gagucacguacuccuggua

SEQ ID NO: 1973897 - RNA, 19 nt, Artificial Sequence
  Description of Artificial Sequence: Synthetic oligonucleotide
aagcgaccugccagcaggu

SEQ ID NO: 1973898 - RNA, 19 nt, Artificial Sequence
  Description of Artificial Sequence: Synthetic oligonucleotide
uucugucacucaggagacu

SEQ ID NO: 1973899 - RNA, 19 nt, Artificial Sequence
  Description of Artificial Sequence: Synthetic oligonucleotide
acagcucgugugaaucgga

SEQ ID NO: 1973900 - RNA, 19 nt, Artificial Sequence
  Description of Artificial Sequence: Synthetic oligonucleotide
caugucugucagccccaac

SEQ ID NO: 1973901 - RNA, 19 nt, Artificial Sequence
  Description of Artificial Sequence: Synthetic oligonucleotide
gagaagcgaccugccagca

SEQ ID NO: 1973902 - RNA, 19 nt, Artificial Sequence
  Description of Artificial Sequence: Synthetic oligonucleotide
cugcaaggagcuggagcag

SEQ ID NO: 1973903 - RNA, 19 nt, Artificial Sequence
  Description of Artificial Sequence: Synthetic oligonucleotide
aggguucgcaccacucugu

SEQ ID NO: 1973904 - RNA, 19 nt, Artificial Sequence
  Description of Artificial Sequence: Synthetic oligonucleotide
ugcggcgccucagcucuag

SEQ ID NO: 1973905 - RNA, 19 nt, Artificial Sequence
  Description of Artificial Sequence: Synthetic oligonucleotide
caggacagccuuggcuagc

SEQ ID NO: 1973906 - RNA, 19 nt, Artificial Sequence
  Description of Artificial Sequence: Synthetic oligonucleotide
ccauauaacccacucugua

SEQ ID NO: 1973907 - RNA, 19 nt, Artificial Sequence
  Description of Artificial Sequence: Synthetic oligonucleotide
gguuguggucaccauccaa

SEQ ID NO: 1973908 - RNA, 19 nt, Artificial Sequence
  Description of Artificial Sequence: Synthetic oligonucleotide
gcuacggccaccggcaguc

SEQ ID NO: 1973909 - RNA, 19 nt, Artificial Sequence
  Description of Artificial Sequence: Synthetic oligonucleotide
cgcaccacucuguuugacc

SEQ ID NO: 1973910 - RNA, 19 nt, Artificial Sequence
  Description of Artificial Sequence: Synthetic oligonucleotide
augccagccuugaaccaga

SEQ ID NO: 1973911 - RNA, 19 nt, Artificial Sequence
  Description of Artificial Sequence: Synthetic oligonucleotide
ccgucauugagcagcacaa

SEQ ID NO: 1973912 - RNA, 19 nt, Artificial Sequence
  Description of Artificial Sequence: Synthetic oligonucleotide
ggagcguagcagguaguac

SEQ ID NO: 1973913 - RNA, 19 nt, Artificial Sequence
  Description of Artificial Sequence: Synthetic oligonucleotide
cgugagugcagggaugggc

SEQ ID NO: 1973914 - RNA, 19 nt, Artificial Sequence
  Description of Artificial Sequence: Synthetic oligonucleotide
ggggccgggcaauauacaa

SEQ ID NO: 1973915 - RNA, 19 nt, Artificial Sequence
  Description of Artificial Sequence: Synthetic oligonucleotide
ccguugaccccagaagccc

SEQ ID NO: 1973916 - RNA, 19 nt, Artificial Sequence
  Description of Artificial Sequence: Synthetic oligonucleotide
cccgucauugagcagcaca

SEQ ID NO: 1973917 - RNA, 19 nt, Artificial Sequence
  Description of Artificial Sequence: Synthetic oligonucleotide
ugccagccuugaaccagau

SEQ ID NO: 1973918 - RNA, 19 nt, Artificial Sequence
  Description of Artificial Sequence: Synthetic oligonucleotide
ccgaaggaucccgucauug

SEQ ID NO: 1973919 - RNA, 19 nt, Artificial Sequence
  Description of Artificial Sequence: Synthetic oligonucleotide
cgagccaacggccuacuuc

SEQ ID NO: 1973920 - RNA, 19 nt, Artificial Sequence
  Description of Artificial Sequence: Synthetic oligonucleotide
ucgcaccacucuguuugac

SEQ ID NO: 1973921 - RNA, 19 nt, Artificial Sequence
  Description of Artificial Sequence: Synthetic oligonucleotide
ccgacagcacggcuggcgc

SEQ ID NO: 1973922 - RNA, 19 nt, Artificial Sequence
  Description of Artificial Sequence: Synthetic oligonucleotide
cccacucuguacccacucc

SEQ ID NO: 1973923 - RNA, 19 nt, Artificial Sequence
  Description of Artificial Sequence: Synthetic oligonucleotide
caccauccaagggcugcgc

SEQ ID NO: 1973924 - RNA, 19 nt, Artificial Sequence
  Description of Artificial Sequence: Synthetic oligonucleotide
cugcuacggccaccggcag

SEQ ID NO: 1973925 - RNA, 19 nt, Artificial Sequence
  Description of Artificial Sequence: Synthetic oligonucleotide
gcggaggcccaaaagccgc

SEQ ID NO: 1973926 - RNA, 19 nt, Artificial Sequence
  Description of Artificial Sequence: Synthetic oligonucleotide
aucccgucauugagcagca

SEQ ID NO: 1973927 - RNA, 19 nt, Artificial Sequence
  Description of Artificial Sequence: Synthetic oligonucleotide
agccaacggccuacuucac

SEQ ID NO: 1973928 - RNA, 19 nt, Artificial Sequence
  Description of Artificial Sequence: Synthetic oligonucleotide
gugcuaagcuccuccugcu

SEQ ID NO: 1973929 - RNA, 19 nt, Artificial Sequence
  Description of Artificial Sequence: Synthetic oligonucleotide
caacucagacagcucgugu

SEQ ID NO: 1973930 - RNA, 19 nt, Artificial Sequence
  Description of Artificial Sequence: Synthetic oligonucleotide
ggauugugcggcgccucag

SEQ ID NO: 1973931 - RNA, 19 nt, Artificial Sequence
  Description of Artificial Sequence: Synthetic oligonucleotide
agccccaacuguagaaaua

SEQ ID NO: 1973932 - RNA, 19 nt, Artificial Sequence
  Description of Artificial Sequence: Synthetic oligonucleotide
ugggccguggcggcugggu

SEQ ID NO: 1973933 - RNA, 19 nt, Artificial Sequence
  Description of Artificial Sequence: Synthetic oligonucleotide
ggaggguucgcaccacucu

SEQ ID NO: 1973934 - RNA, 19 nt, Artificial Sequence
  Description of Artificial Sequence: Synthetic oligonucleotide
ccaacucagacagcucgug

SEQ ID NO: 1973935 - RNA, 19 nt, Artificial Sequence
  Description of Artificial Sequence: Synthetic oligonucleotide
gcgaccugccagcagguaa

SEQ ID NO: 1973936 - RNA, 19 nt, Artificial Sequence
  Description of Artificial Sequence: Synthetic oligonucleotide
gucacucaggagacucaga

SEQ ID NO: 1973937 - RNA, 19 nt, Artificial Sequence
  Description of Artificial Sequence: Synthetic oligonucleotide
ggaucccgucauugagcag

SEQ ID NO: 1973938 - RNA, 19 nt, Artificial Sequence
  Description of Artificial Sequence: Synthetic oligonucleotide
caagugcagcaggggccgg

SEQ ID NO: 1973939 - RNA, 19 nt, Artificial Sequence
  Description of Artificial Sequence: Synthetic oligonucleotide
cguacuccugguagcggag

SEQ ID NO: 1973940 - RNA, 19 nt, Artificial Sequence
  Description of Artificial Sequence: Synthetic oligonucleotide
cucagacagcucgugugaa

SEQ ID NO: 1973941 - RNA, 19 nt, Artificial Sequence
  Description of Artificial Sequence: Synthetic oligonucleotide
cugggugacgagucacgua

SEQ ID NO: 1973942 - RNA, 19 nt, Artificial Sequence
  Description of Artificial Sequence: Synthetic oligonucleotide
cacggcuggcgcggcaccc

SEQ ID NO: 1973943 - RNA, 19 nt, Artificial Sequence
  Description of Artificial Sequence: Synthetic oligonucleotide
augagcggccuugccacua

SEQ ID NO: 1973944 - RNA, 19 nt, Artificial Sequence
  Description of Artificial Sequence: Synthetic oligonucleotide
aggccccgcacugcggucu

SEQ ID NO: 1973945 - RNA, 19 nt, Artificial Sequence
  Description of Artificial Sequence: Synthetic oligonucleotide
cgggcaauauacaaagacu

SEQ ID NO: 1973946 - RNA, 19 nt, Artificial Sequence
  Description of Artificial Sequence: Synthetic oligonucleotide
auggggagcguagcaggua

SEQ ID NO: 1973947 - RNA, 19 nt, Artificial Sequence
  Description of Artificial Sequence: Synthetic oligonucleotide
ccugcaaccccagaggugu

SEQ ID NO: 1973948 - RNA, 19 nt, Artificial Sequence
  Description of Artificial Sequence: Synthetic oligonucleotide
gugccgugagugcagggau

SEQ ID NO: 1973949 - RNA, 19 nt, Artificial Sequence
  Description of Artificial Sequence: Synthetic oligonucleotide
ggccuacuucaccccacac

SEQ ID NO: 1973950 - RNA, 19 nt, Artificial Sequence
  Description of Artificial Sequence: Synthetic oligonucleotide
gaggccccgcacugcgguc

SEQ ID NO: 1973951 - RNA, 19 nt, Artificial Sequence
  Description of Artificial Sequence: Synthetic oligonucleotide
cuaggccaacgccagggau

SEQ ID NO: 1973952 - RNA, 19 nt, Artificial Sequence
  Description of Artificial Sequence: Synthetic oligonucleotide
gcaacagagcacaccauau

SEQ ID NO: 1973953 - RNA, 19 nt, Artificial Sequence
  Description of Artificial Sequence: Synthetic oligonucleotide
cgaaggaucccgucauuga

SEQ ID NO: 1973954 - RNA, 19 nt, Artificial Sequence
  Description of Artificial Sequence: Synthetic oligonucleotide
ccgcacugcggucuccagc

SEQ ID NO: 1973955 - RNA, 19 nt, Artificial Sequence
  Description of Artificial Sequence: Synthetic oligonucleotide
aggggccgggcaauauaca

SEQ ID NO: 1973956 - RNA, 19 nt, Artificial Sequence
  Description of Artificial Sequence: Synthetic oligonucleotide
cgcaggacagccuuggcua

SEQ ID NO: 1973957 - RNA, 19 nt, Artificial Sequence
  Description of Artificial Sequence: Synthetic oligonucleotide
ggccguggcggcuggguga

SEQ ID NO: 1973958 - RNA, 19 nt, Artificial Sequence
  Description of Artificial Sequence: Synthetic oligonucleotide
ggcuccccagugccgugag

SEQ ID NO: 1973959 - RNA, 19 nt, Artificial Sequence
  Description of Artificial Sequence: Synthetic oligonucleotide
cugcggucuccagcugggc

SEQ ID NO: 1973960 - RNA, 19 nt, Artificial Sequence
  Description of Artificial Sequence: Synthetic oligonucleotide
acgagccaacggccuacuu

SEQ ID NO: 1973961 - RNA, 19 nt, Artificial Sequence
  Description of Artificial Sequence: Synthetic oligonucleotide
gccccaacuguagaaauau

SEQ ID NO: 1973962 - RNA, 19 nt, Artificial Sequence
  Description of Artificial Sequence: Synthetic oligonucleotide
cggcgccucagcucuagcc

SEQ ID NO: 1973963 - RNA, 19 nt, Artificial Sequence
  Description of Artificial Sequence: Synthetic oligonucleotide
ccagugccgugagugcagg

SEQ ID NO: 1973964 - RNA, 19 nt, Artificial Sequence
  Description of Artificial Sequence: Synthetic oligonucleotide
cagccccaacuguagaaau

SEQ ID NO: 1973965 - RNA, 19 nt, Artificial Sequence
  Description of Artificial Sequence: Synthetic oligonucleotide
ccacuaggccaacgccagg

SEQ ID NO: 1973966 - RNA, 19 nt, Artificial Sequence
  Description of Artificial Sequence: Synthetic oligonucleotide
cuacggccaccggcagucc

SEQ ID NO: 1973967 - RNA, 19 nt, Artificial Sequence
  Description of Artificial Sequence: Synthetic oligonucleotide
ggcagucccacuggccgac

SEQ ID NO: 1973968 - RNA, 19 nt, Artificial Sequence
  Description of Artificial Sequence: Synthetic oligonucleotide
ggcggcugggugacgaguc

SEQ ID NO: 1973969 - RNA, 19 nt, Artificial Sequence
  Description of Artificial Sequence: Synthetic oligonucleotide
ggguguccaugaccguuga

SEQ ID NO: 1973970 - RNA, 19 nt, Artificial Sequence
  Description of Artificial Sequence: Synthetic oligonucleotide
gcuagcuggaugagagcaa

SEQ ID NO: 1973971 - RNA, 19 nt, Artificial Sequence
  Description of Artificial Sequence: Synthetic oligonucleotide
ccuugccacuaggccaacg

SEQ ID NO: 1973972 - RNA, 19 nt, Artificial Sequence
  Description of Artificial Sequence: Synthetic oligonucleotide
gccagggauauggucugca

SEQ ID NO: 1973973 - RNA, 19 nt, Artificial Sequence
  Description of Artificial Sequence: Synthetic oligonucleotide
gggagcguagcagguagua

SEQ ID NO: 1973974 - RNA, 19 nt, Artificial Sequence
  Description of Artificial Sequence: Synthetic oligonucleotide
ggucaccauccaagggcug

SEQ ID NO: 1973975 - RNA, 19 nt, Artificial Sequence
  Description of Artificial Sequence: Synthetic oligonucleotide
acggcuggcgcggcacccu

SEQ ID NO: 1973976 - RNA, 19 nt, Artificial Sequence
  Description of Artificial Sequence: Synthetic oligonucleotide
caugaccguugaccccaga

SEQ ID NO: 1973977 - RNA, 19 nt, Artificial Sequence
  Description of Artificial Sequence: Synthetic oligonucleotide
gggugaggucugaaugcca

SEQ ID NO: 1973978 - RNA, 19 nt, Artificial Sequence
  Description of Artificial Sequence: Synthetic oligonucleotide
ucccgucauugagcagcac

SEQ ID NO: 1973979 - RNA, 19 nt, Artificial Sequence
  Description of Artificial Sequence: Synthetic oligonucleotide
gcaggggccgggcaauaua

SEQ ID NO: 1973980 - RNA, 19 nt, Artificial Sequence
  Description of Artificial Sequence: Synthetic oligonucleotide
ccaugaccguugaccccag

SEQ ID NO: 1973981 - RNA, 19 nt, Artificial Sequence
  Description of Artificial Sequence: Synthetic oligonucleotide
gaccugccagcagguaacu

SEQ ID NO: 1973982 - RNA, 19 nt, Artificial Sequence
  Description of Artificial Sequence: Synthetic oligonucleotide
gucauagaauggggagcgu

SEQ ID NO: 1973983 - RNA, 19 nt, Artificial Sequence
  Description of Artificial Sequence: Synthetic oligonucleotide
cguugaccccagaagccca

SEQ ID NO: 1973984 - RNA, 19 nt, Artificial Sequence
  Description of Artificial Sequence: Synthetic oligonucleotide
caugagcggccuugccacu

SEQ ID NO: 1973985 - RNA, 19 nt, Artificial Sequence
  Description of Artificial Sequence: Synthetic oligonucleotide
ccauccugcuacggccacc

SEQ ID NO: 1973986 - RNA, 19 nt, Artificial Sequence
  Description of Artificial Sequence: Synthetic oligonucleotide
agcgaccugccagcaggua

SEQ ID NO: 1973987 - RNA, 19 nt, Artificial Sequence
  Description of Artificial Sequence: Synthetic oligonucleotide
gguaguccaugagcggccu

SEQ ID NO: 1973988 - RNA, 19 nt, Artificial Sequence
  Description of Artificial Sequence: Synthetic oligonucleotide
gcacugcggucuccagcug

SEQ ID NO: 1973989 - RNA, 19 nt, Artificial Sequence
  Description of Artificial Sequence: Synthetic oligonucleotide
gccguucccuucgggucag

SEQ ID NO: 1973990 - RNA, 19 nt, Artificial Sequence
  Description of Artificial Sequence: Synthetic oligonucleotide
cuacuucaccccacaccuu

SEQ ID NO: 1973991 - RNA, 19 nt, Artificial Sequence
  Description of Artificial Sequence: Synthetic oligonucleotide
cugguagcggaggcccaaa

SEQ ID NO: 1973992 - RNA, 19 nt, Artificial Sequence
  Description of Artificial Sequence: Synthetic oligonucleotide
gccgggcaauauacaaaga

SEQ ID NO: 1973993 - RNA, 19 nt, Artificial Sequence
  Description of Artificial Sequence: Synthetic oligonucleotide
gccguggcggcugggugac

SEQ ID NO: 1973994 - RNA, 19 nt, Artificial Sequence
  Description of Artificial Sequence: Synthetic oligonucleotide
gcgccucagcucuagccgu

SEQ ID NO: 1973995 - RNA, 19 nt, Artificial Sequence
  Description of Artificial Sequence: Synthetic oligonucleotide
gguucgcaccacucuguuu

SEQ ID NO: 1973996 - RNA, 19 nt, Artificial Sequence
  Description of Artificial Sequence: Synthetic oligonucleotide
ccgugagugcagggauggg

SEQ ID NO: 1973997 - RNA, 19 nt, Artificial Sequence
  Description of Artificial Sequence: Synthetic oligonucleotide
cguucccuucgggucagac

SEQ ID NO: 1973998 - RNA, 19 nt, Artificial Sequence
  Description of Artificial Sequence: Synthetic oligonucleotide
guaguccaugagcggccuu

SEQ ID NO: 1973999 - RNA, 19 nt, Artificial Sequence
  Description of Artificial Sequence: Synthetic oligonucleotide
gccucagcucuagccguuc

SEQ ID NO: 1974000 - RNA, 19 nt, Artificial Sequence
  Description of Artificial Sequence: Synthetic oligonucleotide
gcggcgccucagcucuagc

SEQ ID NO: 1974001 - RNA, 19 nt, Artificial Sequence
  Description of Artificial Sequence: Synthetic oligonucleotide
ggguucgcaccacucuguu

SEQ ID NO: 1974002 - RNA, 19 nt, Artificial Sequence
  Description of Artificial Sequence: Synthetic oligonucleotide
gcaggauugugcggcgccu

SEQ ID NO: 1974003 - RNA, 19 nt, Artificial Sequence
  Description of Artificial Sequence: Synthetic oligonucleotide
ccaacgccagggauauggu

SEQ ID NO: 1974004 - RNA, 19 nt, Artificial Sequence
  Description of Artificial Sequence: Synthetic oligonucleotide
ggcuggcgcggcacccugc

SEQ ID NO: 1974005 - RNA, 19 nt, Artificial Sequence
  Description of Artificial Sequence: Synthetic oligonucleotide
cgagucacguacuccuggu

SEQ ID NO: 1974006 - RNA, 19 nt, Artificial Sequence
  Description of Artificial Sequence: Synthetic oligonucleotide
cgggucagacucuuucugu

SEQ ID NO: 1974007 - RNA, 19 nt, Artificial Sequence
  Description of Artificial Sequence: Synthetic oligonucleotide
cggcugggugacgagucac

SEQ ID NO: 1974008 - RNA, 19 nt, Artificial Sequence
  Description of Artificial Sequence: Synthetic oligonucleotide
gggugacgagucacguacu

SEQ ID NO: 1974009 - RNA, 19 nt, Artificial Sequence
  Description of Artificial Sequence: Synthetic oligonucleotide
ggccccgcacugcggucuc

SEQ ID NO: 1974010 - RNA, 19 nt, Artificial Sequence
  Description of Artificial Sequence: Synthetic oligonucleotide
cguggcggcugggugacga

SEQ ID NO: 1974011 - RNA, 19 nt, Artificial Sequence
  Description of Artificial Sequence: Synthetic oligonucleotide
cggccuacuucaccccaca

SEQ ID NO: 1974012 - RNA, 19 nt, Artificial Sequence
  Description of Artificial Sequence: Synthetic oligonucleotide
cccacauaugauggcuccu

SEQ ID NO: 1974013 - RNA, 19 nt, Artificial Sequence
  Description of Artificial Sequence: Synthetic oligonucleotide
cugcaaccccagagguguu

SEQ ID NO: 1974014 - RNA, 19 nt, Artificial Sequence
  Description of Artificial Sequence: Synthetic oligonucleotide
ggggagcguagcagguagu

SEQ ID NO: 1974015 - RNA, 19 nt, Artificial Sequence
  Description of Artificial Sequence: Synthetic oligonucleotide
ccuggguuguggucaccau

SEQ ID NO: 1974016 - RNA, 19 nt, Artificial Sequence
  Description of Artificial Sequence: Synthetic oligonucleotide
ggccaacgccagggauaug

SEQ ID NO: 1974017 - RNA, 19 nt, Artificial Sequence
  Description of Artificial Sequence: Synthetic oligonucleotide
ccccgcacugcggucucca

SEQ ID NO: 1974018 - RNA, 19 nt, Artificial Sequence
  Description of Artificial Sequence: Synthetic oligonucleotide
gccccgcacugcggucucc

SEQ ID NO: 1974019 - RNA, 19 nt, Artificial Sequence
  Description of Artificial Sequence: Synthetic oligonucleotide
gcuccccagugccgugagu

SEQ ID NO: 1974020 - RNA, 19 nt, Artificial Sequence
  Description of Artificial Sequence: Synthetic oligonucleotide
ccuucgggucagacucuuu

SEQ ID NO: 1974021 - RNA, 19 nt, Artificial Sequence
  Description of Artificial Sequence: Synthetic oligonucleotide
gugcggcgccucagcucua

SEQ ID NO: 1974022 - RNA, 19 nt, Artificial Sequence
  Description of Artificial Sequence: Synthetic oligonucleotide
cccuucgggucagacucuu

SEQ ID NO: 1974023 - RNA, 19 nt, Artificial Sequence
  Description of Artificial Sequence: Synthetic oligonucleotide
cgccucagcucuagccguu

SEQ ID NO: 1974024 - RNA, 19 nt, Artificial Sequence
  Description of Artificial Sequence: Synthetic oligonucleotide
aauugcuaucuccugaggc

SEQ ID NO: 1974025 - RNA, 19 nt, Artificial Sequence
  Description of Artificial Sequence: Synthetic oligonucleotide
uagacugccacccagagcc

SEQ ID NO: 1974026 - RNA, 19 nt, Artificial Sequence
  Description of Artificial Sequence: Synthetic oligonucleotide
aagaaauuccugcuuuagc

SEQ ID NO: 1974027 - RNA, 19 nt, Artificial Sequence
  Description of Artificial Sequence: Synthetic oligonucleotide
cucgguaaggcuuauaggg

SEQ ID NO: 1974028 - RNA, 19 nt, Artificial Sequence
  Description of Artificial Sequence: Synthetic oligonucleotide
ucacguaaaucucauagcc

SEQ ID NO: 1974029 - RNA, 19 nt, Artificial Sequence
  Description of Artificial Sequence: Synthetic oligonucleotide
aacucgguaaggcuuauag

SEQ ID NO: 1974030 - RNA, 19 nt, Artificial Sequence
  Description of Artificial Sequence: Synthetic oligonucleotide
aagaacuugaccguucuuc

SEQ ID NO: 1974031 - RNA, 19 nt, Artificial Sequence
  Description of Artificial Sequence: Synthetic oligonucleotide
ugcaaguuaugacaacucg

SEQ ID NO: 1974032 - RNA, 19 nt, Artificial Sequence
  Description of Artificial Sequence: Synthetic oligonucleotide
agaaauuccugcuuuagca

SEQ ID NO: 1974033 - RNA, 19 nt, Artificial Sequence
  Description of Artificial Sequence: Synthetic oligonucleotide
aguaccuuggggcugcugc

SEQ ID NO: 1974034 - RNA, 19 nt, Artificial Sequence
  Description of Artificial Sequence: Synthetic oligonucleotide
uucagugcaaguuaugaca

SEQ ID NO: 1974035 - RNA, 19 nt, Artificial Sequence
  Description of Artificial Sequence: Synthetic oligonucleotide
uggauuuugggauuccggg

SEQ ID NO: 1974036 - RNA, 19 nt, Artificial Sequence
  Description of Artificial Sequence: Synthetic oligonucleotide
ucaggaggaacucaggaga

SEQ ID NO: 1974037 - RNA, 19 nt, Artificial Sequence
  Description of Artificial Sequence: Synthetic oligonucleotide
gcacacaagaacuugaccg

SEQ ID NO: 1974038 - RNA, 19 nt, Artificial Sequence
  Description of Artificial Sequence: Synthetic oligonucleotide
gaugggauagcgcagcgag

SEQ ID NO: 1974039 - RNA, 19 nt, Artificial Sequence
  Description of Artificial Sequence: Synthetic oligonucleotide
guuaugacaacucgguaag

SEQ ID NO: 1974040 - RNA, 19 nt, Artificial Sequence
  Description of Artificial Sequence: Synthetic oligonucleotide
agccuuucuggacugauac

SEQ ID NO: 1974041 - RNA, 19 nt, Artificial Sequence
  Description of Artificial Sequence: Synthetic oligonucleotide
uucuugguuagguuuagcc

SEQ ID NO: 1974042 - RNA, 19 nt, Artificial Sequence
  Description of Artificial Sequence: Synthetic oligonucleotide
gaugcgaucagugaccaag

SEQ ID NO: 1974043 - RNA, 19 nt, Artificial Sequence
  Description of Artificial Sequence: Synthetic oligonucleotide
agaacuugaccguucuucg

SEQ ID NO: 1974044 - RNA, 19 nt, Artificial Sequence
  Description of Artificial Sequence: Synthetic oligonucleotide
aaauuccugcuuuagcacu

SEQ ID NO: 1974045 - RNA, 19 nt, Artificial Sequence
  Description of Artificial Sequence: Synthetic oligonucleotide
aguuaugacaacucgguaa

SEQ ID NO: 1974046 - RNA, 19 nt, Artificial Sequence
  Description of Artificial Sequence: Synthetic oligonucleotide
acguaaaucucauagcccu

SEQ ID NO: 1974047 - RNA, 19 nt, Artificial Sequence
  Description of Artificial Sequence: Synthetic oligonucleotide
uacugagcuggcuagacug

SEQ ID NO: 1974048 - RNA, 19 nt, Artificial Sequence
  Description of Artificial Sequence: Synthetic oligonucleotide
uguuggaauugcuaucucc

SEQ ID NO: 1974049 - RNA, 19 nt, Artificial Sequence
  Description of Artificial Sequence: Synthetic oligonucleotide
aagugaccagccuuucugg

SEQ ID NO: 1974050 - RNA, 19 nt, Artificial Sequence
  Description of Artificial Sequence: Synthetic oligonucleotide
caaguagucaucagguggc

SEQ ID NO: 1974051 - RNA, 19 nt, Artificial Sequence
  Description of Artificial Sequence: Synthetic oligonucleotide
gacugauacagccaguuca

SEQ ID NO: 1974052 - RNA, 19 nt, Artificial Sequence
  Description of Artificial Sequence: Synthetic oligonucleotide
ggucacguaaaucucauag

SEQ ID NO: 1974053 - RNA, 19 nt, Artificial Sequence
  Description of Artificial Sequence: Synthetic oligonucleotide
guagucaucagguggcagg

SEQ ID NO: 1974054 - RNA, 19 nt, Artificial Sequence
  Description of Artificial Sequence: Synthetic oligonucleotide
agugggaggccucauuuac

SEQ ID NO: 1974055 - RNA, 19 nt, Artificial Sequence
  Description of Artificial Sequence: Synthetic oligonucleotide
guggguuuagguaugacag

SEQ ID NO: 1974056 - RNA, 19 nt, Artificial Sequence
  Description of Artificial Sequence: Synthetic oligonucleotide
aacuugaccguucuucgga

SEQ ID NO: 1974057 - RNA, 19 nt, Artificial Sequence
  Description of Artificial Sequence: Synthetic oligonucleotide
guuagguuuagcccgccgg

SEQ ID NO: 1974058 - RNA, 19 nt, Artificial Sequence
  Description of Artificial Sequence: Synthetic oligonucleotide
gauuccgggguccugguag

SEQ ID NO: 1974059 - RNA, 19 nt, Artificial Sequence
  Description of Artificial Sequence: Synthetic oligonucleotide
ugggguaacaggcuguucu

SEQ ID NO: 1974060 - RNA, 19 nt, Artificial Sequence
  Description of Artificial Sequence: Synthetic oligonucleotide
uaugacaacucgguaaggc

SEQ ID NO: 1974061 - RNA, 19 nt, Artificial Sequence
  Description of Artificial Sequence: Synthetic oligonucleotide
aagacuuacgugaccugcc

SEQ ID NO: 1974062 - RNA, 19 nt, Artificial Sequence
  Description of Artificial Sequence: Synthetic oligonucleotide
aaggcuuauagggacuggg

SEQ ID NO: 1974063 - RNA, 19 nt, Artificial Sequence
  Description of Artificial Sequence: Synthetic oligonucleotide
gaaauuccugcuuuagcac

SEQ ID NO: 1974064 - RNA, 19 nt, Artificial Sequence
  Description of Artificial Sequence: Synthetic oligonucleotide
aacaguaccuuggggcugc

SEQ ID NO: 1974065 - RNA, 19 nt, Artificial Sequence
  Description of Artificial Sequence: Synthetic oligonucleotide
ugggguuugggguaacagg

SEQ ID NO: 1974066 - RNA, 19 nt, Artificial Sequence
  Description of Artificial Sequence: Synthetic oligonucleotide
gauacagccaguucaggga

SEQ ID NO: 1974067 - RNA, 19 nt, Artificial Sequence
  Description of Artificial Sequence: Synthetic oligonucleotide
ugaacaguaccuuggggcu

SEQ ID NO: 1974068 - RNA, 19 nt, Artificial Sequence
  Description of Artificial Sequence: Synthetic oligonucleotide
uugaccguucuucggaugc

SEQ ID NO: 1974069 - RNA, 19 nt, Artificial Sequence
  Description of Artificial Sequence: Synthetic oligonucleotide
uuagguuuagcccgccggc

SEQ ID NO: 1974070 - RNA, 19 nt, Artificial Sequence
  Description of Artificial Sequence: Synthetic oligonucleotide
uucggaugcgaucagugac

SEQ ID NO: 1974071 - RNA, 19 nt, Artificial Sequence
  Description of Artificial Sequence: Synthetic oligonucleotide
uaagaaauuccugcuuuag

SEQ ID NO: 1974072 - RNA, 19 nt, Artificial Sequence
  Description of Artificial Sequence: Synthetic oligonucleotide
gagagaaccugucuuaaga

SEQ ID NO: 1974073 - RNA, 19 nt, Artificial Sequence
  Description of Artificial Sequence: Synthetic oligonucleotide
agacuuacgugaccugccc

SEQ ID NO: 1974074 - RNA, 19 nt, Artificial Sequence
  Description of Artificial Sequence: Synthetic oligonucleotide
uuuagguaugacaggcugu

SEQ ID NO: 1974075 - RNA, 19 nt, Artificial Sequence
  Description of Artificial Sequence: Synthetic oligonucleotide
aaccugucuuaagaaauuc

SEQ ID NO: 1974076 - RNA, 19 nt, Artificial Sequence
  Description of Artificial Sequence: Synthetic oligonucleotide
cauuuacugagcuggcuag

SEQ ID NO: 1974077 - RNA, 19 nt, Artificial Sequence
  Description of Artificial Sequence: Synthetic oligonucleotide
uuuagcacuccagucagga

SEQ ID NO: 1974078 - RNA, 19 nt, Artificial Sequence
  Description of Artificial Sequence: Synthetic oligonucleotide
gaagcuaaaguucuucucu

SEQ ID NO: 1974079 - RNA, 19 nt, Artificial Sequence
  Description of Artificial Sequence: Synthetic oligonucleotide
uagaggaccuauuugcccu

SEQ ID NO: 1974080 - RNA, 19 nt, Artificial Sequence
  Description of Artificial Sequence: Synthetic oligonucleotide
uucacuacaggcuguucug

SEQ ID NO: 1974081 - RNA, 19 nt, Artificial Sequence
  Description of Artificial Sequence: Synthetic oligonucleotide
aggauagggaugcccuucc

SEQ ID NO: 1974082 - RNA, 19 nt, Artificial Sequence
  Description of Artificial Sequence: Synthetic oligonucleotide
gaccuauuugcccugcccc

SEQ ID NO: 1974083 - RNA, 19 nt, Artificial Sequence
  Description of Artificial Sequence: Synthetic oligonucleotide
gaccagugggaguaagugg

SEQ ID NO: 1974084 - RNA, 19 nt, Artificial Sequence
  Description of Artificial Sequence: Synthetic oligonucleotide
agaccuauguggccugccc

SEQ ID NO: 1974085 - RNA, 19 nt, Artificial Sequence
  Description of Artificial Sequence: Synthetic oligonucleotide
agguaugacaggcuguucu

SEQ ID NO: 1974086 - RNA, 19 nt, Artificial Sequence
  Description of Artificial Sequence: Synthetic oligonucleotide
gauagggaugcccuucccc

SEQ ID NO: 1974087 - RNA, 19 nt, Artificial Sequence
  Description of Artificial Sequence: Synthetic oligonucleotide
gaagacuuacgugaccugc

SEQ ID NO: 1974088 - RNA, 19 nt, Artificial Sequence
  Description of Artificial Sequence: Synthetic oligonucleotide
cuggauuuugggauuccgg

SEQ ID NO: 1974089 - RNA, 19 nt, Artificial Sequence
  Description of Artificial Sequence: Synthetic oligonucleotide
cacguaaaucucauagccc

SEQ ID NO: 1974090 - RNA, 19 nt, Artificial Sequence
  Description of Artificial Sequence: Synthetic oligonucleotide
gaccaguggggacagcugg

SEQ ID NO: 1974091 - RNA, 19 nt, Artificial Sequence
  Description of Artificial Sequence: Synthetic oligonucleotide
uggguuuagguaugacagg

SEQ ID NO: 1974092 - RNA, 19 nt, Artificial Sequence
  Description of Artificial Sequence: Synthetic oligonucleotide
gucgagaugggauagcgca

SEQ ID NO: 1974093 - RNA, 19 nt, Artificial Sequence
  Description of Artificial Sequence: Synthetic oligonucleotide
ucggaugcgaucagugacc

SEQ ID NO: 1974094 - RNA, 19 nt, Artificial Sequence
  Description of Artificial Sequence: Synthetic oligonucleotide
uaacaggcuguucugugga

SEQ ID NO: 1974095 - RNA, 19 nt, Artificial Sequence
  Description of Artificial Sequence: Synthetic oligonucleotide
ugaagcuaaaguucuucuc

SEQ ID NO: 1974096 - RNA, 19 nt, Artificial Sequence
  Description of Artificial Sequence: Synthetic oligonucleotide
uacgugaccugcccgagca

SEQ ID NO: 1974097 - RNA, 19 nt, Artificial Sequence
  Description of Artificial Sequence: Synthetic oligonucleotide
gaacuugaccguucuucgg

SEQ ID NO: 1974098 - RNA, 19 nt, Artificial Sequence
  Description of Artificial Sequence: Synthetic oligonucleotide
cugucuuaagaaauuccug

SEQ ID NO: 1974099 - RNA, 19 nt, Artificial Sequence
  Description of Artificial Sequence: Synthetic oligonucleotide
gaauugcuaucuccugagg

SEQ ID NO: 1974100 - RNA, 19 nt, Artificial Sequence
  Description of Artificial Sequence: Synthetic oligonucleotide
gucacguaaaucucauagc

SEQ ID NO: 1974101 - RNA, 19 nt, Artificial Sequence
  Description of Artificial Sequence: Synthetic oligonucleotide
uccugguagaagacuuacg

SEQ ID NO: 1974102 - RNA, 19 nt, Artificial Sequence
  Description of Artificial Sequence: Synthetic oligonucleotide
ccaaguagucaucaggugg

SEQ ID NO: 1974103 - RNA, 19 nt, Artificial Sequence
  Description of Artificial Sequence: Synthetic oligonucleotide
cgaucagugaccaaguggg

SEQ ID NO: 1974104 - RNA, 19 nt, Artificial Sequence
  Description of Artificial Sequence: Synthetic oligonucleotide
guagaggaccuauuugccc

SEQ ID NO: 1974105 - RNA, 19 nt, Artificial Sequence
  Description of Artificial Sequence: Synthetic oligonucleotide
uccgacuuggguuucccug

SEQ ID NO: 1974106 - RNA, 19 nt, Artificial Sequence
  Description of Artificial Sequence: Synthetic oligonucleotide
accuauguggccugccccg

SEQ ID NO: 1974107 - RNA, 19 nt, Artificial Sequence
  Description of Artificial Sequence: Synthetic oligonucleotide
cuucagugcaaguuaugac

SEQ ID NO: 1974108 - RNA, 19 nt, Artificial Sequence
  Description of Artificial Sequence: Synthetic oligonucleotide
ugacaggcuguucugugga

SEQ ID NO: 1974109 - RNA, 19 nt, Artificial Sequence
  Description of Artificial Sequence: Synthetic oligonucleotide
agagaaccugucuuaagaa

SEQ ID NO: 1974110 - RNA, 19 nt, Artificial Sequence
  Description of Artificial Sequence: Synthetic oligonucleotide
ggaauugcuaucuccugag

SEQ ID NO: 1974111 - RNA, 19 nt, Artificial Sequence
  Description of Artificial Sequence: Synthetic oligonucleotide
aggacugcacgcucucccc

SEQ ID NO: 1974112 - RNA, 19 nt, Artificial Sequence
  Description of Artificial Sequence: Synthetic oligonucleotide
uuggaauugcuaucuccug

SEQ ID NO: 1974113 - RNA, 19 nt, Artificial Sequence
  Description of Artificial Sequence: Synthetic oligonucleotide
ggauuuugggauuccgggg

SEQ ID NO: 1974114 - RNA, 19 nt, Artificial Sequence
  Description of Artificial Sequence: Synthetic oligonucleotide
auuuugggauuccgggguc

SEQ ID NO: 1974115 - RNA, 19 nt, Artificial Sequence
  Description of Artificial Sequence: Synthetic oligonucleotide
gacuuacgugaccugcccg

SEQ ID NO: 1974116 - RNA, 19 nt, Artificial Sequence
  Description of Artificial Sequence: Synthetic oligonucleotide
uuuguugccgagcccggcu

SEQ ID NO: 1974117 - RNA, 19 nt, Artificial Sequence
  Description of Artificial Sequence: Synthetic oligonucleotide
aagaccuauguggccugcc

SEQ ID NO: 1974118 - RNA, 19 nt, Artificial Sequence
  Description of Artificial Sequence: Synthetic oligonucleotide
ucgagaugggauagcgcag

SEQ ID NO: 1974119 - RNA, 19 nt, Artificial Sequence
  Description of Artificial Sequence: Synthetic oligonucleotide
acuuacgugaccugcccga

SEQ ID NO: 1974120 - RNA, 19 nt, Artificial Sequence
  Description of Artificial Sequence: Synthetic oligonucleotide
uaaaucucauagcccucca

SEQ ID NO: 1974121 - RNA, 19 nt, Artificial Sequence
  Description of Artificial Sequence: Synthetic oligonucleotide
uguucagggucagucacca

SEQ ID NO: 1974122 - RNA, 19 nt, Artificial Sequence
  Description of Artificial Sequence: Synthetic oligonucleotide
aacaggcuguucuguggag

SEQ ID NO: 1974123 - RNA, 19 nt, Artificial Sequence
  Description of Artificial Sequence: Synthetic oligonucleotide
gcaaguuaugacaacucgg

SEQ ID NO: 1974124 - RNA, 19 nt, Artificial Sequence
  Description of Artificial Sequence: Synthetic oligonucleotide
gaguaagugguucuggggu

SEQ ID NO: 1974125 - RNA, 19 nt, Artificial Sequence
  Description of Artificial Sequence: Synthetic oligonucleotide
guucuguggaggugggagg

SEQ ID NO: 1974126 - RNA, 19 nt, Artificial Sequence
  Description of Artificial Sequence: Synthetic oligonucleotide
ggaguaagugguucugggg

SEQ ID NO: 1974127 - RNA, 19 nt, Artificial Sequence
  Description of Artificial Sequence: Synthetic oligonucleotide
ugggauagcgcagcgaggu

SEQ ID NO: 1974128 - RNA, 19 nt, Artificial Sequence
  Description of Artificial Sequence: Synthetic oligonucleotide
uuguucagggucagucacc

SEQ ID NO: 1974129 - RNA, 19 nt, Artificial Sequence
  Description of Artificial Sequence: Synthetic oligonucleotide
uuuacugagcuggcuagac

SEQ ID NO: 1974130 - RNA, 19 nt, Artificial Sequence
  Description of Artificial Sequence: Synthetic oligonucleotide
gagucccgaaggcugaagc

SEQ ID NO: 1974131 - RNA, 19 nt, Artificial Sequence
  Description of Artificial Sequence: Synthetic oligonucleotide
gauagcgcagcgagguagg

SEQ ID NO: 1974132 - RNA, 19 nt, Artificial Sequence
  Description of Artificial Sequence: Synthetic oligonucleotide
ugaucucgcccaucugagg

SEQ ID NO: 1974133 - RNA, 19 nt, Artificial Sequence
  Description of Artificial Sequence: Synthetic oligonucleotide
gagaacuccacaacuccug

SEQ ID NO: 1974134 - RNA, 19 nt, Artificial Sequence
  Description of Artificial Sequence: Synthetic oligonucleotide
gagauguggguuuagguau

SEQ ID NO: 1974135 - RNA, 19 nt, Artificial Sequence
  Description of Artificial Sequence: Synthetic oligonucleotide
uuaugacaacucgguaagg

SEQ ID NO: 1974136 - RNA, 19 nt, Artificial Sequence
  Description of Artificial Sequence: Synthetic oligonucleotide
uuagcacuccagucaggag

SEQ ID NO: 1974137 - RNA, 19 nt, Artificial Sequence
  Description of Artificial Sequence: Synthetic oligonucleotide
guagaagacuuacgugacc

SEQ ID NO: 1974138 - RNA, 19 nt, Artificial Sequence
  Description of Artificial Sequence: Synthetic oligonucleotide
ugggaguaagugguucugg

SEQ ID NO: 1974139 - RNA, 19 nt, Artificial Sequence
  Description of Artificial Sequence: Synthetic oligonucleotide
gcgaucagugaccaagugg

SEQ ID NO: 1974140 - RNA, 19 nt, Artificial Sequence
  Description of Artificial Sequence: Synthetic oligonucleotide
uuacugagcuggcuagacu

SEQ ID NO: 1974141 - RNA, 19 nt, Artificial Sequence
  Description of Artificial Sequence: Synthetic oligonucleotide
cugguagaggaccuauuug

SEQ ID NO: 1974142 - RNA, 19 nt, Artificial Sequence
  Description of Artificial Sequence: Synthetic oligonucleotide
uuagguaugacaggcuguu

SEQ ID NO: 1974143 - RNA, 19 nt, Artificial Sequence
  Description of Artificial Sequence: Synthetic oligonucleotide
gaccuauguggccugcccc

SEQ ID NO: 1974144 - RNA, 19 nt, Artificial Sequence
  Description of Artificial Sequence: Synthetic oligonucleotide
gcuuuagcacuccagucag

SEQ ID NO: 1974145 - RNA, 19 nt, Artificial Sequence
  Description of Artificial Sequence: Synthetic oligonucleotide
gggaguaagugguucuggg

SEQ ID NO: 1974146 - RNA, 19 nt, Artificial Sequence
  Description of Artificial Sequence: Synthetic oligonucleotide
agguuuagcccgccggcuc

SEQ ID NO: 1974147 - RNA, 19 nt, Artificial Sequence
  Description of Artificial Sequence: Synthetic oligonucleotide
ucuacacggucccucuuuc

SEQ ID NO: 1974148 - RNA, 19 nt, Artificial Sequence
  Description of Artificial Sequence: Synthetic oligonucleotide
ggcuuauagggacuggggc

SEQ ID NO: 1974149 - RNA, 19 nt, Artificial Sequence
  Description of Artificial Sequence: Synthetic oligonucleotide
cucuuguucagggucaguc

SEQ ID NO: 1974150 - RNA, 19 nt, Artificial Sequence
  Description of Artificial Sequence: Synthetic oligonucleotide
ugcgaucagugaccaagug

SEQ ID NO: 1974151 - RNA, 19 nt, Artificial Sequence
  Description of Artificial Sequence: Synthetic oligonucleotide
aggaccuauuugcccugcc

SEQ ID NO: 1974152 - RNA, 19 nt, Artificial Sequence
  Description of Artificial Sequence: Synthetic oligonucleotide
agcgagguaggucuucagu

SEQ ID NO: 1974153 - RNA, 19 nt, Artificial Sequence
  Description of Artificial Sequence: Synthetic oligonucleotide
cagucgagaugggauagcg

SEQ ID NO: 1974154 - RNA, 19 nt, Artificial Sequence
  Description of Artificial Sequence: Synthetic oligonucleotide
ggguuuagguaugacaggc

SEQ ID NO: 1974155 - RNA, 19 nt, Artificial Sequence
  Description of Artificial Sequence: Synthetic oligonucleotide
guaaggcuuauagggacug

SEQ ID NO: 1974156 - RNA, 19 nt, Artificial Sequence
  Description of Artificial Sequence: Synthetic oligonucleotide
uacacggucccucuuucuu

SEQ ID NO: 1974157 - RNA, 19 nt, Artificial Sequence
  Description of Artificial Sequence: Synthetic oligonucleotide
uuucuuuugccggguguug

SEQ ID NO: 1974158 - RNA, 19 nt, Artificial Sequence
  Description of Artificial Sequence: Synthetic oligonucleotide
cuuuagcacuccagucagg

SEQ ID NO: 1974159 - RNA, 19 nt, Artificial Sequence
  Description of Artificial Sequence: Synthetic oligonucleotide
gaucucgcccaucugaggu

SEQ ID NO: 1974160 - RNA, 19 nt, Artificial Sequence
  Description of Artificial Sequence: Synthetic oligonucleotide
uuuugggauuccggggucc

SEQ ID NO: 1974161 - RNA, 19 nt, Artificial Sequence
  Description of Artificial Sequence: Synthetic oligonucleotide
ugcacgcucuccccgagaa

SEQ ID NO: 1974162 - RNA, 19 nt, Artificial Sequence
  Description of Artificial Sequence: Synthetic oligonucleotide
agcuggcuagacugccacc

SEQ ID NO: 1974163 - RNA, 19 nt, Artificial Sequence
  Description of Artificial Sequence: Synthetic oligonucleotide
cacaagaacuugaccguuc

SEQ ID NO: 1974164 - RNA, 19 nt, Artificial Sequence
  Description of Artificial Sequence: Synthetic oligonucleotide
uuugccggguguuggaauu

SEQ ID NO: 1974165 - RNA, 19 nt, Artificial Sequence
  Description of Artificial Sequence: Synthetic oligonucleotide
gggguuugggguaacaggc

SEQ ID NO: 1974166 - RNA, 19 nt, Artificial Sequence
  Description of Artificial Sequence: Synthetic oligonucleotide
agugaccagccuuucugga

SEQ ID NO: 1974167 - RNA, 19 nt, Artificial Sequence
  Description of Artificial Sequence: Synthetic oligonucleotide
ugagcuggcuagacugcca

SEQ ID NO: 1974168 - RNA, 19 nt, Artificial Sequence
  Description of Artificial Sequence: Synthetic oligonucleotide
cuucucuuguucaggguca

SEQ ID NO: 1974169 - RNA, 19 nt, Artificial Sequence
  Description of Artificial Sequence: Synthetic oligonucleotide
gguaugacaggcuguucug

SEQ ID NO: 1974170 - RNA, 19 nt, Artificial Sequence
  Description of Artificial Sequence: Synthetic oligonucleotide
gcgagguaggucuucagug

SEQ ID NO: 1974171 - RNA, 19 nt, Artificial Sequence
  Description of Artificial Sequence: Synthetic oligonucleotide
uuacgugaccugcccgagc

SEQ ID NO: 1974172 - RNA, 19 nt, Artificial Sequence
  Description of Artificial Sequence: Synthetic oligonucleotide
uuucccugggucucauccu

SEQ ID NO: 1974173 - RNA, 19 nt, Artificial Sequence
  Description of Artificial Sequence: Synthetic oligonucleotide
uccccgagaacuccacaac

SEQ ID NO: 1974174 - RNA, 19 nt, Artificial Sequence
  Description of Artificial Sequence: Synthetic oligonucleotide
uacaggcuguucuguggag

SEQ ID NO: 1974175 - RNA, 19 nt, Artificial Sequence
  Description of Artificial Sequence: Synthetic oligonucleotide
gcuuauagggacuggggca

SEQ ID NO: 1974176 - RNA, 19 nt, Artificial Sequence
  Description of Artificial Sequence: Synthetic oligonucleotide
aggcuuauagggacugggg

SEQ ID NO: 1974177 - RNA, 19 nt, Artificial Sequence
  Description of Artificial Sequence: Synthetic oligonucleotide
gguuugggguaacaggcug

SEQ ID NO: 1974178 - RNA, 19 nt, Artificial Sequence
  Description of Artificial Sequence: Synthetic oligonucleotide
guuggaauugcuaucuccu

SEQ ID NO: 1974179 - RNA, 19 nt, Artificial Sequence
  Description of Artificial Sequence: Synthetic oligonucleotide
aggccucauuuacugagcu

SEQ ID NO: 1974180 - RNA, 19 nt, Artificial Sequence
  Description of Artificial Sequence: Synthetic oligonucleotide
uggacugauacagccaguu

SEQ ID NO: 1974181 - RNA, 19 nt, Artificial Sequence
  Description of Artificial Sequence: Synthetic oligonucleotide
aagugggaggccucauuua

SEQ ID NO: 1974182 - RNA, 19 nt, Artificial Sequence
  Description of Artificial Sequence: Synthetic oligonucleotide
gcagcugaugaucucgccc

SEQ ID NO: 1974183 - RNA, 19 nt, Artificial Sequence
  Description of Artificial Sequence: Synthetic oligonucleotide
cagcugaugaucucgccca

SEQ ID NO: 1974184 - RNA, 19 nt, Artificial Sequence
  Description of Artificial Sequence: Synthetic oligonucleotide
gacaggcuguucuguggag

SEQ ID NO: 1974185 - RNA, 19 nt, Artificial Sequence
  Description of Artificial Sequence: Synthetic oligonucleotide
uuuugccggguguuggaau

SEQ ID NO: 1974186 - RNA, 19 nt, Artificial Sequence
  Description of Artificial Sequence: Synthetic oligonucleotide
ugaccguucuucggaugcg

SEQ ID NO: 1974187 - RNA, 19 nt, Artificial Sequence
  Description of Artificial Sequence: Synthetic oligonucleotide
uccucuacacggucccucu

SEQ ID NO: 1974188 - RNA, 19 nt, Artificial Sequence
  Description of Artificial Sequence: Synthetic oligonucleotide
aguagucaucagguggcag

SEQ ID NO: 1974189 - RNA, 19 nt, Artificial Sequence
  Description of Artificial Sequence: Synthetic oligonucleotide
agaggaccuauuugcccug

SEQ ID NO: 1974190 - RNA, 19 nt, Artificial Sequence
  Description of Artificial Sequence: Synthetic oligonucleotide
cuccacaacuccugugaac

SEQ ID NO: 1974191 - RNA, 19 nt, Artificial Sequence
  Description of Artificial Sequence: Synthetic oligonucleotide
uucucuuguucagggucag

SEQ ID NO: 1974192 - RNA, 19 nt, Artificial Sequence
  Description of Artificial Sequence: Synthetic oligonucleotide
gcucagggagucccgaagg

SEQ ID NO: 1974193 - RNA, 19 nt, Artificial Sequence
  Description of Artificial Sequence: Synthetic oligonucleotide
ggauagcgcagcgagguag

SEQ ID NO: 1974194 - RNA, 19 nt, Artificial Sequence
  Description of Artificial Sequence: Synthetic oligonucleotide
gguagaggaccuauuugcc

SEQ ID NO: 1974195 - RNA, 19 nt, Artificial Sequence
  Description of Artificial Sequence: Synthetic oligonucleotide
aggcugaagcuaaaguucu

SEQ ID NO: 1974196 - RNA, 19 nt, Artificial Sequence
  Description of Artificial Sequence: Synthetic oligonucleotide
cuugaccguucuucggaug

SEQ ID NO: 1974197 - RNA, 19 nt, Artificial Sequence
  Description of Artificial Sequence: Synthetic oligonucleotide
ggcacacaagaacuugacc

SEQ ID NO: 1974198 - RNA, 19 nt, Artificial Sequence
  Description of Artificial Sequence: Synthetic oligonucleotide
aaguagucaucagguggca

SEQ ID NO: 1974199 - RNA, 19 nt, Artificial Sequence
  Description of Artificial Sequence: Synthetic oligonucleotide
uuuuguugccgagcccggc

SEQ ID NO: 1974200 - RNA, 19 nt, Artificial Sequence
  Description of Artificial Sequence: Synthetic oligonucleotide
uacagccaguucagggaga

SEQ ID NO: 1974201 - RNA, 19 nt, Artificial Sequence
  Description of Artificial Sequence: Synthetic oligonucleotide
uuccuucacuacaggcugu

SEQ ID NO: 1974202 - RNA, 19 nt, Artificial Sequence
  Description of Artificial Sequence: Synthetic oligonucleotide
acuugaccguucuucggau

SEQ ID NO: 1974203 - RNA, 19 nt, Artificial Sequence
  Description of Artificial Sequence: Synthetic oligonucleotide
auagcccuccagcaguuuu

SEQ ID NO: 1974204 - RNA, 19 nt, Artificial Sequence
  Description of Artificial Sequence: Synthetic oligonucleotide
cagagccaggacugcacgc

SEQ ID NO: 1974205 - RNA, 19 nt, Artificial Sequence
  Description of Artificial Sequence: Synthetic oligonucleotide
cugauacagccaguucagg

SEQ ID NO: 1974206 - RNA, 19 nt, Artificial Sequence
  Description of Artificial Sequence: Synthetic oligonucleotide
agagccaggacugcacgcu

SEQ ID NO: 1974207 - RNA, 19 nt, Artificial Sequence
  Description of Artificial Sequence: Synthetic oligonucleotide
gaggauagggaugcccuuc

SEQ ID NO: 1974208 - RNA, 19 nt, Artificial Sequence
  Description of Artificial Sequence: Synthetic oligonucleotide
agugaccaagugggaggcc

SEQ ID NO: 1974209 - RNA, 19 nt, Artificial Sequence
  Description of Artificial Sequence: Synthetic oligonucleotide
ggaccuauuugcccugccc

SEQ ID NO: 1974210 - RNA, 19 nt, Artificial Sequence
  Description of Artificial Sequence: Synthetic oligonucleotide
auuuacugagcuggcuaga

SEQ ID NO: 1974211 - RNA, 19 nt, Artificial Sequence
  Description of Artificial Sequence: Synthetic oligonucleotide
uuguugccgagcccggcuc

SEQ ID NO: 1974212 - RNA, 19 nt, Artificial Sequence
  Description of Artificial Sequence: Synthetic oligonucleotide
ucuccccgagaacuccaca

SEQ ID NO: 1974213 - RNA, 19 nt, Artificial Sequence
  Description of Artificial Sequence: Synthetic oligonucleotide
gguuagguuuagcccgccg

SEQ ID NO: 1974214 - RNA, 19 nt, Artificial Sequence
  Description of Artificial Sequence: Synthetic oligonucleotide
ugaccugcccgagcagccg

SEQ ID NO: 1974215 - RNA, 19 nt, Artificial Sequence
  Description of Artificial Sequence: Synthetic oligonucleotide
gcuagacugccacccagag

SEQ ID NO: 1974216 - RNA, 19 nt, Artificial Sequence
  Description of Artificial Sequence: Synthetic oligonucleotide
ccgagaacuccacaacucc

SEQ ID NO: 1974217 - RNA, 19 nt, Artificial Sequence
  Description of Artificial Sequence: Synthetic oligonucleotide
auguggguuuagguaugac

SEQ ID NO: 1974218 - RNA, 19 nt, Artificial Sequence
  Description of Artificial Sequence: Synthetic oligonucleotide
caggggucacguaaaucuc

SEQ ID NO: 1974219 - RNA, 19 nt, Artificial Sequence
  Description of Artificial Sequence: Synthetic oligonucleotide
acaacuccugugaacagua

SEQ ID NO: 1974220 - RNA, 19 nt, Artificial Sequence
  Description of Artificial Sequence: Synthetic oligonucleotide
uccgggguccugguagagg

SEQ ID NO: 1974221 - RNA, 19 nt, Artificial Sequence
  Description of Artificial Sequence: Synthetic oligonucleotide
uuugggauuccgggguccu

SEQ ID NO: 1974222 - RNA, 19 nt, Artificial Sequence
  Description of Artificial Sequence: Synthetic oligonucleotide
cuuacgugaccugcccgag

SEQ ID NO: 1974223 - RNA, 19 nt, Artificial Sequence
  Description of Artificial Sequence: Synthetic oligonucleotide
gaccagccuuucuggacug

SEQ ID NO: 1974224 - RNA, 19 nt, Artificial Sequence
  Description of Artificial Sequence: Synthetic oligonucleotide
cugaagcuaaaguucuucu

SEQ ID NO: 1974225 - RNA, 19 nt, Artificial Sequence
  Description of Artificial Sequence: Synthetic oligonucleotide
uuugggguaacaggcuguu

SEQ ID NO: 1974226 - RNA, 19 nt, Artificial Sequence
  Description of Artificial Sequence: Synthetic oligonucleotide
cacacaagaacuugaccgu

SEQ ID NO: 1974227 - RNA, 19 nt, Artificial Sequence
  Description of Artificial Sequence: Synthetic oligonucleotide
uagguuuagcccgccggcu

SEQ ID NO: 1974228 - RNA, 19 nt, Artificial Sequence
  Description of Artificial Sequence: Synthetic oligonucleotide
acuccacaacuccugugaa

SEQ ID NO: 1974229 - RNA, 19 nt, Artificial Sequence
  Description of Artificial Sequence: Synthetic oligonucleotide
agauguggguuuagguaug

SEQ ID NO: 1974230 - RNA, 19 nt, Artificial Sequence
  Description of Artificial Sequence: Synthetic oligonucleotide
gcuggcuagacugccaccc

SEQ ID NO: 1974231 - RNA, 19 nt, Artificial Sequence
  Description of Artificial Sequence: Synthetic oligonucleotide
guccugguagaagacuuac

SEQ ID NO: 1974232 - RNA, 19 nt, Artificial Sequence
  Description of Artificial Sequence: Synthetic oligonucleotide
ggagaggauagggaugccc

SEQ ID NO: 1974233 - RNA, 19 nt, Artificial Sequence
  Description of Artificial Sequence: Synthetic oligonucleotide
aggaagugaccagccuuuc

SEQ ID NO: 1974234 - RNA, 19 nt, Artificial Sequence
  Description of Artificial Sequence: Synthetic oligonucleotide
auuccgggguccugguaga

SEQ ID NO: 1974235 - RNA, 19 nt, Artificial Sequence
  Description of Artificial Sequence: Synthetic oligonucleotide
gguuuagcccgccggcucc

SEQ ID NO: 1974236 - RNA, 19 nt, Artificial Sequence
  Description of Artificial Sequence: Synthetic oligonucleotide
cuucuugguuagguuuagc

SEQ ID NO: 1974237 - RNA, 19 nt, Artificial Sequence
  Description of Artificial Sequence: Synthetic oligonucleotide
cuggauggaagaccuaugu

SEQ ID NO: 1974238 - RNA, 19 nt, Artificial Sequence
  Description of Artificial Sequence: Synthetic oligonucleotide
acugcacgcucuccccgag

SEQ ID NO: 1974239 - RNA, 19 nt, Artificial Sequence
  Description of Artificial Sequence: Synthetic oligonucleotide
gcuggauuuugggauuccg

SEQ ID NO: 1974240 - RNA, 19 nt, Artificial Sequence
  Description of Artificial Sequence: Synthetic oligonucleotide
guucuucggaugcgaucag

SEQ ID NO: 1974241 - RNA, 19 nt, Artificial Sequence
  Description of Artificial Sequence: Synthetic oligonucleotide
gaagaccuauguggccugc

SEQ ID NO: 1974242 - RNA, 19 nt, Artificial Sequence
  Description of Artificial Sequence: Synthetic oligonucleotide
cccucuuucuuuugccggg

SEQ ID NO: 1974243 - RNA, 19 nt, Artificial Sequence
  Description of Artificial Sequence: Synthetic oligonucleotide
gauguggguuuagguauga

SEQ ID NO: 1974244 - RNA, 19 nt, Artificial Sequence
  Description of Artificial Sequence: Synthetic oligonucleotide
caacuccugugaacaguac

SEQ ID NO: 1974245 - RNA, 19 nt, Artificial Sequence
  Description of Artificial Sequence: Synthetic oligonucleotide
acacggucccucuuucuuu

SEQ ID NO: 1974246 - RNA, 19 nt, Artificial Sequence
  Description of Artificial Sequence: Synthetic oligonucleotide
cgagcagccgagauguggg

SEQ ID NO: 1974247 - RNA, 19 nt, Artificial Sequence
  Description of Artificial Sequence: Synthetic oligonucleotide
uuauagggacuggggcaug

SEQ ID NO: 1974248 - RNA, 19 nt, Artificial Sequence
  Description of Artificial Sequence: Synthetic oligonucleotide
gggucucauccucuacacg

SEQ ID NO: 1974249 - RNA, 19 nt, Artificial Sequence
  Description of Artificial Sequence: Synthetic oligonucleotide
gggguaacaggcuguucug

SEQ ID NO: 1974250 - RNA, 19 nt, Artificial Sequence
  Description of Artificial Sequence: Synthetic oligonucleotide
ggacugcacgcucuccccg

SEQ ID NO: 1974251 - RNA, 19 nt, Artificial Sequence
  Description of Artificial Sequence: Synthetic oligonucleotide
ggcucagggagucccgaag

SEQ ID NO: 1974252 - RNA, 19 nt, Artificial Sequence
  Description of Artificial Sequence: Synthetic oligonucleotide
uaccuuggggcugcugcug

SEQ ID NO: 1974253 - RNA, 19 nt, Artificial Sequence
  Description of Artificial Sequence: Synthetic oligonucleotide
gacugcacgcucuccccga

SEQ ID NO: 1974254 - RNA, 19 nt, Artificial Sequence
  Description of Artificial Sequence: Synthetic oligonucleotide
gggucagucaccaaguagu

SEQ ID NO: 1974255 - RNA, 19 nt, Artificial Sequence
  Description of Artificial Sequence: Synthetic oligonucleotide
cuauguggccugccccgag

SEQ ID NO: 1974256 - RNA, 19 nt, Artificial Sequence
  Description of Artificial Sequence: Synthetic oligonucleotide
gguguuggaauugcuaucu

SEQ ID NO: 1974257 - RNA, 19 nt, Artificial Sequence
  Description of Artificial Sequence: Synthetic oligonucleotide
ccaggggucacguaaaucu

SEQ ID NO: 1974258 - RNA, 19 nt, Artificial Sequence
  Description of Artificial Sequence: Synthetic oligonucleotide
cuccccgagaacuccacaa

SEQ ID NO: 1974259 - RNA, 19 nt, Artificial Sequence
  Description of Artificial Sequence: Synthetic oligonucleotide
uccugguagaggaccuauu

SEQ ID NO: 1974260 - RNA, 19 nt, Artificial Sequence
  Description of Artificial Sequence: Synthetic oligonucleotide
ccugucuuaagaaauuccu

SEQ ID NO: 1974261 - RNA, 19 nt, Artificial Sequence
  Description of Artificial Sequence: Synthetic oligonucleotide
ugccccgaguggccugagg

SEQ ID NO: 1974262 - RNA, 19 nt, Artificial Sequence
  Description of Artificial Sequence: Synthetic oligonucleotide
ugccggguguuggaauugc

SEQ ID NO: 1974263 - RNA, 19 nt, Artificial Sequence
  Description of Artificial Sequence: Synthetic oligonucleotide
cacagcagcugaugaucuc

SEQ ID NO: 1974264 - RNA, 19 nt, Artificial Sequence
  Description of Artificial Sequence: Synthetic oligonucleotide
acacaagaacuugaccguu

SEQ ID NO: 1974265 - RNA, 19 nt, Artificial Sequence
  Description of Artificial Sequence: Synthetic oligonucleotide
guuuagcccgccggcuccg

SEQ ID NO: 1974266 - RNA, 19 nt, Artificial Sequence
  Description of Artificial Sequence: Synthetic oligonucleotide
agaugggauagcgcagcga

SEQ ID NO: 1974267 - RNA, 19 nt, Artificial Sequence
  Description of Artificial Sequence: Synthetic oligonucleotide
ccugguagaagacuuacgu

SEQ ID NO: 1974268 - RNA, 19 nt, Artificial Sequence
  Description of Artificial Sequence: Synthetic oligonucleotide
gaucagugaccaaguggga

SEQ ID NO: 1974269 - RNA, 19 nt, Artificial Sequence
  Description of Artificial Sequence: Synthetic oligonucleotide
gaggaccuauuugcccugc

SEQ ID NO: 1974270 - RNA, 19 nt, Artificial Sequence
  Description of Artificial Sequence: Synthetic oligonucleotide
ccagagccaggacugcacg

SEQ ID NO: 1974271 - RNA, 19 nt, Artificial Sequence
  Description of Artificial Sequence: Synthetic oligonucleotide
guguuggaauugcuaucuc

SEQ ID NO: 1974272 - RNA, 19 nt, Artificial Sequence
  Description of Artificial Sequence: Synthetic oligonucleotide
cucuccccgagaacuccac

SEQ ID NO: 1974273 - RNA, 19 nt, Artificial Sequence
  Description of Artificial Sequence: Synthetic oligonucleotide
cgguaaggcuuauagggac

SEQ ID NO: 1974274 - RNA, 19 nt, Artificial Sequence
  Description of Artificial Sequence: Synthetic oligonucleotide
gugaccugcccgagcagcc

SEQ ID NO: 1974275 - RNA, 19 nt, Artificial Sequence
  Description of Artificial Sequence: Synthetic oligonucleotide
augcgaucagugaccaagu

SEQ ID NO: 1974276 - RNA, 19 nt, Artificial Sequence
  Description of Artificial Sequence: Synthetic oligonucleotide
uuagcccgccggcuccgac

SEQ ID NO: 1974277 - RNA, 19 nt, Artificial Sequence
  Description of Artificial Sequence: Synthetic oligonucleotide
cccgagaacuccacaacuc

SEQ ID NO: 1974278 - RNA, 19 nt, Artificial Sequence
  Description of Artificial Sequence: Synthetic oligonucleotide
aggaggaacucaggagaga

SEQ ID NO: 1974279 - RNA, 19 nt, Artificial Sequence
  Description of Artificial Sequence: Synthetic oligonucleotide
cuuauagggacuggggcau

SEQ ID NO: 1974280 - RNA, 19 nt, Artificial Sequence
  Description of Artificial Sequence: Synthetic oligonucleotide
cagcgagguaggucuucag

SEQ ID NO: 1974281 - RNA, 19 nt, Artificial Sequence
  Description of Artificial Sequence: Synthetic oligonucleotide
uagguaugacaggcuguuc

SEQ ID NO: 1974282 - RNA, 19 nt, Artificial Sequence
  Description of Artificial Sequence: Synthetic oligonucleotide
ugguuagguuuagcccgcc

SEQ ID NO: 1974283 - RNA, 19 nt, Artificial Sequence
  Description of Artificial Sequence: Synthetic oligonucleotide
ggccucauuuacugagcug

SEQ ID NO: 1974284 - RNA, 19 nt, Artificial Sequence
  Description of Artificial Sequence: Synthetic oligonucleotide
gccgagauguggguuuagg

SEQ ID NO: 1974285 - RNA, 19 nt, Artificial Sequence
  Description of Artificial Sequence: Synthetic oligonucleotide
ggacugauacagccaguuc

SEQ ID NO: 1974286 - RNA, 19 nt, Artificial Sequence
  Description of Artificial Sequence: Synthetic oligonucleotide
gaccguucuucggaugcga

SEQ ID NO: 1974287 - RNA, 19 nt, Artificial Sequence
  Description of Artificial Sequence: Synthetic oligonucleotide
gaaccugucuuaagaaauu

SEQ ID NO: 1974288 - RNA, 19 nt, Artificial Sequence
  Description of Artificial Sequence: Synthetic oligonucleotide
acgugaccugcccgagcag

SEQ ID NO: 1974289 - RNA, 19 nt, Artificial Sequence
  Description of Artificial Sequence: Synthetic oligonucleotide
ggauagggaugcccuuccc

SEQ ID NO: 1974290 - RNA, 19 nt, Artificial Sequence
  Description of Artificial Sequence: Synthetic oligonucleotide
agcugaugaucucgcccau

SEQ ID NO: 1974291 - RNA, 19 nt, Artificial Sequence
  Description of Artificial Sequence: Synthetic oligonucleotide
ugcccuuccccagggcaca

SEQ ID NO: 1974292 - RNA, 19 nt, Artificial Sequence
  Description of Artificial Sequence: Synthetic oligonucleotide
gaccugcccgagcagccga

SEQ ID NO: 1974293 - RNA, 19 nt, Artificial Sequence
  Description of Artificial Sequence: Synthetic oligonucleotide
gaccaagugggaggccuca

SEQ ID NO: 1974294 - RNA, 19 nt, Artificial Sequence
  Description of Artificial Sequence: Synthetic oligonucleotide
acggucccucuuucuuuug

SEQ ID NO: 1974295 - RNA, 19 nt, Artificial Sequence
  Description of Artificial Sequence: Synthetic oligonucleotide
ucucuuguucagggucagu

SEQ ID NO: 1974296 - RNA, 19 nt, Artificial Sequence
  Description of Artificial Sequence: Synthetic oligonucleotide
uuccgggguccugguagag

SEQ ID NO: 1974297 - RNA, 19 nt, Artificial Sequence
  Description of Artificial Sequence: Synthetic oligonucleotide
cacgcucuccccgagaacu

SEQ ID NO: 1974298 - RNA, 19 nt, Artificial Sequence
  Description of Artificial Sequence: Synthetic oligonucleotide
gugaccaagugggaggccu

SEQ ID NO: 1974299 - RNA, 19 nt, Artificial Sequence
  Description of Artificial Sequence: Synthetic oligonucleotide
caagugggaggccucauuu

SEQ ID NO: 1974300 - RNA, 19 nt, Artificial Sequence
  Description of Artificial Sequence: Synthetic oligonucleotide
uugccgagcccggcucagg

SEQ ID NO: 1974301 - RNA, 19 nt, Artificial Sequence
  Description of Artificial Sequence: Synthetic oligonucleotide
uagcgcagcgagguagguc

SEQ ID NO: 1974302 - RNA, 19 nt, Artificial Sequence
  Description of Artificial Sequence: Synthetic oligonucleotide
caggaccagugggaguaag

SEQ ID NO: 1974303 - RNA, 19 nt, Artificial Sequence
  Description of Artificial Sequence: Synthetic oligonucleotide
ccgagcagccgagaugugg

SEQ ID NO: 1974304 - RNA, 19 nt, Artificial Sequence
  Description of Artificial Sequence: Synthetic oligonucleotide
cguucuucggaugcgauca

SEQ ID NO: 1974305 - RNA, 19 nt, Artificial Sequence
  Description of Artificial Sequence: Synthetic oligonucleotide
guugccgagcccggcucag

SEQ ID NO: 1974306 - RNA, 19 nt, Artificial Sequence
  Description of Artificial Sequence: Synthetic oligonucleotide
caggcuguucuguggaggu

SEQ ID NO: 1974307 - RNA, 19 nt, Artificial Sequence
  Description of Artificial Sequence: Synthetic oligonucleotide
cgagauguggguuuaggua

SEQ ID NO: 1974308 - RNA, 19 nt, Artificial Sequence
  Description of Artificial Sequence: Synthetic oligonucleotide
ccacaacuccugugaacag

SEQ ID NO: 1974309 - RNA, 19 nt, Artificial Sequence
  Description of Artificial Sequence: Synthetic oligonucleotide
gggcacacaagaacuugac

SEQ ID NO: 1974310 - RNA, 19 nt, Artificial Sequence
  Description of Artificial Sequence: Synthetic oligonucleotide
caggaagugaccagccuuu

SEQ ID NO: 1974311 - RNA, 19 nt, Artificial Sequence
  Description of Artificial Sequence: Synthetic oligonucleotide
acgcucuccccgagaacuc

SEQ ID NO: 1974312 - RNA, 19 nt, Artificial Sequence
  Description of Artificial Sequence: Synthetic oligonucleotide
guaccuuggggcugcugcu

SEQ ID NO: 1974313 - RNA, 19 nt, Artificial Sequence
  Description of Artificial Sequence: Synthetic oligonucleotide
auagcgcagcgagguaggu

SEQ ID NO: 1974314 - RNA, 19 nt, Artificial Sequence
  Description of Artificial Sequence: Synthetic oligonucleotide
aggcuguucuguggaggug

SEQ ID NO: 1974315 - RNA, 19 nt, Artificial Sequence
  Description of Artificial Sequence: Synthetic oligonucleotide
cuuuugccggguguuggaa

SEQ ID NO: 1974316 - RNA, 19 nt, Artificial Sequence
  Description of Artificial Sequence: Synthetic oligonucleotide
cuaucuccugaggcucuuc

SEQ ID NO: 1974317 - RNA, 19 nt, Artificial Sequence
  Description of Artificial Sequence: Synthetic oligonucleotide
agguaggucuucagugcaa

SEQ ID NO: 1974318 - RNA, 19 nt, Artificial Sequence
  Description of Artificial Sequence: Synthetic oligonucleotide
cccagucgagaugggauag

SEQ ID NO: 1974319 - RNA, 19 nt, Artificial Sequence
  Description of Artificial Sequence: Synthetic oligonucleotide
agcagccgagauguggguu

SEQ ID NO: 1974320 - RNA, 19 nt, Artificial Sequence
  Description of Artificial Sequence: Synthetic oligonucleotide
ggcagccccagucgagaug

SEQ ID NO: 1974321 - RNA, 19 nt, Artificial Sequence
  Description of Artificial Sequence: Synthetic oligonucleotide
uuuagcccgccggcuccga

SEQ ID NO: 1974322 - RNA, 19 nt, Artificial Sequence
  Description of Artificial Sequence: Synthetic oligonucleotide
agcccgccggcuccgacuu

SEQ ID NO: 1974323 - RNA, 19 nt, Artificial Sequence
  Description of Artificial Sequence: Synthetic oligonucleotide
agcccggcucagggagucc

SEQ ID NO: 1974324 - RNA, 19 nt, Artificial Sequence
  Description of Artificial Sequence: Synthetic oligonucleotide
gagcccggcucagggaguc

SEQ ID NO: 1974325 - RNA, 19 nt, Artificial Sequence
  Description of Artificial Sequence: Synthetic oligonucleotide
ccguucuucggaugcgauc

SEQ ID NO: 1974326 - RNA, 19 nt, Artificial Sequence
  Description of Artificial Sequence: Synthetic oligonucleotide
agccgagauguggguuuag

SEQ ID NO: 1974327 - RNA, 19 nt, Artificial Sequence
  Description of Artificial Sequence: Synthetic oligonucleotide
gguaaggcuuauagggacu

SEQ ID NO: 1974328 - RNA, 19 nt, Artificial Sequence
  Description of Artificial Sequence: Synthetic oligonucleotide
ggaagugaccagccuuucu

SEQ ID NO: 1974329 - RNA, 19 nt, Artificial Sequence
  Description of Artificial Sequence: Synthetic oligonucleotide
ggagucccgaaggcugaag

SEQ ID NO: 1974330 - RNA, 19 nt, Artificial Sequence
  Description of Artificial Sequence: Synthetic oligonucleotide
guggccugagguguggggu

SEQ ID NO: 1974331 - RNA, 19 nt, Artificial Sequence
  Description of Artificial Sequence: Synthetic oligonucleotide
accguucuucggaugcgau

SEQ ID NO: 1974332 - RNA, 19 nt, Artificial Sequence
  Description of Artificial Sequence: Synthetic oligonucleotide
gacuuggguuucccugggu

SEQ ID NO: 1974333 - RNA, 19 nt, Artificial Sequence
  Description of Artificial Sequence: Synthetic oligonucleotide
gagcagccgagaugugggu

SEQ ID NO: 1974334 - RNA, 19 nt, Artificial Sequence
  Description of Artificial Sequence: Synthetic oligonucleotide
gguuuagguaugacaggcu

SEQ ID NO: 1974335 - RNA, 19 nt, Artificial Sequence
  Description of Artificial Sequence: Synthetic oligonucleotide
cucuacacggucccucuuu

SEQ ID NO: 1974336 - RNA, 19 nt, Artificial Sequence
  Description of Artificial Sequence: Synthetic oligonucleotide
accaagugggaggccucau

SEQ ID NO: 1974337 - RNA, 19 nt, Artificial Sequence
  Description of Artificial Sequence: Synthetic oligonucleotide
accugcccgagcagccgag

SEQ ID NO: 1974338 - RNA, 19 nt, Artificial Sequence
  Description of Artificial Sequence: Synthetic oligonucleotide
ccagucgagaugggauagc

SEQ ID NO: 1974339 - RNA, 19 nt, Artificial Sequence
  Description of Artificial Sequence: Synthetic oligonucleotide
cgacuuggguuucccuggg

SEQ ID NO: 1974340 - RNA, 19 nt, Artificial Sequence
  Description of Artificial Sequence: Synthetic oligonucleotide
gcccgagcagccgagaugu

SEQ ID NO: 1974341 - RNA, 19 nt, Artificial Sequence
  Description of Artificial Sequence: Synthetic oligonucleotide
gcagcgagguaggucuuca

SEQ ID NO: 1974342 - RNA, 19 nt, Artificial Sequence
  Description of Artificial Sequence: Synthetic oligonucleotide
ggucuucagugcaaguuau

SEQ ID NO: 1974343 - RNA, 19 nt, Artificial Sequence
  Description of Artificial Sequence: Synthetic oligonucleotide
gcuccgacuuggguuuccc

SEQ ID NO: 1974344 - RNA, 19 nt, Artificial Sequence
  Description of Artificial Sequence: Synthetic oligonucleotide
gccccgaguggccugaggu

SEQ ID NO: 1974345 - RNA, 19 nt, Artificial Sequence
  Description of Artificial Sequence: Synthetic oligonucleotide
cuggacugauacagccagu

SEQ ID NO: 1974346 - RNA, 19 nt, Artificial Sequence
  Description of Artificial Sequence: Synthetic oligonucleotide
cacggucccucuuucuuuu

SEQ ID NO: 1974347 - RNA, 19 nt, Artificial Sequence
  Description of Artificial Sequence: Synthetic oligonucleotide
caguaccuuggggcugcug

SEQ ID NO: 1974348 - RNA, 19 nt, Artificial Sequence
  Description of Artificial Sequence: Synthetic oligonucleotide
ccgagauguggguuuaggu

SEQ ID NO: 1974349 - RNA, 19 nt, Artificial Sequence
  Description of Artificial Sequence: Synthetic oligonucleotide
cuguucuguggagguggga

SEQ ID NO: 1974350 - RNA, 19 nt, Artificial Sequence
  Description of Artificial Sequence: Synthetic oligonucleotide
ccgaguggccugaggugug

SEQ ID NO: 1974351 - RNA, 19 nt, Artificial Sequence
  Description of Artificial Sequence: Synthetic oligonucleotide
ccugguagaggaccuauuu

SEQ ID NO: 1974352 - RNA, 19 nt, Artificial Sequence
  Description of Artificial Sequence: Synthetic oligonucleotide
guccugguagaggaccuau

SEQ ID NO: 1974353 - RNA, 19 nt, Artificial Sequence
  Description of Artificial Sequence: Synthetic oligonucleotide
ccggguguuggaauugcua

SEQ ID NO: 1974354 - RNA, 19 nt, Artificial Sequence
  Description of Artificial Sequence: Synthetic oligonucleotide
cugcacgcucuccccgaga

SEQ ID NO: 1974355 - RNA, 19 nt, Artificial Sequence
  Description of Artificial Sequence: Synthetic oligonucleotide
ggcugcacuccagggguca

SEQ ID NO: 1974356 - RNA, 19 nt, Artificial Sequence
  Description of Artificial Sequence: Synthetic oligonucleotide
ccaggacugcacgcucucc

SEQ ID NO: 1974357 - RNA, 19 nt, Artificial Sequence
  Description of Artificial Sequence: Synthetic oligonucleotide
gguccugguagaagacuua

SEQ ID NO: 1974358 - RNA, 19 nt, Artificial Sequence
  Description of Artificial Sequence: Synthetic oligonucleotide
gccggcuccgacuuggguu

SEQ ID NO: 1974359 - RNA, 19 nt, Artificial Sequence
  Description of Artificial Sequence: Synthetic oligonucleotide
gggucacguaaaucucaua

SEQ ID NO: 1974360 - RNA, 19 nt, Artificial Sequence
  Description of Artificial Sequence: Synthetic oligonucleotide
cuccgacuuggguuucccu

SEQ ID NO: 1974361 - RNA, 19 nt, Artificial Sequence
  Description of Artificial Sequence: Synthetic oligonucleotide
gcacgcucuccccgagaac

SEQ ID NO: 1974362 - RNA, 19 nt, Artificial Sequence
  Description of Artificial Sequence: Synthetic oligonucleotide
ggguuugggguaacaggcu

SEQ ID NO: 1974363 - RNA, 19 nt, Artificial Sequence
  Description of Artificial Sequence: Synthetic oligonucleotide
cggguguuggaauugcuau

SEQ ID NO: 1974364 - RNA, 19 nt, Artificial Sequence
  Description of Artificial Sequence: Synthetic oligonucleotide
ccuucacuacaggcuguuc

SEQ ID NO: 1974365 - RNA, 19 nt, Artificial Sequence
  Description of Artificial Sequence: Synthetic oligonucleotide
ccccagucgagaugggaua

SEQ ID NO: 1974366 - RNA, 19 nt, Artificial Sequence
  Description of Artificial Sequence: Synthetic oligonucleotide
ccccgagaacuccacaacu

SEQ ID NO: 1974367 - RNA, 19 nt, Artificial Sequence
  Description of Artificial Sequence: Synthetic oligonucleotide
ggauuccgggguccuggua

SEQ ID NO: 1974368 - RNA, 19 nt, Artificial Sequence
  Description of Artificial Sequence: Synthetic oligonucleotide
gggauagcgcagcgaggua

SEQ ID NO: 1974369 - RNA, 19 nt, Artificial Sequence
  Description of Artificial Sequence: Synthetic oligonucleotide
ggggucacguaaaucucau

SEQ ID NO: 1974370 - RNA, 19 nt, Artificial Sequence
  Description of Artificial Sequence: Synthetic oligonucleotide
caacucgguaaggcuuaua

SEQ ID NO: 1974371 - RNA, 19 nt, Artificial Sequence
  Description of Artificial Sequence: Synthetic oligonucleotide
cagccgagauguggguuua

SEQ ID NO: 1974372 - RNA, 19 nt, Artificial Sequence
  Description of Artificial Sequence: Synthetic oligonucleotide
gccccagucgagaugggau

SEQ ID NO: 1974373 - RNA, 19 nt, Artificial Sequence
  Description of Artificial Sequence: Synthetic oligonucleotide
gggauuccgggguccuggu

SEQ ID NO: 1974374 - RNA, 19 nt, Artificial Sequence
  Description of Artificial Sequence: Synthetic oligonucleotide
ccuauguggccugccccga

SEQ ID NO: 1974375 - RNA, 19 nt, Artificial Sequence
  Description of Artificial Sequence: Synthetic oligonucleotide
cauccucuacacggucccu

SEQ ID NO: 1974376 - RNA, 19 nt, Artificial Sequence
  Description of Artificial Sequence: Synthetic oligonucleotide
cugccccgaguggccugag

SEQ ID NO: 1974377 - RNA, 19 nt, Artificial Sequence
  Description of Artificial Sequence: Synthetic oligonucleotide
cggaugcgaucagugacca

SEQ ID NO: 1974378 - RNA, 19 nt, Artificial Sequence
  Description of Artificial Sequence: Synthetic oligonucleotide
cccgaguggccugaggugu

SEQ ID NO: 1974379 - RNA, 19 nt, Artificial Sequence
  Description of Artificial Sequence: Synthetic oligonucleotide
ccgccggcuccgacuuggg

SEQ ID NO: 1974380 - RNA, 19 nt, Artificial Sequence
  Description of Artificial Sequence: Synthetic oligonucleotide
gggagucccgaaggcugaa

SEQ ID NO: 1974381 - RNA, 19 nt, Artificial Sequence
  Description of Artificial Sequence: Synthetic oligonucleotide
cccgaaggcugaagcuaaa

SEQ ID NO: 1974382 - RNA, 19 nt, Artificial Sequence
  Description of Artificial Sequence: Synthetic oligonucleotide
cccgagcagccgagaugug

SEQ ID NO: 1974383 - RNA, 19 nt, Artificial Sequence
  Description of Artificial Sequence: Synthetic oligonucleotide
cccugggucucauccucua

SEQ ID NO: 1974384 - RNA, 19 nt, Artificial Sequence
  Description of Artificial Sequence: Synthetic oligonucleotide
cauagcccuccagcaguuu

SEQ ID NO: 1974385 - RNA, 19 nt, Artificial Sequence
  Description of Artificial Sequence: Synthetic oligonucleotide
gggcagccccagucgagau

SEQ ID NO: 1974386 - RNA, 19 nt, Artificial Sequence
  Description of Artificial Sequence: Synthetic oligonucleotide
ccaagugggaggccucauu

SEQ ID NO: 1974387 - RNA, 19 nt, Artificial Sequence
  Description of Artificial Sequence: Synthetic oligonucleotide
cgcagcgagguaggucuuc

SEQ ID NO: 1974388 - RNA, 19 nt, Artificial Sequence
  Description of Artificial Sequence: Synthetic oligonucleotide
gcccuuccccagggcacac

SEQ ID NO: 1974389 - RNA, 19 nt, Artificial Sequence
  Description of Artificial Sequence: Synthetic oligonucleotide
gccggguguuggaauugcu

SEQ ID NO: 1974390 - RNA, 19 nt, Artificial Sequence
  Description of Artificial Sequence: Synthetic oligonucleotide
gcuaucuccugaggcucuu

SEQ ID NO: 1974391 - RNA, 19 nt, Artificial Sequence
  Description of Artificial Sequence: Synthetic oligonucleotide
ccggcucagggagucccga

SEQ ID NO: 1974392 - RNA, 19 nt, Artificial Sequence
  Description of Artificial Sequence: Synthetic oligonucleotide
cagcugguucugggguccu

SEQ ID NO: 1974393 - RNA, 19 nt, Artificial Sequence
  Description of Artificial Sequence: Synthetic oligonucleotide
gcacuccagucaggaggaa

SEQ ID NO: 1974394 - RNA, 19 nt, Artificial Sequence
  Description of Artificial Sequence: Synthetic oligonucleotide
gcccgccggcuccgacuug

SEQ ID NO: 1974395 - RNA, 19 nt, Artificial Sequence
  Description of Artificial Sequence: Synthetic oligonucleotide
ggccugccccgaguggccu

SEQ ID NO: 1974396 - RNA, 19 nt, Artificial Sequence
  Description of Artificial Sequence: Synthetic oligonucleotide
ggguuucccugggucucau

SEQ ID NO: 1974397 - RNA, 19 nt, Artificial Sequence
  Description of Artificial Sequence: Synthetic oligonucleotide
cggcucagggagucccgaa

SEQ ID NO: 1974398 - RNA, 19 nt, Artificial Sequence
  Description of Artificial Sequence: Synthetic oligonucleotide
cgagcccggcucagggagu

SEQ ID NO: 1974399 - RNA, 19 nt, Artificial Sequence
  Description of Artificial Sequence: Synthetic oligonucleotide
cgccggcuccgacuugggu

SEQ ID NO: 1974400 - RNA, 19 nt, Artificial Sequence
  Description of Artificial Sequence: Synthetic oligonucleotide
gcgcagcgagguaggucuu

SEQ ID NO: 1974401 - RNA, 19 nt, Artificial Sequence
  Description of Artificial Sequence: Synthetic oligonucleotide
aaauauacaacuuggaaug

SEQ ID NO: 1974402 - RNA, 19 nt, Artificial Sequence
  Description of Artificial Sequence: Synthetic oligonucleotide
aaaggcauaacccagaugu

SEQ ID NO: 1974403 - RNA, 19 nt, Artificial Sequence
  Description of Artificial Sequence: Synthetic oligonucleotide
aauagugcaacuuuuaagu

SEQ ID NO: 1974404 - RNA, 19 nt, Artificial Sequence
  Description of Artificial Sequence: Synthetic oligonucleotide
ucuaaaguaagguuuaagg

SEQ ID NO: 1974405 - RNA, 19 nt, Artificial Sequence
  Description of Artificial Sequence: Synthetic oligonucleotide
aaaacaaauauacaacuug

SEQ ID NO: 1974406 - RNA, 19 nt, Artificial Sequence
  Description of Artificial Sequence: Synthetic oligonucleotide
aacaacaacaugcugacag

SEQ ID NO: 1974407 - RNA, 19 nt, Artificial Sequence
  Description of Artificial Sequence: Synthetic oligonucleotide
aaaauaguguacgaguacc

SEQ ID NO: 1974408 - RNA, 19 nt, Artificial Sequence
  Description of Artificial Sequence: Synthetic oligonucleotide
aauuuaacacauucuguac

SEQ ID NO: 1974409 - RNA, 19 nt, Artificial Sequence
  Description of Artificial Sequence: Synthetic oligonucleotide
uuuaaguacauauuguuga

SEQ ID NO: 1974410 - RNA, 19 nt, Artificial Sequence
  Description of Artificial Sequence: Synthetic oligonucleotide
uuuauuggaaaacaaauau

SEQ ID NO: 1974411 - RNA, 19 nt, Artificial Sequence
  Description of Artificial Sequence: Synthetic oligonucleotide
auuugaggcaaauugugcc

SEQ ID NO: 1974412 - RNA, 19 nt, Artificial Sequence
  Description of Artificial Sequence: Synthetic oligonucleotide
aaauuuaacacauucugua

SEQ ID NO: 1974413 - RNA, 19 nt, Artificial Sequence
  Description of Artificial Sequence: Synthetic oligonucleotide
uccagaguaagccacaugc

SEQ ID NO: 1974414 - RNA, 19 nt, Artificial Sequence
  Description of Artificial Sequence: Synthetic oligonucleotide
aagguuuaaggacaaugac

SEQ ID NO: 1974415 - RNA, 19 nt, Artificial Sequence
  Description of Artificial Sequence: Synthetic oligonucleotide
acaacaugcugacaguucc

SEQ ID NO: 1974416 - RNA, 19 nt, Artificial Sequence
  Description of Artificial Sequence: Synthetic oligonucleotide
gauauauccagaguaagcc

SEQ ID NO: 1974417 - RNA, 19 nt, Artificial Sequence
  Description of Artificial Sequence: Synthetic oligonucleotide
uccaucuaaguuuagaugu

SEQ ID NO: 1974418 - RNA, 19 nt, Artificial Sequence
  Description of Artificial Sequence: Synthetic oligonucleotide
uccuaauuacuauacaugc

SEQ ID NO: 1974419 - RNA, 19 nt, Artificial Sequence
  Description of Artificial Sequence: Synthetic oligonucleotide
aguuuagaugugcagaagg

SEQ ID NO: 1974420 - RNA, 19 nt, Artificial Sequence
  Description of Artificial Sequence: Synthetic oligonucleotide
ucuacuucauuaaucaugu

SEQ ID NO: 1974421 - RNA, 19 nt, Artificial Sequence
  Description of Artificial Sequence: Synthetic oligonucleotide
auggauuugaggcaaauug

SEQ ID NO: 1974422 - RNA, 19 nt, Artificial Sequence
  Description of Artificial Sequence: Synthetic oligonucleotide
aaaccuuuuacagauaagu

SEQ ID NO: 1974423 - RNA, 19 nt, Artificial Sequence
  Description of Artificial Sequence: Synthetic oligonucleotide
aauuacuauacaugcauau

SEQ ID NO: 1974424 - RNA, 19 nt, Artificial Sequence
  Description of Artificial Sequence: Synthetic oligonucleotide
agauaaguuacaaacaaag

SEQ ID NO: 1974425 - RNA, 19 nt, Artificial Sequence
  Description of Artificial Sequence: Synthetic oligonucleotide
uucauaguuuaccugacca

SEQ ID NO: 1974426 - RNA, 19 nt, Artificial Sequence
  Description of Artificial Sequence: Synthetic oligonucleotide
aagcaaguaacaauaaaag

SEQ ID NO: 1974427 - RNA, 19 nt, Artificial Sequence
  Description of Artificial Sequence: Synthetic oligonucleotide
uguuauagucccaucacca

SEQ ID NO: 1974428 - RNA, 19 nt, Artificial Sequence
  Description of Artificial Sequence: Synthetic oligonucleotide
cauugucagaaauucaggg

SEQ ID NO: 1974429 - RNA, 19 nt, Artificial Sequence
  Description of Artificial Sequence: Synthetic oligonucleotide
acaaugacagaagauaagg

SEQ ID NO: 1974430 - RNA, 19 nt, Artificial Sequence
  Description of Artificial Sequence: Synthetic oligonucleotide
uguuguuauagucccauca

SEQ ID NO: 1974431 - RNA, 19 nt, Artificial Sequence
  Description of Artificial Sequence: Synthetic oligonucleotide
uuuaaggacaaugacagaa

SEQ ID NO: 1974432 - RNA, 19 nt, Artificial Sequence
  Description of Artificial Sequence: Synthetic oligonucleotide
uaccugaccaucaccaucg

SEQ ID NO: 1974433 - RNA, 19 nt, Artificial Sequence
  Description of Artificial Sequence: Synthetic oligonucleotide
aaagcaaguaacaauaaaa

SEQ ID NO: 1974434 - RNA, 19 nt, Artificial Sequence
  Description of Artificial Sequence: Synthetic oligonucleotide
uaagccacaugcaacaugu

SEQ ID NO: 1974435 - RNA, 19 nt, Artificial Sequence
  Description of Artificial Sequence: Synthetic oligonucleotide
uuugucaucacauggcgga

SEQ ID NO: 1974436 - RNA, 19 nt, Artificial Sequence
  Description of Artificial Sequence: Synthetic oligonucleotide
uuaaggacaaugacagaag

SEQ ID NO: 1974437 - RNA, 19 nt, Artificial Sequence
  Description of Artificial Sequence: Synthetic oligonucleotide
ucugguacaauaccagcag

SEQ ID NO: 1974438 - RNA, 19 nt, Artificial Sequence
  Description of Artificial Sequence: Synthetic oligonucleotide
aaaguaagguuuaaggaca

SEQ ID NO: 1974439 - RNA, 19 nt, Artificial Sequence
  Description of Artificial Sequence: Synthetic oligonucleotide
uuacuauacaugcauauuu

SEQ ID NO: 1974440 - RNA, 19 nt, Artificial Sequence
  Description of Artificial Sequence: Synthetic oligonucleotide
ucuuuaaguggcuaaacaa

SEQ ID NO: 1974441 - RNA, 19 nt, Artificial Sequence
  Description of Artificial Sequence: Synthetic oligonucleotide
uacaaacaaagaaaaggca

SEQ ID NO: 1974442 - RNA, 19 nt, Artificial Sequence
  Description of Artificial Sequence: Synthetic oligonucleotide
auaguguacgaguaccugg

SEQ ID NO: 1974443 - RNA, 19 nt, Artificial Sequence
  Description of Artificial Sequence: Synthetic oligonucleotide
aaaacauggaggaaucgag

SEQ ID NO: 1974444 - RNA, 19 nt, Artificial Sequence
  Description of Artificial Sequence: Synthetic oligonucleotide
uguacgaguaccuggauaa

SEQ ID NO: 1974445 - RNA, 19 nt, Artificial Sequence
  Description of Artificial Sequence: Synthetic oligonucleotide
uccuuuguuguuauagucc

SEQ ID NO: 1974446 - RNA, 19 nt, Artificial Sequence
  Description of Artificial Sequence: Synthetic oligonucleotide
uucaucaauucucuaaagu

SEQ ID NO: 1974447 - RNA, 19 nt, Artificial Sequence
  Description of Artificial Sequence: Synthetic oligonucleotide
ucaucaauucucuaaagua

SEQ ID NO: 1974448 - RNA, 19 nt, Artificial Sequence
  Description of Artificial Sequence: Synthetic oligonucleotide
uuugcugucaucauuugua

SEQ ID NO: 1974449 - RNA, 19 nt, Artificial Sequence
  Description of Artificial Sequence: Synthetic oligonucleotide
uguuucugguacaauacca

SEQ ID NO: 1974450 - RNA, 19 nt, Artificial Sequence
  Description of Artificial Sequence: Synthetic oligonucleotide
ugacagaagauaagggaag

SEQ ID NO: 1974451 - RNA, 19 nt, Artificial Sequence
  Description of Artificial Sequence: Synthetic oligonucleotide
auuuaacacauucuguaca

SEQ ID NO: 1974452 - RNA, 19 nt, Artificial Sequence
  Description of Artificial Sequence: Synthetic oligonucleotide
gauaaaacacccguuuugc

SEQ ID NO: 1974453 - RNA, 19 nt, Artificial Sequence
  Description of Artificial Sequence: Synthetic oligonucleotide
aagagaccucaucacaguc

SEQ ID NO: 1974454 - RNA, 19 nt, Artificial Sequence
  Description of Artificial Sequence: Synthetic oligonucleotide
aggggaaaaccuuuuacag

SEQ ID NO: 1974455 - RNA, 19 nt, Artificial Sequence
  Description of Artificial Sequence: Synthetic oligonucleotide
cuaaaguaagguuuaagga

SEQ ID NO: 1974456 - RNA, 19 nt, Artificial Sequence
  Description of Artificial Sequence: Synthetic oligonucleotide
aaaacacccguuuugcaau

SEQ ID NO: 1974457 - RNA, 19 nt, Artificial Sequence
  Description of Artificial Sequence: Synthetic oligonucleotide
uugaccaacuccaucuaag

SEQ ID NO: 1974458 - RNA, 19 nt, Artificial Sequence
  Description of Artificial Sequence: Synthetic oligonucleotide
ucaacaacaacaugcugac

SEQ ID NO: 1974459 - RNA, 19 nt, Artificial Sequence
  Description of Artificial Sequence: Synthetic oligonucleotide
uuugcaauagugcaacuuu

SEQ ID NO: 1974460 - RNA, 19 nt, Artificial Sequence
  Description of Artificial Sequence: Synthetic oligonucleotide
caaugacagaagauaaggg

SEQ ID NO: 1974461 - RNA, 19 nt, Artificial Sequence
  Description of Artificial Sequence: Synthetic oligonucleotide
uuuaacacauucuguacaa

SEQ ID NO: 1974462 - RNA, 19 nt, Artificial Sequence
  Description of Artificial Sequence: Synthetic oligonucleotide
aguuuaccugaccaucacc

SEQ ID NO: 1974463 - RNA, 19 nt, Artificial Sequence
  Description of Artificial Sequence: Synthetic oligonucleotide
agcaaguaacaauaaaaga

SEQ ID NO: 1974464 - RNA, 19 nt, Artificial Sequence
  Description of Artificial Sequence: Synthetic oligonucleotide
uugaauucugcaaucugcu

SEQ ID NO: 1974465 - RNA, 19 nt, Artificial Sequence
  Description of Artificial Sequence: Synthetic oligonucleotide
uuguuauagucccaucacc

SEQ ID NO: 1974466 - RNA, 19 nt, Artificial Sequence
  Description of Artificial Sequence: Synthetic oligonucleotide
uaaggacaaugacagaaga

SEQ ID NO: 1974467 - RNA, 19 nt, Artificial Sequence
  Description of Artificial Sequence: Synthetic oligonucleotide
ucugcugcacuaauguagc

SEQ ID NO: 1974468 - RNA, 19 nt, Artificial Sequence
  Description of Artificial Sequence: Synthetic oligonucleotide
aacauguuacuucaucaau

SEQ ID NO: 1974469 - RNA, 19 nt, Artificial Sequence
  Description of Artificial Sequence: Synthetic oligonucleotide
uaaaacacccguuuugcaa

SEQ ID NO: 1974470 - RNA, 19 nt, Artificial Sequence
  Description of Artificial Sequence: Synthetic oligonucleotide
uggauuugaggcaaauugu

SEQ ID NO: 1974471 - RNA, 19 nt, Artificial Sequence
  Description of Artificial Sequence: Synthetic oligonucleotide
uaaguggcuaaacaaaguu

SEQ ID NO: 1974472 - RNA, 19 nt, Artificial Sequence
  Description of Artificial Sequence: Synthetic oligonucleotide
uuaaguacauauuguugac

SEQ ID NO: 1974473 - RNA, 19 nt, Artificial Sequence
  Description of Artificial Sequence: Synthetic oligonucleotide
gacgcgaacacacaaccgc

SEQ ID NO: 1974474 - RNA, 19 nt, Artificial Sequence
  Description of Artificial Sequence: Synthetic oligonucleotide
uaggggaaaaccuuuuaca

SEQ ID NO: 1974475 - RNA, 19 nt, Artificial Sequence
  Description of Artificial Sequence: Synthetic oligonucleotide
auugucagaaauucaggga

SEQ ID NO: 1974476 - RNA, 19 nt, Artificial Sequence
  Description of Artificial Sequence: Synthetic oligonucleotide
aguccuaauuacuauacau

SEQ ID NO: 1974477 - RNA, 19 nt, Artificial Sequence
  Description of Artificial Sequence: Synthetic oligonucleotide
auccuugucaaauagugaa

SEQ ID NO: 1974478 - RNA, 19 nt, Artificial Sequence
  Description of Artificial Sequence: Synthetic oligonucleotide
uacauauuguugacugucc

SEQ ID NO: 1974479 - RNA, 19 nt, Artificial Sequence
  Description of Artificial Sequence: Synthetic oligonucleotide
aucgauaucugcuucccug

SEQ ID NO: 1974480 - RNA, 19 nt, Artificial Sequence
  Description of Artificial Sequence: Synthetic oligonucleotide
uugacaguaggggaaaacc

SEQ ID NO: 1974481 - RNA, 19 nt, Artificial Sequence
  Description of Artificial Sequence: Synthetic oligonucleotide
uuaaguggcuaaacaaagu

SEQ ID NO: 1974482 - RNA, 19 nt, Artificial Sequence
  Description of Artificial Sequence: Synthetic oligonucleotide
accaucgauaucugcuucc

SEQ ID NO: 1974483 - RNA, 19 nt, Artificial Sequence
  Description of Artificial Sequence: Synthetic oligonucleotide
uacuucaucaauucucuaa

SEQ ID NO: 1974484 - RNA, 19 nt, Artificial Sequence
  Description of Artificial Sequence: Synthetic oligonucleotide
cauguuacuucaucaauuc

SEQ ID NO: 1974485 - RNA, 19 nt, Artificial Sequence
  Description of Artificial Sequence: Synthetic oligonucleotide
gaagauaagggaagaaaac

SEQ ID NO: 1974486 - RNA, 19 nt, Artificial Sequence
  Description of Artificial Sequence: Synthetic oligonucleotide
acaguccagaguuacaacu

SEQ ID NO: 1974487 - RNA, 19 nt, Artificial Sequence
  Description of Artificial Sequence: Synthetic oligonucleotide
guaagguuuaaggacaaug

SEQ ID NO: 1974488 - RNA, 19 nt, Artificial Sequence
  Description of Artificial Sequence: Synthetic oligonucleotide
gagacgcgaacacacaacc

SEQ ID NO: 1974489 - RNA, 19 nt, Artificial Sequence
  Description of Artificial Sequence: Synthetic oligonucleotide
aggcaaauaaacaauuuug

SEQ ID NO: 1974490 - RNA, 19 nt, Artificial Sequence
  Description of Artificial Sequence: Synthetic oligonucleotide
gauguucccucauuugacc

SEQ ID NO: 1974491 - RNA, 19 nt, Artificial Sequence
  Description of Artificial Sequence: Synthetic oligonucleotide
uuucugguacaauaccagc

SEQ ID NO: 1974492 - RNA, 19 nt, Artificial Sequence
  Description of Artificial Sequence: Synthetic oligonucleotide
aauaguguacgaguaccug

SEQ ID NO: 1974493 - RNA, 19 nt, Artificial Sequence
  Description of Artificial Sequence: Synthetic oligonucleotide
ugacaguaggggaaaaccu

SEQ ID NO: 1974494 - RNA, 19 nt, Artificial Sequence
  Description of Artificial Sequence: Synthetic oligonucleotide
uuggauauauccagaguaa

SEQ ID NO: 1974495 - RNA, 19 nt, Artificial Sequence
  Description of Artificial Sequence: Synthetic oligonucleotide
ggcaaauugugccauaagc

SEQ ID NO: 1974496 - RNA, 19 nt, Artificial Sequence
  Description of Artificial Sequence: Synthetic oligonucleotide
accaacuccaucuaaguuu

SEQ ID NO: 1974497 - RNA, 19 nt, Artificial Sequence
  Description of Artificial Sequence: Synthetic oligonucleotide
cuugucaaauagugaaaag

SEQ ID NO: 1974498 - RNA, 19 nt, Artificial Sequence
  Description of Artificial Sequence: Synthetic oligonucleotide
agaguaagccacaugcaac

SEQ ID NO: 1974499 - RNA, 19 nt, Artificial Sequence
  Description of Artificial Sequence: Synthetic oligonucleotide
uuauagucccaucaccauc

SEQ ID NO: 1974500 - RNA, 19 nt, Artificial Sequence
  Description of Artificial Sequence: Synthetic oligonucleotide
gauuugaggcaaauugugc

SEQ ID NO: 1974501 - RNA, 19 nt, Artificial Sequence
  Description of Artificial Sequence: Synthetic oligonucleotide
cacacaaccgcucggcucg

SEQ ID NO: 1974502 - RNA, 19 nt, Artificial Sequence
  Description of Artificial Sequence: Synthetic oligonucleotide
guuacaacuccacacuuca

SEQ ID NO: 1974503 - RNA, 19 nt, Artificial Sequence
  Description of Artificial Sequence: Synthetic oligonucleotide
auaacccagauguucccuc

SEQ ID NO: 1974504 - RNA, 19 nt, Artificial Sequence
  Description of Artificial Sequence: Synthetic oligonucleotide
gauaaguuacaaacaaaga

SEQ ID NO: 1974505 - RNA, 19 nt, Artificial Sequence
  Description of Artificial Sequence: Synthetic oligonucleotide
guuguuauagucccaucac

SEQ ID NO: 1974506 - RNA, 19 nt, Artificial Sequence
  Description of Artificial Sequence: Synthetic oligonucleotide
uaguguacgaguaccugga

SEQ ID NO: 1974507 - RNA, 19 nt, Artificial Sequence
  Description of Artificial Sequence: Synthetic oligonucleotide
ugcacuaauguagccauug

SEQ ID NO: 1974508 - RNA, 19 nt, Artificial Sequence
  Description of Artificial Sequence: Synthetic oligonucleotide
gaguaagccacaugcaaca

SEQ ID NO: 1974509 - RNA, 19 nt, Artificial Sequence
  Description of Artificial Sequence: Synthetic oligonucleotide
cuuuaaguggcuaaacaaa

SEQ ID NO: 1974510 - RNA, 19 nt, Artificial Sequence
  Description of Artificial Sequence: Synthetic oligonucleotide
aauugugccauaagcagau

SEQ ID NO: 1974511 - RNA, 19 nt, Artificial Sequence
  Description of Artificial Sequence: Synthetic oligonucleotide
uggauauauccagaguaag

SEQ ID NO: 1974512 - RNA, 19 nt, Artificial Sequence
  Description of Artificial Sequence: Synthetic oligonucleotide
ugcaacauguuacuucauc

SEQ ID NO: 1974513 - RNA, 19 nt, Artificial Sequence
  Description of Artificial Sequence: Synthetic oligonucleotide
uaucaaacacacggaaugc

SEQ ID NO: 1974514 - RNA, 19 nt, Artificial Sequence
  Description of Artificial Sequence: Synthetic oligonucleotide
uacuauacaugcauauuuu

SEQ ID NO: 1974515 - RNA, 19 nt, Artificial Sequence
  Description of Artificial Sequence: Synthetic oligonucleotide
accuggauaaaacacccgu

SEQ ID NO: 1974516 - RNA, 19 nt, Artificial Sequence
  Description of Artificial Sequence: Synthetic oligonucleotide
acuccaucuaaguuuagau

SEQ ID NO: 1974517 - RNA, 19 nt, Artificial Sequence
  Description of Artificial Sequence: Synthetic oligonucleotide
gacaaugacagaagauaag

SEQ ID NO: 1974518 - RNA, 19 nt, Artificial Sequence
  Description of Artificial Sequence: Synthetic oligonucleotide
uaauuacuauacaugcaua

SEQ ID NO: 1974519 - RNA, 19 nt, Artificial Sequence
  Description of Artificial Sequence: Synthetic oligonucleotide
acgaguaccuggauaaaac

SEQ ID NO: 1974520 - RNA, 19 nt, Artificial Sequence
  Description of Artificial Sequence: Synthetic oligonucleotide
uucauuaaucauguccugu

SEQ ID NO: 1974521 - RNA, 19 nt, Artificial Sequence
  Description of Artificial Sequence: Synthetic oligonucleotide
ugugccauaagcagauuuu

SEQ ID NO: 1974522 - RNA, 19 nt, Artificial Sequence
  Description of Artificial Sequence: Synthetic oligonucleotide
cuccaucuaaguuuagaug

SEQ ID NO: 1974523 - RNA, 19 nt, Artificial Sequence
  Description of Artificial Sequence: Synthetic oligonucleotide
ucuucauaguuuaccugac

SEQ ID NO: 1974524 - RNA, 19 nt, Artificial Sequence
  Description of Artificial Sequence: Synthetic oligonucleotide
agugcaacuuuuaaguaca

SEQ ID NO: 1974525 - RNA, 19 nt, Artificial Sequence
  Description of Artificial Sequence: Synthetic oligonucleotide
acccguuuugcaauagugc

SEQ ID NO: 1974526 - RNA, 19 nt, Artificial Sequence
  Description of Artificial Sequence: Synthetic oligonucleotide
ugguacaauaccagcagua

SEQ ID NO: 1974527 - RNA, 19 nt, Artificial Sequence
  Description of Artificial Sequence: Synthetic oligonucleotide
cuaaguuuagaugugcaga

SEQ ID NO: 1974528 - RNA, 19 nt, Artificial Sequence
  Description of Artificial Sequence: Synthetic oligonucleotide
guccuaauuacuauacaug

SEQ ID NO: 1974529 - RNA, 19 nt, Artificial Sequence
  Description of Artificial Sequence: Synthetic oligonucleotide
uguugacuguccacagucc

SEQ ID NO: 1974530 - RNA, 19 nt, Artificial Sequence
  Description of Artificial Sequence: Synthetic oligonucleotide
uuccgagacgcgaacacac

SEQ ID NO: 1974531 - RNA, 19 nt, Artificial Sequence
  Description of Artificial Sequence: Synthetic oligonucleotide
guaggggaaaaccuuuuac

SEQ ID NO: 1974532 - RNA, 19 nt, Artificial Sequence
  Description of Artificial Sequence: Synthetic oligonucleotide
auagugaaaaggcuucuuu

SEQ ID NO: 1974533 - RNA, 19 nt, Artificial Sequence
  Description of Artificial Sequence: Synthetic oligonucleotide
acauauuguugacugucca

SEQ ID NO: 1974534 - RNA, 19 nt, Artificial Sequence
  Description of Artificial Sequence: Synthetic oligonucleotide
agauguucccucauuugac

SEQ ID NO: 1974535 - RNA, 19 nt, Artificial Sequence
  Description of Artificial Sequence: Synthetic oligonucleotide
agguuuaaggacaaugaca

SEQ ID NO: 1974536 - RNA, 19 nt, Artificial Sequence
  Description of Artificial Sequence: Synthetic oligonucleotide
uuaccugaccaucaccauc

SEQ ID NO: 1974537 - RNA, 19 nt, Artificial Sequence
  Description of Artificial Sequence: Synthetic oligonucleotide
ucauuugaccaacuccauc

SEQ ID NO: 1974538 - RNA, 19 nt, Artificial Sequence
  Description of Artificial Sequence: Synthetic oligonucleotide
aaguuuagaugugcagaag

SEQ ID NO: 1974539 - RNA, 19 nt, Artificial Sequence
  Description of Artificial Sequence: Synthetic oligonucleotide
guuuaccugaccaucacca

SEQ ID NO: 1974540 - RNA, 19 nt, Artificial Sequence
  Description of Artificial Sequence: Synthetic oligonucleotide
auaaaacacccguuuugca

SEQ ID NO: 1974541 - RNA, 19 nt, Artificial Sequence
  Description of Artificial Sequence: Synthetic oligonucleotide
uaccuggauaaaacacccg

SEQ ID NO: 1974542 - RNA, 19 nt, Artificial Sequence
  Description of Artificial Sequence: Synthetic oligonucleotide
aggcauaacccagauguuc

SEQ ID NO: 1974543 - RNA, 19 nt, Artificial Sequence
  Description of Artificial Sequence: Synthetic oligonucleotide
ugaccaacuccaucuaagu

SEQ ID NO: 1974544 - RNA, 19 nt, Artificial Sequence
  Description of Artificial Sequence: Synthetic oligonucleotide
cuaauuacuauacaugcau

SEQ ID NO: 1974545 - RNA, 19 nt, Artificial Sequence
  Description of Artificial Sequence: Synthetic oligonucleotide
acacacaaccgcucggcuc

SEQ ID NO: 1974546 - RNA, 19 nt, Artificial Sequence
  Description of Artificial Sequence: Synthetic oligonucleotide
ucauaguuuaccugaccau

SEQ ID NO: 1974547 - RNA, 19 nt, Artificial Sequence
  Description of Artificial Sequence: Synthetic oligonucleotide
ucgauaucugcuucccuga

SEQ ID NO: 1974548 - RNA, 19 nt, Artificial Sequence
  Description of Artificial Sequence: Synthetic oligonucleotide
aguacauauuguugacugu

SEQ ID NO: 1974549 - RNA, 19 nt, Artificial Sequence
  Description of Artificial Sequence: Synthetic oligonucleotide
ugcaauagugcaacuuuua

SEQ ID NO: 1974550 - RNA, 19 nt, Artificial Sequence
  Description of Artificial Sequence: Synthetic oligonucleotide
aacuccaucuaaguuuaga

SEQ ID NO: 1974551 - RNA, 19 nt, Artificial Sequence
  Description of Artificial Sequence: Synthetic oligonucleotide
guaccuggauaaaacaccc

SEQ ID NO: 1974552 - RNA, 19 nt, Artificial Sequence
  Description of Artificial Sequence: Synthetic oligonucleotide
agaaauucagggaagucaa

SEQ ID NO: 1974553 - RNA, 19 nt, Artificial Sequence
  Description of Artificial Sequence: Synthetic oligonucleotide
aaacauggaggaaucgagu

SEQ ID NO: 1974554 - RNA, 19 nt, Artificial Sequence
  Description of Artificial Sequence: Synthetic oligonucleotide
ccuuuguuguuauaguccc

SEQ ID NO: 1974555 - RNA, 19 nt, Artificial Sequence
  Description of Artificial Sequence: Synthetic oligonucleotide
uuugaccaacuccaucuaa

SEQ ID NO: 1974556 - RNA, 19 nt, Artificial Sequence
  Description of Artificial Sequence: Synthetic oligonucleotide
cagggaagucaauugugcc

SEQ ID NO: 1974557 - RNA, 19 nt, Artificial Sequence
  Description of Artificial Sequence: Synthetic oligonucleotide
uuggguaaauuguaauuuu

SEQ ID NO: 1974558 - RNA, 19 nt, Artificial Sequence
  Description of Artificial Sequence: Synthetic oligonucleotide
aguuacaacuccacacuuc

SEQ ID NO: 1974559 - RNA, 19 nt, Artificial Sequence
  Description of Artificial Sequence: Synthetic oligonucleotide
caugcugcaagggcuaccg

SEQ ID NO: 1974560 - RNA, 19 nt, Artificial Sequence
  Description of Artificial Sequence: Synthetic oligonucleotide
ugccauuaccaucugcauc

SEQ ID NO: 1974561 - RNA, 19 nt, Artificial Sequence
  Description of Artificial Sequence: Synthetic oligonucleotide
ggcuaaacaaaguuuaaaa

SEQ ID NO: 1974562 - RNA, 19 nt, Artificial Sequence
  Description of Artificial Sequence: Synthetic oligonucleotide
guacauauuguugacuguc

SEQ ID NO: 1974563 - RNA, 19 nt, Artificial Sequence
  Description of Artificial Sequence: Synthetic oligonucleotide
cuaccgguuuccgagacgc

SEQ ID NO: 1974564 - RNA, 19 nt, Artificial Sequence
  Description of Artificial Sequence: Synthetic oligonucleotide
gaaauuuaacacauucugu

SEQ ID NO: 1974565 - RNA, 19 nt, Artificial Sequence
  Description of Artificial Sequence: Synthetic oligonucleotide
acaaccgcucggcucgccc

SEQ ID NO: 1974566 - RNA, 19 nt, Artificial Sequence
  Description of Artificial Sequence: Synthetic oligonucleotide
aaucgaguccuaauuacua

SEQ ID NO: 1974567 - RNA, 19 nt, Artificial Sequence
  Description of Artificial Sequence: Synthetic oligonucleotide
aacacacaaccgcucggcu

SEQ ID NO: 1974568 - RNA, 19 nt, Artificial Sequence
  Description of Artificial Sequence: Synthetic oligonucleotide
caauugugccauuaccauc

SEQ ID NO: 1974569 - RNA, 19 nt, Artificial Sequence
  Description of Artificial Sequence: Synthetic oligonucleotide
uuuugcaauagugcaacuu

SEQ ID NO: 1974570 - RNA, 19 nt, Artificial Sequence
  Description of Artificial Sequence: Synthetic oligonucleotide
aaccgcucggcucgcccgc

SEQ ID NO: 1974571 - RNA, 19 nt, Artificial Sequence
  Description of Artificial Sequence: Synthetic oligonucleotide
ggaaucgaguccuaauuac

SEQ ID NO: 1974572 - RNA, 19 nt, Artificial Sequence
  Description of Artificial Sequence: Synthetic oligonucleotide
uccccaguuccuuuguugu

SEQ ID NO: 1974573 - RNA, 19 nt, Artificial Sequence
  Description of Artificial Sequence: Synthetic oligonucleotide
uaguuuaccugaccaucac

SEQ ID NO: 1974574 - RNA, 19 nt, Artificial Sequence
  Description of Artificial Sequence: Synthetic oligonucleotide
ugugcagaagggcuuggau

SEQ ID NO: 1974575 - RNA, 19 nt, Artificial Sequence
  Description of Artificial Sequence: Synthetic oligonucleotide
cucuaaaguaagguuuaag

SEQ ID NO: 1974576 - RNA, 19 nt, Artificial Sequence
  Description of Artificial Sequence: Synthetic oligonucleotide
guaagccacaugcaacaug

SEQ ID NO: 1974577 - RNA, 19 nt, Artificial Sequence
  Description of Artificial Sequence: Synthetic oligonucleotide
guacaauaccagcaguaca

SEQ ID NO: 1974578 - RNA, 19 nt, Artificial Sequence
  Description of Artificial Sequence: Synthetic oligonucleotide
auaguuuaccugaccauca

SEQ ID NO: 1974579 - RNA, 19 nt, Artificial Sequence
  Description of Artificial Sequence: Synthetic oligonucleotide
auuguugacuguccacagu

SEQ ID NO: 1974580 - RNA, 19 nt, Artificial Sequence
  Description of Artificial Sequence: Synthetic oligonucleotide
uugcaauagugcaacuuuu

SEQ ID NO: 1974581 - RNA, 19 nt, Artificial Sequence
  Description of Artificial Sequence: Synthetic oligonucleotide
aggaaucgaguccuaauua

SEQ ID NO: 1974582 - RNA, 19 nt, Artificial Sequence
  Description of Artificial Sequence: Synthetic oligonucleotide
ucgaguccuaauuacuaua

SEQ ID NO: 1974583 - RNA, 19 nt, Artificial Sequence
  Description of Artificial Sequence: Synthetic oligonucleotide
aauggauuugaggcaaauu

SEQ ID NO: 1974584 - RNA, 19 nt, Artificial Sequence
  Description of Artificial Sequence: Synthetic oligonucleotide
aaaauguuucugguacaau

SEQ ID NO: 1974585 - RNA, 19 nt, Artificial Sequence
  Description of Artificial Sequence: Synthetic oligonucleotide
uccacacuucaacaacaac

SEQ ID NO: 1974586 - RNA, 19 nt, Artificial Sequence
  Description of Artificial Sequence: Synthetic oligonucleotide
ggauauauccagaguaagc

SEQ ID NO: 1974587 - RNA, 19 nt, Artificial Sequence
  Description of Artificial Sequence: Synthetic oligonucleotide
caccauccuugucaaauag

SEQ ID NO: 1974588 - RNA, 19 nt, Artificial Sequence
  Description of Artificial Sequence: Synthetic oligonucleotide
uggcuaaacaaaguuuaaa

SEQ ID NO: 1974589 - RNA, 19 nt, Artificial Sequence
  Description of Artificial Sequence: Synthetic oligonucleotide
cagauguucccucauuuga

SEQ ID NO: 1974590 - RNA, 19 nt, Artificial Sequence
  Description of Artificial Sequence: Synthetic oligonucleotide
aaguggcuaaacaaaguuu

SEQ ID NO: 1974591 - RNA, 19 nt, Artificial Sequence
  Description of Artificial Sequence: Synthetic oligonucleotide
uaacccagauguucccuca

SEQ ID NO: 1974592 - RNA, 19 nt, Artificial Sequence
  Description of Artificial Sequence: Synthetic oligonucleotide
uagaugugcagaagggcuu

SEQ ID NO: 1974593 - RNA, 19 nt, Artificial Sequence
  Description of Artificial Sequence: Synthetic oligonucleotide
uuuaccugaccaucaccau

SEQ ID NO: 1974594 - RNA, 19 nt, Artificial Sequence
  Description of Artificial Sequence: Synthetic oligonucleotide
gacagaagauaagggaaga

SEQ ID NO: 1974595 - RNA, 19 nt, Artificial Sequence
  Description of Artificial Sequence: Synthetic oligonucleotide
ucaccaucgauaucugcuu

SEQ ID NO: 1974596 - RNA, 19 nt, Artificial Sequence
  Description of Artificial Sequence: Synthetic oligonucleotide
acacuucaacaacaacaug

SEQ ID NO: 1974597 - RNA, 19 nt, Artificial Sequence
  Description of Artificial Sequence: Synthetic oligonucleotide
uguucccucauuugaccaa

SEQ ID NO: 1974598 - RNA, 19 nt, Artificial Sequence
  Description of Artificial Sequence: Synthetic oligonucleotide
acauguuacuucaucaauu

SEQ ID NO: 1974599 - RNA, 19 nt, Artificial Sequence
  Description of Artificial Sequence: Synthetic oligonucleotide
gaguccuaauuacuauaca

SEQ ID NO: 1974600 - RNA, 19 nt, Artificial Sequence
  Description of Artificial Sequence: Synthetic oligonucleotide
acuuugcugucaucauuug

SEQ ID NO: 1974601 - RNA, 19 nt, Artificial Sequence
  Description of Artificial Sequence: Synthetic oligonucleotide
augcugacaguuccuaaaa

SEQ ID NO: 1974602 - RNA, 19 nt, Artificial Sequence
  Description of Artificial Sequence: Synthetic oligonucleotide
caacauguuacuucaucaa

SEQ ID NO: 1974603 - RNA, 19 nt, Artificial Sequence
  Description of Artificial Sequence: Synthetic oligonucleotide
ggcauaacccagauguucc

SEQ ID NO: 1974604 - RNA, 19 nt, Artificial Sequence
  Description of Artificial Sequence: Synthetic oligonucleotide
aagggcuaccgguuuccga

SEQ ID NO: 1974605 - RNA, 19 nt, Artificial Sequence
  Description of Artificial Sequence: Synthetic oligonucleotide
ugucaucacauggcggagc

SEQ ID NO: 1974606 - RNA, 19 nt, Artificial Sequence
  Description of Artificial Sequence: Synthetic oligonucleotide
gggaaaaccuuuuacagau

SEQ ID NO: 1974607 - RNA, 19 nt, Artificial Sequence
  Description of Artificial Sequence: Synthetic oligonucleotide
acacggaaugcuucucuga

SEQ ID NO: 1974608 - RNA, 19 nt, Artificial Sequence
  Description of Artificial Sequence: Synthetic oligonucleotide
caugcugacaguuccuaaa

SEQ ID NO: 1974609 - RNA, 19 nt, Artificial Sequence
  Description of Artificial Sequence: Synthetic oligonucleotide
aacacccguuuugcaauag

SEQ ID NO: 1974610 - RNA, 19 nt, Artificial Sequence
  Description of Artificial Sequence: Synthetic oligonucleotide
uuuccgagacgcgaacaca

SEQ ID NO: 1974611 - RNA, 19 nt, Artificial Sequence
  Description of Artificial Sequence: Synthetic oligonucleotide
aucuaaguuuagaugugca

SEQ ID NO: 1974612 - RNA, 19 nt, Artificial Sequence
  Description of Artificial Sequence: Synthetic oligonucleotide
cagauaaguuacaaacaaa

SEQ ID NO: 1974613 - RNA, 19 nt, Artificial Sequence
  Description of Artificial Sequence: Synthetic oligonucleotide
cacacggaaugcuucucug

SEQ ID NO: 1974614 - RNA, 19 nt, Artificial Sequence
  Description of Artificial Sequence: Synthetic oligonucleotide
aguaggggaaaaccuuuua

SEQ ID NO: 1974615 - RNA, 19 nt, Artificial Sequence
  Description of Artificial Sequence: Synthetic oligonucleotide
aacaugcugacaguuccua

SEQ ID NO: 1974616 - RNA, 19 nt, Artificial Sequence
  Description of Artificial Sequence: Synthetic oligonucleotide
cagaguaagccacaugcaa

SEQ ID NO: 1974617 - RNA, 19 nt, Artificial Sequence
  Description of Artificial Sequence: Synthetic oligonucleotide
gguacaauaccagcaguac

SEQ ID NO: 1974618 - RNA, 19 nt, Artificial Sequence
  Description of Artificial Sequence: Synthetic oligonucleotide
gccacaugcaacauguuac

SEQ ID NO: 1974619 - RNA, 19 nt, Artificial Sequence
  Description of Artificial Sequence: Synthetic oligonucleotide
aaguaagguuuaaggacaa

SEQ ID NO: 1974620 - RNA, 19 nt, Artificial Sequence
  Description of Artificial Sequence: Synthetic oligonucleotide
ucccucauuugaccaacuc

SEQ ID NO: 1974621 - RNA, 19 nt, Artificial Sequence
  Description of Artificial Sequence: Synthetic oligonucleotide
aaacacccguuuugcaaua

SEQ ID NO: 1974622 - RNA, 19 nt, Artificial Sequence
  Description of Artificial Sequence: Synthetic oligonucleotide
cccucauuugaccaacucc

SEQ ID NO: 1974623 - RNA, 19 nt, Artificial Sequence
  Description of Artificial Sequence: Synthetic oligonucleotide
gccauuaccaucugcaucu

SEQ ID NO: 1974624 - RNA, 19 nt, Artificial Sequence
  Description of Artificial Sequence: Synthetic oligonucleotide
uccgagacgcgaacacaca

SEQ ID NO: 1974625 - RNA, 19 nt, Artificial Sequence
  Description of Artificial Sequence: Synthetic oligonucleotide
agaugugcagaagggcuug

SEQ ID NO: 1974626 - RNA, 19 nt, Artificial Sequence
  Description of Artificial Sequence: Synthetic oligonucleotide
cacaguccagaguuacaac

SEQ ID NO: 1974627 - RNA, 19 nt, Artificial Sequence
  Description of Artificial Sequence: Synthetic oligonucleotide
auuugaccaacuccaucua

SEQ ID NO: 1974628 - RNA, 19 nt, Artificial Sequence
  Description of Artificial Sequence: Synthetic oligonucleotide
uugaggcaaauugugccau

SEQ ID NO: 1974629 - RNA, 19 nt, Artificial Sequence
  Description of Artificial Sequence: Synthetic oligonucleotide
gaggaaucgaguccuaauu

SEQ ID NO: 1974630 - RNA, 19 nt, Artificial Sequence
  Description of Artificial Sequence: Synthetic oligonucleotide
ggggaaaaccuuuuacaga

SEQ ID NO: 1974631 - RNA, 19 nt, Artificial Sequence
  Description of Artificial Sequence: Synthetic oligonucleotide
uucugcccaagagaccuca

SEQ ID NO: 1974632 - RNA, 19 nt, Artificial Sequence
  Description of Artificial Sequence: Synthetic oligonucleotide
agacgcgaacacacaaccg

SEQ ID NO: 1974633 - RNA, 19 nt, Artificial Sequence
  Description of Artificial Sequence: Synthetic oligonucleotide
ugcaagggcuaccgguuuc

SEQ ID NO: 1974634 - RNA, 19 nt, Artificial Sequence
  Description of Artificial Sequence: Synthetic oligonucleotide
caaccgcucggcucgcccg

SEQ ID NO: 1974635 - RNA, 19 nt, Artificial Sequence
  Description of Artificial Sequence: Synthetic oligonucleotide
uuacuucaucaauucucua

SEQ ID NO: 1974636 - RNA, 19 nt, Artificial Sequence
  Description of Artificial Sequence: Synthetic oligonucleotide
guuuaaggacaaugacaga

SEQ ID NO: 1974637 - RNA, 19 nt, Artificial Sequence
  Description of Artificial Sequence: Synthetic oligonucleotide
aacccagauguucccucau

SEQ ID NO: 1974638 - RNA, 19 nt, Artificial Sequence
  Description of Artificial Sequence: Synthetic oligonucleotide
auccagaguaagccacaug

SEQ ID NO: 1974639 - RNA, 19 nt, Artificial Sequence
  Description of Artificial Sequence: Synthetic oligonucleotide
acagaagauaagggaagaa

SEQ ID NO: 1974640 - RNA, 19 nt, Artificial Sequence
  Description of Artificial Sequence: Synthetic oligonucleotide
gaaucgaguccuaauuacu

SEQ ID NO: 1974641 - RNA, 19 nt, Artificial Sequence
  Description of Artificial Sequence: Synthetic oligonucleotide
ugcaacuuuuaaguacaua

SEQ ID NO: 1974642 - RNA, 19 nt, Artificial Sequence
  Description of Artificial Sequence: Synthetic oligonucleotide
ucucuaaaguaagguuuaa

SEQ ID NO: 1974643 - RNA, 19 nt, Artificial Sequence
  Description of Artificial Sequence: Synthetic oligonucleotide
uaccgguuuccgagacgcg

SEQ ID NO: 1974644 - RNA, 19 nt, Artificial Sequence
  Description of Artificial Sequence: Synthetic oligonucleotide
caauucucuaaaguaaggu

SEQ ID NO: 1974645 - RNA, 19 nt, Artificial Sequence
  Description of Artificial Sequence: Synthetic oligonucleotide
acacccguuuugcaauagu

SEQ ID NO: 1974646 - RNA, 19 nt, Artificial Sequence
  Description of Artificial Sequence: Synthetic oligonucleotide
acaugcugacaguuccuaa

SEQ ID NO: 1974647 - RNA, 19 nt, Artificial Sequence
  Description of Artificial Sequence: Synthetic oligonucleotide
uauccagaguaagccacau

SEQ ID NO: 1974648 - RNA, 19 nt, Artificial Sequence
  Description of Artificial Sequence: Synthetic oligonucleotide
cuuuguuguuauaguccca

SEQ ID NO: 1974649 - RNA, 19 nt, Artificial Sequence
  Description of Artificial Sequence: Synthetic oligonucleotide
agaagggcuuggauauauc

SEQ ID NO: 1974650 - RNA, 19 nt, Artificial Sequence
  Description of Artificial Sequence: Synthetic oligonucleotide
ccuaauuacuauacaugca

SEQ ID NO: 1974651 - RNA, 19 nt, Artificial Sequence
  Description of Artificial Sequence: Synthetic oligonucleotide
caacuccacacuucaacaa

SEQ ID NO: 1974652 - RNA, 19 nt, Artificial Sequence
  Description of Artificial Sequence: Synthetic oligonucleotide
auauccagaguaagccaca

SEQ ID NO: 1974653 - RNA, 19 nt, Artificial Sequence
  Description of Artificial Sequence: Synthetic oligonucleotide
ggacaaugacagaagauaa

SEQ ID NO: 1974654 - RNA, 19 nt, Artificial Sequence
  Description of Artificial Sequence: Synthetic oligonucleotide
cgaguccuaauuacuauac

SEQ ID NO: 1974655 - RNA, 19 nt, Artificial Sequence
  Description of Artificial Sequence: Synthetic oligonucleotide
guucccucauuugaccaac

SEQ ID NO: 1974656 - RNA, 19 nt, Artificial Sequence
  Description of Artificial Sequence: Synthetic oligonucleotide
acaguaggggaaaaccuuu

SEQ ID NO: 1974657 - RNA, 19 nt, Artificial Sequence
  Description of Artificial Sequence: Synthetic oligonucleotide
cugcugcacuaauguagcc

SEQ ID NO: 1974658 - RNA, 19 nt, Artificial Sequence
  Description of Artificial Sequence: Synthetic oligonucleotide
guuauagucccaucaccau

SEQ ID NO: 1974659 - RNA, 19 nt, Artificial Sequence
  Description of Artificial Sequence: Synthetic oligonucleotide
cccguuuugcaauagugca

SEQ ID NO: 1974660 - RNA, 19 nt, Artificial Sequence
  Description of Artificial Sequence: Synthetic oligonucleotide
accgguuuccgagacgcga

SEQ ID NO: 1974661 - RNA, 19 nt, Artificial Sequence
  Description of Artificial Sequence: Synthetic oligonucleotide
aguguacgaguaccuggau

SEQ ID NO: 1974662 - RNA, 19 nt, Artificial Sequence
  Description of Artificial Sequence: Synthetic oligonucleotide
gcacuaauguagccauugc

SEQ ID NO: 1974663 - RNA, 19 nt, Artificial Sequence
  Description of Artificial Sequence: Synthetic oligonucleotide
caccaucgauaucugcuuc

SEQ ID NO: 1974664 - RNA, 19 nt, Artificial Sequence
  Description of Artificial Sequence: Synthetic oligonucleotide
gcauaacccagauguuccc

SEQ ID NO: 1974665 - RNA, 19 nt, Artificial Sequence
  Description of Artificial Sequence: Synthetic oligonucleotide
accauccuugucaaauagu

SEQ ID NO: 1974666 - RNA, 19 nt, Artificial Sequence
  Description of Artificial Sequence: Synthetic oligonucleotide
guccacaguccagaguuac

SEQ ID NO: 1974667 - RNA, 19 nt, Artificial Sequence
  Description of Artificial Sequence: Synthetic oligonucleotide
ugaggcaaauugugccaua

SEQ ID NO: 1974668 - RNA, 19 nt, Artificial Sequence
  Description of Artificial Sequence: Synthetic oligonucleotide
cuggauaaaacacccguuu

SEQ ID NO: 1974669 - RNA, 19 nt, Artificial Sequence
  Description of Artificial Sequence: Synthetic oligonucleotide
guguacgaguaccuggaua

SEQ ID NO: 1974670 - RNA, 19 nt, Artificial Sequence
  Description of Artificial Sequence: Synthetic oligonucleotide
cuacuucauuaaucauguc

SEQ ID NO: 1974671 - RNA, 19 nt, Artificial Sequence
  Description of Artificial Sequence: Synthetic oligonucleotide
cguuuugcaauagugcaac

SEQ ID NO: 1974672 - RNA, 19 nt, Artificial Sequence
  Description of Artificial Sequence: Synthetic oligonucleotide
cugcccaagagaccucauc

SEQ ID NO: 1974673 - RNA, 19 nt, Artificial Sequence
  Description of Artificial Sequence: Synthetic oligonucleotide
gucaucacauggcggagcu

SEQ ID NO: 1974674 - RNA, 19 nt, Artificial Sequence
  Description of Artificial Sequence: Synthetic oligonucleotide
ccagguuugucaucacaug

SEQ ID NO: 1974675 - RNA, 19 nt, Artificial Sequence
  Description of Artificial Sequence: Synthetic oligonucleotide
aguaagccacaugcaacau

SEQ ID NO: 1974676 - RNA, 19 nt, Artificial Sequence
  Description of Artificial Sequence: Synthetic oligonucleotide
acaagaaauuuaacacauu

SEQ ID NO: 1974677 - RNA, 19 nt, Artificial Sequence
  Description of Artificial Sequence: Synthetic oligonucleotide
gaguuacaacuccacacuu

SEQ ID NO: 1974678 - RNA, 19 nt, Artificial Sequence
  Description of Artificial Sequence: Synthetic oligonucleotide
aaggcauaacccagauguu

SEQ ID NO: 1974679 - RNA, 19 nt, Artificial Sequence
  Description of Artificial Sequence: Synthetic oligonucleotide
acgcgaacacacaaccgcu

SEQ ID NO: 1974680 - RNA, 19 nt, Artificial Sequence
  Description of Artificial Sequence: Synthetic oligonucleotide
aguaagguuuaaggacaau

SEQ ID NO: 1974681 - RNA, 19 nt, Artificial Sequence
  Description of Artificial Sequence: Synthetic oligonucleotide
caagggcuaccgguuuccg

SEQ ID NO: 1974682 - RNA, 19 nt, Artificial Sequence
  Description of Artificial Sequence: Synthetic oligonucleotide
cauugccauccuuaucaaa

SEQ ID NO: 1974683 - RNA, 19 nt, Artificial Sequence
  Description of Artificial Sequence: Synthetic oligonucleotide
gaccaacuccaucuaaguu

SEQ ID NO: 1974684 - RNA, 19 nt, Artificial Sequence
  Description of Artificial Sequence: Synthetic oligonucleotide
gcuaccgguuuccgagacg

SEQ ID NO: 1974685 - RNA, 19 nt, Artificial Sequence
  Description of Artificial Sequence: Synthetic oligonucleotide
ucugcccaagagaccucau

SEQ ID NO: 1974686 - RNA, 19 nt, Artificial Sequence
  Description of Artificial Sequence: Synthetic oligonucleotide
auggcggagcucugcugca

SEQ ID NO: 1974687 - RNA, 19 nt, Artificial Sequence
  Description of Artificial Sequence: Synthetic oligonucleotide
ucgcccgcuccacucggac

SEQ ID NO: 1974688 - RNA, 19 nt, Artificial Sequence
  Description of Artificial Sequence: Synthetic oligonucleotide
ucccaucaccauccuuguc

SEQ ID NO: 1974689 - RNA, 19 nt, Artificial Sequence
  Description of Artificial Sequence: Synthetic oligonucleotide
guggcuaaacaaaguuuaa

SEQ ID NO: 1974690 - RNA, 19 nt, Artificial Sequence
  Description of Artificial Sequence: Synthetic oligonucleotide
gcccaagagaccucaucac

SEQ ID NO: 1974691 - RNA, 19 nt, Artificial Sequence
  Description of Artificial Sequence: Synthetic oligonucleotide
acccagauguucccucauu

SEQ ID NO: 1974692 - RNA, 19 nt, Artificial Sequence
  Description of Artificial Sequence: Synthetic oligonucleotide
gaauggauuugaggcaaau

SEQ ID NO: 1974693 - RNA, 19 nt, Artificial Sequence
  Description of Artificial Sequence: Synthetic oligonucleotide
gaccaucaccaucgauauc

SEQ ID NO: 1974694 - RNA, 19 nt, Artificial Sequence
  Description of Artificial Sequence: Synthetic oligonucleotide
acacaaccgcucggcucgc

SEQ ID NO: 1974695 - RNA, 19 nt, Artificial Sequence
  Description of Artificial Sequence: Synthetic oligonucleotide
cagucaguuggucagccau

SEQ ID NO: 1974696 - RNA, 19 nt, Artificial Sequence
  Description of Artificial Sequence: Synthetic oligonucleotide
cugucaucauuuguacaaa

SEQ ID NO: 1974697 - RNA, 19 nt, Artificial Sequence
  Description of Artificial Sequence: Synthetic oligonucleotide
ucggcucgcccgcuccacu

SEQ ID NO: 1974698 - RNA, 19 nt, Artificial Sequence
  Description of Artificial Sequence: Synthetic oligonucleotide
cgaacacacaaccgcucgg

SEQ ID NO: 1974699 - RNA, 19 nt, Artificial Sequence
  Description of Artificial Sequence: Synthetic oligonucleotide
cccaagagaccucaucaca

SEQ ID NO: 1974700 - RNA, 19 nt, Artificial Sequence
  Description of Artificial Sequence: Synthetic oligonucleotide
ccagaguuacaacuccaca

SEQ ID NO: 1974701 - RNA, 19 nt, Artificial Sequence
  Description of Artificial Sequence: Synthetic oligonucleotide
cacggaaugcuucucugau

SEQ ID NO: 1974702 - RNA, 19 nt, Artificial Sequence
  Description of Artificial Sequence: Synthetic oligonucleotide
cugguacaauaccagcagu

SEQ ID NO: 1974703 - RNA, 19 nt, Artificial Sequence
  Description of Artificial Sequence: Synthetic oligonucleotide
ccagaguaagccacaugca

SEQ ID NO: 1974704 - RNA, 19 nt, Artificial Sequence
  Description of Artificial Sequence: Synthetic oligonucleotide
cgaguaccuggauaaaaca

SEQ ID NO: 1974705 - RNA, 19 nt, Artificial Sequence
  Description of Artificial Sequence: Synthetic oligonucleotide
cgagacgcgaacacacaac

SEQ ID NO: 1974706 - RNA, 19 nt, Artificial Sequence
  Description of Artificial Sequence: Synthetic oligonucleotide
accugaccaucaccaucga

SEQ ID NO: 1974707 - RNA, 19 nt, Artificial Sequence
  Description of Artificial Sequence: Synthetic oligonucleotide
ggcuaccgguuuccgagac

SEQ ID NO: 1974708 - RNA, 19 nt, Artificial Sequence
  Description of Artificial Sequence: Synthetic oligonucleotide
aucacauggcggagcucug

SEQ ID NO: 1974709 - RNA, 19 nt, Artificial Sequence
  Description of Artificial Sequence: Synthetic oligonucleotide
cucauuugaccaacuccau

SEQ ID NO: 1974710 - RNA, 19 nt, Artificial Sequence
  Description of Artificial Sequence: Synthetic oligonucleotide
cauaacccagauguucccu

SEQ ID NO: 1974711 - RNA, 19 nt, Artificial Sequence
  Description of Artificial Sequence: Synthetic oligonucleotide
ggaggaaucgaguccuaau

SEQ ID NO: 1974712 - RNA, 19 nt, Artificial Sequence
  Description of Artificial Sequence: Synthetic oligonucleotide
gguuuccgagacgcgaaca

SEQ ID NO: 1974713 - RNA, 19 nt, Artificial Sequence
  Description of Artificial Sequence: Synthetic oligonucleotide
gugccauuaccaucugcau

SEQ ID NO: 1974714 - RNA, 19 nt, Artificial Sequence
  Description of Artificial Sequence: Synthetic oligonucleotide
uggcggagcucugcugcac

SEQ ID NO: 1974715 - RNA, 19 nt, Artificial Sequence
  Description of Artificial Sequence: Synthetic oligonucleotide
ccguuuugcaauagugcaa

SEQ ID NO: 1974716 - RNA, 19 nt, Artificial Sequence
  Description of Artificial Sequence: Synthetic oligonucleotide
caacaacaacaugcugaca

SEQ ID NO: 1974717 - RNA, 19 nt, Artificial Sequence
  Description of Artificial Sequence: Synthetic oligonucleotide
gcucgcccgcuccacucgg

SEQ ID NO: 1974718 - RNA, 19 nt, Artificial Sequence
  Description of Artificial Sequence: Synthetic oligonucleotide
cugcaucuacuucauuaau

SEQ ID NO: 1974719 - RNA, 19 nt, Artificial Sequence
  Description of Artificial Sequence: Synthetic oligonucleotide
caucgauaucugcuucccu

SEQ ID NO: 1974720 - RNA, 19 nt, Artificial Sequence
  Description of Artificial Sequence: Synthetic oligonucleotide
ggguucugcccaagagacc

SEQ ID NO: 1974721 - RNA, 19 nt, Artificial Sequence
  Description of Artificial Sequence: Synthetic oligonucleotide
augcaacauguuacuucau

SEQ ID NO: 1974722 - RNA, 19 nt, Artificial Sequence
  Description of Artificial Sequence: Synthetic oligonucleotide
gggcuuggauauauccaga

SEQ ID NO: 1974723 - RNA, 19 nt, Artificial Sequence
  Description of Artificial Sequence: Synthetic oligonucleotide
caguaggggaaaaccuuuu

SEQ ID NO: 1974724 - RNA, 19 nt, Artificial Sequence
  Description of Artificial Sequence: Synthetic oligonucleotide
ccacaugcaacauguuacu

SEQ ID NO: 1974725 - RNA, 19 nt, Artificial Sequence
  Description of Artificial Sequence: Synthetic oligonucleotide
gcccgcuccacucggacua

SEQ ID NO: 1974726 - RNA, 19 nt, Artificial Sequence
  Description of Artificial Sequence: Synthetic oligonucleotide
cucggcucgcccgcuccac

SEQ ID NO: 1974727 - RNA, 19 nt, Artificial Sequence
  Description of Artificial Sequence: Synthetic oligonucleotide
ccgagacgcgaacacacaa

SEQ ID NO: 1974728 - RNA, 19 nt, Artificial Sequence
  Description of Artificial Sequence: Synthetic oligonucleotide
ggaauggauuugaggcaaa

SEQ ID NO: 1974729 - RNA, 19 nt, Artificial Sequence
  Description of Artificial Sequence: Synthetic oligonucleotide
gccaucauugucagaaauu

SEQ ID NO: 1974730 - RNA, 19 nt, Artificial Sequence
  Description of Artificial Sequence: Synthetic oligonucleotide
gggcuaccgguuuccgaga

SEQ ID NO: 1974731 - RNA, 19 nt, Artificial Sequence
  Description of Artificial Sequence: Synthetic oligonucleotide
cggaaugcuucucugauuu

SEQ ID NO: 1974732 - RNA, 19 nt, Artificial Sequence
  Description of Artificial Sequence: Synthetic oligonucleotide
cacaugcaacauguuacuu

SEQ ID NO: 1974733 - RNA, 19 nt, Artificial Sequence
  Description of Artificial Sequence: Synthetic oligonucleotide
auggaggaaucgaguccua

SEQ ID NO: 1974734 - RNA, 19 nt, Artificial Sequence
  Description of Artificial Sequence: Synthetic oligonucleotide
ccgguuuccgagacgcgaa

SEQ ID NO: 1974735 - RNA, 19 nt, Artificial Sequence
  Description of Artificial Sequence: Synthetic oligonucleotide
cucgcccgcuccacucgga

SEQ ID NO: 1974736 - RNA, 19 nt, Artificial Sequence
  Description of Artificial Sequence: Synthetic oligonucleotide
cugcuucugugggguucug

SEQ ID NO: 1974737 - RNA, 19 nt, Artificial Sequence
  Description of Artificial Sequence: Synthetic oligonucleotide
gugcaacuuuuaaguacau

SEQ ID NO: 1974738 - RNA, 19 nt, Artificial Sequence
  Description of Artificial Sequence: Synthetic oligonucleotide
gcugcaagggcuaccgguu

SEQ ID NO: 1974739 - RNA, 19 nt, Artificial Sequence
  Description of Artificial Sequence: Synthetic oligonucleotide
cgguuuccgagacgcgaac

SEQ ID NO: 1974740 - RNA, 19 nt, Artificial Sequence
  Description of Artificial Sequence: Synthetic oligonucleotide
cugcaagggcuaccgguuu

SEQ ID NO: 1974741 - RNA, 19 nt, Artificial Sequence
  Description of Artificial Sequence: Synthetic oligonucleotide
accgcucggcucgcccgcu

SEQ ID NO: 1974742 - RNA, 19 nt, Artificial Sequence
  Description of Artificial Sequence: Synthetic oligonucleotide
cugcacuaauguagccauu

SEQ ID NO: 1974743 - RNA, 19 nt, Artificial Sequence
  Description of Artificial Sequence: Synthetic oligonucleotide
gcggagcucugcugcacua

SEQ ID NO: 1974744 - RNA, 19 nt, Artificial Sequence
  Description of Artificial Sequence: Synthetic oligonucleotide
gcucggcucgcccgcucca

SEQ ID NO: 1974745 - RNA, 19 nt, Artificial Sequence
  Description of Artificial Sequence: Synthetic oligonucleotide
cgcucggcucgcccgcucc

SEQ ID NO: 1974746 - RNA, 19 nt, Artificial Sequence
  Description of Artificial Sequence: Synthetic oligonucleotide
cggcucgcccgcuccacuc

SEQ ID NO: 1974747 - RNA, 19 nt, Artificial Sequence
  Description of Artificial Sequence: Synthetic oligonucleotide
ccugaccaucaccaucgau

SEQ ID NO: 1974748 - RNA, 19 nt, Artificial Sequence
  Description of Artificial Sequence: Synthetic oligonucleotide
cgcccgcuccacucggacu

SEQ ID NO: 1974749 - RNA, 19 nt, Artificial Sequence
  Description of Artificial Sequence: Synthetic oligonucleotide
aaaucuuugauacagauca

SEQ ID NO: 1974750 - RNA, 19 nt, Artificial Sequence
  Description of Artificial Sequence: Synthetic oligonucleotide
auuuguaugugucagaucc

SEQ ID NO: 1974751 - RNA, 19 nt, Artificial Sequence
  Description of Artificial Sequence: Synthetic oligonucleotide
aaaucuccgauucagaaac

SEQ ID NO: 1974752 - RNA, 19 nt, Artificial Sequence
  Description of Artificial Sequence: Synthetic oligonucleotide
uaauaacaaaaccagaucc

SEQ ID NO: 1974753 - RNA, 19 nt, Artificial Sequence
  Description of Artificial Sequence: Synthetic oligonucleotide
aaagaauguagcuuaauga

SEQ ID NO: 1974754 - RNA, 19 nt, Artificial Sequence
  Description of Artificial Sequence: Synthetic oligonucleotide
ucacacauuucucaaaucg

SEQ ID NO: 1974755 - RNA, 19 nt, Artificial Sequence
  Description of Artificial Sequence: Synthetic oligonucleotide
acaaacagcggcuucagcc

SEQ ID NO: 1974756 - RNA, 19 nt, Artificial Sequence
  Description of Artificial Sequence: Synthetic oligonucleotide
uuauguuggguucagaagc

SEQ ID NO: 1974757 - RNA, 19 nt, Artificial Sequence
  Description of Artificial Sequence: Synthetic oligonucleotide
aauaacaaaaccagauccc

SEQ ID NO: 1974758 - RNA, 19 nt, Artificial Sequence
  Description of Artificial Sequence: Synthetic oligonucleotide
auugcuacuaagcugaaag

SEQ ID NO: 1974759 - RNA, 19 nt, Artificial Sequence
  Description of Artificial Sequence: Synthetic oligonucleotide
ucauucagcaccaagauaa

SEQ ID NO: 1974760 - RNA, 19 nt, Artificial Sequence
  Description of Artificial Sequence: Synthetic oligonucleotide
uguagcuuaaugaacacca

SEQ ID NO: 1974761 - RNA, 19 nt, Artificial Sequence
  Description of Artificial Sequence: Synthetic oligonucleotide
aaaugaguucucuaaugac

SEQ ID NO: 1974762 - RNA, 19 nt, Artificial Sequence
  Description of Artificial Sequence: Synthetic oligonucleotide
uagauuuuguaucuaauca

SEQ ID NO: 1974763 - RNA, 19 nt, Artificial Sequence
  Description of Artificial Sequence: Synthetic oligonucleotide
uaucuaaucaaagauaucu

SEQ ID NO: 1974764 - RNA, 19 nt, Artificial Sequence
  Description of Artificial Sequence: Synthetic oligonucleotide
aaagauaucuucugggcug

SEQ ID NO: 1974765 - RNA, 19 nt, Artificial Sequence
  Description of Artificial Sequence: Synthetic oligonucleotide
uuuguaucuaaucaaagau

SEQ ID NO: 1974766 - RNA, 19 nt, Artificial Sequence
  Description of Artificial Sequence: Synthetic oligonucleotide
uguaucuaaucaaagauau

SEQ ID NO: 1974767 - RNA, 19 nt, Artificial Sequence
  Description of Artificial Sequence: Synthetic oligonucleotide
auuagaaagaacuggauaa

SEQ ID NO: 1974768 - RNA, 19 nt, Artificial Sequence
  Description of Artificial Sequence: Synthetic oligonucleotide
uuucagaacauuuaguuuc

SEQ ID NO: 1974769 - RNA, 19 nt, Artificial Sequence
  Description of Artificial Sequence: Synthetic oligonucleotide
uuugauacagaucagccuc

SEQ ID NO: 1974770 - RNA, 19 nt, Artificial Sequence
  Description of Artificial Sequence: Synthetic oligonucleotide
ucaucuaacaacuuaugca

SEQ ID NO: 1974771 - RNA, 19 nt, Artificial Sequence
  Description of Artificial Sequence: Synthetic oligonucleotide
ucucuaaugacuucgguug

SEQ ID NO: 1974772 - RNA, 19 nt, Artificial Sequence
  Description of Artificial Sequence: Synthetic oligonucleotide
aagaauguagcuuaaugaa

SEQ ID NO: 1974773 - RNA, 19 nt, Artificial Sequence
  Description of Artificial Sequence: Synthetic oligonucleotide
gaaacuugcagaaaguaag

SEQ ID NO: 1974774 - RNA, 19 nt, Artificial Sequence
  Description of Artificial Sequence: Synthetic oligonucleotide
aaagacauguuuccagcgg

SEQ ID NO: 1974775 - RNA, 19 nt, Artificial Sequence
  Description of Artificial Sequence: Synthetic oligonucleotide
aauguagcuuaaugaacac

SEQ ID NO: 1974776 - RNA, 19 nt, Artificial Sequence
  Description of Artificial Sequence: Synthetic oligonucleotide
uuuuguaucuaaucaaaga

SEQ ID NO: 1974777 - RNA, 19 nt, Artificial Sequence
  Description of Artificial Sequence: Synthetic oligonucleotide
ucuaaagacauguuuccag

SEQ ID NO: 1974778 - RNA, 19 nt, Artificial Sequence
  Description of Artificial Sequence: Synthetic oligonucleotide
ucuuugauacagaucagcc

SEQ ID NO: 1974779 - RNA, 19 nt, Artificial Sequence
  Description of Artificial Sequence: Synthetic oligonucleotide
uucauuagaaagaacugga

SEQ ID NO: 1974780 - RNA, 19 nt, Artificial Sequence
  Description of Artificial Sequence: Synthetic oligonucleotide
agauaaaucuuugauacag

SEQ ID NO: 1974781 - RNA, 19 nt, Artificial Sequence
  Description of Artificial Sequence: Synthetic oligonucleotide
uggauuucaucuaacaacu

SEQ ID NO: 1974782 - RNA, 19 nt, Artificial Sequence
  Description of Artificial Sequence: Synthetic oligonucleotide
aacaacuuaugcaagcuuc

SEQ ID NO: 1974783 - RNA, 19 nt, Artificial Sequence
  Description of Artificial Sequence: Synthetic oligonucleotide
aggaaucuucuuuacaaac

SEQ ID NO: 1974784 - RNA, 19 nt, Artificial Sequence
  Description of Artificial Sequence: Synthetic oligonucleotide
aacaaaaccagaucccacu

SEQ ID NO: 1974785 - RNA, 19 nt, Artificial Sequence
  Description of Artificial Sequence: Synthetic oligonucleotide
uaaggaaucuucuuuacaa

SEQ ID NO: 1974786 - RNA, 19 nt, Artificial Sequence
  Description of Artificial Sequence: Synthetic oligonucleotide
aauggcacgacucucuaga

SEQ ID NO: 1974787 - RNA, 19 nt, Artificial Sequence
  Description of Artificial Sequence: Synthetic oligonucleotide
ugaguuuggaacuuugucu

SEQ ID NO: 1974788 - RNA, 19 nt, Artificial Sequence
  Description of Artificial Sequence: Synthetic oligonucleotide
aacauuuaguuucccuuuc

SEQ ID NO: 1974789 - RNA, 19 nt, Artificial Sequence
  Description of Artificial Sequence: Synthetic oligonucleotide
aucguuuucuuucugcagg

SEQ ID NO: 1974790 - RNA, 19 nt, Artificial Sequence
  Description of Artificial Sequence: Synthetic oligonucleotide
agaaaguaaguuauguugg

SEQ ID NO: 1974791 - RNA, 19 nt, Artificial Sequence
  Description of Artificial Sequence: Synthetic oligonucleotide
ucuagaaaagaugaauuug

SEQ ID NO: 1974792 - RNA, 19 nt, Artificial Sequence
  Description of Artificial Sequence: Synthetic oligonucleotide
gaaaguaaguuauguuggg

SEQ ID NO: 1974793 - RNA, 19 nt, Artificial Sequence
  Description of Artificial Sequence: Synthetic oligonucleotide
cuggauuucaucuaacaac

SEQ ID NO: 1974794 - RNA, 19 nt, Artificial Sequence
  Description of Artificial Sequence: Synthetic oligonucleotide
acuggauaaagaauguagc

SEQ ID NO: 1974795 - RNA, 19 nt, Artificial Sequence
  Description of Artificial Sequence: Synthetic oligonucleotide
gaaagaacuggauaaagaa

SEQ ID NO: 1974796 - RNA, 19 nt, Artificial Sequence
  Description of Artificial Sequence: Synthetic oligonucleotide
ucaggguaauaacaaaacc

SEQ ID NO: 1974797 - RNA, 19 nt, Artificial Sequence
  Description of Artificial Sequence: Synthetic oligonucleotide
ucuaacaacuuaugcaagc

SEQ ID NO: 1974798 - RNA, 19 nt, Artificial Sequence
  Description of Artificial Sequence: Synthetic oligonucleotide
uucucauucagcaccaaga

SEQ ID NO: 1974799 - RNA, 19 nt, Artificial Sequence
  Description of Artificial Sequence: Synthetic oligonucleotide
ucuaaucaaagauaucuuc

SEQ ID NO: 1974800 - RNA, 19 nt, Artificial Sequence
  Description of Artificial Sequence: Synthetic oligonucleotide
guuccaaucucucaggagc

SEQ ID NO: 1974801 - RNA, 19 nt, Artificial Sequence
  Description of Artificial Sequence: Synthetic oligonucleotide
auaugaugucuucucuucc

SEQ ID NO: 1974802 - RNA, 19 nt, Artificial Sequence
  Description of Artificial Sequence: Synthetic oligonucleotide
aaaucggccuugaacaucg

SEQ ID NO: 1974803 - RNA, 19 nt, Artificial Sequence
  Description of Artificial Sequence: Synthetic oligonucleotide
uuuucucaauucaucagca

SEQ ID NO: 1974804 - RNA, 19 nt, Artificial Sequence
  Description of Artificial Sequence: Synthetic oligonucleotide
auacagaucagccuccaag

SEQ ID NO: 1974805 - RNA, 19 nt, Artificial Sequence
  Description of Artificial Sequence: Synthetic oligonucleotide
aagaugaauuuguaugugu

SEQ ID NO: 1974806 - RNA, 19 nt, Artificial Sequence
  Description of Artificial Sequence: Synthetic oligonucleotide
ucuaagugacuccacuucc

SEQ ID NO: 1974807 - RNA, 19 nt, Artificial Sequence
  Description of Artificial Sequence: Synthetic oligonucleotide
uccgauucagaaacugucg

SEQ ID NO: 1974808 - RNA, 19 nt, Artificial Sequence
  Description of Artificial Sequence: Synthetic oligonucleotide
aaacugucgcaguccaggc

SEQ ID NO: 1974809 - RNA, 19 nt, Artificial Sequence
  Description of Artificial Sequence: Synthetic oligonucleotide
aaccaagccuaaaugagac

SEQ ID NO: 1974810 - RNA, 19 nt, Artificial Sequence
  Description of Artificial Sequence: Synthetic oligonucleotide
uaaauugcaucuuggucag

SEQ ID NO: 1974811 - RNA, 19 nt, Artificial Sequence
  Description of Artificial Sequence: Synthetic oligonucleotide
gaaaccaaugcuuuucuca

SEQ ID NO: 1974812 - RNA, 19 nt, Artificial Sequence
  Description of Artificial Sequence: Synthetic oligonucleotide
cugacuaccucuaagugac

SEQ ID NO: 1974813 - RNA, 19 nt, Artificial Sequence
  Description of Artificial Sequence: Synthetic oligonucleotide
aauuuguaugugucagauc

SEQ ID NO: 1974814 - RNA, 19 nt, Artificial Sequence
  Description of Artificial Sequence: Synthetic oligonucleotide
ucucaauucaucagcauau

SEQ ID NO: 1974815 - RNA, 19 nt, Artificial Sequence
  Description of Artificial Sequence: Synthetic oligonucleotide
ucucaaaucggccuugaac

SEQ ID NO: 1974816 - RNA, 19 nt, Artificial Sequence
  Description of Artificial Sequence: Synthetic oligonucleotide
augucagugacaucaggac

SEQ ID NO: 1974817 - RNA, 19 nt, Artificial Sequence
  Description of Artificial Sequence: Synthetic oligonucleotide
uaaugaacaccaagucugg

SEQ ID NO: 1974818 - RNA, 19 nt, Artificial Sequence
  Description of Artificial Sequence: Synthetic oligonucleotide
uaaccauugcuacuaagcu

SEQ ID NO: 1974819 - RNA, 19 nt, Artificial Sequence
  Description of Artificial Sequence: Synthetic oligonucleotide
gauucagaaacugucgcag

SEQ ID NO: 1974820 - RNA, 19 nt, Artificial Sequence
  Description of Artificial Sequence: Synthetic oligonucleotide
cucaaaucggccuugaaca

SEQ ID NO: 1974821 - RNA, 19 nt, Artificial Sequence
  Description of Artificial Sequence: Synthetic oligonucleotide
acaaaugaguucucuaaug

SEQ ID NO: 1974822 - RNA, 19 nt, Artificial Sequence
  Description of Artificial Sequence: Synthetic oligonucleotide
aaccauugcuacuaagcug

SEQ ID NO: 1974823 - RNA, 19 nt, Artificial Sequence
  Description of Artificial Sequence: Synthetic oligonucleotide
acuaccucuaagugacucc

SEQ ID NO: 1974824 - RNA, 19 nt, Artificial Sequence
  Description of Artificial Sequence: Synthetic oligonucleotide
uuaugcaagcuucggaucu

SEQ ID NO: 1974825 - RNA, 19 nt, Artificial Sequence
  Description of Artificial Sequence: Synthetic oligonucleotide
agauccugauccugaaacc

SEQ ID NO: 1974826 - RNA, 19 nt, Artificial Sequence
  Description of Artificial Sequence: Synthetic oligonucleotide
cuagauuuuguaucuaauc

SEQ ID NO: 1974827 - RNA, 19 nt, Artificial Sequence
  Description of Artificial Sequence: Synthetic oligonucleotide
ucugacuaccucuaaguga

SEQ ID NO: 1974828 - RNA, 19 nt, Artificial Sequence
  Description of Artificial Sequence: Synthetic oligonucleotide
ucucaagggagaaauggca

SEQ ID NO: 1974829 - RNA, 19 nt, Artificial Sequence
  Description of Artificial Sequence: Synthetic oligonucleotide
ugauccugaaaccaaugcu

SEQ ID NO: 1974830 - RNA, 19 nt, Artificial Sequence
  Description of Artificial Sequence: Synthetic oligonucleotide
gaauguagcuuaaugaaca

SEQ ID NO: 1974831 - RNA, 19 nt, Artificial Sequence
  Description of Artificial Sequence: Synthetic oligonucleotide
guuauguuggguucagaag

SEQ ID NO: 1974832 - RNA, 19 nt, Artificial Sequence
  Description of Artificial Sequence: Synthetic oligonucleotide
aaugucagugacaucagga

SEQ ID NO: 1974833 - RNA, 19 nt, Artificial Sequence
  Description of Artificial Sequence: Synthetic oligonucleotide
aggguaauaacaaaaccag

SEQ ID NO: 1974834 - RNA, 19 nt, Artificial Sequence
  Description of Artificial Sequence: Synthetic oligonucleotide
accaagauaaaucuuugau

SEQ ID NO: 1974835 - RNA, 19 nt, Artificial Sequence
  Description of Artificial Sequence: Synthetic oligonucleotide
uuuucuuucugcaggugcu

SEQ ID NO: 1974836 - RNA, 19 nt, Artificial Sequence
  Description of Artificial Sequence: Synthetic oligonucleotide
uuguaucuaaucaaagaua

SEQ ID NO: 1974837 - RNA, 19 nt, Artificial Sequence
  Description of Artificial Sequence: Synthetic oligonucleotide
aagacauguuuccagcgga

SEQ ID NO: 1974838 - RNA, 19 nt, Artificial Sequence
  Description of Artificial Sequence: Synthetic oligonucleotide
agaauguagcuuaaugaac

SEQ ID NO: 1974839 - RNA, 19 nt, Artificial Sequence
  Description of Artificial Sequence: Synthetic oligonucleotide
aaagaugaauuuguaugug

SEQ ID NO: 1974840 - RNA, 19 nt, Artificial Sequence
  Description of Artificial Sequence: Synthetic oligonucleotide
aagcaagagagauucugcu

SEQ ID NO: 1974841 - RNA, 19 nt, Artificial Sequence
  Description of Artificial Sequence: Synthetic oligonucleotide
caggguaauaacaaaacca

SEQ ID NO: 1974842 - RNA, 19 nt, Artificial Sequence
  Description of Artificial Sequence: Synthetic oligonucleotide
uucucaagggagaaauggc

SEQ ID NO: 1974843 - RNA, 19 nt, Artificial Sequence
  Description of Artificial Sequence: Synthetic oligonucleotide
uuuacaaacagcggcuuca

SEQ ID NO: 1974844 - RNA, 19 nt, Artificial Sequence
  Description of Artificial Sequence: Synthetic oligonucleotide
ucaggguuucuaaagacau

SEQ ID NO: 1974845 - RNA, 19 nt, Artificial Sequence
  Description of Artificial Sequence: Synthetic oligonucleotide
agauuuuguaucuaaucaa

SEQ ID NO: 1974846 - RNA, 19 nt, Artificial Sequence
  Description of Artificial Sequence: Synthetic oligonucleotide
augaauuuguaugugucag

SEQ ID NO: 1974847 - RNA, 19 nt, Artificial Sequence
  Description of Artificial Sequence: Synthetic oligonucleotide
guaaccauugcuacuaagc

SEQ ID NO: 1974848 - RNA, 19 nt, Artificial Sequence
  Description of Artificial Sequence: Synthetic oligonucleotide
aacuuaugcaagcuucgga

SEQ ID NO: 1974849 - RNA, 19 nt, Artificial Sequence
  Description of Artificial Sequence: Synthetic oligonucleotide
caaggugugaggcagugag

SEQ ID NO: 1974850 - RNA, 19 nt, Artificial Sequence
  Description of Artificial Sequence: Synthetic oligonucleotide
acuuaugcaagcuucggau

SEQ ID NO: 1974851 - RNA, 19 nt, Artificial Sequence
  Description of Artificial Sequence: Synthetic oligonucleotide
aaaaccagaucccacuguu

SEQ ID NO: 1974852 - RNA, 19 nt, Artificial Sequence
  Description of Artificial Sequence: Synthetic oligonucleotide
uugaguuuggaacuuuguc

SEQ ID NO: 1974853 - RNA, 19 nt, Artificial Sequence
  Description of Artificial Sequence: Synthetic oligonucleotide
acagaucagccuccaaggc

SEQ ID NO: 1974854 - RNA, 19 nt, Artificial Sequence
  Description of Artificial Sequence: Synthetic oligonucleotide
uugucuagguugaaggaac

SEQ ID NO: 1974855 - RNA, 19 nt, Artificial Sequence
  Description of Artificial Sequence: Synthetic oligonucleotide
aagauaaaucuuugauaca

SEQ ID NO: 1974856 - RNA, 19 nt, Artificial Sequence
  Description of Artificial Sequence: Synthetic oligonucleotide
cuaaaugagacaucuuuca

SEQ ID NO: 1974857 - RNA, 19 nt, Artificial Sequence
  Description of Artificial Sequence: Synthetic oligonucleotide
aaugacuucgguugaguuu

SEQ ID NO: 1974858 - RNA, 19 nt, Artificial Sequence
  Description of Artificial Sequence: Synthetic oligonucleotide
aguuauguuggguucagaa

SEQ ID NO: 1974859 - RNA, 19 nt, Artificial Sequence
  Description of Artificial Sequence: Synthetic oligonucleotide
aagccuaaaugagacaucu

SEQ ID NO: 1974860 - RNA, 19 nt, Artificial Sequence
  Description of Artificial Sequence: Synthetic oligonucleotide
uucucaauucaucagcaua

SEQ ID NO: 1974861 - RNA, 19 nt, Artificial Sequence
  Description of Artificial Sequence: Synthetic oligonucleotide
uagaaagaacuggauaaag

SEQ ID NO: 1974862 - RNA, 19 nt, Artificial Sequence
  Description of Artificial Sequence: Synthetic oligonucleotide
aagcugaaagccugucuuc

SEQ ID NO: 1974863 - RNA, 19 nt, Artificial Sequence
  Description of Artificial Sequence: Synthetic oligonucleotide
ugaacaucguuccaaucuc

SEQ ID NO: 1974864 - RNA, 19 nt, Artificial Sequence
  Description of Artificial Sequence: Synthetic oligonucleotide
ugguucuagauuuuguauc

SEQ ID NO: 1974865 - RNA, 19 nt, Artificial Sequence
  Description of Artificial Sequence: Synthetic oligonucleotide
uucugacuaccucuaagug

SEQ ID NO: 1974866 - RNA, 19 nt, Artificial Sequence
  Description of Artificial Sequence: Synthetic oligonucleotide
gacucucuagaaaagauga

SEQ ID NO: 1974867 - RNA, 19 nt, Artificial Sequence
  Description of Artificial Sequence: Synthetic oligonucleotide
acauuucucaaaucggccu

SEQ ID NO: 1974868 - RNA, 19 nt, Artificial Sequence
  Description of Artificial Sequence: Synthetic oligonucleotide
uuuggguucugucccaaga

SEQ ID NO: 1974869 - RNA, 19 nt, Artificial Sequence
  Description of Artificial Sequence: Synthetic oligonucleotide
uauguuggguucagaagca

SEQ ID NO: 1974870 - RNA, 19 nt, Artificial Sequence
  Description of Artificial Sequence: Synthetic oligonucleotide
uguuggguucagaagcaag

SEQ ID NO: 1974871 - RNA, 19 nt, Artificial Sequence
  Description of Artificial Sequence: Synthetic oligonucleotide
agcaagagagauucugcuc

SEQ ID NO: 1974872 - RNA, 19 nt, Artificial Sequence
  Description of Artificial Sequence: Synthetic oligonucleotide
uucgguugaguuuggaacu

SEQ ID NO: 1974873 - RNA, 19 nt, Artificial Sequence
  Description of Artificial Sequence: Synthetic oligonucleotide
ucuagauuuuguaucuaau

SEQ ID NO: 1974874 - RNA, 19 nt, Artificial Sequence
  Description of Artificial Sequence: Synthetic oligonucleotide
cuaagugacuccacuuccg

SEQ ID NO: 1974875 - RNA, 19 nt, Artificial Sequence
  Description of Artificial Sequence: Synthetic oligonucleotide
cauaugaugucuucucuuc

SEQ ID NO: 1974876 - RNA, 19 nt, Artificial Sequence
  Description of Artificial Sequence: Synthetic oligonucleotide
agaucccacuguuuccucc

SEQ ID NO: 1974877 - RNA, 19 nt, Artificial Sequence
  Description of Artificial Sequence: Synthetic oligonucleotide
cucacuuuucuuuccauuc

SEQ ID NO: 1974878 - RNA, 19 nt, Artificial Sequence
  Description of Artificial Sequence: Synthetic oligonucleotide
aaaguaaguuauguugggu

SEQ ID NO: 1974879 - RNA, 19 nt, Artificial Sequence
  Description of Artificial Sequence: Synthetic oligonucleotide
ugggaaaucuccgauucag

SEQ ID NO: 1974880 - RNA, 19 nt, Artificial Sequence
  Description of Artificial Sequence: Synthetic oligonucleotide
ucccuuucagguuucaagu

SEQ ID NO: 1974881 - RNA, 19 nt, Artificial Sequence
  Description of Artificial Sequence: Synthetic oligonucleotide
uaucguuuucuuucugcag

SEQ ID NO: 1974882 - RNA, 19 nt, Artificial Sequence
  Description of Artificial Sequence: Synthetic oligonucleotide
caucguuccaaucucucag

SEQ ID NO: 1974883 - RNA, 19 nt, Artificial Sequence
  Description of Artificial Sequence: Synthetic oligonucleotide
uaagugacuccacuuccgc

SEQ ID NO: 1974884 - RNA, 19 nt, Artificial Sequence
  Description of Artificial Sequence: Synthetic oligonucleotide
cuugggaaaucuccgauuc

SEQ ID NO: 1974885 - RNA, 19 nt, Artificial Sequence
  Description of Artificial Sequence: Synthetic oligonucleotide
uguguguucgugcuccucu

SEQ ID NO: 1974886 - RNA, 19 nt, Artificial Sequence
  Description of Artificial Sequence: Synthetic oligonucleotide
caguucuuucucaagggag

SEQ ID NO: 1974887 - RNA, 19 nt, Artificial Sequence
  Description of Artificial Sequence: Synthetic oligonucleotide
gaagcaagagagauucugc

SEQ ID NO: 1974888 - RNA, 19 nt, Artificial Sequence
  Description of Artificial Sequence: Synthetic oligonucleotide
auuuuguaucuaaucaaag

SEQ ID NO: 1974889 - RNA, 19 nt, Artificial Sequence
  Description of Artificial Sequence: Synthetic oligonucleotide
cugaauggccaucagucag

SEQ ID NO: 1974890 - RNA, 19 nt, Artificial Sequence
  Description of Artificial Sequence: Synthetic oligonucleotide
cuuucaaggugugaggcag

SEQ ID NO: 1974891 - RNA, 19 nt, Artificial Sequence
  Description of Artificial Sequence: Synthetic oligonucleotide
uuuggaacuuugucuaggu

SEQ ID NO: 1974892 - RNA, 19 nt, Artificial Sequence
  Description of Artificial Sequence: Synthetic oligonucleotide
uuccaaucucucaggagcc

SEQ ID NO: 1974893 - RNA, 19 nt, Artificial Sequence
  Description of Artificial Sequence: Synthetic oligonucleotide
aacuuugucuagguugaag

SEQ ID NO: 1974894 - RNA, 19 nt, Artificial Sequence
  Description of Artificial Sequence: Synthetic oligonucleotide
uucuagauuuuguaucuaa

SEQ ID NO: 1974895 - RNA, 19 nt, Artificial Sequence
  Description of Artificial Sequence: Synthetic oligonucleotide
aaauggcacgacucucuag

SEQ ID NO: 1974896 - RNA, 19 nt, Artificial Sequence
  Description of Artificial Sequence: Synthetic oligonucleotide
uugauacagaucagccucc

SEQ ID NO: 1974897 - RNA, 19 nt, Artificial Sequence
  Description of Artificial Sequence: Synthetic oligonucleotide
ugucagauccugauccuga

SEQ ID NO: 1974898 - RNA, 19 nt, Artificial Sequence
  Description of Artificial Sequence: Synthetic oligonucleotide
uucagaaacugucgcaguc

SEQ ID NO: 1974899 - RNA, 19 nt, Artificial Sequence
  Description of Artificial Sequence: Synthetic oligonucleotide
ugaauuuguaugugucaga

SEQ ID NO: 1974900 - RNA, 19 nt, Artificial Sequence
  Description of Artificial Sequence: Synthetic oligonucleotide
ucugguucuagauuuugua

SEQ ID NO: 1974901 - RNA, 19 nt, Artificial Sequence
  Description of Artificial Sequence: Synthetic oligonucleotide
agcuuaaugaacaccaagu

SEQ ID NO: 1974902 - RNA, 19 nt, Artificial Sequence
  Description of Artificial Sequence: Synthetic oligonucleotide
caaaugaguucucuaauga

SEQ ID NO: 1974903 - RNA, 19 nt, Artificial Sequence
  Description of Artificial Sequence: Synthetic oligonucleotide
auuucaucuaacaacuuau

SEQ ID NO: 1974904 - RNA, 19 nt, Artificial Sequence
  Description of Artificial Sequence: Synthetic oligonucleotide
uccugcggagccauuuugg

SEQ ID NO: 1974905 - RNA, 19 nt, Artificial Sequence
  Description of Artificial Sequence: Synthetic oligonucleotide
aguaaccauugcuacuaag

SEQ ID NO: 1974906 - RNA, 19 nt, Artificial Sequence
  Description of Artificial Sequence: Synthetic oligonucleotide
uuugucuagguugaaggaa

SEQ ID NO: 1974907 - RNA, 19 nt, Artificial Sequence
  Description of Artificial Sequence: Synthetic oligonucleotide
acauguuuccagcggaugu

SEQ ID NO: 1974908 - RNA, 19 nt, Artificial Sequence
  Description of Artificial Sequence: Synthetic oligonucleotide
cauucugacuaccucuaag

SEQ ID NO: 1974909 - RNA, 19 nt, Artificial Sequence
  Description of Artificial Sequence: Synthetic oligonucleotide
aucguuccaaucucucagg

SEQ ID NO: 1974910 - RNA, 19 nt, Artificial Sequence
  Description of Artificial Sequence: Synthetic oligonucleotide
ugcuggauuucaucuaaca

SEQ ID NO: 1974911 - RNA, 19 nt, Artificial Sequence
  Description of Artificial Sequence: Synthetic oligonucleotide
aagaaacuugcagaaagua

SEQ ID NO: 1974912 - RNA, 19 nt, Artificial Sequence
  Description of Artificial Sequence: Synthetic oligonucleotide
acaacuuaugcaagcuucg

SEQ ID NO: 1974913 - RNA, 19 nt, Artificial Sequence
  Description of Artificial Sequence: Synthetic oligonucleotide
uuuccauucugacuaccuc

SEQ ID NO: 1974914 - RNA, 19 nt, Artificial Sequence
  Description of Artificial Sequence: Synthetic oligonucleotide
ugucuagguugaaggaacc

SEQ ID NO: 1974915 - RNA, 19 nt, Artificial Sequence
  Description of Artificial Sequence: Synthetic oligonucleotide
uaugugucagauccugauc

SEQ ID NO: 1974916 - RNA, 19 nt, Artificial Sequence
  Description of Artificial Sequence: Synthetic oligonucleotide
uuguaugugucagauccug

SEQ ID NO: 1974917 - RNA, 19 nt, Artificial Sequence
  Description of Artificial Sequence: Synthetic oligonucleotide
uuagaaagaacuggauaaa

SEQ ID NO: 1974918 - RNA, 19 nt, Artificial Sequence
  Description of Artificial Sequence: Synthetic oligonucleotide
ucuccgauucagaaacugu

SEQ ID NO: 1974919 - RNA, 19 nt, Artificial Sequence
  Description of Artificial Sequence: Synthetic oligonucleotide
cuccgauucagaaacuguc

SEQ ID NO: 1974920 - RNA, 19 nt, Artificial Sequence
  Description of Artificial Sequence: Synthetic oligonucleotide
acugggugcaaugucagug

SEQ ID NO: 1974921 - RNA, 19 nt, Artificial Sequence
  Description of Artificial Sequence: Synthetic oligonucleotide
uuuguaugugucagauccu

SEQ ID NO: 1974922 - RNA, 19 nt, Artificial Sequence
  Description of Artificial Sequence: Synthetic oligonucleotide
uguaugugucagauccuga

SEQ ID NO: 1974923 - RNA, 19 nt, Artificial Sequence
  Description of Artificial Sequence: Synthetic oligonucleotide
uggguucagaagcaagaga

SEQ ID NO: 1974924 - RNA, 19 nt, Artificial Sequence
  Description of Artificial Sequence: Synthetic oligonucleotide
uuccucccaagaaacuugc

SEQ ID NO: 1974925 - RNA, 19 nt, Artificial Sequence
  Description of Artificial Sequence: Synthetic oligonucleotide
ggauaaagaauguagcuua

SEQ ID NO: 1974926 - RNA, 19 nt, Artificial Sequence
  Description of Artificial Sequence: Synthetic oligonucleotide
ugcggagccauuuuggguu

SEQ ID NO: 1974927 - RNA, 19 nt, Artificial Sequence
  Description of Artificial Sequence: Synthetic oligonucleotide
ucuaaugacuucgguugag

SEQ ID NO: 1974928 - RNA, 19 nt, Artificial Sequence
  Description of Artificial Sequence: Synthetic oligonucleotide
aucaguacuuccaucauaa

SEQ ID NO: 1974929 - RNA, 19 nt, Artificial Sequence
  Description of Artificial Sequence: Synthetic oligonucleotide
aguuuggaacuuugucuag

SEQ ID NO: 1974930 - RNA, 19 nt, Artificial Sequence
  Description of Artificial Sequence: Synthetic oligonucleotide
cuuaugcaagcuucggauc

SEQ ID NO: 1974931 - RNA, 19 nt, Artificial Sequence
  Description of Artificial Sequence: Synthetic oligonucleotide
cuuaaugaacaccaagucu

SEQ ID NO: 1974932 - RNA, 19 nt, Artificial Sequence
  Description of Artificial Sequence: Synthetic oligonucleotide
uaaguuauguuggguucag

SEQ ID NO: 1974933 - RNA, 19 nt, Artificial Sequence
  Description of Artificial Sequence: Synthetic oligonucleotide
uucuugggaaaucuccgau

SEQ ID NO: 1974934 - RNA, 19 nt, Artificial Sequence
  Description of Artificial Sequence: Synthetic oligonucleotide
aagggagaaauggcacgac

SEQ ID NO: 1974935 - RNA, 19 nt, Artificial Sequence
  Description of Artificial Sequence: Synthetic oligonucleotide
uaacaacuuaugcaagcuu

SEQ ID NO: 1974936 - RNA, 19 nt, Artificial Sequence
  Description of Artificial Sequence: Synthetic oligonucleotide
auucugcucacuuuucuuu

SEQ ID NO: 1974937 - RNA, 19 nt, Artificial Sequence
  Description of Artificial Sequence: Synthetic oligonucleotide
aagcuucggaucuuuguuu

SEQ ID NO: 1974938 - RNA, 19 nt, Artificial Sequence
  Description of Artificial Sequence: Synthetic oligonucleotide
gcaagagagauucugcuca

SEQ ID NO: 1974939 - RNA, 19 nt, Artificial Sequence
  Description of Artificial Sequence: Synthetic oligonucleotide
uguuuccucccaagaaacu

SEQ ID NO: 1974940 - RNA, 19 nt, Artificial Sequence
  Description of Artificial Sequence: Synthetic oligonucleotide
aagccugucuucauuagaa

SEQ ID NO: 1974941 - RNA, 19 nt, Artificial Sequence
  Description of Artificial Sequence: Synthetic oligonucleotide
caucagucaggguaauaac

SEQ ID NO: 1974942 - RNA, 19 nt, Artificial Sequence
  Description of Artificial Sequence: Synthetic oligonucleotide
aucagucaggguaauaaca

SEQ ID NO: 1974943 - RNA, 19 nt, Artificial Sequence
  Description of Artificial Sequence: Synthetic oligonucleotide
ggaaccaagccuaaaugag

SEQ ID NO: 1974944 - RNA, 19 nt, Artificial Sequence
  Description of Artificial Sequence: Synthetic oligonucleotide
cuaucguuuucuuucugca

SEQ ID NO: 1974945 - RNA, 19 nt, Artificial Sequence
  Description of Artificial Sequence: Synthetic oligonucleotide
gaauggccaucagucaggg

SEQ ID NO: 1974946 - RNA, 19 nt, Artificial Sequence
  Description of Artificial Sequence: Synthetic oligonucleotide
gucaggguaauaacaaaac

SEQ ID NO: 1974947 - RNA, 19 nt, Artificial Sequence
  Description of Artificial Sequence: Synthetic oligonucleotide
cuuccuacugggugcaaug

SEQ ID NO: 1974948 - RNA, 19 nt, Artificial Sequence
  Description of Artificial Sequence: Synthetic oligonucleotide
cugcauaugaugucuucuc

SEQ ID NO: 1974949 - RNA, 19 nt, Artificial Sequence
  Description of Artificial Sequence: Synthetic oligonucleotide
uguucgugcuccucuuuca

SEQ ID NO: 1974950 - RNA, 19 nt, Artificial Sequence
  Description of Artificial Sequence: Synthetic oligonucleotide
ucguuccaaucucucagga

SEQ ID NO: 1974951 - RNA, 19 nt, Artificial Sequence
  Description of Artificial Sequence: Synthetic oligonucleotide
ucguuuucuuucugcaggu

SEQ ID NO: 1974952 - RNA, 19 nt, Artificial Sequence
  Description of Artificial Sequence: Synthetic oligonucleotide
acaucguuccaaucucuca

SEQ ID NO: 1974953 - RNA, 19 nt, Artificial Sequence
  Description of Artificial Sequence: Synthetic oligonucleotide
uccagcggauguguguucg

SEQ ID NO: 1974954 - RNA, 19 nt, Artificial Sequence
  Description of Artificial Sequence: Synthetic oligonucleotide
aacugucgcaguccaggcu

SEQ ID NO: 1974955 - RNA, 19 nt, Artificial Sequence
  Description of Artificial Sequence: Synthetic oligonucleotide
aguucucuaaugacuucgg

SEQ ID NO: 1974956 - RNA, 19 nt, Artificial Sequence
  Description of Artificial Sequence: Synthetic oligonucleotide
aaucucucaggagccuauc

SEQ ID NO: 1974957 - RNA, 19 nt, Artificial Sequence
  Description of Artificial Sequence: Synthetic oligonucleotide
accucuaagugacuccacu

SEQ ID NO: 1974958 - RNA, 19 nt, Artificial Sequence
  Description of Artificial Sequence: Synthetic oligonucleotide
uaaugacuucgguugaguu

SEQ ID NO: 1974959 - RNA, 19 nt, Artificial Sequence
  Description of Artificial Sequence: Synthetic oligonucleotide
ggcaguaacaaaugaguuc

SEQ ID NO: 1974960 - RNA, 19 nt, Artificial Sequence
  Description of Artificial Sequence: Synthetic oligonucleotide
guugaaggaaccaagccua

SEQ ID NO: 1974961 - RNA, 19 nt, Artificial Sequence
  Description of Artificial Sequence: Synthetic oligonucleotide
aguucuuucucaagggaga

SEQ ID NO: 1974962 - RNA, 19 nt, Artificial Sequence
  Description of Artificial Sequence: Synthetic oligonucleotide
auucagaaacugucgcagu

SEQ ID NO: 1974963 - RNA, 19 nt, Artificial Sequence
  Description of Artificial Sequence: Synthetic oligonucleotide
aaugaacaccaagucuggu

SEQ ID NO: 1974964 - RNA, 19 nt, Artificial Sequence
  Description of Artificial Sequence: Synthetic oligonucleotide
gaaccaagccuaaaugaga

SEQ ID NO: 1974965 - RNA, 19 nt, Artificial Sequence
  Description of Artificial Sequence: Synthetic oligonucleotide
agcaccaagauaaaucuuu

SEQ ID NO: 1974966 - RNA, 19 nt, Artificial Sequence
  Description of Artificial Sequence: Synthetic oligonucleotide
ugaaaccaaugcuuuucuc

SEQ ID NO: 1974967 - RNA, 19 nt, Artificial Sequence
  Description of Artificial Sequence: Synthetic oligonucleotide
accaagucugguucuagau

SEQ ID NO: 1974968 - RNA, 19 nt, Artificial Sequence
  Description of Artificial Sequence: Synthetic oligonucleotide
cuuugucuagguugaagga

SEQ ID NO: 1974969 - RNA, 19 nt, Artificial Sequence
  Description of Artificial Sequence: Synthetic oligonucleotide
ucaaaucggccuugaacau

SEQ ID NO: 1974970 - RNA, 19 nt, Artificial Sequence
  Description of Artificial Sequence: Synthetic oligonucleotide
uugggaaaucuccgauuca

SEQ ID NO: 1974971 - RNA, 19 nt, Artificial Sequence
  Description of Artificial Sequence: Synthetic oligonucleotide
gaaggaaccaagccuaaau

SEQ ID NO: 1974972 - RNA, 19 nt, Artificial Sequence
  Description of Artificial Sequence: Synthetic oligonucleotide
ucaucaguacuuccaucau

SEQ ID NO: 1974973 - RNA, 19 nt, Artificial Sequence
  Description of Artificial Sequence: Synthetic oligonucleotide
agaaauggcacgacucucu

SEQ ID NO: 1974974 - RNA, 19 nt, Artificial Sequence
  Description of Artificial Sequence: Synthetic oligonucleotide
aacuugcagaaaguaaguu

SEQ ID NO: 1974975 - RNA, 19 nt, Artificial Sequence
  Description of Artificial Sequence: Synthetic oligonucleotide
uuuuggguucugucccaag

SEQ ID NO: 1974976 - RNA, 19 nt, Artificial Sequence
  Description of Artificial Sequence: Synthetic oligonucleotide
uguuuccagcggaugugug

SEQ ID NO: 1974977 - RNA, 19 nt, Artificial Sequence
  Description of Artificial Sequence: Synthetic oligonucleotide
uuucucaauucaucagcau

SEQ ID NO: 1974978 - RNA, 19 nt, Artificial Sequence
  Description of Artificial Sequence: Synthetic oligonucleotide
caacuuaugcaagcuucgg

SEQ ID NO: 1974979 - RNA, 19 nt, Artificial Sequence
  Description of Artificial Sequence: Synthetic oligonucleotide
agaacuggauaaagaaugu

SEQ ID NO: 1974980 - RNA, 19 nt, Artificial Sequence
  Description of Artificial Sequence: Synthetic oligonucleotide
caaacagcggcuucagcca

SEQ ID NO: 1974981 - RNA, 19 nt, Artificial Sequence
  Description of Artificial Sequence: Synthetic oligonucleotide
guuggguucagaagcaaga

SEQ ID NO: 1974982 - RNA, 19 nt, Artificial Sequence
  Description of Artificial Sequence: Synthetic oligonucleotide
ccuaucguuuucuuucugc

SEQ ID NO: 1974983 - RNA, 19 nt, Artificial Sequence
  Description of Artificial Sequence: Synthetic oligonucleotide
aucuaacaacuuaugcaag

SEQ ID NO: 1974984 - RNA, 19 nt, Artificial Sequence
  Description of Artificial Sequence: Synthetic oligonucleotide
uccugauccugaaaccaau

SEQ ID NO: 1974985 - RNA, 19 nt, Artificial Sequence
  Description of Artificial Sequence: Synthetic oligonucleotide
cuugaacaucguuccaauc

SEQ ID NO: 1974986 - RNA, 19 nt, Artificial Sequence
  Description of Artificial Sequence: Synthetic oligonucleotide
gaauuuguaugugucagau

SEQ ID NO: 1974987 - RNA, 19 nt, Artificial Sequence
  Description of Artificial Sequence: Synthetic oligonucleotide
aaacagcggcuucagccaa

SEQ ID NO: 1974988 - RNA, 19 nt, Artificial Sequence
  Description of Artificial Sequence: Synthetic oligonucleotide
guaaguuauguuggguuca

SEQ ID NO: 1974989 - RNA, 19 nt, Artificial Sequence
  Description of Artificial Sequence: Synthetic oligonucleotide
ggaaaucuccgauucagaa

SEQ ID NO: 1974990 - RNA, 19 nt, Artificial Sequence
  Description of Artificial Sequence: Synthetic oligonucleotide
uggcaaucacacauuucuc

SEQ ID NO: 1974991 - RNA, 19 nt, Artificial Sequence
  Description of Artificial Sequence: Synthetic oligonucleotide
caggcaguaacaaaugagu

SEQ ID NO: 1974992 - RNA, 19 nt, Artificial Sequence
  Description of Artificial Sequence: Synthetic oligonucleotide
ggcacgacucucuagaaaa

SEQ ID NO: 1974993 - RNA, 19 nt, Artificial Sequence
  Description of Artificial Sequence: Synthetic oligonucleotide
caagagagauucugcucac

SEQ ID NO: 1974994 - RNA, 19 nt, Artificial Sequence
  Description of Artificial Sequence: Synthetic oligonucleotide
acuuccgcucuccucaaaa

SEQ ID NO: 1974995 - RNA, 19 nt, Artificial Sequence
  Description of Artificial Sequence: Synthetic oligonucleotide
uuucaaggugugaggcagu

SEQ ID NO: 1974996 - RNA, 19 nt, Artificial Sequence
  Description of Artificial Sequence: Synthetic oligonucleotide
ucuuuccauucugacuacc

SEQ ID NO: 1974997 - RNA, 19 nt, Artificial Sequence
  Description of Artificial Sequence: Synthetic oligonucleotide
ugggugcaaugucagugac

SEQ ID NO: 1974998 - RNA, 19 nt, Artificial Sequence
  Description of Artificial Sequence: Synthetic oligonucleotide
cauguuuccagcggaugug

SEQ ID NO: 1974999 - RNA, 19 nt, Artificial Sequence
  Description of Artificial Sequence: Synthetic oligonucleotide
gguuucaaguucuucucca

SEQ ID NO: 1975000 - RNA, 19 nt, Artificial Sequence
  Description of Artificial Sequence: Synthetic oligonucleotide
ugcaagcuucggaucuuug

SEQ ID NO: 1975001 - RNA, 19 nt, Artificial Sequence
  Description of Artificial Sequence: Synthetic oligonucleotide
gacuaccucuaagugacuc

SEQ ID NO: 1975002 - RNA, 19 nt, Artificial Sequence
  Description of Artificial Sequence: Synthetic oligonucleotide
caagccuaaaugagacauc

SEQ ID NO: 1975003 - RNA, 19 nt, Artificial Sequence
  Description of Artificial Sequence: Synthetic oligonucleotide
cuuucagguuucaaguucu

SEQ ID NO: 1975004 - RNA, 19 nt, Artificial Sequence
  Description of Artificial Sequence: Synthetic oligonucleotide
uggguucugucccaagauu

SEQ ID NO: 1975005 - RNA, 19 nt, Artificial Sequence
  Description of Artificial Sequence: Synthetic oligonucleotide
ucaggagccuaucguuuuc

SEQ ID NO: 1975006 - RNA, 19 nt, Artificial Sequence
  Description of Artificial Sequence: Synthetic oligonucleotide
caaagauaucuucugggcu

SEQ ID NO: 1975007 - RNA, 19 nt, Artificial Sequence
  Description of Artificial Sequence: Synthetic oligonucleotide
ucagugacaucaggacuug

SEQ ID NO: 1975008 - RNA, 19 nt, Artificial Sequence
  Description of Artificial Sequence: Synthetic oligonucleotide
gagaaauggcacgacucuc

SEQ ID NO: 1975009 - RNA, 19 nt, Artificial Sequence
  Description of Artificial Sequence: Synthetic oligonucleotide
gcaguaacaaaugaguucu

SEQ ID NO: 1975010 - RNA, 19 nt, Artificial Sequence
  Description of Artificial Sequence: Synthetic oligonucleotide
uuuccagcggauguguguu

SEQ ID NO: 1975011 - RNA, 19 nt, Artificial Sequence
  Description of Artificial Sequence: Synthetic oligonucleotide
agcuucggaucuuuguuuu

SEQ ID NO: 1975012 - RNA, 19 nt, Artificial Sequence
  Description of Artificial Sequence: Synthetic oligonucleotide
ugacuucgguugaguuugg

SEQ ID NO: 1975013 - RNA, 19 nt, Artificial Sequence
  Description of Artificial Sequence: Synthetic oligonucleotide
caagucugguucuagauuu

SEQ ID NO: 1975014 - RNA, 19 nt, Artificial Sequence
  Description of Artificial Sequence: Synthetic oligonucleotide
cuucuugggaaaucuccga

SEQ ID NO: 1975015 - RNA, 19 nt, Artificial Sequence
  Description of Artificial Sequence: Synthetic oligonucleotide
ugauacagaucagccucca

SEQ ID NO: 1975016 - RNA, 19 nt, Artificial Sequence
  Description of Artificial Sequence: Synthetic oligonucleotide
uuggaacuuugucuagguu

SEQ ID NO: 1975017 - RNA, 19 nt, Artificial Sequence
  Description of Artificial Sequence: Synthetic oligonucleotide
gguucuagauuuuguaucu

SEQ ID NO: 1975018 - RNA, 19 nt, Artificial Sequence
  Description of Artificial Sequence: Synthetic oligonucleotide
uggcacgacucucuagaaa

SEQ ID NO: 1975019 - RNA, 19 nt, Artificial Sequence
  Description of Artificial Sequence: Synthetic oligonucleotide
caggguuucuaaagacaug

SEQ ID NO: 1975020 - RNA, 19 nt, Artificial Sequence
  Description of Artificial Sequence: Synthetic oligonucleotide
acaucaggacuugaaaaua

SEQ ID NO: 1975021 - RNA, 19 nt, Artificial Sequence
  Description of Artificial Sequence: Synthetic oligonucleotide
ucuuuacaaacagcggcuu

SEQ ID NO: 1975022 - RNA, 19 nt, Artificial Sequence
  Description of Artificial Sequence: Synthetic oligonucleotide
gucccaagauucuucugca

SEQ ID NO: 1975023 - RNA, 19 nt, Artificial Sequence
  Description of Artificial Sequence: Synthetic oligonucleotide
augaugucuucucuuccua

SEQ ID NO: 1975024 - RNA, 19 nt, Artificial Sequence
  Description of Artificial Sequence: Synthetic oligonucleotide
ccgauucagaaacugucgc

SEQ ID NO: 1975025 - RNA, 19 nt, Artificial Sequence
  Description of Artificial Sequence: Synthetic oligonucleotide
uucucaaaucggccuugaa

SEQ ID NO: 1975026 - RNA, 19 nt, Artificial Sequence
  Description of Artificial Sequence: Synthetic oligonucleotide
gaaauggcacgacucucua

SEQ ID NO: 1975027 - RNA, 19 nt, Artificial Sequence
  Description of Artificial Sequence: Synthetic oligonucleotide
ggaggcaagccuuuccuuc

SEQ ID NO: 1975028 - RNA, 19 nt, Artificial Sequence
  Description of Artificial Sequence: Synthetic oligonucleotide
ccucuuucaaggugugagg

SEQ ID NO: 1975029 - RNA, 19 nt, Artificial Sequence
  Description of Artificial Sequence: Synthetic oligonucleotide
aauggccaucagucagggu

SEQ ID NO: 1975030 - RNA, 19 nt, Artificial Sequence
  Description of Artificial Sequence: Synthetic oligonucleotide
caccaagauaaaucuuuga

SEQ ID NO: 1975031 - RNA, 19 nt, Artificial Sequence
  Description of Artificial Sequence: Synthetic oligonucleotide
ccuuucagguuucaaguuc

SEQ ID NO: 1975032 - RNA, 19 nt, Artificial Sequence
  Description of Artificial Sequence: Synthetic oligonucleotide
acgacucucuagaaaagau

SEQ ID NO: 1975033 - RNA, 19 nt, Artificial Sequence
  Description of Artificial Sequence: Synthetic oligonucleotide
caaaucggccuugaacauc

SEQ ID NO: 1975034 - RNA, 19 nt, Artificial Sequence
  Description of Artificial Sequence: Synthetic oligonucleotide
guaugugucagauccugau

SEQ ID NO: 1975035 - RNA, 19 nt, Artificial Sequence
  Description of Artificial Sequence: Synthetic oligonucleotide
uccugaaaccaaugcuuuu

SEQ ID NO: 1975036 - RNA, 19 nt, Artificial Sequence
  Description of Artificial Sequence: Synthetic oligonucleotide
cugggugcaaugucaguga

SEQ ID NO: 1975037 - RNA, 19 nt, Artificial Sequence
  Description of Artificial Sequence: Synthetic oligonucleotide
caaucacacauuucucaaa

SEQ ID NO: 1975038 - RNA, 19 nt, Artificial Sequence
  Description of Artificial Sequence: Synthetic oligonucleotide
ugaaggaaccaagccuaaa

SEQ ID NO: 1975039 - RNA, 19 nt, Artificial Sequence
  Description of Artificial Sequence: Synthetic oligonucleotide
aaguuauguuggguucaga

SEQ ID NO: 1975040 - RNA, 19 nt, Artificial Sequence
  Description of Artificial Sequence: Synthetic oligonucleotide
guguucgugcuccucuuuc

SEQ ID NO: 1975041 - RNA, 19 nt, Artificial Sequence
  Description of Artificial Sequence: Synthetic oligonucleotide
uuccccugcagcugcugcu

SEQ ID NO: 1975042 - RNA, 19 nt, Artificial Sequence
  Description of Artificial Sequence: Synthetic oligonucleotide
auucagcaccaagauaaau

SEQ ID NO: 1975043 - RNA, 19 nt, Artificial Sequence
  Description of Artificial Sequence: Synthetic oligonucleotide
cuaacaacuuaugcaagcu

SEQ ID NO: 1975044 - RNA, 19 nt, Artificial Sequence
  Description of Artificial Sequence: Synthetic oligonucleotide
cuuuccauucugacuaccu

SEQ ID NO: 1975045 - RNA, 19 nt, Artificial Sequence
  Description of Artificial Sequence: Synthetic oligonucleotide
gguuucuaaagacauguuu

SEQ ID NO: 1975046 - RNA, 19 nt, Artificial Sequence
  Description of Artificial Sequence: Synthetic oligonucleotide
ucuuccuacugggugcaau

SEQ ID NO: 1975047 - RNA, 19 nt, Artificial Sequence
  Description of Artificial Sequence: Synthetic oligonucleotide
aaucuccgauucagaaacu

SEQ ID NO: 1975048 - RNA, 19 nt, Artificial Sequence
  Description of Artificial Sequence: Synthetic oligonucleotide
uucggaucuuuguuuucuu

SEQ ID NO: 1975049 - RNA, 19 nt, Artificial Sequence
  Description of Artificial Sequence: Synthetic oligonucleotide
cucuaaugacuucgguuga

SEQ ID NO: 1975050 - RNA, 19 nt, Artificial Sequence
  Description of Artificial Sequence: Synthetic oligonucleotide
cacuguuuccucccaagaa

SEQ ID NO: 1975051 - RNA, 19 nt, Artificial Sequence
  Description of Artificial Sequence: Synthetic oligonucleotide
gguugaguuuggaacuuug

SEQ ID NO: 1975052 - RNA, 19 nt, Artificial Sequence
  Description of Artificial Sequence: Synthetic oligonucleotide
gauucugcucacuuuucuu

SEQ ID NO: 1975053 - RNA, 19 nt, Artificial Sequence
  Description of Artificial Sequence: Synthetic oligonucleotide
aguccaggcugaauggcca

SEQ ID NO: 1975054 - RNA, 19 nt, Artificial Sequence
  Description of Artificial Sequence: Synthetic oligonucleotide
acaccaagucugguucuag

SEQ ID NO: 1975055 - RNA, 19 nt, Artificial Sequence
  Description of Artificial Sequence: Synthetic oligonucleotide
uacugggugcaaugucagu

SEQ ID NO: 1975056 - RNA, 19 nt, Artificial Sequence
  Description of Artificial Sequence: Synthetic oligonucleotide
gauacagaucagccuccaa

SEQ ID NO: 1975057 - RNA, 19 nt, Artificial Sequence
  Description of Artificial Sequence: Synthetic oligonucleotide
agccugucuucauuagaaa

SEQ ID NO: 1975058 - RNA, 19 nt, Artificial Sequence
  Description of Artificial Sequence: Synthetic oligonucleotide
ccugcggagccauuuuggg

SEQ ID NO: 1975059 - RNA, 19 nt, Artificial Sequence
  Description of Artificial Sequence: Synthetic oligonucleotide
ucaaggugugaggcaguga

SEQ ID NO: 1975060 - RNA, 19 nt, Artificial Sequence
  Description of Artificial Sequence: Synthetic oligonucleotide
cugcuggauuucaucuaac

SEQ ID NO: 1975061 - RNA, 19 nt, Artificial Sequence
  Description of Artificial Sequence: Synthetic oligonucleotide
gggagaaauggcacgacuc

SEQ ID NO: 1975062 - RNA, 19 nt, Artificial Sequence
  Description of Artificial Sequence: Synthetic oligonucleotide
ccugaaaccaaugcuuuuc

SEQ ID NO: 1975063 - RNA, 19 nt, Artificial Sequence
  Description of Artificial Sequence: Synthetic oligonucleotide
gugucagauccugauccug

SEQ ID NO: 1975064 - RNA, 19 nt, Artificial Sequence
  Description of Artificial Sequence: Synthetic oligonucleotide
aggcaguaacaaaugaguu

SEQ ID NO: 1975065 - RNA, 19 nt, Artificial Sequence
  Description of Artificial Sequence: Synthetic oligonucleotide
ucccaagauucuucugcau

SEQ ID NO: 1975066 - RNA, 19 nt, Artificial Sequence
  Description of Artificial Sequence: Synthetic oligonucleotide
uccaaucucucaggagccu

SEQ ID NO: 1975067 - RNA, 19 nt, Artificial Sequence
  Description of Artificial Sequence: Synthetic oligonucleotide
guuuccagcggaugugugu

SEQ ID NO: 1975068 - RNA, 19 nt, Artificial Sequence
  Description of Artificial Sequence: Synthetic oligonucleotide
cuccugcggagccauuuug

SEQ ID NO: 1975069 - RNA, 19 nt, Artificial Sequence
  Description of Artificial Sequence: Synthetic oligonucleotide
caguaacaaaugaguucuc

SEQ ID NO: 1975070 - RNA, 19 nt, Artificial Sequence
  Description of Artificial Sequence: Synthetic oligonucleotide
ggagaaauggcacgacucu

SEQ ID NO: 1975071 - RNA, 19 nt, Artificial Sequence
  Description of Artificial Sequence: Synthetic oligonucleotide
cugguucuagauuuuguau

SEQ ID NO: 1975072 - RNA, 19 nt, Artificial Sequence
  Description of Artificial Sequence: Synthetic oligonucleotide
uuucugcaaugguguccag

SEQ ID NO: 1975073 - RNA, 19 nt, Artificial Sequence
  Description of Artificial Sequence: Synthetic oligonucleotide
cacgacucucuagaaaaga

SEQ ID NO: 1975074 - RNA, 19 nt, Artificial Sequence
  Description of Artificial Sequence: Synthetic oligonucleotide
ugacuaccucuaagugacu

SEQ ID NO: 1975075 - RNA, 19 nt, Artificial Sequence
  Description of Artificial Sequence: Synthetic oligonucleotide
caucaguacuuccaucaua

SEQ ID NO: 1975076 - RNA, 19 nt, Artificial Sequence
  Description of Artificial Sequence: Synthetic oligonucleotide
agaaacugucgcaguccag

SEQ ID NO: 1975077 - RNA, 19 nt, Artificial Sequence
  Description of Artificial Sequence: Synthetic oligonucleotide
gaacaccaagucugguucu

SEQ ID NO: 1975078 - RNA, 19 nt, Artificial Sequence
  Description of Artificial Sequence: Synthetic oligonucleotide
uaugcaagcuucggaucuu

SEQ ID NO: 1975079 - RNA, 19 nt, Artificial Sequence
  Description of Artificial Sequence: Synthetic oligonucleotide
cucauucagcaccaagaua

SEQ ID NO: 1975080 - RNA, 19 nt, Artificial Sequence
  Description of Artificial Sequence: Synthetic oligonucleotide
ucccacuguuuccucccaa

SEQ ID NO: 1975081 - RNA, 19 nt, Artificial Sequence
  Description of Artificial Sequence: Synthetic oligonucleotide
ggguaauaacaaaaccaga

SEQ ID NO: 1975082 - RNA, 19 nt, Artificial Sequence
  Description of Artificial Sequence: Synthetic oligonucleotide
guucgugcuccucuuucaa

SEQ ID NO: 1975083 - RNA, 19 nt, Artificial Sequence
  Description of Artificial Sequence: Synthetic oligonucleotide
caccaagucugguucuaga

SEQ ID NO: 1975084 - RNA, 19 nt, Artificial Sequence
  Description of Artificial Sequence: Synthetic oligonucleotide
gucuagguugaaggaacca

SEQ ID NO: 1975085 - RNA, 19 nt, Artificial Sequence
  Description of Artificial Sequence: Synthetic oligonucleotide
aaauugcaucuuggucagu

SEQ ID NO: 1975086 - RNA, 19 nt, Artificial Sequence
  Description of Artificial Sequence: Synthetic oligonucleotide
cagaucagccuccaaggcu

SEQ ID NO: 1975087 - RNA, 19 nt, Artificial Sequence
  Description of Artificial Sequence: Synthetic oligonucleotide
cauucagcaccaagauaaa

SEQ ID NO: 1975088 - RNA, 19 nt, Artificial Sequence
  Description of Artificial Sequence: Synthetic oligonucleotide
guagcuuaaugaacaccaa

SEQ ID NO: 1975089 - RNA, 19 nt, Artificial Sequence
  Description of Artificial Sequence: Synthetic oligonucleotide
cggccuugaacaucguucc

SEQ ID NO: 1975090 - RNA, 19 nt, Artificial Sequence
  Description of Artificial Sequence: Synthetic oligonucleotide
caagcuucggaucuuuguu

SEQ ID NO: 1975091 - RNA, 19 nt, Artificial Sequence
  Description of Artificial Sequence: Synthetic oligonucleotide
gaacaucguuccaaucucu

SEQ ID NO: 1975092 - RNA, 19 nt, Artificial Sequence
  Description of Artificial Sequence: Synthetic oligonucleotide
acagcggcuucagccaaca

SEQ ID NO: 1975093 - RNA, 19 nt, Artificial Sequence
  Description of Artificial Sequence: Synthetic oligonucleotide
agacauguuuccagcggau

SEQ ID NO: 1975094 - RNA, 19 nt, Artificial Sequence
  Description of Artificial Sequence: Synthetic oligonucleotide
cuucggaucuuuguuuucu

SEQ ID NO: 1975095 - RNA, 19 nt, Artificial Sequence
  Description of Artificial Sequence: Synthetic oligonucleotide
uuccagcggauguguguuc

SEQ ID NO: 1975096 - RNA, 19 nt, Artificial Sequence
  Description of Artificial Sequence: Synthetic oligonucleotide
cagcggauguguguucgug

SEQ ID NO: 1975097 - RNA, 19 nt, Artificial Sequence
  Description of Artificial Sequence: Synthetic oligonucleotide
cagaucccacuguuuccuc

SEQ ID NO: 1975098 - RNA, 19 nt, Artificial Sequence
  Description of Artificial Sequence: Synthetic oligonucleotide
cauuucucaaaucggccuu

SEQ ID NO: 1975099 - RNA, 19 nt, Artificial Sequence
  Description of Artificial Sequence: Synthetic oligonucleotide
aggagccuaucguuuucuu

SEQ ID NO: 1975100 - RNA, 19 nt, Artificial Sequence
  Description of Artificial Sequence: Synthetic oligonucleotide
cuaaugacuucgguugagu

SEQ ID NO: 1975101 - RNA, 19 nt, Artificial Sequence
  Description of Artificial Sequence: Synthetic oligonucleotide
auguuggguucagaagcaa

SEQ ID NO: 1975102 - RNA, 19 nt, Artificial Sequence
  Description of Artificial Sequence: Synthetic oligonucleotide
gcagugaggaggcaagccu

SEQ ID NO: 1975103 - RNA, 19 nt, Artificial Sequence
  Description of Artificial Sequence: Synthetic oligonucleotide
ggcaagccuuuccuucccc

SEQ ID NO: 1975104 - RNA, 19 nt, Artificial Sequence
  Description of Artificial Sequence: Synthetic oligonucleotide
cucucaggagccuaucguu

SEQ ID NO: 1975105 - RNA, 19 nt, Artificial Sequence
  Description of Artificial Sequence: Synthetic oligonucleotide
gcacgacucucuagaaaag

SEQ ID NO: 1975106 - RNA, 19 nt, Artificial Sequence
  Description of Artificial Sequence: Synthetic oligonucleotide
guucuagauuuuguaucua

SEQ ID NO: 1975107 - RNA, 19 nt, Artificial Sequence
  Description of Artificial Sequence: Synthetic oligonucleotide
gacuucgguugaguuugga

SEQ ID NO: 1975108 - RNA, 19 nt, Artificial Sequence
  Description of Artificial Sequence: Synthetic oligonucleotide
gggaaaucuccgauucaga

SEQ ID NO: 1975109 - RNA, 19 nt, Artificial Sequence
  Description of Artificial Sequence: Synthetic oligonucleotide
gccuugaacaucguuccaa

SEQ ID NO: 1975110 - RNA, 19 nt, Artificial Sequence
  Description of Artificial Sequence: Synthetic oligonucleotide
cgauucagaaacugucgca

SEQ ID NO: 1975111 - RNA, 19 nt, Artificial Sequence
  Description of Artificial Sequence: Synthetic oligonucleotide
gaacuuugucuagguugaa

SEQ ID NO: 1975112 - RNA, 19 nt, Artificial Sequence
  Description of Artificial Sequence: Synthetic oligonucleotide
cauugcuacuaagcugaaa

SEQ ID NO: 1975113 - RNA, 19 nt, Artificial Sequence
  Description of Artificial Sequence: Synthetic oligonucleotide
cccaagauucuucugcaua

SEQ ID NO: 1975114 - RNA, 19 nt, Artificial Sequence
  Description of Artificial Sequence: Synthetic oligonucleotide
gcuucggaucuuuguuuuc

SEQ ID NO: 1975115 - RNA, 19 nt, Artificial Sequence
  Description of Artificial Sequence: Synthetic oligonucleotide
cugcggagccauuuugggu

SEQ ID NO: 1975116 - RNA, 19 nt, Artificial Sequence
  Description of Artificial Sequence: Synthetic oligonucleotide
aaucggccuugaacaucgu

SEQ ID NO: 1975117 - RNA, 19 nt, Artificial Sequence
  Description of Artificial Sequence: Synthetic oligonucleotide
cucaggagccuaucguuuu

SEQ ID NO: 1975118 - RNA, 19 nt, Artificial Sequence
  Description of Artificial Sequence: Synthetic oligonucleotide
cagugaggaggcaagccuu

SEQ ID NO: 1975119 - RNA, 19 nt, Artificial Sequence
  Description of Artificial Sequence: Synthetic oligonucleotide
gugcaaugucagugacauc

SEQ ID NO: 1975120 - RNA, 19 nt, Artificial Sequence
  Description of Artificial Sequence: Synthetic oligonucleotide
agccuaaaugagacaucuu

SEQ ID NO: 1975121 - RNA, 19 nt, Artificial Sequence
  Description of Artificial Sequence: Synthetic oligonucleotide
ggagccuaucguuuucuuu

SEQ ID NO: 1975122 - RNA, 19 nt, Artificial Sequence
  Description of Artificial Sequence: Synthetic oligonucleotide
ggccuugaacaucguucca

SEQ ID NO: 1975123 - RNA, 19 nt, Artificial Sequence
  Description of Artificial Sequence: Synthetic oligonucleotide
cagcggcuucagccaacac

SEQ ID NO: 1975124 - RNA, 19 nt, Artificial Sequence
  Description of Artificial Sequence: Synthetic oligonucleotide
caggagccuaucguuuucu

SEQ ID NO: 1975125 - RNA, 19 nt, Artificial Sequence
  Description of Artificial Sequence: Synthetic oligonucleotide
cagugacaucaggacuuga

SEQ ID NO: 1975126 - RNA, 19 nt, Artificial Sequence
  Description of Artificial Sequence: Synthetic oligonucleotide
ccaagucugguucuagauu

SEQ ID NO: 1975127 - RNA, 19 nt, Artificial Sequence
  Description of Artificial Sequence: Synthetic oligonucleotide
ccucuaagugacuccacuu

SEQ ID NO: 1975128 - RNA, 19 nt, Artificial Sequence
  Description of Artificial Sequence: Synthetic oligonucleotide
ccauucugacuaccucuaa

SEQ ID NO: 1975129 - RNA, 19 nt, Artificial Sequence
  Description of Artificial Sequence: Synthetic oligonucleotide
cacuuccgcucuccucaaa

SEQ ID NO: 1975130 - RNA, 19 nt, Artificial Sequence
  Description of Artificial Sequence: Synthetic oligonucleotide
ggauuucaucuaacaacuu

SEQ ID NO: 1975131 - RNA, 19 nt, Artificial Sequence
  Description of Artificial Sequence: Synthetic oligonucleotide
ccaaucucucaggagccua

SEQ ID NO: 1975132 - RNA, 19 nt, Artificial Sequence
  Description of Artificial Sequence: Synthetic oligonucleotide
ccauugcuacuaagcugaa

SEQ ID NO: 1975133 - RNA, 19 nt, Artificial Sequence
  Description of Artificial Sequence: Synthetic oligonucleotide
gccaucagucaggguaaua

SEQ ID NO: 1975134 - RNA, 19 nt, Artificial Sequence
  Description of Artificial Sequence: Synthetic oligonucleotide
gcuccugcggagccauuuu

SEQ ID NO: 1975135 - RNA, 19 nt, Artificial Sequence
  Description of Artificial Sequence: Synthetic oligonucleotide
ccacuuccgcucuccucaa

SEQ ID NO: 1975136 - RNA, 19 nt, Artificial Sequence
  Description of Artificial Sequence: Synthetic oligonucleotide
ccaaggcuucuuuggcaau

SEQ ID NO: 1975137 - RNA, 19 nt, Artificial Sequence
  Description of Artificial Sequence: Synthetic oligonucleotide
ccagcggauguguguucgu

SEQ ID NO: 1975138 - RNA, 19 nt, Artificial Sequence
  Description of Artificial Sequence: Synthetic oligonucleotide
cgguugaguuuggaacuuu

SEQ ID NO: 1975139 - RNA, 19 nt, Artificial Sequence
  Description of Artificial Sequence: Synthetic oligonucleotide
gauaaagacaugaagaacc

SEQ ID NO: 1975140 - RNA, 19 nt, Artificial Sequence
  Description of Artificial Sequence: Synthetic oligonucleotide
gaucaugaaucacagaugg

SEQ ID NO: 1975141 - RNA, 19 nt, Artificial Sequence
  Description of Artificial Sequence: Synthetic oligonucleotide
aguucuaaaacagagacuc

SEQ ID NO: 1975142 - RNA, 19 nt, Artificial Sequence
  Description of Artificial Sequence: Synthetic oligonucleotide
aaagucacgagcuaggacu

SEQ ID NO: 1975143 - RNA, 19 nt, Artificial Sequence
  Description of Artificial Sequence: Synthetic oligonucleotide
uccuuaaacauuuucacag

SEQ ID NO: 1975144 - RNA, 19 nt, Artificial Sequence
  Description of Artificial Sequence: Synthetic oligonucleotide
aaaacgguugugcaaaauc

SEQ ID NO: 1975145 - RNA, 19 nt, Artificial Sequence
  Description of Artificial Sequence: Synthetic oligonucleotide
aagagaucccuacagcacc

SEQ ID NO: 1975146 - RNA, 19 nt, Artificial Sequence
  Description of Artificial Sequence: Synthetic oligonucleotide
aacuuacugagauuucacc

SEQ ID NO: 1975147 - RNA, 19 nt, Artificial Sequence
  Description of Artificial Sequence: Synthetic oligonucleotide
ucaguucuaaaacagagac

SEQ ID NO: 1975148 - RNA, 19 nt, Artificial Sequence
  Description of Artificial Sequence: Synthetic oligonucleotide
uuugaaaaccccgauaucc

SEQ ID NO: 1975149 - RNA, 19 nt, Artificial Sequence
  Description of Artificial Sequence: Synthetic oligonucleotide
uccuucaucacgaagaagu

SEQ ID NO: 1975150 - RNA, 19 nt, Artificial Sequence
  Description of Artificial Sequence: Synthetic oligonucleotide
aaacgguugugcaaaaucc

SEQ ID NO: 1975151 - RNA, 19 nt, Artificial Sequence
  Description of Artificial Sequence: Synthetic oligonucleotide
uucuucacaagacaguaag

SEQ ID NO: 1975152 - RNA, 19 nt, Artificial Sequence
  Description of Artificial Sequence: Synthetic oligonucleotide
ugaguucaaagaccgaugg

SEQ ID NO: 1975153 - RNA, 19 nt, Artificial Sequence
  Description of Artificial Sequence: Synthetic oligonucleotide
ucuguagagaagcaggcag

SEQ ID NO: 1975154 - RNA, 19 nt, Artificial Sequence
  Description of Artificial Sequence: Synthetic oligonucleotide
ucacaagacaguaaguggc

SEQ ID NO: 1975155 - RNA, 19 nt, Artificial Sequence
  Description of Artificial Sequence: Synthetic oligonucleotide
uucacaagacaguaagugg

SEQ ID NO: 1975156 - RNA, 19 nt, Artificial Sequence
  Description of Artificial Sequence: Synthetic oligonucleotide
aaccccgauauccuuaaac

SEQ ID NO: 1975157 - RNA, 19 nt, Artificial Sequence
  Description of Artificial Sequence: Synthetic oligonucleotide
aagugaaucuuuaaucaac

SEQ ID NO: 1975158 - RNA, 19 nt, Artificial Sequence
  Description of Artificial Sequence: Synthetic oligonucleotide
aaguugaguucaaagaccg

SEQ ID NO: 1975159 - RNA, 19 nt, Artificial Sequence
  Description of Artificial Sequence: Synthetic oligonucleotide
ucagcguacgcauacaggc

SEQ ID NO: 1975160 - RNA, 19 nt, Artificial Sequence
  Description of Artificial Sequence: Synthetic oligonucleotide
caucauuaggccuugcagg

SEQ ID NO: 1975161 - RNA, 19 nt, Artificial Sequence
  Description of Artificial Sequence: Synthetic oligonucleotide
aaugugaguggacaugaug

SEQ ID NO: 1975162 - RNA, 19 nt, Artificial Sequence
  Description of Artificial Sequence: Synthetic oligonucleotide
uauccuuaaacauuuucac

SEQ ID NO: 1975163 - RNA, 19 nt, Artificial Sequence
  Description of Artificial Sequence: Synthetic oligonucleotide
aacccauugcuguagaagu

SEQ ID NO: 1975164 - RNA, 19 nt, Artificial Sequence
  Description of Artificial Sequence: Synthetic oligonucleotide
uacgcauacaggcugcagg

SEQ ID NO: 1975165 - RNA, 19 nt, Artificial Sequence
  Description of Artificial Sequence: Synthetic oligonucleotide
guagaaguugaguucaaag

SEQ ID NO: 1975166 - RNA, 19 nt, Artificial Sequence
  Description of Artificial Sequence: Synthetic oligonucleotide
aauauacuccaggaguuuc

SEQ ID NO: 1975167 - RNA, 19 nt, Artificial Sequence
  Description of Artificial Sequence: Synthetic oligonucleotide
ucugaauucccugagaauc

SEQ ID NO: 1975168 - RNA, 19 nt, Artificial Sequence
  Description of Artificial Sequence: Synthetic oligonucleotide
uuuaaucaacuccaaaaua

SEQ ID NO: 1975169 - RNA, 19 nt, Artificial Sequence
  Description of Artificial Sequence: Synthetic oligonucleotide
agaaucccaggucaaaguc

SEQ ID NO: 1975170 - RNA, 19 nt, Artificial Sequence
  Description of Artificial Sequence: Synthetic oligonucleotide
uaaucaacuccaaaauaac

SEQ ID NO: 1975171 - RNA, 19 nt, Artificial Sequence
  Description of Artificial Sequence: Synthetic oligonucleotide
augauaaagacaugaagaa

SEQ ID NO: 1975172 - RNA, 19 nt, Artificial Sequence
  Description of Artificial Sequence: Synthetic oligonucleotide
ucugcuguguuucugggcu

SEQ ID NO: 1975173 - RNA, 19 nt, Artificial Sequence
  Description of Artificial Sequence: Synthetic oligonucleotide
acuuacugagauuucaccu

SEQ ID NO: 1975174 - RNA, 19 nt, Artificial Sequence
  Description of Artificial Sequence: Synthetic oligonucleotide
acaugaagaacccauugcu

SEQ ID NO: 1975175 - RNA, 19 nt, Artificial Sequence
  Description of Artificial Sequence: Synthetic oligonucleotide
aaggcacgcaucuuccugg

SEQ ID NO: 1975176 - RNA, 19 nt, Artificial Sequence
  Description of Artificial Sequence: Synthetic oligonucleotide
uuugcaaucagccgucuuc

SEQ ID NO: 1975177 - RNA, 19 nt, Artificial Sequence
  Description of Artificial Sequence: Synthetic oligonucleotide
uuccgcagcauucugauaa

SEQ ID NO: 1975178 - RNA, 19 nt, Artificial Sequence
  Description of Artificial Sequence: Synthetic oligonucleotide
ugaucaugaaucacagaug

SEQ ID NO: 1975179 - RNA, 19 nt, Artificial Sequence
  Description of Artificial Sequence: Synthetic oligonucleotide
ucaaggaaaacgguugugc

SEQ ID NO: 1975180 - RNA, 19 nt, Artificial Sequence
  Description of Artificial Sequence: Synthetic oligonucleotide
uccacucugacauagccgu

SEQ ID NO: 1975181 - RNA, 19 nt, Artificial Sequence
  Description of Artificial Sequence: Synthetic oligonucleotide
gauauccuuaaacauuuuc

SEQ ID NO: 1975182 - RNA, 19 nt, Artificial Sequence
  Description of Artificial Sequence: Synthetic oligonucleotide
ucugauaaccccucucgcc

SEQ ID NO: 1975183 - RNA, 19 nt, Artificial Sequence
  Description of Artificial Sequence: Synthetic oligonucleotide
augaagaacccauugcugu

SEQ ID NO: 1975184 - RNA, 19 nt, Artificial Sequence
  Description of Artificial Sequence: Synthetic oligonucleotide
aaagacaugaagaacccau

SEQ ID NO: 1975185 - RNA, 19 nt, Artificial Sequence
  Description of Artificial Sequence: Synthetic oligonucleotide
acgcauacaggcugcaggc

SEQ ID NO: 1975186 - RNA, 19 nt, Artificial Sequence
  Description of Artificial Sequence: Synthetic oligonucleotide
aggaguuucugccgguugc

SEQ ID NO: 1975187 - RNA, 19 nt, Artificial Sequence
  Description of Artificial Sequence: Synthetic oligonucleotide
aaugugcucgcccagguuu

SEQ ID NO: 1975188 - RNA, 19 nt, Artificial Sequence
  Description of Artificial Sequence: Synthetic oligonucleotide
aguaaguggcacucucagc

SEQ ID NO: 1975189 - RNA, 19 nt, Artificial Sequence
  Description of Artificial Sequence: Synthetic oligonucleotide
gauugugacacaguuuccc

SEQ ID NO: 1975190 - RNA, 19 nt, Artificial Sequence
  Description of Artificial Sequence: Synthetic oligonucleotide
uugaguucaaagaccgaug

SEQ ID NO: 1975191 - RNA, 19 nt, Artificial Sequence
  Description of Artificial Sequence: Synthetic oligonucleotide
aauaacuuacugagauuuc

SEQ ID NO: 1975192 - RNA, 19 nt, Artificial Sequence
  Description of Artificial Sequence: Synthetic oligonucleotide
aaacagagacucuuuucgu

SEQ ID NO: 1975193 - RNA, 19 nt, Artificial Sequence
  Description of Artificial Sequence: Synthetic oligonucleotide
auauccuuaaacauuuuca

SEQ ID NO: 1975194 - RNA, 19 nt, Artificial Sequence
  Description of Artificial Sequence: Synthetic oligonucleotide
cuagugaucaugaaucaca

SEQ ID NO: 1975195 - RNA, 19 nt, Artificial Sequence
  Description of Artificial Sequence: Synthetic oligonucleotide
accgaugggacaguugugc

SEQ ID NO: 1975196 - RNA, 19 nt, Artificial Sequence
  Description of Artificial Sequence: Synthetic oligonucleotide
uucaccuaguaaccuagug

SEQ ID NO: 1975197 - RNA, 19 nt, Artificial Sequence
  Description of Artificial Sequence: Synthetic oligonucleotide
uaacuuacugagauuucac

SEQ ID NO: 1975198 - RNA, 19 nt, Artificial Sequence
  Description of Artificial Sequence: Synthetic oligonucleotide
ugauaaagacaugaagaac

SEQ ID NO: 1975199 - RNA, 19 nt, Artificial Sequence
  Description of Artificial Sequence: Synthetic oligonucleotide
agaccgaugggacaguugu

SEQ ID NO: 1975200 - RNA, 19 nt, Artificial Sequence
  Description of Artificial Sequence: Synthetic oligonucleotide
aaguauuccuucaaggaaa

SEQ ID NO: 1975201 - RNA, 19 nt, Artificial Sequence
  Description of Artificial Sequence: Synthetic oligonucleotide
acucucagcguacgcauac

SEQ ID NO: 1975202 - RNA, 19 nt, Artificial Sequence
  Description of Artificial Sequence: Synthetic oligonucleotide
cuugcuccagagaaagggg

SEQ ID NO: 1975203 - RNA, 19 nt, Artificial Sequence
  Description of Artificial Sequence: Synthetic oligonucleotide
uucacagcguucuucacaa

SEQ ID NO: 1975204 - RNA, 19 nt, Artificial Sequence
  Description of Artificial Sequence: Synthetic oligonucleotide
aucauuaggccuugcagga

SEQ ID NO: 1975205 - RNA, 19 nt, Artificial Sequence
  Description of Artificial Sequence: Synthetic oligonucleotide
aaggaaaacgguugugcaa

SEQ ID NO: 1975206 - RNA, 19 nt, Artificial Sequence
  Description of Artificial Sequence: Synthetic oligonucleotide
uggauagcaugcaugacua

SEQ ID NO: 1975207 - RNA, 19 nt, Artificial Sequence
  Description of Artificial Sequence: Synthetic oligonucleotide
auaacuuacugagauuuca

SEQ ID NO: 1975208 - RNA, 19 nt, Artificial Sequence
  Description of Artificial Sequence: Synthetic oligonucleotide
ucucgucccuacuuaaaag

SEQ ID NO: 1975209 - RNA, 19 nt, Artificial Sequence
  Description of Artificial Sequence: Synthetic oligonucleotide
aauucccugagaaucccag

SEQ ID NO: 1975210 - RNA, 19 nt, Artificial Sequence
  Description of Artificial Sequence: Synthetic oligonucleotide
gugaucaugaaucacagau

SEQ ID NO: 1975211 - RNA, 19 nt, Artificial Sequence
  Description of Artificial Sequence: Synthetic oligonucleotide
cugagguaggaaaguaccg

SEQ ID NO: 1975212 - RNA, 19 nt, Artificial Sequence
  Description of Artificial Sequence: Synthetic oligonucleotide
ugugaguggacaugauggc

SEQ ID NO: 1975213 - RNA, 19 nt, Artificial Sequence
  Description of Artificial Sequence: Synthetic oligonucleotide
ucucagcguacgcauacag

SEQ ID NO: 1975214 - RNA, 19 nt, Artificial Sequence
  Description of Artificial Sequence: Synthetic oligonucleotide
uuacaaaucucgucccuac

SEQ ID NO: 1975215 - RNA, 19 nt, Artificial Sequence
  Description of Artificial Sequence: Synthetic oligonucleotide
uugcaaucagccgucuucg

SEQ ID NO: 1975216 - RNA, 19 nt, Artificial Sequence
  Description of Artificial Sequence: Synthetic oligonucleotide
uucugauaaccccucucgc

SEQ ID NO: 1975217 - RNA, 19 nt, Artificial Sequence
  Description of Artificial Sequence: Synthetic oligonucleotide
ucgucccuacuuaaaagug

SEQ ID NO: 1975218 - RNA, 19 nt, Artificial Sequence
  Description of Artificial Sequence: Synthetic oligonucleotide
agcaugcaugacuacaucu

SEQ ID NO: 1975219 - RNA, 19 nt, Artificial Sequence
  Description of Artificial Sequence: Synthetic oligonucleotide
ugguagcagagcuugcucc

SEQ ID NO: 1975220 - RNA, 19 nt, Artificial Sequence
  Description of Artificial Sequence: Synthetic oligonucleotide
gaguucaaagaccgauggg

SEQ ID NO: 1975221 - RNA, 19 nt, Artificial Sequence
  Description of Artificial Sequence: Synthetic oligonucleotide
accccgauauccuuaaaca

SEQ ID NO: 1975222 - RNA, 19 nt, Artificial Sequence
  Description of Artificial Sequence: Synthetic oligonucleotide
aaggggagcggacguuggc

SEQ ID NO: 1975223 - RNA, 19 nt, Artificial Sequence
  Description of Artificial Sequence: Synthetic oligonucleotide
aaaaccccgauauccuuaa

SEQ ID NO: 1975224 - RNA, 19 nt, Artificial Sequence
  Description of Artificial Sequence: Synthetic oligonucleotide
guuucugccgguugcacug

SEQ ID NO: 1975225 - RNA, 19 nt, Artificial Sequence
  Description of Artificial Sequence: Synthetic oligonucleotide
agacucuuuucguuugguc

SEQ ID NO: 1975226 - RNA, 19 nt, Artificial Sequence
  Description of Artificial Sequence: Synthetic oligonucleotide
aaaucucgucccuacuuaa

SEQ ID NO: 1975227 - RNA, 19 nt, Artificial Sequence
  Description of Artificial Sequence: Synthetic oligonucleotide
uaccgcucaguucuaaaac

SEQ ID NO: 1975228 - RNA, 19 nt, Artificial Sequence
  Description of Artificial Sequence: Synthetic oligonucleotide
auuucaccuaguaaccuag

SEQ ID NO: 1975229 - RNA, 19 nt, Artificial Sequence
  Description of Artificial Sequence: Synthetic oligonucleotide
caacuccaaaauaacuuac

SEQ ID NO: 1975230 - RNA, 19 nt, Artificial Sequence
  Description of Artificial Sequence: Synthetic oligonucleotide
cuuccuggaggucuccucg

SEQ ID NO: 1975231 - RNA, 19 nt, Artificial Sequence
  Description of Artificial Sequence: Synthetic oligonucleotide
cauuaggccuugcaggaag

SEQ ID NO: 1975232 - RNA, 19 nt, Artificial Sequence
  Description of Artificial Sequence: Synthetic oligonucleotide
agugaaucuuuaaucaacu

SEQ ID NO: 1975233 - RNA, 19 nt, Artificial Sequence
  Description of Artificial Sequence: Synthetic oligonucleotide
ucugacauagccguaguuu

SEQ ID NO: 1975234 - RNA, 19 nt, Artificial Sequence
  Description of Artificial Sequence: Synthetic oligonucleotide
auugugacacaguuuccca

SEQ ID NO: 1975235 - RNA, 19 nt, Artificial Sequence
  Description of Artificial Sequence: Synthetic oligonucleotide
uuuuccgcagcauucugau

SEQ ID NO: 1975236 - RNA, 19 nt, Artificial Sequence
  Description of Artificial Sequence: Synthetic oligonucleotide
ucgucuuuccugcuagugu

SEQ ID NO: 1975237 - RNA, 19 nt, Artificial Sequence
  Description of Artificial Sequence: Synthetic oligonucleotide
uggcuuucuaaguauuccu

SEQ ID NO: 1975238 - RNA, 19 nt, Artificial Sequence
  Description of Artificial Sequence: Synthetic oligonucleotide
gaaggcacgcaucuuccug

SEQ ID NO: 1975239 - RNA, 19 nt, Artificial Sequence
  Description of Artificial Sequence: Synthetic oligonucleotide
agagacucuuuucguuugg

SEQ ID NO: 1975240 - RNA, 19 nt, Artificial Sequence
  Description of Artificial Sequence: Synthetic oligonucleotide
acgugucuucacuuucagc

SEQ ID NO: 1975241 - RNA, 19 nt, Artificial Sequence
  Description of Artificial Sequence: Synthetic oligonucleotide
agcguacgcauacaggcug

SEQ ID NO: 1975242 - RNA, 19 nt, Artificial Sequence
  Description of Artificial Sequence: Synthetic oligonucleotide
acaaugugaguggacauga

SEQ ID NO: 1975243 - RNA, 19 nt, Artificial Sequence
  Description of Artificial Sequence: Synthetic oligonucleotide
gucaaagucacgagcuagg

SEQ ID NO: 1975244 - RNA, 19 nt, Artificial Sequence
  Description of Artificial Sequence: Synthetic oligonucleotide
ugauugugacacaguuucc

SEQ ID NO: 1975245 - RNA, 19 nt, Artificial Sequence
  Description of Artificial Sequence: Synthetic oligonucleotide
caguaaguggcacucucag

SEQ ID NO: 1975246 - RNA, 19 nt, Artificial Sequence
  Description of Artificial Sequence: Synthetic oligonucleotide
aaauucgucuuuccugcua

SEQ ID NO: 1975247 - RNA, 19 nt, Artificial Sequence
  Description of Artificial Sequence: Synthetic oligonucleotide
agacucagcuccucccucg

SEQ ID NO: 1975248 - RNA, 19 nt, Artificial Sequence
  Description of Artificial Sequence: Synthetic oligonucleotide
accgcucaguucuaaaaca

SEQ ID NO: 1975249 - RNA, 19 nt, Artificial Sequence
  Description of Artificial Sequence: Synthetic oligonucleotide
agcuaggacuuccuccuuc

SEQ ID NO: 1975250 - RNA, 19 nt, Artificial Sequence
  Description of Artificial Sequence: Synthetic oligonucleotide
agcguucuucacaagacag

SEQ ID NO: 1975251 - RNA, 19 nt, Artificial Sequence
  Description of Artificial Sequence: Synthetic oligonucleotide
acaaaucucgucccuacuu

SEQ ID NO: 1975252 - RNA, 19 nt, Artificial Sequence
  Description of Artificial Sequence: Synthetic oligonucleotide
acuuuggcuuucuaaguau

SEQ ID NO: 1975253 - RNA, 19 nt, Artificial Sequence
  Description of Artificial Sequence: Synthetic oligonucleotide
ucccaggucaaagucacga

SEQ ID NO: 1975254 - RNA, 19 nt, Artificial Sequence
  Description of Artificial Sequence: Synthetic oligonucleotide
acugagauuucaccuagua

SEQ ID NO: 1975255 - RNA, 19 nt, Artificial Sequence
  Description of Artificial Sequence: Synthetic oligonucleotide
uggucucuuugaaaacccc

SEQ ID NO: 1975256 - RNA, 19 nt, Artificial Sequence
  Description of Artificial Sequence: Synthetic oligonucleotide
acuugcuagcagugaagag

SEQ ID NO: 1975257 - RNA, 19 nt, Artificial Sequence
  Description of Artificial Sequence: Synthetic oligonucleotide
agagguggauucccugccg

SEQ ID NO: 1975258 - RNA, 19 nt, Artificial Sequence
  Description of Artificial Sequence: Synthetic oligonucleotide
ucucuuugaaaaccccgau

SEQ ID NO: 1975259 - RNA, 19 nt, Artificial Sequence
  Description of Artificial Sequence: Synthetic oligonucleotide
aagaacccauugcuguaga

SEQ ID NO: 1975260 - RNA, 19 nt, Artificial Sequence
  Description of Artificial Sequence: Synthetic oligonucleotide
uuuacaaaucucgucccua

SEQ ID NO: 1975261 - RNA, 19 nt, Artificial Sequence
  Description of Artificial Sequence: Synthetic oligonucleotide
auggcgcaggacuugcuag

SEQ ID NO: 1975262 - RNA, 19 nt, Artificial Sequence
  Description of Artificial Sequence: Synthetic oligonucleotide
aucaugaaucacagauggc

SEQ ID NO: 1975263 - RNA, 19 nt, Artificial Sequence
  Description of Artificial Sequence: Synthetic oligonucleotide
gacgugucuucacuuucag

SEQ ID NO: 1975264 - RNA, 19 nt, Artificial Sequence
  Description of Artificial Sequence: Synthetic oligonucleotide
ucaaagucacgagcuagga

SEQ ID NO: 1975265 - RNA, 19 nt, Artificial Sequence
  Description of Artificial Sequence: Synthetic oligonucleotide
ugugacuguguugggagga

SEQ ID NO: 1975266 - RNA, 19 nt, Artificial Sequence
  Description of Artificial Sequence: Synthetic oligonucleotide
uacaaaucucgucccuacu

SEQ ID NO: 1975267 - RNA, 19 nt, Artificial Sequence
  Description of Artificial Sequence: Synthetic oligonucleotide
agcaucauuaggccuugca

SEQ ID NO: 1975268 - RNA, 19 nt, Artificial Sequence
  Description of Artificial Sequence: Synthetic oligonucleotide
aggaaaacgguugugcaaa

SEQ ID NO: 1975269 - RNA, 19 nt, Artificial Sequence
  Description of Artificial Sequence: Synthetic oligonucleotide
aagcuggauagcaugcaug

SEQ ID NO: 1975270 - RNA, 19 nt, Artificial Sequence
  Description of Artificial Sequence: Synthetic oligonucleotide
acuguguugggaggagcgc

SEQ ID NO: 1975271 - RNA, 19 nt, Artificial Sequence
  Description of Artificial Sequence: Synthetic oligonucleotide
gugaagagaaugugcucgc

SEQ ID NO: 1975272 - RNA, 19 nt, Artificial Sequence
  Description of Artificial Sequence: Synthetic oligonucleotide
ugaagaacccauugcugua

SEQ ID NO: 1975273 - RNA, 19 nt, Artificial Sequence
  Description of Artificial Sequence: Synthetic oligonucleotide
caaggaaaacgguugugca

SEQ ID NO: 1975274 - RNA, 19 nt, Artificial Sequence
  Description of Artificial Sequence: Synthetic oligonucleotide
acgaagaagucuuccacua

SEQ ID NO: 1975275 - RNA, 19 nt, Artificial Sequence
  Description of Artificial Sequence: Synthetic oligonucleotide
accuagugaucaugaauca

SEQ ID NO: 1975276 - RNA, 19 nt, Artificial Sequence
  Description of Artificial Sequence: Synthetic oligonucleotide
aguuucugccgguugcacu

SEQ ID NO: 1975277 - RNA, 19 nt, Artificial Sequence
  Description of Artificial Sequence: Synthetic oligonucleotide
cuacagcaccacaaaacuc

SEQ ID NO: 1975278 - RNA, 19 nt, Artificial Sequence
  Description of Artificial Sequence: Synthetic oligonucleotide
aucucgucccuacuuaaaa

SEQ ID NO: 1975279 - RNA, 19 nt, Artificial Sequence
  Description of Artificial Sequence: Synthetic oligonucleotide
gcuagcagugaagagaaug

SEQ ID NO: 1975280 - RNA, 19 nt, Artificial Sequence
  Description of Artificial Sequence: Synthetic oligonucleotide
ucugccgguugcacugagg

SEQ ID NO: 1975281 - RNA, 19 nt, Artificial Sequence
  Description of Artificial Sequence: Synthetic oligonucleotide
cugauaaccccucucgcca

SEQ ID NO: 1975282 - RNA, 19 nt, Artificial Sequence
  Description of Artificial Sequence: Synthetic oligonucleotide
cauucugauaaccccucuc

SEQ ID NO: 1975283 - RNA, 19 nt, Artificial Sequence
  Description of Artificial Sequence: Synthetic oligonucleotide
aggacuugcuagcagugaa

SEQ ID NO: 1975284 - RNA, 19 nt, Artificial Sequence
  Description of Artificial Sequence: Synthetic oligonucleotide
ugcaaucagccgucuucgg

SEQ ID NO: 1975285 - RNA, 19 nt, Artificial Sequence
  Description of Artificial Sequence: Synthetic oligonucleotide
gaaucccaggucaaaguca

SEQ ID NO: 1975286 - RNA, 19 nt, Artificial Sequence
  Description of Artificial Sequence: Synthetic oligonucleotide
ugcuggacgugucuucacu

SEQ ID NO: 1975287 - RNA, 19 nt, Artificial Sequence
  Description of Artificial Sequence: Synthetic oligonucleotide
cugggcucauugcuggacg

SEQ ID NO: 1975288 - RNA, 19 nt, Artificial Sequence
  Description of Artificial Sequence: Synthetic oligonucleotide
uggacgugucuucacuuuc

SEQ ID NO: 1975289 - RNA, 19 nt, Artificial Sequence
  Description of Artificial Sequence: Synthetic oligonucleotide
uuccuggaggucuccucgg

SEQ ID NO: 1975290 - RNA, 19 nt, Artificial Sequence
  Description of Artificial Sequence: Synthetic oligonucleotide
gacuugcuagcagugaaga

SEQ ID NO: 1975291 - RNA, 19 nt, Artificial Sequence
  Description of Artificial Sequence: Synthetic oligonucleotide
cagagacucuuuucguuug

SEQ ID NO: 1975292 - RNA, 19 nt, Artificial Sequence
  Description of Artificial Sequence: Synthetic oligonucleotide
caggcugggucacaccacg

SEQ ID NO: 1975293 - RNA, 19 nt, Artificial Sequence
  Description of Artificial Sequence: Synthetic oligonucleotide
agauuucaccuaguaaccu

SEQ ID NO: 1975294 - RNA, 19 nt, Artificial Sequence
  Description of Artificial Sequence: Synthetic oligonucleotide
agugaucaugaaucacaga

SEQ ID NO: 1975295 - RNA, 19 nt, Artificial Sequence
  Description of Artificial Sequence: Synthetic oligonucleotide
cuucggaaggccucaucug

SEQ ID NO: 1975296 - RNA, 19 nt, Artificial Sequence
  Description of Artificial Sequence: Synthetic oligonucleotide
uaaguggcacucucagcgu

SEQ ID NO: 1975297 - RNA, 19 nt, Artificial Sequence
  Description of Artificial Sequence: Synthetic oligonucleotide
cacaaugugaguggacaug

SEQ ID NO: 1975298 - RNA, 19 nt, Artificial Sequence
  Description of Artificial Sequence: Synthetic oligonucleotide
acaccacgacaccugccac

SEQ ID NO: 1975299 - RNA, 19 nt, Artificial Sequence
  Description of Artificial Sequence: Synthetic oligonucleotide
cuagcagugaagagaaugu

SEQ ID NO: 1975300 - RNA, 19 nt, Artificial Sequence
  Description of Artificial Sequence: Synthetic oligonucleotide
accacgacaccugccacuc

SEQ ID NO: 1975301 - RNA, 19 nt, Artificial Sequence
  Description of Artificial Sequence: Synthetic oligonucleotide
gccgguugcacugagguag

SEQ ID NO: 1975302 - RNA, 19 nt, Artificial Sequence
  Description of Artificial Sequence: Synthetic oligonucleotide
uuuucacagcguucuucac

SEQ ID NO: 1975303 - RNA, 19 nt, Artificial Sequence
  Description of Artificial Sequence: Synthetic oligonucleotide
caaucagccgucuucggaa

SEQ ID NO: 1975304 - RNA, 19 nt, Artificial Sequence
  Description of Artificial Sequence: Synthetic oligonucleotide
ugauaaccccucucgccac

SEQ ID NO: 1975305 - RNA, 19 nt, Artificial Sequence
  Description of Artificial Sequence: Synthetic oligonucleotide
ucagccgucuucggaaggc

SEQ ID NO: 1975306 - RNA, 19 nt, Artificial Sequence
  Description of Artificial Sequence: Synthetic oligonucleotide
gaaucacagauggcaccgg

SEQ ID NO: 1975307 - RNA, 19 nt, Artificial Sequence
  Description of Artificial Sequence: Synthetic oligonucleotide
cuagugugggugauuguga

SEQ ID NO: 1975308 - RNA, 19 nt, Artificial Sequence
  Description of Artificial Sequence: Synthetic oligonucleotide
ggagagguggauucccugc

SEQ ID NO: 1975309 - RNA, 19 nt, Artificial Sequence
  Description of Artificial Sequence: Synthetic oligonucleotide
ucccuacagcaccacaaaa

SEQ ID NO: 1975310 - RNA, 19 nt, Artificial Sequence
  Description of Artificial Sequence: Synthetic oligonucleotide
ucguuuggucucuuugaaa

SEQ ID NO: 1975311 - RNA, 19 nt, Artificial Sequence
  Description of Artificial Sequence: Synthetic oligonucleotide
gaucccuacagcaccacaa

SEQ ID NO: 1975312 - RNA, 19 nt, Artificial Sequence
  Description of Artificial Sequence: Synthetic oligonucleotide
agugugggugauugugaca

SEQ ID NO: 1975313 - RNA, 19 nt, Artificial Sequence
  Description of Artificial Sequence: Synthetic oligonucleotide
agguuugcaaucagccguc

SEQ ID NO: 1975314 - RNA, 19 nt, Artificial Sequence
  Description of Artificial Sequence: Synthetic oligonucleotide
gcuuucuaaguauuccuuc

SEQ ID NO: 1975315 - RNA, 19 nt, Artificial Sequence
  Description of Artificial Sequence: Synthetic oligonucleotide
cccuacuuaaaagugaauc

SEQ ID NO: 1975316 - RNA, 19 nt, Artificial Sequence
  Description of Artificial Sequence: Synthetic oligonucleotide
auauacuccaggaguuucu

SEQ ID NO: 1975317 - RNA, 19 nt, Artificial Sequence
  Description of Artificial Sequence: Synthetic oligonucleotide
aagacaugaagaacccauu

SEQ ID NO: 1975318 - RNA, 19 nt, Artificial Sequence
  Description of Artificial Sequence: Synthetic oligonucleotide
cuggauagcaugcaugacu

SEQ ID NO: 1975319 - RNA, 19 nt, Artificial Sequence
  Description of Artificial Sequence: Synthetic oligonucleotide
caagugcucugcacaggcc

SEQ ID NO: 1975320 - RNA, 19 nt, Artificial Sequence
  Description of Artificial Sequence: Synthetic oligonucleotide
aguggcacucucagcguac

SEQ ID NO: 1975321 - RNA, 19 nt, Artificial Sequence
  Description of Artificial Sequence: Synthetic oligonucleotide
caccuaguaaccuagugau

SEQ ID NO: 1975322 - RNA, 19 nt, Artificial Sequence
  Description of Artificial Sequence: Synthetic oligonucleotide
cauugcuggacgugucuuc

SEQ ID NO: 1975323 - RNA, 19 nt, Artificial Sequence
  Description of Artificial Sequence: Synthetic oligonucleotide
uacugagauuucaccuagu

SEQ ID NO: 1975324 - RNA, 19 nt, Artificial Sequence
  Description of Artificial Sequence: Synthetic oligonucleotide
cccuacagcaccacaaaac

SEQ ID NO: 1975325 - RNA, 19 nt, Artificial Sequence
  Description of Artificial Sequence: Synthetic oligonucleotide
cuuccaugauaaagacaug

SEQ ID NO: 1975326 - RNA, 19 nt, Artificial Sequence
  Description of Artificial Sequence: Synthetic oligonucleotide
cagguuugcaaucagccgu

SEQ ID NO: 1975327 - RNA, 19 nt, Artificial Sequence
  Description of Artificial Sequence: Synthetic oligonucleotide
gucacgagcuaggacuucc

SEQ ID NO: 1975328 - RNA, 19 nt, Artificial Sequence
  Description of Artificial Sequence: Synthetic oligonucleotide
auaaccccucucgccacac

SEQ ID NO: 1975329 - RNA, 19 nt, Artificial Sequence
  Description of Artificial Sequence: Synthetic oligonucleotide
gucuccucgggguaaggca

SEQ ID NO: 1975330 - RNA, 19 nt, Artificial Sequence
  Description of Artificial Sequence: Synthetic oligonucleotide
ucacgagcuaggacuuccu

SEQ ID NO: 1975331 - RNA, 19 nt, Artificial Sequence
  Description of Artificial Sequence: Synthetic oligonucleotide
aucccuacagcaccacaaa

SEQ ID NO: 1975332 - RNA, 19 nt, Artificial Sequence
  Description of Artificial Sequence: Synthetic oligonucleotide
aguauuccuucaaggaaaa

SEQ ID NO: 1975333 - RNA, 19 nt, Artificial Sequence
  Description of Artificial Sequence: Synthetic oligonucleotide
ugacuguguugggaggagc

SEQ ID NO: 1975334 - RNA, 19 nt, Artificial Sequence
  Description of Artificial Sequence: Synthetic oligonucleotide
aaucucgucccuacuuaaa

SEQ ID NO: 1975335 - RNA, 19 nt, Artificial Sequence
  Description of Artificial Sequence: Synthetic oligonucleotide
ggaaaguaccgcucaguuc

SEQ ID NO: 1975336 - RNA, 19 nt, Artificial Sequence
  Description of Artificial Sequence: Synthetic oligonucleotide
agcagcaucauuaggccuu

SEQ ID NO: 1975337 - RNA, 19 nt, Artificial Sequence
  Description of Artificial Sequence: Synthetic oligonucleotide
cucgucccuacuuaaaagu

SEQ ID NO: 1975338 - RNA, 19 nt, Artificial Sequence
  Description of Artificial Sequence: Synthetic oligonucleotide
ugggcucauugcuggacgu

SEQ ID NO: 1975339 - RNA, 19 nt, Artificial Sequence
  Description of Artificial Sequence: Synthetic oligonucleotide
caaaucucgucccuacuua

SEQ ID NO: 1975340 - RNA, 19 nt, Artificial Sequence
  Description of Artificial Sequence: Synthetic oligonucleotide
accuaguaaccuagugauc

SEQ ID NO: 1975341 - RNA, 19 nt, Artificial Sequence
  Description of Artificial Sequence: Synthetic oligonucleotide
uuccugcuaguguggguga

SEQ ID NO: 1975342 - RNA, 19 nt, Artificial Sequence
  Description of Artificial Sequence: Synthetic oligonucleotide
cacagauggcaccggcccc

SEQ ID NO: 1975343 - RNA, 19 nt, Artificial Sequence
  Description of Artificial Sequence: Synthetic oligonucleotide
gccaagagaucccuacagc

SEQ ID NO: 1975344 - RNA, 19 nt, Artificial Sequence
  Description of Artificial Sequence: Synthetic oligonucleotide
agaacccauugcuguagaa

SEQ ID NO: 1975345 - RNA, 19 nt, Artificial Sequence
  Description of Artificial Sequence: Synthetic oligonucleotide
guuucccagaagcuggaua

SEQ ID NO: 1975346 - RNA, 19 nt, Artificial Sequence
  Description of Artificial Sequence: Synthetic oligonucleotide
acacuccacaaacucucau

SEQ ID NO: 1975347 - RNA, 19 nt, Artificial Sequence
  Description of Artificial Sequence: Synthetic oligonucleotide
guagagaagcaggcaggcc

SEQ ID NO: 1975348 - RNA, 19 nt, Artificial Sequence
  Description of Artificial Sequence: Synthetic oligonucleotide
aaagaccgaugggacaguu

SEQ ID NO: 1975349 - RNA, 19 nt, Artificial Sequence
  Description of Artificial Sequence: Synthetic oligonucleotide
ucccuacuuaaaagugaau

SEQ ID NO: 1975350 - RNA, 19 nt, Artificial Sequence
  Description of Artificial Sequence: Synthetic oligonucleotide
agcuccucccucgccauag

SEQ ID NO: 1975351 - RNA, 19 nt, Artificial Sequence
  Description of Artificial Sequence: Synthetic oligonucleotide
caggaguuucugccgguug

SEQ ID NO: 1975352 - RNA, 19 nt, Artificial Sequence
  Description of Artificial Sequence: Synthetic oligonucleotide
gaauggcugguagcagagc

SEQ ID NO: 1975353 - RNA, 19 nt, Artificial Sequence
  Description of Artificial Sequence: Synthetic oligonucleotide
aagucacgagcuaggacuu

SEQ ID NO: 1975354 - RNA, 19 nt, Artificial Sequence
  Description of Artificial Sequence: Synthetic oligonucleotide
ccgcucaguucuaaaacag

SEQ ID NO: 1975355 - RNA, 19 nt, Artificial Sequence
  Description of Artificial Sequence: Synthetic oligonucleotide
gguagcagagcuugcucca

SEQ ID NO: 1975356 - RNA, 19 nt, Artificial Sequence
  Description of Artificial Sequence: Synthetic oligonucleotide
ucauugcuggacgugucuu

SEQ ID NO: 1975357 - RNA, 19 nt, Artificial Sequence
  Description of Artificial Sequence: Synthetic oligonucleotide
gaagcuggauagcaugcau

SEQ ID NO: 1975358 - RNA, 19 nt, Artificial Sequence
  Description of Artificial Sequence: Synthetic oligonucleotide
agagaucccuacagcacca

SEQ ID NO: 1975359 - RNA, 19 nt, Artificial Sequence
  Description of Artificial Sequence: Synthetic oligonucleotide
uggcacucucagcguacgc

SEQ ID NO: 1975360 - RNA, 19 nt, Artificial Sequence
  Description of Artificial Sequence: Synthetic oligonucleotide
ucgcccagguuugcaauca

SEQ ID NO: 1975361 - RNA, 19 nt, Artificial Sequence
  Description of Artificial Sequence: Synthetic oligonucleotide
agucuuccacuaaugugga

SEQ ID NO: 1975362 - RNA, 19 nt, Artificial Sequence
  Description of Artificial Sequence: Synthetic oligonucleotide
ucacagcguucuucacaag

SEQ ID NO: 1975363 - RNA, 19 nt, Artificial Sequence
  Description of Artificial Sequence: Synthetic oligonucleotide
guagcagagcuugcuccag

SEQ ID NO: 1975364 - RNA, 19 nt, Artificial Sequence
  Description of Artificial Sequence: Synthetic oligonucleotide
cucgccauaggugccaaga

SEQ ID NO: 1975365 - RNA, 19 nt, Artificial Sequence
  Description of Artificial Sequence: Synthetic oligonucleotide
cacgaagaagucuuccacu

SEQ ID NO: 1975366 - RNA, 19 nt, Artificial Sequence
  Description of Artificial Sequence: Synthetic oligonucleotide
gaauucccugagaauccca

SEQ ID NO: 1975367 - RNA, 19 nt, Artificial Sequence
  Description of Artificial Sequence: Synthetic oligonucleotide
ucauuaggccuugcaggaa

SEQ ID NO: 1975368 - RNA, 19 nt, Artificial Sequence
  Description of Artificial Sequence: Synthetic oligonucleotide
agguggauucccugccggu

SEQ ID NO: 1975369 - RNA, 19 nt, Artificial Sequence
  Description of Artificial Sequence: Synthetic oligonucleotide
aggucaaagucacgagcua

SEQ ID NO: 1975370 - RNA, 19 nt, Artificial Sequence
  Description of Artificial Sequence: Synthetic oligonucleotide
ugcaggcuaugauggcuuc

SEQ ID NO: 1975371 - RNA, 19 nt, Artificial Sequence
  Description of Artificial Sequence: Synthetic oligonucleotide
ggguaaggcaggcuggguc

SEQ ID NO: 1975372 - RNA, 19 nt, Artificial Sequence
  Description of Artificial Sequence: Synthetic oligonucleotide
guggcacucucagcguacg

SEQ ID NO: 1975373 - RNA, 19 nt, Artificial Sequence
  Description of Artificial Sequence: Synthetic oligonucleotide
guugugcaaaauccacucu

SEQ ID NO: 1975374 - RNA, 19 nt, Artificial Sequence
  Description of Artificial Sequence: Synthetic oligonucleotide
cugacauagccguaguuuu

SEQ ID NO: 1975375 - RNA, 19 nt, Artificial Sequence
  Description of Artificial Sequence: Synthetic oligonucleotide
ccggugucuguagagaagc

SEQ ID NO: 1975376 - RNA, 19 nt, Artificial Sequence
  Description of Artificial Sequence: Synthetic oligonucleotide
aaaccccgauauccuuaaa

SEQ ID NO: 1975377 - RNA, 19 nt, Artificial Sequence
  Description of Artificial Sequence: Synthetic oligonucleotide
ggacuugcuagcagugaag

SEQ ID NO: 1975378 - RNA, 19 nt, Artificial Sequence
  Description of Artificial Sequence: Synthetic oligonucleotide
uugcuggacgugucuucac

SEQ ID NO: 1975379 - RNA, 19 nt, Artificial Sequence
  Description of Artificial Sequence: Synthetic oligonucleotide
gaguuucugccgguugcac

SEQ ID NO: 1975380 - RNA, 19 nt, Artificial Sequence
  Description of Artificial Sequence: Synthetic oligonucleotide
gcaaucagccgucuucgga

SEQ ID NO: 1975381 - RNA, 19 nt, Artificial Sequence
  Description of Artificial Sequence: Synthetic oligonucleotide
ccuucaucacgaagaaguc

SEQ ID NO: 1975382 - RNA, 19 nt, Artificial Sequence
  Description of Artificial Sequence: Synthetic oligonucleotide
guacgcauacaggcugcag

SEQ ID NO: 1975383 - RNA, 19 nt, Artificial Sequence
  Description of Artificial Sequence: Synthetic oligonucleotide
agucacgagcuaggacuuc

SEQ ID NO: 1975384 - RNA, 19 nt, Artificial Sequence
  Description of Artificial Sequence: Synthetic oligonucleotide
aggggagcggacguuggcu

SEQ ID NO: 1975385 - RNA, 19 nt, Artificial Sequence
  Description of Artificial Sequence: Synthetic oligonucleotide
cagacucagcuccucccuc

SEQ ID NO: 1975386 - RNA, 19 nt, Artificial Sequence
  Description of Artificial Sequence: Synthetic oligonucleotide
aaguaccgcucaguucuaa

SEQ ID NO: 1975387 - RNA, 19 nt, Artificial Sequence
  Description of Artificial Sequence: Synthetic oligonucleotide
uuuccgcagcauucugaua

SEQ ID NO: 1975388 - RNA, 19 nt, Artificial Sequence
  Description of Artificial Sequence: Synthetic oligonucleotide
gaggucuccucgggguaag

SEQ ID NO: 1975389 - RNA, 19 nt, Artificial Sequence
  Description of Artificial Sequence: Synthetic oligonucleotide
agacaguaaguggcacucu

SEQ ID NO: 1975390 - RNA, 19 nt, Artificial Sequence
  Description of Artificial Sequence: Synthetic oligonucleotide
aguugaguucaaagaccga

SEQ ID NO: 1975391 - RNA, 19 nt, Artificial Sequence
  Description of Artificial Sequence: Synthetic oligonucleotide
ggucacaccacgacaccug

SEQ ID NO: 1975392 - RNA, 19 nt, Artificial Sequence
  Description of Artificial Sequence: Synthetic oligonucleotide
gaccgaugggacaguugug

SEQ ID NO: 1975393 - RNA, 19 nt, Artificial Sequence
  Description of Artificial Sequence: Synthetic oligonucleotide
agagcuugcuccagagaaa

SEQ ID NO: 1975394 - RNA, 19 nt, Artificial Sequence
  Description of Artificial Sequence: Synthetic oligonucleotide
ugugcucgcccagguuugc

SEQ ID NO: 1975395 - RNA, 19 nt, Artificial Sequence
  Description of Artificial Sequence: Synthetic oligonucleotide
uucccugccggugucugua

SEQ ID NO: 1975396 - RNA, 19 nt, Artificial Sequence
  Description of Artificial Sequence: Synthetic oligonucleotide
gguggauucccugccggug

SEQ ID NO: 1975397 - RNA, 19 nt, Artificial Sequence
  Description of Artificial Sequence: Synthetic oligonucleotide
cacgcaucuuccuggaggu

SEQ ID NO: 1975398 - RNA, 19 nt, Artificial Sequence
  Description of Artificial Sequence: Synthetic oligonucleotide
augugcucgcccagguuug

SEQ ID NO: 1975399 - RNA, 19 nt, Artificial Sequence
  Description of Artificial Sequence: Synthetic oligonucleotide
ccuacagcaccacaaaacu

SEQ ID NO: 1975400 - RNA, 19 nt, Artificial Sequence
  Description of Artificial Sequence: Synthetic oligonucleotide
uccucgggguaaggcaggc

SEQ ID NO: 1975401 - RNA, 19 nt, Artificial Sequence
  Description of Artificial Sequence: Synthetic oligonucleotide
ccugccggugucuguagag

SEQ ID NO: 1975402 - RNA, 19 nt, Artificial Sequence
  Description of Artificial Sequence: Synthetic oligonucleotide
cugccgguugcacugaggu

SEQ ID NO: 1975403 - RNA, 19 nt, Artificial Sequence
  Description of Artificial Sequence: Synthetic oligonucleotide
cccaggucaaagucacgag

SEQ ID NO: 1975404 - RNA, 19 nt, Artificial Sequence
  Description of Artificial Sequence: Synthetic oligonucleotide
caguuucccagaagcugga

SEQ ID NO: 1975405 - RNA, 19 nt, Artificial Sequence
  Description of Artificial Sequence: Synthetic oligonucleotide
ggcugggucacaccacgac

SEQ ID NO: 1975406 - RNA, 19 nt, Artificial Sequence
  Description of Artificial Sequence: Synthetic oligonucleotide
ggauagcaugcaugacuac

SEQ ID NO: 1975407 - RNA, 19 nt, Artificial Sequence
  Description of Artificial Sequence: Synthetic oligonucleotide
gcggacguuggcuucugac

SEQ ID NO: 1975408 - RNA, 19 nt, Artificial Sequence
  Description of Artificial Sequence: Synthetic oligonucleotide
ggcacucucagcguacgca

SEQ ID NO: 1975409 - RNA, 19 nt, Artificial Sequence
  Description of Artificial Sequence: Synthetic oligonucleotide
cccugagaaucccagguca

SEQ ID NO: 1975410 - RNA, 19 nt, Artificial Sequence
  Description of Artificial Sequence: Synthetic oligonucleotide
auacaggcugcaggcuaug

SEQ ID NO: 1975411 - RNA, 19 nt, Artificial Sequence
  Description of Artificial Sequence: Synthetic oligonucleotide
gaaaacgguugugcaaaau

SEQ ID NO: 1975412 - RNA, 19 nt, Artificial Sequence
  Description of Artificial Sequence: Synthetic oligonucleotide
aaaguaccgcucaguucua

SEQ ID NO: 1975413 - RNA, 19 nt, Artificial Sequence
  Description of Artificial Sequence: Synthetic oligonucleotide
aggccacaaugugagugga

SEQ ID NO: 1975414 - RNA, 19 nt, Artificial Sequence
  Description of Artificial Sequence: Synthetic oligonucleotide
ugccgguugcacugaggua

SEQ ID NO: 1975415 - RNA, 19 nt, Artificial Sequence
  Description of Artificial Sequence: Synthetic oligonucleotide
ggucuccucgggguaaggc

SEQ ID NO: 1975416 - RNA, 19 nt, Artificial Sequence
  Description of Artificial Sequence: Synthetic oligonucleotide
cuaguaaccuagugaucau

SEQ ID NO: 1975417 - RNA, 19 nt, Artificial Sequence
  Description of Artificial Sequence: Synthetic oligonucleotide
gugggcagaaggcacgcau

SEQ ID NO: 1975418 - RNA, 19 nt, Artificial Sequence
  Description of Artificial Sequence: Synthetic oligonucleotide
gccauaggugccaagagau

SEQ ID NO: 1975419 - RNA, 19 nt, Artificial Sequence
  Description of Artificial Sequence: Synthetic oligonucleotide
ccauaggugccaagagauc

SEQ ID NO: 1975420 - RNA, 19 nt, Artificial Sequence
  Description of Artificial Sequence: Synthetic oligonucleotide
ggaaaacgguugugcaaaa

SEQ ID NO: 1975421 - RNA, 19 nt, Artificial Sequence
  Description of Artificial Sequence: Synthetic oligonucleotide
cugagaaucccaggucaaa

SEQ ID NO: 1975422 - RNA, 19 nt, Artificial Sequence
  Description of Artificial Sequence: Synthetic oligonucleotide
ggcugcaggcuaugauggc

SEQ ID NO: 1975423 - RNA, 19 nt, Artificial Sequence
  Description of Artificial Sequence: Synthetic oligonucleotide
ccgauauccuuaaacauuu

SEQ ID NO: 1975424 - RNA, 19 nt, Artificial Sequence
  Description of Artificial Sequence: Synthetic oligonucleotide
ggacgugucuucacuuuca

SEQ ID NO: 1975425 - RNA, 19 nt, Artificial Sequence
  Description of Artificial Sequence: Synthetic oligonucleotide
caggacuugcuagcaguga

SEQ ID NO: 1975426 - RNA, 19 nt, Artificial Sequence
  Description of Artificial Sequence: Synthetic oligonucleotide
accggccccaagugcucug

SEQ ID NO: 1975427 - RNA, 19 nt, Artificial Sequence
  Description of Artificial Sequence: Synthetic oligonucleotide
uccugcuagugugggugau

SEQ ID NO: 1975428 - RNA, 19 nt, Artificial Sequence
  Description of Artificial Sequence: Synthetic oligonucleotide
ccgguugcacugagguagg

SEQ ID NO: 1975429 - RNA, 19 nt, Artificial Sequence
  Description of Artificial Sequence: Synthetic oligonucleotide
ggacguuggcuucugacuu

SEQ ID NO: 1975430 - RNA, 19 nt, Artificial Sequence
  Description of Artificial Sequence: Synthetic oligonucleotide
ggaguuucugccgguugca

SEQ ID NO: 1975431 - RNA, 19 nt, Artificial Sequence
  Description of Artificial Sequence: Synthetic oligonucleotide
cgucccuacuuaaaaguga

SEQ ID NO: 1975432 - RNA, 19 nt, Artificial Sequence
  Description of Artificial Sequence: Synthetic oligonucleotide
gacguuggcuucugacuuu

SEQ ID NO: 1975433 - RNA, 19 nt, Artificial Sequence
  Description of Artificial Sequence: Synthetic oligonucleotide
gaaugugcucgcccagguu

SEQ ID NO: 1975434 - RNA, 19 nt, Artificial Sequence
  Description of Artificial Sequence: Synthetic oligonucleotide
cugccggugucuguagaga

SEQ ID NO: 1975435 - RNA, 19 nt, Artificial Sequence
  Description of Artificial Sequence: Synthetic oligonucleotide
ggcacgcaucuuccuggag

SEQ ID NO: 1975436 - RNA, 19 nt, Artificial Sequence
  Description of Artificial Sequence: Synthetic oligonucleotide
ggccccaagugcucugcac

SEQ ID NO: 1975437 - RNA, 19 nt, Artificial Sequence
  Description of Artificial Sequence: Synthetic oligonucleotide
cucucgccacacuccacaa

SEQ ID NO: 1975438 - RNA, 19 nt, Artificial Sequence
  Description of Artificial Sequence: Synthetic oligonucleotide
cuuuccugcuagugugggu

SEQ ID NO: 1975439 - RNA, 19 nt, Artificial Sequence
  Description of Artificial Sequence: Synthetic oligonucleotide
gcagcaucauuaggccuug

SEQ ID NO: 1975440 - RNA, 19 nt, Artificial Sequence
  Description of Artificial Sequence: Synthetic oligonucleotide
cagcguacgcauacaggcu

SEQ ID NO: 1975441 - RNA, 19 nt, Artificial Sequence
  Description of Artificial Sequence: Synthetic oligonucleotide
gguugcacugagguaggaa

SEQ ID NO: 1975442 - RNA, 19 nt, Artificial Sequence
  Description of Artificial Sequence: Synthetic oligonucleotide
ccucucgccacacuccaca

SEQ ID NO: 1975443 - RNA, 19 nt, Artificial Sequence
  Description of Artificial Sequence: Synthetic oligonucleotide
cuaauguggagagguggau

SEQ ID NO: 1975444 - RNA, 19 nt, Artificial Sequence
  Description of Artificial Sequence: Synthetic oligonucleotide
cccgauauccuuaaacauu

SEQ ID NO: 1975445 - RNA, 19 nt, Artificial Sequence
  Description of Artificial Sequence: Synthetic oligonucleotide
gcgcagguccauggggugg

SEQ ID NO: 1975446 - RNA, 19 nt, Artificial Sequence
  Description of Artificial Sequence: Synthetic oligonucleotide
caccacgacaccugccacu

SEQ ID NO: 1975447 - RNA, 19 nt, Artificial Sequence
  Description of Artificial Sequence: Synthetic oligonucleotide
gcguacgcauacaggcugc

SEQ ID NO: 1975448 - RNA, 19 nt, Artificial Sequence
  Description of Artificial Sequence: Synthetic oligonucleotide
cucucagcguacgcauaca

SEQ ID NO: 1975449 - RNA, 19 nt, Artificial Sequence
  Description of Artificial Sequence: Synthetic oligonucleotide
gagcggacguuggcuucug

SEQ ID NO: 1975450 - RNA, 19 nt, Artificial Sequence
  Description of Artificial Sequence: Synthetic oligonucleotide
gccuugcaggaagaauggc

SEQ ID NO: 1975451 - RNA, 19 nt, Artificial Sequence
  Description of Artificial Sequence: Synthetic oligonucleotide
guuugcaaucagccgucuu

SEQ ID NO: 1975452 - RNA, 19 nt, Artificial Sequence
  Description of Artificial Sequence: Synthetic oligonucleotide
ggaggagcgcagguccaug

SEQ ID NO: 1975453 - RNA, 19 nt, Artificial Sequence
  Description of Artificial Sequence: Synthetic oligonucleotide
cacucucagcguacgcaua

SEQ ID NO: 1975454 - RNA, 19 nt, Artificial Sequence
  Description of Artificial Sequence: Synthetic oligonucleotide
cuggacgugucuucacuuu

SEQ ID NO: 1975455 - RNA, 19 nt, Artificial Sequence
  Description of Artificial Sequence: Synthetic oligonucleotide
cucuuuucguuuggucucu

SEQ ID NO: 1975456 - RNA, 19 nt, Artificial Sequence
  Description of Artificial Sequence: Synthetic oligonucleotide
ccuccuucaucacgaagaa

SEQ ID NO: 1975457 - RNA, 19 nt, Artificial Sequence
  Description of Artificial Sequence: Synthetic oligonucleotide
gggcucauugcuggacgug

SEQ ID NO: 1975458 - RNA, 19 nt, Artificial Sequence
  Description of Artificial Sequence: Synthetic oligonucleotide
cuuuucguuuggucucuuu

SEQ ID NO: 1975459 - RNA, 19 nt, Artificial Sequence
  Description of Artificial Sequence: Synthetic oligonucleotide
cagcaucauuaggccuugc

SEQ ID NO: 1975460 - RNA, 19 nt, Artificial Sequence
  Description of Artificial Sequence: Synthetic oligonucleotide
caaugugaguggacaugau

SEQ ID NO: 1975461 - RNA, 19 nt, Artificial Sequence
  Description of Artificial Sequence: Synthetic oligonucleotide
cgagcuaggacuuccuccu

SEQ ID NO: 1975462 - RNA, 19 nt, Artificial Sequence
  Description of Artificial Sequence: Synthetic oligonucleotide
ggcucauugcuggacgugu

SEQ ID NO: 1975463 - RNA, 19 nt, Artificial Sequence
  Description of Artificial Sequence: Synthetic oligonucleotide
ggcgcaggacuugcuagca

SEQ ID NO: 1975464 - RNA, 19 nt, Artificial Sequence
  Description of Artificial Sequence: Synthetic oligonucleotide
gcucauugcuggacguguc

SEQ ID NO: 1975465 - RNA, 19 nt, Artificial Sequence
  Description of Artificial Sequence: Synthetic oligonucleotide
aggcugggucacaccacga

SEQ ID NO: 1975466 - RNA, 19 nt, Artificial Sequence
  Description of Artificial Sequence: Synthetic oligonucleotide
ggccacaaugugaguggac

SEQ ID NO: 1975467 - RNA, 19 nt, Artificial Sequence
  Description of Artificial Sequence: Synthetic oligonucleotide
ggcaccggccccaagugcu

SEQ ID NO: 1975468 - RNA, 19 nt, Artificial Sequence
  Description of Artificial Sequence: Synthetic oligonucleotide
cucugacauagccguaguu

SEQ ID NO: 1975469 - RNA, 19 nt, Artificial Sequence
  Description of Artificial Sequence: Synthetic oligonucleotide
cgccauaggugccaagaga

SEQ ID NO: 1975470 - RNA, 19 nt, Artificial Sequence
  Description of Artificial Sequence: Synthetic oligonucleotide
cuccucccucgccauaggu

SEQ ID NO: 1975471 - RNA, 19 nt, Artificial Sequence
  Description of Artificial Sequence: Synthetic oligonucleotide
ccccgauauccuuaaacau

SEQ ID NO: 1975472 - RNA, 19 nt, Artificial Sequence
  Description of Artificial Sequence: Synthetic oligonucleotide
gcguucuucacaagacagu

SEQ ID NO: 1975473 - RNA, 19 nt, Artificial Sequence
  Description of Artificial Sequence: Synthetic oligonucleotide
gugcucgcccagguuugca

SEQ ID NO: 1975474 - RNA, 19 nt, Artificial Sequence
  Description of Artificial Sequence: Synthetic oligonucleotide
gggucacaccacgacaccu

SEQ ID NO: 1975475 - RNA, 19 nt, Artificial Sequence
  Description of Artificial Sequence: Synthetic oligonucleotide
gagcuaggacuuccuccuu

SEQ ID NO: 1975476 - RNA, 19 nt, Artificial Sequence
  Description of Artificial Sequence: Synthetic oligonucleotide
ccacaaugugaguggacau

SEQ ID NO: 1975477 - RNA, 19 nt, Artificial Sequence
  Description of Artificial Sequence: Synthetic oligonucleotide
cgcaggacuugcuagcagu

SEQ ID NO: 1975478 - RNA, 19 nt, Artificial Sequence
  Description of Artificial Sequence: Synthetic oligonucleotide
ccucgccauaggugccaag

SEQ ID NO: 1975479 - RNA, 19 nt, Artificial Sequence
  Description of Artificial Sequence: Synthetic oligonucleotide
cgguugugcaaaauccacu

SEQ ID NO: 1975480 - RNA, 19 nt, Artificial Sequence
  Description of Artificial Sequence: Synthetic oligonucleotide
ggugggcagaaggcacgca

SEQ ID NO: 1975481 - RNA, 19 nt, Artificial Sequence
  Description of Artificial Sequence: Synthetic oligonucleotide
ggagcggacguuggcuucu

SEQ ID NO: 1975482 - RNA, 19 nt, Artificial Sequence
  Description of Artificial Sequence: Synthetic oligonucleotide
ggggagcggacguuggcuu

SEQ ID NO: 1975483 - RNA, 19 nt, Artificial Sequence
  Description of Artificial Sequence: Synthetic oligonucleotide
gguuugcaaucagccgucu

SEQ ID NO: 1975484 - RNA, 19 nt, Artificial Sequence
  Description of Artificial Sequence: Synthetic oligonucleotide
ccgaugggacaguugugcu

SEQ ID NO: 1975485 - RNA, 19 nt, Artificial Sequence
  Description of Artificial Sequence: Synthetic oligonucleotide
ccggccccaagugcucugc

SEQ ID NO: 1975486 - RNA, 19 nt, Artificial Sequence
  Description of Artificial Sequence: Synthetic oligonucleotide
cggugucuguagagaagca

SEQ ID NO: 1975487 - RNA, 19 nt, Artificial Sequence
  Description of Artificial Sequence: Synthetic oligonucleotide
cagauggcaccggccccaa

SEQ ID NO: 1975488 - RNA, 19 nt, Artificial Sequence
  Description of Artificial Sequence: Synthetic oligonucleotide
cguacgcauacaggcugca

SEQ ID NO: 1975489 - RNA, 19 nt, Artificial Sequence
  Description of Artificial Sequence: Synthetic oligonucleotide
caccggccccaagugcucu

SEQ ID NO: 1975490 - RNA, 19 nt, Artificial Sequence
  Description of Artificial Sequence: Synthetic oligonucleotide
cggccccaagugcucugca

SEQ ID NO: 1975491 - RNA, 19 nt, Artificial Sequence
  Description of Artificial Sequence: Synthetic oligonucleotide
cgguugcacugagguagga

SEQ ID NO: 1975492 - RNA, 19 nt, Artificial Sequence
  Description of Artificial Sequence: Synthetic oligonucleotide
cgucuucggaaggccucau

SEQ ID NO: 1975493 - RNA, 19 nt, Artificial Sequence
  Description of Artificial Sequence: Synthetic oligonucleotide
uuagaaauccaucaguucc

SEQ ID NO: 1975494 - RNA, 19 nt, Artificial Sequence
  Description of Artificial Sequence: Synthetic oligonucleotide
ucuaauuggacauuccugg

SEQ ID NO: 1975495 - RNA, 19 nt, Artificial Sequence
  Description of Artificial Sequence: Synthetic oligonucleotide
aaugcaauggacucggguc

SEQ ID NO: 1975496 - RNA, 19 nt, Artificial Sequence
  Description of Artificial Sequence: Synthetic oligonucleotide
aggacauucgaucacauac

SEQ ID NO: 1975497 - RNA, 19 nt, Artificial Sequence
  Description of Artificial Sequence: Synthetic oligonucleotide
uuauuuaagaagcagccca

SEQ ID NO: 1975498 - RNA, 19 nt, Artificial Sequence
  Description of Artificial Sequence: Synthetic oligonucleotide
uauauauauauauuuauuu

SEQ ID NO: 1975499 - RNA, 19 nt, Artificial Sequence
  Description of Artificial Sequence: Synthetic oligonucleotide
uauauauauauauauuuau

SEQ ID NO: 1975500 - RNA, 19 nt, Artificial Sequence
  Description of Artificial Sequence: Synthetic oligonucleotide
agagcuuugacgcugaacu

SEQ ID NO: 1975501 - RNA, 19 nt, Artificial Sequence
  Description of Artificial Sequence: Synthetic oligonucleotide
cauucgaucacauacccag

SEQ ID NO: 1975502 - RNA, 19 nt, Artificial Sequence
  Description of Artificial Sequence: Synthetic oligonucleotide
aucgcagaaacccucaccg

SEQ ID NO: 1975503 - RNA, 19 nt, Artificial Sequence
  Description of Artificial Sequence: Synthetic oligonucleotide
uuuacugagagaugcucgg

SEQ ID NO: 1975504 - RNA, 19 nt, Artificial Sequence
  Description of Artificial Sequence: Synthetic oligonucleotide
aucaauagcugucaccacg

SEQ ID NO: 1975505 - RNA, 19 nt, Artificial Sequence
  Description of Artificial Sequence: Synthetic oligonucleotide
uugcaauugaagcagacuc

SEQ ID NO: 1975506 - RNA, 19 nt, Artificial Sequence
  Description of Artificial Sequence: Synthetic oligonucleotide
ugcaauugaagcagacucg

SEQ ID NO: 1975507 - RNA, 19 nt, Artificial Sequence
  Description of Artificial Sequence: Synthetic oligonucleotide
auauauauauauuuauuua

SEQ ID NO: 1975508 - RNA, 19 nt, Artificial Sequence
  Description of Artificial Sequence: Synthetic oligonucleotide
acugagagaugcucggucc

SEQ ID NO: 1975509 - RNA, 19 nt, Artificial Sequence
  Description of Artificial Sequence: Synthetic oligonucleotide
uagugguauaucaauagcu

SEQ ID NO: 1975510 - RNA, 19 nt, Artificial Sequence
  Description of Artificial Sequence: Synthetic oligonucleotide
uauaucaauagcugucacc

SEQ ID NO: 1975511 - RNA, 19 nt, Artificial Sequence
  Description of Artificial Sequence: Synthetic oligonucleotide
auaaaugcaauggacucgg

SEQ ID NO: 1975512 - RNA, 19 nt, Artificial Sequence
  Description of Artificial Sequence: Synthetic oligonucleotide
agauagucauuauuuuaac

SEQ ID NO: 1975513 - RNA, 19 nt, Artificial Sequence
  Description of Artificial Sequence: Synthetic oligonucleotide
augcaauggacucgggucc

SEQ ID NO: 1975514 - RNA, 19 nt, Artificial Sequence
  Description of Artificial Sequence: Synthetic oligonucleotide
aguaggccggccuagcagc

SEQ ID NO: 1975515 - RNA, 19 nt, Artificial Sequence
  Description of Artificial Sequence: Synthetic oligonucleotide
aggaucuugguucccaaac

SEQ ID NO: 1975516 - RNA, 19 nt, Artificial Sequence
  Description of Artificial Sequence: Synthetic oligonucleotide
ucccaaaccaguacugccg

SEQ ID NO: 1975517 - RNA, 19 nt, Artificial Sequence
  Description of Artificial Sequence: Synthetic oligonucleotide
caaggcuaagcucagacac

SEQ ID NO: 1975518 - RNA, 19 nt, Artificial Sequence
  Description of Artificial Sequence: Synthetic oligonucleotide
gguuuaaagguucaccggg

SEQ ID NO: 1975519 - RNA, 19 nt, Artificial Sequence
  Description of Artificial Sequence: Synthetic oligonucleotide
agauguuuugggcaccacg

SEQ ID NO: 1975520 - RNA, 19 nt, Artificial Sequence
  Description of Artificial Sequence: Synthetic oligonucleotide
uuuauuuaagaagcagccc

SEQ ID NO: 1975521 - RNA, 19 nt, Artificial Sequence
  Description of Artificial Sequence: Synthetic oligonucleotide
gauguuuugggcaccacgc

SEQ ID NO: 1975522 - RNA, 19 nt, Artificial Sequence
  Description of Artificial Sequence: Synthetic oligonucleotide
uggucgggcacccaguagg

SEQ ID NO: 1975523 - RNA, 19 nt, Artificial Sequence
  Description of Artificial Sequence: Synthetic oligonucleotide
ucgaugagcagcuaucgca

SEQ ID NO: 1975524 - RNA, 19 nt, Artificial Sequence
  Description of Artificial Sequence: Synthetic oligonucleotide
aauagcugucaccacggcu

SEQ ID NO: 1975525 - RNA, 19 nt, Artificial Sequence
  Description of Artificial Sequence: Synthetic oligonucleotide
ugguauaucaauagcuguc

SEQ ID NO: 1975526 - RNA, 19 nt, Artificial Sequence
  Description of Artificial Sequence: Synthetic oligonucleotide
aguuaggacauucgaucac

SEQ ID NO: 1975527 - RNA, 19 nt, Artificial Sequence
  Description of Artificial Sequence: Synthetic oligonucleotide
gggguuuaaagguucaccg

SEQ ID NO: 1975528 - RNA, 19 nt, Artificial Sequence
  Description of Artificial Sequence: Synthetic oligonucleotide
aaccaguacugccggcucc

SEQ ID NO: 1975529 - RNA, 19 nt, Artificial Sequence
  Description of Artificial Sequence: Synthetic oligonucleotide
uuagccaagaagucacagc

SEQ ID NO: 1975530 - RNA, 19 nt, Artificial Sequence
  Description of Artificial Sequence: Synthetic oligonucleotide
cuagugguauaucaauagc

SEQ ID NO: 1975531 - RNA, 19 nt, Artificial Sequence
  Description of Artificial Sequence: Synthetic oligonucleotide
uguuuugggcaccacgcug

SEQ ID NO: 1975532 - RNA, 19 nt, Artificial Sequence
  Description of Artificial Sequence: Synthetic oligonucleotide
aaaccaguacugccggcuc

SEQ ID NO: 1975533 - RNA, 19 nt, Artificial Sequence
  Description of Artificial Sequence: Synthetic oligonucleotide
gcuccgauagaccacaccg

SEQ ID NO: 1975534 - RNA, 19 nt, Artificial Sequence
  Description of Artificial Sequence: Synthetic oligonucleotide
aggcguacuuugcaagucc

SEQ ID NO: 1975535 - RNA, 19 nt, Artificial Sequence
  Description of Artificial Sequence: Synthetic oligonucleotide
uucaucccauccaacagac

SEQ ID NO: 1975536 - RNA, 19 nt, Artificial Sequence
  Description of Artificial Sequence: Synthetic oligonucleotide
cuguuagccaagaagucac

SEQ ID NO: 1975537 - RNA, 19 nt, Artificial Sequence
  Description of Artificial Sequence: Synthetic oligonucleotide
gacgcugaacuccuugcgg

SEQ ID NO: 1975538 - RNA, 19 nt, Artificial Sequence
  Description of Artificial Sequence: Synthetic oligonucleotide
uccgauagaccacaccgca

SEQ ID NO: 1975539 - RNA, 19 nt, Artificial Sequence
  Description of Artificial Sequence: Synthetic oligonucleotide
agugguauaucaauagcug

SEQ ID NO: 1975540 - RNA, 19 nt, Artificial Sequence
  Description of Artificial Sequence: Synthetic oligonucleotide
ugacgcugaacuccuugcg

SEQ ID NO: 1975541 - RNA, 19 nt, Artificial Sequence
  Description of Artificial Sequence: Synthetic oligonucleotide
aguaggaaggggcaaucug

SEQ ID NO: 1975542 - RNA, 19 nt, Artificial Sequence
  Description of Artificial Sequence: Synthetic oligonucleotide
cucaacauggauauaugga

SEQ ID NO: 1975543 - RNA, 19 nt, Artificial Sequence
  Description of Artificial Sequence: Synthetic oligonucleotide
acuccaaauccccucaaca

SEQ ID NO: 1975544 - RNA, 19 nt, Artificial Sequence
  Description of Artificial Sequence: Synthetic oligonucleotide
uguacaaucucaguccgaa

SEQ ID NO: 1975545 - RNA, 19 nt, Artificial Sequence
  Description of Artificial Sequence: Synthetic oligonucleotide
uaucgcagaaacccucacc

SEQ ID NO: 1975546 - RNA, 19 nt, Artificial Sequence
  Description of Artificial Sequence: Synthetic oligonucleotide
gaucuugguucccaaacca

SEQ ID NO: 1975547 - RNA, 19 nt, Artificial Sequence
  Description of Artificial Sequence: Synthetic oligonucleotide
uauuugcaauugaagcaga

SEQ ID NO: 1975548 - RNA, 19 nt, Artificial Sequence
  Description of Artificial Sequence: Synthetic oligonucleotide
acaaucucaguccgaacca

SEQ ID NO: 1975549 - RNA, 19 nt, Artificial Sequence
  Description of Artificial Sequence: Synthetic oligonucleotide
cuagcagcaucuuucacca

SEQ ID NO: 1975550 - RNA, 19 nt, Artificial Sequence
  Description of Artificial Sequence: Synthetic oligonucleotide
auauauauauauauuuauu

SEQ ID NO: 1975551 - RNA, 19 nt, Artificial Sequence
  Description of Artificial Sequence: Synthetic oligonucleotide
aucacauacccagaccagg

SEQ ID NO: 1975552 - RNA, 19 nt, Artificial Sequence
  Description of Artificial Sequence: Synthetic oligonucleotide
cugaaauaaaugcaaugga

SEQ ID NO: 1975553 - RNA, 19 nt, Artificial Sequence
  Description of Artificial Sequence: Synthetic oligonucleotide
uacagguagauagucauua

SEQ ID NO: 1975554 - RNA, 19 nt, Artificial Sequence
  Description of Artificial Sequence: Synthetic oligonucleotide
ucgaucacauacccagacc

SEQ ID NO: 1975555 - RNA, 19 nt, Artificial Sequence
  Description of Artificial Sequence: Synthetic oligonucleotide
agaagcagcccagucacuc

SEQ ID NO: 1975556 - RNA, 19 nt, Artificial Sequence
  Description of Artificial Sequence: Synthetic oligonucleotide
gacauuccuggccucguag

SEQ ID NO: 1975557 - RNA, 19 nt, Artificial Sequence
  Description of Artificial Sequence: Synthetic oligonucleotide
gauagucauuauuuuaacu

SEQ ID NO: 1975558 - RNA, 19 nt, Artificial Sequence
  Description of Artificial Sequence: Synthetic oligonucleotide
agaaacccucaccgcaggc

SEQ ID NO: 1975559 - RNA, 19 nt, Artificial Sequence
  Description of Artificial Sequence: Synthetic oligonucleotide
acucggacuggaugguccc

SEQ ID NO: 1975560 - RNA, 19 nt, Artificial Sequence
  Description of Artificial Sequence: Synthetic oligonucleotide
caagaagucacagccuuag

SEQ ID NO: 1975561 - RNA, 19 nt, Artificial Sequence
  Description of Artificial Sequence: Synthetic oligonucleotide
ucagacacugacugagcca

SEQ ID NO: 1975562 - RNA, 19 nt, Artificial Sequence
  Description of Artificial Sequence: Synthetic oligonucleotide
uggaggcagauguuuuggg

SEQ ID NO: 1975563 - RNA, 19 nt, Artificial Sequence
  Description of Artificial Sequence: Synthetic oligonucleotide
caaucaguguuccaccuuc

SEQ ID NO: 1975564 - RNA, 19 nt, Artificial Sequence
  Description of Artificial Sequence: Synthetic oligonucleotide
uucgaugagcagcuaucgc

SEQ ID NO: 1975565 - RNA, 19 nt, Artificial Sequence
  Description of Artificial Sequence: Synthetic oligonucleotide
guagauagucauuauuuua

SEQ ID NO: 1975566 - RNA, 19 nt, Artificial Sequence
  Description of Artificial Sequence: Synthetic oligonucleotide
acacgcucggcaguggugc

SEQ ID NO: 1975567 - RNA, 19 nt, Artificial Sequence
  Description of Artificial Sequence: Synthetic oligonucleotide
aauggacucggguccauua

SEQ ID NO: 1975568 - RNA, 19 nt, Artificial Sequence
  Description of Artificial Sequence: Synthetic oligonucleotide
cuucgaugagcagcuaucg

SEQ ID NO: 1975569 - RNA, 19 nt, Artificial Sequence
  Description of Artificial Sequence: Synthetic oligonucleotide
aggucuacagccaggcucg

SEQ ID NO: 1975570 - RNA, 19 nt, Artificial Sequence
  Description of Artificial Sequence: Synthetic oligonucleotide
caggucuacagccaggcuc

SEQ ID NO: 1975571 - RNA, 19 nt, Artificial Sequence
  Description of Artificial Sequence: Synthetic oligonucleotide
ccuagugguauaucaauag

SEQ ID NO: 1975572 - RNA, 19 nt, Artificial Sequence
  Description of Artificial Sequence: Synthetic oligonucleotide
agccuuaguggguccaagg

SEQ ID NO: 1975573 - RNA, 19 nt, Artificial Sequence
  Description of Artificial Sequence: Synthetic oligonucleotide
agcagacucggacuggaug

SEQ ID NO: 1975574 - RNA, 19 nt, Artificial Sequence
  Description of Artificial Sequence: Synthetic oligonucleotide
uggacucggguccauuagc

SEQ ID NO: 1975575 - RNA, 19 nt, Artificial Sequence
  Description of Artificial Sequence: Synthetic oligonucleotide
agguagauagucauuauuu

SEQ ID NO: 1975576 - RNA, 19 nt, Artificial Sequence
  Description of Artificial Sequence: Synthetic oligonucleotide
acauacccagaccaggcgu

SEQ ID NO: 1975577 - RNA, 19 nt, Artificial Sequence
  Description of Artificial Sequence: Synthetic oligonucleotide
uaaaugcaauggacucggg

SEQ ID NO: 1975578 - RNA, 19 nt, Artificial Sequence
  Description of Artificial Sequence: Synthetic oligonucleotide
gucaugggagcacucauca

SEQ ID NO: 1975579 - RNA, 19 nt, Artificial Sequence
  Description of Artificial Sequence: Synthetic oligonucleotide
ggguuuaaagguucaccgg

SEQ ID NO: 1975580 - RNA, 19 nt, Artificial Sequence
  Description of Artificial Sequence: Synthetic oligonucleotide
guuuaaagguucaccgggc

SEQ ID NO: 1975581 - RNA, 19 nt, Artificial Sequence
  Description of Artificial Sequence: Synthetic oligonucleotide
gcaauugaagcagacucgg

SEQ ID NO: 1975582 - RNA, 19 nt, Artificial Sequence
  Description of Artificial Sequence: Synthetic oligonucleotide
uaaagguucaccgggcuuu

SEQ ID NO: 1975583 - RNA, 19 nt, Artificial Sequence
  Description of Artificial Sequence: Synthetic oligonucleotide
gaaacccucaccgcaggcc

SEQ ID NO: 1975584 - RNA, 19 nt, Artificial Sequence
  Description of Artificial Sequence: Synthetic oligonucleotide
ccucaacauggauauaugg

SEQ ID NO: 1975585 - RNA, 19 nt, Artificial Sequence
  Description of Artificial Sequence: Synthetic oligonucleotide
cuugcggcaguuguggcag

SEQ ID NO: 1975586 - RNA, 19 nt, Artificial Sequence
  Description of Artificial Sequence: Synthetic oligonucleotide
ugggaguugggccuccagu

SEQ ID NO: 1975587 - RNA, 19 nt, Artificial Sequence
  Description of Artificial Sequence: Synthetic oligonucleotide
uguuagccaagaagucaca

SEQ ID NO: 1975588 - RNA, 19 nt, Artificial Sequence
  Description of Artificial Sequence: Synthetic oligonucleotide
ggugguucaugccuucagg

SEQ ID NO: 1975589 - RNA, 19 nt, Artificial Sequence
  Description of Artificial Sequence: Synthetic oligonucleotide
uauggagauacagguagau

SEQ ID NO: 1975590 - RNA, 19 nt, Artificial Sequence
  Description of Artificial Sequence: Synthetic oligonucleotide
cacauacccagaccaggcg

SEQ ID NO: 1975591 - RNA, 19 nt, Artificial Sequence
  Description of Artificial Sequence: Synthetic oligonucleotide
cuuaguggguccaaggcua

SEQ ID NO: 1975592 - RNA, 19 nt, Artificial Sequence
  Description of Artificial Sequence: Synthetic oligonucleotide
guauaucaauagcugucac

SEQ ID NO: 1975593 - RNA, 19 nt, Artificial Sequence
  Description of Artificial Sequence: Synthetic oligonucleotide
uuaggacauucgaucacau

SEQ ID NO: 1975594 - RNA, 19 nt, Artificial Sequence
  Description of Artificial Sequence: Synthetic oligonucleotide
cucguagcaguugucacac

SEQ ID NO: 1975595 - RNA, 19 nt, Artificial Sequence
  Description of Artificial Sequence: Synthetic oligonucleotide
guacugccggcuccgauag

SEQ ID NO: 1975596 - RNA, 19 nt, Artificial Sequence
  Description of Artificial Sequence: Synthetic oligonucleotide
ucucaguccgaaccacugu

SEQ ID NO: 1975597 - RNA, 19 nt, Artificial Sequence
  Description of Artificial Sequence: Synthetic oligonucleotide
auuggacauuccuggccuc

SEQ ID NO: 1975598 - RNA, 19 nt, Artificial Sequence
  Description of Artificial Sequence: Synthetic oligonucleotide
cuccgauagaccacaccgc

SEQ ID NO: 1975599 - RNA, 19 nt, Artificial Sequence
  Description of Artificial Sequence: Synthetic oligonucleotide
cacaucuaauuggacauuc

SEQ ID NO: 1975600 - RNA, 19 nt, Artificial Sequence
  Description of Artificial Sequence: Synthetic oligonucleotide
agcagcuaucgcagaaacc

SEQ ID NO: 1975601 - RNA, 19 nt, Artificial Sequence
  Description of Artificial Sequence: Synthetic oligonucleotide
ggaucuugguucccaaacc

SEQ ID NO: 1975602 - RNA, 19 nt, Artificial Sequence
  Description of Artificial Sequence: Synthetic oligonucleotide
uaucaauagcugucaccac

SEQ ID NO: 1975603 - RNA, 19 nt, Artificial Sequence
  Description of Artificial Sequence: Synthetic oligonucleotide
guuaggacauucgaucaca

SEQ ID NO: 1975604 - RNA, 19 nt, Artificial Sequence
  Description of Artificial Sequence: Synthetic oligonucleotide
aguacugccggcuccgaua

SEQ ID NO: 1975605 - RNA, 19 nt, Artificial Sequence
  Description of Artificial Sequence: Synthetic oligonucleotide
ugccggcuccgauagacca

SEQ ID NO: 1975606 - RNA, 19 nt, Artificial Sequence
  Description of Artificial Sequence: Synthetic oligonucleotide
aggcuaagcucagacacug

SEQ ID NO: 1975607 - RNA, 19 nt, Artificial Sequence
  Description of Artificial Sequence: Synthetic oligonucleotide
gacucggacuggauggucc

SEQ ID NO: 1975608 - RNA, 19 nt, Artificial Sequence
  Description of Artificial Sequence: Synthetic oligonucleotide
aaucucaguccgaaccacu

SEQ ID NO: 1975609 - RNA, 19 nt, Artificial Sequence
  Description of Artificial Sequence: Synthetic oligonucleotide
gagaugcucgguccucugc

SEQ ID NO: 1975610 - RNA, 19 nt, Artificial Sequence
  Description of Artificial Sequence: Synthetic oligonucleotide
ggaggcagauguuuugggc

SEQ ID NO: 1975611 - RNA, 19 nt, Artificial Sequence
  Description of Artificial Sequence: Synthetic oligonucleotide
auguuuugggcaccacgcu

SEQ ID NO: 1975612 - RNA, 19 nt, Artificial Sequence
  Description of Artificial Sequence: Synthetic oligonucleotide
ugacugagccaugaaguuc

SEQ ID NO: 1975613 - RNA, 19 nt, Artificial Sequence
  Description of Artificial Sequence: Synthetic oligonucleotide
ucaguccgaaccacuguau

SEQ ID NO: 1975614 - RNA, 19 nt, Artificial Sequence
  Description of Artificial Sequence: Synthetic oligonucleotide
agucauuauuuuaacugaa

SEQ ID NO: 1975615 - RNA, 19 nt, Artificial Sequence
  Description of Artificial Sequence: Synthetic oligonucleotide
auuuaagaagcagcccagu

SEQ ID NO: 1975616 - RNA, 19 nt, Artificial Sequence
  Description of Artificial Sequence: Synthetic oligonucleotide
caggccuagugguauauca

SEQ ID NO: 1975617 - RNA, 19 nt, Artificial Sequence
  Description of Artificial Sequence: Synthetic oligonucleotide
aaggcuaagcucagacacu

SEQ ID NO: 1975618 - RNA, 19 nt, Artificial Sequence
  Description of Artificial Sequence: Synthetic oligonucleotide
augggguuuaaagguucac

SEQ ID NO: 1975619 - RNA, 19 nt, Artificial Sequence
  Description of Artificial Sequence: Synthetic oligonucleotide
cagaaacccucaccgcagg

SEQ ID NO: 1975620 - RNA, 19 nt, Artificial Sequence
  Description of Artificial Sequence: Synthetic oligonucleotide
uggagagcuuugacgcuga

SEQ ID NO: 1975621 - RNA, 19 nt, Artificial Sequence
  Description of Artificial Sequence: Synthetic oligonucleotide
acagguagauagucauuau

SEQ ID NO: 1975622 - RNA, 19 nt, Artificial Sequence
  Description of Artificial Sequence: Synthetic oligonucleotide
uuaguggguccaaggcuaa

SEQ ID NO: 1975623 - RNA, 19 nt, Artificial Sequence
  Description of Artificial Sequence: Synthetic oligonucleotide
guacuuugcaagucccauc

SEQ ID NO: 1975624 - RNA, 19 nt, Artificial Sequence
  Description of Artificial Sequence: Synthetic oligonucleotide
gacacugacugagccauga

SEQ ID NO: 1975625 - RNA, 19 nt, Artificial Sequence
  Description of Artificial Sequence: Synthetic oligonucleotide
gcaaucuggucuguuagcc

SEQ ID NO: 1975626 - RNA, 19 nt, Artificial Sequence
  Description of Artificial Sequence: Synthetic oligonucleotide
ucauggucgggcacccagu

SEQ ID NO: 1975627 - RNA, 19 nt, Artificial Sequence
  Description of Artificial Sequence: Synthetic oligonucleotide
caguaggccggccuagcag

SEQ ID NO: 1975628 - RNA, 19 nt, Artificial Sequence
  Description of Artificial Sequence: Synthetic oligonucleotide
accgcaguuaggacauucg

SEQ ID NO: 1975629 - RNA, 19 nt, Artificial Sequence
  Description of Artificial Sequence: Synthetic oligonucleotide
guuuugggcaccacgcuga

SEQ ID NO: 1975630 - RNA, 19 nt, Artificial Sequence
  Description of Artificial Sequence: Synthetic oligonucleotide
ucgcagaaacccucaccgc

SEQ ID NO: 1975631 - RNA, 19 nt, Artificial Sequence
  Description of Artificial Sequence: Synthetic oligonucleotide
auuccuggccucguagcag

SEQ ID NO: 1975632 - RNA, 19 nt, Artificial Sequence
  Description of Artificial Sequence: Synthetic oligonucleotide
uuuugggcaccacgcugac

SEQ ID NO: 1975633 - RNA, 19 nt, Artificial Sequence
  Description of Artificial Sequence: Synthetic oligonucleotide
cugccugcgccucagucac

SEQ ID NO: 1975634 - RNA, 19 nt, Artificial Sequence
  Description of Artificial Sequence: Synthetic oligonucleotide
caucuaauuggacauuccu

SEQ ID NO: 1975635 - RNA, 19 nt, Artificial Sequence
  Description of Artificial Sequence: Synthetic oligonucleotide
ucccaguccucgagagggg

SEQ ID NO: 1975636 - RNA, 19 nt, Artificial Sequence
  Description of Artificial Sequence: Synthetic oligonucleotide
uuccgggcaaucaguguuc

SEQ ID NO: 1975637 - RNA, 19 nt, Artificial Sequence
  Description of Artificial Sequence: Synthetic oligonucleotide
ucgguccucugcccugagg

SEQ ID NO: 1975638 - RNA, 19 nt, Artificial Sequence
  Description of Artificial Sequence: Synthetic oligonucleotide
ggucuguuagccaagaagu

SEQ ID NO: 1975639 - RNA, 19 nt, Artificial Sequence
  Description of Artificial Sequence: Synthetic oligonucleotide
gagcuuugacgcugaacuc

SEQ ID NO: 1975640 - RNA, 19 nt, Artificial Sequence
  Description of Artificial Sequence: Synthetic oligonucleotide
uuacugagagaugcucggu

SEQ ID NO: 1975641 - RNA, 19 nt, Artificial Sequence
  Description of Artificial Sequence: Synthetic oligonucleotide
gguucaugccuucaggucu

SEQ ID NO: 1975642 - RNA, 19 nt, Artificial Sequence
  Description of Artificial Sequence: Synthetic oligonucleotide
gaugggguuuaaagguuca

SEQ ID NO: 1975643 - RNA, 19 nt, Artificial Sequence
  Description of Artificial Sequence: Synthetic oligonucleotide
auauauggagauacaggua

SEQ ID NO: 1975644 - RNA, 19 nt, Artificial Sequence
  Description of Artificial Sequence: Synthetic oligonucleotide
ggaaggggcaaucuggucu

SEQ ID NO: 1975645 - RNA, 19 nt, Artificial Sequence
  Description of Artificial Sequence: Synthetic oligonucleotide
caauagcugucaccacggc

SEQ ID NO: 1975646 - RNA, 19 nt, Artificial Sequence
  Description of Artificial Sequence: Synthetic oligonucleotide
gacagcccuccggucaugg

SEQ ID NO: 1975647 - RNA, 19 nt, Artificial Sequence
  Description of Artificial Sequence: Synthetic oligonucleotide
cuaucgcagaaacccucac

SEQ ID NO: 1975648 - RNA, 19 nt, Artificial Sequence
  Description of Artificial Sequence: Synthetic oligonucleotide
guccgaaccacuguaucca

SEQ ID NO: 1975649 - RNA, 19 nt, Artificial Sequence
  Description of Artificial Sequence: Synthetic oligonucleotide
ggaguugggccuccaguag

SEQ ID NO: 1975650 - RNA, 19 nt, Artificial Sequence
  Description of Artificial Sequence: Synthetic oligonucleotide
aucaguguuccaccuucau

SEQ ID NO: 1975651 - RNA, 19 nt, Artificial Sequence
  Description of Artificial Sequence: Synthetic oligonucleotide
aggccggccuagcagcauc

SEQ ID NO: 1975652 - RNA, 19 nt, Artificial Sequence
  Description of Artificial Sequence: Synthetic oligonucleotide
uggugucauuuucuuugaa

SEQ ID NO: 1975653 - RNA, 19 nt, Artificial Sequence
  Description of Artificial Sequence: Synthetic oligonucleotide
caaucucaguccgaaccac

SEQ ID NO: 1975654 - RNA, 19 nt, Artificial Sequence
  Description of Artificial Sequence: Synthetic oligonucleotide
cccaagguguucugcacgg

SEQ ID NO: 1975655 - RNA, 19 nt, Artificial Sequence
  Description of Artificial Sequence: Synthetic oligonucleotide
gucacagccuuaguggguc

SEQ ID NO: 1975656 - RNA, 19 nt, Artificial Sequence
  Description of Artificial Sequence: Synthetic oligonucleotide
ggcaaucuggucuguuagc

SEQ ID NO: 1975657 - RNA, 19 nt, Artificial Sequence
  Description of Artificial Sequence: Synthetic oligonucleotide
accacggcucccaaggugu

SEQ ID NO: 1975658 - RNA, 19 nt, Artificial Sequence
  Description of Artificial Sequence: Synthetic oligonucleotide
auggucgggcacccaguag

SEQ ID NO: 1975659 - RNA, 19 nt, Artificial Sequence
  Description of Artificial Sequence: Synthetic oligonucleotide
auauggagauacagguaga

SEQ ID NO: 1975660 - RNA, 19 nt, Artificial Sequence
  Description of Artificial Sequence: Synthetic oligonucleotide
ugcaauggacucgggucca

SEQ ID NO: 1975661 - RNA, 19 nt, Artificial Sequence
  Description of Artificial Sequence: Synthetic oligonucleotide
caguccgaaccacuguauc

SEQ ID NO: 1975662 - RNA, 19 nt, Artificial Sequence
  Description of Artificial Sequence: Synthetic oligonucleotide
uccuugcggcaguuguggc

SEQ ID NO: 1975663 - RNA, 19 nt, Artificial Sequence
  Description of Artificial Sequence: Synthetic oligonucleotide
ggcucgccuccacugaggg

SEQ ID NO: 1975664 - RNA, 19 nt, Artificial Sequence
  Description of Artificial Sequence: Synthetic oligonucleotide
ucaccacggcucccaaggu

SEQ ID NO: 1975665 - RNA, 19 nt, Artificial Sequence
  Description of Artificial Sequence: Synthetic oligonucleotide
uccgggcaaucaguguucc

SEQ ID NO: 1975666 - RNA, 19 nt, Artificial Sequence
  Description of Artificial Sequence: Synthetic oligonucleotide
caauugaagcagacucgga

SEQ ID NO: 1975667 - RNA, 19 nt, Artificial Sequence
  Description of Artificial Sequence: Synthetic oligonucleotide
ugcgccucagucacaucua

SEQ ID NO: 1975668 - RNA, 19 nt, Artificial Sequence
  Description of Artificial Sequence: Synthetic oligonucleotide
acauucgaucacauaccca

SEQ ID NO: 1975669 - RNA, 19 nt, Artificial Sequence
  Description of Artificial Sequence: Synthetic oligonucleotide
agacucggacuggaugguc

SEQ ID NO: 1975670 - RNA, 19 nt, Artificial Sequence
  Description of Artificial Sequence: Synthetic oligonucleotide
aacccucaccgcaggcccg

SEQ ID NO: 1975671 - RNA, 19 nt, Artificial Sequence
  Description of Artificial Sequence: Synthetic oligonucleotide
cucaguccgaaccacugua

SEQ ID NO: 1975672 - RNA, 19 nt, Artificial Sequence
  Description of Artificial Sequence: Synthetic oligonucleotide
caccacggcucccaaggug

SEQ ID NO: 1975673 - RNA, 19 nt, Artificial Sequence
  Description of Artificial Sequence: Synthetic oligonucleotide
agcccuccggucaugggag

SEQ ID NO: 1975674 - RNA, 19 nt, Artificial Sequence
  Description of Artificial Sequence: Synthetic oligonucleotide
ggacucggguccauuagcc

SEQ ID NO: 1975675 - RNA, 19 nt, Artificial Sequence
  Description of Artificial Sequence: Synthetic oligonucleotide
acggcucccaagguguucu

SEQ ID NO: 1975676 - RNA, 19 nt, Artificial Sequence
  Description of Artificial Sequence: Synthetic oligonucleotide
acgcggacgggugcaggcc

SEQ ID NO: 1975677 - RNA, 19 nt, Artificial Sequence
  Description of Artificial Sequence: Synthetic oligonucleotide
cacacgcucggcaguggug

SEQ ID NO: 1975678 - RNA, 19 nt, Artificial Sequence
  Description of Artificial Sequence: Synthetic oligonucleotide
cgaucacauacccagacca

SEQ ID NO: 1975679 - RNA, 19 nt, Artificial Sequence
  Description of Artificial Sequence: Synthetic oligonucleotide
auggagauacagguagaua

SEQ ID NO: 1975680 - RNA, 19 nt, Artificial Sequence
  Description of Artificial Sequence: Synthetic oligonucleotide
auucgaucacauacccaga

SEQ ID NO: 1975681 - RNA, 19 nt, Artificial Sequence
  Description of Artificial Sequence: Synthetic oligonucleotide
cauacccagaccaggcgua

SEQ ID NO: 1975682 - RNA, 19 nt, Artificial Sequence
  Description of Artificial Sequence: Synthetic oligonucleotide
gguagauagucauuauuuu

SEQ ID NO: 1975683 - RNA, 19 nt, Artificial Sequence
  Description of Artificial Sequence: Synthetic oligonucleotide
accggccgcgucuucgaug

SEQ ID NO: 1975684 - RNA, 19 nt, Artificial Sequence
  Description of Artificial Sequence: Synthetic oligonucleotide
aucugggaguugggccucc

SEQ ID NO: 1975685 - RNA, 19 nt, Artificial Sequence
  Description of Artificial Sequence: Synthetic oligonucleotide
acauggauauauggagaua

SEQ ID NO: 1975686 - RNA, 19 nt, Artificial Sequence
  Description of Artificial Sequence: Synthetic oligonucleotide
ggcguacuuugcaaguccc

SEQ ID NO: 1975687 - RNA, 19 nt, Artificial Sequence
  Description of Artificial Sequence: Synthetic oligonucleotide
agcuauuguuguuguccuu

SEQ ID NO: 1975688 - RNA, 19 nt, Artificial Sequence
  Description of Artificial Sequence: Synthetic oligonucleotide
ccggcaauggugcuuggug

SEQ ID NO: 1975689 - RNA, 19 nt, Artificial Sequence
  Description of Artificial Sequence: Synthetic oligonucleotide
ggguccauuagccuuuacu

SEQ ID NO: 1975690 - RNA, 19 nt, Artificial Sequence
  Description of Artificial Sequence: Synthetic oligonucleotide
cugggaguugggccuccag

SEQ ID NO: 1975691 - RNA, 19 nt, Artificial Sequence
  Description of Artificial Sequence: Synthetic oligonucleotide
cagcuauuguuguuguccu

SEQ ID NO: 1975692 - RNA, 19 nt, Artificial Sequence
  Description of Artificial Sequence: Synthetic oligonucleotide
gggaguugggccuccagua

SEQ ID NO: 1975693 - RNA, 19 nt, Artificial Sequence
  Description of Artificial Sequence: Synthetic oligonucleotide
cuuccgggcaaucaguguu

SEQ ID NO: 1975694 - RNA, 19 nt, Artificial Sequence
  Description of Artificial Sequence: Synthetic oligonucleotide
ccagaccaggcguacuuug

SEQ ID NO: 1975695 - RNA, 19 nt, Artificial Sequence
  Description of Artificial Sequence: Synthetic oligonucleotide
cacaccgcaguuaggacau

SEQ ID NO: 1975696 - RNA, 19 nt, Artificial Sequence
  Description of Artificial Sequence: Synthetic oligonucleotide
ggcuccgauagaccacacc

SEQ ID NO: 1975697 - RNA, 19 nt, Artificial Sequence
  Description of Artificial Sequence: Synthetic oligonucleotide
aggccuagugguauaucaa

SEQ ID NO: 1975698 - RNA, 19 nt, Artificial Sequence
  Description of Artificial Sequence: Synthetic oligonucleotide
gacucggguccauuagccu

SEQ ID NO: 1975699 - RNA, 19 nt, Artificial Sequence
  Description of Artificial Sequence: Synthetic oligonucleotide
gucuucgaugagcagcuau

SEQ ID NO: 1975700 - RNA, 19 nt, Artificial Sequence
  Description of Artificial Sequence: Synthetic oligonucleotide
ccacaccgcaguuaggaca

SEQ ID NO: 1975701 - RNA, 19 nt, Artificial Sequence
  Description of Artificial Sequence: Synthetic oligonucleotide
acccucaccgcaggcccgg

SEQ ID NO: 1975702 - RNA, 19 nt, Artificial Sequence
  Description of Artificial Sequence: Synthetic oligonucleotide
cagccuuaguggguccaag

SEQ ID NO: 1975703 - RNA, 19 nt, Artificial Sequence
  Description of Artificial Sequence: Synthetic oligonucleotide
gccucguagcaguugucac

SEQ ID NO: 1975704 - RNA, 19 nt, Artificial Sequence
  Description of Artificial Sequence: Synthetic oligonucleotide
acacgcggacgggugcagg

SEQ ID NO: 1975705 - RNA, 19 nt, Artificial Sequence
  Description of Artificial Sequence: Synthetic oligonucleotide
cgggcaaucaguguuccac

SEQ ID NO: 1975706 - RNA, 19 nt, Artificial Sequence
  Description of Artificial Sequence: Synthetic oligonucleotide
ccucguagcaguugucaca

SEQ ID NO: 1975707 - RNA, 19 nt, Artificial Sequence
  Description of Artificial Sequence: Synthetic oligonucleotide
gcuaucgcagaaacccuca

SEQ ID NO: 1975708 - RNA, 19 nt, Artificial Sequence
  Description of Artificial Sequence: Synthetic oligonucleotide
uacccagaccaggcguacu

SEQ ID NO: 1975709 - RNA, 19 nt, Artificial Sequence
  Description of Artificial Sequence: Synthetic oligonucleotide
caggaucuugguucccaaa

SEQ ID NO: 1975710 - RNA, 19 nt, Artificial Sequence
  Description of Artificial Sequence: Synthetic oligonucleotide
gagagaugcucgguccucu

SEQ ID NO: 1975711 - RNA, 19 nt, Artificial Sequence
  Description of Artificial Sequence: Synthetic oligonucleotide
cggccuagcagcaucuuuc

SEQ ID NO: 1975712 - RNA, 19 nt, Artificial Sequence
  Description of Artificial Sequence: Synthetic oligonucleotide
ccaaggcuaagcucagaca

SEQ ID NO: 1975713 - RNA, 19 nt, Artificial Sequence
  Description of Artificial Sequence: Synthetic oligonucleotide
uucaugccuucaggucuac

SEQ ID NO: 1975714 - RNA, 19 nt, Artificial Sequence
  Description of Artificial Sequence: Synthetic oligonucleotide
ggcaccggccgcgucuucg

SEQ ID NO: 1975715 - RNA, 19 nt, Artificial Sequence
  Description of Artificial Sequence: Synthetic oligonucleotide
ggcaaucaguguuccaccu

SEQ ID NO: 1975716 - RNA, 19 nt, Artificial Sequence
  Description of Artificial Sequence: Synthetic oligonucleotide
aagcagacucggacuggau

SEQ ID NO: 1975717 - RNA, 19 nt, Artificial Sequence
  Description of Artificial Sequence: Synthetic oligonucleotide
cauggucgggcacccagua

SEQ ID NO: 1975718 - RNA, 19 nt, Artificial Sequence
  Description of Artificial Sequence: Synthetic oligonucleotide
uacugccggcuccgauaga

SEQ ID NO: 1975719 - RNA, 19 nt, Artificial Sequence
  Description of Artificial Sequence: Synthetic oligonucleotide
ggggcaaucuggucuguua

SEQ ID NO: 1975720 - RNA, 19 nt, Artificial Sequence
  Description of Artificial Sequence: Synthetic oligonucleotide
ggucgggcacccaguaggc

SEQ ID NO: 1975721 - RNA, 19 nt, Artificial Sequence
  Description of Artificial Sequence: Synthetic oligonucleotide
cccgcucaggcaccggccg

SEQ ID NO: 1975722 - RNA, 19 nt, Artificial Sequence
  Description of Artificial Sequence: Synthetic oligonucleotide
gcaauggugcuugguguca

SEQ ID NO: 1975723 - RNA, 19 nt, Artificial Sequence
  Description of Artificial Sequence: Synthetic oligonucleotide
ggccgcgucuucgaugagc

SEQ ID NO: 1975724 - RNA, 19 nt, Artificial Sequence
  Description of Artificial Sequence: Synthetic oligonucleotide
gccgcgucuucgaugagca

SEQ ID NO: 1975725 - RNA, 19 nt, Artificial Sequence
  Description of Artificial Sequence: Synthetic oligonucleotide
caguggugcuuggagagcu

SEQ ID NO: 1975726 - RNA, 19 nt, Artificial Sequence
  Description of Artificial Sequence: Synthetic oligonucleotide
gccuagugguauaucaaua

SEQ ID NO: 1975727 - RNA, 19 nt, Artificial Sequence
  Description of Artificial Sequence: Synthetic oligonucleotide
ugggcaccacgcugaccuc

SEQ ID NO: 1975728 - RNA, 19 nt, Artificial Sequence
  Description of Artificial Sequence: Synthetic oligonucleotide
guaggccggccuagcagca

SEQ ID NO: 1975729 - RNA, 19 nt, Artificial Sequence
  Description of Artificial Sequence: Synthetic oligonucleotide
cucgcccaccuuccgggca

SEQ ID NO: 1975730 - RNA, 19 nt, Artificial Sequence
  Description of Artificial Sequence: Synthetic oligonucleotide
gaagcccuguccacacgcu

SEQ ID NO: 1975731 - RNA, 19 nt, Artificial Sequence
  Description of Artificial Sequence: Synthetic oligonucleotide
gucacacacgcggacgggu

SEQ ID NO: 1975732 - RNA, 19 nt, Artificial Sequence
  Description of Artificial Sequence: Synthetic oligonucleotide
ccggccgcgucuucgauga

SEQ ID NO: 1975733 - RNA, 19 nt, Artificial Sequence
  Description of Artificial Sequence: Synthetic oligonucleotide
caccuuccgggcaaucagu

SEQ ID NO: 1975734 - RNA, 19 nt, Artificial Sequence
  Description of Artificial Sequence: Synthetic oligonucleotide
cacacgcggacgggugcag

SEQ ID NO: 1975735 - RNA, 19 nt, Artificial Sequence
  Description of Artificial Sequence: Synthetic oligonucleotide
gccuagcagcaucuuucac

SEQ ID NO: 1975736 - RNA, 19 nt, Artificial Sequence
  Description of Artificial Sequence: Synthetic oligonucleotide
cucgguccucugcccugag

SEQ ID NO: 1975737 - RNA, 19 nt, Artificial Sequence
  Description of Artificial Sequence: Synthetic oligonucleotide
guccucgagaggggacagc

SEQ ID NO: 1975738 - RNA, 19 nt, Artificial Sequence
  Description of Artificial Sequence: Synthetic oligonucleotide
ccgcaguuaggacauucga

SEQ ID NO: 1975739 - RNA, 19 nt, Artificial Sequence
  Description of Artificial Sequence: Synthetic oligonucleotide
gccccgcucaggcaccggc

SEQ ID NO: 1975740 - RNA, 19 nt, Artificial Sequence
  Description of Artificial Sequence: Synthetic oligonucleotide
gcuuugacgcugaacuccu

SEQ ID NO: 1975741 - RNA, 19 nt, Artificial Sequence
  Description of Artificial Sequence: Synthetic oligonucleotide
aacagacgcugggcagcua

SEQ ID NO: 1975742 - RNA, 19 nt, Artificial Sequence
  Description of Artificial Sequence: Synthetic oligonucleotide
acugagggaugggguuuaa

SEQ ID NO: 1975743 - RNA, 19 nt, Artificial Sequence
  Description of Artificial Sequence: Synthetic oligonucleotide
uaggccggccuagcagcau

SEQ ID NO: 1975744 - RNA, 19 nt, Artificial Sequence
  Description of Artificial Sequence: Synthetic oligonucleotide
caguaggaaggggcaaucu

SEQ ID NO: 1975745 - RNA, 19 nt, Artificial Sequence
  Description of Artificial Sequence: Synthetic oligonucleotide
ucggguccauuagccuuua

SEQ ID NO: 1975746 - RNA, 19 nt, Artificial Sequence
  Description of Artificial Sequence: Synthetic oligonucleotide
gcgucuucgaugagcagcu

SEQ ID NO: 1975747 - RNA, 19 nt, Artificial Sequence
  Description of Artificial Sequence: Synthetic oligonucleotide
cgauagaccacaccgcagu

SEQ ID NO: 1975748 - RNA, 19 nt, Artificial Sequence
  Description of Artificial Sequence: Synthetic oligonucleotide
gcguacuuugcaaguccca

SEQ ID NO: 1975749 - RNA, 19 nt, Artificial Sequence
  Description of Artificial Sequence: Synthetic oligonucleotide
cucggacuggaugguccca

SEQ ID NO: 1975750 - RNA, 19 nt, Artificial Sequence
  Description of Artificial Sequence: Synthetic oligonucleotide
gcaaucaguguuccaccuu

SEQ ID NO: 1975751 - RNA, 19 nt, Artificial Sequence
  Description of Artificial Sequence: Synthetic oligonucleotide
ccaguaggccggccuagca

SEQ ID NO: 1975752 - RNA, 19 nt, Artificial Sequence
  Description of Artificial Sequence: Synthetic oligonucleotide
ggcuaagcucagacacuga

SEQ ID NO: 1975753 - RNA, 19 nt, Artificial Sequence
  Description of Artificial Sequence: Synthetic oligonucleotide
ccuccggucaugggagcac

SEQ ID NO: 1975754 - RNA, 19 nt, Artificial Sequence
  Description of Artificial Sequence: Synthetic oligonucleotide
caauggugcuuggugucau

SEQ ID NO: 1975755 - RNA, 19 nt, Artificial Sequence
  Description of Artificial Sequence: Synthetic oligonucleotide
cgcggacgggugcaggccc

SEQ ID NO: 1975756 - RNA, 19 nt, Artificial Sequence
  Description of Artificial Sequence: Synthetic oligonucleotide
agccccgcucaggcaccgg

SEQ ID NO: 1975757 - RNA, 19 nt, Artificial Sequence
  Description of Artificial Sequence: Synthetic oligonucleotide
cagacucggacuggauggu

SEQ ID NO: 1975758 - RNA, 19 nt, Artificial Sequence
  Description of Artificial Sequence: Synthetic oligonucleotide
cgcaguuaggacauucgau

SEQ ID NO: 1975759 - RNA, 19 nt, Artificial Sequence
  Description of Artificial Sequence: Synthetic oligonucleotide
ggucuacagccaggcucgc

SEQ ID NO: 1975760 - RNA, 19 nt, Artificial Sequence
  Description of Artificial Sequence: Synthetic oligonucleotide
gcaccggccgcgucuucga

SEQ ID NO: 1975761 - RNA, 19 nt, Artificial Sequence
  Description of Artificial Sequence: Synthetic oligonucleotide
acgcucggcaguggugcuu

SEQ ID NO: 1975762 - RNA, 19 nt, Artificial Sequence
  Description of Artificial Sequence: Synthetic oligonucleotide
ccggcuccgauagaccaca

SEQ ID NO: 1975763 - RNA, 19 nt, Artificial Sequence
  Description of Artificial Sequence: Synthetic oligonucleotide
gcucgccuccacugaggga

SEQ ID NO: 1975764 - RNA, 19 nt, Artificial Sequence
  Description of Artificial Sequence: Synthetic oligonucleotide
ccgcucaggcaccggccgc

SEQ ID NO: 1975765 - RNA, 19 nt, Artificial Sequence
  Description of Artificial Sequence: Synthetic oligonucleotide
ccaggccuagugguauauc

SEQ ID NO: 1975766 - RNA, 19 nt, Artificial Sequence
  Description of Artificial Sequence: Synthetic oligonucleotide
ccggucaugggagcacuca

SEQ ID NO: 1975767 - RNA, 19 nt, Artificial Sequence
  Description of Artificial Sequence: Synthetic oligonucleotide
caguacugccggcuccgau

SEQ ID NO: 1975768 - RNA, 19 nt, Artificial Sequence
  Description of Artificial Sequence: Synthetic oligonucleotide
gcggacgggugcaggcccc

SEQ ID NO: 1975769 - RNA, 19 nt, Artificial Sequence
  Description of Artificial Sequence: Synthetic oligonucleotide
ccgcgucuucgaugagcag

SEQ ID NO: 1975770 - RNA, 19 nt, Artificial Sequence
  Description of Artificial Sequence: Synthetic oligonucleotide
gcucgguccucugcccuga

SEQ ID NO: 1975771 - RNA, 19 nt, Artificial Sequence
  Description of Artificial Sequence: Synthetic oligonucleotide
cacgcucggcaguggugcu

SEQ ID NO: 1975772 - RNA, 19 nt, Artificial Sequence
  Description of Artificial Sequence: Synthetic oligonucleotide
caauggacucggguccauu

SEQ ID NO: 1975773 - RNA, 19 nt, Artificial Sequence
  Description of Artificial Sequence: Synthetic oligonucleotide
ccauccagggagagucagu

SEQ ID NO: 1975774 - RNA, 19 nt, Artificial Sequence
  Description of Artificial Sequence: Synthetic oligonucleotide
ccucaccgcaggcccggca

SEQ ID NO: 1975775 - RNA, 19 nt, Artificial Sequence
  Description of Artificial Sequence: Synthetic oligonucleotide
ggccggccuagcagcaucu

SEQ ID NO: 1975776 - RNA, 19 nt, Artificial Sequence
  Description of Artificial Sequence: Synthetic oligonucleotide
cggcuccgauagaccacac

SEQ ID NO: 1975777 - RNA, 19 nt, Artificial Sequence
  Description of Artificial Sequence: Synthetic oligonucleotide
cggguccauuagccuuuac

SEQ ID NO: 1975778 - RNA, 19 nt, Artificial Sequence
  Description of Artificial Sequence: Synthetic oligonucleotide
gcaauggacucggguccau

SEQ ID NO: 1975779 - RNA, 19 nt, Artificial Sequence
  Description of Artificial Sequence: Synthetic oligonucleotide
caccggccgcgucuucgau

SEQ ID NO: 1975780 - RNA, 19 nt, Artificial Sequence
  Description of Artificial Sequence: Synthetic oligonucleotide
ccggccuagcagcaucuuu

SEQ ID NO: 1975781 - RNA, 19 nt, Artificial Sequence
  Description of Artificial Sequence: Synthetic oligonucleotide
cccucaccgcaggcccggc

SEQ ID NO: 1975782 - RNA, 19 nt, Artificial Sequence
  Description of Artificial Sequence: Synthetic oligonucleotide
gcucaggcaccggccgcgu

SEQ ID NO: 1975783 - RNA, 19 nt, Artificial Sequence
  Description of Artificial Sequence: Synthetic oligonucleotide
ccgcaggcccggcaauggu

SEQ ID NO: 1975784 - RNA, 19 nt, Artificial Sequence
  Description of Artificial Sequence: Synthetic oligonucleotide
cggccgcgucuucgaugag

SEQ ID NO: 1975785 - RNA, 19 nt, Artificial Sequence
  Description of Artificial Sequence: Synthetic oligonucleotide
gccggccuagcagcaucuu

SEQ ID NO: 1975786 - RNA, 19 nt, Artificial Sequence
  Description of Artificial Sequence: Synthetic oligonucleotide
cgucuucgaugagcagcua

SEQ ID NO: 1975787 - RNA, 19 nt, Artificial Sequence
  Description of Artificial Sequence: Synthetic oligonucleotide
aagaauucaugucagaauc

SEQ ID NO: 1975788 - RNA, 19 nt, Artificial Sequence
  Description of Artificial Sequence: Synthetic oligonucleotide
acuagggacagccauaugc

SEQ ID NO: 1975789 - RNA, 19 nt, Artificial Sequence
  Description of Artificial Sequence: Synthetic oligonucleotide
aggaagacaauaucuaugc

SEQ ID NO: 1975790 - RNA, 19 nt, Artificial Sequence
  Description of Artificial Sequence: Synthetic oligonucleotide
acauauguccaccagaguc

SEQ ID NO: 1975791 - RNA, 19 nt, Artificial Sequence
  Description of Artificial Sequence: Synthetic oligonucleotide
ucauacuuagggcagaggc

SEQ ID NO: 1975792 - RNA, 19 nt, Artificial Sequence
  Description of Artificial Sequence: Synthetic oligonucleotide
aagacaauaucuaugccgg

SEQ ID NO: 1975793 - RNA, 19 nt, Artificial Sequence
  Description of Artificial Sequence: Synthetic oligonucleotide
gaacacauggaauacguag

SEQ ID NO: 1975794 - RNA, 19 nt, Artificial Sequence
  Description of Artificial Sequence: Synthetic oligonucleotide
agugucagagcccagaaag

SEQ ID NO: 1975795 - RNA, 19 nt, Artificial Sequence
  Description of Artificial Sequence: Synthetic oligonucleotide
gaugguuuucuucacgugg

SEQ ID NO: 1975796 - RNA, 19 nt, Artificial Sequence
  Description of Artificial Sequence: Synthetic oligonucleotide
aagcauaagaauucauguc

SEQ ID NO: 1975797 - RNA, 19 nt, Artificial Sequence
  Description of Artificial Sequence: Synthetic oligonucleotide
auuccaugcacucagaaca

SEQ ID NO: 1975798 - RNA, 19 nt, Artificial Sequence
  Description of Artificial Sequence: Synthetic oligonucleotide
cuugcgauaggccacaugc

SEQ ID NO: 1975799 - RNA, 19 nt, Artificial Sequence
  Description of Artificial Sequence: Synthetic oligonucleotide
uugaauaacaggcugcaga

SEQ ID NO: 1975800 - RNA, 19 nt, Artificial Sequence
  Description of Artificial Sequence: Synthetic oligonucleotide
guauauuugggguagaaca

SEQ ID NO: 1975801 - RNA, 19 nt, Artificial Sequence
  Description of Artificial Sequence: Synthetic oligonucleotide
auucaugucagaaucaggg

SEQ ID NO: 1975802 - RNA, 19 nt, Artificial Sequence
  Description of Artificial Sequence: Synthetic oligonucleotide
agcauaagaauucauguca

SEQ ID NO: 1975803 - RNA, 19 nt, Artificial Sequence
  Description of Artificial Sequence: Synthetic oligonucleotide
ucaaagacgcuccaguuca

SEQ ID NO: 1975804 - RNA, 19 nt, Artificial Sequence
  Description of Artificial Sequence: Synthetic oligonucleotide
uaagcucauacuuagggca

SEQ ID NO: 1975805 - RNA, 19 nt, Artificial Sequence
  Description of Artificial Sequence: Synthetic oligonucleotide
ucaacugucaccagguaca

SEQ ID NO: 1975806 - RNA, 19 nt, Artificial Sequence
  Description of Artificial Sequence: Synthetic oligonucleotide
aauacguagaggaagacaa

SEQ ID NO: 1975807 - RNA, 19 nt, Artificial Sequence
  Description of Artificial Sequence: Synthetic oligonucleotide
uuaaucaccagguaggcua

SEQ ID NO: 1975808 - RNA, 19 nt, Artificial Sequence
  Description of Artificial Sequence: Synthetic oligonucleotide
uucaugcucacccugcuag

SEQ ID NO: 1975809 - RNA, 19 nt, Artificial Sequence
  Description of Artificial Sequence: Synthetic oligonucleotide
acaagguuaagcagaaugc

SEQ ID NO: 1975810 - RNA, 19 nt, Artificial Sequence
  Description of Artificial Sequence: Synthetic oligonucleotide
cuugagaaacacuggaacc

SEQ ID NO: 1975811 - RNA, 19 nt, Artificial Sequence
  Description of Artificial Sequence: Synthetic oligonucleotide
aaaggugucccuugccaac

SEQ ID NO: 1975812 - RNA, 19 nt, Artificial Sequence
  Description of Artificial Sequence: Synthetic oligonucleotide
ugaauaacaggcugcagac

SEQ ID NO: 1975813 - RNA, 19 nt, Artificial Sequence
  Description of Artificial Sequence: Synthetic oligonucleotide
aguugacccaguuuggguc

SEQ ID NO: 1975814 - RNA, 19 nt, Artificial Sequence
  Description of Artificial Sequence: Synthetic oligonucleotide
uuaggagccccucaaagac

SEQ ID NO: 1975815 - RNA, 19 nt, Artificial Sequence
  Description of Artificial Sequence: Synthetic oligonucleotide
guuaguacagccuggcugc

SEQ ID NO: 1975816 - RNA, 19 nt, Artificial Sequence
  Description of Artificial Sequence: Synthetic oligonucleotide
gguaagcucauacuuaggg

SEQ ID NO: 1975817 - RNA, 19 nt, Artificial Sequence
  Description of Artificial Sequence: Synthetic oligonucleotide
ucagcaagcauaagaauuc

SEQ ID NO: 1975818 - RNA, 19 nt, Artificial Sequence
  Description of Artificial Sequence: Synthetic oligonucleotide
aaagacuagggacagccau

SEQ ID NO: 1975819 - RNA, 19 nt, Artificial Sequence
  Description of Artificial Sequence: Synthetic oligonucleotide
aagacaaagacuagggaca

SEQ ID NO: 1975820 - RNA, 19 nt, Artificial Sequence
  Description of Artificial Sequence: Synthetic oligonucleotide
cuugguaccucuucucucg

SEQ ID NO: 1975821 - RNA, 19 nt, Artificial Sequence
  Description of Artificial Sequence: Synthetic oligonucleotide
ucaugucagaaucagggaa

SEQ ID NO: 1975822 - RNA, 19 nt, Artificial Sequence
  Description of Artificial Sequence: Synthetic oligonucleotide
uuggaucccaagcuguggg

SEQ ID NO: 1975823 - RNA, 19 nt, Artificial Sequence
  Description of Artificial Sequence: Synthetic oligonucleotide
ugagcagcgacuccucagg

SEQ ID NO: 1975824 - RNA, 19 nt, Artificial Sequence
  Description of Artificial Sequence: Synthetic oligonucleotide
uggguaagcucauacuuag

SEQ ID NO: 1975825 - RNA, 19 nt, Artificial Sequence
  Description of Artificial Sequence: Synthetic oligonucleotide
ugucgcauggcacuugacc

SEQ ID NO: 1975826 - RNA, 19 nt, Artificial Sequence
  Description of Artificial Sequence: Synthetic oligonucleotide
uggaauacguagaggaaga

SEQ ID NO: 1975827 - RNA, 19 nt, Artificial Sequence
  Description of Artificial Sequence: Synthetic oligonucleotide
aaagcagacguuaguacag

SEQ ID NO: 1975828 - RNA, 19 nt, Artificial Sequence
  Description of Artificial Sequence: Synthetic oligonucleotide
gauggcagugaucagcaug

SEQ ID NO: 1975829 - RNA, 19 nt, Artificial Sequence
  Description of Artificial Sequence: Synthetic oligonucleotide
uuguugaccccacuuagga

SEQ ID NO: 1975830 - RNA, 19 nt, Artificial Sequence
  Description of Artificial Sequence: Synthetic oligonucleotide
gaauucaugucagaaucag

SEQ ID NO: 1975831 - RNA, 19 nt, Artificial Sequence
  Description of Artificial Sequence: Synthetic oligonucleotide
cagaacaccgcuuaaucac

SEQ ID NO: 1975832 - RNA, 19 nt, Artificial Sequence
  Description of Artificial Sequence: Synthetic oligonucleotide
ggcacuugaccacagaagg

SEQ ID NO: 1975833 - RNA, 19 nt, Artificial Sequence
  Description of Artificial Sequence: Synthetic oligonucleotide
cauucuugagaaacacugg

SEQ ID NO: 1975834 - RNA, 19 nt, Artificial Sequence
  Description of Artificial Sequence: Synthetic oligonucleotide
acuuaggagccccucaaag

SEQ ID NO: 1975835 - RNA, 19 nt, Artificial Sequence
  Description of Artificial Sequence: Synthetic oligonucleotide
acaauuggaucccaagcug

SEQ ID NO: 1975836 - RNA, 19 nt, Artificial Sequence
  Description of Artificial Sequence: Synthetic oligonucleotide
ucggaagacaaagacuagg

SEQ ID NO: 1975837 - RNA, 19 nt, Artificial Sequence
  Description of Artificial Sequence: Synthetic oligonucleotide
uuugcuggaagaguugacc

SEQ ID NO: 1975838 - RNA, 19 nt, Artificial Sequence
  Description of Artificial Sequence: Synthetic oligonucleotide
acuuguugaccccacuuag

SEQ ID NO: 1975839 - RNA, 19 nt, Artificial Sequence
  Description of Artificial Sequence: Synthetic oligonucleotide
aagguuaagcagaaugcag

SEQ ID NO: 1975840 - RNA, 19 nt, Artificial Sequence
  Description of Artificial Sequence: Synthetic oligonucleotide
uugagaaacacuggaaccu

SEQ ID NO: 1975841 - RNA, 19 nt, Artificial Sequence
  Description of Artificial Sequence: Synthetic oligonucleotide
acuauguuggggcacggug

SEQ ID NO: 1975842 - RNA, 19 nt, Artificial Sequence
  Description of Artificial Sequence: Synthetic oligonucleotide
acuggaaccuuccaauuca

SEQ ID NO: 1975843 - RNA, 19 nt, Artificial Sequence
  Description of Artificial Sequence: Synthetic oligonucleotide
auggaauacguagaggaag

SEQ ID NO: 1975844 - RNA, 19 nt, Artificial Sequence
  Description of Artificial Sequence: Synthetic oligonucleotide
guaagcucauacuuagggc

SEQ ID NO: 1975845 - RNA, 19 nt, Artificial Sequence
  Description of Artificial Sequence: Synthetic oligonucleotide
cuaguaccgauccuggaag

SEQ ID NO: 1975846 - RNA, 19 nt, Artificial Sequence
  Description of Artificial Sequence: Synthetic oligonucleotide
gacaauaucuaugccggcc

SEQ ID NO: 1975847 - RNA, 19 nt, Artificial Sequence
  Description of Artificial Sequence: Synthetic oligonucleotide
agaaacacuggaaccuucc

SEQ ID NO: 1975848 - RNA, 19 nt, Artificial Sequence
  Description of Artificial Sequence: Synthetic oligonucleotide
gguguugcagucaaaaucc

SEQ ID NO: 1975849 - RNA, 19 nt, Artificial Sequence
  Description of Artificial Sequence: Synthetic oligonucleotide
uagaggaagacaauaucua

SEQ ID NO: 1975850 - RNA, 19 nt, Artificial Sequence
  Description of Artificial Sequence: Synthetic oligonucleotide
ucagaaucagggaaggguu

SEQ ID NO: 1975851 - RNA, 19 nt, Artificial Sequence
  Description of Artificial Sequence: Synthetic oligonucleotide
ugcuaguccagccuagaga

SEQ ID NO: 1975852 - RNA, 19 nt, Artificial Sequence
  Description of Artificial Sequence: Synthetic oligonucleotide
aaacacuggaaccuuccaa

SEQ ID NO: 1975853 - RNA, 19 nt, Artificial Sequence
  Description of Artificial Sequence: Synthetic oligonucleotide
caguccacuauguuggggc

SEQ ID NO: 1975854 - RNA, 19 nt, Artificial Sequence
  Description of Artificial Sequence: Synthetic oligonucleotide
gaggaagacaauaucuaug

SEQ ID NO: 1975855 - RNA, 19 nt, Artificial Sequence
  Description of Artificial Sequence: Synthetic oligonucleotide
cucgauuccaugcacucag

SEQ ID NO: 1975856 - RNA, 19 nt, Artificial Sequence
  Description of Artificial Sequence: Synthetic oligonucleotide
aacacauggaauacguaga

SEQ ID NO: 1975857 - RNA, 19 nt, Artificial Sequence
  Description of Artificial Sequence: Synthetic oligonucleotide
ucuaugccggccuugaaua

SEQ ID NO: 1975858 - RNA, 19 nt, Artificial Sequence
  Description of Artificial Sequence: Synthetic oligonucleotide
caggguacagguaaaggug

SEQ ID NO: 1975859 - RNA, 19 nt, Artificial Sequence
  Description of Artificial Sequence: Synthetic oligonucleotide
agguaaaggugucccuugc

SEQ ID NO: 1975860 - RNA, 19 nt, Artificial Sequence
  Description of Artificial Sequence: Synthetic oligonucleotide
acaauaucuaugccggccu

SEQ ID NO: 1975861 - RNA, 19 nt, Artificial Sequence
  Description of Artificial Sequence: Synthetic oligonucleotide
uggcacuugaccacagaag

SEQ ID NO: 1975862 - RNA, 19 nt, Artificial Sequence
  Description of Artificial Sequence: Synthetic oligonucleotide
agacauauguccaccagag

SEQ ID NO: 1975863 - RNA, 19 nt, Artificial Sequence
  Description of Artificial Sequence: Synthetic oligonucleotide
gagggcuuagagaugaagc

SEQ ID NO: 1975864 - RNA, 19 nt, Artificial Sequence
  Description of Artificial Sequence: Synthetic oligonucleotide
auacuuagggcagaggcug

SEQ ID NO: 1975865 - RNA, 19 nt, Artificial Sequence
  Description of Artificial Sequence: Synthetic oligonucleotide
aaugcagaugauggcagug

SEQ ID NO: 1975866 - RNA, 19 nt, Artificial Sequence
  Description of Artificial Sequence: Synthetic oligonucleotide
cuuguugaccccacuuagg

SEQ ID NO: 1975867 - RNA, 19 nt, Artificial Sequence
  Description of Artificial Sequence: Synthetic oligonucleotide
agagaggugggugaguguc

SEQ ID NO: 1975868 - RNA, 19 nt, Artificial Sequence
  Description of Artificial Sequence: Synthetic oligonucleotide
uacauucuugagaaacacu

SEQ ID NO: 1975869 - RNA, 19 nt, Artificial Sequence
  Description of Artificial Sequence: Synthetic oligonucleotide
cuugaccacagaagggagg

SEQ ID NO: 1975870 - RNA, 19 nt, Artificial Sequence
  Description of Artificial Sequence: Synthetic oligonucleotide
uaagagaggugggugagug

SEQ ID NO: 1975871 - RNA, 19 nt, Artificial Sequence
  Description of Artificial Sequence: Synthetic oligonucleotide
cagacguuaguacagccug

SEQ ID NO: 1975872 - RNA, 19 nt, Artificial Sequence
  Description of Artificial Sequence: Synthetic oligonucleotide
agaacaccgcuuaaucacc

SEQ ID NO: 1975873 - RNA, 19 nt, Artificial Sequence
  Description of Artificial Sequence: Synthetic oligonucleotide
agacaauaucuaugccggc

SEQ ID NO: 1975874 - RNA, 19 nt, Artificial Sequence
  Description of Artificial Sequence: Synthetic oligonucleotide
uucaugucagaaucaggga

SEQ ID NO: 1975875 - RNA, 19 nt, Artificial Sequence
  Description of Artificial Sequence: Synthetic oligonucleotide
ucgucaaagcagacguuag

SEQ ID NO: 1975876 - RNA, 19 nt, Artificial Sequence
  Description of Artificial Sequence: Synthetic oligonucleotide
agaggaagacaauaucuau

SEQ ID NO: 1975877 - RNA, 19 nt, Artificial Sequence
  Description of Artificial Sequence: Synthetic oligonucleotide
aggaugguuuucuucacgu

SEQ ID NO: 1975878 - RNA, 19 nt, Artificial Sequence
  Description of Artificial Sequence: Synthetic oligonucleotide
agccauaugcggccaaagg

SEQ ID NO: 1975879 - RNA, 19 nt, Artificial Sequence
  Description of Artificial Sequence: Synthetic oligonucleotide
uaggagccccucaaagacg

SEQ ID NO: 1975880 - RNA, 19 nt, Artificial Sequence
  Description of Artificial Sequence: Synthetic oligonucleotide
guagaacacauggaauacg

SEQ ID NO: 1975881 - RNA, 19 nt, Artificial Sequence
  Description of Artificial Sequence: Synthetic oligonucleotide
gacaauuggaucccaagcu

SEQ ID NO: 1975882 - RNA, 19 nt, Artificial Sequence
  Description of Artificial Sequence: Synthetic oligonucleotide
uccaguucaugguggacgc

SEQ ID NO: 1975883 - RNA, 19 nt, Artificial Sequence
  Description of Artificial Sequence: Synthetic oligonucleotide
aauaucuaugccggccuug

SEQ ID NO: 1975884 - RNA, 19 nt, Artificial Sequence
  Description of Artificial Sequence: Synthetic oligonucleotide
gaggguauauuugggguag

SEQ ID NO: 1975885 - RNA, 19 nt, Artificial Sequence
  Description of Artificial Sequence: Synthetic oligonucleotide
aagcagaaugcagaugaug

SEQ ID NO: 1975886 - RNA, 19 nt, Artificial Sequence
  Description of Artificial Sequence: Synthetic oligonucleotide
uguugaccccacuuaggag

SEQ ID NO: 1975887 - RNA, 19 nt, Artificial Sequence
  Description of Artificial Sequence: Synthetic oligonucleotide
aguaccgauccuggaagcc

SEQ ID NO: 1975888 - RNA, 19 nt, Artificial Sequence
  Description of Artificial Sequence: Synthetic oligonucleotide
gcuaguccagccuagagac

SEQ ID NO: 1975889 - RNA, 19 nt, Artificial Sequence
  Description of Artificial Sequence: Synthetic oligonucleotide
cucaacugucaccagguac

SEQ ID NO: 1975890 - RNA, 19 nt, Artificial Sequence
  Description of Artificial Sequence: Synthetic oligonucleotide
ggucugguaagagaggugg

SEQ ID NO: 1975891 - RNA, 19 nt, Artificial Sequence
  Description of Artificial Sequence: Synthetic oligonucleotide
caagcauaagaauucaugu

SEQ ID NO: 1975892 - RNA, 19 nt, Artificial Sequence
  Description of Artificial Sequence: Synthetic oligonucleotide
ccggccuugaauaacaggc

SEQ ID NO: 1975893 - RNA, 19 nt, Artificial Sequence
  Description of Artificial Sequence: Synthetic oligonucleotide
ugcgauaggccacaugcau

SEQ ID NO: 1975894 - RNA, 19 nt, Artificial Sequence
  Description of Artificial Sequence: Synthetic oligonucleotide
uguuugcuggaagaguuga

SEQ ID NO: 1975895 - RNA, 19 nt, Artificial Sequence
  Description of Artificial Sequence: Synthetic oligonucleotide
uccacuauguuggggcacg

SEQ ID NO: 1975896 - RNA, 19 nt, Artificial Sequence
  Description of Artificial Sequence: Synthetic oligonucleotide
cucagaacaccgcuuaauc

SEQ ID NO: 1975897 - RNA, 19 nt, Artificial Sequence
  Description of Artificial Sequence: Synthetic oligonucleotide
ugagcgcucgccucgauuc

SEQ ID NO: 1975898 - RNA, 19 nt, Artificial Sequence
  Description of Artificial Sequence: Synthetic oligonucleotide
agaguugacccaguuuggg

SEQ ID NO: 1975899 - RNA, 19 nt, Artificial Sequence
  Description of Artificial Sequence: Synthetic oligonucleotide
agaaucagggaaggguuuc

SEQ ID NO: 1975900 - RNA, 19 nt, Artificial Sequence
  Description of Artificial Sequence: Synthetic oligonucleotide
uacuuguugaccccacuua

SEQ ID NO: 1975901 - RNA, 19 nt, Artificial Sequence
  Description of Artificial Sequence: Synthetic oligonucleotide
ggacaauuggaucccaagc

SEQ ID NO: 1975902 - RNA, 19 nt, Artificial Sequence
  Description of Artificial Sequence: Synthetic oligonucleotide
uaccgauccuggaagccag

SEQ ID NO: 1975903 - RNA, 19 nt, Artificial Sequence
  Description of Artificial Sequence: Synthetic oligonucleotide
aauuggaucccaagcugug

SEQ ID NO: 1975904 - RNA, 19 nt, Artificial Sequence
  Description of Artificial Sequence: Synthetic oligonucleotide
uucuccgagggcuuagaga

SEQ ID NO: 1975905 - RNA, 19 nt, Artificial Sequence
  Description of Artificial Sequence: Synthetic oligonucleotide
uagagaugaagcaguccac

SEQ ID NO: 1975906 - RNA, 19 nt, Artificial Sequence
  Description of Artificial Sequence: Synthetic oligonucleotide
ucaaaauccuucuggucuu

SEQ ID NO: 1975907 - RNA, 19 nt, Artificial Sequence
  Description of Artificial Sequence: Synthetic oligonucleotide
agaaugcagaugauggcag

SEQ ID NO: 1975908 - RNA, 19 nt, Artificial Sequence
  Description of Artificial Sequence: Synthetic oligonucleotide
caugcacucagaacaccgc

SEQ ID NO: 1975909 - RNA, 19 nt, Artificial Sequence
  Description of Artificial Sequence: Synthetic oligonucleotide
acgcucaacugucaccagg

SEQ ID NO: 1975910 - RNA, 19 nt, Artificial Sequence
  Description of Artificial Sequence: Synthetic oligonucleotide
gaauacguagaggaagaca

SEQ ID NO: 1975911 - RNA, 19 nt, Artificial Sequence
  Description of Artificial Sequence: Synthetic oligonucleotide
uucuggguaagcucauacu

SEQ ID NO: 1975912 - RNA, 19 nt, Artificial Sequence
  Description of Artificial Sequence: Synthetic oligonucleotide
aagcucauacuuagggcag

SEQ ID NO: 1975913 - RNA, 19 nt, Artificial Sequence
  Description of Artificial Sequence: Synthetic oligonucleotide
uauguuggggcacgguguc

SEQ ID NO: 1975914 - RNA, 19 nt, Artificial Sequence
  Description of Artificial Sequence: Synthetic oligonucleotide
gucgcauggcacuugacca

SEQ ID NO: 1975915 - RNA, 19 nt, Artificial Sequence
  Description of Artificial Sequence: Synthetic oligonucleotide
cuuagagaugaagcagucc

SEQ ID NO: 1975916 - RNA, 19 nt, Artificial Sequence
  Description of Artificial Sequence: Synthetic oligonucleotide
guaccucuucucucgagcc

SEQ ID NO: 1975917 - RNA, 19 nt, Artificial Sequence
  Description of Artificial Sequence: Synthetic oligonucleotide
uggaucccaagcugugggg

SEQ ID NO: 1975918 - RNA, 19 nt, Artificial Sequence
  Description of Artificial Sequence: Synthetic oligonucleotide
cauaugcggccaaaggcug

SEQ ID NO: 1975919 - RNA, 19 nt, Artificial Sequence
  Description of Artificial Sequence: Synthetic oligonucleotide
cucaaagacgcuccaguuc

SEQ ID NO: 1975920 - RNA, 19 nt, Artificial Sequence
  Description of Artificial Sequence: Synthetic oligonucleotide
agguuaagcagaaugcaga

SEQ ID NO: 1975921 - RNA, 19 nt, Artificial Sequence
  Description of Artificial Sequence: Synthetic oligonucleotide
ucugguaagagaggugggu

SEQ ID NO: 1975922 - RNA, 19 nt, Artificial Sequence
  Description of Artificial Sequence: Synthetic oligonucleotide
uccgagggcuuagagauga

SEQ ID NO: 1975923 - RNA, 19 nt, Artificial Sequence
  Description of Artificial Sequence: Synthetic oligonucleotide
cuugccaggguacagguaa

SEQ ID NO: 1975924 - RNA, 19 nt, Artificial Sequence
  Description of Artificial Sequence: Synthetic oligonucleotide
guacagguaaagguguccc

SEQ ID NO: 1975925 - RNA, 19 nt, Artificial Sequence
  Description of Artificial Sequence: Synthetic oligonucleotide
ugagugucagagcccagaa

SEQ ID NO: 1975926 - RNA, 19 nt, Artificial Sequence
  Description of Artificial Sequence: Synthetic oligonucleotide
ugaggucuccggcuaggag

SEQ ID NO: 1975927 - RNA, 19 nt, Artificial Sequence
  Description of Artificial Sequence: Synthetic oligonucleotide
aacugucaccagguacacc

SEQ ID NO: 1975928 - RNA, 19 nt, Artificial Sequence
  Description of Artificial Sequence: Synthetic oligonucleotide
auuggaucccaagcugugg

SEQ ID NO: 1975929 - RNA, 19 nt, Artificial Sequence
  Description of Artificial Sequence: Synthetic oligonucleotide
uacguagaggaagacaaua

SEQ ID NO: 1975930 - RNA, 19 nt, Artificial Sequence
  Description of Artificial Sequence: Synthetic oligonucleotide
gccauaugcggccaaaggc

SEQ ID NO: 1975931 - RNA, 19 nt, Artificial Sequence
  Description of Artificial Sequence: Synthetic oligonucleotide
ucuucacgugggcucgggg

SEQ ID NO: 1975932 - RNA, 19 nt, Artificial Sequence
  Description of Artificial Sequence: Synthetic oligonucleotide
uuccaugcacucagaacac

SEQ ID NO: 1975933 - RNA, 19 nt, Artificial Sequence
  Description of Artificial Sequence: Synthetic oligonucleotide
aucuaugccggccuugaau

SEQ ID NO: 1975934 - RNA, 19 nt, Artificial Sequence
  Description of Artificial Sequence: Synthetic oligonucleotide
guagaggaagacaauaucu

SEQ ID NO: 1975935 - RNA, 19 nt, Artificial Sequence
  Description of Artificial Sequence: Synthetic oligonucleotide
gcaagcauaagaauucaug

SEQ ID NO: 1975936 - RNA, 19 nt, Artificial Sequence
  Description of Artificial Sequence: Synthetic oligonucleotide
aaaggcuguggaguacuug

SEQ ID NO: 1975937 - RNA, 19 nt, Artificial Sequence
  Description of Artificial Sequence: Synthetic oligonucleotide
ugaccacaagcagggaggg

SEQ ID NO: 1975938 - RNA, 19 nt, Artificial Sequence
  Description of Artificial Sequence: Synthetic oligonucleotide
ucuugguaccucuucucuc

SEQ ID NO: 1975939 - RNA, 19 nt, Artificial Sequence
  Description of Artificial Sequence: Synthetic oligonucleotide
gcaguugggguucagcaag

SEQ ID NO: 1975940 - RNA, 19 nt, Artificial Sequence
  Description of Artificial Sequence: Synthetic oligonucleotide
aaagacgcuccaguucaug

SEQ ID NO: 1975941 - RNA, 19 nt, Artificial Sequence
  Description of Artificial Sequence: Synthetic oligonucleotide
ugucagagcccagaaagau

SEQ ID NO: 1975942 - RNA, 19 nt, Artificial Sequence
  Description of Artificial Sequence: Synthetic oligonucleotide
ugguuuucuucacgugggc

SEQ ID NO: 1975943 - RNA, 19 nt, Artificial Sequence
  Description of Artificial Sequence: Synthetic oligonucleotide
ucacaggaugguuuucuuc

SEQ ID NO: 1975944 - RNA, 19 nt, Artificial Sequence
  Description of Artificial Sequence: Synthetic oligonucleotide
gacguuaguacagccuggc

SEQ ID NO: 1975945 - RNA, 19 nt, Artificial Sequence
  Description of Artificial Sequence: Synthetic oligonucleotide
caccagauacauucuugag

SEQ ID NO: 1975946 - RNA, 19 nt, Artificial Sequence
  Description of Artificial Sequence: Synthetic oligonucleotide
uuugggucaugcucugggu

SEQ ID NO: 1975947 - RNA, 19 nt, Artificial Sequence
  Description of Artificial Sequence: Synthetic oligonucleotide
ugcagaugauggcagugau

SEQ ID NO: 1975948 - RNA, 19 nt, Artificial Sequence
  Description of Artificial Sequence: Synthetic oligonucleotide
aaucaccagguaggcuagc

SEQ ID NO: 1975949 - RNA, 19 nt, Artificial Sequence
  Description of Artificial Sequence: Synthetic oligonucleotide
uaguaccgauccuggaagc

SEQ ID NO: 1975950 - RNA, 19 nt, Artificial Sequence
  Description of Artificial Sequence: Synthetic oligonucleotide
uucuguuugcuggaagagu

SEQ ID NO: 1975951 - RNA, 19 nt, Artificial Sequence
  Description of Artificial Sequence: Synthetic oligonucleotide
augcacucagaacaccgcu

SEQ ID NO: 1975952 - RNA, 19 nt, Artificial Sequence
  Description of Artificial Sequence: Synthetic oligonucleotide
ugcucacccugcuagucca

SEQ ID NO: 1975953 - RNA, 19 nt, Artificial Sequence
  Description of Artificial Sequence: Synthetic oligonucleotide
uugcgauaggccacaugca

SEQ ID NO: 1975954 - RNA, 19 nt, Artificial Sequence
  Description of Artificial Sequence: Synthetic oligonucleotide
uguuggggcacggugucgc

SEQ ID NO: 1975955 - RNA, 19 nt, Artificial Sequence
  Description of Artificial Sequence: Synthetic oligonucleotide
gguaccucuucucucgagc

SEQ ID NO: 1975956 - RNA, 19 nt, Artificial Sequence
  Description of Artificial Sequence: Synthetic oligonucleotide
uucucucgagccuugcgau

SEQ ID NO: 1975957 - RNA, 19 nt, Artificial Sequence
  Description of Artificial Sequence: Synthetic oligonucleotide
cgcuuaaucaccagguagg

SEQ ID NO: 1975958 - RNA, 19 nt, Artificial Sequence
  Description of Artificial Sequence: Synthetic oligonucleotide
aagagaggugggugagugu

SEQ ID NO: 1975959 - RNA, 19 nt, Artificial Sequence
  Description of Artificial Sequence: Synthetic oligonucleotide
ucgagccuugcgauaggcc

SEQ ID NO: 1975960 - RNA, 19 nt, Artificial Sequence
  Description of Artificial Sequence: Synthetic oligonucleotide
cauaagaauucaugucaga

SEQ ID NO: 1975961 - RNA, 19 nt, Artificial Sequence
  Description of Artificial Sequence: Synthetic oligonucleotide
gccuagagacccuucacag

SEQ ID NO: 1975962 - RNA, 19 nt, Artificial Sequence
  Description of Artificial Sequence: Synthetic oligonucleotide
acaugagacacggggaaga

SEQ ID NO: 1975963 - RNA, 19 nt, Artificial Sequence
  Description of Artificial Sequence: Synthetic oligonucleotide
gggacaauuggaucccaag

SEQ ID NO: 1975964 - RNA, 19 nt, Artificial Sequence
  Description of Artificial Sequence: Synthetic oligonucleotide
cucucgagccuugcgauag

SEQ ID NO: 1975965 - RNA, 19 nt, Artificial Sequence
  Description of Artificial Sequence: Synthetic oligonucleotide
agccccucaaagacgcucc

SEQ ID NO: 1975966 - RNA, 19 nt, Artificial Sequence
  Description of Artificial Sequence: Synthetic oligonucleotide
ugggugagugucagagccc

SEQ ID NO: 1975967 - RNA, 19 nt, Artificial Sequence
  Description of Artificial Sequence: Synthetic oligonucleotide
ggguucagcaagcauaaga

SEQ ID NO: 1975968 - RNA, 19 nt, Artificial Sequence
  Description of Artificial Sequence: Synthetic oligonucleotide
cuuccaauucaugcucacc

SEQ ID NO: 1975969 - RNA, 19 nt, Artificial Sequence
  Description of Artificial Sequence: Synthetic oligonucleotide
uaagcagaaugcagaugau

SEQ ID NO: 1975970 - RNA, 19 nt, Artificial Sequence
  Description of Artificial Sequence: Synthetic oligonucleotide
gagcagcgacuccucaggg

SEQ ID NO: 1975971 - RNA, 19 nt, Artificial Sequence
  Description of Artificial Sequence: Synthetic oligonucleotide
acggggaagaacucgucaa

SEQ ID NO: 1975972 - RNA, 19 nt, Artificial Sequence
  Description of Artificial Sequence: Synthetic oligonucleotide
cacuggaaccuuccaauuc

SEQ ID NO: 1975973 - RNA, 19 nt, Artificial Sequence
  Description of Artificial Sequence: Synthetic oligonucleotide
augagacacggggaagaac

SEQ ID NO: 1975974 - RNA, 19 nt, Artificial Sequence
  Description of Artificial Sequence: Synthetic oligonucleotide
aggcgcacaugagacacgg

SEQ ID NO: 1975975 - RNA, 19 nt, Artificial Sequence
  Description of Artificial Sequence: Synthetic oligonucleotide
cugguaagagaggugggug

SEQ ID NO: 1975976 - RNA, 19 nt, Artificial Sequence
  Description of Artificial Sequence: Synthetic oligonucleotide
cucggaagacaaagacuag

SEQ ID NO: 1975977 - RNA, 19 nt, Artificial Sequence
  Description of Artificial Sequence: Synthetic oligonucleotide
agcgacuccucagggcucc

SEQ ID NO: 1975978 - RNA, 19 nt, Artificial Sequence
  Description of Artificial Sequence: Synthetic oligonucleotide
ggguggucugguaagagag

SEQ ID NO: 1975979 - RNA, 19 nt, Artificial Sequence
  Description of Artificial Sequence: Synthetic oligonucleotide
auaucuaugccggccuuga

SEQ ID NO: 1975980 - RNA, 19 nt, Artificial Sequence
  Description of Artificial Sequence: Synthetic oligonucleotide
uggacgcaagggcuggcug

SEQ ID NO: 1975981 - RNA, 19 nt, Artificial Sequence
  Description of Artificial Sequence: Synthetic oligonucleotide
cacuugaccacagaaggga

SEQ ID NO: 1975982 - RNA, 19 nt, Artificial Sequence
  Description of Artificial Sequence: Synthetic oligonucleotide
cucccuaguaccgauccug

SEQ ID NO: 1975983 - RNA, 19 nt, Artificial Sequence
  Description of Artificial Sequence: Synthetic oligonucleotide
gguagaacacauggaauac

SEQ ID NO: 1975984 - RNA, 19 nt, Artificial Sequence
  Description of Artificial Sequence: Synthetic oligonucleotide
cuguuugcuggaagaguug

SEQ ID NO: 1975985 - RNA, 19 nt, Artificial Sequence
  Description of Artificial Sequence: Synthetic oligonucleotide
ucucgagccuugcgauagg

SEQ ID NO: 1975986 - RNA, 19 nt, Artificial Sequence
  Description of Artificial Sequence: Synthetic oligonucleotide
aguccacuauguuggggca

SEQ ID NO: 1975987 - RNA, 19 nt, Artificial Sequence
  Description of Artificial Sequence: Synthetic oligonucleotide
cuugaauaacaggcugcag

SEQ ID NO: 1975988 - RNA, 19 nt, Artificial Sequence
  Description of Artificial Sequence: Synthetic oligonucleotide
ggguagaacacauggaaua

SEQ ID NO: 1975989 - RNA, 19 nt, Artificial Sequence
  Description of Artificial Sequence: Synthetic oligonucleotide
ugcacucagaacaccgcuu

SEQ ID NO: 1975990 - RNA, 19 nt, Artificial Sequence
  Description of Artificial Sequence: Synthetic oligonucleotide
gcagaaugcagaugauggc

SEQ ID NO: 1975991 - RNA, 19 nt, Artificial Sequence
  Description of Artificial Sequence: Synthetic oligonucleotide
gacccaguuugggucaugc

SEQ ID NO: 1975992 - RNA, 19 nt, Artificial Sequence
  Description of Artificial Sequence: Synthetic oligonucleotide
ugagaaacacuggaaccuu

SEQ ID NO: 1975993 - RNA, 19 nt, Artificial Sequence
  Description of Artificial Sequence: Synthetic oligonucleotide
agcaguugggguucagcaa

SEQ ID NO: 1975994 - RNA, 19 nt, Artificial Sequence
  Description of Artificial Sequence: Synthetic oligonucleotide
gucaaagcagacguuagua

SEQ ID NO: 1975995 - RNA, 19 nt, Artificial Sequence
  Description of Artificial Sequence: Synthetic oligonucleotide
aggguacagguaaaggugu

SEQ ID NO: 1975996 - RNA, 19 nt, Artificial Sequence
  Description of Artificial Sequence: Synthetic oligonucleotide
ggccuugaauaacaggcug

SEQ ID NO: 1975997 - RNA, 19 nt, Artificial Sequence
  Description of Artificial Sequence: Synthetic oligonucleotide
gguauauuugggguagaac

SEQ ID NO: 1975998 - RNA, 19 nt, Artificial Sequence
  Description of Artificial Sequence: Synthetic oligonucleotide
ccagaggcgcacaugagac

SEQ ID NO: 1975999 - RNA, 19 nt, Artificial Sequence
  Description of Artificial Sequence: Synthetic oligonucleotide
gucagaaucagggaagggu

SEQ ID NO: 1976000 - RNA, 19 nt, Artificial Sequence
  Description of Artificial Sequence: Synthetic oligonucleotide
cuaguccagccuagagacc

SEQ ID NO: 1976001 - RNA, 19 nt, Artificial Sequence
  Description of Artificial Sequence: Synthetic oligonucleotide
uugguaccucuucucucga

SEQ ID NO: 1976002 - RNA, 19 nt, Artificial Sequence
  Description of Artificial Sequence: Synthetic oligonucleotide
uggggcacggugucgcaug

SEQ ID NO: 1976003 - RNA, 19 nt, Artificial Sequence
  Description of Artificial Sequence: Synthetic oligonucleotide
gguaagagaggugggugag

SEQ ID NO: 1976004 - RNA, 19 nt, Artificial Sequence
  Description of Artificial Sequence: Synthetic oligonucleotide
cucauacuuagggcagagg

SEQ ID NO: 1976005 - RNA, 19 nt, Artificial Sequence
  Description of Artificial Sequence: Synthetic oligonucleotide
cugcuaguccagccuagag

SEQ ID NO: 1976006 - RNA, 19 nt, Artificial Sequence
  Description of Artificial Sequence: Synthetic oligonucleotide
ucgauuccaugcacucaga

SEQ ID NO: 1976007 - RNA, 19 nt, Artificial Sequence
  Description of Artificial Sequence: Synthetic oligonucleotide
caguugggguucagcaagc

SEQ ID NO: 1976008 - RNA, 19 nt, Artificial Sequence
  Description of Artificial Sequence: Synthetic oligonucleotide
aagacuagggacagccaua

SEQ ID NO: 1976009 - RNA, 19 nt, Artificial Sequence
  Description of Artificial Sequence: Synthetic oligonucleotide
uacuuagggcagaggcugu

SEQ ID NO: 1976010 - RNA, 19 nt, Artificial Sequence
  Description of Artificial Sequence: Synthetic oligonucleotide
agacuagggacagccauau

SEQ ID NO: 1976011 - RNA, 19 nt, Artificial Sequence
  Description of Artificial Sequence: Synthetic oligonucleotide
ccuagagacccuucacagg

SEQ ID NO: 1976012 - RNA, 19 nt, Artificial Sequence
  Description of Artificial Sequence: Synthetic oligonucleotide
ggcagugaucagcaugaag

SEQ ID NO: 1976013 - RNA, 19 nt, Artificial Sequence
  Description of Artificial Sequence: Synthetic oligonucleotide
ccgcuuaaucaccagguag

SEQ ID NO: 1976014 - RNA, 19 nt, Artificial Sequence
  Description of Artificial Sequence: Synthetic oligonucleotide
cauacuuagggcagaggcu

SEQ ID NO: 1976015 - RNA, 19 nt, Artificial Sequence
  Description of Artificial Sequence: Synthetic oligonucleotide
ggcucccuaguaccgaucc

SEQ ID NO: 1976016 - RNA, 19 nt, Artificial Sequence
  Description of Artificial Sequence: Synthetic oligonucleotide
ugccggccuugaauaacag

SEQ ID NO: 1976017 - RNA, 19 nt, Artificial Sequence
  Description of Artificial Sequence: Synthetic oligonucleotide
augcagaugauggcaguga

SEQ ID NO: 1976018 - RNA, 19 nt, Artificial Sequence
  Description of Artificial Sequence: Synthetic oligonucleotide
uuuucuccgagggcuuaga

SEQ ID NO: 1976019 - RNA, 19 nt, Artificial Sequence
  Description of Artificial Sequence: Synthetic oligonucleotide
acguagaggaagacaauau

SEQ ID NO: 1976020 - RNA, 19 nt, Artificial Sequence
  Description of Artificial Sequence: Synthetic oligonucleotide
uucuucacgugggcucggg

SEQ ID NO: 1976021 - RNA, 19 nt, Artificial Sequence
  Description of Artificial Sequence: Synthetic oligonucleotide
caauuggaucccaagcugu

SEQ ID NO: 1976022 - RNA, 19 nt, Artificial Sequence
  Description of Artificial Sequence: Synthetic oligonucleotide
ucuccggcuaggagguccu

SEQ ID NO: 1976023 - RNA, 19 nt, Artificial Sequence
  Description of Artificial Sequence: Synthetic oligonucleotide
gucugguaagagagguggg

SEQ ID NO: 1976024 - RNA, 19 nt, Artificial Sequence
  Description of Artificial Sequence: Synthetic oligonucleotide
cucugggugugcagugagc

SEQ ID NO: 1976025 - RNA, 19 nt, Artificial Sequence
  Description of Artificial Sequence: Synthetic oligonucleotide
augcucugggugugcagug

SEQ ID NO: 1976026 - RNA, 19 nt, Artificial Sequence
  Description of Artificial Sequence: Synthetic oligonucleotide
acguuaguacagccuggcu

SEQ ID NO: 1976027 - RNA, 19 nt, Artificial Sequence
  Description of Artificial Sequence: Synthetic oligonucleotide
gaguugacccaguuugggu

SEQ ID NO: 1976028 - RNA, 19 nt, Artificial Sequence
  Description of Artificial Sequence: Synthetic oligonucleotide
cuauguuggggcacggugu

SEQ ID NO: 1976029 - RNA, 19 nt, Artificial Sequence
  Description of Artificial Sequence: Synthetic oligonucleotide
gaccccacuuaggagcccc

SEQ ID NO: 1976030 - RNA, 19 nt, Artificial Sequence
  Description of Artificial Sequence: Synthetic oligonucleotide
ucgccucgauuccaugcac

SEQ ID NO: 1976031 - RNA, 19 nt, Artificial Sequence
  Description of Artificial Sequence: Synthetic oligonucleotide
uaucuaugccggccuugaa

SEQ ID NO: 1976032 - RNA, 19 nt, Artificial Sequence
  Description of Artificial Sequence: Synthetic oligonucleotide
ugccaacuucuucuuggua

SEQ ID NO: 1976033 - RNA, 19 nt, Artificial Sequence
  Description of Artificial Sequence: Synthetic oligonucleotide
gcuuaaucaccagguaggc

SEQ ID NO: 1976034 - RNA, 19 nt, Artificial Sequence
  Description of Artificial Sequence: Synthetic oligonucleotide
agacccuucacaggauggu

SEQ ID NO: 1976035 - RNA, 19 nt, Artificial Sequence
  Description of Artificial Sequence: Synthetic oligonucleotide
cucgagccuugcgauaggc

SEQ ID NO: 1976036 - RNA, 19 nt, Artificial Sequence
  Description of Artificial Sequence: Synthetic oligonucleotide
gaccacagaagggagggua

SEQ ID NO: 1976037 - RNA, 19 nt, Artificial Sequence
  Description of Artificial Sequence: Synthetic oligonucleotide
gaaugcagaugauggcagu

SEQ ID NO: 1976038 - RNA, 19 nt, Artificial Sequence
  Description of Artificial Sequence: Synthetic oligonucleotide
caaagacuagggacagcca

SEQ ID NO: 1976039 - RNA, 19 nt, Artificial Sequence
  Description of Artificial Sequence: Synthetic oligonucleotide
accgcuuaaucaccaggua

SEQ ID NO: 1976040 - RNA, 19 nt, Artificial Sequence
  Description of Artificial Sequence: Synthetic oligonucleotide
guaccgauccuggaagcca

SEQ ID NO: 1976041 - RNA, 19 nt, Artificial Sequence
  Description of Artificial Sequence: Synthetic oligonucleotide
gucccuugccaacuucuuc

SEQ ID NO: 1976042 - RNA, 19 nt, Artificial Sequence
  Description of Artificial Sequence: Synthetic oligonucleotide
cucgucaaagcagacguua

SEQ ID NO: 1976043 - RNA, 19 nt, Artificial Sequence
  Description of Artificial Sequence: Synthetic oligonucleotide
gguggucugguaagagagg

SEQ ID NO: 1976044 - RNA, 19 nt, Artificial Sequence
  Description of Artificial Sequence: Synthetic oligonucleotide
gagccuugcgauaggccac

SEQ ID NO: 1976045 - RNA, 19 nt, Artificial Sequence
  Description of Artificial Sequence: Synthetic oligonucleotide
caugcucacccugcuaguc

SEQ ID NO: 1976046 - RNA, 19 nt, Artificial Sequence
  Description of Artificial Sequence: Synthetic oligonucleotide
cucgccucgauuccaugca

SEQ ID NO: 1976047 - RNA, 19 nt, Artificial Sequence
  Description of Artificial Sequence: Synthetic oligonucleotide
uugccaggguacagguaaa

SEQ ID NO: 1976048 - RNA, 19 nt, Artificial Sequence
  Description of Artificial Sequence: Synthetic oligonucleotide
guuugcuggaagaguugac

SEQ ID NO: 1976049 - RNA, 19 nt, Artificial Sequence
  Description of Artificial Sequence: Synthetic oligonucleotide
gcucgccucgauuccaugc

SEQ ID NO: 1976050 - RNA, 19 nt, Artificial Sequence
  Description of Artificial Sequence: Synthetic oligonucleotide
gaggcgcacaugagacacg

SEQ ID NO: 1976051 - RNA, 19 nt, Artificial Sequence
  Description of Artificial Sequence: Synthetic oligonucleotide
gaguacuuguugaccccac

SEQ ID NO: 1976052 - RNA, 19 nt, Artificial Sequence
  Description of Artificial Sequence: Synthetic oligonucleotide
gccaggguacagguaaagg

SEQ ID NO: 1976053 - RNA, 19 nt, Artificial Sequence
  Description of Artificial Sequence: Synthetic oligonucleotide
gacuagggacagccauaug

SEQ ID NO: 1976054 - RNA, 19 nt, Artificial Sequence
  Description of Artificial Sequence: Synthetic oligonucleotide
ucucucgagccuugcgaua

SEQ ID NO: 1976055 - RNA, 19 nt, Artificial Sequence
  Description of Artificial Sequence: Synthetic oligonucleotide
uccagccuagagacccuuc

SEQ ID NO: 1976056 - RNA, 19 nt, Artificial Sequence
  Description of Artificial Sequence: Synthetic oligonucleotide
gccggccuugaauaacagg

SEQ ID NO: 1976057 - RNA, 19 nt, Artificial Sequence
  Description of Artificial Sequence: Synthetic oligonucleotide
ggaggguauauuuggggua

SEQ ID NO: 1976058 - RNA, 19 nt, Artificial Sequence
  Description of Artificial Sequence: Synthetic oligonucleotide
agcaagcauaagaauucau

SEQ ID NO: 1976059 - RNA, 19 nt, Artificial Sequence
  Description of Artificial Sequence: Synthetic oligonucleotide
acagaagggaggguauauu

SEQ ID NO: 1976060 - RNA, 19 nt, Artificial Sequence
  Description of Artificial Sequence: Synthetic oligonucleotide
caaaauccuucuggucuuc

SEQ ID NO: 1976061 - RNA, 19 nt, Artificial Sequence
  Description of Artificial Sequence: Synthetic oligonucleotide
agcucauacuuagggcaga

SEQ ID NO: 1976062 - RNA, 19 nt, Artificial Sequence
  Description of Artificial Sequence: Synthetic oligonucleotide
cagccauaugcggccaaag

SEQ ID NO: 1976063 - RNA, 19 nt, Artificial Sequence
  Description of Artificial Sequence: Synthetic oligonucleotide
agaacacauggaauacgua

SEQ ID NO: 1976064 - RNA, 19 nt, Artificial Sequence
  Description of Artificial Sequence: Synthetic oligonucleotide
acccugcuaguccagccua

SEQ ID NO: 1976065 - RNA, 19 nt, Artificial Sequence
  Description of Artificial Sequence: Synthetic oligonucleotide
agggcucccuaguaccgau

SEQ ID NO: 1976066 - RNA, 19 nt, Artificial Sequence
  Description of Artificial Sequence: Synthetic oligonucleotide
guacuuguugaccccacuu

SEQ ID NO: 1976067 - RNA, 19 nt, Artificial Sequence
  Description of Artificial Sequence: Synthetic oligonucleotide
auacguagaggaagacaau

SEQ ID NO: 1976068 - RNA, 19 nt, Artificial Sequence
  Description of Artificial Sequence: Synthetic oligonucleotide
ggaauacguagaggaagac

SEQ ID NO: 1976069 - RNA, 19 nt, Artificial Sequence
  Description of Artificial Sequence: Synthetic oligonucleotide
ggguaagcucauacuuagg

SEQ ID NO: 1976070 - RNA, 19 nt, Artificial Sequence
  Description of Artificial Sequence: Synthetic oligonucleotide
caguucaugguggacgcaa

SEQ ID NO: 1976071 - RNA, 19 nt, Artificial Sequence
  Description of Artificial Sequence: Synthetic oligonucleotide
gcuagcuccacaagguuaa

SEQ ID NO: 1976072 - RNA, 19 nt, Artificial Sequence
  Description of Artificial Sequence: Synthetic oligonucleotide
ccauaugcggccaaaggcu

SEQ ID NO: 1976073 - RNA, 19 nt, Artificial Sequence
  Description of Artificial Sequence: Synthetic oligonucleotide
gcucauacuuagggcagag

SEQ ID NO: 1976074 - RNA, 19 nt, Artificial Sequence
  Description of Artificial Sequence: Synthetic oligonucleotide
accacagaagggaggguau

SEQ ID NO: 1976075 - RNA, 19 nt, Artificial Sequence
  Description of Artificial Sequence: Synthetic oligonucleotide
auaugcggccaaaggcugu

SEQ ID NO: 1976076 - RNA, 19 nt, Artificial Sequence
  Description of Artificial Sequence: Synthetic oligonucleotide
cacgcucaacugucaccag

SEQ ID NO: 1976077 - RNA, 19 nt, Artificial Sequence
  Description of Artificial Sequence: Synthetic oligonucleotide
ggugucgcauggcacuuga

SEQ ID NO: 1976078 - RNA, 19 nt, Artificial Sequence
  Description of Artificial Sequence: Synthetic oligonucleotide
ccuaguaccgauccuggaa

SEQ ID NO: 1976079 - RNA, 19 nt, Artificial Sequence
  Description of Artificial Sequence: Synthetic oligonucleotide
caccccgcuucuugccagg

SEQ ID NO: 1976080 - RNA, 19 nt, Artificial Sequence
  Description of Artificial Sequence: Synthetic oligonucleotide
cuagcuccacaagguuaag

SEQ ID NO: 1976081 - RNA, 19 nt, Artificial Sequence
  Description of Artificial Sequence: Synthetic oligonucleotide
uccggcuaggagguccuuc

SEQ ID NO: 1976082 - RNA, 19 nt, Artificial Sequence
  Description of Artificial Sequence: Synthetic oligonucleotide
cuaugccggccuugaauaa

SEQ ID NO: 1976083 - RNA, 19 nt, Artificial Sequence
  Description of Artificial Sequence: Synthetic oligonucleotide
cacggugucgcauggcacu

SEQ ID NO: 1976084 - RNA, 19 nt, Artificial Sequence
  Description of Artificial Sequence: Synthetic oligonucleotide
gccucgauuccaugcacuc

SEQ ID NO: 1976085 - RNA, 19 nt, Artificial Sequence
  Description of Artificial Sequence: Synthetic oligonucleotide
gcuuagagaugaagcaguc

SEQ ID NO: 1976086 - RNA, 19 nt, Artificial Sequence
  Description of Artificial Sequence: Synthetic oligonucleotide
cauggcacuugaccacaga

SEQ ID NO: 1976087 - RNA, 19 nt, Artificial Sequence
  Description of Artificial Sequence: Synthetic oligonucleotide
acccuucacaggaugguuu

SEQ ID NO: 1976088 - RNA, 19 nt, Artificial Sequence
  Description of Artificial Sequence: Synthetic oligonucleotide
guccacuauguuggggcac

SEQ ID NO: 1976089 - RNA, 19 nt, Artificial Sequence
  Description of Artificial Sequence: Synthetic oligonucleotide
acagccauaugcggccaaa

SEQ ID NO: 1976090 - RNA, 19 nt, Artificial Sequence
  Description of Artificial Sequence: Synthetic oligonucleotide
ccuugaauaacaggcugca

SEQ ID NO: 1976091 - RNA, 19 nt, Artificial Sequence
  Description of Artificial Sequence: Synthetic oligonucleotide
agccuugcgauaggccaca

SEQ ID NO: 1976092 - RNA, 19 nt, Artificial Sequence
  Description of Artificial Sequence: Synthetic oligonucleotide
cagaggcgcacaugagaca

SEQ ID NO: 1976093 - RNA, 19 nt, Artificial Sequence
  Description of Artificial Sequence: Synthetic oligonucleotide
cgagccuugcgauaggcca

SEQ ID NO: 1976094 - RNA, 19 nt, Artificial Sequence
  Description of Artificial Sequence: Synthetic oligonucleotide
gguuucuucuggguaagcu

SEQ ID NO: 1976095 - RNA, 19 nt, Artificial Sequence
  Description of Artificial Sequence: Synthetic oligonucleotide
gugugcagugagcgcucgc

SEQ ID NO: 1976096 - RNA, 19 nt, Artificial Sequence
  Description of Artificial Sequence: Synthetic oligonucleotide
cuuaaucaccagguaggcu

SEQ ID NO: 1976097 - RNA, 19 nt, Artificial Sequence
  Description of Artificial Sequence: Synthetic oligonucleotide
gcacucagaacaccgcuua

SEQ ID NO: 1976098 - RNA, 19 nt, Artificial Sequence
  Description of Artificial Sequence: Synthetic oligonucleotide
auaacaggcugcagacaua

SEQ ID NO: 1976099 - RNA, 19 nt, Artificial Sequence
  Description of Artificial Sequence: Synthetic oligonucleotide
caugcucugggugugcagu

SEQ ID NO: 1976100 - RNA, 19 nt, Artificial Sequence
  Description of Artificial Sequence: Synthetic oligonucleotide
ggugugcagugagcgcucg

SEQ ID NO: 1976101 - RNA, 19 nt, Artificial Sequence
  Description of Artificial Sequence: Synthetic oligonucleotide
aggguauauuugggguaga

SEQ ID NO: 1976102 - RNA, 19 nt, Artificial Sequence
  Description of Artificial Sequence: Synthetic oligonucleotide
ggaaggguuucuucugggu

SEQ ID NO: 1976103 - RNA, 19 nt, Artificial Sequence
  Description of Artificial Sequence: Synthetic oligonucleotide
cagguaggcuagcuccaca

SEQ ID NO: 1976104 - RNA, 19 nt, Artificial Sequence
  Description of Artificial Sequence: Synthetic oligonucleotide
accccgcuucuugccaggg

SEQ ID NO: 1976105 - RNA, 19 nt, Artificial Sequence
  Description of Artificial Sequence: Synthetic oligonucleotide
ccccacacacgcucaacug

SEQ ID NO: 1976106 - RNA, 19 nt, Artificial Sequence
  Description of Artificial Sequence: Synthetic oligonucleotide
agggacaauuggaucccaa

SEQ ID NO: 1976107 - RNA, 19 nt, Artificial Sequence
  Description of Artificial Sequence: Synthetic oligonucleotide
cacuuaggagccccucaaa

SEQ ID NO: 1976108 - RNA, 19 nt, Artificial Sequence
  Description of Artificial Sequence: Synthetic oligonucleotide
ugacccaguuugggucaug

SEQ ID NO: 1976109 - RNA, 19 nt, Artificial Sequence
  Description of Artificial Sequence: Synthetic oligonucleotide
cacucagaacaccgcuuaa

SEQ ID NO: 1976110 - RNA, 19 nt, Artificial Sequence
  Description of Artificial Sequence: Synthetic oligonucleotide
gugucccuugccaacuucu

SEQ ID NO: 1976111 - RNA, 19 nt, Artificial Sequence
  Description of Artificial Sequence: Synthetic oligonucleotide
ggcuagcuccacaagguua

SEQ ID NO: 1976112 - RNA, 19 nt, Artificial Sequence
  Description of Artificial Sequence: Synthetic oligonucleotide
ccuucuggucuucacccca

SEQ ID NO: 1976113 - RNA, 19 nt, Artificial Sequence
  Description of Artificial Sequence: Synthetic oligonucleotide
ggguauauuugggguagaa

SEQ ID NO: 1976114 - RNA, 19 nt, Artificial Sequence
  Description of Artificial Sequence: Synthetic oligonucleotide
gcuccugagcagcgacucc

SEQ ID NO: 1976115 - RNA, 19 nt, Artificial Sequence
  Description of Artificial Sequence: Synthetic oligonucleotide
gaccacaagcagggaggga

SEQ ID NO: 1976116 - RNA, 19 nt, Artificial Sequence
  Description of Artificial Sequence: Synthetic oligonucleotide
agugagcgcucgccucgau

SEQ ID NO: 1976117 - RNA, 19 nt, Artificial Sequence
  Description of Artificial Sequence: Synthetic oligonucleotide
aguccagccuagagacccu

SEQ ID NO: 1976118 - RNA, 19 nt, Artificial Sequence
  Description of Artificial Sequence: Synthetic oligonucleotide
gugcagugagcgcucgccu

SEQ ID NO: 1976119 - RNA, 19 nt, Artificial Sequence
  Description of Artificial Sequence: Synthetic oligonucleotide
cccugcuaguccagccuag

SEQ ID NO: 1976120 - RNA, 19 nt, Artificial Sequence
  Description of Artificial Sequence: Synthetic oligonucleotide
ggguacagguaaagguguc

SEQ ID NO: 1976121 - RNA, 19 nt, Artificial Sequence
  Description of Artificial Sequence: Synthetic oligonucleotide
cgagggcuuagagaugaag

SEQ ID NO: 1976122 - RNA, 19 nt, Artificial Sequence
  Description of Artificial Sequence: Synthetic oligonucleotide
cgcacaugagacacgggga

SEQ ID NO: 1976123 - RNA, 19 nt, Artificial Sequence
  Description of Artificial Sequence: Synthetic oligonucleotide
acggugucgcauggcacuu

SEQ ID NO: 1976124 - RNA, 19 nt, Artificial Sequence
  Description of Artificial Sequence: Synthetic oligonucleotide
gcauggcacuugaccacag

SEQ ID NO: 1976125 - RNA, 19 nt, Artificial Sequence
  Description of Artificial Sequence: Synthetic oligonucleotide
caauaucuaugccggccuu

SEQ ID NO: 1976126 - RNA, 19 nt, Artificial Sequence
  Description of Artificial Sequence: Synthetic oligonucleotide
cccacuuaggagccccuca

SEQ ID NO: 1976127 - RNA, 19 nt, Artificial Sequence
  Description of Artificial Sequence: Synthetic oligonucleotide
gugucgcauggcacuugac

SEQ ID NO: 1976128 - RNA, 19 nt, Artificial Sequence
  Description of Artificial Sequence: Synthetic oligonucleotide
ggcgcacaugagacacggg

SEQ ID NO: 1976129 - RNA, 19 nt, Artificial Sequence
  Description of Artificial Sequence: Synthetic oligonucleotide
cagggcucccuaguaccga

SEQ ID NO: 1976130 - RNA, 19 nt, Artificial Sequence
  Description of Artificial Sequence: Synthetic oligonucleotide
ccacuauguuggggcacgg

SEQ ID NO: 1976131 - RNA, 19 nt, Artificial Sequence
  Description of Artificial Sequence: Synthetic oligonucleotide
gguggacgcaagggcuggc

SEQ ID NO: 1976132 - RNA, 19 nt, Artificial Sequence
  Description of Artificial Sequence: Synthetic oligonucleotide
cccacacacgcucaacugu

SEQ ID NO: 1976133 - RNA, 19 nt, Artificial Sequence
  Description of Artificial Sequence: Synthetic oligonucleotide
caaaggcuguggaguacuu

SEQ ID NO: 1976134 - RNA, 19 nt, Artificial Sequence
  Description of Artificial Sequence: Synthetic oligonucleotide
cgauuccaugcacucagaa

SEQ ID NO: 1976135 - RNA, 19 nt, Artificial Sequence
  Description of Artificial Sequence: Synthetic oligonucleotide
ccccucaaagacgcuccag

SEQ ID NO: 1976136 - RNA, 19 nt, Artificial Sequence
  Description of Artificial Sequence: Synthetic oligonucleotide
agaguccaccccgcuucuu

SEQ ID NO: 1976137 - RNA, 19 nt, Artificial Sequence
  Description of Artificial Sequence: Synthetic oligonucleotide
accccacuuaggagccccu

SEQ ID NO: 1976138 - RNA, 19 nt, Artificial Sequence
  Description of Artificial Sequence: Synthetic oligonucleotide
gugagcgcucgccucgauu

SEQ ID NO: 1976139 - RNA, 19 nt, Artificial Sequence
  Description of Artificial Sequence: Synthetic oligonucleotide
cccuaguaccgauccugga

SEQ ID NO: 1976140 - RNA, 19 nt, Artificial Sequence
  Description of Artificial Sequence: Synthetic oligonucleotide
ccucgauuccaugcacuca

SEQ ID NO: 1976141 - RNA, 19 nt, Artificial Sequence
  Description of Artificial Sequence: Synthetic oligonucleotide
agccagcaguugggguuca

SEQ ID NO: 1976142 - RNA, 19 nt, Artificial Sequence
  Description of Artificial Sequence: Synthetic oligonucleotide
cgcucaacugucaccaggu

SEQ ID NO: 1976143 - RNA, 19 nt, Artificial Sequence
  Description of Artificial Sequence: Synthetic oligonucleotide
ccucaaagacgcuccaguu

SEQ ID NO: 1976144 - RNA, 19 nt, Artificial Sequence
  Description of Artificial Sequence: Synthetic oligonucleotide
gccccucaaagacgcucca

SEQ ID NO: 1976145 - RNA, 19 nt, Artificial Sequence
  Description of Artificial Sequence: Synthetic oligonucleotide
ccggcuaggagguccuucu

SEQ ID NO: 1976146 - RNA, 19 nt, Artificial Sequence
  Description of Artificial Sequence: Synthetic oligonucleotide
ggagguccuucuguuugcu

SEQ ID NO: 1976147 - RNA, 19 nt, Artificial Sequence
  Description of Artificial Sequence: Synthetic oligonucleotide
ccugcuaguccagccuaga

SEQ ID NO: 1976148 - RNA, 19 nt, Artificial Sequence
  Description of Artificial Sequence: Synthetic oligonucleotide
cggggaagaacucgucaaa

SEQ ID NO: 1976149 - RNA, 19 nt, Artificial Sequence
  Description of Artificial Sequence: Synthetic oligonucleotide
caccagaguccaccccgcu

SEQ ID NO: 1976150 - RNA, 19 nt, Artificial Sequence
  Description of Artificial Sequence: Synthetic oligonucleotide
gcucccuaguaccgauccu

SEQ ID NO: 1976151 - RNA, 19 nt, Artificial Sequence
  Description of Artificial Sequence: Synthetic oligonucleotide
cgcauggcacuugaccaca

SEQ ID NO: 1976152 - RNA, 19 nt, Artificial Sequence
  Description of Artificial Sequence: Synthetic oligonucleotide
gggcucccuaguaccgauc

SEQ ID NO: 1976153 - RNA, 19 nt, Artificial Sequence
  Description of Artificial Sequence: Synthetic oligonucleotide
cggccuugaauaacaggcu

SEQ ID NO: 1976154 - RNA, 19 nt, Artificial Sequence
  Description of Artificial Sequence: Synthetic oligonucleotide
gcgacuccucagggcuccc

SEQ ID NO: 1976155 - RNA, 19 nt, Artificial Sequence
  Description of Artificial Sequence: Synthetic oligonucleotide
ggucuccggcuaggagguc

SEQ ID NO: 1976156 - RNA, 19 nt, Artificial Sequence
  Description of Artificial Sequence: Synthetic oligonucleotide
cggugucgcauggcacuug

SEQ ID NO: 1976157 - RNA, 19 nt, Artificial Sequence
  Description of Artificial Sequence: Synthetic oligonucleotide
ccgagggcuuagagaugaa

SEQ ID NO: 1976158 - RNA, 19 nt, Artificial Sequence
  Description of Artificial Sequence: Synthetic oligonucleotide
gcgcucgccucgauuccau

SEQ ID NO: 1976159 - RNA, 19 nt, Artificial Sequence
  Description of Artificial Sequence: Synthetic oligonucleotide
cuccggcuaggagguccuu

SEQ ID NO: 1976160 - RNA, 19 nt, Artificial Sequence
  Description of Artificial Sequence: Synthetic oligonucleotide
uuuaauaagacauuacagc

SEQ ID NO: 1976161 - RNA, 19 nt, Artificial Sequence
  Description of Artificial Sequence: Synthetic oligonucleotide
uuuuguaucaccuuugaag

SEQ ID NO: 1976162 - RNA, 19 nt, Artificial Sequence
  Description of Artificial Sequence: Synthetic oligonucleotide
aacaagaauggacugauuc

SEQ ID NO: 1976163 - RNA, 19 nt, Artificial Sequence
  Description of Artificial Sequence: Synthetic oligonucleotide
uuaauuaacaagaauggac

SEQ ID NO: 1976164 - RNA, 19 nt, Artificial Sequence
  Description of Artificial Sequence: Synthetic oligonucleotide
acgaauacagaauacaaac

SEQ ID NO: 1976165 - RNA, 19 nt, Artificial Sequence
  Description of Artificial Sequence: Synthetic oligonucleotide
uuuaacugaaacacgaaag

SEQ ID NO: 1976166 - RNA, 19 nt, Artificial Sequence
  Description of Artificial Sequence: Synthetic oligonucleotide
aaaugaguguuucuguagc

SEQ ID NO: 1976167 - RNA, 19 nt, Artificial Sequence
  Description of Artificial Sequence: Synthetic oligonucleotide
aaacuaaagaauuggaaca

SEQ ID NO: 1976168 - RNA, 19 nt, Artificial Sequence
  Description of Artificial Sequence: Synthetic oligonucleotide
aacaagcuuagugugaacc

SEQ ID NO: 1976169 - RNA, 19 nt, Artificial Sequence
  Description of Artificial Sequence: Synthetic oligonucleotide
uugcaugaagcccagaggg

SEQ ID NO: 1976170 - RNA, 19 nt, Artificial Sequence
  Description of Artificial Sequence: Synthetic oligonucleotide
agagccgucaacuauuccc

SEQ ID NO: 1976171 - RNA, 19 nt, Artificial Sequence
  Description of Artificial Sequence: Synthetic oligonucleotide
uuuguaucaccuuugaaga

SEQ ID NO: 1976172 - RNA, 19 nt, Artificial Sequence
  Description of Artificial Sequence: Synthetic oligonucleotide
auuaugguucaauucaaac

SEQ ID NO: 1976173 - RNA, 19 nt, Artificial Sequence
  Description of Artificial Sequence: Synthetic oligonucleotide
uguacauuuacacggaacu

SEQ ID NO: 1976174 - RNA, 19 nt, Artificial Sequence
  Description of Artificial Sequence: Synthetic oligonucleotide
ugucuguuaaagaaucucg

SEQ ID NO: 1976175 - RNA, 19 nt, Artificial Sequence
  Description of Artificial Sequence: Synthetic oligonucleotide
aaugaguguuucuguagcc

SEQ ID NO: 1976176 - RNA, 19 nt, Artificial Sequence
  Description of Artificial Sequence: Synthetic oligonucleotide
agaucgaaaggcuuuauuc

SEQ ID NO: 1976177 - RNA, 19 nt, Artificial Sequence
  Description of Artificial Sequence: Synthetic oligonucleotide
caaacuaaagaauuggaac

SEQ ID NO: 1976178 - RNA, 19 nt, Artificial Sequence
  Description of Artificial Sequence: Synthetic oligonucleotide
aaaaugaguguuucuguag

SEQ ID NO: 1976179 - RNA, 19 nt, Artificial Sequence
  Description of Artificial Sequence: Synthetic oligonucleotide
uauauauuaaggcagcuuu

SEQ ID NO: 1976180 - RNA, 19 nt, Artificial Sequence
  Description of Artificial Sequence: Synthetic oligonucleotide
ugaaacacgaaagaggacc

SEQ ID NO: 1976181 - RNA, 19 nt, Artificial Sequence
  Description of Artificial Sequence: Synthetic oligonucleotide
uuaacugaaacacgaaaga

SEQ ID NO: 1976182 - RNA, 19 nt, Artificial Sequence
  Description of Artificial Sequence: Synthetic oligonucleotide
aaauuuaacugaaacacga

SEQ ID NO: 1976183 - RNA, 19 nt, Artificial Sequence
  Description of Artificial Sequence: Synthetic oligonucleotide
aacugaaacacgaaagagg

SEQ ID NO: 1976184 - RNA, 19 nt, Artificial Sequence
  Description of Artificial Sequence: Synthetic oligonucleotide
aagugugucacguaaacau

SEQ ID NO: 1976185 - RNA, 19 nt, Artificial Sequence
  Description of Artificial Sequence: Synthetic oligonucleotide
agguuuguuaccuaagguc

SEQ ID NO: 1976186 - RNA, 19 nt, Artificial Sequence
  Description of Artificial Sequence: Synthetic oligonucleotide
uuaugguucaauucaaacu

SEQ ID NO: 1976187 - RNA, 19 nt, Artificial Sequence
  Description of Artificial Sequence: Synthetic oligonucleotide
gaugcuugcucucaaagug

SEQ ID NO: 1976188 - RNA, 19 nt, Artificial Sequence
  Description of Artificial Sequence: Synthetic oligonucleotide
uauauuaaggcagcuuugg

SEQ ID NO: 1976189 - RNA, 19 nt, Artificial Sequence
  Description of Artificial Sequence: Synthetic oligonucleotide
acaauuuucaaacaucaau

SEQ ID NO: 1976190 - RNA, 19 nt, Artificial Sequence
  Description of Artificial Sequence: Synthetic oligonucleotide
ucaacuauucccuauccga

SEQ ID NO: 1976191 - RNA, 19 nt, Artificial Sequence
  Description of Artificial Sequence: Synthetic oligonucleotide
uauuaaggcagcuuuggca

SEQ ID NO: 1976192 - RNA, 19 nt, Artificial Sequence
  Description of Artificial Sequence: Synthetic oligonucleotide
uuugcaugaagcccagagg

SEQ ID NO: 1976193 - RNA, 19 nt, Artificial Sequence
  Description of Artificial Sequence: Synthetic oligonucleotide
ugcagguauauauuaaggc

SEQ ID NO: 1976194 - RNA, 19 nt, Artificial Sequence
  Description of Artificial Sequence: Synthetic oligonucleotide
ucaaacuaaagaauuggaa

SEQ ID NO: 1976195 - RNA, 19 nt, Artificial Sequence
  Description of Artificial Sequence: Synthetic oligonucleotide
acaagcuuagugugaaccc

SEQ ID NO: 1976196 - RNA, 19 nt, Artificial Sequence
  Description of Artificial Sequence: Synthetic oligonucleotide
gaaucucggaauuaaauga

SEQ ID NO: 1976197 - RNA, 19 nt, Artificial Sequence
  Description of Artificial Sequence: Synthetic oligonucleotide
acagcuaacacgaauacag

SEQ ID NO: 1976198 - RNA, 19 nt, Artificial Sequence
  Description of Artificial Sequence: Synthetic oligonucleotide
cagguauauauuaaggcag

SEQ ID NO: 1976199 - RNA, 19 nt, Artificial Sequence
  Description of Artificial Sequence: Synthetic oligonucleotide
cuauccgagauacagacug

SEQ ID NO: 1976200 - RNA, 19 nt, Artificial Sequence
  Description of Artificial Sequence: Synthetic oligonucleotide
guuaccuaaggucugagac

SEQ ID NO: 1976201 - RNA, 19 nt, Artificial Sequence
  Description of Artificial Sequence: Synthetic oligonucleotide
aaucucggaauuaaaugac

SEQ ID NO: 1976202 - RNA, 19 nt, Artificial Sequence
  Description of Artificial Sequence: Synthetic oligonucleotide
auggaaacaagcuuagugu

SEQ ID NO: 1976203 - RNA, 19 nt, Artificial Sequence
  Description of Artificial Sequence: Synthetic oligonucleotide
ugugcagguauauauuaag

SEQ ID NO: 1976204 - RNA, 19 nt, Artificial Sequence
  Description of Artificial Sequence: Synthetic oligonucleotide
uaauaagacauuacagcac

SEQ ID NO: 1976205 - RNA, 19 nt, Artificial Sequence
  Description of Artificial Sequence: Synthetic oligonucleotide
gacaguagaagagucaaag

SEQ ID NO: 1976206 - RNA, 19 nt, Artificial Sequence
  Description of Artificial Sequence: Synthetic oligonucleotide
cuguaaaccacucuaugcc

SEQ ID NO: 1976207 - RNA, 19 nt, Artificial Sequence
  Description of Artificial Sequence: Synthetic oligonucleotide
cauggaaacaagcuuagug

SEQ ID NO: 1976208 - RNA, 19 nt, Artificial Sequence
  Description of Artificial Sequence: Synthetic oligonucleotide
uguuaaagaaucucggaau

SEQ ID NO: 1976209 - RNA, 19 nt, Artificial Sequence
  Description of Artificial Sequence: Synthetic oligonucleotide
aagacauuacagcacacau

SEQ ID NO: 1976210 - RNA, 19 nt, Artificial Sequence
  Description of Artificial Sequence: Synthetic oligonucleotide
uaaggucugagacaguaga

SEQ ID NO: 1976211 - RNA, 19 nt, Artificial Sequence
  Description of Artificial Sequence: Synthetic oligonucleotide
cuuagugugaaccccauuc

SEQ ID NO: 1976212 - RNA, 19 nt, Artificial Sequence
  Description of Artificial Sequence: Synthetic oligonucleotide
uuuaauuaacaagaaugga

SEQ ID NO: 1976213 - RNA, 19 nt, Artificial Sequence
  Description of Artificial Sequence: Synthetic oligonucleotide
ucgauauuuuguaucaccu

SEQ ID NO: 1976214 - RNA, 19 nt, Artificial Sequence
  Description of Artificial Sequence: Synthetic oligonucleotide
aaucaaaucccucucgaua

SEQ ID NO: 1976215 - RNA, 19 nt, Artificial Sequence
  Description of Artificial Sequence: Synthetic oligonucleotide
agaucugucuguuaaagaa

SEQ ID NO: 1976216 - RNA, 19 nt, Artificial Sequence
  Description of Artificial Sequence: Synthetic oligonucleotide
aaaagguuugaguugucau

SEQ ID NO: 1976217 - RNA, 19 nt, Artificial Sequence
  Description of Artificial Sequence: Synthetic oligonucleotide
cuuuugacagcuaacacga

SEQ ID NO: 1976218 - RNA, 19 nt, Artificial Sequence
  Description of Artificial Sequence: Synthetic oligonucleotide
uuauucugaauuacagaca

SEQ ID NO: 1976219 - RNA, 19 nt, Artificial Sequence
  Description of Artificial Sequence: Synthetic oligonucleotide
ucggaauuaaaugacaaaa

SEQ ID NO: 1976220 - RNA, 19 nt, Artificial Sequence
  Description of Artificial Sequence: Synthetic oligonucleotide
aauacaagaucgaaaggcu

SEQ ID NO: 1976221 - RNA, 19 nt, Artificial Sequence
  Description of Artificial Sequence: Synthetic oligonucleotide
uuccaaaucagagucaacu

SEQ ID NO: 1976222 - RNA, 19 nt, Artificial Sequence
  Description of Artificial Sequence: Synthetic oligonucleotide
ugaguugucaucuccuuac

SEQ ID NO: 1976223 - RNA, 19 nt, Artificial Sequence
  Description of Artificial Sequence: Synthetic oligonucleotide
aucaccuuugaagacaccg

SEQ ID NO: 1976224 - RNA, 19 nt, Artificial Sequence
  Description of Artificial Sequence: Synthetic oligonucleotide
uuagugugaaccccauucc

SEQ ID NO: 1976225 - RNA, 19 nt, Artificial Sequence
  Description of Artificial Sequence: Synthetic oligonucleotide
acaguagaagagucaaagg

SEQ ID NO: 1976226 - RNA, 19 nt, Artificial Sequence
  Description of Artificial Sequence: Synthetic oligonucleotide
aacacgaauacagaauaca

SEQ ID NO: 1976227 - RNA, 19 nt, Artificial Sequence
  Description of Artificial Sequence: Synthetic oligonucleotide
ugaauucaccuguaaacca

SEQ ID NO: 1976228 - RNA, 19 nt, Artificial Sequence
  Description of Artificial Sequence: Synthetic oligonucleotide
accccauuccuuuugacag

SEQ ID NO: 1976229 - RNA, 19 nt, Artificial Sequence
  Description of Artificial Sequence: Synthetic oligonucleotide
cucgauauuuuguaucacc

SEQ ID NO: 1976230 - RNA, 19 nt, Artificial Sequence
  Description of Artificial Sequence: Synthetic oligonucleotide
acucuaugccugcacaucg

SEQ ID NO: 1976231 - RNA, 19 nt, Artificial Sequence
  Description of Artificial Sequence: Synthetic oligonucleotide
uuacacggaacucucuuug

SEQ ID NO: 1976232 - RNA, 19 nt, Artificial Sequence
  Description of Artificial Sequence: Synthetic oligonucleotide
cuuacacaacaguaaauac

SEQ ID NO: 1976233 - RNA, 19 nt, Artificial Sequence
  Description of Artificial Sequence: Synthetic oligonucleotide
ugaauuacagacagugauc

SEQ ID NO: 1976234 - RNA, 19 nt, Artificial Sequence
  Description of Artificial Sequence: Synthetic oligonucleotide
ucuccuuacagcaaauuua

SEQ ID NO: 1976235 - RNA, 19 nt, Artificial Sequence
  Description of Artificial Sequence: Synthetic oligonucleotide
uucagauuuccaaaucaga

SEQ ID NO: 1976236 - RNA, 19 nt, Artificial Sequence
  Description of Artificial Sequence: Synthetic oligonucleotide
ucuguuaaagaaucucgga

SEQ ID NO: 1976237 - RNA, 19 nt, Artificial Sequence
  Description of Artificial Sequence: Synthetic oligonucleotide
guugucaucuccuuacagc

SEQ ID NO: 1976238 - RNA, 19 nt, Artificial Sequence
  Description of Artificial Sequence: Synthetic oligonucleotide
uggaacaauuuucaaacau

SEQ ID NO: 1976239 - RNA, 19 nt, Artificial Sequence
  Description of Artificial Sequence: Synthetic oligonucleotide
gucaacuguacauuuacac

SEQ ID NO: 1976240 - RNA, 19 nt, Artificial Sequence
  Description of Artificial Sequence: Synthetic oligonucleotide
aaaucagagucaacuguac

SEQ ID NO: 1976241 - RNA, 19 nt, Artificial Sequence
  Description of Artificial Sequence: Synthetic oligonucleotide
cuuugcaugaagcccagag

SEQ ID NO: 1976242 - RNA, 19 nt, Artificial Sequence
  Description of Artificial Sequence: Synthetic oligonucleotide
gaauuacagacagugauca

SEQ ID NO: 1976243 - RNA, 19 nt, Artificial Sequence
  Description of Artificial Sequence: Synthetic oligonucleotide
uucuuuaauaagacauuac

SEQ ID NO: 1976244 - RNA, 19 nt, Artificial Sequence
  Description of Artificial Sequence: Synthetic oligonucleotide
ugagacugaaucuucugcu

SEQ ID NO: 1976245 - RNA, 19 nt, Artificial Sequence
  Description of Artificial Sequence: Synthetic oligonucleotide
uacauuuacacggaacucu

SEQ ID NO: 1976246 - RNA, 19 nt, Artificial Sequence
  Description of Artificial Sequence: Synthetic oligonucleotide
ucaugaauucaccuguaaa

SEQ ID NO: 1976247 - RNA, 19 nt, Artificial Sequence
  Description of Artificial Sequence: Synthetic oligonucleotide
ugugucacguaaacauggg

SEQ ID NO: 1976248 - RNA, 19 nt, Artificial Sequence
  Description of Artificial Sequence: Synthetic oligonucleotide
uuacagacagugaucacaa

SEQ ID NO: 1976249 - RNA, 19 nt, Artificial Sequence
  Description of Artificial Sequence: Synthetic oligonucleotide
gaaucuucugcuguccacg

SEQ ID NO: 1976250 - RNA, 19 nt, Artificial Sequence
  Description of Artificial Sequence: Synthetic oligonucleotide
uaccuaaggucugagacag

SEQ ID NO: 1976251 - RNA, 19 nt, Artificial Sequence
  Description of Artificial Sequence: Synthetic oligonucleotide
ucugcugaucuaacagugg

SEQ ID NO: 1976252 - RNA, 19 nt, Artificial Sequence
  Description of Artificial Sequence: Synthetic oligonucleotide
aaucccucucgauauuuug

SEQ ID NO: 1976253 - RNA, 19 nt, Artificial Sequence
  Description of Artificial Sequence: Synthetic oligonucleotide
uuuaaacagaucugucugu

SEQ ID NO: 1976254 - RNA, 19 nt, Artificial Sequence
  Description of Artificial Sequence: Synthetic oligonucleotide
uaacaucuucuuuaauaag

SEQ ID NO: 1976255 - RNA, 19 nt, Artificial Sequence
  Description of Artificial Sequence: Synthetic oligonucleotide
uuucaaacaucaauauaau

SEQ ID NO: 1976256 - RNA, 19 nt, Artificial Sequence
  Description of Artificial Sequence: Synthetic oligonucleotide
uugacagcuaacacgaaua

SEQ ID NO: 1976257 - RNA, 19 nt, Artificial Sequence
  Description of Artificial Sequence: Synthetic oligonucleotide
uucccuauccgagauacag

SEQ ID NO: 1976258 - RNA, 19 nt, Artificial Sequence
  Description of Artificial Sequence: Synthetic oligonucleotide
auuacagacagugaucaca

SEQ ID NO: 1976259 - RNA, 19 nt, Artificial Sequence
  Description of Artificial Sequence: Synthetic oligonucleotide
uaugccugcacaucggcca

SEQ ID NO: 1976260 - RNA, 19 nt, Artificial Sequence
  Description of Artificial Sequence: Synthetic oligonucleotide
aucaaaucccucucgauau

SEQ ID NO: 1976261 - RNA, 19 nt, Artificial Sequence
  Description of Artificial Sequence: Synthetic oligonucleotide
uccaaaucagagucaacug

SEQ ID NO: 1976262 - RNA, 19 nt, Artificial Sequence
  Description of Artificial Sequence: Synthetic oligonucleotide
aguagaagagucaaaggug

SEQ ID NO: 1976263 - RNA, 19 nt, Artificial Sequence
  Description of Artificial Sequence: Synthetic oligonucleotide
aucgaaaggcuuuauucug

SEQ ID NO: 1976264 - RNA, 19 nt, Artificial Sequence
  Description of Artificial Sequence: Synthetic oligonucleotide
uguaaaccacucuaugccu

SEQ ID NO: 1976265 - RNA, 19 nt, Artificial Sequence
  Description of Artificial Sequence: Synthetic oligonucleotide
uccacgagccauauccggg

SEQ ID NO: 1976266 - RNA, 19 nt, Artificial Sequence
  Description of Artificial Sequence: Synthetic oligonucleotide
gagucaacuguacauuuac

SEQ ID NO: 1976267 - RNA, 19 nt, Artificial Sequence
  Description of Artificial Sequence: Synthetic oligonucleotide
uauucccuauccgagauac

SEQ ID NO: 1976268 - RNA, 19 nt, Artificial Sequence
  Description of Artificial Sequence: Synthetic oligonucleotide
ucucggaauuaaaugacaa

SEQ ID NO: 1976269 - RNA, 19 nt, Artificial Sequence
  Description of Artificial Sequence: Synthetic oligonucleotide
aaacaagcuuagugugaac

SEQ ID NO: 1976270 - RNA, 19 nt, Artificial Sequence
  Description of Artificial Sequence: Synthetic oligonucleotide
acacgaaagaggaccaugc

SEQ ID NO: 1976271 - RNA, 19 nt, Artificial Sequence
  Description of Artificial Sequence: Synthetic oligonucleotide
acaucaauauaauuacaau

SEQ ID NO: 1976272 - RNA, 19 nt, Artificial Sequence
  Description of Artificial Sequence: Synthetic oligonucleotide
agaauuggaacaauuuuca

SEQ ID NO: 1976273 - RNA, 19 nt, Artificial Sequence
  Description of Artificial Sequence: Synthetic oligonucleotide
uaaagaaucucggaauuaa

SEQ ID NO: 1976274 - RNA, 19 nt, Artificial Sequence
  Description of Artificial Sequence: Synthetic oligonucleotide
uuaccuaaggucugagaca

SEQ ID NO: 1976275 - RNA, 19 nt, Artificial Sequence
  Description of Artificial Sequence: Synthetic oligonucleotide
ucaccuguaaaccacucua

SEQ ID NO: 1976276 - RNA, 19 nt, Artificial Sequence
  Description of Artificial Sequence: Synthetic oligonucleotide
uuaacaagaauggacugau

SEQ ID NO: 1976277 - RNA, 19 nt, Artificial Sequence
  Description of Artificial Sequence: Synthetic oligonucleotide
ccuuuugacagcuaacacg

SEQ ID NO: 1976278 - RNA, 19 nt, Artificial Sequence
  Description of Artificial Sequence: Synthetic oligonucleotide
aacuauucccuauccgaga

SEQ ID NO: 1976279 - RNA, 19 nt, Artificial Sequence
  Description of Artificial Sequence: Synthetic oligonucleotide
aacuaaagaauuggaacaa

SEQ ID NO: 1976280 - RNA, 19 nt, Artificial Sequence
  Description of Artificial Sequence: Synthetic oligonucleotide
acgaaagaggaccaugcug

SEQ ID NO: 1976281 - RNA, 19 nt, Artificial Sequence
  Description of Artificial Sequence: Synthetic oligonucleotide
gugaucacaaaauuaacua

SEQ ID NO: 1976282 - RNA, 19 nt, Artificial Sequence
  Description of Artificial Sequence: Synthetic oligonucleotide
cauuacagcacacaugaga

SEQ ID NO: 1976283 - RNA, 19 nt, Artificial Sequence
  Description of Artificial Sequence: Synthetic oligonucleotide
ucuucuuuaauaagacauu

SEQ ID NO: 1976284 - RNA, 19 nt, Artificial Sequence
  Description of Artificial Sequence: Synthetic oligonucleotide
caacuauucccuauccgag

SEQ ID NO: 1976285 - RNA, 19 nt, Artificial Sequence
  Description of Artificial Sequence: Synthetic oligonucleotide
ugugcuaagggagagccgu

SEQ ID NO: 1976286 - RNA, 19 nt, Artificial Sequence
  Description of Artificial Sequence: Synthetic oligonucleotide
gucuuuagugcuuacacaa

SEQ ID NO: 1976287 - RNA, 19 nt, Artificial Sequence
  Description of Artificial Sequence: Synthetic oligonucleotide
aagaaucucggaauuaaau

SEQ ID NO: 1976288 - RNA, 19 nt, Artificial Sequence
  Description of Artificial Sequence: Synthetic oligonucleotide
ugucuuuagugcuuacaca

SEQ ID NO: 1976289 - RNA, 19 nt, Artificial Sequence
  Description of Artificial Sequence: Synthetic oligonucleotide
caacaguaaauacaagauc

SEQ ID NO: 1976290 - RNA, 19 nt, Artificial Sequence
  Description of Artificial Sequence: Synthetic oligonucleotide
ucgaaaggcuuuauucuga

SEQ ID NO: 1976291 - RNA, 19 nt, Artificial Sequence
  Description of Artificial Sequence: Synthetic oligonucleotide
aaccacucuaugccugcac

SEQ ID NO: 1976292 - RNA, 19 nt, Artificial Sequence
  Description of Artificial Sequence: Synthetic oligonucleotide
uagugcuuacacaacagua

SEQ ID NO: 1976293 - RNA, 19 nt, Artificial Sequence
  Description of Artificial Sequence: Synthetic oligonucleotide
cuaacagugguguuuaaaa

SEQ ID NO: 1976294 - RNA, 19 nt, Artificial Sequence
  Description of Artificial Sequence: Synthetic oligonucleotide
agagucaaaggugucauga

SEQ ID NO: 1976295 - RNA, 19 nt, Artificial Sequence
  Description of Artificial Sequence: Synthetic oligonucleotide
uacaagaucgaaaggcuuu

SEQ ID NO: 1976296 - RNA, 19 nt, Artificial Sequence
  Description of Artificial Sequence: Synthetic oligonucleotide
gugucuuuagugcuuacac

SEQ ID NO: 1976297 - RNA, 19 nt, Artificial Sequence
  Description of Artificial Sequence: Synthetic oligonucleotide
gucaacuauucccuauccg

SEQ ID NO: 1976298 - RNA, 19 nt, Artificial Sequence
  Description of Artificial Sequence: Synthetic oligonucleotide
agacugugcagguauauau

SEQ ID NO: 1976299 - RNA, 19 nt, Artificial Sequence
  Description of Artificial Sequence: Synthetic oligonucleotide
ucuggcguccgggagaccg

SEQ ID NO: 1976300 - RNA, 19 nt, Artificial Sequence
  Description of Artificial Sequence: Synthetic oligonucleotide
cuuuauucugaauuacaga

SEQ ID NO: 1976301 - RNA, 19 nt, Artificial Sequence
  Description of Artificial Sequence: Synthetic oligonucleotide
aguaaauacaagaucgaaa

SEQ ID NO: 1976302 - RNA, 19 nt, Artificial Sequence
  Description of Artificial Sequence: Synthetic oligonucleotide
gugugucacguaaacaugg

SEQ ID NO: 1976303 - RNA, 19 nt, Artificial Sequence
  Description of Artificial Sequence: Synthetic oligonucleotide
gauauuuuguaucaccuuu

SEQ ID NO: 1976304 - RNA, 19 nt, Artificial Sequence
  Description of Artificial Sequence: Synthetic oligonucleotide
uuggucguggccuuguuuc

SEQ ID NO: 1976305 - RNA, 19 nt, Artificial Sequence
  Description of Artificial Sequence: Synthetic oligonucleotide
uucgggucuggcaucugcg

SEQ ID NO: 1976306 - RNA, 19 nt, Artificial Sequence
  Description of Artificial Sequence: Synthetic oligonucleotide
ugacagcuaacacgaauac

SEQ ID NO: 1976307 - RNA, 19 nt, Artificial Sequence
  Description of Artificial Sequence: Synthetic oligonucleotide
acaucggccagcucugggg

SEQ ID NO: 1976308 - RNA, 19 nt, Artificial Sequence
  Description of Artificial Sequence: Synthetic oligonucleotide
aguugucaucuccuuacag

SEQ ID NO: 1976309 - RNA, 19 nt, Artificial Sequence
  Description of Artificial Sequence: Synthetic oligonucleotide
uaacacgaauacagaauac

SEQ ID NO: 1976310 - RNA, 19 nt, Artificial Sequence
  Description of Artificial Sequence: Synthetic oligonucleotide
ucuaugccugcacaucggc

SEQ ID NO: 1976311 - RNA, 19 nt, Artificial Sequence
  Description of Artificial Sequence: Synthetic oligonucleotide
gagacugaaucuucugcug

SEQ ID NO: 1976312 - RNA, 19 nt, Artificial Sequence
  Description of Artificial Sequence: Synthetic oligonucleotide
uaaaccacucuaugccugc

SEQ ID NO: 1976313 - RNA, 19 nt, Artificial Sequence
  Description of Artificial Sequence: Synthetic oligonucleotide
uguccacgagccauauccg

SEQ ID NO: 1976314 - RNA, 19 nt, Artificial Sequence
  Description of Artificial Sequence: Synthetic oligonucleotide
gaauucaccuguaaaccac

SEQ ID NO: 1976315 - RNA, 19 nt, Artificial Sequence
  Description of Artificial Sequence: Synthetic oligonucleotide
gaucgaaaggcuuuauucu

SEQ ID NO: 1976316 - RNA, 19 nt, Artificial Sequence
  Description of Artificial Sequence: Synthetic oligonucleotide
aggaccaugcuggcaaucc

SEQ ID NO: 1976317 - RNA, 19 nt, Artificial Sequence
  Description of Artificial Sequence: Synthetic oligonucleotide
ugaagacaccguaacaguu

SEQ ID NO: 1976318 - RNA, 19 nt, Artificial Sequence
  Description of Artificial Sequence: Synthetic oligonucleotide
cuaacacgaauacagaaua

SEQ ID NO: 1976319 - RNA, 19 nt, Artificial Sequence
  Description of Artificial Sequence: Synthetic oligonucleotide
aaucuucugcuguccacga

SEQ ID NO: 1976320 - RNA, 19 nt, Artificial Sequence
  Description of Artificial Sequence: Synthetic oligonucleotide
uuggaacaauuuucaaaca

SEQ ID NO: 1976321 - RNA, 19 nt, Artificial Sequence
  Description of Artificial Sequence: Synthetic oligonucleotide
ugcugaucuaacaguggug

SEQ ID NO: 1976322 - RNA, 19 nt, Artificial Sequence
  Description of Artificial Sequence: Synthetic oligonucleotide
cagacugaaauaugguguc

SEQ ID NO: 1976323 - RNA, 19 nt, Artificial Sequence
  Description of Artificial Sequence: Synthetic oligonucleotide
uagugugaaccccauuccu

SEQ ID NO: 1976324 - RNA, 19 nt, Artificial Sequence
  Description of Artificial Sequence: Synthetic oligonucleotide
aagaucgaaaggcuuuauu

SEQ ID NO: 1976325 - RNA, 19 nt, Artificial Sequence
  Description of Artificial Sequence: Synthetic oligonucleotide
auuuacacggaacucucuu

SEQ ID NO: 1976326 - RNA, 19 nt, Artificial Sequence
  Description of Artificial Sequence: Synthetic oligonucleotide
aagacaccguaacaguuuu

SEQ ID NO: 1976327 - RNA, 19 nt, Artificial Sequence
  Description of Artificial Sequence: Synthetic oligonucleotide
uucaccuguaaaccacucu

SEQ ID NO: 1976328 - RNA, 19 nt, Artificial Sequence
  Description of Artificial Sequence: Synthetic oligonucleotide
ugagaucccaaguguguca

SEQ ID NO: 1976329 - RNA, 19 nt, Artificial Sequence
  Description of Artificial Sequence: Synthetic oligonucleotide
aauuuaacugaaacacgaa

SEQ ID NO: 1976330 - RNA, 19 nt, Artificial Sequence
  Description of Artificial Sequence: Synthetic oligonucleotide
agacugaaucuucugcugu

SEQ ID NO: 1976331 - RNA, 19 nt, Artificial Sequence
  Description of Artificial Sequence: Synthetic oligonucleotide
gugucacguaaacaugggg

SEQ ID NO: 1976332 - RNA, 19 nt, Artificial Sequence
  Description of Artificial Sequence: Synthetic oligonucleotide
accuguaaaccacucuaug

SEQ ID NO: 1976333 - RNA, 19 nt, Artificial Sequence
  Description of Artificial Sequence: Synthetic oligonucleotide
uucugcugagacugaaucu

SEQ ID NO: 1976334 - RNA, 19 nt, Artificial Sequence
  Description of Artificial Sequence: Synthetic oligonucleotide
ccuguaaaccacucuaugc

SEQ ID NO: 1976335 - RNA, 19 nt, Artificial Sequence
  Description of Artificial Sequence: Synthetic oligonucleotide
cuguuaaagaaucucggaa

SEQ ID NO: 1976336 - RNA, 19 nt, Artificial Sequence
  Description of Artificial Sequence: Synthetic oligonucleotide
uguagccccuuuauuucug

SEQ ID NO: 1976337 - RNA, 19 nt, Artificial Sequence
  Description of Artificial Sequence: Synthetic oligonucleotide
cucucgauauuuuguauca

SEQ ID NO: 1976338 - RNA, 19 nt, Artificial Sequence
  Description of Artificial Sequence: Synthetic oligonucleotide
caagcuuagugugaacccc

SEQ ID NO: 1976339 - RNA, 19 nt, Artificial Sequence
  Description of Artificial Sequence: Synthetic oligonucleotide
ucccaagugugucacguaa

SEQ ID NO: 1976340 - RNA, 19 nt, Artificial Sequence
  Description of Artificial Sequence: Synthetic oligonucleotide
uguuaccuaaggucugaga

SEQ ID NO: 1976341 - RNA, 19 nt, Artificial Sequence
  Description of Artificial Sequence: Synthetic oligonucleotide
aauucaccuguaaaccacu

SEQ ID NO: 1976342 - RNA, 19 nt, Artificial Sequence
  Description of Artificial Sequence: Synthetic oligonucleotide
aggcuuuauucugaauuac

SEQ ID NO: 1976343 - RNA, 19 nt, Artificial Sequence
  Description of Artificial Sequence: Synthetic oligonucleotide
cuaaggucugagacaguag

SEQ ID NO: 1976344 - RNA, 19 nt, Artificial Sequence
  Description of Artificial Sequence: Synthetic oligonucleotide
augagaucccaaguguguc

SEQ ID NO: 1976345 - RNA, 19 nt, Artificial Sequence
  Description of Artificial Sequence: Synthetic oligonucleotide
aauuaugguucaauucaaa

SEQ ID NO: 1976346 - RNA, 19 nt, Artificial Sequence
  Description of Artificial Sequence: Synthetic oligonucleotide
uuuuaacaucuucuuuaau

SEQ ID NO: 1976347 - RNA, 19 nt, Artificial Sequence
  Description of Artificial Sequence: Synthetic oligonucleotide
auggacugauucuucagau

SEQ ID NO: 1976348 - RNA, 19 nt, Artificial Sequence
  Description of Artificial Sequence: Synthetic oligonucleotide
caucaauauaauuacaauu

SEQ ID NO: 1976349 - RNA, 19 nt, Artificial Sequence
  Description of Artificial Sequence: Synthetic oligonucleotide
uuguaucaccuuugaagac

SEQ ID NO: 1976350 - RNA, 19 nt, Artificial Sequence
  Description of Artificial Sequence: Synthetic oligonucleotide
ugaucuaacagugguguuu

SEQ ID NO: 1976351 - RNA, 19 nt, Artificial Sequence
  Description of Artificial Sequence: Synthetic oligonucleotide
uacacggaacucucuuugc

SEQ ID NO: 1976352 - RNA, 19 nt, Artificial Sequence
  Description of Artificial Sequence: Synthetic oligonucleotide
ugcuuacacaacaguaaau

SEQ ID NO: 1976353 - RNA, 19 nt, Artificial Sequence
  Description of Artificial Sequence: Synthetic oligonucleotide
ucuaacagugguguuuaaa

SEQ ID NO: 1976354 - RNA, 19 nt, Artificial Sequence
  Description of Artificial Sequence: Synthetic oligonucleotide
ugcacaucggccagcucug

SEQ ID NO: 1976355 - RNA, 19 nt, Artificial Sequence
  Description of Artificial Sequence: Synthetic oligonucleotide
agugcuuacacaacaguaa

SEQ ID NO: 1976356 - RNA, 19 nt, Artificial Sequence
  Description of Artificial Sequence: Synthetic oligonucleotide
caguagaagagucaaaggu

SEQ ID NO: 1976357 - RNA, 19 nt, Artificial Sequence
  Description of Artificial Sequence: Synthetic oligonucleotide
uuuacacggaacucucuuu

SEQ ID NO: 1976358 - RNA, 19 nt, Artificial Sequence
  Description of Artificial Sequence: Synthetic oligonucleotide
gcaucugcguccuacagac

SEQ ID NO: 1976359 - RNA, 19 nt, Artificial Sequence
  Description of Artificial Sequence: Synthetic oligonucleotide
agacagugaucacaaaauu

SEQ ID NO: 1976360 - RNA, 19 nt, Artificial Sequence
  Description of Artificial Sequence: Synthetic oligonucleotide
cuccuuacagcaaauuuaa

SEQ ID NO: 1976361 - RNA, 19 nt, Artificial Sequence
  Description of Artificial Sequence: Synthetic oligonucleotide
gaaacacgaaagaggacca

SEQ ID NO: 1976362 - RNA, 19 nt, Artificial Sequence
  Description of Artificial Sequence: Synthetic oligonucleotide
caaaucagagucaacugua

SEQ ID NO: 1976363 - RNA, 19 nt, Artificial Sequence
  Description of Artificial Sequence: Synthetic oligonucleotide
uuuucugcugagacugaau

SEQ ID NO: 1976364 - RNA, 19 nt, Artificial Sequence
  Description of Artificial Sequence: Synthetic oligonucleotide
cuaugccugcacaucggcc

SEQ ID NO: 1976365 - RNA, 19 nt, Artificial Sequence
  Description of Artificial Sequence: Synthetic oligonucleotide
gguuugaguugucaucucc

SEQ ID NO: 1976366 - RNA, 19 nt, Artificial Sequence
  Description of Artificial Sequence: Synthetic oligonucleotide
gacagugaucacaaaauua

SEQ ID NO: 1976367 - RNA, 19 nt, Artificial Sequence
  Description of Artificial Sequence: Synthetic oligonucleotide
uugaguugucaucuccuua

SEQ ID NO: 1976368 - RNA, 19 nt, Artificial Sequence
  Description of Artificial Sequence: Synthetic oligonucleotide
aaagaaucucggaauuaaa

SEQ ID NO: 1976369 - RNA, 19 nt, Artificial Sequence
  Description of Artificial Sequence: Synthetic oligonucleotide
aacuguacauuuacacgga

SEQ ID NO: 1976370 - RNA, 19 nt, Artificial Sequence
  Description of Artificial Sequence: Synthetic oligonucleotide
cucuaugccugcacaucgg

SEQ ID NO: 1976371 - RNA, 19 nt, Artificial Sequence
  Description of Artificial Sequence: Synthetic oligonucleotide
gaauuggaacaauuuucaa

SEQ ID NO: 1976372 - RNA, 19 nt, Artificial Sequence
  Description of Artificial Sequence: Synthetic oligonucleotide
caauucaaacuaaagaauu

SEQ ID NO: 1976373 - RNA, 19 nt, Artificial Sequence
  Description of Artificial Sequence: Synthetic oligonucleotide
uauccgagauacagacuga

SEQ ID NO: 1976374 - RNA, 19 nt, Artificial Sequence
  Description of Artificial Sequence: Synthetic oligonucleotide
gaaauauggugucuuuagu

SEQ ID NO: 1976375 - RNA, 19 nt, Artificial Sequence
  Description of Artificial Sequence: Synthetic oligonucleotide
agccccuuuauuucugcug

SEQ ID NO: 1976376 - RNA, 19 nt, Artificial Sequence
  Description of Artificial Sequence: Synthetic oligonucleotide
acacggaacucucuuugca

SEQ ID NO: 1976377 - RNA, 19 nt, Artificial Sequence
  Description of Artificial Sequence: Synthetic oligonucleotide
guaaaccacucuaugccug

SEQ ID NO: 1976378 - RNA, 19 nt, Artificial Sequence
  Description of Artificial Sequence: Synthetic oligonucleotide
cugucuguuaaagaaucuc

SEQ ID NO: 1976379 - RNA, 19 nt, Artificial Sequence
  Description of Artificial Sequence: Synthetic oligonucleotide
guccacgagccauauccgg

SEQ ID NO: 1976380 - RNA, 19 nt, Artificial Sequence
  Description of Artificial Sequence: Synthetic oligonucleotide
ucuggcaucugcguccuac

SEQ ID NO: 1976381 - RNA, 19 nt, Artificial Sequence
  Description of Artificial Sequence: Synthetic oligonucleotide
accacucuaugccugcaca

SEQ ID NO: 1976382 - RNA, 19 nt, Artificial Sequence
  Description of Artificial Sequence: Synthetic oligonucleotide
cacgaauacagaauacaaa

SEQ ID NO: 1976383 - RNA, 19 nt, Artificial Sequence
  Description of Artificial Sequence: Synthetic oligonucleotide
ucccuauccgagauacaga

SEQ ID NO: 1976384 - RNA, 19 nt, Artificial Sequence
  Description of Artificial Sequence: Synthetic oligonucleotide
acaugagaucccaagugug

SEQ ID NO: 1976385 - RNA, 19 nt, Artificial Sequence
  Description of Artificial Sequence: Synthetic oligonucleotide
uggcaucugcguccuacag

SEQ ID NO: 1976386 - RNA, 19 nt, Artificial Sequence
  Description of Artificial Sequence: Synthetic oligonucleotide
gagauacagacugaaauau

SEQ ID NO: 1976387 - RNA, 19 nt, Artificial Sequence
  Description of Artificial Sequence: Synthetic oligonucleotide
acaguaaauacaagaucga

SEQ ID NO: 1976388 - RNA, 19 nt, Artificial Sequence
  Description of Artificial Sequence: Synthetic oligonucleotide
cuuugaagacaccguaaca

SEQ ID NO: 1976389 - RNA, 19 nt, Artificial Sequence
  Description of Artificial Sequence: Synthetic oligonucleotide
acugaaauauggugucuuu

SEQ ID NO: 1976390 - RNA, 19 nt, Artificial Sequence
  Description of Artificial Sequence: Synthetic oligonucleotide
agugugucacguaaacaug

SEQ ID NO: 1976391 - RNA, 19 nt, Artificial Sequence
  Description of Artificial Sequence: Synthetic oligonucleotide
guagaagagucaaaggugu

SEQ ID NO: 1976392 - RNA, 19 nt, Artificial Sequence
  Description of Artificial Sequence: Synthetic oligonucleotide
ucugcguccuacagacugu

SEQ ID NO: 1976393 - RNA, 19 nt, Artificial Sequence
  Description of Artificial Sequence: Synthetic oligonucleotide
aagcuuagugugaacccca

SEQ ID NO: 1976394 - RNA, 19 nt, Artificial Sequence
  Description of Artificial Sequence: Synthetic oligonucleotide
guccuacagacugugcagg

SEQ ID NO: 1976395 - RNA, 19 nt, Artificial Sequence
  Description of Artificial Sequence: Synthetic oligonucleotide
cauuccuuuugacagcuaa

SEQ ID NO: 1976396 - RNA, 19 nt, Artificial Sequence
  Description of Artificial Sequence: Synthetic oligonucleotide
ggucugagacaguagaaga

SEQ ID NO: 1976397 - RNA, 19 nt, Artificial Sequence
  Description of Artificial Sequence: Synthetic oligonucleotide
agguuugaguugucaucuc

SEQ ID NO: 1976398 - RNA, 19 nt, Artificial Sequence
  Description of Artificial Sequence: Synthetic oligonucleotide
guuuguuaccuaaggucug

SEQ ID NO: 1976399 - RNA, 19 nt, Artificial Sequence
  Description of Artificial Sequence: Synthetic oligonucleotide
gauuuccaaaucagaguca

SEQ ID NO: 1976400 - RNA, 19 nt, Artificial Sequence
  Description of Artificial Sequence: Synthetic oligonucleotide
uccgagauacagacugaaa

SEQ ID NO: 1976401 - RNA, 19 nt, Artificial Sequence
  Description of Artificial Sequence: Synthetic oligonucleotide
ucccucucgauauuuugua

SEQ ID NO: 1976402 - RNA, 19 nt, Artificial Sequence
  Description of Artificial Sequence: Synthetic oligonucleotide
acgagccauauccgggccg

SEQ ID NO: 1976403 - RNA, 19 nt, Artificial Sequence
  Description of Artificial Sequence: Synthetic oligonucleotide
gugucaugaauucaccugu

SEQ ID NO: 1976404 - RNA, 19 nt, Artificial Sequence
  Description of Artificial Sequence: Synthetic oligonucleotide
gucaucuccuuacagcaaa

SEQ ID NO: 1976405 - RNA, 19 nt, Artificial Sequence
  Description of Artificial Sequence: Synthetic oligonucleotide
cugaaacacgaaagaggac

SEQ ID NO: 1976406 - RNA, 19 nt, Artificial Sequence
  Description of Artificial Sequence: Synthetic oligonucleotide
cuucgggucuggcaucugc

SEQ ID NO: 1976407 - RNA, 19 nt, Artificial Sequence
  Description of Artificial Sequence: Synthetic oligonucleotide
gaucuaacagugguguuua

SEQ ID NO: 1976408 - RNA, 19 nt, Artificial Sequence
  Description of Artificial Sequence: Synthetic oligonucleotide
gagaucccaagugugucac

SEQ ID NO: 1976409 - RNA, 19 nt, Artificial Sequence
  Description of Artificial Sequence: Synthetic oligonucleotide
cccuauccgagauacagac

SEQ ID NO: 1976410 - RNA, 19 nt, Artificial Sequence
  Description of Artificial Sequence: Synthetic oligonucleotide
acuaaagaauuggaacaau

SEQ ID NO: 1976411 - RNA, 19 nt, Artificial Sequence
  Description of Artificial Sequence: Synthetic oligonucleotide
uccuacagacugugcaggu

SEQ ID NO: 1976412 - RNA, 19 nt, Artificial Sequence
  Description of Artificial Sequence: Synthetic oligonucleotide
acagcacacaugagauccc

SEQ ID NO: 1976413 - RNA, 19 nt, Artificial Sequence
  Description of Artificial Sequence: Synthetic oligonucleotide
uuguuaccuaaggucugag

SEQ ID NO: 1976414 - RNA, 19 nt, Artificial Sequence
  Description of Artificial Sequence: Synthetic oligonucleotide
agaucccaagugugucacg

SEQ ID NO: 1976415 - RNA, 19 nt, Artificial Sequence
  Description of Artificial Sequence: Synthetic oligonucleotide
aagggagagccgucaacua

SEQ ID NO: 1976416 - RNA, 19 nt, Artificial Sequence
  Description of Artificial Sequence: Synthetic oligonucleotide
guagccccuuuauuucugc

SEQ ID NO: 1976417 - RNA, 19 nt, Artificial Sequence
  Description of Artificial Sequence: Synthetic oligonucleotide
gacagcuaacacgaauaca

SEQ ID NO: 1976418 - RNA, 19 nt, Artificial Sequence
  Description of Artificial Sequence: Synthetic oligonucleotide
ucucgauauuuuguaucac

SEQ ID NO: 1976419 - RNA, 19 nt, Artificial Sequence
  Description of Artificial Sequence: Synthetic oligonucleotide
ugcuaagggagagccguca

SEQ ID NO: 1976420 - RNA, 19 nt, Artificial Sequence
  Description of Artificial Sequence: Synthetic oligonucleotide
guacauuuacacggaacuc

SEQ ID NO: 1976421 - RNA, 19 nt, Artificial Sequence
  Description of Artificial Sequence: Synthetic oligonucleotide
cucggaauuaaaugacaaa

SEQ ID NO: 1976422 - RNA, 19 nt, Artificial Sequence
  Description of Artificial Sequence: Synthetic oligonucleotide
uuuugacagcuaacacgaa

SEQ ID NO: 1976423 - RNA, 19 nt, Artificial Sequence
  Description of Artificial Sequence: Synthetic oligonucleotide
uggacugauucuucagauu

SEQ ID NO: 1976424 - RNA, 19 nt, Artificial Sequence
  Description of Artificial Sequence: Synthetic oligonucleotide
uuuuguccagccugcuuuu

SEQ ID NO: 1976425 - RNA, 19 nt, Artificial Sequence
  Description of Artificial Sequence: Synthetic oligonucleotide
ucaaaucccucucgauauu

SEQ ID NO: 1976426 - RNA, 19 nt, Artificial Sequence
  Description of Artificial Sequence: Synthetic oligonucleotide
cugugcuaagggagagccg

SEQ ID NO: 1976427 - RNA, 19 nt, Artificial Sequence
  Description of Artificial Sequence: Synthetic oligonucleotide
ugaaggucuucgggucugg

SEQ ID NO: 1976428 - RNA, 19 nt, Artificial Sequence
  Description of Artificial Sequence: Synthetic oligonucleotide
gcuuacacaacaguaaaua

SEQ ID NO: 1976429 - RNA, 19 nt, Artificial Sequence
  Description of Artificial Sequence: Synthetic oligonucleotide
ggugagcauggaaacaagc

SEQ ID NO: 1976430 - RNA, 19 nt, Artificial Sequence
  Description of Artificial Sequence: Synthetic oligonucleotide
aaacacgaaagaggaccau

SEQ ID NO: 1976431 - RNA, 19 nt, Artificial Sequence
  Description of Artificial Sequence: Synthetic oligonucleotide
uaacaagaauggacugauu

SEQ ID NO: 1976432 - RNA, 19 nt, Artificial Sequence
  Description of Artificial Sequence: Synthetic oligonucleotide
cacaucggccagcucuggg

SEQ ID NO: 1976433 - RNA, 19 nt, Artificial Sequence
  Description of Artificial Sequence: Synthetic oligonucleotide
gagagccgucaacuauucc

SEQ ID NO: 1976434 - RNA, 19 nt, Artificial Sequence
  Description of Artificial Sequence: Synthetic oligonucleotide
ccucucgauauuuuguauc

SEQ ID NO: 1976435 - RNA, 19 nt, Artificial Sequence
  Description of Artificial Sequence: Synthetic oligonucleotide
gucaugaauucaccuguaa

SEQ ID NO: 1976436 - RNA, 19 nt, Artificial Sequence
  Description of Artificial Sequence: Synthetic oligonucleotide
agucaacuguacauuuaca

SEQ ID NO: 1976437 - RNA, 19 nt, Artificial Sequence
  Description of Artificial Sequence: Synthetic oligonucleotide
auacaagaucgaaaggcuu

SEQ ID NO: 1976438 - RNA, 19 nt, Artificial Sequence
  Description of Artificial Sequence: Synthetic oligonucleotide
cuggcaaucccugugcuaa

SEQ ID NO: 1976439 - RNA, 19 nt, Artificial Sequence
  Description of Artificial Sequence: Synthetic oligonucleotide
ccaagugugucacguaaac

SEQ ID NO: 1976440 - RNA, 19 nt, Artificial Sequence
  Description of Artificial Sequence: Synthetic oligonucleotide
ugcguccuacagacugugc

SEQ ID NO: 1976441 - RNA, 19 nt, Artificial Sequence
  Description of Artificial Sequence: Synthetic oligonucleotide
acaagaucgaaaggcuuua

SEQ ID NO: 1976442 - RNA, 19 nt, Artificial Sequence
  Description of Artificial Sequence: Synthetic oligonucleotide
uggcaaucccugugcuaag

SEQ ID NO: 1976443 - RNA, 19 nt, Artificial Sequence
  Description of Artificial Sequence: Synthetic oligonucleotide
aucccucucgauauuuugu

SEQ ID NO: 1976444 - RNA, 19 nt, Artificial Sequence
  Description of Artificial Sequence: Synthetic oligonucleotide
ggacugauucuucagauuu

SEQ ID NO: 1976445 - RNA, 19 nt, Artificial Sequence
  Description of Artificial Sequence: Synthetic oligonucleotide
agugugaaccccauuccuu

SEQ ID NO: 1976446 - RNA, 19 nt, Artificial Sequence
  Description of Artificial Sequence: Synthetic oligonucleotide
agccauauccgggccgggg

SEQ ID NO: 1976447 - RNA, 19 nt, Artificial Sequence
  Description of Artificial Sequence: Synthetic oligonucleotide
cagcuaacacgaauacaga

SEQ ID NO: 1976448 - RNA, 19 nt, Artificial Sequence
  Description of Artificial Sequence: Synthetic oligonucleotide
cauauccgggccggggccg

SEQ ID NO: 1976449 - RNA, 19 nt, Artificial Sequence
  Description of Artificial Sequence: Synthetic oligonucleotide
ggaaacaagcuuaguguga

SEQ ID NO: 1976450 - RNA, 19 nt, Artificial Sequence
  Description of Artificial Sequence: Synthetic oligonucleotide
guuugaguugucaucuccu

SEQ ID NO: 1976451 - RNA, 19 nt, Artificial Sequence
  Description of Artificial Sequence: Synthetic oligonucleotide
cacgagccauauccgggcc

SEQ ID NO: 1976452 - RNA, 19 nt, Artificial Sequence
  Description of Artificial Sequence: Synthetic oligonucleotide
auccgagauacagacugaa

SEQ ID NO: 1976453 - RNA, 19 nt, Artificial Sequence
  Description of Artificial Sequence: Synthetic oligonucleotide
ggcuuuauucugaauuaca

SEQ ID NO: 1976454 - RNA, 19 nt, Artificial Sequence
  Description of Artificial Sequence: Synthetic oligonucleotide
gcguccuacagacugugca

SEQ ID NO: 1976455 - RNA, 19 nt, Artificial Sequence
  Description of Artificial Sequence: Synthetic oligonucleotide
cugaaauauggugucuuua

SEQ ID NO: 1976456 - RNA, 19 nt, Artificial Sequence
  Description of Artificial Sequence: Synthetic oligonucleotide
acauuacagcacacaugag

SEQ ID NO: 1976457 - RNA, 19 nt, Artificial Sequence
  Description of Artificial Sequence: Synthetic oligonucleotide
gucguggccuuguuucuuc

SEQ ID NO: 1976458 - RNA, 19 nt, Artificial Sequence
  Description of Artificial Sequence: Synthetic oligonucleotide
cugcugaucuaacaguggu

SEQ ID NO: 1976459 - RNA, 19 nt, Artificial Sequence
  Description of Artificial Sequence: Synthetic oligonucleotide
cgaauacagaauacaaaca

SEQ ID NO: 1976460 - RNA, 19 nt, Artificial Sequence
  Description of Artificial Sequence: Synthetic oligonucleotide
uuuuggucguggccuuguu

SEQ ID NO: 1976461 - RNA, 19 nt, Artificial Sequence
  Description of Artificial Sequence: Synthetic oligonucleotide
caccuuugaagacaccgua

SEQ ID NO: 1976462 - RNA, 19 nt, Artificial Sequence
  Description of Artificial Sequence: Synthetic oligonucleotide
cugcagguuuguuaccuaa

SEQ ID NO: 1976463 - RNA, 19 nt, Artificial Sequence
  Description of Artificial Sequence: Synthetic oligonucleotide
gcugaucuaacaguggugu

SEQ ID NO: 1976464 - RNA, 19 nt, Artificial Sequence
  Description of Artificial Sequence: Synthetic oligonucleotide
agagucaacuguacauuua

SEQ ID NO: 1976465 - RNA, 19 nt, Artificial Sequence
  Description of Artificial Sequence: Synthetic oligonucleotide
uggcguccgggagaccgcg

SEQ ID NO: 1976466 - RNA, 19 nt, Artificial Sequence
  Description of Artificial Sequence: Synthetic oligonucleotide
guauauauuaaggcagcuu

SEQ ID NO: 1976467 - RNA, 19 nt, Artificial Sequence
  Description of Artificial Sequence: Synthetic oligonucleotide
ucguggccuuguuucuucu

SEQ ID NO: 1976468 - RNA, 19 nt, Artificial Sequence
  Description of Artificial Sequence: Synthetic oligonucleotide
ccacgagccauauccgggc

SEQ ID NO: 1976469 - RNA, 19 nt, Artificial Sequence
  Description of Artificial Sequence: Synthetic oligonucleotide
gagccgucaacuauucccu

SEQ ID NO: 1976470 - RNA, 19 nt, Artificial Sequence
  Description of Artificial Sequence: Synthetic oligonucleotide
gccauauccgggccggggc

SEQ ID NO: 1976471 - RNA, 19 nt, Artificial Sequence
  Description of Artificial Sequence: Synthetic oligonucleotide
gacugaaauauggugucuu

SEQ ID NO: 1976472 - RNA, 19 nt, Artificial Sequence
  Description of Artificial Sequence: Synthetic oligonucleotide
uggugucuuuagugcuuac

SEQ ID NO: 1976473 - RNA, 19 nt, Artificial Sequence
  Description of Artificial Sequence: Synthetic oligonucleotide
ggugucuuuagugcuuaca

SEQ ID NO: 1976474 - RNA, 19 nt, Artificial Sequence
  Description of Artificial Sequence: Synthetic oligonucleotide
cgucaacuauucccuaucc

SEQ ID NO: 1976475 - RNA, 19 nt, Artificial Sequence
  Description of Artificial Sequence: Synthetic oligonucleotide
ggaugcuugcucucaaagu

SEQ ID NO: 1976476 - RNA, 19 nt, Artificial Sequence
  Description of Artificial Sequence: Synthetic oligonucleotide
cugcguccuacagacugug

SEQ ID NO: 1976477 - RNA, 19 nt, Artificial Sequence
  Description of Artificial Sequence: Synthetic oligonucleotide
cuggcguccgggagaccgc

SEQ ID NO: 1976478 - RNA, 19 nt, Artificial Sequence
  Description of Artificial Sequence: Synthetic oligonucleotide
gugugaaccccauuccuuu

SEQ ID NO: 1976479 - RNA, 19 nt, Artificial Sequence
  Description of Artificial Sequence: Synthetic oligonucleotide
aucuaacagugguguuuaa

SEQ ID NO: 1976480 - RNA, 19 nt, Artificial Sequence
  Description of Artificial Sequence: Synthetic oligonucleotide
gggagucuugggaugcuug

SEQ ID NO: 1976481 - RNA, 19 nt, Artificial Sequence
  Description of Artificial Sequence: Synthetic oligonucleotide
agacaguagaagagucaaa

SEQ ID NO: 1976482 - RNA, 19 nt, Artificial Sequence
  Description of Artificial Sequence: Synthetic oligonucleotide
auauccgggccggggccgg

SEQ ID NO: 1976483 - RNA, 19 nt, Artificial Sequence
  Description of Artificial Sequence: Synthetic oligonucleotide
gcuaacacgaauacagaau

SEQ ID NO: 1976484 - RNA, 19 nt, Artificial Sequence
  Description of Artificial Sequence: Synthetic oligonucleotide
gcaugaagcccagagggaa

SEQ ID NO: 1976485 - RNA, 19 nt, Artificial Sequence
  Description of Artificial Sequence: Synthetic oligonucleotide
ccgagauacagacugaaau

SEQ ID NO: 1976486 - RNA, 19 nt, Artificial Sequence
  Description of Artificial Sequence: Synthetic oligonucleotide
cgagauacagacugaaaua

SEQ ID NO: 1976487 - RNA, 19 nt, Artificial Sequence
  Description of Artificial Sequence: Synthetic oligonucleotide
cagagucaacuguacauuu

SEQ ID NO: 1976488 - RNA, 19 nt, Artificial Sequence
  Description of Artificial Sequence: Synthetic oligonucleotide
ccgucaacuauucccuauc

SEQ ID NO: 1976489 - RNA, 19 nt, Artificial Sequence
  Description of Artificial Sequence: Synthetic oligonucleotide
ccauauccgggccggggcc

SEQ ID NO: 1976490 - RNA, 19 nt, Artificial Sequence
  Description of Artificial Sequence: Synthetic oligonucleotide
gggugagcauggaaacaag

SEQ ID NO: 1976491 - RNA, 19 nt, Artificial Sequence
  Description of Artificial Sequence: Synthetic oligonucleotide
ccccauuccuuuugacagc

SEQ ID NO: 1976492 - RNA, 19 nt, Artificial Sequence
  Description of Artificial Sequence: Synthetic oligonucleotide
cacggaacucucuuugcau

SEQ ID NO: 1976493 - RNA, 19 nt, Artificial Sequence
  Description of Artificial Sequence: Synthetic oligonucleotide
gagccauauccgggccggg

SEQ ID NO: 1976494 - RNA, 19 nt, Artificial Sequence
  Description of Artificial Sequence: Synthetic oligonucleotide
gagucuugggaugcuugcu

SEQ ID NO: 1976495 - RNA, 19 nt, Artificial Sequence
  Description of Artificial Sequence: Synthetic oligonucleotide
cacgaaagaggaccaugcu

SEQ ID NO: 1976496 - RNA, 19 nt, Artificial Sequence
  Description of Artificial Sequence: Synthetic oligonucleotide
agccgucaacuauucccua

SEQ ID NO: 1976497 - RNA, 19 nt, Artificial Sequence
  Description of Artificial Sequence: Synthetic oligonucleotide
caccuguaaaccacucuau

SEQ ID NO: 1976498 - RNA, 19 nt, Artificial Sequence
  Description of Artificial Sequence: Synthetic oligonucleotide
cuauucccuauccgagaua

SEQ ID NO: 1976499 - RNA, 19 nt, Artificial Sequence
  Description of Artificial Sequence: Synthetic oligonucleotide
ucuucgggucuggcaucug

SEQ ID NO: 1976500 - RNA, 19 nt, Artificial Sequence
  Description of Artificial Sequence: Synthetic oligonucleotide
ggagagccgucaacuauuc

SEQ ID NO: 1976501 - RNA, 19 nt, Artificial Sequence
  Description of Artificial Sequence: Synthetic oligonucleotide
auucccuauccgagauaca

SEQ ID NO: 1976502 - RNA, 19 nt, Artificial Sequence
  Description of Artificial Sequence: Synthetic oligonucleotide
agcacacaugagaucccaa

SEQ ID NO: 1976503 - RNA, 19 nt, Artificial Sequence
  Description of Artificial Sequence: Synthetic oligonucleotide
ggucuucgggucuggcauc

SEQ ID NO: 1976504 - RNA, 19 nt, Artificial Sequence
  Description of Artificial Sequence: Synthetic oligonucleotide
gcuaagggagagccgucaa

SEQ ID NO: 1976505 - RNA, 19 nt, Artificial Sequence
  Description of Artificial Sequence: Synthetic oligonucleotide
ggucuggcguccgggagac

SEQ ID NO: 1976506 - RNA, 19 nt, Artificial Sequence
  Description of Artificial Sequence: Synthetic oligonucleotide
cgagccauauccgggccgg

SEQ ID NO: 1976507 - RNA, 19 nt, Artificial Sequence
  Description of Artificial Sequence: Synthetic oligonucleotide
caaaucccucucgauauuu

SEQ ID NO: 1976508 - RNA, 19 nt, Artificial Sequence
  Description of Artificial Sequence: Synthetic oligonucleotide
cuuuuggucguggccuugu

SEQ ID NO: 1976509 - RNA, 19 nt, Artificial Sequence
  Description of Artificial Sequence: Synthetic oligonucleotide
cgggagaccgcgccgcgcg

SEQ ID NO: 1976510 - RNA, 19 nt, Artificial Sequence
  Description of Artificial Sequence: Synthetic oligonucleotide
ggagaccgcgccgcgcgag

SEQ ID NO: 1976511 - RNA, 19 nt, Artificial Sequence
  Description of Artificial Sequence: Synthetic oligonucleotide
cugaucuaacagugguguu

SEQ ID NO: 1976512 - RNA, 19 nt, Artificial Sequence
  Description of Artificial Sequence: Synthetic oligonucleotide
ggccggucuggcguccggg

SEQ ID NO: 1976513 - RNA, 19 nt, Artificial Sequence
  Description of Artificial Sequence: Synthetic oligonucleotide
gcuggcaaucccugugcua

SEQ ID NO: 1976514 - RNA, 19 nt, Artificial Sequence
  Description of Artificial Sequence: Synthetic oligonucleotide
auccgggccggggccgguc

SEQ ID NO: 1976515 - RNA, 19 nt, Artificial Sequence
  Description of Artificial Sequence: Synthetic oligonucleotide
accuaaggucugagacagu

SEQ ID NO: 1976516 - RNA, 19 nt, Artificial Sequence
  Description of Artificial Sequence: Synthetic oligonucleotide
ccggucuggcguccgggag

SEQ ID NO: 1976517 - RNA, 19 nt, Artificial Sequence
  Description of Artificial Sequence: Synthetic oligonucleotide
gccgucaacuauucccuau

SEQ ID NO: 1976518 - RNA, 19 nt, Artificial Sequence
  Description of Artificial Sequence: Synthetic oligonucleotide
gggccggucuggcguccgg

SEQ ID NO: 1976519 - RNA, 19 nt, Artificial Sequence
  Description of Artificial Sequence: Synthetic oligonucleotide
cgggucuggcaucugcguc

SEQ ID NO: 1976520 - RNA, 19 nt, Artificial Sequence
  Description of Artificial Sequence: Synthetic oligonucleotide
ccuauccgagauacagacu

SEQ ID NO: 1976521 - RNA, 19 nt, Artificial Sequence
  Description of Artificial Sequence: Synthetic oligonucleotide
caucugcguccuacagacu

SEQ ID NO: 1976522 - RNA, 19 nt, Artificial Sequence
  Description of Artificial Sequence: Synthetic oligonucleotide
gcauggaaacaagcuuagu

SEQ ID NO: 1976523 - RNA, 19 nt, Artificial Sequence
  Description of Artificial Sequence: Synthetic oligonucleotide
ggggccggucuggcguccg

SEQ ID NO: 1976524 - RNA, 19 nt, Artificial Sequence
  Description of Artificial Sequence: Synthetic oligonucleotide
gcuuagugugaaccccauu

SEQ ID NO: 1976525 - RNA, 19 nt, Artificial Sequence
  Description of Artificial Sequence: Synthetic oligonucleotide
cccucucgauauuuuguau

SEQ ID NO: 1976526 - RNA, 19 nt, Artificial Sequence
  Description of Artificial Sequence: Synthetic oligonucleotide
gggagaccgcgccgcgcga

SEQ ID NO: 1976527 - RNA, 19 nt, Artificial Sequence
  Description of Artificial Sequence: Synthetic oligonucleotide
gucuggcguccgggagacc

SEQ ID NO: 1976528 - RNA, 19 nt, Artificial Sequence
  Description of Artificial Sequence: Synthetic oligonucleotide
cggucuggcguccgggaga

SEQ ID NO: 1976529 - RNA, 19 nt, Artificial Sequence
  Description of Artificial Sequence: Synthetic oligonucleotide
ggcguccgggagaccgcgc

SEQ ID NO: 1976530 - RNA, 19 nt, Artificial Sequence
  Description of Artificial Sequence: Synthetic oligonucleotide
ggucguggccuuguuucuu

SEQ ID NO: 1976531 - RNA, 19 nt, Artificial Sequence
  Description of Artificial Sequence: Synthetic oligonucleotide
ccauuccuuuugacagcua

SEQ ID NO: 1976532 - RNA, 19 nt, Artificial Sequence
  Description of Artificial Sequence: Synthetic oligonucleotide
ccggggccggucuggcguc

SEQ ID NO: 1976533 - RNA, 19 nt, Artificial Sequence
  Description of Artificial Sequence: Synthetic oligonucleotide
ccgggccggggccggucug

SEQ ID NO: 1976534 - RNA, 19 nt, Artificial Sequence
  Description of Artificial Sequence: Synthetic oligonucleotide
cggggccggucuggcgucc

SEQ ID NO: 1976535 - RNA, 19 nt, Artificial Sequence
  Description of Artificial Sequence: Synthetic oligonucleotide
uucacagcuucucaaaugg

SEQ ID NO: 1976536 - RNA, 19 nt, Artificial Sequence
  Description of Artificial Sequence: Synthetic oligonucleotide
agaguaugcacacaauccc

SEQ ID NO: 1976537 - RNA, 19 nt, Artificial Sequence
  Description of Artificial Sequence: Synthetic oligonucleotide
aauacccaaggacugcagc

SEQ ID NO: 1976538 - RNA, 19 nt, Artificial Sequence
  Description of Artificial Sequence: Synthetic oligonucleotide
cuuaagugggcucugauag

SEQ ID NO: 1976539 - RNA, 19 nt, Artificial Sequence
  Description of Artificial Sequence: Synthetic oligonucleotide
aagagaguccaccuccugc

SEQ ID NO: 1976540 - RNA, 19 nt, Artificial Sequence
  Description of Artificial Sequence: Synthetic oligonucleotide
uucuuguaugugcugaugg

SEQ ID NO: 1976541 - RNA, 19 nt, Artificial Sequence
  Description of Artificial Sequence: Synthetic oligonucleotide
ucugccagugaccauagag

SEQ ID NO: 1976542 - RNA, 19 nt, Artificial Sequence
  Description of Artificial Sequence: Synthetic oligonucleotide
uucucaaaugggaagaggu

SEQ ID NO: 1976543 - RNA, 19 nt, Artificial Sequence
  Description of Artificial Sequence: Synthetic oligonucleotide
ugggucauaccucugagug

SEQ ID NO: 1976544 - RNA, 19 nt, Artificial Sequence
  Description of Artificial Sequence: Synthetic oligonucleotide
guaaccaucaguuacugga

SEQ ID NO: 1976545 - RNA, 19 nt, Artificial Sequence
  Description of Artificial Sequence: Synthetic oligonucleotide
acugccucacucuuggccc

SEQ ID NO: 1976546 - RNA, 19 nt, Artificial Sequence
  Description of Artificial Sequence: Synthetic oligonucleotide
aauuucaagagguggcgcu

SEQ ID NO: 1976547 - RNA, 19 nt, Artificial Sequence
  Description of Artificial Sequence: Synthetic oligonucleotide
uucaucuggacacagccga

SEQ ID NO: 1976548 - RNA, 19 nt, Artificial Sequence
  Description of Artificial Sequence: Synthetic oligonucleotide
caucuuagaguacucaggc

SEQ ID NO: 1976549 - RNA, 19 nt, Artificial Sequence
  Description of Artificial Sequence: Synthetic oligonucleotide
aucgaagccagugauggcc

SEQ ID NO: 1976550 - RNA, 19 nt, Artificial Sequence
  Description of Artificial Sequence: Synthetic oligonucleotide
ugagugacaucucggaccc

SEQ ID NO: 1976551 - RNA, 19 nt, Artificial Sequence
  Description of Artificial Sequence: Synthetic oligonucleotide
cuuugaacuccucacagac

SEQ ID NO: 1976552 - RNA, 19 nt, Artificial Sequence
  Description of Artificial Sequence: Synthetic oligonucleotide
uaugugcugauggaggugg

SEQ ID NO: 1976553 - RNA, 19 nt, Artificial Sequence
  Description of Artificial Sequence: Synthetic oligonucleotide
guagccuccauggaaaucg

SEQ ID NO: 1976554 - RNA, 19 nt, Artificial Sequence
  Description of Artificial Sequence: Synthetic oligonucleotide
ucugcuugugagcuggucc

SEQ ID NO: 1976555 - RNA, 19 nt, Artificial Sequence
  Description of Artificial Sequence: Synthetic oligonucleotide
uagcuugcgggccacacgg

SEQ ID NO: 1976556 - RNA, 19 nt, Artificial Sequence
  Description of Artificial Sequence: Synthetic oligonucleotide
guuggguagguucaucugg

SEQ ID NO: 1976557 - RNA, 19 nt, Artificial Sequence
  Description of Artificial Sequence: Synthetic oligonucleotide
cucccuuuccuuaaguggg

SEQ ID NO: 1976558 - RNA, 19 nt, Artificial Sequence
  Description of Artificial Sequence: Synthetic oligonucleotide
cucaaaugggaagaggugg

SEQ ID NO: 1976559 - RNA, 19 nt, Artificial Sequence
  Description of Artificial Sequence: Synthetic oligonucleotide
cuucagggcauagagaggg

SEQ ID NO: 1976560 - RNA, 19 nt, Artificial Sequence
  Description of Artificial Sequence: Synthetic oligonucleotide
caagucauuguagucaugc

SEQ ID NO: 1976561 - RNA, 19 nt, Artificial Sequence
  Description of Artificial Sequence: Synthetic oligonucleotide
aaucgaagccagugauggc

SEQ ID NO: 1976562 - RNA, 19 nt, Artificial Sequence
  Description of Artificial Sequence: Synthetic oligonucleotide
aauguaaccaucaguuacu

SEQ ID NO: 1976563 - RNA, 19 nt, Artificial Sequence
  Description of Artificial Sequence: Synthetic oligonucleotide
uccccgacaauacccaagg

SEQ ID NO: 1976564 - RNA, 19 nt, Artificial Sequence
  Description of Artificial Sequence: Synthetic oligonucleotide
agagguggcgcuucagggc

SEQ ID NO: 1976565 - RNA, 19 nt, Artificial Sequence
  Description of Artificial Sequence: Synthetic oligonucleotide
ucucaaaugggaagaggug

SEQ ID NO: 1976566 - RNA, 19 nt, Artificial Sequence
  Description of Artificial Sequence: Synthetic oligonucleotide
caaucccuggaguagacag

SEQ ID NO: 1976567 - RNA, 19 nt, Artificial Sequence
  Description of Artificial Sequence: Synthetic oligonucleotide
cagccgauaggcaucaugc

SEQ ID NO: 1976568 - RNA, 19 nt, Artificial Sequence
  Description of Artificial Sequence: Synthetic oligonucleotide
ugauagggucucaaggucu

SEQ ID NO: 1976569 - RNA, 19 nt, Artificial Sequence
  Description of Artificial Sequence: Synthetic oligonucleotide
uucccaaacucauuccgag

SEQ ID NO: 1976570 - RNA, 19 nt, Artificial Sequence
  Description of Artificial Sequence: Synthetic oligonucleotide
caaaggcugguccaggugc

SEQ ID NO: 1976571 - RNA, 19 nt, Artificial Sequence
  Description of Artificial Sequence: Synthetic oligonucleotide
aaggucucagcccaccacu

SEQ ID NO: 1976572 - RNA, 19 nt, Artificial Sequence
  Description of Artificial Sequence: Synthetic oligonucleotide
ugcauggggagcuacugcc

SEQ ID NO: 1976573 - RNA, 19 nt, Artificial Sequence
  Description of Artificial Sequence: Synthetic oligonucleotide
uaccuucccgucuacagcc

SEQ ID NO: 1976574 - RNA, 19 nt, Artificial Sequence
  Description of Artificial Sequence: Synthetic oligonucleotide
gguagguucaucuggacac

SEQ ID NO: 1976575 - RNA, 19 nt, Artificial Sequence
  Description of Artificial Sequence: Synthetic oligonucleotide
aaacucauuccgagguacc

SEQ ID NO: 1976576 - RNA, 19 nt, Artificial Sequence
  Description of Artificial Sequence: Synthetic oligonucleotide
uuaagugggcucugauagg

SEQ ID NO: 1976577 - RNA, 19 nt, Artificial Sequence
  Description of Artificial Sequence: Synthetic oligonucleotide
uguaaccaucaguuacugg

SEQ ID NO: 1976578 - RNA, 19 nt, Artificial Sequence
  Description of Artificial Sequence: Synthetic oligonucleotide
agacaauguaaccaucagu

SEQ ID NO: 1976579 - RNA, 19 nt, Artificial Sequence
  Description of Artificial Sequence: Synthetic oligonucleotide
agugggcucugauaggguc

SEQ ID NO: 1976580 - RNA, 19 nt, Artificial Sequence
  Description of Artificial Sequence: Synthetic oligonucleotide
auaccucugagugacaucu

SEQ ID NO: 1976581 - RNA, 19 nt, Artificial Sequence
  Description of Artificial Sequence: Synthetic oligonucleotide
ucgaugccuagcuugcggg

SEQ ID NO: 1976582 - RNA, 19 nt, Artificial Sequence
  Description of Artificial Sequence: Synthetic oligonucleotide
guuacuggauggcaguagc

SEQ ID NO: 1976583 - RNA, 19 nt, Artificial Sequence
  Description of Artificial Sequence: Synthetic oligonucleotide
accauagagggccaaguca

SEQ ID NO: 1976584 - RNA, 19 nt, Artificial Sequence
  Description of Artificial Sequence: Synthetic oligonucleotide
auaucggaguugcagccuc

SEQ ID NO: 1976585 - RNA, 19 nt, Artificial Sequence
  Description of Artificial Sequence: Synthetic oligonucleotide
gauggcaguagccuccaug

SEQ ID NO: 1976586 - RNA, 19 nt, Artificial Sequence
  Description of Artificial Sequence: Synthetic oligonucleotide
aaccaucaguuacuggaug

SEQ ID NO: 1976587 - RNA, 19 nt, Artificial Sequence
  Description of Artificial Sequence: Synthetic oligonucleotide
gguucaucuggacacagcc

SEQ ID NO: 1976588 - RNA, 19 nt, Artificial Sequence
  Description of Artificial Sequence: Synthetic oligonucleotide
ucuuguaugugcugaugga

SEQ ID NO: 1976589 - RNA, 19 nt, Artificial Sequence
  Description of Artificial Sequence: Synthetic oligonucleotide
uccucacagacaauguaac

SEQ ID NO: 1976590 - RNA, 19 nt, Artificial Sequence
  Description of Artificial Sequence: Synthetic oligonucleotide
gaaagccgggcuuuccggg

SEQ ID NO: 1976591 - RNA, 19 nt, Artificial Sequence
  Description of Artificial Sequence: Synthetic oligonucleotide
ugacaucucggacccagcc

SEQ ID NO: 1976592 - RNA, 19 nt, Artificial Sequence
  Description of Artificial Sequence: Synthetic oligonucleotide
auuccgagguaccuucccg

SEQ ID NO: 1976593 - RNA, 19 nt, Artificial Sequence
  Description of Artificial Sequence: Synthetic oligonucleotide
gauacacguucccaaacuc

SEQ ID NO: 1976594 - RNA, 19 nt, Artificial Sequence
  Description of Artificial Sequence: Synthetic oligonucleotide
uggacacucacuucacagc

SEQ ID NO: 1976595 - RNA, 19 nt, Artificial Sequence
  Description of Artificial Sequence: Synthetic oligonucleotide
uccauggaaaucgaagcca

SEQ ID NO: 1976596 - RNA, 19 nt, Artificial Sequence
  Description of Artificial Sequence: Synthetic oligonucleotide
uaugcacacaaucccugga

SEQ ID NO: 1976597 - RNA, 19 nt, Artificial Sequence
  Description of Artificial Sequence: Synthetic oligonucleotide
acguucccaaacucauucc

SEQ ID NO: 1976598 - RNA, 19 nt, Artificial Sequence
  Description of Artificial Sequence: Synthetic oligonucleotide
guaugcacacaaucccugg

SEQ ID NO: 1976599 - RNA, 19 nt, Artificial Sequence
  Description of Artificial Sequence: Synthetic oligonucleotide
auacccaaggacugcagcu

SEQ ID NO: 1976600 - RNA, 19 nt, Artificial Sequence
  Description of Artificial Sequence: Synthetic oligonucleotide
gacaauguaaccaucaguu

SEQ ID NO: 1976601 - RNA, 19 nt, Artificial Sequence
  Description of Artificial Sequence: Synthetic oligonucleotide
augcacacaaucccuggag

SEQ ID NO: 1976602 - RNA, 19 nt, Artificial Sequence
  Description of Artificial Sequence: Synthetic oligonucleotide
agugauggccugcacgcag

SEQ ID NO: 1976603 - RNA, 19 nt, Artificial Sequence
  Description of Artificial Sequence: Synthetic oligonucleotide
uagggcacuucuccaagcc

SEQ ID NO: 1976604 - RNA, 19 nt, Artificial Sequence
  Description of Artificial Sequence: Synthetic oligonucleotide
ucccaaacucauuccgagg

SEQ ID NO: 1976605 - RNA, 19 nt, Artificial Sequence
  Description of Artificial Sequence: Synthetic oligonucleotide
ggaguagacagcuucuccc

SEQ ID NO: 1976606 - RNA, 19 nt, Artificial Sequence
  Description of Artificial Sequence: Synthetic oligonucleotide
uagauggccuggaauuuca

SEQ ID NO: 1976607 - RNA, 19 nt, Artificial Sequence
  Description of Artificial Sequence: Synthetic oligonucleotide
cauucucccaagcagccug

SEQ ID NO: 1976608 - RNA, 19 nt, Artificial Sequence
  Description of Artificial Sequence: Synthetic oligonucleotide
uuuugaggccaggaggcag

SEQ ID NO: 1976609 - RNA, 19 nt, Artificial Sequence
  Description of Artificial Sequence: Synthetic oligonucleotide
caucagaagagaguccacc

SEQ ID NO: 1976610 - RNA, 19 nt, Artificial Sequence
  Description of Artificial Sequence: Synthetic oligonucleotide
cucacagacaauguaacca

SEQ ID NO: 1976611 - RNA, 19 nt, Artificial Sequence
  Description of Artificial Sequence: Synthetic oligonucleotide
cugcuugugagcugguccc

SEQ ID NO: 1976612 - RNA, 19 nt, Artificial Sequence
  Description of Artificial Sequence: Synthetic oligonucleotide
cacguucccaaacucauuc

SEQ ID NO: 1976613 - RNA, 19 nt, Artificial Sequence
  Description of Artificial Sequence: Synthetic oligonucleotide
gucaacccggcauuugcgg

SEQ ID NO: 1976614 - RNA, 19 nt, Artificial Sequence
  Description of Artificial Sequence: Synthetic oligonucleotide
cagggcauagagagggugg

SEQ ID NO: 1976615 - RNA, 19 nt, Artificial Sequence
  Description of Artificial Sequence: Synthetic oligonucleotide
agagggugguucuuguaug

SEQ ID NO: 1976616 - RNA, 19 nt, Artificial Sequence
  Description of Artificial Sequence: Synthetic oligonucleotide
ugcacacaaucccuggagu

SEQ ID NO: 1976617 - RNA, 19 nt, Artificial Sequence
  Description of Artificial Sequence: Synthetic oligonucleotide
gaauuucaagagguggcgc

SEQ ID NO: 1976618 - RNA, 19 nt, Artificial Sequence
  Description of Artificial Sequence: Synthetic oligonucleotide
cuucgccugaaacuccugg

SEQ ID NO: 1976619 - RNA, 19 nt, Artificial Sequence
  Description of Artificial Sequence: Synthetic oligonucleotide
uuugcauggggagcuacug

SEQ ID NO: 1976620 - RNA, 19 nt, Artificial Sequence
  Description of Artificial Sequence: Synthetic oligonucleotide
ugagcaguccucugaccag

SEQ ID NO: 1976621 - RNA, 19 nt, Artificial Sequence
  Description of Artificial Sequence: Synthetic oligonucleotide
caagccguaccacucuugc

SEQ ID NO: 1976622 - RNA, 19 nt, Artificial Sequence
  Description of Artificial Sequence: Synthetic oligonucleotide
gaaaucgaagccagugaug

SEQ ID NO: 1976623 - RNA, 19 nt, Artificial Sequence
  Description of Artificial Sequence: Synthetic oligonucleotide
ggaauuucaagagguggcg

SEQ ID NO: 1976624 - RNA, 19 nt, Artificial Sequence
  Description of Artificial Sequence: Synthetic oligonucleotide
ccgauaggcaucaugcugg

SEQ ID NO: 1976625 - RNA, 19 nt, Artificial Sequence
  Description of Artificial Sequence: Synthetic oligonucleotide
cagacaauguaaccaucag

SEQ ID NO: 1976626 - RNA, 19 nt, Artificial Sequence
  Description of Artificial Sequence: Synthetic oligonucleotide
aacuccuggucuuccuucu

SEQ ID NO: 1976627 - RNA, 19 nt, Artificial Sequence
  Description of Artificial Sequence: Synthetic oligonucleotide
agguuggguagguucaucu

SEQ ID NO: 1976628 - RNA, 19 nt, Artificial Sequence
  Description of Artificial Sequence: Synthetic oligonucleotide
agccaugugucccuggagu

SEQ ID NO: 1976629 - RNA, 19 nt, Artificial Sequence
  Description of Artificial Sequence: Synthetic oligonucleotide
uucugucugccagugacca

SEQ ID NO: 1976630 - RNA, 19 nt, Artificial Sequence
  Description of Artificial Sequence: Synthetic oligonucleotide
gaagagauacacguuccca

SEQ ID NO: 1976631 - RNA, 19 nt, Artificial Sequence
  Description of Artificial Sequence: Synthetic oligonucleotide
gucgaugccuagcuugcgg

SEQ ID NO: 1976632 - RNA, 19 nt, Artificial Sequence
  Description of Artificial Sequence: Synthetic oligonucleotide
uucuccccgacaauaccca

SEQ ID NO: 1976633 - RNA, 19 nt, Artificial Sequence
  Description of Artificial Sequence: Synthetic oligonucleotide
gguaccuucccgucuacag

SEQ ID NO: 1976634 - RNA, 19 nt, Artificial Sequence
  Description of Artificial Sequence: Synthetic oligonucleotide
aggugcuucgccugaaacu

SEQ ID NO: 1976635 - RNA, 19 nt, Artificial Sequence
  Description of Artificial Sequence: Synthetic oligonucleotide
uugcauggggagcuacugc

SEQ ID NO: 1976636 - RNA, 19 nt, Artificial Sequence
  Description of Artificial Sequence: Synthetic oligonucleotide
gacaauacccaaggacugc

SEQ ID NO: 1976637 - RNA, 19 nt, Artificial Sequence
  Description of Artificial Sequence: Synthetic oligonucleotide
uccuguucauucucccaag

SEQ ID NO: 1976638 - RNA, 19 nt, Artificial Sequence
  Description of Artificial Sequence: Synthetic oligonucleotide
ucuccaagccguaccacuc

SEQ ID NO: 1976639 - RNA, 19 nt, Artificial Sequence
  Description of Artificial Sequence: Synthetic oligonucleotide
acagccgauaggcaucaug

SEQ ID NO: 1976640 - RNA, 19 nt, Artificial Sequence
  Description of Artificial Sequence: Synthetic oligonucleotide
aacucauuccgagguaccu

SEQ ID NO: 1976641 - RNA, 19 nt, Artificial Sequence
  Description of Artificial Sequence: Synthetic oligonucleotide
gucucaaggucucagccca

SEQ ID NO: 1976642 - RNA, 19 nt, Artificial Sequence
  Description of Artificial Sequence: Synthetic oligonucleotide
uguagucaugcagcugggg

SEQ ID NO: 1976643 - RNA, 19 nt, Artificial Sequence
  Description of Artificial Sequence: Synthetic oligonucleotide
auagagggccaagucauug

SEQ ID NO: 1976644 - RNA, 19 nt, Artificial Sequence
  Description of Artificial Sequence: Synthetic oligonucleotide
agggcacuucuccaagccg

SEQ ID NO: 1976645 - RNA, 19 nt, Artificial Sequence
  Description of Artificial Sequence: Synthetic oligonucleotide
acucacuucacagcuucuc

SEQ ID NO: 1976646 - RNA, 19 nt, Artificial Sequence
  Description of Artificial Sequence: Synthetic oligonucleotide
uugcggucauccaggcugg

SEQ ID NO: 1976647 - RNA, 19 nt, Artificial Sequence
  Description of Artificial Sequence: Synthetic oligonucleotide
cagcuucucaaaugggaag

SEQ ID NO: 1976648 - RNA, 19 nt, Artificial Sequence
  Description of Artificial Sequence: Synthetic oligonucleotide
ugucugccagugaccauag

SEQ ID NO: 1976649 - RNA, 19 nt, Artificial Sequence
  Description of Artificial Sequence: Synthetic oligonucleotide
ggcgcuucagggcauagag

SEQ ID NO: 1976650 - RNA, 19 nt, Artificial Sequence
  Description of Artificial Sequence: Synthetic oligonucleotide
cacggugcagguuggguag

SEQ ID NO: 1976651 - RNA, 19 nt, Artificial Sequence
  Description of Artificial Sequence: Synthetic oligonucleotide
ucccaagcagccugcagca

SEQ ID NO: 1976652 - RNA, 19 nt, Artificial Sequence
  Description of Artificial Sequence: Synthetic oligonucleotide
ucaaggucucagcccacca

SEQ ID NO: 1976653 - RNA, 19 nt, Artificial Sequence
  Description of Artificial Sequence: Synthetic oligonucleotide
aucuuagaguacucaggcu

SEQ ID NO: 1976654 - RNA, 19 nt, Artificial Sequence
  Description of Artificial Sequence: Synthetic oligonucleotide
cccgucuacagccacaggg

SEQ ID NO: 1976655 - RNA, 19 nt, Artificial Sequence
  Description of Artificial Sequence: Synthetic oligonucleotide
agcuucucaaaugggaaga

SEQ ID NO: 1976656 - RNA, 19 nt, Artificial Sequence
  Description of Artificial Sequence: Synthetic oligonucleotide
agccguaccacucuugcuu

SEQ ID NO: 1976657 - RNA, 19 nt, Artificial Sequence
  Description of Artificial Sequence: Synthetic oligonucleotide
uugugagcuggucccuucc

SEQ ID NO: 1976658 - RNA, 19 nt, Artificial Sequence
  Description of Artificial Sequence: Synthetic oligonucleotide
uucgccugaaacuccuggu

SEQ ID NO: 1976659 - RNA, 19 nt, Artificial Sequence
  Description of Artificial Sequence: Synthetic oligonucleotide
guucaucuggacacagccg

SEQ ID NO: 1976660 - RNA, 19 nt, Artificial Sequence
  Description of Artificial Sequence: Synthetic oligonucleotide
cuugcgggccacacggugc

SEQ ID NO: 1976661 - RNA, 19 nt, Artificial Sequence
  Description of Artificial Sequence: Synthetic oligonucleotide
cuuccgggucaucuuagag

SEQ ID NO: 1976662 - RNA, 19 nt, Artificial Sequence
  Description of Artificial Sequence: Synthetic oligonucleotide
aguuacuggauggcaguag

SEQ ID NO: 1976663 - RNA, 19 nt, Artificial Sequence
  Description of Artificial Sequence: Synthetic oligonucleotide
ucgaagccagugauggccu

SEQ ID NO: 1976664 - RNA, 19 nt, Artificial Sequence
  Description of Artificial Sequence: Synthetic oligonucleotide
auagagagggugguucuug

SEQ ID NO: 1976665 - RNA, 19 nt, Artificial Sequence
  Description of Artificial Sequence: Synthetic oligonucleotide
gucucagcccaccacucag

SEQ ID NO: 1976666 - RNA, 19 nt, Artificial Sequence
  Description of Artificial Sequence: Synthetic oligonucleotide
ucagcgucaacccggcauu

SEQ ID NO: 1976667 - RNA, 19 nt, Artificial Sequence
  Description of Artificial Sequence: Synthetic oligonucleotide
ucauuccgagguaccuucc

SEQ ID NO: 1976668 - RNA, 19 nt, Artificial Sequence
  Description of Artificial Sequence: Synthetic oligonucleotide
ugcuucgccugaaacuccu

SEQ ID NO: 1976669 - RNA, 19 nt, Artificial Sequence
  Description of Artificial Sequence: Synthetic oligonucleotide
uuguagggcacuucuccaa

SEQ ID NO: 1976670 - RNA, 19 nt, Artificial Sequence
  Description of Artificial Sequence: Synthetic oligonucleotide
gugggaagccucugcagcc

SEQ ID NO: 1976671 - RNA, 19 nt, Artificial Sequence
  Description of Artificial Sequence: Synthetic oligonucleotide
ucgccugaaacuccugguc

SEQ ID NO: 1976672 - RNA, 19 nt, Artificial Sequence
  Description of Artificial Sequence: Synthetic oligonucleotide
cuagcuugcgggccacacg

SEQ ID NO: 1976673 - RNA, 19 nt, Artificial Sequence
  Description of Artificial Sequence: Synthetic oligonucleotide
gaagagaguccaccuccug

SEQ ID NO: 1976674 - RNA, 19 nt, Artificial Sequence
  Description of Artificial Sequence: Synthetic oligonucleotide
ucauaccucugagugacau

SEQ ID NO: 1976675 - RNA, 19 nt, Artificial Sequence
  Description of Artificial Sequence: Synthetic oligonucleotide
ggucauaccucugagugac

SEQ ID NO: 1976676 - RNA, 19 nt, Artificial Sequence
  Description of Artificial Sequence: Synthetic oligonucleotide
gcagaguaugcacacaauc

SEQ ID NO: 1976677 - RNA, 19 nt, Artificial Sequence
  Description of Artificial Sequence: Synthetic oligonucleotide
gaccauagagggccaaguc

SEQ ID NO: 1976678 - RNA, 19 nt, Artificial Sequence
  Description of Artificial Sequence: Synthetic oligonucleotide
uucccgucuacagccacag

SEQ ID NO: 1976679 - RNA, 19 nt, Artificial Sequence
  Description of Artificial Sequence: Synthetic oligonucleotide
ucacucuuggccccauauc

SEQ ID NO: 1976680 - RNA, 19 nt, Artificial Sequence
  Description of Artificial Sequence: Synthetic oligonucleotide
acaauacccaaggacugca

SEQ ID NO: 1976681 - RNA, 19 nt, Artificial Sequence
  Description of Artificial Sequence: Synthetic oligonucleotide
uuccgagguaccuucccgu

SEQ ID NO: 1976682 - RNA, 19 nt, Artificial Sequence
  Description of Artificial Sequence: Synthetic oligonucleotide
cauuccgagguaccuuccc

SEQ ID NO: 1976683 - RNA, 19 nt, Artificial Sequence
  Description of Artificial Sequence: Synthetic oligonucleotide
uucaagagguggcgcuuca

SEQ ID NO: 1976684 - RNA, 19 nt, Artificial Sequence
  Description of Artificial Sequence: Synthetic oligonucleotide
cgcuucagggcauagagag

SEQ ID NO: 1976685 - RNA, 19 nt, Artificial Sequence
  Description of Artificial Sequence: Synthetic oligonucleotide
uucucgguuuugaggccag

SEQ ID NO: 1976686 - RNA, 19 nt, Artificial Sequence
  Description of Artificial Sequence: Synthetic oligonucleotide
gguuggagaagccuuucac

SEQ ID NO: 1976687 - RNA, 19 nt, Artificial Sequence
  Description of Artificial Sequence: Synthetic oligonucleotide
uacccaaggacugcagcug

SEQ ID NO: 1976688 - RNA, 19 nt, Artificial Sequence
  Description of Artificial Sequence: Synthetic oligonucleotide
ugaccauagagggccaagu

SEQ ID NO: 1976689 - RNA, 19 nt, Artificial Sequence
  Description of Artificial Sequence: Synthetic oligonucleotide
cuccucacagacaauguaa

SEQ ID NO: 1976690 - RNA, 19 nt, Artificial Sequence
  Description of Artificial Sequence: Synthetic oligonucleotide
aggguagauggccuggaau

SEQ ID NO: 1976691 - RNA, 19 nt, Artificial Sequence
  Description of Artificial Sequence: Synthetic oligonucleotide
ugugagcuggucccuuccu

SEQ ID NO: 1976692 - RNA, 19 nt, Artificial Sequence
  Description of Artificial Sequence: Synthetic oligonucleotide
aacuccucacagacaaugu

SEQ ID NO: 1976693 - RNA, 19 nt, Artificial Sequence
  Description of Artificial Sequence: Synthetic oligonucleotide
uggggcuccgaaagccggg

SEQ ID NO: 1976694 - RNA, 19 nt, Artificial Sequence
  Description of Artificial Sequence: Synthetic oligonucleotide
aagccguaccacucuugcu

SEQ ID NO: 1976695 - RNA, 19 nt, Artificial Sequence
  Description of Artificial Sequence: Synthetic oligonucleotide
gacaucucggacccagcca

SEQ ID NO: 1976696 - RNA, 19 nt, Artificial Sequence
  Description of Artificial Sequence: Synthetic oligonucleotide
caauacccaaggacugcag

SEQ ID NO: 1976697 - RNA, 19 nt, Artificial Sequence
  Description of Artificial Sequence: Synthetic oligonucleotide
uagacagcuucuccccgac

SEQ ID NO: 1976698 - RNA, 19 nt, Artificial Sequence
  Description of Artificial Sequence: Synthetic oligonucleotide
auguaaccaucaguuacug

SEQ ID NO: 1976699 - RNA, 19 nt, Artificial Sequence
  Description of Artificial Sequence: Synthetic oligonucleotide
agcuucuccccgacaauac

SEQ ID NO: 1976700 - RNA, 19 nt, Artificial Sequence
  Description of Artificial Sequence: Synthetic oligonucleotide
gauagggucucaaggucuc

SEQ ID NO: 1976701 - RNA, 19 nt, Artificial Sequence
  Description of Artificial Sequence: Synthetic oligonucleotide
acuccucacagacaaugua

SEQ ID NO: 1976702 - RNA, 19 nt, Artificial Sequence
  Description of Artificial Sequence: Synthetic oligonucleotide
ugcagaguaugcacacaau

SEQ ID NO: 1976703 - RNA, 19 nt, Artificial Sequence
  Description of Artificial Sequence: Synthetic oligonucleotide
uccuuaagugggcucugau

SEQ ID NO: 1976704 - RNA, 19 nt, Artificial Sequence
  Description of Artificial Sequence: Synthetic oligonucleotide
uugcggguugcggucaucc

SEQ ID NO: 1976705 - RNA, 19 nt, Artificial Sequence
  Description of Artificial Sequence: Synthetic oligonucleotide
guagggcacuucuccaagc

SEQ ID NO: 1976706 - RNA, 19 nt, Artificial Sequence
  Description of Artificial Sequence: Synthetic oligonucleotide
gugcagguuggguagguuc

SEQ ID NO: 1976707 - RNA, 19 nt, Artificial Sequence
  Description of Artificial Sequence: Synthetic oligonucleotide
aguccucugaccagcagcu

SEQ ID NO: 1976708 - RNA, 19 nt, Artificial Sequence
  Description of Artificial Sequence: Synthetic oligonucleotide
ucggacccagccaucacua

SEQ ID NO: 1976709 - RNA, 19 nt, Artificial Sequence
  Description of Artificial Sequence: Synthetic oligonucleotide
ccauggaaaucgaagccag

SEQ ID NO: 1976710 - RNA, 19 nt, Artificial Sequence
  Description of Artificial Sequence: Synthetic oligonucleotide
cuccccgacaauacccaag

SEQ ID NO: 1976711 - RNA, 19 nt, Artificial Sequence
  Description of Artificial Sequence: Synthetic oligonucleotide
ucuuccgggucaucuuaga

SEQ ID NO: 1976712 - RNA, 19 nt, Artificial Sequence
  Description of Artificial Sequence: Synthetic oligonucleotide
gggucucaaggucucagcc

SEQ ID NO: 1976713 - RNA, 19 nt, Artificial Sequence
  Description of Artificial Sequence: Synthetic oligonucleotide
cacagacaauguaaccauc

SEQ ID NO: 1976714 - RNA, 19 nt, Artificial Sequence
  Description of Artificial Sequence: Synthetic oligonucleotide
gugcagaguaugcacacaa

SEQ ID NO: 1976715 - RNA, 19 nt, Artificial Sequence
  Description of Artificial Sequence: Synthetic oligonucleotide
caaggucucagcccaccac

SEQ ID NO: 1976716 - RNA, 19 nt, Artificial Sequence
  Description of Artificial Sequence: Synthetic oligonucleotide
cucacuucacagcuucuca

SEQ ID NO: 1976717 - RNA, 19 nt, Artificial Sequence
  Description of Artificial Sequence: Synthetic oligonucleotide
cccgacaauacccaaggac

SEQ ID NO: 1976718 - RNA, 19 nt, Artificial Sequence
  Description of Artificial Sequence: Synthetic oligonucleotide
cuguucauucucccaagca

SEQ ID NO: 1976719 - RNA, 19 nt, Artificial Sequence
  Description of Artificial Sequence: Synthetic oligonucleotide
acgcagucgaugccuagcu

SEQ ID NO: 1976720 - RNA, 19 nt, Artificial Sequence
  Description of Artificial Sequence: Synthetic oligonucleotide
gccgauaggcaucaugcug

SEQ ID NO: 1976721 - RNA, 19 nt, Artificial Sequence
  Description of Artificial Sequence: Synthetic oligonucleotide
gacacagccgauaggcauc

SEQ ID NO: 1976722 - RNA, 19 nt, Artificial Sequence
  Description of Artificial Sequence: Synthetic oligonucleotide
gaagccagugauggccugc

SEQ ID NO: 1976723 - RNA, 19 nt, Artificial Sequence
  Description of Artificial Sequence: Synthetic oligonucleotide
ggugggcaaaggcuggucc

SEQ ID NO: 1976724 - RNA, 19 nt, Artificial Sequence
  Description of Artificial Sequence: Synthetic oligonucleotide
guccuguucauucucccaa

SEQ ID NO: 1976725 - RNA, 19 nt, Artificial Sequence
  Description of Artificial Sequence: Synthetic oligonucleotide
ucaagagguggcgcuucag

SEQ ID NO: 1976726 - RNA, 19 nt, Artificial Sequence
  Description of Artificial Sequence: Synthetic oligonucleotide
cauaccucugagugacauc

SEQ ID NO: 1976727 - RNA, 19 nt, Artificial Sequence
  Description of Artificial Sequence: Synthetic oligonucleotide
caggugcuucgccugaaac

SEQ ID NO: 1976728 - RNA, 19 nt, Artificial Sequence
  Description of Artificial Sequence: Synthetic oligonucleotide
acacggugcagguugggua

SEQ ID NO: 1976729 - RNA, 19 nt, Artificial Sequence
  Description of Artificial Sequence: Synthetic oligonucleotide
ccgucuacagccacagggg

SEQ ID NO: 1976730 - RNA, 19 nt, Artificial Sequence
  Description of Artificial Sequence: Synthetic oligonucleotide
aucuuguagggcacuucuc

SEQ ID NO: 1976731 - RNA, 19 nt, Artificial Sequence
  Description of Artificial Sequence: Synthetic oligonucleotide
agccgauaggcaucaugcu

SEQ ID NO: 1976732 - RNA, 19 nt, Artificial Sequence
  Description of Artificial Sequence: Synthetic oligonucleotide
ucggaguugcagccucucu

SEQ ID NO: 1976733 - RNA, 19 nt, Artificial Sequence
  Description of Artificial Sequence: Synthetic oligonucleotide
acccaaggacugcagcugu

SEQ ID NO: 1976734 - RNA, 19 nt, Artificial Sequence
  Description of Artificial Sequence: Synthetic oligonucleotide
gccuccauggaaaucgaag

SEQ ID NO: 1976735 - RNA, 19 nt, Artificial Sequence
  Description of Artificial Sequence: Synthetic oligonucleotide
cacucagcgucaacccggc

SEQ ID NO: 1976736 - RNA, 19 nt, Artificial Sequence
  Description of Artificial Sequence: Synthetic oligonucleotide
acucuucugucugccagug

SEQ ID NO: 1976737 - RNA, 19 nt, Artificial Sequence
  Description of Artificial Sequence: Synthetic oligonucleotide
gguuggguagguucaucug

SEQ ID NO: 1976738 - RNA, 19 nt, Artificial Sequence
  Description of Artificial Sequence: Synthetic oligonucleotide
cauuguagucaugcagcug

SEQ ID NO: 1976739 - RNA, 19 nt, Artificial Sequence
  Description of Artificial Sequence: Synthetic oligonucleotide
uucagggcauagagagggu

SEQ ID NO: 1976740 - RNA, 19 nt, Artificial Sequence
  Description of Artificial Sequence: Synthetic oligonucleotide
uggguagguucaucuggac

SEQ ID NO: 1976741 - RNA, 19 nt, Artificial Sequence
  Description of Artificial Sequence: Synthetic oligonucleotide
cucaaggucucagcccacc

SEQ ID NO: 1976742 - RNA, 19 nt, Artificial Sequence
  Description of Artificial Sequence: Synthetic oligonucleotide
ccucacagacaauguaacc

SEQ ID NO: 1976743 - RNA, 19 nt, Artificial Sequence
  Description of Artificial Sequence: Synthetic oligonucleotide
uccgagguaccuucccguc

SEQ ID NO: 1976744 - RNA, 19 nt, Artificial Sequence
  Description of Artificial Sequence: Synthetic oligonucleotide
gaagccucugcagcccgcc

SEQ ID NO: 1976745 - RNA, 19 nt, Artificial Sequence
  Description of Artificial Sequence: Synthetic oligonucleotide
agcugucucaggguagaug

SEQ ID NO: 1976746 - RNA, 19 nt, Artificial Sequence
  Description of Artificial Sequence: Synthetic oligonucleotide
ugggaagccucugcagccc

SEQ ID NO: 1976747 - RNA, 19 nt, Artificial Sequence
  Description of Artificial Sequence: Synthetic oligonucleotide
ccucugagugacaucucgg

SEQ ID NO: 1976748 - RNA, 19 nt, Artificial Sequence
  Description of Artificial Sequence: Synthetic oligonucleotide
caccuccugcauuugcaug

SEQ ID NO: 1976749 - RNA, 19 nt, Artificial Sequence
  Description of Artificial Sequence: Synthetic oligonucleotide
uagaguacucaggcuucug

SEQ ID NO: 1976750 - RNA, 19 nt, Artificial Sequence
  Description of Artificial Sequence: Synthetic oligonucleotide
auuugcauggggagcuacu

SEQ ID NO: 1976751 - RNA, 19 nt, Artificial Sequence
  Description of Artificial Sequence: Synthetic oligonucleotide
cacgcagucgaugccuagc

SEQ ID NO: 1976752 - RNA, 19 nt, Artificial Sequence
  Description of Artificial Sequence: Synthetic oligonucleotide
gaguaugcacacaaucccu

SEQ ID NO: 1976753 - RNA, 19 nt, Artificial Sequence
  Description of Artificial Sequence: Synthetic oligonucleotide
gugggcaaaggcuggucca

SEQ ID NO: 1976754 - RNA, 19 nt, Artificial Sequence
  Description of Artificial Sequence: Synthetic oligonucleotide
cauuugcauggggagcuac

SEQ ID NO: 1976755 - RNA, 19 nt, Artificial Sequence
  Description of Artificial Sequence: Synthetic oligonucleotide
gcugggucauaccucugag

SEQ ID NO: 1976756 - RNA, 19 nt, Artificial Sequence
  Description of Artificial Sequence: Synthetic oligonucleotide
gugaccauagagggccaag

SEQ ID NO: 1976757 - RNA, 19 nt, Artificial Sequence
  Description of Artificial Sequence: Synthetic oligonucleotide
ggcauagagagggugguuc

SEQ ID NO: 1976758 - RNA, 19 nt, Artificial Sequence
  Description of Artificial Sequence: Synthetic oligonucleotide
ccuggagugcagaguaugc

SEQ ID NO: 1976759 - RNA, 19 nt, Artificial Sequence
  Description of Artificial Sequence: Synthetic oligonucleotide
ggaaaucgaagccagugau

SEQ ID NO: 1976760 - RNA, 19 nt, Artificial Sequence
  Description of Artificial Sequence: Synthetic oligonucleotide
uccgggcacgguuggagaa

SEQ ID NO: 1976761 - RNA, 19 nt, Artificial Sequence
  Description of Artificial Sequence: Synthetic oligonucleotide
ucucaaggucucagcccac

SEQ ID NO: 1976762 - RNA, 19 nt, Artificial Sequence
  Description of Artificial Sequence: Synthetic oligonucleotide
acgguuggagaagccuuuc

SEQ ID NO: 1976763 - RNA, 19 nt, Artificial Sequence
  Description of Artificial Sequence: Synthetic oligonucleotide
uccaagccguaccacucuu

SEQ ID NO: 1976764 - RNA, 19 nt, Artificial Sequence
  Description of Artificial Sequence: Synthetic oligonucleotide
agggcauagagaggguggu

SEQ ID NO: 1976765 - RNA, 19 nt, Artificial Sequence
  Description of Artificial Sequence: Synthetic oligonucleotide
cugccucacucuuggcccc

SEQ ID NO: 1976766 - RNA, 19 nt, Artificial Sequence
  Description of Artificial Sequence: Synthetic oligonucleotide
agugcagaguaugcacaca

SEQ ID NO: 1976767 - RNA, 19 nt, Artificial Sequence
  Description of Artificial Sequence: Synthetic oligonucleotide
ggcaguagccuccauggaa

SEQ ID NO: 1976768 - RNA, 19 nt, Artificial Sequence
  Description of Artificial Sequence: Synthetic oligonucleotide
uuccuuaagugggcucuga

SEQ ID NO: 1976769 - RNA, 19 nt, Artificial Sequence
  Description of Artificial Sequence: Synthetic oligonucleotide
caucaguuacuggauggca

SEQ ID NO: 1976770 - RNA, 19 nt, Artificial Sequence
  Description of Artificial Sequence: Synthetic oligonucleotide
auuucaagagguggcgcuu

SEQ ID NO: 1976771 - RNA, 19 nt, Artificial Sequence
  Description of Artificial Sequence: Synthetic oligonucleotide
ucucgguuuugaggccagg

SEQ ID NO: 1976772 - RNA, 19 nt, Artificial Sequence
  Description of Artificial Sequence: Synthetic oligonucleotide
ucccgucuacagccacagg

SEQ ID NO: 1976773 - RNA, 19 nt, Artificial Sequence
  Description of Artificial Sequence: Synthetic oligonucleotide
ggguagguucaucuggaca

SEQ ID NO: 1976774 - RNA, 19 nt, Artificial Sequence
  Description of Artificial Sequence: Synthetic oligonucleotide
uccgaaagccgggcuuucc

SEQ ID NO: 1976775 - RNA, 19 nt, Artificial Sequence
  Description of Artificial Sequence: Synthetic oligonucleotide
gagggugguucuuguaugu

SEQ ID NO: 1976776 - RNA, 19 nt, Artificial Sequence
  Description of Artificial Sequence: Synthetic oligonucleotide
gccugcacgcagucgaugc

SEQ ID NO: 1976777 - RNA, 19 nt, Artificial Sequence
  Description of Artificial Sequence: Synthetic oligonucleotide
guccaccuccugcauuugc

SEQ ID NO: 1976778 - RNA, 19 nt, Artificial Sequence
  Description of Artificial Sequence: Synthetic oligonucleotide
agaguccaccuccugcauu

SEQ ID NO: 1976779 - RNA, 19 nt, Artificial Sequence
  Description of Artificial Sequence: Synthetic oligonucleotide
aggucucagcccaccacuc

SEQ ID NO: 1976780 - RNA, 19 nt, Artificial Sequence
  Description of Artificial Sequence: Synthetic oligonucleotide
ggacacucacuucacagcu

SEQ ID NO: 1976781 - RNA, 19 nt, Artificial Sequence
  Description of Artificial Sequence: Synthetic oligonucleotide
ucaugcagcuggggcuccg

SEQ ID NO: 1976782 - RNA, 19 nt, Artificial Sequence
  Description of Artificial Sequence: Synthetic oligonucleotide
gcggguugcggucauccag

SEQ ID NO: 1976783 - RNA, 19 nt, Artificial Sequence
  Description of Artificial Sequence: Synthetic oligonucleotide
gggagcuacugccucacuc

SEQ ID NO: 1976784 - RNA, 19 nt, Artificial Sequence
  Description of Artificial Sequence: Synthetic oligonucleotide
ccgacaauacccaaggacu

SEQ ID NO: 1976785 - RNA, 19 nt, Artificial Sequence
  Description of Artificial Sequence: Synthetic oligonucleotide
gcgucaacccggcauuugc

SEQ ID NO: 1976786 - RNA, 19 nt, Artificial Sequence
  Description of Artificial Sequence: Synthetic oligonucleotide
caugugucccuggagugca

SEQ ID NO: 1976787 - RNA, 19 nt, Artificial Sequence
  Description of Artificial Sequence: Synthetic oligonucleotide
ugcacgcagucgaugccua

SEQ ID NO: 1976788 - RNA, 19 nt, Artificial Sequence
  Description of Artificial Sequence: Synthetic oligonucleotide
ccaccacucagcgucaacc

SEQ ID NO: 1976789 - RNA, 19 nt, Artificial Sequence
  Description of Artificial Sequence: Synthetic oligonucleotide
cuccugcauuugcaugggg

SEQ ID NO: 1976790 - RNA, 19 nt, Artificial Sequence
  Description of Artificial Sequence: Synthetic oligonucleotide
gaguccaccuccugcauuu

SEQ ID NO: 1976791 - RNA, 19 nt, Artificial Sequence
  Description of Artificial Sequence: Synthetic oligonucleotide
ucuccccgacaauacccaa

SEQ ID NO: 1976792 - RNA, 19 nt, Artificial Sequence
  Description of Artificial Sequence: Synthetic oligonucleotide
aagugggcucugauagggu

SEQ ID NO: 1976793 - RNA, 19 nt, Artificial Sequence
  Description of Artificial Sequence: Synthetic oligonucleotide
ugcggguugcggucaucca

SEQ ID NO: 1976794 - RNA, 19 nt, Artificial Sequence
  Description of Artificial Sequence: Synthetic oligonucleotide
ggccccauaucggaguugc

SEQ ID NO: 1976795 - RNA, 19 nt, Artificial Sequence
  Description of Artificial Sequence: Synthetic oligonucleotide
aggcuucugcucuucuuua

SEQ ID NO: 1976796 - RNA, 19 nt, Artificial Sequence
  Description of Artificial Sequence: Synthetic oligonucleotide
cuggagugcagaguaugca

SEQ ID NO: 1976797 - RNA, 19 nt, Artificial Sequence
  Description of Artificial Sequence: Synthetic oligonucleotide
ccgaaagccgggcuuuccg

SEQ ID NO: 1976798 - RNA, 19 nt, Artificial Sequence
  Description of Artificial Sequence: Synthetic oligonucleotide
guugcagccucucucugau

SEQ ID NO: 1976799 - RNA, 19 nt, Artificial Sequence
  Description of Artificial Sequence: Synthetic oligonucleotide
ggagcuacugccucacucu

SEQ ID NO: 1976800 - RNA, 19 nt, Artificial Sequence
  Description of Artificial Sequence: Synthetic oligonucleotide
aggugggcaaaggcugguc

SEQ ID NO: 1976801 - RNA, 19 nt, Artificial Sequence
  Description of Artificial Sequence: Synthetic oligonucleotide
agccgggcuuuccgggcac

SEQ ID NO: 1976802 - RNA, 19 nt, Artificial Sequence
  Description of Artificial Sequence: Synthetic oligonucleotide
guagguucaucuggacaca

SEQ ID NO: 1976803 - RNA, 19 nt, Artificial Sequence
  Description of Artificial Sequence: Synthetic oligonucleotide
cucucugaugagcaguccu

SEQ ID NO: 1976804 - RNA, 19 nt, Artificial Sequence
  Description of Artificial Sequence: Synthetic oligonucleotide
cuacugccucacucuuggc

SEQ ID NO: 1976805 - RNA, 19 nt, Artificial Sequence
  Description of Artificial Sequence: Synthetic oligonucleotide
ggucaucuuagaguacuca

SEQ ID NO: 1976806 - RNA, 19 nt, Artificial Sequence
  Description of Artificial Sequence: Synthetic oligonucleotide
uucugcuugugagcugguc

SEQ ID NO: 1976807 - RNA, 19 nt, Artificial Sequence
  Description of Artificial Sequence: Synthetic oligonucleotide
gccguaccacucuugcuug

SEQ ID NO: 1976808 - RNA, 19 nt, Artificial Sequence
  Description of Artificial Sequence: Synthetic oligonucleotide
cugucugccagugaccaua

SEQ ID NO: 1976809 - RNA, 19 nt, Artificial Sequence
  Description of Artificial Sequence: Synthetic oligonucleotide
cuucccgucuacagccaca

SEQ ID NO: 1976810 - RNA, 19 nt, Artificial Sequence
  Description of Artificial Sequence: Synthetic oligonucleotide
gcauuugcggguugcgguc

SEQ ID NO: 1976811 - RNA, 19 nt, Artificial Sequence
  Description of Artificial Sequence: Synthetic oligonucleotide
gcuuuccgggcacgguugg

SEQ ID NO: 1976812 - RNA, 19 nt, Artificial Sequence
  Description of Artificial Sequence: Synthetic oligonucleotide
cucgguuuugaggccagga

SEQ ID NO: 1976813 - RNA, 19 nt, Artificial Sequence
  Description of Artificial Sequence: Synthetic oligonucleotide
gagguaccuucccgucuac

SEQ ID NO: 1976814 - RNA, 19 nt, Artificial Sequence
  Description of Artificial Sequence: Synthetic oligonucleotide
guuuugaggccaggaggca

SEQ ID NO: 1976815 - RNA, 19 nt, Artificial Sequence
  Description of Artificial Sequence: Synthetic oligonucleotide
uugcagccucucucugaug

SEQ ID NO: 1976816 - RNA, 19 nt, Artificial Sequence
  Description of Artificial Sequence: Synthetic oligonucleotide
cgaaagccgggcuuuccgg

SEQ ID NO: 1976817 - RNA, 19 nt, Artificial Sequence
  Description of Artificial Sequence: Synthetic oligonucleotide
ggcauuugcggguugcggu

SEQ ID NO: 1976818 - RNA, 19 nt, Artificial Sequence
  Description of Artificial Sequence: Synthetic oligonucleotide
gggucauaccucugaguga

SEQ ID NO: 1976819 - RNA, 19 nt, Artificial Sequence
  Description of Artificial Sequence: Synthetic oligonucleotide
auuugcggguugcggucau

SEQ ID NO: 1976820 - RNA, 19 nt, Artificial Sequence
  Description of Artificial Sequence: Synthetic oligonucleotide
agcgucaacccggcauuug

SEQ ID NO: 1976821 - RNA, 19 nt, Artificial Sequence
  Description of Artificial Sequence: Synthetic oligonucleotide
ucccuggagugcagaguau

SEQ ID NO: 1976822 - RNA, 19 nt, Artificial Sequence
  Description of Artificial Sequence: Synthetic oligonucleotide
cucagcgucaacccggcau

SEQ ID NO: 1976823 - RNA, 19 nt, Artificial Sequence
  Description of Artificial Sequence: Synthetic oligonucleotide
ggcugggucauaccucuga

SEQ ID NO: 1976824 - RNA, 19 nt, Artificial Sequence
  Description of Artificial Sequence: Synthetic oligonucleotide
cgucaacccggcauuugcg

SEQ ID NO: 1976825 - RNA, 19 nt, Artificial Sequence
  Description of Artificial Sequence: Synthetic oligonucleotide
gguggacacucacuucaca

SEQ ID NO: 1976826 - RNA, 19 nt, Artificial Sequence
  Description of Artificial Sequence: Synthetic oligonucleotide
acggugcagguuggguagg

SEQ ID NO: 1976827 - RNA, 19 nt, Artificial Sequence
  Description of Artificial Sequence: Synthetic oligonucleotide
uggcgcuucagggcauaga

SEQ ID NO: 1976828 - RNA, 19 nt, Artificial Sequence
  Description of Artificial Sequence: Synthetic oligonucleotide
gugacaucucggacccagc

SEQ ID NO: 1976829 - RNA, 19 nt, Artificial Sequence
  Description of Artificial Sequence: Synthetic oligonucleotide
gugcuucgccugaaacucc

SEQ ID NO: 1976830 - RNA, 19 nt, Artificial Sequence
  Description of Artificial Sequence: Synthetic oligonucleotide
aacccggcauuugcggguu

SEQ ID NO: 1976831 - RNA, 19 nt, Artificial Sequence
  Description of Artificial Sequence: Synthetic oligonucleotide
ccaugugucccuggagugc

SEQ ID NO: 1976832 - RNA, 19 nt, Artificial Sequence
  Description of Artificial Sequence: Synthetic oligonucleotide
ccuuuccuuaagugggcuc

SEQ ID NO: 1976833 - RNA, 19 nt, Artificial Sequence
  Description of Artificial Sequence: Synthetic oligonucleotide
cccaaacucauuccgaggu

SEQ ID NO: 1976834 - RNA, 19 nt, Artificial Sequence
  Description of Artificial Sequence: Synthetic oligonucleotide
agugaccauagagggccaa

SEQ ID NO: 1976835 - RNA, 19 nt, Artificial Sequence
  Description of Artificial Sequence: Synthetic oligonucleotide
cauuugcggguugcgguca

SEQ ID NO: 1976836 - RNA, 19 nt, Artificial Sequence
  Description of Artificial Sequence: Synthetic oligonucleotide
ugcggucauccaggcuggg

SEQ ID NO: 1976837 - RNA, 19 nt, Artificial Sequence
  Description of Artificial Sequence: Synthetic oligonucleotide
gcagcccgccucuuccggg

SEQ ID NO: 1976838 - RNA, 19 nt, Artificial Sequence
  Description of Artificial Sequence: Synthetic oligonucleotide
accaucuuguagggcacuu

SEQ ID NO: 1976839 - RNA, 19 nt, Artificial Sequence
  Description of Artificial Sequence: Synthetic oligonucleotide
cgauaggcaucaugcuggg

SEQ ID NO: 1976840 - RNA, 19 nt, Artificial Sequence
  Description of Artificial Sequence: Synthetic oligonucleotide
agguaccuucccgucuaca

SEQ ID NO: 1976841 - RNA, 19 nt, Artificial Sequence
  Description of Artificial Sequence: Synthetic oligonucleotide
cauggaaaucgaagccagu

SEQ ID NO: 1976842 - RNA, 19 nt, Artificial Sequence
  Description of Artificial Sequence: Synthetic oligonucleotide
ggcuuuccgggcacgguug

SEQ ID NO: 1976843 - RNA, 19 nt, Artificial Sequence
  Description of Artificial Sequence: Synthetic oligonucleotide
ccauagagggccaagucau

SEQ ID NO: 1976844 - RNA, 19 nt, Artificial Sequence
  Description of Artificial Sequence: Synthetic oligonucleotide
ggucucagcccaccacuca

SEQ ID NO: 1976845 - RNA, 19 nt, Artificial Sequence
  Description of Artificial Sequence: Synthetic oligonucleotide
cucggacccagccaucacu

SEQ ID NO: 1976846 - RNA, 19 nt, Artificial Sequence
  Description of Artificial Sequence: Synthetic oligonucleotide
ccuuaagugggcucugaua

SEQ ID NO: 1976847 - RNA, 19 nt, Artificial Sequence
  Description of Artificial Sequence: Synthetic oligonucleotide
uggccccauaucggaguug

SEQ ID NO: 1976848 - RNA, 19 nt, Artificial Sequence
  Description of Artificial Sequence: Synthetic oligonucleotide
agcacccgcuuuuccuuuu

SEQ ID NO: 1976849 - RNA, 19 nt, Artificial Sequence
  Description of Artificial Sequence: Synthetic oligonucleotide
cagguuggguagguucauc

SEQ ID NO: 1976850 - RNA, 19 nt, Artificial Sequence
  Description of Artificial Sequence: Synthetic oligonucleotide
ccaagccguaccacucuug

SEQ ID NO: 1976851 - RNA, 19 nt, Artificial Sequence
  Description of Artificial Sequence: Synthetic oligonucleotide
cggucauccaggcuggguc

SEQ ID NO: 1976852 - RNA, 19 nt, Artificial Sequence
  Description of Artificial Sequence: Synthetic oligonucleotide
ccugguggacacucacuuc

SEQ ID NO: 1976853 - RNA, 19 nt, Artificial Sequence
  Description of Artificial Sequence: Synthetic oligonucleotide
gcauagagagggugguucu

SEQ ID NO: 1976854 - RNA, 19 nt, Artificial Sequence
  Description of Artificial Sequence: Synthetic oligonucleotide
ccaggacucuugcugcuuc

SEQ ID NO: 1976855 - RNA, 19 nt, Artificial Sequence
  Description of Artificial Sequence: Synthetic oligonucleotide
caacccggcauuugcgggu

SEQ ID NO: 1976856 - RNA, 19 nt, Artificial Sequence
  Description of Artificial Sequence: Synthetic oligonucleotide
ccaguuccccagcacccgc

SEQ ID NO: 1976857 - RNA, 19 nt, Artificial Sequence
  Description of Artificial Sequence: Synthetic oligonucleotide
ggcaucaugcugggcagga

SEQ ID NO: 1976858 - RNA, 19 nt, Artificial Sequence
  Description of Artificial Sequence: Synthetic oligonucleotide
uuugcggguugcggucauc

SEQ ID NO: 1976859 - RNA, 19 nt, Artificial Sequence
  Description of Artificial Sequence: Synthetic oligonucleotide
cauaucggaguugcagccu

SEQ ID NO: 1976860 - RNA, 19 nt, Artificial Sequence
  Description of Artificial Sequence: Synthetic oligonucleotide
ccuccugcauuugcauggg

SEQ ID NO: 1976861 - RNA, 19 nt, Artificial Sequence
  Description of Artificial Sequence: Synthetic oligonucleotide
gagcuacugccucacucuu

SEQ ID NO: 1976862 - RNA, 19 nt, Artificial Sequence
  Description of Artificial Sequence: Synthetic oligonucleotide
acacguucccaaacucauu

SEQ ID NO: 1976863 - RNA, 19 nt, Artificial Sequence
  Description of Artificial Sequence: Synthetic oligonucleotide
cgaugccuagcuugcgggc

SEQ ID NO: 1976864 - RNA, 19 nt, Artificial Sequence
  Description of Artificial Sequence: Synthetic oligonucleotide
ucauccaggcugggucaua

SEQ ID NO: 1976865 - RNA, 19 nt, Artificial Sequence
  Description of Artificial Sequence: Synthetic oligonucleotide
gcacgcagucgaugccuag

SEQ ID NO: 1976866 - RNA, 19 nt, Artificial Sequence
  Description of Artificial Sequence: Synthetic oligonucleotide
ugccuagcuugcgggccac

SEQ ID NO: 1976867 - RNA, 19 nt, Artificial Sequence
  Description of Artificial Sequence: Synthetic oligonucleotide
caguuacuggauggcagua

SEQ ID NO: 1976868 - RNA, 19 nt, Artificial Sequence
  Description of Artificial Sequence: Synthetic oligonucleotide
cuccaagccguaccacucu

SEQ ID NO: 1976869 - RNA, 19 nt, Artificial Sequence
  Description of Artificial Sequence: Synthetic oligonucleotide
ccguaccacucuugcuugc

SEQ ID NO: 1976870 - RNA, 19 nt, Artificial Sequence
  Description of Artificial Sequence: Synthetic oligonucleotide
gggcacuucuccaagccgu

SEQ ID NO: 1976871 - RNA, 19 nt, Artificial Sequence
  Description of Artificial Sequence: Synthetic oligonucleotide
ccuucccgucuacagccac

SEQ ID NO: 1976872 - RNA, 19 nt, Artificial Sequence
  Description of Artificial Sequence: Synthetic oligonucleotide
gggucaucuuagaguacuc

SEQ ID NO: 1976873 - RNA, 19 nt, Artificial Sequence
  Description of Artificial Sequence: Synthetic oligonucleotide
ggggcuccgaaagccgggc

SEQ ID NO: 1976874 - RNA, 19 nt, Artificial Sequence
  Description of Artificial Sequence: Synthetic oligonucleotide
cuccgaaagccgggcuuuc

SEQ ID NO: 1976875 - RNA, 19 nt, Artificial Sequence
  Description of Artificial Sequence: Synthetic oligonucleotide
agccuccauggaaaucgaa

SEQ ID NO: 1976876 - RNA, 19 nt, Artificial Sequence
  Description of Artificial Sequence: Synthetic oligonucleotide
ggaagccucugcagcccgc

SEQ ID NO: 1976877 - RNA, 19 nt, Artificial Sequence
  Description of Artificial Sequence: Synthetic oligonucleotide
ccaucuuguagggcacuuc

SEQ ID NO: 1976878 - RNA, 19 nt, Artificial Sequence
  Description of Artificial Sequence: Synthetic oligonucleotide
ggcucugauagggucucaa

SEQ ID NO: 1976879 - RNA, 19 nt, Artificial Sequence
  Description of Artificial Sequence: Synthetic oligonucleotide
cugcacgcagucgaugccu

SEQ ID NO: 1976880 - RNA, 19 nt, Artificial Sequence
  Description of Artificial Sequence: Synthetic oligonucleotide
cauagagggccaagucauu

SEQ ID NO: 1976881 - RNA, 19 nt, Artificial Sequence
  Description of Artificial Sequence: Synthetic oligonucleotide
gaggugggcaaaggcuggu

SEQ ID NO: 1976882 - RNA, 19 nt, Artificial Sequence
  Description of Artificial Sequence: Synthetic oligonucleotide
ccggcauuugcggguugcg

SEQ ID NO: 1976883 - RNA, 19 nt, Artificial Sequence
  Description of Artificial Sequence: Synthetic oligonucleotide
cuuuccgggcacgguugga

SEQ ID NO: 1976884 - RNA, 19 nt, Artificial Sequence
  Description of Artificial Sequence: Synthetic oligonucleotide
caugcagcuggggcuccga

SEQ ID NO: 1976885 - RNA, 19 nt, Artificial Sequence
  Description of Artificial Sequence: Synthetic oligonucleotide
cacucacuucacagcuucu

SEQ ID NO: 1976886 - RNA, 19 nt, Artificial Sequence
  Description of Artificial Sequence: Synthetic oligonucleotide
cccggcauuugcggguugc

SEQ ID NO: 1976887 - RNA, 19 nt, Artificial Sequence
  Description of Artificial Sequence: Synthetic oligonucleotide
gcacuucuccaagccguac

SEQ ID NO: 1976888 - RNA, 19 nt, Artificial Sequence
  Description of Artificial Sequence: Synthetic oligonucleotide
ccaaacucauuccgaggua

SEQ ID NO: 1976889 - RNA, 19 nt, Artificial Sequence
  Description of Artificial Sequence: Synthetic oligonucleotide
agcuugcgggccacacggu

SEQ ID NO: 1976890 - RNA, 19 nt, Artificial Sequence
  Description of Artificial Sequence: Synthetic oligonucleotide
cggcauuugcggguugcgg

SEQ ID NO: 1976891 - RNA, 19 nt, Artificial Sequence
  Description of Artificial Sequence: Synthetic oligonucleotide
caguuccccagcacccgcu

SEQ ID NO: 1976892 - RNA, 19 nt, Artificial Sequence
  Description of Artificial Sequence: Synthetic oligonucleotide
cacacggugcagguugggu

SEQ ID NO: 1976893 - RNA, 19 nt, Artificial Sequence
  Description of Artificial Sequence: Synthetic oligonucleotide
ccucuuccgggucaucuua

SEQ ID NO: 1976894 - RNA, 19 nt, Artificial Sequence
  Description of Artificial Sequence: Synthetic oligonucleotide
gcuucgccugaaacuccug

SEQ ID NO: 1976895 - RNA, 19 nt, Artificial Sequence
  Description of Artificial Sequence: Synthetic oligonucleotide
cauagagagggugguucuu

SEQ ID NO: 1976896 - RNA, 19 nt, Artificial Sequence
  Description of Artificial Sequence: Synthetic oligonucleotide
ccccagcacccgcuuuucc

SEQ ID NO: 1976897 - RNA, 19 nt, Artificial Sequence
  Description of Artificial Sequence: Synthetic oligonucleotide
cgggcacgguuggagaagc

SEQ ID NO: 1976898 - RNA, 19 nt, Artificial Sequence
  Description of Artificial Sequence: Synthetic oligonucleotide
cccaccacucagcgucaac

SEQ ID NO: 1976899 - RNA, 19 nt, Artificial Sequence
  Description of Artificial Sequence: Synthetic oligonucleotide
gguugcggucauccaggcu

SEQ ID NO: 1976900 - RNA, 19 nt, Artificial Sequence
  Description of Artificial Sequence: Synthetic oligonucleotide
ggcuccgaaagccgggcuu

SEQ ID NO: 1976901 - RNA, 19 nt, Artificial Sequence
  Description of Artificial Sequence: Synthetic oligonucleotide
cgagguaccuucccgucua

SEQ ID NO: 1976902 - RNA, 19 nt, Artificial Sequence
  Description of Artificial Sequence: Synthetic oligonucleotide
ccgggcuuuccgggcacgg

SEQ ID NO: 1976903 - RNA, 19 nt, Artificial Sequence
  Description of Artificial Sequence: Synthetic oligonucleotide
cagcccgccucuuccgggu

SEQ ID NO: 1976904 - RNA, 19 nt, Artificial Sequence
  Description of Artificial Sequence: Synthetic oligonucleotide
agguggcgcuucagggcau

SEQ ID NO: 1976905 - RNA, 19 nt, Artificial Sequence
  Description of Artificial Sequence: Synthetic oligonucleotide
cgguuggagaagccuuuca

SEQ ID NO: 1976906 - RNA, 19 nt, Artificial Sequence
  Description of Artificial Sequence: Synthetic oligonucleotide
ccccgacaauacccaagga

SEQ ID NO: 1976907 - RNA, 19 nt, Artificial Sequence
  Description of Artificial Sequence: Synthetic oligonucleotide
gcuccgaaagccgggcuuu

SEQ ID NO: 1976908 - RNA, 19 nt, Artificial Sequence
  Description of Artificial Sequence: Synthetic oligonucleotide
gguggcgcuucagggcaua

SEQ ID NO: 1976909 - RNA, 19 nt, Artificial Sequence
  Description of Artificial Sequence: Synthetic oligonucleotide
gggcuccgaaagccgggcu

SEQ ID NO: 1976910 - RNA, 19 nt, Artificial Sequence
  Description of Artificial Sequence: Synthetic oligonucleotide
gcagguuggguagguucau

SEQ ID NO: 1976911 - RNA, 19 nt, Artificial Sequence
  Description of Artificial Sequence: Synthetic oligonucleotide
gcggucauccaggcugggu

SEQ ID NO: 1976912 - RNA, 19 nt, Artificial Sequence
  Description of Artificial Sequence: Synthetic oligonucleotide
gggcucugauagggucuca

SEQ ID NO: 1976913 - RNA, 19 nt, Artificial Sequence
  Description of Artificial Sequence: Synthetic oligonucleotide
cccuuuccuuaagugggcu

SEQ ID NO: 1976914 - RNA, 19 nt, Artificial Sequence
  Description of Artificial Sequence: Synthetic oligonucleotide
gccccauaucggaguugca

SEQ ID NO: 1976915 - RNA, 19 nt, Artificial Sequence
  Description of Artificial Sequence: Synthetic oligonucleotide
guccucugaccagcagcuu

SEQ ID NO: 1976916 - RNA, 19 nt, Artificial Sequence
  Description of Artificial Sequence: Synthetic oligonucleotide
gggcauagagagggugguu

SEQ ID NO: 1976917 - RNA, 19 nt, Artificial Sequence
  Description of Artificial Sequence: Synthetic oligonucleotide
gccuagcuugcgggccaca

SEQ ID NO: 1976918 - RNA, 19 nt, Artificial Sequence
  Description of Artificial Sequence: Synthetic oligonucleotide
cagcgucaacccggcauuu

SEQ ID NO: 1976919 - RNA, 19 nt, Artificial Sequence
  Description of Artificial Sequence: Synthetic oligonucleotide
ggauggcaguagccuccau

SEQ ID NO: 1976920 - RNA, 19 nt, Artificial Sequence
  Description of Artificial Sequence: Synthetic oligonucleotide
cacagccgauaggcaucau

SEQ ID NO: 1976921 - RNA, 19 nt, Artificial Sequence
  Description of Artificial Sequence: Synthetic oligonucleotide
cgggcuuuccgggcacggu

SEQ ID NO: 1976922 - RNA, 19 nt, Artificial Sequence
  Description of Artificial Sequence: Synthetic oligonucleotide
aauacuuucacuuuagauc

SEQ ID NO: 1976923 - RNA, 19 nt, Artificial Sequence
  Description of Artificial Sequence: Synthetic oligonucleotide
acuaguaugaucuucacac

SEQ ID NO: 1976924 - RNA, 19 nt, Artificial Sequence
  Description of Artificial Sequence: Synthetic oligonucleotide
ucuaauaagaaucuuguga

SEQ ID NO: 1976925 - RNA, 19 nt, Artificial Sequence
  Description of Artificial Sequence: Synthetic oligonucleotide
uuaauaagccaaaagaaca

SEQ ID NO: 1976926 - RNA, 19 nt, Artificial Sequence
  Description of Artificial Sequence: Synthetic oligonucleotide
aaaauuguagacuaugagu

SEQ ID NO: 1976927 - RNA, 19 nt, Artificial Sequence
  Description of Artificial Sequence: Synthetic oligonucleotide
guaguaaucaccuacacug

SEQ ID NO: 1976928 - RNA, 19 nt, Artificial Sequence
  Description of Artificial Sequence: Synthetic oligonucleotide
uuaaauauacacauuucug

SEQ ID NO: 1976929 - RNA, 19 nt, Artificial Sequence
  Description of Artificial Sequence: Synthetic oligonucleotide
uuuaauaagccaaaagaac

SEQ ID NO: 1976930 - RNA, 19 nt, Artificial Sequence
  Description of Artificial Sequence: Synthetic oligonucleotide
gaaagcaauaaucaagucc

SEQ ID NO: 1976931 - RNA, 19 nt, Artificial Sequence
  Description of Artificial Sequence: Synthetic oligonucleotide
acaauuguccauuucuugc

SEQ ID NO: 1976932 - RNA, 19 nt, Artificial Sequence
  Description of Artificial Sequence: Synthetic oligonucleotide
uagacuaugagugagcuag

SEQ ID NO: 1976933 - RNA, 19 nt, Artificial Sequence
  Description of Artificial Sequence: Synthetic oligonucleotide
agucauaagaaguuuggac

SEQ ID NO: 1976934 - RNA, 19 nt, Artificial Sequence
  Description of Artificial Sequence: Synthetic oligonucleotide
uaaaauuguagacuaugag

SEQ ID NO: 1976935 - RNA, 19 nt, Artificial Sequence
  Description of Artificial Sequence: Synthetic oligonucleotide
uuggacauugcaaauggcg

SEQ ID NO: 1976936 - RNA, 19 nt, Artificial Sequence
  Description of Artificial Sequence: Synthetic oligonucleotide
uucuaauuuacucagcaac

SEQ ID NO: 1976937 - RNA, 19 nt, Artificial Sequence
  Description of Artificial Sequence: Synthetic oligonucleotide
ucuuuuaauaagccaaaag

SEQ ID NO: 1976938 - RNA, 19 nt, Artificial Sequence
  Description of Artificial Sequence: Synthetic oligonucleotide
cuaugagugagcuaguugc

SEQ ID NO: 1976939 - RNA, 19 nt, Artificial Sequence
  Description of Artificial Sequence: Synthetic oligonucleotide
uuuagggacacugugagag

SEQ ID NO: 1976940 - RNA, 19 nt, Artificial Sequence
  Description of Artificial Sequence: Synthetic oligonucleotide
uuuacuaguaugaucuuca

SEQ ID NO: 1976941 - RNA, 19 nt, Artificial Sequence
  Description of Artificial Sequence: Synthetic oligonucleotide
ucucccaucuuucagaccc

SEQ ID NO: 1976942 - RNA, 19 nt, Artificial Sequence
  Description of Artificial Sequence: Synthetic oligonucleotide
cugaaaaucuuuuagggac

SEQ ID NO: 1976943 - RNA, 19 nt, Artificial Sequence
  Description of Artificial Sequence: Synthetic oligonucleotide
uguuggacauugcaaaugg

SEQ ID NO: 1976944 - RNA, 19 nt, Artificial Sequence
  Description of Artificial Sequence: Synthetic oligonucleotide
aguugaagcauuuucagca

SEQ ID NO: 1976945 - RNA, 19 nt, Artificial Sequence
  Description of Artificial Sequence: Synthetic oligonucleotide
aaaacuaaagucauaagaa

SEQ ID NO: 1976946 - RNA, 19 nt, Artificial Sequence
  Description of Artificial Sequence: Synthetic oligonucleotide
uuuaguuccuucaacaaaa

SEQ ID NO: 1976947 - RNA, 19 nt, Artificial Sequence
  Description of Artificial Sequence: Synthetic oligonucleotide
auacuuucacuuuagaucu

SEQ ID NO: 1976948 - RNA, 19 nt, Artificial Sequence
  Description of Artificial Sequence: Synthetic oligonucleotide
cuuuuaauaagccaaaaga

SEQ ID NO: 1976949 - RNA, 19 nt, Artificial Sequence
  Description of Artificial Sequence: Synthetic oligonucleotide
uauauuuugccucccacug

SEQ ID NO: 1976950 - RNA, 19 nt, Artificial Sequence
  Description of Artificial Sequence: Synthetic oligonucleotide
aauaagaaucuugugaaca

SEQ ID NO: 1976951 - RNA, 19 nt, Artificial Sequence
  Description of Artificial Sequence: Synthetic oligonucleotide
aaaucuuuuagggacacug

SEQ ID NO: 1976952 - RNA, 19 nt, Artificial Sequence
  Description of Artificial Sequence: Synthetic oligonucleotide
uuuagaucuuucuuguucc

SEQ ID NO: 1976953 - RNA, 19 nt, Artificial Sequence
  Description of Artificial Sequence: Synthetic oligonucleotide
uauuuugccucccacuggg

SEQ ID NO: 1976954 - RNA, 19 nt, Artificial Sequence
  Description of Artificial Sequence: Synthetic oligonucleotide
ucuaauuuacucagcaaca

SEQ ID NO: 1976955 - RNA, 19 nt, Artificial Sequence
  Description of Artificial Sequence: Synthetic oligonucleotide
ucauaagaaguuuggacag

SEQ ID NO: 1976956 - RNA, 19 nt, Artificial Sequence
  Description of Artificial Sequence: Synthetic oligonucleotide
aacugcacaauucagcagu

SEQ ID NO: 1976957 - RNA, 19 nt, Artificial Sequence
  Description of Artificial Sequence: Synthetic oligonucleotide
cuuuugacugaguugaagc

SEQ ID NO: 1976958 - RNA, 19 nt, Artificial Sequence
  Description of Artificial Sequence: Synthetic oligonucleotide
uguaauacuuucacuuuag

SEQ ID NO: 1976959 - RNA, 19 nt, Artificial Sequence
  Description of Artificial Sequence: Synthetic oligonucleotide
uucauaauccuguuugugc

SEQ ID NO: 1976960 - RNA, 19 nt, Artificial Sequence
  Description of Artificial Sequence: Synthetic oligonucleotide
ucuauauuuucuuuuaaua

SEQ ID NO: 1976961 - RNA, 19 nt, Artificial Sequence
  Description of Artificial Sequence: Synthetic oligonucleotide
acacugaaaaucuuuuagg

SEQ ID NO: 1976962 - RNA, 19 nt, Artificial Sequence
  Description of Artificial Sequence: Synthetic oligonucleotide
ugguauuuggcuaauucug

SEQ ID NO: 1976963 - RNA, 19 nt, Artificial Sequence
  Description of Artificial Sequence: Synthetic oligonucleotide
ugugauaaagucugagaag

SEQ ID NO: 1976964 - RNA, 19 nt, Artificial Sequence
  Description of Artificial Sequence: Synthetic oligonucleotide
uucauauucuaauuuacuc

SEQ ID NO: 1976965 - RNA, 19 nt, Artificial Sequence
  Description of Artificial Sequence: Synthetic oligonucleotide
aagaauucgauuccucugu

SEQ ID NO: 1976966 - RNA, 19 nt, Artificial Sequence
  Description of Artificial Sequence: Synthetic oligonucleotide
aacauuucagaugucagcu

SEQ ID NO: 1976967 - RNA, 19 nt, Artificial Sequence
  Description of Artificial Sequence: Synthetic oligonucleotide
auuuacucagcaacaaugc

SEQ ID NO: 1976968 - RNA, 19 nt, Artificial Sequence
  Description of Artificial Sequence: Synthetic oligonucleotide
uuuauaacuuuugacugag

SEQ ID NO: 1976969 - RNA, 19 nt, Artificial Sequence
  Description of Artificial Sequence: Synthetic oligonucleotide
aaucuugugaacaucgucu

SEQ ID NO: 1976970 - RNA, 19 nt, Artificial Sequence
  Description of Artificial Sequence: Synthetic oligonucleotide
accuacacuggucagacuc

SEQ ID NO: 1976971 - RNA, 19 nt, Artificial Sequence
  Description of Artificial Sequence: Synthetic oligonucleotide
aauuuuauugacugaugaa

SEQ ID NO: 1976972 - RNA, 19 nt, Artificial Sequence
  Description of Artificial Sequence: Synthetic oligonucleotide
uauaacuuuugacugaguu

SEQ ID NO: 1976973 - RNA, 19 nt, Artificial Sequence
  Description of Artificial Sequence: Synthetic oligonucleotide
aauucucccaucuuucaga

SEQ ID NO: 1976974 - RNA, 19 nt, Artificial Sequence
  Description of Artificial Sequence: Synthetic oligonucleotide
uuacucagcaacaaugccu

SEQ ID NO: 1976975 - RNA, 19 nt, Artificial Sequence
  Description of Artificial Sequence: Synthetic oligonucleotide
uuccguuauacucuguaag

SEQ ID NO: 1976976 - RNA, 19 nt, Artificial Sequence
  Description of Artificial Sequence: Synthetic oligonucleotide
ugugugcugaucucaaagg

SEQ ID NO: 1976977 - RNA, 19 nt, Artificial Sequence
  Description of Artificial Sequence: Synthetic oligonucleotide
uacuucuuuauauuuugcc

SEQ ID NO: 1976978 - RNA, 19 nt, Artificial Sequence
  Description of Artificial Sequence: Synthetic oligonucleotide
auaacuuuugacugaguug

SEQ ID NO: 1976979 - RNA, 19 nt, Artificial Sequence
  Description of Artificial Sequence: Synthetic oligonucleotide
agucuauugaagaaucccc

SEQ ID NO: 1976980 - RNA, 19 nt, Artificial Sequence
  Description of Artificial Sequence: Synthetic oligonucleotide
gucauaagaaguuuggaca

SEQ ID NO: 1976981 - RNA, 19 nt, Artificial Sequence
  Description of Artificial Sequence: Synthetic oligonucleotide
agugaacucaccuggacug

SEQ ID NO: 1976982 - RNA, 19 nt, Artificial Sequence
  Description of Artificial Sequence: Synthetic oligonucleotide
cuuucuuguuccaaugcgg

SEQ ID NO: 1976983 - RNA, 19 nt, Artificial Sequence
  Description of Artificial Sequence: Synthetic oligonucleotide
agaugucagcuguucaucc

SEQ ID NO: 1976984 - RNA, 19 nt, Artificial Sequence
  Description of Artificial Sequence: Synthetic oligonucleotide
guuauacucuguaaguugg

SEQ ID NO: 1976985 - RNA, 19 nt, Artificial Sequence
  Description of Artificial Sequence: Synthetic oligonucleotide
cuaauaagaaucuugugaa

SEQ ID NO: 1976986 - RNA, 19 nt, Artificial Sequence
  Description of Artificial Sequence: Synthetic oligonucleotide
uuucuuguuccaaugcggc

SEQ ID NO: 1976987 - RNA, 19 nt, Artificial Sequence
  Description of Artificial Sequence: Synthetic oligonucleotide
aaguucgagcuucagucuc

SEQ ID NO: 1976988 - RNA, 19 nt, Artificial Sequence
  Description of Artificial Sequence: Synthetic oligonucleotide
uuuacucagcaacaaugcc

SEQ ID NO: 1976989 - RNA, 19 nt, Artificial Sequence
  Description of Artificial Sequence: Synthetic oligonucleotide
ucuuguuggacauugcaaa

SEQ ID NO: 1976990 - RNA, 19 nt, Artificial Sequence
  Description of Artificial Sequence: Synthetic oligonucleotide
ucuuccagucuauugaaga

SEQ ID NO: 1976991 - RNA, 19 nt, Artificial Sequence
  Description of Artificial Sequence: Synthetic oligonucleotide
ucuuuuagggacacuguga

SEQ ID NO: 1976992 - RNA, 19 nt, Artificial Sequence
  Description of Artificial Sequence: Synthetic oligonucleotide
aauuguagacuaugaguga

SEQ ID NO: 1976993 - RNA, 19 nt, Artificial Sequence
  Description of Artificial Sequence: Synthetic oligonucleotide
uuuugacugaguugaagca

SEQ ID NO: 1976994 - RNA, 19 nt, Artificial Sequence
  Description of Artificial Sequence: Synthetic oligonucleotide
ugcuguaguaaucaccuac

SEQ ID NO: 1976995 - RNA, 19 nt, Artificial Sequence
  Description of Artificial Sequence: Synthetic oligonucleotide
auuuuauugacugaugaaa

SEQ ID NO: 1976996 - RNA, 19 nt, Artificial Sequence
  Description of Artificial Sequence: Synthetic oligonucleotide
ugaaaaucuuuuagggaca

SEQ ID NO: 1976997 - RNA, 19 nt, Artificial Sequence
  Description of Artificial Sequence: Synthetic oligonucleotide
ucugguauuuggcuaauuc

SEQ ID NO: 1976998 - RNA, 19 nt, Artificial Sequence
  Description of Artificial Sequence: Synthetic oligonucleotide
uggaagaguaaauuaauuu

SEQ ID NO: 1976999 - RNA, 19 nt, Artificial Sequence
  Description of Artificial Sequence: Synthetic oligonucleotide
agcuaguugcuuuuaguuc

SEQ ID NO: 1977000 - RNA, 19 nt, Artificial Sequence
  Description of Artificial Sequence: Synthetic oligonucleotide
aacaaugccuucucaagau

SEQ ID NO: 1977001 - RNA, 19 nt, Artificial Sequence
  Description of Artificial Sequence: Synthetic oligonucleotide
aauucgauuccucugucuu

SEQ ID NO: 1977002 - RNA, 19 nt, Artificial Sequence
  Description of Artificial Sequence: Synthetic oligonucleotide
cuuuagaucuuucuuguuc

SEQ ID NO: 1977003 - RNA, 19 nt, Artificial Sequence
  Description of Artificial Sequence: Synthetic oligonucleotide
caauucagcaguugcacag

SEQ ID NO: 1977004 - RNA, 19 nt, Artificial Sequence
  Description of Artificial Sequence: Synthetic oligonucleotide
aggacaauggucuguuccg

SEQ ID NO: 1977005 - RNA, 19 nt, Artificial Sequence
  Description of Artificial Sequence: Synthetic oligonucleotide
uuccaaugcggcaugaagu

SEQ ID NO: 1977006 - RNA, 19 nt, Artificial Sequence
  Description of Artificial Sequence: Synthetic oligonucleotide
agaagaauucgauuccucu

SEQ ID NO: 1977007 - RNA, 19 nt, Artificial Sequence
  Description of Artificial Sequence: Synthetic oligonucleotide
ucgucuuccagucuauuga

SEQ ID NO: 1977008 - RNA, 19 nt, Artificial Sequence
  Description of Artificial Sequence: Synthetic oligonucleotide
ugcuuuuacuucuuuauau

SEQ ID NO: 1977009 - RNA, 19 nt, Artificial Sequence
  Description of Artificial Sequence: Synthetic oligonucleotide
agcaauaaucaaguccugc

SEQ ID NO: 1977010 - RNA, 19 nt, Artificial Sequence
  Description of Artificial Sequence: Synthetic oligonucleotide
uggacauugcaaauggcgu

SEQ ID NO: 1977011 - RNA, 19 nt, Artificial Sequence
  Description of Artificial Sequence: Synthetic oligonucleotide
auuuggcuaauucugccug

SEQ ID NO: 1977012 - RNA, 19 nt, Artificial Sequence
  Description of Artificial Sequence: Synthetic oligonucleotide
uucuauauuuucuuuuaau

SEQ ID NO: 1977013 - RNA, 19 nt, Artificial Sequence
  Description of Artificial Sequence: Synthetic oligonucleotide
ucugcaaaguucugaaagu

SEQ ID NO: 1977014 - RNA, 19 nt, Artificial Sequence
  Description of Artificial Sequence: Synthetic oligonucleotide
auuguagacuaugagugag

SEQ ID NO: 1977015 - RNA, 19 nt, Artificial Sequence
  Description of Artificial Sequence: Synthetic oligonucleotide
ugaacaucgucuuccaguc

SEQ ID NO: 1977016 - RNA, 19 nt, Artificial Sequence
  Description of Artificial Sequence: Synthetic oligonucleotide
uccaaugcggcaugaagug

SEQ ID NO: 1977017 - RNA, 19 nt, Artificial Sequence
  Description of Artificial Sequence: Synthetic oligonucleotide
ugacucauccacuugcaga

SEQ ID NO: 1977018 - RNA, 19 nt, Artificial Sequence
  Description of Artificial Sequence: Synthetic oligonucleotide
gacauugcaaauggcgugg

SEQ ID NO: 1977019 - RNA, 19 nt, Artificial Sequence
  Description of Artificial Sequence: Synthetic oligonucleotide
agaaagcaauaaucaaguc

SEQ ID NO: 1977020 - RNA, 19 nt, Artificial Sequence
  Description of Artificial Sequence: Synthetic oligonucleotide
agcauuuucagcauuuuca

SEQ ID NO: 1977021 - RNA, 19 nt, Artificial Sequence
  Description of Artificial Sequence: Synthetic oligonucleotide
caugaagugaacucaccug

SEQ ID NO: 1977022 - RNA, 19 nt, Artificial Sequence
  Description of Artificial Sequence: Synthetic oligonucleotide
aucuuuuagggacacugug

SEQ ID NO: 1977023 - RNA, 19 nt, Artificial Sequence
  Description of Artificial Sequence: Synthetic oligonucleotide
aguugcacagaauuaaaua

SEQ ID NO: 1977024 - RNA, 19 nt, Artificial Sequence
  Description of Artificial Sequence: Synthetic oligonucleotide
gcuaguugcuuuuaguucc

SEQ ID NO: 1977025 - RNA, 19 nt, Artificial Sequence
  Description of Artificial Sequence: Synthetic oligonucleotide
gugauaaagucugagaaga

SEQ ID NO: 1977026 - RNA, 19 nt, Artificial Sequence
  Description of Artificial Sequence: Synthetic oligonucleotide
uccguuauacucuguaagu

SEQ ID NO: 1977027 - RNA, 19 nt, Artificial Sequence
  Description of Artificial Sequence: Synthetic oligonucleotide
uccagucuauugaagaauc

SEQ ID NO: 1977028 - RNA, 19 nt, Artificial Sequence
  Description of Artificial Sequence: Synthetic oligonucleotide
auacucuguaaguuggucu

SEQ ID NO: 1977029 - RNA, 19 nt, Artificial Sequence
  Description of Artificial Sequence: Synthetic oligonucleotide
uucaaguucgagcuucagu

SEQ ID NO: 1977030 - RNA, 19 nt, Artificial Sequence
  Description of Artificial Sequence: Synthetic oligonucleotide
acuaugagugagcuaguug

SEQ ID NO: 1977031 - RNA, 19 nt, Artificial Sequence
  Description of Artificial Sequence: Synthetic oligonucleotide
uauuuggcuaauucugccu

SEQ ID NO: 1977032 - RNA, 19 nt, Artificial Sequence
  Description of Artificial Sequence: Synthetic oligonucleotide
uacuaguaugaucuucaca

SEQ ID NO: 1977033 - RNA, 19 nt, Artificial Sequence
  Description of Artificial Sequence: Synthetic oligonucleotide
auaaaauuguagacuauga

SEQ ID NO: 1977034 - RNA, 19 nt, Artificial Sequence
  Description of Artificial Sequence: Synthetic oligonucleotide
cuugcagaaguaucucugc

SEQ ID NO: 1977035 - RNA, 19 nt, Artificial Sequence
  Description of Artificial Sequence: Synthetic oligonucleotide
gaagaguaaauuaauuuua

SEQ ID NO: 1977036 - RNA, 19 nt, Artificial Sequence
  Description of Artificial Sequence: Synthetic oligonucleotide
uaauuuacucagcaacaau

SEQ ID NO: 1977037 - RNA, 19 nt, Artificial Sequence
  Description of Artificial Sequence: Synthetic oligonucleotide
guauuuggcuaauucugcc

SEQ ID NO: 1977038 - RNA, 19 nt, Artificial Sequence
  Description of Artificial Sequence: Synthetic oligonucleotide
ucugccuguaauacuuuca

SEQ ID NO: 1977039 - RNA, 19 nt, Artificial Sequence
  Description of Artificial Sequence: Synthetic oligonucleotide
cuucaaacauuucagaugu

SEQ ID NO: 1977040 - RNA, 19 nt, Artificial Sequence
  Description of Artificial Sequence: Synthetic oligonucleotide
gaaucuugugaacaucguc

SEQ ID NO: 1977041 - RNA, 19 nt, Artificial Sequence
  Description of Artificial Sequence: Synthetic oligonucleotide
cagaauuaaauauacacau

SEQ ID NO: 1977042 - RNA, 19 nt, Artificial Sequence
  Description of Artificial Sequence: Synthetic oligonucleotide
uuuugccucccacugggug

SEQ ID NO: 1977043 - RNA, 19 nt, Artificial Sequence
  Description of Artificial Sequence: Synthetic oligonucleotide
agcuucaaacauuucagau

SEQ ID NO: 1977044 - RNA, 19 nt, Artificial Sequence
  Description of Artificial Sequence: Synthetic oligonucleotide
uguagacuaugagugagcu

SEQ ID NO: 1977045 - RNA, 19 nt, Artificial Sequence
  Description of Artificial Sequence: Synthetic oligonucleotide
uugcagaaguaucucugcc

SEQ ID NO: 1977046 - RNA, 19 nt, Artificial Sequence
  Description of Artificial Sequence: Synthetic oligonucleotide
uacucuguaaguuggucuc

SEQ ID NO: 1977047 - RNA, 19 nt, Artificial Sequence
  Description of Artificial Sequence: Synthetic oligonucleotide
ucccacugggugaugacag

SEQ ID NO: 1977048 - RNA, 19 nt, Artificial Sequence
  Description of Artificial Sequence: Synthetic oligonucleotide
uuguagacuaugagugagc

SEQ ID NO: 1977049 - RNA, 19 nt, Artificial Sequence
  Description of Artificial Sequence: Synthetic oligonucleotide
uuggaagaguaaauuaauu

SEQ ID NO: 1977050 - RNA, 19 nt, Artificial Sequence
  Description of Artificial Sequence: Synthetic oligonucleotide
ucaauucucccaucuuuca

SEQ ID NO: 1977051 - RNA, 19 nt, Artificial Sequence
  Description of Artificial Sequence: Synthetic oligonucleotide
aaguucugaaaguccugug

SEQ ID NO: 1977052 - RNA, 19 nt, Artificial Sequence
  Description of Artificial Sequence: Synthetic oligonucleotide
uuuuacuaguaugaucuuc

SEQ ID NO: 1977053 - RNA, 19 nt, Artificial Sequence
  Description of Artificial Sequence: Synthetic oligonucleotide
aacucaccuggacugucag

SEQ ID NO: 1977054 - RNA, 19 nt, Artificial Sequence
  Description of Artificial Sequence: Synthetic oligonucleotide
aaucaccuacacuggucag

SEQ ID NO: 1977055 - RNA, 19 nt, Artificial Sequence
  Description of Artificial Sequence: Synthetic oligonucleotide
agaauucgauuccucuguc

SEQ ID NO: 1977056 - RNA, 19 nt, Artificial Sequence
  Description of Artificial Sequence: Synthetic oligonucleotide
agcgucuuuccuuucaagu

SEQ ID NO: 1977057 - RNA, 19 nt, Artificial Sequence
  Description of Artificial Sequence: Synthetic oligonucleotide
acucaggguuccuuuuccc

SEQ ID NO: 1977058 - RNA, 19 nt, Artificial Sequence
  Description of Artificial Sequence: Synthetic oligonucleotide
ugagcuaguugcuuuuagu

SEQ ID NO: 1977059 - RNA, 19 nt, Artificial Sequence
  Description of Artificial Sequence: Synthetic oligonucleotide
uguuccguuauacucugua

SEQ ID NO: 1977060 - RNA, 19 nt, Artificial Sequence
  Description of Artificial Sequence: Synthetic oligonucleotide
aguaaucaccuacacuggu

SEQ ID NO: 1977061 - RNA, 19 nt, Artificial Sequence
  Description of Artificial Sequence: Synthetic oligonucleotide
cucgggagcaggacaaugg

SEQ ID NO: 1977062 - RNA, 19 nt, Artificial Sequence
  Description of Artificial Sequence: Synthetic oligonucleotide
gaugucagcuguucauccc

SEQ ID NO: 1977063 - RNA, 19 nt, Artificial Sequence
  Description of Artificial Sequence: Synthetic oligonucleotide
ucagaugucagcuguucau

SEQ ID NO: 1977064 - RNA, 19 nt, Artificial Sequence
  Description of Artificial Sequence: Synthetic oligonucleotide
cagucuauugaagaauccc

SEQ ID NO: 1977065 - RNA, 19 nt, Artificial Sequence
  Description of Artificial Sequence: Synthetic oligonucleotide
aguaucucugccuugucuu

SEQ ID NO: 1977066 - RNA, 19 nt, Artificial Sequence
  Description of Artificial Sequence: Synthetic oligonucleotide
uaugagugagcuaguugcu

SEQ ID NO: 1977067 - RNA, 19 nt, Artificial Sequence
  Description of Artificial Sequence: Synthetic oligonucleotide
uuagggacacugugagagg

SEQ ID NO: 1977068 - RNA, 19 nt, Artificial Sequence
  Description of Artificial Sequence: Synthetic oligonucleotide
auaaagucugagaagaauu

SEQ ID NO: 1977069 - RNA, 19 nt, Artificial Sequence
  Description of Artificial Sequence: Synthetic oligonucleotide
agcuguucaucccucuguc

SEQ ID NO: 1977070 - RNA, 19 nt, Artificial Sequence
  Description of Artificial Sequence: Synthetic oligonucleotide
aagucauaagaaguuugga

SEQ ID NO: 1977071 - RNA, 19 nt, Artificial Sequence
  Description of Artificial Sequence: Synthetic oligonucleotide
aauaagccaaaagaacaua

SEQ ID NO: 1977072 - RNA, 19 nt, Artificial Sequence
  Description of Artificial Sequence: Synthetic oligonucleotide
ugugacucauccacuugca

SEQ ID NO: 1977073 - RNA, 19 nt, Artificial Sequence
  Description of Artificial Sequence: Synthetic oligonucleotide
ugugcucgggagcaggaca

SEQ ID NO: 1977074 - RNA, 19 nt, Artificial Sequence
  Description of Artificial Sequence: Synthetic oligonucleotide
cucuaauaagaaucuugug

SEQ ID NO: 1977075 - RNA, 19 nt, Artificial Sequence
  Description of Artificial Sequence: Synthetic oligonucleotide
uuguuggacauugcaaaug

SEQ ID NO: 1977076 - RNA, 19 nt, Artificial Sequence
  Description of Artificial Sequence: Synthetic oligonucleotide
caugugauaaagucugaga

SEQ ID NO: 1977077 - RNA, 19 nt, Artificial Sequence
  Description of Artificial Sequence: Synthetic oligonucleotide
auuucuccuuccuggagca

SEQ ID NO: 1977078 - RNA, 19 nt, Artificial Sequence
  Description of Artificial Sequence: Synthetic oligonucleotide
ugugaacaucgucuuccag

SEQ ID NO: 1977079 - RNA, 19 nt, Artificial Sequence
  Description of Artificial Sequence: Synthetic oligonucleotide
uguaaguuggucucuucuu

SEQ ID NO: 1977080 - RNA, 19 nt, Artificial Sequence
  Description of Artificial Sequence: Synthetic oligonucleotide
aaugccuucucaagaucag

SEQ ID NO: 1977081 - RNA, 19 nt, Artificial Sequence
  Description of Artificial Sequence: Synthetic oligonucleotide
uuauacucuguaaguuggu

SEQ ID NO: 1977082 - RNA, 19 nt, Artificial Sequence
  Description of Artificial Sequence: Synthetic oligonucleotide
agcaacaaugccuucucaa

SEQ ID NO: 1977083 - RNA, 19 nt, Artificial Sequence
  Description of Artificial Sequence: Synthetic oligonucleotide
agcuuugagcuucugaauu

SEQ ID NO: 1977084 - RNA, 19 nt, Artificial Sequence
  Description of Artificial Sequence: Synthetic oligonucleotide
gaaaaucuuuuagggacac

SEQ ID NO: 1977085 - RNA, 19 nt, Artificial Sequence
  Description of Artificial Sequence: Synthetic oligonucleotide
auucuauauuuucuuuuaa

SEQ ID NO: 1977086 - RNA, 19 nt, Artificial Sequence
  Description of Artificial Sequence: Synthetic oligonucleotide
auucuaauuuacucagcaa

SEQ ID NO: 1977087 - RNA, 19 nt, Artificial Sequence
  Description of Artificial Sequence: Synthetic oligonucleotide
uucaacaauuguccauuuc

SEQ ID NO: 1977088 - RNA, 19 nt, Artificial Sequence
  Description of Artificial Sequence: Synthetic oligonucleotide
uucagcgucuuuccuuuca

SEQ ID NO: 1977089 - RNA, 19 nt, Artificial Sequence
  Description of Artificial Sequence: Synthetic oligonucleotide
caauucucccaucuuucag

SEQ ID NO: 1977090 - RNA, 19 nt, Artificial Sequence
  Description of Artificial Sequence: Synthetic oligonucleotide
auggucuguuccguuauac

SEQ ID NO: 1977091 - RNA, 19 nt, Artificial Sequence
  Description of Artificial Sequence: Synthetic oligonucleotide
agacucaggguuccuuuuc

SEQ ID NO: 1977092 - RNA, 19 nt, Artificial Sequence
  Description of Artificial Sequence: Synthetic oligonucleotide
aaucuuuuagggacacugu

SEQ ID NO: 1977093 - RNA, 19 nt, Artificial Sequence
  Description of Artificial Sequence: Synthetic oligonucleotide
acaauucagcaguugcaca

SEQ ID NO: 1977094 - RNA, 19 nt, Artificial Sequence
  Description of Artificial Sequence: Synthetic oligonucleotide
uucuugaugcucugugacu

SEQ ID NO: 1977095 - RNA, 19 nt, Artificial Sequence
  Description of Artificial Sequence: Synthetic oligonucleotide
cacaauucagcaguugcac

SEQ ID NO: 1977096 - RNA, 19 nt, Artificial Sequence
  Description of Artificial Sequence: Synthetic oligonucleotide
agaaguaucucugccuugu

SEQ ID NO: 1977097 - RNA, 19 nt, Artificial Sequence
  Description of Artificial Sequence: Synthetic oligonucleotide
auaagccaaaagaacauaa

SEQ ID NO: 1977098 - RNA, 19 nt, Artificial Sequence
  Description of Artificial Sequence: Synthetic oligonucleotide
gagguuugucuuuucccug

SEQ ID NO: 1977099 - RNA, 19 nt, Artificial Sequence
  Description of Artificial Sequence: Synthetic oligonucleotide
caaugccuucucaagauca

SEQ ID NO: 1977100 - RNA, 19 nt, Artificial Sequence
  Description of Artificial Sequence: Synthetic oligonucleotide
ugcggcaugaagugaacuc

SEQ ID NO: 1977101 - RNA, 19 nt, Artificial Sequence
  Description of Artificial Sequence: Synthetic oligonucleotide
aauggcgugggaggauuuc

SEQ ID NO: 1977102 - RNA, 19 nt, Artificial Sequence
  Description of Artificial Sequence: Synthetic oligonucleotide
aaugcggcaugaagugaac

SEQ ID NO: 1977103 - RNA, 19 nt, Artificial Sequence
  Description of Artificial Sequence: Synthetic oligonucleotide
gcuuuuaguuccuucaaca

SEQ ID NO: 1977104 - RNA, 19 nt, Artificial Sequence
  Description of Artificial Sequence: Synthetic oligonucleotide
uggcaagggaagcugcucu

SEQ ID NO: 1977105 - RNA, 19 nt, Artificial Sequence
  Description of Artificial Sequence: Synthetic oligonucleotide
uuacuaguaugaucuucac

SEQ ID NO: 1977106 - RNA, 19 nt, Artificial Sequence
  Description of Artificial Sequence: Synthetic oligonucleotide
uuuggacagaaagcaauaa

SEQ ID NO: 1977107 - RNA, 19 nt, Artificial Sequence
  Description of Artificial Sequence: Synthetic oligonucleotide
acuugcagaaguaucucug

SEQ ID NO: 1977108 - RNA, 19 nt, Artificial Sequence
  Description of Artificial Sequence: Synthetic oligonucleotide
agucucucaauucucccau

SEQ ID NO: 1977109 - RNA, 19 nt, Artificial Sequence
  Description of Artificial Sequence: Synthetic oligonucleotide
uauacucuguaaguugguc

SEQ ID NO: 1977110 - RNA, 19 nt, Artificial Sequence
  Description of Artificial Sequence: Synthetic oligonucleotide
caaaguucugaaaguccug

SEQ ID NO: 1977111 - RNA, 19 nt, Artificial Sequence
  Description of Artificial Sequence: Synthetic oligonucleotide
uaugaucuucacacugaaa

SEQ ID NO: 1977112 - RNA, 19 nt, Artificial Sequence
  Description of Artificial Sequence: Synthetic oligonucleotide
ugcucuucauauucuaauu

SEQ ID NO: 1977113 - RNA, 19 nt, Artificial Sequence
  Description of Artificial Sequence: Synthetic oligonucleotide
uucuuguuccaaugcggca

SEQ ID NO: 1977114 - RNA, 19 nt, Artificial Sequence
  Description of Artificial Sequence: Synthetic oligonucleotide
uuuuagggacacugugaga

SEQ ID NO: 1977115 - RNA, 19 nt, Artificial Sequence
  Description of Artificial Sequence: Synthetic oligonucleotide
aguaugaucuucacacuga

SEQ ID NO: 1977116 - RNA, 19 nt, Artificial Sequence
  Description of Artificial Sequence: Synthetic oligonucleotide
uuuggcuaauucugccugu

SEQ ID NO: 1977117 - RNA, 19 nt, Artificial Sequence
  Description of Artificial Sequence: Synthetic oligonucleotide
uuauaacuuuugacugagu

SEQ ID NO: 1977118 - RNA, 19 nt, Artificial Sequence
  Description of Artificial Sequence: Synthetic oligonucleotide
gcugguauucuauauuuuc

SEQ ID NO: 1977119 - RNA, 19 nt, Artificial Sequence
  Description of Artificial Sequence: Synthetic oligonucleotide
ugggugaugacagcuuuga

SEQ ID NO: 1977120 - RNA, 19 nt, Artificial Sequence
  Description of Artificial Sequence: Synthetic oligonucleotide
cuucucaagaucagcuuca

SEQ ID NO: 1977121 - RNA, 19 nt, Artificial Sequence
  Description of Artificial Sequence: Synthetic oligonucleotide
ugcugaucucaaaggcugc

SEQ ID NO: 1977122 - RNA, 19 nt, Artificial Sequence
  Description of Artificial Sequence: Synthetic oligonucleotide
cuguaguaaucaccuacac

SEQ ID NO: 1977123 - RNA, 19 nt, Artificial Sequence
  Description of Artificial Sequence: Synthetic oligonucleotide
ggacagaaagcaauaauca

SEQ ID NO: 1977124 - RNA, 19 nt, Artificial Sequence
  Description of Artificial Sequence: Synthetic oligonucleotide
cccaucaugugauaaaguc

SEQ ID NO: 1977125 - RNA, 19 nt, Artificial Sequence
  Description of Artificial Sequence: Synthetic oligonucleotide
ugcugguucuucuuuuauc

SEQ ID NO: 1977126 - RNA, 19 nt, Artificial Sequence
  Description of Artificial Sequence: Synthetic oligonucleotide
gacagcuuugagcuucuga

SEQ ID NO: 1977127 - RNA, 19 nt, Artificial Sequence
  Description of Artificial Sequence: Synthetic oligonucleotide
gguauuuggcuaauucugc

SEQ ID NO: 1977128 - RNA, 19 nt, Artificial Sequence
  Description of Artificial Sequence: Synthetic oligonucleotide
uugugaacaucgucuucca

SEQ ID NO: 1977129 - RNA, 19 nt, Artificial Sequence
  Description of Artificial Sequence: Synthetic oligonucleotide
cauaauccuguuugugcuc

SEQ ID NO: 1977130 - RNA, 19 nt, Artificial Sequence
  Description of Artificial Sequence: Synthetic oligonucleotide
gugaacaucgucuuccagu

SEQ ID NO: 1977131 - RNA, 19 nt, Artificial Sequence
  Description of Artificial Sequence: Synthetic oligonucleotide
ggacauugcaaauggcgug

SEQ ID NO: 1977132 - RNA, 19 nt, Artificial Sequence
  Description of Artificial Sequence: Synthetic oligonucleotide
cuuuucccuuuucugccgc

SEQ ID NO: 1977133 - RNA, 19 nt, Artificial Sequence
  Description of Artificial Sequence: Synthetic oligonucleotide
uggucuguuccguuauacu

SEQ ID NO: 1977134 - RNA, 19 nt, Artificial Sequence
  Description of Artificial Sequence: Synthetic oligonucleotide
caacaaugccuucucaaga

SEQ ID NO: 1977135 - RNA, 19 nt, Artificial Sequence
  Description of Artificial Sequence: Synthetic oligonucleotide
ugcaaauggcgugggagga

SEQ ID NO: 1977136 - RNA, 19 nt, Artificial Sequence
  Description of Artificial Sequence: Synthetic oligonucleotide
gugagcuaguugcuuuuag

SEQ ID NO: 1977137 - RNA, 19 nt, Artificial Sequence
  Description of Artificial Sequence: Synthetic oligonucleotide
ucagaccccacuuccuggu

SEQ ID NO: 1977138 - RNA, 19 nt, Artificial Sequence
  Description of Artificial Sequence: Synthetic oligonucleotide
gauaaagucugagaagaau

SEQ ID NO: 1977139 - RNA, 19 nt, Artificial Sequence
  Description of Artificial Sequence: Synthetic oligonucleotide
uugaagcauuuucagcauu

SEQ ID NO: 1977140 - RNA, 19 nt, Artificial Sequence
  Description of Artificial Sequence: Synthetic oligonucleotide
cuucauauucuaauuuacu

SEQ ID NO: 1977141 - RNA, 19 nt, Artificial Sequence
  Description of Artificial Sequence: Synthetic oligonucleotide
agaucagcuucaaacauuu

SEQ ID NO: 1977142 - RNA, 19 nt, Artificial Sequence
  Description of Artificial Sequence: Synthetic oligonucleotide
aucuugugaacaucgucuu

SEQ ID NO: 1977143 - RNA, 19 nt, Artificial Sequence
  Description of Artificial Sequence: Synthetic oligonucleotide
ucagacucaggguuccuuu

SEQ ID NO: 1977144 - RNA, 19 nt, Artificial Sequence
  Description of Artificial Sequence: Synthetic oligonucleotide
cacuuccugguugugcucg

SEQ ID NO: 1977145 - RNA, 19 nt, Artificial Sequence
  Description of Artificial Sequence: Synthetic oligonucleotide
gccaaaagaacauaaaauu

SEQ ID NO: 1977146 - RNA, 19 nt, Artificial Sequence
  Description of Artificial Sequence: Synthetic oligonucleotide
uucccgagacuccuucugu

SEQ ID NO: 1977147 - RNA, 19 nt, Artificial Sequence
  Description of Artificial Sequence: Synthetic oligonucleotide
cauucuugaugcucuguga

SEQ ID NO: 1977148 - RNA, 19 nt, Artificial Sequence
  Description of Artificial Sequence: Synthetic oligonucleotide
ugccgcucugguauuuggc

SEQ ID NO: 1977149 - RNA, 19 nt, Artificial Sequence
  Description of Artificial Sequence: Synthetic oligonucleotide
cugaaaguccugugugcug

SEQ ID NO: 1977150 - RNA, 19 nt, Artificial Sequence
  Description of Artificial Sequence: Synthetic oligonucleotide
uuccugguugugcucggga

SEQ ID NO: 1977151 - RNA, 19 nt, Artificial Sequence
  Description of Artificial Sequence: Synthetic oligonucleotide
agaccccacuuccugguug

SEQ ID NO: 1977152 - RNA, 19 nt, Artificial Sequence
  Description of Artificial Sequence: Synthetic oligonucleotide
ucuguaaguuggucucuuc

SEQ ID NO: 1977153 - RNA, 19 nt, Artificial Sequence
  Description of Artificial Sequence: Synthetic oligonucleotide
uuucaaguucgagcuucag

SEQ ID NO: 1977154 - RNA, 19 nt, Artificial Sequence
  Description of Artificial Sequence: Synthetic oligonucleotide
guaugaucuucacacugaa

SEQ ID NO: 1977155 - RNA, 19 nt, Artificial Sequence
  Description of Artificial Sequence: Synthetic oligonucleotide
cugguauuuggcuaauucu

SEQ ID NO: 1977156 - RNA, 19 nt, Artificial Sequence
  Description of Artificial Sequence: Synthetic oligonucleotide
caucccucugucuccacuc

SEQ ID NO: 1977157 - RNA, 19 nt, Artificial Sequence
  Description of Artificial Sequence: Synthetic oligonucleotide
ugcugguauucuauauuuu

SEQ ID NO: 1977158 - RNA, 19 nt, Artificial Sequence
  Description of Artificial Sequence: Synthetic oligonucleotide
aaguccugcugguauucua

SEQ ID NO: 1977159 - RNA, 19 nt, Artificial Sequence
  Description of Artificial Sequence: Synthetic oligonucleotide
caaugcggcaugaagugaa

SEQ ID NO: 1977160 - RNA, 19 nt, Artificial Sequence
  Description of Artificial Sequence: Synthetic oligonucleotide
aauggucuguuccguuaua

SEQ ID NO: 1977161 - RNA, 19 nt, Artificial Sequence
  Description of Artificial Sequence: Synthetic oligonucleotide
gagcuaguugcuuuuaguu

SEQ ID NO: 1977162 - RNA, 19 nt, Artificial Sequence
  Description of Artificial Sequence: Synthetic oligonucleotide
cguuauacucuguaaguug

SEQ ID NO: 1977163 - RNA, 19 nt, Artificial Sequence
  Description of Artificial Sequence: Synthetic oligonucleotide
ugugagagguuugucuuuu

SEQ ID NO: 1977164 - RNA, 19 nt, Artificial Sequence
  Description of Artificial Sequence: Synthetic oligonucleotide
acauugcaaauggcguggg

SEQ ID NO: 1977165 - RNA, 19 nt, Artificial Sequence
  Description of Artificial Sequence: Synthetic oligonucleotide
uucaaacauuucagauguc

SEQ ID NO: 1977166 - RNA, 19 nt, Artificial Sequence
  Description of Artificial Sequence: Synthetic oligonucleotide
ucagcucauucuugaugcu

SEQ ID NO: 1977167 - RNA, 19 nt, Artificial Sequence
  Description of Artificial Sequence: Synthetic oligonucleotide
aucaccuacacuggucaga

SEQ ID NO: 1977168 - RNA, 19 nt, Artificial Sequence
  Description of Artificial Sequence: Synthetic oligonucleotide
cuggucagacucaggguuc

SEQ ID NO: 1977169 - RNA, 19 nt, Artificial Sequence
  Description of Artificial Sequence: Synthetic oligonucleotide
guuccguuauacucuguaa

SEQ ID NO: 1977170 - RNA, 19 nt, Artificial Sequence
  Description of Artificial Sequence: Synthetic oligonucleotide
gaauucgauuccucugucu

SEQ ID NO: 1977171 - RNA, 19 nt, Artificial Sequence
  Description of Artificial Sequence: Synthetic oligonucleotide
caauuguccauuucuugcu

SEQ ID NO: 1977172 - RNA, 19 nt, Artificial Sequence
  Description of Artificial Sequence: Synthetic oligonucleotide
cuacacuggucagacucag

SEQ ID NO: 1977173 - RNA, 19 nt, Artificial Sequence
  Description of Artificial Sequence: Synthetic oligonucleotide
guuggacauugcaaauggc

SEQ ID NO: 1977174 - RNA, 19 nt, Artificial Sequence
  Description of Artificial Sequence: Synthetic oligonucleotide
uggucagacucaggguucc

SEQ ID NO: 1977175 - RNA, 19 nt, Artificial Sequence
  Description of Artificial Sequence: Synthetic oligonucleotide
gacugucagcucauucuug

SEQ ID NO: 1977176 - RNA, 19 nt, Artificial Sequence
  Description of Artificial Sequence: Synthetic oligonucleotide
agaaucuugugaacaucgu

SEQ ID NO: 1977177 - RNA, 19 nt, Artificial Sequence
  Description of Artificial Sequence: Synthetic oligonucleotide
gaaguaucucugccuuguc

SEQ ID NO: 1977178 - RNA, 19 nt, Artificial Sequence
  Description of Artificial Sequence: Synthetic oligonucleotide
cugggugaugacagcuuug

SEQ ID NO: 1977179 - RNA, 19 nt, Artificial Sequence
  Description of Artificial Sequence: Synthetic oligonucleotide
cagaugucagcuguucauc

SEQ ID NO: 1977180 - RNA, 19 nt, Artificial Sequence
  Description of Artificial Sequence: Synthetic oligonucleotide
cuggacugucagcucauuc

SEQ ID NO: 1977181 - RNA, 19 nt, Artificial Sequence
  Description of Artificial Sequence: Synthetic oligonucleotide
cugccgcucugguauuugg

SEQ ID NO: 1977182 - RNA, 19 nt, Artificial Sequence
  Description of Artificial Sequence: Synthetic oligonucleotide
gaucucaaaggcugcugua

SEQ ID NO: 1977183 - RNA, 19 nt, Artificial Sequence
  Description of Artificial Sequence: Synthetic oligonucleotide
agcugcucuuguuggacau

SEQ ID NO: 1977184 - RNA, 19 nt, Artificial Sequence
  Description of Artificial Sequence: Synthetic oligonucleotide
acauaaaauuguagacuau

SEQ ID NO: 1977185 - RNA, 19 nt, Artificial Sequence
  Description of Artificial Sequence: Synthetic oligonucleotide
ugaacucaccuggacuguc

SEQ ID NO: 1977186 - RNA, 19 nt, Artificial Sequence
  Description of Artificial Sequence: Synthetic oligonucleotide
guaaguuggucucuucuuu

SEQ ID NO: 1977187 - RNA, 19 nt, Artificial Sequence
  Description of Artificial Sequence: Synthetic oligonucleotide
ccuuuucccuuuucugccg

SEQ ID NO: 1977188 - RNA, 19 nt, Artificial Sequence
  Description of Artificial Sequence: Synthetic oligonucleotide
cucccaucuuucagacccc

SEQ ID NO: 1977189 - RNA, 19 nt, Artificial Sequence
  Description of Artificial Sequence: Synthetic oligonucleotide
uguuccaaugcggcaugaa

SEQ ID NO: 1977190 - RNA, 19 nt, Artificial Sequence
  Description of Artificial Sequence: Synthetic oligonucleotide
ucugccgcucugguauuug

SEQ ID NO: 1977191 - RNA, 19 nt, Artificial Sequence
  Description of Artificial Sequence: Synthetic oligonucleotide
cuguaaguuggucucuucu

SEQ ID NO: 1977192 - RNA, 19 nt, Artificial Sequence
  Description of Artificial Sequence: Synthetic oligonucleotide
aguucgagcuucagucucu

SEQ ID NO: 1977193 - RNA, 19 nt, Artificial Sequence
  Description of Artificial Sequence: Synthetic oligonucleotide
gucuguuccguuauacucu

SEQ ID NO: 1977194 - RNA, 19 nt, Artificial Sequence
  Description of Artificial Sequence: Synthetic oligonucleotide
gaacucaccuggacuguca

SEQ ID NO: 1977195 - RNA, 19 nt, Artificial Sequence
  Description of Artificial Sequence: Synthetic oligonucleotide
cuaguaugaucuucacacu

SEQ ID NO: 1977196 - RNA, 19 nt, Artificial Sequence
  Description of Artificial Sequence: Synthetic oligonucleotide
agcaggacaauggucuguu

SEQ ID NO: 1977197 - RNA, 19 nt, Artificial Sequence
  Description of Artificial Sequence: Synthetic oligonucleotide
gcaugaagugaacucaccu

SEQ ID NO: 1977198 - RNA, 19 nt, Artificial Sequence
  Description of Artificial Sequence: Synthetic oligonucleotide
cugguugugcucgggagca

SEQ ID NO: 1977199 - RNA, 19 nt, Artificial Sequence
  Description of Artificial Sequence: Synthetic oligonucleotide
aacuuuugacugaguugaa

SEQ ID NO: 1977200 - RNA, 19 nt, Artificial Sequence
  Description of Artificial Sequence: Synthetic oligonucleotide
ggagcaggacaauggucug

SEQ ID NO: 1977201 - RNA, 19 nt, Artificial Sequence
  Description of Artificial Sequence: Synthetic oligonucleotide
aucaugugauaaagucuga

SEQ ID NO: 1977202 - RNA, 19 nt, Artificial Sequence
  Description of Artificial Sequence: Synthetic oligonucleotide
ccugguugugcucgggagc

SEQ ID NO: 1977203 - RNA, 19 nt, Artificial Sequence
  Description of Artificial Sequence: Synthetic oligonucleotide
uuguuccaaugcggcauga

SEQ ID NO: 1977204 - RNA, 19 nt, Artificial Sequence
  Description of Artificial Sequence: Synthetic oligonucleotide
cugcugguauucuauauuu

SEQ ID NO: 1977205 - RNA, 19 nt, Artificial Sequence
  Description of Artificial Sequence: Synthetic oligonucleotide
augagugagcuaguugcuu

SEQ ID NO: 1977206 - RNA, 19 nt, Artificial Sequence
  Description of Artificial Sequence: Synthetic oligonucleotide
uuucagcgucuuuccuuuc

SEQ ID NO: 1977207 - RNA, 19 nt, Artificial Sequence
  Description of Artificial Sequence: Synthetic oligonucleotide
cuuccugguugugcucggg

SEQ ID NO: 1977208 - RNA, 19 nt, Artificial Sequence
  Description of Artificial Sequence: Synthetic oligonucleotide
cucauccacuugcagaagu

SEQ ID NO: 1977209 - RNA, 19 nt, Artificial Sequence
  Description of Artificial Sequence: Synthetic oligonucleotide
guagacuaugagugagcua

SEQ ID NO: 1977210 - RNA, 19 nt, Artificial Sequence
  Description of Artificial Sequence: Synthetic oligonucleotide
augcggcaugaagugaacu

SEQ ID NO: 1977211 - RNA, 19 nt, Artificial Sequence
  Description of Artificial Sequence: Synthetic oligonucleotide
uugugcucgggagcaggac

SEQ ID NO: 1977212 - RNA, 19 nt, Artificial Sequence
  Description of Artificial Sequence: Synthetic oligonucleotide
ggcaugaagugaacucacc

SEQ ID NO: 1977213 - RNA, 19 nt, Artificial Sequence
  Description of Artificial Sequence: Synthetic oligonucleotide
cccgagacuccuucugugc

SEQ ID NO: 1977214 - RNA, 19 nt, Artificial Sequence
  Description of Artificial Sequence: Synthetic oligonucleotide
gucugagaagaauucgauu

SEQ ID NO: 1977215 - RNA, 19 nt, Artificial Sequence
  Description of Artificial Sequence: Synthetic oligonucleotide
cauugcaaauggcguggga

SEQ ID NO: 1977216 - RNA, 19 nt, Artificial Sequence
  Description of Artificial Sequence: Synthetic oligonucleotide
gucucucaauucucccauc

SEQ ID NO: 1977217 - RNA, 19 nt, Artificial Sequence
  Description of Artificial Sequence: Synthetic oligonucleotide
aaauggcgugggaggauuu

SEQ ID NO: 1977218 - RNA, 19 nt, Artificial Sequence
  Description of Artificial Sequence: Synthetic oligonucleotide
cucaggguuccuuuucccu

SEQ ID NO: 1977219 - RNA, 19 nt, Artificial Sequence
  Description of Artificial Sequence: Synthetic oligonucleotide
ccaucaugugauaaagucu

SEQ ID NO: 1977220 - RNA, 19 nt, Artificial Sequence
  Description of Artificial Sequence: Synthetic oligonucleotide
cagcaguugcacagaauua

SEQ ID NO: 1977221 - RNA, 19 nt, Artificial Sequence
  Description of Artificial Sequence: Synthetic oligonucleotide
agugagcuaguugcuuuua

SEQ ID NO: 1977222 - RNA, 19 nt, Artificial Sequence
  Description of Artificial Sequence: Synthetic oligonucleotide
ggcuaauucugccuguaau

SEQ ID NO: 1977223 - RNA, 19 nt, Artificial Sequence
  Description of Artificial Sequence: Synthetic oligonucleotide
gcggcaugaagugaacuca

SEQ ID NO: 1977224 - RNA, 19 nt, Artificial Sequence
  Description of Artificial Sequence: Synthetic oligonucleotide
cuaguugcuuuuaguuccu

SEQ ID NO: 1977225 - RNA, 19 nt, Artificial Sequence
  Description of Artificial Sequence: Synthetic oligonucleotide
uucaucccucugucuccac

SEQ ID NO: 1977226 - RNA, 19 nt, Artificial Sequence
  Description of Artificial Sequence: Synthetic oligonucleotide
uuucugccgcucugguauu

SEQ ID NO: 1977227 - RNA, 19 nt, Artificial Sequence
  Description of Artificial Sequence: Synthetic oligonucleotide
gagugagcuaguugcuuuu

SEQ ID NO: 1977228 - RNA, 19 nt, Artificial Sequence
  Description of Artificial Sequence: Synthetic oligonucleotide
agacuaugagugagcuagu

SEQ ID NO: 1977229 - RNA, 19 nt, Artificial Sequence
  Description of Artificial Sequence: Synthetic oligonucleotide
gccaguuuucuucccgaga

SEQ ID NO: 1977230 - RNA, 19 nt, Artificial Sequence
  Description of Artificial Sequence: Synthetic oligonucleotide
caaaggcugcuguaguaau

SEQ ID NO: 1977231 - RNA, 19 nt, Artificial Sequence
  Description of Artificial Sequence: Synthetic oligonucleotide
gcaagggaagcugcucuug

SEQ ID NO: 1977232 - RNA, 19 nt, Artificial Sequence
  Description of Artificial Sequence: Synthetic oligonucleotide
acugcacaauucagcaguu

SEQ ID NO: 1977233 - RNA, 19 nt, Artificial Sequence
  Description of Artificial Sequence: Synthetic oligonucleotide
cagcaacaaugccuucuca

SEQ ID NO: 1977234 - RNA, 19 nt, Artificial Sequence
  Description of Artificial Sequence: Synthetic oligonucleotide
cucccacugggugaugaca

SEQ ID NO: 1977235 - RNA, 19 nt, Artificial Sequence
  Description of Artificial Sequence: Synthetic oligonucleotide
acaucgucuuccagucuau

SEQ ID NO: 1977236 - RNA, 19 nt, Artificial Sequence
  Description of Artificial Sequence: Synthetic oligonucleotide
caauggucuguuccguuau

SEQ ID NO: 1977237 - RNA, 19 nt, Artificial Sequence
  Description of Artificial Sequence: Synthetic oligonucleotide
gacuaugagugagcuaguu

SEQ ID NO: 1977238 - RNA, 19 nt, Artificial Sequence
  Description of Artificial Sequence: Synthetic oligonucleotide
cucugugacucauccacuu

SEQ ID NO: 1977239 - RNA, 19 nt, Artificial Sequence
  Description of Artificial Sequence: Synthetic oligonucleotide
gugcucgggagcaggacaa

SEQ ID NO: 1977240 - RNA, 19 nt, Artificial Sequence
  Description of Artificial Sequence: Synthetic oligonucleotide
aggguuccuuuucccuuuu

SEQ ID NO: 1977241 - RNA, 19 nt, Artificial Sequence
  Description of Artificial Sequence: Synthetic oligonucleotide
cggcaugaagugaacucac

SEQ ID NO: 1977242 - RNA, 19 nt, Artificial Sequence
  Description of Artificial Sequence: Synthetic oligonucleotide
gagcaggacaauggucugu

SEQ ID NO: 1977243 - RNA, 19 nt, Artificial Sequence
  Description of Artificial Sequence: Synthetic oligonucleotide
gcucgggagcaggacaaug

SEQ ID NO: 1977244 - RNA, 19 nt, Artificial Sequence
  Description of Artificial Sequence: Synthetic oligonucleotide
gcgucuuuccuuucaaguu

SEQ ID NO: 1977245 - RNA, 19 nt, Artificial Sequence
  Description of Artificial Sequence: Synthetic oligonucleotide
ccaucuuucagaccccacu

SEQ ID NO: 1977246 - RNA, 19 nt, Artificial Sequence
  Description of Artificial Sequence: Synthetic oligonucleotide
caguuuucuucccgagacu

SEQ ID NO: 1977247 - RNA, 19 nt, Artificial Sequence
  Description of Artificial Sequence: Synthetic oligonucleotide
uucugccgcucugguauuu

SEQ ID NO: 1977248 - RNA, 19 nt, Artificial Sequence
  Description of Artificial Sequence: Synthetic oligonucleotide
gccgcucugguauuuggcu

SEQ ID NO: 1977249 - RNA, 19 nt, Artificial Sequence
  Description of Artificial Sequence: Synthetic oligonucleotide
cauccacuugcagaaguau

SEQ ID NO: 1977250 - RNA, 19 nt, Artificial Sequence
  Description of Artificial Sequence: Synthetic oligonucleotide
ccuguaauacuuucacuuu

SEQ ID NO: 1977251 - RNA, 19 nt, Artificial Sequence
  Description of Artificial Sequence: Synthetic oligonucleotide
ugcucgggagcaggacaau

SEQ ID NO: 1977252 - RNA, 19 nt, Artificial Sequence
  Description of Artificial Sequence: Synthetic oligonucleotide
gacugaguugaagcauuuu

SEQ ID NO: 1977253 - RNA, 19 nt, Artificial Sequence
  Description of Artificial Sequence: Synthetic oligonucleotide
agggacacugugagagguu

SEQ ID NO: 1977254 - RNA, 19 nt, Artificial Sequence
  Description of Artificial Sequence: Synthetic oligonucleotide
cugugagagguuugucuuu

SEQ ID NO: 1977255 - RNA, 19 nt, Artificial Sequence
  Description of Artificial Sequence: Synthetic oligonucleotide
cucucaauucucccaucuu

SEQ ID NO: 1977256 - RNA, 19 nt, Artificial Sequence
  Description of Artificial Sequence: Synthetic oligonucleotide
caaauggcgugggaggauu

SEQ ID NO: 1977257 - RNA, 19 nt, Artificial Sequence
  Description of Artificial Sequence: Synthetic oligonucleotide
gcuguucaucccucugucu

SEQ ID NO: 1977258 - RNA, 19 nt, Artificial Sequence
  Description of Artificial Sequence: Synthetic oligonucleotide
cagacucaggguuccuuuu

SEQ ID NO: 1977259 - RNA, 19 nt, Artificial Sequence
  Description of Artificial Sequence: Synthetic oligonucleotide
cgucuuccagucuauugaa

SEQ ID NO: 1977260 - RNA, 19 nt, Artificial Sequence
  Description of Artificial Sequence: Synthetic oligonucleotide
cacugggugaugacagcuu

SEQ ID NO: 1977261 - RNA, 19 nt, Artificial Sequence
  Description of Artificial Sequence: Synthetic oligonucleotide
cgcucugguauuuggcuaa

SEQ ID NO: 1977262 - RNA, 19 nt, Artificial Sequence
  Description of Artificial Sequence: Synthetic oligonucleotide
ccaaugcggcaugaaguga

SEQ ID NO: 1977263 - RNA, 19 nt, Artificial Sequence
  Description of Artificial Sequence: Synthetic oligonucleotide
ccugcugguauucuauauu

SEQ ID NO: 1977264 - RNA, 19 nt, Artificial Sequence
  Description of Artificial Sequence: Synthetic oligonucleotide
cucuguaaguuggucucuu

SEQ ID NO: 1977265 - RNA, 19 nt, Artificial Sequence
  Description of Artificial Sequence: Synthetic oligonucleotide
ccugugugcugaucucaaa

SEQ ID NO: 1977266 - RNA, 19 nt, Artificial Sequence
  Description of Artificial Sequence: Synthetic oligonucleotide
ggcaagggaagcugcucuu

SEQ ID NO: 1977267 - RNA, 19 nt, Artificial Sequence
  Description of Artificial Sequence: Synthetic oligonucleotide
ccgcucugguauuuggcua

SEQ ID NO: 1977268 - RNA, 19 nt, Artificial Sequence
  Description of Artificial Sequence: Synthetic oligonucleotide
ccgagacuccuucugugcu

SEQ ID NO: 1977269 - RNA, 19 nt, Artificial Sequence
  Description of Artificial Sequence: Synthetic oligonucleotide
ccccaucaugugauaaagu

SEQ ID NO: 1977270 - RNA, 19 nt, Artificial Sequence
  Description of Artificial Sequence: Synthetic oligonucleotide
ccguuauacucuguaaguu

SEQ ID NO: 1977271 - RNA, 19 nt, Artificial Sequence
  Description of Artificial Sequence: Synthetic oligonucleotide
caccuacacuggucagacu

SEQ ID NO: 1977272 - RNA, 19 nt, Artificial Sequence
  Description of Artificial Sequence: Synthetic oligonucleotide
gcaaauggcgugggaggau

SEQ ID NO: 1977273 - RNA, 19 nt, Artificial Sequence
  Description of Artificial Sequence: Synthetic oligonucleotide
cagaccccacuuccugguu

SEQ ID NO: 1977274 - RNA, 19 nt, Artificial Sequence
  Description of Artificial Sequence: Synthetic oligonucleotide
ggucagacucaggguuccu

SEQ ID NO: 1977275 - RNA, 19 nt, Artificial Sequence
  Description of Artificial Sequence: Synthetic oligonucleotide
ccuggacugucagcucauu

SEQ ID NO: 1977276 - RNA, 19 nt, Artificial Sequence
  Description of Artificial Sequence: Synthetic oligonucleotide
aacuuggcguuacagagcc

SEQ ID NO: 1977277 - RNA, 19 nt, Artificial Sequence
  Description of Artificial Sequence: Synthetic oligonucleotide
aguaguugcacuugaacgg

SEQ ID NO: 1977278 - RNA, 19 nt, Artificial Sequence
  Description of Artificial Sequence: Synthetic oligonucleotide
ugaacuuggcguuacagag

SEQ ID NO: 1977279 - RNA, 19 nt, Artificial Sequence
  Description of Artificial Sequence: Synthetic oligonucleotide
ucuugaacuggcaacccgg

SEQ ID NO: 1977280 - RNA, 19 nt, Artificial Sequence
  Description of Artificial Sequence: Synthetic oligonucleotide
caguaguugcacuugaacg

SEQ ID NO: 1977281 - RNA, 19 nt, Artificial Sequence
  Description of Artificial Sequence: Synthetic oligonucleotide
aacugugauggucuggguc

SEQ ID NO: 1977282 - RNA, 19 nt, Artificial Sequence
  Description of Artificial Sequence: Synthetic oligonucleotide
uccgacacaaacugcaccg

SEQ ID NO: 1977283 - RNA, 19 nt, Artificial Sequence
  Description of Artificial Sequence: Synthetic oligonucleotide
aaagacgaauucuggagcu

SEQ ID NO: 1977284 - RNA, 19 nt, Artificial Sequence
  Description of Artificial Sequence: Synthetic oligonucleotide
aacugcaccgugcuggcgg

SEQ ID NO: 1977285 - RNA, 19 nt, Artificial Sequence
  Description of Artificial Sequence: Synthetic oligonucleotide
auagccauguucaaagacg

SEQ ID NO: 1977286 - RNA, 19 nt, Artificial Sequence
  Description of Artificial Sequence: Synthetic oligonucleotide
uccgagcugauuuugaacu

SEQ ID NO: 1977287 - RNA, 19 nt, Artificial Sequence
  Description of Artificial Sequence: Synthetic oligonucleotide
gaacuggcaacccggauag

SEQ ID NO: 1977288 - RNA, 19 nt, Artificial Sequence
  Description of Artificial Sequence: Synthetic oligonucleotide
caaaccucgcacuuguggg

SEQ ID NO: 1977289 - RNA, 19 nt, Artificial Sequence
  Description of Artificial Sequence: Synthetic oligonucleotide
aaaccucgcacuugugggg

SEQ ID NO: 1977290 - RNA, 19 nt, Artificial Sequence
  Description of Artificial Sequence: Synthetic oligonucleotide
ugcuugaugcggaugugcg

SEQ ID NO: 1977291 - RNA, 19 nt, Artificial Sequence
  Description of Artificial Sequence: Synthetic oligonucleotide
uggaacuucuucaugugcu

SEQ ID NO: 1977292 - RNA, 19 nt, Artificial Sequence
  Description of Artificial Sequence: Synthetic oligonucleotide
aguuugauagccauguuca

SEQ ID NO: 1977293 - RNA, 19 nt, Artificial Sequence
  Description of Artificial Sequence: Synthetic oligonucleotide
uucaaguccgagcugauuu

SEQ ID NO: 1977294 - RNA, 19 nt, Artificial Sequence
  Description of Artificial Sequence: Synthetic oligonucleotide
uuugaacuuggcguuacag

SEQ ID NO: 1977295 - RNA, 19 nt, Artificial Sequence
  Description of Artificial Sequence: Synthetic oligonucleotide
uugaacuuggcguuacaga

SEQ ID NO: 1977296 - RNA, 19 nt, Artificial Sequence
  Description of Artificial Sequence: Synthetic oligonucleotide
gagugcacgaucaugugcc

SEQ ID NO: 1977297 - RNA, 19 nt, Artificial Sequence
  Description of Artificial Sequence: Synthetic oligonucleotide
ugaacuggcaacccggaua

SEQ ID NO: 1977298 - RNA, 19 nt, Artificial Sequence
  Description of Artificial Sequence: Synthetic oligonucleotide
cugauuuugaacuuggcgu

SEQ ID NO: 1977299 - RNA, 19 nt, Artificial Sequence
  Description of Artificial Sequence: Synthetic oligonucleotide
ugauuuugaacuuggcguu

SEQ ID NO: 1977300 - RNA, 19 nt, Artificial Sequence
  Description of Artificial Sequence: Synthetic oligonucleotide
uggcacgugacuuggcagg

SEQ ID NO: 1977301 - RNA, 19 nt, Artificial Sequence
  Description of Artificial Sequence: Synthetic oligonucleotide
caugaaugaggcgucacag

SEQ ID NO: 1977302 - RNA, 19 nt, Artificial Sequence
  Description of Artificial Sequence: Synthetic oligonucleotide
agcgagaucacggugguug

SEQ ID NO: 1977303 - RNA, 19 nt, Artificial Sequence
  Description of Artificial Sequence: Synthetic oligonucleotide
aacccggauagcagcagcc

SEQ ID NO: 1977304 - RNA, 19 nt, Artificial Sequence
  Description of Artificial Sequence: Synthetic oligonucleotide
ugugcuggucagcuggcag

SEQ ID NO: 1977305 - RNA, 19 nt, Artificial Sequence
  Description of Artificial Sequence: Synthetic oligonucleotide
uuggugucgaagcugcagu

SEQ ID NO: 1977306 - RNA, 19 nt, Artificial Sequence
  Description of Artificial Sequence: Synthetic oligonucleotide
cuuggcguuacagagccag

SEQ ID NO: 1977307 - RNA, 19 nt, Artificial Sequence
  Description of Artificial Sequence: Synthetic oligonucleotide
auuuugaacuuggcguuac

SEQ ID NO: 1977308 - RNA, 19 nt, Artificial Sequence
  Description of Artificial Sequence: Synthetic oligonucleotide
ucuggcacgugacuuggca

SEQ ID NO: 1977309 - RNA, 19 nt, Artificial Sequence
  Description of Artificial Sequence: Synthetic oligonucleotide
ugcgacuugagguucgccu

SEQ ID NO: 1977310 - RNA, 19 nt, Artificial Sequence
  Description of Artificial Sequence: Synthetic oligonucleotide
ucuugugguggucuggguc

SEQ ID NO: 1977311 - RNA, 19 nt, Artificial Sequence
  Description of Artificial Sequence: Synthetic oligonucleotide
ucaugugccuuuucaaguc

SEQ ID NO: 1977312 - RNA, 19 nt, Artificial Sequence
  Description of Artificial Sequence: Synthetic oligonucleotide
uggaacgucuucuuggcau

SEQ ID NO: 1977313 - RNA, 19 nt, Artificial Sequence
  Description of Artificial Sequence: Synthetic oligonucleotide
uccgcguggaacuucuuca

SEQ ID NO: 1977314 - RNA, 19 nt, Artificial Sequence
  Description of Artificial Sequence: Synthetic oligonucleotide
uucgccuucauggugcagc

SEQ ID NO: 1977315 - RNA, 19 nt, Artificial Sequence
  Description of Artificial Sequence: Synthetic oligonucleotide
uccucccgcaugaaugagg

SEQ ID NO: 1977316 - RNA, 19 nt, Artificial Sequence
  Description of Artificial Sequence: Synthetic oligonucleotide
cuugaugcggaugugcgac

SEQ ID NO: 1977317 - RNA, 19 nt, Artificial Sequence
  Description of Artificial Sequence: Synthetic oligonucleotide
uuucuggcacgugacuugg

SEQ ID NO: 1977318 - RNA, 19 nt, Artificial Sequence
  Description of Artificial Sequence: Synthetic oligonucleotide
gaacucgcacuugaaaggc

SEQ ID NO: 1977319 - RNA, 19 nt, Artificial Sequence
  Description of Artificial Sequence: Synthetic oligonucleotide
agguucgccuucauggugc

SEQ ID NO: 1977320 - RNA, 19 nt, Artificial Sequence
  Description of Artificial Sequence: Synthetic oligonucleotide
ucccgcaugaaugaggcgu

SEQ ID NO: 1977321 - RNA, 19 nt, Artificial Sequence
  Description of Artificial Sequence: Synthetic oligonucleotide
cauggugcagcggacgucg

SEQ ID NO: 1977322 - RNA, 19 nt, Artificial Sequence
  Description of Artificial Sequence: Synthetic oligonucleotide
ugacuuggcagggagcgag

SEQ ID NO: 1977323 - RNA, 19 nt, Artificial Sequence
  Description of Artificial Sequence: Synthetic oligonucleotide
cauguucaaagacgaauuc

SEQ ID NO: 1977324 - RNA, 19 nt, Artificial Sequence
  Description of Artificial Sequence: Synthetic oligonucleotide
uuacagagccagcacugga

SEQ ID NO: 1977325 - RNA, 19 nt, Artificial Sequence
  Description of Artificial Sequence: Synthetic oligonucleotide
gucuugaacuggcaacccg

SEQ ID NO: 1977326 - RNA, 19 nt, Artificial Sequence
  Description of Artificial Sequence: Synthetic oligonucleotide
agucgcacgucuuacacuu

SEQ ID NO: 1977327 - RNA, 19 nt, Artificial Sequence
  Description of Artificial Sequence: Synthetic oligonucleotide
ugcggagcgaguccucccg

SEQ ID NO: 1977328 - RNA, 19 nt, Artificial Sequence
  Description of Artificial Sequence: Synthetic oligonucleotide
cuugacgcccgugugacag

SEQ ID NO: 1977329 - RNA, 19 nt, Artificial Sequence
  Description of Artificial Sequence: Synthetic oligonucleotide
uggcguaggggcgagaucu

SEQ ID NO: 1977330 - RNA, 19 nt, Artificial Sequence
  Description of Artificial Sequence: Synthetic oligonucleotide
auguucaaagacgaauucu

SEQ ID NO: 1977331 - RNA, 19 nt, Artificial Sequence
  Description of Artificial Sequence: Synthetic oligonucleotide
uggucugggucuccgaacu

SEQ ID NO: 1977332 - RNA, 19 nt, Artificial Sequence
  Description of Artificial Sequence: Synthetic oligonucleotide
ugucuccuccgacacaaac

SEQ ID NO: 1977333 - RNA, 19 nt, Artificial Sequence
  Description of Artificial Sequence: Synthetic oligonucleotide
gguggucugggucugggcg

SEQ ID NO: 1977334 - RNA, 19 nt, Artificial Sequence
  Description of Artificial Sequence: Synthetic oligonucleotide
cuuucuggcacgugacuug

SEQ ID NO: 1977335 - RNA, 19 nt, Artificial Sequence
  Description of Artificial Sequence: Synthetic oligonucleotide
gaguccucccgcaugaaug

SEQ ID NO: 1977336 - RNA, 19 nt, Artificial Sequence
  Description of Artificial Sequence: Synthetic oligonucleotide
auggucugggucuccgaac

SEQ ID NO: 1977337 - RNA, 19 nt, Artificial Sequence
  Description of Artificial Sequence: Synthetic oligonucleotide
gguugcuuggugucgaagc

SEQ ID NO: 1977338 - RNA, 19 nt, Artificial Sequence
  Description of Artificial Sequence: Synthetic oligonucleotide
ugaacgggcgcucggugca

SEQ ID NO: 1977339 - RNA, 19 nt, Artificial Sequence
  Description of Artificial Sequence: Synthetic oligonucleotide
guagucgcacgucuuacac

SEQ ID NO: 1977340 - RNA, 19 nt, Artificial Sequence
  Description of Artificial Sequence: Synthetic oligonucleotide
gaagcugcaguaguugcac

SEQ ID NO: 1977341 - RNA, 19 nt, Artificial Sequence
  Description of Artificial Sequence: Synthetic oligonucleotide
agcgcggccuugcuggagc

SEQ ID NO: 1977342 - RNA, 19 nt, Artificial Sequence
  Description of Artificial Sequence: Synthetic oligonucleotide
gaugcgcucgugcacgcgc

SEQ ID NO: 1977343 - RNA, 19 nt, Artificial Sequence
  Description of Artificial Sequence: Synthetic oligonucleotide
uugaacgggcgcucggugc

SEQ ID NO: 1977344 - RNA, 19 nt, Artificial Sequence
  Description of Artificial Sequence: Synthetic oligonucleotide
acaguggaacgucuucuug

SEQ ID NO: 1977345 - RNA, 19 nt, Artificial Sequence
  Description of Artificial Sequence: Synthetic oligonucleotide
agggcuuucuggcacguga

SEQ ID NO: 1977346 - RNA, 19 nt, Artificial Sequence
  Description of Artificial Sequence: Synthetic oligonucleotide
cuuuucaaguccgagcuga

SEQ ID NO: 1977347 - RNA, 19 nt, Artificial Sequence
  Description of Artificial Sequence: Synthetic oligonucleotide
cuggagcacgaguagcugc

SEQ ID NO: 1977348 - RNA, 19 nt, Artificial Sequence
  Description of Artificial Sequence: Synthetic oligonucleotide
guaggcagucuugaacugg

SEQ ID NO: 1977349 - RNA, 19 nt, Artificial Sequence
  Description of Artificial Sequence: Synthetic oligonucleotide
ugagguucgccuucauggu

SEQ ID NO: 1977350 - RNA, 19 nt, Artificial Sequence
  Description of Artificial Sequence: Synthetic oligonucleotide
ucuccgaacugaugguucu

SEQ ID NO: 1977351 - RNA, 19 nt, Artificial Sequence
  Description of Artificial Sequence: Synthetic oligonucleotide
ucgccuucauggugcagcg

SEQ ID NO: 1977352 - RNA, 19 nt, Artificial Sequence
  Description of Artificial Sequence: Synthetic oligonucleotide
uucaggugccgcuccaugu

SEQ ID NO: 1977353 - RNA, 19 nt, Artificial Sequence
  Description of Artificial Sequence: Synthetic oligonucleotide
ucacaguggaacgucuucu

SEQ ID NO: 1977354 - RNA, 19 nt, Artificial Sequence
  Description of Artificial Sequence: Synthetic oligonucleotide
uggcaacccggauagcagc

SEQ ID NO: 1977355 - RNA, 19 nt, Artificial Sequence
  Description of Artificial Sequence: Synthetic oligonucleotide
ugugccuuuucaaguccga

SEQ ID NO: 1977356 - RNA, 19 nt, Artificial Sequence
  Description of Artificial Sequence: Synthetic oligonucleotide
cauugugcugccucuugug

SEQ ID NO: 1977357 - RNA, 19 nt, Artificial Sequence
  Description of Artificial Sequence: Synthetic oligonucleotide
aguugcacuugaacgggcg

SEQ ID NO: 1977358 - RNA, 19 nt, Artificial Sequence
  Description of Artificial Sequence: Synthetic oligonucleotide
ucgcacgucuuacacuugu

SEQ ID NO: 1977359 - RNA, 19 nt, Artificial Sequence
  Description of Artificial Sequence: Synthetic oligonucleotide
uugucaccgguguggaucu

SEQ ID NO: 1977360 - RNA, 19 nt, Artificial Sequence
  Description of Artificial Sequence: Synthetic oligonucleotide
ugcacgaucaugugccuuu

SEQ ID NO: 1977361 - RNA, 19 nt, Artificial Sequence
  Description of Artificial Sequence: Synthetic oligonucleotide
aagacgaauucuggagcug

SEQ ID NO: 1977362 - RNA, 19 nt, Artificial Sequence
  Description of Artificial Sequence: Synthetic oligonucleotide
uaguugcacuugaacgggc

SEQ ID NO: 1977363 - RNA, 19 nt, Artificial Sequence
  Description of Artificial Sequence: Synthetic oligonucleotide
aguccucccgcaugaauga

SEQ ID NO: 1977364 - RNA, 19 nt, Artificial Sequence
  Description of Artificial Sequence: Synthetic oligonucleotide
ucggccgccgcguagucgc

SEQ ID NO: 1977365 - RNA, 19 nt, Artificial Sequence
  Description of Artificial Sequence: Synthetic oligonucleotide
cacuuguagggccggcucg

SEQ ID NO: 1977366 - RNA, 19 nt, Artificial Sequence
  Description of Artificial Sequence: Synthetic oligonucleotide
uggagggcuuucuggcacg

SEQ ID NO: 1977367 - RNA, 19 nt, Artificial Sequence
  Description of Artificial Sequence: Synthetic oligonucleotide
gagguucgccuucauggug

SEQ ID NO: 1977368 - RNA, 19 nt, Artificial Sequence
  Description of Artificial Sequence: Synthetic oligonucleotide
gacgucgcagaacucgcac

SEQ ID NO: 1977369 - RNA, 19 nt, Artificial Sequence
  Description of Artificial Sequence: Synthetic oligonucleotide
cuuggugucgaagcugcag

SEQ ID NO: 1977370 - RNA, 19 nt, Artificial Sequence
  Description of Artificial Sequence: Synthetic oligonucleotide
aaacugugauggucugggu

SEQ ID NO: 1977371 - RNA, 19 nt, Artificial Sequence
  Description of Artificial Sequence: Synthetic oligonucleotide
cacgugacuuggcagggag

SEQ ID NO: 1977372 - RNA, 19 nt, Artificial Sequence
  Description of Artificial Sequence: Synthetic oligonucleotide
uugagcauguccgcgugga

SEQ ID NO: 1977373 - RNA, 19 nt, Artificial Sequence
  Description of Artificial Sequence: Synthetic oligonucleotide
agggacugucuccuccgac

SEQ ID NO: 1977374 - RNA, 19 nt, Artificial Sequence
  Description of Artificial Sequence: Synthetic oligonucleotide
ggugcaguggaugcgcucg

SEQ ID NO: 1977375 - RNA, 19 nt, Artificial Sequence
  Description of Artificial Sequence: Synthetic oligonucleotide
caugccguaggcagucuug

SEQ ID NO: 1977376 - RNA, 19 nt, Artificial Sequence
  Description of Artificial Sequence: Synthetic oligonucleotide
agcugauuuugaacuuggc

SEQ ID NO: 1977377 - RNA, 19 nt, Artificial Sequence
  Description of Artificial Sequence: Synthetic oligonucleotide
guugcacuugaacgggcgc

SEQ ID NO: 1977378 - RNA, 19 nt, Artificial Sequence
  Description of Artificial Sequence: Synthetic oligonucleotide
cacgaguagcugcacucgg

SEQ ID NO: 1977379 - RNA, 19 nt, Artificial Sequence
  Description of Artificial Sequence: Synthetic oligonucleotide
uggcguuacagagccagca

SEQ ID NO: 1977380 - RNA, 19 nt, Artificial Sequence
  Description of Artificial Sequence: Synthetic oligonucleotide
cuggcacgugacuuggcag

SEQ ID NO: 1977381 - RNA, 19 nt, Artificial Sequence
  Description of Artificial Sequence: Synthetic oligonucleotide
agacgaauucuggagcuga

SEQ ID NO: 1977382 - RNA, 19 nt, Artificial Sequence
  Description of Artificial Sequence: Synthetic oligonucleotide
ugacgcccgugugacagcg

SEQ ID NO: 1977383 - RNA, 19 nt, Artificial Sequence
  Description of Artificial Sequence: Synthetic oligonucleotide
cucuuguggcugcggagcg

SEQ ID NO: 1977384 - RNA, 19 nt, Artificial Sequence
  Description of Artificial Sequence: Synthetic oligonucleotide
ucaaguccgagcugauuuu

SEQ ID NO: 1977385 - RNA, 19 nt, Artificial Sequence
  Description of Artificial Sequence: Synthetic oligonucleotide
cucgugcacgcgcagcgcg

SEQ ID NO: 1977386 - RNA, 19 nt, Artificial Sequence
  Description of Artificial Sequence: Synthetic oligonucleotide
aggcgugugcuugaugcgg

SEQ ID NO: 1977387 - RNA, 19 nt, Artificial Sequence
  Description of Artificial Sequence: Synthetic oligonucleotide
cacuggaagggcguguccc

SEQ ID NO: 1977388 - RNA, 19 nt, Artificial Sequence
  Description of Artificial Sequence: Synthetic oligonucleotide
agcgaguccucccgcauga

SEQ ID NO: 1977389 - RNA, 19 nt, Artificial Sequence
  Description of Artificial Sequence: Synthetic oligonucleotide
ggcgucacagcugucacag

SEQ ID NO: 1977390 - RNA, 19 nt, Artificial Sequence
  Description of Artificial Sequence: Synthetic oligonucleotide
gagcauguccgcguggaac

SEQ ID NO: 1977391 - RNA, 19 nt, Artificial Sequence
  Description of Artificial Sequence: Synthetic oligonucleotide
gcaguaguugcacuugaac

SEQ ID NO: 1977392 - RNA, 19 nt, Artificial Sequence
  Description of Artificial Sequence: Synthetic oligonucleotide
uugcacuugaacgggcgcu

SEQ ID NO: 1977393 - RNA, 19 nt, Artificial Sequence
  Description of Artificial Sequence: Synthetic oligonucleotide
uccgugggcagguaaguuu

SEQ ID NO: 1977394 - RNA, 19 nt, Artificial Sequence
  Description of Artificial Sequence: Synthetic oligonucleotide
ucgugcacgcgcagcgcgg

SEQ ID NO: 1977395 - RNA, 19 nt, Artificial Sequence
  Description of Artificial Sequence: Synthetic oligonucleotide
gucgaagcugcaguaguug

SEQ ID NO: 1977396 - RNA, 19 nt, Artificial Sequence
  Description of Artificial Sequence: Synthetic oligonucleotide
cucauugugcugccucuug

SEQ ID NO: 1977397 - RNA, 19 nt, Artificial Sequence
  Description of Artificial Sequence: Synthetic oligonucleotide
cacucggggcacuucuccg

SEQ ID NO: 1977398 - RNA, 19 nt, Artificial Sequence
  Description of Artificial Sequence: Synthetic oligonucleotide
uaaguuugauagccauguu

SEQ ID NO: 1977399 - RNA, 19 nt, Artificial Sequence
  Description of Artificial Sequence: Synthetic oligonucleotide
ugggcagguaaguuugaua

SEQ ID NO: 1977400 - RNA, 19 nt, Artificial Sequence
  Description of Artificial Sequence: Synthetic oligonucleotide
ucguccgaguggaugcgca

SEQ ID NO: 1977401 - RNA, 19 nt, Artificial Sequence
  Description of Artificial Sequence: Synthetic oligonucleotide
aguccgagcugauuuugaa

SEQ ID NO: 1977402 - RNA, 19 nt, Artificial Sequence
  Description of Artificial Sequence: Synthetic oligonucleotide
aucacggugguugucuggu

SEQ ID NO: 1977403 - RNA, 19 nt, Artificial Sequence
  Description of Artificial Sequence: Synthetic oligonucleotide
guccgagcugauuuugaac

SEQ ID NO: 1977404 - RNA, 19 nt, Artificial Sequence
  Description of Artificial Sequence: Synthetic oligonucleotide
caugugcgucuucagcuug

SEQ ID NO: 1977405 - RNA, 19 nt, Artificial Sequence
  Description of Artificial Sequence: Synthetic oligonucleotide
gaugugcgacuugagguuc

SEQ ID NO: 1977406 - RNA, 19 nt, Artificial Sequence
  Description of Artificial Sequence: Synthetic oligonucleotide
uaggggcgagaucuggcac

SEQ ID NO: 1977407 - RNA, 19 nt, Artificial Sequence
  Description of Artificial Sequence: Synthetic oligonucleotide
agggagcgagaucacggug

SEQ ID NO: 1977408 - RNA, 19 nt, Artificial Sequence
  Description of Artificial Sequence: Synthetic oligonucleotide
cuugaacgggcgcucggug

SEQ ID NO: 1977409 - RNA, 19 nt, Artificial Sequence
  Description of Artificial Sequence: Synthetic oligonucleotide
gaggcgucacagcugucac

SEQ ID NO: 1977410 - RNA, 19 nt, Artificial Sequence
  Description of Artificial Sequence: Synthetic oligonucleotide
caacccggauagcagcagc

SEQ ID NO: 1977411 - RNA, 19 nt, Artificial Sequence
  Description of Artificial Sequence: Synthetic oligonucleotide
guaggggcgagaucuggca

SEQ ID NO: 1977412 - RNA, 19 nt, Artificial Sequence
  Description of Artificial Sequence: Synthetic oligonucleotide
aaacugcaccgugcuggcg

SEQ ID NO: 1977413 - RNA, 19 nt, Artificial Sequence
  Description of Artificial Sequence: Synthetic oligonucleotide
aggggcgagaucuggcacu

SEQ ID NO: 1977414 - RNA, 19 nt, Artificial Sequence
  Description of Artificial Sequence: Synthetic oligonucleotide
caggcgugugcuugaugcg

SEQ ID NO: 1977415 - RNA, 19 nt, Artificial Sequence
  Description of Artificial Sequence: Synthetic oligonucleotide
guggagggcuuucuggcac

SEQ ID NO: 1977416 - RNA, 19 nt, Artificial Sequence
  Description of Artificial Sequence: Synthetic oligonucleotide
cgaauucuggagcugaaac

SEQ ID NO: 1977417 - RNA, 19 nt, Artificial Sequence
  Description of Artificial Sequence: Synthetic oligonucleotide
ugcgagcgcaggugcacag

SEQ ID NO: 1977418 - RNA, 19 nt, Artificial Sequence
  Description of Artificial Sequence: Synthetic oligonucleotide
ugguugucugguuuucauu

SEQ ID NO: 1977419 - RNA, 19 nt, Artificial Sequence
  Description of Artificial Sequence: Synthetic oligonucleotide
uggugcaggcgugugcuug

SEQ ID NO: 1977420 - RNA, 19 nt, Artificial Sequence
  Description of Artificial Sequence: Synthetic oligonucleotide
uggaguugcggcuggcgua

SEQ ID NO: 1977421 - RNA, 19 nt, Artificial Sequence
  Description of Artificial Sequence: Synthetic oligonucleotide
ugcuccgacuggugcaggc

SEQ ID NO: 1977422 - RNA, 19 nt, Artificial Sequence
  Description of Artificial Sequence: Synthetic oligonucleotide
ccucccgcaugaaugaggc

SEQ ID NO: 1977423 - RNA, 19 nt, Artificial Sequence
  Description of Artificial Sequence: Synthetic oligonucleotide
aaguccgagcugauuuuga

SEQ ID NO: 1977424 - RNA, 19 nt, Artificial Sequence
  Description of Artificial Sequence: Synthetic oligonucleotide
aacuggcaacccggauagc

SEQ ID NO: 1977425 - RNA, 19 nt, Artificial Sequence
  Description of Artificial Sequence: Synthetic oligonucleotide
caagucucuucugcacagg

SEQ ID NO: 1977426 - RNA, 19 nt, Artificial Sequence
  Description of Artificial Sequence: Synthetic oligonucleotide
gagcgaguccucccgcaug

SEQ ID NO: 1977427 - RNA, 19 nt, Artificial Sequence
  Description of Artificial Sequence: Synthetic oligonucleotide
caaguccgagcugauuuug

SEQ ID NO: 1977428 - RNA, 19 nt, Artificial Sequence
  Description of Artificial Sequence: Synthetic oligonucleotide
gugcuugaugcggaugugc

SEQ ID NO: 1977429 - RNA, 19 nt, Artificial Sequence
  Description of Artificial Sequence: Synthetic oligonucleotide
acgucgcagaacucgcacu

SEQ ID NO: 1977430 - RNA, 19 nt, Artificial Sequence
  Description of Artificial Sequence: Synthetic oligonucleotide
aacucgcacuugaaaggcu

SEQ ID NO: 1977431 - RNA, 19 nt, Artificial Sequence
  Description of Artificial Sequence: Synthetic oligonucleotide
cacuugaacgggcgcucgg

SEQ ID NO: 1977432 - RNA, 19 nt, Artificial Sequence
  Description of Artificial Sequence: Synthetic oligonucleotide
ggucuugagcauguccgcg

SEQ ID NO: 1977433 - RNA, 19 nt, Artificial Sequence
  Description of Artificial Sequence: Synthetic oligonucleotide
ugauggucugggucuccga

SEQ ID NO: 1977434 - RNA, 19 nt, Artificial Sequence
  Description of Artificial Sequence: Synthetic oligonucleotide
ggcagguaaguuugauagc

SEQ ID NO: 1977435 - RNA, 19 nt, Artificial Sequence
  Description of Artificial Sequence: Synthetic oligonucleotide
uugaugcggaugugcgacu

SEQ ID NO: 1977436 - RNA, 19 nt, Artificial Sequence
  Description of Artificial Sequence: Synthetic oligonucleotide
guccgaguggaugcgcagg

SEQ ID NO: 1977437 - RNA, 19 nt, Artificial Sequence
  Description of Artificial Sequence: Synthetic oligonucleotide
acgugacuuggcagggagc

SEQ ID NO: 1977438 - RNA, 19 nt, Artificial Sequence
  Description of Artificial Sequence: Synthetic oligonucleotide
ugugcgagcgcaggugcac

SEQ ID NO: 1977439 - RNA, 19 nt, Artificial Sequence
  Description of Artificial Sequence: Synthetic oligonucleotide
gcggacgucgcagaacucg

SEQ ID NO: 1977440 - RNA, 19 nt, Artificial Sequence
  Description of Artificial Sequence: Synthetic oligonucleotide
agcagccaagucucuucug

SEQ ID NO: 1977441 - RNA, 19 nt, Artificial Sequence
  Description of Artificial Sequence: Synthetic oligonucleotide
ucaugccguaggcagucuu

SEQ ID NO: 1977442 - RNA, 19 nt, Artificial Sequence
  Description of Artificial Sequence: Synthetic oligonucleotide
gauuuugaacuuggcguua

SEQ ID NO: 1977443 - RNA, 19 nt, Artificial Sequence
  Description of Artificial Sequence: Synthetic oligonucleotide
gugccuuuucaaguccgag

SEQ ID NO: 1977444 - RNA, 19 nt, Artificial Sequence
  Description of Artificial Sequence: Synthetic oligonucleotide
uucuugugguggucugggu

SEQ ID NO: 1977445 - RNA, 19 nt, Artificial Sequence
  Description of Artificial Sequence: Synthetic oligonucleotide
ugcaggcgugugcuugaug

SEQ ID NO: 1977446 - RNA, 19 nt, Artificial Sequence
  Description of Artificial Sequence: Synthetic oligonucleotide
ugacagcgcaugugcgucu

SEQ ID NO: 1977447 - RNA, 19 nt, Artificial Sequence
  Description of Artificial Sequence: Synthetic oligonucleotide
gagaucacggugguugucu

SEQ ID NO: 1977448 - RNA, 19 nt, Artificial Sequence
  Description of Artificial Sequence: Synthetic oligonucleotide
acuugaacgggcgcucggu

SEQ ID NO: 1977449 - RNA, 19 nt, Artificial Sequence
  Description of Artificial Sequence: Synthetic oligonucleotide
ggugucgaagcugcaguag

SEQ ID NO: 1977450 - RNA, 19 nt, Artificial Sequence
  Description of Artificial Sequence: Synthetic oligonucleotide
ggugcagcggacgucgcag

SEQ ID NO: 1977451 - RNA, 19 nt, Artificial Sequence
  Description of Artificial Sequence: Synthetic oligonucleotide
ugagcauguccgcguggaa

SEQ ID NO: 1977452 - RNA, 19 nt, Artificial Sequence
  Description of Artificial Sequence: Synthetic oligonucleotide
gguucuugugguggucugg

SEQ ID NO: 1977453 - RNA, 19 nt, Artificial Sequence
  Description of Artificial Sequence: Synthetic oligonucleotide
ugugcgacuugagguucgc

SEQ ID NO: 1977454 - RNA, 19 nt, Artificial Sequence
  Description of Artificial Sequence: Synthetic oligonucleotide
gccguaggcagucuugaac

SEQ ID NO: 1977455 - RNA, 19 nt, Artificial Sequence
  Description of Artificial Sequence: Synthetic oligonucleotide
augugcgacuugagguucg

SEQ ID NO: 1977456 - RNA, 19 nt, Artificial Sequence
  Description of Artificial Sequence: Synthetic oligonucleotide
caguggaugcgcucgugca

SEQ ID NO: 1977457 - RNA, 19 nt, Artificial Sequence
  Description of Artificial Sequence: Synthetic oligonucleotide
ugggcggcagggacugucu

SEQ ID NO: 1977458 - RNA, 19 nt, Artificial Sequence
  Description of Artificial Sequence: Synthetic oligonucleotide
uggaugcgcucgugcacgc

SEQ ID NO: 1977459 - RNA, 19 nt, Artificial Sequence
  Description of Artificial Sequence: Synthetic oligonucleotide
ggaacgucuucuuggcauc

SEQ ID NO: 1977460 - RNA, 19 nt, Artificial Sequence
  Description of Artificial Sequence: Synthetic oligonucleotide
acuuguagggccggcucgu

SEQ ID NO: 1977461 - RNA, 19 nt, Artificial Sequence
  Description of Artificial Sequence: Synthetic oligonucleotide
uugacgcccgugugacagc

SEQ ID NO: 1977462 - RNA, 19 nt, Artificial Sequence
  Description of Artificial Sequence: Synthetic oligonucleotide
ugcugccucuuguggcugc

SEQ ID NO: 1977463 - RNA, 19 nt, Artificial Sequence
  Description of Artificial Sequence: Synthetic oligonucleotide
acggugguugucugguuuu

SEQ ID NO: 1977464 - RNA, 19 nt, Artificial Sequence
  Description of Artificial Sequence: Synthetic oligonucleotide
ggacugucuccuccgacac

SEQ ID NO: 1977465 - RNA, 19 nt, Artificial Sequence
  Description of Artificial Sequence: Synthetic oligonucleotide
cguuacagagccagcacug

SEQ ID NO: 1977466 - RNA, 19 nt, Artificial Sequence
  Description of Artificial Sequence: Synthetic oligonucleotide
gcaguggaugcgcucgugc

SEQ ID NO: 1977467 - RNA, 19 nt, Artificial Sequence
  Description of Artificial Sequence: Synthetic oligonucleotide
cugccggcugcucugccug

SEQ ID NO: 1977468 - RNA, 19 nt, Artificial Sequence
  Description of Artificial Sequence: Synthetic oligonucleotide
gucuccgaacugaugguuc

SEQ ID NO: 1977469 - RNA, 19 nt, Artificial Sequence
  Description of Artificial Sequence: Synthetic oligonucleotide
cuggcggcugucacuggug

SEQ ID NO: 1977470 - RNA, 19 nt, Artificial Sequence
  Description of Artificial Sequence: Synthetic oligonucleotide
gcaugaaugaggcgucaca

SEQ ID NO: 1977471 - RNA, 19 nt, Artificial Sequence
  Description of Artificial Sequence: Synthetic oligonucleotide
agccagcacuggaagggcg

SEQ ID NO: 1977472 - RNA, 19 nt, Artificial Sequence
  Description of Artificial Sequence: Synthetic oligonucleotide
gggucuugagcauguccgc

SEQ ID NO: 1977473 - RNA, 19 nt, Artificial Sequence
  Description of Artificial Sequence: Synthetic oligonucleotide
guagcugcacucggggcac

SEQ ID NO: 1977474 - RNA, 19 nt, Artificial Sequence
  Description of Artificial Sequence: Synthetic oligonucleotide
acagcgcaugugcgucuuc

SEQ ID NO: 1977475 - RNA, 19 nt, Artificial Sequence
  Description of Artificial Sequence: Synthetic oligonucleotide
ggcguuacagagccagcac

SEQ ID NO: 1977476 - RNA, 19 nt, Artificial Sequence
  Description of Artificial Sequence: Synthetic oligonucleotide
ccgugggcagguaaguuug

SEQ ID NO: 1977477 - RNA, 19 nt, Artificial Sequence
  Description of Artificial Sequence: Synthetic oligonucleotide
acgaauucuggagcugaaa

SEQ ID NO: 1977478 - RNA, 19 nt, Artificial Sequence
  Description of Artificial Sequence: Synthetic oligonucleotide
gcugaaacugugauggucu

SEQ ID NO: 1977479 - RNA, 19 nt, Artificial Sequence
  Description of Artificial Sequence: Synthetic oligonucleotide
ugcaccgugcuggcggcug

SEQ ID NO: 1977480 - RNA, 19 nt, Artificial Sequence
  Description of Artificial Sequence: Synthetic oligonucleotide
ucuuguggcugcggagcga

SEQ ID NO: 1977481 - RNA, 19 nt, Artificial Sequence
  Description of Artificial Sequence: Synthetic oligonucleotide
cucccgcaugaaugaggcg

SEQ ID NO: 1977482 - RNA, 19 nt, Artificial Sequence
  Description of Artificial Sequence: Synthetic oligonucleotide
cgcagcgcggccuugcugg

SEQ ID NO: 1977483 - RNA, 19 nt, Artificial Sequence
  Description of Artificial Sequence: Synthetic oligonucleotide
ugaugcggaugugcgacuu

SEQ ID NO: 1977484 - RNA, 19 nt, Artificial Sequence
  Description of Artificial Sequence: Synthetic oligonucleotide
gugucgaagcugcaguagu

SEQ ID NO: 1977485 - RNA, 19 nt, Artificial Sequence
  Description of Artificial Sequence: Synthetic oligonucleotide
cugcggagcgaguccuccc

SEQ ID NO: 1977486 - RNA, 19 nt, Artificial Sequence
  Description of Artificial Sequence: Synthetic oligonucleotide
cuuuccggggccugggucu

SEQ ID NO: 1977487 - RNA, 19 nt, Artificial Sequence
  Description of Artificial Sequence: Synthetic oligonucleotide
aggcgucacagcugucaca

SEQ ID NO: 1977488 - RNA, 19 nt, Artificial Sequence
  Description of Artificial Sequence: Synthetic oligonucleotide
uccgggugcuccgacuggu

SEQ ID NO: 1977489 - RNA, 19 nt, Artificial Sequence
  Description of Artificial Sequence: Synthetic oligonucleotide
gcacucggggcacuucucc

SEQ ID NO: 1977490 - RNA, 19 nt, Artificial Sequence
  Description of Artificial Sequence: Synthetic oligonucleotide
guggaacgucuucuuggca

SEQ ID NO: 1977491 - RNA, 19 nt, Artificial Sequence
  Description of Artificial Sequence: Synthetic oligonucleotide
ugccguaggcagucuugaa

SEQ ID NO: 1977492 - RNA, 19 nt, Artificial Sequence
  Description of Artificial Sequence: Synthetic oligonucleotide
cuccgggugcuccgacugg

SEQ ID NO: 1977493 - RNA, 19 nt, Artificial Sequence
  Description of Artificial Sequence: Synthetic oligonucleotide
ggugcuccgacuggugcag

SEQ ID NO: 1977494 - RNA, 19 nt, Artificial Sequence
  Description of Artificial Sequence: Synthetic oligonucleotide
ggcagggagcgagaucacg

SEQ ID NO: 1977495 - RNA, 19 nt, Artificial Sequence
  Description of Artificial Sequence: Synthetic oligonucleotide
auguccgcguggaacuucu

SEQ ID NO: 1977496 - RNA, 19 nt, Artificial Sequence
  Description of Artificial Sequence: Synthetic oligonucleotide
uggcugcggagcgaguccu

SEQ ID NO: 1977497 - RNA, 19 nt, Artificial Sequence
  Description of Artificial Sequence: Synthetic oligonucleotide
gacgaauucuggagcugaa

SEQ ID NO: 1977498 - RNA, 19 nt, Artificial Sequence
  Description of Artificial Sequence: Synthetic oligonucleotide
cuucugcacaggggcagug

SEQ ID NO: 1977499 - RNA, 19 nt, Artificial Sequence
  Description of Artificial Sequence: Synthetic oligonucleotide
acccggauagcagcagcca

SEQ ID NO: 1977500 - RNA, 19 nt, Artificial Sequence
  Description of Artificial Sequence: Synthetic oligonucleotide
cauguccgcguggaacuuc

SEQ ID NO: 1977501 - RNA, 19 nt, Artificial Sequence
  Description of Artificial Sequence: Synthetic oligonucleotide
cuggagcugaaacugugau

SEQ ID NO: 1977502 - RNA, 19 nt, Artificial Sequence
  Description of Artificial Sequence: Synthetic oligonucleotide
gcugucacaguggaacguc

SEQ ID NO: 1977503 - RNA, 19 nt, Artificial Sequence
  Description of Artificial Sequence: Synthetic oligonucleotide
uggcagggagcgagaucac

SEQ ID NO: 1977504 - RNA, 19 nt, Artificial Sequence
  Description of Artificial Sequence: Synthetic oligonucleotide
gcucagguugcuggguugc

SEQ ID NO: 1977505 - RNA, 19 nt, Artificial Sequence
  Description of Artificial Sequence: Synthetic oligonucleotide
gaacgggcgcucggugcag

SEQ ID NO: 1977506 - RNA, 19 nt, Artificial Sequence
  Description of Artificial Sequence: Synthetic oligonucleotide
gcuccgacuggugcaggcg

SEQ ID NO: 1977507 - RNA, 19 nt, Artificial Sequence
  Description of Artificial Sequence: Synthetic oligonucleotide
gcacuuguagggccggcuc

SEQ ID NO: 1977508 - RNA, 19 nt, Artificial Sequence
  Description of Artificial Sequence: Synthetic oligonucleotide
ccuugcuggagcacgagua

SEQ ID NO: 1977509 - RNA, 19 nt, Artificial Sequence
  Description of Artificial Sequence: Synthetic oligonucleotide
cguaggggcgagaucuggc

SEQ ID NO: 1977510 - RNA, 19 nt, Artificial Sequence
  Description of Artificial Sequence: Synthetic oligonucleotide
ggcgagaucuggcacuugu

SEQ ID NO: 1977511 - RNA, 19 nt, Artificial Sequence
  Description of Artificial Sequence: Synthetic oligonucleotide
ccuuuucaaguccgagcug

SEQ ID NO: 1977512 - RNA, 19 nt, Artificial Sequence
  Description of Artificial Sequence: Synthetic oligonucleotide
ccguaggcagucuugaacu

SEQ ID NO: 1977513 - RNA, 19 nt, Artificial Sequence
  Description of Artificial Sequence: Synthetic oligonucleotide
aacgggcgcucggugcagu

SEQ ID NO: 1977514 - RNA, 19 nt, Artificial Sequence
  Description of Artificial Sequence: Synthetic oligonucleotide
ggugcaggcgugugcuuga

SEQ ID NO: 1977515 - RNA, 19 nt, Artificial Sequence
  Description of Artificial Sequence: Synthetic oligonucleotide
uccuuccuuuccggggccu

SEQ ID NO: 1977516 - RNA, 19 nt, Artificial Sequence
  Description of Artificial Sequence: Synthetic oligonucleotide
ucacggugguugucugguu

SEQ ID NO: 1977517 - RNA, 19 nt, Artificial Sequence
  Description of Artificial Sequence: Synthetic oligonucleotide
gggugcuccgacuggugca

SEQ ID NO: 1977518 - RNA, 19 nt, Artificial Sequence
  Description of Artificial Sequence: Synthetic oligonucleotide
cuggcguaggggcgagauc

SEQ ID NO: 1977519 - RNA, 19 nt, Artificial Sequence
  Description of Artificial Sequence: Synthetic oligonucleotide
ggaugugcgacuugagguu

SEQ ID NO: 1977520 - RNA, 19 nt, Artificial Sequence
  Description of Artificial Sequence: Synthetic oligonucleotide
gucggccgccgcguagucg

SEQ ID NO: 1977521 - RNA, 19 nt, Artificial Sequence
  Description of Artificial Sequence: Synthetic oligonucleotide
cucgcacuugugggguuug

SEQ ID NO: 1977522 - RNA, 19 nt, Artificial Sequence
  Description of Artificial Sequence: Synthetic oligonucleotide
ccauguucaaagacgaauu

SEQ ID NO: 1977523 - RNA, 19 nt, Artificial Sequence
  Description of Artificial Sequence: Synthetic oligonucleotide
gagggcuuucuggcacgug

SEQ ID NO: 1977524 - RNA, 19 nt, Artificial Sequence
  Description of Artificial Sequence: Synthetic oligonucleotide
gcguuacagagccagcacu

SEQ ID NO: 1977525 - RNA, 19 nt, Artificial Sequence
  Description of Artificial Sequence: Synthetic oligonucleotide
gagcgcaggugcacaguga

SEQ ID NO: 1977526 - RNA, 19 nt, Artificial Sequence
  Description of Artificial Sequence: Synthetic oligonucleotide
cagcgcaugugcgucuuca

SEQ ID NO: 1977527 - RNA, 19 nt, Artificial Sequence
  Description of Artificial Sequence: Synthetic oligonucleotide
agggccggcucguccgagu

SEQ ID NO: 1977528 - RNA, 19 nt, Artificial Sequence
  Description of Artificial Sequence: Synthetic oligonucleotide
gcguaggggcgagaucugg

SEQ ID NO: 1977529 - RNA, 19 nt, Artificial Sequence
  Description of Artificial Sequence: Synthetic oligonucleotide
gaccugccggcugcucugc

SEQ ID NO: 1977530 - RNA, 19 nt, Artificial Sequence
  Description of Artificial Sequence: Synthetic oligonucleotide
cuuguagggccggcucguc

SEQ ID NO: 1977531 - RNA, 19 nt, Artificial Sequence
  Description of Artificial Sequence: Synthetic oligonucleotide
uagggccggcucguccgag

SEQ ID NO: 1977532 - RNA, 19 nt, Artificial Sequence
  Description of Artificial Sequence: Synthetic oligonucleotide
cccgagugcacgaucaugu

SEQ ID NO: 1977533 - RNA, 19 nt, Artificial Sequence
  Description of Artificial Sequence: Synthetic oligonucleotide
cccgcaugaaugaggcguc

SEQ ID NO: 1977534 - RNA, 19 nt, Artificial Sequence
  Description of Artificial Sequence: Synthetic oligonucleotide
gugcgacuugagguucgcc

SEQ ID NO: 1977535 - RNA, 19 nt, Artificial Sequence
  Description of Artificial Sequence: Synthetic oligonucleotide
cgcucgugcacgcgcagcg

SEQ ID NO: 1977536 - RNA, 19 nt, Artificial Sequence
  Description of Artificial Sequence: Synthetic oligonucleotide
gcaacccggauagcagcag

SEQ ID NO: 1977537 - RNA, 19 nt, Artificial Sequence
  Description of Artificial Sequence: Synthetic oligonucleotide
gcugcggagcgaguccucc

SEQ ID NO: 1977538 - RNA, 19 nt, Artificial Sequence
  Description of Artificial Sequence: Synthetic oligonucleotide
gcugucggccgccgcguag

SEQ ID NO: 1977539 - RNA, 19 nt, Artificial Sequence
  Description of Artificial Sequence: Synthetic oligonucleotide
agcggacgucgcagaacuc

SEQ ID NO: 1977540 - RNA, 19 nt, Artificial Sequence
  Description of Artificial Sequence: Synthetic oligonucleotide
cagggagcgagaucacggu

SEQ ID NO: 1977541 - RNA, 19 nt, Artificial Sequence
  Description of Artificial Sequence: Synthetic oligonucleotide
cggacgucgcagaacucgc

SEQ ID NO: 1977542 - RNA, 19 nt, Artificial Sequence
  Description of Artificial Sequence: Synthetic oligonucleotide
guucgccuucauggugcag

SEQ ID NO: 1977543 - RNA, 19 nt, Artificial Sequence
  Description of Artificial Sequence: Synthetic oligonucleotide
ggcaacccggauagcagca

SEQ ID NO: 1977544 - RNA, 19 nt, Artificial Sequence
  Description of Artificial Sequence: Synthetic oligonucleotide
gggcuuucuggcacgugac

SEQ ID NO: 1977545 - RNA, 19 nt, Artificial Sequence
  Description of Artificial Sequence: Synthetic oligonucleotide
ggccggcucguccgagugg

SEQ ID NO: 1977546 - RNA, 19 nt, Artificial Sequence
  Description of Artificial Sequence: Synthetic oligonucleotide
gucgcacgucuuacacuug

SEQ ID NO: 1977547 - RNA, 19 nt, Artificial Sequence
  Description of Artificial Sequence: Synthetic oligonucleotide
gguucgccuucauggugca

SEQ ID NO: 1977548 - RNA, 19 nt, Artificial Sequence
  Description of Artificial Sequence: Synthetic oligonucleotide
guagggccggcucguccga

SEQ ID NO: 1977549 - RNA, 19 nt, Artificial Sequence
  Description of Artificial Sequence: Synthetic oligonucleotide
aggcagucuugaacuggca

SEQ ID NO: 1977550 - RNA, 19 nt, Artificial Sequence
  Description of Artificial Sequence: Synthetic oligonucleotide
gggcgcucggugcagugga

SEQ ID NO: 1977551 - RNA, 19 nt, Artificial Sequence
  Description of Artificial Sequence: Synthetic oligonucleotide
ggaugcgcucgugcacgcg

SEQ ID NO: 1977552 - RNA, 19 nt, Artificial Sequence
  Description of Artificial Sequence: Synthetic oligonucleotide
cgagcgcaggugcacagug

SEQ ID NO: 1977553 - RNA, 19 nt, Artificial Sequence
  Description of Artificial Sequence: Synthetic oligonucleotide
gggccggcucguccgagug

SEQ ID NO: 1977554 - RNA, 19 nt, Artificial Sequence
  Description of Artificial Sequence: Synthetic oligonucleotide
uguccgcguggaacuucuu

SEQ ID NO: 1977555 - RNA, 19 nt, Artificial Sequence
  Description of Artificial Sequence: Synthetic oligonucleotide
gcguagucgcacgucuuac

SEQ ID NO: 1977556 - RNA, 19 nt, Artificial Sequence
  Description of Artificial Sequence: Synthetic oligonucleotide
ugcugucggccgccgcgua

SEQ ID NO: 1977557 - RNA, 19 nt, Artificial Sequence
  Description of Artificial Sequence: Synthetic oligonucleotide
cuccgacuggugcaggcgu

SEQ ID NO: 1977558 - RNA, 19 nt, Artificial Sequence
  Description of Artificial Sequence: Synthetic oligonucleotide
gacgcccgugugacagcgc

SEQ ID NO: 1977559 - RNA, 19 nt, Artificial Sequence
  Description of Artificial Sequence: Synthetic oligonucleotide
ggagcgagaucacgguggu

SEQ ID NO: 1977560 - RNA, 19 nt, Artificial Sequence
  Description of Artificial Sequence: Synthetic oligonucleotide
augaggcgucacagcuguc

SEQ ID NO: 1977561 - RNA, 19 nt, Artificial Sequence
  Description of Artificial Sequence: Synthetic oligonucleotide
cacggugguugucugguuu

SEQ ID NO: 1977562 - RNA, 19 nt, Artificial Sequence
  Description of Artificial Sequence: Synthetic oligonucleotide
gugugcuggucagcuggca

SEQ ID NO: 1977563 - RNA, 19 nt, Artificial Sequence
  Description of Artificial Sequence: Synthetic oligonucleotide
gcagcggacgucgcagaac

SEQ ID NO: 1977564 - RNA, 19 nt, Artificial Sequence
  Description of Artificial Sequence: Synthetic oligonucleotide
gcggagcgaguccucccgc

SEQ ID NO: 1977565 - RNA, 19 nt, Artificial Sequence
  Description of Artificial Sequence: Synthetic oligonucleotide
gugcgagcgcaggugcaca

SEQ ID NO: 1977566 - RNA, 19 nt, Artificial Sequence
  Description of Artificial Sequence: Synthetic oligonucleotide
ccgugugacagcgcaugug

SEQ ID NO: 1977567 - RNA, 19 nt, Artificial Sequence
  Description of Artificial Sequence: Synthetic oligonucleotide
acuuggcguuacagagcca

SEQ ID NO: 1977568 - RNA, 19 nt, Artificial Sequence
  Description of Artificial Sequence: Synthetic oligonucleotide
ggagcacgaguagcugcac

SEQ ID NO: 1977569 - RNA, 19 nt, Artificial Sequence
  Description of Artificial Sequence: Synthetic oligonucleotide
ggcuuucuggcacgugacu

SEQ ID NO: 1977570 - RNA, 19 nt, Artificial Sequence
  Description of Artificial Sequence: Synthetic oligonucleotide
cgcguggaacuucuucaug

SEQ ID NO: 1977571 - RNA, 19 nt, Artificial Sequence
  Description of Artificial Sequence: Synthetic oligonucleotide
cguccgaguggaugcgcag

SEQ ID NO: 1977572 - RNA, 19 nt, Artificial Sequence
  Description of Artificial Sequence: Synthetic oligonucleotide
cguagucgcacgucuuaca

SEQ ID NO: 1977573 - RNA, 19 nt, Artificial Sequence
  Description of Artificial Sequence: Synthetic oligonucleotide
gccggcucguccgagugga

SEQ ID NO: 1977574 - RNA, 19 nt, Artificial Sequence
  Description of Artificial Sequence: Synthetic oligonucleotide
ggccuugcuggagcacgag

SEQ ID NO: 1977575 - RNA, 19 nt, Artificial Sequence
  Description of Artificial Sequence: Synthetic oligonucleotide
gcuuucuggcacgugacuu

SEQ ID NO: 1977576 - RNA, 19 nt, Artificial Sequence
  Description of Artificial Sequence: Synthetic oligonucleotide
gccgcguagucgcacgucu

SEQ ID NO: 1977577 - RNA, 19 nt, Artificial Sequence
  Description of Artificial Sequence: Synthetic oligonucleotide
gcgacuugagguucgccuu

SEQ ID NO: 1977578 - RNA, 19 nt, Artificial Sequence
  Description of Artificial Sequence: Synthetic oligonucleotide
gcgcucggugcaguggaug

SEQ ID NO: 1977579 - RNA, 19 nt, Artificial Sequence
  Description of Artificial Sequence: Synthetic oligonucleotide
ggcguaggggcgagaucug

SEQ ID NO: 1977580 - RNA, 19 nt, Artificial Sequence
  Description of Artificial Sequence: Synthetic oligonucleotide
cagcgcggccuugcuggag

SEQ ID NO: 1977581 - RNA, 19 nt, Artificial Sequence
  Description of Artificial Sequence: Synthetic oligonucleotide
ggacgucgcagaacucgca

SEQ ID NO: 1977582 - RNA, 19 nt, Artificial Sequence
  Description of Artificial Sequence: Synthetic oligonucleotide
ccccgagugcacgaucaug

SEQ ID NO: 1977583 - RNA, 19 nt, Artificial Sequence
  Description of Artificial Sequence: Synthetic oligonucleotide
gcuggcggcugucacuggu

SEQ ID NO: 1977584 - RNA, 19 nt, Artificial Sequence
  Description of Artificial Sequence: Synthetic oligonucleotide
gugcaguggaugcgcucgu

SEQ ID NO: 1977585 - RNA, 19 nt, Artificial Sequence
  Description of Artificial Sequence: Synthetic oligonucleotide
gcucgugcacgcgcagcgc

SEQ ID NO: 1977586 - RNA, 19 nt, Artificial Sequence
  Description of Artificial Sequence: Synthetic oligonucleotide
gugggcagguaaguuugau

SEQ ID NO: 1977587 - RNA, 19 nt, Artificial Sequence
  Description of Artificial Sequence: Synthetic oligonucleotide
gcgagaucacggugguugu

SEQ ID NO: 1977588 - RNA, 19 nt, Artificial Sequence
  Description of Artificial Sequence: Synthetic oligonucleotide
cgcaugaaugaggcgucac

SEQ ID NO: 1977589 - RNA, 19 nt, Artificial Sequence
  Description of Artificial Sequence: Synthetic oligonucleotide
gcuugacgcccgugugaca

SEQ ID NO: 1977590 - RNA, 19 nt, Artificial Sequence
  Description of Artificial Sequence: Synthetic oligonucleotide
caccgugcuggcggcuguc

SEQ ID NO: 1977591 - RNA, 19 nt, Artificial Sequence
  Description of Artificial Sequence: Synthetic oligonucleotide
gguacucauugugcugccu

SEQ ID NO: 1977592 - RNA, 19 nt, Artificial Sequence
  Description of Artificial Sequence: Synthetic oligonucleotide
gccuugcuggagcacgagu

SEQ ID NO: 1977593 - RNA, 19 nt, Artificial Sequence
  Description of Artificial Sequence: Synthetic oligonucleotide
ccgggugcuccgacuggug

SEQ ID NO: 1977594 - RNA, 19 nt, Artificial Sequence
  Description of Artificial Sequence: Synthetic oligonucleotide
ggagcgaguccucccgcau

SEQ ID NO: 1977595 - RNA, 19 nt, Artificial Sequence
  Description of Artificial Sequence: Synthetic oligonucleotide
ccgaacugaugguucuugu

SEQ ID NO: 1977596 - RNA, 19 nt, Artificial Sequence
  Description of Artificial Sequence: Synthetic oligonucleotide
gcggcagggacugucuccu

SEQ ID NO: 1977597 - RNA, 19 nt, Artificial Sequence
  Description of Artificial Sequence: Synthetic oligonucleotide
ugucaccgguguggaucuu

SEQ ID NO: 1977598 - RNA, 19 nt, Artificial Sequence
  Description of Artificial Sequence: Synthetic oligonucleotide
cugucggccgccgcguagu

SEQ ID NO: 1977599 - RNA, 19 nt, Artificial Sequence
  Description of Artificial Sequence: Synthetic oligonucleotide
cgcaaaccucgcacuugug

SEQ ID NO: 1977600 - RNA, 19 nt, Artificial Sequence
  Description of Artificial Sequence: Synthetic oligonucleotide
gcgagaucuggcacuugua

SEQ ID NO: 1977601 - RNA, 19 nt, Artificial Sequence
  Description of Artificial Sequence: Synthetic oligonucleotide
ggugaccugccggcugcuc

SEQ ID NO: 1977602 - RNA, 19 nt, Artificial Sequence
  Description of Artificial Sequence: Synthetic oligonucleotide
cucagguugcuggguugcu

SEQ ID NO: 1977603 - RNA, 19 nt, Artificial Sequence
  Description of Artificial Sequence: Synthetic oligonucleotide
gcuggcguaggggcgagau

SEQ ID NO: 1977604 - RNA, 19 nt, Artificial Sequence
  Description of Artificial Sequence: Synthetic oligonucleotide
gugcacgaucaugugccuu

SEQ ID NO: 1977605 - RNA, 19 nt, Artificial Sequence
  Description of Artificial Sequence: Synthetic oligonucleotide
cggcucguccgaguggaug

SEQ ID NO: 1977606 - RNA, 19 nt, Artificial Sequence
  Description of Artificial Sequence: Synthetic oligonucleotide
cucugccugcugguguccu

SEQ ID NO: 1977607 - RNA, 19 nt, Artificial Sequence
  Description of Artificial Sequence: Synthetic oligonucleotide
cgagaucacggugguuguc

SEQ ID NO: 1977608 - RNA, 19 nt, Artificial Sequence
  Description of Artificial Sequence: Synthetic oligonucleotide
cgggcgcucggugcagugg

SEQ ID NO: 1977609 - RNA, 19 nt, Artificial Sequence
  Description of Artificial Sequence: Synthetic oligonucleotide
gcgcggccuugcuggagca

SEQ ID NO: 1977610 - RNA, 19 nt, Artificial Sequence
  Description of Artificial Sequence: Synthetic oligonucleotide
gggcgagaucuggcacuug

SEQ ID NO: 1977611 - RNA, 19 nt, Artificial Sequence
  Description of Artificial Sequence: Synthetic oligonucleotide
cgugggcagguaaguuuga

SEQ ID NO: 1977612 - RNA, 19 nt, Artificial Sequence
  Description of Artificial Sequence: Synthetic oligonucleotide
ggagggcuuucuggcacgu

SEQ ID NO: 1977613 - RNA, 19 nt, Artificial Sequence
  Description of Artificial Sequence: Synthetic oligonucleotide
cugcugucggccgccgcgu

SEQ ID NO: 1977614 - RNA, 19 nt, Artificial Sequence
  Description of Artificial Sequence: Synthetic oligonucleotide
ccgagcugauuuugaacuu

SEQ ID NO: 1977615 - RNA, 19 nt, Artificial Sequence
  Description of Artificial Sequence: Synthetic oligonucleotide
cggagcgaguccucccgca

SEQ ID NO: 1977616 - RNA, 19 nt, Artificial Sequence
  Description of Artificial Sequence: Synthetic oligonucleotide
cgcguagucgcacgucuua

SEQ ID NO: 1977617 - RNA, 19 nt, Artificial Sequence
  Description of Artificial Sequence: Synthetic oligonucleotide
cggugguugucugguuuuc

SEQ ID NO: 1977618 - RNA, 19 nt, Artificial Sequence
  Description of Artificial Sequence: Synthetic oligonucleotide
cuccgaacugaugguucuu

SEQ ID NO: 1977619 - RNA, 19 nt, Artificial Sequence
  Description of Artificial Sequence: Synthetic oligonucleotide
cgccuucauggugcagcgg

SEQ ID NO: 1977620 - RNA, 19 nt, Artificial Sequence
  Description of Artificial Sequence: Synthetic oligonucleotide
ccgcaugaaugaggcguca

SEQ ID NO: 1977621 - RNA, 19 nt, Artificial Sequence
  Description of Artificial Sequence: Synthetic oligonucleotide
cgucgcagaacucgcacuu

SEQ ID NO: 1977622 - RNA, 19 nt, Artificial Sequence
  Description of Artificial Sequence: Synthetic oligonucleotide
cgacuggugcaggcgugug

SEQ ID NO: 1977623 - RNA, 19 nt, Artificial Sequence
  Description of Artificial Sequence: Synthetic oligonucleotide
gagcgagaucacggugguu

SEQ ID NO: 1977624 - RNA, 19 nt, Artificial Sequence
  Description of Artificial Sequence: Synthetic oligonucleotide
ccgcguggaacuucuucau

SEQ ID NO: 1977625 - RNA, 19 nt, Artificial Sequence
  Description of Artificial Sequence: Synthetic oligonucleotide
cgcacgucuuacacuugua

SEQ ID NO: 1977626 - RNA, 19 nt, Artificial Sequence
  Description of Artificial Sequence: Synthetic oligonucleotide
ggggcgagaucuggcacuu

SEQ ID NO: 1977627 - RNA, 19 nt, Artificial Sequence
  Description of Artificial Sequence: Synthetic oligonucleotide
gugcaggcgugugcuugau

SEQ ID NO: 1977628 - RNA, 19 nt, Artificial Sequence
  Description of Artificial Sequence: Synthetic oligonucleotide
ccgacacaaacugcaccgu

SEQ ID NO: 1977629 - RNA, 19 nt, Artificial Sequence
  Description of Artificial Sequence: Synthetic oligonucleotide
cccgugugacagcgcaugu

SEQ ID NO: 1977630 - RNA, 19 nt, Artificial Sequence
  Description of Artificial Sequence: Synthetic oligonucleotide
gcgagcgcaggugcacagu

SEQ ID NO: 1977631 - RNA, 19 nt, Artificial Sequence
  Description of Artificial Sequence: Synthetic oligonucleotide
gcgaguccucccgcaugaa

SEQ ID NO: 1977632 - RNA, 19 nt, Artificial Sequence
  Description of Artificial Sequence: Synthetic oligonucleotide
cgaguccucccgcaugaau

SEQ ID NO: 1977633 - RNA, 19 nt, Artificial Sequence
  Description of Artificial Sequence: Synthetic oligonucleotide
ccgacuggugcaggcgugu

SEQ ID NO: 1977634 - RNA, 19 nt, Artificial Sequence
  Description of Artificial Sequence: Synthetic oligonucleotide
ggcuggcguaggggcgaga

SEQ ID NO: 1977635 - RNA, 19 nt, Artificial Sequence
  Description of Artificial Sequence: Synthetic oligonucleotide
cgccgcguagucgcacguc

SEQ ID NO: 1977636 - RNA, 19 nt, Artificial Sequence
  Description of Artificial Sequence: Synthetic oligonucleotide
cgcggccuugcuggagcac

SEQ ID NO: 1977637 - RNA, 19 nt, Artificial Sequence
  Description of Artificial Sequence: Synthetic oligonucleotide
ccgcguagucgcacgucuu

SEQ ID NO: 1977638 - RNA, 19 nt, Artificial Sequence
  Description of Artificial Sequence: Synthetic oligonucleotide
ggcgcucggugcaguggau

SEQ ID NO: 1977639 - RNA, 19 nt, Artificial Sequence
  Description of Artificial Sequence: Synthetic oligonucleotide
ccgccgcguagucgcacgu

SEQ ID NO: 1977640 - RNA, 19 nt, Artificial Sequence
  Description of Artificial Sequence: Synthetic oligonucleotide
ccggcucguccgaguggau

SEQ ID NO: 1977641 - RNA, 19 nt, Artificial Sequence
  Description of Artificial Sequence: Synthetic oligonucleotide
uacaauaucacuuaauucu

SEQ ID NO: 1977642 - RNA, 19 nt, Artificial Sequence
  Description of Artificial Sequence: Synthetic oligonucleotide
uuucuuaugaaauugggug

SEQ ID NO: 1977643 - RNA, 19 nt, Artificial Sequence
  Description of Artificial Sequence: Synthetic oligonucleotide
auuaaauugguuugcaaac

SEQ ID NO: 1977644 - RNA, 19 nt, Artificial Sequence
  Description of Artificial Sequence: Synthetic oligonucleotide
guauauauugguuaguucc

SEQ ID NO: 1977645 - RNA, 19 nt, Artificial Sequence
  Description of Artificial Sequence: Synthetic oligonucleotide
uuagauuaaaggcaugugc

SEQ ID NO: 1977646 - RNA, 19 nt, Artificial Sequence
  Description of Artificial Sequence: Synthetic oligonucleotide
gaauguauauucuuuagug

SEQ ID NO: 1977647 - RNA, 19 nt, Artificial Sequence
  Description of Artificial Sequence: Synthetic oligonucleotide
uguaauguauucuugguca

SEQ ID NO: 1977648 - RNA, 19 nt, Artificial Sequence
  Description of Artificial Sequence: Synthetic oligonucleotide
aaugugucggcuauggagc

SEQ ID NO: 1977649 - RNA, 19 nt, Artificial Sequence
  Description of Artificial Sequence: Synthetic oligonucleotide
aauguauauucuuuagugu

SEQ ID NO: 1977650 - RNA, 19 nt, Artificial Sequence
  Description of Artificial Sequence: Synthetic oligonucleotide
ucuauuuuagagaaguguc

SEQ ID NO: 1977651 - RNA, 19 nt, Artificial Sequence
  Description of Artificial Sequence: Synthetic oligonucleotide
uuuagagaaguguccaugg

SEQ ID NO: 1977652 - RNA, 19 nt, Artificial Sequence
  Description of Artificial Sequence: Synthetic oligonucleotide
acugaaaucacccacuacu

SEQ ID NO: 1977653 - RNA, 19 nt, Artificial Sequence
  Description of Artificial Sequence: Synthetic oligonucleotide
uguuucuuaugaaauuggg

SEQ ID NO: 1977654 - RNA, 19 nt, Artificial Sequence
  Description of Artificial Sequence: Synthetic oligonucleotide
uucuuaugaaauugggugg

SEQ ID NO: 1977655 - RNA, 19 nt, Artificial Sequence
  Description of Artificial Sequence: Synthetic oligonucleotide
gauucuacaugguauguag

SEQ ID NO: 1977656 - RNA, 19 nt, Artificial Sequence
  Description of Artificial Sequence: Synthetic oligonucleotide
uaaugugucggcuauggag

SEQ ID NO: 1977657 - RNA, 19 nt, Artificial Sequence
  Description of Artificial Sequence: Synthetic oligonucleotide
cagugcauaauuaaauugg

SEQ ID NO: 1977658 - RNA, 19 nt, Artificial Sequence
  Description of Artificial Sequence: Synthetic oligonucleotide
uguacaauaucacuuaauu

SEQ ID NO: 1977659 - RNA, 19 nt, Artificial Sequence
  Description of Artificial Sequence: Synthetic oligonucleotide
ugugaucuauuuuagagaa

SEQ ID NO: 1977660 - RNA, 19 nt, Artificial Sequence
  Description of Artificial Sequence: Synthetic oligonucleotide
gugucuuuaaguucaauag

SEQ ID NO: 1977661 - RNA, 19 nt, Artificial Sequence
  Description of Artificial Sequence: Synthetic oligonucleotide
aaguucaauaguauguuuc

SEQ ID NO: 1977662 - RNA, 19 nt, Artificial Sequence
  Description of Artificial Sequence: Synthetic oligonucleotide
acuacuacugacuuggagu

SEQ ID NO: 1977663 - RNA, 19 nt, Artificial Sequence
  Description of Artificial Sequence: Synthetic oligonucleotide
uugccauuaggccucaggg

SEQ ID NO: 1977664 - RNA, 19 nt, Artificial Sequence
  Description of Artificial Sequence: Synthetic oligonucleotide
ucagugcauaauuaaauug

SEQ ID NO: 1977665 - RNA, 19 nt, Artificial Sequence
  Description of Artificial Sequence: Synthetic oligonucleotide
uuugauguacaauaucacu

SEQ ID NO: 1977666 - RNA, 19 nt, Artificial Sequence
  Description of Artificial Sequence: Synthetic oligonucleotide
ugaucuauuuuagagaagu

SEQ ID NO: 1977667 - RNA, 19 nt, Artificial Sequence
  Description of Artificial Sequence: Synthetic oligonucleotide
uucuacaugguauguagag

SEQ ID NO: 1977668 - RNA, 19 nt, Artificial Sequence
  Description of Artificial Sequence: Synthetic oligonucleotide
uauauauugguuaguucca

SEQ ID NO: 1977669 - RNA, 19 nt, Artificial Sequence
  Description of Artificial Sequence: Synthetic oligonucleotide
uucuguauauauugguuag

SEQ ID NO: 1977670 - RNA, 19 nt, Artificial Sequence
  Description of Artificial Sequence: Synthetic oligonucleotide
aauugggugggccagaguu

SEQ ID NO: 1977671 - RNA, 19 nt, Artificial Sequence
  Description of Artificial Sequence: Synthetic oligonucleotide
cuauuuuagagaagugucc

SEQ ID NO: 1977672 - RNA, 19 nt, Artificial Sequence
  Description of Artificial Sequence: Synthetic oligonucleotide
guuggcaugcucucgaagg

SEQ ID NO: 1977673 - RNA, 19 nt, Artificial Sequence
  Description of Artificial Sequence: Synthetic oligonucleotide
uugauguacaauaucacuu

SEQ ID NO: 1977674 - RNA, 19 nt, Artificial Sequence
  Description of Artificial Sequence: Synthetic oligonucleotide
aauaucacuuaauucugau

SEQ ID NO: 1977675 - RNA, 19 nt, Artificial Sequence
  Description of Artificial Sequence: Synthetic oligonucleotide
cuuuaaguucaauaguaug

SEQ ID NO: 1977676 - RNA, 19 nt, Artificial Sequence
  Description of Artificial Sequence: Synthetic oligonucleotide
ucuuaugaaauuggguggg

SEQ ID NO: 1977677 - RNA, 19 nt, Artificial Sequence
  Description of Artificial Sequence: Synthetic oligonucleotide
gaucuucuucucuaggcgg

SEQ ID NO: 1977678 - RNA, 19 nt, Artificial Sequence
  Description of Artificial Sequence: Synthetic oligonucleotide
uuuuauuccagaugaccug

SEQ ID NO: 1977679 - RNA, 19 nt, Artificial Sequence
  Description of Artificial Sequence: Synthetic oligonucleotide
ugcuguacuuugaugagcc

SEQ ID NO: 1977680 - RNA, 19 nt, Artificial Sequence
  Description of Artificial Sequence: Synthetic oligonucleotide
aucucagaaaccugggcac

SEQ ID NO: 1977681 - RNA, 19 nt, Artificial Sequence
  Description of Artificial Sequence: Synthetic oligonucleotide
ggugugaucuauuuuagag

SEQ ID NO: 1977682 - RNA, 19 nt, Artificial Sequence
  Description of Artificial Sequence: Synthetic oligonucleotide
ucuugcauggaugacuggg

SEQ ID NO: 1977683 - RNA, 19 nt, Artificial Sequence
  Description of Artificial Sequence: Synthetic oligonucleotide
auaaacucaggguccugcc

SEQ ID NO: 1977684 - RNA, 19 nt, Artificial Sequence
  Description of Artificial Sequence: Synthetic oligonucleotide
ucuacuggagaaagugggg

SEQ ID NO: 1977685 - RNA, 19 nt, Artificial Sequence
  Description of Artificial Sequence: Synthetic oligonucleotide
ugucuacuggagaaagugg

SEQ ID NO: 1977686 - RNA, 19 nt, Artificial Sequence
  Description of Artificial Sequence: Synthetic oligonucleotide
aaagugggguacugaaauc

SEQ ID NO: 1977687 - RNA, 19 nt, Artificial Sequence
  Description of Artificial Sequence: Synthetic oligonucleotide
cauagauccaccugccucc

SEQ ID NO: 1977688 - RNA, 19 nt, Artificial Sequence
  Description of Artificial Sequence: Synthetic oligonucleotide
cauaauuaaauugguuugc

SEQ ID NO: 1977689 - RNA, 19 nt, Artificial Sequence
  Description of Artificial Sequence: Synthetic oligonucleotide
acuuugaugagccgagguc

SEQ ID NO: 1977690 - RNA, 19 nt, Artificial Sequence
  Description of Artificial Sequence: Synthetic oligonucleotide
accccuuuaauucagugca

SEQ ID NO: 1977691 - RNA, 19 nt, Artificial Sequence
  Description of Artificial Sequence: Synthetic oligonucleotide
uauguagaggcaaccaggu

SEQ ID NO: 1977692 - RNA, 19 nt, Artificial Sequence
  Description of Artificial Sequence: Synthetic oligonucleotide
cagaguuuggugcauacag

SEQ ID NO: 1977693 - RNA, 19 nt, Artificial Sequence
  Description of Artificial Sequence: Synthetic oligonucleotide
auauucuuuagugucuggg

SEQ ID NO: 1977694 - RNA, 19 nt, Artificial Sequence
  Description of Artificial Sequence: Synthetic oligonucleotide
uggccuacuguguagaaug

SEQ ID NO: 1977695 - RNA, 19 nt, Artificial Sequence
  Description of Artificial Sequence: Synthetic oligonucleotide
ugcaaagguaaugugucgg

SEQ ID NO: 1977696 - RNA, 19 nt, Artificial Sequence
  Description of Artificial Sequence: Synthetic oligonucleotide
aguucaauaguauguuucu

SEQ ID NO: 1977697 - RNA, 19 nt, Artificial Sequence
  Description of Artificial Sequence: Synthetic oligonucleotide
uaauucagugcauaauuaa

SEQ ID NO: 1977698 - RNA, 19 nt, Artificial Sequence
  Description of Artificial Sequence: Synthetic oligonucleotide
aauugguuugcaaacuucu

SEQ ID NO: 1977699 - RNA, 19 nt, Artificial Sequence
  Description of Artificial Sequence: Synthetic oligonucleotide
agaacuguaauguauucuu

SEQ ID NO: 1977700 - RNA, 19 nt, Artificial Sequence
  Description of Artificial Sequence: Synthetic oligonucleotide
uuuuagagaaguguccaug

SEQ ID NO: 1977701 - RNA, 19 nt, Artificial Sequence
  Description of Artificial Sequence: Synthetic oligonucleotide
uguguagaauguauauucu

SEQ ID NO: 1977702 - RNA, 19 nt, Artificial Sequence
  Description of Artificial Sequence: Synthetic oligonucleotide
aguaaucugugucuuuaag

SEQ ID NO: 1977703 - RNA, 19 nt, Artificial Sequence
  Description of Artificial Sequence: Synthetic oligonucleotide
uucaauaguauguuucuua

SEQ ID NO: 1977704 - RNA, 19 nt, Artificial Sequence
  Description of Artificial Sequence: Synthetic oligonucleotide
auccuucauaaacucaggg

SEQ ID NO: 1977705 - RNA, 19 nt, Artificial Sequence
  Description of Artificial Sequence: Synthetic oligonucleotide
gauccugucguucgcagag

SEQ ID NO: 1977706 - RNA, 19 nt, Artificial Sequence
  Description of Artificial Sequence: Synthetic oligonucleotide
ucaauaguauguuucuuau

SEQ ID NO: 1977707 - RNA, 19 nt, Artificial Sequence
  Description of Artificial Sequence: Synthetic oligonucleotide
ucggcuauggagcaucuca

SEQ ID NO: 1977708 - RNA, 19 nt, Artificial Sequence
  Description of Artificial Sequence: Synthetic oligonucleotide
cuuugaugagccgaggucc

SEQ ID NO: 1977709 - RNA, 19 nt, Artificial Sequence
  Description of Artificial Sequence: Synthetic oligonucleotide
uggaagacccagcccaugg

SEQ ID NO: 1977710 - RNA, 19 nt, Artificial Sequence
  Description of Artificial Sequence: Synthetic oligonucleotide
uaguauguuucuuaugaaa

SEQ ID NO: 1977711 - RNA, 19 nt, Artificial Sequence
  Description of Artificial Sequence: Synthetic oligonucleotide
uuuggugcauacagaacug

SEQ ID NO: 1977712 - RNA, 19 nt, Artificial Sequence
  Description of Artificial Sequence: Synthetic oligonucleotide
aacagauucuacaugguau

SEQ ID NO: 1977713 - RNA, 19 nt, Artificial Sequence
  Description of Artificial Sequence: Synthetic oligonucleotide
ucuuuaaguucaauaguau

SEQ ID NO: 1977714 - RNA, 19 nt, Artificial Sequence
  Description of Artificial Sequence: Synthetic oligonucleotide
acugacuuggaguaaucug

SEQ ID NO: 1977715 - RNA, 19 nt, Artificial Sequence
  Description of Artificial Sequence: Synthetic oligonucleotide
aauguauucuuggucaaaa

SEQ ID NO: 1977716 - RNA, 19 nt, Artificial Sequence
  Description of Artificial Sequence: Synthetic oligonucleotide
guauguagaggcaaccagg

SEQ ID NO: 1977717 - RNA, 19 nt, Artificial Sequence
  Description of Artificial Sequence: Synthetic oligonucleotide
aucuauuuuagagaagugu

SEQ ID NO: 1977718 - RNA, 19 nt, Artificial Sequence
  Description of Artificial Sequence: Synthetic oligonucleotide
guugccuuugcucacgggc

SEQ ID NO: 1977719 - RNA, 19 nt, Artificial Sequence
  Description of Artificial Sequence: Synthetic oligonucleotide
aacuacucucugcacagcu

SEQ ID NO: 1977720 - RNA, 19 nt, Artificial Sequence
  Description of Artificial Sequence: Synthetic oligonucleotide
aaaucacccacuacuacug

SEQ ID NO: 1977721 - RNA, 19 nt, Artificial Sequence
  Description of Artificial Sequence: Synthetic oligonucleotide
ugcacaggcucaaacuucc

SEQ ID NO: 1977722 - RNA, 19 nt, Artificial Sequence
  Description of Artificial Sequence: Synthetic oligonucleotide
uccuucauaaacucagggu

SEQ ID NO: 1977723 - RNA, 19 nt, Artificial Sequence
  Description of Artificial Sequence: Synthetic oligonucleotide
ucagaccaacaacagauuc

SEQ ID NO: 1977724 - RNA, 19 nt, Artificial Sequence
  Description of Artificial Sequence: Synthetic oligonucleotide
uuaaauugguuugcaaacu

SEQ ID NO: 1977725 - RNA, 19 nt, Artificial Sequence
  Description of Artificial Sequence: Synthetic oligonucleotide
ugggcuagugccuucagac

SEQ ID NO: 1977726 - RNA, 19 nt, Artificial Sequence
  Description of Artificial Sequence: Synthetic oligonucleotide
acauucuguauauauuggu

SEQ ID NO: 1977727 - RNA, 19 nt, Artificial Sequence
  Description of Artificial Sequence: Synthetic oligonucleotide
uuagagaaguguccauggc

SEQ ID NO: 1977728 - RNA, 19 nt, Artificial Sequence
  Description of Artificial Sequence: Synthetic oligonucleotide
auauugguuaguuccauuu

SEQ ID NO: 1977729 - RNA, 19 nt, Artificial Sequence
  Description of Artificial Sequence: Synthetic oligonucleotide
ugaaaucacccacuacuac

SEQ ID NO: 1977730 - RNA, 19 nt, Artificial Sequence
  Description of Artificial Sequence: Synthetic oligonucleotide
aagugggguacugaaauca

SEQ ID NO: 1977731 - RNA, 19 nt, Artificial Sequence
  Description of Artificial Sequence: Synthetic oligonucleotide
gucuacuggagaaaguggg

SEQ ID NO: 1977732 - RNA, 19 nt, Artificial Sequence
  Description of Artificial Sequence: Synthetic oligonucleotide
gagcaucucagaaaccugg

SEQ ID NO: 1977733 - RNA, 19 nt, Artificial Sequence
  Description of Artificial Sequence: Synthetic oligonucleotide
uaaauugguuugcaaacuu

SEQ ID NO: 1977734 - RNA, 19 nt, Artificial Sequence
  Description of Artificial Sequence: Synthetic oligonucleotide
uaauuaaauugguuugcaa

SEQ ID NO: 1977735 - RNA, 19 nt, Artificial Sequence
  Description of Artificial Sequence: Synthetic oligonucleotide
ucaggaacuccucuggguc

SEQ ID NO: 1977736 - RNA, 19 nt, Artificial Sequence
  Description of Artificial Sequence: Synthetic oligonucleotide
uuuauuccagaugaccugu

SEQ ID NO: 1977737 - RNA, 19 nt, Artificial Sequence
  Description of Artificial Sequence: Synthetic oligonucleotide
uacagaacuguaauguauu

SEQ ID NO: 1977738 - RNA, 19 nt, Artificial Sequence
  Description of Artificial Sequence: Synthetic oligonucleotide
cuguccucuggguugaggg

SEQ ID NO: 1977739 - RNA, 19 nt, Artificial Sequence
  Description of Artificial Sequence: Synthetic oligonucleotide
aagucacucugugagcagg

SEQ ID NO: 1977740 - RNA, 19 nt, Artificial Sequence
  Description of Artificial Sequence: Synthetic oligonucleotide
uaccccuuuaauucagugc

SEQ ID NO: 1977741 - RNA, 19 nt, Artificial Sequence
  Description of Artificial Sequence: Synthetic oligonucleotide
uucagugcauaauuaaauu

SEQ ID NO: 1977742 - RNA, 19 nt, Artificial Sequence
  Description of Artificial Sequence: Synthetic oligonucleotide
aagguaaugugucggcuau

SEQ ID NO: 1977743 - RNA, 19 nt, Artificial Sequence
  Description of Artificial Sequence: Synthetic oligonucleotide
uuaugaaauugggugggcc

SEQ ID NO: 1977744 - RNA, 19 nt, Artificial Sequence
  Description of Artificial Sequence: Synthetic oligonucleotide
cuacucucugcacagcugc

SEQ ID NO: 1977745 - RNA, 19 nt, Artificial Sequence
  Description of Artificial Sequence: Synthetic oligonucleotide
cuuuuggcuguccuggaag

SEQ ID NO: 1977746 - RNA, 19 nt, Artificial Sequence
  Description of Artificial Sequence: Synthetic oligonucleotide
guuuggugcauacagaacu

SEQ ID NO: 1977747 - RNA, 19 nt, Artificial Sequence
  Description of Artificial Sequence: Synthetic oligonucleotide
uacuguguagaauguauau

SEQ ID NO: 1977748 - RNA, 19 nt, Artificial Sequence
  Description of Artificial Sequence: Synthetic oligonucleotide
agugagauuggggugcuuc

SEQ ID NO: 1977749 - RNA, 19 nt, Artificial Sequence
  Description of Artificial Sequence: Synthetic oligonucleotide
cagaugaccugucuacugg

SEQ ID NO: 1977750 - RNA, 19 nt, Artificial Sequence
  Description of Artificial Sequence: Synthetic oligonucleotide
cuugcauggaugacugggc

SEQ ID NO: 1977751 - RNA, 19 nt, Artificial Sequence
  Description of Artificial Sequence: Synthetic oligonucleotide
ugguuaguuccauuugaug

SEQ ID NO: 1977752 - RNA, 19 nt, Artificial Sequence
  Description of Artificial Sequence: Synthetic oligonucleotide
auguuucuuaugaaauugg

SEQ ID NO: 1977753 - RNA, 19 nt, Artificial Sequence
  Description of Artificial Sequence: Synthetic oligonucleotide
augguauguagaggcaacc

SEQ ID NO: 1977754 - RNA, 19 nt, Artificial Sequence
  Description of Artificial Sequence: Synthetic oligonucleotide
ugaccugucuacuggagaa

SEQ ID NO: 1977755 - RNA, 19 nt, Artificial Sequence
  Description of Artificial Sequence: Synthetic oligonucleotide
cacuuaauucugauguuuc

SEQ ID NO: 1977756 - RNA, 19 nt, Artificial Sequence
  Description of Artificial Sequence: Synthetic oligonucleotide
ccuucauaaacucaggguc

SEQ ID NO: 1977757 - RNA, 19 nt, Artificial Sequence
  Description of Artificial Sequence: Synthetic oligonucleotide
uauuccagaugaccugucu

SEQ ID NO: 1977758 - RNA, 19 nt, Artificial Sequence
  Description of Artificial Sequence: Synthetic oligonucleotide
gguauguagaggcaaccag

SEQ ID NO: 1977759 - RNA, 19 nt, Artificial Sequence
  Description of Artificial Sequence: Synthetic oligonucleotide
cuucccauggaaugggcac

SEQ ID NO: 1977760 - RNA, 19 nt, Artificial Sequence
  Description of Artificial Sequence: Synthetic oligonucleotide
cugccaaucuggaugugcc

SEQ ID NO: 1977761 - RNA, 19 nt, Artificial Sequence
  Description of Artificial Sequence: Synthetic oligonucleotide
cugucuacuggagaaagug

SEQ ID NO: 1977762 - RNA, 19 nt, Artificial Sequence
  Description of Artificial Sequence: Synthetic oligonucleotide
ucuucccauggaaugggca

SEQ ID NO: 1977763 - RNA, 19 nt, Artificial Sequence
  Description of Artificial Sequence: Synthetic oligonucleotide
gaugagccgagguccaccc

SEQ ID NO: 1977764 - RNA, 19 nt, Artificial Sequence
  Description of Artificial Sequence: Synthetic oligonucleotide
uuaguuccauuugauguac

SEQ ID NO: 1977765 - RNA, 19 nt, Artificial Sequence
  Description of Artificial Sequence: Synthetic oligonucleotide
caucucagaaaccugggca

SEQ ID NO: 1977766 - RNA, 19 nt, Artificial Sequence
  Description of Artificial Sequence: Synthetic oligonucleotide
gucugggugaaacauucug

SEQ ID NO: 1977767 - RNA, 19 nt, Artificial Sequence
  Description of Artificial Sequence: Synthetic oligonucleotide
gagccgauccugucguucg

SEQ ID NO: 1977768 - RNA, 19 nt, Artificial Sequence
  Description of Artificial Sequence: Synthetic oligonucleotide
cauccuucauaaacucagg

SEQ ID NO: 1977769 - RNA, 19 nt, Artificial Sequence
  Description of Artificial Sequence: Synthetic oligonucleotide
uugguuaguuccauuugau

SEQ ID NO: 1977770 - RNA, 19 nt, Artificial Sequence
  Description of Artificial Sequence: Synthetic oligonucleotide
caugguauguagaggcaac

SEQ ID NO: 1977771 - RNA, 19 nt, Artificial Sequence
  Description of Artificial Sequence: Synthetic oligonucleotide
cuuagauuaaaggcaugug

SEQ ID NO: 1977772 - RNA, 19 nt, Artificial Sequence
  Description of Artificial Sequence: Synthetic oligonucleotide
gguaaugugucggcuaugg

SEQ ID NO: 1977773 - RNA, 19 nt, Artificial Sequence
  Description of Artificial Sequence: Synthetic oligonucleotide
auucagugcauaauuaaau

SEQ ID NO: 1977774 - RNA, 19 nt, Artificial Sequence
  Description of Artificial Sequence: Synthetic oligonucleotide
ucuggggaugaucuuccca

SEQ ID NO: 1977775 - RNA, 19 nt, Artificial Sequence
  Description of Artificial Sequence: Synthetic oligonucleotide
auaccccuuuaauucagug

SEQ ID NO: 1977776 - RNA, 19 nt, Artificial Sequence
  Description of Artificial Sequence: Synthetic oligonucleotide
cuggugugaucuauuuuag

SEQ ID NO: 1977777 - RNA, 19 nt, Artificial Sequence
  Description of Artificial Sequence: Synthetic oligonucleotide
auaguauguuucuuaugaa

SEQ ID NO: 1977778 - RNA, 19 nt, Artificial Sequence
  Description of Artificial Sequence: Synthetic oligonucleotide
ugagccgagguccaccccu

SEQ ID NO: 1977779 - RNA, 19 nt, Artificial Sequence
  Description of Artificial Sequence: Synthetic oligonucleotide
cugcaaagguaaugugucg

SEQ ID NO: 1977780 - RNA, 19 nt, Artificial Sequence
  Description of Artificial Sequence: Synthetic oligonucleotide
aguuccauuugauguacaa

SEQ ID NO: 1977781 - RNA, 19 nt, Artificial Sequence
  Description of Artificial Sequence: Synthetic oligonucleotide
gccauuaggccucagggcc

SEQ ID NO: 1977782 - RNA, 19 nt, Artificial Sequence
  Description of Artificial Sequence: Synthetic oligonucleotide
uggguugaggggcugcccc

SEQ ID NO: 1977783 - RNA, 19 nt, Artificial Sequence
  Description of Artificial Sequence: Synthetic oligonucleotide
uaaguucaauaguauguuu

SEQ ID NO: 1977784 - RNA, 19 nt, Artificial Sequence
  Description of Artificial Sequence: Synthetic oligonucleotide
guaaucugugucuuuaagu

SEQ ID NO: 1977785 - RNA, 19 nt, Artificial Sequence
  Description of Artificial Sequence: Synthetic oligonucleotide
augaaauugggugggccag

SEQ ID NO: 1977786 - RNA, 19 nt, Artificial Sequence
  Description of Artificial Sequence: Synthetic oligonucleotide
ugggcacuugagccgaucc

SEQ ID NO: 1977787 - RNA, 19 nt, Artificial Sequence
  Description of Artificial Sequence: Synthetic oligonucleotide
guuugcaaacuucucaugu

SEQ ID NO: 1977788 - RNA, 19 nt, Artificial Sequence
  Description of Artificial Sequence: Synthetic oligonucleotide
agugcauaauuaaauuggu

SEQ ID NO: 1977789 - RNA, 19 nt, Artificial Sequence
  Description of Artificial Sequence: Synthetic oligonucleotide
uuggcaugcucucgaaggu

SEQ ID NO: 1977790 - RNA, 19 nt, Artificial Sequence
  Description of Artificial Sequence: Synthetic oligonucleotide
gucagugagauuggggugc

SEQ ID NO: 1977791 - RNA, 19 nt, Artificial Sequence
  Description of Artificial Sequence: Synthetic oligonucleotide
aaucacccacuacuacuga

SEQ ID NO: 1977792 - RNA, 19 nt, Artificial Sequence
  Description of Artificial Sequence: Synthetic oligonucleotide
auuuuagagaaguguccau

SEQ ID NO: 1977793 - RNA, 19 nt, Artificial Sequence
  Description of Artificial Sequence: Synthetic oligonucleotide
caacaacagauucuacaug

SEQ ID NO: 1977794 - RNA, 19 nt, Artificial Sequence
  Description of Artificial Sequence: Synthetic oligonucleotide
uugcucacgggcucugucc

SEQ ID NO: 1977795 - RNA, 19 nt, Artificial Sequence
  Description of Artificial Sequence: Synthetic oligonucleotide
gcugggcucaaacucauag

SEQ ID NO: 1977796 - RNA, 19 nt, Artificial Sequence
  Description of Artificial Sequence: Synthetic oligonucleotide
uccauggccuacuguguag

SEQ ID NO: 1977797 - RNA, 19 nt, Artificial Sequence
  Description of Artificial Sequence: Synthetic oligonucleotide
gucuuuaaguucaauagua

SEQ ID NO: 1977798 - RNA, 19 nt, Artificial Sequence
  Description of Artificial Sequence: Synthetic oligonucleotide
aguuuggugcauacagaac

SEQ ID NO: 1977799 - RNA, 19 nt, Artificial Sequence
  Description of Artificial Sequence: Synthetic oligonucleotide
aagacccagcccauggcuc

SEQ ID NO: 1977800 - RNA, 19 nt, Artificial Sequence
  Description of Artificial Sequence: Synthetic oligonucleotide
ucuguauauauugguuagu

SEQ ID NO: 1977801 - RNA, 19 nt, Artificial Sequence
  Description of Artificial Sequence: Synthetic oligonucleotide
ugccccuugucaucucugg

SEQ ID NO: 1977802 - RNA, 19 nt, Artificial Sequence
  Description of Artificial Sequence: Synthetic oligonucleotide
cugucguucgcagagcuug

SEQ ID NO: 1977803 - RNA, 19 nt, Artificial Sequence
  Description of Artificial Sequence: Synthetic oligonucleotide
caggcucaaacuucccugc

SEQ ID NO: 1977804 - RNA, 19 nt, Artificial Sequence
  Description of Artificial Sequence: Synthetic oligonucleotide
gaaauugggugggccagag

SEQ ID NO: 1977805 - RNA, 19 nt, Artificial Sequence
  Description of Artificial Sequence: Synthetic oligonucleotide
cacuacuacugacuuggag

SEQ ID NO: 1977806 - RNA, 19 nt, Artificial Sequence
  Description of Artificial Sequence: Synthetic oligonucleotide
auacagaacuguaauguau

SEQ ID NO: 1977807 - RNA, 19 nt, Artificial Sequence
  Description of Artificial Sequence: Synthetic oligonucleotide
auguagaggcaaccagguc

SEQ ID NO: 1977808 - RNA, 19 nt, Artificial Sequence
  Description of Artificial Sequence: Synthetic oligonucleotide
cacuguccaccucaggacc

SEQ ID NO: 1977809 - RNA, 19 nt, Artificial Sequence
  Description of Artificial Sequence: Synthetic oligonucleotide
aaucuggaugugccugcug

SEQ ID NO: 1977810 - RNA, 19 nt, Artificial Sequence
  Description of Artificial Sequence: Synthetic oligonucleotide
ugguauguagaggcaacca

SEQ ID NO: 1977811 - RNA, 19 nt, Artificial Sequence
  Description of Artificial Sequence: Synthetic oligonucleotide
uguccauggccuacugugu

SEQ ID NO: 1977812 - RNA, 19 nt, Artificial Sequence
  Description of Artificial Sequence: Synthetic oligonucleotide
cugacuuggaguaaucugu

SEQ ID NO: 1977813 - RNA, 19 nt, Artificial Sequence
  Description of Artificial Sequence: Synthetic oligonucleotide
agaugaccugucuacugga

SEQ ID NO: 1977814 - RNA, 19 nt, Artificial Sequence
  Description of Artificial Sequence: Synthetic oligonucleotide
caccucaggaccacucagg

SEQ ID NO: 1977815 - RNA, 19 nt, Artificial Sequence
  Description of Artificial Sequence: Synthetic oligonucleotide
agugggguacugaaaucac

SEQ ID NO: 1977816 - RNA, 19 nt, Artificial Sequence
  Description of Artificial Sequence: Synthetic oligonucleotide
uggugugaucuauuuuaga

SEQ ID NO: 1977817 - RNA, 19 nt, Artificial Sequence
  Description of Artificial Sequence: Synthetic oligonucleotide
augaccugucuacuggaga

SEQ ID NO: 1977818 - RNA, 19 nt, Artificial Sequence
  Description of Artificial Sequence: Synthetic oligonucleotide
uacugacuuggaguaaucu

SEQ ID NO: 1977819 - RNA, 19 nt, Artificial Sequence
  Description of Artificial Sequence: Synthetic oligonucleotide
uccugucguucgcagagcu

SEQ ID NO: 1977820 - RNA, 19 nt, Artificial Sequence
  Description of Artificial Sequence: Synthetic oligonucleotide
caauaucacuuaauucuga

SEQ ID NO: 1977821 - RNA, 19 nt, Artificial Sequence
  Description of Artificial Sequence: Synthetic oligonucleotide
cuuaugaaauugggugggc

SEQ ID NO: 1977822 - RNA, 19 nt, Artificial Sequence
  Description of Artificial Sequence: Synthetic oligonucleotide
agaccaacaacagauucua

SEQ ID NO: 1977823 - RNA, 19 nt, Artificial Sequence
  Description of Artificial Sequence: Synthetic oligonucleotide
uugggugggccagaguuug

SEQ ID NO: 1977824 - RNA, 19 nt, Artificial Sequence
  Description of Artificial Sequence: Synthetic oligonucleotide
cuacuacugacuuggagua

SEQ ID NO: 1977825 - RNA, 19 nt, Artificial Sequence
  Description of Artificial Sequence: Synthetic oligonucleotide
accugucuacuggagaaag

SEQ ID NO: 1977826 - RNA, 19 nt, Artificial Sequence
  Description of Artificial Sequence: Synthetic oligonucleotide
gugccuucagaccaacaac

SEQ ID NO: 1977827 - RNA, 19 nt, Artificial Sequence
  Description of Artificial Sequence: Synthetic oligonucleotide
ugggugaaacauucuguau

SEQ ID NO: 1977828 - RNA, 19 nt, Artificial Sequence
  Description of Artificial Sequence: Synthetic oligonucleotide
uggugcauacagaacugua

SEQ ID NO: 1977829 - RNA, 19 nt, Artificial Sequence
  Description of Artificial Sequence: Synthetic oligonucleotide
ucguucgcagagcuugcca

SEQ ID NO: 1977830 - RNA, 19 nt, Artificial Sequence
  Description of Artificial Sequence: Synthetic oligonucleotide
acuacugacuuggaguaau

SEQ ID NO: 1977831 - RNA, 19 nt, Artificial Sequence
  Description of Artificial Sequence: Synthetic oligonucleotide
caaacuucccugcaaaggu

SEQ ID NO: 1977832 - RNA, 19 nt, Artificial Sequence
  Description of Artificial Sequence: Synthetic oligonucleotide
acgggcucuguccucuggg

SEQ ID NO: 1977833 - RNA, 19 nt, Artificial Sequence
  Description of Artificial Sequence: Synthetic oligonucleotide
gcagcaacuacucucugca

SEQ ID NO: 1977834 - RNA, 19 nt, Artificial Sequence
  Description of Artificial Sequence: Synthetic oligonucleotide
uuauuccagaugaccuguc

SEQ ID NO: 1977835 - RNA, 19 nt, Artificial Sequence
  Description of Artificial Sequence: Synthetic oligonucleotide
cuauggagcaucucagaaa

SEQ ID NO: 1977836 - RNA, 19 nt, Artificial Sequence
  Description of Artificial Sequence: Synthetic oligonucleotide
accaacuccuggugugauc

SEQ ID NO: 1977837 - RNA, 19 nt, Artificial Sequence
  Description of Artificial Sequence: Synthetic oligonucleotide
guaauguauucuuggucaa

SEQ ID NO: 1977838 - RNA, 19 nt, Artificial Sequence
  Description of Artificial Sequence: Synthetic oligonucleotide
ugucguucgcagagcuugc

SEQ ID NO: 1977839 - RNA, 19 nt, Artificial Sequence
  Description of Artificial Sequence: Synthetic oligonucleotide
gcaaagguaaugugucggc

SEQ ID NO: 1977840 - RNA, 19 nt, Artificial Sequence
  Description of Artificial Sequence: Synthetic oligonucleotide
cucagguggaagacccagc

SEQ ID NO: 1977841 - RNA, 19 nt, Artificial Sequence
  Description of Artificial Sequence: Synthetic oligonucleotide
acuguguagaauguauauu

SEQ ID NO: 1977842 - RNA, 19 nt, Artificial Sequence
  Description of Artificial Sequence: Synthetic oligonucleotide
ucuguccucuggguugagg

SEQ ID NO: 1977843 - RNA, 19 nt, Artificial Sequence
  Description of Artificial Sequence: Synthetic oligonucleotide
cauacagaacuguaaugua

SEQ ID NO: 1977844 - RNA, 19 nt, Artificial Sequence
  Description of Artificial Sequence: Synthetic oligonucleotide
auauauugguuaguuccau

SEQ ID NO: 1977845 - RNA, 19 nt, Artificial Sequence
  Description of Artificial Sequence: Synthetic oligonucleotide
ucccugcaaagguaaugug

SEQ ID NO: 1977846 - RNA, 19 nt, Artificial Sequence
  Description of Artificial Sequence: Synthetic oligonucleotide
uccaccugccucccauacc

SEQ ID NO: 1977847 - RNA, 19 nt, Artificial Sequence
  Description of Artificial Sequence: Synthetic oligonucleotide
uaguuccauuugauguaca

SEQ ID NO: 1977848 - RNA, 19 nt, Artificial Sequence
  Description of Artificial Sequence: Synthetic oligonucleotide
cuggaugugccugcugccg

SEQ ID NO: 1977849 - RNA, 19 nt, Artificial Sequence
  Description of Artificial Sequence: Synthetic oligonucleotide
cugcacaggcucaaacuuc

SEQ ID NO: 1977850 - RNA, 19 nt, Artificial Sequence
  Description of Artificial Sequence: Synthetic oligonucleotide
ggguacugaaaucacccac

SEQ ID NO: 1977851 - RNA, 19 nt, Artificial Sequence
  Description of Artificial Sequence: Synthetic oligonucleotide
guuucuuaugaaauugggu

SEQ ID NO: 1977852 - RNA, 19 nt, Artificial Sequence
  Description of Artificial Sequence: Synthetic oligonucleotide
ggcuagugccuucagacca

SEQ ID NO: 1977853 - RNA, 19 nt, Artificial Sequence
  Description of Artificial Sequence: Synthetic oligonucleotide
ugucugggugaaacauucu

SEQ ID NO: 1977854 - RNA, 19 nt, Artificial Sequence
  Description of Artificial Sequence: Synthetic oligonucleotide
uggggaugaucuucccaug

SEQ ID NO: 1977855 - RNA, 19 nt, Artificial Sequence
  Description of Artificial Sequence: Synthetic oligonucleotide
ugguucauggcagcaacua

SEQ ID NO: 1977856 - RNA, 19 nt, Artificial Sequence
  Description of Artificial Sequence: Synthetic oligonucleotide
acaugguauguagaggcaa

SEQ ID NO: 1977857 - RNA, 19 nt, Artificial Sequence
  Description of Artificial Sequence: Synthetic oligonucleotide
agccgauccugucguucgc

SEQ ID NO: 1977858 - RNA, 19 nt, Artificial Sequence
  Description of Artificial Sequence: Synthetic oligonucleotide
augagccgagguccacccc

SEQ ID NO: 1977859 - RNA, 19 nt, Artificial Sequence
  Description of Artificial Sequence: Synthetic oligonucleotide
cucugcacagcugccuugg

SEQ ID NO: 1977860 - RNA, 19 nt, Artificial Sequence
  Description of Artificial Sequence: Synthetic oligonucleotide
uuggugcauacagaacugu

SEQ ID NO: 1977861 - RNA, 19 nt, Artificial Sequence
  Description of Artificial Sequence: Synthetic oligonucleotide
ccacucagguggaagaccc

SEQ ID NO: 1977862 - RNA, 19 nt, Artificial Sequence
  Description of Artificial Sequence: Synthetic oligonucleotide
cugaaaucacccacuacua

SEQ ID NO: 1977863 - RNA, 19 nt, Artificial Sequence
  Description of Artificial Sequence: Synthetic oligonucleotide
gggugaaacauucuguaua

SEQ ID NO: 1977864 - RNA, 19 nt, Artificial Sequence
  Description of Artificial Sequence: Synthetic oligonucleotide
aguguccauggccuacugu

SEQ ID NO: 1977865 - RNA, 19 nt, Artificial Sequence
  Description of Artificial Sequence: Synthetic oligonucleotide
cugggugaaacauucugua

SEQ ID NO: 1977866 - RNA, 19 nt, Artificial Sequence
  Description of Artificial Sequence: Synthetic oligonucleotide
aggaccacucagguggaag

SEQ ID NO: 1977867 - RNA, 19 nt, Artificial Sequence
  Description of Artificial Sequence: Synthetic oligonucleotide
ugcucucgaaggucaguga

SEQ ID NO: 1977868 - RNA, 19 nt, Artificial Sequence
  Description of Artificial Sequence: Synthetic oligonucleotide
cuguacuuugaugagccga

SEQ ID NO: 1977869 - RNA, 19 nt, Artificial Sequence
  Description of Artificial Sequence: Synthetic oligonucleotide
agaguuuggugcauacaga

SEQ ID NO: 1977870 - RNA, 19 nt, Artificial Sequence
  Description of Artificial Sequence: Synthetic oligonucleotide
gaaugggcacuugagccga

SEQ ID NO: 1977871 - RNA, 19 nt, Artificial Sequence
  Description of Artificial Sequence: Synthetic oligonucleotide
gaguaaucugugucuuuaa

SEQ ID NO: 1977872 - RNA, 19 nt, Artificial Sequence
  Description of Artificial Sequence: Synthetic oligonucleotide
ugcauggaugacugggcua

SEQ ID NO: 1977873 - RNA, 19 nt, Artificial Sequence
  Description of Artificial Sequence: Synthetic oligonucleotide
ccaccugccucccauaccc

SEQ ID NO: 1977874 - RNA, 19 nt, Artificial Sequence
  Description of Artificial Sequence: Synthetic oligonucleotide
aacucaggguccugccaau

SEQ ID NO: 1977875 - RNA, 19 nt, Artificial Sequence
  Description of Artificial Sequence: Synthetic oligonucleotide
auucuacaugguauguaga

SEQ ID NO: 1977876 - RNA, 19 nt, Artificial Sequence
  Description of Artificial Sequence: Synthetic oligonucleotide
augugucggcuauggagca

SEQ ID NO: 1977877 - RNA, 19 nt, Artificial Sequence
  Description of Artificial Sequence: Synthetic oligonucleotide
ggucuugcauggaugacug

SEQ ID NO: 1977878 - RNA, 19 nt, Artificial Sequence
  Description of Artificial Sequence: Synthetic oligonucleotide
ggaagucacucugugagca

SEQ ID NO: 1977879 - RNA, 19 nt, Artificial Sequence
  Description of Artificial Sequence: Synthetic oligonucleotide
ggucagugagauuggggug

SEQ ID NO: 1977880 - RNA, 19 nt, Artificial Sequence
  Description of Artificial Sequence: Synthetic oligonucleotide
cauuaggccucagggcccg

SEQ ID NO: 1977881 - RNA, 19 nt, Artificial Sequence
  Description of Artificial Sequence: Synthetic oligonucleotide
aaacuucccugcaaaggua

SEQ ID NO: 1977882 - RNA, 19 nt, Artificial Sequence
  Description of Artificial Sequence: Synthetic oligonucleotide
ucagaaaccugggcacugu

SEQ ID NO: 1977883 - RNA, 19 nt, Artificial Sequence
  Description of Artificial Sequence: Synthetic oligonucleotide
ucgcagagcuugccauuag

SEQ ID NO: 1977884 - RNA, 19 nt, Artificial Sequence
  Description of Artificial Sequence: Synthetic oligonucleotide
cauucuguauauauugguu

SEQ ID NO: 1977885 - RNA, 19 nt, Artificial Sequence
  Description of Artificial Sequence: Synthetic oligonucleotide
agauucuacaugguaugua

SEQ ID NO: 1977886 - RNA, 19 nt, Artificial Sequence
  Description of Artificial Sequence: Synthetic oligonucleotide
uccuggugugaucuauuuu

SEQ ID NO: 1977887 - RNA, 19 nt, Artificial Sequence
  Description of Artificial Sequence: Synthetic oligonucleotide
cuacugacuuggaguaauc

SEQ ID NO: 1977888 - RNA, 19 nt, Artificial Sequence
  Description of Artificial Sequence: Synthetic oligonucleotide
cuguugccuuugcucacgg

SEQ ID NO: 1977889 - RNA, 19 nt, Artificial Sequence
  Description of Artificial Sequence: Synthetic oligonucleotide
ccuggugugaucuauuuua

SEQ ID NO: 1977890 - RNA, 19 nt, Artificial Sequence
  Description of Artificial Sequence: Synthetic oligonucleotide
gagcuugccauuaggccuc

SEQ ID NO: 1977891 - RNA, 19 nt, Artificial Sequence
  Description of Artificial Sequence: Synthetic oligonucleotide
gaugaucuucccauggaau

SEQ ID NO: 1977892 - RNA, 19 nt, Artificial Sequence
  Description of Artificial Sequence: Synthetic oligonucleotide
auccugucguucgcagagc

SEQ ID NO: 1977893 - RNA, 19 nt, Artificial Sequence
  Description of Artificial Sequence: Synthetic oligonucleotide
uuggggugcuucuucuuuu

SEQ ID NO: 1977894 - RNA, 19 nt, Artificial Sequence
  Description of Artificial Sequence: Synthetic oligonucleotide
ggugaaacauucuguauau

SEQ ID NO: 1977895 - RNA, 19 nt, Artificial Sequence
  Description of Artificial Sequence: Synthetic oligonucleotide
ugagccgauccugucguuc

SEQ ID NO: 1977896 - RNA, 19 nt, Artificial Sequence
  Description of Artificial Sequence: Synthetic oligonucleotide
gugcauacagaacuguaau

SEQ ID NO: 1977897 - RNA, 19 nt, Artificial Sequence
  Description of Artificial Sequence: Synthetic oligonucleotide
gcuauggagcaucucagaa

SEQ ID NO: 1977898 - RNA, 19 nt, Artificial Sequence
  Description of Artificial Sequence: Synthetic oligonucleotide
auggaugacugggcuagug

SEQ ID NO: 1977899 - RNA, 19 nt, Artificial Sequence
  Description of Artificial Sequence: Synthetic oligonucleotide
ccauuugauguacaauauc

SEQ ID NO: 1977900 - RNA, 19 nt, Artificial Sequence
  Description of Artificial Sequence: Synthetic oligonucleotide
ugucggcuauggagcaucu

SEQ ID NO: 1977901 - RNA, 19 nt, Artificial Sequence
  Description of Artificial Sequence: Synthetic oligonucleotide
cucagaaaccugggcacug

SEQ ID NO: 1977902 - RNA, 19 nt, Artificial Sequence
  Description of Artificial Sequence: Synthetic oligonucleotide
gguguuggcaugcucucga

SEQ ID NO: 1977903 - RNA, 19 nt, Artificial Sequence
  Description of Artificial Sequence: Synthetic oligonucleotide
gucuugcauggaugacugg

SEQ ID NO: 1977904 - RNA, 19 nt, Artificial Sequence
  Description of Artificial Sequence: Synthetic oligonucleotide
agaaagugggguacugaaa

SEQ ID NO: 1977905 - RNA, 19 nt, Artificial Sequence
  Description of Artificial Sequence: Synthetic oligonucleotide
cagggcccggcacuggugc

SEQ ID NO: 1977906 - RNA, 19 nt, Artificial Sequence
  Description of Artificial Sequence: Synthetic oligonucleotide
gguccaucugguucauggc

SEQ ID NO: 1977907 - RNA, 19 nt, Artificial Sequence
  Description of Artificial Sequence: Synthetic oligonucleotide
guaaugugucggcuaugga

SEQ ID NO: 1977908 - RNA, 19 nt, Artificial Sequence
  Description of Artificial Sequence: Synthetic oligonucleotide
gaacuccucugggucacug

SEQ ID NO: 1977909 - RNA, 19 nt, Artificial Sequence
  Description of Artificial Sequence: Synthetic oligonucleotide
gaccacucagguggaagac

SEQ ID NO: 1977910 - RNA, 19 nt, Artificial Sequence
  Description of Artificial Sequence: Synthetic oligonucleotide
ggaugaucuucccauggaa

SEQ ID NO: 1977911 - RNA, 19 nt, Artificial Sequence
  Description of Artificial Sequence: Synthetic oligonucleotide
ggaagacccagcccauggc

SEQ ID NO: 1977912 - RNA, 19 nt, Artificial Sequence
  Description of Artificial Sequence: Synthetic oligonucleotide
aggcucaaacuucccugca

SEQ ID NO: 1977913 - RNA, 19 nt, Artificial Sequence
  Description of Artificial Sequence: Synthetic oligonucleotide
ggugcauacagaacuguaa

SEQ ID NO: 1977914 - RNA, 19 nt, Artificial Sequence
  Description of Artificial Sequence: Synthetic oligonucleotide
gcuguacuuugaugagccg

SEQ ID NO: 1977915 - RNA, 19 nt, Artificial Sequence
  Description of Artificial Sequence: Synthetic oligonucleotide
gccaccaacuccuggugug

SEQ ID NO: 1977916 - RNA, 19 nt, Artificial Sequence
  Description of Artificial Sequence: Synthetic oligonucleotide
ccgagguccaccccugugg

SEQ ID NO: 1977917 - RNA, 19 nt, Artificial Sequence
  Description of Artificial Sequence: Synthetic oligonucleotide
ucucuaggcgggcccuggu

SEQ ID NO: 1977918 - RNA, 19 nt, Artificial Sequence
  Description of Artificial Sequence: Synthetic oligonucleotide
ccauaccccuuuaauucag

SEQ ID NO: 1977919 - RNA, 19 nt, Artificial Sequence
  Description of Artificial Sequence: Synthetic oligonucleotide
gacuuggaguaaucugugu

SEQ ID NO: 1977920 - RNA, 19 nt, Artificial Sequence
  Description of Artificial Sequence: Synthetic oligonucleotide
cagaaaccugggcacuguc

SEQ ID NO: 1977921 - RNA, 19 nt, Artificial Sequence
  Description of Artificial Sequence: Synthetic oligonucleotide
cuugagccgauccugucgu

SEQ ID NO: 1977922 - RNA, 19 nt, Artificial Sequence
  Description of Artificial Sequence: Synthetic oligonucleotide
uuaggccucagggcccggc

SEQ ID NO: 1977923 - RNA, 19 nt, Artificial Sequence
  Description of Artificial Sequence: Synthetic oligonucleotide
gggcuagugccuucagacc

SEQ ID NO: 1977924 - RNA, 19 nt, Artificial Sequence
  Description of Artificial Sequence: Synthetic oligonucleotide
ggaguaaucugugucuuua

SEQ ID NO: 1977925 - RNA, 19 nt, Artificial Sequence
  Description of Artificial Sequence: Synthetic oligonucleotide
gcuuagauuaaaggcaugu

SEQ ID NO: 1977926 - RNA, 19 nt, Artificial Sequence
  Description of Artificial Sequence: Synthetic oligonucleotide
gaccaacaacagauucuac

SEQ ID NO: 1977927 - RNA, 19 nt, Artificial Sequence
  Description of Artificial Sequence: Synthetic oligonucleotide
caacuacucucugcacagc

SEQ ID NO: 1977928 - RNA, 19 nt, Artificial Sequence
  Description of Artificial Sequence: Synthetic oligonucleotide
uguguagcuuuuggcuguc

SEQ ID NO: 1977929 - RNA, 19 nt, Artificial Sequence
  Description of Artificial Sequence: Synthetic oligonucleotide
ggagcaucucagaaaccug

SEQ ID NO: 1977930 - RNA, 19 nt, Artificial Sequence
  Description of Artificial Sequence: Synthetic oligonucleotide
gggaugaucuucccaugga

SEQ ID NO: 1977931 - RNA, 19 nt, Artificial Sequence
  Description of Artificial Sequence: Synthetic oligonucleotide
gagaaguguccauggccua

SEQ ID NO: 1977932 - RNA, 19 nt, Artificial Sequence
  Description of Artificial Sequence: Synthetic oligonucleotide
auggccuacuguguagaau

SEQ ID NO: 1977933 - RNA, 19 nt, Artificial Sequence
  Description of Artificial Sequence: Synthetic oligonucleotide
gugucggcuauggagcauc

SEQ ID NO: 1977934 - RNA, 19 nt, Artificial Sequence
  Description of Artificial Sequence: Synthetic oligonucleotide
cugccccuugucaucucug

SEQ ID NO: 1977935 - RNA, 19 nt, Artificial Sequence
  Description of Artificial Sequence: Synthetic oligonucleotide
gaugugccugcugccgcug

SEQ ID NO: 1977936 - RNA, 19 nt, Artificial Sequence
  Description of Artificial Sequence: Synthetic oligonucleotide
ccaacaacagauucuacau

SEQ ID NO: 1977937 - RNA, 19 nt, Artificial Sequence
  Description of Artificial Sequence: Synthetic oligonucleotide
augggcacuugagccgauc

SEQ ID NO: 1977938 - RNA, 19 nt, Artificial Sequence
  Description of Artificial Sequence: Synthetic oligonucleotide
cacgggcucuguccucugg

SEQ ID NO: 1977939 - RNA, 19 nt, Artificial Sequence
  Description of Artificial Sequence: Synthetic oligonucleotide
gccuucagaccaacaacag

SEQ ID NO: 1977940 - RNA, 19 nt, Artificial Sequence
  Description of Artificial Sequence: Synthetic oligonucleotide
ggugguguuggcaugcucu

SEQ ID NO: 1977941 - RNA, 19 nt, Artificial Sequence
  Description of Artificial Sequence: Synthetic oligonucleotide
ccugccaaucuggaugugc

SEQ ID NO: 1977942 - RNA, 19 nt, Artificial Sequence
  Description of Artificial Sequence: Synthetic oligonucleotide
ggcuauggagcaucucaga

SEQ ID NO: 1977943 - RNA, 19 nt, Artificial Sequence
  Description of Artificial Sequence: Synthetic oligonucleotide
gccagaguuuggugcauac

SEQ ID NO: 1977944 - RNA, 19 nt, Artificial Sequence
  Description of Artificial Sequence: Synthetic oligonucleotide
cucccauaccccuuuaauu

SEQ ID NO: 1977945 - RNA, 19 nt, Artificial Sequence
  Description of Artificial Sequence: Synthetic oligonucleotide
gacugggcuagugccuuca

SEQ ID NO: 1977946 - RNA, 19 nt, Artificial Sequence
  Description of Artificial Sequence: Synthetic oligonucleotide
caccccuguggcugccucc

SEQ ID NO: 1977947 - RNA, 19 nt, Artificial Sequence
  Description of Artificial Sequence: Synthetic oligonucleotide
gucguucgcagagcuugcc

SEQ ID NO: 1977948 - RNA, 19 nt, Artificial Sequence
  Description of Artificial Sequence: Synthetic oligonucleotide
gggguacugaaaucaccca

SEQ ID NO: 1977949 - RNA, 19 nt, Artificial Sequence
  Description of Artificial Sequence: Synthetic oligonucleotide
gaaguguccauggccuacu

SEQ ID NO: 1977950 - RNA, 19 nt, Artificial Sequence
  Description of Artificial Sequence: Synthetic oligonucleotide
caaagguaaugugucggcu

SEQ ID NO: 1977951 - RNA, 19 nt, Artificial Sequence
  Description of Artificial Sequence: Synthetic oligonucleotide
auugggugggccagaguuu

SEQ ID NO: 1977952 - RNA, 19 nt, Artificial Sequence
  Description of Artificial Sequence: Synthetic oligonucleotide
ugugucggcuauggagcau

SEQ ID NO: 1977953 - RNA, 19 nt, Artificial Sequence
  Description of Artificial Sequence: Synthetic oligonucleotide
guggaagacccagcccaug

SEQ ID NO: 1977954 - RNA, 19 nt, Artificial Sequence
  Description of Artificial Sequence: Synthetic oligonucleotide
ugacugggcuagugccuuc

SEQ ID NO: 1977955 - RNA, 19 nt, Artificial Sequence
  Description of Artificial Sequence: Synthetic oligonucleotide
ucacgggcucuguccucug

SEQ ID NO: 1977956 - RNA, 19 nt, Artificial Sequence
  Description of Artificial Sequence: Synthetic oligonucleotide
ccuggugguguuggcaugc

SEQ ID NO: 1977957 - RNA, 19 nt, Artificial Sequence
  Description of Artificial Sequence: Synthetic oligonucleotide
cccauaccccuuuaauuca

SEQ ID NO: 1977958 - RNA, 19 nt, Artificial Sequence
  Description of Artificial Sequence: Synthetic oligonucleotide
cauggccuacuguguagaa

SEQ ID NO: 1977959 - RNA, 19 nt, Artificial Sequence
  Description of Artificial Sequence: Synthetic oligonucleotide
cauaccccuuuaauucagu

SEQ ID NO: 1977960 - RNA, 19 nt, Artificial Sequence
  Description of Artificial Sequence: Synthetic oligonucleotide
cggcuauggagcaucucag

SEQ ID NO: 1977961 - RNA, 19 nt, Artificial Sequence
  Description of Artificial Sequence: Synthetic oligonucleotide
guucaauaguauguuucuu

SEQ ID NO: 1977962 - RNA, 19 nt, Artificial Sequence
  Description of Artificial Sequence: Synthetic oligonucleotide
ccgauccugucguucgcag

SEQ ID NO: 1977963 - RNA, 19 nt, Artificial Sequence
  Description of Artificial Sequence: Synthetic oligonucleotide
uaggcgggcccugguggug

SEQ ID NO: 1977964 - RNA, 19 nt, Artificial Sequence
  Description of Artificial Sequence: Synthetic oligonucleotide
cagauucuacaugguaugu

SEQ ID NO: 1977965 - RNA, 19 nt, Artificial Sequence
  Description of Artificial Sequence: Synthetic oligonucleotide
guguagcuuuuggcugucc

SEQ ID NO: 1977966 - RNA, 19 nt, Artificial Sequence
  Description of Artificial Sequence: Synthetic oligonucleotide
cacucagguggaagaccca

SEQ ID NO: 1977967 - RNA, 19 nt, Artificial Sequence
  Description of Artificial Sequence: Synthetic oligonucleotide
cugguucauggcagcaacu

SEQ ID NO: 1977968 - RNA, 19 nt, Artificial Sequence
  Description of Artificial Sequence: Synthetic oligonucleotide
gggucuugcauggaugacu

SEQ ID NO: 1977969 - RNA, 19 nt, Artificial Sequence
  Description of Artificial Sequence: Synthetic oligonucleotide
uugagccgauccugucguu

SEQ ID NO: 1977970 - RNA, 19 nt, Artificial Sequence
  Description of Artificial Sequence: Synthetic oligonucleotide
aaugggcacuugagccgau

SEQ ID NO: 1977971 - RNA, 19 nt, Artificial Sequence
  Description of Artificial Sequence: Synthetic oligonucleotide
uccugccaaucuggaugug

SEQ ID NO: 1977972 - RNA, 19 nt, Artificial Sequence
  Description of Artificial Sequence: Synthetic oligonucleotide
cgagguccaccccuguggc

SEQ ID NO: 1977973 - RNA, 19 nt, Artificial Sequence
  Description of Artificial Sequence: Synthetic oligonucleotide
ugucaucucuggggaugau

SEQ ID NO: 1977974 - RNA, 19 nt, Artificial Sequence
  Description of Artificial Sequence: Synthetic oligonucleotide
agccgagguccaccccugu

SEQ ID NO: 1977975 - RNA, 19 nt, Artificial Sequence
  Description of Artificial Sequence: Synthetic oligonucleotide
agggcccggcacuggugcu

SEQ ID NO: 1977976 - RNA, 19 nt, Artificial Sequence
  Description of Artificial Sequence: Synthetic oligonucleotide
ugccucccauaccccuuua

SEQ ID NO: 1977977 - RNA, 19 nt, Artificial Sequence
  Description of Artificial Sequence: Synthetic oligonucleotide
gccgagguccaccccugug

SEQ ID NO: 1977978 - RNA, 19 nt, Artificial Sequence
  Description of Artificial Sequence: Synthetic oligonucleotide
guucgcagagcuugccauu

SEQ ID NO: 1977979 - RNA, 19 nt, Artificial Sequence
  Description of Artificial Sequence: Synthetic oligonucleotide
aggcugggcucaaacucau

SEQ ID NO: 1977980 - RNA, 19 nt, Artificial Sequence
  Description of Artificial Sequence: Synthetic oligonucleotide
gagguccaccccuguggcu

SEQ ID NO: 1977981 - RNA, 19 nt, Artificial Sequence
  Description of Artificial Sequence: Synthetic oligonucleotide
gucggcuauggagcaucuc

SEQ ID NO: 1977982 - RNA, 19 nt, Artificial Sequence
  Description of Artificial Sequence: Synthetic oligonucleotide
ggggucuugcauggaugac

SEQ ID NO: 1977983 - RNA, 19 nt, Artificial Sequence
  Description of Artificial Sequence: Synthetic oligonucleotide
ggaugugccugcugccgcu

SEQ ID NO: 1977984 - RNA, 19 nt, Artificial Sequence
  Description of Artificial Sequence: Synthetic oligonucleotide
agcuugccauuaggccuca

SEQ ID NO: 1977985 - RNA, 19 nt, Artificial Sequence
  Description of Artificial Sequence: Synthetic oligonucleotide
gucacucugugagcaggcu

SEQ ID NO: 1977986 - RNA, 19 nt, Artificial Sequence
  Description of Artificial Sequence: Synthetic oligonucleotide
cccuuuaauucagugcaua

SEQ ID NO: 1977987 - RNA, 19 nt, Artificial Sequence
  Description of Artificial Sequence: Synthetic oligonucleotide
cacuggugcugcacaggcu

SEQ ID NO: 1977988 - RNA, 19 nt, Artificial Sequence
  Description of Artificial Sequence: Synthetic oligonucleotide
gcugccccuugucaucucu

SEQ ID NO: 1977989 - RNA, 19 nt, Artificial Sequence
  Description of Artificial Sequence: Synthetic oligonucleotide
gccuacuguguagaaugua

SEQ ID NO: 1977990 - RNA, 19 nt, Artificial Sequence
  Description of Artificial Sequence: Synthetic oligonucleotide
ccugucuacuggagaaagu

SEQ ID NO: 1977991 - RNA, 19 nt, Artificial Sequence
  Description of Artificial Sequence: Synthetic oligonucleotide
gccgauccugucguucgca

SEQ ID NO: 1977992 - RNA, 19 nt, Artificial Sequence
  Description of Artificial Sequence: Synthetic oligonucleotide
ccggcacuggugcugcaca

SEQ ID NO: 1977993 - RNA, 19 nt, Artificial Sequence
  Description of Artificial Sequence: Synthetic oligonucleotide
gcucacgggcucuguccuc

SEQ ID NO: 1977994 - RNA, 19 nt, Artificial Sequence
  Description of Artificial Sequence: Synthetic oligonucleotide
ccauggcuccucaggaacu

SEQ ID NO: 1977995 - RNA, 19 nt, Artificial Sequence
  Description of Artificial Sequence: Synthetic oligonucleotide
cuuugcucacgggcucugu

SEQ ID NO: 1977996 - RNA, 19 nt, Artificial Sequence
  Description of Artificial Sequence: Synthetic oligonucleotide
gggugggccagaguuuggu

SEQ ID NO: 1977997 - RNA, 19 nt, Artificial Sequence
  Description of Artificial Sequence: Synthetic oligonucleotide
ccaccaacuccugguguga

SEQ ID NO: 1977998 - RNA, 19 nt, Artificial Sequence
  Description of Artificial Sequence: Synthetic oligonucleotide
ccacuacuacugacuugga

SEQ ID NO: 1977999 - RNA, 19 nt, Artificial Sequence
  Description of Artificial Sequence: Synthetic oligonucleotide
cugccucccauaccccuuu

SEQ ID NO: 1978000 - RNA, 19 nt, Artificial Sequence
  Description of Artificial Sequence: Synthetic oligonucleotide
cguucgcagagcuugccau

SEQ ID NO: 1978001 - RNA, 19 nt, Artificial Sequence
  Description of Artificial Sequence: Synthetic oligonucleotide
cauggaugacugggcuagu

SEQ ID NO: 1978002 - RNA, 19 nt, Artificial Sequence
  Description of Artificial Sequence: Synthetic oligonucleotide
ggccagaguuuggugcaua

SEQ ID NO: 1978003 - RNA, 19 nt, Artificial Sequence
  Description of Artificial Sequence: Synthetic oligonucleotide
gcuugccauuaggccucag

SEQ ID NO: 1978004 - RNA, 19 nt, Artificial Sequence
  Description of Artificial Sequence: Synthetic oligonucleotide
caccaacuccuggugugau

SEQ ID NO: 1978005 - RNA, 19 nt, Artificial Sequence
  Description of Artificial Sequence: Synthetic oligonucleotide
ccccuuuaauucagugcau

SEQ ID NO: 1978006 - RNA, 19 nt, Artificial Sequence
  Description of Artificial Sequence: Synthetic oligonucleotide
gguugaggggcugccccuu

SEQ ID NO: 1978007 - RNA, 19 nt, Artificial Sequence
  Description of Artificial Sequence: Synthetic oligonucleotide
gcgggcccuggugguguug

SEQ ID NO: 1978008 - RNA, 19 nt, Artificial Sequence
  Description of Artificial Sequence: Synthetic oligonucleotide
ggcugggcucaaacucaua

SEQ ID NO: 1978009 - RNA, 19 nt, Artificial Sequence
  Description of Artificial Sequence: Synthetic oligonucleotide
ccugccucccauaccccuu

SEQ ID NO: 1978010 - RNA, 19 nt, Artificial Sequence
  Description of Artificial Sequence: Synthetic oligonucleotide
ccugucguucgcagagcuu

SEQ ID NO: 1978011 - RNA, 19 nt, Artificial Sequence
  Description of Artificial Sequence: Synthetic oligonucleotide
cagugagauuggggugcuu

SEQ ID NO: 1978012 - RNA, 19 nt, Artificial Sequence
  Description of Artificial Sequence: Synthetic oligonucleotide
ggcgggcccuggugguguu

SEQ ID NO: 1978013 - RNA, 19 nt, Artificial Sequence
  Description of Artificial Sequence: Synthetic oligonucleotide
gauacuucuacugucaucg

SEQ ID NO: 1978014 - RNA, 19 nt, Artificial Sequence
  Description of Artificial Sequence: Synthetic oligonucleotide
aaagucuguagccuggacc

SEQ ID NO: 1978015 - RNA, 19 nt, Artificial Sequence
  Description of Artificial Sequence: Synthetic oligonucleotide
auuucgguucuucagaagc

SEQ ID NO: 1978016 - RNA, 19 nt, Artificial Sequence
  Description of Artificial Sequence: Synthetic oligonucleotide
uaaaauucaccuuauccag

SEQ ID NO: 1978017 - RNA, 19 nt, Artificial Sequence
  Description of Artificial Sequence: Synthetic oligonucleotide
ugaaguaucuccaggaccc

SEQ ID NO: 1978018 - RNA, 19 nt, Artificial Sequence
  Description of Artificial Sequence: Synthetic oligonucleotide
agaucggccaaugagaugc

SEQ ID NO: 1978019 - RNA, 19 nt, Artificial Sequence
  Description of Artificial Sequence: Synthetic oligonucleotide
ucuaccuccaggauguugg

SEQ ID NO: 1978020 - RNA, 19 nt, Artificial Sequence
  Description of Artificial Sequence: Synthetic oligonucleotide
guuucugugacacuguggg

SEQ ID NO: 1978021 - RNA, 19 nt, Artificial Sequence
  Description of Artificial Sequence: Synthetic oligonucleotide
aaauggcuaaaauucaccu

SEQ ID NO: 1978022 - RNA, 19 nt, Artificial Sequence
  Description of Artificial Sequence: Synthetic oligonucleotide
uacuugauacuucugcacg

SEQ ID NO: 1978023 - RNA, 19 nt, Artificial Sequence
  Description of Artificial Sequence: Synthetic oligonucleotide
auggaugacaauccgcugc

SEQ ID NO: 1978024 - RNA, 19 nt, Artificial Sequence
  Description of Artificial Sequence: Synthetic oligonucleotide
auuugcuccucauuguagc

SEQ ID NO: 1978025 - RNA, 19 nt, Artificial Sequence
  Description of Artificial Sequence: Synthetic oligonucleotide
ucuacugucaucguggagc

SEQ ID NO: 1978026 - RNA, 19 nt, Artificial Sequence
  Description of Artificial Sequence: Synthetic oligonucleotide
aagggugacccucaaagag

SEQ ID NO: 1978027 - RNA, 19 nt, Artificial Sequence
  Description of Artificial Sequence: Synthetic oligonucleotide
aacaauaccgaaucuucug

SEQ ID NO: 1978028 - RNA, 19 nt, Artificial Sequence
  Description of Artificial Sequence: Synthetic oligonucleotide
uauagcuccacuccaacca

SEQ ID NO: 1978029 - RNA, 19 nt, Artificial Sequence
  Description of Artificial Sequence: Synthetic oligonucleotide
cuaaaauucaccuuaucca

SEQ ID NO: 1978030 - RNA, 19 nt, Artificial Sequence
  Description of Artificial Sequence: Synthetic oligonucleotide
aaugagaugcaggugguuc

SEQ ID NO: 1978031 - RNA, 19 nt, Artificial Sequence
  Description of Artificial Sequence: Synthetic oligonucleotide
aaagagguacuccuggugu

SEQ ID NO: 1978032 - RNA, 19 nt, Artificial Sequence
  Description of Artificial Sequence: Synthetic oligonucleotide
aaauucaccuuauccagcu

SEQ ID NO: 1978033 - RNA, 19 nt, Artificial Sequence
  Description of Artificial Sequence: Synthetic oligonucleotide
guagacaugaugcaagacc

SEQ ID NO: 1978034 - RNA, 19 nt, Artificial Sequence
  Description of Artificial Sequence: Synthetic oligonucleotide
aagucuguagccuggaccu

SEQ ID NO: 1978035 - RNA, 19 nt, Artificial Sequence
  Description of Artificial Sequence: Synthetic oligonucleotide
agaggcuuggcucaaggac

SEQ ID NO: 1978036 - RNA, 19 nt, Artificial Sequence
  Description of Artificial Sequence: Synthetic oligonucleotide
acaauaccgaaucuucugg

SEQ ID NO: 1978037 - RNA, 19 nt, Artificial Sequence
  Description of Artificial Sequence: Synthetic oligonucleotide
uacagccagccacagaucg

SEQ ID NO: 1978038 - RNA, 19 nt, Artificial Sequence
  Description of Artificial Sequence: Synthetic oligonucleotide
acuugauacuucugcacgc

SEQ ID NO: 1978039 - RNA, 19 nt, Artificial Sequence
  Description of Artificial Sequence: Synthetic oligonucleotide
auacuugauacuucugcac

SEQ ID NO: 1978040 - RNA, 19 nt, Artificial Sequence
  Description of Artificial Sequence: Synthetic oligonucleotide
gcuaaaauucaccuuaucc

SEQ ID NO: 1978041 - RNA, 19 nt, Artificial Sequence
  Description of Artificial Sequence: Synthetic oligonucleotide
uagaccgaaacaaacuucu

SEQ ID NO: 1978042 - RNA, 19 nt, Artificial Sequence
  Description of Artificial Sequence: Synthetic oligonucleotide
ucuagagaggaccucugag

SEQ ID NO: 1978043 - RNA, 19 nt, Artificial Sequence
  Description of Artificial Sequence: Synthetic oligonucleotide
auggggaggcuauagcucc

SEQ ID NO: 1978044 - RNA, 19 nt, Artificial Sequence
  Description of Artificial Sequence: Synthetic oligonucleotide
gauguagacaugaugcaag

SEQ ID NO: 1978045 - RNA, 19 nt, Artificial Sequence
  Description of Artificial Sequence: Synthetic oligonucleotide
gaugacaauccgcugcagg

SEQ ID NO: 1978046 - RNA, 19 nt, Artificial Sequence
  Description of Artificial Sequence: Synthetic oligonucleotide
caaacaauaccgaaucuuc

SEQ ID NO: 1978047 - RNA, 19 nt, Artificial Sequence
  Description of Artificial Sequence: Synthetic oligonucleotide
gagaggaccucugagaaag

SEQ ID NO: 1978048 - RNA, 19 nt, Artificial Sequence
  Description of Artificial Sequence: Synthetic oligonucleotide
gaccgaaacaaacuucucc

SEQ ID NO: 1978049 - RNA, 19 nt, Artificial Sequence
  Description of Artificial Sequence: Synthetic oligonucleotide
augaagugcaucuugucca

SEQ ID NO: 1978050 - RNA, 19 nt, Artificial Sequence
  Description of Artificial Sequence: Synthetic oligonucleotide
accgaaacaaacuucuccu

SEQ ID NO: 1978051 - RNA, 19 nt, Artificial Sequence
  Description of Artificial Sequence: Synthetic oligonucleotide
acugugggaacaucuagag

SEQ ID NO: 1978052 - RNA, 19 nt, Artificial Sequence
  Description of Artificial Sequence: Synthetic oligonucleotide
uggaccucaguucuguggc

SEQ ID NO: 1978053 - RNA, 19 nt, Artificial Sequence
  Description of Artificial Sequence: Synthetic oligonucleotide
agaagcucuccacccaggc

SEQ ID NO: 1978054 - RNA, 19 nt, Artificial Sequence
  Description of Artificial Sequence: Synthetic oligonucleotide
aacuggucgaagccccagc

SEQ ID NO: 1978055 - RNA, 19 nt, Artificial Sequence
  Description of Artificial Sequence: Synthetic oligonucleotide
uguguuacagccagccaca

SEQ ID NO: 1978056 - RNA, 19 nt, Artificial Sequence
  Description of Artificial Sequence: Synthetic oligonucleotide
agccccagcacuuagcuug

SEQ ID NO: 1978057 - RNA, 19 nt, Artificial Sequence
  Description of Artificial Sequence: Synthetic oligonucleotide
aauaccgaaucuucuggau

SEQ ID NO: 1978058 - RNA, 19 nt, Artificial Sequence
  Description of Artificial Sequence: Synthetic oligonucleotide
agucgggcaucucagcccc

SEQ ID NO: 1978059 - RNA, 19 nt, Artificial Sequence
  Description of Artificial Sequence: Synthetic oligonucleotide
caaugugcggcgcugagag

SEQ ID NO: 1978060 - RNA, 19 nt, Artificial Sequence
  Description of Artificial Sequence: Synthetic oligonucleotide
uaccgaaucuucuggauac

SEQ ID NO: 1978061 - RNA, 19 nt, Artificial Sequence
  Description of Artificial Sequence: Synthetic oligonucleotide
uccucauuguagcugaguc

SEQ ID NO: 1978062 - RNA, 19 nt, Artificial Sequence
  Description of Artificial Sequence: Synthetic oligonucleotide
cugaaguaucuccaggacc

SEQ ID NO: 1978063 - RNA, 19 nt, Artificial Sequence
  Description of Artificial Sequence: Synthetic oligonucleotide
ucggccaaugagaugcagg

SEQ ID NO: 1978064 - RNA, 19 nt, Artificial Sequence
  Description of Artificial Sequence: Synthetic oligonucleotide
augugcggcgcugagaggc

SEQ ID NO: 1978065 - RNA, 19 nt, Artificial Sequence
  Description of Artificial Sequence: Synthetic oligonucleotide
augcaagaccgccuggggc

SEQ ID NO: 1978066 - RNA, 19 nt, Artificial Sequence
  Description of Artificial Sequence: Synthetic oligonucleotide
ucugaaguaucuccaggac

SEQ ID NO: 1978067 - RNA, 19 nt, Artificial Sequence
  Description of Artificial Sequence: Synthetic oligonucleotide
accauagaccgaaacaaac

SEQ ID NO: 1978068 - RNA, 19 nt, Artificial Sequence
  Description of Artificial Sequence: Synthetic oligonucleotide
ucugcucauauacagccuc

SEQ ID NO: 1978069 - RNA, 19 nt, Artificial Sequence
  Description of Artificial Sequence: Synthetic oligonucleotide
caugcugaacagaaccagg

SEQ ID NO: 1978070 - RNA, 19 nt, Artificial Sequence
  Description of Artificial Sequence: Synthetic oligonucleotide
cuucagaagcucuccaccc

SEQ ID NO: 1978071 - RNA, 19 nt, Artificial Sequence
  Description of Artificial Sequence: Synthetic oligonucleotide
agacauggaugacaauccg

SEQ ID NO: 1978072 - RNA, 19 nt, Artificial Sequence
  Description of Artificial Sequence: Synthetic oligonucleotide
agcgauacuugauacuucu

SEQ ID NO: 1978073 - RNA, 19 nt, Artificial Sequence
  Description of Artificial Sequence: Synthetic oligonucleotide
aaucguguugugggcaugg

SEQ ID NO: 1978074 - RNA, 19 nt, Artificial Sequence
  Description of Artificial Sequence: Synthetic oligonucleotide
cagccucuuggcuaaaugg

SEQ ID NO: 1978075 - RNA, 19 nt, Artificial Sequence
  Description of Artificial Sequence: Synthetic oligonucleotide
uacuucuacugucaucgug

SEQ ID NO: 1978076 - RNA, 19 nt, Artificial Sequence
  Description of Artificial Sequence: Synthetic oligonucleotide
uuggcuaaauggcuaaaau

SEQ ID NO: 1978077 - RNA, 19 nt, Artificial Sequence
  Description of Artificial Sequence: Synthetic oligonucleotide
gauggcaaucguguugugg

SEQ ID NO: 1978078 - RNA, 19 nt, Artificial Sequence
  Description of Artificial Sequence: Synthetic oligonucleotide
cauggauguagacaugaug

SEQ ID NO: 1978079 - RNA, 19 nt, Artificial Sequence
  Description of Artificial Sequence: Synthetic oligonucleotide
uguaggggcaaugugcggc

SEQ ID NO: 1978080 - RNA, 19 nt, Artificial Sequence
  Description of Artificial Sequence: Synthetic oligonucleotide
uugcucuaccuccaggaug

SEQ ID NO: 1978081 - RNA, 19 nt, Artificial Sequence
  Description of Artificial Sequence: Synthetic oligonucleotide
ugcaucuuguccaaacaau

SEQ ID NO: 1978082 - RNA, 19 nt, Artificial Sequence
  Description of Artificial Sequence: Synthetic oligonucleotide
gaugcaagaccgccugggg

SEQ ID NO: 1978083 - RNA, 19 nt, Artificial Sequence
  Description of Artificial Sequence: Synthetic oligonucleotide
gauggguaccaacugguuc

SEQ ID NO: 1978084 - RNA, 19 nt, Artificial Sequence
  Description of Artificial Sequence: Synthetic oligonucleotide
uuucgguucuucagaagcu

SEQ ID NO: 1978085 - RNA, 19 nt, Artificial Sequence
  Description of Artificial Sequence: Synthetic oligonucleotide
ucgucguccagcuuccgag

SEQ ID NO: 1978086 - RNA, 19 nt, Artificial Sequence
  Description of Artificial Sequence: Synthetic oligonucleotide
ggucugcucauauacagcc

SEQ ID NO: 1978087 - RNA, 19 nt, Artificial Sequence
  Description of Artificial Sequence: Synthetic oligonucleotide
uuauccgcuugccaugugu

SEQ ID NO: 1978088 - RNA, 19 nt, Artificial Sequence
  Description of Artificial Sequence: Synthetic oligonucleotide
uggaugacaauccgcugca

SEQ ID NO: 1978089 - RNA, 19 nt, Artificial Sequence
  Description of Artificial Sequence: Synthetic oligonucleotide
gacaugaugcaagaccgcc

SEQ ID NO: 1978090 - RNA, 19 nt, Artificial Sequence
  Description of Artificial Sequence: Synthetic oligonucleotide
aaacaauaccgaaucuucu

SEQ ID NO: 1978091 - RNA, 19 nt, Artificial Sequence
  Description of Artificial Sequence: Synthetic oligonucleotide
agccucuuggcuaaauggc

SEQ ID NO: 1978092 - RNA, 19 nt, Artificial Sequence
  Description of Artificial Sequence: Synthetic oligonucleotide
cuauagcuccacuccaacc

SEQ ID NO: 1978093 - RNA, 19 nt, Artificial Sequence
  Description of Artificial Sequence: Synthetic oligonucleotide
gaaucuucuggauacuucu

SEQ ID NO: 1978094 - RNA, 19 nt, Artificial Sequence
  Description of Artificial Sequence: Synthetic oligonucleotide
auagaccgaaacaaacuuc

SEQ ID NO: 1978095 - RNA, 19 nt, Artificial Sequence
  Description of Artificial Sequence: Synthetic oligonucleotide
aacucaggcucacuugggu

SEQ ID NO: 1978096 - RNA, 19 nt, Artificial Sequence
  Description of Artificial Sequence: Synthetic oligonucleotide
uggcuaaauggcuaaaauu

SEQ ID NO: 1978097 - RNA, 19 nt, Artificial Sequence
  Description of Artificial Sequence: Synthetic oligonucleotide
aacaucuagagaggaccuc

SEQ ID NO: 1978098 - RNA, 19 nt, Artificial Sequence
  Description of Artificial Sequence: Synthetic oligonucleotide
caugaugcaagaccgccug

SEQ ID NO: 1978099 - RNA, 19 nt, Artificial Sequence
  Description of Artificial Sequence: Synthetic oligonucleotide
uccaaccauagaccgaaac

SEQ ID NO: 1978100 - RNA, 19 nt, Artificial Sequence
  Description of Artificial Sequence: Synthetic oligonucleotide
gagaaagucuguagccugg

SEQ ID NO: 1978101 - RNA, 19 nt, Artificial Sequence
  Description of Artificial Sequence: Synthetic oligonucleotide
uggucgaagccccagcacu

SEQ ID NO: 1978102 - RNA, 19 nt, Artificial Sequence
  Description of Artificial Sequence: Synthetic oligonucleotide
uauccgcuugccaugugug

SEQ ID NO: 1978103 - RNA, 19 nt, Artificial Sequence
  Description of Artificial Sequence: Synthetic oligonucleotide
ucacuuggguuucugugac

SEQ ID NO: 1978104 - RNA, 19 nt, Artificial Sequence
  Description of Artificial Sequence: Synthetic oligonucleotide
guuacagccagccacagau

SEQ ID NO: 1978105 - RNA, 19 nt, Artificial Sequence
  Description of Artificial Sequence: Synthetic oligonucleotide
uuguccaaacaauaccgaa

SEQ ID NO: 1978106 - RNA, 19 nt, Artificial Sequence
  Description of Artificial Sequence: Synthetic oligonucleotide
ugauuucgguucuucagaa

SEQ ID NO: 1978107 - RNA, 19 nt, Artificial Sequence
  Description of Artificial Sequence: Synthetic oligonucleotide
gauuucgguucuucagaag

SEQ ID NO: 1978108 - RNA, 19 nt, Artificial Sequence
  Description of Artificial Sequence: Synthetic oligonucleotide
auggacaaucugcagguga

SEQ ID NO: 1978109 - RNA, 19 nt, Artificial Sequence
  Description of Artificial Sequence: Synthetic oligonucleotide
cuccuuuaguuccuggaag

SEQ ID NO: 1978110 - RNA, 19 nt, Artificial Sequence
  Description of Artificial Sequence: Synthetic oligonucleotide
cuggaccucaguucugugg

SEQ ID NO: 1978111 - RNA, 19 nt, Artificial Sequence
  Description of Artificial Sequence: Synthetic oligonucleotide
uuguagcugaguccuggcc

SEQ ID NO: 1978112 - RNA, 19 nt, Artificial Sequence
  Description of Artificial Sequence: Synthetic oligonucleotide
acugucaucguggagcuga

SEQ ID NO: 1978113 - RNA, 19 nt, Artificial Sequence
  Description of Artificial Sequence: Synthetic oligonucleotide
cuugccaugugugaccagc

SEQ ID NO: 1978114 - RNA, 19 nt, Artificial Sequence
  Description of Artificial Sequence: Synthetic oligonucleotide
uucaccuuauccagcuugu

SEQ ID NO: 1978115 - RNA, 19 nt, Artificial Sequence
  Description of Artificial Sequence: Synthetic oligonucleotide
uucagaagcucuccaccca

SEQ ID NO: 1978116 - RNA, 19 nt, Artificial Sequence
  Description of Artificial Sequence: Synthetic oligonucleotide
guccgcgugaccuccaggg

SEQ ID NO: 1978117 - RNA, 19 nt, Artificial Sequence
  Description of Artificial Sequence: Synthetic oligonucleotide
gacaauccgcugcaggaug

SEQ ID NO: 1978118 - RNA, 19 nt, Artificial Sequence
  Description of Artificial Sequence: Synthetic oligonucleotide
uguagccuggaccucaguu

SEQ ID NO: 1978119 - RNA, 19 nt, Artificial Sequence
  Description of Artificial Sequence: Synthetic oligonucleotide
aaggggagggcuguccgcg

SEQ ID NO: 1978120 - RNA, 19 nt, Artificial Sequence
  Description of Artificial Sequence: Synthetic oligonucleotide
caggauggguaccaacugg

SEQ ID NO: 1978121 - RNA, 19 nt, Artificial Sequence
  Description of Artificial Sequence: Synthetic oligonucleotide
ugaccagcgauacuugaua

SEQ ID NO: 1978122 - RNA, 19 nt, Artificial Sequence
  Description of Artificial Sequence: Synthetic oligonucleotide
caucguggagcugauuucg

SEQ ID NO: 1978123 - RNA, 19 nt, Artificial Sequence
  Description of Artificial Sequence: Synthetic oligonucleotide
gacauggaugacaauccgc

SEQ ID NO: 1978124 - RNA, 19 nt, Artificial Sequence
  Description of Artificial Sequence: Synthetic oligonucleotide
uggucugcucauauacagc

SEQ ID NO: 1978125 - RNA, 19 nt, Artificial Sequence
  Description of Artificial Sequence: Synthetic oligonucleotide
uggacaaucugcaggugau

SEQ ID NO: 1978126 - RNA, 19 nt, Artificial Sequence
  Description of Artificial Sequence: Synthetic oligonucleotide
cacgcauuccuccuggaac

SEQ ID NO: 1978127 - RNA, 19 nt, Artificial Sequence
  Description of Artificial Sequence: Synthetic oligonucleotide
gaugcaggugguucuuggc

SEQ ID NO: 1978128 - RNA, 19 nt, Artificial Sequence
  Description of Artificial Sequence: Synthetic oligonucleotide
auccuagcuuuguugaacu

SEQ ID NO: 1978129 - RNA, 19 nt, Artificial Sequence
  Description of Artificial Sequence: Synthetic oligonucleotide
ugccuuauccgcuugccau

SEQ ID NO: 1978130 - RNA, 19 nt, Artificial Sequence
  Description of Artificial Sequence: Synthetic oligonucleotide
auguagacaugaugcaaga

SEQ ID NO: 1978131 - RNA, 19 nt, Artificial Sequence
  Description of Artificial Sequence: Synthetic oligonucleotide
cuagagaggaccucugaga

SEQ ID NO: 1978132 - RNA, 19 nt, Artificial Sequence
  Description of Artificial Sequence: Synthetic oligonucleotide
uuugcuccucauuguagcu

SEQ ID NO: 1978133 - RNA, 19 nt, Artificial Sequence
  Description of Artificial Sequence: Synthetic oligonucleotide
uggauuugcuccucauugu

SEQ ID NO: 1978134 - RNA, 19 nt, Artificial Sequence
  Description of Artificial Sequence: Synthetic oligonucleotide
gcugauuucgguucuucag

SEQ ID NO: 1978135 - RNA, 19 nt, Artificial Sequence
  Description of Artificial Sequence: Synthetic oligonucleotide
cacagaucggccaaugaga

SEQ ID NO: 1978136 - RNA, 19 nt, Artificial Sequence
  Description of Artificial Sequence: Synthetic oligonucleotide
cucauccuagcuuuguuga

SEQ ID NO: 1978137 - RNA, 19 nt, Artificial Sequence
  Description of Artificial Sequence: Synthetic oligonucleotide
cuucugcacgcauuccucc

SEQ ID NO: 1978138 - RNA, 19 nt, Artificial Sequence
  Description of Artificial Sequence: Synthetic oligonucleotide
aaugugcggcgcugagagg

SEQ ID NO: 1978139 - RNA, 19 nt, Artificial Sequence
  Description of Artificial Sequence: Synthetic oligonucleotide
ugugaccagcgauacuuga

SEQ ID NO: 1978140 - RNA, 19 nt, Artificial Sequence
  Description of Artificial Sequence: Synthetic oligonucleotide
acgcauuccuccuggaaca

SEQ ID NO: 1978141 - RNA, 19 nt, Artificial Sequence
  Description of Artificial Sequence: Synthetic oligonucleotide
gaccagcgauacuugauac

SEQ ID NO: 1978142 - RNA, 19 nt, Artificial Sequence
  Description of Artificial Sequence: Synthetic oligonucleotide
aguucuguggccuccuuua

SEQ ID NO: 1978143 - RNA, 19 nt, Artificial Sequence
  Description of Artificial Sequence: Synthetic oligonucleotide
ucuguguuacagccagcca

SEQ ID NO: 1978144 - RNA, 19 nt, Artificial Sequence
  Description of Artificial Sequence: Synthetic oligonucleotide
guaggggcaaugugcggcg

SEQ ID NO: 1978145 - RNA, 19 nt, Artificial Sequence
  Description of Artificial Sequence: Synthetic oligonucleotide
ugauacuucugcacgcauu

SEQ ID NO: 1978146 - RNA, 19 nt, Artificial Sequence
  Description of Artificial Sequence: Synthetic oligonucleotide
agggugacccucaaagagg

SEQ ID NO: 1978147 - RNA, 19 nt, Artificial Sequence
  Description of Artificial Sequence: Synthetic oligonucleotide
acaucuagagaggaccucu

SEQ ID NO: 1978148 - RNA, 19 nt, Artificial Sequence
  Description of Artificial Sequence: Synthetic oligonucleotide
aacccucgaagcaucagca

SEQ ID NO: 1978149 - RNA, 19 nt, Artificial Sequence
  Description of Artificial Sequence: Synthetic oligonucleotide
ugacccucaaagagguacu

SEQ ID NO: 1978150 - RNA, 19 nt, Artificial Sequence
  Description of Artificial Sequence: Synthetic oligonucleotide
ugcaaagaacuggucgaag

SEQ ID NO: 1978151 - RNA, 19 nt, Artificial Sequence
  Description of Artificial Sequence: Synthetic oligonucleotide
ucugcacgcauuccuccug

SEQ ID NO: 1978152 - RNA, 19 nt, Artificial Sequence
  Description of Artificial Sequence: Synthetic oligonucleotide
aaguaucuccaggacccag

SEQ ID NO: 1978153 - RNA, 19 nt, Artificial Sequence
  Description of Artificial Sequence: Synthetic oligonucleotide
ugaagugcaucuuguccaa

SEQ ID NO: 1978154 - RNA, 19 nt, Artificial Sequence
  Description of Artificial Sequence: Synthetic oligonucleotide
uucuacugucaucguggag

SEQ ID NO: 1978155 - RNA, 19 nt, Artificial Sequence
  Description of Artificial Sequence: Synthetic oligonucleotide
ugcaccugccuuauccgcu

SEQ ID NO: 1978156 - RNA, 19 nt, Artificial Sequence
  Description of Artificial Sequence: Synthetic oligonucleotide
aagagguacuccugguguu

SEQ ID NO: 1978157 - RNA, 19 nt, Artificial Sequence
  Description of Artificial Sequence: Synthetic oligonucleotide
cuugggugugucacuggcc

SEQ ID NO: 1978158 - RNA, 19 nt, Artificial Sequence
  Description of Artificial Sequence: Synthetic oligonucleotide
ucaucguggagcugauuuc

SEQ ID NO: 1978159 - RNA, 19 nt, Artificial Sequence
  Description of Artificial Sequence: Synthetic oligonucleotide
auacuucugcacgcauucc

SEQ ID NO: 1978160 - RNA, 19 nt, Artificial Sequence
  Description of Artificial Sequence: Synthetic oligonucleotide
uguagacaugaugcaagac

SEQ ID NO: 1978161 - RNA, 19 nt, Artificial Sequence
  Description of Artificial Sequence: Synthetic oligonucleotide
aguguaacccucgaagcau

SEQ ID NO: 1978162 - RNA, 19 nt, Artificial Sequence
  Description of Artificial Sequence: Synthetic oligonucleotide
agacaugaugcaagaccgc

SEQ ID NO: 1978163 - RNA, 19 nt, Artificial Sequence
  Description of Artificial Sequence: Synthetic oligonucleotide
acuccaaccauagaccgaa

SEQ ID NO: 1978164 - RNA, 19 nt, Artificial Sequence
  Description of Artificial Sequence: Synthetic oligonucleotide
acuggucgaagccccagca

SEQ ID NO: 1978165 - RNA, 19 nt, Artificial Sequence
  Description of Artificial Sequence: Synthetic oligonucleotide
ucgaagccccagcacuuag

SEQ ID NO: 1978166 - RNA, 19 nt, Artificial Sequence
  Description of Artificial Sequence: Synthetic oligonucleotide
accugccuuauccgcuugc

SEQ ID NO: 1978167 - RNA, 19 nt, Artificial Sequence
  Description of Artificial Sequence: Synthetic oligonucleotide
gaacugcuuguagaugaag

SEQ ID NO: 1978168 - RNA, 19 nt, Artificial Sequence
  Description of Artificial Sequence: Synthetic oligonucleotide
uguuacagccagccacaga

SEQ ID NO: 1978169 - RNA, 19 nt, Artificial Sequence
  Description of Artificial Sequence: Synthetic oligonucleotide
cauccuagcuuuguugaac

SEQ ID NO: 1978170 - RNA, 19 nt, Artificial Sequence
  Description of Artificial Sequence: Synthetic oligonucleotide
augaugcaagaccgccugg

SEQ ID NO: 1978171 - RNA, 19 nt, Artificial Sequence
  Description of Artificial Sequence: Synthetic oligonucleotide
uggauacuucuacugucau

SEQ ID NO: 1978172 - RNA, 19 nt, Artificial Sequence
  Description of Artificial Sequence: Synthetic oligonucleotide
agcugauuucgguucuuca

SEQ ID NO: 1978173 - RNA, 19 nt, Artificial Sequence
  Description of Artificial Sequence: Synthetic oligonucleotide
caugugugaccagcgauac

SEQ ID NO: 1978174 - RNA, 19 nt, Artificial Sequence
  Description of Artificial Sequence: Synthetic oligonucleotide
caacucaggcucacuuggg

SEQ ID NO: 1978175 - RNA, 19 nt, Artificial Sequence
  Description of Artificial Sequence: Synthetic oligonucleotide
aucuagagaggaccucuga

SEQ ID NO: 1978176 - RNA, 19 nt, Artificial Sequence
  Description of Artificial Sequence: Synthetic oligonucleotide
caacugguucugcagcccc

SEQ ID NO: 1978177 - RNA, 19 nt, Artificial Sequence
  Description of Artificial Sequence: Synthetic oligonucleotide
uugauacuucugcacgcau

SEQ ID NO: 1978178 - RNA, 19 nt, Artificial Sequence
  Description of Artificial Sequence: Synthetic oligonucleotide
accagcgauacuugauacu

SEQ ID NO: 1978179 - RNA, 19 nt, Artificial Sequence
  Description of Artificial Sequence: Synthetic oligonucleotide
aaccauagaccgaaacaaa

SEQ ID NO: 1978180 - RNA, 19 nt, Artificial Sequence
  Description of Artificial Sequence: Synthetic oligonucleotide
uggcuaaaauucaccuuau

SEQ ID NO: 1978181 - RNA, 19 nt, Artificial Sequence
  Description of Artificial Sequence: Synthetic oligonucleotide
gcugcuggcggcuguaggg

SEQ ID NO: 1978182 - RNA, 19 nt, Artificial Sequence
  Description of Artificial Sequence: Synthetic oligonucleotide
ucacuggucucugcaaaga

SEQ ID NO: 1978183 - RNA, 19 nt, Artificial Sequence
  Description of Artificial Sequence: Synthetic oligonucleotide
caauaccgaaucuucugga

SEQ ID NO: 1978184 - RNA, 19 nt, Artificial Sequence
  Description of Artificial Sequence: Synthetic oligonucleotide
gggcuucuguguuacagcc

SEQ ID NO: 1978185 - RNA, 19 nt, Artificial Sequence
  Description of Artificial Sequence: Synthetic oligonucleotide
uccucgucguccagcuucc

SEQ ID NO: 1978186 - RNA, 19 nt, Artificial Sequence
  Description of Artificial Sequence: Synthetic oligonucleotide
uucugcacgcauuccuccu

SEQ ID NO: 1978187 - RNA, 19 nt, Artificial Sequence
  Description of Artificial Sequence: Synthetic oligonucleotide
ucgaagcaucagcaccugc

SEQ ID NO: 1978188 - RNA, 19 nt, Artificial Sequence
  Description of Artificial Sequence: Synthetic oligonucleotide
caucuagagaggaccucug

SEQ ID NO: 1978189 - RNA, 19 nt, Artificial Sequence
  Description of Artificial Sequence: Synthetic oligonucleotide
uccuagcuuuguugaacug

SEQ ID NO: 1978190 - RNA, 19 nt, Artificial Sequence
  Description of Artificial Sequence: Synthetic oligonucleotide
uguccgcgugaccuccagg

SEQ ID NO: 1978191 - RNA, 19 nt, Artificial Sequence
  Description of Artificial Sequence: Synthetic oligonucleotide
aggcuauagcuccacucca

SEQ ID NO: 1978192 - RNA, 19 nt, Artificial Sequence
  Description of Artificial Sequence: Synthetic oligonucleotide
uggcaaucguguugugggc

SEQ ID NO: 1978193 - RNA, 19 nt, Artificial Sequence
  Description of Artificial Sequence: Synthetic oligonucleotide
ucauccuagcuuuguugaa

SEQ ID NO: 1978194 - RNA, 19 nt, Artificial Sequence
  Description of Artificial Sequence: Synthetic oligonucleotide
ucguccagcuuccgagcag

SEQ ID NO: 1978195 - RNA, 19 nt, Artificial Sequence
  Description of Artificial Sequence: Synthetic oligonucleotide
cuagcuuuguugaacugcu

SEQ ID NO: 1978196 - RNA, 19 nt, Artificial Sequence
  Description of Artificial Sequence: Synthetic oligonucleotide
aauucaccuuauccagcuu

SEQ ID NO: 1978197 - RNA, 19 nt, Artificial Sequence
  Description of Artificial Sequence: Synthetic oligonucleotide
aagaccgccuggggcaggg

SEQ ID NO: 1978198 - RNA, 19 nt, Artificial Sequence
  Description of Artificial Sequence: Synthetic oligonucleotide
auagcuccacuccaaccau

SEQ ID NO: 1978199 - RNA, 19 nt, Artificial Sequence
  Description of Artificial Sequence: Synthetic oligonucleotide
cacugugggaacaucuaga

SEQ ID NO: 1978200 - RNA, 19 nt, Artificial Sequence
  Description of Artificial Sequence: Synthetic oligonucleotide
gaaggggagggcuguccgc

SEQ ID NO: 1978201 - RNA, 19 nt, Artificial Sequence
  Description of Artificial Sequence: Synthetic oligonucleotide
uucgguucuucagaagcuc

SEQ ID NO: 1978202 - RNA, 19 nt, Artificial Sequence
  Description of Artificial Sequence: Synthetic oligonucleotide
cugcacgcauuccuccugg

SEQ ID NO: 1978203 - RNA, 19 nt, Artificial Sequence
  Description of Artificial Sequence: Synthetic oligonucleotide
ucguggagcugauuucggu

SEQ ID NO: 1978204 - RNA, 19 nt, Artificial Sequence
  Description of Artificial Sequence: Synthetic oligonucleotide
ucguguugugggcauggau

SEQ ID NO: 1978205 - RNA, 19 nt, Artificial Sequence
  Description of Artificial Sequence: Synthetic oligonucleotide
ggaaggggagggcuguccg

SEQ ID NO: 1978206 - RNA, 19 nt, Artificial Sequence
  Description of Artificial Sequence: Synthetic oligonucleotide
agcuccacuccaaccauag

SEQ ID NO: 1978207 - RNA, 19 nt, Artificial Sequence
  Description of Artificial Sequence: Synthetic oligonucleotide
cugcaccugccuuauccgc

SEQ ID NO: 1978208 - RNA, 19 nt, Artificial Sequence
  Description of Artificial Sequence: Synthetic oligonucleotide
caguguaacccucgaagca

SEQ ID NO: 1978209 - RNA, 19 nt, Artificial Sequence
  Description of Artificial Sequence: Synthetic oligonucleotide
ccacagaucggccaaugag

SEQ ID NO: 1978210 - RNA, 19 nt, Artificial Sequence
  Description of Artificial Sequence: Synthetic oligonucleotide
ggaccucugagaaagucug

SEQ ID NO: 1978211 - RNA, 19 nt, Artificial Sequence
  Description of Artificial Sequence: Synthetic oligonucleotide
gugcaucuuguccaaacaa

SEQ ID NO: 1978212 - RNA, 19 nt, Artificial Sequence
  Description of Artificial Sequence: Synthetic oligonucleotide
ugugggcauggauguagac

SEQ ID NO: 1978213 - RNA, 19 nt, Artificial Sequence
  Description of Artificial Sequence: Synthetic oligonucleotide
ccucauuguagcugagucc

SEQ ID NO: 1978214 - RNA, 19 nt, Artificial Sequence
  Description of Artificial Sequence: Synthetic oligonucleotide
uaaccagcgggucccugaa

SEQ ID NO: 1978215 - RNA, 19 nt, Artificial Sequence
  Description of Artificial Sequence: Synthetic oligonucleotide
cgaagcaucagcaccugcc

SEQ ID NO: 1978216 - RNA, 19 nt, Artificial Sequence
  Description of Artificial Sequence: Synthetic oligonucleotide
aggauggguaccaacuggu

SEQ ID NO: 1978217 - RNA, 19 nt, Artificial Sequence
  Description of Artificial Sequence: Synthetic oligonucleotide
acagaucggccaaugagau

SEQ ID NO: 1978218 - RNA, 19 nt, Artificial Sequence
  Description of Artificial Sequence: Synthetic oligonucleotide
guaaccagcgggucccuga

SEQ ID NO: 1978219 - RNA, 19 nt, Artificial Sequence
  Description of Artificial Sequence: Synthetic oligonucleotide
uuacagccagccacagauc

SEQ ID NO: 1978220 - RNA, 19 nt, Artificial Sequence
  Description of Artificial Sequence: Synthetic oligonucleotide
gaccgccuggggcagggag

SEQ ID NO: 1978221 - RNA, 19 nt, Artificial Sequence
  Description of Artificial Sequence: Synthetic oligonucleotide
ugacaauccgcugcaggau

SEQ ID NO: 1978222 - RNA, 19 nt, Artificial Sequence
  Description of Artificial Sequence: Synthetic oligonucleotide
uccgcugcaggaugucacu

SEQ ID NO: 1978223 - RNA, 19 nt, Artificial Sequence
  Description of Artificial Sequence: Synthetic oligonucleotide
ugcagccccauggacaauc

SEQ ID NO: 1978224 - RNA, 19 nt, Artificial Sequence
  Description of Artificial Sequence: Synthetic oligonucleotide
cauagaccgaaacaaacuu

SEQ ID NO: 1978225 - RNA, 19 nt, Artificial Sequence
  Description of Artificial Sequence: Synthetic oligonucleotide
gaacuggucgaagccccag

SEQ ID NO: 1978226 - RNA, 19 nt, Artificial Sequence
  Description of Artificial Sequence: Synthetic oligonucleotide
gaacaccugcagcagccuc

SEQ ID NO: 1978227 - RNA, 19 nt, Artificial Sequence
  Description of Artificial Sequence: Synthetic oligonucleotide
cuguaggggcaaugugcgg

SEQ ID NO: 1978228 - RNA, 19 nt, Artificial Sequence
  Description of Artificial Sequence: Synthetic oligonucleotide
gguacuccugguguuuggg

SEQ ID NO: 1978229 - RNA, 19 nt, Artificial Sequence
  Description of Artificial Sequence: Synthetic oligonucleotide
caagggugacccucaaaga

SEQ ID NO: 1978230 - RNA, 19 nt, Artificial Sequence
  Description of Artificial Sequence: Synthetic oligonucleotide
agagaggaccucugagaaa

SEQ ID NO: 1978231 - RNA, 19 nt, Artificial Sequence
  Description of Artificial Sequence: Synthetic oligonucleotide
agaccgaaacaaacuucuc

SEQ ID NO: 1978232 - RNA, 19 nt, Artificial Sequence
  Description of Artificial Sequence: Synthetic oligonucleotide
cuugauacuucugcacgca

SEQ ID NO: 1978233 - RNA, 19 nt, Artificial Sequence
  Description of Artificial Sequence: Synthetic oligonucleotide
aggcaacucaggcucacuu

SEQ ID NO: 1978234 - RNA, 19 nt, Artificial Sequence
  Description of Artificial Sequence: Synthetic oligonucleotide
auacuucuacugucaucgu

SEQ ID NO: 1978235 - RNA, 19 nt, Artificial Sequence
  Description of Artificial Sequence: Synthetic oligonucleotide
ccaaccauagaccgaaaca

SEQ ID NO: 1978236 - RNA, 19 nt, Artificial Sequence
  Description of Artificial Sequence: Synthetic oligonucleotide
ccucauccuagcuuuguug

SEQ ID NO: 1978237 - RNA, 19 nt, Artificial Sequence
  Description of Artificial Sequence: Synthetic oligonucleotide
auccgcuugccauguguga

SEQ ID NO: 1978238 - RNA, 19 nt, Artificial Sequence
  Description of Artificial Sequence: Synthetic oligonucleotide
aucguggagcugauuucgg

SEQ ID NO: 1978239 - RNA, 19 nt, Artificial Sequence
  Description of Artificial Sequence: Synthetic oligonucleotide
cagcgauacuugauacuuc

SEQ ID NO: 1978240 - RNA, 19 nt, Artificial Sequence
  Description of Artificial Sequence: Synthetic oligonucleotide
ggauacuucuacugucauc

SEQ ID NO: 1978241 - RNA, 19 nt, Artificial Sequence
  Description of Artificial Sequence: Synthetic oligonucleotide
gcuauagcuccacuccaac

SEQ ID NO: 1978242 - RNA, 19 nt, Artificial Sequence
  Description of Artificial Sequence: Synthetic oligonucleotide
cugaaggucagggcccuug

SEQ ID NO: 1978243 - RNA, 19 nt, Artificial Sequence
  Description of Artificial Sequence: Synthetic oligonucleotide
ugaccuccagggucugcug

SEQ ID NO: 1978244 - RNA, 19 nt, Artificial Sequence
  Description of Artificial Sequence: Synthetic oligonucleotide
acgugcucugaaguaucuc

SEQ ID NO: 1978245 - RNA, 19 nt, Artificial Sequence
  Description of Artificial Sequence: Synthetic oligonucleotide
uggccaugcugaacagaac

SEQ ID NO: 1978246 - RNA, 19 nt, Artificial Sequence
  Description of Artificial Sequence: Synthetic oligonucleotide
gcucaaggacacaagggug

SEQ ID NO: 1978247 - RNA, 19 nt, Artificial Sequence
  Description of Artificial Sequence: Synthetic oligonucleotide
ggcauggauguagacauga

SEQ ID NO: 1978248 - RNA, 19 nt, Artificial Sequence
  Description of Artificial Sequence: Synthetic oligonucleotide
cuggucgaagccccagcac

SEQ ID NO: 1978249 - RNA, 19 nt, Artificial Sequence
  Description of Artificial Sequence: Synthetic oligonucleotide
ccugguaaccagcgggucc

SEQ ID NO: 1978250 - RNA, 19 nt, Artificial Sequence
  Description of Artificial Sequence: Synthetic oligonucleotide
uccgcgugaccuccagggu

SEQ ID NO: 1978251 - RNA, 19 nt, Artificial Sequence
  Description of Artificial Sequence: Synthetic oligonucleotide
ugugcggcgcugagaggcu

SEQ ID NO: 1978252 - RNA, 19 nt, Artificial Sequence
  Description of Artificial Sequence: Synthetic oligonucleotide
gagaugcaggugguucuug

SEQ ID NO: 1978253 - RNA, 19 nt, Artificial Sequence
  Description of Artificial Sequence: Synthetic oligonucleotide
uggcacgugcucugaagua

SEQ ID NO: 1978254 - RNA, 19 nt, Artificial Sequence
  Description of Artificial Sequence: Synthetic oligonucleotide
cagaucggccaaugagaug

SEQ ID NO: 1978255 - RNA, 19 nt, Artificial Sequence
  Description of Artificial Sequence: Synthetic oligonucleotide
cugagccuuucaaugccca

SEQ ID NO: 1978256 - RNA, 19 nt, Artificial Sequence
  Description of Artificial Sequence: Synthetic oligonucleotide
agcgggucccugaagguca

SEQ ID NO: 1978257 - RNA, 19 nt, Artificial Sequence
  Description of Artificial Sequence: Synthetic oligonucleotide
ccuugggugugucacuggc

SEQ ID NO: 1978258 - RNA, 19 nt, Artificial Sequence
  Description of Artificial Sequence: Synthetic oligonucleotide
gcuggcacgugcucugaag

SEQ ID NO: 1978259 - RNA, 19 nt, Artificial Sequence
  Description of Artificial Sequence: Synthetic oligonucleotide
cugcucauauacagccuca

SEQ ID NO: 1978260 - RNA, 19 nt, Artificial Sequence
  Description of Artificial Sequence: Synthetic oligonucleotide
acaauccgcugcaggaugu

SEQ ID NO: 1978261 - RNA, 19 nt, Artificial Sequence
  Description of Artificial Sequence: Synthetic oligonucleotide
gacacugugggaacaucua

SEQ ID NO: 1978262 - RNA, 19 nt, Artificial Sequence
  Description of Artificial Sequence: Synthetic oligonucleotide
ggaagucgggcaucucagc

SEQ ID NO: 1978263 - RNA, 19 nt, Artificial Sequence
  Description of Artificial Sequence: Synthetic oligonucleotide
ccaggacccaguguaaccc

SEQ ID NO: 1978264 - RNA, 19 nt, Artificial Sequence
  Description of Artificial Sequence: Synthetic oligonucleotide
cucuaccuccaggauguug

SEQ ID NO: 1978265 - RNA, 19 nt, Artificial Sequence
  Description of Artificial Sequence: Synthetic oligonucleotide
ugagaugcaggugguucuu

SEQ ID NO: 1978266 - RNA, 19 nt, Artificial Sequence
  Description of Artificial Sequence: Synthetic oligonucleotide
agucuguagccuggaccuc

SEQ ID NO: 1978267 - RNA, 19 nt, Artificial Sequence
  Description of Artificial Sequence: Synthetic oligonucleotide
ggauuugcuccucauugua

SEQ ID NO: 1978268 - RNA, 19 nt, Artificial Sequence
  Description of Artificial Sequence: Synthetic oligonucleotide
uagcuccacuccaaccaua

SEQ ID NO: 1978269 - RNA, 19 nt, Artificial Sequence
  Description of Artificial Sequence: Synthetic oligonucleotide
augugugaccagcgauacu

SEQ ID NO: 1978270 - RNA, 19 nt, Artificial Sequence
  Description of Artificial Sequence: Synthetic oligonucleotide
ugcacgcauuccuccugga

SEQ ID NO: 1978271 - RNA, 19 nt, Artificial Sequence
  Description of Artificial Sequence: Synthetic oligonucleotide
gcuuuguugaacugcuugu

SEQ ID NO: 1978272 - RNA, 19 nt, Artificial Sequence
  Description of Artificial Sequence: Synthetic oligonucleotide
gacccaguguaacccucga

SEQ ID NO: 1978273 - RNA, 19 nt, Artificial Sequence
  Description of Artificial Sequence: Synthetic oligonucleotide
ggcuaaaauucaccuuauc

SEQ ID NO: 1978274 - RNA, 19 nt, Artificial Sequence
  Description of Artificial Sequence: Synthetic oligonucleotide
gccuuauccgcuugccaug

SEQ ID NO: 1978275 - RNA, 19 nt, Artificial Sequence
  Description of Artificial Sequence: Synthetic oligonucleotide
aucggccaaugagaugcag

SEQ ID NO: 1978276 - RNA, 19 nt, Artificial Sequence
  Description of Artificial Sequence: Synthetic oligonucleotide
gacccucaaagagguacuc

SEQ ID NO: 1978277 - RNA, 19 nt, Artificial Sequence
  Description of Artificial Sequence: Synthetic oligonucleotide
guguuacagccagccacag

SEQ ID NO: 1978278 - RNA, 19 nt, Artificial Sequence
  Description of Artificial Sequence: Synthetic oligonucleotide
ggacccaguguaacccucg

SEQ ID NO: 1978279 - RNA, 19 nt, Artificial Sequence
  Description of Artificial Sequence: Synthetic oligonucleotide
guguaacccucgaagcauc

SEQ ID NO: 1978280 - RNA, 19 nt, Artificial Sequence
  Description of Artificial Sequence: Synthetic oligonucleotide
gugugaccagcgauacuug

SEQ ID NO: 1978281 - RNA, 19 nt, Artificial Sequence
  Description of Artificial Sequence: Synthetic oligonucleotide
cgaaucuucuggauacuuc

SEQ ID NO: 1978282 - RNA, 19 nt, Artificial Sequence
  Description of Artificial Sequence: Synthetic oligonucleotide
cuuauccgcuugccaugug

SEQ ID NO: 1978283 - RNA, 19 nt, Artificial Sequence
  Description of Artificial Sequence: Synthetic oligonucleotide
aggacacaagggugacccu

SEQ ID NO: 1978284 - RNA, 19 nt, Artificial Sequence
  Description of Artificial Sequence: Synthetic oligonucleotide
agccagccacagaucggcc

SEQ ID NO: 1978285 - RNA, 19 nt, Artificial Sequence
  Description of Artificial Sequence: Synthetic oligonucleotide
ugcuggcacgugcucugaa

SEQ ID NO: 1978286 - RNA, 19 nt, Artificial Sequence
  Description of Artificial Sequence: Synthetic oligonucleotide
ccgaaacaaacuucuccuc

SEQ ID NO: 1978287 - RNA, 19 nt, Artificial Sequence
  Description of Artificial Sequence: Synthetic oligonucleotide
gggcacguuggucugcuca

SEQ ID NO: 1978288 - RNA, 19 nt, Artificial Sequence
  Description of Artificial Sequence: Synthetic oligonucleotide
guuccuggaagucgggcau

SEQ ID NO: 1978289 - RNA, 19 nt, Artificial Sequence
  Description of Artificial Sequence: Synthetic oligonucleotide
gcaucuuguccaaacaaua

SEQ ID NO: 1978290 - RNA, 19 nt, Artificial Sequence
  Description of Artificial Sequence: Synthetic oligonucleotide
ucgggcaucucagccccac

SEQ ID NO: 1978291 - RNA, 19 nt, Artificial Sequence
  Description of Artificial Sequence: Synthetic oligonucleotide
acguuggucugcucauaua

SEQ ID NO: 1978292 - RNA, 19 nt, Artificial Sequence
  Description of Artificial Sequence: Synthetic oligonucleotide
cucgaagcaucagcaccug

SEQ ID NO: 1978293 - RNA, 19 nt, Artificial Sequence
  Description of Artificial Sequence: Synthetic oligonucleotide
caggacccgcgccagccac

SEQ ID NO: 1978294 - RNA, 19 nt, Artificial Sequence
  Description of Artificial Sequence: Synthetic oligonucleotide
accgaaucuucuggauacu

SEQ ID NO: 1978295 - RNA, 19 nt, Artificial Sequence
  Description of Artificial Sequence: Synthetic oligonucleotide
gggaacaucuagagaggac

SEQ ID NO: 1978296 - RNA, 19 nt, Artificial Sequence
  Description of Artificial Sequence: Synthetic oligonucleotide
cugccuuauccgcuugcca

SEQ ID NO: 1978297 - RNA, 19 nt, Artificial Sequence
  Description of Artificial Sequence: Synthetic oligonucleotide
ccauagaccgaaacaaacu

SEQ ID NO: 1978298 - RNA, 19 nt, Artificial Sequence
  Description of Artificial Sequence: Synthetic oligonucleotide
cuggcacgugcucugaagu

SEQ ID NO: 1978299 - RNA, 19 nt, Artificial Sequence
  Description of Artificial Sequence: Synthetic oligonucleotide
cacuuagcuugcucuaccu

SEQ ID NO: 1978300 - RNA, 19 nt, Artificial Sequence
  Description of Artificial Sequence: Synthetic oligonucleotide
gcugagccuuucaaugccc

SEQ ID NO: 1978301 - RNA, 19 nt, Artificial Sequence
  Description of Artificial Sequence: Synthetic oligonucleotide
acacaagggugacccucaa

SEQ ID NO: 1978302 - RNA, 19 nt, Artificial Sequence
  Description of Artificial Sequence: Synthetic oligonucleotide
cuguccgcgugaccuccag

SEQ ID NO: 1978303 - RNA, 19 nt, Artificial Sequence
  Description of Artificial Sequence: Synthetic oligonucleotide
agaacuggucgaagcccca

SEQ ID NO: 1978304 - RNA, 19 nt, Artificial Sequence
  Description of Artificial Sequence: Synthetic oligonucleotide
ggcaaucguguugugggca

SEQ ID NO: 1978305 - RNA, 19 nt, Artificial Sequence
  Description of Artificial Sequence: Synthetic oligonucleotide
gcgcugagaggcuuggcuc

SEQ ID NO: 1978306 - RNA, 19 nt, Artificial Sequence
  Description of Artificial Sequence: Synthetic oligonucleotide
cucgucguccagcuuccga

SEQ ID NO: 1978307 - RNA, 19 nt, Artificial Sequence
  Description of Artificial Sequence: Synthetic oligonucleotide
uaggggcaaugugcggcgc

SEQ ID NO: 1978308 - RNA, 19 nt, Artificial Sequence
  Description of Artificial Sequence: Synthetic oligonucleotide
ggacaaucugcaggugaug

SEQ ID NO: 1978309 - RNA, 19 nt, Artificial Sequence
  Description of Artificial Sequence: Synthetic oligonucleotide
ccauggacaaucugcaggu

SEQ ID NO: 1978310 - RNA, 19 nt, Artificial Sequence
  Description of Artificial Sequence: Synthetic oligonucleotide
gcagcagccucuuggcuaa

SEQ ID NO: 1978311 - RNA, 19 nt, Artificial Sequence
  Description of Artificial Sequence: Synthetic oligonucleotide
gugacacugugggaacauc

SEQ ID NO: 1978312 - RNA, 19 nt, Artificial Sequence
  Description of Artificial Sequence: Synthetic oligonucleotide
agggcccuuggguguguca

SEQ ID NO: 1978313 - RNA, 19 nt, Artificial Sequence
  Description of Artificial Sequence: Synthetic oligonucleotide
cgggcuucuguguuacagc

SEQ ID NO: 1978314 - RNA, 19 nt, Artificial Sequence
  Description of Artificial Sequence: Synthetic oligonucleotide
ccugccuuauccgcuugcc

SEQ ID NO: 1978315 - RNA, 19 nt, Artificial Sequence
  Description of Artificial Sequence: Synthetic oligonucleotide
ccaugugugaccagcgaua

SEQ ID NO: 1978316 - RNA, 19 nt, Artificial Sequence
  Description of Artificial Sequence: Synthetic oligonucleotide
caauccgcugcaggauguc

SEQ ID NO: 1978317 - RNA, 19 nt, Artificial Sequence
  Description of Artificial Sequence: Synthetic oligonucleotide
gaucggccaaugagaugca

SEQ ID NO: 1978318 - RNA, 19 nt, Artificial Sequence
  Description of Artificial Sequence: Synthetic oligonucleotide
ggcgcugagaggcuuggcu

SEQ ID NO: 1978319 - RNA, 19 nt, Artificial Sequence
  Description of Artificial Sequence: Synthetic oligonucleotide
ggaugacaauccgcugcag

SEQ ID NO: 1978320 - RNA, 19 nt, Artificial Sequence
  Description of Artificial Sequence: Synthetic oligonucleotide
aggggagggcuguccgcgu

SEQ ID NO: 1978321 - RNA, 19 nt, Artificial Sequence
  Description of Artificial Sequence: Synthetic oligonucleotide
aggcucacuuggguuucug

SEQ ID NO: 1978322 - RNA, 19 nt, Artificial Sequence
  Description of Artificial Sequence: Synthetic oligonucleotide
gcgauacuugauacuucug

SEQ ID NO: 1978323 - RNA, 19 nt, Artificial Sequence
  Description of Artificial Sequence: Synthetic oligonucleotide
gccccauggacaaucugca

SEQ ID NO: 1978324 - RNA, 19 nt, Artificial Sequence
  Description of Artificial Sequence: Synthetic oligonucleotide
caccugccuuauccgcuug

SEQ ID NO: 1978325 - RNA, 19 nt, Artificial Sequence
  Description of Artificial Sequence: Synthetic oligonucleotide
ccucgaagcaucagcaccu

SEQ ID NO: 1978326 - RNA, 19 nt, Artificial Sequence
  Description of Artificial Sequence: Synthetic oligonucleotide
accgccuggggcagggaga

SEQ ID NO: 1978327 - RNA, 19 nt, Artificial Sequence
  Description of Artificial Sequence: Synthetic oligonucleotide
caagaccgccuggggcagg

SEQ ID NO: 1978328 - RNA, 19 nt, Artificial Sequence
  Description of Artificial Sequence: Synthetic oligonucleotide
cacguuggucugcucauau

SEQ ID NO: 1978329 - RNA, 19 nt, Artificial Sequence
  Description of Artificial Sequence: Synthetic oligonucleotide
ugguaaccagcgggucccu

SEQ ID NO: 1978330 - RNA, 19 nt, Artificial Sequence
  Description of Artificial Sequence: Synthetic oligonucleotide
gugaccagcgauacuugau

SEQ ID NO: 1978331 - RNA, 19 nt, Artificial Sequence
  Description of Artificial Sequence: Synthetic oligonucleotide
ccucuuggcuaaauggcua

SEQ ID NO: 1978332 - RNA, 19 nt, Artificial Sequence
  Description of Artificial Sequence: Synthetic oligonucleotide
ccgcgugaccuccaggguc

SEQ ID NO: 1978333 - RNA, 19 nt, Artificial Sequence
  Description of Artificial Sequence: Synthetic oligonucleotide
ggcuguccgcgugaccucc

SEQ ID NO: 1978334 - RNA, 19 nt, Artificial Sequence
  Description of Artificial Sequence: Synthetic oligonucleotide
ggcuauagcuccacuccaa

SEQ ID NO: 1978335 - RNA, 19 nt, Artificial Sequence
  Description of Artificial Sequence: Synthetic oligonucleotide
gggugacccucaaagaggu

SEQ ID NO: 1978336 - RNA, 19 nt, Artificial Sequence
  Description of Artificial Sequence: Synthetic oligonucleotide
cccuugggugugucacugg

SEQ ID NO: 1978337 - RNA, 19 nt, Artificial Sequence
  Description of Artificial Sequence: Synthetic oligonucleotide
cuuauccagcuuguggauu

SEQ ID NO: 1978338 - RNA, 19 nt, Artificial Sequence
  Description of Artificial Sequence: Synthetic oligonucleotide
gcaagaccgccuggggcag

SEQ ID NO: 1978339 - RNA, 19 nt, Artificial Sequence
  Description of Artificial Sequence: Synthetic oligonucleotide
ccaaacaauaccgaaucuu

SEQ ID NO: 1978340 - RNA, 19 nt, Artificial Sequence
  Description of Artificial Sequence: Synthetic oligonucleotide
gccaugugugaccagcgau

SEQ ID NO: 1978341 - RNA, 19 nt, Artificial Sequence
  Description of Artificial Sequence: Synthetic oligonucleotide
cgucguccagcuuccgagc

SEQ ID NO: 1978342 - RNA, 19 nt, Artificial Sequence
  Description of Artificial Sequence: Synthetic oligonucleotide
ggacccgcgccagccacag

SEQ ID NO: 1978343 - RNA, 19 nt, Artificial Sequence
  Description of Artificial Sequence: Synthetic oligonucleotide
gcacgugcucugaaguauc

SEQ ID NO: 1978344 - RNA, 19 nt, Artificial Sequence
  Description of Artificial Sequence: Synthetic oligonucleotide
caggacccaguguaacccu

SEQ ID NO: 1978345 - RNA, 19 nt, Artificial Sequence
  Description of Artificial Sequence: Synthetic oligonucleotide
gguaaccagcgggucccug

SEQ ID NO: 1978346 - RNA, 19 nt, Artificial Sequence
  Description of Artificial Sequence: Synthetic oligonucleotide
gcacgcauuccuccuggaa

SEQ ID NO: 1978347 - RNA, 19 nt, Artificial Sequence
  Description of Artificial Sequence: Synthetic oligonucleotide
gcaaucguguugugggcau

SEQ ID NO: 1978348 - RNA, 19 nt, Artificial Sequence
  Description of Artificial Sequence: Synthetic oligonucleotide
ggggaggcuauagcuccac

SEQ ID NO: 1978349 - RNA, 19 nt, Artificial Sequence
  Description of Artificial Sequence: Synthetic oligonucleotide
ggguaccaacugguucugc

SEQ ID NO: 1978350 - RNA, 19 nt, Artificial Sequence
  Description of Artificial Sequence: Synthetic oligonucleotide
ccagcgauacuugauacuu

SEQ ID NO: 1978351 - RNA, 19 nt, Artificial Sequence
  Description of Artificial Sequence: Synthetic oligonucleotide
ccaaugagaugcagguggu

SEQ ID NO: 1978352 - RNA, 19 nt, Artificial Sequence
  Description of Artificial Sequence: Synthetic oligonucleotide
ggcacgugcucugaaguau

SEQ ID NO: 1978353 - RNA, 19 nt, Artificial Sequence
  Description of Artificial Sequence: Synthetic oligonucleotide
cuccucauuguagcugagu

SEQ ID NO: 1978354 - RNA, 19 nt, Artificial Sequence
  Description of Artificial Sequence: Synthetic oligonucleotide
ggcggcuguaggggcaaug

SEQ ID NO: 1978355 - RNA, 19 nt, Artificial Sequence
  Description of Artificial Sequence: Synthetic oligonucleotide
gggcauggauguagacaug

SEQ ID NO: 1978356 - RNA, 19 nt, Artificial Sequence
  Description of Artificial Sequence: Synthetic oligonucleotide
gcggcgcugagaggcuugg

SEQ ID NO: 1978357 - RNA, 19 nt, Artificial Sequence
  Description of Artificial Sequence: Synthetic oligonucleotide
cgcugagaggcuuggcuca

SEQ ID NO: 1978358 - RNA, 19 nt, Artificial Sequence
  Description of Artificial Sequence: Synthetic oligonucleotide
aggacccgcgccagccaca

SEQ ID NO: 1978359 - RNA, 19 nt, Artificial Sequence
  Description of Artificial Sequence: Synthetic oligonucleotide
cccgcgccagccacagggc

SEQ ID NO: 1978360 - RNA, 19 nt, Artificial Sequence
  Description of Artificial Sequence: Synthetic oligonucleotide
ccaggcaacucaggcucac

SEQ ID NO: 1978361 - RNA, 19 nt, Artificial Sequence
  Description of Artificial Sequence: Synthetic oligonucleotide
gccugguaaccagcggguc

SEQ ID NO: 1978362 - RNA, 19 nt, Artificial Sequence
  Description of Artificial Sequence: Synthetic oligonucleotide
gggcuguccgcgugaccuc

SEQ ID NO: 1978363 - RNA, 19 nt, Artificial Sequence
  Description of Artificial Sequence: Synthetic oligonucleotide
cugucaucguggagcugau

SEQ ID NO: 1978364 - RNA, 19 nt, Artificial Sequence
  Description of Artificial Sequence: Synthetic oligonucleotide
ggccugguaaccagcgggu

SEQ ID NO: 1978365 - RNA, 19 nt, Artificial Sequence
  Description of Artificial Sequence: Synthetic oligonucleotide
gcggcuguaggggcaaugu

SEQ ID NO: 1978366 - RNA, 19 nt, Artificial Sequence
  Description of Artificial Sequence: Synthetic oligonucleotide
gugugucacuggccaugcu

SEQ ID NO: 1978367 - RNA, 19 nt, Artificial Sequence
  Description of Artificial Sequence: Synthetic oligonucleotide
gggcugcuggcggcuguag

SEQ ID NO: 1978368 - RNA, 19 nt, Artificial Sequence
  Description of Artificial Sequence: Synthetic oligonucleotide
gcugagaggcuuggcucaa

SEQ ID NO: 1978369 - RNA, 19 nt, Artificial Sequence
  Description of Artificial Sequence: Synthetic oligonucleotide
cccauccagcaggacccgc

SEQ ID NO: 1978370 - RNA, 19 nt, Artificial Sequence
  Description of Artificial Sequence: Synthetic oligonucleotide
gccuggaccucaguucugu

SEQ ID NO: 1978371 - RNA, 19 nt, Artificial Sequence
  Description of Artificial Sequence: Synthetic oligonucleotide
agaccgccuggggcaggga

SEQ ID NO: 1978372 - RNA, 19 nt, Artificial Sequence
  Description of Artificial Sequence: Synthetic oligonucleotide
cccaggcaacucaggcuca

SEQ ID NO: 1978373 - RNA, 19 nt, Artificial Sequence
  Description of Artificial Sequence: Synthetic oligonucleotide
ggucgaagccccagcacuu

SEQ ID NO: 1978374 - RNA, 19 nt, Artificial Sequence
  Description of Artificial Sequence: Synthetic oligonucleotide
gccucauccuagcuuuguu

SEQ ID NO: 1978375 - RNA, 19 nt, Artificial Sequence
  Description of Artificial Sequence: Synthetic oligonucleotide
ggauggguaccaacugguu

SEQ ID NO: 1978376 - RNA, 19 nt, Artificial Sequence
  Description of Artificial Sequence: Synthetic oligonucleotide
ggccucauccuagcuuugu

SEQ ID NO: 1978377 - RNA, 19 nt, Artificial Sequence
  Description of Artificial Sequence: Synthetic oligonucleotide
ccuuauccgcuugccaugu

SEQ ID NO: 1978378 - RNA, 19 nt, Artificial Sequence
  Description of Artificial Sequence: Synthetic oligonucleotide
cguggagcugauuucgguu

SEQ ID NO: 1978379 - RNA, 19 nt, Artificial Sequence
  Description of Artificial Sequence: Synthetic oligonucleotide
cuguagccuggaccucagu

SEQ ID NO: 1978380 - RNA, 19 nt, Artificial Sequence
  Description of Artificial Sequence: Synthetic oligonucleotide
caggcaacucaggcucacu

SEQ ID NO: 1978381 - RNA, 19 nt, Artificial Sequence
  Description of Artificial Sequence: Synthetic oligonucleotide
cgcgugaccuccagggucu

SEQ ID NO: 1978382 - RNA, 19 nt, Artificial Sequence
  Description of Artificial Sequence: Synthetic oligonucleotide
cgcuugccaugugugacca

SEQ ID NO: 1978383 - RNA, 19 nt, Artificial Sequence
  Description of Artificial Sequence: Synthetic oligonucleotide
gucgggcaucucagcccca

SEQ ID NO: 1978384 - RNA, 19 nt, Artificial Sequence
  Description of Artificial Sequence: Synthetic oligonucleotide
ggggcacguuggucugcuc

SEQ ID NO: 1978385 - RNA, 19 nt, Artificial Sequence
  Description of Artificial Sequence: Synthetic oligonucleotide
gcacguuggucugcucaua

SEQ ID NO: 1978386 - RNA, 19 nt, Artificial Sequence
  Description of Artificial Sequence: Synthetic oligonucleotide
gcagccccauggacaaucu

SEQ ID NO: 1978387 - RNA, 19 nt, Artificial Sequence
  Description of Artificial Sequence: Synthetic oligonucleotide
gcuguccgcgugaccucca

SEQ ID NO: 1978388 - RNA, 19 nt, Artificial Sequence
  Description of Artificial Sequence: Synthetic oligonucleotide
gcgugaccuccagggucug

SEQ ID NO: 1978389 - RNA, 19 nt, Artificial Sequence
  Description of Artificial Sequence: Synthetic oligonucleotide
ccgaaucuucuggauacuu

SEQ ID NO: 1978390 - RNA, 19 nt, Artificial Sequence
  Description of Artificial Sequence: Synthetic oligonucleotide
ggagcugauuucgguucuu

SEQ ID NO: 1978391 - RNA, 19 nt, Artificial Sequence
  Description of Artificial Sequence: Synthetic oligonucleotide
ccccacugcugagccuuuc

SEQ ID NO: 1978392 - RNA, 19 nt, Artificial Sequence
  Description of Artificial Sequence: Synthetic oligonucleotide
gugcggcgcugagaggcuu

SEQ ID NO: 1978393 - RNA, 19 nt, Artificial Sequence
  Description of Artificial Sequence: Synthetic oligonucleotide
cggcgcugagaggcuuggc

SEQ ID NO: 1978394 - RNA, 19 nt, Artificial Sequence
  Description of Artificial Sequence: Synthetic oligonucleotide
cugcagccccauggacaau

SEQ ID NO: 1978395 - RNA, 19 nt, Artificial Sequence
  Description of Artificial Sequence: Synthetic oligonucleotide
gccccacugcugagccuuu

SEQ ID NO: 1978396 - RNA, 19 nt, Artificial Sequence
  Description of Artificial Sequence: Synthetic oligonucleotide
uuagagacaauauuuacag

SEQ ID NO: 1978397 - RNA, 19 nt, Artificial Sequence
  Description of Artificial Sequence: Synthetic oligonucleotide
uauaauauguuacacauua

SEQ ID NO: 1978398 - RNA, 19 nt, Artificial Sequence
  Description of Artificial Sequence: Synthetic oligonucleotide
uauguuacacauuagagac

SEQ ID NO: 1978399 - RNA, 19 nt, Artificial Sequence
  Description of Artificial Sequence: Synthetic oligonucleotide
uaaaaugagcaaaacaucu

SEQ ID NO: 1978400 - RNA, 19 nt, Artificial Sequence
  Description of Artificial Sequence: Synthetic oligonucleotide
uaauauguuacacauuaga

SEQ ID NO: 1978401 - RNA, 19 nt, Artificial Sequence
  Description of Artificial Sequence: Synthetic oligonucleotide
uuuacagcaaaucuuugca

SEQ ID NO: 1978402 - RNA, 19 nt, Artificial Sequence
  Description of Artificial Sequence: Synthetic oligonucleotide
auugaggucggucagcggg

SEQ ID NO: 1978403 - RNA, 19 nt, Artificial Sequence
  Description of Artificial Sequence: Synthetic oligonucleotide
auauguuacacauuagaga

SEQ ID NO: 1978404 - RNA, 19 nt, Artificial Sequence
  Description of Artificial Sequence: Synthetic oligonucleotide
uuaaaaugagcaaaacauc

SEQ ID NO: 1978405 - RNA, 19 nt, Artificial Sequence
  Description of Artificial Sequence: Synthetic oligonucleotide
uugaaauugaggucgguca

SEQ ID NO: 1978406 - RNA, 19 nt, Artificial Sequence
  Description of Artificial Sequence: Synthetic oligonucleotide
agcaaaucuuugcauaaac

SEQ ID NO: 1978407 - RNA, 19 nt, Artificial Sequence
  Description of Artificial Sequence: Synthetic oligonucleotide
cucguugaaauugaggucg

SEQ ID NO: 1978408 - RNA, 19 nt, Artificial Sequence
  Description of Artificial Sequence: Synthetic oligonucleotide
uucuuuauaauauguuaca

SEQ ID NO: 1978409 - RNA, 19 nt, Artificial Sequence
  Description of Artificial Sequence: Synthetic oligonucleotide
uuauccaacacuguuacaa

SEQ ID NO: 1978410 - RNA, 19 nt, Artificial Sequence
  Description of Artificial Sequence: Synthetic oligonucleotide
caaaucuuugcauaaacca

SEQ ID NO: 1978411 - RNA, 19 nt, Artificial Sequence
  Description of Artificial Sequence: Synthetic oligonucleotide
uuccguuugcgguugaccg

SEQ ID NO: 1978412 - RNA, 19 nt, Artificial Sequence
  Description of Artificial Sequence: Synthetic oligonucleotide
uccuuguugucacugugcg

SEQ ID NO: 1978413 - RNA, 19 nt, Artificial Sequence
  Description of Artificial Sequence: Synthetic oligonucleotide
cuuuauccaacacuguuac

SEQ ID NO: 1978414 - RNA, 19 nt, Artificial Sequence
  Description of Artificial Sequence: Synthetic oligonucleotide
cuuuauaauauguuacaca

SEQ ID NO: 1978415 - RNA, 19 nt, Artificial Sequence
  Description of Artificial Sequence: Synthetic oligonucleotide
ucaucaucggugcugcugc

SEQ ID NO: 1978416 - RNA, 19 nt, Artificial Sequence
  Description of Artificial Sequence: Synthetic oligonucleotide
cauuagagacaauauuuac

SEQ ID NO: 1978417 - RNA, 19 nt, Artificial Sequence
  Description of Artificial Sequence: Synthetic oligonucleotide
ucuuuauaauauguuacac

SEQ ID NO: 1978418 - RNA, 19 nt, Artificial Sequence
  Description of Artificial Sequence: Synthetic oligonucleotide
uggugugagcugaaggacg

SEQ ID NO: 1978419 - RNA, 19 nt, Artificial Sequence
  Description of Artificial Sequence: Synthetic oligonucleotide
agagacuuuacagcaaauc

SEQ ID NO: 1978420 - RNA, 19 nt, Artificial Sequence
  Description of Artificial Sequence: Synthetic oligonucleotide
uccaacacuguuacaacac

SEQ ID NO: 1978421 - RNA, 19 nt, Artificial Sequence
  Description of Artificial Sequence: Synthetic oligonucleotide
aaaucuuugcauaaaccaa

SEQ ID NO: 1978422 - RNA, 19 nt, Artificial Sequence
  Description of Artificial Sequence: Synthetic oligonucleotide
caguaaaagggagaggagg

SEQ ID NO: 1978423 - RNA, 19 nt, Artificial Sequence
  Description of Artificial Sequence: Synthetic oligonucleotide
gucacugugcggucgagcg

SEQ ID NO: 1978424 - RNA, 19 nt, Artificial Sequence
  Description of Artificial Sequence: Synthetic oligonucleotide
uccuuauaaauucuuuaua

SEQ ID NO: 1978425 - RNA, 19 nt, Artificial Sequence
  Description of Artificial Sequence: Synthetic oligonucleotide
acucguugaaauugagguc

SEQ ID NO: 1978426 - RNA, 19 nt, Artificial Sequence
  Description of Artificial Sequence: Synthetic oligonucleotide
ugagcugaaggacggccgg

SEQ ID NO: 1978427 - RNA, 19 nt, Artificial Sequence
  Description of Artificial Sequence: Synthetic oligonucleotide
cuccacguggcucagcucg

SEQ ID NO: 1978428 - RNA, 19 nt, Artificial Sequence
  Description of Artificial Sequence: Synthetic oligonucleotide
gagacuuuacagcaaaucu

SEQ ID NO: 1978429 - RNA, 19 nt, Artificial Sequence
  Description of Artificial Sequence: Synthetic oligonucleotide
cucggagucaucaucggug

SEQ ID NO: 1978430 - RNA, 19 nt, Artificial Sequence
  Description of Artificial Sequence: Synthetic oligonucleotide
cugcucggagucaucaucg

SEQ ID NO: 1978431 - RNA, 19 nt, Artificial Sequence
  Description of Artificial Sequence: Synthetic oligonucleotide
aauugaggucggucagcgg

SEQ ID NO: 1978432 - RNA, 19 nt, Artificial Sequence
  Description of Artificial Sequence: Synthetic oligonucleotide
ugcuggacgacgccgagcu

SEQ ID NO: 1978433 - RNA, 19 nt, Artificial Sequence
  Description of Artificial Sequence: Synthetic oligonucleotide
uuauaauauguuacacauu

SEQ ID NO: 1978434 - RNA, 19 nt, Artificial Sequence
  Description of Artificial Sequence: Synthetic oligonucleotide
uauccaacacuguuacaac

SEQ ID NO: 1978435 - RNA, 19 nt, Artificial Sequence
  Description of Artificial Sequence: Synthetic oligonucleotide
uagcccgagacgauggagc

SEQ ID NO: 1978436 - RNA, 19 nt, Artificial Sequence
  Description of Artificial Sequence: Synthetic oligonucleotide
agagagacuuuacagcaaa

SEQ ID NO: 1978437 - RNA, 19 nt, Artificial Sequence
  Description of Artificial Sequence: Synthetic oligonucleotide
ucguugaaauugaggucgg

SEQ ID NO: 1978438 - RNA, 19 nt, Artificial Sequence
  Description of Artificial Sequence: Synthetic oligonucleotide
acggucgugacccgagcgc

SEQ ID NO: 1978439 - RNA, 19 nt, Artificial Sequence
  Description of Artificial Sequence: Synthetic oligonucleotide
cuuccacucguugaaauug

SEQ ID NO: 1978440 - RNA, 19 nt, Artificial Sequence
  Description of Artificial Sequence: Synthetic oligonucleotide
cuucccuggaaugagugag

SEQ ID NO: 1978441 - RNA, 19 nt, Artificial Sequence
  Description of Artificial Sequence: Synthetic oligonucleotide
agacaauauuuacaguaaa

SEQ ID NO: 1978442 - RNA, 19 nt, Artificial Sequence
  Description of Artificial Sequence: Synthetic oligonucleotide
acguggcucagcucgcugc

SEQ ID NO: 1978443 - RNA, 19 nt, Artificial Sequence
  Description of Artificial Sequence: Synthetic oligonucleotide
uucccuggaaugagugagg

SEQ ID NO: 1978444 - RNA, 19 nt, Artificial Sequence
  Description of Artificial Sequence: Synthetic oligonucleotide
auccaacacuguuacaaca

SEQ ID NO: 1978445 - RNA, 19 nt, Artificial Sequence
  Description of Artificial Sequence: Synthetic oligonucleotide
ucggagucaucaucggugc

SEQ ID NO: 1978446 - RNA, 19 nt, Artificial Sequence
  Description of Artificial Sequence: Synthetic oligonucleotide
gacucucuccauccgcgcg

SEQ ID NO: 1978447 - RNA, 19 nt, Artificial Sequence
  Description of Artificial Sequence: Synthetic oligonucleotide
accgccagcaugucgucgg

SEQ ID NO: 1978448 - RNA, 19 nt, Artificial Sequence
  Description of Artificial Sequence: Synthetic oligonucleotide
gucacacggcauaaggugg

SEQ ID NO: 1978449 - RNA, 19 nt, Artificial Sequence
  Description of Artificial Sequence: Synthetic oligonucleotide
cuggacgacgccgagcucg

SEQ ID NO: 1978450 - RNA, 19 nt, Artificial Sequence
  Description of Artificial Sequence: Synthetic oligonucleotide
gaaauugaggucggucagc

SEQ ID NO: 1978451 - RNA, 19 nt, Artificial Sequence
  Description of Artificial Sequence: Synthetic oligonucleotide
uccacucguugaaauugag

SEQ ID NO: 1978452 - RNA, 19 nt, Artificial Sequence
  Description of Artificial Sequence: Synthetic oligonucleotide
auaauauguuacacauuag

SEQ ID NO: 1978453 - RNA, 19 nt, Artificial Sequence
  Description of Artificial Sequence: Synthetic oligonucleotide
gacggucgugacccgagcg

SEQ ID NO: 1978454 - RNA, 19 nt, Artificial Sequence
  Description of Artificial Sequence: Synthetic oligonucleotide
cacauuagagacaauauuu

SEQ ID NO: 1978455 - RNA, 19 nt, Artificial Sequence
  Description of Artificial Sequence: Synthetic oligonucleotide
gacgacgccgagcucgggg

SEQ ID NO: 1978456 - RNA, 19 nt, Artificial Sequence
  Description of Artificial Sequence: Synthetic oligonucleotide
agggcuuccacgcgcgacg

SEQ ID NO: 1978457 - RNA, 19 nt, Artificial Sequence
  Description of Artificial Sequence: Synthetic oligonucleotide
uuccacucguugaaauuga

SEQ ID NO: 1978458 - RNA, 19 nt, Artificial Sequence
  Description of Artificial Sequence: Synthetic oligonucleotide
uuuccguuugcgguugacc

SEQ ID NO: 1978459 - RNA, 19 nt, Artificial Sequence
  Description of Artificial Sequence: Synthetic oligonucleotide
agcccgagacgauggagcg

SEQ ID NO: 1978460 - RNA, 19 nt, Artificial Sequence
  Description of Artificial Sequence: Synthetic oligonucleotide
uugugugccuccugcucgg

SEQ ID NO: 1978461 - RNA, 19 nt, Artificial Sequence
  Description of Artificial Sequence: Synthetic oligonucleotide
uugaggucggucagcgggc

SEQ ID NO: 1978462 - RNA, 19 nt, Artificial Sequence
  Description of Artificial Sequence: Synthetic oligonucleotide
guugaaauugaggucgguc

SEQ ID NO: 1978463 - RNA, 19 nt, Artificial Sequence
  Description of Artificial Sequence: Synthetic oligonucleotide
gagggagagagacuuuaca

SEQ ID NO: 1978464 - RNA, 19 nt, Artificial Sequence
  Description of Artificial Sequence: Synthetic oligonucleotide
uuuauccaacacuguuaca

SEQ ID NO: 1978465 - RNA, 19 nt, Artificial Sequence
  Description of Artificial Sequence: Synthetic oligonucleotide
ucacacggcauaagguggu

SEQ ID NO: 1978466 - RNA, 19 nt, Artificial Sequence
  Description of Artificial Sequence: Synthetic oligonucleotide
gaguagcccgagacgaugg

SEQ ID NO: 1978467 - RNA, 19 nt, Artificial Sequence
  Description of Artificial Sequence: Synthetic oligonucleotide
uccguguccgucuccacgu

SEQ ID NO: 1978468 - RNA, 19 nt, Artificial Sequence
  Description of Artificial Sequence: Synthetic oligonucleotide
cacggcauaagguggugug

SEQ ID NO: 1978469 - RNA, 19 nt, Artificial Sequence
  Description of Artificial Sequence: Synthetic oligonucleotide
cacgcugcgguccauggug

SEQ ID NO: 1978470 - RNA, 19 nt, Artificial Sequence
  Description of Artificial Sequence: Synthetic oligonucleotide
gguggaguagcccgagacg

SEQ ID NO: 1978471 - RNA, 19 nt, Artificial Sequence
  Description of Artificial Sequence: Synthetic oligonucleotide
gaccgcagagaugaaggag

SEQ ID NO: 1978472 - RNA, 19 nt, Artificial Sequence
  Description of Artificial Sequence: Synthetic oligonucleotide
ugcucggagucaucaucgg

SEQ ID NO: 1978473 - RNA, 19 nt, Artificial Sequence
  Description of Artificial Sequence: Synthetic oligonucleotide
gacgauggagcgcgugucc

SEQ ID NO: 1978474 - RNA, 19 nt, Artificial Sequence
  Description of Artificial Sequence: Synthetic oligonucleotide
agacuuuacagcaaaucuu

SEQ ID NO: 1978475 - RNA, 19 nt, Artificial Sequence
  Description of Artificial Sequence: Synthetic oligonucleotide
guugaccgcagagaugaag

SEQ ID NO: 1978476 - RNA, 19 nt, Artificial Sequence
  Description of Artificial Sequence: Synthetic oligonucleotide
uccguuugcgguugaccgc

SEQ ID NO: 1978477 - RNA, 19 nt, Artificial Sequence
  Description of Artificial Sequence: Synthetic oligonucleotide
aucaucggugcugcugccc

SEQ ID NO: 1978478 - RNA, 19 nt, Artificial Sequence
  Description of Artificial Sequence: Synthetic oligonucleotide
acaguaaaagggagaggag

SEQ ID NO: 1978479 - RNA, 19 nt, Artificial Sequence
  Description of Artificial Sequence: Synthetic oligonucleotide
ugaccgcagagaugaagga

SEQ ID NO: 1978480 - RNA, 19 nt, Artificial Sequence
  Description of Artificial Sequence: Synthetic oligonucleotide
acagcgggcgccgaagccg

SEQ ID NO: 1978481 - RNA, 19 nt, Artificial Sequence
  Description of Artificial Sequence: Synthetic oligonucleotide
acacuguuacaacacuuuu

SEQ ID NO: 1978482 - RNA, 19 nt, Artificial Sequence
  Description of Artificial Sequence: Synthetic oligonucleotide
cacugugcggucgagcgcc

SEQ ID NO: 1978483 - RNA, 19 nt, Artificial Sequence
  Description of Artificial Sequence: Synthetic oligonucleotide
uugggugcagggcuggcau

SEQ ID NO: 1978484 - RNA, 19 nt, Artificial Sequence
  Description of Artificial Sequence: Synthetic oligonucleotide
uggacgacgccgagcucgg

SEQ ID NO: 1978485 - RNA, 19 nt, Artificial Sequence
  Description of Artificial Sequence: Synthetic oligonucleotide
cuccguguccgucuccacg

SEQ ID NO: 1978486 - RNA, 19 nt, Artificial Sequence
  Description of Artificial Sequence: Synthetic oligonucleotide
aggagccaugcagacauag

SEQ ID NO: 1978487 - RNA, 19 nt, Artificial Sequence
  Description of Artificial Sequence: Synthetic oligonucleotide
cuuccacgcgcgacggucg

SEQ ID NO: 1978488 - RNA, 19 nt, Artificial Sequence
  Description of Artificial Sequence: Synthetic oligonucleotide
ucggcggugccacggagac

SEQ ID NO: 1978489 - RNA, 19 nt, Artificial Sequence
  Description of Artificial Sequence: Synthetic oligonucleotide
augucgucggcggugccac

SEQ ID NO: 1978490 - RNA, 19 nt, Artificial Sequence
  Description of Artificial Sequence: Synthetic oligonucleotide
gacuuuacagcaaaucuuu

SEQ ID NO: 1978491 - RNA, 19 nt, Artificial Sequence
  Description of Artificial Sequence: Synthetic oligonucleotide
ucacugugcggucgagcgc

SEQ ID NO: 1978492 - RNA, 19 nt, Artificial Sequence
  Description of Artificial Sequence: Synthetic oligonucleotide
agacgauggagcgcguguc

SEQ ID NO: 1978493 - RNA, 19 nt, Artificial Sequence
  Description of Artificial Sequence: Synthetic oligonucleotide
cacacgcugcgguccaugg

SEQ ID NO: 1978494 - RNA, 19 nt, Artificial Sequence
  Description of Artificial Sequence: Synthetic oligonucleotide
ugagaccugaguccuuguu

SEQ ID NO: 1978495 - RNA, 19 nt, Artificial Sequence
  Description of Artificial Sequence: Synthetic oligonucleotide
acggagacgcagccgcagg

SEQ ID NO: 1978496 - RNA, 19 nt, Artificial Sequence
  Description of Artificial Sequence: Synthetic oligonucleotide
acgauggagcgcguguccg

SEQ ID NO: 1978497 - RNA, 19 nt, Artificial Sequence
  Description of Artificial Sequence: Synthetic oligonucleotide
ggcggugccacggagacgc

SEQ ID NO: 1978498 - RNA, 19 nt, Artificial Sequence
  Description of Artificial Sequence: Synthetic oligonucleotide
uccgccucgucgccugccg

SEQ ID NO: 1978499 - RNA, 19 nt, Artificial Sequence
  Description of Artificial Sequence: Synthetic oligonucleotide
ugcgguccaugguggacag

SEQ ID NO: 1978500 - RNA, 19 nt, Artificial Sequence
  Description of Artificial Sequence: Synthetic oligonucleotide
ccacucguugaaauugagg

SEQ ID NO: 1978501 - RNA, 19 nt, Artificial Sequence
  Description of Artificial Sequence: Synthetic oligonucleotide
auccgcgcggcugcgagac

SEQ ID NO: 1978502 - RNA, 19 nt, Artificial Sequence
  Description of Artificial Sequence: Synthetic oligonucleotide
uccucggguggcuccugcg

SEQ ID NO: 1978503 - RNA, 19 nt, Artificial Sequence
  Description of Artificial Sequence: Synthetic oligonucleotide
gccagcaugucgucggcgg

SEQ ID NO: 1978504 - RNA, 19 nt, Artificial Sequence
  Description of Artificial Sequence: Synthetic oligonucleotide
cucgcugcgcucgucgucc

SEQ ID NO: 1978505 - RNA, 19 nt, Artificial Sequence
  Description of Artificial Sequence: Synthetic oligonucleotide
ugcggucgagcgcccgugg

SEQ ID NO: 1978506 - RNA, 19 nt, Artificial Sequence
  Description of Artificial Sequence: Synthetic oligonucleotide
uccucgggugccgucgggg

SEQ ID NO: 1978507 - RNA, 19 nt, Artificial Sequence
  Description of Artificial Sequence: Synthetic oligonucleotide
guggugugagcugaaggac

SEQ ID NO: 1978508 - RNA, 19 nt, Artificial Sequence
  Description of Artificial Sequence: Synthetic oligonucleotide
gccacggagacgcagccgc

SEQ ID NO: 1978509 - RNA, 19 nt, Artificial Sequence
  Description of Artificial Sequence: Synthetic oligonucleotide
guagcccgagacgauggag

SEQ ID NO: 1978510 - RNA, 19 nt, Artificial Sequence
  Description of Artificial Sequence: Synthetic oligonucleotide
ugugcggucgagcgcccgu

SEQ ID NO: 1978511 - RNA, 19 nt, Artificial Sequence
  Description of Artificial Sequence: Synthetic oligonucleotide
aguagcccgagacgaugga

SEQ ID NO: 1978512 - RNA, 19 nt, Artificial Sequence
  Description of Artificial Sequence: Synthetic oligonucleotide
auguuacacauuagagaca

SEQ ID NO: 1978513 - RNA, 19 nt, Artificial Sequence
  Description of Artificial Sequence: Synthetic oligonucleotide
cagcucgcugcgcucgucg

SEQ ID NO: 1978514 - RNA, 19 nt, Artificial Sequence
  Description of Artificial Sequence: Synthetic oligonucleotide
ggguggaguagcccgagac

SEQ ID NO: 1978515 - RNA, 19 nt, Artificial Sequence
  Description of Artificial Sequence: Synthetic oligonucleotide
ucggggaccgcggggaccc

SEQ ID NO: 1978516 - RNA, 19 nt, Artificial Sequence
  Description of Artificial Sequence: Synthetic oligonucleotide
aggacggccggcgggacag

SEQ ID NO: 1978517 - RNA, 19 nt, Artificial Sequence
  Description of Artificial Sequence: Synthetic oligonucleotide
ggucucgggcgacagcggg

SEQ ID NO: 1978518 - RNA, 19 nt, Artificial Sequence
  Description of Artificial Sequence: Synthetic oligonucleotide
gcgaccaggggccuccacg

SEQ ID NO: 1978519 - RNA, 19 nt, Artificial Sequence
  Description of Artificial Sequence: Synthetic oligonucleotide
aucggugcugcugcccagg

SEQ ID NO: 1978520 - RNA, 19 nt, Artificial Sequence
  Description of Artificial Sequence: Synthetic oligonucleotide
ugacccgagcgccggggca

SEQ ID NO: 1978521 - RNA, 19 nt, Artificial Sequence
  Description of Artificial Sequence: Synthetic oligonucleotide
uggaguagcccgagacgau

SEQ ID NO: 1978522 - RNA, 19 nt, Artificial Sequence
  Description of Artificial Sequence: Synthetic oligonucleotide
auggagcgcguguccgccg

SEQ ID NO: 1978523 - RNA, 19 nt, Artificial Sequence
  Description of Artificial Sequence: Synthetic oligonucleotide
gaccgcggggacccgcccg

SEQ ID NO: 1978524 - RNA, 19 nt, Artificial Sequence
  Description of Artificial Sequence: Synthetic oligonucleotide
guguccgucuccacguggc

SEQ ID NO: 1978525 - RNA, 19 nt, Artificial Sequence
  Description of Artificial Sequence: Synthetic oligonucleotide
caucaucggugcugcugcc

SEQ ID NO: 1978526 - RNA, 19 nt, Artificial Sequence
  Description of Artificial Sequence: Synthetic oligonucleotide
cuggcauccccagcggggc

SEQ ID NO: 1978527 - RNA, 19 nt, Artificial Sequence
  Description of Artificial Sequence: Synthetic oligonucleotide
gucgucggcggugccacgg

SEQ ID NO: 1978528 - RNA, 19 nt, Artificial Sequence
  Description of Artificial Sequence: Synthetic oligonucleotide
gcugaggcgaccaggggcc

SEQ ID NO: 1978529 - RNA, 19 nt, Artificial Sequence
  Description of Artificial Sequence: Synthetic oligonucleotide
ggcauaagguggugugagc

SEQ ID NO: 1978530 - RNA, 19 nt, Artificial Sequence
  Description of Artificial Sequence: Synthetic oligonucleotide
gaggcgaccaggggccucc

SEQ ID NO: 1978531 - RNA, 19 nt, Artificial Sequence
  Description of Artificial Sequence: Synthetic oligonucleotide
gagagagacuuuacagcaa

SEQ ID NO: 1978532 - RNA, 19 nt, Artificial Sequence
  Description of Artificial Sequence: Synthetic oligonucleotide
cagccgcagggcuuccacg

SEQ ID NO: 1978533 - RNA, 19 nt, Artificial Sequence
  Description of Artificial Sequence: Synthetic oligonucleotide
aggucggucagcgggcucu

SEQ ID NO: 1978534 - RNA, 19 nt, Artificial Sequence
  Description of Artificial Sequence: Synthetic oligonucleotide
agcggggcuucccuggaau

SEQ ID NO: 1978535 - RNA, 19 nt, Artificial Sequence
  Description of Artificial Sequence: Synthetic oligonucleotide
gucgugacccgagcgccgg

SEQ ID NO: 1978536 - RNA, 19 nt, Artificial Sequence
  Description of Artificial Sequence: Synthetic oligonucleotide
uccccagcggggcuucccu

SEQ ID NO: 1978537 - RNA, 19 nt, Artificial Sequence
  Description of Artificial Sequence: Synthetic oligonucleotide
ccuuguugucacugugcgg

SEQ ID NO: 1978538 - RNA, 19 nt, Artificial Sequence
  Description of Artificial Sequence: Synthetic oligonucleotide
ucgugacccgagcgccggg

SEQ ID NO: 1978539 - RNA, 19 nt, Artificial Sequence
  Description of Artificial Sequence: Synthetic oligonucleotide
gacccgagcgccggggcag

SEQ ID NO: 1978540 - RNA, 19 nt, Artificial Sequence
  Description of Artificial Sequence: Synthetic oligonucleotide
ggaguagcccgagacgaug

SEQ ID NO: 1978541 - RNA, 19 nt, Artificial Sequence
  Description of Artificial Sequence: Synthetic oligonucleotide
ggucagcgggcucugcacc

SEQ ID NO: 1978542 - RNA, 19 nt, Artificial Sequence
  Description of Artificial Sequence: Synthetic oligonucleotide
acggcauaaggugguguga

SEQ ID NO: 1978543 - RNA, 19 nt, Artificial Sequence
  Description of Artificial Sequence: Synthetic oligonucleotide
caggccgcuccucgggugc

SEQ ID NO: 1978544 - RNA, 19 nt, Artificial Sequence
  Description of Artificial Sequence: Synthetic oligonucleotide
ucgggcgacagcgggcgcc

SEQ ID NO: 1978545 - RNA, 19 nt, Artificial Sequence
  Description of Artificial Sequence: Synthetic oligonucleotide
gcugcgagacaggcgacgg

SEQ ID NO: 1978546 - RNA, 19 nt, Artificial Sequence
  Description of Artificial Sequence: Synthetic oligonucleotide
ggugcccgagcacacgcug

SEQ ID NO: 1978547 - RNA, 19 nt, Artificial Sequence
  Description of Artificial Sequence: Synthetic oligonucleotide
gugugccuccugcucggag

SEQ ID NO: 1978548 - RNA, 19 nt, Artificial Sequence
  Description of Artificial Sequence: Synthetic oligonucleotide
acacgcugcgguccauggu

SEQ ID NO: 1978549 - RNA, 19 nt, Artificial Sequence
  Description of Artificial Sequence: Synthetic oligonucleotide
ggugccacggagacgcagc

SEQ ID NO: 1978550 - RNA, 19 nt, Artificial Sequence
  Description of Artificial Sequence: Synthetic oligonucleotide
gucagcgggcucugcacca

SEQ ID NO: 1978551 - RNA, 19 nt, Artificial Sequence
  Description of Artificial Sequence: Synthetic oligonucleotide
accguguggcggcgccagc

SEQ ID NO: 1978552 - RNA, 19 nt, Artificial Sequence
  Description of Artificial Sequence: Synthetic oligonucleotide
agccgcaccgccagcaugu

SEQ ID NO: 1978553 - RNA, 19 nt, Artificial Sequence
  Description of Artificial Sequence: Synthetic oligonucleotide
uuccacgcgcgacggucgu

SEQ ID NO: 1978554 - RNA, 19 nt, Artificial Sequence
  Description of Artificial Sequence: Synthetic oligonucleotide
caucggugcugcugcccag

SEQ ID NO: 1978555 - RNA, 19 nt, Artificial Sequence
  Description of Artificial Sequence: Synthetic oligonucleotide
gaaugagugaggggugccu

SEQ ID NO: 1978556 - RNA, 19 nt, Artificial Sequence
  Description of Artificial Sequence: Synthetic oligonucleotide
ugucgucggcggugccacg

SEQ ID NO: 1978557 - RNA, 19 nt, Artificial Sequence
  Description of Artificial Sequence: Synthetic oligonucleotide
ucgagcgcccgugggcucc

SEQ ID NO: 1978558 - RNA, 19 nt, Artificial Sequence
  Description of Artificial Sequence: Synthetic oligonucleotide
gccgaagccgcaccgccag

SEQ ID NO: 1978559 - RNA, 19 nt, Artificial Sequence
  Description of Artificial Sequence: Synthetic oligonucleotide
ucgucggcggugccacgga

SEQ ID NO: 1978560 - RNA, 19 nt, Artificial Sequence
  Description of Artificial Sequence: Synthetic oligonucleotide
ccugcucggagucaucauc

SEQ ID NO: 1978561 - RNA, 19 nt, Artificial Sequence
  Description of Artificial Sequence: Synthetic oligonucleotide
caccaccaccguguggcgg

SEQ ID NO: 1978562 - RNA, 19 nt, Artificial Sequence
  Description of Artificial Sequence: Synthetic oligonucleotide
ggccgaagcgacuccuggc

SEQ ID NO: 1978563 - RNA, 19 nt, Artificial Sequence
  Description of Artificial Sequence: Synthetic oligonucleotide
gagcacacgcugcggucca

SEQ ID NO: 1978564 - RNA, 19 nt, Artificial Sequence
  Description of Artificial Sequence: Synthetic oligonucleotide
ggacucucuccauccgcgc

SEQ ID NO: 1978565 - RNA, 19 nt, Artificial Sequence
  Description of Artificial Sequence: Synthetic oligonucleotide
caggcgacggcgcgccagc

SEQ ID NO: 1978566 - RNA, 19 nt, Artificial Sequence
  Description of Artificial Sequence: Synthetic oligonucleotide
guuugcgguugaccgcaga

SEQ ID NO: 1978567 - RNA, 19 nt, Artificial Sequence
  Description of Artificial Sequence: Synthetic oligonucleotide
agcgugucacacggcauaa

SEQ ID NO: 1978568 - RNA, 19 nt, Artificial Sequence
  Description of Artificial Sequence: Synthetic oligonucleotide
cgaagcgacuccuggcugc

SEQ ID NO: 1978569 - RNA, 19 nt, Artificial Sequence
  Description of Artificial Sequence: Synthetic oligonucleotide
gugucacacggcauaaggu

SEQ ID NO: 1978570 - RNA, 19 nt, Artificial Sequence
  Description of Artificial Sequence: Synthetic oligonucleotide
cucgucgccugccgcgcgc

SEQ ID NO: 1978571 - RNA, 19 nt, Artificial Sequence
  Description of Artificial Sequence: Synthetic oligonucleotide
ggcugcgagacaggcgacg

SEQ ID NO: 1978572 - RNA, 19 nt, Artificial Sequence
  Description of Artificial Sequence: Synthetic oligonucleotide
ucagcgggcucugcaccac

SEQ ID NO: 1978573 - RNA, 19 nt, Artificial Sequence
  Description of Artificial Sequence: Synthetic oligonucleotide
acugugcggucgagcgccc

SEQ ID NO: 1978574 - RNA, 19 nt, Artificial Sequence
  Description of Artificial Sequence: Synthetic oligonucleotide
acgugggaggagccaugca

SEQ ID NO: 1978575 - RNA, 19 nt, Artificial Sequence
  Description of Artificial Sequence: Synthetic oligonucleotide
cgcgcgacggucgugaccc

SEQ ID NO: 1978576 - RNA, 19 nt, Artificial Sequence
  Description of Artificial Sequence: Synthetic oligonucleotide
gcuuugggugcagggcugg

SEQ ID NO: 1978577 - RNA, 19 nt, Artificial Sequence
  Description of Artificial Sequence: Synthetic oligonucleotide
caccgccagcaugucgucg

SEQ ID NO: 1978578 - RNA, 19 nt, Artificial Sequence
  Description of Artificial Sequence: Synthetic oligonucleotide
gcgacggcgcgccagcgug

SEQ ID NO: 1978579 - RNA, 19 nt, Artificial Sequence
  Description of Artificial Sequence: Synthetic oligonucleotide
cugcuggacgacgccgagc

SEQ ID NO: 1978580 - RNA, 19 nt, Artificial Sequence
  Description of Artificial Sequence: Synthetic oligonucleotide
cacacggcauaagguggug

SEQ ID NO: 1978581 - RNA, 19 nt, Artificial Sequence
  Description of Artificial Sequence: Synthetic oligonucleotide
cagcgugucacacggcaua

SEQ ID NO: 1978582 - RNA, 19 nt, Artificial Sequence
  Description of Artificial Sequence: Synthetic oligonucleotide
cgguugaccgcagagauga

SEQ ID NO: 1978583 - RNA, 19 nt, Artificial Sequence
  Description of Artificial Sequence: Synthetic oligonucleotide
cccagcggggcuucccugg

SEQ ID NO: 1978584 - RNA, 19 nt, Artificial Sequence
  Description of Artificial Sequence: Synthetic oligonucleotide
gucucgggcgacagcgggc

SEQ ID NO: 1978585 - RNA, 19 nt, Artificial Sequence
  Description of Artificial Sequence: Synthetic oligonucleotide
gugcccgagcacacgcugc

SEQ ID NO: 1978586 - RNA, 19 nt, Artificial Sequence
  Description of Artificial Sequence: Synthetic oligonucleotide
ugcugagaccugaguccuu

SEQ ID NO: 1978587 - RNA, 19 nt, Artificial Sequence
  Description of Artificial Sequence: Synthetic oligonucleotide
aggccgcuccucgggugcc

SEQ ID NO: 1978588 - RNA, 19 nt, Artificial Sequence
  Description of Artificial Sequence: Synthetic oligonucleotide
ugugugccuccugcucgga

SEQ ID NO: 1978589 - RNA, 19 nt, Artificial Sequence
  Description of Artificial Sequence: Synthetic oligonucleotide
cagcgggcucugcaccacc

SEQ ID NO: 1978590 - RNA, 19 nt, Artificial Sequence
  Description of Artificial Sequence: Synthetic oligonucleotide
  modified_base (18)..(18): a, c, u, g, unknown or other
acggccggcgggacaggnc

SEQ ID NO: 1978591 - RNA, 19 nt, Artificial Sequence
  Description of Artificial Sequence: Synthetic oligonucleotide
gcgcucgucguccgccucg

SEQ ID NO: 1978592 - RNA, 19 nt, Artificial Sequence
  Description of Artificial Sequence: Synthetic oligonucleotide
gcuuccacgcgcgacgguc

SEQ ID NO: 1978593 - RNA, 19 nt, Artificial Sequence
  Description of Artificial Sequence: Synthetic oligonucleotide
cucggggaccgcggggacc

SEQ ID NO: 1978594 - RNA, 19 nt, Artificial Sequence
  Description of Artificial Sequence: Synthetic oligonucleotide
ggucgugacccgagcgccg

SEQ ID NO: 1978595 - RNA, 19 nt, Artificial Sequence
  Description of Artificial Sequence: Synthetic oligonucleotide
gcugcuggacgacgccgag

SEQ ID NO: 1978596 - RNA, 19 nt, Artificial Sequence
  Description of Artificial Sequence: Synthetic oligonucleotide
cuccucgggugccgucggg

SEQ ID NO: 1978597 - RNA, 19 nt, Artificial Sequence
  Description of Artificial Sequence: Synthetic oligonucleotide
caggccccgcgccucgcgc

SEQ ID NO: 1978598 - RNA, 19 nt, Artificial Sequence
  Description of Artificial Sequence: Synthetic oligonucleotide
gagagacuuuacagcaaau

SEQ ID NO: 1978599 - RNA, 19 nt, Artificial Sequence
  Description of Artificial Sequence: Synthetic oligonucleotide
ucgucgccugccgcgcgcc

SEQ ID NO: 1978600 - RNA, 19 nt, Artificial Sequence
  Description of Artificial Sequence: Synthetic oligonucleotide
cacggcugcgggguccggc

SEQ ID NO: 1978601 - RNA, 19 nt, Artificial Sequence
  Description of Artificial Sequence: Synthetic oligonucleotide
gacccgcccgggccgugcc

SEQ ID NO: 1978602 - RNA, 19 nt, Artificial Sequence
  Description of Artificial Sequence: Synthetic oligonucleotide
gcggucgagcgcccguggg

SEQ ID NO: 1978603 - RNA, 19 nt, Artificial Sequence
  Description of Artificial Sequence: Synthetic oligonucleotide
gaggucggucagcgggcuc

SEQ ID NO: 1978604 - RNA, 19 nt, Artificial Sequence
  Description of Artificial Sequence: Synthetic oligonucleotide
cgagacaggcgacggcgcg

SEQ ID NO: 1978605 - RNA, 19 nt, Artificial Sequence
  Description of Artificial Sequence: Synthetic oligonucleotide
cggcauaagguggugugag

SEQ ID NO: 1978606 - RNA, 19 nt, Artificial Sequence
  Description of Artificial Sequence: Synthetic oligonucleotide
gcuccucgggugccgucgg

SEQ ID NO: 1978607 - RNA, 19 nt, Artificial Sequence
  Description of Artificial Sequence: Synthetic oligonucleotide
agcgggcucugcaccacca

SEQ ID NO: 1978608 - RNA, 19 nt, Artificial Sequence
  Description of Artificial Sequence: Synthetic oligonucleotide
gggcgccgaagccgcaccg

SEQ ID NO: 1978609 - RNA, 19 nt, Artificial Sequence
  Description of Artificial Sequence: Synthetic oligonucleotide
ccauccgcgcggcugcgag

SEQ ID NO: 1978610 - RNA, 19 nt, Artificial Sequence
  Description of Artificial Sequence: Synthetic oligonucleotide
uccacgcgcgacggucgug

SEQ ID NO: 1978611 - RNA, 19 nt, Artificial Sequence
  Description of Artificial Sequence: Synthetic oligonucleotide
cugugcggucgagcgcccg

SEQ ID NO: 1978612 - RNA, 19 nt, Artificial Sequence
  Description of Artificial Sequence: Synthetic oligonucleotide
gcggggcuucccuggaaug

SEQ ID NO: 1978613 - RNA, 19 nt, Artificial Sequence
  Description of Artificial Sequence: Synthetic oligonucleotide
ucagcucgcugcgcucguc

SEQ ID NO: 1978614 - RNA, 19 nt, Artificial Sequence
  Description of Artificial Sequence: Synthetic oligonucleotide
cugcugagaccugaguccu

SEQ ID NO: 1978615 - RNA, 19 nt, Artificial Sequence
  Description of Artificial Sequence: Synthetic oligonucleotide
ugaggcgaccaggggccuc

SEQ ID NO: 1978616 - RNA, 19 nt, Artificial Sequence
  Description of Artificial Sequence: Synthetic oligonucleotide
gcgcguguccgccgcaggc

SEQ ID NO: 1978617 - RNA, 19 nt, Artificial Sequence
  Description of Artificial Sequence: Synthetic oligonucleotide
gucggcggugccacggaga

SEQ ID NO: 1978618 - RNA, 19 nt, Artificial Sequence
  Description of Artificial Sequence: Synthetic oligonucleotide
uccauccgcgcggcugcga

SEQ ID NO: 1978619 - RNA, 19 nt, Artificial Sequence
  Description of Artificial Sequence: Synthetic oligonucleotide
gugcggucgagcgcccgug

SEQ ID NO: 1978620 - RNA, 19 nt, Artificial Sequence
  Description of Artificial Sequence: Synthetic oligonucleotide
gacggcgcgccagcguguc

SEQ ID NO: 1978621 - RNA, 19 nt, Artificial Sequence
  Description of Artificial Sequence: Synthetic oligonucleotide
gcggggacccgcccgggcc

SEQ ID NO: 1978622 - RNA, 19 nt, Artificial Sequence
  Description of Artificial Sequence: Synthetic oligonucleotide
ggccuccacggcugcgggg

SEQ ID NO: 1978623 - RNA, 19 nt, Artificial Sequence
  Description of Artificial Sequence: Synthetic oligonucleotide
  modified_base (19)..(19): a, c, u, g, unknown or other
gacggccggcgggacaggn

SEQ ID NO: 1978624 - RNA, 19 nt, Artificial Sequence
  Description of Artificial Sequence: Synthetic oligonucleotide
ccgaagcgacuccuggcug

SEQ ID NO: 1978625 - RNA, 19 nt, Artificial Sequence
  Description of Artificial Sequence: Synthetic oligonucleotide
gaagccgcaccgccagcau

SEQ ID NO: 1978626 - RNA, 19 nt, Artificial Sequence
  Description of Artificial Sequence: Synthetic oligonucleotide
gcgacggucgugacccgag

SEQ ID NO: 1978627 - RNA, 19 nt, Artificial Sequence
  Description of Artificial Sequence: Synthetic oligonucleotide
aggcgacggcgcgccagcg

SEQ ID NO: 1978628 - RNA, 19 nt, Artificial Sequence
  Description of Artificial Sequence: Synthetic oligonucleotide
ggcgcccgggacucucucc

SEQ ID NO: 1978629 - RNA, 19 nt, Artificial Sequence
  Description of Artificial Sequence: Synthetic oligonucleotide
cgcagggcuuccacgcgcg

SEQ ID NO: 1978630 - RNA, 19 nt, Artificial Sequence
  Description of Artificial Sequence: Synthetic oligonucleotide
ccgggacucucuccauccg

SEQ ID NO: 1978631 - RNA, 19 nt, Artificial Sequence
  Description of Artificial Sequence: Synthetic oligonucleotide
gcgacagcgggcgccgaag

SEQ ID NO: 1978632 - RNA, 19 nt, Artificial Sequence
  Description of Artificial Sequence: Synthetic oligonucleotide
gucgccugccgcgcgccgc

SEQ ID NO: 1978633 - RNA, 19 nt, Artificial Sequence
  Description of Artificial Sequence: Synthetic oligonucleotide
cuccauccgcgcggcugcg

SEQ ID NO: 1978634 - RNA, 19 nt, Artificial Sequence
  Description of Artificial Sequence: Synthetic oligonucleotide
ccaacacuguuacaacacu

SEQ ID NO: 1978635 - RNA, 19 nt, Artificial Sequence
  Description of Artificial Sequence: Synthetic oligonucleotide
cacgcgcgacggucgugac

SEQ ID NO: 1978636 - RNA, 19 nt, Artificial Sequence
  Description of Artificial Sequence: Synthetic oligonucleotide
cgauggagcgcguguccgc

SEQ ID NO: 1978637 - RNA, 19 nt, Artificial Sequence
  Description of Artificial Sequence: Synthetic oligonucleotide
agcugcuccucggguggcu

SEQ ID NO: 1978638 - RNA, 19 nt, Artificial Sequence
  Description of Artificial Sequence: Synthetic oligonucleotide
uccgcgcggcugcgagaca

SEQ ID NO: 1978639 - RNA, 19 nt, Artificial Sequence
  Description of Artificial Sequence: Synthetic oligonucleotide
gcugcgguccaugguggac

SEQ ID NO: 1978640 - RNA, 19 nt, Artificial Sequence
  Description of Artificial Sequence: Synthetic oligonucleotide
gcgcccgggacucucucca

SEQ ID NO: 1978641 - RNA, 19 nt, Artificial Sequence
  Description of Artificial Sequence: Synthetic oligonucleotide
gcgguugaccgcagagaug

SEQ ID NO: 1978642 - RNA, 19 nt, Artificial Sequence
  Description of Artificial Sequence: Synthetic oligonucleotide
agacgcagccgcagggcuu

SEQ ID NO: 1978643 - RNA, 19 nt, Artificial Sequence
  Description of Artificial Sequence: Synthetic oligonucleotide
ccguuugcgguugaccgca

SEQ ID NO: 1978644 - RNA, 19 nt, Artificial Sequence
  Description of Artificial Sequence: Synthetic oligonucleotide
ccgagcacacgcugcgguc

SEQ ID NO: 1978645 - RNA, 19 nt, Artificial Sequence
  Description of Artificial Sequence: Synthetic oligonucleotide
gucgagcgcccgugggcuc

SEQ ID NO: 1978646 - RNA, 19 nt, Artificial Sequence
  Description of Artificial Sequence: Synthetic oligonucleotide
cauccgcgcggcugcgaga

SEQ ID NO: 1978647 - RNA, 19 nt, Artificial Sequence
  Description of Artificial Sequence: Synthetic oligonucleotide
gcgugucacacggcauaag

SEQ ID NO: 1978648 - RNA, 19 nt, Artificial Sequence
  Description of Artificial Sequence: Synthetic oligonucleotide
ccgcaggccgcuccucggg

SEQ ID NO: 1978649 - RNA, 19 nt, Artificial Sequence
  Description of Artificial Sequence: Synthetic oligonucleotide
gcucggagucaucaucggu

SEQ ID NO: 1978650 - RNA, 19 nt, Artificial Sequence
  Description of Artificial Sequence: Synthetic oligonucleotide
cuccuuccacucguugaaa

SEQ ID NO: 1978651 - RNA, 19 nt, Artificial Sequence
  Description of Artificial Sequence: Synthetic oligonucleotide
cugagaccugaguccuugu

SEQ ID NO: 1978652 - RNA, 19 nt, Artificial Sequence
  Description of Artificial Sequence: Synthetic oligonucleotide
cgccucgucgccugccgcg

SEQ ID NO: 1978653 - RNA, 19 nt, Artificial Sequence
  Description of Artificial Sequence: Synthetic oligonucleotide
ggacacgugggaggagcca

SEQ ID NO: 1978654 - RNA, 19 nt, Artificial Sequence
  Description of Artificial Sequence: Synthetic oligonucleotide
ggcugcuggacgacgccga

SEQ ID NO: 1978655 - RNA, 19 nt, Artificial Sequence
  Description of Artificial Sequence: Synthetic oligonucleotide
cuccugcguccccgccgcg

SEQ ID NO: 1978656 - RNA, 19 nt, Artificial Sequence
  Description of Artificial Sequence: Synthetic oligonucleotide
gcacacgcugcgguccaug

SEQ ID NO: 1978657 - RNA, 19 nt, Artificial Sequence
  Description of Artificial Sequence: Synthetic oligonucleotide
cggucgugacccgagcgcc

SEQ ID NO: 1978658 - RNA, 19 nt, Artificial Sequence
  Description of Artificial Sequence: Synthetic oligonucleotide
gugccggcgcccgggacuc

SEQ ID NO: 1978659 - RNA, 19 nt, Artificial Sequence
  Description of Artificial Sequence: Synthetic oligonucleotide
ggcgccgaagccgcaccgc

SEQ ID NO: 1978660 - RNA, 19 nt, Artificial Sequence
  Description of Artificial Sequence: Synthetic oligonucleotide
gucggucagcgggcucugc

SEQ ID NO: 1978661 - RNA, 19 nt, Artificial Sequence
  Description of Artificial Sequence: Synthetic oligonucleotide
ccgcgcggcugcgagacag

SEQ ID NO: 1978662 - RNA, 19 nt, Artificial Sequence
  Description of Artificial Sequence: Synthetic oligonucleotide
uccccgccgcggccuugug

SEQ ID NO: 1978663 - RNA, 19 nt, Artificial Sequence
  Description of Artificial Sequence: Synthetic oligonucleotide
acggcgcgccagcguguca

SEQ ID NO: 1978664 - RNA, 19 nt, Artificial Sequence
  Description of Artificial Sequence: Synthetic oligonucleotide
cggucgagcgcccgugggc

SEQ ID NO: 1978665 - RNA, 19 nt, Artificial Sequence
  Description of Artificial Sequence: Synthetic oligonucleotide
ggucgagcgcccgugggcu

SEQ ID NO: 1978666 - RNA, 19 nt, Artificial Sequence
  Description of Artificial Sequence: Synthetic oligonucleotide
cauccccagcggggcuucc

SEQ ID NO: 1978667 - RNA, 19 nt, Artificial Sequence
  Description of Artificial Sequence: Synthetic oligonucleotide
gggaccgcggggacccgcc

SEQ ID NO: 1978668 - RNA, 19 nt, Artificial Sequence
  Description of Artificial Sequence: Synthetic oligonucleotide
gcgacuccuggcugcugga

SEQ ID NO: 1978669 - RNA, 19 nt, Artificial Sequence
  Description of Artificial Sequence: Synthetic oligonucleotide
cgacagcgggcgccgaagc

SEQ ID NO: 1978670 - RNA, 19 nt, Artificial Sequence
  Description of Artificial Sequence: Synthetic oligonucleotide
caccaccguguggcggcgc

SEQ ID NO: 1978671 - RNA, 19 nt, Artificial Sequence
  Description of Artificial Sequence: Synthetic oligonucleotide
cgugacccgagcgccgggg

SEQ ID NO: 1978672 - RNA, 19 nt, Artificial Sequence
  Description of Artificial Sequence: Synthetic oligonucleotide
ggggugccuugguggacuc

SEQ ID NO: 1978673 - RNA, 19 nt, Artificial Sequence
  Description of Artificial Sequence: Synthetic oligonucleotide
ggaccgcggggacccgccc

SEQ ID NO: 1978674 - RNA, 19 nt, Artificial Sequence
  Description of Artificial Sequence: Synthetic oligonucleotide
ccucgucgccugccgcgcg

SEQ ID NO: 1978675 - RNA, 19 nt, Artificial Sequence
  Description of Artificial Sequence: Synthetic oligonucleotide
gggugccuugguggacucc

SEQ ID NO: 1978676 - RNA, 19 nt, Artificial Sequence
  Description of Artificial Sequence: Synthetic oligonucleotide
cguguggcggcgccagcug

SEQ ID NO: 1978677 - RNA, 19 nt, Artificial Sequence
  Description of Artificial Sequence: Synthetic oligonucleotide
  modified_base (15)..(15): a, c, u, g, unknown or other
gccggcgggacaggncccc

SEQ ID NO: 1978678 - RNA, 19 nt, Artificial Sequence
  Description of Artificial Sequence: Synthetic oligonucleotide
gcaccgccagcaugucguc

SEQ ID NO: 1978679 - RNA, 19 nt, Artificial Sequence
  Description of Artificial Sequence: Synthetic oligonucleotide
cgacggucgugacccgagc

SEQ ID NO: 1978680 - RNA, 19 nt, Artificial Sequence
  Description of Artificial Sequence: Synthetic oligonucleotide
ggacgacgccgagcucggg

SEQ ID NO: 1978681 - RNA, 19 nt, Artificial Sequence
  Description of Artificial Sequence: Synthetic oligonucleotide
gagcgcccgugggcuccgg

SEQ ID NO: 1978682 - RNA, 19 nt, Artificial Sequence
  Description of Artificial Sequence: Synthetic oligonucleotide
ggcgacagcgggcgccgaa

SEQ ID NO: 1978683 - RNA, 19 nt, Artificial Sequence
  Description of Artificial Sequence: Synthetic oligonucleotide
gcuccggcgccgccggguc

SEQ ID NO: 1978684 - RNA, 19 nt, Artificial Sequence
  Description of Artificial Sequence: Synthetic oligonucleotide
ccugccgcgcgccgcccgc

SEQ ID NO: 1978685 - RNA, 19 nt, Artificial Sequence
  Description of Artificial Sequence: Synthetic oligonucleotide
ccguguccgucuccacgug

SEQ ID NO: 1978686 - RNA, 19 nt, Artificial Sequence
  Description of Artificial Sequence: Synthetic oligonucleotide
uguccgccgcaggccgcuc

SEQ ID NO: 1978687 - RNA, 19 nt, Artificial Sequence
  Description of Artificial Sequence: Synthetic oligonucleotide
cggggacccgcccgggccg

SEQ ID NO: 1978688 - RNA, 19 nt, Artificial Sequence
  Description of Artificial Sequence: Synthetic oligonucleotide
ccacgcgcgacggucguga

SEQ ID NO: 1978689 - RNA, 19 nt, Artificial Sequence
  Description of Artificial Sequence: Synthetic oligonucleotide
gccgccgggucucgggcga

SEQ ID NO: 1978690 - RNA, 19 nt, Artificial Sequence
  Description of Artificial Sequence: Synthetic oligonucleotide
ggcgaccaggggccuccac

SEQ ID NO: 1978691 - RNA, 19 nt, Artificial Sequence
  Description of Artificial Sequence: Synthetic oligonucleotide
cguuugcgguugaccgcag

SEQ ID NO: 1978692 - RNA, 19 nt, Artificial Sequence
  Description of Artificial Sequence: Synthetic oligonucleotide
gggcuuuauccaacacugu

SEQ ID NO: 1978693 - RNA, 19 nt, Artificial Sequence
  Description of Artificial Sequence: Synthetic oligonucleotide
ccgaagccgcaccgccagc

SEQ ID NO: 1978694 - RNA, 19 nt, Artificial Sequence
  Description of Artificial Sequence: Synthetic oligonucleotide
gcuggacgacgccgagcuc

SEQ ID NO: 1978695 - RNA, 19 nt, Artificial Sequence
  Description of Artificial Sequence: Synthetic oligonucleotide
cccgcccgggccgugccgg

SEQ ID NO: 1978696 - RNA, 19 nt, Artificial Sequence
  Description of Artificial Sequence: Synthetic oligonucleotide
cugcgcucgucguccgccu

SEQ ID NO: 1978697 - RNA, 19 nt, Artificial Sequence
  Description of Artificial Sequence: Synthetic oligonucleotide
ggggaccgcggggacccgc

SEQ ID NO: 1978698 - RNA, 19 nt, Artificial Sequence
  Description of Artificial Sequence: Synthetic oligonucleotide
cagcggggcuucccuggaa

SEQ ID NO: 1978699 - RNA, 19 nt, Artificial Sequence
  Description of Artificial Sequence: Synthetic oligonucleotide
ccgccucgucgccugccgc

SEQ ID NO: 1978700 - RNA, 19 nt, Artificial Sequence
  Description of Artificial Sequence: Synthetic oligonucleotide
cgcgcggcugcgagacagg

SEQ ID NO: 1978701 - RNA, 19 nt, Artificial Sequence
  Description of Artificial Sequence: Synthetic oligonucleotide
cccuccguguccgucucca

SEQ ID NO: 1978702 - RNA, 19 nt, Artificial Sequence
  Description of Artificial Sequence: Synthetic oligonucleotide
cgucggcggugccacggag

SEQ ID NO: 1978703 - RNA, 19 nt, Artificial Sequence
  Description of Artificial Sequence: Synthetic oligonucleotide
gcgcgacggucgugacccg

SEQ ID NO: 1978704 - RNA, 19 nt, Artificial Sequence
  Description of Artificial Sequence: Synthetic oligonucleotide
gcccuccguguccgucucc

SEQ ID NO: 1978705 - RNA, 19 nt, Artificial Sequence
  Description of Artificial Sequence: Synthetic oligonucleotide
cgccgccgggucucgggcg

SEQ ID NO: 1978706 - RNA, 19 nt, Artificial Sequence
  Description of Artificial Sequence: Synthetic oligonucleotide
cgggcgccgaagccgcacc

SEQ ID NO: 1978707 - RNA, 19 nt, Artificial Sequence
  Description of Artificial Sequence: Synthetic oligonucleotide
cccgccggugcccgagcac

SEQ ID NO: 1978708 - RNA, 19 nt, Artificial Sequence
  Description of Artificial Sequence: Synthetic oligonucleotide
aggcgaccaggggccucca

SEQ ID NO: 1978709 - RNA, 19 nt, Artificial Sequence
  Description of Artificial Sequence: Synthetic oligonucleotide
ccgcagagaugaaggagau

SEQ ID NO: 1978710 - RNA, 19 nt, Artificial Sequence
  Description of Artificial Sequence: Synthetic oligonucleotide
cggcgcgccagcgugucac

SEQ ID NO: 1978711 - RNA, 19 nt, Artificial Sequence
  Description of Artificial Sequence: Synthetic oligonucleotide
cgggcgacagcgggcgccg

SEQ ID NO: 1978712 - RNA, 19 nt, Artificial Sequence
  Description of Artificial Sequence: Synthetic oligonucleotide
ccgccggugcccgagcaca

SEQ ID NO: 1978713 - RNA, 19 nt, Artificial Sequence
  Description of Artificial Sequence: Synthetic oligonucleotide
cggugccacggagacgcag

SEQ ID NO: 1978714 - RNA, 19 nt, Artificial Sequence
  Description of Artificial Sequence: Synthetic oligonucleotide
gguugaccgcagagaugaa

SEQ ID NO: 1978715 - RNA, 19 nt, Artificial Sequence
  Description of Artificial Sequence: Synthetic oligonucleotide
cgcggccuugugugccucc

SEQ ID NO: 1978716 - RNA, 19 nt, Artificial Sequence
  Description of Artificial Sequence: Synthetic oligonucleotide
ccagcggggcuucccugga

SEQ ID NO: 1978717 - RNA, 19 nt, Artificial Sequence
  Description of Artificial Sequence: Synthetic oligonucleotide
cggggcuucccuggaauga

SEQ ID NO: 1978718 - RNA, 19 nt, Artificial Sequence
  Description of Artificial Sequence: Synthetic oligonucleotide
cugcgggguccggcagcug

SEQ ID NO: 1978719 - RNA, 19 nt, Artificial Sequence
  Description of Artificial Sequence: Synthetic oligonucleotide
ggcgacggcgcgccagcgu

SEQ ID NO: 1978720 - RNA, 19 nt, Artificial Sequence
  Description of Artificial Sequence: Synthetic oligonucleotide
gccgcccuccguguccguc

SEQ ID NO: 1978721 - RNA, 19 nt, Artificial Sequence
  Description of Artificial Sequence: Synthetic oligonucleotide
agcgggcgccgaagccgca

SEQ ID NO: 1978722 - RNA, 19 nt, Artificial Sequence
  Description of Artificial Sequence: Synthetic oligonucleotide
ccuccacggcugcgggguc

SEQ ID NO: 1978723 - RNA, 19 nt, Artificial Sequence
  Description of Artificial Sequence: Synthetic oligonucleotide
guccccgccgcggccuugu

SEQ ID NO: 1978724 - RNA, 19 nt, Artificial Sequence
  Description of Artificial Sequence: Synthetic oligonucleotide
cugaggcgaccaggggccu

SEQ ID NO: 1978725 - RNA, 19 nt, Artificial Sequence
  Description of Artificial Sequence: Synthetic oligonucleotide
cgucgccugccgcgcgccg

SEQ ID NO: 1978726 - RNA, 19 nt, Artificial Sequence
  Description of Artificial Sequence: Synthetic oligonucleotide
cggcugcgagacaggcgac

SEQ ID NO: 1978727 - RNA, 19 nt, Artificial Sequence
  Description of Artificial Sequence: Synthetic oligonucleotide
gccgcggccuugugugccu

SEQ ID NO: 1978728 - RNA, 19 nt, Artificial Sequence
  Description of Artificial Sequence: Synthetic oligonucleotide
ggcuuccacgcgcgacggu

SEQ ID NO: 1978729 - RNA, 19 nt, Artificial Sequence
  Description of Artificial Sequence: Synthetic oligonucleotide
ggcauccccagcggggcuu

SEQ ID NO: 1978730 - RNA, 19 nt, Artificial Sequence
  Description of Artificial Sequence: Synthetic oligonucleotide
cguccgccucgucgccugc

SEQ ID NO: 1978731 - RNA, 19 nt, Artificial Sequence
  Description of Artificial Sequence: Synthetic oligonucleotide
gccgcaccgccagcauguc

SEQ ID NO: 1978732 - RNA, 19 nt, Artificial Sequence
  Description of Artificial Sequence: Synthetic oligonucleotide
cgagcgcccgugggcuccg

SEQ ID NO: 1978733 - RNA, 19 nt, Artificial Sequence
  Description of Artificial Sequence: Synthetic oligonucleotide
ccgcccuccguguccgucu

SEQ ID NO: 1978734 - RNA, 19 nt, Artificial Sequence
  Description of Artificial Sequence: Synthetic oligonucleotide
cgcugcgguccauggugga

SEQ ID NO: 1978735 - RNA, 19 nt, Artificial Sequence
  Description of Artificial Sequence: Synthetic oligonucleotide
cgcccuccguguccgucuc

SEQ ID NO: 1978736 - RNA, 19 nt, Artificial Sequence
  Description of Artificial Sequence: Synthetic oligonucleotide
cuccggcgccgccgggucu

SEQ ID NO: 1978737 - RNA, 19 nt, Artificial Sequence
  Description of Artificial Sequence: Synthetic oligonucleotide
cccgagcgccggggcagcc

SEQ ID NO: 1978738 - RNA, 19 nt, Artificial Sequence
  Description of Artificial Sequence: Synthetic oligonucleotide
cggcggugccacggagacg

SEQ ID NO: 1978739 - RNA, 19 nt, Artificial Sequence
  Description of Artificial Sequence: Synthetic oligonucleotide
ccguguggcggcgccagcu

SEQ ID NO: 1978740 - RNA, 19 nt, Artificial Sequence
  Description of Artificial Sequence: Synthetic oligonucleotide
cguugaaauugaggucggu

SEQ ID NO: 1978741 - RNA, 19 nt, Artificial Sequence
  Description of Artificial Sequence: Synthetic oligonucleotide
gggacccgcccgggccgug

SEQ ID NO: 1978742 - RNA, 19 nt, Artificial Sequence
  Description of Artificial Sequence: Synthetic oligonucleotide
cgcgacggucgugacccga

SEQ ID NO: 1978743 - RNA, 19 nt, Artificial Sequence
  Description of Artificial Sequence: Synthetic oligonucleotide
cggcgccagcugcuccggc

SEQ ID NO: 1978744 - RNA, 19 nt, Artificial Sequence
  Description of Artificial Sequence: Synthetic oligonucleotide
ccgcggccuugugugccuc

SEQ ID NO: 1978745 - RNA, 19 nt, Artificial Sequence
  Description of Artificial Sequence: Synthetic oligonucleotide
ccacguggcucagcucgcu

SEQ ID NO: 1978746 - RNA, 19 nt, Artificial Sequence
  Description of Artificial Sequence: Synthetic oligonucleotide
gccgcuccucgggugccgu

SEQ ID NO: 1978747 - RNA, 19 nt, Artificial Sequence
  Description of Artificial Sequence: Synthetic oligonucleotide
ccgccgggucucgggcgac

SEQ ID NO: 1978748 - RNA, 19 nt, Artificial Sequence
  Description of Artificial Sequence: Synthetic oligonucleotide
ccccgccgcggccuugugu

SEQ ID NO: 1978749 - RNA, 19 nt, Artificial Sequence
  Description of Artificial Sequence: Synthetic oligonucleotide
cggggaccgcggggacccg

SEQ ID NO: 1978750 - RNA, 19 nt, Artificial Sequence
  Description of Artificial Sequence: Synthetic oligonucleotide
cgacggcgcgccagcgugu

SEQ ID NO: 1978751 - RNA, 19 nt, Artificial Sequence
  Description of Artificial Sequence: Synthetic oligonucleotide
cgcgcgccgcccgccggug

SEQ ID NO: 1978752 - RNA, 19 nt, Artificial Sequence
  Description of Artificial Sequence: Synthetic oligonucleotide
cguccccgccgcggccuug

SEQ ID NO: 1978753 - RNA, 19 nt, Artificial Sequence
  Description of Artificial Sequence: Synthetic oligonucleotide
ccgcgccucgcgccgcuuu

SEQ ID NO: 1978754 - RNA, 19 nt, Artificial Sequence
  Description of Artificial Sequence: Synthetic oligonucleotide
cgccgcccuccguguccgu

SEQ ID NO: 1978755 - RNA, 19 nt, Artificial Sequence
  Description of Artificial Sequence: Synthetic oligonucleotide
cccgcgccucgcgccgcuu

SEQ ID NO: 1978756 - RNA, 19 nt, Artificial Sequence
  Description of Artificial Sequence: Synthetic oligonucleotide
aauaauauaacuuuaagua

SEQ ID NO: 1978757 - RNA, 19 nt, Artificial Sequence
  Description of Artificial Sequence: Synthetic oligonucleotide
uguaaauacaaacauagug

SEQ ID NO: 1978758 - RNA, 19 nt, Artificial Sequence
  Description of Artificial Sequence: Synthetic oligonucleotide
aauaaauuacagcaagggg

SEQ ID NO: 1978759 - RNA, 19 nt, Artificial Sequence
  Description of Artificial Sequence: Synthetic oligonucleotide
aaauaauauaacuuuaagu

SEQ ID NO: 1978760 - RNA, 19 nt, Artificial Sequence
  Description of Artificial Sequence: Synthetic oligonucleotide
auaaauuacagcaaggggc

SEQ ID NO: 1978761 - RNA, 19 nt, Artificial Sequence
  Description of Artificial Sequence: Synthetic oligonucleotide
gauguaaauacaaacauag

SEQ ID NO: 1978762 - RNA, 19 nt, Artificial Sequence
  Description of Artificial Sequence: Synthetic oligonucleotide
ucugcuaugauguaaauac

SEQ ID NO: 1978763 - RNA, 19 nt, Artificial Sequence
  Description of Artificial Sequence: Synthetic oligonucleotide
uagaauauaagcugcauag

SEQ ID NO: 1978764 - RNA, 19 nt, Artificial Sequence
  Description of Artificial Sequence: Synthetic oligonucleotide
gaauauaagcugcauagcg

SEQ ID NO: 1978765 - RNA, 19 nt, Artificial Sequence
  Description of Artificial Sequence: Synthetic oligonucleotide
aaugauguaaaauggaaau

SEQ ID NO: 1978766 - RNA, 19 nt, Artificial Sequence
  Description of Artificial Sequence: Synthetic oligonucleotide
aauacaacacagcacauga

SEQ ID NO: 1978767 - RNA, 19 nt, Artificial Sequence
  Description of Artificial Sequence: Synthetic oligonucleotide
aaaaugacgaagauguugg

SEQ ID NO: 1978768 - RNA, 19 nt, Artificial Sequence
  Description of Artificial Sequence: Synthetic oligonucleotide
uguaaaauggaaaugggaa

SEQ ID NO: 1978769 - RNA, 19 nt, Artificial Sequence
  Description of Artificial Sequence: Synthetic oligonucleotide
ucagaaugaagaaagggag

SEQ ID NO: 1978770 - RNA, 19 nt, Artificial Sequence
  Description of Artificial Sequence: Synthetic oligonucleotide
caaacaguugucuaaaggg

SEQ ID NO: 1978771 - RNA, 19 nt, Artificial Sequence
  Description of Artificial Sequence: Synthetic oligonucleotide
aguaaaacuguccccaccc

SEQ ID NO: 1978772 - RNA, 19 nt, Artificial Sequence
  Description of Artificial Sequence: Synthetic oligonucleotide
uuuaaguacaugcuucagg

SEQ ID NO: 1978773 - RNA, 19 nt, Artificial Sequence
  Description of Artificial Sequence: Synthetic oligonucleotide
aacucuuccauguaagauc

SEQ ID NO: 1978774 - RNA, 19 nt, Artificial Sequence
  Description of Artificial Sequence: Synthetic oligonucleotide
uuauauaaccgcuuuauac

SEQ ID NO: 1978775 - RNA, 19 nt, Artificial Sequence
  Description of Artificial Sequence: Synthetic oligonucleotide
uauauaaccgcuuuauaca

SEQ ID NO: 1978776 - RNA, 19 nt, Artificial Sequence
  Description of Artificial Sequence: Synthetic oligonucleotide
guaaauacaaacauagugc

SEQ ID NO: 1978777 - RNA, 19 nt, Artificial Sequence
  Description of Artificial Sequence: Synthetic oligonucleotide
uuaagcucugcuaugaugu

SEQ ID NO: 1978778 - RNA, 19 nt, Artificial Sequence
  Description of Artificial Sequence: Synthetic oligonucleotide
uuaaguacaugcuucagga

SEQ ID NO: 1978779 - RNA, 19 nt, Artificial Sequence
  Description of Artificial Sequence: Synthetic oligonucleotide
uuaaacaauaagcaaucug

SEQ ID NO: 1978780 - RNA, 19 nt, Artificial Sequence
  Description of Artificial Sequence: Synthetic oligonucleotide
ucuacuauugcauagucuc

SEQ ID NO: 1978781 - RNA, 19 nt, Artificial Sequence
  Description of Artificial Sequence: Synthetic oligonucleotide
uuuaauauccaagauagaa

SEQ ID NO: 1978782 - RNA, 19 nt, Artificial Sequence
  Description of Artificial Sequence: Synthetic oligonucleotide
ucuaugaucaucuuugcuc

SEQ ID NO: 1978783 - RNA, 19 nt, Artificial Sequence
  Description of Artificial Sequence: Synthetic oligonucleotide
uuguuaaacaauaagcaau

SEQ ID NO: 1978784 - RNA, 19 nt, Artificial Sequence
  Description of Artificial Sequence: Synthetic oligonucleotide
auugcauagucucccaagc

SEQ ID NO: 1978785 - RNA, 19 nt, Artificial Sequence
  Description of Artificial Sequence: Synthetic oligonucleotide
aaguacaugcuucaggaca

SEQ ID NO: 1978786 - RNA, 19 nt, Artificial Sequence
  Description of Artificial Sequence: Synthetic oligonucleotide
uuucuagaauauaagcugc

SEQ ID NO: 1978787 - RNA, 19 nt, Artificial Sequence
  Description of Artificial Sequence: Synthetic oligonucleotide
aauacaaacauagugcaau

SEQ ID NO: 1978788 - RNA, 19 nt, Artificial Sequence
  Description of Artificial Sequence: Synthetic oligonucleotide
uaacaguggggaaaggugg

SEQ ID NO: 1978789 - RNA, 19 nt, Artificial Sequence
  Description of Artificial Sequence: Synthetic oligonucleotide
uuaaauauugguacuuuaa

SEQ ID NO: 1978790 - RNA, 19 nt, Artificial Sequence
  Description of Artificial Sequence: Synthetic oligonucleotide
cuaugauguaaauacaaac

SEQ ID NO: 1978791 - RNA, 19 nt, Artificial Sequence
  Description of Artificial Sequence: Synthetic oligonucleotide
aacaauaagcaaucugucu

SEQ ID NO: 1978792 - RNA, 19 nt, Artificial Sequence
  Description of Artificial Sequence: Synthetic oligonucleotide
aacuuuaaguacaugcuuc

SEQ ID NO: 1978793 - RNA, 19 nt, Artificial Sequence
  Description of Artificial Sequence: Synthetic oligonucleotide
cuucgaaaggaaaagggcc

SEQ ID NO: 1978794 - RNA, 19 nt, Artificial Sequence
  Description of Artificial Sequence: Synthetic oligonucleotide
uuaacaguggggaaaggug

SEQ ID NO: 1978795 - RNA, 19 nt, Artificial Sequence
  Description of Artificial Sequence: Synthetic oligonucleotide
gauagaaucccgugaauug

SEQ ID NO: 1978796 - RNA, 19 nt, Artificial Sequence
  Description of Artificial Sequence: Synthetic oligonucleotide
uuaauauccaagauagaau

SEQ ID NO: 1978797 - RNA, 19 nt, Artificial Sequence
  Description of Artificial Sequence: Synthetic oligonucleotide
aacauagugcaauaaguau

SEQ ID NO: 1978798 - RNA, 19 nt, Artificial Sequence
  Description of Artificial Sequence: Synthetic oligonucleotide
ucuuuuauuccuuuccaca

SEQ ID NO: 1978799 - RNA, 19 nt, Artificial Sequence
  Description of Artificial Sequence: Synthetic oligonucleotide
aauugggauuauccaacac

SEQ ID NO: 1978800 - RNA, 19 nt, Artificial Sequence
  Description of Artificial Sequence: Synthetic oligonucleotide
ugaauugggauuauccaac

SEQ ID NO: 1978801 - RNA, 19 nt, Artificial Sequence
  Description of Artificial Sequence: Synthetic oligonucleotide
ugaguucacaaacaguugu

SEQ ID NO: 1978802 - RNA, 19 nt, Artificial Sequence
  Description of Artificial Sequence: Synthetic oligonucleotide
ugguacuuuaauauccaag

SEQ ID NO: 1978803 - RNA, 19 nt, Artificial Sequence
  Description of Artificial Sequence: Synthetic oligonucleotide
uucaaauacaacacagcac

SEQ ID NO: 1978804 - RNA, 19 nt, Artificial Sequence
  Description of Artificial Sequence: Synthetic oligonucleotide
uggcuaaagaaauaaauua

SEQ ID NO: 1978805 - RNA, 19 nt, Artificial Sequence
  Description of Artificial Sequence: Synthetic oligonucleotide
ugcauagucucccaagcag

SEQ ID NO: 1978806 - RNA, 19 nt, Artificial Sequence
  Description of Artificial Sequence: Synthetic oligonucleotide
aaaugacgaagauguuggc

SEQ ID NO: 1978807 - RNA, 19 nt, Artificial Sequence
  Description of Artificial Sequence: Synthetic oligonucleotide
aaucagaucaagacgaagu

SEQ ID NO: 1978808 - RNA, 19 nt, Artificial Sequence
  Description of Artificial Sequence: Synthetic oligonucleotide
aacauuacugugcucugug

SEQ ID NO: 1978809 - RNA, 19 nt, Artificial Sequence
  Description of Artificial Sequence: Synthetic oligonucleotide
aauuacagcaaggggcuac

SEQ ID NO: 1978810 - RNA, 19 nt, Artificial Sequence
  Description of Artificial Sequence: Synthetic oligonucleotide
auugggauuauccaacaca

SEQ ID NO: 1978811 - RNA, 19 nt, Artificial Sequence
  Description of Artificial Sequence: Synthetic oligonucleotide
aaacaauaagcaaucuguc

SEQ ID NO: 1978812 - RNA, 19 nt, Artificial Sequence
  Description of Artificial Sequence: Synthetic oligonucleotide
gauguaaaauggaaauggg

SEQ ID NO: 1978813 - RNA, 19 nt, Artificial Sequence
  Description of Artificial Sequence: Synthetic oligonucleotide
aagacgaaguccuaucaga

SEQ ID NO: 1978814 - RNA, 19 nt, Artificial Sequence
  Description of Artificial Sequence: Synthetic oligonucleotide
ucaaguauucaaacacugc

SEQ ID NO: 1978815 - RNA, 19 nt, Artificial Sequence
  Description of Artificial Sequence: Synthetic oligonucleotide
acacacuucacaguguagc

SEQ ID NO: 1978816 - RNA, 19 nt, Artificial Sequence
  Description of Artificial Sequence: Synthetic oligonucleotide
auaaagguagcacacacuu

SEQ ID NO: 1978817 - RNA, 19 nt, Artificial Sequence
  Description of Artificial Sequence: Synthetic oligonucleotide
aucagaucaagacgaaguc

SEQ ID NO: 1978818 - RNA, 19 nt, Artificial Sequence
  Description of Artificial Sequence: Synthetic oligonucleotide
aaaauggaaaugggaacuc

SEQ ID NO: 1978819 - RNA, 19 nt, Artificial Sequence
  Description of Artificial Sequence: Synthetic oligonucleotide
uugggauuauccaacacaa

SEQ ID NO: 1978820 - RNA, 19 nt, Artificial Sequence
  Description of Artificial Sequence: Synthetic oligonucleotide
acaauaagcaaucugucuu

SEQ ID NO: 1978821 - RNA, 19 nt, Artificial Sequence
  Description of Artificial Sequence: Synthetic oligonucleotide
uauugcauagucucccaag

SEQ ID NO: 1978822 - RNA, 19 nt, Artificial Sequence
  Description of Artificial Sequence: Synthetic oligonucleotide
guccuuuaaauauugguac

SEQ ID NO: 1978823 - RNA, 19 nt, Artificial Sequence
  Description of Artificial Sequence: Synthetic oligonucleotide
auuuagcucuuguggauac

SEQ ID NO: 1978824 - RNA, 19 nt, Artificial Sequence
  Description of Artificial Sequence: Synthetic oligonucleotide
ugcuaugauguaaauacaa

SEQ ID NO: 1978825 - RNA, 19 nt, Artificial Sequence
  Description of Artificial Sequence: Synthetic oligonucleotide
uaagccgaaagcaguauga

SEQ ID NO: 1978826 - RNA, 19 nt, Artificial Sequence
  Description of Artificial Sequence: Synthetic oligonucleotide
cuuugcucagcacagcagg

SEQ ID NO: 1978827 - RNA, 19 nt, Artificial Sequence
  Description of Artificial Sequence: Synthetic oligonucleotide
acgaaguccuaucagagca

SEQ ID NO: 1978828 - RNA, 19 nt, Artificial Sequence
  Description of Artificial Sequence: Synthetic oligonucleotide
uagaaucccgugaauuggg

SEQ ID NO: 1978829 - RNA, 19 nt, Artificial Sequence
  Description of Artificial Sequence: Synthetic oligonucleotide
aauauaagcugcauagcgu

SEQ ID NO: 1978830 - RNA, 19 nt, Artificial Sequence
  Description of Artificial Sequence: Synthetic oligonucleotide
aaauacaacacagcacaug

SEQ ID NO: 1978831 - RNA, 19 nt, Artificial Sequence
  Description of Artificial Sequence: Synthetic oligonucleotide
uaaagggagcaccagggga

SEQ ID NO: 1978832 - RNA, 19 nt, Artificial Sequence
  Description of Artificial Sequence: Synthetic oligonucleotide
uucgaaaggaaaagggccu

SEQ ID NO: 1978833 - RNA, 19 nt, Artificial Sequence
  Description of Artificial Sequence: Synthetic oligonucleotide
aguucuuccucuuaacagu

SEQ ID NO: 1978834 - RNA, 19 nt, Artificial Sequence
  Description of Artificial Sequence: Synthetic oligonucleotide
cacuuuguuaaacaauaag

SEQ ID NO: 1978835 - RNA, 19 nt, Artificial Sequence
  Description of Artificial Sequence: Synthetic oligonucleotide
aacaguugucuaaagggag

SEQ ID NO: 1978836 - RNA, 19 nt, Artificial Sequence
  Description of Artificial Sequence: Synthetic oligonucleotide
gguacuuuaauauccaaga

SEQ ID NO: 1978837 - RNA, 19 nt, Artificial Sequence
  Description of Artificial Sequence: Synthetic oligonucleotide
ugauguaaauacaaacaua

SEQ ID NO: 1978838 - RNA, 19 nt, Artificial Sequence
  Description of Artificial Sequence: Synthetic oligonucleotide
uucacaaacaguugucuaa

SEQ ID NO: 1978839 - RNA, 19 nt, Artificial Sequence
  Description of Artificial Sequence: Synthetic oligonucleotide
aaagcaguaugaggaauag

SEQ ID NO: 1978840 - RNA, 19 nt, Artificial Sequence
  Description of Artificial Sequence: Synthetic oligonucleotide
ucaagacgaaguccuauca

SEQ ID NO: 1978841 - RNA, 19 nt, Artificial Sequence
  Description of Artificial Sequence: Synthetic oligonucleotide
uauaaagguagcacacacu

SEQ ID NO: 1978842 - RNA, 19 nt, Artificial Sequence
  Description of Artificial Sequence: Synthetic oligonucleotide
auagaaucccgugaauugg

SEQ ID NO: 1978843 - RNA, 19 nt, Artificial Sequence
  Description of Artificial Sequence: Synthetic oligonucleotide
aucaagacgaaguccuauc

SEQ ID NO: 1978844 - RNA, 19 nt, Artificial Sequence
  Description of Artificial Sequence: Synthetic oligonucleotide
auacagcauucuuuuauuc

SEQ ID NO: 1978845 - RNA, 19 nt, Artificial Sequence
  Description of Artificial Sequence: Synthetic oligonucleotide
aacccaacauuacugugcu

SEQ ID NO: 1978846 - RNA, 19 nt, Artificial Sequence
  Description of Artificial Sequence: Synthetic oligonucleotide
aaaugggaacucuuccaug

SEQ ID NO: 1978847 - RNA, 19 nt, Artificial Sequence
  Description of Artificial Sequence: Synthetic oligonucleotide
uuugcucagcacagcaggg

SEQ ID NO: 1978848 - RNA, 19 nt, Artificial Sequence
  Description of Artificial Sequence: Synthetic oligonucleotide
aaaagggccucguccauca

SEQ ID NO: 1978849 - RNA, 19 nt, Artificial Sequence
  Description of Artificial Sequence: Synthetic oligonucleotide
aaaucagaucaagacgaag

SEQ ID NO: 1978850 - RNA, 19 nt, Artificial Sequence
  Description of Artificial Sequence: Synthetic oligonucleotide
ggagaaugauguaaaaugg

SEQ ID NO: 1978851 - RNA, 19 nt, Artificial Sequence
  Description of Artificial Sequence: Synthetic oligonucleotide
ugaucaucuuugcucagca

SEQ ID NO: 1978852 - RNA, 19 nt, Artificial Sequence
  Description of Artificial Sequence: Synthetic oligonucleotide
augagucagaugcugucac

SEQ ID NO: 1978853 - RNA, 19 nt, Artificial Sequence
  Description of Artificial Sequence: Synthetic oligonucleotide
auaacuuuaaguacaugcu

SEQ ID NO: 1978854 - RNA, 19 nt, Artificial Sequence
  Description of Artificial Sequence: Synthetic oligonucleotide
ugguccuuuaaauauuggu

SEQ ID NO: 1978855 - RNA, 19 nt, Artificial Sequence
  Description of Artificial Sequence: Synthetic oligonucleotide
aaugacgaagauguuggca

SEQ ID NO: 1978856 - RNA, 19 nt, Artificial Sequence
  Description of Artificial Sequence: Synthetic oligonucleotide
uguggauacagcauucuuu

SEQ ID NO: 1978857 - RNA, 19 nt, Artificial Sequence
  Description of Artificial Sequence: Synthetic oligonucleotide
agcucuaugaucaucuuug

SEQ ID NO: 1978858 - RNA, 19 nt, Artificial Sequence
  Description of Artificial Sequence: Synthetic oligonucleotide
aguacaugcuucaggacac

SEQ ID NO: 1978859 - RNA, 19 nt, Artificial Sequence
  Description of Artificial Sequence: Synthetic oligonucleotide
cagcacaauguuuacaaac

SEQ ID NO: 1978860 - RNA, 19 nt, Artificial Sequence
  Description of Artificial Sequence: Synthetic oligonucleotide
augacgaagauguuggcau

SEQ ID NO: 1978861 - RNA, 19 nt, Artificial Sequence
  Description of Artificial Sequence: Synthetic oligonucleotide
uccaagauagaaucccgug

SEQ ID NO: 1978862 - RNA, 19 nt, Artificial Sequence
  Description of Artificial Sequence: Synthetic oligonucleotide
aaacauagugcaauaagua

SEQ ID NO: 1978863 - RNA, 19 nt, Artificial Sequence
  Description of Artificial Sequence: Synthetic oligonucleotide
auuacugugcucuguguga

SEQ ID NO: 1978864 - RNA, 19 nt, Artificial Sequence
  Description of Artificial Sequence: Synthetic oligonucleotide
uuuauauaaccgcuuuaua

SEQ ID NO: 1978865 - RNA, 19 nt, Artificial Sequence
  Description of Artificial Sequence: Synthetic oligonucleotide
ucuaugagucagaugcugu

SEQ ID NO: 1978866 - RNA, 19 nt, Artificial Sequence
  Description of Artificial Sequence: Synthetic oligonucleotide
auauaagcugcauagcguu

SEQ ID NO: 1978867 - RNA, 19 nt, Artificial Sequence
  Description of Artificial Sequence: Synthetic oligonucleotide
uucuagaauauaagcugca

SEQ ID NO: 1978868 - RNA, 19 nt, Artificial Sequence
  Description of Artificial Sequence: Synthetic oligonucleotide
agcucuuguggauacagca

SEQ ID NO: 1978869 - RNA, 19 nt, Artificial Sequence
  Description of Artificial Sequence: Synthetic oligonucleotide
caaucugucuuugaugacc

SEQ ID NO: 1978870 - RNA, 19 nt, Artificial Sequence
  Description of Artificial Sequence: Synthetic oligonucleotide
uuagcucuuguggauacag

SEQ ID NO: 1978871 - RNA, 19 nt, Artificial Sequence
  Description of Artificial Sequence: Synthetic oligonucleotide
uugucuaaagggagcacca

SEQ ID NO: 1978872 - RNA, 19 nt, Artificial Sequence
  Description of Artificial Sequence: Synthetic oligonucleotide
aaucccgugaauugggauu

SEQ ID NO: 1978873 - RNA, 19 nt, Artificial Sequence
  Description of Artificial Sequence: Synthetic oligonucleotide
auuucuggcaucucuccug

SEQ ID NO: 1978874 - RNA, 19 nt, Artificial Sequence
  Description of Artificial Sequence: Synthetic oligonucleotide
ucagaucaagacgaagucc

SEQ ID NO: 1978875 - RNA, 19 nt, Artificial Sequence
  Description of Artificial Sequence: Synthetic oligonucleotide
auaaccgcuuuauacauua

SEQ ID NO: 1978876 - RNA, 19 nt, Artificial Sequence
  Description of Artificial Sequence: Synthetic oligonucleotide
guuaagcucugcuaugaug

SEQ ID NO: 1978877 - RNA, 19 nt, Artificial Sequence
  Description of Artificial Sequence: Synthetic oligonucleotide
ugcauucacaucucggaga

SEQ ID NO: 1978878 - RNA, 19 nt, Artificial Sequence
  Description of Artificial Sequence: Synthetic oligonucleotide
caaaccacugccucagagc

SEQ ID NO: 1978879 - RNA, 19 nt, Artificial Sequence
  Description of Artificial Sequence: Synthetic oligonucleotide
acaguugucuaaagggagc

SEQ ID NO: 1978880 - RNA, 19 nt, Artificial Sequence
  Description of Artificial Sequence: Synthetic oligonucleotide
cuaugaucaucuuugcuca

SEQ ID NO: 1978881 - RNA, 19 nt, Artificial Sequence
  Description of Artificial Sequence: Synthetic oligonucleotide
uccuuuaaauauugguacu

SEQ ID NO: 1978882 - RNA, 19 nt, Artificial Sequence
  Description of Artificial Sequence: Synthetic oligonucleotide
uucuuuuauuccuuuccac

SEQ ID NO: 1978883 - RNA, 19 nt, Artificial Sequence
  Description of Artificial Sequence: Synthetic oligonucleotide
uuucuacuauugcauaguc

SEQ ID NO: 1978884 - RNA, 19 nt, Artificial Sequence
  Description of Artificial Sequence: Synthetic oligonucleotide
uguguuaagcucugcuaug

SEQ ID NO: 1978885 - RNA, 19 nt, Artificial Sequence
  Description of Artificial Sequence: Synthetic oligonucleotide
uucuacuauugcauagucu

SEQ ID NO: 1978886 - RNA, 19 nt, Artificial Sequence
  Description of Artificial Sequence: Synthetic oligonucleotide
gacauggagacagauguac

SEQ ID NO: 1978887 - RNA, 19 nt, Artificial Sequence
  Description of Artificial Sequence: Synthetic oligonucleotide
aagggcacaaagcugcuuu

SEQ ID NO: 1978888 - RNA, 19 nt, Artificial Sequence
  Description of Artificial Sequence: Synthetic oligonucleotide
cauagucucccaagcagcc

SEQ ID NO: 1978889 - RNA, 19 nt, Artificial Sequence
  Description of Artificial Sequence: Synthetic oligonucleotide
ucggauuucuggcaucucu

SEQ ID NO: 1978890 - RNA, 19 nt, Artificial Sequence
  Description of Artificial Sequence: Synthetic oligonucleotide
uuccucuuaacagugggga

SEQ ID NO: 1978891 - RNA, 19 nt, Artificial Sequence
  Description of Artificial Sequence: Synthetic oligonucleotide
augaucaucuuugcucagc

SEQ ID NO: 1978892 - RNA, 19 nt, Artificial Sequence
  Description of Artificial Sequence: Synthetic oligonucleotide
gucagaaugaagaaaggga

SEQ ID NO: 1978893 - RNA, 19 nt, Artificial Sequence
  Description of Artificial Sequence: Synthetic oligonucleotide
gagcacugaguucacaaac

SEQ ID NO: 1978894 - RNA, 19 nt, Artificial Sequence
  Description of Artificial Sequence: Synthetic oligonucleotide
agcaguaugaggaauaguu

SEQ ID NO: 1978895 - RNA, 19 nt, Artificial Sequence
  Description of Artificial Sequence: Synthetic oligonucleotide
aaagggagagucaccuuuc

SEQ ID NO: 1978896 - RNA, 19 nt, Artificial Sequence
  Description of Artificial Sequence: Synthetic oligonucleotide
gauggggcuauuuagcucu

SEQ ID NO: 1978897 - RNA, 19 nt, Artificial Sequence
  Description of Artificial Sequence: Synthetic oligonucleotide
guugucuaaagggagcacc

SEQ ID NO: 1978898 - RNA, 19 nt, Artificial Sequence
  Description of Artificial Sequence: Synthetic oligonucleotide
agccgaaagcaguaugagg

SEQ ID NO: 1978899 - RNA, 19 nt, Artificial Sequence
  Description of Artificial Sequence: Synthetic oligonucleotide
gagagcuuguguuaagcuc

SEQ ID NO: 1978900 - RNA, 19 nt, Artificial Sequence
  Description of Artificial Sequence: Synthetic oligonucleotide
cauuacugugcucugugug

SEQ ID NO: 1978901 - RNA, 19 nt, Artificial Sequence
  Description of Artificial Sequence: Synthetic oligonucleotide
ucuuccauguaagaucgga

SEQ ID NO: 1978902 - RNA, 19 nt, Artificial Sequence
  Description of Artificial Sequence: Synthetic oligonucleotide
cucaggguaagccgaaagc

SEQ ID NO: 1978903 - RNA, 19 nt, Artificial Sequence
  Description of Artificial Sequence: Synthetic oligonucleotide
ucucggagaaugauguaaa

SEQ ID NO: 1978904 - RNA, 19 nt, Artificial Sequence
  Description of Artificial Sequence: Synthetic oligonucleotide
uauggcaggccacucacau

SEQ ID NO: 1978905 - RNA, 19 nt, Artificial Sequence
  Description of Artificial Sequence: Synthetic oligonucleotide
aacuauggcaggccacuca

SEQ ID NO: 1978906 - RNA, 19 nt, Artificial Sequence
  Description of Artificial Sequence: Synthetic oligonucleotide
cuucaggacacuuuguuaa

SEQ ID NO: 1978907 - RNA, 19 nt, Artificial Sequence
  Description of Artificial Sequence: Synthetic oligonucleotide
agaaugauguaaaauggaa

SEQ ID NO: 1978908 - RNA, 19 nt, Artificial Sequence
  Description of Artificial Sequence: Synthetic oligonucleotide
accaccauauaaagguagc

SEQ ID NO: 1978909 - RNA, 19 nt, Artificial Sequence
  Description of Artificial Sequence: Synthetic oligonucleotide
cacuucacaguguagccug

SEQ ID NO: 1978910 - RNA, 19 nt, Artificial Sequence
  Description of Artificial Sequence: Synthetic oligonucleotide
cacacuucacaguguagcc

SEQ ID NO: 1978911 - RNA, 19 nt, Artificial Sequence
  Description of Artificial Sequence: Synthetic oligonucleotide
agcacaugauuucaaguau

SEQ ID NO: 1978912 - RNA, 19 nt, Artificial Sequence
  Description of Artificial Sequence: Synthetic oligonucleotide
gaccaccauauaaagguag

SEQ ID NO: 1978913 - RNA, 19 nt, Artificial Sequence
  Description of Artificial Sequence: Synthetic oligonucleotide
augaggaauaguucuuccu

SEQ ID NO: 1978914 - RNA, 19 nt, Artificial Sequence
  Description of Artificial Sequence: Synthetic oligonucleotide
ucuuguggauacagcauuc

SEQ ID NO: 1978915 - RNA, 19 nt, Artificial Sequence
  Description of Artificial Sequence: Synthetic oligonucleotide
caagacgaaguccuaucag

SEQ ID NO: 1978916 - RNA, 19 nt, Artificial Sequence
  Description of Artificial Sequence: Synthetic oligonucleotide
agcacaauguuuacaaaca

SEQ ID NO: 1978917 - RNA, 19 nt, Artificial Sequence
  Description of Artificial Sequence: Synthetic oligonucleotide
ggcuacggcagucagaaug

SEQ ID NO: 1978918 - RNA, 19 nt, Artificial Sequence
  Description of Artificial Sequence: Synthetic oligonucleotide
caaacauagugcaauaagu

SEQ ID NO: 1978919 - RNA, 19 nt, Artificial Sequence
  Description of Artificial Sequence: Synthetic oligonucleotide
caguguagccugcaaacag

SEQ ID NO: 1978920 - RNA, 19 nt, Artificial Sequence
  Description of Artificial Sequence: Synthetic oligonucleotide
uugccuucgaaaggaaaag

SEQ ID NO: 1978921 - RNA, 19 nt, Artificial Sequence
  Description of Artificial Sequence: Synthetic oligonucleotide
ggcuaaagaaauaaauuac

SEQ ID NO: 1978922 - RNA, 19 nt, Artificial Sequence
  Description of Artificial Sequence: Synthetic oligonucleotide
auguaaaauggaaauggga

SEQ ID NO: 1978923 - RNA, 19 nt, Artificial Sequence
  Description of Artificial Sequence: Synthetic oligonucleotide
cacaucucggagaaugaug

SEQ ID NO: 1978924 - RNA, 19 nt, Artificial Sequence
  Description of Artificial Sequence: Synthetic oligonucleotide
ugccuucgaaaggaaaagg

SEQ ID NO: 1978925 - RNA, 19 nt, Artificial Sequence
  Description of Artificial Sequence: Synthetic oligonucleotide
aagccgaaagcaguaugag

SEQ ID NO: 1978926 - RNA, 19 nt, Artificial Sequence
  Description of Artificial Sequence: Synthetic oligonucleotide
cuggcaucucuccuggucc

SEQ ID NO: 1978927 - RNA, 19 nt, Artificial Sequence
  Description of Artificial Sequence: Synthetic oligonucleotide
gugaauugggauuauccaa

SEQ ID NO: 1978928 - RNA, 19 nt, Artificial Sequence
  Description of Artificial Sequence: Synthetic oligonucleotide
uacggcagucagaaugaag

SEQ ID NO: 1978929 - RNA, 19 nt, Artificial Sequence
  Description of Artificial Sequence: Synthetic oligonucleotide
caaguauucaaacacugcu

SEQ ID NO: 1978930 - RNA, 19 nt, Artificial Sequence
  Description of Artificial Sequence: Synthetic oligonucleotide
gggagagucaccuuucuac

SEQ ID NO: 1978931 - RNA, 19 nt, Artificial Sequence
  Description of Artificial Sequence: Synthetic oligonucleotide
agagucaccuuucuacuau

SEQ ID NO: 1978932 - RNA, 19 nt, Artificial Sequence
  Description of Artificial Sequence: Synthetic oligonucleotide
aagauagaaucccgugaau

SEQ ID NO: 1978933 - RNA, 19 nt, Artificial Sequence
  Description of Artificial Sequence: Synthetic oligonucleotide
gucaccuuucuacuauugc

SEQ ID NO: 1978934 - RNA, 19 nt, Artificial Sequence
  Description of Artificial Sequence: Synthetic oligonucleotide
cugcaaacagacauggaga

SEQ ID NO: 1978935 - RNA, 19 nt, Artificial Sequence
  Description of Artificial Sequence: Synthetic oligonucleotide
uuacugugcucugugugag

SEQ ID NO: 1978936 - RNA, 19 nt, Artificial Sequence
  Description of Artificial Sequence: Synthetic oligonucleotide
agccugcaaacagacaugg

SEQ ID NO: 1978937 - RNA, 19 nt, Artificial Sequence
  Description of Artificial Sequence: Synthetic oligonucleotide
auuacagcaaggggcuacg

SEQ ID NO: 1978938 - RNA, 19 nt, Artificial Sequence
  Description of Artificial Sequence: Synthetic oligonucleotide
agaaacuauggcaggccac

SEQ ID NO: 1978939 - RNA, 19 nt, Artificial Sequence
  Description of Artificial Sequence: Synthetic oligonucleotide
guaagccgaaagcaguaug

SEQ ID NO: 1978940 - RNA, 19 nt, Artificial Sequence
  Description of Artificial Sequence: Synthetic oligonucleotide
ugggaacucuuccauguaa

SEQ ID NO: 1978941 - RNA, 19 nt, Artificial Sequence
  Description of Artificial Sequence: Synthetic oligonucleotide
aaacaacauucaaauacaa

SEQ ID NO: 1978942 - RNA, 19 nt, Artificial Sequence
  Description of Artificial Sequence: Synthetic oligonucleotide
aaagggagcaccaggggaa

SEQ ID NO: 1978943 - RNA, 19 nt, Artificial Sequence
  Description of Artificial Sequence: Synthetic oligonucleotide
ccccaagcaaacaaaaccc

SEQ ID NO: 1978944 - RNA, 19 nt, Artificial Sequence
  Description of Artificial Sequence: Synthetic oligonucleotide
uaugaucaucuuugcucag

SEQ ID NO: 1978945 - RNA, 19 nt, Artificial Sequence
  Description of Artificial Sequence: Synthetic oligonucleotide
ccuucgaaaggaaaagggc

SEQ ID NO: 1978946 - RNA, 19 nt, Artificial Sequence
  Description of Artificial Sequence: Synthetic oligonucleotide
caagauagaaucccgugaa

SEQ ID NO: 1978947 - RNA, 19 nt, Artificial Sequence
  Description of Artificial Sequence: Synthetic oligonucleotide
gugcauucacaucucggag

SEQ ID NO: 1978948 - RNA, 19 nt, Artificial Sequence
  Description of Artificial Sequence: Synthetic oligonucleotide
agacgaaguccuaucagag

SEQ ID NO: 1978949 - RNA, 19 nt, Artificial Sequence
  Description of Artificial Sequence: Synthetic oligonucleotide
cugaguucacaaacaguug

SEQ ID NO: 1978950 - RNA, 19 nt, Artificial Sequence
  Description of Artificial Sequence: Synthetic oligonucleotide
guagccugcaaacagacau

SEQ ID NO: 1978951 - RNA, 19 nt, Artificial Sequence
  Description of Artificial Sequence: Synthetic oligonucleotide
ccauauaaagguagcacac

SEQ ID NO: 1978952 - RNA, 19 nt, Artificial Sequence
  Description of Artificial Sequence: Synthetic oligonucleotide
ucuccugguccuuuaaaua

SEQ ID NO: 1978953 - RNA, 19 nt, Artificial Sequence
  Description of Artificial Sequence: Synthetic oligonucleotide
gcuauuuagcucuugugga

SEQ ID NO: 1978954 - RNA, 19 nt, Artificial Sequence
  Description of Artificial Sequence: Synthetic oligonucleotide
auaagcaaucugucuuuga

SEQ ID NO: 1978955 - RNA, 19 nt, Artificial Sequence
  Description of Artificial Sequence: Synthetic oligonucleotide
ugagucagaugcugucacc

SEQ ID NO: 1978956 - RNA, 19 nt, Artificial Sequence
  Description of Artificial Sequence: Synthetic oligonucleotide
agauagaaucccgugaauu

SEQ ID NO: 1978957 - RNA, 19 nt, Artificial Sequence
  Description of Artificial Sequence: Synthetic oligonucleotide
ucggagaaugauguaaaau

SEQ ID NO: 1978958 - RNA, 19 nt, Artificial Sequence
  Description of Artificial Sequence: Synthetic oligonucleotide
aagguagcacacacuucac

SEQ ID NO: 1978959 - RNA, 19 nt, Artificial Sequence
  Description of Artificial Sequence: Synthetic oligonucleotide
aguccuaucagagcacuga

SEQ ID NO: 1978960 - RNA, 19 nt, Artificial Sequence
  Description of Artificial Sequence: Synthetic oligonucleotide
ucgagagcuuguguuaagc

SEQ ID NO: 1978961 - RNA, 19 nt, Artificial Sequence
  Description of Artificial Sequence: Synthetic oligonucleotide
acuauugcauagucuccca

SEQ ID NO: 1978962 - RNA, 19 nt, Artificial Sequence
  Description of Artificial Sequence: Synthetic oligonucleotide
guaaaacuguccccacccc

SEQ ID NO: 1978963 - RNA, 19 nt, Artificial Sequence
  Description of Artificial Sequence: Synthetic oligonucleotide
augacagccucacuacaga

SEQ ID NO: 1978964 - RNA, 19 nt, Artificial Sequence
  Description of Artificial Sequence: Synthetic oligonucleotide
aaggggcuacggcagucag

SEQ ID NO: 1978965 - RNA, 19 nt, Artificial Sequence
  Description of Artificial Sequence: Synthetic oligonucleotide
cagugagacuggcucaggg

SEQ ID NO: 1978966 - RNA, 19 nt, Artificial Sequence
  Description of Artificial Sequence: Synthetic oligonucleotide
ugacagccucacuacagac

SEQ ID NO: 1978967 - RNA, 19 nt, Artificial Sequence
  Description of Artificial Sequence: Synthetic oligonucleotide
cacaaacaguugucuaaag

SEQ ID NO: 1978968 - RNA, 19 nt, Artificial Sequence
  Description of Artificial Sequence: Synthetic oligonucleotide
cugguccuuuaaauauugg

SEQ ID NO: 1978969 - RNA, 19 nt, Artificial Sequence
  Description of Artificial Sequence: Synthetic oligonucleotide
guccaucagaaacuauggc

SEQ ID NO: 1978970 - RNA, 19 nt, Artificial Sequence
  Description of Artificial Sequence: Synthetic oligonucleotide
ugagacuggcucaggguaa

SEQ ID NO: 1978971 - RNA, 19 nt, Artificial Sequence
  Description of Artificial Sequence: Synthetic oligonucleotide
cagaucaagacgaaguccu

SEQ ID NO: 1978972 - RNA, 19 nt, Artificial Sequence
  Description of Artificial Sequence: Synthetic oligonucleotide
uguagccugcaaacagaca

SEQ ID NO: 1978973 - RNA, 19 nt, Artificial Sequence
  Description of Artificial Sequence: Synthetic oligonucleotide
caguaugaggaauaguucu

SEQ ID NO: 1978974 - RNA, 19 nt, Artificial Sequence
  Description of Artificial Sequence: Synthetic oligonucleotide
ugucuaaagggagcaccag

SEQ ID NO: 1978975 - RNA, 19 nt, Artificial Sequence
  Description of Artificial Sequence: Synthetic oligonucleotide
uggggaaagguggcuaaag

SEQ ID NO: 1978976 - RNA, 19 nt, Artificial Sequence
  Description of Artificial Sequence: Synthetic oligonucleotide
aguugucuaaagggagcac

SEQ ID NO: 1978977 - RNA, 19 nt, Artificial Sequence
  Description of Artificial Sequence: Synthetic oligonucleotide
aaaaucagaucaagacgaa

SEQ ID NO: 1978978 - RNA, 19 nt, Artificial Sequence
  Description of Artificial Sequence: Synthetic oligonucleotide
uagcucuuguggauacagc

SEQ ID NO: 1978979 - RNA, 19 nt, Artificial Sequence
  Description of Artificial Sequence: Synthetic oligonucleotide
cuaucagagcacugaguuc

SEQ ID NO: 1978980 - RNA, 19 nt, Artificial Sequence
  Description of Artificial Sequence: Synthetic oligonucleotide
uauaaccgcuuuauacauu

SEQ ID NO: 1978981 - RNA, 19 nt, Artificial Sequence
  Description of Artificial Sequence: Synthetic oligonucleotide
ugggauuauccaacacaac

SEQ ID NO: 1978982 - RNA, 19 nt, Artificial Sequence
  Description of Artificial Sequence: Synthetic oligonucleotide
gaaaugggaacucuuccau

SEQ ID NO: 1978983 - RNA, 19 nt, Artificial Sequence
  Description of Artificial Sequence: Synthetic oligonucleotide
aucucggagaaugauguaa

SEQ ID NO: 1978984 - RNA, 19 nt, Artificial Sequence
  Description of Artificial Sequence: Synthetic oligonucleotide
uauaagcugcauagcguuu

SEQ ID NO: 1978985 - RNA, 19 nt, Artificial Sequence
  Description of Artificial Sequence: Synthetic oligonucleotide
gccgaaagcaguaugagga

SEQ ID NO: 1978986 - RNA, 19 nt, Artificial Sequence
  Description of Artificial Sequence: Synthetic oligonucleotide
uucgagagcuuguguuaag

SEQ ID NO: 1978987 - RNA, 19 nt, Artificial Sequence
  Description of Artificial Sequence: Synthetic oligonucleotide
uuguggauacagcauucuu

SEQ ID NO: 1978988 - RNA, 19 nt, Artificial Sequence
  Description of Artificial Sequence: Synthetic oligonucleotide
cuuguguuaagcucugcua

SEQ ID NO: 1978989 - RNA, 19 nt, Artificial Sequence
  Description of Artificial Sequence: Synthetic oligonucleotide
acauuacugugcucugugu

SEQ ID NO: 1978990 - RNA, 19 nt, Artificial Sequence
  Description of Artificial Sequence: Synthetic oligonucleotide
uucacaguguagccugcaa

SEQ ID NO: 1978991 - RNA, 19 nt, Artificial Sequence
  Description of Artificial Sequence: Synthetic oligonucleotide
ucuuaacaguggggaaagg

SEQ ID NO: 1978992 - RNA, 19 nt, Artificial Sequence
  Description of Artificial Sequence: Synthetic oligonucleotide
gaaagggagagucaccuuu

SEQ ID NO: 1978993 - RNA, 19 nt, Artificial Sequence
  Description of Artificial Sequence: Synthetic oligonucleotide
uucaggacacuuuguuaaa

SEQ ID NO: 1978994 - RNA, 19 nt, Artificial Sequence
  Description of Artificial Sequence: Synthetic oligonucleotide
gaaagguggcuaaagaaau

SEQ ID NO: 1978995 - RNA, 19 nt, Artificial Sequence
  Description of Artificial Sequence: Synthetic oligonucleotide
ccuuucuacuauugcauag

SEQ ID NO: 1978996 - RNA, 19 nt, Artificial Sequence
  Description of Artificial Sequence: Synthetic oligonucleotide
ugaccaccauauaaaggua

SEQ ID NO: 1978997 - RNA, 19 nt, Artificial Sequence
  Description of Artificial Sequence: Synthetic oligonucleotide
agguagcacacacuucaca

SEQ ID NO: 1978998 - RNA, 19 nt, Artificial Sequence
  Description of Artificial Sequence: Synthetic oligonucleotide
guaugaggaauaguucuuc

SEQ ID NO: 1978999 - RNA, 19 nt, Artificial Sequence
  Description of Artificial Sequence: Synthetic oligonucleotide
gucuuugccuucgaaagga

SEQ ID NO: 1979000 - RNA, 19 nt, Artificial Sequence
  Description of Artificial Sequence: Synthetic oligonucleotide
auguaaauacaaacauagu

SEQ ID NO: 1979001 - RNA, 19 nt, Artificial Sequence
  Description of Artificial Sequence: Synthetic oligonucleotide
cugucaccagcucaaacca

SEQ ID NO: 1979002 - RNA, 19 nt, Artificial Sequence
  Description of Artificial Sequence: Synthetic oligonucleotide
ugucaccagcucaaaccac

SEQ ID NO: 1979003 - RNA, 19 nt, Artificial Sequence
  Description of Artificial Sequence: Synthetic oligonucleotide
cauauaaagguagcacaca

SEQ ID NO: 1979004 - RNA, 19 nt, Artificial Sequence
  Description of Artificial Sequence: Synthetic oligonucleotide
uccugguccuuuaaauauu

SEQ ID NO: 1979005 - RNA, 19 nt, Artificial Sequence
  Description of Artificial Sequence: Synthetic oligonucleotide
uccucuuaacaguggggaa

SEQ ID NO: 1979006 - RNA, 19 nt, Artificial Sequence
  Description of Artificial Sequence: Synthetic oligonucleotide
agcacugaguucacaaaca

SEQ ID NO: 1979007 - RNA, 19 nt, Artificial Sequence
  Description of Artificial Sequence: Synthetic oligonucleotide
aguguagccugcaaacaga

SEQ ID NO: 1979008 - RNA, 19 nt, Artificial Sequence
  Description of Artificial Sequence: Synthetic oligonucleotide
ucuuugccuucgaaaggaa

SEQ ID NO: 1979009 - RNA, 19 nt, Artificial Sequence
  Description of Artificial Sequence: Synthetic oligonucleotide
caaaacccaacauuacugu

SEQ ID NO: 1979010 - RNA, 19 nt, Artificial Sequence
  Description of Artificial Sequence: Synthetic oligonucleotide
gaaacuauggcaggccacu

SEQ ID NO: 1979011 - RNA, 19 nt, Artificial Sequence
  Description of Artificial Sequence: Synthetic oligonucleotide
ggaaagguggcuaaagaaa

SEQ ID NO: 1979012 - RNA, 19 nt, Artificial Sequence
  Description of Artificial Sequence: Synthetic oligonucleotide
gccaaguaaaacugucccc

SEQ ID NO: 1979013 - RNA, 19 nt, Artificial Sequence
  Description of Artificial Sequence: Synthetic oligonucleotide
cuggaagugcauucacauc

SEQ ID NO: 1979014 - RNA, 19 nt, Artificial Sequence
  Description of Artificial Sequence: Synthetic oligonucleotide
aaagguggcuaaagaaaua

SEQ ID NO: 1979015 - RNA, 19 nt, Artificial Sequence
  Description of Artificial Sequence: Synthetic oligonucleotide
aagggagcaccaggggaag

SEQ ID NO: 1979016 - RNA, 19 nt, Artificial Sequence
  Description of Artificial Sequence: Synthetic oligonucleotide
aagcaguaugaggaauagu

SEQ ID NO: 1979017 - RNA, 19 nt, Artificial Sequence
  Description of Artificial Sequence: Synthetic oligonucleotide
cguccaucagaaacuaugg

SEQ ID NO: 1979018 - RNA, 19 nt, Artificial Sequence
  Description of Artificial Sequence: Synthetic oligonucleotide
gggaaagguggcuaaagaa

SEQ ID NO: 1979019 - RNA, 19 nt, Artificial Sequence
  Description of Artificial Sequence: Synthetic oligonucleotide
auaagcugcauagcguuuu

SEQ ID NO: 1979020 - RNA, 19 nt, Artificial Sequence
  Description of Artificial Sequence: Synthetic oligonucleotide
accuuucuacuauugcaua

SEQ ID NO: 1979021 - RNA, 19 nt, Artificial Sequence
  Description of Artificial Sequence: Synthetic oligonucleotide
ggauuauccaacacaacaa

SEQ ID NO: 1979022 - RNA, 19 nt, Artificial Sequence
  Description of Artificial Sequence: Synthetic oligonucleotide
acaguguagccugcaaaca

SEQ ID NO: 1979023 - RNA, 19 nt, Artificial Sequence
  Description of Artificial Sequence: Synthetic oligonucleotide
cacagugagacuggcucag

SEQ ID NO: 1979024 - RNA, 19 nt, Artificial Sequence
  Description of Artificial Sequence: Synthetic oligonucleotide
acacuucacaguguagccu

SEQ ID NO: 1979025 - RNA, 19 nt, Artificial Sequence
  Description of Artificial Sequence: Synthetic oligonucleotide
aggguaagccgaaagcagu

SEQ ID NO: 1979026 - RNA, 19 nt, Artificial Sequence
  Description of Artificial Sequence: Synthetic oligonucleotide
ucgaaaggaaaagggccuc

SEQ ID NO: 1979027 - RNA, 19 nt, Artificial Sequence
  Description of Artificial Sequence: Synthetic oligonucleotide
cagaaacuauggcaggcca

SEQ ID NO: 1979028 - RNA, 19 nt, Artificial Sequence
  Description of Artificial Sequence: Synthetic oligonucleotide
gauuucuggcaucucuccu

SEQ ID NO: 1979029 - RNA, 19 nt, Artificial Sequence
  Description of Artificial Sequence: Synthetic oligonucleotide
cugcuaugauguaaauaca

SEQ ID NO: 1979030 - RNA, 19 nt, Artificial Sequence
  Description of Artificial Sequence: Synthetic oligonucleotide
gggaacucuuccauguaag

SEQ ID NO: 1979031 - RNA, 19 nt, Artificial Sequence
  Description of Artificial Sequence: Synthetic oligonucleotide
ccugguccuuuaaauauug

SEQ ID NO: 1979032 - RNA, 19 nt, Artificial Sequence
  Description of Artificial Sequence: Synthetic oligonucleotide
uugcucagcacagcaggga

SEQ ID NO: 1979033 - RNA, 19 nt, Artificial Sequence
  Description of Artificial Sequence: Synthetic oligonucleotide
guuggcauucugggcagcc

SEQ ID NO: 1979034 - RNA, 19 nt, Artificial Sequence
  Description of Artificial Sequence: Synthetic oligonucleotide
auccaagauagaaucccgu

SEQ ID NO: 1979035 - RNA, 19 nt, Artificial Sequence
  Description of Artificial Sequence: Synthetic oligonucleotide
cuuaacaguggggaaaggu

SEQ ID NO: 1979036 - RNA, 19 nt, Artificial Sequence
  Description of Artificial Sequence: Synthetic oligonucleotide
guacuuuaauauccaagau

SEQ ID NO: 1979037 - RNA, 19 nt, Artificial Sequence
  Description of Artificial Sequence: Synthetic oligonucleotide
ggauacagcauucuuuuau

SEQ ID NO: 1979038 - RNA, 19 nt, Artificial Sequence
  Description of Artificial Sequence: Synthetic oligonucleotide
agacagauguacagcacaa

SEQ ID NO: 1979039 - RNA, 19 nt, Artificial Sequence
  Description of Artificial Sequence: Synthetic oligonucleotide
acauggagacagauguaca

SEQ ID NO: 1979040 - RNA, 19 nt, Artificial Sequence
  Description of Artificial Sequence: Synthetic oligonucleotide
gggcuauuuagcucuugug

SEQ ID NO: 1979041 - RNA, 19 nt, Artificial Sequence
  Description of Artificial Sequence: Synthetic oligonucleotide
uaaccgcuuuauacauuaa

SEQ ID NO: 1979042 - RNA, 19 nt, Artificial Sequence
  Description of Artificial Sequence: Synthetic oligonucleotide
gaacucuuccauguaagau

SEQ ID NO: 1979043 - RNA, 19 nt, Artificial Sequence
  Description of Artificial Sequence: Synthetic oligonucleotide
ggaacucuuccauguaaga

SEQ ID NO: 1979044 - RNA, 19 nt, Artificial Sequence
  Description of Artificial Sequence: Synthetic oligonucleotide
gcucaggguaagccgaaag

SEQ ID NO: 1979045 - RNA, 19 nt, Artificial Sequence
  Description of Artificial Sequence: Synthetic oligonucleotide
uggauacagcauucuuuua

SEQ ID NO: 1979046 - RNA, 19 nt, Artificial Sequence
  Description of Artificial Sequence: Synthetic oligonucleotide
caucuuugcucagcacagc

SEQ ID NO: 1979047 - RNA, 19 nt, Artificial Sequence
  Description of Artificial Sequence: Synthetic oligonucleotide
ccucagagcgucacugagg

SEQ ID NO: 1979048 - RNA, 19 nt, Artificial Sequence
  Description of Artificial Sequence: Synthetic oligonucleotide
ccaagauagaaucccguga

SEQ ID NO: 1979049 - RNA, 19 nt, Artificial Sequence
  Description of Artificial Sequence: Synthetic oligonucleotide
caguugucuaaagggagca

SEQ ID NO: 1979050 - RNA, 19 nt, Artificial Sequence
  Description of Artificial Sequence: Synthetic oligonucleotide
agaaagggagagucaccuu

SEQ ID NO: 1979051 - RNA, 19 nt, Artificial Sequence
  Description of Artificial Sequence: Synthetic oligonucleotide
cuccugguccuuuaaauau

SEQ ID NO: 1979052 - RNA, 19 nt, Artificial Sequence
  Description of Artificial Sequence: Synthetic oligonucleotide
cuauuuagcucuuguggau

SEQ ID NO: 1979053 - RNA, 19 nt, Artificial Sequence
  Description of Artificial Sequence: Synthetic oligonucleotide
cauucugggcagccuggac

SEQ ID NO: 1979054 - RNA, 19 nt, Artificial Sequence
  Description of Artificial Sequence: Synthetic oligonucleotide
cuuucuacuauugcauagu

SEQ ID NO: 1979055 - RNA, 19 nt, Artificial Sequence
  Description of Artificial Sequence: Synthetic oligonucleotide
gcuaugauguaaauacaaa

SEQ ID NO: 1979056 - RNA, 19 nt, Artificial Sequence
  Description of Artificial Sequence: Synthetic oligonucleotide
gaaguccuaucagagcacu

SEQ ID NO: 1979057 - RNA, 19 nt, Artificial Sequence
  Description of Artificial Sequence: Synthetic oligonucleotide
ggggauggggcuauuuagc

SEQ ID NO: 1979058 - RNA, 19 nt, Artificial Sequence
  Description of Artificial Sequence: Synthetic oligonucleotide
aucccgugaauugggauua

SEQ ID NO: 1979059 - RNA, 19 nt, Artificial Sequence
  Description of Artificial Sequence: Synthetic oligonucleotide
auagucucccaagcagcca

SEQ ID NO: 1979060 - RNA, 19 nt, Artificial Sequence
  Description of Artificial Sequence: Synthetic oligonucleotide
gaucggauuucuggcaucu

SEQ ID NO: 1979061 - RNA, 19 nt, Artificial Sequence
  Description of Artificial Sequence: Synthetic oligonucleotide
gagcuuguguuaagcucug

SEQ ID NO: 1979062 - RNA, 19 nt, Artificial Sequence
  Description of Artificial Sequence: Synthetic oligonucleotide
acccaacauuacugugcuc

SEQ ID NO: 1979063 - RNA, 19 nt, Artificial Sequence
  Description of Artificial Sequence: Synthetic oligonucleotide
gcaguaugaggaauaguuc

SEQ ID NO: 1979064 - RNA, 19 nt, Artificial Sequence
  Description of Artificial Sequence: Synthetic oligonucleotide
agaaucccgugaauuggga

SEQ ID NO: 1979065 - RNA, 19 nt, Artificial Sequence
  Description of Artificial Sequence: Synthetic oligonucleotide
auguaagaucggauuucug

SEQ ID NO: 1979066 - RNA, 19 nt, Artificial Sequence
  Description of Artificial Sequence: Synthetic oligonucleotide
ugcacagcucuaugaucau

SEQ ID NO: 1979067 - RNA, 19 nt, Artificial Sequence
  Description of Artificial Sequence: Synthetic oligonucleotide
cuauugcauagucucccaa

SEQ ID NO: 1979068 - RNA, 19 nt, Artificial Sequence
  Description of Artificial Sequence: Synthetic oligonucleotide
gaaucccgugaauugggau

SEQ ID NO: 1979069 - RNA, 19 nt, Artificial Sequence
  Description of Artificial Sequence: Synthetic oligonucleotide
caauaagcaaucugucuuu

SEQ ID NO: 1979070 - RNA, 19 nt, Artificial Sequence
  Description of Artificial Sequence: Synthetic oligonucleotide
gucucuggaagugcauuca

SEQ ID NO: 1979071 - RNA, 19 nt, Artificial Sequence
  Description of Artificial Sequence: Synthetic oligonucleotide
cuguuucugcucuaugagu

SEQ ID NO: 1979072 - RNA, 19 nt, Artificial Sequence
  Description of Artificial Sequence: Synthetic oligonucleotide
cgugaauugggauuaucca

SEQ ID NO: 1979073 - RNA, 19 nt, Artificial Sequence
  Description of Artificial Sequence: Synthetic oligonucleotide
gaaaggaaaagggccucgu

SEQ ID NO: 1979074 - RNA, 19 nt, Artificial Sequence
  Description of Artificial Sequence: Synthetic oligonucleotide
agggccucguccaucagaa

SEQ ID NO: 1979075 - RNA, 19 nt, Artificial Sequence
  Description of Artificial Sequence: Synthetic oligonucleotide
guucgagagcuuguguuaa

SEQ ID NO: 1979076 - RNA, 19 nt, Artificial Sequence
  Description of Artificial Sequence: Synthetic oligonucleotide
cucggagaaugauguaaaa

SEQ ID NO: 1979077 - RNA, 19 nt, Artificial Sequence
  Description of Artificial Sequence: Synthetic oligonucleotide
cauguaagaucggauuucu

SEQ ID NO: 1979078 - RNA, 19 nt, Artificial Sequence
  Description of Artificial Sequence: Synthetic oligonucleotide
aucggauuucuggcaucuc

SEQ ID NO: 1979079 - RNA, 19 nt, Artificial Sequence
  Description of Artificial Sequence: Synthetic oligonucleotide
cuuccauguaagaucggau

SEQ ID NO: 1979080 - RNA, 19 nt, Artificial Sequence
  Description of Artificial Sequence: Synthetic oligonucleotide
uggcucaggguaagccgaa

SEQ ID NO: 1979081 - RNA, 19 nt, Artificial Sequence
  Description of Artificial Sequence: Synthetic oligonucleotide
ccaacauuacugugcucug

SEQ ID NO: 1979082 - RNA, 19 nt, Artificial Sequence
  Description of Artificial Sequence: Synthetic oligonucleotide
gcuacggcagucagaauga

SEQ ID NO: 1979083 - RNA, 19 nt, Artificial Sequence
  Description of Artificial Sequence: Synthetic oligonucleotide
cucugcuaugauguaaaua

SEQ ID NO: 1979084 - RNA, 19 nt, Artificial Sequence
  Description of Artificial Sequence: Synthetic oligonucleotide
ggaauaguucuuccucuua

SEQ ID NO: 1979085 - RNA, 19 nt, Artificial Sequence
  Description of Artificial Sequence: Synthetic oligonucleotide
ggggcuacggcagucagaa

SEQ ID NO: 1979086 - RNA, 19 nt, Artificial Sequence
  Description of Artificial Sequence: Synthetic oligonucleotide
ucagagcgucacugagggu

SEQ ID NO: 1979087 - RNA, 19 nt, Artificial Sequence
  Description of Artificial Sequence: Synthetic oligonucleotide
gggaguucgagagcuugug

SEQ ID NO: 1979088 - RNA, 19 nt, Artificial Sequence
  Description of Artificial Sequence: Synthetic oligonucleotide
ggagacagauguacagcac

SEQ ID NO: 1979089 - RNA, 19 nt, Artificial Sequence
  Description of Artificial Sequence: Synthetic oligonucleotide
acagacuguuucugcucua

SEQ ID NO: 1979090 - RNA, 19 nt, Artificial Sequence
  Description of Artificial Sequence: Synthetic oligonucleotide
uggggcuauuuagcucuug

SEQ ID NO: 1979091 - RNA, 19 nt, Artificial Sequence
  Description of Artificial Sequence: Synthetic oligonucleotide
cuauggcaggccacucaca

SEQ ID NO: 1979092 - RNA, 19 nt, Artificial Sequence
  Description of Artificial Sequence: Synthetic oligonucleotide
caaauacaacacagcacau

SEQ ID NO: 1979093 - RNA, 19 nt, Artificial Sequence
  Description of Artificial Sequence: Synthetic oligonucleotide
ccuaucagagcacugaguu

SEQ ID NO: 1979094 - RNA, 19 nt, Artificial Sequence
  Description of Artificial Sequence: Synthetic oligonucleotide
gcucugugugagugagggg

SEQ ID NO: 1979095 - RNA, 19 nt, Artificial Sequence
  Description of Artificial Sequence: Synthetic oligonucleotide
gggauggggcuauuuagcu

SEQ ID NO: 1979096 - RNA, 19 nt, Artificial Sequence
  Description of Artificial Sequence: Synthetic oligonucleotide
cacugccucagagcgucac

SEQ ID NO: 1979097 - RNA, 19 nt, Artificial Sequence
  Description of Artificial Sequence: Synthetic oligonucleotide
cgaaaggaaaagggccucg

SEQ ID NO: 1979098 - RNA, 19 nt, Artificial Sequence
  Description of Artificial Sequence: Synthetic oligonucleotide
ggggcuauuuagcucuugu

SEQ ID NO: 1979099 - RNA, 19 nt, Artificial Sequence
  Description of Artificial Sequence: Synthetic oligonucleotide
agcacagcagggaguucga

SEQ ID NO: 1979100 - RNA, 19 nt, Artificial Sequence
  Description of Artificial Sequence: Synthetic oligonucleotide
cgaaguccuaucagagcac

SEQ ID NO: 1979101 - RNA, 19 nt, Artificial Sequence
  Description of Artificial Sequence: Synthetic oligonucleotide
caaggggcuacggcaguca

SEQ ID NO: 1979102 - RNA, 19 nt, Artificial Sequence
  Description of Artificial Sequence: Synthetic oligonucleotide
ccucuuaacaguggggaaa

SEQ ID NO: 1979103 - RNA, 19 nt, Artificial Sequence
  Description of Artificial Sequence: Synthetic oligonucleotide
caucucggagaaugaugua

SEQ ID NO: 1979104 - RNA, 19 nt, Artificial Sequence
  Description of Artificial Sequence: Synthetic oligonucleotide
ccaccauauaaagguagca

SEQ ID NO: 1979105 - RNA, 19 nt, Artificial Sequence
  Description of Artificial Sequence: Synthetic oligonucleotide
gcaccaggggaagaugaca

SEQ ID NO: 1979106 - RNA, 19 nt, Artificial Sequence
  Description of Artificial Sequence: Synthetic oligonucleotide
caacauuacugugcucugu

SEQ ID NO: 1979107 - RNA, 19 nt, Artificial Sequence
  Description of Artificial Sequence: Synthetic oligonucleotide
cucagcacagcagggaguu

SEQ ID NO: 1979108 - RNA, 19 nt, Artificial Sequence
  Description of Artificial Sequence: Synthetic oligonucleotide
aggggcuacggcagucaga

SEQ ID NO: 1979109 - RNA, 19 nt, Artificial Sequence
  Description of Artificial Sequence: Synthetic oligonucleotide
cagcauucuuuuauuccuu

SEQ ID NO: 1979110 - RNA, 19 nt, Artificial Sequence
  Description of Artificial Sequence: Synthetic oligonucleotide
ggguaagccgaaagcagua

SEQ ID NO: 1979111 - RNA, 19 nt, Artificial Sequence
  Description of Artificial Sequence: Synthetic oligonucleotide
cagcucuaugaucaucuuu

SEQ ID NO: 1979112 - RNA, 19 nt, Artificial Sequence
  Description of Artificial Sequence: Synthetic oligonucleotide
ccgaaagcaguaugaggaa

SEQ ID NO: 1979113 - RNA, 19 nt, Artificial Sequence
  Description of Artificial Sequence: Synthetic oligonucleotide
ggggaagaugacagccuca

SEQ ID NO: 1979114 - RNA, 19 nt, Artificial Sequence
  Description of Artificial Sequence: Synthetic oligonucleotide
caguggggaaagguggcua

SEQ ID NO: 1979115 - RNA, 19 nt, Artificial Sequence
  Description of Artificial Sequence: Synthetic oligonucleotide
ucccgugaauugggauuau

SEQ ID NO: 1979116 - RNA, 19 nt, Artificial Sequence
  Description of Artificial Sequence: Synthetic oligonucleotide
gccucguccaucagaaacu

SEQ ID NO: 1979117 - RNA, 19 nt, Artificial Sequence
  Description of Artificial Sequence: Synthetic oligonucleotide
ggaagaugacagccucacu

SEQ ID NO: 1979118 - RNA, 19 nt, Artificial Sequence
  Description of Artificial Sequence: Synthetic oligonucleotide
gcacaugauuucaaguauu

SEQ ID NO: 1979119 - RNA, 19 nt, Artificial Sequence
  Description of Artificial Sequence: Synthetic oligonucleotide
cagacuguuucugcucuau

SEQ ID NO: 1979120 - RNA, 19 nt, Artificial Sequence
  Description of Artificial Sequence: Synthetic oligonucleotide
cuacggcagucagaaugaa

SEQ ID NO: 1979121 - RNA, 19 nt, Artificial Sequence
  Description of Artificial Sequence: Synthetic oligonucleotide
gaagggcacaaagcugcuu

SEQ ID NO: 1979122 - RNA, 19 nt, Artificial Sequence
  Description of Artificial Sequence: Synthetic oligonucleotide
gguaagccgaaagcaguau

SEQ ID NO: 1979123 - RNA, 19 nt, Artificial Sequence
  Description of Artificial Sequence: Synthetic oligonucleotide
gagcgucacugagggucuc

SEQ ID NO: 1979124 - RNA, 19 nt, Artificial Sequence
  Description of Artificial Sequence: Synthetic oligonucleotide
gcucuaugagucagaugcu

SEQ ID NO: 1979125 - RNA, 19 nt, Artificial Sequence
  Description of Artificial Sequence: Synthetic oligonucleotide
auggggcuauuuagcucuu

SEQ ID NO: 1979126 - RNA, 19 nt, Artificial Sequence
  Description of Artificial Sequence: Synthetic oligonucleotide
gcucugcuaugauguaaau

SEQ ID NO: 1979127 - RNA, 19 nt, Artificial Sequence
  Description of Artificial Sequence: Synthetic oligonucleotide
ccucguccaucagaaacua

SEQ ID NO: 1979128 - RNA, 19 nt, Artificial Sequence
  Description of Artificial Sequence: Synthetic oligonucleotide
ggcucaggguaagccgaaa

SEQ ID NO: 1979129 - RNA, 19 nt, Artificial Sequence
  Description of Artificial Sequence: Synthetic oligonucleotide
cauucacaucucggagaau

SEQ ID NO: 1979130 - RNA, 19 nt, Artificial Sequence
  Description of Artificial Sequence: Synthetic oligonucleotide
gggccucguccaucagaaa

SEQ ID NO: 1979131 - RNA, 19 nt, Artificial Sequence
  Description of Artificial Sequence: Synthetic oligonucleotide
ggacugcugccaggacucu

SEQ ID NO: 1979132 - RNA, 19 nt, Artificial Sequence
  Description of Artificial Sequence: Synthetic oligonucleotide
gggcuacggcagucagaau

SEQ ID NO: 1979133 - RNA, 19 nt, Artificial Sequence
  Description of Artificial Sequence: Synthetic oligonucleotide
aaucauuuaguguugaucg

SEQ ID NO: 1979134 - RNA, 19 nt, Artificial Sequence
  Description of Artificial Sequence: Synthetic oligonucleotide
uuuauauucaaucauuuag

SEQ ID NO: 1979135 - RNA, 19 nt, Artificial Sequence
  Description of Artificial Sequence: Synthetic oligonucleotide
aaguuuacguuguugaggc

SEQ ID NO: 1979136 - RNA, 19 nt, Artificial Sequence
  Description of Artificial Sequence: Synthetic oligonucleotide
aauuuacucauuuacucac

SEQ ID NO: 1979137 - RNA, 19 nt, Artificial Sequence
  Description of Artificial Sequence: Synthetic oligonucleotide
uuagaaguuaauuuguggg

SEQ ID NO: 1979138 - RNA, 19 nt, Artificial Sequence
  Description of Artificial Sequence: Synthetic oligonucleotide
aaauauagcuacaaggucg

SEQ ID NO: 1979139 - RNA, 19 nt, Artificial Sequence
  Description of Artificial Sequence: Synthetic oligonucleotide
ugaaacacagguaaagucc

SEQ ID NO: 1979140 - RNA, 19 nt, Artificial Sequence
  Description of Artificial Sequence: Synthetic oligonucleotide
auuuaaguggucugggucc

SEQ ID NO: 1979141 - RNA, 19 nt, Artificial Sequence
  Description of Artificial Sequence: Synthetic oligonucleotide
uauucaaucauuuaguguu

SEQ ID NO: 1979142 - RNA, 19 nt, Artificial Sequence
  Description of Artificial Sequence: Synthetic oligonucleotide
ugaucguuagucuuaauag

SEQ ID NO: 1979143 - RNA, 19 nt, Artificial Sequence
  Description of Artificial Sequence: Synthetic oligonucleotide
ucauuuacucaccauaaag

SEQ ID NO: 1979144 - RNA, 19 nt, Artificial Sequence
  Description of Artificial Sequence: Synthetic oligonucleotide
uaaaauuaugaauagacuu

SEQ ID NO: 1979145 - RNA, 19 nt, Artificial Sequence
  Description of Artificial Sequence: Synthetic oligonucleotide
aaaggaauuccuuuuccag

SEQ ID NO: 1979146 - RNA, 19 nt, Artificial Sequence
  Description of Artificial Sequence: Synthetic oligonucleotide
aagcuuagaaguuaauuug

SEQ ID NO: 1979147 - RNA, 19 nt, Artificial Sequence
  Description of Artificial Sequence: Synthetic oligonucleotide
uuauauucaaucauuuagu

SEQ ID NO: 1979148 - RNA, 19 nt, Artificial Sequence
  Description of Artificial Sequence: Synthetic oligonucleotide
acuuguuugauuaauaaag

SEQ ID NO: 1979149 - RNA, 19 nt, Artificial Sequence
  Description of Artificial Sequence: Synthetic oligonucleotide
gauacuacaaacuauuaaa

SEQ ID NO: 1979150 - RNA, 19 nt, Artificial Sequence
  Description of Artificial Sequence: Synthetic oligonucleotide
uuaauuuacucauuuacuc

SEQ ID NO: 1979151 - RNA, 19 nt, Artificial Sequence
  Description of Artificial Sequence: Synthetic oligonucleotide
uuaaaauuaugaauagacu

SEQ ID NO: 1979152 - RNA, 19 nt, Artificial Sequence
  Description of Artificial Sequence: Synthetic oligonucleotide
uuacucaccauaaagauuu

SEQ ID NO: 1979153 - RNA, 19 nt, Artificial Sequence
  Description of Artificial Sequence: Synthetic oligonucleotide
auauaaaguaaauauucug

SEQ ID NO: 1979154 - RNA, 19 nt, Artificial Sequence
  Description of Artificial Sequence: Synthetic oligonucleotide
uaucaaauuacccuucugu

SEQ ID NO: 1979155 - RNA, 19 nt, Artificial Sequence
  Description of Artificial Sequence: Synthetic oligonucleotide
aggauauuguaccagcucg

SEQ ID NO: 1979156 - RNA, 19 nt, Artificial Sequence
  Description of Artificial Sequence: Synthetic oligonucleotide
uguuugauuaauaaagcau

SEQ ID NO: 1979157 - RNA, 19 nt, Artificial Sequence
  Description of Artificial Sequence: Synthetic oligonucleotide
caaauuacccuucuguagg

SEQ ID NO: 1979158 - RNA, 19 nt, Artificial Sequence
  Description of Artificial Sequence: Synthetic oligonucleotide
auaaaguaaauauucugca

SEQ ID NO: 1979159 - RNA, 19 nt, Artificial Sequence
  Description of Artificial Sequence: Synthetic oligonucleotide
agagcagugacauuaaggu

SEQ ID NO: 1979160 - RNA, 19 nt, Artificial Sequence
  Description of Artificial Sequence: Synthetic oligonucleotide
ugauuaauaaagcauuuua

SEQ ID NO: 1979161 - RNA, 19 nt, Artificial Sequence
  Description of Artificial Sequence: Synthetic oligonucleotide
cuuagaaguuaauuugugg

SEQ ID NO: 1979162 - RNA, 19 nt, Artificial Sequence
  Description of Artificial Sequence: Synthetic oligonucleotide
cauuaagguagcuugaaac

SEQ ID NO: 1979163 - RNA, 19 nt, Artificial Sequence
  Description of Artificial Sequence: Synthetic oligonucleotide
agaaguuaauuuguggggc

SEQ ID NO: 1979164 - RNA, 19 nt, Artificial Sequence
  Description of Artificial Sequence: Synthetic oligonucleotide
aaaucggcugucucuaggg

SEQ ID NO: 1979165 - RNA, 19 nt, Artificial Sequence
  Description of Artificial Sequence: Synthetic oligonucleotide
cuuguuugauuaauaaagc

SEQ ID NO: 1979166 - RNA, 19 nt, Artificial Sequence
  Description of Artificial Sequence: Synthetic oligonucleotide
auaaagauuuaaaauguuc

SEQ ID NO: 1979167 - RNA, 19 nt, Artificial Sequence
  Description of Artificial Sequence: Synthetic oligonucleotide
uuuaguguugaucguuagg

SEQ ID NO: 1979168 - RNA, 19 nt, Artificial Sequence
  Description of Artificial Sequence: Synthetic oligonucleotide
aauauagcuacaaggucgg

SEQ ID NO: 1979169 - RNA, 19 nt, Artificial Sequence
  Description of Artificial Sequence: Synthetic oligonucleotide
aaaggagguuuccaccagc

SEQ ID NO: 1979170 - RNA, 19 nt, Artificial Sequence
  Description of Artificial Sequence: Synthetic oligonucleotide
aaauuaugaauagacuucu

SEQ ID NO: 1979171 - RNA, 19 nt, Artificial Sequence
  Description of Artificial Sequence: Synthetic oligonucleotide
uaauuuacucauuuacuca

SEQ ID NO: 1979172 - RNA, 19 nt, Artificial Sequence
  Description of Artificial Sequence: Synthetic oligonucleotide
aaaaggaauuccuuuucca

SEQ ID NO: 1979173 - RNA, 19 nt, Artificial Sequence
  Description of Artificial Sequence: Synthetic oligonucleotide
uuuaaucacauaauauaaa

SEQ ID NO: 1979174 - RNA, 19 nt, Artificial Sequence
  Description of Artificial Sequence: Synthetic oligonucleotide
gugacauuaagguagcuug

SEQ ID NO: 1979175 - RNA, 19 nt, Artificial Sequence
  Description of Artificial Sequence: Synthetic oligonucleotide
uauuguaccagcucggccu

SEQ ID NO: 1979176 - RNA, 19 nt, Artificial Sequence
  Description of Artificial Sequence: Synthetic oligonucleotide
auuaagguagcuugaaaca

SEQ ID NO: 1979177 - RNA, 19 nt, Artificial Sequence
  Description of Artificial Sequence: Synthetic oligonucleotide
aaauuacccuucuguaggg

SEQ ID NO: 1979178 - RNA, 19 nt, Artificial Sequence
  Description of Artificial Sequence: Synthetic oligonucleotide
uuugagaaggagacgagcu

SEQ ID NO: 1979179 - RNA, 19 nt, Artificial Sequence
  Description of Artificial Sequence: Synthetic oligonucleotide
uuaguguugaucguuagga

SEQ ID NO: 1979180 - RNA, 19 nt, Artificial Sequence
  Description of Artificial Sequence: Synthetic oligonucleotide
gaaguuuacguuguugagg

SEQ ID NO: 1979181 - RNA, 19 nt, Artificial Sequence
  Description of Artificial Sequence: Synthetic oligonucleotide
aguguugaucguuaggaag

SEQ ID NO: 1979182 - RNA, 19 nt, Artificial Sequence
  Description of Artificial Sequence: Synthetic oligonucleotide
agcauuuuauauucaauca

SEQ ID NO: 1979183 - RNA, 19 nt, Artificial Sequence
  Description of Artificial Sequence: Synthetic oligonucleotide
uuguuugauuaauaaagca

SEQ ID NO: 1979184 - RNA, 19 nt, Artificial Sequence
  Description of Artificial Sequence: Synthetic oligonucleotide
aagagcagugacauuaagg

SEQ ID NO: 1979185 - RNA, 19 nt, Artificial Sequence
  Description of Artificial Sequence: Synthetic oligonucleotide
uaugcgauacuacaaacua

SEQ ID NO: 1979186 - RNA, 19 nt, Artificial Sequence
  Description of Artificial Sequence: Synthetic oligonucleotide
uuuggaaucggcuguaggu

SEQ ID NO: 1979187 - RNA, 19 nt, Artificial Sequence
  Description of Artificial Sequence: Synthetic oligonucleotide
aaaagaagagaggggaaag

SEQ ID NO: 1979188 - RNA, 19 nt, Artificial Sequence
  Description of Artificial Sequence: Synthetic oligonucleotide
ucaaaggcugcuucuaugc

SEQ ID NO: 1979189 - RNA, 19 nt, Artificial Sequence
  Description of Artificial Sequence: Synthetic oligonucleotide
aucguuaggaaguuuacgu

SEQ ID NO: 1979190 - RNA, 19 nt, Artificial Sequence
  Description of Artificial Sequence: Synthetic oligonucleotide
agucuuaauagucuguggu

SEQ ID NO: 1979191 - RNA, 19 nt, Artificial Sequence
  Description of Artificial Sequence: Synthetic oligonucleotide
auuuguggggcccuucggc

SEQ ID NO: 1979192 - RNA, 19 nt, Artificial Sequence
  Description of Artificial Sequence: Synthetic oligonucleotide
uuaugaauagacuucuuuu

SEQ ID NO: 1979193 - RNA, 19 nt, Artificial Sequence
  Description of Artificial Sequence: Synthetic oligonucleotide
auauuguaccagcucggcc

SEQ ID NO: 1979194 - RNA, 19 nt, Artificial Sequence
  Description of Artificial Sequence: Synthetic oligonucleotide
uaugaauagacuucuuuua

SEQ ID NO: 1979195 - RNA, 19 nt, Artificial Sequence
  Description of Artificial Sequence: Synthetic oligonucleotide
cauuuaaucacauaauaua

SEQ ID NO: 1979196 - RNA, 19 nt, Artificial Sequence
  Description of Artificial Sequence: Synthetic oligonucleotide
uacaaggucgguaucaaau

SEQ ID NO: 1979197 - RNA, 19 nt, Artificial Sequence
  Description of Artificial Sequence: Synthetic oligonucleotide
gauuuaaguggucuggguc

SEQ ID NO: 1979198 - RNA, 19 nt, Artificial Sequence
  Description of Artificial Sequence: Synthetic oligonucleotide
aggaaguuuacguuguuga

SEQ ID NO: 1979199 - RNA, 19 nt, Artificial Sequence
  Description of Artificial Sequence: Synthetic oligonucleotide
aauauuaccacuggacgau

SEQ ID NO: 1979200 - RNA, 19 nt, Artificial Sequence
  Description of Artificial Sequence: Synthetic oligonucleotide
cacuggacgauuuacaguc

SEQ ID NO: 1979201 - RNA, 19 nt, Artificial Sequence
  Description of Artificial Sequence: Synthetic oligonucleotide
uguagguuugucuuccucu

SEQ ID NO: 1979202 - RNA, 19 nt, Artificial Sequence
  Description of Artificial Sequence: Synthetic oligonucleotide
aauauaagcuuagaaguua

SEQ ID NO: 1979203 - RNA, 19 nt, Artificial Sequence
  Description of Artificial Sequence: Synthetic oligonucleotide
aagcgcagaacccucaaga

SEQ ID NO: 1979204 - RNA, 19 nt, Artificial Sequence
  Description of Artificial Sequence: Synthetic oligonucleotide
uuugauuaauaaagcauuu

SEQ ID NO: 1979205 - RNA, 19 nt, Artificial Sequence
  Description of Artificial Sequence: Synthetic oligonucleotide
acgauuuacagucaggaua

SEQ ID NO: 1979206 - RNA, 19 nt, Artificial Sequence
  Description of Artificial Sequence: Synthetic oligonucleotide
aagugcacuuguuugauua

SEQ ID NO: 1979207 - RNA, 19 nt, Artificial Sequence
  Description of Artificial Sequence: Synthetic oligonucleotide
cauuuacucaccauaaaga

SEQ ID NO: 1979208 - RNA, 19 nt, Artificial Sequence
  Description of Artificial Sequence: Synthetic oligonucleotide
auuuaaucacauaauauaa

SEQ ID NO: 1979209 - RNA, 19 nt, Artificial Sequence
  Description of Artificial Sequence: Synthetic oligonucleotide
aauuuguggggcccuucgg

SEQ ID NO: 1979210 - RNA, 19 nt, Artificial Sequence
  Description of Artificial Sequence: Synthetic oligonucleotide
aaaggcugcuucuaugcga

SEQ ID NO: 1979211 - RNA, 19 nt, Artificial Sequence
  Description of Artificial Sequence: Synthetic oligonucleotide
aaggucgguaucaaauuac

SEQ ID NO: 1979212 - RNA, 19 nt, Artificial Sequence
  Description of Artificial Sequence: Synthetic oligonucleotide
acguuguugaggcaaauca

SEQ ID NO: 1979213 - RNA, 19 nt, Artificial Sequence
  Description of Artificial Sequence: Synthetic oligonucleotide
auagcuacaaggucgguau

SEQ ID NO: 1979214 - RNA, 19 nt, Artificial Sequence
  Description of Artificial Sequence: Synthetic oligonucleotide
uaagguagcuugaaacaca

SEQ ID NO: 1979215 - RNA, 19 nt, Artificial Sequence
  Description of Artificial Sequence: Synthetic oligonucleotide
guucaagugcacuuguuug

SEQ ID NO: 1979216 - RNA, 19 nt, Artificial Sequence
  Description of Artificial Sequence: Synthetic oligonucleotide
aucguuagucuuaauaguc

SEQ ID NO: 1979217 - RNA, 19 nt, Artificial Sequence
  Description of Artificial Sequence: Synthetic oligonucleotide
aauuacccuucuguagggc

SEQ ID NO: 1979218 - RNA, 19 nt, Artificial Sequence
  Description of Artificial Sequence: Synthetic oligonucleotide
ugcgauacuacaaacuauu

SEQ ID NO: 1979219 - RNA, 19 nt, Artificial Sequence
  Description of Artificial Sequence: Synthetic oligonucleotide
uuaagguagcuugaaacac

SEQ ID NO: 1979220 - RNA, 19 nt, Artificial Sequence
  Description of Artificial Sequence: Synthetic oligonucleotide
uugaucguuaggaaguuua

SEQ ID NO: 1979221 - RNA, 19 nt, Artificial Sequence
  Description of Artificial Sequence: Synthetic oligonucleotide
aaucggcugucucuagggg

SEQ ID NO: 1979222 - RNA, 19 nt, Artificial Sequence
  Description of Artificial Sequence: Synthetic oligonucleotide
uucuaugcgauacuacaaa

SEQ ID NO: 1979223 - RNA, 19 nt, Artificial Sequence
  Description of Artificial Sequence: Synthetic oligonucleotide
uagucuuaauagucugugg

SEQ ID NO: 1979224 - RNA, 19 nt, Artificial Sequence
  Description of Artificial Sequence: Synthetic oligonucleotide
ucuguagggcagcucaaag

SEQ ID NO: 1979225 - RNA, 19 nt, Artificial Sequence
  Description of Artificial Sequence: Synthetic oligonucleotide
ucuaugcgauacuacaaac

SEQ ID NO: 1979226 - RNA, 19 nt, Artificial Sequence
  Description of Artificial Sequence: Synthetic oligonucleotide
ucguuagucuuaauagucu

SEQ ID NO: 1979227 - RNA, 19 nt, Artificial Sequence
  Description of Artificial Sequence: Synthetic oligonucleotide
ucgauucuucucuuccugg

SEQ ID NO: 1979228 - RNA, 19 nt, Artificial Sequence
  Description of Artificial Sequence: Synthetic oligonucleotide
guggaaguaguccuggccc

SEQ ID NO: 1979229 - RNA, 19 nt, Artificial Sequence
  Description of Artificial Sequence: Synthetic oligonucleotide
gaucguuaggaaguuuacg

SEQ ID NO: 1979230 - RNA, 19 nt, Artificial Sequence
  Description of Artificial Sequence: Synthetic oligonucleotide
uaggguuuggaaucggcug

SEQ ID NO: 1979231 - RNA, 19 nt, Artificial Sequence
  Description of Artificial Sequence: Synthetic oligonucleotide
uuuacucaccauaaagauu

SEQ ID NO: 1979232 - RNA, 19 nt, Artificial Sequence
  Description of Artificial Sequence: Synthetic oligonucleotide
aaauauaagcuuagaaguu

SEQ ID NO: 1979233 - RNA, 19 nt, Artificial Sequence
  Description of Artificial Sequence: Synthetic oligonucleotide
uguugaggcaaaucaccag

SEQ ID NO: 1979234 - RNA, 19 nt, Artificial Sequence
  Description of Artificial Sequence: Synthetic oligonucleotide
ucuccgucuaccaggagcu

SEQ ID NO: 1979235 - RNA, 19 nt, Artificial Sequence
  Description of Artificial Sequence: Synthetic oligonucleotide
guuguugaggcaaaucacc

SEQ ID NO: 1979236 - RNA, 19 nt, Artificial Sequence
  Description of Artificial Sequence: Synthetic oligonucleotide
aagguagcuugaaacacag

SEQ ID NO: 1979237 - RNA, 19 nt, Artificial Sequence
  Description of Artificial Sequence: Synthetic oligonucleotide
ccaauauuaccacuggacg

SEQ ID NO: 1979238 - RNA, 19 nt, Artificial Sequence
  Description of Artificial Sequence: Synthetic oligonucleotide
uuuuaccugucucuccgug

SEQ ID NO: 1979239 - RNA, 19 nt, Artificial Sequence
  Description of Artificial Sequence: Synthetic oligonucleotide
auuuacucauuuacucacc

SEQ ID NO: 1979240 - RNA, 19 nt, Artificial Sequence
  Description of Artificial Sequence: Synthetic oligonucleotide
uguucaagugcacuuguuu

SEQ ID NO: 1979241 - RNA, 19 nt, Artificial Sequence
  Description of Artificial Sequence: Synthetic oligonucleotide
augaauagacuucuuuuaa

SEQ ID NO: 1979242 - RNA, 19 nt, Artificial Sequence
  Description of Artificial Sequence: Synthetic oligonucleotide
uuacccuucuguagggcag

SEQ ID NO: 1979243 - RNA, 19 nt, Artificial Sequence
  Description of Artificial Sequence: Synthetic oligonucleotide
cuguagggcagcucaaagg

SEQ ID NO: 1979244 - RNA, 19 nt, Artificial Sequence
  Description of Artificial Sequence: Synthetic oligonucleotide
cagggaaacauuugagaag

SEQ ID NO: 1979245 - RNA, 19 nt, Artificial Sequence
  Description of Artificial Sequence: Synthetic oligonucleotide
cucgccaauauuaccacug

SEQ ID NO: 1979246 - RNA, 19 nt, Artificial Sequence
  Description of Artificial Sequence: Synthetic oligonucleotide
ucgccaauauuaccacugg

SEQ ID NO: 1979247 - RNA, 19 nt, Artificial Sequence
  Description of Artificial Sequence: Synthetic oligonucleotide
ugacauuaagguagcuuga

SEQ ID NO: 1979248 - RNA, 19 nt, Artificial Sequence
  Description of Artificial Sequence: Synthetic oligonucleotide
aaagcgcagaacccucaag

SEQ ID NO: 1979249 - RNA, 19 nt, Artificial Sequence
  Description of Artificial Sequence: Synthetic oligonucleotide
aaguaguccuggcccgggc

SEQ ID NO: 1979250 - RNA, 19 nt, Artificial Sequence
  Description of Artificial Sequence: Synthetic oligonucleotide
ucuaggguuuggaaucggc

SEQ ID NO: 1979251 - RNA, 19 nt, Artificial Sequence
  Description of Artificial Sequence: Synthetic oligonucleotide
ucaggauauuguaccagcu

SEQ ID NO: 1979252 - RNA, 19 nt, Artificial Sequence
  Description of Artificial Sequence: Synthetic oligonucleotide
aucaaauuacccuucugua

SEQ ID NO: 1979253 - RNA, 19 nt, Artificial Sequence
  Description of Artificial Sequence: Synthetic oligonucleotide
ugagaaggagacgagcucu

SEQ ID NO: 1979254 - RNA, 19 nt, Artificial Sequence
  Description of Artificial Sequence: Synthetic oligonucleotide
caauauuaccacuggacga

SEQ ID NO: 1979255 - RNA, 19 nt, Artificial Sequence
  Description of Artificial Sequence: Synthetic oligonucleotide
gaggcaaaucaccagcuca

SEQ ID NO: 1979256 - RNA, 19 nt, Artificial Sequence
  Description of Artificial Sequence: Synthetic oligonucleotide
gucaggauauuguaccagc

SEQ ID NO: 1979257 - RNA, 19 nt, Artificial Sequence
  Description of Artificial Sequence: Synthetic oligonucleotide
uuucaaagcgcagaacccu

SEQ ID NO: 1979258 - RNA, 19 nt, Artificial Sequence
  Description of Artificial Sequence: Synthetic oligonucleotide
acauuuaaucacauaauau

SEQ ID NO: 1979259 - RNA, 19 nt, Artificial Sequence
  Description of Artificial Sequence: Synthetic oligonucleotide
ucgguaucaaauuacccuu

SEQ ID NO: 1979260 - RNA, 19 nt, Artificial Sequence
  Description of Artificial Sequence: Synthetic oligonucleotide
uaugcugaucguuagucuu

SEQ ID NO: 1979261 - RNA, 19 nt, Artificial Sequence
  Description of Artificial Sequence: Synthetic oligonucleotide
auuacccuucuguagggca

SEQ ID NO: 1979262 - RNA, 19 nt, Artificial Sequence
  Description of Artificial Sequence: Synthetic oligonucleotide
caaaucaccagcucagaca

SEQ ID NO: 1979263 - RNA, 19 nt, Artificial Sequence
  Description of Artificial Sequence: Synthetic oligonucleotide
aaggagacgagcucugauu

SEQ ID NO: 1979264 - RNA, 19 nt, Artificial Sequence
  Description of Artificial Sequence: Synthetic oligonucleotide
uugaggcaaaucaccagcu

SEQ ID NO: 1979265 - RNA, 19 nt, Artificial Sequence
  Description of Artificial Sequence: Synthetic oligonucleotide
uuaauagucugugguaaaa

SEQ ID NO: 1979266 - RNA, 19 nt, Artificial Sequence
  Description of Artificial Sequence: Synthetic oligonucleotide
cauaugcugaucguuaguc

SEQ ID NO: 1979267 - RNA, 19 nt, Artificial Sequence
  Description of Artificial Sequence: Synthetic oligonucleotide
gauauuguaccagcucggc

SEQ ID NO: 1979268 - RNA, 19 nt, Artificial Sequence
  Description of Artificial Sequence: Synthetic oligonucleotide
ccaaaucccuuucaaagcg

SEQ ID NO: 1979269 - RNA, 19 nt, Artificial Sequence
  Description of Artificial Sequence: Synthetic oligonucleotide
aggucgguaucaaauuacc

SEQ ID NO: 1979270 - RNA, 19 nt, Artificial Sequence
  Description of Artificial Sequence: Synthetic oligonucleotide
auaagcuuagaaguuaauu

SEQ ID NO: 1979271 - RNA, 19 nt, Artificial Sequence
  Description of Artificial Sequence: Synthetic oligonucleotide
uuuacguuguugaggcaaa

SEQ ID NO: 1979272 - RNA, 19 nt, Artificial Sequence
  Description of Artificial Sequence: Synthetic oligonucleotide
gaaaggagguuuccaccag

SEQ ID NO: 1979273 - RNA, 19 nt, Artificial Sequence
  Description of Artificial Sequence: Synthetic oligonucleotide
gcccaaaucccuuucaaag

SEQ ID NO: 1979274 - RNA, 19 nt, Artificial Sequence
  Description of Artificial Sequence: Synthetic oligonucleotide
uuuuccagcucuaggguuu

SEQ ID NO: 1979275 - RNA, 19 nt, Artificial Sequence
  Description of Artificial Sequence: Synthetic oligonucleotide
uuuaccugucucuccguga

SEQ ID NO: 1979276 - RNA, 19 nt, Artificial Sequence
  Description of Artificial Sequence: Synthetic oligonucleotide
caccagcauaugcugaucg

SEQ ID NO: 1979277 - RNA, 19 nt, Artificial Sequence
  Description of Artificial Sequence: Synthetic oligonucleotide
cugauuuaaguggucuggg

SEQ ID NO: 1979278 - RNA, 19 nt, Artificial Sequence
  Description of Artificial Sequence: Synthetic oligonucleotide
agcgcagaacccucaagag

SEQ ID NO: 1979279 - RNA, 19 nt, Artificial Sequence
  Description of Artificial Sequence: Synthetic oligonucleotide
auaugcugaucguuagucu

SEQ ID NO: 1979280 - RNA, 19 nt, Artificial Sequence
  Description of Artificial Sequence: Synthetic oligonucleotide
auuguaccagcucggccuc

SEQ ID NO: 1979281 - RNA, 19 nt, Artificial Sequence
  Description of Artificial Sequence: Synthetic oligonucleotide
caaaucccuuucaaagcgc

SEQ ID NO: 1979282 - RNA, 19 nt, Artificial Sequence
  Description of Artificial Sequence: Synthetic oligonucleotide
uccuggucagauaaggguu

SEQ ID NO: 1979283 - RNA, 19 nt, Artificial Sequence
  Description of Artificial Sequence: Synthetic oligonucleotide
guaaauauucugcaggcau

SEQ ID NO: 1979284 - RNA, 19 nt, Artificial Sequence
  Description of Artificial Sequence: Synthetic oligonucleotide
aaaucccuuucaaagcgca

SEQ ID NO: 1979285 - RNA, 19 nt, Artificial Sequence
  Description of Artificial Sequence: Synthetic oligonucleotide
gaauagacuucuuuuaauu

SEQ ID NO: 1979286 - RNA, 19 nt, Artificial Sequence
  Description of Artificial Sequence: Synthetic oligonucleotide
ugcacuuguuugauuaaua

SEQ ID NO: 1979287 - RNA, 19 nt, Artificial Sequence
  Description of Artificial Sequence: Synthetic oligonucleotide
uaccacuggacgauuuaca

SEQ ID NO: 1979288 - RNA, 19 nt, Artificial Sequence
  Description of Artificial Sequence: Synthetic oligonucleotide
cucaccauaaagauuuaaa

SEQ ID NO: 1979289 - RNA, 19 nt, Artificial Sequence
  Description of Artificial Sequence: Synthetic oligonucleotide
uaggaaguuuacguuguug

SEQ ID NO: 1979290 - RNA, 19 nt, Artificial Sequence
  Description of Artificial Sequence: Synthetic oligonucleotide
gucgguaucaaauuacccu

SEQ ID NO: 1979291 - RNA, 19 nt, Artificial Sequence
  Description of Artificial Sequence: Synthetic oligonucleotide
cauuugagaaggagacgag

SEQ ID NO: 1979292 - RNA, 19 nt, Artificial Sequence
  Description of Artificial Sequence: Synthetic oligonucleotide
uuuguggggcccuucggcu

SEQ ID NO: 1979293 - RNA, 19 nt, Artificial Sequence
  Description of Artificial Sequence: Synthetic oligonucleotide
gugugcgagaccucgauuc

SEQ ID NO: 1979294 - RNA, 19 nt, Artificial Sequence
  Description of Artificial Sequence: Synthetic oligonucleotide
uucaaagcgcagaacccuc

SEQ ID NO: 1979295 - RNA, 19 nt, Artificial Sequence
  Description of Artificial Sequence: Synthetic oligonucleotide
uauaagcuuagaaguuaau

SEQ ID NO: 1979296 - RNA, 19 nt, Artificial Sequence
  Description of Artificial Sequence: Synthetic oligonucleotide
ucaaagcgcagaacccuca

SEQ ID NO: 1979297 - RNA, 19 nt, Artificial Sequence
  Description of Artificial Sequence: Synthetic oligonucleotide
caaaggcugcuucuaugcg

SEQ ID NO: 1979298 - RNA, 19 nt, Artificial Sequence
  Description of Artificial Sequence: Synthetic oligonucleotide
auacuacaaacuauuaaaa

SEQ ID NO: 1979299 - RNA, 19 nt, Artificial Sequence
  Description of Artificial Sequence: Synthetic oligonucleotide
aggguuuggaaucggcugu

SEQ ID NO: 1979300 - RNA, 19 nt, Artificial Sequence
  Description of Artificial Sequence: Synthetic oligonucleotide
uauagcuacaaggucggua

SEQ ID NO: 1979301 - RNA, 19 nt, Artificial Sequence
  Description of Artificial Sequence: Synthetic oligonucleotide
aucauuuaguguugaucgu

SEQ ID NO: 1979302 - RNA, 19 nt, Artificial Sequence
  Description of Artificial Sequence: Synthetic oligonucleotide
uugauuaauaaagcauuuu

SEQ ID NO: 1979303 - RNA, 19 nt, Artificial Sequence
  Description of Artificial Sequence: Synthetic oligonucleotide
ugcuucuaugcgauacuac

SEQ ID NO: 1979304 - RNA, 19 nt, Artificial Sequence
  Description of Artificial Sequence: Synthetic oligonucleotide
gaucguuagucuuaauagu

SEQ ID NO: 1979305 - RNA, 19 nt, Artificial Sequence
  Description of Artificial Sequence: Synthetic oligonucleotide
gagggugcggaggaggagg

SEQ ID NO: 1979306 - RNA, 19 nt, Artificial Sequence
  Description of Artificial Sequence: Synthetic oligonucleotide
guaucaaauuacccuucug

SEQ ID NO: 1979307 - RNA, 19 nt, Artificial Sequence
  Description of Artificial Sequence: Synthetic oligonucleotide
ggaaguuuacguuguugag

SEQ ID NO: 1979308 - RNA, 19 nt, Artificial Sequence
  Description of Artificial Sequence: Synthetic oligonucleotide
ucauuuaguguugaucguu

SEQ ID NO: 1979309 - RNA, 19 nt, Artificial Sequence
  Description of Artificial Sequence: Synthetic oligonucleotide
gagaccucgauucuucucu

SEQ ID NO: 1979310 - RNA, 19 nt, Artificial Sequence
  Description of Artificial Sequence: Synthetic oligonucleotide
ugugcgagaccucgauucu

SEQ ID NO: 1979311 - RNA, 19 nt, Artificial Sequence
  Description of Artificial Sequence: Synthetic oligonucleotide
cucgauucuucucuuccug

SEQ ID NO: 1979312 - RNA, 19 nt, Artificial Sequence
  Description of Artificial Sequence: Synthetic oligonucleotide
cuggacgauuuacagucag

SEQ ID NO: 1979313 - RNA, 19 nt, Artificial Sequence
  Description of Artificial Sequence: Synthetic oligonucleotide
agucaggauauuguaccag

SEQ ID NO: 1979314 - RNA, 19 nt, Artificial Sequence
  Description of Artificial Sequence: Synthetic oligonucleotide
gguaaaguccuuuccaaaa

SEQ ID NO: 1979315 - RNA, 19 nt, Artificial Sequence
  Description of Artificial Sequence: Synthetic oligonucleotide
gcuucuaugcgauacuaca

SEQ ID NO: 1979316 - RNA, 19 nt, Artificial Sequence
  Description of Artificial Sequence: Synthetic oligonucleotide
ucggccucuugcugggucg

SEQ ID NO: 1979317 - RNA, 19 nt, Artificial Sequence
  Description of Artificial Sequence: Synthetic oligonucleotide
uuaccacuggacgauuuac

SEQ ID NO: 1979318 - RNA, 19 nt, Artificial Sequence
  Description of Artificial Sequence: Synthetic oligonucleotide
cugaucguuagucuuaaua

SEQ ID NO: 1979319 - RNA, 19 nt, Artificial Sequence
  Description of Artificial Sequence: Synthetic oligonucleotide
uuuaaguggucuggguccu

SEQ ID NO: 1979320 - RNA, 19 nt, Artificial Sequence
  Description of Artificial Sequence: Synthetic oligonucleotide
ugcgagaccucgauucuuc

SEQ ID NO: 1979321 - RNA, 19 nt, Artificial Sequence
  Description of Artificial Sequence: Synthetic oligonucleotide
aucggcuguagguuugucu

SEQ ID NO: 1979322 - RNA, 19 nt, Artificial Sequence
  Description of Artificial Sequence: Synthetic oligonucleotide
aaacugggaacuuguccuu

SEQ ID NO: 1979323 - RNA, 19 nt, Artificial Sequence
  Description of Artificial Sequence: Synthetic oligonucleotide
uaguguugaucguuaggaa

SEQ ID NO: 1979324 - RNA, 19 nt, Artificial Sequence
  Description of Artificial Sequence: Synthetic oligonucleotide
uuuggguucuccguccuuc

SEQ ID NO: 1979325 - RNA, 19 nt, Artificial Sequence
  Description of Artificial Sequence: Synthetic oligonucleotide
guuuacguuguugaggcaa

SEQ ID NO: 1979326 - RNA, 19 nt, Artificial Sequence
  Description of Artificial Sequence: Synthetic oligonucleotide
auauaagcuuagaaguuaa

SEQ ID NO: 1979327 - RNA, 19 nt, Artificial Sequence
  Description of Artificial Sequence: Synthetic oligonucleotide
uauuaccacuggacgauuu

SEQ ID NO: 1979328 - RNA, 19 nt, Artificial Sequence
  Description of Artificial Sequence: Synthetic oligonucleotide
agguaaaguccuuuccaaa

SEQ ID NO: 1979329 - RNA, 19 nt, Artificial Sequence
  Description of Artificial Sequence: Synthetic oligonucleotide
aggcaaaucaccagcucag

SEQ ID NO: 1979330 - RNA, 19 nt, Artificial Sequence
  Description of Artificial Sequence: Synthetic oligonucleotide
uuacucauuuacucaccau

SEQ ID NO: 1979331 - RNA, 19 nt, Artificial Sequence
  Description of Artificial Sequence: Synthetic oligonucleotide
ggaaaggagguuuccacca

SEQ ID NO: 1979332 - RNA, 19 nt, Artificial Sequence
  Description of Artificial Sequence: Synthetic oligonucleotide
agugacauuaagguagcuu

SEQ ID NO: 1979333 - RNA, 19 nt, Artificial Sequence
  Description of Artificial Sequence: Synthetic oligonucleotide
ugucucuccgugagggcca

SEQ ID NO: 1979334 - RNA, 19 nt, Artificial Sequence
  Description of Artificial Sequence: Synthetic oligonucleotide
uaccagcucggccucuugc

SEQ ID NO: 1979335 - RNA, 19 nt, Artificial Sequence
  Description of Artificial Sequence: Synthetic oligonucleotide
agguggggcggccugguag

SEQ ID NO: 1979336 - RNA, 19 nt, Artificial Sequence
  Description of Artificial Sequence: Synthetic oligonucleotide
auaauacauuuaaucacau

SEQ ID NO: 1979337 - RNA, 19 nt, Artificial Sequence
  Description of Artificial Sequence: Synthetic oligonucleotide
ggauauuguaccagcucgg

SEQ ID NO: 1979338 - RNA, 19 nt, Artificial Sequence
  Description of Artificial Sequence: Synthetic oligonucleotide
aacugggaacuuguccuug

SEQ ID NO: 1979339 - RNA, 19 nt, Artificial Sequence
  Description of Artificial Sequence: Synthetic oligonucleotide
gggaaaggagguuuccacc

SEQ ID NO: 1979340 - RNA, 19 nt, Artificial Sequence
  Description of Artificial Sequence: Synthetic oligonucleotide
gccaauauuaccacuggac

SEQ ID NO: 1979341 - RNA, 19 nt, Artificial Sequence
  Description of Artificial Sequence: Synthetic oligonucleotide
cccaaaucccuuucaaagc

SEQ ID NO: 1979342 - RNA, 19 nt, Artificial Sequence
  Description of Artificial Sequence: Synthetic oligonucleotide
agcuacaaggucgguauca

SEQ ID NO: 1979343 - RNA, 19 nt, Artificial Sequence
  Description of Artificial Sequence: Synthetic oligonucleotide
aaggcugcuucuaugcgau

SEQ ID NO: 1979344 - RNA, 19 nt, Artificial Sequence
  Description of Artificial Sequence: Synthetic oligonucleotide
ucaagugcacuuguuugau

SEQ ID NO: 1979345 - RNA, 19 nt, Artificial Sequence
  Description of Artificial Sequence: Synthetic oligonucleotide
auuaccacuggacgauuua

SEQ ID NO: 1979346 - RNA, 19 nt, Artificial Sequence
  Description of Artificial Sequence: Synthetic oligonucleotide
uccucgccaauauuaccac

SEQ ID NO: 1979347 - RNA, 19 nt, Artificial Sequence
  Description of Artificial Sequence: Synthetic oligonucleotide
aucccuuucaaagcgcaga

SEQ ID NO: 1979348 - RNA, 19 nt, Artificial Sequence
  Description of Artificial Sequence: Synthetic oligonucleotide
uccgucuaccaggagcugc

SEQ ID NO: 1979349 - RNA, 19 nt, Artificial Sequence
  Description of Artificial Sequence: Synthetic oligonucleotide
cuuaauagucugugguaaa

SEQ ID NO: 1979350 - RNA, 19 nt, Artificial Sequence
  Description of Artificial Sequence: Synthetic oligonucleotide
uuggaaucggcuguagguu

SEQ ID NO: 1979351 - RNA, 19 nt, Artificial Sequence
  Description of Artificial Sequence: Synthetic oligonucleotide
guccucgccaauauuacca

SEQ ID NO: 1979352 - RNA, 19 nt, Artificial Sequence
  Description of Artificial Sequence: Synthetic oligonucleotide
uggaaucggcuguagguuu

SEQ ID NO: 1979353 - RNA, 19 nt, Artificial Sequence
  Description of Artificial Sequence: Synthetic oligonucleotide
cuuccucuccgucuaccag

SEQ ID NO: 1979354 - RNA, 19 nt, Artificial Sequence
  Description of Artificial Sequence: Synthetic oligonucleotide
cagcucggccucuugcugg

SEQ ID NO: 1979355 - RNA, 19 nt, Artificial Sequence
  Description of Artificial Sequence: Synthetic oligonucleotide
cguuaggaaguuuacguug

SEQ ID NO: 1979356 - RNA, 19 nt, Artificial Sequence
  Description of Artificial Sequence: Synthetic oligonucleotide
aauuaugaauagacuucuu

SEQ ID NO: 1979357 - RNA, 19 nt, Artificial Sequence
  Description of Artificial Sequence: Synthetic oligonucleotide
cuaugcgauacuacaaacu

SEQ ID NO: 1979358 - RNA, 19 nt, Artificial Sequence
  Description of Artificial Sequence: Synthetic oligonucleotide
ggugcggaggaggaggugg

SEQ ID NO: 1979359 - RNA, 19 nt, Artificial Sequence
  Description of Artificial Sequence: Synthetic oligonucleotide
gacauuaagguagcuugaa

SEQ ID NO: 1979360 - RNA, 19 nt, Artificial Sequence
  Description of Artificial Sequence: Synthetic oligonucleotide
accagcauaugcugaucgu

SEQ ID NO: 1979361 - RNA, 19 nt, Artificial Sequence
  Description of Artificial Sequence: Synthetic oligonucleotide
aaaccgcccaaaucccuuu

SEQ ID NO: 1979362 - RNA, 19 nt, Artificial Sequence
  Description of Artificial Sequence: Synthetic oligonucleotide
ccauaaagauuuaaaaugu

SEQ ID NO: 1979363 - RNA, 19 nt, Artificial Sequence
  Description of Artificial Sequence: Synthetic oligonucleotide
aaaaccgcccaaaucccuu

SEQ ID NO: 1979364 - RNA, 19 nt, Artificial Sequence
  Description of Artificial Sequence: Synthetic oligonucleotide
ggacgauuuacagucagga

SEQ ID NO: 1979365 - RNA, 19 nt, Artificial Sequence
  Description of Artificial Sequence: Synthetic oligonucleotide
aaucggcuguagguuuguc

SEQ ID NO: 1979366 - RNA, 19 nt, Artificial Sequence
  Description of Artificial Sequence: Synthetic oligonucleotide
uacguuguugaggcaaauc

SEQ ID NO: 1979367 - RNA, 19 nt, Artificial Sequence
  Description of Artificial Sequence: Synthetic oligonucleotide
guaguccuggcccgggccc

SEQ ID NO: 1979368 - RNA, 19 nt, Artificial Sequence
  Description of Artificial Sequence: Synthetic oligonucleotide
cagguaaaguccuuuccaa

SEQ ID NO: 1979369 - RNA, 19 nt, Artificial Sequence
  Description of Artificial Sequence: Synthetic oligonucleotide
uuaggaaguuuacguuguu

SEQ ID NO: 1979370 - RNA, 19 nt, Artificial Sequence
  Description of Artificial Sequence: Synthetic oligonucleotide
uuaauuuguggggcccuuc

SEQ ID NO: 1979371 - RNA, 19 nt, Artificial Sequence
  Description of Artificial Sequence: Synthetic oligonucleotide
gcuuagaaguuaauuugug

SEQ ID NO: 1979372 - RNA, 19 nt, Artificial Sequence
  Description of Artificial Sequence: Synthetic oligonucleotide
agcugcuuguggucucauc

SEQ ID NO: 1979373 - RNA, 19 nt, Artificial Sequence
  Description of Artificial Sequence: Synthetic oligonucleotide
cgaaacugggaacuugucc

SEQ ID NO: 1979374 - RNA, 19 nt, Artificial Sequence
  Description of Artificial Sequence: Synthetic oligonucleotide
gagcagugacauuaaggua

SEQ ID NO: 1979375 - RNA, 19 nt, Artificial Sequence
  Description of Artificial Sequence: Synthetic oligonucleotide
uucucuuccuggucagaua

SEQ ID NO: 1979376 - RNA, 19 nt, Artificial Sequence
  Description of Artificial Sequence: Synthetic oligonucleotide
cauaaagauuuaaaauguu

SEQ ID NO: 1979377 - RNA, 19 nt, Artificial Sequence
  Description of Artificial Sequence: Synthetic oligonucleotide
gaacccucaagagcaguga

SEQ ID NO: 1979378 - RNA, 19 nt, Artificial Sequence
  Description of Artificial Sequence: Synthetic oligonucleotide
guuaggaaguuuacguugu

SEQ ID NO: 1979379 - RNA, 19 nt, Artificial Sequence
  Description of Artificial Sequence: Synthetic oligonucleotide
cuguagguuugucuuccuc

SEQ ID NO: 1979380 - RNA, 19 nt, Artificial Sequence
  Description of Artificial Sequence: Synthetic oligonucleotide
gguggggcggccugguagg

SEQ ID NO: 1979381 - RNA, 19 nt, Artificial Sequence
  Description of Artificial Sequence: Synthetic oligonucleotide
ucuccguccuucgccuccg

SEQ ID NO: 1979382 - RNA, 19 nt, Artificial Sequence
  Description of Artificial Sequence: Synthetic oligonucleotide
aguuuacguuguugaggca

SEQ ID NO: 1979383 - RNA, 19 nt, Artificial Sequence
  Description of Artificial Sequence: Synthetic oligonucleotide
ugcugaucguuagucuuaa

SEQ ID NO: 1979384 - RNA, 19 nt, Artificial Sequence
  Description of Artificial Sequence: Synthetic oligonucleotide
caaggucgguaucaaauua

SEQ ID NO: 1979385 - RNA, 19 nt, Artificial Sequence
  Description of Artificial Sequence: Synthetic oligonucleotide
ggucgguaucaaauuaccc

SEQ ID NO: 1979386 - RNA, 19 nt, Artificial Sequence
  Description of Artificial Sequence: Synthetic oligonucleotide
cgcagaacccucaagagca

SEQ ID NO: 1979387 - RNA, 19 nt, Artificial Sequence
  Description of Artificial Sequence: Synthetic oligonucleotide
cguuagucuuaauagucug

SEQ ID NO: 1979388 - RNA, 19 nt, Artificial Sequence
  Description of Artificial Sequence: Synthetic oligonucleotide
uucuguagggcagcucaaa

SEQ ID NO: 1979389 - RNA, 19 nt, Artificial Sequence
  Description of Artificial Sequence: Synthetic oligonucleotide
cagucaggauauuguacca

SEQ ID NO: 1979390 - RNA, 19 nt, Artificial Sequence
  Description of Artificial Sequence: Synthetic oligonucleotide
cuaggguuuggaaucggcu

SEQ ID NO: 1979391 - RNA, 19 nt, Artificial Sequence
  Description of Artificial Sequence: Synthetic oligonucleotide
ggguucuccguccuucgcc

SEQ ID NO: 1979392 - RNA, 19 nt, Artificial Sequence
  Description of Artificial Sequence: Synthetic oligonucleotide
cucauuuacucaccauaaa

SEQ ID NO: 1979393 - RNA, 19 nt, Artificial Sequence
  Description of Artificial Sequence: Synthetic oligonucleotide
uacccuucuguagggcagc

SEQ ID NO: 1979394 - RNA, 19 nt, Artificial Sequence
  Description of Artificial Sequence: Synthetic oligonucleotide
agcucugauuuaagugguc

SEQ ID NO: 1979395 - RNA, 19 nt, Artificial Sequence
  Description of Artificial Sequence: Synthetic oligonucleotide
gguccucgccaauauuacc

SEQ ID NO: 1979396 - RNA, 19 nt, Artificial Sequence
  Description of Artificial Sequence: Synthetic oligonucleotide
gcgcagaacccucaagagc

SEQ ID NO: 1979397 - RNA, 19 nt, Artificial Sequence
  Description of Artificial Sequence: Synthetic oligonucleotide
accgcccaaaucccuuuca

SEQ ID NO: 1979398 - RNA, 19 nt, Artificial Sequence
  Description of Artificial Sequence: Synthetic oligonucleotide
cugcuuguggucucaucca

SEQ ID NO: 1979399 - RNA, 19 nt, Artificial Sequence
  Description of Artificial Sequence: Synthetic oligonucleotide
augcgauacuacaaacuau

SEQ ID NO: 1979400 - RNA, 19 nt, Artificial Sequence
  Description of Artificial Sequence: Synthetic oligonucleotide
uuguggggcccuucggcuc

SEQ ID NO: 1979401 - RNA, 19 nt, Artificial Sequence
  Description of Artificial Sequence: Synthetic oligonucleotide
uuuuggguucuccguccuu

SEQ ID NO: 1979402 - RNA, 19 nt, Artificial Sequence
  Description of Artificial Sequence: Synthetic oligonucleotide
uagcuacaaggucgguauc

SEQ ID NO: 1979403 - RNA, 19 nt, Artificial Sequence
  Description of Artificial Sequence: Synthetic oligonucleotide
uaguccuggcccgggcccg

SEQ ID NO: 1979404 - RNA, 19 nt, Artificial Sequence
  Description of Artificial Sequence: Synthetic oligonucleotide
gaccucgauucuucucuuc

SEQ ID NO: 1979405 - RNA, 19 nt, Artificial Sequence
  Description of Artificial Sequence: Synthetic oligonucleotide
ucuccgugagggccagggu

SEQ ID NO: 1979406 - RNA, 19 nt, Artificial Sequence
  Description of Artificial Sequence: Synthetic oligonucleotide
gaaggagacgagcucugau

SEQ ID NO: 1979407 - RNA, 19 nt, Artificial Sequence
  Description of Artificial Sequence: Synthetic oligonucleotide
ggcugcuucuaugcgauac

SEQ ID NO: 1979408 - RNA, 19 nt, Artificial Sequence
  Description of Artificial Sequence: Synthetic oligonucleotide
uacucaccauaaagauuua

SEQ ID NO: 1979409 - RNA, 19 nt, Artificial Sequence
  Description of Artificial Sequence: Synthetic oligonucleotide
agaaggagacgagcucuga

SEQ ID NO: 1979410 - RNA, 19 nt, Artificial Sequence
  Description of Artificial Sequence: Synthetic oligonucleotide
uuacguuguugaggcaaau

SEQ ID NO: 1979411 - RNA, 19 nt, Artificial Sequence
  Description of Artificial Sequence: Synthetic oligonucleotide
ggggcggccugguaggcag

SEQ ID NO: 1979412 - RNA, 19 nt, Artificial Sequence
  Description of Artificial Sequence: Synthetic oligonucleotide
uccuucgccuccggccgcg

SEQ ID NO: 1979413 - RNA, 19 nt, Artificial Sequence
  Description of Artificial Sequence: Synthetic oligonucleotide
cuaccaggagcugcuugug

SEQ ID NO: 1979414 - RNA, 19 nt, Artificial Sequence
  Description of Artificial Sequence: Synthetic oligonucleotide
cuucggcuccaucuuccuc

SEQ ID NO: 1979415 - RNA, 19 nt, Artificial Sequence
  Description of Artificial Sequence: Synthetic oligonucleotide
gugcggaggaggagguggg

SEQ ID NO: 1979416 - RNA, 19 nt, Artificial Sequence
  Description of Artificial Sequence: Synthetic oligonucleotide
agaccucgauucuucucuu

SEQ ID NO: 1979417 - RNA, 19 nt, Artificial Sequence
  Description of Artificial Sequence: Synthetic oligonucleotide
gagcucugauuuaaguggu

SEQ ID NO: 1979418 - RNA, 19 nt, Artificial Sequence
  Description of Artificial Sequence: Synthetic oligonucleotide
ggaaucggcuguagguuug

SEQ ID NO: 1979419 - RNA, 19 nt, Artificial Sequence
  Description of Artificial Sequence: Synthetic oligonucleotide
agcuugaaacacagguaaa

SEQ ID NO: 1979420 - RNA, 19 nt, Artificial Sequence
  Description of Artificial Sequence: Synthetic oligonucleotide
cuccggccgcgaaacuggg

SEQ ID NO: 1979421 - RNA, 19 nt, Artificial Sequence
  Description of Artificial Sequence: Synthetic oligonucleotide
agcucaaaggcugcuucua

SEQ ID NO: 1979422 - RNA, 19 nt, Artificial Sequence
  Description of Artificial Sequence: Synthetic oligonucleotide
ccguccuucgccuccggcc

SEQ ID NO: 1979423 - RNA, 19 nt, Artificial Sequence
  Description of Artificial Sequence: Synthetic oligonucleotide
caccagcucagacauuaaa

SEQ ID NO: 1979424 - RNA, 19 nt, Artificial Sequence
  Description of Artificial Sequence: Synthetic oligonucleotide
auauuaccacuggacgauu

SEQ ID NO: 1979425 - RNA, 19 nt, Artificial Sequence
  Description of Artificial Sequence: Synthetic oligonucleotide
cuuuuccagcucuaggguu

SEQ ID NO: 1979426 - RNA, 19 nt, Artificial Sequence
  Description of Artificial Sequence: Synthetic oligonucleotide
cucggccucuugcuggguc

SEQ ID NO: 1979427 - RNA, 19 nt, Artificial Sequence
  Description of Artificial Sequence: Synthetic oligonucleotide
acuggacgauuuacaguca

SEQ ID NO: 1979428 - RNA, 19 nt, Artificial Sequence
  Description of Artificial Sequence: Synthetic oligonucleotide
uccggccgcgaaacuggga

SEQ ID NO: 1979429 - RNA, 19 nt, Artificial Sequence
  Description of Artificial Sequence: Synthetic oligonucleotide
auauagcuacaaggucggu

SEQ ID NO: 1979430 - RNA, 19 nt, Artificial Sequence
  Description of Artificial Sequence: Synthetic oligonucleotide
cccuucggcuccaucuucc

SEQ ID NO: 1979431 - RNA, 19 nt, Artificial Sequence
  Description of Artificial Sequence: Synthetic oligonucleotide
gguuuggaaucggcuguag

SEQ ID NO: 1979432 - RNA, 19 nt, Artificial Sequence
  Description of Artificial Sequence: Synthetic oligonucleotide
augcugaucguuagucuua

SEQ ID NO: 1979433 - RNA, 19 nt, Artificial Sequence
  Description of Artificial Sequence: Synthetic oligonucleotide
caaagcgcagaacccucaa

SEQ ID NO: 1979434 - RNA, 19 nt, Artificial Sequence
  Description of Artificial Sequence: Synthetic oligonucleotide
cuucuguagggcagcucaa

SEQ ID NO: 1979435 - RNA, 19 nt, Artificial Sequence
  Description of Artificial Sequence: Synthetic oligonucleotide
agagaggggaaaggagguu

SEQ ID NO: 1979436 - RNA, 19 nt, Artificial Sequence
  Description of Artificial Sequence: Synthetic oligonucleotide
cguccuucgccuccggccg

SEQ ID NO: 1979437 - RNA, 19 nt, Artificial Sequence
  Description of Artificial Sequence: Synthetic oligonucleotide
cucuugcugggucguaaaa

SEQ ID NO: 1979438 - RNA, 19 nt, Artificial Sequence
  Description of Artificial Sequence: Synthetic oligonucleotide
ggguccucgccaauauuac

SEQ ID NO: 1979439 - RNA, 19 nt, Artificial Sequence
  Description of Artificial Sequence: Synthetic oligonucleotide
ccugguaggcagcggccgg

SEQ ID NO: 1979440 - RNA, 19 nt, Artificial Sequence
  Description of Artificial Sequence: Synthetic oligonucleotide
gguucuccguccuucgccu

SEQ ID NO: 1979441 - RNA, 19 nt, Artificial Sequence
  Description of Artificial Sequence: Synthetic oligonucleotide
uccugcgcacccgggcggc

SEQ ID NO: 1979442 - RNA, 19 nt, Artificial Sequence
  Description of Artificial Sequence: Synthetic oligonucleotide
gaugggugcgggugcgcgu

SEQ ID NO: 1979443 - RNA, 19 nt, Artificial Sequence
  Description of Artificial Sequence: Synthetic oligonucleotide
cgguaucaaauuacccuuc

SEQ ID NO: 1979444 - RNA, 19 nt, Artificial Sequence
  Description of Artificial Sequence: Synthetic oligonucleotide
gcggcgaugggugcgggug

SEQ ID NO: 1979445 - RNA, 19 nt, Artificial Sequence
  Description of Artificial Sequence: Synthetic oligonucleotide
agggugcggaggaggaggu

SEQ ID NO: 1979446 - RNA, 19 nt, Artificial Sequence
  Description of Artificial Sequence: Synthetic oligonucleotide
gaaucggcuguagguuugu

SEQ ID NO: 1979447 - RNA, 19 nt, Artificial Sequence
  Description of Artificial Sequence: Synthetic oligonucleotide
uggggcggccugguaggca

SEQ ID NO: 1979448 - RNA, 19 nt, Artificial Sequence
  Description of Artificial Sequence: Synthetic oligonucleotide
cagcucaaaggcugcuucu

SEQ ID NO: 1979449 - RNA, 19 nt, Artificial Sequence
  Description of Artificial Sequence: Synthetic oligonucleotide
ggcaaaucaccagcucaga

SEQ ID NO: 1979450 - RNA, 19 nt, Artificial Sequence
  Description of Artificial Sequence: Synthetic oligonucleotide
gggcccuucggcuccaucu

SEQ ID NO: 1979451 - RNA, 19 nt, Artificial Sequence
  Description of Artificial Sequence: Synthetic oligonucleotide
guagggcagcucaaaggcu

SEQ ID NO: 1979452 - RNA, 19 nt, Artificial Sequence
  Description of Artificial Sequence: Synthetic oligonucleotide
ccuggucagauaaggguua

SEQ ID NO: 1979453 - RNA, 19 nt, Artificial Sequence
  Description of Artificial Sequence: Synthetic oligonucleotide
gugcacuuguuugauuaau

SEQ ID NO: 1979454 - RNA, 19 nt, Artificial Sequence
  Description of Artificial Sequence: Synthetic oligonucleotide
cugcgcacccgggcggcgg

SEQ ID NO: 1979455 - RNA, 19 nt, Artificial Sequence
  Description of Artificial Sequence: Synthetic oligonucleotide
ccagcucuaggguuuggaa

SEQ ID NO: 1979456 - RNA, 19 nt, Artificial Sequence
  Description of Artificial Sequence: Synthetic oligonucleotide
gcauaugcugaucguuagu

SEQ ID NO: 1979457 - RNA, 19 nt, Artificial Sequence
  Description of Artificial Sequence: Synthetic oligonucleotide
gcugcuucuaugcgauacu

SEQ ID NO: 1979458 - RNA, 19 nt, Artificial Sequence
  Description of Artificial Sequence: Synthetic oligonucleotide
acccuucuguagggcagcu

SEQ ID NO: 1979459 - RNA, 19 nt, Artificial Sequence
  Description of Artificial Sequence: Synthetic oligonucleotide
ggagggugcggaggaggag

SEQ ID NO: 1979460 - RNA, 19 nt, Artificial Sequence
  Description of Artificial Sequence: Synthetic oligonucleotide
guuaauuuguggggcccuu

SEQ ID NO: 1979461 - RNA, 19 nt, Artificial Sequence
  Description of Artificial Sequence: Synthetic oligonucleotide
agggugugcgagaccucga

SEQ ID NO: 1979462 - RNA, 19 nt, Artificial Sequence
  Description of Artificial Sequence: Synthetic oligonucleotide
gcgauacuacaaacuauua

SEQ ID NO: 1979463 - RNA, 19 nt, Artificial Sequence
  Description of Artificial Sequence: Synthetic oligonucleotide
cgagaccucgauucuucuc

SEQ ID NO: 1979464 - RNA, 19 nt, Artificial Sequence
  Description of Artificial Sequence: Synthetic oligonucleotide
ggccugguaggcagcggcc

SEQ ID NO: 1979465 - RNA, 19 nt, Artificial Sequence
  Description of Artificial Sequence: Synthetic oligonucleotide
cuccgucuaccaggagcug

SEQ ID NO: 1979466 - RNA, 19 nt, Artificial Sequence
  Description of Artificial Sequence: Synthetic oligonucleotide
cccuuucaaagcgcagaac

SEQ ID NO: 1979467 - RNA, 19 nt, Artificial Sequence
  Description of Artificial Sequence: Synthetic oligonucleotide
ccggccgcgaaacugggaa

SEQ ID NO: 1979468 - RNA, 19 nt, Artificial Sequence
  Description of Artificial Sequence: Synthetic oligonucleotide
gcgaaacugggaacuuguc

SEQ ID NO: 1979469 - RNA, 19 nt, Artificial Sequence
  Description of Artificial Sequence: Synthetic oligonucleotide
guugaucguuaggaaguuu

SEQ ID NO: 1979470 - RNA, 19 nt, Artificial Sequence
  Description of Artificial Sequence: Synthetic oligonucleotide
gcucaaaggcugcuucuau

SEQ ID NO: 1979471 - RNA, 19 nt, Artificial Sequence
  Description of Artificial Sequence: Synthetic oligonucleotide
cgaugggugcgggugcgcg

SEQ ID NO: 1979472 - RNA, 19 nt, Artificial Sequence
  Description of Artificial Sequence: Synthetic oligonucleotide
ccggcguggaaguaguccu

SEQ ID NO: 1979473 - RNA, 19 nt, Artificial Sequence
  Description of Artificial Sequence: Synthetic oligonucleotide
guggggcggccugguaggc

SEQ ID NO: 1979474 - RNA, 19 nt, Artificial Sequence
  Description of Artificial Sequence: Synthetic oligonucleotide
cccucaagagcagugacau

SEQ ID NO: 1979475 - RNA, 19 nt, Artificial Sequence
  Description of Artificial Sequence: Synthetic oligonucleotide
aggcugcuucuaugcgaua

SEQ ID NO: 1979476 - RNA, 19 nt, Artificial Sequence
  Description of Artificial Sequence: Synthetic oligonucleotide
ccgcgaaacugggaacuug

SEQ ID NO: 1979477 - RNA, 19 nt, Artificial Sequence
  Description of Artificial Sequence: Synthetic oligonucleotide
ggccgcgaaacugggaacu

SEQ ID NO: 1979478 - RNA, 19 nt, Artificial Sequence
  Description of Artificial Sequence: Synthetic oligonucleotide
cugccccgcgccggcgugg

SEQ ID NO: 1979479 - RNA, 19 nt, Artificial Sequence
  Description of Artificial Sequence: Synthetic oligonucleotide
cgcgaaacugggaacuugu

SEQ ID NO: 1979480 - RNA, 19 nt, Artificial Sequence
  Description of Artificial Sequence: Synthetic oligonucleotide
ggguuuggaaucggcugua

SEQ ID NO: 1979481 - RNA, 19 nt, Artificial Sequence
  Description of Artificial Sequence: Synthetic oligonucleotide
gggugugcgagaccucgau

SEQ ID NO: 1979482 - RNA, 19 nt, Artificial Sequence
  Description of Artificial Sequence: Synthetic oligonucleotide
cggcuguagguuugucuuc

SEQ ID NO: 1979483 - RNA, 19 nt, Artificial Sequence
  Description of Artificial Sequence: Synthetic oligonucleotide
ggugugcgagaccucgauu

SEQ ID NO: 1979484 - RNA, 19 nt, Artificial Sequence
  Description of Artificial Sequence: Synthetic oligonucleotide
gcgagaccucgauucuucu

SEQ ID NO: 1979485 - RNA, 19 nt, Artificial Sequence
  Description of Artificial Sequence: Synthetic oligonucleotide
cuucgccuccggccgcgaa

SEQ ID NO: 1979486 - RNA, 19 nt, Artificial Sequence
  Description of Artificial Sequence: Synthetic oligonucleotide
cgcgccggcguggaaguag

SEQ ID NO: 1979487 - RNA, 19 nt, Artificial Sequence
  Description of Artificial Sequence: Synthetic oligonucleotide
gggugcggaggaggaggug

SEQ ID NO: 1979488 - RNA, 19 nt, Artificial Sequence
  Description of Artificial Sequence: Synthetic oligonucleotide
ccagcauaugcugaucguu

SEQ ID NO: 1979489 - RNA, 19 nt, Artificial Sequence
  Description of Artificial Sequence: Synthetic oligonucleotide
cagugacauuaagguagcu

SEQ ID NO: 1979490 - RNA, 19 nt, Artificial Sequence
  Description of Artificial Sequence: Synthetic oligonucleotide
gugcgagaccucgauucuu

SEQ ID NO: 1979491 - RNA, 19 nt, Artificial Sequence
  Description of Artificial Sequence: Synthetic oligonucleotide
ccucgccaauauuaccacu

SEQ ID NO: 1979492 - RNA, 19 nt, Artificial Sequence
  Description of Artificial Sequence: Synthetic oligonucleotide
cggccgcgaaacugggaac

SEQ ID NO: 1979493 - RNA, 19 nt, Artificial Sequence
  Description of Artificial Sequence: Synthetic oligonucleotide
gcgaugggugcgggugcgc

SEQ ID NO: 1979494 - RNA, 19 nt, Artificial Sequence
  Description of Artificial Sequence: Synthetic oligonucleotide
ggcccuucggcuccaucuu

SEQ ID NO: 1979495 - RNA, 19 nt, Artificial Sequence
  Description of Artificial Sequence: Synthetic oligonucleotide
ggggcccuucggcuccauc

SEQ ID NO: 1979496 - RNA, 19 nt, Artificial Sequence
  Description of Artificial Sequence: Synthetic oligonucleotide
gcugaucguuagucuuaau

SEQ ID NO: 1979497 - RNA, 19 nt, Artificial Sequence
  Description of Artificial Sequence: Synthetic oligonucleotide
ccugcgcacccgggcggcg

SEQ ID NO: 1979498 - RNA, 19 nt, Artificial Sequence
  Description of Artificial Sequence: Synthetic oligonucleotide
ggcggcgaugggugcgggu

SEQ ID NO: 1979499 - RNA, 19 nt, Artificial Sequence
  Description of Artificial Sequence: Synthetic oligonucleotide
gggcagcucaaaggcugcu

SEQ ID NO: 1979500 - RNA, 19 nt, Artificial Sequence
  Description of Artificial Sequence: Synthetic oligonucleotide
ccggccccuccugcgcacc

SEQ ID NO: 1979501 - RNA, 19 nt, Artificial Sequence
  Description of Artificial Sequence: Synthetic oligonucleotide
gcgccggcguggaaguagu

SEQ ID NO: 1979502 - RNA, 19 nt, Artificial Sequence
  Description of Artificial Sequence: Synthetic oligonucleotide
ccucaagagcagugacauu

SEQ ID NO: 1979503 - RNA, 19 nt, Artificial Sequence
  Description of Artificial Sequence: Synthetic oligonucleotide
gccgcgaaacugggaacuu

SEQ ID NO: 1979504 - RNA, 19 nt, Artificial Sequence
  Description of Artificial Sequence: Synthetic oligonucleotide
ccuucgccuccggccgcga

SEQ ID NO: 1979505 - RNA, 19 nt, Artificial Sequence
  Description of Artificial Sequence: Synthetic oligonucleotide
gccccgcgccggcguggaa

SEQ ID NO: 1979506 - RNA, 19 nt, Artificial Sequence
  Description of Artificial Sequence: Synthetic oligonucleotide
cggccucuugcugggucgu

SEQ ID NO: 1979507 - RNA, 19 nt, Artificial Sequence
  Description of Artificial Sequence: Synthetic oligonucleotide
ccgcgccggcguggaagua

SEQ ID NO: 1979508 - RNA, 19 nt, Artificial Sequence
  Description of Artificial Sequence: Synthetic oligonucleotide
aaaauguuaaacuauuucc

SEQ ID NO: 1979509 - RNA, 19 nt, Artificial Sequence
  Description of Artificial Sequence: Synthetic oligonucleotide
aaaacaauaguaaauagcc

SEQ ID NO: 1979510 - RNA, 19 nt, Artificial Sequence
  Description of Artificial Sequence: Synthetic oligonucleotide
aaagcugugaaauacaagg

SEQ ID NO: 1979511 - RNA, 19 nt, Artificial Sequence
  Description of Artificial Sequence: Synthetic oligonucleotide
aauacaaggaucuuuaauc

SEQ ID NO: 1979512 - RNA, 19 nt, Artificial Sequence
  Description of Artificial Sequence: Synthetic oligonucleotide
auuuccuuaaguuaaaccc

SEQ ID NO: 1979513 - RNA, 19 nt, Artificial Sequence
  Description of Artificial Sequence: Synthetic oligonucleotide
aaaagauucccacaguugc

SEQ ID NO: 1979514 - RNA, 19 nt, Artificial Sequence
  Description of Artificial Sequence: Synthetic oligonucleotide
aaagauguuugccagagac

SEQ ID NO: 1979515 - RNA, 19 nt, Artificial Sequence
  Description of Artificial Sequence: Synthetic oligonucleotide
aacaauaguaaauagccuc

SEQ ID NO: 1979516 - RNA, 19 nt, Artificial Sequence
  Description of Artificial Sequence: Synthetic oligonucleotide
acagcauuagccuucaucc

SEQ ID NO: 1979517 - RNA, 19 nt, Artificial Sequence
  Description of Artificial Sequence: Synthetic oligonucleotide
uggaaaaucauccagccag

SEQ ID NO: 1979518 - RNA, 19 nt, Artificial Sequence
  Description of Artificial Sequence: Synthetic oligonucleotide
aagagaacaaguuauuuug

SEQ ID NO: 1979519 - RNA, 19 nt, Artificial Sequence
  Description of Artificial Sequence: Synthetic oligonucleotide
aacauguaaacaaauuucc

SEQ ID NO: 1979520 - RNA, 19 nt, Artificial Sequence
  Description of Artificial Sequence: Synthetic oligonucleotide
aaauuauacauauucuugu

SEQ ID NO: 1979521 - RNA, 19 nt, Artificial Sequence
  Description of Artificial Sequence: Synthetic oligonucleotide
agcuaagaggcuuuuaucc

SEQ ID NO: 1979522 - RNA, 19 nt, Artificial Sequence
  Description of Artificial Sequence: Synthetic oligonucleotide
uuuaacuucaagaauucug

SEQ ID NO: 1979523 - RNA, 19 nt, Artificial Sequence
  Description of Artificial Sequence: Synthetic oligonucleotide
aauaucuugucucaauuca

SEQ ID NO: 1979524 - RNA, 19 nt, Artificial Sequence
  Description of Artificial Sequence: Synthetic oligonucleotide
uauuuuaacuucaagaauu

SEQ ID NO: 1979525 - RNA, 19 nt, Artificial Sequence
  Description of Artificial Sequence: Synthetic oligonucleotide
uuaacuucaagaauucuga

SEQ ID NO: 1979526 - RNA, 19 nt, Artificial Sequence
  Description of Artificial Sequence: Synthetic oligonucleotide
uugaacaaaaccacgagcu

SEQ ID NO: 1979527 - RNA, 19 nt, Artificial Sequence
  Description of Artificial Sequence: Synthetic oligonucleotide
agaguuucaguauagcuuc

SEQ ID NO: 1979528 - RNA, 19 nt, Artificial Sequence
  Description of Artificial Sequence: Synthetic oligonucleotide
aaauaucugaacagcaccc

SEQ ID NO: 1979529 - RNA, 19 nt, Artificial Sequence
  Description of Artificial Sequence: Synthetic oligonucleotide
auugaugaaauaucugaac

SEQ ID NO: 1979530 - RNA, 19 nt, Artificial Sequence
  Description of Artificial Sequence: Synthetic oligonucleotide
auuauacauauucuugugg

SEQ ID NO: 1979531 - RNA, 19 nt, Artificial Sequence
  Description of Artificial Sequence: Synthetic oligonucleotide
ucugagacaaugcagguca

SEQ ID NO: 1979532 - RNA, 19 nt, Artificial Sequence
  Description of Artificial Sequence: Synthetic oligonucleotide
uaucuuuauuacuugauug

SEQ ID NO: 1979533 - RNA, 19 nt, Artificial Sequence
  Description of Artificial Sequence: Synthetic oligonucleotide
uuucaaaacggcuagcuga

SEQ ID NO: 1979534 - RNA, 19 nt, Artificial Sequence
  Description of Artificial Sequence: Synthetic oligonucleotide
cuuaaguuaaacccuaaag

SEQ ID NO: 1979535 - RNA, 19 nt, Artificial Sequence
  Description of Artificial Sequence: Synthetic oligonucleotide
gacgacuuuguuuugagcc

SEQ ID NO: 1979536 - RNA, 19 nt, Artificial Sequence
  Description of Artificial Sequence: Synthetic oligonucleotide
aggauauuaucuuuauuac

SEQ ID NO: 1979537 - RNA, 19 nt, Artificial Sequence
  Description of Artificial Sequence: Synthetic oligonucleotide
uugaacaacauguaaacaa

SEQ ID NO: 1979538 - RNA, 19 nt, Artificial Sequence
  Description of Artificial Sequence: Synthetic oligonucleotide
uuugaacaaaaccacgagc

SEQ ID NO: 1979539 - RNA, 19 nt, Artificial Sequence
  Description of Artificial Sequence: Synthetic oligonucleotide
aaucuggacagugaaugcc

SEQ ID NO: 1979540 - RNA, 19 nt, Artificial Sequence
  Description of Artificial Sequence: Synthetic oligonucleotide
uguuugaacaaaaccacga

SEQ ID NO: 1979541 - RNA, 19 nt, Artificial Sequence
  Description of Artificial Sequence: Synthetic oligonucleotide
aauaaucucaauaguuuuc

SEQ ID NO: 1979542 - RNA, 19 nt, Artificial Sequence
  Description of Artificial Sequence: Synthetic oligonucleotide
ugcuguauaaucuggacga

SEQ ID NO: 1979543 - RNA, 19 nt, Artificial Sequence
  Description of Artificial Sequence: Synthetic oligonucleotide
aauaucugaacagcacccc

SEQ ID NO: 1979544 - RNA, 19 nt, Artificial Sequence
  Description of Artificial Sequence: Synthetic oligonucleotide
aaaucauccagccaguguu

SEQ ID NO: 1979545 - RNA, 19 nt, Artificial Sequence
  Description of Artificial Sequence: Synthetic oligonucleotide
aauaguuuucuccaagcaa

SEQ ID NO: 1979546 - RNA, 19 nt, Artificial Sequence
  Description of Artificial Sequence: Synthetic oligonucleotide
ucaguauagcuucugagac

SEQ ID NO: 1979547 - RNA, 19 nt, Artificial Sequence
  Description of Artificial Sequence: Synthetic oligonucleotide
uuaaacuauuuccuuaagu

SEQ ID NO: 1979548 - RNA, 19 nt, Artificial Sequence
  Description of Artificial Sequence: Synthetic oligonucleotide
ucaagaauucugaugcaag

SEQ ID NO: 1979549 - RNA, 19 nt, Artificial Sequence
  Description of Artificial Sequence: Synthetic oligonucleotide
agcauuagccuucauccgc

SEQ ID NO: 1979550 - RNA, 19 nt, Artificial Sequence
  Description of Artificial Sequence: Synthetic oligonucleotide
aaguuaaacccuaaaguag

SEQ ID NO: 1979551 - RNA, 19 nt, Artificial Sequence
  Description of Artificial Sequence: Synthetic oligonucleotide
uuagucuccauucagcaaa

SEQ ID NO: 1979552 - RNA, 19 nt, Artificial Sequence
  Description of Artificial Sequence: Synthetic oligonucleotide
aaauguuaaacuauuuccu

SEQ ID NO: 1979553 - RNA, 19 nt, Artificial Sequence
  Description of Artificial Sequence: Synthetic oligonucleotide
auuacuugauuguagguga

SEQ ID NO: 1979554 - RNA, 19 nt, Artificial Sequence
  Description of Artificial Sequence: Synthetic oligonucleotide
aagggccagccucugaucc

SEQ ID NO: 1979555 - RNA, 19 nt, Artificial Sequence
  Description of Artificial Sequence: Synthetic oligonucleotide
gacaaugcaggucacuggg

SEQ ID NO: 1979556 - RNA, 19 nt, Artificial Sequence
  Description of Artificial Sequence: Synthetic oligonucleotide
gaugaaauaucugaacagc

SEQ ID NO: 1979557 - RNA, 19 nt, Artificial Sequence
  Description of Artificial Sequence: Synthetic oligonucleotide
uguaucauugaugaaauau

SEQ ID NO: 1979558 - RNA, 19 nt, Artificial Sequence
  Description of Artificial Sequence: Synthetic oligonucleotide
ugaacucacagacaaauua

SEQ ID NO: 1979559 - RNA, 19 nt, Artificial Sequence
  Description of Artificial Sequence: Synthetic oligonucleotide
acaauaguaaauagccucc

SEQ ID NO: 1979560 - RNA, 19 nt, Artificial Sequence
  Description of Artificial Sequence: Synthetic oligonucleotide
uuagccuucauccgccugg

SEQ ID NO: 1979561 - RNA, 19 nt, Artificial Sequence
  Description of Artificial Sequence: Synthetic oligonucleotide
cucaauucaucuucaagcc

SEQ ID NO: 1979562 - RNA, 19 nt, Artificial Sequence
  Description of Artificial Sequence: Synthetic oligonucleotide
uuuccuuaaguuaaacccu

SEQ ID NO: 1979563 - RNA, 19 nt, Artificial Sequence
  Description of Artificial Sequence: Synthetic oligonucleotide
uucaguauagcuucugaga

SEQ ID NO: 1979564 - RNA, 19 nt, Artificial Sequence
  Description of Artificial Sequence: Synthetic oligonucleotide
aguuaaacccuaaaguagg

SEQ ID NO: 1979565 - RNA, 19 nt, Artificial Sequence
  Description of Artificial Sequence: Synthetic oligonucleotide
uuuuagucuccauucagca

SEQ ID NO: 1979566 - RNA, 19 nt, Artificial Sequence
  Description of Artificial Sequence: Synthetic oligonucleotide
ugcagauguaauaaucuca

SEQ ID NO: 1979567 - RNA, 19 nt, Artificial Sequence
  Description of Artificial Sequence: Synthetic oligonucleotide
aauguuaaacuauuuccuu

SEQ ID NO: 1979568 - RNA, 19 nt, Artificial Sequence
  Description of Artificial Sequence: Synthetic oligonucleotide
aagcuaagaggcuuuuauc

SEQ ID NO: 1979569 - RNA, 19 nt, Artificial Sequence
  Description of Artificial Sequence: Synthetic oligonucleotide
caagcaauauuuuaacuuc

SEQ ID NO: 1979570 - RNA, 19 nt, Artificial Sequence
  Description of Artificial Sequence: Synthetic oligonucleotide
uuucaguauagcuucugag

SEQ ID NO: 1979571 - RNA, 19 nt, Artificial Sequence
  Description of Artificial Sequence: Synthetic oligonucleotide
agauguaauaaucucaaua

SEQ ID NO: 1979572 - RNA, 19 nt, Artificial Sequence
  Description of Artificial Sequence: Synthetic oligonucleotide
acaaauuauacauauucuu

SEQ ID NO: 1979573 - RNA, 19 nt, Artificial Sequence
  Description of Artificial Sequence: Synthetic oligonucleotide
acaacauguaaacaaauuu

SEQ ID NO: 1979574 - RNA, 19 nt, Artificial Sequence
  Description of Artificial Sequence: Synthetic oligonucleotide
acaucuuggaaccuuguug

SEQ ID NO: 1979575 - RNA, 19 nt, Artificial Sequence
  Description of Artificial Sequence: Synthetic oligonucleotide
ggaucuuuaaucuccauug

SEQ ID NO: 1979576 - RNA, 19 nt, Artificial Sequence
  Description of Artificial Sequence: Synthetic oligonucleotide
uugauuguaggugaaggag

SEQ ID NO: 1979577 - RNA, 19 nt, Artificial Sequence
  Description of Artificial Sequence: Synthetic oligonucleotide
uguuaaacuauuuccuuaa

SEQ ID NO: 1979578 - RNA, 19 nt, Artificial Sequence
  Description of Artificial Sequence: Synthetic oligonucleotide
uuaacaucuuggaaccuug

SEQ ID NO: 1979579 - RNA, 19 nt, Artificial Sequence
  Description of Artificial Sequence: Synthetic oligonucleotide
uuaaucuccauugaacaac

SEQ ID NO: 1979580 - RNA, 19 nt, Artificial Sequence
  Description of Artificial Sequence: Synthetic oligonucleotide
auacaaggaucuuuaaucu

SEQ ID NO: 1979581 - RNA, 19 nt, Artificial Sequence
  Description of Artificial Sequence: Synthetic oligonucleotide
acauugaacucacagacaa

SEQ ID NO: 1979582 - RNA, 19 nt, Artificial Sequence
  Description of Artificial Sequence: Synthetic oligonucleotide
aacuauuuccuuaaguuaa

SEQ ID NO: 1979583 - RNA, 19 nt, Artificial Sequence
  Description of Artificial Sequence: Synthetic oligonucleotide
cuugcucccuuucaaaacg

SEQ ID NO: 1979584 - RNA, 19 nt, Artificial Sequence
  Description of Artificial Sequence: Synthetic oligonucleotide
ucaaaaggcacaagcaauc

SEQ ID NO: 1979585 - RNA, 19 nt, Artificial Sequence
  Description of Artificial Sequence: Synthetic oligonucleotide
caguguuugaacaaaacca

SEQ ID NO: 1979586 - RNA, 19 nt, Artificial Sequence
  Description of Artificial Sequence: Synthetic oligonucleotide
guuaucucuguguagacca

SEQ ID NO: 1979587 - RNA, 19 nt, Artificial Sequence
  Description of Artificial Sequence: Synthetic oligonucleotide
uauaaucuggacgacuuug

SEQ ID NO: 1979588 - RNA, 19 nt, Artificial Sequence
  Description of Artificial Sequence: Synthetic oligonucleotide
aauaguaaauagccuccca

SEQ ID NO: 1979589 - RNA, 19 nt, Artificial Sequence
  Description of Artificial Sequence: Synthetic oligonucleotide
uuaauaucuugucucaauu

SEQ ID NO: 1979590 - RNA, 19 nt, Artificial Sequence
  Description of Artificial Sequence: Synthetic oligonucleotide
uguauaaucuggacgacuu

SEQ ID NO: 1979591 - RNA, 19 nt, Artificial Sequence
  Description of Artificial Sequence: Synthetic oligonucleotide
aggcuuuuauccccaaggc

SEQ ID NO: 1979592 - RNA, 19 nt, Artificial Sequence
  Description of Artificial Sequence: Synthetic oligonucleotide
aagauguuugccagagacc

SEQ ID NO: 1979593 - RNA, 19 nt, Artificial Sequence
  Description of Artificial Sequence: Synthetic oligonucleotide
agaacaaguuauuuugacu

SEQ ID NO: 1979594 - RNA, 19 nt, Artificial Sequence
  Description of Artificial Sequence: Synthetic oligonucleotide
ugauuguaggugaaggagu

SEQ ID NO: 1979595 - RNA, 19 nt, Artificial Sequence
  Description of Artificial Sequence: Synthetic oligonucleotide
ugagccucuuguaucauug

SEQ ID NO: 1979596 - RNA, 19 nt, Artificial Sequence
  Description of Artificial Sequence: Synthetic oligonucleotide
acuugauuguaggugaagg

SEQ ID NO: 1979597 - RNA, 19 nt, Artificial Sequence
  Description of Artificial Sequence: Synthetic oligonucleotide
agagaguuucaguauagcu

SEQ ID NO: 1979598 - RNA, 19 nt, Artificial Sequence
  Description of Artificial Sequence: Synthetic oligonucleotide
cuugucucaauucaucuuc

SEQ ID NO: 1979599 - RNA, 19 nt, Artificial Sequence
  Description of Artificial Sequence: Synthetic oligonucleotide
aagaguuaacaucuuggaa

SEQ ID NO: 1979600 - RNA, 19 nt, Artificial Sequence
  Description of Artificial Sequence: Synthetic oligonucleotide
cuaagaggcuuuuaucccc

SEQ ID NO: 1979601 - RNA, 19 nt, Artificial Sequence
  Description of Artificial Sequence: Synthetic oligonucleotide
aucugaacagcaccccugc

SEQ ID NO: 1979602 - RNA, 19 nt, Artificial Sequence
  Description of Artificial Sequence: Synthetic oligonucleotide
uaaacccuaaaguaggaua

SEQ ID NO: 1979603 - RNA, 19 nt, Artificial Sequence
  Description of Artificial Sequence: Synthetic oligonucleotide
uuaucuuuauuacuugauu

SEQ ID NO: 1979604 - RNA, 19 nt, Artificial Sequence
  Description of Artificial Sequence: Synthetic oligonucleotide
uuuaaucuccauugaacaa

SEQ ID NO: 1979605 - RNA, 19 nt, Artificial Sequence
  Description of Artificial Sequence: Synthetic oligonucleotide
ugagagguuucccuccagg

SEQ ID NO: 1979606 - RNA, 19 nt, Artificial Sequence
  Description of Artificial Sequence: Synthetic oligonucleotide
aaaaccacgagcugcucaa

SEQ ID NO: 1979607 - RNA, 19 nt, Artificial Sequence
  Description of Artificial Sequence: Synthetic oligonucleotide
uaauaucuugucucaauuc

SEQ ID NO: 1979608 - RNA, 19 nt, Artificial Sequence
  Description of Artificial Sequence: Synthetic oligonucleotide
uauuuugacuuucuucauc

SEQ ID NO: 1979609 - RNA, 19 nt, Artificial Sequence
  Description of Artificial Sequence: Synthetic oligonucleotide
ucaagccucguugagcugg

SEQ ID NO: 1979610 - RNA, 19 nt, Artificial Sequence
  Description of Artificial Sequence: Synthetic oligonucleotide
gaccugaccaguuccacag

SEQ ID NO: 1979611 - RNA, 19 nt, Artificial Sequence
  Description of Artificial Sequence: Synthetic oligonucleotide
uucaaaacggcuagcugac

SEQ ID NO: 1979612 - RNA, 19 nt, Artificial Sequence
  Description of Artificial Sequence: Synthetic oligonucleotide
ugugaaguuugugagccag

SEQ ID NO: 1979613 - RNA, 19 nt, Artificial Sequence
  Description of Artificial Sequence: Synthetic oligonucleotide
ugcaagaguuaacaucuug

SEQ ID NO: 1979614 - RNA, 19 nt, Artificial Sequence
  Description of Artificial Sequence: Synthetic oligonucleotide
uccauugaacaacauguaa

SEQ ID NO: 1979615 - RNA, 19 nt, Artificial Sequence
  Description of Artificial Sequence: Synthetic oligonucleotide
uguuuugagccucuuguau

SEQ ID NO: 1979616 - RNA, 19 nt, Artificial Sequence
  Description of Artificial Sequence: Synthetic oligonucleotide
cuuguugucuagaauuuuc

SEQ ID NO: 1979617 - RNA, 19 nt, Artificial Sequence
  Description of Artificial Sequence: Synthetic oligonucleotide
gaagucacugugaaguuug

SEQ ID NO: 1979618 - RNA, 19 nt, Artificial Sequence
  Description of Artificial Sequence: Synthetic oligonucleotide
auaaucucaauaguuuucu

SEQ ID NO: 1979619 - RNA, 19 nt, Artificial Sequence
  Description of Artificial Sequence: Synthetic oligonucleotide
cuaaaguaggauauuaucu

SEQ ID NO: 1979620 - RNA, 19 nt, Artificial Sequence
  Description of Artificial Sequence: Synthetic oligonucleotide
caaaacggcuagcugaccc

SEQ ID NO: 1979621 - RNA, 19 nt, Artificial Sequence
  Description of Artificial Sequence: Synthetic oligonucleotide
acaaguuauuuugacuuuc

SEQ ID NO: 1979622 - RNA, 19 nt, Artificial Sequence
  Description of Artificial Sequence: Synthetic oligonucleotide
uaguaaauagccucccagu

SEQ ID NO: 1979623 - RNA, 19 nt, Artificial Sequence
  Description of Artificial Sequence: Synthetic oligonucleotide
uuauuacuugauuguaggu

SEQ ID NO: 1979624 - RNA, 19 nt, Artificial Sequence
  Description of Artificial Sequence: Synthetic oligonucleotide
auguaauaaucucaauagu

SEQ ID NO: 1979625 - RNA, 19 nt, Artificial Sequence
  Description of Artificial Sequence: Synthetic oligonucleotide
uguggucaaaauguuaaac

SEQ ID NO: 1979626 - RNA, 19 nt, Artificial Sequence
  Description of Artificial Sequence: Synthetic oligonucleotide
cacaguugccagcagaagc

SEQ ID NO: 1979627 - RNA, 19 nt, Artificial Sequence
  Description of Artificial Sequence: Synthetic oligonucleotide
aaagcuugcucccuuucaa

SEQ ID NO: 1979628 - RNA, 19 nt, Artificial Sequence
  Description of Artificial Sequence: Synthetic oligonucleotide
agguggaaaaucauccagc

SEQ ID NO: 1979629 - RNA, 19 nt, Artificial Sequence
  Description of Artificial Sequence: Synthetic oligonucleotide
guaaacaaauuucccuuug

SEQ ID NO: 1979630 - RNA, 19 nt, Artificial Sequence
  Description of Artificial Sequence: Synthetic oligonucleotide
cuuguggucaaaauguuaa

SEQ ID NO: 1979631 - RNA, 19 nt, Artificial Sequence
  Description of Artificial Sequence: Synthetic oligonucleotide
agagguuucccuccagguc

SEQ ID NO: 1979632 - RNA, 19 nt, Artificial Sequence
  Description of Artificial Sequence: Synthetic oligonucleotide
aaaacggcuagcugaccca

SEQ ID NO: 1979633 - RNA, 19 nt, Artificial Sequence
  Description of Artificial Sequence: Synthetic oligonucleotide
aucuggacgacuuuguuuu

SEQ ID NO: 1979634 - RNA, 19 nt, Artificial Sequence
  Description of Artificial Sequence: Synthetic oligonucleotide
aaacccuaaaguaggauau

SEQ ID NO: 1979635 - RNA, 19 nt, Artificial Sequence
  Description of Artificial Sequence: Synthetic oligonucleotide
aaacaauaguaaauagccu

SEQ ID NO: 1979636 - RNA, 19 nt, Artificial Sequence
  Description of Artificial Sequence: Synthetic oligonucleotide
ugaacagcaccccugcaaa

SEQ ID NO: 1979637 - RNA, 19 nt, Artificial Sequence
  Description of Artificial Sequence: Synthetic oligonucleotide
agacaaugcaggucacugg

SEQ ID NO: 1979638 - RNA, 19 nt, Artificial Sequence
  Description of Artificial Sequence: Synthetic oligonucleotide
uccaagcaauauuuuaacu

SEQ ID NO: 1979639 - RNA, 19 nt, Artificial Sequence
  Description of Artificial Sequence: Synthetic oligonucleotide
auaguuuucuccaagcaau

SEQ ID NO: 1979640 - RNA, 19 nt, Artificial Sequence
  Description of Artificial Sequence: Synthetic oligonucleotide
guugccagcagaagcaggg

SEQ ID NO: 1979641 - RNA, 19 nt, Artificial Sequence
  Description of Artificial Sequence: Synthetic oligonucleotide
ugaaugccugugcugcccg

SEQ ID NO: 1979642 - RNA, 19 nt, Artificial Sequence
  Description of Artificial Sequence: Synthetic oligonucleotide
uacuugauuucugaagucu

SEQ ID NO: 1979643 - RNA, 19 nt, Artificial Sequence
  Description of Artificial Sequence: Synthetic oligonucleotide
aacaaguuauuuugacuuu

SEQ ID NO: 1979644 - RNA, 19 nt, Artificial Sequence
  Description of Artificial Sequence: Synthetic oligonucleotide
aguaaauagccucccaguu

SEQ ID NO: 1979645 - RNA, 19 nt, Artificial Sequence
  Description of Artificial Sequence: Synthetic oligonucleotide
gagacaaugcaggucacug

SEQ ID NO: 1979646 - RNA, 19 nt, Artificial Sequence
  Description of Artificial Sequence: Synthetic oligonucleotide
aaagggccagccucugauc

SEQ ID NO: 1979647 - RNA, 19 nt, Artificial Sequence
  Description of Artificial Sequence: Synthetic oligonucleotide
aaugcaggucacuggggca

SEQ ID NO: 1979648 - RNA, 19 nt, Artificial Sequence
  Description of Artificial Sequence: Synthetic oligonucleotide
ugagcugguaccaggugga

SEQ ID NO: 1979649 - RNA, 19 nt, Artificial Sequence
  Description of Artificial Sequence: Synthetic oligonucleotide
guuaaacuauuuccuuaag

SEQ ID NO: 1979650 - RNA, 19 nt, Artificial Sequence
  Description of Artificial Sequence: Synthetic oligonucleotide
agugcagauguaauaaucu

SEQ ID NO: 1979651 - RNA, 19 nt, Artificial Sequence
  Description of Artificial Sequence: Synthetic oligonucleotide
cuccaagcaauauuuuaac

SEQ ID NO: 1979652 - RNA, 19 nt, Artificial Sequence
  Description of Artificial Sequence: Synthetic oligonucleotide
gcaagaguuaacaucuugg

SEQ ID NO: 1979653 - RNA, 19 nt, Artificial Sequence
  Description of Artificial Sequence: Synthetic oligonucleotide
aguaggauauuaucuuuau

SEQ ID NO: 1979654 - RNA, 19 nt, Artificial Sequence
  Description of Artificial Sequence: Synthetic oligonucleotide
cauguaaacaaauuucccu

SEQ ID NO: 1979655 - RNA, 19 nt, Artificial Sequence
  Description of Artificial Sequence: Synthetic oligonucleotide
uugcucccuuucaaaacgg

SEQ ID NO: 1979656 - RNA, 19 nt, Artificial Sequence
  Description of Artificial Sequence: Synthetic oligonucleotide
cagguggaaaaucauccag

SEQ ID NO: 1979657 - RNA, 19 nt, Artificial Sequence
  Description of Artificial Sequence: Synthetic oligonucleotide
ucuucaagccucguugagc

SEQ ID NO: 1979658 - RNA, 19 nt, Artificial Sequence
  Description of Artificial Sequence: Synthetic oligonucleotide
aaacggcuagcugacccac

SEQ ID NO: 1979659 - RNA, 19 nt, Artificial Sequence
  Description of Artificial Sequence: Synthetic oligonucleotide
aagcaauauuuuaacuuca

SEQ ID NO: 1979660 - RNA, 19 nt, Artificial Sequence
  Description of Artificial Sequence: Synthetic oligonucleotide
uccagccaguguuugaaca

SEQ ID NO: 1979661 - RNA, 19 nt, Artificial Sequence
  Description of Artificial Sequence: Synthetic oligonucleotide
guguuugaacaaaaccacg

SEQ ID NO: 1979662 - RNA, 19 nt, Artificial Sequence
  Description of Artificial Sequence: Synthetic oligonucleotide
uugucucaauucaucuuca

SEQ ID NO: 1979663 - RNA, 19 nt, Artificial Sequence
  Description of Artificial Sequence: Synthetic oligonucleotide
cacgagcugcucaaaaggc

SEQ ID NO: 1979664 - RNA, 19 nt, Artificial Sequence
  Description of Artificial Sequence: Synthetic oligonucleotide
uccucaugugcacucugcc

SEQ ID NO: 1979665 - RNA, 19 nt, Artificial Sequence
  Description of Artificial Sequence: Synthetic oligonucleotide
ucguugagcugguaccagg

SEQ ID NO: 1979666 - RNA, 19 nt, Artificial Sequence
  Description of Artificial Sequence: Synthetic oligonucleotide
uuccuuaaguuaaacccua

SEQ ID NO: 1979667 - RNA, 19 nt, Artificial Sequence
  Description of Artificial Sequence: Synthetic oligonucleotide
agccucguugagcugguac

SEQ ID NO: 1979668 - RNA, 19 nt, Artificial Sequence
  Description of Artificial Sequence: Synthetic oligonucleotide
uuuuaacuucaagaauucu

SEQ ID NO: 1979669 - RNA, 19 nt, Artificial Sequence
  Description of Artificial Sequence: Synthetic oligonucleotide
gucuagaauuuucuuguac

SEQ ID NO: 1979670 - RNA, 19 nt, Artificial Sequence
  Description of Artificial Sequence: Synthetic oligonucleotide
augaaauaucugaacagca

SEQ ID NO: 1979671 - RNA, 19 nt, Artificial Sequence
  Description of Artificial Sequence: Synthetic oligonucleotide
uuuagucuccauucagcaa

SEQ ID NO: 1979672 - RNA, 19 nt, Artificial Sequence
  Description of Artificial Sequence: Synthetic oligonucleotide
auaucugaacagcaccccu

SEQ ID NO: 1979673 - RNA, 19 nt, Artificial Sequence
  Description of Artificial Sequence: Synthetic oligonucleotide
ucuuguggucaaaauguua

SEQ ID NO: 1979674 - RNA, 19 nt, Artificial Sequence
  Description of Artificial Sequence: Synthetic oligonucleotide
acggcuagcugacccacac

SEQ ID NO: 1979675 - RNA, 19 nt, Artificial Sequence
  Description of Artificial Sequence: Synthetic oligonucleotide
aacaucuuggaaccuuguu

SEQ ID NO: 1979676 - RNA, 19 nt, Artificial Sequence
  Description of Artificial Sequence: Synthetic oligonucleotide
gaucuuuaaucuccauuga

SEQ ID NO: 1979677 - RNA, 19 nt, Artificial Sequence
  Description of Artificial Sequence: Synthetic oligonucleotide
cagugaaugccugugcugc

SEQ ID NO: 1979678 - RNA, 19 nt, Artificial Sequence
  Description of Artificial Sequence: Synthetic oligonucleotide
caagaauucugaugcaaga

SEQ ID NO: 1979679 - RNA, 19 nt, Artificial Sequence
  Description of Artificial Sequence: Synthetic oligonucleotide
auugaacaacauguaaaca

SEQ ID NO: 1979680 - RNA, 19 nt, Artificial Sequence
  Description of Artificial Sequence: Synthetic oligonucleotide
agcugugaacucccgggcg

SEQ ID NO: 1979681 - RNA, 19 nt, Artificial Sequence
  Description of Artificial Sequence: Synthetic oligonucleotide
cacagcauuagccuucauc

SEQ ID NO: 1979682 - RNA, 19 nt, Artificial Sequence
  Description of Artificial Sequence: Synthetic oligonucleotide
uuuuaauaucuugucucaa

SEQ ID NO: 1979683 - RNA, 19 nt, Artificial Sequence
  Description of Artificial Sequence: Synthetic oligonucleotide
agcugacccacacacugag

SEQ ID NO: 1979684 - RNA, 19 nt, Artificial Sequence
  Description of Artificial Sequence: Synthetic oligonucleotide
ccaugugaaauaaauaaca

SEQ ID NO: 1979685 - RNA, 19 nt, Artificial Sequence
  Description of Artificial Sequence: Synthetic oligonucleotide
acagugaaugccugugcug

SEQ ID NO: 1979686 - RNA, 19 nt, Artificial Sequence
  Description of Artificial Sequence: Synthetic oligonucleotide
auuaucuuuauuacuugau

SEQ ID NO: 1979687 - RNA, 19 nt, Artificial Sequence
  Description of Artificial Sequence: Synthetic oligonucleotide
uaccagguggaaaaucauc

SEQ ID NO: 1979688 - RNA, 19 nt, Artificial Sequence
  Description of Artificial Sequence: Synthetic oligonucleotide
aguuugugagccaggccgc

SEQ ID NO: 1979689 - RNA, 19 nt, Artificial Sequence
  Description of Artificial Sequence: Synthetic oligonucleotide
gaagcuaagaggcuuuuau

SEQ ID NO: 1979690 - RNA, 19 nt, Artificial Sequence
  Description of Artificial Sequence: Synthetic oligonucleotide
ccuaaaguaggauauuauc

SEQ ID NO: 1979691 - RNA, 19 nt, Artificial Sequence
  Description of Artificial Sequence: Synthetic oligonucleotide
acgacuuuguuuugagccu

SEQ ID NO: 1979692 - RNA, 19 nt, Artificial Sequence
  Description of Artificial Sequence: Synthetic oligonucleotide
gcaaucuggacagugaaug

SEQ ID NO: 1979693 - RNA, 19 nt, Artificial Sequence
  Description of Artificial Sequence: Synthetic oligonucleotide
caauaguaaauagccuccc

SEQ ID NO: 1979694 - RNA, 19 nt, Artificial Sequence
  Description of Artificial Sequence: Synthetic oligonucleotide
aagcugugaaauacaagga

SEQ ID NO: 1979695 - RNA, 19 nt, Artificial Sequence
  Description of Artificial Sequence: Synthetic oligonucleotide
cagagaccugaccaguucc

SEQ ID NO: 1979696 - RNA, 19 nt, Artificial Sequence
  Description of Artificial Sequence: Synthetic oligonucleotide
acaagcaaucuggacagug

SEQ ID NO: 1979697 - RNA, 19 nt, Artificial Sequence
  Description of Artificial Sequence: Synthetic oligonucleotide
gcagcugugaacucccggg

SEQ ID NO: 1979698 - RNA, 19 nt, Artificial Sequence
  Description of Artificial Sequence: Synthetic oligonucleotide
ugcuauucuccagaagaca

SEQ ID NO: 1979699 - RNA, 19 nt, Artificial Sequence
  Description of Artificial Sequence: Synthetic oligonucleotide
cacugugaaguuugugagc

SEQ ID NO: 1979700 - RNA, 19 nt, Artificial Sequence
  Description of Artificial Sequence: Synthetic oligonucleotide
cugacccacacacugagca

SEQ ID NO: 1979701 - RNA, 19 nt, Artificial Sequence
  Description of Artificial Sequence: Synthetic oligonucleotide
cugugaaauacaaggaucu

SEQ ID NO: 1979702 - RNA, 19 nt, Artificial Sequence
  Description of Artificial Sequence: Synthetic oligonucleotide
accaguuccacagcauuag

SEQ ID NO: 1979703 - RNA, 19 nt, Artificial Sequence
  Description of Artificial Sequence: Synthetic oligonucleotide
cagcauuagccuucauccg

SEQ ID NO: 1979704 - RNA, 19 nt, Artificial Sequence
  Description of Artificial Sequence: Synthetic oligonucleotide
cacacacugagcagcuugc

SEQ ID NO: 1979705 - RNA, 19 nt, Artificial Sequence
  Description of Artificial Sequence: Synthetic oligonucleotide
auguuugccagagaccuga

SEQ ID NO: 1979706 - RNA, 19 nt, Artificial Sequence
  Description of Artificial Sequence: Synthetic oligonucleotide
ucuugucucaauucaucuu

SEQ ID NO: 1979707 - RNA, 19 nt, Artificial Sequence
  Description of Artificial Sequence: Synthetic oligonucleotide
uacuugauuguaggugaag

SEQ ID NO: 1979708 - RNA, 19 nt, Artificial Sequence
  Description of Artificial Sequence: Synthetic oligonucleotide
aucuucaagccucguugag

SEQ ID NO: 1979709 - RNA, 19 nt, Artificial Sequence
  Description of Artificial Sequence: Synthetic oligonucleotide
uucugaugcaagaguuaac

SEQ ID NO: 1979710 - RNA, 19 nt, Artificial Sequence
  Description of Artificial Sequence: Synthetic oligonucleotide
uuacuugauuguaggugaa

SEQ ID NO: 1979711 - RNA, 19 nt, Artificial Sequence
  Description of Artificial Sequence: Synthetic oligonucleotide
ugaccaguuccacagcauu

SEQ ID NO: 1979712 - RNA, 19 nt, Artificial Sequence
  Description of Artificial Sequence: Synthetic oligonucleotide
uuaaacccuaaaguaggau

SEQ ID NO: 1979713 - RNA, 19 nt, Artificial Sequence
  Description of Artificial Sequence: Synthetic oligonucleotide
ucucaauaguuuucuccaa

SEQ ID NO: 1979714 - RNA, 19 nt, Artificial Sequence
  Description of Artificial Sequence: Synthetic oligonucleotide
aucuuggaaccuuguuguc

SEQ ID NO: 1979715 - RNA, 19 nt, Artificial Sequence
  Description of Artificial Sequence: Synthetic oligonucleotide
ugugcugcccggucagaag

SEQ ID NO: 1979716 - RNA, 19 nt, Artificial Sequence
  Description of Artificial Sequence: Synthetic oligonucleotide
augcaggucacuggggcac

SEQ ID NO: 1979717 - RNA, 19 nt, Artificial Sequence
  Description of Artificial Sequence: Synthetic oligonucleotide
uaaucucaauaguuuucuc

SEQ ID NO: 1979718 - RNA, 19 nt, Artificial Sequence
  Description of Artificial Sequence: Synthetic oligonucleotide
caaggccaugccauccugg

SEQ ID NO: 1979719 - RNA, 19 nt, Artificial Sequence
  Description of Artificial Sequence: Synthetic oligonucleotide
uaguuuucuccaagcaaua

SEQ ID NO: 1979720 - RNA, 19 nt, Artificial Sequence
  Description of Artificial Sequence: Synthetic oligonucleotide
ucugccgugagagguuucc

SEQ ID NO: 1979721 - RNA, 19 nt, Artificial Sequence
  Description of Artificial Sequence: Synthetic oligonucleotide
ugcugcuauucuccagaag

SEQ ID NO: 1979722 - RNA, 19 nt, Artificial Sequence
  Description of Artificial Sequence: Synthetic oligonucleotide
ugcucccuuucaaaacggc

SEQ ID NO: 1979723 - RNA, 19 nt, Artificial Sequence
  Description of Artificial Sequence: Synthetic oligonucleotide
uuucccuccagguccugga

SEQ ID NO: 1979724 - RNA, 19 nt, Artificial Sequence
  Description of Artificial Sequence: Synthetic oligonucleotide
ggcuuuuauccccaaggcc

SEQ ID NO: 1979725 - RNA, 19 nt, Artificial Sequence
  Description of Artificial Sequence: Synthetic oligonucleotide
ugcacucugccgugagagg

SEQ ID NO: 1979726 - RNA, 19 nt, Artificial Sequence
  Description of Artificial Sequence: Synthetic oligonucleotide
uugugagccaggccgcaga

SEQ ID NO: 1979727 - RNA, 19 nt, Artificial Sequence
  Description of Artificial Sequence: Synthetic oligonucleotide
uaaucuggacgacuuuguu

SEQ ID NO: 1979728 - RNA, 19 nt, Artificial Sequence
  Description of Artificial Sequence: Synthetic oligonucleotide
uucuuguggucaaaauguu

SEQ ID NO: 1979729 - RNA, 19 nt, Artificial Sequence
  Description of Artificial Sequence: Synthetic oligonucleotide
uuguuuugagccucuugua

SEQ ID NO: 1979730 - RNA, 19 nt, Artificial Sequence
  Description of Artificial Sequence: Synthetic oligonucleotide
cuauuuccuuaaguuaaac

SEQ ID NO: 1979731 - RNA, 19 nt, Artificial Sequence
  Description of Artificial Sequence: Synthetic oligonucleotide
agagaacaaguuauuuuga

SEQ ID NO: 1979732 - RNA, 19 nt, Artificial Sequence
  Description of Artificial Sequence: Synthetic oligonucleotide
uuguggucaaaauguuaaa

SEQ ID NO: 1979733 - RNA, 19 nt, Artificial Sequence
  Description of Artificial Sequence: Synthetic oligonucleotide
ugaacucccgggcgccagg

SEQ ID NO: 1979734 - RNA, 19 nt, Artificial Sequence
  Description of Artificial Sequence: Synthetic oligonucleotide
cuuguaucauugaugaaau

SEQ ID NO: 1979735 - RNA, 19 nt, Artificial Sequence
  Description of Artificial Sequence: Synthetic oligonucleotide
gugcacucugccgugagag

SEQ ID NO: 1979736 - RNA, 19 nt, Artificial Sequence
  Description of Artificial Sequence: Synthetic oligonucleotide
ucaugugcacucugccgug

SEQ ID NO: 1979737 - RNA, 19 nt, Artificial Sequence
  Description of Artificial Sequence: Synthetic oligonucleotide
auaaucuggacgacuuugu

SEQ ID NO: 1979738 - RNA, 19 nt, Artificial Sequence
  Description of Artificial Sequence: Synthetic oligonucleotide
ggcuagcugacccacacac

SEQ ID NO: 1979739 - RNA, 19 nt, Artificial Sequence
  Description of Artificial Sequence: Synthetic oligonucleotide
auuagccuucauccgccug

SEQ ID NO: 1979740 - RNA, 19 nt, Artificial Sequence
  Description of Artificial Sequence: Synthetic oligonucleotide
caagcaaucuggacaguga

SEQ ID NO: 1979741 - RNA, 19 nt, Artificial Sequence
  Description of Artificial Sequence: Synthetic oligonucleotide
uccuuaaguuaaacccuaa

SEQ ID NO: 1979742 - RNA, 19 nt, Artificial Sequence
  Description of Artificial Sequence: Synthetic oligonucleotide
gagaguuucaguauagcuu

SEQ ID NO: 1979743 - RNA, 19 nt, Artificial Sequence
  Description of Artificial Sequence: Synthetic oligonucleotide
cuucaagccucguugagcu

SEQ ID NO: 1979744 - RNA, 19 nt, Artificial Sequence
  Description of Artificial Sequence: Synthetic oligonucleotide
ugccgugagagguuucccu

SEQ ID NO: 1979745 - RNA, 19 nt, Artificial Sequence
  Description of Artificial Sequence: Synthetic oligonucleotide
agaccugaccaguuccaca

SEQ ID NO: 1979746 - RNA, 19 nt, Artificial Sequence
  Description of Artificial Sequence: Synthetic oligonucleotide
ugucucaauucaucuucaa

SEQ ID NO: 1979747 - RNA, 19 nt, Artificial Sequence
  Description of Artificial Sequence: Synthetic oligonucleotide
gacauugaacucacagaca

SEQ ID NO: 1979748 - RNA, 19 nt, Artificial Sequence
  Description of Artificial Sequence: Synthetic oligonucleotide
ugucuagaauuuucuugua

SEQ ID NO: 1979749 - RNA, 19 nt, Artificial Sequence
  Description of Artificial Sequence: Synthetic oligonucleotide
ccccaugugaaauaaauaa

SEQ ID NO: 1979750 - RNA, 19 nt, Artificial Sequence
  Description of Artificial Sequence: Synthetic oligonucleotide
gaaugccugugcugcccgg

SEQ ID NO: 1979751 - RNA, 19 nt, Artificial Sequence
  Description of Artificial Sequence: Synthetic oligonucleotide
gaauucugaugcaagaguu

SEQ ID NO: 1979752 - RNA, 19 nt, Artificial Sequence
  Description of Artificial Sequence: Synthetic oligonucleotide
auccuguucuucaugggcu

SEQ ID NO: 1979753 - RNA, 19 nt, Artificial Sequence
  Description of Artificial Sequence: Synthetic oligonucleotide
ggcgccaggaaucuugcug

SEQ ID NO: 1979754 - RNA, 19 nt, Artificial Sequence
  Description of Artificial Sequence: Synthetic oligonucleotide
ggauauuaucuuuauuacu

SEQ ID NO: 1979755 - RNA, 19 nt, Artificial Sequence
  Description of Artificial Sequence: Synthetic oligonucleotide
auaucuugucucaauucau

SEQ ID NO: 1979756 - RNA, 19 nt, Artificial Sequence
  Description of Artificial Sequence: Synthetic oligonucleotide
aucuggacagugaaugccu

SEQ ID NO: 1979757 - RNA, 19 nt, Artificial Sequence
  Description of Artificial Sequence: Synthetic oligonucleotide
ugcccggucagaagagaac

SEQ ID NO: 1979758 - RNA, 19 nt, Artificial Sequence
  Description of Artificial Sequence: Synthetic oligonucleotide
ugagacaaugcaggucacu

SEQ ID NO: 1979759 - RNA, 19 nt, Artificial Sequence
  Description of Artificial Sequence: Synthetic oligonucleotide
guuaaacccuaaaguagga

SEQ ID NO: 1979760 - RNA, 19 nt, Artificial Sequence
  Description of Artificial Sequence: Synthetic oligonucleotide
uuugugagccaggccgcag

SEQ ID NO: 1979761 - RNA, 19 nt, Artificial Sequence
  Description of Artificial Sequence: Synthetic oligonucleotide
ugugaaauacaaggaucuu

SEQ ID NO: 1979762 - RNA, 19 nt, Artificial Sequence
  Description of Artificial Sequence: Synthetic oligonucleotide
gugaaguuugugagccagg

SEQ ID NO: 1979763 - RNA, 19 nt, Artificial Sequence
  Description of Artificial Sequence: Synthetic oligonucleotide
ucuggacgacuuuguuuug

SEQ ID NO: 1979764 - RNA, 19 nt, Artificial Sequence
  Description of Artificial Sequence: Synthetic oligonucleotide
guggaaaaucauccagcca

SEQ ID NO: 1979765 - RNA, 19 nt, Artificial Sequence
  Description of Artificial Sequence: Synthetic oligonucleotide
aguuuucuccaagcaauau

SEQ ID NO: 1979766 - RNA, 19 nt, Artificial Sequence
  Description of Artificial Sequence: Synthetic oligonucleotide
caguauagcuucugagaca

SEQ ID NO: 1979767 - RNA, 19 nt, Artificial Sequence
  Description of Artificial Sequence: Synthetic oligonucleotide
aaugccugugcugcccggu

SEQ ID NO: 1979768 - RNA, 19 nt, Artificial Sequence
  Description of Artificial Sequence: Synthetic oligonucleotide
cagcugugaacucccgggc

SEQ ID NO: 1979769 - RNA, 19 nt, Artificial Sequence
  Description of Artificial Sequence: Synthetic oligonucleotide
uuguaucauugaugaaaua

SEQ ID NO: 1979770 - RNA, 19 nt, Artificial Sequence
  Description of Artificial Sequence: Synthetic oligonucleotide
caaagcuugcucccuuuca

SEQ ID NO: 1979771 - RNA, 19 nt, Artificial Sequence
  Description of Artificial Sequence: Synthetic oligonucleotide
uggaaccuuguugucuaga

SEQ ID NO: 1979772 - RNA, 19 nt, Artificial Sequence
  Description of Artificial Sequence: Synthetic oligonucleotide
cuauucuccagaagacaaa

SEQ ID NO: 1979773 - RNA, 19 nt, Artificial Sequence
  Description of Artificial Sequence: Synthetic oligonucleotide
cuucaagaauucugaugca

SEQ ID NO: 1979774 - RNA, 19 nt, Artificial Sequence
  Description of Artificial Sequence: Synthetic oligonucleotide
gauguuugccagagaccug

SEQ ID NO: 1979775 - RNA, 19 nt, Artificial Sequence
  Description of Artificial Sequence: Synthetic oligonucleotide
gagagguuucccuccaggu

SEQ ID NO: 1979776 - RNA, 19 nt, Artificial Sequence
  Description of Artificial Sequence: Synthetic oligonucleotide
ucaaaacggcuagcugacc

SEQ ID NO: 1979777 - RNA, 19 nt, Artificial Sequence
  Description of Artificial Sequence: Synthetic oligonucleotide
cucaugugcacucugccgu

SEQ ID NO: 1979778 - RNA, 19 nt, Artificial Sequence
  Description of Artificial Sequence: Synthetic oligonucleotide
cugaacagcaccccugcaa

SEQ ID NO: 1979779 - RNA, 19 nt, Artificial Sequence
  Description of Artificial Sequence: Synthetic oligonucleotide
aucauccagccaguguuug

SEQ ID NO: 1979780 - RNA, 19 nt, Artificial Sequence
  Description of Artificial Sequence: Synthetic oligonucleotide
gcagauguaauaaucucaa

SEQ ID NO: 1979781 - RNA, 19 nt, Artificial Sequence
  Description of Artificial Sequence: Synthetic oligonucleotide
uguuugccagagaccugac

SEQ ID NO: 1979782 - RNA, 19 nt, Artificial Sequence
  Description of Artificial Sequence: Synthetic oligonucleotide
ugccugugcugcccgguca

SEQ ID NO: 1979783 - RNA, 19 nt, Artificial Sequence
  Description of Artificial Sequence: Synthetic oligonucleotide
acccuaaaguaggauauua

SEQ ID NO: 1979784 - RNA, 19 nt, Artificial Sequence
  Description of Artificial Sequence: Synthetic oligonucleotide
augccugugcugcccgguc

SEQ ID NO: 1979785 - RNA, 19 nt, Artificial Sequence
  Description of Artificial Sequence: Synthetic oligonucleotide
gugaaugccugugcugccc

SEQ ID NO: 1979786 - RNA, 19 nt, Artificial Sequence
  Description of Artificial Sequence: Synthetic oligonucleotide
uuuuauccccaaggccaug

SEQ ID NO: 1979787 - RNA, 19 nt, Artificial Sequence
  Description of Artificial Sequence: Synthetic oligonucleotide
ggaaccuuguugucuagaa

SEQ ID NO: 1979788 - RNA, 19 nt, Artificial Sequence
  Description of Artificial Sequence: Synthetic oligonucleotide
uucauccgccuggugaccu

SEQ ID NO: 1979789 - RNA, 19 nt, Artificial Sequence
  Description of Artificial Sequence: Synthetic oligonucleotide
agacaaagcuugcucccuu

SEQ ID NO: 1979790 - RNA, 19 nt, Artificial Sequence
  Description of Artificial Sequence: Synthetic oligonucleotide
gcuugcucccuuucaaaac

SEQ ID NO: 1979791 - RNA, 19 nt, Artificial Sequence
  Description of Artificial Sequence: Synthetic oligonucleotide
uuggcaaaacaagcacuau

SEQ ID NO: 1979792 - RNA, 19 nt, Artificial Sequence
  Description of Artificial Sequence: Synthetic oligonucleotide
gcuauucuccagaagacaa

SEQ ID NO: 1979793 - RNA, 19 nt, Artificial Sequence
  Description of Artificial Sequence: Synthetic oligonucleotide
ggacagugaaugccugugc

SEQ ID NO: 1979794 - RNA, 19 nt, Artificial Sequence
  Description of Artificial Sequence: Synthetic oligonucleotide
gugcugcccggucagaaga

SEQ ID NO: 1979795 - RNA, 19 nt, Artificial Sequence
  Description of Artificial Sequence: Synthetic oligonucleotide
uccuguucuucaugggcuu

SEQ ID NO: 1979796 - RNA, 19 nt, Artificial Sequence
  Description of Artificial Sequence: Synthetic oligonucleotide
gcugugaacucccgggcgc

SEQ ID NO: 1979797 - RNA, 19 nt, Artificial Sequence
  Description of Artificial Sequence: Synthetic oligonucleotide
gccucuuguaucauugaug

SEQ ID NO: 1979798 - RNA, 19 nt, Artificial Sequence
  Description of Artificial Sequence: Synthetic oligonucleotide
aacccuaaaguaggauauu

SEQ ID NO: 1979799 - RNA, 19 nt, Artificial Sequence
  Description of Artificial Sequence: Synthetic oligonucleotide
aguuaacaucuuggaaccu

SEQ ID NO: 1979800 - RNA, 19 nt, Artificial Sequence
  Description of Artificial Sequence: Synthetic oligonucleotide
gccaugccauccuggaggg

SEQ ID NO: 1979801 - RNA, 19 nt, Artificial Sequence
  Description of Artificial Sequence: Synthetic oligonucleotide
ugguaccagguggaaaauc

SEQ ID NO: 1979802 - RNA, 19 nt, Artificial Sequence
  Description of Artificial Sequence: Synthetic oligonucleotide
gauuguaggugaaggaguu

SEQ ID NO: 1979803 - RNA, 19 nt, Artificial Sequence
  Description of Artificial Sequence: Synthetic oligonucleotide
cugagacaaugcaggucac

SEQ ID NO: 1979804 - RNA, 19 nt, Artificial Sequence
  Description of Artificial Sequence: Synthetic oligonucleotide
cuggggcacccucucagug

SEQ ID NO: 1979805 - RNA, 19 nt, Artificial Sequence
  Description of Artificial Sequence: Synthetic oligonucleotide
agagaccugaccaguucca

SEQ ID NO: 1979806 - RNA, 19 nt, Artificial Sequence
  Description of Artificial Sequence: Synthetic oligonucleotide
acucccgggcgccaggaau

SEQ ID NO: 1979807 - RNA, 19 nt, Artificial Sequence
  Description of Artificial Sequence: Synthetic oligonucleotide
gugaaauacaaggaucuuu

SEQ ID NO: 1979808 - RNA, 19 nt, Artificial Sequence
  Description of Artificial Sequence: Synthetic oligonucleotide
gugagagguuucccuccag

SEQ ID NO: 1979809 - RNA, 19 nt, Artificial Sequence
  Description of Artificial Sequence: Synthetic oligonucleotide
ugaccuccucaugugcacu

SEQ ID NO: 1979810 - RNA, 19 nt, Artificial Sequence
  Description of Artificial Sequence: Synthetic oligonucleotide
gaaccuuguugucuagaau

SEQ ID NO: 1979811 - RNA, 19 nt, Artificial Sequence
  Description of Artificial Sequence: Synthetic oligonucleotide
cugugaacucccgggcgcc

SEQ ID NO: 1979812 - RNA, 19 nt, Artificial Sequence
  Description of Artificial Sequence: Synthetic oligonucleotide
ccaagcaauauuuuaacuu

SEQ ID NO: 1979813 - RNA, 19 nt, Artificial Sequence
  Description of Artificial Sequence: Synthetic oligonucleotide
aaucuccauugaacaacau

SEQ ID NO: 1979814 - RNA, 19 nt, Artificial Sequence
  Description of Artificial Sequence: Synthetic oligonucleotide
gucacuggggcacccucuc

SEQ ID NO: 1979815 - RNA, 19 nt, Artificial Sequence
  Description of Artificial Sequence: Synthetic oligonucleotide
guuaacaucuuggaaccuu

SEQ ID NO: 1979816 - RNA, 19 nt, Artificial Sequence
  Description of Artificial Sequence: Synthetic oligonucleotide
uccauucagcaaagauguu

SEQ ID NO: 1979817 - RNA, 19 nt, Artificial Sequence
  Description of Artificial Sequence: Synthetic oligonucleotide
cccuuuggcaaaacaagca

SEQ ID NO: 1979818 - RNA, 19 nt, Artificial Sequence
  Description of Artificial Sequence: Synthetic oligonucleotide
cuucauccgccuggugacc

SEQ ID NO: 1979819 - RNA, 19 nt, Artificial Sequence
  Description of Artificial Sequence: Synthetic oligonucleotide
auuguaggugaaggaguuu

SEQ ID NO: 1979820 - RNA, 19 nt, Artificial Sequence
  Description of Artificial Sequence: Synthetic oligonucleotide
cuuuuauccccaaggccau

SEQ ID NO: 1979821 - RNA, 19 nt, Artificial Sequence
  Description of Artificial Sequence: Synthetic oligonucleotide
aaaccacgagcugcucaaa

SEQ ID NO: 1979822 - RNA, 19 nt, Artificial Sequence
  Description of Artificial Sequence: Synthetic oligonucleotide
ugcaggucacuggggcacc

SEQ ID NO: 1979823 - RNA, 19 nt, Artificial Sequence
  Description of Artificial Sequence: Synthetic oligonucleotide
agaagcuaagaggcuuuua

SEQ ID NO: 1979824 - RNA, 19 nt, Artificial Sequence
  Description of Artificial Sequence: Synthetic oligonucleotide
uccccaaggccaugccauc

SEQ ID NO: 1979825 - RNA, 19 nt, Artificial Sequence
  Description of Artificial Sequence: Synthetic oligonucleotide
ccgugagagguuucccucc

SEQ ID NO: 1979826 - RNA, 19 nt, Artificial Sequence
  Description of Artificial Sequence: Synthetic oligonucleotide
cacccucucagugcagaug

SEQ ID NO: 1979827 - RNA, 19 nt, Artificial Sequence
  Description of Artificial Sequence: Synthetic oligonucleotide
ccggucagaagagaacaag

SEQ ID NO: 1979828 - RNA, 19 nt, Artificial Sequence
  Description of Artificial Sequence: Synthetic oligonucleotide
aacggcuagcugacccaca

SEQ ID NO: 1979829 - RNA, 19 nt, Artificial Sequence
  Description of Artificial Sequence: Synthetic oligonucleotide
cugaugcaagaguuaacau

SEQ ID NO: 1979830 - RNA, 19 nt, Artificial Sequence
  Description of Artificial Sequence: Synthetic oligonucleotide
ccaguuccacagcauuagc

SEQ ID NO: 1979831 - RNA, 19 nt, Artificial Sequence
  Description of Artificial Sequence: Synthetic oligonucleotide
cugugaaguuugugagcca

SEQ ID NO: 1979832 - RNA, 19 nt, Artificial Sequence
  Description of Artificial Sequence: Synthetic oligonucleotide
cuguauaaucuggacgacu

SEQ ID NO: 1979833 - RNA, 19 nt, Artificial Sequence
  Description of Artificial Sequence: Synthetic oligonucleotide
gccgugagagguuucccuc

SEQ ID NO: 1979834 - RNA, 19 nt, Artificial Sequence
  Description of Artificial Sequence: Synthetic oligonucleotide
cugcccggucagaagagaa

SEQ ID NO: 1979835 - RNA, 19 nt, Artificial Sequence
  Description of Artificial Sequence: Synthetic oligonucleotide
cugccgugagagguuuccc

SEQ ID NO: 1979836 - RNA, 19 nt, Artificial Sequence
  Description of Artificial Sequence: Synthetic oligonucleotide
cucuuguaucauugaugaa

SEQ ID NO: 1979837 - RNA, 19 nt, Artificial Sequence
  Description of Artificial Sequence: Synthetic oligonucleotide
ccuuaaguuaaacccuaaa

SEQ ID NO: 1979838 - RNA, 19 nt, Artificial Sequence
  Description of Artificial Sequence: Synthetic oligonucleotide
aggccgcagagaguuucag

SEQ ID NO: 1979839 - RNA, 19 nt, Artificial Sequence
  Description of Artificial Sequence: Synthetic oligonucleotide
guauaaucuggacgacuuu

SEQ ID NO: 1979840 - RNA, 19 nt, Artificial Sequence
  Description of Artificial Sequence: Synthetic oligonucleotide
ggggcacccucucagugca

SEQ ID NO: 1979841 - RNA, 19 nt, Artificial Sequence
  Description of Artificial Sequence: Synthetic oligonucleotide
ccugaccaguuccacagca

SEQ ID NO: 1979842 - RNA, 19 nt, Artificial Sequence
  Description of Artificial Sequence: Synthetic oligonucleotide
guuugugagccaggccgca

SEQ ID NO: 1979843 - RNA, 19 nt, Artificial Sequence
  Description of Artificial Sequence: Synthetic oligonucleotide
ccagagaccugaccaguuc

SEQ ID NO: 1979844 - RNA, 19 nt, Artificial Sequence
  Description of Artificial Sequence: Synthetic oligonucleotide
uccgccuggugaccuccuc

SEQ ID NO: 1979845 - RNA, 19 nt, Artificial Sequence
  Description of Artificial Sequence: Synthetic oligonucleotide
gcccggucagaagagaaca

SEQ ID NO: 1979846 - RNA, 19 nt, Artificial Sequence
  Description of Artificial Sequence: Synthetic oligonucleotide
gcuguauaaucuggacgac

SEQ ID NO: 1979847 - RNA, 19 nt, Artificial Sequence
  Description of Artificial Sequence: Synthetic oligonucleotide
ccgggcgccaggaaucuug

SEQ ID NO: 1979848 - RNA, 19 nt, Artificial Sequence
  Description of Artificial Sequence: Synthetic oligonucleotide
gaacucccgggcgccagga

SEQ ID NO: 1979849 - RNA, 19 nt, Artificial Sequence
  Description of Artificial Sequence: Synthetic oligonucleotide
acucugccgugagagguuu

SEQ ID NO: 1979850 - RNA, 19 nt, Artificial Sequence
  Description of Artificial Sequence: Synthetic oligonucleotide
cagauguaauaaucucaau

SEQ ID NO: 1979851 - RNA, 19 nt, Artificial Sequence
  Description of Artificial Sequence: Synthetic oligonucleotide
cuggacagugaaugccugu

SEQ ID NO: 1979852 - RNA, 19 nt, Artificial Sequence
  Description of Artificial Sequence: Synthetic oligonucleotide
caggccgcagagaguuuca

SEQ ID NO: 1979853 - RNA, 19 nt, Artificial Sequence
  Description of Artificial Sequence: Synthetic oligonucleotide
ucccgggcgccaggaaucu

SEQ ID NO: 1979854 - RNA, 19 nt, Artificial Sequence
  Description of Artificial Sequence: Synthetic oligonucleotide
ggaaaaucauccagccagu

SEQ ID NO: 1979855 - RNA, 19 nt, Artificial Sequence
  Description of Artificial Sequence: Synthetic oligonucleotide
gggccagccucugaucccc

SEQ ID NO: 1979856 - RNA, 19 nt, Artificial Sequence
  Description of Artificial Sequence: Synthetic oligonucleotide
caugugcacucugccguga

SEQ ID NO: 1979857 - RNA, 19 nt, Artificial Sequence
  Description of Artificial Sequence: Synthetic oligonucleotide
cucugccgugagagguuuc

SEQ ID NO: 1979858 - RNA, 19 nt, Artificial Sequence
  Description of Artificial Sequence: Synthetic oligonucleotide
guaccagguggaaaaucau

SEQ ID NO: 1979859 - RNA, 19 nt, Artificial Sequence
  Description of Artificial Sequence: Synthetic oligonucleotide
cauuagccuucauccgccu

SEQ ID NO: 1979860 - RNA, 19 nt, Artificial Sequence
  Description of Artificial Sequence: Synthetic oligonucleotide
cccuuucaaaacggcuagc

SEQ ID NO: 1979861 - RNA, 19 nt, Artificial Sequence
  Description of Artificial Sequence: Synthetic oligonucleotide
ggcacccucucagugcaga

SEQ ID NO: 1979862 - RNA, 19 nt, Artificial Sequence
  Description of Artificial Sequence: Synthetic oligonucleotide
gcacucugccgugagaggu

SEQ ID NO: 1979863 - RNA, 19 nt, Artificial Sequence
  Description of Artificial Sequence: Synthetic oligonucleotide
cccuaaaguaggauauuau

SEQ ID NO: 1979864 - RNA, 19 nt, Artificial Sequence
  Description of Artificial Sequence: Synthetic oligonucleotide
cgacuuuguuuugagccuc

SEQ ID NO: 1979865 - RNA, 19 nt, Artificial Sequence
  Description of Artificial Sequence: Synthetic oligonucleotide
gagcugguaccagguggaa

SEQ ID NO: 1979866 - RNA, 19 nt, Artificial Sequence
  Description of Artificial Sequence: Synthetic oligonucleotide
gugagccaggccgcagaga

SEQ ID NO: 1979867 - RNA, 19 nt, Artificial Sequence
  Description of Artificial Sequence: Synthetic oligonucleotide
cgcagagaguuucaguaua

SEQ ID NO: 1979868 - RNA, 19 nt, Artificial Sequence
  Description of Artificial Sequence: Synthetic oligonucleotide
gagcagcuugcuguauaau

SEQ ID NO: 1979869 - RNA, 19 nt, Artificial Sequence
  Description of Artificial Sequence: Synthetic oligonucleotide
aagccucguugagcuggua

SEQ ID NO: 1979870 - RNA, 19 nt, Artificial Sequence
  Description of Artificial Sequence: Synthetic oligonucleotide
gcaggucacuggggcaccc

SEQ ID NO: 1979871 - RNA, 19 nt, Artificial Sequence
  Description of Artificial Sequence: Synthetic oligonucleotide
ggccgcagagaguuucagu

SEQ ID NO: 1979872 - RNA, 19 nt, Artificial Sequence
  Description of Artificial Sequence: Synthetic oligonucleotide
cacucugccgugagagguu

SEQ ID NO: 1979873 - RNA, 19 nt, Artificial Sequence
  Description of Artificial Sequence: Synthetic oligonucleotide
gcugcccggucagaagaga

SEQ ID NO: 1979874 - RNA, 19 nt, Artificial Sequence
  Description of Artificial Sequence: Synthetic oligonucleotide
auccgccuggugaccuccu

SEQ ID NO: 1979875 - RNA, 19 nt, Artificial Sequence
  Description of Artificial Sequence: Synthetic oligonucleotide
ccagaagcuaagaggcuuu

SEQ ID NO: 1979876 - RNA, 19 nt, Artificial Sequence
  Description of Artificial Sequence: Synthetic oligonucleotide
ccgccuggugaccuccuca

SEQ ID NO: 1979877 - RNA, 19 nt, Artificial Sequence
  Description of Artificial Sequence: Synthetic oligonucleotide
cugguaccagguggaaaau

SEQ ID NO: 1979878 - RNA, 19 nt, Artificial Sequence
  Description of Artificial Sequence: Synthetic oligonucleotide
cagaagcuaagaggcuuuu

SEQ ID NO: 1979879 - RNA, 19 nt, Artificial Sequence
  Description of Artificial Sequence: Synthetic oligonucleotide
cacaagcaaucuggacagu

SEQ ID NO: 1979880 - RNA, 19 nt, Artificial Sequence
  Description of Artificial Sequence: Synthetic oligonucleotide
guauagcuucugagacaau

SEQ ID NO: 1979881 - RNA, 19 nt, Artificial Sequence
  Description of Artificial Sequence: Synthetic oligonucleotide
ccgcagagaguuucaguau

SEQ ID NO: 1979882 - RNA, 19 nt, Artificial Sequence
  Description of Artificial Sequence: Synthetic oligonucleotide
gggcgccaggaaucuugcu

SEQ ID NO: 1979883 - RNA, 19 nt, Artificial Sequence
  Description of Artificial Sequence: Synthetic oligonucleotide
cggcuagcugacccacaca

SEQ ID NO: 1979884 - RNA, 19 nt, Artificial Sequence
  Description of Artificial Sequence: Synthetic oligonucleotide
cgccuggugaccuccucau

SEQ ID NO: 1979885 - RNA, 19 nt, Artificial Sequence
  Description of Artificial Sequence: Synthetic oligonucleotide
gccaggccgcagagaguuu

SEQ ID NO: 1979886 - RNA, 19 nt, Artificial Sequence
  Description of Artificial Sequence: Synthetic oligonucleotide
cccgggcgccaggaaucuu

SEQ ID NO: 1979887 - RNA, 19 nt, Artificial Sequence
  Description of Artificial Sequence: Synthetic oligonucleotide
aaucguuacacugauaggg

SEQ ID NO: 1979888 - RNA, 19 nt, Artificial Sequence
  Description of Artificial Sequence: Synthetic oligonucleotide
aaaauuugaacuaugguug

SEQ ID NO: 1979889 - RNA, 19 nt, Artificial Sequence
  Description of Artificial Sequence: Synthetic oligonucleotide
acaaucguuacacugauag

SEQ ID NO: 1979890 - RNA, 19 nt, Artificial Sequence
  Description of Artificial Sequence: Synthetic oligonucleotide
ugagcuauugcuaaaggcc

SEQ ID NO: 1979891 - RNA, 19 nt, Artificial Sequence
  Description of Artificial Sequence: Synthetic oligonucleotide
ucgauuucaaaccuugacg

SEQ ID NO: 1979892 - RNA, 19 nt, Artificial Sequence
  Description of Artificial Sequence: Synthetic oligonucleotide
auauguaacgcuucucucc

SEQ ID NO: 1979893 - RNA, 19 nt, Artificial Sequence
  Description of Artificial Sequence: Synthetic oligonucleotide
acaccuuacagucauaggg

SEQ ID NO: 1979894 - RNA, 19 nt, Artificial Sequence
  Description of Artificial Sequence: Synthetic oligonucleotide
aaucacagggaugaugucc

SEQ ID NO: 1979895 - RNA, 19 nt, Artificial Sequence
  Description of Artificial Sequence: Synthetic oligonucleotide
uuugaacuaugguugaagg

SEQ ID NO: 1979896 - RNA, 19 nt, Artificial Sequence
  Description of Artificial Sequence: Synthetic oligonucleotide
aucuacuguacuuauuggc

SEQ ID NO: 1979897 - RNA, 19 nt, Artificial Sequence
  Description of Artificial Sequence: Synthetic oligonucleotide
ucuaugaugcuuauuaaaa

SEQ ID NO: 1979898 - RNA, 19 nt, Artificial Sequence
  Description of Artificial Sequence: Synthetic oligonucleotide
aacgcuucucuccuggggc

SEQ ID NO: 1979899 - RNA, 19 nt, Artificial Sequence
  Description of Artificial Sequence: Synthetic oligonucleotide
auuaaaauuugaacuaugg

SEQ ID NO: 1979900 - RNA, 19 nt, Artificial Sequence
  Description of Artificial Sequence: Synthetic oligonucleotide
aaccuugacgcuuucuugg

SEQ ID NO: 1979901 - RNA, 19 nt, Artificial Sequence
  Description of Artificial Sequence: Synthetic oligonucleotide
ugaggauucgauuucaaac

SEQ ID NO: 1979902 - RNA, 19 nt, Artificial Sequence
  Description of Artificial Sequence: Synthetic oligonucleotide
gaggauucgauuucaaacc

SEQ ID NO: 1979903 - RNA, 19 nt, Artificial Sequence
  Description of Artificial Sequence: Synthetic oligonucleotide
augaugucccuuuugaguc

SEQ ID NO: 1979904 - RNA, 19 nt, Artificial Sequence
  Description of Artificial Sequence: Synthetic oligonucleotide
gauucuaugaugcuuauua

SEQ ID NO: 1979905 - RNA, 19 nt, Artificial Sequence
  Description of Artificial Sequence: Synthetic oligonucleotide
ucuacuguacuuauuggca

SEQ ID NO: 1979906 - RNA, 19 nt, Artificial Sequence
  Description of Artificial Sequence: Synthetic oligonucleotide
ugagguuugagcuauugcu

SEQ ID NO: 1979907 - RNA, 19 nt, Artificial Sequence
  Description of Artificial Sequence: Synthetic oligonucleotide
uguucuguaaugaagggua

SEQ ID NO: 1979908 - RNA, 19 nt, Artificial Sequence
  Description of Artificial Sequence: Synthetic oligonucleotide
uauuaaaauuugaacuaug

SEQ ID NO: 1979909 - RNA, 19 nt, Artificial Sequence
  Description of Artificial Sequence: Synthetic oligonucleotide
ugaacuaugguugaaggcu

SEQ ID NO: 1979910 - RNA, 19 nt, Artificial Sequence
  Description of Artificial Sequence: Synthetic oligonucleotide
auacaggaguucuugcucc

SEQ ID NO: 1979911 - RNA, 19 nt, Artificial Sequence
  Description of Artificial Sequence: Synthetic oligonucleotide
ucuguaaugaaggguaagg

SEQ ID NO: 1979912 - RNA, 19 nt, Artificial Sequence
  Description of Artificial Sequence: Synthetic oligonucleotide
uuugagcuauugcuaaagg

SEQ ID NO: 1979913 - RNA, 19 nt, Artificial Sequence
  Description of Artificial Sequence: Synthetic oligonucleotide
guaaugaaggguaagguug

SEQ ID NO: 1979914 - RNA, 19 nt, Artificial Sequence
  Description of Artificial Sequence: Synthetic oligonucleotide
uguaacgcuucucuccugg

SEQ ID NO: 1979915 - RNA, 19 nt, Artificial Sequence
  Description of Artificial Sequence: Synthetic oligonucleotide
ugaugcuuauuaaaauuug

SEQ ID NO: 1979916 - RNA, 19 nt, Artificial Sequence
  Description of Artificial Sequence: Synthetic oligonucleotide
aaauuugaacuaugguuga

SEQ ID NO: 1979917 - RNA, 19 nt, Artificial Sequence
  Description of Artificial Sequence: Synthetic oligonucleotide
uuuugaguccgucugcgug

SEQ ID NO: 1979918 - RNA, 19 nt, Artificial Sequence
  Description of Artificial Sequence: Synthetic oligonucleotide
uaugaugcuuauuaaaauu

SEQ ID NO: 1979919 - RNA, 19 nt, Artificial Sequence
  Description of Artificial Sequence: Synthetic oligonucleotide
uucgauuucaaaccuugac

SEQ ID NO: 1979920 - RNA, 19 nt, Artificial Sequence
  Description of Artificial Sequence: Synthetic oligonucleotide
uuucccacaccuuacaguc

SEQ ID NO: 1979921 - RNA, 19 nt, Artificial Sequence
  Description of Artificial Sequence: Synthetic oligonucleotide
gaucuacuguacuuauugg

SEQ ID NO: 1979922 - RNA, 19 nt, Artificial Sequence
  Description of Artificial Sequence: Synthetic oligonucleotide
ugauguuuaaggaggucug

SEQ ID NO: 1979923 - RNA, 19 nt, Artificial Sequence
  Description of Artificial Sequence: Synthetic oligonucleotide
agugguuacaccaguaggg

SEQ ID NO: 1979924 - RNA, 19 nt, Artificial Sequence
  Description of Artificial Sequence: Synthetic oligonucleotide
uauguaacgcuucucuccu

SEQ ID NO: 1979925 - RNA, 19 nt, Artificial Sequence
  Description of Artificial Sequence: Synthetic oligonucleotide
auugcuaaaggccuuccca

SEQ ID NO: 1979926 - RNA, 19 nt, Artificial Sequence
  Description of Artificial Sequence: Synthetic oligonucleotide
uguuuaaggaggucugagc

SEQ ID NO: 1979927 - RNA, 19 nt, Artificial Sequence
  Description of Artificial Sequence: Synthetic oligonucleotide
gaugcgguagugucgaaug

SEQ ID NO: 1979928 - RNA, 19 nt, Artificial Sequence
  Description of Artificial Sequence: Synthetic oligonucleotide
ugucgaaugaggcugcccu

SEQ ID NO: 1979929 - RNA, 19 nt, Artificial Sequence
  Description of Artificial Sequence: Synthetic oligonucleotide
gucucuuggauauacagga

SEQ ID NO: 1979930 - RNA, 19 nt, Artificial Sequence
  Description of Artificial Sequence: Synthetic oligonucleotide
gauucgauuucaaaccuug

SEQ ID NO: 1979931 - RNA, 19 nt, Artificial Sequence
  Description of Artificial Sequence: Synthetic oligonucleotide
  modified_base (16)..(16): a, c, u, g, unknown or other
gaagcuuuugcucccncuc

SEQ ID NO: 1979932 - RNA, 19 nt, Artificial Sequence
  Description of Artificial Sequence: Synthetic oligonucleotide
cuuauuggcagcaaucaca

SEQ ID NO: 1979933 - RNA, 19 nt, Artificial Sequence
  Description of Artificial Sequence: Synthetic oligonucleotide
guguguucuguaaugaagg

SEQ ID NO: 1979934 - RNA, 19 nt, Artificial Sequence
  Description of Artificial Sequence: Synthetic oligonucleotide
aagauuugauuugcuacag

SEQ ID NO: 1979935 - RNA, 19 nt, Artificial Sequence
  Description of Artificial Sequence: Synthetic oligonucleotide
uguaaugaaggguaagguu

SEQ ID NO: 1979936 - RNA, 19 nt, Artificial Sequence
  Description of Artificial Sequence: Synthetic oligonucleotide
ggaucuacuguacuuauug

SEQ ID NO: 1979937 - RNA, 19 nt, Artificial Sequence
  Description of Artificial Sequence: Synthetic oligonucleotide
uuauuaaaauuugaacuau

SEQ ID NO: 1979938 - RNA, 19 nt, Artificial Sequence
  Description of Artificial Sequence: Synthetic oligonucleotide
aucacagggaugauguccc

SEQ ID NO: 1979939 - RNA, 19 nt, Artificial Sequence
  Description of Artificial Sequence: Synthetic oligonucleotide
auauacaggaguucuugcu

SEQ ID NO: 1979940 - RNA, 19 nt, Artificial Sequence
  Description of Artificial Sequence: Synthetic oligonucleotide
aaacucuuuccacaaucgu

SEQ ID NO: 1979941 - RNA, 19 nt, Artificial Sequence
  Description of Artificial Sequence: Synthetic oligonucleotide
cuuacagucauagggccgg

SEQ ID NO: 1979942 - RNA, 19 nt, Artificial Sequence
  Description of Artificial Sequence: Synthetic oligonucleotide
uuaaggaggucugagcucu

SEQ ID NO: 1979943 - RNA, 19 nt, Artificial Sequence
  Description of Artificial Sequence: Synthetic oligonucleotide
acaccaguaggguuucucg

SEQ ID NO: 1979944 - RNA, 19 nt, Artificial Sequence
  Description of Artificial Sequence: Synthetic oligonucleotide
auuugaacuaugguugaag

SEQ ID NO: 1979945 - RNA, 19 nt, Artificial Sequence
  Description of Artificial Sequence: Synthetic oligonucleotide
guugaugggaacugagacc

SEQ ID NO: 1979946 - RNA, 19 nt, Artificial Sequence
  Description of Artificial Sequence: Synthetic oligonucleotide
uguacuuauuggcagcaau

SEQ ID NO: 1979947 - RNA, 19 nt, Artificial Sequence
  Description of Artificial Sequence: Synthetic oligonucleotide
caccuuacagucauagggc

SEQ ID NO: 1979948 - RNA, 19 nt, Artificial Sequence
  Description of Artificial Sequence: Synthetic oligonucleotide
cuacuguacuuauuggcag

SEQ ID NO: 1979949 - RNA, 19 nt, Artificial Sequence
  Description of Artificial Sequence: Synthetic oligonucleotide
uuuagcagacacugguucu

SEQ ID NO: 1979950 - RNA, 19 nt, Artificial Sequence
  Description of Artificial Sequence: Synthetic oligonucleotide
uaacgcuucucuccugggg

SEQ ID NO: 1979951 - RNA, 19 nt, Artificial Sequence
  Description of Artificial Sequence: Synthetic oligonucleotide
guagugucgaaugaggcug

SEQ ID NO: 1979952 - RNA, 19 nt, Artificial Sequence
  Description of Artificial Sequence: Synthetic oligonucleotide
acagugguuacaccaguag

SEQ ID NO: 1979953 - RNA, 19 nt, Artificial Sequence
  Description of Artificial Sequence: Synthetic oligonucleotide
ucuuggauauacaggaguu

SEQ ID NO: 1979954 - RNA, 19 nt, Artificial Sequence
  Description of Artificial Sequence: Synthetic oligonucleotide
ucccuuuugaguccgucug

SEQ ID NO: 1979955 - RNA, 19 nt, Artificial Sequence
  Description of Artificial Sequence: Synthetic oligonucleotide
cagucucuuggauauacag

SEQ ID NO: 1979956 - RNA, 19 nt, Artificial Sequence
  Description of Artificial Sequence: Synthetic oligonucleotide
uuugaguccgucugcguga

SEQ ID NO: 1979957 - RNA, 19 nt, Artificial Sequence
  Description of Artificial Sequence: Synthetic oligonucleotide
acucugcacauauguaacg

SEQ ID NO: 1979958 - RNA, 19 nt, Artificial Sequence
  Description of Artificial Sequence: Synthetic oligonucleotide
uauugcuaaaggccuuccc

SEQ ID NO: 1979959 - RNA, 19 nt, Artificial Sequence
  Description of Artificial Sequence: Synthetic oligonucleotide
cuccucaccagucucuugg

SEQ ID NO: 1979960 - RNA, 19 nt, Artificial Sequence
  Description of Artificial Sequence: Synthetic oligonucleotide
uucuccggugcuuugugag

SEQ ID NO: 1979961 - RNA, 19 nt, Artificial Sequence
  Description of Artificial Sequence: Synthetic oligonucleotide
accaguuacagugcuuccc

SEQ ID NO: 1979962 - RNA, 19 nt, Artificial Sequence
  Description of Artificial Sequence: Synthetic oligonucleotide
cagucuuacacugguaggg

SEQ ID NO: 1979963 - RNA, 19 nt, Artificial Sequence
  Description of Artificial Sequence: Synthetic oligonucleotide
aacugagaccugcaugcug

SEQ ID NO: 1979964 - RNA, 19 nt, Artificial Sequence
  Description of Artificial Sequence: Synthetic oligonucleotide
cugcccuucccacugaagg

SEQ ID NO: 1979965 - RNA, 19 nt, Artificial Sequence
  Description of Artificial Sequence: Synthetic oligonucleotide
ucaccagucucuuggauau

SEQ ID NO: 1979966 - RNA, 19 nt, Artificial Sequence
  Description of Artificial Sequence: Synthetic oligonucleotide
cagugguuacaccaguagg

SEQ ID NO: 1979967 - RNA, 19 nt, Artificial Sequence
  Description of Artificial Sequence: Synthetic oligonucleotide
ugcuuuugugaccuggauc

SEQ ID NO: 1979968 - RNA, 19 nt, Artificial Sequence
  Description of Artificial Sequence: Synthetic oligonucleotide
uacuguacuuauuggcagc

SEQ ID NO: 1979969 - RNA, 19 nt, Artificial Sequence
  Description of Artificial Sequence: Synthetic oligonucleotide
ucucuuggauauacaggag

SEQ ID NO: 1979970 - RNA, 19 nt, Artificial Sequence
  Description of Artificial Sequence: Synthetic oligonucleotide
agucucuuggauauacagg

SEQ ID NO: 1979971 - RNA, 19 nt, Artificial Sequence
  Description of Artificial Sequence: Synthetic oligonucleotide
guuugagcuauugcuaaag

SEQ ID NO: 1979972 - RNA, 19 nt, Artificial Sequence
  Description of Artificial Sequence: Synthetic oligonucleotide
uuuaaggaggucugagcuc

SEQ ID NO: 1979973 - RNA, 19 nt, Artificial Sequence
  Description of Artificial Sequence: Synthetic oligonucleotide
ugcacauauguaacgcuuc

SEQ ID NO: 1979974 - RNA, 19 nt, Artificial Sequence
  Description of Artificial Sequence: Synthetic oligonucleotide
gguucugccccuuuccugg

SEQ ID NO: 1979975 - RNA, 19 nt, Artificial Sequence
  Description of Artificial Sequence: Synthetic oligonucleotide
caaucguuacacugauagg

SEQ ID NO: 1979976 - RNA, 19 nt, Artificial Sequence
  Description of Artificial Sequence: Synthetic oligonucleotide
ugugucuugcagagaagcu

SEQ ID NO: 1979977 - RNA, 19 nt, Artificial Sequence
  Description of Artificial Sequence: Synthetic oligonucleotide
uuugugagguuugagcuau

SEQ ID NO: 1979978 - RNA, 19 nt, Artificial Sequence
  Description of Artificial Sequence: Synthetic oligonucleotide
accagucucuuggauauac

SEQ ID NO: 1979979 - RNA, 19 nt, Artificial Sequence
  Description of Artificial Sequence: Synthetic oligonucleotide
cgauuucaaaccuugacgc

SEQ ID NO: 1979980 - RNA, 19 nt, Artificial Sequence
  Description of Artificial Sequence: Synthetic oligonucleotide
cuugacgcuuucuuggauc

SEQ ID NO: 1979981 - RNA, 19 nt, Artificial Sequence
  Description of Artificial Sequence: Synthetic oligonucleotide
gaugggaacugagaccugc

SEQ ID NO: 1979982 - RNA, 19 nt, Artificial Sequence
  Description of Artificial Sequence: Synthetic oligonucleotide
ucucggggcaggaugguca

SEQ ID NO: 1979983 - RNA, 19 nt, Artificial Sequence
  Description of Artificial Sequence: Synthetic oligonucleotide
agugacggccuccucugcg

SEQ ID NO: 1979984 - RNA, 19 nt, Artificial Sequence
  Description of Artificial Sequence: Synthetic oligonucleotide
ugcugacuaaaacucuuuc

SEQ ID NO: 1979985 - RNA, 19 nt, Artificial Sequence
  Description of Artificial Sequence: Synthetic oligonucleotide
ugagacuccucuucagaac

SEQ ID NO: 1979986 - RNA, 19 nt, Artificial Sequence
  Description of Artificial Sequence: Synthetic oligonucleotide
uccugagugaaaaccuccu

SEQ ID NO: 1979987 - RNA, 19 nt, Artificial Sequence
  Description of Artificial Sequence: Synthetic oligonucleotide
ugcugaguccuccuucuga

SEQ ID NO: 1979988 - RNA, 19 nt, Artificial Sequence
  Description of Artificial Sequence: Synthetic oligonucleotide
uggacucucugauguuugg

SEQ ID NO: 1979989 - RNA, 19 nt, Artificial Sequence
  Description of Artificial Sequence: Synthetic oligonucleotide
uuagcagacacugguucug

SEQ ID NO: 1979990 - RNA, 19 nt, Artificial Sequence
  Description of Artificial Sequence: Synthetic oligonucleotide
uccacuaaguguguucugu

SEQ ID NO: 1979991 - RNA, 19 nt, Artificial Sequence
  Description of Artificial Sequence: Synthetic oligonucleotide
auucuaugaugcuuauuaa

SEQ ID NO: 1979992 - RNA, 19 nt, Artificial Sequence
  Description of Artificial Sequence: Synthetic oligonucleotide
gagaccugcaugcugacua

SEQ ID NO: 1979993 - RNA, 19 nt, Artificial Sequence
  Description of Artificial Sequence: Synthetic oligonucleotide
aacucuuuccacaaucguu

SEQ ID NO: 1979994 - RNA, 19 nt, Artificial Sequence
  Description of Artificial Sequence: Synthetic oligonucleotide
ucuccggugcuuugugagg

SEQ ID NO: 1979995 - RNA, 19 nt, Artificial Sequence
  Description of Artificial Sequence: Synthetic oligonucleotide
cucugcacauauguaacgc

SEQ ID NO: 1979996 - RNA, 19 nt, Artificial Sequence
  Description of Artificial Sequence: Synthetic oligonucleotide
auguuuaaggaggucugag

SEQ ID NO: 1979997 - RNA, 19 nt, Artificial Sequence
  Description of Artificial Sequence: Synthetic oligonucleotide
agagugacggccuccucug

SEQ ID NO: 1979998 - RNA, 19 nt, Artificial Sequence
  Description of Artificial Sequence: Synthetic oligonucleotide
ugcgugagacuccucuuca

SEQ ID NO: 1979999 - RNA, 19 nt, Artificial Sequence
  Description of Artificial Sequence: Synthetic oligonucleotide
uuuugugaccuggaucuac

SEQ ID NO: 1980000 - RNA, 19 nt, Artificial Sequence
  Description of Artificial Sequence: Synthetic oligonucleotide
agguuugagcuauugcuaa

SEQ ID NO: 1980001 - RNA, 19 nt, Artificial Sequence
  Description of Artificial Sequence: Synthetic oligonucleotide
augaugcuuauuaaaauuu

SEQ ID NO: 1980002 - RNA, 19 nt, Artificial Sequence
  Description of Artificial Sequence: Synthetic oligonucleotide
agccacucacagcagagca

SEQ ID NO: 1980003 - RNA, 19 nt, Artificial Sequence
  Description of Artificial Sequence: Synthetic oligonucleotide
gugaaaaccuccuccucac

SEQ ID NO: 1980004 - RNA, 19 nt, Artificial Sequence
  Description of Artificial Sequence: Synthetic oligonucleotide
gugagguuugagcuauugc

SEQ ID NO: 1980005 - RNA, 19 nt, Artificial Sequence
  Description of Artificial Sequence: Synthetic oligonucleotide
cucgggacagugcugcugc

SEQ ID NO: 1980006 - RNA, 19 nt, Artificial Sequence
  Description of Artificial Sequence: Synthetic oligonucleotide
cacaccuuacagucauagg

SEQ ID NO: 1980007 - RNA, 19 nt, Artificial Sequence
  Description of Artificial Sequence: Synthetic oligonucleotide
gacucucugauguuuggaa

SEQ ID NO: 1980008 - RNA, 19 nt, Artificial Sequence
  Description of Artificial Sequence: Synthetic oligonucleotide
ucccacagucuuacacugg

SEQ ID NO: 1980009 - RNA, 19 nt, Artificial Sequence
  Description of Artificial Sequence: Synthetic oligonucleotide
ggauauacaggaguucuug

SEQ ID NO: 1980010 - RNA, 19 nt, Artificial Sequence
  Description of Artificial Sequence: Synthetic oligonucleotide
acugagaccugcaugcuga

SEQ ID NO: 1980011 - RNA, 19 nt, Artificial Sequence
  Description of Artificial Sequence: Synthetic oligonucleotide
auagggccgguccacuaag

SEQ ID NO: 1980012 - RNA, 19 nt, Artificial Sequence
  Description of Artificial Sequence: Synthetic oligonucleotide
  modified_base (17)..(17): a, c, u, g, unknown or other
agaagcuuuugcucccncu

SEQ ID NO: 1980013 - RNA, 19 nt, Artificial Sequence
  Description of Artificial Sequence: Synthetic oligonucleotide
caccaguaggguuucucgc

SEQ ID NO: 1980014 - RNA, 19 nt, Artificial Sequence
  Description of Artificial Sequence: Synthetic oligonucleotide
cuucagaacuucucugcuc

SEQ ID NO: 1980015 - RNA, 19 nt, Artificial Sequence
  Description of Artificial Sequence: Synthetic oligonucleotide
uccggcugcagccacucac

SEQ ID NO: 1980016 - RNA, 19 nt, Artificial Sequence
  Description of Artificial Sequence: Synthetic oligonucleotide
gaggucugagcucugccca

SEQ ID NO: 1980017 - RNA, 19 nt, Artificial Sequence
  Description of Artificial Sequence: Synthetic oligonucleotide
gaguccgucugcgugagac

SEQ ID NO: 1980018 - RNA, 19 nt, Artificial Sequence
  Description of Artificial Sequence: Synthetic oligonucleotide
acucuuuccacaaucguua

SEQ ID NO: 1980019 - RNA, 19 nt, Artificial Sequence
  Description of Artificial Sequence: Synthetic oligonucleotide
acucucugauguuuggaaa

SEQ ID NO: 1980020 - RNA, 19 nt, Artificial Sequence
  Description of Artificial Sequence: Synthetic oligonucleotide
ugcagccacucacagcaga

SEQ ID NO: 1980021 - RNA, 19 nt, Artificial Sequence
  Description of Artificial Sequence: Synthetic oligonucleotide
guacuuauuggcagcaauc

SEQ ID NO: 1980022 - RNA, 19 nt, Artificial Sequence
  Description of Artificial Sequence: Synthetic oligonucleotide
gacgcuuucuuggauccug

SEQ ID NO: 1980023 - RNA, 19 nt, Artificial Sequence
  Description of Artificial Sequence: Synthetic oligonucleotide
caggaguucuugcuccagg

SEQ ID NO: 1980024 - RNA, 19 nt, Artificial Sequence
  Description of Artificial Sequence: Synthetic oligonucleotide
ucugaggauucgauuucaa

SEQ ID NO: 1980025 - RNA, 19 nt, Artificial Sequence
  Description of Artificial Sequence: Synthetic oligonucleotide
cucucgaggcccaggagug

SEQ ID NO: 1980026 - RNA, 19 nt, Artificial Sequence
  Description of Artificial Sequence: Synthetic oligonucleotide
guucucgggacagugcugc

SEQ ID NO: 1980027 - RNA, 19 nt, Artificial Sequence
  Description of Artificial Sequence: Synthetic oligonucleotide
agggaugaugucccuuuug

SEQ ID NO: 1980028 - RNA, 19 nt, Artificial Sequence
  Description of Artificial Sequence: Synthetic oligonucleotide
uccucugcguucucgggac

SEQ ID NO: 1980029 - RNA, 19 nt, Artificial Sequence
  Description of Artificial Sequence: Synthetic oligonucleotide
guaacgcuucucuccuggg

SEQ ID NO: 1980030 - RNA, 19 nt, Artificial Sequence
  Description of Artificial Sequence: Synthetic oligonucleotide
acuguuggcccacugcuuu

SEQ ID NO: 1980031 - RNA, 19 nt, Artificial Sequence
  Description of Artificial Sequence: Synthetic oligonucleotide
ucuugcagagaagcuuuug

SEQ ID NO: 1980032 - RNA, 19 nt, Artificial Sequence
  Description of Artificial Sequence: Synthetic oligonucleotide
ugguucugccccuuuccug

SEQ ID NO: 1980033 - RNA, 19 nt, Artificial Sequence
  Description of Artificial Sequence: Synthetic oligonucleotide
ugcguucucgggacagugc

SEQ ID NO: 1980034 - RNA, 19 nt, Artificial Sequence
  Description of Artificial Sequence: Synthetic oligonucleotide
ggcucagugccucucgagg

SEQ ID NO: 1980035 - RNA, 19 nt, Artificial Sequence
  Description of Artificial Sequence: Synthetic oligonucleotide
acagggaugaugucccuuu

SEQ ID NO: 1980036 - RNA, 19 nt, Artificial Sequence
  Description of Artificial Sequence: Synthetic oligonucleotide
cuuacacugguagggcgcc

SEQ ID NO: 1980037 - RNA, 19 nt, Artificial Sequence
  Description of Artificial Sequence: Synthetic oligonucleotide
ucugccccuuuccuggaac

SEQ ID NO: 1980038 - RNA, 19 nt, Artificial Sequence
  Description of Artificial Sequence: Synthetic oligonucleotide
cuuggauauacaggaguuc

SEQ ID NO: 1980039 - RNA, 19 nt, Artificial Sequence
  Description of Artificial Sequence: Synthetic oligonucleotide
acgcuucucuccuggggcg

SEQ ID NO: 1980040 - RNA, 19 nt, Artificial Sequence
  Description of Artificial Sequence: Synthetic oligonucleotide
gauguuuaaggaggucuga

SEQ ID NO: 1980041 - RNA, 19 nt, Artificial Sequence
  Description of Artificial Sequence: Synthetic oligonucleotide
uugugaccuggaucuacug

SEQ ID NO: 1980042 - RNA, 19 nt, Artificial Sequence
  Description of Artificial Sequence: Synthetic oligonucleotide
gauccugagugaaaaccuc

SEQ ID NO: 1980043 - RNA, 19 nt, Artificial Sequence
  Description of Artificial Sequence: Synthetic oligonucleotide
guguggaugcgguaguguc

SEQ ID NO: 1980044 - RNA, 19 nt, Artificial Sequence
  Description of Artificial Sequence: Synthetic oligonucleotide
uacaggaguucuugcucca

SEQ ID NO: 1980045 - RNA, 19 nt, Artificial Sequence
  Description of Artificial Sequence: Synthetic oligonucleotide
gugaccuggaucuacugua

SEQ ID NO: 1980046 - RNA, 19 nt, Artificial Sequence
  Description of Artificial Sequence: Synthetic oligonucleotide
gaccaguuacagugcuucc

SEQ ID NO: 1980047 - RNA, 19 nt, Artificial Sequence
  Description of Artificial Sequence: Synthetic oligonucleotide
aaugaaggguaagguugga

SEQ ID NO: 1980048 - RNA, 19 nt, Artificial Sequence
  Description of Artificial Sequence: Synthetic oligonucleotide
uguguucuccggugcuuug

SEQ ID NO: 1980049 - RNA, 19 nt, Artificial Sequence
  Description of Artificial Sequence: Synthetic oligonucleotide
gguaagguuggagcugugg

SEQ ID NO: 1980050 - RNA, 19 nt, Artificial Sequence
  Description of Artificial Sequence: Synthetic oligonucleotide
ggaaagauuugauuugcua

SEQ ID NO: 1980051 - RNA, 19 nt, Artificial Sequence
  Description of Artificial Sequence: Synthetic oligonucleotide
agugucgaaugaggcugcc

SEQ ID NO: 1980052 - RNA, 19 nt, Artificial Sequence
  Description of Artificial Sequence: Synthetic oligonucleotide
guagggcgccucuucagug

SEQ ID NO: 1980053 - RNA, 19 nt, Artificial Sequence
  Description of Artificial Sequence: Synthetic oligonucleotide
cuauugcuaaaggccuucc

SEQ ID NO: 1980054 - RNA, 19 nt, Artificial Sequence
  Description of Artificial Sequence: Synthetic oligonucleotide
ccaguuacagugcuucccc

SEQ ID NO: 1980055 - RNA, 19 nt, Artificial Sequence
  Description of Artificial Sequence: Synthetic oligonucleotide
gggaugaugucccuuuuga

SEQ ID NO: 1980056 - RNA, 19 nt, Artificial Sequence
  Description of Artificial Sequence: Synthetic oligonucleotide
cugcaugcugacuaaaacu

SEQ ID NO: 1980057 - RNA, 19 nt, Artificial Sequence
  Description of Artificial Sequence: Synthetic oligonucleotide
ugggaacugagaccugcau

SEQ ID NO: 1980058 - RNA, 19 nt, Artificial Sequence
  Description of Artificial Sequence: Synthetic oligonucleotide
acuaugguugaaggcuuug

SEQ ID NO: 1980059 - RNA, 19 nt, Artificial Sequence
  Description of Artificial Sequence: Synthetic oligonucleotide
uccuucugaggauucgauu

SEQ ID NO: 1980060 - RNA, 19 nt, Artificial Sequence
  Description of Artificial Sequence: Synthetic oligonucleotide
accuugacgcuuucuugga

SEQ ID NO: 1980061 - RNA, 19 nt, Artificial Sequence
  Description of Artificial Sequence: Synthetic oligonucleotide
uucccacaccuuacaguca

SEQ ID NO: 1980062 - RNA, 19 nt, Artificial Sequence
  Description of Artificial Sequence: Synthetic oligonucleotide
ucgaaugaggcugcccuuc

SEQ ID NO: 1980063 - RNA, 19 nt, Artificial Sequence
  Description of Artificial Sequence: Synthetic oligonucleotide
agggccgguccacuaagug

SEQ ID NO: 1980064 - RNA, 19 nt, Artificial Sequence
  Description of Artificial Sequence: Synthetic oligonucleotide
ccuuacagucauagggccg

SEQ ID NO: 1980065 - RNA, 19 nt, Artificial Sequence
  Description of Artificial Sequence: Synthetic oligonucleotide
uccgucugcgugagacucc

SEQ ID NO: 1980066 - RNA, 19 nt, Artificial Sequence
  Description of Artificial Sequence: Synthetic oligonucleotide
uugaguccgucugcgugag

SEQ ID NO: 1980067 - RNA, 19 nt, Artificial Sequence
  Description of Artificial Sequence: Synthetic oligonucleotide
gagcuauugcuaaaggccu

SEQ ID NO: 1980068 - RNA, 19 nt, Artificial Sequence
  Description of Artificial Sequence: Synthetic oligonucleotide
cccuuucccagacuguugg

SEQ ID NO: 1980069 - RNA, 19 nt, Artificial Sequence
  Description of Artificial Sequence: Synthetic oligonucleotide
uggaucuacuguacuuauu

SEQ ID NO: 1980070 - RNA, 19 nt, Artificial Sequence
  Description of Artificial Sequence: Synthetic oligonucleotide
uagggcgccucuucagugu

SEQ ID NO: 1980071 - RNA, 19 nt, Artificial Sequence
  Description of Artificial Sequence: Synthetic oligonucleotide
ugguuacaccaguaggguu

SEQ ID NO: 1980072 - RNA, 19 nt, Artificial Sequence
  Description of Artificial Sequence: Synthetic oligonucleotide
agcacccgaagcuggcuca

SEQ ID NO: 1980073 - RNA, 19 nt, Artificial Sequence
  Description of Artificial Sequence: Synthetic oligonucleotide
  modified_base (18)..(18): a, c, u, g, unknown or other
gagaagcuuuugcucccnc

SEQ ID NO: 1980074 - RNA, 19 nt, Artificial Sequence
  Description of Artificial Sequence: Synthetic oligonucleotide
cugccccuuuccuggaacc

SEQ ID NO: 1980075 - RNA, 19 nt, Artificial Sequence
  Description of Artificial Sequence: Synthetic oligonucleotide
gcuuucccacaccuuacag

SEQ ID NO: 1980076 - RNA, 19 nt, Artificial Sequence
  Description of Artificial Sequence: Synthetic oligonucleotide
cacuaaguguguucuguaa

SEQ ID NO: 1980077 - RNA, 19 nt, Artificial Sequence
  Description of Artificial Sequence: Synthetic oligonucleotide
cugcgugagacuccucuuc

SEQ ID NO: 1980078 - RNA, 19 nt, Artificial Sequence
  Description of Artificial Sequence: Synthetic oligonucleotide
cugaggauucgauuucaaa

SEQ ID NO: 1980079 - RNA, 19 nt, Artificial Sequence
  Description of Artificial Sequence: Synthetic oligonucleotide
cucaccagucucuuggaua

SEQ ID NO: 1980080 - RNA, 19 nt, Artificial Sequence
  Description of Artificial Sequence: Synthetic oligonucleotide
ucucgggacagugcugcug

SEQ ID NO: 1980081 - RNA, 19 nt, Artificial Sequence
  Description of Artificial Sequence: Synthetic oligonucleotide
aggcuuucccacaccuuac

SEQ ID NO: 1980082 - RNA, 19 nt, Artificial Sequence
  Description of Artificial Sequence: Synthetic oligonucleotide
ggaccaguuacagugcuuc

SEQ ID NO: 1980083 - RNA, 19 nt, Artificial Sequence
  Description of Artificial Sequence: Synthetic oligonucleotide
uccuggggcgggcuuuagc

SEQ ID NO: 1980084 - RNA, 19 nt, Artificial Sequence
  Description of Artificial Sequence: Synthetic oligonucleotide
guggacucucugauguuug

SEQ ID NO: 1980085 - RNA, 19 nt, Artificial Sequence
  Description of Artificial Sequence: Synthetic oligonucleotide
auucgauuucaaaccuuga

SEQ ID NO: 1980086 - RNA, 19 nt, Artificial Sequence
  Description of Artificial Sequence: Synthetic oligonucleotide
ggccgguccacuaagugug

SEQ ID NO: 1980087 - RNA, 19 nt, Artificial Sequence
  Description of Artificial Sequence: Synthetic oligonucleotide
uucaaaccuugacgcuuuc

SEQ ID NO: 1980088 - RNA, 19 nt, Artificial Sequence
  Description of Artificial Sequence: Synthetic oligonucleotide
caguaggguuucucgccag

SEQ ID NO: 1980089 - RNA, 19 nt, Artificial Sequence
  Description of Artificial Sequence: Synthetic oligonucleotide
cuuucccacaccuuacagu

SEQ ID NO: 1980090 - RNA, 19 nt, Artificial Sequence
  Description of Artificial Sequence: Synthetic oligonucleotide
cuggggcgggcuuuagcag

SEQ ID NO: 1980091 - RNA, 19 nt, Artificial Sequence
  Description of Artificial Sequence: Synthetic oligonucleotide
gcgguagugucgaaugagg

SEQ ID NO: 1980092 - RNA, 19 nt, Artificial Sequence
  Description of Artificial Sequence: Synthetic oligonucleotide
guggaugcgguagugucga

SEQ ID NO: 1980093 - RNA, 19 nt, Artificial Sequence
  Description of Artificial Sequence: Synthetic oligonucleotide
ggcuuuagcagacacuggu

SEQ ID NO: 1980094 - RNA, 19 nt, Artificial Sequence
  Description of Artificial Sequence: Synthetic oligonucleotide
ucauagggccgguccacua

SEQ ID NO: 1980095 - RNA, 19 nt, Artificial Sequence
  Description of Artificial Sequence: Synthetic oligonucleotide
aguccgucugcgugagacu

SEQ ID NO: 1980096 - RNA, 19 nt, Artificial Sequence
  Description of Artificial Sequence: Synthetic oligonucleotide
agggcgccucuucagugug

SEQ ID NO: 1980097 - RNA, 19 nt, Artificial Sequence
  Description of Artificial Sequence: Synthetic oligonucleotide
gguagugucgaaugaggcu

SEQ ID NO: 1980098 - RNA, 19 nt, Artificial Sequence
  Description of Artificial Sequence: Synthetic oligonucleotide
guuacaccaguaggguuuc

SEQ ID NO: 1980099 - RNA, 19 nt, Artificial Sequence
  Description of Artificial Sequence: Synthetic oligonucleotide
  modified_base (19)..(19): a, c, u, g, unknown or other
agagaagcuuuugcucccn

SEQ ID NO: 1980100 - RNA, 19 nt, Artificial Sequence
  Description of Artificial Sequence: Synthetic oligonucleotide
cucugcguucucgggacag

SEQ ID NO: 1980101 - RNA, 19 nt, Artificial Sequence
  Description of Artificial Sequence: Synthetic oligonucleotide
ggacagugcugcugcaccc

SEQ ID NO: 1980102 - RNA, 19 nt, Artificial Sequence
  Description of Artificial Sequence: Synthetic oligonucleotide
aacuaugguugaaggcuuu

SEQ ID NO: 1980103 - RNA, 19 nt, Artificial Sequence
  Description of Artificial Sequence: Synthetic oligonucleotide
guccacuaaguguguucug

SEQ ID NO: 1980104 - RNA, 19 nt, Artificial Sequence
  Description of Artificial Sequence: Synthetic oligonucleotide
ccacaccuuacagucauag

SEQ ID NO: 1980105 - RNA, 19 nt, Artificial Sequence
  Description of Artificial Sequence: Synthetic oligonucleotide
ugucccuuuugaguccguc

SEQ ID NO: 1980106 - RNA, 19 nt, Artificial Sequence
  Description of Artificial Sequence: Synthetic oligonucleotide
ugagaccugcaugcugacu

SEQ ID NO: 1980107 - RNA, 19 nt, Artificial Sequence
  Description of Artificial Sequence: Synthetic oligonucleotide
uagggccgguccacuaagu

SEQ ID NO: 1980108 - RNA, 19 nt, Artificial Sequence
  Description of Artificial Sequence: Synthetic oligonucleotide
cuguaaugaaggguaaggu

SEQ ID NO: 1980109 - RNA, 19 nt, Artificial Sequence
  Description of Artificial Sequence: Synthetic oligonucleotide
ccuggaaccugugucuugc

SEQ ID NO: 1980110 - RNA, 19 nt, Artificial Sequence
  Description of Artificial Sequence: Synthetic oligonucleotide
uccccuguaugcaggcguu

SEQ ID NO: 1980111 - RNA, 19 nt, Artificial Sequence
  Description of Artificial Sequence: Synthetic oligonucleotide
ucacagggaugaugucccu

SEQ ID NO: 1980112 - RNA, 19 nt, Artificial Sequence
  Description of Artificial Sequence: Synthetic oligonucleotide
cugagaccugcaugcugac

SEQ ID NO: 1980113 - RNA, 19 nt, Artificial Sequence
  Description of Artificial Sequence: Synthetic oligonucleotide
gacagugcugcugcaccca

SEQ ID NO: 1980114 - RNA, 19 nt, Artificial Sequence
  Description of Artificial Sequence: Synthetic oligonucleotide
ggcguugaugggaacugag

SEQ ID NO: 1980115 - RNA, 19 nt, Artificial Sequence
  Description of Artificial Sequence: Synthetic oligonucleotide
gauuugcuacagaagguuu

SEQ ID NO: 1980116 - RNA, 19 nt, Artificial Sequence
  Description of Artificial Sequence: Synthetic oligonucleotide
gagugacggccuccucugc

SEQ ID NO: 1980117 - RNA, 19 nt, Artificial Sequence
  Description of Artificial Sequence: Synthetic oligonucleotide
guccgucugcgugagacuc

SEQ ID NO: 1980118 - RNA, 19 nt, Artificial Sequence
  Description of Artificial Sequence: Synthetic oligonucleotide
guucuccggugcuuuguga

SEQ ID NO: 1980119 - RNA, 19 nt, Artificial Sequence
  Description of Artificial Sequence: Synthetic oligonucleotide
guguucuguaaugaagggu

SEQ ID NO: 1980120 - RNA, 19 nt, Artificial Sequence
  Description of Artificial Sequence: Synthetic oligonucleotide
cugcguucucgggacagug

SEQ ID NO: 1980121 - RNA, 19 nt, Artificial Sequence
  Description of Artificial Sequence: Synthetic oligonucleotide
cagccacucacagcagagc

SEQ ID NO: 1980122 - RNA, 19 nt, Artificial Sequence
  Description of Artificial Sequence: Synthetic oligonucleotide
cagucauagggccggucca

SEQ ID NO: 1980123 - RNA, 19 nt, Artificial Sequence
  Description of Artificial Sequence: Synthetic oligonucleotide
ucugcguucucgggacagu

SEQ ID NO: 1980124 - RNA, 19 nt, Artificial Sequence
  Description of Artificial Sequence: Synthetic oligonucleotide
agguuggagcuguggcaca

SEQ ID NO: 1980125 - RNA, 19 nt, Artificial Sequence
  Description of Artificial Sequence: Synthetic oligonucleotide
cgguagugucgaaugaggc

SEQ ID NO: 1980126 - RNA, 19 nt, Artificial Sequence
  Description of Artificial Sequence: Synthetic oligonucleotide
uucugccccuuuccuggaa

SEQ ID NO: 1980127 - RNA, 19 nt, Artificial Sequence
  Description of Artificial Sequence: Synthetic oligonucleotide
cauagggccgguccacuaa

SEQ ID NO: 1980128 - RNA, 19 nt, Artificial Sequence
  Description of Artificial Sequence: Synthetic oligonucleotide
aguccuccuucugaggauu

SEQ ID NO: 1980129 - RNA, 19 nt, Artificial Sequence
  Description of Artificial Sequence: Synthetic oligonucleotide
gugucgaaugaggcugccc

SEQ ID NO: 1980130 - RNA, 19 nt, Artificial Sequence
  Description of Artificial Sequence: Synthetic oligonucleotide
cacagugguuacaccagua

SEQ ID NO: 1980131 - RNA, 19 nt, Artificial Sequence
  Description of Artificial Sequence: Synthetic oligonucleotide
uuccuggaaccugugucuu

SEQ ID NO: 1980132 - RNA, 19 nt, Artificial Sequence
  Description of Artificial Sequence: Synthetic oligonucleotide
gaacuaugguugaaggcuu

SEQ ID NO: 1980133 - RNA, 19 nt, Artificial Sequence
  Description of Artificial Sequence: Synthetic oligonucleotide
ggcccacugcuuuugugac

SEQ ID NO: 1980134 - RNA, 19 nt, Artificial Sequence
  Description of Artificial Sequence: Synthetic oligonucleotide
augggaacugagaccugca

SEQ ID NO: 1980135 - RNA, 19 nt, Artificial Sequence
  Description of Artificial Sequence: Synthetic oligonucleotide
cugcacauauguaacgcuu

SEQ ID NO: 1980136 - RNA, 19 nt, Artificial Sequence
  Description of Artificial Sequence: Synthetic oligonucleotide
uucucgggacagugcugcu

SEQ ID NO: 1980137 - RNA, 19 nt, Artificial Sequence
  Description of Artificial Sequence: Synthetic oligonucleotide
gguuugagcuauugcuaaa

SEQ ID NO: 1980138 - RNA, 19 nt, Artificial Sequence
  Description of Artificial Sequence: Synthetic oligonucleotide
accugcaugcugacuaaaa

SEQ ID NO: 1980139 - RNA, 19 nt, Artificial Sequence
  Description of Artificial Sequence: Synthetic oligonucleotide
gucccuuuugaguccgucu

SEQ ID NO: 1980140 - RNA, 19 nt, Artificial Sequence
  Description of Artificial Sequence: Synthetic oligonucleotide
cucgaggcccaggaguguc

SEQ ID NO: 1980141 - RNA, 19 nt, Artificial Sequence
  Description of Artificial Sequence: Synthetic oligonucleotide
uacagucauagggccgguc

SEQ ID NO: 1980142 - RNA, 19 nt, Artificial Sequence
  Description of Artificial Sequence: Synthetic oligonucleotide
agagcacccgaagcuggcu

SEQ ID NO: 1980143 - RNA, 19 nt, Artificial Sequence
  Description of Artificial Sequence: Synthetic oligonucleotide
ccuggggcgggcuuuagca

SEQ ID NO: 1980144 - RNA, 19 nt, Artificial Sequence
  Description of Artificial Sequence: Synthetic oligonucleotide
ggcgggcuuuagcagacac

SEQ ID NO: 1980145 - RNA, 19 nt, Artificial Sequence
  Description of Artificial Sequence: Synthetic oligonucleotide
gacggccuccucugcguuc

SEQ ID NO: 1980146 - RNA, 19 nt, Artificial Sequence
  Description of Artificial Sequence: Synthetic oligonucleotide
uuacagucauagggccggu

SEQ ID NO: 1980147 - RNA, 19 nt, Artificial Sequence
  Description of Artificial Sequence: Synthetic oligonucleotide
ugacgcuuucuuggauccu

SEQ ID NO: 1980148 - RNA, 19 nt, Artificial Sequence
  Description of Artificial Sequence: Synthetic oligonucleotide
ggcagcaaucacagggaug

SEQ ID NO: 1980149 - RNA, 19 nt, Artificial Sequence
  Description of Artificial Sequence: Synthetic oligonucleotide
ugcaggcguugaugggaac

SEQ ID NO: 1980150 - RNA, 19 nt, Artificial Sequence
  Description of Artificial Sequence: Synthetic oligonucleotide
cccuuuugaguccgucugc

SEQ ID NO: 1980151 - RNA, 19 nt, Artificial Sequence
  Description of Artificial Sequence: Synthetic oligonucleotide
gguuacaccaguaggguuu

SEQ ID NO: 1980152 - RNA, 19 nt, Artificial Sequence
  Description of Artificial Sequence: Synthetic oligonucleotide
gcgugagacuccucuucag

SEQ ID NO: 1980153 - RNA, 19 nt, Artificial Sequence
  Description of Artificial Sequence: Synthetic oligonucleotide
ccuugguguggaucuccgg

SEQ ID NO: 1980154 - RNA, 19 nt, Artificial Sequence
  Description of Artificial Sequence: Synthetic oligonucleotide
ugacggccuccucugcguu

SEQ ID NO: 1980155 - RNA, 19 nt, Artificial Sequence
  Description of Artificial Sequence: Synthetic oligonucleotide
cugcugaguccuccuucug

SEQ ID NO: 1980156 - RNA, 19 nt, Artificial Sequence
  Description of Artificial Sequence: Synthetic oligonucleotide
uuacacugguagggcgccu

SEQ ID NO: 1980157 - RNA, 19 nt, Artificial Sequence
  Description of Artificial Sequence: Synthetic oligonucleotide
gguccacuaaguguguucu

SEQ ID NO: 1980158 - RNA, 19 nt, Artificial Sequence
  Description of Artificial Sequence: Synthetic oligonucleotide
ggccuucccacacucugca

SEQ ID NO: 1980159 - RNA, 19 nt, Artificial Sequence
  Description of Artificial Sequence: Synthetic oligonucleotide
ccugugucuugcagagaag

SEQ ID NO: 1980160 - RNA, 19 nt, Artificial Sequence
  Description of Artificial Sequence: Synthetic oligonucleotide
gugucuugcagagaagcuu

SEQ ID NO: 1980161 - RNA, 19 nt, Artificial Sequence
  Description of Artificial Sequence: Synthetic oligonucleotide
ucccagacuguuggcccac

SEQ ID NO: 1980162 - RNA, 19 nt, Artificial Sequence
  Description of Artificial Sequence: Synthetic oligonucleotide
ugaguccgucugcgugaga

SEQ ID NO: 1980163 - RNA, 19 nt, Artificial Sequence
  Description of Artificial Sequence: Synthetic oligonucleotide
gguuggagcuguggcacac

SEQ ID NO: 1980164 - RNA, 19 nt, Artificial Sequence
  Description of Artificial Sequence: Synthetic oligonucleotide
gcacauauguaacgcuucu

SEQ ID NO: 1980165 - RNA, 19 nt, Artificial Sequence
  Description of Artificial Sequence: Synthetic oligonucleotide
acgcuuucuuggauccuga

SEQ ID NO: 1980166 - RNA, 19 nt, Artificial Sequence
  Description of Artificial Sequence: Synthetic oligonucleotide
cuucucuccuggggcgggc

SEQ ID NO: 1980167 - RNA, 19 nt, Artificial Sequence
  Description of Artificial Sequence: Synthetic oligonucleotide
gaguccuccuucugaggau

SEQ ID NO: 1980168 - RNA, 19 nt, Artificial Sequence
  Description of Artificial Sequence: Synthetic oligonucleotide
guucugccccuuuccugga

SEQ ID NO: 1980169 - RNA, 19 nt, Artificial Sequence
  Description of Artificial Sequence: Synthetic oligonucleotide
cuccccuguaugcaggcgu

SEQ ID NO: 1980170 - RNA, 19 nt, Artificial Sequence
  Description of Artificial Sequence: Synthetic oligonucleotide
uccggugcuuugugagguu

SEQ ID NO: 1980171 - RNA, 19 nt, Artificial Sequence
  Description of Artificial Sequence: Synthetic oligonucleotide
cuggcucagugccucucga

SEQ ID NO: 1980172 - RNA, 19 nt, Artificial Sequence
  Description of Artificial Sequence: Synthetic oligonucleotide
ggacucucugauguuugga

SEQ ID NO: 1980173 - RNA, 19 nt, Artificial Sequence
  Description of Artificial Sequence: Synthetic oligonucleotide
gcccacugcuuuugugacc

SEQ ID NO: 1980174 - RNA, 19 nt, Artificial Sequence
  Description of Artificial Sequence: Synthetic oligonucleotide
cacaaucguuacacugaua

SEQ ID NO: 1980175 - RNA, 19 nt, Artificial Sequence
  Description of Artificial Sequence: Synthetic oligonucleotide
gugacggccuccucugcgu

SEQ ID NO: 1980176 - RNA, 19 nt, Artificial Sequence
  Description of Artificial Sequence: Synthetic oligonucleotide
gguagggcgccucuucagu

SEQ ID NO: 1980177 - RNA, 19 nt, Artificial Sequence
  Description of Artificial Sequence: Synthetic oligonucleotide
cucucggggcaggaugguc

SEQ ID NO: 1980178 - RNA, 19 nt, Artificial Sequence
  Description of Artificial Sequence: Synthetic oligonucleotide
cugguucugccccuuuccu

SEQ ID NO: 1980179 - RNA, 19 nt, Artificial Sequence
  Description of Artificial Sequence: Synthetic oligonucleotide
gaccugcaugcugacuaaa

SEQ ID NO: 1980180 - RNA, 19 nt, Artificial Sequence
  Description of Artificial Sequence: Synthetic oligonucleotide
acacugguucugccccuuu

SEQ ID NO: 1980181 - RNA, 19 nt, Artificial Sequence
  Description of Artificial Sequence: Synthetic oligonucleotide
uggaugcgguagugucgaa

SEQ ID NO: 1980182 - RNA, 19 nt, Artificial Sequence
  Description of Artificial Sequence: Synthetic oligonucleotide
ucuccuggggcgggcuuua

SEQ ID NO: 1980183 - RNA, 19 nt, Artificial Sequence
  Description of Artificial Sequence: Synthetic oligonucleotide
gccacucacagcagagcac

SEQ ID NO: 1980184 - RNA, 19 nt, Artificial Sequence
  Description of Artificial Sequence: Synthetic oligonucleotide
gggccgguccacuaagugu

SEQ ID NO: 1980185 - RNA, 19 nt, Artificial Sequence
  Description of Artificial Sequence: Synthetic oligonucleotide
ccuggaucuacuguacuua

SEQ ID NO: 1980186 - RNA, 19 nt, Artificial Sequence
  Description of Artificial Sequence: Synthetic oligonucleotide
cuguacuuauuggcagcaa

SEQ ID NO: 1980187 - RNA, 19 nt, Artificial Sequence
  Description of Artificial Sequence: Synthetic oligonucleotide
cuccggugcuuugugaggu

SEQ ID NO: 1980188 - RNA, 19 nt, Artificial Sequence
  Description of Artificial Sequence: Synthetic oligonucleotide
gccucucgaggcccaggag

SEQ ID NO: 1980189 - RNA, 19 nt, Artificial Sequence
  Description of Artificial Sequence: Synthetic oligonucleotide
guuggcccacugcuuuugu

SEQ ID NO: 1980190 - RNA, 19 nt, Artificial Sequence
  Description of Artificial Sequence: Synthetic oligonucleotide
ccagucucuuggauauaca

SEQ ID NO: 1980191 - RNA, 19 nt, Artificial Sequence
  Description of Artificial Sequence: Synthetic oligonucleotide
ggcgccucuucagugugca

SEQ ID NO: 1980192 - RNA, 19 nt, Artificial Sequence
  Description of Artificial Sequence: Synthetic oligonucleotide
cgguccacuaaguguguuc

SEQ ID NO: 1980193 - RNA, 19 nt, Artificial Sequence
  Description of Artificial Sequence: Synthetic oligonucleotide
ggaucuccggcugcagcca

SEQ ID NO: 1980194 - RNA, 19 nt, Artificial Sequence
  Description of Artificial Sequence: Synthetic oligonucleotide
cugcuuuugugaccuggau

SEQ ID NO: 1980195 - RNA, 19 nt, Artificial Sequence
  Description of Artificial Sequence: Synthetic oligonucleotide
gucgaaugaggcugcccuu

SEQ ID NO: 1980196 - RNA, 19 nt, Artificial Sequence
  Description of Artificial Sequence: Synthetic oligonucleotide
cccacagucuuacacuggu

SEQ ID NO: 1980197 - RNA, 19 nt, Artificial Sequence
  Description of Artificial Sequence: Synthetic oligonucleotide
ccucucgaggcccaggagu

SEQ ID NO: 1980198 - RNA, 19 nt, Artificial Sequence
  Description of Artificial Sequence: Synthetic oligonucleotide
cggugcuuugugagguuug

SEQ ID NO: 1980199 - RNA, 19 nt, Artificial Sequence
  Description of Artificial Sequence: Synthetic oligonucleotide
cguucucgggacagugcug

SEQ ID NO: 1980200 - RNA, 19 nt, Artificial Sequence
  Description of Artificial Sequence: Synthetic oligonucleotide
ccggcugcagccacucaca

SEQ ID NO: 1980201 - RNA, 19 nt, Artificial Sequence
  Description of Artificial Sequence: Synthetic oligonucleotide
ccuccuucugaggauucga

SEQ ID NO: 1980202 - RNA, 19 nt, Artificial Sequence
  Description of Artificial Sequence: Synthetic oligonucleotide
ggauucgauuucaaaccuu

SEQ ID NO: 1980203 - RNA, 19 nt, Artificial Sequence
  Description of Artificial Sequence: Synthetic oligonucleotide
ggaugcgguagugucgaau

SEQ ID NO: 1980204 - RNA, 19 nt, Artificial Sequence
  Description of Artificial Sequence: Synthetic oligonucleotide
cuccuggggcgggcuuuag

SEQ ID NO: 1980205 - RNA, 19 nt, Artificial Sequence
  Description of Artificial Sequence: Synthetic oligonucleotide
ccacaaucguuacacugau

SEQ ID NO: 1980206 - RNA, 19 nt, Artificial Sequence
  Description of Artificial Sequence: Synthetic oligonucleotide
gacacugguucugccccuu

SEQ ID NO: 1980207 - RNA, 19 nt, Artificial Sequence
  Description of Artificial Sequence: Synthetic oligonucleotide
ggguaagguuggagcugug

SEQ ID NO: 1980208 - RNA, 19 nt, Artificial Sequence
  Description of Artificial Sequence: Synthetic oligonucleotide
cuguuggcccacugcuuuu

SEQ ID NO: 1980209 - RNA, 19 nt, Artificial Sequence
  Description of Artificial Sequence: Synthetic oligonucleotide
gggcgccucuucagugugc

SEQ ID NO: 1980210 - RNA, 19 nt, Artificial Sequence
  Description of Artificial Sequence: Synthetic oligonucleotide
cagggaugaugucccuuuu

SEQ ID NO: 1980211 - RNA, 19 nt, Artificial Sequence
  Description of Artificial Sequence: Synthetic oligonucleotide
gucuugcagagaagcuuuu

SEQ ID NO: 1980212 - RNA, 19 nt, Artificial Sequence
  Description of Artificial Sequence: Synthetic oligonucleotide
caccagucucuuggauaua

SEQ ID NO: 1980213 - RNA, 19 nt, Artificial Sequence
  Description of Artificial Sequence: Synthetic oligonucleotide
ccuugacgcuuucuuggau

SEQ ID NO: 1980214 - RNA, 19 nt, Artificial Sequence
  Description of Artificial Sequence: Synthetic oligonucleotide
ccucugcguucucgggaca

SEQ ID NO: 1980215 - RNA, 19 nt, Artificial Sequence
  Description of Artificial Sequence: Synthetic oligonucleotide
ccgucugcgugagacuccu

SEQ ID NO: 1980216 - RNA, 19 nt, Artificial Sequence
  Description of Artificial Sequence: Synthetic oligonucleotide
gggcgggcuuuagcagaca

SEQ ID NO: 1980217 - RNA, 19 nt, Artificial Sequence
  Description of Artificial Sequence: Synthetic oligonucleotide
cacugguagggcgccucuu

SEQ ID NO: 1980218 - RNA, 19 nt, Artificial Sequence
  Description of Artificial Sequence: Synthetic oligonucleotide
gccgguccacuaagugugu

SEQ ID NO: 1980219 - RNA, 19 nt, Artificial Sequence
  Description of Artificial Sequence: Synthetic oligonucleotide
cgucugcgugagacuccuc

SEQ ID NO: 1980220 - RNA, 19 nt, Artificial Sequence
  Description of Artificial Sequence: Synthetic oligonucleotide
ccggugcuuugugagguuu

SEQ ID NO: 1980221 - RNA, 19 nt, Artificial Sequence
  Description of Artificial Sequence: Synthetic oligonucleotide
ccaggucuuccaggagagu

SEQ ID NO: 1980222 - RNA, 19 nt, Artificial Sequence
  Description of Artificial Sequence: Synthetic oligonucleotide
gcgccucuucagugugcau

SEQ ID NO: 1980223 - RNA, 19 nt, Artificial Sequence
  Description of Artificial Sequence: Synthetic oligonucleotide
ccgguccacuaaguguguu

SEQ ID NO: 1980224 - RNA, 19 nt, Artificial Sequence
  Description of Artificial Sequence: Synthetic oligonucleotide
uuauuagccacaaagauaa

SEQ ID NO: 1980225 - RNA, 19 nt, Artificial Sequence
  Description of Artificial Sequence: Synthetic oligonucleotide
agaaagacaucacuacgcc

SEQ ID NO: 1980226 - RNA, 19 nt, Artificial Sequence
  Description of Artificial Sequence: Synthetic oligonucleotide
auuacugagccccagcagg

SEQ ID NO: 1980227 - RNA, 19 nt, Artificial Sequence
  Description of Artificial Sequence: Synthetic oligonucleotide
acaaagauaacacaccccu

SEQ ID NO: 1980228 - RNA, 19 nt, Artificial Sequence
  Description of Artificial Sequence: Synthetic oligonucleotide
uagaaagacaucacuacgc

SEQ ID NO: 1980229 - RNA, 19 nt, Artificial Sequence
  Description of Artificial Sequence: Synthetic oligonucleotide
gacagcaguagguagaacc

SEQ ID NO: 1980230 - RNA, 19 nt, Artificial Sequence
  Description of Artificial Sequence: Synthetic oligonucleotide
aaguagaugaaaacaguac

SEQ ID NO: 1980231 - RNA, 19 nt, Artificial Sequence
  Description of Artificial Sequence: Synthetic oligonucleotide
uguaauaccuggcauacuc

SEQ ID NO: 1980232 - RNA, 19 nt, Artificial Sequence
  Description of Artificial Sequence: Synthetic oligonucleotide
aguagaugaaaacaguaca

SEQ ID NO: 1980233 - RNA, 19 nt, Artificial Sequence
  Description of Artificial Sequence: Synthetic oligonucleotide
aaaacacguggacugggac

SEQ ID NO: 1980234 - RNA, 19 nt, Artificial Sequence
  Description of Artificial Sequence: Synthetic oligonucleotide
ugaaugcuaaacaagcacu

SEQ ID NO: 1980235 - RNA, 19 nt, Artificial Sequence
  Description of Artificial Sequence: Synthetic oligonucleotide
acauaggcugcuuauuagc

SEQ ID NO: 1980236 - RNA, 19 nt, Artificial Sequence
  Description of Artificial Sequence: Synthetic oligonucleotide
auuacaggcuuucacuaac

SEQ ID NO: 1980237 - RNA, 19 nt, Artificial Sequence
  Description of Artificial Sequence: Synthetic oligonucleotide
cuagauaagguguacuaag

SEQ ID NO: 1980238 - RNA, 19 nt, Artificial Sequence
  Description of Artificial Sequence: Synthetic oligonucleotide
uaagguguacuaagcaggg

SEQ ID NO: 1980239 - RNA, 19 nt, Artificial Sequence
  Description of Artificial Sequence: Synthetic oligonucleotide
guagaaagacaucacuacg

SEQ ID NO: 1980240 - RNA, 19 nt, Artificial Sequence
  Description of Artificial Sequence: Synthetic oligonucleotide
guaccuauguccucgaugc

SEQ ID NO: 1980241 - RNA, 19 nt, Artificial Sequence
  Description of Artificial Sequence: Synthetic oligonucleotide
gagacagugucucauguag

SEQ ID NO: 1980242 - RNA, 19 nt, Artificial Sequence
  Description of Artificial Sequence: Synthetic oligonucleotide
cugucaguuggaaagagag

SEQ ID NO: 1980243 - RNA, 19 nt, Artificial Sequence
  Description of Artificial Sequence: Synthetic oligonucleotide
guguguaccacucuggacc

SEQ ID NO: 1980244 - RNA, 19 nt, Artificial Sequence
  Description of Artificial Sequence: Synthetic oligonucleotide
auaagguguacuaagcagg

SEQ ID NO: 1980245 - RNA, 19 nt, Artificial Sequence
  Description of Artificial Sequence: Synthetic oligonucleotide
cugguaauuacagagcagg

SEQ ID NO: 1980246 - RNA, 19 nt, Artificial Sequence
  Description of Artificial Sequence: Synthetic oligonucleotide
gagaaagaaggcgagggcg

SEQ ID NO: 1980247 - RNA, 19 nt, Artificial Sequence
  Description of Artificial Sequence: Synthetic oligonucleotide
augcuaaacaagcacucac

SEQ ID NO: 1980248 - RNA, 19 nt, Artificial Sequence
  Description of Artificial Sequence: Synthetic oligonucleotide
aacauguccgguuuaugca

SEQ ID NO: 1980249 - RNA, 19 nt, Artificial Sequence
  Description of Artificial Sequence: Synthetic oligonucleotide
agcaaaguugaaaaggagg

SEQ ID NO: 1980250 - RNA, 19 nt, Artificial Sequence
  Description of Artificial Sequence: Synthetic oligonucleotide
aguacagaacccaaggccg

SEQ ID NO: 1980251 - RNA, 19 nt, Artificial Sequence
  Description of Artificial Sequence: Synthetic oligonucleotide
ugcuuauuagccacaaaga

SEQ ID NO: 1980252 - RNA, 19 nt, Artificial Sequence
  Description of Artificial Sequence: Synthetic oligonucleotide
gucaguuggaaagagaggc

SEQ ID NO: 1980253 - RNA, 19 nt, Artificial Sequence
  Description of Artificial Sequence: Synthetic oligonucleotide
aguagguagaaccccgcac

SEQ ID NO: 1980254 - RNA, 19 nt, Artificial Sequence
  Description of Artificial Sequence: Synthetic oligonucleotide
gcugcagugagaaagaagg

SEQ ID NO: 1980255 - RNA, 19 nt, Artificial Sequence
  Description of Artificial Sequence: Synthetic oligonucleotide
gacauguagaaagacauca

SEQ ID NO: 1980256 - RNA, 19 nt, Artificial Sequence
  Description of Artificial Sequence: Synthetic oligonucleotide
gacagugucucauguagcc

SEQ ID NO: 1980257 - RNA, 19 nt, Artificial Sequence
  Description of Artificial Sequence: Synthetic oligonucleotide
guagccauuacugagcccc

SEQ ID NO: 1980258 - RNA, 19 nt, Artificial Sequence
  Description of Artificial Sequence: Synthetic oligonucleotide
ucuucaccagaaaacacgu

SEQ ID NO: 1980259 - RNA, 19 nt, Artificial Sequence
  Description of Artificial Sequence: Synthetic oligonucleotide
guagaugaaaacaguacag

SEQ ID NO: 1980260 - RNA, 19 nt, Artificial Sequence
  Description of Artificial Sequence: Synthetic oligonucleotide
ugaagauccucuccuaccu

SEQ ID NO: 1980261 - RNA, 19 nt, Artificial Sequence
  Description of Artificial Sequence: Synthetic oligonucleotide
gacaucacuacgcccgugg

SEQ ID NO: 1980262 - RNA, 19 nt, Artificial Sequence
  Description of Artificial Sequence: Synthetic oligonucleotide
cuaccuugcugucaguugg

SEQ ID NO: 1980263 - RNA, 19 nt, Artificial Sequence
  Description of Artificial Sequence: Synthetic oligonucleotide
cauaggcugcuuauuagcc

SEQ ID NO: 1980264 - RNA, 19 nt, Artificial Sequence
  Description of Artificial Sequence: Synthetic oligonucleotide
ucuccuaccuugcugucag

SEQ ID NO: 1980265 - RNA, 19 nt, Artificial Sequence
  Description of Artificial Sequence: Synthetic oligonucleotide
ucagacuggaacagcacca

SEQ ID NO: 1980266 - RNA, 19 nt, Artificial Sequence
  Description of Artificial Sequence: Synthetic oligonucleotide
aaacacguggacugggaca

SEQ ID NO: 1980267 - RNA, 19 nt, Artificial Sequence
  Description of Artificial Sequence: Synthetic oligonucleotide
aggauuacaggcuuucacu

SEQ ID NO: 1980268 - RNA, 19 nt, Artificial Sequence
  Description of Artificial Sequence: Synthetic oligonucleotide
agauaagguguacuaagca

SEQ ID NO: 1980269 - RNA, 19 nt, Artificial Sequence
  Description of Artificial Sequence: Synthetic oligonucleotide
cuaaacaagcacucacacc

SEQ ID NO: 1980270 - RNA, 19 nt, Artificial Sequence
  Description of Artificial Sequence: Synthetic oligonucleotide
ggcacgaagaacuuggcag

SEQ ID NO: 1980271 - RNA, 19 nt, Artificial Sequence
  Description of Artificial Sequence: Synthetic oligonucleotide
guagaugagcaccagugug

SEQ ID NO: 1980272 - RNA, 19 nt, Artificial Sequence
  Description of Artificial Sequence: Synthetic oligonucleotide
gacauaggcugcuuauuag

SEQ ID NO: 1980273 - RNA, 19 nt, Artificial Sequence
  Description of Artificial Sequence: Synthetic oligonucleotide
agcaccuugcuccuaggac

SEQ ID NO: 1980274 - RNA, 19 nt, Artificial Sequence
  Description of Artificial Sequence: Synthetic oligonucleotide
aguugaaaaggaggaagac

SEQ ID NO: 1980275 - RNA, 19 nt, Artificial Sequence
  Description of Artificial Sequence: Synthetic oligonucleotide
gauggcagggaagaugagg

SEQ ID NO: 1980276 - RNA, 19 nt, Artificial Sequence
  Description of Artificial Sequence: Synthetic oligonucleotide
ugaugggugcucuucacca

SEQ ID NO: 1980277 - RNA, 19 nt, Artificial Sequence
  Description of Artificial Sequence: Synthetic oligonucleotide
cuuucacuaacauguccgg

SEQ ID NO: 1980278 - RNA, 19 nt, Artificial Sequence
  Description of Artificial Sequence: Synthetic oligonucleotide
auaacacaccccucuuuac

SEQ ID NO: 1980279 - RNA, 19 nt, Artificial Sequence
  Description of Artificial Sequence: Synthetic oligonucleotide
agaaagaaggcgagggcgc

SEQ ID NO: 1980280 - RNA, 19 nt, Artificial Sequence
  Description of Artificial Sequence: Synthetic oligonucleotide
ucgaggcugguaauuacag

SEQ ID NO: 1980281 - RNA, 19 nt, Artificial Sequence
  Description of Artificial Sequence: Synthetic oligonucleotide
guucugaccugugacaacg

SEQ ID NO: 1980282 - RNA, 19 nt, Artificial Sequence
  Description of Artificial Sequence: Synthetic oligonucleotide
uaugcagugcuggggaugg

SEQ ID NO: 1980283 - RNA, 19 nt, Artificial Sequence
  Description of Artificial Sequence: Synthetic oligonucleotide
aggucagcaaaguugaaaa

SEQ ID NO: 1980284 - RNA, 19 nt, Artificial Sequence
  Description of Artificial Sequence: Synthetic oligonucleotide
acauguccgguuuaugcag

SEQ ID NO: 1980285 - RNA, 19 nt, Artificial Sequence
  Description of Artificial Sequence: Synthetic oligonucleotide
gaccaaggaagacugcugc

SEQ ID NO: 1980286 - RNA, 19 nt, Artificial Sequence
  Description of Artificial Sequence: Synthetic oligonucleotide
ucauguaauaccuggcaua

SEQ ID NO: 1980287 - RNA, 19 nt, Artificial Sequence
  Description of Artificial Sequence: Synthetic oligonucleotide
gguagaaccccgcacagag

SEQ ID NO: 1980288 - RNA, 19 nt, Artificial Sequence
  Description of Artificial Sequence: Synthetic oligonucleotide
caggguagaugucagacug

SEQ ID NO: 1980289 - RNA, 19 nt, Artificial Sequence
  Description of Artificial Sequence: Synthetic oligonucleotide
auggcagggaagaugaggg

SEQ ID NO: 1980290 - RNA, 19 nt, Artificial Sequence
  Description of Artificial Sequence: Synthetic oligonucleotide
cacaaagauaacacacccc

SEQ ID NO: 1980291 - RNA, 19 nt, Artificial Sequence
  Description of Artificial Sequence: Synthetic oligonucleotide
aaguugaaaaggaggaaga

SEQ ID NO: 1980292 - RNA, 19 nt, Artificial Sequence
  Description of Artificial Sequence: Synthetic oligonucleotide
ucccuaacgucacuggaug

SEQ ID NO: 1980293 - RNA, 19 nt, Artificial Sequence
  Description of Artificial Sequence: Synthetic oligonucleotide
aaugcuaaacaagcacuca

SEQ ID NO: 1980294 - RNA, 19 nt, Artificial Sequence
  Description of Artificial Sequence: Synthetic oligonucleotide
ucacaccguaccuaugucc

SEQ ID NO: 1980295 - RNA, 19 nt, Artificial Sequence
  Description of Artificial Sequence: Synthetic oligonucleotide
cugaagauccucuccuacc

SEQ ID NO: 1980296 - RNA, 19 nt, Artificial Sequence
  Description of Artificial Sequence: Synthetic oligonucleotide
cauguaauaccuggcauac

SEQ ID NO: 1980297 - RNA, 19 nt, Artificial Sequence
  Description of Artificial Sequence: Synthetic oligonucleotide
uucacuaacauguccgguu

SEQ ID NO: 1980298 - RNA, 19 nt, Artificial Sequence
  Description of Artificial Sequence: Synthetic oligonucleotide
ugcucuucaccagaaaaca

SEQ ID NO: 1980299 - RNA, 19 nt, Artificial Sequence
  Description of Artificial Sequence: Synthetic oligonucleotide
uugagacagugucucaugu

SEQ ID NO: 1980300 - RNA, 19 nt, Artificial Sequence
  Description of Artificial Sequence: Synthetic oligonucleotide
uacuaagcagggcugcaca

SEQ ID NO: 1980301 - RNA, 19 nt, Artificial Sequence
  Description of Artificial Sequence: Synthetic oligonucleotide
gcuuucacuaacauguccg

SEQ ID NO: 1980302 - RNA, 19 nt, Artificial Sequence
  Description of Artificial Sequence: Synthetic oligonucleotide
uguguaccacucuggaccc

SEQ ID NO: 1980303 - RNA, 19 nt, Artificial Sequence
  Description of Artificial Sequence: Synthetic oligonucleotide
uuacugagccccagcaggc

SEQ ID NO: 1980304 - RNA, 19 nt, Artificial Sequence
  Description of Artificial Sequence: Synthetic oligonucleotide
ugguguguguaccacucug

SEQ ID NO: 1980305 - RNA, 19 nt, Artificial Sequence
  Description of Artificial Sequence: Synthetic oligonucleotide
aucuugggcccguagauga

SEQ ID NO: 1980306 - RNA, 19 nt, Artificial Sequence
  Description of Artificial Sequence: Synthetic oligonucleotide
acucacaccguaccuaugu

SEQ ID NO: 1980307 - RNA, 19 nt, Artificial Sequence
  Description of Artificial Sequence: Synthetic oligonucleotide
ugguaauuacagagcagga

SEQ ID NO: 1980308 - RNA, 19 nt, Artificial Sequence
  Description of Artificial Sequence: Synthetic oligonucleotide
cuuggcaguccauggagag

SEQ ID NO: 1980309 - RNA, 19 nt, Artificial Sequence
  Description of Artificial Sequence: Synthetic oligonucleotide
caagcacucacaccguacc

SEQ ID NO: 1980310 - RNA, 19 nt, Artificial Sequence
  Description of Artificial Sequence: Synthetic oligonucleotide
acaucacuacgcccguggc

SEQ ID NO: 1980311 - RNA, 19 nt, Artificial Sequence
  Description of Artificial Sequence: Synthetic oligonucleotide
auucggggcaucaugaaug

SEQ ID NO: 1980312 - RNA, 19 nt, Artificial Sequence
  Description of Artificial Sequence: Synthetic oligonucleotide
ugggauucggggcaucaug

SEQ ID NO: 1980313 - RNA, 19 nt, Artificial Sequence
  Description of Artificial Sequence: Synthetic oligonucleotide
uccuagauaagguguacua

SEQ ID NO: 1980314 - RNA, 19 nt, Artificial Sequence
  Description of Artificial Sequence: Synthetic oligonucleotide
guagguagaaccccgcaca

SEQ ID NO: 1980315 - RNA, 19 nt, Artificial Sequence
  Description of Artificial Sequence: Synthetic oligonucleotide
ucccuccuagauaaggugu

SEQ ID NO: 1980316 - RNA, 19 nt, Artificial Sequence
  Description of Artificial Sequence: Synthetic oligonucleotide
uuacaggcuuucacuaaca

SEQ ID NO: 1980317 - RNA, 19 nt, Artificial Sequence
  Description of Artificial Sequence: Synthetic oligonucleotide
gaaugcuaaacaagcacuc

SEQ ID NO: 1980318 - RNA, 19 nt, Artificial Sequence
  Description of Artificial Sequence: Synthetic oligonucleotide
acuaagcagggcugcacag

SEQ ID NO: 1980319 - RNA, 19 nt, Artificial Sequence
  Description of Artificial Sequence: Synthetic oligonucleotide
aacacguggacugggacaa

SEQ ID NO: 1980320 - RNA, 19 nt, Artificial Sequence
  Description of Artificial Sequence: Synthetic oligonucleotide
cuucuucaggauagguccg

SEQ ID NO: 1980321 - RNA, 19 nt, Artificial Sequence
  Description of Artificial Sequence: Synthetic oligonucleotide
acagugucucauguagccc

SEQ ID NO: 1980322 - RNA, 19 nt, Artificial Sequence
  Description of Artificial Sequence: Synthetic oligonucleotide
agaaaacacguggacuggg

SEQ ID NO: 1980323 - RNA, 19 nt, Artificial Sequence
  Description of Artificial Sequence: Synthetic oligonucleotide
agugagaaagaaggcgagg

SEQ ID NO: 1980324 - RNA, 19 nt, Artificial Sequence
  Description of Artificial Sequence: Synthetic oligonucleotide
ugucccuaacgucacugga

SEQ ID NO: 1980325 - RNA, 19 nt, Artificial Sequence
  Description of Artificial Sequence: Synthetic oligonucleotide
accuauguccucgaugcuc

SEQ ID NO: 1980326 - RNA, 19 nt, Artificial Sequence
  Description of Artificial Sequence: Synthetic oligonucleotide
auaggcugcuuauuagcca

SEQ ID NO: 1980327 - RNA, 19 nt, Artificial Sequence
  Description of Artificial Sequence: Synthetic oligonucleotide
aagacagugaggggcacga

SEQ ID NO: 1980328 - RNA, 19 nt, Artificial Sequence
  Description of Artificial Sequence: Synthetic oligonucleotide
caggcugugaccugucggc

SEQ ID NO: 1980329 - RNA, 19 nt, Artificial Sequence
  Description of Artificial Sequence: Synthetic oligonucleotide
aagauaacacaccccucuu

SEQ ID NO: 1980330 - RNA, 19 nt, Artificial Sequence
  Description of Artificial Sequence: Synthetic oligonucleotide
aucacuacgcccguggccu

SEQ ID NO: 1980331 - RNA, 19 nt, Artificial Sequence
  Description of Artificial Sequence: Synthetic oligonucleotide
ggccucauguaauaccugg

SEQ ID NO: 1980332 - RNA, 19 nt, Artificial Sequence
  Description of Artificial Sequence: Synthetic oligonucleotide
gugauaaaguagaugaaaa

SEQ ID NO: 1980333 - RNA, 19 nt, Artificial Sequence
  Description of Artificial Sequence: Synthetic oligonucleotide
gacaacgcaggucagacau

SEQ ID NO: 1980334 - RNA, 19 nt, Artificial Sequence
  Description of Artificial Sequence: Synthetic oligonucleotide
agacauaggcugcuuauua

SEQ ID NO: 1980335 - RNA, 19 nt, Artificial Sequence
  Description of Artificial Sequence: Synthetic oligonucleotide
agugugcucagguagccau

SEQ ID NO: 1980336 - RNA, 19 nt, Artificial Sequence
  Description of Artificial Sequence: Synthetic oligonucleotide
uguguguaccacucuggac

SEQ ID NO: 1980337 - RNA, 19 nt, Artificial Sequence
  Description of Artificial Sequence: Synthetic oligonucleotide
gacaacuggccucauguaa

SEQ ID NO: 1980338 - RNA, 19 nt, Artificial Sequence
  Description of Artificial Sequence: Synthetic oligonucleotide
uaacgucacuggaugcugc

SEQ ID NO: 1980339 - RNA, 19 nt, Artificial Sequence
  Description of Artificial Sequence: Synthetic oligonucleotide
uucggggcaucaugaaugc

SEQ ID NO: 1980340 - RNA, 19 nt, Artificial Sequence
  Description of Artificial Sequence: Synthetic oligonucleotide
accacggucaggugugauc

SEQ ID NO: 1980341 - RNA, 19 nt, Artificial Sequence
  Description of Artificial Sequence: Synthetic oligonucleotide
ucacuaacauguccgguuu

SEQ ID NO: 1980342 - RNA, 19 nt, Artificial Sequence
  Description of Artificial Sequence: Synthetic oligonucleotide
gaugggugcucuucaccag

SEQ ID NO: 1980343 - RNA, 19 nt, Artificial Sequence
  Description of Artificial Sequence: Synthetic oligonucleotide
uccuguuuccaccucucaa

SEQ ID NO: 1980344 - RNA, 19 nt, Artificial Sequence
  Description of Artificial Sequence: Synthetic oligonucleotide
acgaagaacuuggcagucc

SEQ ID NO: 1980345 - RNA, 19 nt, Artificial Sequence
  Description of Artificial Sequence: Synthetic oligonucleotide
uguaccacucuggacccag

SEQ ID NO: 1980346 - RNA, 19 nt, Artificial Sequence
  Description of Artificial Sequence: Synthetic oligonucleotide
gagggcgcugucccuaacg

SEQ ID NO: 1980347 - RNA, 19 nt, Artificial Sequence
  Description of Artificial Sequence: Synthetic oligonucleotide
agcaguagguagaaccccg

SEQ ID NO: 1980348 - RNA, 19 nt, Artificial Sequence
  Description of Artificial Sequence: Synthetic oligonucleotide
cacaggguagaugucagac

SEQ ID NO: 1980349 - RNA, 19 nt, Artificial Sequence
  Description of Artificial Sequence: Synthetic oligonucleotide
aagacaucacuacgcccgu

SEQ ID NO: 1980350 - RNA, 19 nt, Artificial Sequence
  Description of Artificial Sequence: Synthetic oligonucleotide
accagaaaacacguggacu

SEQ ID NO: 1980351 - RNA, 19 nt, Artificial Sequence
  Description of Artificial Sequence: Synthetic oligonucleotide
aagcacucacaccguaccu

SEQ ID NO: 1980352 - RNA, 19 nt, Artificial Sequence
  Description of Artificial Sequence: Synthetic oligonucleotide
cucccuauguagcugagga

SEQ ID NO: 1980353 - RNA, 19 nt, Artificial Sequence
  Description of Artificial Sequence: Synthetic oligonucleotide
uccgguuuaugcagugcug

SEQ ID NO: 1980354 - RNA, 19 nt, Artificial Sequence
  Description of Artificial Sequence: Synthetic oligonucleotide
gcuaaacaagcacucacac

SEQ ID NO: 1980355 - RNA, 19 nt, Artificial Sequence
  Description of Artificial Sequence: Synthetic oligonucleotide
gauuacaggcuuucacuaa

SEQ ID NO: 1980356 - RNA, 19 nt, Artificial Sequence
  Description of Artificial Sequence: Synthetic oligonucleotide
ucccggggcacgaucuugg

SEQ ID NO: 1980357 - RNA, 19 nt, Artificial Sequence
  Description of Artificial Sequence: Synthetic oligonucleotide
cauacuccagccgggacag

SEQ ID NO: 1980358 - RNA, 19 nt, Artificial Sequence
  Description of Artificial Sequence: Synthetic oligonucleotide
gcaaaguugaaaaggagga

SEQ ID NO: 1980359 - RNA, 19 nt, Artificial Sequence
  Description of Artificial Sequence: Synthetic oligonucleotide
acaggguagaugucagacu

SEQ ID NO: 1980360 - RNA, 19 nt, Artificial Sequence
  Description of Artificial Sequence: Synthetic oligonucleotide
acaagcacucacaccguac

SEQ ID NO: 1980361 - RNA, 19 nt, Artificial Sequence
  Description of Artificial Sequence: Synthetic oligonucleotide
gaucgaggcugguaauuac

SEQ ID NO: 1980362 - RNA, 19 nt, Artificial Sequence
  Description of Artificial Sequence: Synthetic oligonucleotide
uuaugcagugcuggggaug

SEQ ID NO: 1980363 - RNA, 19 nt, Artificial Sequence
  Description of Artificial Sequence: Synthetic oligonucleotide
cagacauguagaaagacau

SEQ ID NO: 1980364 - RNA, 19 nt, Artificial Sequence
  Description of Artificial Sequence: Synthetic oligonucleotide
ggcaucaugaaugcuaaac

SEQ ID NO: 1980365 - RNA, 19 nt, Artificial Sequence
  Description of Artificial Sequence: Synthetic oligonucleotide
agauccucuccuaccuugc

SEQ ID NO: 1980366 - RNA, 19 nt, Artificial Sequence
  Description of Artificial Sequence: Synthetic oligonucleotide
uccaggcugugaccugucg

SEQ ID NO: 1980367 - RNA, 19 nt, Artificial Sequence
  Description of Artificial Sequence: Synthetic oligonucleotide
ugcuccuaggacccggcac

SEQ ID NO: 1980368 - RNA, 19 nt, Artificial Sequence
  Description of Artificial Sequence: Synthetic oligonucleotide
cugucccuaacgucacugg

SEQ ID NO: 1980369 - RNA, 19 nt, Artificial Sequence
  Description of Artificial Sequence: Synthetic oligonucleotide
ccuguuuccaccucucaag

SEQ ID NO: 1980370 - RNA, 19 nt, Artificial Sequence
  Description of Artificial Sequence: Synthetic oligonucleotide
caucacuacgcccguggcc

SEQ ID NO: 1980371 - RNA, 19 nt, Artificial Sequence
  Description of Artificial Sequence: Synthetic oligonucleotide
uuucacuaacauguccggu

SEQ ID NO: 1980372 - RNA, 19 nt, Artificial Sequence
  Description of Artificial Sequence: Synthetic oligonucleotide
gguuuaugcagugcugggg

SEQ ID NO: 1980373 - RNA, 19 nt, Artificial Sequence
  Description of Artificial Sequence: Synthetic oligonucleotide
ccuggcauacuccagccgg

SEQ ID NO: 1980374 - RNA, 19 nt, Artificial Sequence
  Description of Artificial Sequence: Synthetic oligonucleotide
caggucagacauaggcugc

SEQ ID NO: 1980375 - RNA, 19 nt, Artificial Sequence
  Description of Artificial Sequence: Synthetic oligonucleotide
cucccuccuagauaaggug

SEQ ID NO: 1980376 - RNA, 19 nt, Artificial Sequence
  Description of Artificial Sequence: Synthetic oligonucleotide
cagaaaacacguggacugg

SEQ ID NO: 1980377 - RNA, 19 nt, Artificial Sequence
  Description of Artificial Sequence: Synthetic oligonucleotide
ggacccggcaccuggaucc

SEQ ID NO: 1980378 - RNA, 19 nt, Artificial Sequence
  Description of Artificial Sequence: Synthetic oligonucleotide
gaaccccgcacagagacca

SEQ ID NO: 1980379 - RNA, 19 nt, Artificial Sequence
  Description of Artificial Sequence: Synthetic oligonucleotide
ggucaggugugaucgaggc

SEQ ID NO: 1980380 - RNA, 19 nt, Artificial Sequence
  Description of Artificial Sequence: Synthetic oligonucleotide
guacagaacccaaggccgg

SEQ ID NO: 1980381 - RNA, 19 nt, Artificial Sequence
  Description of Artificial Sequence: Synthetic oligonucleotide
cugaacccagcaucaggcc

SEQ ID NO: 1980382 - RNA, 19 nt, Artificial Sequence
  Description of Artificial Sequence: Synthetic oligonucleotide
caccguaccuauguccucg

SEQ ID NO: 1980383 - RNA, 19 nt, Artificial Sequence
  Description of Artificial Sequence: Synthetic oligonucleotide
uguacuaagcagggcugca

SEQ ID NO: 1980384 - RNA, 19 nt, Artificial Sequence
  Description of Artificial Sequence: Synthetic oligonucleotide
caccagaaaacacguggac

SEQ ID NO: 1980385 - RNA, 19 nt, Artificial Sequence
  Description of Artificial Sequence: Synthetic oligonucleotide
accugucggccacagaggu

SEQ ID NO: 1980386 - RNA, 19 nt, Artificial Sequence
  Description of Artificial Sequence: Synthetic oligonucleotide
ggucagcaaaguugaaaag

SEQ ID NO: 1980387 - RNA, 19 nt, Artificial Sequence
  Description of Artificial Sequence: Synthetic oligonucleotide
cacgaggcagacacgcagc

SEQ ID NO: 1980388 - RNA, 19 nt, Artificial Sequence
  Description of Artificial Sequence: Synthetic oligonucleotide
ugagacagugucucaugua

SEQ ID NO: 1980389 - RNA, 19 nt, Artificial Sequence
  Description of Artificial Sequence: Synthetic oligonucleotide
uuuaugcagugcuggggau

SEQ ID NO: 1980390 - RNA, 19 nt, Artificial Sequence
  Description of Artificial Sequence: Synthetic oligonucleotide
accugugacaacgcagguc

SEQ ID NO: 1980391 - RNA, 19 nt, Artificial Sequence
  Description of Artificial Sequence: Synthetic oligonucleotide
gugugaucgaggcugguaa

SEQ ID NO: 1980392 - RNA, 19 nt, Artificial Sequence
  Description of Artificial Sequence: Synthetic oligonucleotide
uacgcccguggccucagcc

SEQ ID NO: 1980393 - RNA, 19 nt, Artificial Sequence
  Description of Artificial Sequence: Synthetic oligonucleotide
ggaagacugcugcagugag

SEQ ID NO: 1980394 - RNA, 19 nt, Artificial Sequence
  Description of Artificial Sequence: Synthetic oligonucleotide
cuaacgucacuggaugcug

SEQ ID NO: 1980395 - RNA, 19 nt, Artificial Sequence
  Description of Artificial Sequence: Synthetic oligonucleotide
agacacgcagcagugccag

SEQ ID NO: 1980396 - RNA, 19 nt, Artificial Sequence
  Description of Artificial Sequence: Synthetic oligonucleotide
ccguagaugagcaccagug

SEQ ID NO: 1980397 - RNA, 19 nt, Artificial Sequence
  Description of Artificial Sequence: Synthetic oligonucleotide
cuucaccagaaaacacgug

SEQ ID NO: 1980398 - RNA, 19 nt, Artificial Sequence
  Description of Artificial Sequence: Synthetic oligonucleotide
agugccagugcagggagca

SEQ ID NO: 1980399 - RNA, 19 nt, Artificial Sequence
  Description of Artificial Sequence: Synthetic oligonucleotide
acuaacauguccgguuuau

SEQ ID NO: 1980400 - RNA, 19 nt, Artificial Sequence
  Description of Artificial Sequence: Synthetic oligonucleotide
gaaaacacguggacuggga

SEQ ID NO: 1980401 - RNA, 19 nt, Artificial Sequence
  Description of Artificial Sequence: Synthetic oligonucleotide
ugaucgaggcugguaauua

SEQ ID NO: 1980402 - RNA, 19 nt, Artificial Sequence
  Description of Artificial Sequence: Synthetic oligonucleotide
agaugagcaccagugugcu

SEQ ID NO: 1980403 - RNA, 19 nt, Artificial Sequence
  Description of Artificial Sequence: Synthetic oligonucleotide
caaacucccuauguagcug

SEQ ID NO: 1980404 - RNA, 19 nt, Artificial Sequence
  Description of Artificial Sequence: Synthetic oligonucleotide
gaccugucggccacagagg

SEQ ID NO: 1980405 - RNA, 19 nt, Artificial Sequence
  Description of Artificial Sequence: Synthetic oligonucleotide
cuugcuccuaggacccggc

SEQ ID NO: 1980406 - RNA, 19 nt, Artificial Sequence
  Description of Artificial Sequence: Synthetic oligonucleotide
ugugaucgaggcugguaau

SEQ ID NO: 1980407 - RNA, 19 nt, Artificial Sequence
  Description of Artificial Sequence: Synthetic oligonucleotide
ucgaugcucccuccuagau

SEQ ID NO: 1980408 - RNA, 19 nt, Artificial Sequence
  Description of Artificial Sequence: Synthetic oligonucleotide
aggacccggcaccuggauc

SEQ ID NO: 1980409 - RNA, 19 nt, Artificial Sequence
  Description of Artificial Sequence: Synthetic oligonucleotide
ugacaacgcaggucagaca

SEQ ID NO: 1980410 - RNA, 19 nt, Artificial Sequence
  Description of Artificial Sequence: Synthetic oligonucleotide
acugggacaacuggccuca

SEQ ID NO: 1980411 - RNA, 19 nt, Artificial Sequence
  Description of Artificial Sequence: Synthetic oligonucleotide
uaccuugcugucaguugga

SEQ ID NO: 1980412 - RNA, 19 nt, Artificial Sequence
  Description of Artificial Sequence: Synthetic oligonucleotide
acaacuggccucauguaau

SEQ ID NO: 1980413 - RNA, 19 nt, Artificial Sequence
  Description of Artificial Sequence: Synthetic oligonucleotide
aaacaagcacucacaccgu

SEQ ID NO: 1980414 - RNA, 19 nt, Artificial Sequence
  Description of Artificial Sequence: Synthetic oligonucleotide
acaccguaccuauguccuc

SEQ ID NO: 1980415 - RNA, 19 nt, Artificial Sequence
  Description of Artificial Sequence: Synthetic oligonucleotide
uucuucaggauagguccga

SEQ ID NO: 1980416 - RNA, 19 nt, Artificial Sequence
  Description of Artificial Sequence: Synthetic oligonucleotide
uggccucauguaauaccug

SEQ ID NO: 1980417 - RNA, 19 nt, Artificial Sequence
  Description of Artificial Sequence: Synthetic oligonucleotide
ugggacaacuggccucaug

SEQ ID NO: 1980418 - RNA, 19 nt, Artificial Sequence
  Description of Artificial Sequence: Synthetic oligonucleotide
ugagcaccagugugcucag

SEQ ID NO: 1980419 - RNA, 19 nt, Artificial Sequence
  Description of Artificial Sequence: Synthetic oligonucleotide
aggaagacugcugcaguga

SEQ ID NO: 1980420 - RNA, 19 nt, Artificial Sequence
  Description of Artificial Sequence: Synthetic oligonucleotide
ggcagugauaaaguagaug

SEQ ID NO: 1980421 - RNA, 19 nt, Artificial Sequence
  Description of Artificial Sequence: Synthetic oligonucleotide
guguguguaccacucugga

SEQ ID NO: 1980422 - RNA, 19 nt, Artificial Sequence
  Description of Artificial Sequence: Synthetic oligonucleotide
cccuauguagcugaggaug

SEQ ID NO: 1980423 - RNA, 19 nt, Artificial Sequence
  Description of Artificial Sequence: Synthetic oligonucleotide
cuaacauguccgguuuaug

SEQ ID NO: 1980424 - RNA, 19 nt, Artificial Sequence
  Description of Artificial Sequence: Synthetic oligonucleotide
auguccgguuuaugcagug

SEQ ID NO: 1980425 - RNA, 19 nt, Artificial Sequence
  Description of Artificial Sequence: Synthetic oligonucleotide
ugugaccugucggccacag

SEQ ID NO: 1980426 - RNA, 19 nt, Artificial Sequence
  Description of Artificial Sequence: Synthetic oligonucleotide
caggugugaucgaggcugg

SEQ ID NO: 1980427 - RNA, 19 nt, Artificial Sequence
  Description of Artificial Sequence: Synthetic oligonucleotide
aaagagaggcuggguucug

SEQ ID NO: 1980428 - RNA, 19 nt, Artificial Sequence
  Description of Artificial Sequence: Synthetic oligonucleotide
agggcgcugucccuaacgu

SEQ ID NO: 1980429 - RNA, 19 nt, Artificial Sequence
  Description of Artificial Sequence: Synthetic oligonucleotide
cccucuuuacaauuguauc

SEQ ID NO: 1980430 - RNA, 19 nt, Artificial Sequence
  Description of Artificial Sequence: Synthetic oligonucleotide
cuugggcccguagaugagc

SEQ ID NO: 1980431 - RNA, 19 nt, Artificial Sequence
  Description of Artificial Sequence: Synthetic oligonucleotide
uguccgguuuaugcagugc

SEQ ID NO: 1980432 - RNA, 19 nt, Artificial Sequence
  Description of Artificial Sequence: Synthetic oligonucleotide
gcuuauuagccacaaagau

SEQ ID NO: 1980433 - RNA, 19 nt, Artificial Sequence
  Description of Artificial Sequence: Synthetic oligonucleotide
gguaauuacagagcaggaa

SEQ ID NO: 1980434 - RNA, 19 nt, Artificial Sequence
  Description of Artificial Sequence: Synthetic oligonucleotide
acugcugcagugagaaaga

SEQ ID NO: 1980435 - RNA, 19 nt, Artificial Sequence
  Description of Artificial Sequence: Synthetic oligonucleotide
ccacggucaggugugaucg

SEQ ID NO: 1980436 - RNA, 19 nt, Artificial Sequence
  Description of Artificial Sequence: Synthetic oligonucleotide
agaaccccgcacagagacc

SEQ ID NO: 1980437 - RNA, 19 nt, Artificial Sequence
  Description of Artificial Sequence: Synthetic oligonucleotide
acucccuauguagcugagg

SEQ ID NO: 1980438 - RNA, 19 nt, Artificial Sequence
  Description of Artificial Sequence: Synthetic oligonucleotide
aucgaggcugguaauuaca

SEQ ID NO: 1980439 - RNA, 19 nt, Artificial Sequence
  Description of Artificial Sequence: Synthetic oligonucleotide
uguccucgaugcucccucc

SEQ ID NO: 1980440 - RNA, 19 nt, Artificial Sequence
  Description of Artificial Sequence: Synthetic oligonucleotide
agcaccacggucaggugug

SEQ ID NO: 1980441 - RNA, 19 nt, Artificial Sequence
  Description of Artificial Sequence: Synthetic oligonucleotide
gacccaggggccacugagg

SEQ ID NO: 1980442 - RNA, 19 nt, Artificial Sequence
  Description of Artificial Sequence: Synthetic oligonucleotide
uagccauuacugagcccca

SEQ ID NO: 1980443 - RNA, 19 nt, Artificial Sequence
  Description of Artificial Sequence: Synthetic oligonucleotide
ugugcauggacuggauguu

SEQ ID NO: 1980444 - RNA, 19 nt, Artificial Sequence
  Description of Artificial Sequence: Synthetic oligonucleotide
acggucaggugugaucgag

SEQ ID NO: 1980445 - RNA, 19 nt, Artificial Sequence
  Description of Artificial Sequence: Synthetic oligonucleotide
aggaggugcugggaguguc

SEQ ID NO: 1980446 - RNA, 19 nt, Artificial Sequence
  Description of Artificial Sequence: Synthetic oligonucleotide
cggggcacgaucuugggcc

SEQ ID NO: 1980447 - RNA, 19 nt, Artificial Sequence
  Description of Artificial Sequence: Synthetic oligonucleotide
uauguccucgaugcucccu

SEQ ID NO: 1980448 - RNA, 19 nt, Artificial Sequence
  Description of Artificial Sequence: Synthetic oligonucleotide
ucccuauguagcugaggau

SEQ ID NO: 1980449 - RNA, 19 nt, Artificial Sequence
  Description of Artificial Sequence: Synthetic oligonucleotide
cuggaacagcaccacgguc

SEQ ID NO: 1980450 - RNA, 19 nt, Artificial Sequence
  Description of Artificial Sequence: Synthetic oligonucleotide
gggacaacuggccucaugu

SEQ ID NO: 1980451 - RNA, 19 nt, Artificial Sequence
  Description of Artificial Sequence: Synthetic oligonucleotide
ccuaggacccggcaccugg

SEQ ID NO: 1980452 - RNA, 19 nt, Artificial Sequence
  Description of Artificial Sequence: Synthetic oligonucleotide
uguccugugaugggugcuc

SEQ ID NO: 1980453 - RNA, 19 nt, Artificial Sequence
  Description of Artificial Sequence: Synthetic oligonucleotide
cagacuggaacagcaccac

SEQ ID NO: 1980454 - RNA, 19 nt, Artificial Sequence
  Description of Artificial Sequence: Synthetic oligonucleotide
uaccuauguccucgaugcu

SEQ ID NO: 1980455 - RNA, 19 nt, Artificial Sequence
  Description of Artificial Sequence: Synthetic oligonucleotide
aggccggcugucuucuuca

SEQ ID NO: 1980456 - RNA, 19 nt, Artificial Sequence
  Description of Artificial Sequence: Synthetic oligonucleotide
cucacaccguaccuauguc

SEQ ID NO: 1980457 - RNA, 19 nt, Artificial Sequence
  Description of Artificial Sequence: Synthetic oligonucleotide
gauucggggcaucaugaau

SEQ ID NO: 1980458 - RNA, 19 nt, Artificial Sequence
  Description of Artificial Sequence: Synthetic oligonucleotide
aacucccuauguagcugag

SEQ ID NO: 1980459 - RNA, 19 nt, Artificial Sequence
  Description of Artificial Sequence: Synthetic oligonucleotide
uccucgaugcucccuccua

SEQ ID NO: 1980460 - RNA, 19 nt, Artificial Sequence
  Description of Artificial Sequence: Synthetic oligonucleotide
gggagcaccuugcuccuag

SEQ ID NO: 1980461 - RNA, 19 nt, Artificial Sequence
  Description of Artificial Sequence: Synthetic oligonucleotide
agugucucauguagcccag

SEQ ID NO: 1980462 - RNA, 19 nt, Artificial Sequence
  Description of Artificial Sequence: Synthetic oligonucleotide
cuauguccucgaugcuccc

SEQ ID NO: 1980463 - RNA, 19 nt, Artificial Sequence
  Description of Artificial Sequence: Synthetic oligonucleotide
ccgguuuaugcagugcugg

SEQ ID NO: 1980464 - RNA, 19 nt, Artificial Sequence
  Description of Artificial Sequence: Synthetic oligonucleotide
guacuaagcagggcugcac

SEQ ID NO: 1980465 - RNA, 19 nt, Artificial Sequence
  Description of Artificial Sequence: Synthetic oligonucleotide
gcauacuccagccgggaca

SEQ ID NO: 1980466 - RNA, 19 nt, Artificial Sequence
  Description of Artificial Sequence: Synthetic oligonucleotide
uugcuccuaggacccggca

SEQ ID NO: 1980467 - RNA, 19 nt, Artificial Sequence
  Description of Artificial Sequence: Synthetic oligonucleotide
ccucuuuacaauuguaucu

SEQ ID NO: 1980468 - RNA, 19 nt, Artificial Sequence
  Description of Artificial Sequence: Synthetic oligonucleotide
acaccccucuuuacaauug

SEQ ID NO: 1980469 - RNA, 19 nt, Artificial Sequence
  Description of Artificial Sequence: Synthetic oligonucleotide
ggcgcugucccuaacguca

SEQ ID NO: 1980470 - RNA, 19 nt, Artificial Sequence
  Description of Artificial Sequence: Synthetic oligonucleotide
cacgaucuugggcccguag

SEQ ID NO: 1980471 - RNA, 19 nt, Artificial Sequence
  Description of Artificial Sequence: Synthetic oligonucleotide
gaggggcacgaagaacuug

SEQ ID NO: 1980472 - RNA, 19 nt, Artificial Sequence
  Description of Artificial Sequence: Synthetic oligonucleotide
cagaacccaaggccggcug

SEQ ID NO: 1980473 - RNA, 19 nt, Artificial Sequence
  Description of Artificial Sequence: Synthetic oligonucleotide
guccgguuuaugcagugcu

SEQ ID NO: 1980474 - RNA, 19 nt, Artificial Sequence
  Description of Artificial Sequence: Synthetic oligonucleotide
ccuaccuugcugucaguug

SEQ ID NO: 1980475 - RNA, 19 nt, Artificial Sequence
  Description of Artificial Sequence: Synthetic oligonucleotide
gcugguaauuacagagcag

SEQ ID NO: 1980476 - RNA, 19 nt, Artificial Sequence
  Description of Artificial Sequence: Synthetic oligonucleotide
cacgaagaacuuggcaguc

SEQ ID NO: 1980477 - RNA, 19 nt, Artificial Sequence
  Description of Artificial Sequence: Synthetic oligonucleotide
ccaggcugugaccugucgg

SEQ ID NO: 1980478 - RNA, 19 nt, Artificial Sequence
  Description of Artificial Sequence: Synthetic oligonucleotide
agguccgagggguggugug

SEQ ID NO: 1980479 - RNA, 19 nt, Artificial Sequence
  Description of Artificial Sequence: Synthetic oligonucleotide
gucagacauaggcugcuua

SEQ ID NO: 1980480 - RNA, 19 nt, Artificial Sequence
  Description of Artificial Sequence: Synthetic oligonucleotide
agcacucacaccguaccua

SEQ ID NO: 1980481 - RNA, 19 nt, Artificial Sequence
  Description of Artificial Sequence: Synthetic oligonucleotide
aggucagacauaggcugcu

SEQ ID NO: 1980482 - RNA, 19 nt, Artificial Sequence
  Description of Artificial Sequence: Synthetic oligonucleotide
gaugagcaccagugugcuc

SEQ ID NO: 1980483 - RNA, 19 nt, Artificial Sequence
  Description of Artificial Sequence: Synthetic oligonucleotide
uacugagccccagcaggca

SEQ ID NO: 1980484 - RNA, 19 nt, Artificial Sequence
  Description of Artificial Sequence: Synthetic oligonucleotide
ggugguguguguaccacuc

SEQ ID NO: 1980485 - RNA, 19 nt, Artificial Sequence
  Description of Artificial Sequence: Synthetic oligonucleotide
gugcauggacuggauguug

SEQ ID NO: 1980486 - RNA, 19 nt, Artificial Sequence
  Description of Artificial Sequence: Synthetic oligonucleotide
ggcagggaagaugagggca

SEQ ID NO: 1980487 - RNA, 19 nt, Artificial Sequence
  Description of Artificial Sequence: Synthetic oligonucleotide
gcuaggauuacaggcuuuc

SEQ ID NO: 1980488 - RNA, 19 nt, Artificial Sequence
  Description of Artificial Sequence: Synthetic oligonucleotide
gaggcacgaggcagacacg

SEQ ID NO: 1980489 - RNA, 19 nt, Artificial Sequence
  Description of Artificial Sequence: Synthetic oligonucleotide
auguaauaccuggcauacu

SEQ ID NO: 1980490 - RNA, 19 nt, Artificial Sequence
  Description of Artificial Sequence: Synthetic oligonucleotide
ccggcugucuucuucagga

SEQ ID NO: 1980491 - RNA, 19 nt, Artificial Sequence
  Description of Artificial Sequence: Synthetic oligonucleotide
acagaacccaaggccggcu

SEQ ID NO: 1980492 - RNA, 19 nt, Artificial Sequence
  Description of Artificial Sequence: Synthetic oligonucleotide
gcugucccuaacgucacug

SEQ ID NO: 1980493 - RNA, 19 nt, Artificial Sequence
  Description of Artificial Sequence: Synthetic oligonucleotide
cucgaugcucccuccuaga

SEQ ID NO: 1980494 - RNA, 19 nt, Artificial Sequence
  Description of Artificial Sequence: Synthetic oligonucleotide
cuaggauuacaggcuuuca

SEQ ID NO: 1980495 - RNA, 19 nt, Artificial Sequence
  Description of Artificial Sequence: Synthetic oligonucleotide
accguaccuauguccucga

SEQ ID NO: 1980496 - RNA, 19 nt, Artificial Sequence
  Description of Artificial Sequence: Synthetic oligonucleotide
uaggacccggcaccuggau

SEQ ID NO: 1980497 - RNA, 19 nt, Artificial Sequence
  Description of Artificial Sequence: Synthetic oligonucleotide
cacucacaccguaccuaug

SEQ ID NO: 1980498 - RNA, 19 nt, Artificial Sequence
  Description of Artificial Sequence: Synthetic oligonucleotide
gguucugaccugugacaac

SEQ ID NO: 1980499 - RNA, 19 nt, Artificial Sequence
  Description of Artificial Sequence: Synthetic oligonucleotide
auagguccgagggguggug

SEQ ID NO: 1980500 - RNA, 19 nt, Artificial Sequence
  Description of Artificial Sequence: Synthetic oligonucleotide
uggacccaggggccacuga

SEQ ID NO: 1980501 - RNA, 19 nt, Artificial Sequence
  Description of Artificial Sequence: Synthetic oligonucleotide
gcccagguuggccucaaac

SEQ ID NO: 1980502 - RNA, 19 nt, Artificial Sequence
  Description of Artificial Sequence: Synthetic oligonucleotide
acguggacugggacaacug

SEQ ID NO: 1980503 - RNA, 19 nt, Artificial Sequence
  Description of Artificial Sequence: Synthetic oligonucleotide
cagacacgcagcagugcca

SEQ ID NO: 1980504 - RNA, 19 nt, Artificial Sequence
  Description of Artificial Sequence: Synthetic oligonucleotide
cagugccagugcagggagc

SEQ ID NO: 1980505 - RNA, 19 nt, Artificial Sequence
  Description of Artificial Sequence: Synthetic oligonucleotide
uagguccgagggguggugu

SEQ ID NO: 1980506 - RNA, 19 nt, Artificial Sequence
  Description of Artificial Sequence: Synthetic oligonucleotide
gcugugaccugucggccac

SEQ ID NO: 1980507 - RNA, 19 nt, Artificial Sequence
  Description of Artificial Sequence: Synthetic oligonucleotide
ccucgaugcucccuccuag

SEQ ID NO: 1980508 - RNA, 19 nt, Artificial Sequence
  Description of Artificial Sequence: Synthetic oligonucleotide
guaccacucuggacccagg

SEQ ID NO: 1980509 - RNA, 19 nt, Artificial Sequence
  Description of Artificial Sequence: Synthetic oligonucleotide
gccucauguaauaccuggc

SEQ ID NO: 1980510 - RNA, 19 nt, Artificial Sequence
  Description of Artificial Sequence: Synthetic oligonucleotide
cccuaacgucacuggaugc

SEQ ID NO: 1980511 - RNA, 19 nt, Artificial Sequence
  Description of Artificial Sequence: Synthetic oligonucleotide
uccgagggguggugugugu

SEQ ID NO: 1980512 - RNA, 19 nt, Artificial Sequence
  Description of Artificial Sequence: Synthetic oligonucleotide
caacuggccucauguaaua

SEQ ID NO: 1980513 - RNA, 19 nt, Artificial Sequence
  Description of Artificial Sequence: Synthetic oligonucleotide
gauccucuccuaccuugcu

SEQ ID NO: 1980514 - RNA, 19 nt, Artificial Sequence
  Description of Artificial Sequence: Synthetic oligonucleotide
ccccgcacagagaccaagg

SEQ ID NO: 1980515 - RNA, 19 nt, Artificial Sequence
  Description of Artificial Sequence: Synthetic oligonucleotide
gggcacgaagaacuuggca

SEQ ID NO: 1980516 - RNA, 19 nt, Artificial Sequence
  Description of Artificial Sequence: Synthetic oligonucleotide
agacaucacuacgcccgug

SEQ ID NO: 1980517 - RNA, 19 nt, Artificial Sequence
  Description of Artificial Sequence: Synthetic oligonucleotide
cgguuuaugcagugcuggg

SEQ ID NO: 1980518 - RNA, 19 nt, Artificial Sequence
  Description of Artificial Sequence: Synthetic oligonucleotide
gcacgaagaacuuggcagu

SEQ ID NO: 1980519 - RNA, 19 nt, Artificial Sequence
  Description of Artificial Sequence: Synthetic oligonucleotide
agcucccggggcacgaucu

SEQ ID NO: 1980520 - RNA, 19 nt, Artificial Sequence
  Description of Artificial Sequence: Synthetic oligonucleotide
ccgggacagcaguagguag

SEQ ID NO: 1980521 - RNA, 19 nt, Artificial Sequence
  Description of Artificial Sequence: Synthetic oligonucleotide
gugcucagguagccauuac

SEQ ID NO: 1980522 - RNA, 19 nt, Artificial Sequence
  Description of Artificial Sequence: Synthetic oligonucleotide
ggcauacuccagccgggac

SEQ ID NO: 1980523 - RNA, 19 nt, Artificial Sequence
  Description of Artificial Sequence: Synthetic oligonucleotide
gaagauccucuccuaccuu

SEQ ID NO: 1980524 - RNA, 19 nt, Artificial Sequence
  Description of Artificial Sequence: Synthetic oligonucleotide
cauguccgguuuaugcagu

SEQ ID NO: 1980525 - RNA, 19 nt, Artificial Sequence
  Description of Artificial Sequence: Synthetic oligonucleotide
gcaguagguagaaccccgc

SEQ ID NO: 1980526 - RNA, 19 nt, Artificial Sequence
  Description of Artificial Sequence: Synthetic oligonucleotide
ccuagauaagguguacuaa

SEQ ID NO: 1980527 - RNA, 19 nt, Artificial Sequence
  Description of Artificial Sequence: Synthetic oligonucleotide
acuacgcccguggccucag

SEQ ID NO: 1980528 - RNA, 19 nt, Artificial Sequence
  Description of Artificial Sequence: Synthetic oligonucleotide
ucggggcaucaugaaugcu

SEQ ID NO: 1980529 - RNA, 19 nt, Artificial Sequence
  Description of Artificial Sequence: Synthetic oligonucleotide
guccgagggguggugugug

SEQ ID NO: 1980530 - RNA, 19 nt, Artificial Sequence
  Description of Artificial Sequence: Synthetic oligonucleotide
ggggcaucaugaaugcuaa

SEQ ID NO: 1980531 - RNA, 19 nt, Artificial Sequence
  Description of Artificial Sequence: Synthetic oligonucleotide
uccuaggacccggcaccug

SEQ ID NO: 1980532 - RNA, 19 nt, Artificial Sequence
  Description of Artificial Sequence: Synthetic oligonucleotide
accuugcuccuaggacccg

SEQ ID NO: 1980533 - RNA, 19 nt, Artificial Sequence
  Description of Artificial Sequence: Synthetic oligonucleotide
gaccugugacaacgcaggu

SEQ ID NO: 1980534 - RNA, 19 nt, Artificial Sequence
  Description of Artificial Sequence: Synthetic oligonucleotide
ggauucggggcaucaugaa

SEQ ID NO: 1980535 - RNA, 19 nt, Artificial Sequence
  Description of Artificial Sequence: Synthetic oligonucleotide
accuugcugucaguuggaa

SEQ ID NO: 1980536 - RNA, 19 nt, Artificial Sequence
  Description of Artificial Sequence: Synthetic oligonucleotide
ggcugugaccugucggcca

SEQ ID NO: 1980537 - RNA, 19 nt, Artificial Sequence
  Description of Artificial Sequence: Synthetic oligonucleotide
ucacuacgcccguggccuc

SEQ ID NO: 1980538 - RNA, 19 nt, Artificial Sequence
  Description of Artificial Sequence: Synthetic oligonucleotide
ccagugugcucagguagcc

SEQ ID NO: 1980539 - RNA, 19 nt, Artificial Sequence
  Description of Artificial Sequence: Synthetic oligonucleotide
ccuugcuccuaggacccgg

SEQ ID NO: 1980540 - RNA, 19 nt, Artificial Sequence
  Description of Artificial Sequence: Synthetic oligonucleotide
aggcuggguucugaccugu

SEQ ID NO: 1980541 - RNA, 19 nt, Artificial Sequence
  Description of Artificial Sequence: Synthetic oligonucleotide
cucccggggcacgaucuug

SEQ ID NO: 1980542 - RNA, 19 nt, Artificial Sequence
  Description of Artificial Sequence: Synthetic oligonucleotide
acccaaggccggcugucuu

SEQ ID NO: 1980543 - RNA, 19 nt, Artificial Sequence
  Description of Artificial Sequence: Synthetic oligonucleotide
gucaggugugaucgaggcu

SEQ ID NO: 1980544 - RNA, 19 nt, Artificial Sequence
  Description of Artificial Sequence: Synthetic oligonucleotide
cuccuagauaagguguacu

SEQ ID NO: 1980545 - RNA, 19 nt, Artificial Sequence
  Description of Artificial Sequence: Synthetic oligonucleotide
cacaccccucuuuacaauu

SEQ ID NO: 1980546 - RNA, 19 nt, Artificial Sequence
  Description of Artificial Sequence: Synthetic oligonucleotide
cagcaccacggucaggugu

SEQ ID NO: 1980547 - RNA, 19 nt, Artificial Sequence
  Description of Artificial Sequence: Synthetic oligonucleotide
cacuaacauguccgguuua

SEQ ID NO: 1980548 - RNA, 19 nt, Artificial Sequence
  Description of Artificial Sequence: Synthetic oligonucleotide
gucccuaacgucacuggau

SEQ ID NO: 1980549 - RNA, 19 nt, Artificial Sequence
  Description of Artificial Sequence: Synthetic oligonucleotide
ggacaacuggccucaugua

SEQ ID NO: 1980550 - RNA, 19 nt, Artificial Sequence
  Description of Artificial Sequence: Synthetic oligonucleotide
ccuccuagauaagguguac

SEQ ID NO: 1980551 - RNA, 19 nt, Artificial Sequence
  Description of Artificial Sequence: Synthetic oligonucleotide
accccucuuuacaauugua

SEQ ID NO: 1980552 - RNA, 19 nt, Artificial Sequence
  Description of Artificial Sequence: Synthetic oligonucleotide
ccggcaccuggauccaggc

SEQ ID NO: 1980553 - RNA, 19 nt, Artificial Sequence
  Description of Artificial Sequence: Synthetic oligonucleotide
gugguguguguaccacucu

SEQ ID NO: 1980554 - RNA, 19 nt, Artificial Sequence
  Description of Artificial Sequence: Synthetic oligonucleotide
aggcugcuuauuagccaca

SEQ ID NO: 1980555 - RNA, 19 nt, Artificial Sequence
  Description of Artificial Sequence: Synthetic oligonucleotide
cccaaggccggcugucuuc

SEQ ID NO: 1980556 - RNA, 19 nt, Artificial Sequence
  Description of Artificial Sequence: Synthetic oligonucleotide
ggggcacgaagaacuuggc

SEQ ID NO: 1980557 - RNA, 19 nt, Artificial Sequence
  Description of Artificial Sequence: Synthetic oligonucleotide
ggaagacagugaggggcac

SEQ ID NO: 1980558 - RNA, 19 nt, Artificial Sequence
  Description of Artificial Sequence: Synthetic oligonucleotide
cagcucccggggcacgauc

SEQ ID NO: 1980559 - RNA, 19 nt, Artificial Sequence
  Description of Artificial Sequence: Synthetic oligonucleotide
ggacugggacaacuggccu

SEQ ID NO: 1980560 - RNA, 19 nt, Artificial Sequence
  Description of Artificial Sequence: Synthetic oligonucleotide
ccggggcacgaucuugggc

SEQ ID NO: 1980561 - RNA, 19 nt, Artificial Sequence
  Description of Artificial Sequence: Synthetic oligonucleotide
cagugugcucagguagcca

SEQ ID NO: 1980562 - RNA, 19 nt, Artificial Sequence
  Description of Artificial Sequence: Synthetic oligonucleotide
cacggucaggugugaucga

SEQ ID NO: 1980563 - RNA, 19 nt, Artificial Sequence
  Description of Artificial Sequence: Synthetic oligonucleotide
gugaucgaggcugguaauu

SEQ ID NO: 1980564 - RNA, 19 nt, Artificial Sequence
  Description of Artificial Sequence: Synthetic oligonucleotide
cacguggacugggacaacu

SEQ ID NO: 1980565 - RNA, 19 nt, Artificial Sequence
  Description of Artificial Sequence: Synthetic oligonucleotide
gcacucacaccguaccuau

SEQ ID NO: 1980566 - RNA, 19 nt, Artificial Sequence
  Description of Artificial Sequence: Synthetic oligonucleotide
cggggcaucaugaaugcua

SEQ ID NO: 1980567 - RNA, 19 nt, Artificial Sequence
  Description of Artificial Sequence: Synthetic oligonucleotide
gugaccugucggccacaga

SEQ ID NO: 1980568 - RNA, 19 nt, Artificial Sequence
  Description of Artificial Sequence: Synthetic oligonucleotide
ggcugcuuauuagccacaa

SEQ ID NO: 1980569 - RNA, 19 nt, Artificial Sequence
  Description of Artificial Sequence: Synthetic oligonucleotide
gggcgcugucccuaacguc

SEQ ID NO: 1980570 - RNA, 19 nt, Artificial Sequence
  Description of Artificial Sequence: Synthetic oligonucleotide
ccccucuuuacaauuguau

SEQ ID NO: 1980571 - RNA, 19 nt, Artificial Sequence
  Description of Artificial Sequence: Synthetic oligonucleotide
cuacgcccguggccucagc

SEQ ID NO: 1980572 - RNA, 19 nt, Artificial Sequence
  Description of Artificial Sequence: Synthetic oligonucleotide
gcaccagugugcucaggua

SEQ ID NO: 1980573 - RNA, 19 nt, Artificial Sequence
  Description of Artificial Sequence: Synthetic oligonucleotide
ccgcacagagaccaaggaa

SEQ ID NO: 1980574 - RNA, 19 nt, Artificial Sequence
  Description of Artificial Sequence: Synthetic oligonucleotide
ccuaacgucacuggaugcu

SEQ ID NO: 1980575 - RNA, 19 nt, Artificial Sequence
  Description of Artificial Sequence: Synthetic oligonucleotide
ccugucggccacagagguc

SEQ ID NO: 1980576 - RNA, 19 nt, Artificial Sequence
  Description of Artificial Sequence: Synthetic oligonucleotide
cccuccuagauaaggugua

SEQ ID NO: 1980577 - RNA, 19 nt, Artificial Sequence
  Description of Artificial Sequence: Synthetic oligonucleotide
cccggggcacgaucuuggg

SEQ ID NO: 1980578 - RNA, 19 nt, Artificial Sequence
  Description of Artificial Sequence: Synthetic oligonucleotide
gggcacgaucuugggcccg

SEQ ID NO: 1980579 - RNA, 19 nt, Artificial Sequence
  Description of Artificial Sequence: Synthetic oligonucleotide
cccgcacagagaccaagga

SEQ ID NO: 1980580 - RNA, 19 nt, Artificial Sequence
  Description of Artificial Sequence: Synthetic oligonucleotide
aaccccgcacagagaccaa

SEQ ID NO: 1980581 - RNA, 19 nt, Artificial Sequence
  Description of Artificial Sequence: Synthetic oligonucleotide
guccucgaugcucccuccu

SEQ ID NO: 1980582 - RNA, 19 nt, Artificial Sequence
  Description of Artificial Sequence: Synthetic oligonucleotide
gcucccuccuagauaaggu

SEQ ID NO: 1980583 - RNA, 19 nt, Artificial Sequence
  Description of Artificial Sequence: Synthetic oligonucleotide
gggugguguguguaccacu

SEQ ID NO: 1980584 - RNA, 19 nt, Artificial Sequence
  Description of Artificial Sequence: Synthetic oligonucleotide
gacccggcaccuggaucca

SEQ ID NO: 1980585 - RNA, 19 nt, Artificial Sequence
  Description of Artificial Sequence: Synthetic oligonucleotide
cagacauaggcugcuuauu

SEQ ID NO: 1980586 - RNA, 19 nt, Artificial Sequence
  Description of Artificial Sequence: Synthetic oligonucleotide
ggacagcaguagguagaac

SEQ ID NO: 1980587 - RNA, 19 nt, Artificial Sequence
  Description of Artificial Sequence: Synthetic oligonucleotide
guguaccacucuggaccca

SEQ ID NO: 1980588 - RNA, 19 nt, Artificial Sequence
  Description of Artificial Sequence: Synthetic oligonucleotide
guguccugugaugggugcu

SEQ ID NO: 1980589 - RNA, 19 nt, Artificial Sequence
  Description of Artificial Sequence: Synthetic oligonucleotide
cgcccguggccucagccag

SEQ ID NO: 1980590 - RNA, 19 nt, Artificial Sequence
  Description of Artificial Sequence: Synthetic oligonucleotide
agcccagguuggccucaaa

SEQ ID NO: 1980591 - RNA, 19 nt, Artificial Sequence
  Description of Artificial Sequence: Synthetic oligonucleotide
gcccguagaugagcaccag

SEQ ID NO: 1980592 - RNA, 19 nt, Artificial Sequence
  Description of Artificial Sequence: Synthetic oligonucleotide
gccgggacagcaguaggua

SEQ ID NO: 1980593 - RNA, 19 nt, Artificial Sequence
  Description of Artificial Sequence: Synthetic oligonucleotide
gggcaucaugaaugcuaaa

SEQ ID NO: 1980594 - RNA, 19 nt, Artificial Sequence
  Description of Artificial Sequence: Synthetic oligonucleotide
ggcuggguucugaccugug

SEQ ID NO: 1980595 - RNA, 19 nt, Artificial Sequence
  Description of Artificial Sequence: Synthetic oligonucleotide
ggagagccagugcccuugu

SEQ ID NO: 1980596 - RNA, 19 nt, Artificial Sequence
  Description of Artificial Sequence: Synthetic oligonucleotide
cuccuaggacccggcaccu

SEQ ID NO: 1980597 - RNA, 19 nt, Artificial Sequence
  Description of Artificial Sequence: Synthetic oligonucleotide
gguccgagggguggugugu

SEQ ID NO: 1980598 - RNA, 19 nt, Artificial Sequence
  Description of Artificial Sequence: Synthetic oligonucleotide
ggcgagggcgcugucccua

SEQ ID NO: 1980599 - RNA, 19 nt, Artificial Sequence
  Description of Artificial Sequence: Synthetic oligonucleotide
cccguagaugagcaccagu

SEQ ID NO: 1980600 - RNA, 19 nt, Artificial Sequence
  Description of Artificial Sequence: Synthetic oligonucleotide
gcgagggcgcugucccuaa

SEQ ID NO: 1980601 - RNA, 19 nt, Artificial Sequence
  Description of Artificial Sequence: Synthetic oligonucleotide
cuccuaccuugcugucagu

SEQ ID NO: 1980602 - RNA, 19 nt, Artificial Sequence
  Description of Artificial Sequence: Synthetic oligonucleotide
gggcagugauaaaguagau

SEQ ID NO: 1980603 - RNA, 19 nt, Artificial Sequence
  Description of Artificial Sequence: Synthetic oligonucleotide
ggcacgaucuugggcccgu

SEQ ID NO: 1980604 - RNA, 19 nt, Artificial Sequence
  Description of Artificial Sequence: Synthetic oligonucleotide
gcccguggccucagccagc

SEQ ID NO: 1980605 - RNA, 19 nt, Artificial Sequence
  Description of Artificial Sequence: Synthetic oligonucleotide
ccuugugcauggacuggau

SEQ ID NO: 1980606 - RNA, 19 nt, Artificial Sequence
  Description of Artificial Sequence: Synthetic oligonucleotide
ccaaggccggcugucuucu

SEQ ID NO: 1980607 - RNA, 19 nt, Artificial Sequence
  Description of Artificial Sequence: Synthetic oligonucleotide
ccgagggguggugugugua

SEQ ID NO: 1980608 - RNA, 19 nt, Artificial Sequence
  Description of Artificial Sequence: Synthetic oligonucleotide
caccacggucaggugugau

SEQ ID NO: 1980609 - RNA, 19 nt, Artificial Sequence
  Description of Artificial Sequence: Synthetic oligonucleotide
gcacgaucuugggcccgua

SEQ ID NO: 1980610 - RNA, 19 nt, Artificial Sequence
  Description of Artificial Sequence: Synthetic oligonucleotide
cugggacaacuggccucau

SEQ ID NO: 1980611 - RNA, 19 nt, Artificial Sequence
  Description of Artificial Sequence: Synthetic oligonucleotide
ccguaccuauguccucgau

SEQ ID NO: 1980612 - RNA, 19 nt, Artificial Sequence
  Description of Artificial Sequence: Synthetic oligonucleotide
ccagcucccggggcacgau

SEQ ID NO: 1980613 - RNA, 19 nt, Artificial Sequence
  Description of Artificial Sequence: Synthetic oligonucleotide
aaugauacaaggcagaagc

SEQ ID NO: 1980614 - RNA, 19 nt, Artificial Sequence
  Description of Artificial Sequence: Synthetic oligonucleotide
aacguaagcaaacuggugc

SEQ ID NO: 1980615 - RNA, 19 nt, Artificial Sequence
  Description of Artificial Sequence: Synthetic oligonucleotide
uuuucaaagaaacacccgg

SEQ ID NO: 1980616 - RNA, 19 nt, Artificial Sequence
  Description of Artificial Sequence: Synthetic oligonucleotide
uguaacguaagcaaacugg

SEQ ID NO: 1980617 - RNA, 19 nt, Artificial Sequence
  Description of Artificial Sequence: Synthetic oligonucleotide
acuagcauuccauacaagc

SEQ ID NO: 1980618 - RNA, 19 nt, Artificial Sequence
  Description of Artificial Sequence: Synthetic oligonucleotide
aagagauacgccuuuccgc

SEQ ID NO: 1980619 - RNA, 19 nt, Artificial Sequence
  Description of Artificial Sequence: Synthetic oligonucleotide
uuaaacgccacuuaagggc

SEQ ID NO: 1980620 - RNA, 19 nt, Artificial Sequence
  Description of Artificial Sequence: Synthetic oligonucleotide
auagacuucgcacaccucc

SEQ ID NO: 1980621 - RNA, 19 nt, Artificial Sequence
  Description of Artificial Sequence: Synthetic oligonucleotide
aacaacuagcauuccauac

SEQ ID NO: 1980622 - RNA, 19 nt, Artificial Sequence
  Description of Artificial Sequence: Synthetic oligonucleotide
ugugucauugacauaagcc

SEQ ID NO: 1980623 - RNA, 19 nt, Artificial Sequence
  Description of Artificial Sequence: Synthetic oligonucleotide
gacacauuucucuaugucg

SEQ ID NO: 1980624 - RNA, 19 nt, Artificial Sequence
  Description of Artificial Sequence: Synthetic oligonucleotide
gaagucuugcgccagauag

SEQ ID NO: 1980625 - RNA, 19 nt, Artificial Sequence
  Description of Artificial Sequence: Synthetic oligonucleotide
auuaauuccaucuggagaa

SEQ ID NO: 1980626 - RNA, 19 nt, Artificial Sequence
  Description of Artificial Sequence: Synthetic oligonucleotide
uguuaaaacaacuagcauu

SEQ ID NO: 1980627 - RNA, 19 nt, Artificial Sequence
  Description of Artificial Sequence: Synthetic oligonucleotide
cauacaagcacuucugucc

SEQ ID NO: 1980628 - RNA, 19 nt, Artificial Sequence
  Description of Artificial Sequence: Synthetic oligonucleotide
uaagcuuuugucaugugug

SEQ ID NO: 1980629 - RNA, 19 nt, Artificial Sequence
  Description of Artificial Sequence: Synthetic oligonucleotide
uaaauaaagcugaaauccc

SEQ ID NO: 1980630 - RNA, 19 nt, Artificial Sequence
  Description of Artificial Sequence: Synthetic oligonucleotide
uacacguucagccaggaca

SEQ ID NO: 1980631 - RNA, 19 nt, Artificial Sequence
  Description of Artificial Sequence: Synthetic oligonucleotide
ucuugcgccagauagaaug

SEQ ID NO: 1980632 - RNA, 19 nt, Artificial Sequence
  Description of Artificial Sequence: Synthetic oligonucleotide
auaaggaaauucuaagcag

SEQ ID NO: 1980633 - RNA, 19 nt, Artificial Sequence
  Description of Artificial Sequence: Synthetic oligonucleotide
uuaauuucuaagcuuuugu

SEQ ID NO: 1980634 - RNA, 19 nt, Artificial Sequence
  Description of Artificial Sequence: Synthetic oligonucleotide
aaggaaauucuaagcagcc

SEQ ID NO: 1980635 - RNA, 19 nt, Artificial Sequence
  Description of Artificial Sequence: Synthetic oligonucleotide
aacuggugcaacuuuggag

SEQ ID NO: 1980636 - RNA, 19 nt, Artificial Sequence
  Description of Artificial Sequence: Synthetic oligonucleotide
gaagagauacgccuuuccg

SEQ ID NO: 1980637 - RNA, 19 nt, Artificial Sequence
  Description of Artificial Sequence: Synthetic oligonucleotide
ugacauauggcuucuuugc

SEQ ID NO: 1980638 - RNA, 19 nt, Artificial Sequence
  Description of Artificial Sequence: Synthetic oligonucleotide
uaagcagccgacauccagg

SEQ ID NO: 1980639 - RNA, 19 nt, Artificial Sequence
  Description of Artificial Sequence: Synthetic oligonucleotide
uaugucgcaccacugauac

SEQ ID NO: 1980640 - RNA, 19 nt, Artificial Sequence
  Description of Artificial Sequence: Synthetic oligonucleotide
guugugaugccauguaacg

SEQ ID NO: 1980641 - RNA, 19 nt, Artificial Sequence
  Description of Artificial Sequence: Synthetic oligonucleotide
uggcuguucugacauaugg

SEQ ID NO: 1980642 - RNA, 19 nt, Artificial Sequence
  Description of Artificial Sequence: Synthetic oligonucleotide
acaagcgccaucuguaacg

SEQ ID NO: 1980643 - RNA, 19 nt, Artificial Sequence
  Description of Artificial Sequence: Synthetic oligonucleotide
aauucuaagcagccgacau

SEQ ID NO: 1980644 - RNA, 19 nt, Artificial Sequence
  Description of Artificial Sequence: Synthetic oligonucleotide
aaauccaagcuguuggcgu

SEQ ID NO: 1980645 - RNA, 19 nt, Artificial Sequence
  Description of Artificial Sequence: Synthetic oligonucleotide
aacuuuggaggguagauuu

SEQ ID NO: 1980646 - RNA, 19 nt, Artificial Sequence
  Description of Artificial Sequence: Synthetic oligonucleotide
cauggaggagaaaugauac

SEQ ID NO: 1980647 - RNA, 19 nt, Artificial Sequence
  Description of Artificial Sequence: Synthetic oligonucleotide
caucauuaauuccaucugg

SEQ ID NO: 1980648 - RNA, 19 nt, Artificial Sequence
  Description of Artificial Sequence: Synthetic oligonucleotide
cauaaggaaauucuaagca

SEQ ID NO: 1980649 - RNA, 19 nt, Artificial Sequence
  Description of Artificial Sequence: Synthetic oligonucleotide
ucauuaauuccaucuggag

SEQ ID NO: 1980650 - RNA, 19 nt, Artificial Sequence
  Description of Artificial Sequence: Synthetic oligonucleotide
uaaacgccacuuaagggcc

SEQ ID NO: 1980651 - RNA, 19 nt, Artificial Sequence
  Description of Artificial Sequence: Synthetic oligonucleotide
uccauuagccaauccagag

SEQ ID NO: 1980652 - RNA, 19 nt, Artificial Sequence
  Description of Artificial Sequence: Synthetic oligonucleotide
  modified_base (3)..(3): a, c, u, g, unknown or other
ganaggauggcguugcaga

SEQ ID NO: 1980653 - RNA, 19 nt, Artificial Sequence
  Description of Artificial Sequence: Synthetic oligonucleotide
ucaaagaaacacccgggca

SEQ ID NO: 1980654 - RNA, 19 nt, Artificial Sequence
  Description of Artificial Sequence: Synthetic oligonucleotide
auacaagcacuucuguccg

SEQ ID NO: 1980655 - RNA, 19 nt, Artificial Sequence
  Description of Artificial Sequence: Synthetic oligonucleotide
gauagaaugucucccugug

SEQ ID NO: 1980656 - RNA, 19 nt, Artificial Sequence
  Description of Artificial Sequence: Synthetic oligonucleotide
ugaaaucccaaugagcugu

SEQ ID NO: 1980657 - RNA, 19 nt, Artificial Sequence
  Description of Artificial Sequence: Synthetic oligonucleotide
uuuccaugggaacuccccg

SEQ ID NO: 1980658 - RNA, 19 nt, Artificial Sequence
  Description of Artificial Sequence: Synthetic oligonucleotide
ugauacaaggcagaagcag

SEQ ID NO: 1980659 - RNA, 19 nt, Artificial Sequence
  Description of Artificial Sequence: Synthetic oligonucleotide
uaauuucuaagcuuuuguc

SEQ ID NO: 1980660 - RNA, 19 nt, Artificial Sequence
  Description of Artificial Sequence: Synthetic oligonucleotide
uuuuccaugggaacucccc

SEQ ID NO: 1980661 - RNA, 19 nt, Artificial Sequence
  Description of Artificial Sequence: Synthetic oligonucleotide
aaaacaacuagcauuccau

SEQ ID NO: 1980662 - RNA, 19 nt, Artificial Sequence
  Description of Artificial Sequence: Synthetic oligonucleotide
aacaagcgccaucuguaac

SEQ ID NO: 1980663 - RNA, 19 nt, Artificial Sequence
  Description of Artificial Sequence: Synthetic oligonucleotide
acauaagccacuuggacau

SEQ ID NO: 1980664 - RNA, 19 nt, Artificial Sequence
  Description of Artificial Sequence: Synthetic oligonucleotide
aggagaaaugauacaaggc

SEQ ID NO: 1980665 - RNA, 19 nt, Artificial Sequence
  Description of Artificial Sequence: Synthetic oligonucleotide
uccuaggcagcaaaggagc

SEQ ID NO: 1980666 - RNA, 19 nt, Artificial Sequence
  Description of Artificial Sequence: Synthetic oligonucleotide
uccuuaauuucuaagcuuu

SEQ ID NO: 1980667 - RNA, 19 nt, Artificial Sequence
  Description of Artificial Sequence: Synthetic oligonucleotide
auuccauacaagcacuucu

SEQ ID NO: 1980668 - RNA, 19 nt, Artificial Sequence
  Description of Artificial Sequence: Synthetic oligonucleotide
aacccuauuguuaaaacaa

SEQ ID NO: 1980669 - RNA, 19 nt, Artificial Sequence
  Description of Artificial Sequence: Synthetic oligonucleotide
gacauaagccacuuggaca

SEQ ID NO: 1980670 - RNA, 19 nt, Artificial Sequence
  Description of Artificial Sequence: Synthetic oligonucleotide
gauacaaggcagaagcagc

SEQ ID NO: 1980671 - RNA, 19 nt, Artificial Sequence
  Description of Artificial Sequence: Synthetic oligonucleotide
acaacuagcauuccauaca

SEQ ID NO: 1980672 - RNA, 19 nt, Artificial Sequence
  Description of Artificial Sequence: Synthetic oligonucleotide
ggaaccauccacuugacac

SEQ ID NO: 1980673 - RNA, 19 nt, Artificial Sequence
  Description of Artificial Sequence: Synthetic oligonucleotide
aaauaaagcugaaauccca

SEQ ID NO: 1980674 - RNA, 19 nt, Artificial Sequence
  Description of Artificial Sequence: Synthetic oligonucleotide
aaagaccugcuguggguac

SEQ ID NO: 1980675 - RNA, 19 nt, Artificial Sequence
  Description of Artificial Sequence: Synthetic oligonucleotide
agagauacgccuuuccgca

SEQ ID NO: 1980676 - RNA, 19 nt, Artificial Sequence
  Description of Artificial Sequence: Synthetic oligonucleotide
gcuuaaacgccacuuaagg

SEQ ID NO: 1980677 - RNA, 19 nt, Artificial Sequence
  Description of Artificial Sequence: Synthetic oligonucleotide
ugcacaaagaccugcugug

SEQ ID NO: 1980678 - RNA, 19 nt, Artificial Sequence
  Description of Artificial Sequence: Synthetic oligonucleotide
ugugaugccauguaacgau

SEQ ID NO: 1980679 - RNA, 19 nt, Artificial Sequence
  Description of Artificial Sequence: Synthetic oligonucleotide
ggucauugggcuuaaacgc

SEQ ID NO: 1980680 - RNA, 19 nt, Artificial Sequence
  Description of Artificial Sequence: Synthetic oligonucleotide
  modified_base (13)..(13): a, c, u, g, unknown or other
uugccugcagganaggaug

SEQ ID NO: 1980681 - RNA, 19 nt, Artificial Sequence
  Description of Artificial Sequence: Synthetic oligonucleotide
uucucuaugucgcaccacu

SEQ ID NO: 1980682 - RNA, 19 nt, Artificial Sequence
  Description of Artificial Sequence: Synthetic oligonucleotide
ucuaaaagcucagcaaucu

SEQ ID NO: 1980683 - RNA, 19 nt, Artificial Sequence
  Description of Artificial Sequence: Synthetic oligonucleotide
gaagcuuauagacuucgca

SEQ ID NO: 1980684 - RNA, 19 nt, Artificial Sequence
  Description of Artificial Sequence: Synthetic oligonucleotide
acgaucaaagaagucuugc

SEQ ID NO: 1980685 - RNA, 19 nt, Artificial Sequence
  Description of Artificial Sequence: Synthetic oligonucleotide
uuccauacaagcacuucug

SEQ ID NO: 1980686 - RNA, 19 nt, Artificial Sequence
  Description of Artificial Sequence: Synthetic oligonucleotide
agaucuaaaagcucagcaa

SEQ ID NO: 1980687 - RNA, 19 nt, Artificial Sequence
  Description of Artificial Sequence: Synthetic oligonucleotide
ucgcacaccuccauuagcc

SEQ ID NO: 1980688 - RNA, 19 nt, Artificial Sequence
  Description of Artificial Sequence: Synthetic oligonucleotide
gauguugugggcguuuucc

SEQ ID NO: 1980689 - RNA, 19 nt, Artificial Sequence
  Description of Artificial Sequence: Synthetic oligonucleotide
cucccugugaagcuuauag

SEQ ID NO: 1980690 - RNA, 19 nt, Artificial Sequence
  Description of Artificial Sequence: Synthetic oligonucleotide
aauccaagcuguuggcgug

SEQ ID NO: 1980691 - RNA, 19 nt, Artificial Sequence
  Description of Artificial Sequence: Synthetic oligonucleotide
agcuuauagacuucgcaca

SEQ ID NO: 1980692 - RNA, 19 nt, Artificial Sequence
  Description of Artificial Sequence: Synthetic oligonucleotide
ugagcuuggagcuucccac

SEQ ID NO: 1980693 - RNA, 19 nt, Artificial Sequence
  Description of Artificial Sequence: Synthetic oligonucleotide
cauuaauuccaucuggaga

SEQ ID NO: 1980694 - RNA, 19 nt, Artificial Sequence
  Description of Artificial Sequence: Synthetic oligonucleotide
aaaagcucagcaaucugca

SEQ ID NO: 1980695 - RNA, 19 nt, Artificial Sequence
  Description of Artificial Sequence: Synthetic oligonucleotide
gaggccauuuugaagacgc

SEQ ID NO: 1980696 - RNA, 19 nt, Artificial Sequence
  Description of Artificial Sequence: Synthetic oligonucleotide
auuuugaagacgcccgcug

SEQ ID NO: 1980697 - RNA, 19 nt, Artificial Sequence
  Description of Artificial Sequence: Synthetic oligonucleotide
ucaucuccggaacaagcgc

SEQ ID NO: 1980698 - RNA, 19 nt, Artificial Sequence
  Description of Artificial Sequence: Synthetic oligonucleotide
aggauggcguugcagaaag

SEQ ID NO: 1980699 - RNA, 19 nt, Artificial Sequence
  Description of Artificial Sequence: Synthetic oligonucleotide
caaacuggugcaacuuugg

SEQ ID NO: 1980700 - RNA, 19 nt, Artificial Sequence
  Description of Artificial Sequence: Synthetic oligonucleotide
uugugggcguuuuccaugg

SEQ ID NO: 1980701 - RNA, 19 nt, Artificial Sequence
  Description of Artificial Sequence: Synthetic oligonucleotide
aaucccaaugagcuguaaa

SEQ ID NO: 1980702 - RNA, 19 nt, Artificial Sequence
  Description of Artificial Sequence: Synthetic oligonucleotide
auggcgaacggaaccaucc

SEQ ID NO: 1980703 - RNA, 19 nt, Artificial Sequence
  Description of Artificial Sequence: Synthetic oligonucleotide
cauuucucuaugucgcacc

SEQ ID NO: 1980704 - RNA, 19 nt, Artificial Sequence
  Description of Artificial Sequence: Synthetic oligonucleotide
uuguuaaaacaacuagcau

SEQ ID NO: 1980705 - RNA, 19 nt, Artificial Sequence
  Description of Artificial Sequence: Synthetic oligonucleotide
aaaaguguuuucaguauau

SEQ ID NO: 1980706 - RNA, 19 nt, Artificial Sequence
  Description of Artificial Sequence: Synthetic oligonucleotide
ucaacccuauuguuaaaac

SEQ ID NO: 1980707 - RNA, 19 nt, Artificial Sequence
  Description of Artificial Sequence: Synthetic oligonucleotide
aguuccauggaggagaaau

SEQ ID NO: 1980708 - RNA, 19 nt, Artificial Sequence
  Description of Artificial Sequence: Synthetic oligonucleotide
  modified_base (2)..(2): a, c, u, g, unknown or other
anaggauggcguugcagaa

SEQ ID NO: 1980709 - RNA, 19 nt, Artificial Sequence
  Description of Artificial Sequence: Synthetic oligonucleotide
acacaauggucauugggcu

SEQ ID NO: 1980710 - RNA, 19 nt, Artificial Sequence
  Description of Artificial Sequence: Synthetic oligonucleotide
uuuguugugaugccaugua

SEQ ID NO: 1980711 - RNA, 19 nt, Artificial Sequence
  Description of Artificial Sequence: Synthetic oligonucleotide
cuuaauuucuaagcuuuug

SEQ ID NO: 1980712 - RNA, 19 nt, Artificial Sequence
  Description of Artificial Sequence: Synthetic oligonucleotide
aaacaacuagcauuccaua

SEQ ID NO: 1980713 - RNA, 19 nt, Artificial Sequence
  Description of Artificial Sequence: Synthetic oligonucleotide
aucccaaugagcuguaaaa

SEQ ID NO: 1980714 - RNA, 19 nt, Artificial Sequence
  Description of Artificial Sequence: Synthetic oligonucleotide
guaacgaucaaagaagucu

SEQ ID NO: 1980715 - RNA, 19 nt, Artificial Sequence
  Description of Artificial Sequence: Synthetic oligonucleotide
uuugaagacgcccgcugcu

SEQ ID NO: 1980716 - RNA, 19 nt, Artificial Sequence
  Description of Artificial Sequence: Synthetic oligonucleotide
ucuaugucgcaccacugau

SEQ ID NO: 1980717 - RNA, 19 nt, Artificial Sequence
  Description of Artificial Sequence: Synthetic oligonucleotide
gauacccugaaaccuucug

SEQ ID NO: 1980718 - RNA, 19 nt, Artificial Sequence
  Description of Artificial Sequence: Synthetic oligonucleotide
uuuuguugugaugccaugu

SEQ ID NO: 1980719 - RNA, 19 nt, Artificial Sequence
  Description of Artificial Sequence: Synthetic oligonucleotide
auaagccacuuggacauac

SEQ ID NO: 1980720 - RNA, 19 nt, Artificial Sequence
  Description of Artificial Sequence: Synthetic oligonucleotide
guuggcgugggucuggaug

SEQ ID NO: 1980721 - RNA, 19 nt, Artificial Sequence
  Description of Artificial Sequence: Synthetic oligonucleotide
cacaaagaccugcuguggg

SEQ ID NO: 1980722 - RNA, 19 nt, Artificial Sequence
  Description of Artificial Sequence: Synthetic oligonucleotide
uguaacgaucaaagaaguc

SEQ ID NO: 1980723 - RNA, 19 nt, Artificial Sequence
  Description of Artificial Sequence: Synthetic oligonucleotide
ggaaauucuaagcagccga

SEQ ID NO: 1980724 - RNA, 19 nt, Artificial Sequence
  Description of Artificial Sequence: Synthetic oligonucleotide
agauagaaugucucccugu

SEQ ID NO: 1980725 - RNA, 19 nt, Artificial Sequence
  Description of Artificial Sequence: Synthetic oligonucleotide
gugaagcuuauagacuucg

SEQ ID NO: 1980726 - RNA, 19 nt, Artificial Sequence
  Description of Artificial Sequence: Synthetic oligonucleotide
uugagcuuggagcuuccca

SEQ ID NO: 1980727 - RNA, 19 nt, Artificial Sequence
  Description of Artificial Sequence: Synthetic oligonucleotide
ucuguaacguaagcaaacu

SEQ ID NO: 1980728 - RNA, 19 nt, Artificial Sequence
  Description of Artificial Sequence: Synthetic oligonucleotide
cauuagccaauccagagaa

SEQ ID NO: 1980729 - RNA, 19 nt, Artificial Sequence
  Description of Artificial Sequence: Synthetic oligonucleotide
aucuaaaagcucagcaauc

SEQ ID NO: 1980730 - RNA, 19 nt, Artificial Sequence
  Description of Artificial Sequence: Synthetic oligonucleotide
caucuccggaacaagcgcc

SEQ ID NO: 1980731 - RNA, 19 nt, Artificial Sequence
  Description of Artificial Sequence: Synthetic oligonucleotide
uucuaagcuuuugucaugu

SEQ ID NO: 1980732 - RNA, 19 nt, Artificial Sequence
  Description of Artificial Sequence: Synthetic oligonucleotide
aaagaagucuugcgccaga

SEQ ID NO: 1980733 - RNA, 19 nt, Artificial Sequence
  Description of Artificial Sequence: Synthetic oligonucleotide
uccauacaagcacuucugu

SEQ ID NO: 1980734 - RNA, 19 nt, Artificial Sequence
  Description of Artificial Sequence: Synthetic oligonucleotide
acauuucucuaugucgcac

SEQ ID NO: 1980735 - RNA, 19 nt, Artificial Sequence
  Description of Artificial Sequence: Synthetic oligonucleotide
cuaagcagccgacauccag

SEQ ID NO: 1980736 - RNA, 19 nt, Artificial Sequence
  Description of Artificial Sequence: Synthetic oligonucleotide
ggcuuuguccagcaaaucc

SEQ ID NO: 1980737 - RNA, 19 nt, Artificial Sequence
  Description of Artificial Sequence: Synthetic oligonucleotide
aggaaauucuaagcagccg

SEQ ID NO: 1980738 - RNA, 19 nt, Artificial Sequence
  Description of Artificial Sequence: Synthetic oligonucleotide
acacacagaucuaaaagcu

SEQ ID NO: 1980739 - RNA, 19 nt, Artificial Sequence
  Description of Artificial Sequence: Synthetic oligonucleotide
ucugacauauggcuucuuu

SEQ ID NO: 1980740 - RNA, 19 nt, Artificial Sequence
  Description of Artificial Sequence: Synthetic oligonucleotide
acguaagcaaacuggugca

SEQ ID NO: 1980741 - RNA, 19 nt, Artificial Sequence
  Description of Artificial Sequence: Synthetic oligonucleotide
uuggacauacacguucagc

SEQ ID NO: 1980742 - RNA, 19 nt, Artificial Sequence
  Description of Artificial Sequence: Synthetic oligonucleotide
uagccaauccagagaacug

SEQ ID NO: 1980743 - RNA, 19 nt, Artificial Sequence
  Description of Artificial Sequence: Synthetic oligonucleotide
auuucucuaugucgcacca

SEQ ID NO: 1980744 - RNA, 19 nt, Artificial Sequence
  Description of Artificial Sequence: Synthetic oligonucleotide
ugcgccagauagaaugucu

SEQ ID NO: 1980745 - RNA, 19 nt, Artificial Sequence
  Description of Artificial Sequence: Synthetic oligonucleotide
ugaggcaguagcaccucgc

SEQ ID NO: 1980746 - RNA, 19 nt, Artificial Sequence
  Description of Artificial Sequence: Synthetic oligonucleotide
gaaauucuaagcagccgac

SEQ ID NO: 1980747 - RNA, 19 nt, Artificial Sequence
  Description of Artificial Sequence: Synthetic oligonucleotide
uccacuugacacauuucuc

SEQ ID NO: 1980748 - RNA, 19 nt, Artificial Sequence
  Description of Artificial Sequence: Synthetic oligonucleotide
uauggcuucuuugccuggg

SEQ ID NO: 1980749 - RNA, 19 nt, Artificial Sequence
  Description of Artificial Sequence: Synthetic oligonucleotide
ucuguccgaggccauuuug

SEQ ID NO: 1980750 - RNA, 19 nt, Artificial Sequence
  Description of Artificial Sequence: Synthetic oligonucleotide
aucauuaauuccaucugga

SEQ ID NO: 1980751 - RNA, 19 nt, Artificial Sequence
  Description of Artificial Sequence: Synthetic oligonucleotide
acaaagaccugcugugggu

SEQ ID NO: 1980752 - RNA, 19 nt, Artificial Sequence
  Description of Artificial Sequence: Synthetic oligonucleotide
uccagugggucaaguagca

SEQ ID NO: 1980753 - RNA, 19 nt, Artificial Sequence
  Description of Artificial Sequence: Synthetic oligonucleotide
guugugggcguuuuccaug

SEQ ID NO: 1980754 - RNA, 19 nt, Artificial Sequence
  Description of Artificial Sequence: Synthetic oligonucleotide
gccuccuuaauuucuaagc

SEQ ID NO: 1980755 - RNA, 19 nt, Artificial Sequence
  Description of Artificial Sequence: Synthetic oligonucleotide
uccggaacaagcgccaucu

SEQ ID NO: 1980756 - RNA, 19 nt, Artificial Sequence
  Description of Artificial Sequence: Synthetic oligonucleotide
uagacuucgcacaccucca

SEQ ID NO: 1980757 - RNA, 19 nt, Artificial Sequence
  Description of Artificial Sequence: Synthetic oligonucleotide
ugggcguuuuccaugggaa

SEQ ID NO: 1980758 - RNA, 19 nt, Artificial Sequence
  Description of Artificial Sequence: Synthetic oligonucleotide
uuuggcuguucugacauau

SEQ ID NO: 1980759 - RNA, 19 nt, Artificial Sequence
  Description of Artificial Sequence: Synthetic oligonucleotide
ucucuaugucgcaccacug

SEQ ID NO: 1980760 - RNA, 19 nt, Artificial Sequence
  Description of Artificial Sequence: Synthetic oligonucleotide
uucgcacaccuccauuagc

SEQ ID NO: 1980761 - RNA, 19 nt, Artificial Sequence
  Description of Artificial Sequence: Synthetic oligonucleotide
acccuauuguuaaaacaac

SEQ ID NO: 1980762 - RNA, 19 nt, Artificial Sequence
  Description of Artificial Sequence: Synthetic oligonucleotide
uuaaaacaacuagcauucc

SEQ ID NO: 1980763 - RNA, 19 nt, Artificial Sequence
  Description of Artificial Sequence: Synthetic oligonucleotide
aggguagauuuccucaagu

SEQ ID NO: 1980764 - RNA, 19 nt, Artificial Sequence
  Description of Artificial Sequence: Synthetic oligonucleotide
caacccuauuguuaaaaca

SEQ ID NO: 1980765 - RNA, 19 nt, Artificial Sequence
  Description of Artificial Sequence: Synthetic oligonucleotide
cuguaacguaagcaaacug

SEQ ID NO: 1980766 - RNA, 19 nt, Artificial Sequence
  Description of Artificial Sequence: Synthetic oligonucleotide
gaauuucaucuccggaaca

SEQ ID NO: 1980767 - RNA, 19 nt, Artificial Sequence
  Description of Artificial Sequence: Synthetic oligonucleotide
uugugaugccauguaacga

SEQ ID NO: 1980768 - RNA, 19 nt, Artificial Sequence
  Description of Artificial Sequence: Synthetic oligonucleotide
auagaaugucucccuguga

SEQ ID NO: 1980769 - RNA, 19 nt, Artificial Sequence
  Description of Artificial Sequence: Synthetic oligonucleotide
aaugagcuguaaaaguguu

SEQ ID NO: 1980770 - RNA, 19 nt, Artificial Sequence
  Description of Artificial Sequence: Synthetic oligonucleotide
cuuuugucaugugugaaga

SEQ ID NO: 1980771 - RNA, 19 nt, Artificial Sequence
  Description of Artificial Sequence: Synthetic oligonucleotide
ugaaaccuucugcaucagu

SEQ ID NO: 1980772 - RNA, 19 nt, Artificial Sequence
  Description of Artificial Sequence: Synthetic oligonucleotide
aaggccauggcgaacggaa

SEQ ID NO: 1980773 - RNA, 19 nt, Artificial Sequence
  Description of Artificial Sequence: Synthetic oligonucleotide
gcaaaggagcuccaggcag

SEQ ID NO: 1980774 - RNA, 19 nt, Artificial Sequence
  Description of Artificial Sequence: Synthetic oligonucleotide
ugugaagcuuauagacuuc

SEQ ID NO: 1980775 - RNA, 19 nt, Artificial Sequence
  Description of Artificial Sequence: Synthetic oligonucleotide
gauacgccuuuccgcagag

SEQ ID NO: 1980776 - RNA, 19 nt, Artificial Sequence
  Description of Artificial Sequence: Synthetic oligonucleotide
aacgaucaaagaagucuug

SEQ ID NO: 1980777 - RNA, 19 nt, Artificial Sequence
  Description of Artificial Sequence: Synthetic oligonucleotide
cuuauagacuucgcacacc

SEQ ID NO: 1980778 - RNA, 19 nt, Artificial Sequence
  Description of Artificial Sequence: Synthetic oligonucleotide
agccacuuggacauacacg

SEQ ID NO: 1980779 - RNA, 19 nt, Artificial Sequence
  Description of Artificial Sequence: Synthetic oligonucleotide
augggaacuccccggaagu

SEQ ID NO: 1980780 - RNA, 19 nt, Artificial Sequence
  Description of Artificial Sequence: Synthetic oligonucleotide
gguguccucaacccuauug

SEQ ID NO: 1980781 - RNA, 19 nt, Artificial Sequence
  Description of Artificial Sequence: Synthetic oligonucleotide
gaacggaaccauccacuug

SEQ ID NO: 1980782 - RNA, 19 nt, Artificial Sequence
  Description of Artificial Sequence: Synthetic oligonucleotide
auacacguucagccaggac

SEQ ID NO: 1980783 - RNA, 19 nt, Artificial Sequence
  Description of Artificial Sequence: Synthetic oligonucleotide
auguaacgaucaaagaagu

SEQ ID NO: 1980784 - RNA, 19 nt, Artificial Sequence
  Description of Artificial Sequence: Synthetic oligonucleotide
auggaggagaaaugauaca

SEQ ID NO: 1980785 - RNA, 19 nt, Artificial Sequence
  Description of Artificial Sequence: Synthetic oligonucleotide
gaacugcucgcauccuugc

SEQ ID NO: 1980786 - RNA, 19 nt, Artificial Sequence
  Description of Artificial Sequence: Synthetic oligonucleotide
acuucgcacaccuccauua

SEQ ID NO: 1980787 - RNA, 19 nt, Artificial Sequence
  Description of Artificial Sequence: Synthetic oligonucleotide
acuugacacauuucucuau

SEQ ID NO: 1980788 - RNA, 19 nt, Artificial Sequence
  Description of Artificial Sequence: Synthetic oligonucleotide
gccauuuugaagacgcccg

SEQ ID NO: 1980789 - RNA, 19 nt, Artificial Sequence
  Description of Artificial Sequence: Synthetic oligonucleotide
  modified_base (6)..(6): a, c, u, g, unknown or other
cagganaggauggcguugc

SEQ ID NO: 1980790 - RNA, 19 nt, Artificial Sequence
  Description of Artificial Sequence: Synthetic oligonucleotide
cuugugucauugacauaag

SEQ ID NO: 1980791 - RNA, 19 nt, Artificial Sequence
  Description of Artificial Sequence: Synthetic oligonucleotide
ugaagacgcccgcugcucu

SEQ ID NO: 1980792 - RNA, 19 nt, Artificial Sequence
  Description of Artificial Sequence: Synthetic oligonucleotide
aaccguggccuccuuaauu

SEQ ID NO: 1980793 - RNA, 19 nt, Artificial Sequence
  Description of Artificial Sequence: Synthetic oligonucleotide
aaacacccgggcagaggcc

SEQ ID NO: 1980794 - RNA, 19 nt, Artificial Sequence
  Description of Artificial Sequence: Synthetic oligonucleotide
agcaggggcucccaaccuc

SEQ ID NO: 1980795 - RNA, 19 nt, Artificial Sequence
  Description of Artificial Sequence: Synthetic oligonucleotide
caagcuguuggcguggguc

SEQ ID NO: 1980796 - RNA, 19 nt, Artificial Sequence
  Description of Artificial Sequence: Synthetic oligonucleotide
ugggcuuaaacgccacuua

SEQ ID NO: 1980797 - RNA, 19 nt, Artificial Sequence
  Description of Artificial Sequence: Synthetic oligonucleotide
cucaaguuuagaagcaaua

SEQ ID NO: 1980798 - RNA, 19 nt, Artificial Sequence
  Description of Artificial Sequence: Synthetic oligonucleotide
gagcuuggagcuucccacc

SEQ ID NO: 1980799 - RNA, 19 nt, Artificial Sequence
  Description of Artificial Sequence: Synthetic oligonucleotide
ucuaagcuuuugucaugug

SEQ ID NO: 1980800 - RNA, 19 nt, Artificial Sequence
  Description of Artificial Sequence: Synthetic oligonucleotide
uguugugggcguuuuccau

SEQ ID NO: 1980801 - RNA, 19 nt, Artificial Sequence
  Description of Artificial Sequence: Synthetic oligonucleotide
uguccgaggccauuuugaa

SEQ ID NO: 1980802 - RNA, 19 nt, Artificial Sequence
  Description of Artificial Sequence: Synthetic oligonucleotide
guaaaaguguuuucaguau

SEQ ID NO: 1980803 - RNA, 19 nt, Artificial Sequence
  Description of Artificial Sequence: Synthetic oligonucleotide
agauacgccuuuccgcaga

SEQ ID NO: 1980804 - RNA, 19 nt, Artificial Sequence
  Description of Artificial Sequence: Synthetic oligonucleotide
ucaguuccauggaggagaa

SEQ ID NO: 1980805 - RNA, 19 nt, Artificial Sequence
  Description of Artificial Sequence: Synthetic oligonucleotide
aagaaacacccgggcagag

SEQ ID NO: 1980806 - RNA, 19 nt, Artificial Sequence
  Description of Artificial Sequence: Synthetic oligonucleotide
agaaacacccgggcagagg

SEQ ID NO: 1980807 - RNA, 19 nt, Artificial Sequence
  Description of Artificial Sequence: Synthetic oligonucleotide
cuucgcacaccuccauuag

SEQ ID NO: 1980808 - RNA, 19 nt, Artificial Sequence
  Description of Artificial Sequence: Synthetic oligonucleotide
aacacccgggcagaggcca

SEQ ID NO: 1980809 - RNA, 19 nt, Artificial Sequence
  Description of Artificial Sequence: Synthetic oligonucleotide
uuggcuguucugacauaug

SEQ ID NO: 1980810 - RNA, 19 nt, Artificial Sequence
  Description of Artificial Sequence: Synthetic oligonucleotide
gagauacgccuuuccgcag

SEQ ID NO: 1980811 - RNA, 19 nt, Artificial Sequence
  Description of Artificial Sequence: Synthetic oligonucleotide
aacuagcauuccauacaag

SEQ ID NO: 1980812 - RNA, 19 nt, Artificial Sequence
  Description of Artificial Sequence: Synthetic oligonucleotide
ccauguaacgaucaaagaa

SEQ ID NO: 1980813 - RNA, 19 nt, Artificial Sequence
  Description of Artificial Sequence: Synthetic oligonucleotide
guaagcaaacuggugcaac

SEQ ID NO: 1980814 - RNA, 19 nt, Artificial Sequence
  Description of Artificial Sequence: Synthetic oligonucleotide
cugauacccugaaaccuuc

SEQ ID NO: 1980815 - RNA, 19 nt, Artificial Sequence
  Description of Artificial Sequence: Synthetic oligonucleotide
acauacacguucagccagg

SEQ ID NO: 1980816 - RNA, 19 nt, Artificial Sequence
  Description of Artificial Sequence: Synthetic oligonucleotide
cucgcuugugucauugaca

SEQ ID NO: 1980817 - RNA, 19 nt, Artificial Sequence
  Description of Artificial Sequence: Synthetic oligonucleotide
agucuugcgccagauagaa

SEQ ID NO: 1980818 - RNA, 19 nt, Artificial Sequence
  Description of Artificial Sequence: Synthetic oligonucleotide
aacuccccggaagugcuug

SEQ ID NO: 1980819 - RNA, 19 nt, Artificial Sequence
  Description of Artificial Sequence: Synthetic oligonucleotide
gcuuauagacuucgcacac

SEQ ID NO: 1980820 - RNA, 19 nt, Artificial Sequence
  Description of Artificial Sequence: Synthetic oligonucleotide
augucgcaccacugauacc

SEQ ID NO: 1980821 - RNA, 19 nt, Artificial Sequence
  Description of Artificial Sequence: Synthetic oligonucleotide
cgaucaaagaagucuugcg

SEQ ID NO: 1980822 - RNA, 19 nt, Artificial Sequence
  Description of Artificial Sequence: Synthetic oligonucleotide
gcagccgacauccaggaca

SEQ ID NO: 1980823 - RNA, 19 nt, Artificial Sequence
  Description of Artificial Sequence: Synthetic oligonucleotide
gaaaccuucugcaucaguu

SEQ ID NO: 1980824 - RNA, 19 nt, Artificial Sequence
  Description of Artificial Sequence: Synthetic oligonucleotide
agcaaacuggugcaacuuu

SEQ ID NO: 1980825 - RNA, 19 nt, Artificial Sequence
  Description of Artificial Sequence: Synthetic oligonucleotide
cugcaucaguuccauggag

SEQ ID NO: 1980826 - RNA, 19 nt, Artificial Sequence
  Description of Artificial Sequence: Synthetic oligonucleotide
  modified_base (8)..(8): a, c, u, g, unknown or other
ugcagganaggauggcguu

SEQ ID NO: 1980827 - RNA, 19 nt, Artificial Sequence
  Description of Artificial Sequence: Synthetic oligonucleotide
caucuguaacguaagcaaa

SEQ ID NO: 1980828 - RNA, 19 nt, Artificial Sequence
  Description of Artificial Sequence: Synthetic oligonucleotide
gccacuuggacauacacgu

SEQ ID NO: 1980829 - RNA, 19 nt, Artificial Sequence
  Description of Artificial Sequence: Synthetic oligonucleotide
cuaagcuuuugucaugugu

SEQ ID NO: 1980830 - RNA, 19 nt, Artificial Sequence
  Description of Artificial Sequence: Synthetic oligonucleotide
uauagacuucgcacaccuc

SEQ ID NO: 1980831 - RNA, 19 nt, Artificial Sequence
  Description of Artificial Sequence: Synthetic oligonucleotide
guccgaggccauuuugaag

SEQ ID NO: 1980832 - RNA, 19 nt, Artificial Sequence
  Description of Artificial Sequence: Synthetic oligonucleotide
auuagccaauccagagaac

SEQ ID NO: 1980833 - RNA, 19 nt, Artificial Sequence
  Description of Artificial Sequence: Synthetic oligonucleotide
aagucuugcgccagauaga

SEQ ID NO: 1980834 - RNA, 19 nt, Artificial Sequence
  Description of Artificial Sequence: Synthetic oligonucleotide
  modified_base (17)..(17): a, c, u, g, unknown or other
auccuugccugcagganag

SEQ ID NO: 1980835 - RNA, 19 nt, Artificial Sequence
  Description of Artificial Sequence: Synthetic oligonucleotide
gaacaagcgccaucuguaa

SEQ ID NO: 1980836 - RNA, 19 nt, Artificial Sequence
  Description of Artificial Sequence: Synthetic oligonucleotide
acgcccgcugcucuggaag

SEQ ID NO: 1980837 - RNA, 19 nt, Artificial Sequence
  Description of Artificial Sequence: Synthetic oligonucleotide
ugcaacuuuggaggguaga

SEQ ID NO: 1980838 - RNA, 19 nt, Artificial Sequence
  Description of Artificial Sequence: Synthetic oligonucleotide
guaacguaagcaaacuggu

SEQ ID NO: 1980839 - RNA, 19 nt, Artificial Sequence
  Description of Artificial Sequence: Synthetic oligonucleotide
uccccggaagugcuugagc

SEQ ID NO: 1980840 - RNA, 19 nt, Artificial Sequence
  Description of Artificial Sequence: Synthetic oligonucleotide
uugggcuuaaacgccacuu

SEQ ID NO: 1980841 - RNA, 19 nt, Artificial Sequence
  Description of Artificial Sequence: Synthetic oligonucleotide
ggagaauuucaucuccgga

SEQ ID NO: 1980842 - RNA, 19 nt, Artificial Sequence
  Description of Artificial Sequence: Synthetic oligonucleotide
agcgccaucuguaacguaa

SEQ ID NO: 1980843 - RNA, 19 nt, Artificial Sequence
  Description of Artificial Sequence: Synthetic oligonucleotide
uggcgaacggaaccaucca

SEQ ID NO: 1980844 - RNA, 19 nt, Artificial Sequence
  Description of Artificial Sequence: Synthetic oligonucleotide
cucuaugucgcaccacuga

SEQ ID NO: 1980845 - RNA, 19 nt, Artificial Sequence
  Description of Artificial Sequence: Synthetic oligonucleotide
ucuaagcagccgacaucca

SEQ ID NO: 1980846 - RNA, 19 nt, Artificial Sequence
  Description of Artificial Sequence: Synthetic oligonucleotide
uagcaccucgcuuguguca

SEQ ID NO: 1980847 - RNA, 19 nt, Artificial Sequence
  Description of Artificial Sequence: Synthetic oligonucleotide
caagcacuucuguccgagg

SEQ ID NO: 1980848 - RNA, 19 nt, Artificial Sequence
  Description of Artificial Sequence: Synthetic oligonucleotide
caaugagcuguaaaagugu

SEQ ID NO: 1980849 - RNA, 19 nt, Artificial Sequence
  Description of Artificial Sequence: Synthetic oligonucleotide
aaccuccuaggcagcaaag

SEQ ID NO: 1980850 - RNA, 19 nt, Artificial Sequence
  Description of Artificial Sequence: Synthetic oligonucleotide
gaagacgcccgcugcucug

SEQ ID NO: 1980851 - RNA, 19 nt, Artificial Sequence
  Description of Artificial Sequence: Synthetic oligonucleotide
agcuuggagcuucccaccu

SEQ ID NO: 1980852 - RNA, 19 nt, Artificial Sequence
  Description of Artificial Sequence: Synthetic oligonucleotide
auugggcuuaaacgccacu

SEQ ID NO: 1980853 - RNA, 19 nt, Artificial Sequence
  Description of Artificial Sequence: Synthetic oligonucleotide
  modified_base (4)..(4): a, c, u, g, unknown or other
gganaggauggcguugcag

SEQ ID NO: 1980854 - RNA, 19 nt, Artificial Sequence
  Description of Artificial Sequence: Synthetic oligonucleotide
ccuauuguuaaaacaacua

SEQ ID NO: 1980855 - RNA, 19 nt, Artificial Sequence
  Description of Artificial Sequence: Synthetic oligonucleotide
ugugggcguuuuccauggg

SEQ ID NO: 1980856 - RNA, 19 nt, Artificial Sequence
  Description of Artificial Sequence: Synthetic oligonucleotide
cauugggcuuaaacgccac

SEQ ID NO: 1980857 - RNA, 19 nt, Artificial Sequence
  Description of Artificial Sequence: Synthetic oligonucleotide
acugauacccugaaaccuu

SEQ ID NO: 1980858 - RNA, 19 nt, Artificial Sequence
  Description of Artificial Sequence: Synthetic oligonucleotide
gccagauagaaugucuccc

SEQ ID NO: 1980859 - RNA, 19 nt, Artificial Sequence
  Description of Artificial Sequence: Synthetic oligonucleotide
cuccauuagccaauccaga

SEQ ID NO: 1980860 - RNA, 19 nt, Artificial Sequence
  Description of Artificial Sequence: Synthetic oligonucleotide
ugucucccugugaagcuua

SEQ ID NO: 1980861 - RNA, 19 nt, Artificial Sequence
  Description of Artificial Sequence: Synthetic oligonucleotide
  modified_base (10)..(10): a, c, u, g, unknown or other
ccugcagganaggauggcg

SEQ ID NO: 1980862 - RNA, 19 nt, Artificial Sequence
  Description of Artificial Sequence: Synthetic oligonucleotide
ggcuuaaacgccacuuaag

SEQ ID NO: 1980863 - RNA, 19 nt, Artificial Sequence
  Description of Artificial Sequence: Synthetic oligonucleotide
uuaauuccaucuggagaau

SEQ ID NO: 1980864 - RNA, 19 nt, Artificial Sequence
  Description of Artificial Sequence: Synthetic oligonucleotide
ggccauuuugaagacgccc

SEQ ID NO: 1980865 - RNA, 19 nt, Artificial Sequence
  Description of Artificial Sequence: Synthetic oligonucleotide
auccaagcuguuggcgugg

SEQ ID NO: 1980866 - RNA, 19 nt, Artificial Sequence
  Description of Artificial Sequence: Synthetic oligonucleotide
cauggcgaacggaaccauc

SEQ ID NO: 1980867 - RNA, 19 nt, Artificial Sequence
  Description of Artificial Sequence: Synthetic oligonucleotide
gcaucaguuccauggagga

SEQ ID NO: 1980868 - RNA, 19 nt, Artificial Sequence
  Description of Artificial Sequence: Synthetic oligonucleotide
  modified_base (16)..(16): a, c, u, g, unknown or other
uccuugccugcagganagg

SEQ ID NO: 1980869 - RNA, 19 nt, Artificial Sequence
  Description of Artificial Sequence: Synthetic oligonucleotide
ccauacaagcacuucuguc

SEQ ID NO: 1980870 - RNA, 19 nt, Artificial Sequence
  Description of Artificial Sequence: Synthetic oligonucleotide
ggccuccuuaauuucuaag

SEQ ID NO: 1980871 - RNA, 19 nt, Artificial Sequence
  Description of Artificial Sequence: Synthetic oligonucleotide
ggacauacacguucagcca

SEQ ID NO: 1980872 - RNA, 19 nt, Artificial Sequence
  Description of Artificial Sequence: Synthetic oligonucleotide
  modified_base (18)..(18): a, c, u, g, unknown or other
cauccuugccugcaggana

SEQ ID NO: 1980873 - RNA, 19 nt, Artificial Sequence
  Description of Artificial Sequence: Synthetic oligonucleotide
aggccauuuugaagacgcc

SEQ ID NO: 1980874 - RNA, 19 nt, Artificial Sequence
  Description of Artificial Sequence: Synthetic oligonucleotide
cagccaggacacaaugguc

SEQ ID NO: 1980875 - RNA, 19 nt, Artificial Sequence
  Description of Artificial Sequence: Synthetic oligonucleotide
agcagccgacauccaggac

SEQ ID NO: 1980876 - RNA, 19 nt, Artificial Sequence
  Description of Artificial Sequence: Synthetic oligonucleotide
cuaggcagcaaaggagcuc

SEQ ID NO: 1980877 - RNA, 19 nt, Artificial Sequence
  Description of Artificial Sequence: Synthetic oligonucleotide
gguagauuuccucaaguuu

SEQ ID NO: 1980878 - RNA, 19 nt, Artificial Sequence
  Description of Artificial Sequence: Synthetic oligonucleotide
ugggaacuccccggaagug

SEQ ID NO: 1980879 - RNA, 19 nt, Artificial Sequence
  Description of Artificial Sequence: Synthetic oligonucleotide
agcuuuugucaugugugaa

SEQ ID NO: 1980880 - RNA, 19 nt, Artificial Sequence
  Description of Artificial Sequence: Synthetic oligonucleotide
gugggcguuuuccauggga

SEQ ID NO: 1980881 - RNA, 19 nt, Artificial Sequence
  Description of Artificial Sequence: Synthetic oligonucleotide
augccauguaacgaucaaa

SEQ ID NO: 1980882 - RNA, 19 nt, Artificial Sequence
  Description of Artificial Sequence: Synthetic oligonucleotide
ucgcaccacugauacccug

SEQ ID NO: 1980883 - RNA, 19 nt, Artificial Sequence
  Description of Artificial Sequence: Synthetic oligonucleotide
agaagucuugcgccagaua

SEQ ID NO: 1980884 - RNA, 19 nt, Artificial Sequence
  Description of Artificial Sequence: Synthetic oligonucleotide
gagcuucccaccucccgga

SEQ ID NO: 1980885 - RNA, 19 nt, Artificial Sequence
  Description of Artificial Sequence: Synthetic oligonucleotide
auacgccuuuccgcagagc

SEQ ID NO: 1980886 - RNA, 19 nt, Artificial Sequence
  Description of Artificial Sequence: Synthetic oligonucleotide
ccauuuugaagacgcccgc

SEQ ID NO: 1980887 - RNA, 19 nt, Artificial Sequence
  Description of Artificial Sequence: Synthetic oligonucleotide
ucccaaccuccuaggcagc

SEQ ID NO: 1980888 - RNA, 19 nt, Artificial Sequence
  Description of Artificial Sequence: Synthetic oligonucleotide
gaguccagugggucaagua

SEQ ID NO: 1980889 - RNA, 19 nt, Artificial Sequence
  Description of Artificial Sequence: Synthetic oligonucleotide
  modified_base (5)..(5): a, c, u, g, unknown or other
agganaggauggcguugca

SEQ ID NO: 1980890 - RNA, 19 nt, Artificial Sequence
  Description of Artificial Sequence: Synthetic oligonucleotide
agacuucgcacaccuccau

SEQ ID NO: 1980891 - RNA, 19 nt, Artificial Sequence
  Description of Artificial Sequence: Synthetic oligonucleotide
agauuuccucaaguuuaga

SEQ ID NO: 1980892 - RNA, 19 nt, Artificial Sequence
  Description of Artificial Sequence: Synthetic oligonucleotide
cuugagcuuggagcuuccc

SEQ ID NO: 1980893 - RNA, 19 nt, Artificial Sequence
  Description of Artificial Sequence: Synthetic oligonucleotide
ggcgaacggaaccauccac

SEQ ID NO: 1980894 - RNA, 19 nt, Artificial Sequence
  Description of Artificial Sequence: Synthetic oligonucleotide
gggucaaguagcacccucc

SEQ ID NO: 1980895 - RNA, 19 nt, Artificial Sequence
  Description of Artificial Sequence: Synthetic oligonucleotide
gaggcaguagcaccucgcu

SEQ ID NO: 1980896 - RNA, 19 nt, Artificial Sequence
  Description of Artificial Sequence: Synthetic oligonucleotide
cuaugucgcaccacugaua

SEQ ID NO: 1980897 - RNA, 19 nt, Artificial Sequence
  Description of Artificial Sequence: Synthetic oligonucleotide
uucuguccgaggccauuuu

SEQ ID NO: 1980898 - RNA, 19 nt, Artificial Sequence
  Description of Artificial Sequence: Synthetic oligonucleotide
  modified_base (7)..(7): a, c, u, g, unknown or other
gcagganaggauggcguug

SEQ ID NO: 1980899 - RNA, 19 nt, Artificial Sequence
  Description of Artificial Sequence: Synthetic oligonucleotide
acucagcggcguucuggag

SEQ ID NO: 1980900 - RNA, 19 nt, Artificial Sequence
  Description of Artificial Sequence: Synthetic oligonucleotide
aggccauggcgaacggaac

SEQ ID NO: 1980901 - RNA, 19 nt, Artificial Sequence
  Description of Artificial Sequence: Synthetic oligonucleotide
acguucagccaggacacaa

SEQ ID NO: 1980902 - RNA, 19 nt, Artificial Sequence
  Description of Artificial Sequence: Synthetic oligonucleotide
cacugauacccugaaaccu

SEQ ID NO: 1980903 - RNA, 19 nt, Artificial Sequence
  Description of Artificial Sequence: Synthetic oligonucleotide
gccauguaacgaucaaaga

SEQ ID NO: 1980904 - RNA, 19 nt, Artificial Sequence
  Description of Artificial Sequence: Synthetic oligonucleotide
gggaacuccccggaagugc

SEQ ID NO: 1980905 - RNA, 19 nt, Artificial Sequence
  Description of Artificial Sequence: Synthetic oligonucleotide
aaacgccacuuaagggccu

SEQ ID NO: 1980906 - RNA, 19 nt, Artificial Sequence
  Description of Artificial Sequence: Synthetic oligonucleotide
acggaaccauccacuugac

SEQ ID NO: 1980907 - RNA, 19 nt, Artificial Sequence
  Description of Artificial Sequence: Synthetic oligonucleotide
caccucgcuugugucauug

SEQ ID NO: 1980908 - RNA, 19 nt, Artificial Sequence
  Description of Artificial Sequence: Synthetic oligonucleotide
gggcuuaaacgccacuuaa

SEQ ID NO: 1980909 - RNA, 19 nt, Artificial Sequence
  Description of Artificial Sequence: Synthetic oligonucleotide
ugcucgcauccuugccugc

SEQ ID NO: 1980910 - RNA, 19 nt, Artificial Sequence
  Description of Artificial Sequence: Synthetic oligonucleotide
  modified_base (9)..(9): a, c, u, g, unknown or other
cugcagganaggauggcgu

SEQ ID NO: 1980911 - RNA, 19 nt, Artificial Sequence
  Description of Artificial Sequence: Synthetic oligonucleotide
gccgacauccaggacacac

SEQ ID NO: 1980912 - RNA, 19 nt, Artificial Sequence
  Description of Artificial Sequence: Synthetic oligonucleotide
cuugcgccagauagaaugu

SEQ ID NO: 1980913 - RNA, 19 nt, Artificial Sequence
  Description of Artificial Sequence: Synthetic oligonucleotide
uugcgccagauagaauguc

SEQ ID NO: 1980914 - RNA, 19 nt, Artificial Sequence
  Description of Artificial Sequence: Synthetic oligonucleotide
ggacaccauaaggaaauuc

SEQ ID NO: 1980915 - RNA, 19 nt, Artificial Sequence
  Description of Artificial Sequence: Synthetic oligonucleotide
cgacauccaggacacacag

SEQ ID NO: 1980916 - RNA, 19 nt, Artificial Sequence
  Description of Artificial Sequence: Synthetic oligonucleotide
guccucaacccuauuguua

SEQ ID NO: 1980917 - RNA, 19 nt, Artificial Sequence
  Description of Artificial Sequence: Synthetic oligonucleotide
caaccuccuaggcagcaaa

SEQ ID NO: 1980918 - RNA, 19 nt, Artificial Sequence
  Description of Artificial Sequence: Synthetic oligonucleotide
aggcaguagcaccucgcuu

SEQ ID NO: 1980919 - RNA, 19 nt, Artificial Sequence
  Description of Artificial Sequence: Synthetic oligonucleotide
agagaacugcucgcauccu

SEQ ID NO: 1980920 - RNA, 19 nt, Artificial Sequence
  Description of Artificial Sequence: Synthetic oligonucleotide
gcucccaaccuccuaggca

SEQ ID NO: 1980921 - RNA, 19 nt, Artificial Sequence
  Description of Artificial Sequence: Synthetic oligonucleotide
gcaaccguggccuccuuaa

SEQ ID NO: 1980922 - RNA, 19 nt, Artificial Sequence
  Description of Artificial Sequence: Synthetic oligonucleotide
augagcuguaaaaguguuu

SEQ ID NO: 1980923 - RNA, 19 nt, Artificial Sequence
  Description of Artificial Sequence: Synthetic oligonucleotide
aacgccacuuaagggccuu

SEQ ID NO: 1980924 - RNA, 19 nt, Artificial Sequence
  Description of Artificial Sequence: Synthetic oligonucleotide
gaaggccauggcgaacgga

SEQ ID NO: 1980925 - RNA, 19 nt, Artificial Sequence
  Description of Artificial Sequence: Synthetic oligonucleotide
uggauguugugggcguuuu

SEQ ID NO: 1980926 - RNA, 19 nt, Artificial Sequence
  Description of Artificial Sequence: Synthetic oligonucleotide
ccacuugacacauuucucu

SEQ ID NO: 1980927 - RNA, 19 nt, Artificial Sequence
  Description of Artificial Sequence: Synthetic oligonucleotide
caaagaccugcugugggua

SEQ ID NO: 1980928 - RNA, 19 nt, Artificial Sequence
  Description of Artificial Sequence: Synthetic oligonucleotide
accucgcuugugucauuga

SEQ ID NO: 1980929 - RNA, 19 nt, Artificial Sequence
  Description of Artificial Sequence: Synthetic oligonucleotide
cgccagauagaaugucucc

SEQ ID NO: 1980930 - RNA, 19 nt, Artificial Sequence
  Description of Artificial Sequence: Synthetic oligonucleotide
gaaaucccaaugagcugua

SEQ ID NO: 1980931 - RNA, 19 nt, Artificial Sequence
  Description of Artificial Sequence: Synthetic oligonucleotide
agcaaccguggccuccuua

SEQ ID NO: 1980932 - RNA, 19 nt, Artificial Sequence
  Description of Artificial Sequence: Synthetic oligonucleotide
gagaacugcucgcauccuu

SEQ ID NO: 1980933 - RNA, 19 nt, Artificial Sequence
  Description of Artificial Sequence: Synthetic oligonucleotide
aagcgccaucuguaacgua

SEQ ID NO: 1980934 - RNA, 19 nt, Artificial Sequence
  Description of Artificial Sequence: Synthetic oligonucleotide
caugugugaagaguccagu

SEQ ID NO: 1980935 - RNA, 19 nt, Artificial Sequence
  Description of Artificial Sequence: Synthetic oligonucleotide
cccuauuguuaaaacaacu

SEQ ID NO: 1980936 - RNA, 19 nt, Artificial Sequence
  Description of Artificial Sequence: Synthetic oligonucleotide
gcucuggaagagauacgcc

SEQ ID NO: 1980937 - RNA, 19 nt, Artificial Sequence
  Description of Artificial Sequence: Synthetic oligonucleotide
cauacacguucagccagga

SEQ ID NO: 1980938 - RNA, 19 nt, Artificial Sequence
  Description of Artificial Sequence: Synthetic oligonucleotide
gugcaacuuuggaggguag

SEQ ID NO: 1980939 - RNA, 19 nt, Artificial Sequence
  Description of Artificial Sequence: Synthetic oligonucleotide
agcacucagcggcguucug

SEQ ID NO: 1980940 - RNA, 19 nt, Artificial Sequence
  Description of Artificial Sequence: Synthetic oligonucleotide
cuccccggaagugcuugag

SEQ ID NO: 1980941 - RNA, 19 nt, Artificial Sequence
  Description of Artificial Sequence: Synthetic oligonucleotide
cauuuugaagacgcccgcu

SEQ ID NO: 1980942 - RNA, 19 nt, Artificial Sequence
  Description of Artificial Sequence: Synthetic oligonucleotide
ucuccggaacaagcgccau

SEQ ID NO: 1980943 - RNA, 19 nt, Artificial Sequence
  Description of Artificial Sequence: Synthetic oligonucleotide
ggcguuuuccaugggaacu

SEQ ID NO: 1980944 - RNA, 19 nt, Artificial Sequence
  Description of Artificial Sequence: Synthetic oligonucleotide
ggguagauuuccucaaguu

SEQ ID NO: 1980945 - RNA, 19 nt, Artificial Sequence
  Description of Artificial Sequence: Synthetic oligonucleotide
uguuggcgugggucuggau

SEQ ID NO: 1980946 - RNA, 19 nt, Artificial Sequence
  Description of Artificial Sequence: Synthetic oligonucleotide
acgccacuuaagggccuuc

SEQ ID NO: 1980947 - RNA, 19 nt, Artificial Sequence
  Description of Artificial Sequence: Synthetic oligonucleotide
ucucccugugaagcuuaua

SEQ ID NO: 1980948 - RNA, 19 nt, Artificial Sequence
  Description of Artificial Sequence: Synthetic oligonucleotide
agcuucccaccucccggaa

SEQ ID NO: 1980949 - RNA, 19 nt, Artificial Sequence
  Description of Artificial Sequence: Synthetic oligonucleotide
gacuucgcacaccuccauu

SEQ ID NO: 1980950 - RNA, 19 nt, Artificial Sequence
  Description of Artificial Sequence: Synthetic oligonucleotide
gcgccagauagaaugucuc

SEQ ID NO: 1980951 - RNA, 19 nt, Artificial Sequence
  Description of Artificial Sequence: Synthetic oligonucleotide
guggccuccuuaauuucua

SEQ ID NO: 1980952 - RNA, 19 nt, Artificial Sequence
  Description of Artificial Sequence: Synthetic oligonucleotide
gcgccaucuguaacguaag

SEQ ID NO: 1980953 - RNA, 19 nt, Artificial Sequence
  Description of Artificial Sequence: Synthetic oligonucleotide
gcugguguccucaacccua

SEQ ID NO: 1980954 - RNA, 19 nt, Artificial Sequence
  Description of Artificial Sequence: Synthetic oligonucleotide
gggccuucaucaucauuaa

SEQ ID NO: 1980955 - RNA, 19 nt, Artificial Sequence
  Description of Artificial Sequence: Synthetic oligonucleotide
agacgcccgcugcucugga

SEQ ID NO: 1980956 - RNA, 19 nt, Artificial Sequence
  Description of Artificial Sequence: Synthetic oligonucleotide
caagcgccaucuguaacgu

SEQ ID NO: 1980957 - RNA, 19 nt, Artificial Sequence
  Description of Artificial Sequence: Synthetic oligonucleotide
ccgaggccauuuugaagac

SEQ ID NO: 1980958 - RNA, 19 nt, Artificial Sequence
  Description of Artificial Sequence: Synthetic oligonucleotide
aggggcucccaaccuccua

SEQ ID NO: 1980959 - RNA, 19 nt, Artificial Sequence
  Description of Artificial Sequence: Synthetic oligonucleotide
cguuuuccaugggaacucc

SEQ ID NO: 1980960 - RNA, 19 nt, Artificial Sequence
  Description of Artificial Sequence: Synthetic oligonucleotide
caccacugauacccugaaa

SEQ ID NO: 1980961 - RNA, 19 nt, Artificial Sequence
  Description of Artificial Sequence: Synthetic oligonucleotide
gcgaacggaaccauccacu

SEQ ID NO: 1980962 - RNA, 19 nt, Artificial Sequence
  Description of Artificial Sequence: Synthetic oligonucleotide
caacuuuggaggguagauu

SEQ ID NO: 1980963 - RNA, 19 nt, Artificial Sequence
  Description of Artificial Sequence: Synthetic oligonucleotide
cacccgggcagaggccagc

SEQ ID NO: 1980964 - RNA, 19 nt, Artificial Sequence
  Description of Artificial Sequence: Synthetic oligonucleotide
caguagcaccucgcuugug

SEQ ID NO: 1980965 - RNA, 19 nt, Artificial Sequence
  Description of Artificial Sequence: Synthetic oligonucleotide
cgccaucuguaacguaagc

SEQ ID NO: 1980966 - RNA, 19 nt, Artificial Sequence
  Description of Artificial Sequence: Synthetic oligonucleotide
cugguguccucaacccuau

SEQ ID NO: 1980967 - RNA, 19 nt, Artificial Sequence
  Description of Artificial Sequence: Synthetic oligonucleotide
cgaggccauuuugaagacg

SEQ ID NO: 1980968 - RNA, 19 nt, Artificial Sequence
  Description of Artificial Sequence: Synthetic oligonucleotide
ggcgugggucuggauguug

SEQ ID NO: 1980969 - RNA, 19 nt, Artificial Sequence
  Description of Artificial Sequence: Synthetic oligonucleotide
ccucaaguuuagaagcaau

SEQ ID NO: 1980970 - RNA, 19 nt, Artificial Sequence
  Description of Artificial Sequence: Synthetic oligonucleotide
ccguggccuccuuaauuuc

SEQ ID NO: 1980971 - RNA, 19 nt, Artificial Sequence
  Description of Artificial Sequence: Synthetic oligonucleotide
gcaguagcaccucgcuugu

SEQ ID NO: 1980972 - RNA, 19 nt, Artificial Sequence
  Description of Artificial Sequence: Synthetic oligonucleotide
cuguggguacugaggcagu

SEQ ID NO: 1980973 - RNA, 19 nt, Artificial Sequence
  Description of Artificial Sequence: Synthetic oligonucleotide
cuguuggcgugggucugga

SEQ ID NO: 1980974 - RNA, 19 nt, Artificial Sequence
  Description of Artificial Sequence: Synthetic oligonucleotide
gcucgcauccuugccugca

SEQ ID NO: 1980975 - RNA, 19 nt, Artificial Sequence
  Description of Artificial Sequence: Synthetic oligonucleotide
  modified_base (15)..(15): a, c, u, g, unknown or other
ccuugccugcagganagga

SEQ ID NO: 1980976 - RNA, 19 nt, Artificial Sequence
  Description of Artificial Sequence: Synthetic oligonucleotide
cauaagccacuuggacaua

SEQ ID NO: 1980977 - RNA, 19 nt, Artificial Sequence
  Description of Artificial Sequence: Synthetic oligonucleotide
gcccgcugcucuggaagag

SEQ ID NO: 1980978 - RNA, 19 nt, Artificial Sequence
  Description of Artificial Sequence: Synthetic oligonucleotide
ccuaggcagcaaaggagcu

SEQ ID NO: 1980979 - RNA, 19 nt, Artificial Sequence
  Description of Artificial Sequence: Synthetic oligonucleotide
cgcauccuugccugcagga

SEQ ID NO: 1980980 - RNA, 19 nt, Artificial Sequence
  Description of Artificial Sequence: Synthetic oligonucleotide
cacguucagccaggacaca

SEQ ID NO: 1980981 - RNA, 19 nt, Artificial Sequence
  Description of Artificial Sequence: Synthetic oligonucleotide
cggaacaagcgccaucugu

SEQ ID NO: 1980982 - RNA, 19 nt, Artificial Sequence
  Description of Artificial Sequence: Synthetic oligonucleotide
gccacuuaagggccuucau

SEQ ID NO: 1980983 - RNA, 19 nt, Artificial Sequence
  Description of Artificial Sequence: Synthetic oligonucleotide
cagcaggggcucccaaccu

SEQ ID NO: 1980984 - RNA, 19 nt, Artificial Sequence
  Description of Artificial Sequence: Synthetic oligonucleotide
gucgcaccacugauacccu

SEQ ID NO: 1980985 - RNA, 19 nt, Artificial Sequence
  Description of Artificial Sequence: Synthetic oligonucleotide
accauccacuugacacauu

SEQ ID NO: 1980986 - RNA, 19 nt, Artificial Sequence
  Description of Artificial Sequence: Synthetic oligonucleotide
caaccguggccuccuuaau

SEQ ID NO: 1980987 - RNA, 19 nt, Artificial Sequence
  Description of Artificial Sequence: Synthetic oligonucleotide
cccggaaggccauggcgaa

SEQ ID NO: 1980988 - RNA, 19 nt, Artificial Sequence
  Description of Artificial Sequence: Synthetic oligonucleotide
agccgacauccaggacaca

SEQ ID NO: 1980989 - RNA, 19 nt, Artificial Sequence
  Description of Artificial Sequence: Synthetic oligonucleotide
cguaagcaaacuggugcaa

SEQ ID NO: 1980990 - RNA, 19 nt, Artificial Sequence
  Description of Artificial Sequence: Synthetic oligonucleotide
gcgugggucuggauguugu

SEQ ID NO: 1980991 - RNA, 19 nt, Artificial Sequence
  Description of Artificial Sequence: Synthetic oligonucleotide
ccaugggaacuccccggaa

SEQ ID NO: 1980992 - RNA, 19 nt, Artificial Sequence
  Description of Artificial Sequence: Synthetic oligonucleotide
gaacuccccggaagugcuu

SEQ ID NO: 1980993 - RNA, 19 nt, Artificial Sequence
  Description of Artificial Sequence: Synthetic oligonucleotide
ggagcuccaggcagcugcu

SEQ ID NO: 1980994 - RNA, 19 nt, Artificial Sequence
  Description of Artificial Sequence: Synthetic oligonucleotide
gucuugcgccagauagaau

SEQ ID NO: 1980995 - RNA, 19 nt, Artificial Sequence
  Description of Artificial Sequence: Synthetic oligonucleotide
cgaacggaaccauccacuu

SEQ ID NO: 1980996 - RNA, 19 nt, Artificial Sequence
  Description of Artificial Sequence: Synthetic oligonucleotide
caguuccauggaggagaaa

SEQ ID NO: 1980997 - RNA, 19 nt, Artificial Sequence
  Description of Artificial Sequence: Synthetic oligonucleotide
cccgcugcucuggaagaga

SEQ ID NO: 1980998 - RNA, 19 nt, Artificial Sequence
  Description of Artificial Sequence: Synthetic oligonucleotide
gucucccugugaagcuuau

SEQ ID NO: 1980999 - RNA, 19 nt, Artificial Sequence
  Description of Artificial Sequence: Synthetic oligonucleotide
ccaaccuccuaggcagcaa

SEQ ID NO: 1981000 - RNA, 19 nt, Artificial Sequence
  Description of Artificial Sequence: Synthetic oligonucleotide
cguucagccaggacacaau

SEQ ID NO: 1981001 - RNA, 19 nt, Artificial Sequence
  Description of Artificial Sequence: Synthetic oligonucleotide
ccgcugcucuggaagagau

SEQ ID NO: 1981002 - RNA, 19 nt, Artificial Sequence
  Description of Artificial Sequence: Synthetic oligonucleotide
cagcggcguucuggaggug

SEQ ID NO: 1981003 - RNA, 19 nt, Artificial Sequence
  Description of Artificial Sequence: Synthetic oligonucleotide
ggauggcguugcagaaagu

SEQ ID NO: 1981004 - RNA, 19 nt, Artificial Sequence
  Description of Artificial Sequence: Synthetic oligonucleotide
cgccacuuaagggccuuca

SEQ ID NO: 1981005 - RNA, 19 nt, Artificial Sequence
  Description of Artificial Sequence: Synthetic oligonucleotide
ccaagcuguuggcgugggu

SEQ ID NO: 1981006 - RNA, 19 nt, Artificial Sequence
  Description of Artificial Sequence: Synthetic oligonucleotide
cgcuugugucauugacaua

SEQ ID NO: 1981007 - RNA, 19 nt, Artificial Sequence
  Description of Artificial Sequence: Synthetic oligonucleotide
gcaccucgcuugugucauu

SEQ ID NO: 1981008 - RNA, 19 nt, Artificial Sequence
  Description of Artificial Sequence: Synthetic oligonucleotide
cagcaaccguggccuccuu

SEQ ID NO: 1981009 - RNA, 19 nt, Artificial Sequence
  Description of Artificial Sequence: Synthetic oligonucleotide
  modified_base (1)..(1): a, c, u, g, unknown or other
naggauggcguugcagaaa

SEQ ID NO: 1981010 - RNA, 19 nt, Artificial Sequence
  Description of Artificial Sequence: Synthetic oligonucleotide
ucaugauucauauucaucc

SEQ ID NO: 1981011 - RNA, 19 nt, Artificial Sequence
  Description of Artificial Sequence: Synthetic oligonucleotide
uuuucuaggaccuuuaaaa

SEQ ID NO: 1981012 - RNA, 19 nt, Artificial Sequence
  Description of Artificial Sequence: Synthetic oligonucleotide
uugguuucauagcagaugg

SEQ ID NO: 1981013 - RNA, 19 nt, Artificial Sequence
  Description of Artificial Sequence: Synthetic oligonucleotide
aguacauugguuucauagc

SEQ ID NO: 1981014 - RNA, 19 nt, Artificial Sequence
  Description of Artificial Sequence: Synthetic oligonucleotide
ugaacuaucugaaaauucu

SEQ ID NO: 1981015 - RNA, 19 nt, Artificial Sequence
  Description of Artificial Sequence: Synthetic oligonucleotide
aaguugaggacauaggacu

SEQ ID NO: 1981016 - RNA, 19 nt, Artificial Sequence
  Description of Artificial Sequence: Synthetic oligonucleotide
uucacacuacccaagaugc

SEQ ID NO: 1981017 - RNA, 19 nt, Artificial Sequence
  Description of Artificial Sequence: Synthetic oligonucleotide
uuaaaacccaguacauugg

SEQ ID NO: 1981018 - RNA, 19 nt, Artificial Sequence
  Description of Artificial Sequence: Synthetic oligonucleotide
uuauagucaagugugaaca

SEQ ID NO: 1981019 - RNA, 19 nt, Artificial Sequence
  Description of Artificial Sequence: Synthetic oligonucleotide
uguaacuuuccccuucacg

SEQ ID NO: 1981020 - RNA, 19 nt, Artificial Sequence
  Description of Artificial Sequence: Synthetic oligonucleotide
aauucucaaggucagggca

SEQ ID NO: 1981021 - RNA, 19 nt, Artificial Sequence
  Description of Artificial Sequence: Synthetic oligonucleotide
ucucugaaugagcugacgg

SEQ ID NO: 1981022 - RNA, 19 nt, Artificial Sequence
  Description of Artificial Sequence: Synthetic oligonucleotide
aacucucucucucugaaug

SEQ ID NO: 1981023 - RNA, 19 nt, Artificial Sequence
  Description of Artificial Sequence: Synthetic oligonucleotide
aauaucuugcgauucuccu

SEQ ID NO: 1981024 - RNA, 19 nt, Artificial Sequence
  Description of Artificial Sequence: Synthetic oligonucleotide
uauuuauaccacugaaugc

SEQ ID NO: 1981025 - RNA, 19 nt, Artificial Sequence
  Description of Artificial Sequence: Synthetic oligonucleotide
guaguuauagucaagugug

SEQ ID NO: 1981026 - RNA, 19 nt, Artificial Sequence
  Description of Artificial Sequence: Synthetic oligonucleotide
aaguuuuggaauucucaag

SEQ ID NO: 1981027 - RNA, 19 nt, Artificial Sequence
  Description of Artificial Sequence: Synthetic oligonucleotide
ugcaugacuauguagucag

SEQ ID NO: 1981028 - RNA, 19 nt, Artificial Sequence
  Description of Artificial Sequence: Synthetic oligonucleotide
aagcuggacagcccgaugg

SEQ ID NO: 1981029 - RNA, 19 nt, Artificial Sequence
  Description of Artificial Sequence: Synthetic oligonucleotide
uucauauucaucccuggga

SEQ ID NO: 1981030 - RNA, 19 nt, Artificial Sequence
  Description of Artificial Sequence: Synthetic oligonucleotide
caguacauugguuucauag

SEQ ID NO: 1981031 - RNA, 19 nt, Artificial Sequence
  Description of Artificial Sequence: Synthetic oligonucleotide
uucuaggaccuuuaaaacc

SEQ ID NO: 1981032 - RNA, 19 nt, Artificial Sequence
  Description of Artificial Sequence: Synthetic oligonucleotide
gaaaccagguaguuggaag

SEQ ID NO: 1981033 - RNA, 19 nt, Artificial Sequence
  Description of Artificial Sequence: Synthetic oligonucleotide
aaaaguuuuggaauucuca

SEQ ID NO: 1981034 - RNA, 19 nt, Artificial Sequence
  Description of Artificial Sequence: Synthetic oligonucleotide
ucugaaugagcugacgggg

SEQ ID NO: 1981035 - RNA, 19 nt, Artificial Sequence
  Description of Artificial Sequence: Synthetic oligonucleotide
aaaugggaugcguucauga

SEQ ID NO: 1981036 - RNA, 19 nt, Artificial Sequence
  Description of Artificial Sequence: Synthetic oligonucleotide
uucgcuuccuaccagcaag

SEQ ID NO: 1981037 - RNA, 19 nt, Artificial Sequence
  Description of Artificial Sequence: Synthetic oligonucleotide
aaacccaguacauugguuu

SEQ ID NO: 1981038 - RNA, 19 nt, Artificial Sequence
  Description of Artificial Sequence: Synthetic oligonucleotide
uuguugugcaguucgauca

SEQ ID NO: 1981039 - RNA, 19 nt, Artificial Sequence
  Description of Artificial Sequence: Synthetic oligonucleotide
cacgagacaaaucugucgg

SEQ ID NO: 1981040 - RNA, 19 nt, Artificial Sequence
  Description of Artificial Sequence: Synthetic oligonucleotide
acagaugccugagugaccc

SEQ ID NO: 1981041 - RNA, 19 nt, Artificial Sequence
  Description of Artificial Sequence: Synthetic oligonucleotide
ucucguguucauuucgugg

SEQ ID NO: 1981042 - RNA, 19 nt, Artificial Sequence
  Description of Artificial Sequence: Synthetic oligonucleotide
ucacgagacaaaucugucg

SEQ ID NO: 1981043 - RNA, 19 nt, Artificial Sequence
  Description of Artificial Sequence: Synthetic oligonucleotide
gauucauauucaucccugg

SEQ ID NO: 1981044 - RNA, 19 nt, Artificial Sequence
  Description of Artificial Sequence: Synthetic oligonucleotide
agugugaacacaucaucag

SEQ ID NO: 1981045 - RNA, 19 nt, Artificial Sequence
  Description of Artificial Sequence: Synthetic oligonucleotide
uggucauacacugugaacu

SEQ ID NO: 1981046 - RNA, 19 nt, Artificial Sequence
  Description of Artificial Sequence: Synthetic oligonucleotide
uuuauaccacugaaugcag

SEQ ID NO: 1981047 - RNA, 19 nt, Artificial Sequence
  Description of Artificial Sequence: Synthetic oligonucleotide
ucauauucaucccugggau

SEQ ID NO: 1981048 - RNA, 19 nt, Artificial Sequence
  Description of Artificial Sequence: Synthetic oligonucleotide
uuauaccacugaaugcagg

SEQ ID NO: 1981049 - RNA, 19 nt, Artificial Sequence
  Description of Artificial Sequence: Synthetic oligonucleotide
auucauauucaucccuggg

SEQ ID NO: 1981050 - RNA, 19 nt, Artificial Sequence
  Description of Artificial Sequence: Synthetic oligonucleotide
aagaggaaauaucuugcga

SEQ ID NO: 1981051 - RNA, 19 nt, Artificial Sequence
  Description of Artificial Sequence: Synthetic oligonucleotide
agaggaaauaucuugcgau

SEQ ID NO: 1981052 - RNA, 19 nt, Artificial Sequence
  Description of Artificial Sequence: Synthetic oligonucleotide
augagauuggaucugaguu

SEQ ID NO: 1981053 - RNA, 19 nt, Artificial Sequence
  Description of Artificial Sequence: Synthetic oligonucleotide
ugcgaaguccucuaaauuc

SEQ ID NO: 1981054 - RNA, 19 nt, Artificial Sequence
  Description of Artificial Sequence: Synthetic oligonucleotide
ucgaucagguucuccaugg

SEQ ID NO: 1981055 - RNA, 19 nt, Artificial Sequence
  Description of Artificial Sequence: Synthetic oligonucleotide
uuuccaugaacuaucugaa

SEQ ID NO: 1981056 - RNA, 19 nt, Artificial Sequence
  Description of Artificial Sequence: Synthetic oligonucleotide
cuugaagugcacacagugg

SEQ ID NO: 1981057 - RNA, 19 nt, Artificial Sequence
  Description of Artificial Sequence: Synthetic oligonucleotide
ugacuauguagucaggguc

SEQ ID NO: 1981058 - RNA, 19 nt, Artificial Sequence
  Description of Artificial Sequence: Synthetic oligonucleotide
uuggaucugaguuugccga

SEQ ID NO: 1981059 - RNA, 19 nt, Artificial Sequence
  Description of Artificial Sequence: Synthetic oligonucleotide
aaguccucuaaauucucca

SEQ ID NO: 1981060 - RNA, 19 nt, Artificial Sequence
  Description of Artificial Sequence: Synthetic oligonucleotide
aacccaguacauugguuuc

SEQ ID NO: 1981061 - RNA, 19 nt, Artificial Sequence
  Description of Artificial Sequence: Synthetic oligonucleotide
auuuguuauuuauaccacu

SEQ ID NO: 1981062 - RNA, 19 nt, Artificial Sequence
  Description of Artificial Sequence: Synthetic oligonucleotide
aaucugucgggucugugga

SEQ ID NO: 1981063 - RNA, 19 nt, Artificial Sequence
  Description of Artificial Sequence: Synthetic oligonucleotide
ugggaugcguucaugauuc

SEQ ID NO: 1981064 - RNA, 19 nt, Artificial Sequence
  Description of Artificial Sequence: Synthetic oligonucleotide
aguucgaucagguucucca

SEQ ID NO: 1981065 - RNA, 19 nt, Artificial Sequence
  Description of Artificial Sequence: Synthetic oligonucleotide
auaucuugcgauucuccuc

SEQ ID NO: 1981066 - RNA, 19 nt, Artificial Sequence
  Description of Artificial Sequence: Synthetic oligonucleotide
cucguguucauuucguggc

SEQ ID NO: 1981067 - RNA, 19 nt, Artificial Sequence
  Description of Artificial Sequence: Synthetic oligonucleotide
gucaaagcuggacagcccg

SEQ ID NO: 1981068 - RNA, 19 nt, Artificial Sequence
  Description of Artificial Sequence: Synthetic oligonucleotide
uaccacugaaugcagggcc

SEQ ID NO: 1981069 - RNA, 19 nt, Artificial Sequence
  Description of Artificial Sequence: Synthetic oligonucleotide
ucuaaauucuccacuucuc

SEQ ID NO: 1981070 - RNA, 19 nt, Artificial Sequence
  Description of Artificial Sequence: Synthetic oligonucleotide
ucuguggugaggacguucc

SEQ ID NO: 1981071 - RNA, 19 nt, Artificial Sequence
  Description of Artificial Sequence: Synthetic oligonucleotide
ugcaguucgaucagguucu

SEQ ID NO: 1981072 - RNA, 19 nt, Artificial Sequence
  Description of Artificial Sequence: Synthetic oligonucleotide
ucuggcuagcugcagaacu

SEQ ID NO: 1981073 - RNA, 19 nt, Artificial Sequence
  Description of Artificial Sequence: Synthetic oligonucleotide
ucauucgcaugccagcuug

SEQ ID NO: 1981074 - RNA, 19 nt, Artificial Sequence
  Description of Artificial Sequence: Synthetic oligonucleotide
aacacaucaucagccacuc

SEQ ID NO: 1981075 - RNA, 19 nt, Artificial Sequence
  Description of Artificial Sequence: Synthetic oligonucleotide
guuauagucaagugugaac

SEQ ID NO: 1981076 - RNA, 19 nt, Artificial Sequence
  Description of Artificial Sequence: Synthetic oligonucleotide
gacguucccuacuugcugg

SEQ ID NO: 1981077 - RNA, 19 nt, Artificial Sequence
  Description of Artificial Sequence: Synthetic oligonucleotide
ucaagugugaacacaucau

SEQ ID NO: 1981078 - RNA, 19 nt, Artificial Sequence
  Description of Artificial Sequence: Synthetic oligonucleotide
ugaaagcaagcucucgugu

SEQ ID NO: 1981079 - RNA, 19 nt, Artificial Sequence
  Description of Artificial Sequence: Synthetic oligonucleotide
ugaaugagcugacggggag

SEQ ID NO: 1981080 - RNA, 19 nt, Artificial Sequence
  Description of Artificial Sequence: Synthetic oligonucleotide
ugaacuugguccccaugag

SEQ ID NO: 1981081 - RNA, 19 nt, Artificial Sequence
  Description of Artificial Sequence: Synthetic oligonucleotide
uaaaacccaguacauuggu

SEQ ID NO: 1981082 - RNA, 19 nt, Artificial Sequence
  Description of Artificial Sequence: Synthetic oligonucleotide
acaccauggucauacacug

SEQ ID NO: 1981083 - RNA, 19 nt, Artificial Sequence
  Description of Artificial Sequence: Synthetic oligonucleotide
acugcaugacuauguaguc

SEQ ID NO: 1981084 - RNA, 19 nt, Artificial Sequence
  Description of Artificial Sequence: Synthetic oligonucleotide
aagugugaacacaucauca

SEQ ID NO: 1981085 - RNA, 19 nt, Artificial Sequence
  Description of Artificial Sequence: Synthetic oligonucleotide
augauucauauucaucccu

SEQ ID NO: 1981086 - RNA, 19 nt, Artificial Sequence
  Description of Artificial Sequence: Synthetic oligonucleotide
augaacuaucugaaaauuc

SEQ ID NO: 1981087 - RNA, 19 nt, Artificial Sequence
  Description of Artificial Sequence: Synthetic oligonucleotide
gaaguugaggacauaggac

SEQ ID NO: 1981088 - RNA, 19 nt, Artificial Sequence
  Description of Artificial Sequence: Synthetic oligonucleotide
guuucauagcagauggcgg

SEQ ID NO: 1981089 - RNA, 19 nt, Artificial Sequence
  Description of Artificial Sequence: Synthetic oligonucleotide
acauugguuucauagcaga

SEQ ID NO: 1981090 - RNA, 19 nt, Artificial Sequence
  Description of Artificial Sequence: Synthetic oligonucleotide
ucuguggaaaccagguagu

SEQ ID NO: 1981091 - RNA, 19 nt, Artificial Sequence
  Description of Artificial Sequence: Synthetic oligonucleotide
uaugcgaaguccucuaaau

SEQ ID NO: 1981092 - RNA, 19 nt, Artificial Sequence
  Description of Artificial Sequence: Synthetic oligonucleotide
aagugcacacaguggguag

SEQ ID NO: 1981093 - RNA, 19 nt, Artificial Sequence
  Description of Artificial Sequence: Synthetic oligonucleotide
agacaaaucugucgggucu

SEQ ID NO: 1981094 - RNA, 19 nt, Artificial Sequence
  Description of Artificial Sequence: Synthetic oligonucleotide
uucaucccugggaugauca

SEQ ID NO: 1981095 - RNA, 19 nt, Artificial Sequence
  Description of Artificial Sequence: Synthetic oligonucleotide
uuugccgauguaacuuucc

SEQ ID NO: 1981096 - RNA, 19 nt, Artificial Sequence
  Description of Artificial Sequence: Synthetic oligonucleotide
ugaacacaucaucagccac

SEQ ID NO: 1981097 - RNA, 19 nt, Artificial Sequence
  Description of Artificial Sequence: Synthetic oligonucleotide
uaacuuuccccuucacgag

SEQ ID NO: 1981098 - RNA, 19 nt, Artificial Sequence
  Description of Artificial Sequence: Synthetic oligonucleotide
auugguuucauagcagaug

SEQ ID NO: 1981099 - RNA, 19 nt, Artificial Sequence
  Description of Artificial Sequence: Synthetic oligonucleotide
gugucgucacuccacacgg

SEQ ID NO: 1981100 - RNA, 19 nt, Artificial Sequence
  Description of Artificial Sequence: Synthetic oligonucleotide
ggaauucucaaggucaggg

SEQ ID NO: 1981101 - RNA, 19 nt, Artificial Sequence
  Description of Artificial Sequence: Synthetic oligonucleotide
gaggacguucccuacuugc

SEQ ID NO: 1981102 - RNA, 19 nt, Artificial Sequence
  Description of Artificial Sequence: Synthetic oligonucleotide
ucgcaugccagcuugcugu

SEQ ID NO: 1981103 - RNA, 19 nt, Artificial Sequence
  Description of Artificial Sequence: Synthetic oligonucleotide
gucaagugugaacacauca

SEQ ID NO: 1981104 - RNA, 19 nt, Artificial Sequence
  Description of Artificial Sequence: Synthetic oligonucleotide
auggcgaaggcuugaagug

SEQ ID NO: 1981105 - RNA, 19 nt, Artificial Sequence
  Description of Artificial Sequence: Synthetic oligonucleotide
gcguucaugauucauauuc

SEQ ID NO: 1981106 - RNA, 19 nt, Artificial Sequence
  Description of Artificial Sequence: Synthetic oligonucleotide
cugaguuugccgauguaac

SEQ ID NO: 1981107 - RNA, 19 nt, Artificial Sequence
  Description of Artificial Sequence: Synthetic oligonucleotide
aggcuugaagugcacacag

SEQ ID NO: 1981108 - RNA, 19 nt, Artificial Sequence
  Description of Artificial Sequence: Synthetic oligonucleotide
ucugaguuugccgauguaa

SEQ ID NO: 1981109 - RNA, 19 nt, Artificial Sequence
  Description of Artificial Sequence: Synthetic oligonucleotide
uggguaguuauagucaagu

SEQ ID NO: 1981110 - RNA, 19 nt, Artificial Sequence
  Description of Artificial Sequence: Synthetic oligonucleotide
gauuggaucugaguuugcc

SEQ ID NO: 1981111 - RNA, 19 nt, Artificial Sequence
  Description of Artificial Sequence: Synthetic oligonucleotide
uauagucaagugugaacac

SEQ ID NO: 1981112 - RNA, 19 nt, Artificial Sequence
  Description of Artificial Sequence: Synthetic oligonucleotide
uugccgauguaacuuuccc

SEQ ID NO: 1981113 - RNA, 19 nt, Artificial Sequence
  Description of Artificial Sequence: Synthetic oligonucleotide
agggccaaaaguuuuggaa

SEQ ID NO: 1981114 - RNA, 19 nt, Artificial Sequence
  Description of Artificial Sequence: Synthetic oligonucleotide
ucuuaucccgggucacucg

SEQ ID NO: 1981115 - RNA, 19 nt, Artificial Sequence
  Description of Artificial Sequence: Synthetic oligonucleotide
aaugagcugacggggagcu

SEQ ID NO: 1981116 - RNA, 19 nt, Artificial Sequence
  Description of Artificial Sequence: Synthetic oligonucleotide
augacuauguagucagggu

SEQ ID NO: 1981117 - RNA, 19 nt, Artificial Sequence
  Description of Artificial Sequence: Synthetic oligonucleotide
ugacggggagcugagauug

SEQ ID NO: 1981118 - RNA, 19 nt, Artificial Sequence
  Description of Artificial Sequence: Synthetic oligonucleotide
ugaguuugccgauguaacu

SEQ ID NO: 1981119 - RNA, 19 nt, Artificial Sequence
  Description of Artificial Sequence: Synthetic oligonucleotide
uuuucgcuuccuaccagca

SEQ ID NO: 1981120 - RNA, 19 nt, Artificial Sequence
  Description of Artificial Sequence: Synthetic oligonucleotide
uaguucacacuacccaaga

SEQ ID NO: 1981121 - RNA, 19 nt, Artificial Sequence
  Description of Artificial Sequence: Synthetic oligonucleotide
guccccaugagauuggauc

SEQ ID NO: 1981122 - RNA, 19 nt, Artificial Sequence
  Description of Artificial Sequence: Synthetic oligonucleotide
uccccaugagauuggaucu

SEQ ID NO: 1981123 - RNA, 19 nt, Artificial Sequence
  Description of Artificial Sequence: Synthetic oligonucleotide
gauggcgaaggcuugaagu

SEQ ID NO: 1981124 - RNA, 19 nt, Artificial Sequence
  Description of Artificial Sequence: Synthetic oligonucleotide
guaguuggaaguuuugucu

SEQ ID NO: 1981125 - RNA, 19 nt, Artificial Sequence
  Description of Artificial Sequence: Synthetic oligonucleotide
auaccacugaaugcagggc

SEQ ID NO: 1981126 - RNA, 19 nt, Artificial Sequence
  Description of Artificial Sequence: Synthetic oligonucleotide
ugacaccauggucauacac

SEQ ID NO: 1981127 - RNA, 19 nt, Artificial Sequence
  Description of Artificial Sequence: Synthetic oligonucleotide
uuuugccacuuugaaagca

SEQ ID NO: 1981128 - RNA, 19 nt, Artificial Sequence
  Description of Artificial Sequence: Synthetic oligonucleotide
aguggguaguuauagucaa

SEQ ID NO: 1981129 - RNA, 19 nt, Artificial Sequence
  Description of Artificial Sequence: Synthetic oligonucleotide
gucgucacuccacacgggg

SEQ ID NO: 1981130 - RNA, 19 nt, Artificial Sequence
  Description of Artificial Sequence: Synthetic oligonucleotide
uucacgagacaaaucuguc

SEQ ID NO: 1981131 - RNA, 19 nt, Artificial Sequence
  Description of Artificial Sequence: Synthetic oligonucleotide
acugugacaccccgagggg

SEQ ID NO: 1981132 - RNA, 19 nt, Artificial Sequence
  Description of Artificial Sequence: Synthetic oligonucleotide
gcuugaagugcacacagug

SEQ ID NO: 1981133 - RNA, 19 nt, Artificial Sequence
  Description of Artificial Sequence: Synthetic oligonucleotide
agggucauuuccaugaacu

SEQ ID NO: 1981134 - RNA, 19 nt, Artificial Sequence
  Description of Artificial Sequence: Synthetic oligonucleotide
ugugacaccccgaggggca

SEQ ID NO: 1981135 - RNA, 19 nt, Artificial Sequence
  Description of Artificial Sequence: Synthetic oligonucleotide
ugccgauguaacuuucccc

SEQ ID NO: 1981136 - RNA, 19 nt, Artificial Sequence
  Description of Artificial Sequence: Synthetic oligonucleotide
uugccacuuugaaagcaag

SEQ ID NO: 1981137 - RNA, 19 nt, Artificial Sequence
  Description of Artificial Sequence: Synthetic oligonucleotide
ggugucgucacuccacacg

SEQ ID NO: 1981138 - RNA, 19 nt, Artificial Sequence
  Description of Artificial Sequence: Synthetic oligonucleotide
gacuauguagucaggguca

SEQ ID NO: 1981139 - RNA, 19 nt, Artificial Sequence
  Description of Artificial Sequence: Synthetic oligonucleotide
ucacucgacacuucacugu

SEQ ID NO: 1981140 - RNA, 19 nt, Artificial Sequence
  Description of Artificial Sequence: Synthetic oligonucleotide
cacucguccaaacugcaug

SEQ ID NO: 1981141 - RNA, 19 nt, Artificial Sequence
  Description of Artificial Sequence: Synthetic oligonucleotide
cuugcugucaaagcuggac

SEQ ID NO: 1981142 - RNA, 19 nt, Artificial Sequence
  Description of Artificial Sequence: Synthetic oligonucleotide
agcuggacagcccgauggc

SEQ ID NO: 1981143 - RNA, 19 nt, Artificial Sequence
  Description of Artificial Sequence: Synthetic oligonucleotide
acacaguggguaguuauag

SEQ ID NO: 1981144 - RNA, 19 nt, Artificial Sequence
  Description of Artificial Sequence: Synthetic oligonucleotide
aguuggaaguuuugucucu

SEQ ID NO: 1981145 - RNA, 19 nt, Artificial Sequence
  Description of Artificial Sequence: Synthetic oligonucleotide
ucaucagccacucguccaa

SEQ ID NO: 1981146 - RNA, 19 nt, Artificial Sequence
  Description of Artificial Sequence: Synthetic oligonucleotide
acgagacaaaucugucggg

SEQ ID NO: 1981147 - RNA, 19 nt, Artificial Sequence
  Description of Artificial Sequence: Synthetic oligonucleotide
uuucuggcuagcugcagaa

SEQ ID NO: 1981148 - RNA, 19 nt, Artificial Sequence
  Description of Artificial Sequence: Synthetic oligonucleotide
augcguucaugauucauau

SEQ ID NO: 1981149 - RNA, 19 nt, Artificial Sequence
  Description of Artificial Sequence: Synthetic oligonucleotide
agaacucucucucucugaa

SEQ ID NO: 1981150 - RNA, 19 nt, Artificial Sequence
  Description of Artificial Sequence: Synthetic oligonucleotide
cuugcgauucuccuccuuc

SEQ ID NO: 1981151 - RNA, 19 nt, Artificial Sequence
  Description of Artificial Sequence: Synthetic oligonucleotide
gguaguuauagucaagugu

SEQ ID NO: 1981152 - RNA, 19 nt, Artificial Sequence
  Description of Artificial Sequence: Synthetic oligonucleotide
acucguccaaacugcauga

SEQ ID NO: 1981153 - RNA, 19 nt, Artificial Sequence
  Description of Artificial Sequence: Synthetic oligonucleotide
auagucaagugugaacaca

SEQ ID NO: 1981154 - RNA, 19 nt, Artificial Sequence
  Description of Artificial Sequence: Synthetic oligonucleotide
gucacucgacacuucacug

SEQ ID NO: 1981155 - RNA, 19 nt, Artificial Sequence
  Description of Artificial Sequence: Synthetic oligonucleotide
ucguguucauuucguggcc

SEQ ID NO: 1981156 - RNA, 19 nt, Artificial Sequence
  Description of Artificial Sequence: Synthetic oligonucleotide
guucucauucgcaugccag

SEQ ID NO: 1981157 - RNA, 19 nt, Artificial Sequence
  Description of Artificial Sequence: Synthetic oligonucleotide
uccauggauuuguuuugcc

SEQ ID NO: 1981158 - RNA, 19 nt, Artificial Sequence
  Description of Artificial Sequence: Synthetic oligonucleotide
cugagugacccugccaugg

SEQ ID NO: 1981159 - RNA, 19 nt, Artificial Sequence
  Description of Artificial Sequence: Synthetic oligonucleotide
agaggccucgguccaugcc

SEQ ID NO: 1981160 - RNA, 19 nt, Artificial Sequence
  Description of Artificial Sequence: Synthetic oligonucleotide
cauauucaucccugggaug

SEQ ID NO: 1981161 - RNA, 19 nt, Artificial Sequence
  Description of Artificial Sequence: Synthetic oligonucleotide
auaguucacacuacccaag

SEQ ID NO: 1981162 - RNA, 19 nt, Artificial Sequence
  Description of Artificial Sequence: Synthetic oligonucleotide
gguaguuggaaguuuuguc

SEQ ID NO: 1981163 - RNA, 19 nt, Artificial Sequence
  Description of Artificial Sequence: Synthetic oligonucleotide
ucauuucguggccgaaaug

SEQ ID NO: 1981164 - RNA, 19 nt, Artificial Sequence
  Description of Artificial Sequence: Synthetic oligonucleotide
cucgacacuucacugugac

SEQ ID NO: 1981165 - RNA, 19 nt, Artificial Sequence
  Description of Artificial Sequence: Synthetic oligonucleotide
ugcagaacucucucucucu

SEQ ID NO: 1981166 - RNA, 19 nt, Artificial Sequence
  Description of Artificial Sequence: Synthetic oligonucleotide
uucgcaugccagcuugcug

SEQ ID NO: 1981167 - RNA, 19 nt, Artificial Sequence
  Description of Artificial Sequence: Synthetic oligonucleotide
uucauagcagauggcggcc

SEQ ID NO: 1981168 - RNA, 19 nt, Artificial Sequence
  Description of Artificial Sequence: Synthetic oligonucleotide
ucacacuacccaagaugcc

SEQ ID NO: 1981169 - RNA, 19 nt, Artificial Sequence
  Description of Artificial Sequence: Synthetic oligonucleotide
uguaugcgaaguccucuaa

SEQ ID NO: 1981170 - RNA, 19 nt, Artificial Sequence
  Description of Artificial Sequence: Synthetic oligonucleotide
cuugacuggguugacacca

SEQ ID NO: 1981171 - RNA, 19 nt, Artificial Sequence
  Description of Artificial Sequence: Synthetic oligonucleotide
aaggcuugaagugcacaca

SEQ ID NO: 1981172 - RNA, 19 nt, Artificial Sequence
  Description of Artificial Sequence: Synthetic oligonucleotide
uugguccccaugagauugg

SEQ ID NO: 1981173 - RNA, 19 nt, Artificial Sequence
  Description of Artificial Sequence: Synthetic oligonucleotide
aguuauagucaagugugaa

SEQ ID NO: 1981174 - RNA, 19 nt, Artificial Sequence
  Description of Artificial Sequence: Synthetic oligonucleotide
ucucauucgcaugccagcu

SEQ ID NO: 1981175 - RNA, 19 nt, Artificial Sequence
  Description of Artificial Sequence: Synthetic oligonucleotide
ugucgucacuccacacggg

SEQ ID NO: 1981176 - RNA, 19 nt, Artificial Sequence
  Description of Artificial Sequence: Synthetic oligonucleotide
gcugagauugucuccuucc

SEQ ID NO: 1981177 - RNA, 19 nt, Artificial Sequence
  Description of Artificial Sequence: Synthetic oligonucleotide
gucggucuccucaucauag

SEQ ID NO: 1981178 - RNA, 19 nt, Artificial Sequence
  Description of Artificial Sequence: Synthetic oligonucleotide
ucaaagcuggacagcccga

SEQ ID NO: 1981179 - RNA, 19 nt, Artificial Sequence
  Description of Artificial Sequence: Synthetic oligonucleotide
uucccuacuugcugguucu

SEQ ID NO: 1981180 - RNA, 19 nt, Artificial Sequence
  Description of Artificial Sequence: Synthetic oligonucleotide
uaucccgggucacucgaca

SEQ ID NO: 1981181 - RNA, 19 nt, Artificial Sequence
  Description of Artificial Sequence: Synthetic oligonucleotide
cacucgacacuucacugug

SEQ ID NO: 1981182 - RNA, 19 nt, Artificial Sequence
  Description of Artificial Sequence: Synthetic oligonucleotide
uguggugaggacguucccu

SEQ ID NO: 1981183 - RNA, 19 nt, Artificial Sequence
  Description of Artificial Sequence: Synthetic oligonucleotide
uugcgauucuccuccuucu

SEQ ID NO: 1981184 - RNA, 19 nt, Artificial Sequence
  Description of Artificial Sequence: Synthetic oligonucleotide
augccugagugacccugcc

SEQ ID NO: 1981185 - RNA, 19 nt, Artificial Sequence
  Description of Artificial Sequence: Synthetic oligonucleotide
aucccgggucacucgacac

SEQ ID NO: 1981186 - RNA, 19 nt, Artificial Sequence
  Description of Artificial Sequence: Synthetic oligonucleotide
guaguagguggggaagagg

SEQ ID NO: 1981187 - RNA, 19 nt, Artificial Sequence
  Description of Artificial Sequence: Synthetic oligonucleotide
uggaauucucaaggucagg

SEQ ID NO: 1981188 - RNA, 19 nt, Artificial Sequence
  Description of Artificial Sequence: Synthetic oligonucleotide
gaugcguucaugauucaua

SEQ ID NO: 1981189 - RNA, 19 nt, Artificial Sequence
  Description of Artificial Sequence: Synthetic oligonucleotide
gugaacacaucaucagcca

SEQ ID NO: 1981190 - RNA, 19 nt, Artificial Sequence
  Description of Artificial Sequence: Synthetic oligonucleotide
ugggccuugacuggguuga

SEQ ID NO: 1981191 - RNA, 19 nt, Artificial Sequence
  Description of Artificial Sequence: Synthetic oligonucleotide
augggaugcguucaugauu

SEQ ID NO: 1981192 - RNA, 19 nt, Artificial Sequence
  Description of Artificial Sequence: Synthetic oligonucleotide
aguuugccgauguaacuuu

SEQ ID NO: 1981193 - RNA, 19 nt, Artificial Sequence
  Description of Artificial Sequence: Synthetic oligonucleotide
acucucucucucugaauga

SEQ ID NO: 1981194 - RNA, 19 nt, Artificial Sequence
  Description of Artificial Sequence: Synthetic oligonucleotide
cuucacgagacaaaucugu

SEQ ID NO: 1981195 - RNA, 19 nt, Artificial Sequence
  Description of Artificial Sequence: Synthetic oligonucleotide
ugaggacguucccuacuug

SEQ ID NO: 1981196 - RNA, 19 nt, Artificial Sequence
  Description of Artificial Sequence: Synthetic oligonucleotide
aguugaggacauaggacug

SEQ ID NO: 1981197 - RNA, 19 nt, Artificial Sequence
  Description of Artificial Sequence: Synthetic oligonucleotide
ucgggucuguggaaaccag

SEQ ID NO: 1981198 - RNA, 19 nt, Artificial Sequence
  Description of Artificial Sequence: Synthetic oligonucleotide
ggugcauguaguagguggg

SEQ ID NO: 1981199 - RNA, 19 nt, Artificial Sequence
  Description of Artificial Sequence: Synthetic oligonucleotide
cugugacaccggaagcucc

SEQ ID NO: 1981200 - RNA, 19 nt, Artificial Sequence
  Description of Artificial Sequence: Synthetic oligonucleotide
ugagugacccugccaugga

SEQ ID NO: 1981201 - RNA, 19 nt, Artificial Sequence
  Description of Artificial Sequence: Synthetic oligonucleotide
uuucgcuuccuaccagcaa

SEQ ID NO: 1981202 - RNA, 19 nt, Artificial Sequence
  Description of Artificial Sequence: Synthetic oligonucleotide
uuuccccuucacgagacaa

SEQ ID NO: 1981203 - RNA, 19 nt, Artificial Sequence
  Description of Artificial Sequence: Synthetic oligonucleotide
agguaguuggaaguuuugu

SEQ ID NO: 1981204 - RNA, 19 nt, Artificial Sequence
  Description of Artificial Sequence: Synthetic oligonucleotide
uggcgaaggcuugaagugc

SEQ ID NO: 1981205 - RNA, 19 nt, Artificial Sequence
  Description of Artificial Sequence: Synthetic oligonucleotide
ugccagcuugcugucaaag

SEQ ID NO: 1981206 - RNA, 19 nt, Artificial Sequence
  Description of Artificial Sequence: Synthetic oligonucleotide
guucccuacuugcugguuc

SEQ ID NO: 1981207 - RNA, 19 nt, Artificial Sequence
  Description of Artificial Sequence: Synthetic oligonucleotide
cucucucucucugaaugag

SEQ ID NO: 1981208 - RNA, 19 nt, Artificial Sequence
  Description of Artificial Sequence: Synthetic oligonucleotide
auaggacugggugucguca

SEQ ID NO: 1981209 - RNA, 19 nt, Artificial Sequence
  Description of Artificial Sequence: Synthetic oligonucleotide
ugacuggguugacaccaug

SEQ ID NO: 1981210 - RNA, 19 nt, Artificial Sequence
  Description of Artificial Sequence: Synthetic oligonucleotide
caucccugggaugaucacc

SEQ ID NO: 1981211 - RNA, 19 nt, Artificial Sequence
  Description of Artificial Sequence: Synthetic oligonucleotide
aggcucuguggugaggacg

SEQ ID NO: 1981212 - RNA, 19 nt, Artificial Sequence
  Description of Artificial Sequence: Synthetic oligonucleotide
agauugucuccuuccucgu

SEQ ID NO: 1981213 - RNA, 19 nt, Artificial Sequence
  Description of Artificial Sequence: Synthetic oligonucleotide
ucguccucauugucggucu

SEQ ID NO: 1981214 - RNA, 19 nt, Artificial Sequence
  Description of Artificial Sequence: Synthetic oligonucleotide
uuucuuaucccgggucacu

SEQ ID NO: 1981215 - RNA, 19 nt, Artificial Sequence
  Description of Artificial Sequence: Synthetic oligonucleotide
gaaugcagggccaaaaguu

SEQ ID NO: 1981216 - RNA, 19 nt, Artificial Sequence
  Description of Artificial Sequence: Synthetic oligonucleotide
gacugggugucgucacucc

SEQ ID NO: 1981217 - RNA, 19 nt, Artificial Sequence
  Description of Artificial Sequence: Synthetic oligonucleotide
aaaacccaguacauugguu

SEQ ID NO: 1981218 - RNA, 19 nt, Artificial Sequence
  Description of Artificial Sequence: Synthetic oligonucleotide
agaugccugagugacccug

SEQ ID NO: 1981219 - RNA, 19 nt, Artificial Sequence
  Description of Artificial Sequence: Synthetic oligonucleotide
cauuuccaugaacuaucug

SEQ ID NO: 1981220 - RNA, 19 nt, Artificial Sequence
  Description of Artificial Sequence: Synthetic oligonucleotide
uucuuaucccgggucacuc

SEQ ID NO: 1981221 - RNA, 19 nt, Artificial Sequence
  Description of Artificial Sequence: Synthetic oligonucleotide
ucugucgggucuguggaaa

SEQ ID NO: 1981222 - RNA, 19 nt, Artificial Sequence
  Description of Artificial Sequence: Synthetic oligonucleotide
gacauaggacugggugucg

SEQ ID NO: 1981223 - RNA, 19 nt, Artificial Sequence
  Description of Artificial Sequence: Synthetic oligonucleotide
augcgaaguccucuaaauu

SEQ ID NO: 1981224 - RNA, 19 nt, Artificial Sequence
  Description of Artificial Sequence: Synthetic oligonucleotide
cucucguguucauuucgug

SEQ ID NO: 1981225 - RNA, 19 nt, Artificial Sequence
  Description of Artificial Sequence: Synthetic oligonucleotide
cagguaguuggaaguuuug

SEQ ID NO: 1981226 - RNA, 19 nt, Artificial Sequence
  Description of Artificial Sequence: Synthetic oligonucleotide
uuccccuucacgagacaaa

SEQ ID NO: 1981227 - RNA, 19 nt, Artificial Sequence
  Description of Artificial Sequence: Synthetic oligonucleotide
agucaagugugaacacauc

SEQ ID NO: 1981228 - RNA, 19 nt, Artificial Sequence
  Description of Artificial Sequence: Synthetic oligonucleotide
ggaccuuuaaaacccagua

SEQ ID NO: 1981229 - RNA, 19 nt, Artificial Sequence
  Description of Artificial Sequence: Synthetic oligonucleotide
acuacccaagaugccaugu

SEQ ID NO: 1981230 - RNA, 19 nt, Artificial Sequence
  Description of Artificial Sequence: Synthetic oligonucleotide
ggguaguuauagucaagug

SEQ ID NO: 1981231 - RNA, 19 nt, Artificial Sequence
  Description of Artificial Sequence: Synthetic oligonucleotide
cuccauggauuuguuuugc

SEQ ID NO: 1981232 - RNA, 19 nt, Artificial Sequence
  Description of Artificial Sequence: Synthetic oligonucleotide
acugaaugcagggccaaaa

SEQ ID NO: 1981233 - RNA, 19 nt, Artificial Sequence
  Description of Artificial Sequence: Synthetic oligonucleotide
ugucggucuccucaucaua

SEQ ID NO: 1981234 - RNA, 19 nt, Artificial Sequence
  Description of Artificial Sequence: Synthetic oligonucleotide
ugacaccggaagcuccugu

SEQ ID NO: 1981235 - RNA, 19 nt, Artificial Sequence
  Description of Artificial Sequence: Synthetic oligonucleotide
uaggacugggugucgucac

SEQ ID NO: 1981236 - RNA, 19 nt, Artificial Sequence
  Description of Artificial Sequence: Synthetic oligonucleotide
ugucgggucuguggaaacc

SEQ ID NO: 1981237 - RNA, 19 nt, Artificial Sequence
  Description of Artificial Sequence: Synthetic oligonucleotide
cauagcagauggcggccag

SEQ ID NO: 1981238 - RNA, 19 nt, Artificial Sequence
  Description of Artificial Sequence: Synthetic oligonucleotide
cuuucuuaucccgggucac

SEQ ID NO: 1981239 - RNA, 19 nt, Artificial Sequence
  Description of Artificial Sequence: Synthetic oligonucleotide
gaacacaucaucagccacu

SEQ ID NO: 1981240 - RNA, 19 nt, Artificial Sequence
  Description of Artificial Sequence: Synthetic oligonucleotide
cauucgcaugccagcuugc

SEQ ID NO: 1981241 - RNA, 19 nt, Artificial Sequence
  Description of Artificial Sequence: Synthetic oligonucleotide
ucgacacuucacugugaca

SEQ ID NO: 1981242 - RNA, 19 nt, Artificial Sequence
  Description of Artificial Sequence: Synthetic oligonucleotide
cacagaugccugagugacc

SEQ ID NO: 1981243 - RNA, 19 nt, Artificial Sequence
  Description of Artificial Sequence: Synthetic oligonucleotide
acagcccgauggcgaaggc

SEQ ID NO: 1981244 - RNA, 19 nt, Artificial Sequence
  Description of Artificial Sequence: Synthetic oligonucleotide
ucauagcagauggcggcca

SEQ ID NO: 1981245 - RNA, 19 nt, Artificial Sequence
  Description of Artificial Sequence: Synthetic oligonucleotide
gaagugcacacagugggua

SEQ ID NO: 1981246 - RNA, 19 nt, Artificial Sequence
  Description of Artificial Sequence: Synthetic oligonucleotide
uccccuucacgagacaaau

SEQ ID NO: 1981247 - RNA, 19 nt, Artificial Sequence
  Description of Artificial Sequence: Synthetic oligonucleotide
cugaaugagcugacgggga

SEQ ID NO: 1981248 - RNA, 19 nt, Artificial Sequence
  Description of Artificial Sequence: Synthetic oligonucleotide
uuaucccgggucacucgac

SEQ ID NO: 1981249 - RNA, 19 nt, Artificial Sequence
  Description of Artificial Sequence: Synthetic oligonucleotide
cuuaucccgggucacucga

SEQ ID NO: 1981250 - RNA, 19 nt, Artificial Sequence
  Description of Artificial Sequence: Synthetic oligonucleotide
guaugcgaaguccucuaaa

SEQ ID NO: 1981251 - RNA, 19 nt, Artificial Sequence
  Description of Artificial Sequence: Synthetic oligonucleotide
aggaccuuuaaaacccagu

SEQ ID NO: 1981252 - RNA, 19 nt, Artificial Sequence
  Description of Artificial Sequence: Synthetic oligonucleotide
ggugugggccuuuuccacc

SEQ ID NO: 1981253 - RNA, 19 nt, Artificial Sequence
  Description of Artificial Sequence: Synthetic oligonucleotide
ugccugagugacccugcca

SEQ ID NO: 1981254 - RNA, 19 nt, Artificial Sequence
  Description of Artificial Sequence: Synthetic oligonucleotide
gaggaaauaucuugcgauu

SEQ ID NO: 1981255 - RNA, 19 nt, Artificial Sequence
  Description of Artificial Sequence: Synthetic oligonucleotide
caugagauuggaucugagu

SEQ ID NO: 1981256 - RNA, 19 nt, Artificial Sequence
  Description of Artificial Sequence: Synthetic oligonucleotide
gaucugaguuugccgaugu

SEQ ID NO: 1981257 - RNA, 19 nt, Artificial Sequence
  Description of Artificial Sequence: Synthetic oligonucleotide
gaagaggccucgguccaug

SEQ ID NO: 1981258 - RNA, 19 nt, Artificial Sequence
  Description of Artificial Sequence: Synthetic oligonucleotide
uggcggccagcuccugucg

SEQ ID NO: 1981259 - RNA, 19 nt, Artificial Sequence
  Description of Artificial Sequence: Synthetic oligonucleotide
cugaaggcucuguggugag

SEQ ID NO: 1981260 - RNA, 19 nt, Artificial Sequence
  Description of Artificial Sequence: Synthetic oligonucleotide
caaacugcaugacuaugua

SEQ ID NO: 1981261 - RNA, 19 nt, Artificial Sequence
  Description of Artificial Sequence: Synthetic oligonucleotide
cugugacaccccgaggggc

SEQ ID NO: 1981262 - RNA, 19 nt, Artificial Sequence
  Description of Artificial Sequence: Synthetic oligonucleotide
ucaccuggcuggccuguga

SEQ ID NO: 1981263 - RNA, 19 nt, Artificial Sequence
  Description of Artificial Sequence: Synthetic oligonucleotide
gaucagguucuccauggau

SEQ ID NO: 1981264 - RNA, 19 nt, Artificial Sequence
  Description of Artificial Sequence: Synthetic oligonucleotide
cuggacagcccgauggcga

SEQ ID NO: 1981265 - RNA, 19 nt, Artificial Sequence
  Description of Artificial Sequence: Synthetic oligonucleotide
gggaugaucaccgacauuu

SEQ ID NO: 1981266 - RNA, 19 nt, Artificial Sequence
  Description of Artificial Sequence: Synthetic oligonucleotide
ggacguucccuacuugcug

SEQ ID NO: 1981267 - RNA, 19 nt, Artificial Sequence
  Description of Artificial Sequence: Synthetic oligonucleotide
cagggucauuuccaugaac

SEQ ID NO: 1981268 - RNA, 19 nt, Artificial Sequence
  Description of Artificial Sequence: Synthetic oligonucleotide
ggcaggacuguaugcgaag

SEQ ID NO: 1981269 - RNA, 19 nt, Artificial Sequence
  Description of Artificial Sequence: Synthetic oligonucleotide
cuaggaccuuuaaaaccca

SEQ ID NO: 1981270 - RNA, 19 nt, Artificial Sequence
  Description of Artificial Sequence: Synthetic oligonucleotide
caggacuguaugcgaaguc

SEQ ID NO: 1981271 - RNA, 19 nt, Artificial Sequence
  Description of Artificial Sequence: Synthetic oligonucleotide
gcagaacucucucucucug

SEQ ID NO: 1981272 - RNA, 19 nt, Artificial Sequence
  Description of Artificial Sequence: Synthetic oligonucleotide
gccgauguaacuuuccccu

SEQ ID NO: 1981273 - RNA, 19 nt, Artificial Sequence
  Description of Artificial Sequence: Synthetic oligonucleotide
uaccagcaagaggaaauau

SEQ ID NO: 1981274 - RNA, 19 nt, Artificial Sequence
  Description of Artificial Sequence: Synthetic oligonucleotide
ggaaauaucuugcgauucu

SEQ ID NO: 1981275 - RNA, 19 nt, Artificial Sequence
  Description of Artificial Sequence: Synthetic oligonucleotide
uguucauuucguggccgaa

SEQ ID NO: 1981276 - RNA, 19 nt, Artificial Sequence
  Description of Artificial Sequence: Synthetic oligonucleotide
acggggagcugagauuguc

SEQ ID NO: 1981277 - RNA, 19 nt, Artificial Sequence
  Description of Artificial Sequence: Synthetic oligonucleotide
guguucauuucguggccga

SEQ ID NO: 1981278 - RNA, 19 nt, Artificial Sequence
  Description of Artificial Sequence: Synthetic oligonucleotide
cugggccuugacuggguug

SEQ ID NO: 1981279 - RNA, 19 nt, Artificial Sequence
  Description of Artificial Sequence: Synthetic oligonucleotide
gugugggccuuuuccacca

SEQ ID NO: 1981280 - RNA, 19 nt, Artificial Sequence
  Description of Artificial Sequence: Synthetic oligonucleotide
guggguaguuauagucaag

SEQ ID NO: 1981281 - RNA, 19 nt, Artificial Sequence
  Description of Artificial Sequence: Synthetic oligonucleotide
acauaggacugggugucgu

SEQ ID NO: 1981282 - RNA, 19 nt, Artificial Sequence
  Description of Artificial Sequence: Synthetic oligonucleotide
uccuaccagcaagaggaaa

SEQ ID NO: 1981283 - RNA, 19 nt, Artificial Sequence
  Description of Artificial Sequence: Synthetic oligonucleotide
auucgcaugccagcuugcu

SEQ ID NO: 1981284 - RNA, 19 nt, Artificial Sequence
  Description of Artificial Sequence: Synthetic oligonucleotide
aggacguucccuacuugcu

SEQ ID NO: 1981285 - RNA, 19 nt, Artificial Sequence
  Description of Artificial Sequence: Synthetic oligonucleotide
cacuacccaagaugccaug

SEQ ID NO: 1981286 - RNA, 19 nt, Artificial Sequence
  Description of Artificial Sequence: Synthetic oligonucleotide
gaguuugccgauguaacuu

SEQ ID NO: 1981287 - RNA, 19 nt, Artificial Sequence
  Description of Artificial Sequence: Synthetic oligonucleotide
ucgguccaugccuuucuua

SEQ ID NO: 1981288 - RNA, 19 nt, Artificial Sequence
  Description of Artificial Sequence: Synthetic oligonucleotide
ggacauaggacuggguguc

SEQ ID NO: 1981289 - RNA, 19 nt, Artificial Sequence
  Description of Artificial Sequence: Synthetic oligonucleotide
cugucgggucuguggaaac

SEQ ID NO: 1981290 - RNA, 19 nt, Artificial Sequence
  Description of Artificial Sequence: Synthetic oligonucleotide
cagaacucucucucucuga

SEQ ID NO: 1981291 - RNA, 19 nt, Artificial Sequence
  Description of Artificial Sequence: Synthetic oligonucleotide
acccaguacauugguuuca

SEQ ID NO: 1981292 - RNA, 19 nt, Artificial Sequence
  Description of Artificial Sequence: Synthetic oligonucleotide
ccuucacgagacaaaucug

SEQ ID NO: 1981293 - RNA, 19 nt, Artificial Sequence
  Description of Artificial Sequence: Synthetic oligonucleotide
ugcguucaugauucauauu

SEQ ID NO: 1981294 - RNA, 19 nt, Artificial Sequence
  Description of Artificial Sequence: Synthetic oligonucleotide
guggccgaaaugggaugcg

SEQ ID NO: 1981295 - RNA, 19 nt, Artificial Sequence
  Description of Artificial Sequence: Synthetic oligonucleotide
gccauggaaguugaggaca

SEQ ID NO: 1981296 - RNA, 19 nt, Artificial Sequence
  Description of Artificial Sequence: Synthetic oligonucleotide
uucuggcuagcugcagaac

SEQ ID NO: 1981297 - RNA, 19 nt, Artificial Sequence
  Description of Artificial Sequence: Synthetic oligonucleotide
cucuguggugaggacguuc

SEQ ID NO: 1981298 - RNA, 19 nt, Artificial Sequence
  Description of Artificial Sequence: Synthetic oligonucleotide
ugggcaucaccuggcuggc

SEQ ID NO: 1981299 - RNA, 19 nt, Artificial Sequence
  Description of Artificial Sequence: Synthetic oligonucleotide
agcccgauggcgaaggcuu

SEQ ID NO: 1981300 - RNA, 19 nt, Artificial Sequence
  Description of Artificial Sequence: Synthetic oligonucleotide
acguucccuacuugcuggu

SEQ ID NO: 1981301 - RNA, 19 nt, Artificial Sequence
  Description of Artificial Sequence: Synthetic oligonucleotide
gucgggucuguggaaacca

SEQ ID NO: 1981302 - RNA, 19 nt, Artificial Sequence
  Description of Artificial Sequence: Synthetic oligonucleotide
aaggucagggcagccgcuu

SEQ ID NO: 1981303 - RNA, 19 nt, Artificial Sequence
  Description of Artificial Sequence: Synthetic oligonucleotide
agcuccugucggguguggg

SEQ ID NO: 1981304 - RNA, 19 nt, Artificial Sequence
  Description of Artificial Sequence: Synthetic oligonucleotide
cacacaguggguaguuaua

SEQ ID NO: 1981305 - RNA, 19 nt, Artificial Sequence
  Description of Artificial Sequence: Synthetic oligonucleotide
caugaacuaucugaaaauu

SEQ ID NO: 1981306 - RNA, 19 nt, Artificial Sequence
  Description of Artificial Sequence: Synthetic oligonucleotide
cccuucacgagacaaaucu

SEQ ID NO: 1981307 - RNA, 19 nt, Artificial Sequence
  Description of Artificial Sequence: Synthetic oligonucleotide
cuucacugugacaccccga

SEQ ID NO: 1981308 - RNA, 19 nt, Artificial Sequence
  Description of Artificial Sequence: Synthetic oligonucleotide
gguucucauucgcaugcca

SEQ ID NO: 1981309 - RNA, 19 nt, Artificial Sequence
  Description of Artificial Sequence: Synthetic oligonucleotide
ugggaugaucaccgacauu

SEQ ID NO: 1981310 - RNA, 19 nt, Artificial Sequence
  Description of Artificial Sequence: Synthetic oligonucleotide
caguucgaucagguucucc

SEQ ID NO: 1981311 - RNA, 19 nt, Artificial Sequence
  Description of Artificial Sequence: Synthetic oligonucleotide
agccgcuuucugcuccuga

SEQ ID NO: 1981312 - RNA, 19 nt, Artificial Sequence
  Description of Artificial Sequence: Synthetic oligonucleotide
cauugguuucauagcagau

SEQ ID NO: 1981313 - RNA, 19 nt, Artificial Sequence
  Description of Artificial Sequence: Synthetic oligonucleotide
cacugugaacuuggucccc

SEQ ID NO: 1981314 - RNA, 19 nt, Artificial Sequence
  Description of Artificial Sequence: Synthetic oligonucleotide
gcuggacagcccgauggcg

SEQ ID NO: 1981315 - RNA, 19 nt, Artificial Sequence
  Description of Artificial Sequence: Synthetic oligonucleotide
cucguccaaacugcaugac

SEQ ID NO: 1981316 - RNA, 19 nt, Artificial Sequence
  Description of Artificial Sequence: Synthetic oligonucleotide
uccugucgggugugggccu

SEQ ID NO: 1981317 - RNA, 19 nt, Artificial Sequence
  Description of Artificial Sequence: Synthetic oligonucleotide
ggaucugaguuugccgaug

SEQ ID NO: 1981318 - RNA, 19 nt, Artificial Sequence
  Description of Artificial Sequence: Synthetic oligonucleotide
cauugucggucuccucauc

SEQ ID NO: 1981319 - RNA, 19 nt, Artificial Sequence
  Description of Artificial Sequence: Synthetic oligonucleotide
aucugucgggucuguggaa

SEQ ID NO: 1981320 - RNA, 19 nt, Artificial Sequence
  Description of Artificial Sequence: Synthetic oligonucleotide
cagggccaaaaguuuugga

SEQ ID NO: 1981321 - RNA, 19 nt, Artificial Sequence
  Description of Artificial Sequence: Synthetic oligonucleotide
gggccuuuuccaccagacc

SEQ ID NO: 1981322 - RNA, 19 nt, Artificial Sequence
  Description of Artificial Sequence: Synthetic oligonucleotide
ccuuucuuaucccggguca

SEQ ID NO: 1981323 - RNA, 19 nt, Artificial Sequence
  Description of Artificial Sequence: Synthetic oligonucleotide
gggugugggccuuuuccac

SEQ ID NO: 1981324 - RNA, 19 nt, Artificial Sequence
  Description of Artificial Sequence: Synthetic oligonucleotide
accccgaggggcaggacug

SEQ ID NO: 1981325 - RNA, 19 nt, Artificial Sequence
  Description of Artificial Sequence: Synthetic oligonucleotide
accagguaguuggaaguuu

SEQ ID NO: 1981326 - RNA, 19 nt, Artificial Sequence
  Description of Artificial Sequence: Synthetic oligonucleotide
cugagauugucuccuuccu

SEQ ID NO: 1981327 - RNA, 19 nt, Artificial Sequence
  Description of Artificial Sequence: Synthetic oligonucleotide
gccaaaaguuuuggaauuc

SEQ ID NO: 1981328 - RNA, 19 nt, Artificial Sequence
  Description of Artificial Sequence: Synthetic oligonucleotide
aucugaguuugccgaugua

SEQ ID NO: 1981329 - RNA, 19 nt, Artificial Sequence
  Description of Artificial Sequence: Synthetic oligonucleotide
ggagcugagauugucuccu

SEQ ID NO: 1981330 - RNA, 19 nt, Artificial Sequence
  Description of Artificial Sequence: Synthetic oligonucleotide
agcuccugucuccgaggcu

SEQ ID NO: 1981331 - RNA, 19 nt, Artificial Sequence
  Description of Artificial Sequence: Synthetic oligonucleotide
ccucuaaauucuccacuuc

SEQ ID NO: 1981332 - RNA, 19 nt, Artificial Sequence
  Description of Artificial Sequence: Synthetic oligonucleotide
ggucauuuccaugaacuau

SEQ ID NO: 1981333 - RNA, 19 nt, Artificial Sequence
  Description of Artificial Sequence: Synthetic oligonucleotide
gggucauuuccaugaacua

SEQ ID NO: 1981334 - RNA, 19 nt, Artificial Sequence
  Description of Artificial Sequence: Synthetic oligonucleotide
gaacucucucucucugaau

SEQ ID NO: 1981335 - RNA, 19 nt, Artificial Sequence
  Description of Artificial Sequence: Synthetic oligonucleotide
cguccaaacugcaugacua

SEQ ID NO: 1981336 - RNA, 19 nt, Artificial Sequence
  Description of Artificial Sequence: Synthetic oligonucleotide
gcaugacuauguagucagg

SEQ ID NO: 1981337 - RNA, 19 nt, Artificial Sequence
  Description of Artificial Sequence: Synthetic oligonucleotide
ugacccugccauggaaguu

SEQ ID NO: 1981338 - RNA, 19 nt, Artificial Sequence
  Description of Artificial Sequence: Synthetic oligonucleotide
ggccaaaaguuuuggaauu

SEQ ID NO: 1981339 - RNA, 19 nt, Artificial Sequence
  Description of Artificial Sequence: Synthetic oligonucleotide
cguguucauuucguggccg

SEQ ID NO: 1981340 - RNA, 19 nt, Artificial Sequence
  Description of Artificial Sequence: Synthetic oligonucleotide
ccuaccagcaagaggaaau

SEQ ID NO: 1981341 - RNA, 19 nt, Artificial Sequence
  Description of Artificial Sequence: Synthetic oligonucleotide
ccugaaggcucugugguga

SEQ ID NO: 1981342 - RNA, 19 nt, Artificial Sequence
  Description of Artificial Sequence: Synthetic oligonucleotide
acucgacacuucacuguga

SEQ ID NO: 1981343 - RNA, 19 nt, Artificial Sequence
  Description of Artificial Sequence: Synthetic oligonucleotide
gugaggacguucccuacuu

SEQ ID NO: 1981344 - RNA, 19 nt, Artificial Sequence
  Description of Artificial Sequence: Synthetic oligonucleotide
gugacaccccgaggggcag

SEQ ID NO: 1981345 - RNA, 19 nt, Artificial Sequence
  Description of Artificial Sequence: Synthetic oligonucleotide
gcgaaguccucuaaauucu

SEQ ID NO: 1981346 - RNA, 19 nt, Artificial Sequence
  Description of Artificial Sequence: Synthetic oligonucleotide
gugacaccggaagcuccug

SEQ ID NO: 1981347 - RNA, 19 nt, Artificial Sequence
  Description of Artificial Sequence: Synthetic oligonucleotide
ggucagggcagccgcuuuc

SEQ ID NO: 1981348 - RNA, 19 nt, Artificial Sequence
  Description of Artificial Sequence: Synthetic oligonucleotide
ccuuuaaaacccaguacau

SEQ ID NO: 1981349 - RNA, 19 nt, Artificial Sequence
  Description of Artificial Sequence: Synthetic oligonucleotide
aucaccuggcuggccugug

SEQ ID NO: 1981350 - RNA, 19 nt, Artificial Sequence
  Description of Artificial Sequence: Synthetic oligonucleotide
aggucagggcagccgcuuu

SEQ ID NO: 1981351 - RNA, 19 nt, Artificial Sequence
  Description of Artificial Sequence: Synthetic oligonucleotide
gguggggaagaggccucgg

SEQ ID NO: 1981352 - RNA, 19 nt, Artificial Sequence
  Description of Artificial Sequence: Synthetic oligonucleotide
ccugagugacccugccaug

SEQ ID NO: 1981353 - RNA, 19 nt, Artificial Sequence
  Description of Artificial Sequence: Synthetic oligonucleotide
gcugacggggagcugagau

SEQ ID NO: 1981354 - RNA, 19 nt, Artificial Sequence
  Description of Artificial Sequence: Synthetic oligonucleotide
ggucauacacugugaacuu

SEQ ID NO: 1981355 - RNA, 19 nt, Artificial Sequence
  Description of Artificial Sequence: Synthetic oligonucleotide
ccugugacaccggaagcuc

SEQ ID NO: 1981356 - RNA, 19 nt, Artificial Sequence
  Description of Artificial Sequence: Synthetic oligonucleotide
cguggccgaaaugggaugc

SEQ ID NO: 1981357 - RNA, 19 nt, Artificial Sequence
  Description of Artificial Sequence: Synthetic oligonucleotide
cagcaagaggaaauaucuu

SEQ ID NO: 1981358 - RNA, 19 nt, Artificial Sequence
  Description of Artificial Sequence: Synthetic oligonucleotide
ucccuacuugcugguucuc

SEQ ID NO: 1981359 - RNA, 19 nt, Artificial Sequence
  Description of Artificial Sequence: Synthetic oligonucleotide
gucgggugugggccuuuuc

SEQ ID NO: 1981360 - RNA, 19 nt, Artificial Sequence
  Description of Artificial Sequence: Synthetic oligonucleotide
ccgaaaugggaugcguuca

SEQ ID NO: 1981361 - RNA, 19 nt, Artificial Sequence
  Description of Artificial Sequence: Synthetic oligonucleotide
cuacccaagaugccauguu

SEQ ID NO: 1981362 - RNA, 19 nt, Artificial Sequence
  Description of Artificial Sequence: Synthetic oligonucleotide
gcuggccugugacaccgga

SEQ ID NO: 1981363 - RNA, 19 nt, Artificial Sequence
  Description of Artificial Sequence: Synthetic oligonucleotide
gcuagcugcagaacucucu

SEQ ID NO: 1981364 - RNA, 19 nt, Artificial Sequence
  Description of Artificial Sequence: Synthetic oligonucleotide
gggucacucgacacuucac

SEQ ID NO: 1981365 - RNA, 19 nt, Artificial Sequence
  Description of Artificial Sequence: Synthetic oligonucleotide
acaccccgaggggcaggac

SEQ ID NO: 1981366 - RNA, 19 nt, Artificial Sequence
  Description of Artificial Sequence: Synthetic oligonucleotide
ccaaaaguuuuggaauucu

SEQ ID NO: 1981367 - RNA, 19 nt, Artificial Sequence
  Description of Artificial Sequence: Synthetic oligonucleotide
cagcuccugucgggugugg

SEQ ID NO: 1981368 - RNA, 19 nt, Artificial Sequence
  Description of Artificial Sequence: Synthetic oligonucleotide
cgauggcgaaggcuugaag

SEQ ID NO: 1981369 - RNA, 19 nt, Artificial Sequence
  Description of Artificial Sequence: Synthetic oligonucleotide
ccccuucacgagacaaauc

SEQ ID NO: 1981370 - RNA, 19 nt, Artificial Sequence
  Description of Artificial Sequence: Synthetic oligonucleotide
cugacggggagcugagauu

SEQ ID NO: 1981371 - RNA, 19 nt, Artificial Sequence
  Description of Artificial Sequence: Synthetic oligonucleotide
ccccaugagauuggaucug

SEQ ID NO: 1981372 - RNA, 19 nt, Artificial Sequence
  Description of Artificial Sequence: Synthetic oligonucleotide
ugucgggugugggccuuuu

SEQ ID NO: 1981373 - RNA, 19 nt, Artificial Sequence
  Description of Artificial Sequence: Synthetic oligonucleotide
ggacagcccgauggcgaag

SEQ ID NO: 1981374 - RNA, 19 nt, Artificial Sequence
  Description of Artificial Sequence: Synthetic oligonucleotide
ggcuagcugcagaacucuc

SEQ ID NO: 1981375 - RNA, 19 nt, Artificial Sequence
  Description of Artificial Sequence: Synthetic oligonucleotide
ggguugacaccauggucau

SEQ ID NO: 1981376 - RNA, 19 nt, Artificial Sequence
  Description of Artificial Sequence: Synthetic oligonucleotide
cacugaaugcagggccaaa

SEQ ID NO: 1981377 - RNA, 19 nt, Artificial Sequence
  Description of Artificial Sequence: Synthetic oligonucleotide
gggaugcguucaugauuca

SEQ ID NO: 1981378 - RNA, 19 nt, Artificial Sequence
  Description of Artificial Sequence: Synthetic oligonucleotide
cauggaaguugaggacaua

SEQ ID NO: 1981379 - RNA, 19 nt, Artificial Sequence
  Description of Artificial Sequence: Synthetic oligonucleotide
ccagguaguuggaaguuuu

SEQ ID NO: 1981380 - RNA, 19 nt, Artificial Sequence
  Description of Artificial Sequence: Synthetic oligonucleotide
cucauucgcaugccagcuu

SEQ ID NO: 1981381 - RNA, 19 nt, Artificial Sequence
  Description of Artificial Sequence: Synthetic oligonucleotide
aggccucgguccaugccuu

SEQ ID NO: 1981382 - RNA, 19 nt, Artificial Sequence
  Description of Artificial Sequence: Synthetic oligonucleotide
caucagccacucguccaaa

SEQ ID NO: 1981383 - RNA, 19 nt, Artificial Sequence
  Description of Artificial Sequence: Synthetic oligonucleotide
gcucucguguucauuucgu

SEQ ID NO: 1981384 - RNA, 19 nt, Artificial Sequence
  Description of Artificial Sequence: Synthetic oligonucleotide
cugugaacuugguccccau

SEQ ID NO: 1981385 - RNA, 19 nt, Artificial Sequence
  Description of Artificial Sequence: Synthetic oligonucleotide
cgggugugggccuuuucca

SEQ ID NO: 1981386 - RNA, 19 nt, Artificial Sequence
  Description of Artificial Sequence: Synthetic oligonucleotide
cccuacuugcugguucuca

SEQ ID NO: 1981387 - RNA, 19 nt, Artificial Sequence
  Description of Artificial Sequence: Synthetic oligonucleotide
cuguggaaaccagguaguu

SEQ ID NO: 1981388 - RNA, 19 nt, Artificial Sequence
  Description of Artificial Sequence: Synthetic oligonucleotide
gacggggagcugagauugu

SEQ ID NO: 1981389 - RNA, 19 nt, Artificial Sequence
  Description of Artificial Sequence: Synthetic oligonucleotide
gccucgguccaugccuuuc

SEQ ID NO: 1981390 - RNA, 19 nt, Artificial Sequence
  Description of Artificial Sequence: Synthetic oligonucleotide
cgagacaaaucugucgggu

SEQ ID NO: 1981391 - RNA, 19 nt, Artificial Sequence
  Description of Artificial Sequence: Synthetic oligonucleotide
gcccgauggcgaaggcuug

SEQ ID NO: 1981392 - RNA, 19 nt, Artificial Sequence
  Description of Artificial Sequence: Synthetic oligonucleotide
cccugccauggaaguugag

SEQ ID NO: 1981393 - RNA, 19 nt, Artificial Sequence
  Description of Artificial Sequence: Synthetic oligonucleotide
gcaugccagcuugcuguca

SEQ ID NO: 1981394 - RNA, 19 nt, Artificial Sequence
  Description of Artificial Sequence: Synthetic oligonucleotide
cagaugccugagugacccu

SEQ ID NO: 1981395 - RNA, 19 nt, Artificial Sequence
  Description of Artificial Sequence: Synthetic oligonucleotide
ccaguacauugguuucaua

SEQ ID NO: 1981396 - RNA, 19 nt, Artificial Sequence
  Description of Artificial Sequence: Synthetic oligonucleotide
cgaucagguucuccaugga

SEQ ID NO: 1981397 - RNA, 19 nt, Artificial Sequence
  Description of Artificial Sequence: Synthetic oligonucleotide
ccgggucacucgacacuuc

SEQ ID NO: 1981398 - RNA, 19 nt, Artificial Sequence
  Description of Artificial Sequence: Synthetic oligonucleotide
gcaguucgaucagguucuc

SEQ ID NO: 1981399 - RNA, 19 nt, Artificial Sequence
  Description of Artificial Sequence: Synthetic oligonucleotide
ccucgguccaugccuuucu

SEQ ID NO: 1981400 - RNA, 19 nt, Artificial Sequence
  Description of Artificial Sequence: Synthetic oligonucleotide
gguugacaccauggucaua

SEQ ID NO: 1981401 - RNA, 19 nt, Artificial Sequence
  Description of Artificial Sequence: Synthetic oligonucleotide
cccaguacauugguuucau

SEQ ID NO: 1981402 - RNA, 19 nt, Artificial Sequence
  Description of Artificial Sequence: Synthetic oligonucleotide
ccacucguccaaacugcau

SEQ ID NO: 1981403 - RNA, 19 nt, Artificial Sequence
  Description of Artificial Sequence: Synthetic oligonucleotide
gguccccaugagauuggau

SEQ ID NO: 1981404 - RNA, 19 nt, Artificial Sequence
  Description of Artificial Sequence: Synthetic oligonucleotide
ccgauguaacuuuccccuu

SEQ ID NO: 1981405 - RNA, 19 nt, Artificial Sequence
  Description of Artificial Sequence: Synthetic oligonucleotide
ccgauggcgaaggcuugaa

SEQ ID NO: 1981406 - RNA, 19 nt, Artificial Sequence
  Description of Artificial Sequence: Synthetic oligonucleotide
cccgggucacucgacacuu

SEQ ID NO: 1981407 - RNA, 19 nt, Artificial Sequence
  Description of Artificial Sequence: Synthetic oligonucleotide
cugucgggugugggccuuu

SEQ ID NO: 1981408 - RNA, 19 nt, Artificial Sequence
  Description of Artificial Sequence: Synthetic oligonucleotide
ccugucgggugugggccuu

SEQ ID NO: 1981409 - RNA, 19 nt, Artificial Sequence
  Description of Artificial Sequence: Synthetic oligonucleotide
cguucccuacuugcugguu

SEQ ID NO: 1981410 - RNA, 19 nt, Artificial Sequence
  Description of Artificial Sequence: Synthetic oligonucleotide
uuacagaucagcuaaugag

SEQ ID NO: 1981411 - RNA, 19 nt, Artificial Sequence
  Description of Artificial Sequence: Synthetic oligonucleotide
aaguguacacguaaaaggc

SEQ ID NO: 1981412 - RNA, 19 nt, Artificial Sequence
  Description of Artificial Sequence: Synthetic oligonucleotide
uacagaucagcuaaugagg

SEQ ID NO: 1981413 - RNA, 19 nt, Artificial Sequence
  Description of Artificial Sequence: Synthetic oligonucleotide
aauaauguuccuaagggug

SEQ ID NO: 1981414 - RNA, 19 nt, Artificial Sequence
  Description of Artificial Sequence: Synthetic oligonucleotide
uaauguugaaguucggacg

SEQ ID NO: 1981415 - RNA, 19 nt, Artificial Sequence
  Description of Artificial Sequence: Synthetic oligonucleotide
aauuucagaggguuuguuc

SEQ ID NO: 1981416 - RNA, 19 nt, Artificial Sequence
  Description of Artificial Sequence: Synthetic oligonucleotide
caaguguacacguaaaagg

SEQ ID NO: 1981417 - RNA, 19 nt, Artificial Sequence
  Description of Artificial Sequence: Synthetic oligonucleotide
uagcugaaauuucagaggg

SEQ ID NO: 1981418 - RNA, 19 nt, Artificial Sequence
  Description of Artificial Sequence: Synthetic oligonucleotide
aauguugaaguucggacgu

SEQ ID NO: 1981419 - RNA, 19 nt, Artificial Sequence
  Description of Artificial Sequence: Synthetic oligonucleotide
ucgaggauuauacaguuca

SEQ ID NO: 1981420 - RNA, 19 nt, Artificial Sequence
  Description of Artificial Sequence: Synthetic oligonucleotide
acuuucaagagucaguucu

SEQ ID NO: 1981421 - RNA, 19 nt, Artificial Sequence
  Description of Artificial Sequence: Synthetic oligonucleotide
aggauuauacaguucaaag

SEQ ID NO: 1981422 - RNA, 19 nt, Artificial Sequence
  Description of Artificial Sequence: Synthetic oligonucleotide
uuaauguugaaguucggac

SEQ ID NO: 1981423 - RNA, 19 nt, Artificial Sequence
  Description of Artificial Sequence: Synthetic oligonucleotide
uuuguuuaccugcugagcu

SEQ ID NO: 1981424 - RNA, 19 nt, Artificial Sequence
  Description of Artificial Sequence: Synthetic oligonucleotide
aagaucaagacuucuuuga

SEQ ID NO: 1981425 - RNA, 19 nt, Artificial Sequence
  Description of Artificial Sequence: Synthetic oligonucleotide
cauuuuaacuuucagcuug

SEQ ID NO: 1981426 - RNA, 19 nt, Artificial Sequence
  Description of Artificial Sequence: Synthetic oligonucleotide
ugagcugucucacaagucc

SEQ ID NO: 1981427 - RNA, 19 nt, Artificial Sequence
  Description of Artificial Sequence: Synthetic oligonucleotide
aacauagaacucuggaaug

SEQ ID NO: 1981428 - RNA, 19 nt, Artificial Sequence
  Description of Artificial Sequence: Synthetic oligonucleotide
gaaccuuguacuuucgucc

SEQ ID NO: 1981429 - RNA, 19 nt, Artificial Sequence
  Description of Artificial Sequence: Synthetic oligonucleotide
uuuuccacuggcauaccgg

SEQ ID NO: 1981430 - RNA, 19 nt, Artificial Sequence
  Description of Artificial Sequence: Synthetic oligonucleotide
uaagggugaaaguagcucc

SEQ ID NO: 1981431 - RNA, 19 nt, Artificial Sequence
  Description of Artificial Sequence: Synthetic oligonucleotide
ugaaaguagcuccaagccc

SEQ ID NO: 1981432 - RNA, 19 nt, Artificial Sequence
  Description of Artificial Sequence: Synthetic oligonucleotide
augucaacgucaaaggugc

SEQ ID NO: 1981433 - RNA, 19 nt, Artificial Sequence
  Description of Artificial Sequence: Synthetic oligonucleotide
aaacucaagccauggcugg

SEQ ID NO: 1981434 - RNA, 19 nt, Artificial Sequence
  Description of Artificial Sequence: Synthetic oligonucleotide
uuucagcuuguuaacaggc

SEQ ID NO: 1981435 - RNA, 19 nt, Artificial Sequence
  Description of Artificial Sequence: Synthetic oligonucleotide
ugaaauuucagaggguuug

SEQ ID NO: 1981436 - RNA, 19 nt, Artificial Sequence
  Description of Artificial Sequence: Synthetic oligonucleotide
aaccuuguacuuucguccg

SEQ ID NO: 1981437 - RNA, 19 nt, Artificial Sequence
  Description of Artificial Sequence: Synthetic oligonucleotide
ucaaaggugcugaacucgg

SEQ ID NO: 1981438 - RNA, 19 nt, Artificial Sequence
  Description of Artificial Sequence: Synthetic oligonucleotide
ucguaaauacagcaggcug

SEQ ID NO: 1981439 - RNA, 19 nt, Artificial Sequence
  Description of Artificial Sequence: Synthetic oligonucleotide
gaauucgggacucaggaac

SEQ ID NO: 1981440 - RNA, 19 nt, Artificial Sequence
  Description of Artificial Sequence: Synthetic oligonucleotide
cauaucuuuucuuucuagc

SEQ ID NO: 1981441 - RNA, 19 nt, Artificial Sequence
  Description of Artificial Sequence: Synthetic oligonucleotide
agaggguuuguucuucccc

SEQ ID NO: 1981442 - RNA, 19 nt, Artificial Sequence
  Description of Artificial Sequence: Synthetic oligonucleotide
uuaacaggcacuuccuggc

SEQ ID NO: 1981443 - RNA, 19 nt, Artificial Sequence
  Description of Artificial Sequence: Synthetic oligonucleotide
acacguaaaaggcaaagga

SEQ ID NO: 1981444 - RNA, 19 nt, Artificial Sequence
  Description of Artificial Sequence: Synthetic oligonucleotide
uccaacauagaacucugga

SEQ ID NO: 1981445 - RNA, 19 nt, Artificial Sequence
  Description of Artificial Sequence: Synthetic oligonucleotide
uuugaagugucauauucuc

SEQ ID NO: 1981446 - RNA, 19 nt, Artificial Sequence
  Description of Artificial Sequence: Synthetic oligonucleotide
caugucaacgucaaaggug

SEQ ID NO: 1981447 - RNA, 19 nt, Artificial Sequence
  Description of Artificial Sequence: Synthetic oligonucleotide
aauucgggacucaggaacc

SEQ ID NO: 1981448 - RNA, 19 nt, Artificial Sequence
  Description of Artificial Sequence: Synthetic oligonucleotide
augaauucgggacucagga

SEQ ID NO: 1981449 - RNA, 19 nt, Artificial Sequence
  Description of Artificial Sequence: Synthetic oligonucleotide
uuucauuugcucuucaguu

SEQ ID NO: 1981450 - RNA, 19 nt, Artificial Sequence
  Description of Artificial Sequence: Synthetic oligonucleotide
ugugggaccggcuucaugu

SEQ ID NO: 1981451 - RNA, 19 nt, Artificial Sequence
  Description of Artificial Sequence: Synthetic oligonucleotide
uuccuaagggugaaaguag

SEQ ID NO: 1981452 - RNA, 19 nt, Artificial Sequence
  Description of Artificial Sequence: Synthetic oligonucleotide
uuuaauguugaaguucgga

SEQ ID NO: 1981453 - RNA, 19 nt, Artificial Sequence
  Description of Artificial Sequence: Synthetic oligonucleotide
caguaugcuuccaacauag

SEQ ID NO: 1981454 - RNA, 19 nt, Artificial Sequence
  Description of Artificial Sequence: Synthetic oligonucleotide
gugaaaguagcuccaagcc

SEQ ID NO: 1981455 - RNA, 19 nt, Artificial Sequence
  Description of Artificial Sequence: Synthetic oligonucleotide
ugucucacaagucccaaga

SEQ ID NO: 1981456 - RNA, 19 nt, Artificial Sequence
  Description of Artificial Sequence: Synthetic oligonucleotide
uggcauaccggucagcuga

SEQ ID NO: 1981457 - RNA, 19 nt, Artificial Sequence
  Description of Artificial Sequence: Synthetic oligonucleotide
uuucuagcugaaauuucag

SEQ ID NO: 1981458 - RNA, 19 nt, Artificial Sequence
  Description of Artificial Sequence: Synthetic oligonucleotide
aaugaauucgggacucagg

SEQ ID NO: 1981459 - RNA, 19 nt, Artificial Sequence
  Description of Artificial Sequence: Synthetic oligonucleotide
ggauuauacaguucaaagc

SEQ ID NO: 1981460 - RNA, 19 nt, Artificial Sequence
  Description of Artificial Sequence: Synthetic oligonucleotide
uguacuuucguccgcggcu

SEQ ID NO: 1981461 - RNA, 19 nt, Artificial Sequence
  Description of Artificial Sequence: Synthetic oligonucleotide
ucuuugaugcuucuauuuc

SEQ ID NO: 1981462 - RNA, 19 nt, Artificial Sequence
  Description of Artificial Sequence: Synthetic oligonucleotide
aaagcaagaucaaaucuga

SEQ ID NO: 1981463 - RNA, 19 nt, Artificial Sequence
  Description of Artificial Sequence: Synthetic oligonucleotide
cuuucagcuuguuaacagg

SEQ ID NO: 1981464 - RNA, 19 nt, Artificial Sequence
  Description of Artificial Sequence: Synthetic oligonucleotide
uuugguuugucaaguguac

SEQ ID NO: 1981465 - RNA, 19 nt, Artificial Sequence
  Description of Artificial Sequence: Synthetic oligonucleotide
aguucggacguucccagcg

SEQ ID NO: 1981466 - RNA, 19 nt, Artificial Sequence
  Description of Artificial Sequence: Synthetic oligonucleotide
uucagggacacccuacagc

SEQ ID NO: 1981467 - RNA, 19 nt, Artificial Sequence
  Description of Artificial Sequence: Synthetic oligonucleotide
agugucauauucucucauc

SEQ ID NO: 1981468 - RNA, 19 nt, Artificial Sequence
  Description of Artificial Sequence: Synthetic oligonucleotide
uucggagguggcuugaacc

SEQ ID NO: 1981469 - RNA, 19 nt, Artificial Sequence
  Description of Artificial Sequence: Synthetic oligonucleotide
cacguaaaaggcaaaggac

SEQ ID NO: 1981470 - RNA, 19 nt, Artificial Sequence
  Description of Artificial Sequence: Synthetic oligonucleotide
ggauucgaggauuauacag

SEQ ID NO: 1981471 - RNA, 19 nt, Artificial Sequence
  Description of Artificial Sequence: Synthetic oligonucleotide
aacuuucaagagucaguuc

SEQ ID NO: 1981472 - RNA, 19 nt, Artificial Sequence
  Description of Artificial Sequence: Synthetic oligonucleotide
uuuaacuuucagcuuguua

SEQ ID NO: 1981473 - RNA, 19 nt, Artificial Sequence
  Description of Artificial Sequence: Synthetic oligonucleotide
acgucaaaggugcugaacu

SEQ ID NO: 1981474 - RNA, 19 nt, Artificial Sequence
  Description of Artificial Sequence: Synthetic oligonucleotide
uuugcuaaccacugcuuac

SEQ ID NO: 1981475 - RNA, 19 nt, Artificial Sequence
  Description of Artificial Sequence: Synthetic oligonucleotide
cacaggagguaucugacgc

SEQ ID NO: 1981476 - RNA, 19 nt, Artificial Sequence
  Description of Artificial Sequence: Synthetic oligonucleotide
ucaugucaacgucaaaggu

SEQ ID NO: 1981477 - RNA, 19 nt, Artificial Sequence
  Description of Artificial Sequence: Synthetic oligonucleotide
uuggaggaaugaauucggg

SEQ ID NO: 1981478 - RNA, 19 nt, Artificial Sequence
  Description of Artificial Sequence: Synthetic oligonucleotide
aguuaaagcaagaucaaau

SEQ ID NO: 1981479 - RNA, 19 nt, Artificial Sequence
  Description of Artificial Sequence: Synthetic oligonucleotide
ugguuugucaaguguacac

SEQ ID NO: 1981480 - RNA, 19 nt, Artificial Sequence
  Description of Artificial Sequence: Synthetic oligonucleotide
acacccuacagccuuccac

SEQ ID NO: 1981481 - RNA, 19 nt, Artificial Sequence
  Description of Artificial Sequence: Synthetic oligonucleotide
aacgucaaaggugcugaac

SEQ ID NO: 1981482 - RNA, 19 nt, Artificial Sequence
  Description of Artificial Sequence: Synthetic oligonucleotide
uccuaagggugaaaguagc

SEQ ID NO: 1981483 - RNA, 19 nt, Artificial Sequence
  Description of Artificial Sequence: Synthetic oligonucleotide
uaucugacgcgacugcagc

SEQ ID NO: 1981484 - RNA, 19 nt, Artificial Sequence
  Description of Artificial Sequence: Synthetic oligonucleotide
gacaacuuucaagagucag

SEQ ID NO: 1981485 - RNA, 19 nt, Artificial Sequence
  Description of Artificial Sequence: Synthetic oligonucleotide
ucaacgucaaaggugcuga

SEQ ID NO: 1981486 - RNA, 19 nt, Artificial Sequence
  Description of Artificial Sequence: Synthetic oligonucleotide
ucucacaagucccaagauc

SEQ ID NO: 1981487 - RNA, 19 nt, Artificial Sequence
  Description of Artificial Sequence: Synthetic oligonucleotide
gaccgcuggaugcaaaucc

SEQ ID NO: 1981488 - RNA, 19 nt, Artificial Sequence
  Description of Artificial Sequence: Synthetic oligonucleotide
caucucguaaauacagcag

SEQ ID NO: 1981489 - RNA, 19 nt, Artificial Sequence
  Description of Artificial Sequence: Synthetic oligonucleotide
agaacucuggaaugugaag

SEQ ID NO: 1981490 - RNA, 19 nt, Artificial Sequence
  Description of Artificial Sequence: Synthetic oligonucleotide
gaaguucggacguucccag

SEQ ID NO: 1981491 - RNA, 19 nt, Artificial Sequence
  Description of Artificial Sequence: Synthetic oligonucleotide
aaguucggacguucccagc

SEQ ID NO: 1981492 - RNA, 19 nt, Artificial Sequence
  Description of Artificial Sequence: Synthetic oligonucleotide
acguaaaaggcaaaggaca

SEQ ID NO: 1981493 - RNA, 19 nt, Artificial Sequence
  Description of Artificial Sequence: Synthetic oligonucleotide
agcaagaucaaaucugauu

SEQ ID NO: 1981494 - RNA, 19 nt, Artificial Sequence
  Description of Artificial Sequence: Synthetic oligonucleotide
aaggugcugaacucgggga

SEQ ID NO: 1981495 - RNA, 19 nt, Artificial Sequence
  Description of Artificial Sequence: Synthetic oligonucleotide
uugaagugucauauucucu

SEQ ID NO: 1981496 - RNA, 19 nt, Artificial Sequence
  Description of Artificial Sequence: Synthetic oligonucleotide
caccacuuggaucucgugg

SEQ ID NO: 1981497 - RNA, 19 nt, Artificial Sequence
  Description of Artificial Sequence: Synthetic oligonucleotide
guggauucgaggauuauac

SEQ ID NO: 1981498 - RNA, 19 nt, Artificial Sequence
  Description of Artificial Sequence: Synthetic oligonucleotide
cuagcauaucuuuucuuuc

SEQ ID NO: 1981499 - RNA, 19 nt, Artificial Sequence
  Description of Artificial Sequence: Synthetic oligonucleotide
gucaaaggugcugaacucg

SEQ ID NO: 1981500 - RNA, 19 nt, Artificial Sequence
  Description of Artificial Sequence: Synthetic oligonucleotide
agucccaagaucaagacuu

SEQ ID NO: 1981501 - RNA, 19 nt, Artificial Sequence
  Description of Artificial Sequence: Synthetic oligonucleotide
accacuuggaucucgugga

SEQ ID NO: 1981502 - RNA, 19 nt, Artificial Sequence
  Description of Artificial Sequence: Synthetic oligonucleotide
uucucuguccaccccaggu

SEQ ID NO: 1981503 - RNA, 19 nt, Artificial Sequence
  Description of Artificial Sequence: Synthetic oligonucleotide
cacccuacagccuuccacc

SEQ ID NO: 1981504 - RNA, 19 nt, Artificial Sequence
  Description of Artificial Sequence: Synthetic oligonucleotide
ucggagguggcuugaaccc

SEQ ID NO: 1981505 - RNA, 19 nt, Artificial Sequence
  Description of Artificial Sequence: Synthetic oligonucleotide
aacucaagccauggcuggc

SEQ ID NO: 1981506 - RNA, 19 nt, Artificial Sequence
  Description of Artificial Sequence: Synthetic oligonucleotide
uuuccacuggcauaccggu

SEQ ID NO: 1981507 - RNA, 19 nt, Artificial Sequence
  Description of Artificial Sequence: Synthetic oligonucleotide
ugaaguucggacguuccca

SEQ ID NO: 1981508 - RNA, 19 nt, Artificial Sequence
  Description of Artificial Sequence: Synthetic oligonucleotide
cuucaauaauguuccuaag

SEQ ID NO: 1981509 - RNA, 19 nt, Artificial Sequence
  Description of Artificial Sequence: Synthetic oligonucleotide
agagucaguucucugucca

SEQ ID NO: 1981510 - RNA, 19 nt, Artificial Sequence
  Description of Artificial Sequence: Synthetic oligonucleotide
gaagcuccgggccagguuc

SEQ ID NO: 1981511 - RNA, 19 nt, Artificial Sequence
  Description of Artificial Sequence: Synthetic oligonucleotide
acaggagguaucugacgcg

SEQ ID NO: 1981512 - RNA, 19 nt, Artificial Sequence
  Description of Artificial Sequence: Synthetic oligonucleotide
ucagcuaaugaggaauacu

SEQ ID NO: 1981513 - RNA, 19 nt, Artificial Sequence
  Description of Artificial Sequence: Synthetic oligonucleotide
acacaggagguaucugacg

SEQ ID NO: 1981514 - RNA, 19 nt, Artificial Sequence
  Description of Artificial Sequence: Synthetic oligonucleotide
agaucagcuaaugaggaau

SEQ ID NO: 1981515 - RNA, 19 nt, Artificial Sequence
  Description of Artificial Sequence: Synthetic oligonucleotide
aggaaugaauucgggacuc

SEQ ID NO: 1981516 - RNA, 19 nt, Artificial Sequence
  Description of Artificial Sequence: Synthetic oligonucleotide
uggaugcaaauccccagga

SEQ ID NO: 1981517 - RNA, 19 nt, Artificial Sequence
  Description of Artificial Sequence: Synthetic oligonucleotide
ugcuaaccacugcuuacag

SEQ ID NO: 1981518 - RNA, 19 nt, Artificial Sequence
  Description of Artificial Sequence: Synthetic oligonucleotide
cuaaccacugcuuacagau

SEQ ID NO: 1981519 - RNA, 19 nt, Artificial Sequence
  Description of Artificial Sequence: Synthetic oligonucleotide
uuguacuuucguccgcggc

SEQ ID NO: 1981520 - RNA, 19 nt, Artificial Sequence
  Description of Artificial Sequence: Synthetic oligonucleotide
gaaaguagcuccaagcccu

SEQ ID NO: 1981521 - RNA, 19 nt, Artificial Sequence
  Description of Artificial Sequence: Synthetic oligonucleotide
cuuacagaucagcuaauga

SEQ ID NO: 1981522 - RNA, 19 nt, Artificial Sequence
  Description of Artificial Sequence: Synthetic oligonucleotide
auguuccuaagggugaaag

SEQ ID NO: 1981523 - RNA, 19 nt, Artificial Sequence
  Description of Artificial Sequence: Synthetic oligonucleotide
caaaucuccacaccuuguc

SEQ ID NO: 1981524 - RNA, 19 nt, Artificial Sequence
  Description of Artificial Sequence: Synthetic oligonucleotide
acugcuuacagaucagcua

SEQ ID NO: 1981525 - RNA, 19 nt, Artificial Sequence
  Description of Artificial Sequence: Synthetic oligonucleotide
auucgaggauuauacaguu

SEQ ID NO: 1981526 - RNA, 19 nt, Artificial Sequence
  Description of Artificial Sequence: Synthetic oligonucleotide
cuugaacccaccggguucg

SEQ ID NO: 1981527 - RNA, 19 nt, Artificial Sequence
  Description of Artificial Sequence: Synthetic oligonucleotide
cuaagggugaaaguagcuc

SEQ ID NO: 1981528 - RNA, 19 nt, Artificial Sequence
  Description of Artificial Sequence: Synthetic oligonucleotide
auaccggucagcugaggug

SEQ ID NO: 1981529 - RNA, 19 nt, Artificial Sequence
  Description of Artificial Sequence: Synthetic oligonucleotide
uguuuaccugcugagcugu

SEQ ID NO: 1981530 - RNA, 19 nt, Artificial Sequence
  Description of Artificial Sequence: Synthetic oligonucleotide
cucaucauaucaaacucaa

SEQ ID NO: 1981531 - RNA, 19 nt, Artificial Sequence
  Description of Artificial Sequence: Synthetic oligonucleotide
uuugucaaguguacacgua

SEQ ID NO: 1981532 - RNA, 19 nt, Artificial Sequence
  Description of Artificial Sequence: Synthetic oligonucleotide
aucagcuaaugaggaauac

SEQ ID NO: 1981533 - RNA, 19 nt, Artificial Sequence
  Description of Artificial Sequence: Synthetic oligonucleotide
caagagucaguucucuguc

SEQ ID NO: 1981534 - RNA, 19 nt, Artificial Sequence
  Description of Artificial Sequence: Synthetic oligonucleotide
aacccaccggguucggaag

SEQ ID NO: 1981535 - RNA, 19 nt, Artificial Sequence
  Description of Artificial Sequence: Synthetic oligonucleotide
uuucaagagucaguucucu

SEQ ID NO: 1981536 - RNA, 19 nt, Artificial Sequence
  Description of Artificial Sequence: Synthetic oligonucleotide
ucagaggguuuguucuucc

SEQ ID NO: 1981537 - RNA, 19 nt, Artificial Sequence
  Description of Artificial Sequence: Synthetic oligonucleotide
aggugcugaacucggggag

SEQ ID NO: 1981538 - RNA, 19 nt, Artificial Sequence
  Description of Artificial Sequence: Synthetic oligonucleotide
uaaauacagcaggcugucg

SEQ ID NO: 1981539 - RNA, 19 nt, Artificial Sequence
  Description of Artificial Sequence: Synthetic oligonucleotide
aguucaaagcaaaucucca

SEQ ID NO: 1981540 - RNA, 19 nt, Artificial Sequence
  Description of Artificial Sequence: Synthetic oligonucleotide
aggaagcauguuuguuuac

SEQ ID NO: 1981541 - RNA, 19 nt, Artificial Sequence
  Description of Artificial Sequence: Synthetic oligonucleotide
accggcuucaugucaacgu

SEQ ID NO: 1981542 - RNA, 19 nt, Artificial Sequence
  Description of Artificial Sequence: Synthetic oligonucleotide
acagaucagcuaaugagga

SEQ ID NO: 1981543 - RNA, 19 nt, Artificial Sequence
  Description of Artificial Sequence: Synthetic oligonucleotide
uggcuagcauaucuuuucu

SEQ ID NO: 1981544 - RNA, 19 nt, Artificial Sequence
  Description of Artificial Sequence: Synthetic oligonucleotide
acaacuuucaagagucagu

SEQ ID NO: 1981545 - RNA, 19 nt, Artificial Sequence
  Description of Artificial Sequence: Synthetic oligonucleotide
gacgcgacugcagcgagcc

SEQ ID NO: 1981546 - RNA, 19 nt, Artificial Sequence
  Description of Artificial Sequence: Synthetic oligonucleotide
uaccggucagcugagguga

SEQ ID NO: 1981547 - RNA, 19 nt, Artificial Sequence
  Description of Artificial Sequence: Synthetic oligonucleotide
uuuggaccauggcuuuggc

SEQ ID NO: 1981548 - RNA, 19 nt, Artificial Sequence
  Description of Artificial Sequence: Synthetic oligonucleotide
caaaggugcugaacucggg

SEQ ID NO: 1981549 - RNA, 19 nt, Artificial Sequence
  Description of Artificial Sequence: Synthetic oligonucleotide
gauucgaggauuauacagu

SEQ ID NO: 1981550 - RNA, 19 nt, Artificial Sequence
  Description of Artificial Sequence: Synthetic oligonucleotide
accgcuggaugcaaauccc

SEQ ID NO: 1981551 - RNA, 19 nt, Artificial Sequence
  Description of Artificial Sequence: Synthetic oligonucleotide
gaagcauguuuguuuaccu

SEQ ID NO: 1981552 - RNA, 19 nt, Artificial Sequence
  Description of Artificial Sequence: Synthetic oligonucleotide
uuucguccgcggcucggcg

SEQ ID NO: 1981553 - RNA, 19 nt, Artificial Sequence
  Description of Artificial Sequence: Synthetic oligonucleotide
cuuguacuuucguccgcgg

SEQ ID NO: 1981554 - RNA, 19 nt, Artificial Sequence
  Description of Artificial Sequence: Synthetic oligonucleotide
cacgcaguaugcuuccaac

SEQ ID NO: 1981555 - RNA, 19 nt, Artificial Sequence
  Description of Artificial Sequence: Synthetic oligonucleotide
caacuucaccacuuggauc

SEQ ID NO: 1981556 - RNA, 19 nt, Artificial Sequence
  Description of Artificial Sequence: Synthetic oligonucleotide
aguguacacguaaaaggca

SEQ ID NO: 1981557 - RNA, 19 nt, Artificial Sequence
  Description of Artificial Sequence: Synthetic oligonucleotide
uaacaggcacuuccuggca

SEQ ID NO: 1981558 - RNA, 19 nt, Artificial Sequence
  Description of Artificial Sequence: Synthetic oligonucleotide
ggacucaggaaccuuguac

SEQ ID NO: 1981559 - RNA, 19 nt, Artificial Sequence
  Description of Artificial Sequence: Synthetic oligonucleotide
cauagaacucuggaaugug

SEQ ID NO: 1981560 - RNA, 19 nt, Artificial Sequence
  Description of Artificial Sequence: Synthetic oligonucleotide
cauaucaaacucaagccau

SEQ ID NO: 1981561 - RNA, 19 nt, Artificial Sequence
  Description of Artificial Sequence: Synthetic oligonucleotide
aucccgugcggacacagga

SEQ ID NO: 1981562 - RNA, 19 nt, Artificial Sequence
  Description of Artificial Sequence: Synthetic oligonucleotide
acaccuuguccuucaauaa

SEQ ID NO: 1981563 - RNA, 19 nt, Artificial Sequence
  Description of Artificial Sequence: Synthetic oligonucleotide
gaggauuauacaguucaaa

SEQ ID NO: 1981564 - RNA, 19 nt, Artificial Sequence
  Description of Artificial Sequence: Synthetic oligonucleotide
auaucaaacucaagccaug

SEQ ID NO: 1981565 - RNA, 19 nt, Artificial Sequence
  Description of Artificial Sequence: Synthetic oligonucleotide
acguucccagcguuuggac

SEQ ID NO: 1981566 - RNA, 19 nt, Artificial Sequence
  Description of Artificial Sequence: Synthetic oligonucleotide
uguugaaguucggacguuc

SEQ ID NO: 1981567 - RNA, 19 nt, Artificial Sequence
  Description of Artificial Sequence: Synthetic oligonucleotide
ggaagcauguuuguuuacc

SEQ ID NO: 1981568 - RNA, 19 nt, Artificial Sequence
  Description of Artificial Sequence: Synthetic oligonucleotide
auuauacaguucaaagcaa

SEQ ID NO: 1981569 - RNA, 19 nt, Artificial Sequence
  Description of Artificial Sequence: Synthetic oligonucleotide
ucugacgcgacugcagcga

SEQ ID NO: 1981570 - RNA, 19 nt, Artificial Sequence
  Description of Artificial Sequence: Synthetic oligonucleotide
uucgaggauuauacaguuc

SEQ ID NO: 1981571 - RNA, 19 nt, Artificial Sequence
  Description of Artificial Sequence: Synthetic oligonucleotide
ccuuccaccaaggaggccg

SEQ ID NO: 1981572 - RNA, 19 nt, Artificial Sequence
  Description of Artificial Sequence: Synthetic oligonucleotide
gcaucucguaaauacagca

SEQ ID NO: 1981573 - RNA, 19 nt, Artificial Sequence
  Description of Artificial Sequence: Synthetic oligonucleotide
gaggaaugaauucgggacu

SEQ ID NO: 1981574 - RNA, 19 nt, Artificial Sequence
  Description of Artificial Sequence: Synthetic oligonucleotide
acgcaguaugcuuccaaca

SEQ ID NO: 1981575 - RNA, 19 nt, Artificial Sequence
  Description of Artificial Sequence: Synthetic oligonucleotide
ggaaccuuguacuuucguc

SEQ ID NO: 1981576 - RNA, 19 nt, Artificial Sequence
  Description of Artificial Sequence: Synthetic oligonucleotide
auagaacucuggaauguga

SEQ ID NO: 1981577 - RNA, 19 nt, Artificial Sequence
  Description of Artificial Sequence: Synthetic oligonucleotide
guugaaguucggacguucc

SEQ ID NO: 1981578 - RNA, 19 nt, Artificial Sequence
  Description of Artificial Sequence: Synthetic oligonucleotide
cuuugaugcuucuauuucu

SEQ ID NO: 1981579 - RNA, 19 nt, Artificial Sequence
  Description of Artificial Sequence: Synthetic oligonucleotide
ucucuguccaccccagguu

SEQ ID NO: 1981580 - RNA, 19 nt, Artificial Sequence
  Description of Artificial Sequence: Synthetic oligonucleotide
guaucugacgcgacugcag

SEQ ID NO: 1981581 - RNA, 19 nt, Artificial Sequence
  Description of Artificial Sequence: Synthetic oligonucleotide
uccuucaauaauguuccua

SEQ ID NO: 1981582 - RNA, 19 nt, Artificial Sequence
  Description of Artificial Sequence: Synthetic oligonucleotide
uacagccuuccaccaagga

SEQ ID NO: 1981583 - RNA, 19 nt, Artificial Sequence
  Description of Artificial Sequence: Synthetic oligonucleotide
ucccgugcggacacaggag

SEQ ID NO: 1981584 - RNA, 19 nt, Artificial Sequence
  Description of Artificial Sequence: Synthetic oligonucleotide
agguggcuugaacccaccg

SEQ ID NO: 1981585 - RNA, 19 nt, Artificial Sequence
  Description of Artificial Sequence: Synthetic oligonucleotide
ucacaagucccaagaucaa

SEQ ID NO: 1981586 - RNA, 19 nt, Artificial Sequence
  Description of Artificial Sequence: Synthetic oligonucleotide
cuucagccugagcaggaag

SEQ ID NO: 1981587 - RNA, 19 nt, Artificial Sequence
  Description of Artificial Sequence: Synthetic oligonucleotide
uuggaccauggcuuuggcu

SEQ ID NO: 1981588 - RNA, 19 nt, Artificial Sequence
  Description of Artificial Sequence: Synthetic oligonucleotide
ucaugugggaccggcuuca

SEQ ID NO: 1981589 - RNA, 19 nt, Artificial Sequence
  Description of Artificial Sequence: Synthetic oligonucleotide
caggacucaugugggaccg

SEQ ID NO: 1981590 - RNA, 19 nt, Artificial Sequence
  Description of Artificial Sequence: Synthetic oligonucleotide
agcguuuggaccauggcuu

SEQ ID NO: 1981591 - RNA, 19 nt, Artificial Sequence
  Description of Artificial Sequence: Synthetic oligonucleotide
gucaacgucaaaggugcug

SEQ ID NO: 1981592 - RNA, 19 nt, Artificial Sequence
  Description of Artificial Sequence: Synthetic oligonucleotide
ugggaccggcuucauguca

SEQ ID NO: 1981593 - RNA, 19 nt, Artificial Sequence
  Description of Artificial Sequence: Synthetic oligonucleotide
ccuucaauaauguuccuaa

SEQ ID NO: 1981594 - RNA, 19 nt, Artificial Sequence
  Description of Artificial Sequence: Synthetic oligonucleotide
ggaaugugaagcaccuucc

SEQ ID NO: 1981595 - RNA, 19 nt, Artificial Sequence
  Description of Artificial Sequence: Synthetic oligonucleotide
uacuuucguccgcggcucg

SEQ ID NO: 1981596 - RNA, 19 nt, Artificial Sequence
  Description of Artificial Sequence: Synthetic oligonucleotide
acucaugugggaccggcuu

SEQ ID NO: 1981597 - RNA, 19 nt, Artificial Sequence
  Description of Artificial Sequence: Synthetic oligonucleotide
aggaaccuuguacuuucgu

SEQ ID NO: 1981598 - RNA, 19 nt, Artificial Sequence
  Description of Artificial Sequence: Synthetic oligonucleotide
gaacccaccggguucggaa

SEQ ID NO: 1981599 - RNA, 19 nt, Artificial Sequence
  Description of Artificial Sequence: Synthetic oligonucleotide
cugucucacaagucccaag

SEQ ID NO: 1981600 - RNA, 19 nt, Artificial Sequence
  Description of Artificial Sequence: Synthetic oligonucleotide
ucuuccccuuggaggaaug

SEQ ID NO: 1981601 - RNA, 19 nt, Artificial Sequence
  Description of Artificial Sequence: Synthetic oligonucleotide
agggacacccuacagccuu

SEQ ID NO: 1981602 - RNA, 19 nt, Artificial Sequence
  Description of Artificial Sequence: Synthetic oligonucleotide
gaggguuuguucuuccccu

SEQ ID NO: 1981603 - RNA, 19 nt, Artificial Sequence
  Description of Artificial Sequence: Synthetic oligonucleotide
ugaagccggcucgaucccg

SEQ ID NO: 1981604 - RNA, 19 nt, Artificial Sequence
  Description of Artificial Sequence: Synthetic oligonucleotide
uuccuccuggcuagcauau

SEQ ID NO: 1981605 - RNA, 19 nt, Artificial Sequence
  Description of Artificial Sequence: Synthetic oligonucleotide
uccaaccgcuucuccaacu

SEQ ID NO: 1981606 - RNA, 19 nt, Artificial Sequence
  Description of Artificial Sequence: Synthetic oligonucleotide
agccggcucgaucccgugc

SEQ ID NO: 1981607 - RNA, 19 nt, Artificial Sequence
  Description of Artificial Sequence: Synthetic oligonucleotide
gugacacgcaguaugcuuc

SEQ ID NO: 1981608 - RNA, 19 nt, Artificial Sequence
  Description of Artificial Sequence: Synthetic oligonucleotide
uucagaggguuuguucuuc

SEQ ID NO: 1981609 - RNA, 19 nt, Artificial Sequence
  Description of Artificial Sequence: Synthetic oligonucleotide
ucguccgcggcucggcgcc

SEQ ID NO: 1981610 - RNA, 19 nt, Artificial Sequence
  Description of Artificial Sequence: Synthetic oligonucleotide
gguucggaaggcccggugc

SEQ ID NO: 1981611 - RNA, 19 nt, Artificial Sequence
  Description of Artificial Sequence: Synthetic oligonucleotide
uucggaagcuccgggccag

SEQ ID NO: 1981612 - RNA, 19 nt, Artificial Sequence
  Description of Artificial Sequence: Synthetic oligonucleotide
gagucaguucucuguccac

SEQ ID NO: 1981613 - RNA, 19 nt, Artificial Sequence
  Description of Artificial Sequence: Synthetic oligonucleotide
aucucguggauucgaggau

SEQ ID NO: 1981614 - RNA, 19 nt, Artificial Sequence
  Description of Artificial Sequence: Synthetic oligonucleotide
gccagguucagggacaccc

SEQ ID NO: 1981615 - RNA, 19 nt, Artificial Sequence
  Description of Artificial Sequence: Synthetic oligonucleotide
ugcuuacagaucagcuaau

SEQ ID NO: 1981616 - RNA, 19 nt, Artificial Sequence
  Description of Artificial Sequence: Synthetic oligonucleotide
acccaccggguucggaagg

SEQ ID NO: 1981617 - RNA, 19 nt, Artificial Sequence
  Description of Artificial Sequence: Synthetic oligonucleotide
accaaggaggccgccaugu

SEQ ID NO: 1981618 - RNA, 19 nt, Artificial Sequence
  Description of Artificial Sequence: Synthetic oligonucleotide
aagcaaaucuccacaccuu

SEQ ID NO: 1981619 - RNA, 19 nt, Artificial Sequence
  Description of Artificial Sequence: Synthetic oligonucleotide
cugagcugucucacaaguc

SEQ ID NO: 1981620 - RNA, 19 nt, Artificial Sequence
  Description of Artificial Sequence: Synthetic oligonucleotide
cucaugugggaccggcuuc

SEQ ID NO: 1981621 - RNA, 19 nt, Artificial Sequence
  Description of Artificial Sequence: Synthetic oligonucleotide
uggcuugaacccaccgggu

SEQ ID NO: 1981622 - RNA, 19 nt, Artificial Sequence
  Description of Artificial Sequence: Synthetic oligonucleotide
aagacagguuucggaggug

SEQ ID NO: 1981623 - RNA, 19 nt, Artificial Sequence
  Description of Artificial Sequence: Synthetic oligonucleotide
uucuucccgcaaugcagcu

SEQ ID NO: 1981624 - RNA, 19 nt, Artificial Sequence
  Description of Artificial Sequence: Synthetic oligonucleotide
agcuuguuaacaggcacuu

SEQ ID NO: 1981625 - RNA, 19 nt, Artificial Sequence
  Description of Artificial Sequence: Synthetic oligonucleotide
ucccaagaucaagacuucu

SEQ ID NO: 1981626 - RNA, 19 nt, Artificial Sequence
  Description of Artificial Sequence: Synthetic oligonucleotide
gaucagcuaaugaggaaua

SEQ ID NO: 1981627 - RNA, 19 nt, Artificial Sequence
  Description of Artificial Sequence: Synthetic oligonucleotide
gugcugaacucggggaggg

SEQ ID NO: 1981628 - RNA, 19 nt, Artificial Sequence
  Description of Artificial Sequence: Synthetic oligonucleotide
cucgaucccgugcggacac

SEQ ID NO: 1981629 - RNA, 19 nt, Artificial Sequence
  Description of Artificial Sequence: Synthetic oligonucleotide
caccggguucggaaggccc

SEQ ID NO: 1981630 - RNA, 19 nt, Artificial Sequence
  Description of Artificial Sequence: Synthetic oligonucleotide
ucggcgccgguccuccaag

SEQ ID NO: 1981631 - RNA, 19 nt, Artificial Sequence
  Description of Artificial Sequence: Synthetic oligonucleotide
acacgcaguaugcuuccaa

SEQ ID NO: 1981632 - RNA, 19 nt, Artificial Sequence
  Description of Artificial Sequence: Synthetic oligonucleotide
uucguccgcggcucggcgc

SEQ ID NO: 1981633 - RNA, 19 nt, Artificial Sequence
  Description of Artificial Sequence: Synthetic oligonucleotide
gcuaaugaggaauacuuuu

SEQ ID NO: 1981634 - RNA, 19 nt, Artificial Sequence
  Description of Artificial Sequence: Synthetic oligonucleotide
gggugaaaguagcuccaag

SEQ ID NO: 1981635 - RNA, 19 nt, Artificial Sequence
  Description of Artificial Sequence: Synthetic oligonucleotide
gcaggacucaugugggacc

SEQ ID NO: 1981636 - RNA, 19 nt, Artificial Sequence
  Description of Artificial Sequence: Synthetic oligonucleotide
ugucaacgucaaaggugcu

SEQ ID NO: 1981637 - RNA, 19 nt, Artificial Sequence
  Description of Artificial Sequence: Synthetic oligonucleotide
uccaagcccuuuuccugac

SEQ ID NO: 1981638 - RNA, 19 nt, Artificial Sequence
  Description of Artificial Sequence: Synthetic oligonucleotide
gacguucccagcguuugga

SEQ ID NO: 1981639 - RNA, 19 nt, Artificial Sequence
  Description of Artificial Sequence: Synthetic oligonucleotide
uuccacuggcauaccgguc

SEQ ID NO: 1981640 - RNA, 19 nt, Artificial Sequence
  Description of Artificial Sequence: Synthetic oligonucleotide
aggaggccgccaugucuac

SEQ ID NO: 1981641 - RNA, 19 nt, Artificial Sequence
  Description of Artificial Sequence: Synthetic oligonucleotide
ccaacauagaacucuggaa

SEQ ID NO: 1981642 - RNA, 19 nt, Artificial Sequence
  Description of Artificial Sequence: Synthetic oligonucleotide
gaucccgugcggacacagg

SEQ ID NO: 1981643 - RNA, 19 nt, Artificial Sequence
  Description of Artificial Sequence: Synthetic oligonucleotide
caagacagguuucggaggu

SEQ ID NO: 1981644 - RNA, 19 nt, Artificial Sequence
  Description of Artificial Sequence: Synthetic oligonucleotide
uuccugaccgcuggaugca

SEQ ID NO: 1981645 - RNA, 19 nt, Artificial Sequence
  Description of Artificial Sequence: Synthetic oligonucleotide
agcuaaugaggaauacuuu

SEQ ID NO: 1981646 - RNA, 19 nt, Artificial Sequence
  Description of Artificial Sequence: Synthetic oligonucleotide
acuuucguccgcggcucgg

SEQ ID NO: 1981647 - RNA, 19 nt, Artificial Sequence
  Description of Artificial Sequence: Synthetic oligonucleotide
gcuuacagaucagcuaaug

SEQ ID NO: 1981648 - RNA, 19 nt, Artificial Sequence
  Description of Artificial Sequence: Synthetic oligonucleotide
gccggcucgaucccgugcg

SEQ ID NO: 1981649 - RNA, 19 nt, Artificial Sequence
  Description of Artificial Sequence: Synthetic oligonucleotide
cugaagccggcucgauccc

SEQ ID NO: 1981650 - RNA, 19 nt, Artificial Sequence
  Description of Artificial Sequence: Synthetic oligonucleotide
uucggacguucccagcguu

SEQ ID NO: 1981651 - RNA, 19 nt, Artificial Sequence
  Description of Artificial Sequence: Synthetic oligonucleotide
cuuucguccgcggcucggc

SEQ ID NO: 1981652 - RNA, 19 nt, Artificial Sequence
  Description of Artificial Sequence: Synthetic oligonucleotide
guucggaagcuccgggcca

SEQ ID NO: 1981653 - RNA, 19 nt, Artificial Sequence
  Description of Artificial Sequence: Synthetic oligonucleotide
cugacgcgacugcagcgag

SEQ ID NO: 1981654 - RNA, 19 nt, Artificial Sequence
  Description of Artificial Sequence: Synthetic oligonucleotide
aggagguaucugacgcgac

SEQ ID NO: 1981655 - RNA, 19 nt, Artificial Sequence
  Description of Artificial Sequence: Synthetic oligonucleotide
augugggaccggcuucaug

SEQ ID NO: 1981656 - RNA, 19 nt, Artificial Sequence
  Description of Artificial Sequence: Synthetic oligonucleotide
gcuugaacccaccggguuc

SEQ ID NO: 1981657 - RNA, 19 nt, Artificial Sequence
  Description of Artificial Sequence: Synthetic oligonucleotide
cacugcuuacagaucagcu

SEQ ID NO: 1981658 - RNA, 19 nt, Artificial Sequence
  Description of Artificial Sequence: Synthetic oligonucleotide
aagccggcucgaucccgug

SEQ ID NO: 1981659 - RNA, 19 nt, Artificial Sequence
  Description of Artificial Sequence: Synthetic oligonucleotide
gcuagcauaucuuuucuuu

SEQ ID NO: 1981660 - RNA, 19 nt, Artificial Sequence
  Description of Artificial Sequence: Synthetic oligonucleotide
guacuuucguccgcggcuc

SEQ ID NO: 1981661 - RNA, 19 nt, Artificial Sequence
  Description of Artificial Sequence: Synthetic oligonucleotide
ugaccgcuggaugcaaauc

SEQ ID NO: 1981662 - RNA, 19 nt, Artificial Sequence
  Description of Artificial Sequence: Synthetic oligonucleotide
caguuaaagcaagaucaaa

SEQ ID NO: 1981663 - RNA, 19 nt, Artificial Sequence
  Description of Artificial Sequence: Synthetic oligonucleotide
caacuuucaagagucaguu

SEQ ID NO: 1981664 - RNA, 19 nt, Artificial Sequence
  Description of Artificial Sequence: Synthetic oligonucleotide
ucggacguucccagcguuu

SEQ ID NO: 1981665 - RNA, 19 nt, Artificial Sequence
  Description of Artificial Sequence: Synthetic oligonucleotide
cccgugcggacacaggagg

SEQ ID NO: 1981666 - RNA, 19 nt, Artificial Sequence
  Description of Artificial Sequence: Synthetic oligonucleotide
caggagguaucugacgcga

SEQ ID NO: 1981667 - RNA, 19 nt, Artificial Sequence
  Description of Artificial Sequence: Synthetic oligonucleotide
cauaccggucagcugaggu

SEQ ID NO: 1981668 - RNA, 19 nt, Artificial Sequence
  Description of Artificial Sequence: Synthetic oligonucleotide
aaaguagcuccaagcccuu

SEQ ID NO: 1981669 - RNA, 19 nt, Artificial Sequence
  Description of Artificial Sequence: Synthetic oligonucleotide
aggguuuguucuuccccuu

SEQ ID NO: 1981670 - RNA, 19 nt, Artificial Sequence
  Description of Artificial Sequence: Synthetic oligonucleotide
uucuuccccuuggaggaau

SEQ ID NO: 1981671 - RNA, 19 nt, Artificial Sequence
  Description of Artificial Sequence: Synthetic oligonucleotide
gccguucggaagcuccggg

SEQ ID NO: 1981672 - RNA, 19 nt, Artificial Sequence
  Description of Artificial Sequence: Synthetic oligonucleotide
ugaacccaccggguucgga

SEQ ID NO: 1981673 - RNA, 19 nt, Artificial Sequence
  Description of Artificial Sequence: Synthetic oligonucleotide
uugaacccaccggguucgg

SEQ ID NO: 1981674 - RNA, 19 nt, Artificial Sequence
  Description of Artificial Sequence: Synthetic oligonucleotide
gguaucugacgcgacugca

SEQ ID NO: 1981675 - RNA, 19 nt, Artificial Sequence
  Description of Artificial Sequence: Synthetic oligonucleotide
cucguaaauacagcaggcu

SEQ ID NO: 1981676 - RNA, 19 nt, Artificial Sequence
  Description of Artificial Sequence: Synthetic oligonucleotide
uucccgcaaugcagcuuca

SEQ ID NO: 1981677 - RNA, 19 nt, Artificial Sequence
  Description of Artificial Sequence: Synthetic oligonucleotide
uccccaggaacuggauggu

SEQ ID NO: 1981678 - RNA, 19 nt, Artificial Sequence
  Description of Artificial Sequence: Synthetic oligonucleotide
ggacucaugugggaccggc

SEQ ID NO: 1981679 - RNA, 19 nt, Artificial Sequence
  Description of Artificial Sequence: Synthetic oligonucleotide
aggugacacgcaguaugcu

SEQ ID NO: 1981680 - RNA, 19 nt, Artificial Sequence
  Description of Artificial Sequence: Synthetic oligonucleotide
gcugagcugucucacaagu

SEQ ID NO: 1981681 - RNA, 19 nt, Artificial Sequence
  Description of Artificial Sequence: Synthetic oligonucleotide
cguucggaagcuccgggcc

SEQ ID NO: 1981682 - RNA, 19 nt, Artificial Sequence
  Description of Artificial Sequence: Synthetic oligonucleotide
ccacuucugggcuucuuuc

SEQ ID NO: 1981683 - RNA, 19 nt, Artificial Sequence
  Description of Artificial Sequence: Synthetic oligonucleotide
cgccgguccuccaagacag

SEQ ID NO: 1981684 - RNA, 19 nt, Artificial Sequence
  Description of Artificial Sequence: Synthetic oligonucleotide
aggcugucguccaaccgcu

SEQ ID NO: 1981685 - RNA, 19 nt, Artificial Sequence
  Description of Artificial Sequence: Synthetic oligonucleotide
ggaccauggcuuuggcuuc

SEQ ID NO: 1981686 - RNA, 19 nt, Artificial Sequence
  Description of Artificial Sequence: Synthetic oligonucleotide
ggcccggugcucugaagcc

SEQ ID NO: 1981687 - RNA, 19 nt, Artificial Sequence
  Description of Artificial Sequence: Synthetic oligonucleotide
cguucccagcguuuggacc

SEQ ID NO: 1981688 - RNA, 19 nt, Artificial Sequence
  Description of Artificial Sequence: Synthetic oligonucleotide
gacacccuacagccuucca

SEQ ID NO: 1981689 - RNA, 19 nt, Artificial Sequence
  Description of Artificial Sequence: Synthetic oligonucleotide
cucguggauucgaggauua

SEQ ID NO: 1981690 - RNA, 19 nt, Artificial Sequence
  Description of Artificial Sequence: Synthetic oligonucleotide
cguaaauacagcaggcugu

SEQ ID NO: 1981691 - RNA, 19 nt, Artificial Sequence
  Description of Artificial Sequence: Synthetic oligonucleotide
ccagcguuuggaccauggc

SEQ ID NO: 1981692 - RNA, 19 nt, Artificial Sequence
  Description of Artificial Sequence: Synthetic oligonucleotide
ucuucccgcaaugcagcuu

SEQ ID NO: 1981693 - RNA, 19 nt, Artificial Sequence
  Description of Artificial Sequence: Synthetic oligonucleotide
gcugaacucggggagggca

SEQ ID NO: 1981694 - RNA, 19 nt, Artificial Sequence
  Description of Artificial Sequence: Synthetic oligonucleotide
gagcugaacucaggucuuc

SEQ ID NO: 1981695 - RNA, 19 nt, Artificial Sequence
  Description of Artificial Sequence: Synthetic oligonucleotide
gugggaccggcuucauguc

SEQ ID NO: 1981696 - RNA, 19 nt, Artificial Sequence
  Description of Artificial Sequence: Synthetic oligonucleotide
ccgcuggaugcaaaucccc

SEQ ID NO: 1981697 - RNA, 19 nt, Artificial Sequence
  Description of Artificial Sequence: Synthetic oligonucleotide
gucuucagccugagcagga

SEQ ID NO: 1981698 - RNA, 19 nt, Artificial Sequence
  Description of Artificial Sequence: Synthetic oligonucleotide
ggagguaucugacgcgacu

SEQ ID NO: 1981699 - RNA, 19 nt, Artificial Sequence
  Description of Artificial Sequence: Synthetic oligonucleotide
ccguucggaagcuccgggc

SEQ ID NO: 1981700 - RNA, 19 nt, Artificial Sequence
  Description of Artificial Sequence: Synthetic oligonucleotide
ggcucgaucccgugcggac

SEQ ID NO: 1981701 - RNA, 19 nt, Artificial Sequence
  Description of Artificial Sequence: Synthetic oligonucleotide
caccuuguccuucaauaau

SEQ ID NO: 1981702 - RNA, 19 nt, Artificial Sequence
  Description of Artificial Sequence: Synthetic oligonucleotide
cgucaaaggugcugaacuc

SEQ ID NO: 1981703 - RNA, 19 nt, Artificial Sequence
  Description of Artificial Sequence: Synthetic oligonucleotide
ggugacacgcaguaugcuu

SEQ ID NO: 1981704 - RNA, 19 nt, Artificial Sequence
  Description of Artificial Sequence: Synthetic oligonucleotide
acgcgacugcagcgagccg

SEQ ID NO: 1981705 - RNA, 19 nt, Artificial Sequence
  Description of Artificial Sequence: Synthetic oligonucleotide
ucguggauucgaggauuau

SEQ ID NO: 1981706 - RNA, 19 nt, Artificial Sequence
  Description of Artificial Sequence: Synthetic oligonucleotide
gucucacaagucccaagau

SEQ ID NO: 1981707 - RNA, 19 nt, Artificial Sequence
  Description of Artificial Sequence: Synthetic oligonucleotide
cugucguccaaccgcuucu

SEQ ID NO: 1981708 - RNA, 19 nt, Artificial Sequence
  Description of Artificial Sequence: Synthetic oligonucleotide
cagcgagccgcggucuggc

SEQ ID NO: 1981709 - RNA, 19 nt, Artificial Sequence
  Description of Artificial Sequence: Synthetic oligonucleotide
ccuccaagacagguuucgg

SEQ ID NO: 1981710 - RNA, 19 nt, Artificial Sequence
  Description of Artificial Sequence: Synthetic oligonucleotide
gcgacugcagcgagccgcg

SEQ ID NO: 1981711 - RNA, 19 nt, Artificial Sequence
  Description of Artificial Sequence: Synthetic oligonucleotide
ggaaugaauucgggacuca

SEQ ID NO: 1981712 - RNA, 19 nt, Artificial Sequence
  Description of Artificial Sequence: Synthetic oligonucleotide
auguugaaguucggacguu

SEQ ID NO: 1981713 - RNA, 19 nt, Artificial Sequence
  Description of Artificial Sequence: Synthetic oligonucleotide
guucggacguucccagcgu

SEQ ID NO: 1981714 - RNA, 19 nt, Artificial Sequence
  Description of Artificial Sequence: Synthetic oligonucleotide
caacgucaaaggugcugaa

SEQ ID NO: 1981715 - RNA, 19 nt, Artificial Sequence
  Description of Artificial Sequence: Synthetic oligonucleotide
uccugaccgcuggaugcaa

SEQ ID NO: 1981716 - RNA, 19 nt, Artificial Sequence
  Description of Artificial Sequence: Synthetic oligonucleotide
ggcauaccggucagcugag

SEQ ID NO: 1981717 - RNA, 19 nt, Artificial Sequence
  Description of Artificial Sequence: Synthetic oligonucleotide
ggguucggaaggcccggug

SEQ ID NO: 1981718 - RNA, 19 nt, Artificial Sequence
  Description of Artificial Sequence: Synthetic oligonucleotide
cgcgacugcagcgagccgc

SEQ ID NO: 1981719 - RNA, 19 nt, Artificial Sequence
  Description of Artificial Sequence: Synthetic oligonucleotide
gcccggugcucugaagccg

SEQ ID NO: 1981720 - RNA, 19 nt, Artificial Sequence
  Description of Artificial Sequence: Synthetic oligonucleotide
ccaagaucaagacuucuuu

SEQ ID NO: 1981721 - RNA, 19 nt, Artificial Sequence
  Description of Artificial Sequence: Synthetic oligonucleotide
ggccguucggaagcuccgg

SEQ ID NO: 1981722 - RNA, 19 nt, Artificial Sequence
  Description of Artificial Sequence: Synthetic oligonucleotide
guuuaccugcugagcuguc

SEQ ID NO: 1981723 - RNA, 19 nt, Artificial Sequence
  Description of Artificial Sequence: Synthetic oligonucleotide
uccuccuggcuagcauauc

SEQ ID NO: 1981724 - RNA, 19 nt, Artificial Sequence
  Description of Artificial Sequence: Synthetic oligonucleotide
ggacacccuacagccuucc

SEQ ID NO: 1981725 - RNA, 19 nt, Artificial Sequence
  Description of Artificial Sequence: Synthetic oligonucleotide
gaagccggcucgaucccgu

SEQ ID NO: 1981726 - RNA, 19 nt, Artificial Sequence
  Description of Artificial Sequence: Synthetic oligonucleotide
guuucggagguggcuugaa

SEQ ID NO: 1981727 - RNA, 19 nt, Artificial Sequence
  Description of Artificial Sequence: Synthetic oligonucleotide
ggcgccgguccuccaagac

SEQ ID NO: 1981728 - RNA, 19 nt, Artificial Sequence
  Description of Artificial Sequence: Synthetic oligonucleotide
cucggggagggcaucucgu

SEQ ID NO: 1981729 - RNA, 19 nt, Artificial Sequence
  Description of Artificial Sequence: Synthetic oligonucleotide
ccaacuucaccacuuggau

SEQ ID NO: 1981730 - RNA, 19 nt, Artificial Sequence
  Description of Artificial Sequence: Synthetic oligonucleotide
gcauguuuguuuaccugcu

SEQ ID NO: 1981731 - RNA, 19 nt, Artificial Sequence
  Description of Artificial Sequence: Synthetic oligonucleotide
ccuaagggugaaaguagcu

SEQ ID NO: 1981732 - RNA, 19 nt, Artificial Sequence
  Description of Artificial Sequence: Synthetic oligonucleotide
gacucaugugggaccggcu

SEQ ID NO: 1981733 - RNA, 19 nt, Artificial Sequence
  Description of Artificial Sequence: Synthetic oligonucleotide
gcuuguuaacaggcacuuc

SEQ ID NO: 1981734 - RNA, 19 nt, Artificial Sequence
  Description of Artificial Sequence: Synthetic oligonucleotide
ucgaucccgugcggacaca

SEQ ID NO: 1981735 - RNA, 19 nt, Artificial Sequence
  Description of Artificial Sequence: Synthetic oligonucleotide
agcuccgggccagguucag

SEQ ID NO: 1981736 - RNA, 19 nt, Artificial Sequence
  Description of Artificial Sequence: Synthetic oligonucleotide
gcauaccggucagcugagg

SEQ ID NO: 1981737 - RNA, 19 nt, Artificial Sequence
  Description of Artificial Sequence: Synthetic oligonucleotide
gggaccggcuucaugucaa

SEQ ID NO: 1981738 - RNA, 19 nt, Artificial Sequence
  Description of Artificial Sequence: Synthetic oligonucleotide
ggcuccacuucugggcuuc

SEQ ID NO: 1981739 - RNA, 19 nt, Artificial Sequence
  Description of Artificial Sequence: Synthetic oligonucleotide
cggucagcugaggugacac

SEQ ID NO: 1981740 - RNA, 19 nt, Artificial Sequence
  Description of Artificial Sequence: Synthetic oligonucleotide
accccagguuccagagcug

SEQ ID NO: 1981741 - RNA, 19 nt, Artificial Sequence
  Description of Artificial Sequence: Synthetic oligonucleotide
ccgcaaugcagcuucaauu

SEQ ID NO: 1981742 - RNA, 19 nt, Artificial Sequence
  Description of Artificial Sequence: Synthetic oligonucleotide
gcugucucacaagucccaa

SEQ ID NO: 1981743 - RNA, 19 nt, Artificial Sequence
  Description of Artificial Sequence: Synthetic oligonucleotide
cagguuucggagguggcuu

SEQ ID NO: 1981744 - RNA, 19 nt, Artificial Sequence
  Description of Artificial Sequence: Synthetic oligonucleotide
gugcggacacaggagguau

SEQ ID NO: 1981745 - RNA, 19 nt, Artificial Sequence
  Description of Artificial Sequence: Synthetic oligonucleotide
ggcuagcauaucuuuucuu

SEQ ID NO: 1981746 - RNA, 19 nt, Artificial Sequence
  Description of Artificial Sequence: Synthetic oligonucleotide
gggacucaggaaccuugua

SEQ ID NO: 1981747 - RNA, 19 nt, Artificial Sequence
  Description of Artificial Sequence: Synthetic oligonucleotide
gcucgaucccgugcggaca

SEQ ID NO: 1981748 - RNA, 19 nt, Artificial Sequence
  Description of Artificial Sequence: Synthetic oligonucleotide
ggcucggcgccgguccucc

SEQ ID NO: 1981749 - RNA, 19 nt, Artificial Sequence
  Description of Artificial Sequence: Synthetic oligonucleotide
ggcuugaacccaccggguu

SEQ ID NO: 1981750 - RNA, 19 nt, Artificial Sequence
  Description of Artificial Sequence: Synthetic oligonucleotide
cgaggauuauacaguucaa

SEQ ID NO: 1981751 - RNA, 19 nt, Artificial Sequence
  Description of Artificial Sequence: Synthetic oligonucleotide
cccaccggguucggaaggc

SEQ ID NO: 1981752 - RNA, 19 nt, Artificial Sequence
  Description of Artificial Sequence: Synthetic oligonucleotide
cggacguucccagcguuug

SEQ ID NO: 1981753 - RNA, 19 nt, Artificial Sequence
  Description of Artificial Sequence: Synthetic oligonucleotide
gcggacacaggagguaucu

SEQ ID NO: 1981754 - RNA, 19 nt, Artificial Sequence
  Description of Artificial Sequence: Synthetic oligonucleotide
guccgcggcucggcgccgg

SEQ ID NO: 1981755 - RNA, 19 nt, Artificial Sequence
  Description of Artificial Sequence: Synthetic oligonucleotide
cagggacacccuacagccu

SEQ ID NO: 1981756 - RNA, 19 nt, Artificial Sequence
  Description of Artificial Sequence: Synthetic oligonucleotide
ccggguucggaaggcccgg

SEQ ID NO: 1981757 - RNA, 19 nt, Artificial Sequence
  Description of Artificial Sequence: Synthetic oligonucleotide
cgcggcucggcgccggucc

SEQ ID NO: 1981758 - RNA, 19 nt, Artificial Sequence
  Description of Artificial Sequence: Synthetic oligonucleotide
ccaccggguucggaaggcc

SEQ ID NO: 1981759 - RNA, 19 nt, Artificial Sequence
  Description of Artificial Sequence: Synthetic oligonucleotide
cgaucccgugcggacacag

SEQ ID NO: 1981760 - RNA, 19 nt, Artificial Sequence
  Description of Artificial Sequence: Synthetic oligonucleotide
agccgcggucuggccguuc

SEQ ID NO: 1981761 - RNA, 19 nt, Artificial Sequence
  Description of Artificial Sequence: Synthetic oligonucleotide
ccggcucgaucccgugcgg

SEQ ID NO: 1981762 - RNA, 19 nt, Artificial Sequence
  Description of Artificial Sequence: Synthetic oligonucleotide
gggacacccuacagccuuc

SEQ ID NO: 1981763 - RNA, 19 nt, Artificial Sequence
  Description of Artificial Sequence: Synthetic oligonucleotide
cguggauucgaggauuaua

SEQ ID NO: 1981764 - RNA, 19 nt, Artificial Sequence
  Description of Artificial Sequence: Synthetic oligonucleotide
ccuggcuagcauaucuuuu

SEQ ID NO: 1981765 - RNA, 19 nt, Artificial Sequence
  Description of Artificial Sequence: Synthetic oligonucleotide
cacuuggaucucguggauu

SEQ ID NO: 1981766 - RNA, 19 nt, Artificial Sequence
  Description of Artificial Sequence: Synthetic oligonucleotide
cguuuggaccauggcuuug

SEQ ID NO: 1981767 - RNA, 19 nt, Artificial Sequence
  Description of Artificial Sequence: Synthetic oligonucleotide
ggaagcuccgggccagguu

SEQ ID NO: 1981768 - RNA, 19 nt, Artificial Sequence
  Description of Artificial Sequence: Synthetic oligonucleotide
ccugaccgcuggaugcaaa

SEQ ID NO: 1981769 - RNA, 19 nt, Artificial Sequence
  Description of Artificial Sequence: Synthetic oligonucleotide
cugaggugacacgcaguau

SEQ ID NO: 1981770 - RNA, 19 nt, Artificial Sequence
  Description of Artificial Sequence: Synthetic oligonucleotide
ccgcggucuggccguucgg

SEQ ID NO: 1981771 - RNA, 19 nt, Artificial Sequence
  Description of Artificial Sequence: Synthetic oligonucleotide
gccuuccaccaaggaggcc

SEQ ID NO: 1981772 - RNA, 19 nt, Artificial Sequence
  Description of Artificial Sequence: Synthetic oligonucleotide
cccgcaaugcagcuucaau

SEQ ID NO: 1981773 - RNA, 19 nt, Artificial Sequence
  Description of Artificial Sequence: Synthetic oligonucleotide
gucuggccguucggaagcu

SEQ ID NO: 1981774 - RNA, 19 nt, Artificial Sequence
  Description of Artificial Sequence: Synthetic oligonucleotide
ccgugcggacacaggaggu

SEQ ID NO: 1981775 - RNA, 19 nt, Artificial Sequence
  Description of Artificial Sequence: Synthetic oligonucleotide
ggaggccgccaugucuacu

SEQ ID NO: 1981776 - RNA, 19 nt, Artificial Sequence
  Description of Artificial Sequence: Synthetic oligonucleotide
ccgguccuccaagacaggu

SEQ ID NO: 1981777 - RNA, 19 nt, Artificial Sequence
  Description of Artificial Sequence: Synthetic oligonucleotide
caugugggaccggcuucau

SEQ ID NO: 1981778 - RNA, 19 nt, Artificial Sequence
  Description of Artificial Sequence: Synthetic oligonucleotide
cgggacucaggaaccuugu

SEQ ID NO: 1981779 - RNA, 19 nt, Artificial Sequence
  Description of Artificial Sequence: Synthetic oligonucleotide
cgugcggacacaggaggua

SEQ ID NO: 1981780 - RNA, 19 nt, Artificial Sequence
  Description of Artificial Sequence: Synthetic oligonucleotide
ccacuuggaucucguggau

SEQ ID NO: 1981781 - RNA, 19 nt, Artificial Sequence
  Description of Artificial Sequence: Synthetic oligonucleotide
ccggucagcugaggugaca

SEQ ID NO: 1981782 - RNA, 19 nt, Artificial Sequence
  Description of Artificial Sequence: Synthetic oligonucleotide
cgcggucuggccguucgga

SEQ ID NO: 1981783 - RNA, 19 nt, Artificial Sequence
  Description of Artificial Sequence: Synthetic oligonucleotide
cgacugcagcgagccgcgg

SEQ ID NO: 1981784 - RNA, 19 nt, Artificial Sequence
  Description of Artificial Sequence: Synthetic oligonucleotide
cgguccuccaagacagguu

SEQ ID NO: 1981785 - RNA, 19 nt, Artificial Sequence
  Description of Artificial Sequence: Synthetic oligonucleotide
cggcucgaucccgugcgga

SEQ ID NO: 1981786 - RNA, 19 nt, Artificial Sequence
  Description of Artificial Sequence: Synthetic oligonucleotide
gcggcucggcgccgguccu

SEQ ID NO: 1981787 - RNA, 19 nt, Artificial Sequence
  Description of Artificial Sequence: Synthetic oligonucleotide
cguccgcggcucggcgccg

SEQ ID NO: 1981788 - RNA, 19 nt, Artificial Sequence
  Description of Artificial Sequence: Synthetic oligonucleotide
ccgcggcucggcgccgguc

SEQ ID NO: 1981789 - RNA, 19 nt, Artificial Sequence
  Description of Artificial Sequence: Synthetic oligonucleotide
ggcugucguccaaccgcuu

SEQ ID NO: 1981790 - RNA, 19 nt, Artificial Sequence
  Description of Artificial Sequence: Synthetic oligonucleotide
gagccgcggucuggccguu

SEQ ID NO: 1981791 - RNA, 19 nt, Artificial Sequence
  Description of Artificial Sequence: Synthetic oligonucleotide
cggguucggaaggcccggu

SEQ ID NO: 1981792 - RNA, 19 nt, Artificial Sequence
  Description of Artificial Sequence: Synthetic oligonucleotide
aaacgcaacaccuuugagc

SEQ ID NO: 1981793 - RNA, 19 nt, Artificial Sequence
  Description of Artificial Sequence: Synthetic oligonucleotide
gaauuggcagcucagaugg

SEQ ID NO: 1981794 - RNA, 19 nt, Artificial Sequence
  Description of Artificial Sequence: Synthetic oligonucleotide
gacagcaugaacucgaagg

SEQ ID NO: 1981795 - RNA, 19 nt, Artificial Sequence
  Description of Artificial Sequence: Synthetic oligonucleotide
aacgcaacaccuuugagca

SEQ ID NO: 1981796 - RNA, 19 nt, Artificial Sequence
  Description of Artificial Sequence: Synthetic oligonucleotide
uuaaagacgaugccguggg

SEQ ID NO: 1981797 - RNA, 19 nt, Artificial Sequence
  Description of Artificial Sequence: Synthetic oligonucleotide
uuggcuuuaaagacgaugc

SEQ ID NO: 1981798 - RNA, 19 nt, Artificial Sequence
  Description of Artificial Sequence: Synthetic oligonucleotide
acacgcggcacccagaucc

SEQ ID NO: 1981799 - RNA, 19 nt, Artificial Sequence
  Description of Artificial Sequence: Synthetic oligonucleotide
cauuaugcagcccacagcc

SEQ ID NO: 1981800 - RNA, 19 nt, Artificial Sequence
  Description of Artificial Sequence: Synthetic oligonucleotide
ucagcuguaccacauacug

SEQ ID NO: 1981801 - RNA, 19 nt, Artificial Sequence
  Description of Artificial Sequence: Synthetic oligonucleotide
uuuucucccgggaacaggg

SEQ ID NO: 1981802 - RNA, 19 nt, Artificial Sequence
  Description of Artificial Sequence: Synthetic oligonucleotide
uuuaaagacgaugccgugg

SEQ ID NO: 1981803 - RNA, 19 nt, Artificial Sequence
  Description of Artificial Sequence: Synthetic oligonucleotide
aguacugaugcagaagggc

SEQ ID NO: 1981804 - RNA, 19 nt, Artificial Sequence
  Description of Artificial Sequence: Synthetic oligonucleotide
cacacagcaaaguugcucg

SEQ ID NO: 1981805 - RNA, 19 nt, Artificial Sequence
  Description of Artificial Sequence: Synthetic oligonucleotide
aagacgaugccgugggcac

SEQ ID NO: 1981806 - RNA, 19 nt, Artificial Sequence
  Description of Artificial Sequence: Synthetic oligonucleotide
aaaaguacugaugcagaag

SEQ ID NO: 1981807 - RNA, 19 nt, Artificial Sequence
  Description of Artificial Sequence: Synthetic oligonucleotide
aaggagaucuuguuguagu

SEQ ID NO: 1981808 - RNA, 19 nt, Artificial Sequence
  Description of Artificial Sequence: Synthetic oligonucleotide
ugcagauagcucuugaccu

SEQ ID NO: 1981809 - RNA, 19 nt, Artificial Sequence
  Description of Artificial Sequence: Synthetic oligonucleotide
uucuugagggcaacgaucu

SEQ ID NO: 1981810 - RNA, 19 nt, Artificial Sequence
  Description of Artificial Sequence: Synthetic oligonucleotide
aaggggccgguccacaugg

SEQ ID NO: 1981811 - RNA, 19 nt, Artificial Sequence
  Description of Artificial Sequence: Synthetic oligonucleotide
gaacuugccuagcaggucc

SEQ ID NO: 1981812 - RNA, 19 nt, Artificial Sequence
  Description of Artificial Sequence: Synthetic oligonucleotide
uuguuggcguggcaaaacg

SEQ ID NO: 1981813 - RNA, 19 nt, Artificial Sequence
  Description of Artificial Sequence: Synthetic oligonucleotide
aaaacgcaacaccuuugag

SEQ ID NO: 1981814 - RNA, 19 nt, Artificial Sequence
  Description of Artificial Sequence: Synthetic oligonucleotide
augcagaagggccugggac

SEQ ID NO: 1981815 - RNA, 19 nt, Artificial Sequence
  Description of Artificial Sequence: Synthetic oligonucleotide
gaagucauggacaugggga

SEQ ID NO: 1981816 - RNA, 19 nt, Artificial Sequence
  Description of Artificial Sequence: Synthetic oligonucleotide
ucuccggccagacucgagg

SEQ ID NO: 1981817 - RNA, 19 nt, Artificial Sequence
  Description of Artificial Sequence: Synthetic oligonucleotide
caggaugcgaagcacacag

SEQ ID NO: 1981818 - RNA, 19 nt, Artificial Sequence
  Description of Artificial Sequence: Synthetic oligonucleotide
auacugacuguccucgauc

SEQ ID NO: 1981819 - RNA, 19 nt, Artificial Sequence
  Description of Artificial Sequence: Synthetic oligonucleotide
ugcuuggcuuuaaagacga

SEQ ID NO: 1981820 - RNA, 19 nt, Artificial Sequence
  Description of Artificial Sequence: Synthetic oligonucleotide
uagcucuugaccugugccg

SEQ ID NO: 1981821 - RNA, 19 nt, Artificial Sequence
  Description of Artificial Sequence: Synthetic oligonucleotide
uucccuuagagccugguua

SEQ ID NO: 1981822 - RNA, 19 nt, Artificial Sequence
  Description of Artificial Sequence: Synthetic oligonucleotide
acugccgagcaccauacag

SEQ ID NO: 1981823 - RNA, 19 nt, Artificial Sequence
  Description of Artificial Sequence: Synthetic oligonucleotide
aauguuguuggcguggcaa

SEQ ID NO: 1981824 - RNA, 19 nt, Artificial Sequence
  Description of Artificial Sequence: Synthetic oligonucleotide
ggugccugcuccuugaagg

SEQ ID NO: 1981825 - RNA, 19 nt, Artificial Sequence
  Description of Artificial Sequence: Synthetic oligonucleotide
uuaggaaugccauccucca

SEQ ID NO: 1981826 - RNA, 19 nt, Artificial Sequence
  Description of Artificial Sequence: Synthetic oligonucleotide
uaggucgacgcccugguca

SEQ ID NO: 1981827 - RNA, 19 nt, Artificial Sequence
  Description of Artificial Sequence: Synthetic oligonucleotide
ugaggaauuggcagcucag

SEQ ID NO: 1981828 - RNA, 19 nt, Artificial Sequence
  Description of Artificial Sequence: Synthetic oligonucleotide
cugcagauagcucuugacc

SEQ ID NO: 1981829 - RNA, 19 nt, Artificial Sequence
  Description of Artificial Sequence: Synthetic oligonucleotide
uguguagaggcgaccacca

SEQ ID NO: 1981830 - RNA, 19 nt, Artificial Sequence
  Description of Artificial Sequence: Synthetic oligonucleotide
acagcccauaggucgacgc

SEQ ID NO: 1981831 - RNA, 19 nt, Artificial Sequence
  Description of Artificial Sequence: Synthetic oligonucleotide
uacgugcuuggcuuuaaag

SEQ ID NO: 1981832 - RNA, 19 nt, Artificial Sequence
  Description of Artificial Sequence: Synthetic oligonucleotide
guuaggaaugccauccucc

SEQ ID NO: 1981833 - RNA, 19 nt, Artificial Sequence
  Description of Artificial Sequence: Synthetic oligonucleotide
cucgaucuccugcagagcc

SEQ ID NO: 1981834 - RNA, 19 nt, Artificial Sequence
  Description of Artificial Sequence: Synthetic oligonucleotide
ucccgaugcacaauguugu

SEQ ID NO: 1981835 - RNA, 19 nt, Artificial Sequence
  Description of Artificial Sequence: Synthetic oligonucleotide
uucaacagcucucccauua

SEQ ID NO: 1981836 - RNA, 19 nt, Artificial Sequence
  Description of Artificial Sequence: Synthetic oligonucleotide
gaugaagggccuaaucagc

SEQ ID NO: 1981837 - RNA, 19 nt, Artificial Sequence
  Description of Artificial Sequence: Synthetic oligonucleotide
agaggcgaccaccaucugg

SEQ ID NO: 1981838 - RNA, 19 nt, Artificial Sequence
  Description of Artificial Sequence: Synthetic oligonucleotide
agaggaggaacuugccuag

SEQ ID NO: 1981839 - RNA, 19 nt, Artificial Sequence
  Description of Artificial Sequence: Synthetic oligonucleotide
ucccuuagagccugguuag

SEQ ID NO: 1981840 - RNA, 19 nt, Artificial Sequence
  Description of Artificial Sequence: Synthetic oligonucleotide
cacauacugacuguccucg

SEQ ID NO: 1981841 - RNA, 19 nt, Artificial Sequence
  Description of Artificial Sequence: Synthetic oligonucleotide
ucgaugucauuuucucccg

SEQ ID NO: 1981842 - RNA, 19 nt, Artificial Sequence
  Description of Artificial Sequence: Synthetic oligonucleotide
agcaaaguugcucgauguc

SEQ ID NO: 1981843 - RNA, 19 nt, Artificial Sequence
  Description of Artificial Sequence: Synthetic oligonucleotide
uacugguccaugucgacac

SEQ ID NO: 1981844 - RNA, 19 nt, Artificial Sequence
  Description of Artificial Sequence: Synthetic oligonucleotide
gugaucuccggccagacuc

SEQ ID NO: 1981845 - RNA, 19 nt, Artificial Sequence
  Description of Artificial Sequence: Synthetic oligonucleotide
uagagccugguuaggaaug

SEQ ID NO: 1981846 - RNA, 19 nt, Artificial Sequence
  Description of Artificial Sequence: Synthetic oligonucleotide
ggaugaagggccuaaucag

SEQ ID NO: 1981847 - RNA, 19 nt, Artificial Sequence
  Description of Artificial Sequence: Synthetic oligonucleotide
agggcaacgaucucuccag

SEQ ID NO: 1981848 - RNA, 19 nt, Artificial Sequence
  Description of Artificial Sequence: Synthetic oligonucleotide
cuuggcuuuaaagacgaug

SEQ ID NO: 1981849 - RNA, 19 nt, Artificial Sequence
  Description of Artificial Sequence: Synthetic oligonucleotide
ugcgaagcacacagcaaag

SEQ ID NO: 1981850 - RNA, 19 nt, Artificial Sequence
  Description of Artificial Sequence: Synthetic oligonucleotide
cuucuugagggcaacgauc

SEQ ID NO: 1981851 - RNA, 19 nt, Artificial Sequence
  Description of Artificial Sequence: Synthetic oligonucleotide
uugauuucccuuagagccu

SEQ ID NO: 1981852 - RNA, 19 nt, Artificial Sequence
  Description of Artificial Sequence: Synthetic oligonucleotide
cuaggcgagcaucucaccc

SEQ ID NO: 1981853 - RNA, 19 nt, Artificial Sequence
  Description of Artificial Sequence: Synthetic oligonucleotide
cugccgagcaccauacagg

SEQ ID NO: 1981854 - RNA, 19 nt, Artificial Sequence
  Description of Artificial Sequence: Synthetic oligonucleotide
ugcgauacgcugguguggg

SEQ ID NO: 1981855 - RNA, 19 nt, Artificial Sequence
  Description of Artificial Sequence: Synthetic oligonucleotide
cuucagcuguaccacauac

SEQ ID NO: 1981856 - RNA, 19 nt, Artificial Sequence
  Description of Artificial Sequence: Synthetic oligonucleotide
ggcuuuaaagacgaugccg

SEQ ID NO: 1981857 - RNA, 19 nt, Artificial Sequence
  Description of Artificial Sequence: Synthetic oligonucleotide
ucuccagucucuacgugcu

SEQ ID NO: 1981858 - RNA, 19 nt, Artificial Sequence
  Description of Artificial Sequence: Synthetic oligonucleotide
uacugaugcagaagggccu

SEQ ID NO: 1981859 - RNA, 19 nt, Artificial Sequence
  Description of Artificial Sequence: Synthetic oligonucleotide
acccauucaacagcucucc

SEQ ID NO: 1981860 - RNA, 19 nt, Artificial Sequence
  Description of Artificial Sequence: Synthetic oligonucleotide
uuagagccugguuaggaau

SEQ ID NO: 1981861 - RNA, 19 nt, Artificial Sequence
  Description of Artificial Sequence: Synthetic oligonucleotide
uccacugcagggauccagc

SEQ ID NO: 1981862 - RNA, 19 nt, Artificial Sequence
  Description of Artificial Sequence: Synthetic oligonucleotide
acugacuccucaaggggcc

SEQ ID NO: 1981863 - RNA, 19 nt, Artificial Sequence
  Description of Artificial Sequence: Synthetic oligonucleotide
gaaggagaucuuguuguag

SEQ ID NO: 1981864 - RNA, 19 nt, Artificial Sequence
  Description of Artificial Sequence: Synthetic oligonucleotide
accacauacugacuguccu

SEQ ID NO: 1981865 - RNA, 19 nt, Artificial Sequence
  Description of Artificial Sequence: Synthetic oligonucleotide
uccaugucgacacgcggca

SEQ ID NO: 1981866 - RNA, 19 nt, Artificial Sequence
  Description of Artificial Sequence: Synthetic oligonucleotide
uaggcgagcaucucacccc

SEQ ID NO: 1981867 - RNA, 19 nt, Artificial Sequence
  Description of Artificial Sequence: Synthetic oligonucleotide
acuaggcgagcaucucacc

SEQ ID NO: 1981868 - RNA, 19 nt, Artificial Sequence
  Description of Artificial Sequence: Synthetic oligonucleotide
uucagcuguaccacauacu

SEQ ID NO: 1981869 - RNA, 19 nt, Artificial Sequence
  Description of Artificial Sequence: Synthetic oligonucleotide
agcccauaggucgacgccc

SEQ ID NO: 1981870 - RNA, 19 nt, Artificial Sequence
  Description of Artificial Sequence: Synthetic oligonucleotide
augcacaauguuguuggcg

SEQ ID NO: 1981871 - RNA, 19 nt, Artificial Sequence
  Description of Artificial Sequence: Synthetic oligonucleotide
gaacucgaaggccagcaca

SEQ ID NO: 1981872 - RNA, 19 nt, Artificial Sequence
  Description of Artificial Sequence: Synthetic oligonucleotide
ugccgagcaccauacagga

SEQ ID NO: 1981873 - RNA, 19 nt, Artificial Sequence
  Description of Artificial Sequence: Synthetic oligonucleotide
ugcucgaugucauuuucuc

SEQ ID NO: 1981874 - RNA, 19 nt, Artificial Sequence
  Description of Artificial Sequence: Synthetic oligonucleotide
ugcagagccuugauuuccc

SEQ ID NO: 1981875 - RNA, 19 nt, Artificial Sequence
  Description of Artificial Sequence: Synthetic oligonucleotide
cuggugggaggcaucaggc

SEQ ID NO: 1981876 - RNA, 19 nt, Artificial Sequence
  Description of Artificial Sequence: Synthetic oligonucleotide
acaccuuugagcagcaucu

SEQ ID NO: 1981877 - RNA, 19 nt, Artificial Sequence
  Description of Artificial Sequence: Synthetic oligonucleotide
acgcccuggucauacugcc

SEQ ID NO: 1981878 - RNA, 19 nt, Artificial Sequence
  Description of Artificial Sequence: Synthetic oligonucleotide
gucauggacauggggaggg

SEQ ID NO: 1981879 - RNA, 19 nt, Artificial Sequence
  Description of Artificial Sequence: Synthetic oligonucleotide
caccccucugggaugaagg

SEQ ID NO: 1981880 - RNA, 19 nt, Artificial Sequence
  Description of Artificial Sequence: Synthetic oligonucleotide
ggaauuggcagcucagaug

SEQ ID NO: 1981881 - RNA, 19 nt, Artificial Sequence
  Description of Artificial Sequence: Synthetic oligonucleotide
ugacagcaugaacucgaag

SEQ ID NO: 1981882 - RNA, 19 nt, Artificial Sequence
  Description of Artificial Sequence: Synthetic oligonucleotide
uaggaaugccauccuccag

SEQ ID NO: 1981883 - RNA, 19 nt, Artificial Sequence
  Description of Artificial Sequence: Synthetic oligonucleotide
ugauguguguagaggcgac

SEQ ID NO: 1981884 - RNA, 19 nt, Artificial Sequence
  Description of Artificial Sequence: Synthetic oligonucleotide
ugagccuuggguguggguc

SEQ ID NO: 1981885 - RNA, 19 nt, Artificial Sequence
  Description of Artificial Sequence: Synthetic oligonucleotide
ugauuucccuuagagccug

SEQ ID NO: 1981886 - RNA, 19 nt, Artificial Sequence
  Description of Artificial Sequence: Synthetic oligonucleotide
uguggguccuccugggcgc

SEQ ID NO: 1981887 - RNA, 19 nt, Artificial Sequence
  Description of Artificial Sequence: Synthetic oligonucleotide
ggcgcugaggaauuggcag

SEQ ID NO: 1981888 - RNA, 19 nt, Artificial Sequence
  Description of Artificial Sequence: Synthetic oligonucleotide
gcuaucuugagcuggccug

SEQ ID NO: 1981889 - RNA, 19 nt, Artificial Sequence
  Description of Artificial Sequence: Synthetic oligonucleotide
acaaauccugcuccaugug

SEQ ID NO: 1981890 - RNA, 19 nt, Artificial Sequence
  Description of Artificial Sequence: Synthetic oligonucleotide
gggaugaagggccuaauca

SEQ ID NO: 1981891 - RNA, 19 nt, Artificial Sequence
  Description of Artificial Sequence: Synthetic oligonucleotide
caugucgacacgcggcacc

SEQ ID NO: 1981892 - RNA, 19 nt, Artificial Sequence
  Description of Artificial Sequence: Synthetic oligonucleotide
agcaugaacucgaaggcca

SEQ ID NO: 1981893 - RNA, 19 nt, Artificial Sequence
  Description of Artificial Sequence: Synthetic oligonucleotide
auuaugcagcccacagccc

SEQ ID NO: 1981894 - RNA, 19 nt, Artificial Sequence
  Description of Artificial Sequence: Synthetic oligonucleotide
agcucuugaccugugccgg

SEQ ID NO: 1981895 - RNA, 19 nt, Artificial Sequence
  Description of Artificial Sequence: Synthetic oligonucleotide
agucaggcagcucugugau

SEQ ID NO: 1981896 - RNA, 19 nt, Artificial Sequence
  Description of Artificial Sequence: Synthetic oligonucleotide
ccgagcaccauacaggagc

SEQ ID NO: 1981897 - RNA, 19 nt, Artificial Sequence
  Description of Artificial Sequence: Synthetic oligonucleotide
uccccgaugcgaccgagga

SEQ ID NO: 1981898 - RNA, 19 nt, Artificial Sequence
  Description of Artificial Sequence: Synthetic oligonucleotide
ggucauacugccgagcacc

SEQ ID NO: 1981899 - RNA, 19 nt, Artificial Sequence
  Description of Artificial Sequence: Synthetic oligonucleotide
agucucuacgugcuuggcu

SEQ ID NO: 1981900 - RNA, 19 nt, Artificial Sequence
  Description of Artificial Sequence: Synthetic oligonucleotide
ggugggaggcaucaggcag

SEQ ID NO: 1981901 - RNA, 19 nt, Artificial Sequence
  Description of Artificial Sequence: Synthetic oligonucleotide
ugggcgcugaggaauuggc

SEQ ID NO: 1981902 - RNA, 19 nt, Artificial Sequence
  Description of Artificial Sequence: Synthetic oligonucleotide
caaaacgcaacaccuuuga

SEQ ID NO: 1981903 - RNA, 19 nt, Artificial Sequence
  Description of Artificial Sequence: Synthetic oligonucleotide
gaugcacaauguuguuggc

SEQ ID NO: 1981904 - RNA, 19 nt, Artificial Sequence
  Description of Artificial Sequence: Synthetic oligonucleotide
cuggguguggcgcaccacc

SEQ ID NO: 1981905 - RNA, 19 nt, Artificial Sequence
  Description of Artificial Sequence: Synthetic oligonucleotide
auacugccgagcaccauac

SEQ ID NO: 1981906 - RNA, 19 nt, Artificial Sequence
  Description of Artificial Sequence: Synthetic oligonucleotide
gagggcaacgaucucucca

SEQ ID NO: 1981907 - RNA, 19 nt, Artificial Sequence
  Description of Artificial Sequence: Synthetic oligonucleotide
ugggaacacggccuucagc

SEQ ID NO: 1981908 - RNA, 19 nt, Artificial Sequence
  Description of Artificial Sequence: Synthetic oligonucleotide
uguguguagaggcgaccac

SEQ ID NO: 1981909 - RNA, 19 nt, Artificial Sequence
  Description of Artificial Sequence: Synthetic oligonucleotide
ugugggaacacggccuuca

SEQ ID NO: 1981910 - RNA, 19 nt, Artificial Sequence
  Description of Artificial Sequence: Synthetic oligonucleotide
ucuugaccugugccggugc

SEQ ID NO: 1981911 - RNA, 19 nt, Artificial Sequence
  Description of Artificial Sequence: Synthetic oligonucleotide
augucgacacgcggcaccc

SEQ ID NO: 1981912 - RNA, 19 nt, Artificial Sequence
  Description of Artificial Sequence: Synthetic oligonucleotide
accccucugggaugaaggg

SEQ ID NO: 1981913 - RNA, 19 nt, Artificial Sequence
  Description of Artificial Sequence: Synthetic oligonucleotide
gaggcgaccaccaucugga

SEQ ID NO: 1981914 - RNA, 19 nt, Artificial Sequence
  Description of Artificial Sequence: Synthetic oligonucleotide
uccucaaggggccggucca

SEQ ID NO: 1981915 - RNA, 19 nt, Artificial Sequence
  Description of Artificial Sequence: Synthetic oligonucleotide
gagccuugggugugggucc

SEQ ID NO: 1981916 - RNA, 19 nt, Artificial Sequence
  Description of Artificial Sequence: Synthetic oligonucleotide
gaugcaguacugguccaug

SEQ ID NO: 1981917 - RNA, 19 nt, Artificial Sequence
  Description of Artificial Sequence: Synthetic oligonucleotide
gaugccgugggcacccucc

SEQ ID NO: 1981918 - RNA, 19 nt, Artificial Sequence
  Description of Artificial Sequence: Synthetic oligonucleotide
ggaugcgaagcacacagca

SEQ ID NO: 1981919 - RNA, 19 nt, Artificial Sequence
  Description of Artificial Sequence: Synthetic oligonucleotide
uugagcuggccugaggcac

SEQ ID NO: 1981920 - RNA, 19 nt, Artificial Sequence
  Description of Artificial Sequence: Synthetic oligonucleotide
gacuaggcgagcaucucac

SEQ ID NO: 1981921 - RNA, 19 nt, Artificial Sequence
  Description of Artificial Sequence: Synthetic oligonucleotide
gagccuugauuucccuuag

SEQ ID NO: 1981922 - RNA, 19 nt, Artificial Sequence
  Description of Artificial Sequence: Synthetic oligonucleotide
uuggcguggcaaaacgcaa

SEQ ID NO: 1981923 - RNA, 19 nt, Artificial Sequence
  Description of Artificial Sequence: Synthetic oligonucleotide
aucuugagcuggccugagg

SEQ ID NO: 1981924 - RNA, 19 nt, Artificial Sequence
  Description of Artificial Sequence: Synthetic oligonucleotide
uggcgcaccaccucugcca

SEQ ID NO: 1981925 - RNA, 19 nt, Artificial Sequence
  Description of Artificial Sequence: Synthetic oligonucleotide
uccugcuccaugugggaac

SEQ ID NO: 1981926 - RNA, 19 nt, Artificial Sequence
  Description of Artificial Sequence: Synthetic oligonucleotide
gaagggccuaaucagcucu

SEQ ID NO: 1981927 - RNA, 19 nt, Artificial Sequence
  Description of Artificial Sequence: Synthetic oligonucleotide
gaaugccauccuccagccg

SEQ ID NO: 1981928 - RNA, 19 nt, Artificial Sequence
  Description of Artificial Sequence: Synthetic oligonucleotide
caccugauguguguagagg

SEQ ID NO: 1981929 - RNA, 19 nt, Artificial Sequence
  Description of Artificial Sequence: Synthetic oligonucleotide
uggcguggcaaaacgcaac

SEQ ID NO: 1981930 - RNA, 19 nt, Artificial Sequence
  Description of Artificial Sequence: Synthetic oligonucleotide
uguggcgcaccaccucugc

SEQ ID NO: 1981931 - RNA, 19 nt, Artificial Sequence
  Description of Artificial Sequence: Synthetic oligonucleotide
guguguagaggcgaccacc

SEQ ID NO: 1981932 - RNA, 19 nt, Artificial Sequence
  Description of Artificial Sequence: Synthetic oligonucleotide
gaugagcagguuggcaggc

SEQ ID NO: 1981933 - RNA, 19 nt, Artificial Sequence
  Description of Artificial Sequence: Synthetic oligonucleotide
augaagggccuaaucagcu

SEQ ID NO: 1981934 - RNA, 19 nt, Artificial Sequence
  Description of Artificial Sequence: Synthetic oligonucleotide
guugcucgaugucauuuuc

SEQ ID NO: 1981935 - RNA, 19 nt, Artificial Sequence
  Description of Artificial Sequence: Synthetic oligonucleotide
caacgaucucuccagucuc

SEQ ID NO: 1981936 - RNA, 19 nt, Artificial Sequence
  Description of Artificial Sequence: Synthetic oligonucleotide
ugaagggccuaaucagcuc

SEQ ID NO: 1981937 - RNA, 19 nt, Artificial Sequence
  Description of Artificial Sequence: Synthetic oligonucleotide
ugugaucuccggccagacu

SEQ ID NO: 1981938 - RNA, 19 nt, Artificial Sequence
  Description of Artificial Sequence: Synthetic oligonucleotide
aguugcucgaugucauuuu

SEQ ID NO: 1981939 - RNA, 19 nt, Artificial Sequence
  Description of Artificial Sequence: Synthetic oligonucleotide
accgaggaugcaguacugg

SEQ ID NO: 1981940 - RNA, 19 nt, Artificial Sequence
  Description of Artificial Sequence: Synthetic oligonucleotide
cagcaugaacucgaaggcc

SEQ ID NO: 1981941 - RNA, 19 nt, Artificial Sequence
  Description of Artificial Sequence: Synthetic oligonucleotide
uuucccuuagagccugguu

SEQ ID NO: 1981942 - RNA, 19 nt, Artificial Sequence
  Description of Artificial Sequence: Synthetic oligonucleotide
augccgugggcacccuccc

SEQ ID NO: 1981943 - RNA, 19 nt, Artificial Sequence
  Description of Artificial Sequence: Synthetic oligonucleotide
ucugugaucuccggccaga

SEQ ID NO: 1981944 - RNA, 19 nt, Artificial Sequence
  Description of Artificial Sequence: Synthetic oligonucleotide
auuggcagcucagauggau

SEQ ID NO: 1981945 - RNA, 19 nt, Artificial Sequence
  Description of Artificial Sequence: Synthetic oligonucleotide
uggucauacugccgagcac

SEQ ID NO: 1981946 - RNA, 19 nt, Artificial Sequence
  Description of Artificial Sequence: Synthetic oligonucleotide
cuuagagccugguuaggaa

SEQ ID NO: 1981947 - RNA, 19 nt, Artificial Sequence
  Description of Artificial Sequence: Synthetic oligonucleotide
ugagcagguuggcaggcuu

SEQ ID NO: 1981948 - RNA, 19 nt, Artificial Sequence
  Description of Artificial Sequence: Synthetic oligonucleotide
cuggucauacugccgagca

SEQ ID NO: 1981949 - RNA, 19 nt, Artificial Sequence
  Description of Artificial Sequence: Synthetic oligonucleotide
gacgcccuggucauacugc

SEQ ID NO: 1981950 - RNA, 19 nt, Artificial Sequence
  Description of Artificial Sequence: Synthetic oligonucleotide
gggaacacggccuucagcu

SEQ ID NO: 1981951 - RNA, 19 nt, Artificial Sequence
  Description of Artificial Sequence: Synthetic oligonucleotide
cuugaccugugccggugcc

SEQ ID NO: 1981952 - RNA, 19 nt, Artificial Sequence
  Description of Artificial Sequence: Synthetic oligonucleotide
uggcaaaacgcaacaccuu

SEQ ID NO: 1981953 - RNA, 19 nt, Artificial Sequence
  Description of Artificial Sequence: Synthetic oligonucleotide
gucgacacgcggcacccag

SEQ ID NO: 1981954 - RNA, 19 nt, Artificial Sequence
  Description of Artificial Sequence: Synthetic oligonucleotide
auguuguuggcguggcaaa

SEQ ID NO: 1981955 - RNA, 19 nt, Artificial Sequence
  Description of Artificial Sequence: Synthetic oligonucleotide
auaggucgacgcccugguc

SEQ ID NO: 1981956 - RNA, 19 nt, Artificial Sequence
  Description of Artificial Sequence: Synthetic oligonucleotide
ugggacgcugcgauacgcu

SEQ ID NO: 1981957 - RNA, 19 nt, Artificial Sequence
  Description of Artificial Sequence: Synthetic oligonucleotide
gacgaugccgugggcaccc

SEQ ID NO: 1981958 - RNA, 19 nt, Artificial Sequence
  Description of Artificial Sequence: Synthetic oligonucleotide
cacaaauccugcuccaugu

SEQ ID NO: 1981959 - RNA, 19 nt, Artificial Sequence
  Description of Artificial Sequence: Synthetic oligonucleotide
guuguuggcguggcaaaac

SEQ ID NO: 1981960 - RNA, 19 nt, Artificial Sequence
  Description of Artificial Sequence: Synthetic oligonucleotide
guagaggcgaccaccaucu

SEQ ID NO: 1981961 - RNA, 19 nt, Artificial Sequence
  Description of Artificial Sequence: Synthetic oligonucleotide
cuaaucagcucuggguuca

SEQ ID NO: 1981962 - RNA, 19 nt, Artificial Sequence
  Description of Artificial Sequence: Synthetic oligonucleotide
agacgaugccgugggcacc

SEQ ID NO: 1981963 - RNA, 19 nt, Artificial Sequence
  Description of Artificial Sequence: Synthetic oligonucleotide
uggguucagcacugacucc

SEQ ID NO: 1981964 - RNA, 19 nt, Artificial Sequence
  Description of Artificial Sequence: Synthetic oligonucleotide
cauacugccgagcaccaua

SEQ ID NO: 1981965 - RNA, 19 nt, Artificial Sequence
  Description of Artificial Sequence: Synthetic oligonucleotide
ggguagaggaggaacuugc

SEQ ID NO: 1981966 - RNA, 19 nt, Artificial Sequence
  Description of Artificial Sequence: Synthetic oligonucleotide
gcagauagcucuugaccug

SEQ ID NO: 1981967 - RNA, 19 nt, Artificial Sequence
  Description of Artificial Sequence: Synthetic oligonucleotide
aggaugcgaagcacacagc

SEQ ID NO: 1981968 - RNA, 19 nt, Artificial Sequence
  Description of Artificial Sequence: Synthetic oligonucleotide
gaggaauuggcagcucaga

SEQ ID NO: 1981969 - RNA, 19 nt, Artificial Sequence
  Description of Artificial Sequence: Synthetic oligonucleotide
cauuuucucccgggaacag

SEQ ID NO: 1981970 - RNA, 19 nt, Artificial Sequence
  Description of Artificial Sequence: Synthetic oligonucleotide
cccauuaugcagcccacag

SEQ ID NO: 1981971 - RNA, 19 nt, Artificial Sequence
  Description of Artificial Sequence: Synthetic oligonucleotide
gcuccaugugggaacacgg

SEQ ID NO: 1981972 - RNA, 19 nt, Artificial Sequence
  Description of Artificial Sequence: Synthetic oligonucleotide
uaucuugagcuggccugag

SEQ ID NO: 1981973 - RNA, 19 nt, Artificial Sequence
  Description of Artificial Sequence: Synthetic oligonucleotide
gcacaaauccugcuccaug

SEQ ID NO: 1981974 - RNA, 19 nt, Artificial Sequence
  Description of Artificial Sequence: Synthetic oligonucleotide
cagcccauaggucgacgcc

SEQ ID NO: 1981975 - RNA, 19 nt, Artificial Sequence
  Description of Artificial Sequence: Synthetic oligonucleotide
ucucaccccucugggauga

SEQ ID NO: 1981976 - RNA, 19 nt, Artificial Sequence
  Description of Artificial Sequence: Synthetic oligonucleotide
cugcgauacgcuggugugg

SEQ ID NO: 1981977 - RNA, 19 nt, Artificial Sequence
  Description of Artificial Sequence: Synthetic oligonucleotide
gcugcgauacgcuggugug

SEQ ID NO: 1981978 - RNA, 19 nt, Artificial Sequence
  Description of Artificial Sequence: Synthetic oligonucleotide
gaugcgaagcacacagcaa

SEQ ID NO: 1981979 - RNA, 19 nt, Artificial Sequence
  Description of Artificial Sequence: Synthetic oligonucleotide
aagggccuaaucagcucug

SEQ ID NO: 1981980 - RNA, 19 nt, Artificial Sequence
  Description of Artificial Sequence: Synthetic oligonucleotide
cugauguguguagaggcga

SEQ ID NO: 1981981 - RNA, 19 nt, Artificial Sequence
  Description of Artificial Sequence: Synthetic oligonucleotide
ccauuaugcagcccacagc

SEQ ID NO: 1981982 - RNA, 19 nt, Artificial Sequence
  Description of Artificial Sequence: Synthetic oligonucleotide
cucugugaucuccggccag

SEQ ID NO: 1981983 - RNA, 19 nt, Artificial Sequence
  Description of Artificial Sequence: Synthetic oligonucleotide
auggacauggggagggccu

SEQ ID NO: 1981984 - RNA, 19 nt, Artificial Sequence
  Description of Artificial Sequence: Synthetic oligonucleotide
cucccauuaugcagcccac

SEQ ID NO: 1981985 - RNA, 19 nt, Artificial Sequence
  Description of Artificial Sequence: Synthetic oligonucleotide
uggacauggggagggccug

SEQ ID NO: 1981986 - RNA, 19 nt, Artificial Sequence
  Description of Artificial Sequence: Synthetic oligonucleotide
gauuucccuuagagccugg

SEQ ID NO: 1981987 - RNA, 19 nt, Artificial Sequence
  Description of Artificial Sequence: Synthetic oligonucleotide
uccggccagacucgaggac

SEQ ID NO: 1981988 - RNA, 19 nt, Artificial Sequence
  Description of Artificial Sequence: Synthetic oligonucleotide
gcuuuaaagacgaugccgu

SEQ ID NO: 1981989 - RNA, 19 nt, Artificial Sequence
  Description of Artificial Sequence: Synthetic oligonucleotide
cccgaugcgaccgaggaug

SEQ ID NO: 1981990 - RNA, 19 nt, Artificial Sequence
  Description of Artificial Sequence: Synthetic oligonucleotide
ucccauuaugcagcccaca

SEQ ID NO: 1981991 - RNA, 19 nt, Artificial Sequence
  Description of Artificial Sequence: Synthetic oligonucleotide
gggccuaaucagcucuggg

SEQ ID NO: 1981992 - RNA, 19 nt, Artificial Sequence
  Description of Artificial Sequence: Synthetic oligonucleotide
cugggcgcugaggaauugg

SEQ ID NO: 1981993 - RNA, 19 nt, Artificial Sequence
  Description of Artificial Sequence: Synthetic oligonucleotide
agccugguuaggaaugcca

SEQ ID NO: 1981994 - RNA, 19 nt, Artificial Sequence
  Description of Artificial Sequence: Synthetic oligonucleotide
aggaugcaguacuggucca

SEQ ID NO: 1981995 - RNA, 19 nt, Artificial Sequence
  Description of Artificial Sequence: Synthetic oligonucleotide
ucauggacauggggagggc

SEQ ID NO: 1981996 - RNA, 19 nt, Artificial Sequence
  Description of Artificial Sequence: Synthetic oligonucleotide
aggugcuccuggggcaagc

SEQ ID NO: 1981997 - RNA, 19 nt, Artificial Sequence
  Description of Artificial Sequence: Synthetic oligonucleotide
ucgacacgcggcacccaga

SEQ ID NO: 1981998 - RNA, 19 nt, Artificial Sequence
  Description of Artificial Sequence: Synthetic oligonucleotide
uugaccugugccggugcca

SEQ ID NO: 1981999 - RNA, 19 nt, Artificial Sequence
  Description of Artificial Sequence: Synthetic oligonucleotide
aggucgacgcccuggucau

SEQ ID NO: 1982000 - RNA, 19 nt, Artificial Sequence
  Description of Artificial Sequence: Synthetic oligonucleotide
cugggacgcugcgauacgc

SEQ ID NO: 1982001 - RNA, 19 nt, Artificial Sequence
  Description of Artificial Sequence: Synthetic oligonucleotide
aguggccgcuggguguggc

SEQ ID NO: 1982002 - RNA, 19 nt, Artificial Sequence
  Description of Artificial Sequence: Synthetic oligonucleotide
cuaucuugagcuggccuga

SEQ ID NO: 1982003 - RNA, 19 nt, Artificial Sequence
  Description of Artificial Sequence: Synthetic oligonucleotide
gcaaaacgcaacaccuuug

SEQ ID NO: 1982004 - RNA, 19 nt, Artificial Sequence
  Description of Artificial Sequence: Synthetic oligonucleotide
ccuaaucagcucuggguuc

SEQ ID NO: 1982005 - RNA, 19 nt, Artificial Sequence
  Description of Artificial Sequence: Synthetic oligonucleotide
gaggaggaacuugccuagc

SEQ ID NO: 1982006 - RNA, 19 nt, Artificial Sequence
  Description of Artificial Sequence: Synthetic oligonucleotide
ugggugagccuugggugug

SEQ ID NO: 1982007 - RNA, 19 nt, Artificial Sequence
  Description of Artificial Sequence: Synthetic oligonucleotide
ucuacgugcuuggcuuuaa

SEQ ID NO: 1982008 - RNA, 19 nt, Artificial Sequence
  Description of Artificial Sequence: Synthetic oligonucleotide
gucgacgcccuggucauac

SEQ ID NO: 1982009 - RNA, 19 nt, Artificial Sequence
  Description of Artificial Sequence: Synthetic oligonucleotide
acccuccccgaugcgaccg

SEQ ID NO: 1982010 - RNA, 19 nt, Artificial Sequence
  Description of Artificial Sequence: Synthetic oligonucleotide
cuccccgaugcgaccgagg

SEQ ID NO: 1982011 - RNA, 19 nt, Artificial Sequence
  Description of Artificial Sequence: Synthetic oligonucleotide
ggacccauucaacagcucu

SEQ ID NO: 1982012 - RNA, 19 nt, Artificial Sequence
  Description of Artificial Sequence: Synthetic oligonucleotide
guucagcacugacuccuca

SEQ ID NO: 1982013 - RNA, 19 nt, Artificial Sequence
  Description of Artificial Sequence: Synthetic oligonucleotide
guagccaccugaugugugu

SEQ ID NO: 1982014 - RNA, 19 nt, Artificial Sequence
  Description of Artificial Sequence: Synthetic oligonucleotide
cagcucagauggaugggca

SEQ ID NO: 1982015 - RNA, 19 nt, Artificial Sequence
  Description of Artificial Sequence: Synthetic oligonucleotide
gagccugguuaggaaugcc

SEQ ID NO: 1982016 - RNA, 19 nt, Artificial Sequence
  Description of Artificial Sequence: Synthetic oligonucleotide
ggcaacgaucucuccaguc

SEQ ID NO: 1982017 - RNA, 19 nt, Artificial Sequence
  Description of Artificial Sequence: Synthetic oligonucleotide
ccauucaacagcucuccca

SEQ ID NO: 1982018 - RNA, 19 nt, Artificial Sequence
  Description of Artificial Sequence: Synthetic oligonucleotide
gcgcugaggaauuggcagc

SEQ ID NO: 1982019 - RNA, 19 nt, Artificial Sequence
  Description of Artificial Sequence: Synthetic oligonucleotide
gcaacgaucucuccagucu

SEQ ID NO: 1982020 - RNA, 19 nt, Artificial Sequence
  Description of Artificial Sequence: Synthetic oligonucleotide
ggacuaggcgagcaucuca

SEQ ID NO: 1982021 - RNA, 19 nt, Artificial Sequence
  Description of Artificial Sequence: Synthetic oligonucleotide
ggcguggcaaaacgcaaca

SEQ ID NO: 1982022 - RNA, 19 nt, Artificial Sequence
  Description of Artificial Sequence: Synthetic oligonucleotide
guggccgcuggguguggcg

SEQ ID NO: 1982023 - RNA, 19 nt, Artificial Sequence
  Description of Artificial Sequence: Synthetic oligonucleotide
aauuggcagcucagaugga

SEQ ID NO: 1982024 - RNA, 19 nt, Artificial Sequence
  Description of Artificial Sequence: Synthetic oligonucleotide
gaccgaggaugcaguacug

SEQ ID NO: 1982025 - RNA, 19 nt, Artificial Sequence
  Description of Artificial Sequence: Synthetic oligonucleotide
cugacuccucaaggggccg

SEQ ID NO: 1982026 - RNA, 19 nt, Artificial Sequence
  Description of Artificial Sequence: Synthetic oligonucleotide
gacgcugcgauacgcuggu

SEQ ID NO: 1982027 - RNA, 19 nt, Artificial Sequence
  Description of Artificial Sequence: Synthetic oligonucleotide
cacggccuucagcuguacc

SEQ ID NO: 1982028 - RNA, 19 nt, Artificial Sequence
  Description of Artificial Sequence: Synthetic oligonucleotide
uagaggcgaccaccaucug

SEQ ID NO: 1982029 - RNA, 19 nt, Artificial Sequence
  Description of Artificial Sequence: Synthetic oligonucleotide
ugccauccuccagccgucg

SEQ ID NO: 1982030 - RNA, 19 nt, Artificial Sequence
  Description of Artificial Sequence: Synthetic oligonucleotide
ccaccugauguguguagag

SEQ ID NO: 1982031 - RNA, 19 nt, Artificial Sequence
  Description of Artificial Sequence: Synthetic oligonucleotide
agcacaaauccugcuccau

SEQ ID NO: 1982032 - RNA, 19 nt, Artificial Sequence
  Description of Artificial Sequence: Synthetic oligonucleotide
gggacgcugcgauacgcug

SEQ ID NO: 1982033 - RNA, 19 nt, Artificial Sequence
  Description of Artificial Sequence: Synthetic oligonucleotide
caucucaccccucugggau

SEQ ID NO: 1982034 - RNA, 19 nt, Artificial Sequence
  Description of Artificial Sequence: Synthetic oligonucleotide
uggccgcuggguguggcgc

SEQ ID NO: 1982035 - RNA, 19 nt, Artificial Sequence
  Description of Artificial Sequence: Synthetic oligonucleotide
ggccuaaucagcucugggu

SEQ ID NO: 1982036 - RNA, 19 nt, Artificial Sequence
  Description of Artificial Sequence: Synthetic oligonucleotide
gcagcccacagcccauagg

SEQ ID NO: 1982037 - RNA, 19 nt, Artificial Sequence
  Description of Artificial Sequence: Synthetic oligonucleotide
ugccgugggcacccucccc

SEQ ID NO: 1982038 - RNA, 19 nt, Artificial Sequence
  Description of Artificial Sequence: Synthetic oligonucleotide
acccgggccaggccaaagu

SEQ ID NO: 1982039 - RNA, 19 nt, Artificial Sequence
  Description of Artificial Sequence: Synthetic oligonucleotide
uccugggcgcugaggaauu

SEQ ID NO: 1982040 - RNA, 19 nt, Artificial Sequence
  Description of Artificial Sequence: Synthetic oligonucleotide
guggcgcaccaccucugcc

SEQ ID NO: 1982041 - RNA, 19 nt, Artificial Sequence
  Description of Artificial Sequence: Synthetic oligonucleotide
aggcgaccaccaucuggag

SEQ ID NO: 1982042 - RNA, 19 nt, Artificial Sequence
  Description of Artificial Sequence: Synthetic oligonucleotide
augccauccuccagccguc

SEQ ID NO: 1982043 - RNA, 19 nt, Artificial Sequence
  Description of Artificial Sequence: Synthetic oligonucleotide
gcacacagcaaaguugcuc

SEQ ID NO: 1982044 - RNA, 19 nt, Artificial Sequence
  Description of Artificial Sequence: Synthetic oligonucleotide
gcacaauguuguuggcgug

SEQ ID NO: 1982045 - RNA, 19 nt, Artificial Sequence
  Description of Artificial Sequence: Synthetic oligonucleotide
cagcacaaauccugcucca

SEQ ID NO: 1982046 - RNA, 19 nt, Artificial Sequence
  Description of Artificial Sequence: Synthetic oligonucleotide
ugcgaccgaggaugcagua

SEQ ID NO: 1982047 - RNA, 19 nt, Artificial Sequence
  Description of Artificial Sequence: Synthetic oligonucleotide
cacagcccauaggucgacg

SEQ ID NO: 1982048 - RNA, 19 nt, Artificial Sequence
  Description of Artificial Sequence: Synthetic oligonucleotide
gggguagaggaggaacuug

SEQ ID NO: 1982049 - RNA, 19 nt, Artificial Sequence
  Description of Artificial Sequence: Synthetic oligonucleotide
ccugguuaggaaugccauc

SEQ ID NO: 1982050 - RNA, 19 nt, Artificial Sequence
  Description of Artificial Sequence: Synthetic oligonucleotide
ggcagcucagauggauggg

SEQ ID NO: 1982051 - RNA, 19 nt, Artificial Sequence
  Description of Artificial Sequence: Synthetic oligonucleotide
gaagggccugggacgcugc

SEQ ID NO: 1982052 - RNA, 19 nt, Artificial Sequence
  Description of Artificial Sequence: Synthetic oligonucleotide
ccauaggucgacgcccugg

SEQ ID NO: 1982053 - RNA, 19 nt, Artificial Sequence
  Description of Artificial Sequence: Synthetic oligonucleotide
augugggaacacggccuuc

SEQ ID NO: 1982054 - RNA, 19 nt, Artificial Sequence
  Description of Artificial Sequence: Synthetic oligonucleotide
ccacauacugacuguccuc

SEQ ID NO: 1982055 - RNA, 19 nt, Artificial Sequence
  Description of Artificial Sequence: Synthetic oligonucleotide
ggcaaaacgcaacaccuuu

SEQ ID NO: 1982056 - RNA, 19 nt, Artificial Sequence
  Description of Artificial Sequence: Synthetic oligonucleotide
gucauacugccgagcacca

SEQ ID NO: 1982057 - RNA, 19 nt, Artificial Sequence
  Description of Artificial Sequence: Synthetic oligonucleotide
gccagacucgaggacuggg

SEQ ID NO: 1982058 - RNA, 19 nt, Artificial Sequence
  Description of Artificial Sequence: Synthetic oligonucleotide
caccuuugagcagcaucug

SEQ ID NO: 1982059 - RNA, 19 nt, Artificial Sequence
  Description of Artificial Sequence: Synthetic oligonucleotide
gguguggguccuccugggc

SEQ ID NO: 1982060 - RNA, 19 nt, Artificial Sequence
  Description of Artificial Sequence: Synthetic oligonucleotide
cuccggccagacucgagga

SEQ ID NO: 1982061 - RNA, 19 nt, Artificial Sequence
  Description of Artificial Sequence: Synthetic oligonucleotide
cauaggucgacgcccuggu

SEQ ID NO: 1982062 - RNA, 19 nt, Artificial Sequence
  Description of Artificial Sequence: Synthetic oligonucleotide
cugggugagccuugggugu

SEQ ID NO: 1982063 - RNA, 19 nt, Artificial Sequence
  Description of Artificial Sequence: Synthetic oligonucleotide
aggcaggacuaggcgagca

SEQ ID NO: 1982064 - RNA, 19 nt, Artificial Sequence
  Description of Artificial Sequence: Synthetic oligonucleotide
uagccaccugaugugugua

SEQ ID NO: 1982065 - RNA, 19 nt, Artificial Sequence
  Description of Artificial Sequence: Synthetic oligonucleotide
cauacugacuguccucgau

SEQ ID NO: 1982066 - RNA, 19 nt, Artificial Sequence
  Description of Artificial Sequence: Synthetic oligonucleotide
ccaccaucuggagagaaga

SEQ ID NO: 1982067 - RNA, 19 nt, Artificial Sequence
  Description of Artificial Sequence: Synthetic oligonucleotide
cacccuccccgaugcgacc

SEQ ID NO: 1982068 - RNA, 19 nt, Artificial Sequence
  Description of Artificial Sequence: Synthetic oligonucleotide
cucgaaggccagcacaaau

SEQ ID NO: 1982069 - RNA, 19 nt, Artificial Sequence
  Description of Artificial Sequence: Synthetic oligonucleotide
gguggcccaggaugcgaag

SEQ ID NO: 1982070 - RNA, 19 nt, Artificial Sequence
  Description of Artificial Sequence: Synthetic oligonucleotide
augcgaccgaggaugcagu

SEQ ID NO: 1982071 - RNA, 19 nt, Artificial Sequence
  Description of Artificial Sequence: Synthetic oligonucleotide
gccuaaucagcucuggguu

SEQ ID NO: 1982072 - RNA, 19 nt, Artificial Sequence
  Description of Artificial Sequence: Synthetic oligonucleotide
gcaccauacaggagcucag

SEQ ID NO: 1982073 - RNA, 19 nt, Artificial Sequence
  Description of Artificial Sequence: Synthetic oligonucleotide
aagacccgggccaggccaa

SEQ ID NO: 1982074 - RNA, 19 nt, Artificial Sequence
  Description of Artificial Sequence: Synthetic oligonucleotide
ucgacgcccuggucauacu

SEQ ID NO: 1982075 - RNA, 19 nt, Artificial Sequence
  Description of Artificial Sequence: Synthetic oligonucleotide
gacacgcggcacccagauc

SEQ ID NO: 1982076 - RNA, 19 nt, Artificial Sequence
  Description of Artificial Sequence: Synthetic oligonucleotide
ugccggugccaguggccgc

SEQ ID NO: 1982077 - RNA, 19 nt, Artificial Sequence
  Description of Artificial Sequence: Synthetic oligonucleotide
gccugggacgcugcgauac

SEQ ID NO: 1982078 - RNA, 19 nt, Artificial Sequence
  Description of Artificial Sequence: Synthetic oligonucleotide
gcaggacuaggcgagcauc

SEQ ID NO: 1982079 - RNA, 19 nt, Artificial Sequence
  Description of Artificial Sequence: Synthetic oligonucleotide
ggccgguccacauggaagu

SEQ ID NO: 1982080 - RNA, 19 nt, Artificial Sequence
  Description of Artificial Sequence: Synthetic oligonucleotide
caggagcucaggggcucgg

SEQ ID NO: 1982081 - RNA, 19 nt, Artificial Sequence
  Description of Artificial Sequence: Synthetic oligonucleotide
gguguggcgcaccaccucu

SEQ ID NO: 1982082 - RNA, 19 nt, Artificial Sequence
  Description of Artificial Sequence: Synthetic oligonucleotide
gucaggcagcucugugauc

SEQ ID NO: 1982083 - RNA, 19 nt, Artificial Sequence
  Description of Artificial Sequence: Synthetic oligonucleotide
gaucuccggccagacucga

SEQ ID NO: 1982084 - RNA, 19 nt, Artificial Sequence
  Description of Artificial Sequence: Synthetic oligonucleotide
gacccgggccaggccaaag

SEQ ID NO: 1982085 - RNA, 19 nt, Artificial Sequence
  Description of Artificial Sequence: Synthetic oligonucleotide
cuacgugcuuggcuuuaaa

SEQ ID NO: 1982086 - RNA, 19 nt, Artificial Sequence
  Description of Artificial Sequence: Synthetic oligonucleotide
ccuggucauacugccgagc

SEQ ID NO: 1982087 - RNA, 19 nt, Artificial Sequence
  Description of Artificial Sequence: Synthetic oligonucleotide
caccggugccugcuccuug

SEQ ID NO: 1982088 - RNA, 19 nt, Artificial Sequence
  Description of Artificial Sequence: Synthetic oligonucleotide
cagauagcucuugaccugu

SEQ ID NO: 1982089 - RNA, 19 nt, Artificial Sequence
  Description of Artificial Sequence: Synthetic oligonucleotide
caggcaggacuaggcgagc

SEQ ID NO: 1982090 - RNA, 19 nt, Artificial Sequence
  Description of Artificial Sequence: Synthetic oligonucleotide
ugucgacacgcggcaccca

SEQ ID NO: 1982091 - RNA, 19 nt, Artificial Sequence
  Description of Artificial Sequence: Synthetic oligonucleotide
ccuuagagccugguuagga

SEQ ID NO: 1982092 - RNA, 19 nt, Artificial Sequence
  Description of Artificial Sequence: Synthetic oligonucleotide
ccgaugcgaccgaggaugc

SEQ ID NO: 1982093 - RNA, 19 nt, Artificial Sequence
  Description of Artificial Sequence: Synthetic oligonucleotide
aucuccggccagacucgag

SEQ ID NO: 1982094 - RNA, 19 nt, Artificial Sequence
  Description of Artificial Sequence: Synthetic oligonucleotide
ccugggacgcugcgauacg

SEQ ID NO: 1982095 - RNA, 19 nt, Artificial Sequence
  Description of Artificial Sequence: Synthetic oligonucleotide
guguggcgcaccaccucug

SEQ ID NO: 1982096 - RNA, 19 nt, Artificial Sequence
  Description of Artificial Sequence: Synthetic oligonucleotide
gcgauacgcuggugugggg

SEQ ID NO: 1982097 - RNA, 19 nt, Artificial Sequence
  Description of Artificial Sequence: Synthetic oligonucleotide
aggagcucaggggcucggu

SEQ ID NO: 1982098 - RNA, 19 nt, Artificial Sequence
  Description of Artificial Sequence: Synthetic oligonucleotide
ccuuggguguggguccucc

SEQ ID NO: 1982099 - RNA, 19 nt, Artificial Sequence
  Description of Artificial Sequence: Synthetic oligonucleotide
agccuuggguguggguccu

SEQ ID NO: 1982100 - RNA, 19 nt, Artificial Sequence
  Description of Artificial Sequence: Synthetic oligonucleotide
caugugggaacacggccuu

SEQ ID NO: 1982101 - RNA, 19 nt, Artificial Sequence
  Description of Artificial Sequence: Synthetic oligonucleotide
cgcggcacccagauccucc

SEQ ID NO: 1982102 - RNA, 19 nt, Artificial Sequence
  Description of Artificial Sequence: Synthetic oligonucleotide
cucaaggggccgguccaca

SEQ ID NO: 1982103 - RNA, 19 nt, Artificial Sequence
  Description of Artificial Sequence: Synthetic oligonucleotide
gcgaccgaggaugcaguac

SEQ ID NO: 1982104 - RNA, 19 nt, Artificial Sequence
  Description of Artificial Sequence: Synthetic oligonucleotide
gggcaccggugccugcucc

SEQ ID NO: 1982105 - RNA, 19 nt, Artificial Sequence
  Description of Artificial Sequence: Synthetic oligonucleotide
gccauccuccagccgucgc

SEQ ID NO: 1982106 - RNA, 19 nt, Artificial Sequence
  Description of Artificial Sequence: Synthetic oligonucleotide
gcacccuccccgaugcgac

SEQ ID NO: 1982107 - RNA, 19 nt, Artificial Sequence
  Description of Artificial Sequence: Synthetic oligonucleotide
cccuuagagccugguuagg

SEQ ID NO: 1982108 - RNA, 19 nt, Artificial Sequence
  Description of Artificial Sequence: Synthetic oligonucleotide
ggguguggcgcaccaccuc

SEQ ID NO: 1982109 - RNA, 19 nt, Artificial Sequence
  Description of Artificial Sequence: Synthetic oligonucleotide
ggcacccuccccgaugcga

SEQ ID NO: 1982110 - RNA, 19 nt, Artificial Sequence
  Description of Artificial Sequence: Synthetic oligonucleotide
cccacagcccauaggucga

SEQ ID NO: 1982111 - RNA, 19 nt, Artificial Sequence
  Description of Artificial Sequence: Synthetic oligonucleotide
ggccugggugagccuuggg

SEQ ID NO: 1982112 - RNA, 19 nt, Artificial Sequence
  Description of Artificial Sequence: Synthetic oligonucleotide
gguccaaggccugguggga

SEQ ID NO: 1982113 - RNA, 19 nt, Artificial Sequence
  Description of Artificial Sequence: Synthetic oligonucleotide
gcguggcaaaacgcaacac

SEQ ID NO: 1982114 - RNA, 19 nt, Artificial Sequence
  Description of Artificial Sequence: Synthetic oligonucleotide
ggggacccauucaacagcu

SEQ ID NO: 1982115 - RNA, 19 nt, Artificial Sequence
  Description of Artificial Sequence: Synthetic oligonucleotide
ccaguggccgcugggugug

SEQ ID NO: 1982116 - RNA, 19 nt, Artificial Sequence
  Description of Artificial Sequence: Synthetic oligonucleotide
cgacgcccuggucauacug

SEQ ID NO: 1982117 - RNA, 19 nt, Artificial Sequence
  Description of Artificial Sequence: Synthetic oligonucleotide
cucuacgugcuuggcuuua

SEQ ID NO: 1982118 - RNA, 19 nt, Artificial Sequence
  Description of Artificial Sequence: Synthetic oligonucleotide
ggugcuccuggggcaagca

SEQ ID NO: 1982119 - RNA, 19 nt, Artificial Sequence
  Description of Artificial Sequence: Synthetic oligonucleotide
gggcaagcaggcaggacua

SEQ ID NO: 1982120 - RNA, 19 nt, Artificial Sequence
  Description of Artificial Sequence: Synthetic oligonucleotide
ggccuggugggaggcauca

SEQ ID NO: 1982121 - RNA, 19 nt, Artificial Sequence
  Description of Artificial Sequence: Synthetic oligonucleotide
gguccacauggaagucaug

SEQ ID NO: 1982122 - RNA, 19 nt, Artificial Sequence
  Description of Artificial Sequence: Synthetic oligonucleotide
gggcgcugaggaauuggca

SEQ ID NO: 1982123 - RNA, 19 nt, Artificial Sequence
  Description of Artificial Sequence: Synthetic oligonucleotide
ccgaggaugcaguacuggu

SEQ ID NO: 1982124 - RNA, 19 nt, Artificial Sequence
  Description of Artificial Sequence: Synthetic oligonucleotide
cugcuccaugugggaacac

SEQ ID NO: 1982125 - RNA, 19 nt, Artificial Sequence
  Description of Artificial Sequence: Synthetic oligonucleotide
gccgagcaccauacaggag

SEQ ID NO: 1982126 - RNA, 19 nt, Artificial Sequence
  Description of Artificial Sequence: Synthetic oligonucleotide
caccugguagccaccugau

SEQ ID NO: 1982127 - RNA, 19 nt, Artificial Sequence
  Description of Artificial Sequence: Synthetic oligonucleotide
guguagaggcgaccaccau

SEQ ID NO: 1982128 - RNA, 19 nt, Artificial Sequence
  Description of Artificial Sequence: Synthetic oligonucleotide
cgcccuggucauacugccg

SEQ ID NO: 1982129 - RNA, 19 nt, Artificial Sequence
  Description of Artificial Sequence: Synthetic oligonucleotide
gcgaagcacacagcaaagu

SEQ ID NO: 1982130 - RNA, 19 nt, Artificial Sequence
  Description of Artificial Sequence: Synthetic oligonucleotide
caguggccgcugggugugg

SEQ ID NO: 1982131 - RNA, 19 nt, Artificial Sequence
  Description of Artificial Sequence: Synthetic oligonucleotide
gugagccuugggugugggu

SEQ ID NO: 1982132 - RNA, 19 nt, Artificial Sequence
  Description of Artificial Sequence: Synthetic oligonucleotide
gccugguuaggaaugccau

SEQ ID NO: 1982133 - RNA, 19 nt, Artificial Sequence
  Description of Artificial Sequence: Synthetic oligonucleotide
ccgucgcagggccaccuuc

SEQ ID NO: 1982134 - RNA, 19 nt, Artificial Sequence
  Description of Artificial Sequence: Synthetic oligonucleotide
cgaccgaggaugcaguacu

SEQ ID NO: 1982135 - RNA, 19 nt, Artificial Sequence
  Description of Artificial Sequence: Synthetic oligonucleotide
cggugccugcuccuugaag

SEQ ID NO: 1982136 - RNA, 19 nt, Artificial Sequence
  Description of Artificial Sequence: Synthetic oligonucleotide
cacgcggcacccagauccu

SEQ ID NO: 1982137 - RNA, 19 nt, Artificial Sequence
  Description of Artificial Sequence: Synthetic oligonucleotide
gggguggcccaggaugcga

SEQ ID NO: 1982138 - RNA, 19 nt, Artificial Sequence
  Description of Artificial Sequence: Synthetic oligonucleotide
ccaugucgacacgcggcac

SEQ ID NO: 1982139 - RNA, 19 nt, Artificial Sequence
  Description of Artificial Sequence: Synthetic oligonucleotide
ccaggaugcgaagcacaca

SEQ ID NO: 1982140 - RNA, 19 nt, Artificial Sequence
  Description of Artificial Sequence: Synthetic oligonucleotide
cucugggaugaagggccua

SEQ ID NO: 1982141 - RNA, 19 nt, Artificial Sequence
  Description of Artificial Sequence: Synthetic oligonucleotide
gggacccauucaacagcuc

SEQ ID NO: 1982142 - RNA, 19 nt, Artificial Sequence
  Description of Artificial Sequence: Synthetic oligonucleotide
cccauaggucgacgcccug

SEQ ID NO: 1982143 - RNA, 19 nt, Artificial Sequence
  Description of Artificial Sequence: Synthetic oligonucleotide
agacccgggccaggccaaa

SEQ ID NO: 1982144 - RNA, 19 nt, Artificial Sequence
  Description of Artificial Sequence: Synthetic oligonucleotide
ggcaccggugccugcuccu

SEQ ID NO: 1982145 - RNA, 19 nt, Artificial Sequence
  Description of Artificial Sequence: Synthetic oligonucleotide
gcuggguguggcgcaccac

SEQ ID NO: 1982146 - RNA, 19 nt, Artificial Sequence
  Description of Artificial Sequence: Synthetic oligonucleotide
ggggcaccggugccugcuc

SEQ ID NO: 1982147 - RNA, 19 nt, Artificial Sequence
  Description of Artificial Sequence: Synthetic oligonucleotide
gcucuugaccugugccggu

SEQ ID NO: 1982148 - RNA, 19 nt, Artificial Sequence
  Description of Artificial Sequence: Synthetic oligonucleotide
cgagcaccauacaggagcu

SEQ ID NO: 1982149 - RNA, 19 nt, Artificial Sequence
  Description of Artificial Sequence: Synthetic oligonucleotide
aggggccgguccacaugga

SEQ ID NO: 1982150 - RNA, 19 nt, Artificial Sequence
  Description of Artificial Sequence: Synthetic oligonucleotide
gggcaacgaucucuccagu

SEQ ID NO: 1982151 - RNA, 19 nt, Artificial Sequence
  Description of Artificial Sequence: Synthetic oligonucleotide
gucgcagggccaccuucuu

SEQ ID NO: 1982152 - RNA, 19 nt, Artificial Sequence
  Description of Artificial Sequence: Synthetic oligonucleotide
gccgguccacauggaaguc

SEQ ID NO: 1982153 - RNA, 19 nt, Artificial Sequence
  Description of Artificial Sequence: Synthetic oligonucleotide
gcaucugcagauagcucuu

SEQ ID NO: 1982154 - RNA, 19 nt, Artificial Sequence
  Description of Artificial Sequence: Synthetic oligonucleotide
ccugggcgcugaggaauug

SEQ ID NO: 1982155 - RNA, 19 nt, Artificial Sequence
  Description of Artificial Sequence: Synthetic oligonucleotide
cgcugcgauacgcuggugu

SEQ ID NO: 1982156 - RNA, 19 nt, Artificial Sequence
  Description of Artificial Sequence: Synthetic oligonucleotide
ccggccagacucgaggacu

SEQ ID NO: 1982157 - RNA, 19 nt, Artificial Sequence
  Description of Artificial Sequence: Synthetic oligonucleotide
ccgugggcacccuccccga

SEQ ID NO: 1982158 - RNA, 19 nt, Artificial Sequence
  Description of Artificial Sequence: Synthetic oligonucleotide
gccggugccaguggccgcu

SEQ ID NO: 1982159 - RNA, 19 nt, Artificial Sequence
  Description of Artificial Sequence: Synthetic oligonucleotide
ggccugggacgcugcgaua

SEQ ID NO: 1982160 - RNA, 19 nt, Artificial Sequence
  Description of Artificial Sequence: Synthetic oligonucleotide
caacaccuuugagcagcau

SEQ ID NO: 1982161 - RNA, 19 nt, Artificial Sequence
  Description of Artificial Sequence: Synthetic oligonucleotide
ccgcuggguguggcgcacc

SEQ ID NO: 1982162 - RNA, 19 nt, Artificial Sequence
  Description of Artificial Sequence: Synthetic oligonucleotide
cccgaugcacaauguuguu

SEQ ID NO: 1982163 - RNA, 19 nt, Artificial Sequence
  Description of Artificial Sequence: Synthetic oligonucleotide
cucaccccucugggaugaa

SEQ ID NO: 1982164 - RNA, 19 nt, Artificial Sequence
  Description of Artificial Sequence: Synthetic oligonucleotide
cgacacgcggcacccagau

SEQ ID NO: 1982165 - RNA, 19 nt, Artificial Sequence
  Description of Artificial Sequence: Synthetic oligonucleotide
cccuccccgaugcgaccga

SEQ ID NO: 1982166 - RNA, 19 nt, Artificial Sequence
  Description of Artificial Sequence: Synthetic oligonucleotide
ccggugccugcuccuugaa

SEQ ID NO: 1982167 - RNA, 19 nt, Artificial Sequence
  Description of Artificial Sequence: Synthetic oligonucleotide
ccggugccaguggccgcug

SEQ ID NO: 1982168 - RNA, 19 nt, Artificial Sequence
  Description of Artificial Sequence: Synthetic oligonucleotide
ggucgacgcccuggucaua

SEQ ID NO: 1982169 - RNA, 19 nt, Artificial Sequence
  Description of Artificial Sequence: Synthetic oligonucleotide
cgaugcgaccgaggaugca

SEQ ID NO: 1982170 - RNA, 19 nt, Artificial Sequence
  Description of Artificial Sequence: Synthetic oligonucleotide
ccccgaugcgaccgaggau

SEQ ID NO: 1982171 - RNA, 19 nt, Artificial Sequence
  Description of Artificial Sequence: Synthetic oligonucleotide
uuuguaauuacacagaacc

SEQ ID NO: 1982172 - RNA, 19 nt, Artificial Sequence
  Description of Artificial Sequence: Synthetic oligonucleotide
aaacuuuguaauuacacag

SEQ ID NO: 1982173 - RNA, 19 nt, Artificial Sequence
  Description of Artificial Sequence: Synthetic oligonucleotide
ucauuaaccaccaaccagg

SEQ ID NO: 1982174 - RNA, 19 nt, Artificial Sequence
  Description of Artificial Sequence: Synthetic oligonucleotide
aaagaaucaccgcucaccc

SEQ ID NO: 1982175 - RNA, 19 nt, Artificial Sequence
  Description of Artificial Sequence: Synthetic oligonucleotide
ugauagaagaccaacacug

SEQ ID NO: 1982176 - RNA, 19 nt, Artificial Sequence
  Description of Artificial Sequence: Synthetic oligonucleotide
aaaaccaaagaaucaccgc

SEQ ID NO: 1982177 - RNA, 19 nt, Artificial Sequence
  Description of Artificial Sequence: Synthetic oligonucleotide
aaagaagcugauuacagcu

SEQ ID NO: 1982178 - RNA, 19 nt, Artificial Sequence
  Description of Artificial Sequence: Synthetic oligonucleotide
acaauggccagcuauaccg

SEQ ID NO: 1982179 - RNA, 19 nt, Artificial Sequence
  Description of Artificial Sequence: Synthetic oligonucleotide
ugucccuucaaacaaacag

SEQ ID NO: 1982180 - RNA, 19 nt, Artificial Sequence
  Description of Artificial Sequence: Synthetic oligonucleotide
uaaacgauguugcaucugg

SEQ ID NO: 1982181 - RNA, 19 nt, Artificial Sequence
  Description of Artificial Sequence: Synthetic oligonucleotide
cuauguacagguuaucugg

SEQ ID NO: 1982182 - RNA, 19 nt, Artificial Sequence
  Description of Artificial Sequence: Synthetic oligonucleotide
aaauuccucuaacuugugc

SEQ ID NO: 1982183 - RNA, 19 nt, Artificial Sequence
  Description of Artificial Sequence: Synthetic oligonucleotide
aacagaaauugagaugugc

SEQ ID NO: 1982184 - RNA, 19 nt, Artificial Sequence
  Description of Artificial Sequence: Synthetic oligonucleotide
ugcauaaagaagcugauua

SEQ ID NO: 1982185 - RNA, 19 nt, Artificial Sequence
  Description of Artificial Sequence: Synthetic oligonucleotide
acaucauuaaccaccaacc

SEQ ID NO: 1982186 - RNA, 19 nt, Artificial Sequence
  Description of Artificial Sequence: Synthetic oligonucleotide
aaggaagcaacucccuagc

SEQ ID NO: 1982187 - RNA, 19 nt, Artificial Sequence
  Description of Artificial Sequence: Synthetic oligonucleotide
auggcugcuguauagacac

SEQ ID NO: 1982188 - RNA, 19 nt, Artificial Sequence
  Description of Artificial Sequence: Synthetic oligonucleotide
ugcaaaacaagaaacugac

SEQ ID NO: 1982189 - RNA, 19 nt, Artificial Sequence
  Description of Artificial Sequence: Synthetic oligonucleotide
uggacaaguacugucaugg

SEQ ID NO: 1982190 - RNA, 19 nt, Artificial Sequence
  Description of Artificial Sequence: Synthetic oligonucleotide
auguaaacgauguugcauc

SEQ ID NO: 1982191 - RNA, 19 nt, Artificial Sequence
  Description of Artificial Sequence: Synthetic oligonucleotide
agaagcugauuacagcugc

SEQ ID NO: 1982192 - RNA, 19 nt, Artificial Sequence
  Description of Artificial Sequence: Synthetic oligonucleotide
cugaccaccaauuaucugc

SEQ ID NO: 1982193 - RNA, 19 nt, Artificial Sequence
  Description of Artificial Sequence: Synthetic oligonucleotide
gaaaaccaaagaaucaccg

SEQ ID NO: 1982194 - RNA, 19 nt, Artificial Sequence
  Description of Artificial Sequence: Synthetic oligonucleotide
acauaaacuuuguaauuac

SEQ ID NO: 1982195 - RNA, 19 nt, Artificial Sequence
  Description of Artificial Sequence: Synthetic oligonucleotide
uccccuuaaacacaaagca

SEQ ID NO: 1982196 - RNA, 19 nt, Artificial Sequence
  Description of Artificial Sequence: Synthetic oligonucleotide
aguagcaauaucuuuauuu

SEQ ID NO: 1982197 - RNA, 19 nt, Artificial Sequence
  Description of Artificial Sequence: Synthetic oligonucleotide
agcaacuccauuuccgagc

SEQ ID NO: 1982198 - RNA, 19 nt, Artificial Sequence
  Description of Artificial Sequence: Synthetic oligonucleotide
auacacauaaacuuuguaa

SEQ ID NO: 1982199 - RNA, 19 nt, Artificial Sequence
  Description of Artificial Sequence: Synthetic oligonucleotide
aaaacuacuggaacuuugg

SEQ ID NO: 1982200 - RNA, 19 nt, Artificial Sequence
  Description of Artificial Sequence: Synthetic oligonucleotide
acagaaauugagaugugcc

SEQ ID NO: 1982201 - RNA, 19 nt, Artificial Sequence
  Description of Artificial Sequence: Synthetic oligonucleotide
aaaacaagaaacugacuua

SEQ ID NO: 1982202 - RNA, 19 nt, Artificial Sequence
  Description of Artificial Sequence: Synthetic oligonucleotide
acaagaaacugacuuauga

SEQ ID NO: 1982203 - RNA, 19 nt, Artificial Sequence
  Description of Artificial Sequence: Synthetic oligonucleotide
aucauuaaccaccaaccag

SEQ ID NO: 1982204 - RNA, 19 nt, Artificial Sequence
  Description of Artificial Sequence: Synthetic oligonucleotide
gaaacagcuugcuuuauac

SEQ ID NO: 1982205 - RNA, 19 nt, Artificial Sequence
  Description of Artificial Sequence: Synthetic oligonucleotide
ucacccaccaccaagggcu

SEQ ID NO: 1982206 - RNA, 19 nt, Artificial Sequence
  Description of Artificial Sequence: Synthetic oligonucleotide
ugacuuaugaacacaggac

SEQ ID NO: 1982207 - RNA, 19 nt, Artificial Sequence
  Description of Artificial Sequence: Synthetic oligonucleotide
uaaggaagcaacucccuag

SEQ ID NO: 1982208 - RNA, 19 nt, Artificial Sequence
  Description of Artificial Sequence: Synthetic oligonucleotide
uacaucgugcaaaacaaga

SEQ ID NO: 1982209 - RNA, 19 nt, Artificial Sequence
  Description of Artificial Sequence: Synthetic oligonucleotide
aaacagagcaacuccauuu

SEQ ID NO: 1982210 - RNA, 19 nt, Artificial Sequence
  Description of Artificial Sequence: Synthetic oligonucleotide
cagaaauugagaugugccg

SEQ ID NO: 1982211 - RNA, 19 nt, Artificial Sequence
  Description of Artificial Sequence: Synthetic oligonucleotide
gacuuaugaacacaggaca

SEQ ID NO: 1982212 - RNA, 19 nt, Artificial Sequence
  Description of Artificial Sequence: Synthetic oligonucleotide
aaaguagcaauaucuuuau

SEQ ID NO: 1982213 - RNA, 19 nt, Artificial Sequence
  Description of Artificial Sequence: Synthetic oligonucleotide
agacacuugugauagaaga

SEQ ID NO: 1982214 - RNA, 19 nt, Artificial Sequence
  Description of Artificial Sequence: Synthetic oligonucleotide
uucccucacaucauuaacc

SEQ ID NO: 1982215 - RNA, 19 nt, Artificial Sequence
  Description of Artificial Sequence: Synthetic oligonucleotide
gauccccuuaaacacaaag

SEQ ID NO: 1982216 - RNA, 19 nt, Artificial Sequence
  Description of Artificial Sequence: Synthetic oligonucleotide
uaauuacacagaaccaugu

SEQ ID NO: 1982217 - RNA, 19 nt, Artificial Sequence
  Description of Artificial Sequence: Synthetic oligonucleotide
gaagacacuggacaaguac

SEQ ID NO: 1982218 - RNA, 19 nt, Artificial Sequence
  Description of Artificial Sequence: Synthetic oligonucleotide
gaacuggcuaacaagacug

SEQ ID NO: 1982219 - RNA, 19 nt, Artificial Sequence
  Description of Artificial Sequence: Synthetic oligonucleotide
aucgugcaaaacaagaaac

SEQ ID NO: 1982220 - RNA, 19 nt, Artificial Sequence
  Description of Artificial Sequence: Synthetic oligonucleotide
uuguaauuacacagaacca

SEQ ID NO: 1982221 - RNA, 19 nt, Artificial Sequence
  Description of Artificial Sequence: Synthetic oligonucleotide
uggcuaacaagacugugug

SEQ ID NO: 1982222 - RNA, 19 nt, Artificial Sequence
  Description of Artificial Sequence: Synthetic oligonucleotide
acugucauggggcaggucu

SEQ ID NO: 1982223 - RNA, 19 nt, Artificial Sequence
  Description of Artificial Sequence: Synthetic oligonucleotide
aaacaagaaacugacuuau

SEQ ID NO: 1982224 - RNA, 19 nt, Artificial Sequence
  Description of Artificial Sequence: Synthetic oligonucleotide
uccagucagagccagacaa

SEQ ID NO: 1982225 - RNA, 19 nt, Artificial Sequence
  Description of Artificial Sequence: Synthetic oligonucleotide
aagcugauuacagcugccc

SEQ ID NO: 1982226 - RNA, 19 nt, Artificial Sequence
  Description of Artificial Sequence: Synthetic oligonucleotide
gaggcgacaaaucucugag

SEQ ID NO: 1982227 - RNA, 19 nt, Artificial Sequence
  Description of Artificial Sequence: Synthetic oligonucleotide
guacagguuaucuggacag

SEQ ID NO: 1982228 - RNA, 19 nt, Artificial Sequence
  Description of Artificial Sequence: Synthetic oligonucleotide
aacaagacugugugcccac

SEQ ID NO: 1982229 - RNA, 19 nt, Artificial Sequence
  Description of Artificial Sequence: Synthetic oligonucleotide
caauuaucugcucacuggc

SEQ ID NO: 1982230 - RNA, 19 nt, Artificial Sequence
  Description of Artificial Sequence: Synthetic oligonucleotide
cauaacugucccuucaaac

SEQ ID NO: 1982231 - RNA, 19 nt, Artificial Sequence
  Description of Artificial Sequence: Synthetic oligonucleotide
cucuaaggaagcaacuccc

SEQ ID NO: 1982232 - RNA, 19 nt, Artificial Sequence
  Description of Artificial Sequence: Synthetic oligonucleotide
aacugacuuaugaacacag

SEQ ID NO: 1982233 - RNA, 19 nt, Artificial Sequence
  Description of Artificial Sequence: Synthetic oligonucleotide
uaucuggacagcuuguccu

SEQ ID NO: 1982234 - RNA, 19 nt, Artificial Sequence
  Description of Artificial Sequence: Synthetic oligonucleotide
uuauacacauaaacuuugu

SEQ ID NO: 1982235 - RNA, 19 nt, Artificial Sequence
  Description of Artificial Sequence: Synthetic oligonucleotide
uguauagacacuugugaua

SEQ ID NO: 1982236 - RNA, 19 nt, Artificial Sequence
  Description of Artificial Sequence: Synthetic oligonucleotide
ggaaagauccccuuaaaca

SEQ ID NO: 1982237 - RNA, 19 nt, Artificial Sequence
  Description of Artificial Sequence: Synthetic oligonucleotide
ugcuguauagacacuugug

SEQ ID NO: 1982238 - RNA, 19 nt, Artificial Sequence
  Description of Artificial Sequence: Synthetic oligonucleotide
accgguccacaacaaaacc

SEQ ID NO: 1982239 - RNA, 19 nt, Artificial Sequence
  Description of Artificial Sequence: Synthetic oligonucleotide
ggguguuuaauccagucag

SEQ ID NO: 1982240 - RNA, 19 nt, Artificial Sequence
  Description of Artificial Sequence: Synthetic oligonucleotide
agcuauaccgguccacaac

SEQ ID NO: 1982241 - RNA, 19 nt, Artificial Sequence
  Description of Artificial Sequence: Synthetic oligonucleotide
gaacuuugguuauucucag

SEQ ID NO: 1982242 - RNA, 19 nt, Artificial Sequence
  Description of Artificial Sequence: Synthetic oligonucleotide
uauguacagguuaucugga

SEQ ID NO: 1982243 - RNA, 19 nt, Artificial Sequence
  Description of Artificial Sequence: Synthetic oligonucleotide
gaaauugagaugugccgac

SEQ ID NO: 1982244 - RNA, 19 nt, Artificial Sequence
  Description of Artificial Sequence: Synthetic oligonucleotide
uuacaucgugcaaaacaag

SEQ ID NO: 1982245 - RNA, 19 nt, Artificial Sequence
  Description of Artificial Sequence: Synthetic oligonucleotide
agagccagacaauagccug

SEQ ID NO: 1982246 - RNA, 19 nt, Artificial Sequence
  Description of Artificial Sequence: Synthetic oligonucleotide
agaaccauguaaacgaugu

SEQ ID NO: 1982247 - RNA, 19 nt, Artificial Sequence
  Description of Artificial Sequence: Synthetic oligonucleotide
aaccaaagaaucaccgcuc

SEQ ID NO: 1982248 - RNA, 19 nt, Artificial Sequence
  Description of Artificial Sequence: Synthetic oligonucleotide
aauuacacagaaccaugua

SEQ ID NO: 1982249 - RNA, 19 nt, Artificial Sequence
  Description of Artificial Sequence: Synthetic oligonucleotide
caccagaccucuaaggaag

SEQ ID NO: 1982250 - RNA, 19 nt, Artificial Sequence
  Description of Artificial Sequence: Synthetic oligonucleotide
uggguguuuaauccaguca

SEQ ID NO: 1982251 - RNA, 19 nt, Artificial Sequence
  Description of Artificial Sequence: Synthetic oligonucleotide
uggaacuuugguuauucuc

SEQ ID NO: 1982252 - RNA, 19 nt, Artificial Sequence
  Description of Artificial Sequence: Synthetic oligonucleotide
aagacacuggacaaguacu

SEQ ID NO: 1982253 - RNA, 19 nt, Artificial Sequence
  Description of Artificial Sequence: Synthetic oligonucleotide
ucaaaguagcaauaucuuu

SEQ ID NO: 1982254 - RNA, 19 nt, Artificial Sequence
  Description of Artificial Sequence: Synthetic oligonucleotide
auagaagaccaacacugga

SEQ ID NO: 1982255 - RNA, 19 nt, Artificial Sequence
  Description of Artificial Sequence: Synthetic oligonucleotide
accaauuaucugcucacug

SEQ ID NO: 1982256 - RNA, 19 nt, Artificial Sequence
  Description of Artificial Sequence: Synthetic oligonucleotide
agaaauugagaugugccga

SEQ ID NO: 1982257 - RNA, 19 nt, Artificial Sequence
  Description of Artificial Sequence: Synthetic oligonucleotide
aauagccuggggacaagac

SEQ ID NO: 1982258 - RNA, 19 nt, Artificial Sequence
  Description of Artificial Sequence: Synthetic oligonucleotide
aaacgauguugcaucuggc

SEQ ID NO: 1982259 - RNA, 19 nt, Artificial Sequence
  Description of Artificial Sequence: Synthetic oligonucleotide
uagacacuugugauagaag

SEQ ID NO: 1982260 - RNA, 19 nt, Artificial Sequence
  Description of Artificial Sequence: Synthetic oligonucleotide
agcaagcaaacagaaauug

SEQ ID NO: 1982261 - RNA, 19 nt, Artificial Sequence
  Description of Artificial Sequence: Synthetic oligonucleotide
cuuuguaauuacacagaac

SEQ ID NO: 1982262 - RNA, 19 nt, Artificial Sequence
  Description of Artificial Sequence: Synthetic oligonucleotide
ucccucacaucauuaacca

SEQ ID NO: 1982263 - RNA, 19 nt, Artificial Sequence
  Description of Artificial Sequence: Synthetic oligonucleotide
gacaccagaccucuaagga

SEQ ID NO: 1982264 - RNA, 19 nt, Artificial Sequence
  Description of Artificial Sequence: Synthetic oligonucleotide
guuauucucagggugaaga

SEQ ID NO: 1982265 - RNA, 19 nt, Artificial Sequence
  Description of Artificial Sequence: Synthetic oligonucleotide
gcuaacaagacugugugcc

SEQ ID NO: 1982266 - RNA, 19 nt, Artificial Sequence
  Description of Artificial Sequence: Synthetic oligonucleotide
cuugugauagaagaccaac

SEQ ID NO: 1982267 - RNA, 19 nt, Artificial Sequence
  Description of Artificial Sequence: Synthetic oligonucleotide
aacucccuagcccaacuga

SEQ ID NO: 1982268 - RNA, 19 nt, Artificial Sequence
  Description of Artificial Sequence: Synthetic oligonucleotide
cugacuuaugaacacagga

SEQ ID NO: 1982269 - RNA, 19 nt, Artificial Sequence
  Description of Artificial Sequence: Synthetic oligonucleotide
uagcaauaucuuuauuuac

SEQ ID NO: 1982270 - RNA, 19 nt, Artificial Sequence
  Description of Artificial Sequence: Synthetic oligonucleotide
guagcaauaucuuuauuua

SEQ ID NO: 1982271 - RNA, 19 nt, Artificial Sequence
  Description of Artificial Sequence: Synthetic oligonucleotide
ucuaaggaagcaacucccu

SEQ ID NO: 1982272 - RNA, 19 nt, Artificial Sequence
  Description of Artificial Sequence: Synthetic oligonucleotide
cacccacagggaaagaucc

SEQ ID NO: 1982273 - RNA, 19 nt, Artificial Sequence
  Description of Artificial Sequence: Synthetic oligonucleotide
guggcuacauaacuguccc

SEQ ID NO: 1982274 - RNA, 19 nt, Artificial Sequence
  Description of Artificial Sequence: Synthetic oligonucleotide
aacuccauuuccgagcaga

SEQ ID NO: 1982275 - RNA, 19 nt, Artificial Sequence
  Description of Artificial Sequence: Synthetic oligonucleotide
gagaugugccgacauauca

SEQ ID NO: 1982276 - RNA, 19 nt, Artificial Sequence
  Description of Artificial Sequence: Synthetic oligonucleotide
gccgacauaucacagaggc

SEQ ID NO: 1982277 - RNA, 19 nt, Artificial Sequence
  Description of Artificial Sequence: Synthetic oligonucleotide
aauggcgggaacuggcuaa

SEQ ID NO: 1982278 - RNA, 19 nt, Artificial Sequence
  Description of Artificial Sequence: Synthetic oligonucleotide
uacacagaaccauguaaac

SEQ ID NO: 1982279 - RNA, 19 nt, Artificial Sequence
  Description of Artificial Sequence: Synthetic oligonucleotide
uguaaacgauguugcaucu

SEQ ID NO: 1982280 - RNA, 19 nt, Artificial Sequence
  Description of Artificial Sequence: Synthetic oligonucleotide
uuauucucagggugaagac

SEQ ID NO: 1982281 - RNA, 19 nt, Artificial Sequence
  Description of Artificial Sequence: Synthetic oligonucleotide
gaugugccgacauaucaca

SEQ ID NO: 1982282 - RNA, 19 nt, Artificial Sequence
  Description of Artificial Sequence: Synthetic oligonucleotide
gugccgacauaucacagag

SEQ ID NO: 1982283 - RNA, 19 nt, Artificial Sequence
  Description of Artificial Sequence: Synthetic oligonucleotide
aggaagcaacucccuagcc

SEQ ID NO: 1982284 - RNA, 19 nt, Artificial Sequence
  Description of Artificial Sequence: Synthetic oligonucleotide
acugugugcccacauucuc

SEQ ID NO: 1982285 - RNA, 19 nt, Artificial Sequence
  Description of Artificial Sequence: Synthetic oligonucleotide
agugaaaaccaaagaauca

SEQ ID NO: 1982286 - RNA, 19 nt, Artificial Sequence
  Description of Artificial Sequence: Synthetic oligonucleotide
agaugugccgacauaucac

SEQ ID NO: 1982287 - RNA, 19 nt, Artificial Sequence
  Description of Artificial Sequence: Synthetic oligonucleotide
caaaacaagaaacugacuu

SEQ ID NO: 1982288 - RNA, 19 nt, Artificial Sequence
  Description of Artificial Sequence: Synthetic oligonucleotide
agaccucuaaggaagcaac

SEQ ID NO: 1982289 - RNA, 19 nt, Artificial Sequence
  Description of Artificial Sequence: Synthetic oligonucleotide
cuaacaagacugugugccc

SEQ ID NO: 1982290 - RNA, 19 nt, Artificial Sequence
  Description of Artificial Sequence: Synthetic oligonucleotide
ucugagcacacacaacaau

SEQ ID NO: 1982291 - RNA, 19 nt, Artificial Sequence
  Description of Artificial Sequence: Synthetic oligonucleotide
ccaauuaucugcucacugg

SEQ ID NO: 1982292 - RNA, 19 nt, Artificial Sequence
  Description of Artificial Sequence: Synthetic oligonucleotide
aaagauccccuuaaacaca

SEQ ID NO: 1982293 - RNA, 19 nt, Artificial Sequence
  Description of Artificial Sequence: Synthetic oligonucleotide
agaaguggcuacauaacug

SEQ ID NO: 1982294 - RNA, 19 nt, Artificial Sequence
  Description of Artificial Sequence: Synthetic oligonucleotide
auuaucugcucacuggcua

SEQ ID NO: 1982295 - RNA, 19 nt, Artificial Sequence
  Description of Artificial Sequence: Synthetic oligonucleotide
agagcaacuccauuuccga

SEQ ID NO: 1982296 - RNA, 19 nt, Artificial Sequence
  Description of Artificial Sequence: Synthetic oligonucleotide
cagugagaucacaaagggg

SEQ ID NO: 1982297 - RNA, 19 nt, Artificial Sequence
  Description of Artificial Sequence: Synthetic oligonucleotide
ugugccgacauaucacaga

SEQ ID NO: 1982298 - RNA, 19 nt, Artificial Sequence
  Description of Artificial Sequence: Synthetic oligonucleotide
gagggucacgcccaguuug

SEQ ID NO: 1982299 - RNA, 19 nt, Artificial Sequence
  Description of Artificial Sequence: Synthetic oligonucleotide
aaacugacuuaugaacaca

SEQ ID NO: 1982300 - RNA, 19 nt, Artificial Sequence
  Description of Artificial Sequence: Synthetic oligonucleotide
uccucuaacuugugcuggg

SEQ ID NO: 1982301 - RNA, 19 nt, Artificial Sequence
  Description of Artificial Sequence: Synthetic oligonucleotide
uugagaugugccgacauau

SEQ ID NO: 1982302 - RNA, 19 nt, Artificial Sequence
  Description of Artificial Sequence: Synthetic oligonucleotide
uaccgguccacaacaaaac

SEQ ID NO: 1982303 - RNA, 19 nt, Artificial Sequence
  Description of Artificial Sequence: Synthetic oligonucleotide
uaucacagaggcgacaaau

SEQ ID NO: 1982304 - RNA, 19 nt, Artificial Sequence
  Description of Artificial Sequence: Synthetic oligonucleotide
uacauaacugucccuucaa

SEQ ID NO: 1982305 - RNA, 19 nt, Artificial Sequence
  Description of Artificial Sequence: Synthetic oligonucleotide
aagcacaggccagggaaac

SEQ ID NO: 1982306 - RNA, 19 nt, Artificial Sequence
  Description of Artificial Sequence: Synthetic oligonucleotide
ucuguggagaaguggcuac

SEQ ID NO: 1982307 - RNA, 19 nt, Artificial Sequence
  Description of Artificial Sequence: Synthetic oligonucleotide
gaacugacagcuagcacug

SEQ ID NO: 1982308 - RNA, 19 nt, Artificial Sequence
  Description of Artificial Sequence: Synthetic oligonucleotide
aauggccagcuauaccggu

SEQ ID NO: 1982309 - RNA, 19 nt, Artificial Sequence
  Description of Artificial Sequence: Synthetic oligonucleotide
uccacaacaaaaccacauu

SEQ ID NO: 1982310 - RNA, 19 nt, Artificial Sequence
  Description of Artificial Sequence: Synthetic oligonucleotide
auagacacuugugauagaa

SEQ ID NO: 1982311 - RNA, 19 nt, Artificial Sequence
  Description of Artificial Sequence: Synthetic oligonucleotide
acacauaaacuuuguaauu

SEQ ID NO: 1982312 - RNA, 19 nt, Artificial Sequence
  Description of Artificial Sequence: Synthetic oligonucleotide
ucagucugccgccaaugca

SEQ ID NO: 1982313 - RNA, 19 nt, Artificial Sequence
  Description of Artificial Sequence: Synthetic oligonucleotide
acuggcuauguacagguua

SEQ ID NO: 1982314 - RNA, 19 nt, Artificial Sequence
  Description of Artificial Sequence: Synthetic oligonucleotide
uauaccgguccacaacaaa

SEQ ID NO: 1982315 - RNA, 19 nt, Artificial Sequence
  Description of Artificial Sequence: Synthetic oligonucleotide
aagaccaacacuggaggau

SEQ ID NO: 1982316 - RNA, 19 nt, Artificial Sequence
  Description of Artificial Sequence: Synthetic oligonucleotide
aggcgacaaaucucugagc

SEQ ID NO: 1982317 - RNA, 19 nt, Artificial Sequence
  Description of Artificial Sequence: Synthetic oligonucleotide
acagaggcgacaaaucucu

SEQ ID NO: 1982318 - RNA, 19 nt, Artificial Sequence
  Description of Artificial Sequence: Synthetic oligonucleotide
aauuaucugcucacuggcu

SEQ ID NO: 1982319 - RNA, 19 nt, Artificial Sequence
  Description of Artificial Sequence: Synthetic oligonucleotide
guugcaucuggccuggcca

SEQ ID NO: 1982320 - RNA, 19 nt, Artificial Sequence
  Description of Artificial Sequence: Synthetic oligonucleotide
accaaagaaucaccgcuca

SEQ ID NO: 1982321 - RNA, 19 nt, Artificial Sequence
  Description of Artificial Sequence: Synthetic oligonucleotide
ggaacuuugguuauucuca

SEQ ID NO: 1982322 - RNA, 19 nt, Artificial Sequence
  Description of Artificial Sequence: Synthetic oligonucleotide
agaucacaaaggggcaggc

SEQ ID NO: 1982323 - RNA, 19 nt, Artificial Sequence
  Description of Artificial Sequence: Synthetic oligonucleotide
gcuguauagacacuuguga

SEQ ID NO: 1982324 - RNA, 19 nt, Artificial Sequence
  Description of Artificial Sequence: Synthetic oligonucleotide
gaggauaagcacaggccag

SEQ ID NO: 1982325 - RNA, 19 nt, Artificial Sequence
  Description of Artificial Sequence: Synthetic oligonucleotide
ucccuagcccaacugaguc

SEQ ID NO: 1982326 - RNA, 19 nt, Artificial Sequence
  Description of Artificial Sequence: Synthetic oligonucleotide
agaggcgacaaaucucuga

SEQ ID NO: 1982327 - RNA, 19 nt, Artificial Sequence
  Description of Artificial Sequence: Synthetic oligonucleotide
ggaagcaacucccuagccc

SEQ ID NO: 1982328 - RNA, 19 nt, Artificial Sequence
  Description of Artificial Sequence: Synthetic oligonucleotide
aggauaagcacaggccagg

SEQ ID NO: 1982329 - RNA, 19 nt, Artificial Sequence
  Description of Artificial Sequence: Synthetic oligonucleotide
uaacaagacugugugccca

SEQ ID NO: 1982330 - RNA, 19 nt, Artificial Sequence
  Description of Artificial Sequence: Synthetic oligonucleotide
aucacagaggcgacaaauc

SEQ ID NO: 1982331 - RNA, 19 nt, Artificial Sequence
  Description of Artificial Sequence: Synthetic oligonucleotide
ggcgacaaaucucugagca

SEQ ID NO: 1982332 - RNA, 19 nt, Artificial Sequence
  Description of Artificial Sequence: Synthetic oligonucleotide
ucugaccaccaauuaucug

SEQ ID NO: 1982333 - RNA, 19 nt, Artificial Sequence
  Description of Artificial Sequence: Synthetic oligonucleotide
aggucuuuggcaaauuccu

SEQ ID NO: 1982334 - RNA, 19 nt, Artificial Sequence
  Description of Artificial Sequence: Synthetic oligonucleotide
gcuauguacagguuaucug

SEQ ID NO: 1982335 - RNA, 19 nt, Artificial Sequence
  Description of Artificial Sequence: Synthetic oligonucleotide
cugauuacagcugcccagc

SEQ ID NO: 1982336 - RNA, 19 nt, Artificial Sequence
  Description of Artificial Sequence: Synthetic oligonucleotide
aaguggcuacauaacuguc

SEQ ID NO: 1982337 - RNA, 19 nt, Artificial Sequence
  Description of Artificial Sequence: Synthetic oligonucleotide
ccaacuucugacaccaccc

SEQ ID NO: 1982338 - RNA, 19 nt, Artificial Sequence
  Description of Artificial Sequence: Synthetic oligonucleotide
gagccagacaauagccugg

SEQ ID NO: 1982339 - RNA, 19 nt, Artificial Sequence
  Description of Artificial Sequence: Synthetic oligonucleotide
ucucagggugaagacacug

SEQ ID NO: 1982340 - RNA, 19 nt, Artificial Sequence
  Description of Artificial Sequence: Synthetic oligonucleotide
uuaucugcucacuggcuau

SEQ ID NO: 1982341 - RNA, 19 nt, Artificial Sequence
  Description of Artificial Sequence: Synthetic oligonucleotide
gagaaguggcuacauaacu

SEQ ID NO: 1982342 - RNA, 19 nt, Artificial Sequence
  Description of Artificial Sequence: Synthetic oligonucleotide
gugcaaaacaagaaacuga

SEQ ID NO: 1982343 - RNA, 19 nt, Artificial Sequence
  Description of Artificial Sequence: Synthetic oligonucleotide
cauggggcaggucuuuggc

SEQ ID NO: 1982344 - RNA, 19 nt, Artificial Sequence
  Description of Artificial Sequence: Synthetic oligonucleotide
uaagcacaggccagggaaa

SEQ ID NO: 1982345 - RNA, 19 nt, Artificial Sequence
  Description of Artificial Sequence: Synthetic oligonucleotide
ugagaugugccgacauauc

SEQ ID NO: 1982346 - RNA, 19 nt, Artificial Sequence
  Description of Artificial Sequence: Synthetic oligonucleotide
gcugauuacagcugcccag

SEQ ID NO: 1982347 - RNA, 19 nt, Artificial Sequence
  Description of Artificial Sequence: Synthetic oligonucleotide
agcugauuacagcugccca

SEQ ID NO: 1982348 - RNA, 19 nt, Artificial Sequence
  Description of Artificial Sequence: Synthetic oligonucleotide
acugacuuaugaacacagg

SEQ ID NO: 1982349 - RNA, 19 nt, Artificial Sequence
  Description of Artificial Sequence: Synthetic oligonucleotide
ugccgacauaucacagagg

SEQ ID NO: 1982350 - RNA, 19 nt, Artificial Sequence
  Description of Artificial Sequence: Synthetic oligonucleotide
aguuugcauaaagaagcug

SEQ ID NO: 1982351 - RNA, 19 nt, Artificial Sequence
  Description of Artificial Sequence: Synthetic oligonucleotide
gcauaaagaagcugauuac

SEQ ID NO: 1982352 - RNA, 19 nt, Artificial Sequence
  Description of Artificial Sequence: Synthetic oligonucleotide
gacaccauucccucacauc

SEQ ID NO: 1982353 - RNA, 19 nt, Artificial Sequence
  Description of Artificial Sequence: Synthetic oligonucleotide
agcucugaccaccaauuau

SEQ ID NO: 1982354 - RNA, 19 nt, Artificial Sequence
  Description of Artificial Sequence: Synthetic oligonucleotide
agcccaacugagucagggg

SEQ ID NO: 1982355 - RNA, 19 nt, Artificial Sequence
  Description of Artificial Sequence: Synthetic oligonucleotide
acaccagaccucuaaggaa

SEQ ID NO: 1982356 - RNA, 19 nt, Artificial Sequence
  Description of Artificial Sequence: Synthetic oligonucleotide
aagacugugugcccacauu

SEQ ID NO: 1982357 - RNA, 19 nt, Artificial Sequence
  Description of Artificial Sequence: Synthetic oligonucleotide
aaucaccgcucacccacca

SEQ ID NO: 1982358 - RNA, 19 nt, Artificial Sequence
  Description of Artificial Sequence: Synthetic oligonucleotide
caucgugcaaaacaagaaa

SEQ ID NO: 1982359 - RNA, 19 nt, Artificial Sequence
  Description of Artificial Sequence: Synthetic oligonucleotide
acagcuuguccucugcuua

SEQ ID NO: 1982360 - RNA, 19 nt, Artificial Sequence
  Description of Artificial Sequence: Synthetic oligonucleotide
aagauccccuuaaacacaa

SEQ ID NO: 1982361 - RNA, 19 nt, Artificial Sequence
  Description of Artificial Sequence: Synthetic oligonucleotide
ccucuaaggaagcaacucc

SEQ ID NO: 1982362 - RNA, 19 nt, Artificial Sequence
  Description of Artificial Sequence: Synthetic oligonucleotide
uggacagcuuguccucugc

SEQ ID NO: 1982363 - RNA, 19 nt, Artificial Sequence
  Description of Artificial Sequence: Synthetic oligonucleotide
cacauaaacuuuguaauua

SEQ ID NO: 1982364 - RNA, 19 nt, Artificial Sequence
  Description of Artificial Sequence: Synthetic oligonucleotide
cucuaacuugugcugggug

SEQ ID NO: 1982365 - RNA, 19 nt, Artificial Sequence
  Description of Artificial Sequence: Synthetic oligonucleotide
acgcccaguuugcauaaag

SEQ ID NO: 1982366 - RNA, 19 nt, Artificial Sequence
  Description of Artificial Sequence: Synthetic oligonucleotide
cacaacaaaaccacauucu

SEQ ID NO: 1982367 - RNA, 19 nt, Artificial Sequence
  Description of Artificial Sequence: Synthetic oligonucleotide
gggaaagauccccuuaaac

SEQ ID NO: 1982368 - RNA, 19 nt, Artificial Sequence
  Description of Artificial Sequence: Synthetic oligonucleotide
acauaacugucccuucaaa

SEQ ID NO: 1982369 - RNA, 19 nt, Artificial Sequence
  Description of Artificial Sequence: Synthetic oligonucleotide
aaacagaaauugagaugug

SEQ ID NO: 1982370 - RNA, 19 nt, Artificial Sequence
  Description of Artificial Sequence: Synthetic oligonucleotide
ugauuacagcugcccagcu

SEQ ID NO: 1982371 - RNA, 19 nt, Artificial Sequence
  Description of Artificial Sequence: Synthetic oligonucleotide
cacuggacaaguacuguca

SEQ ID NO: 1982372 - RNA, 19 nt, Artificial Sequence
  Description of Artificial Sequence: Synthetic oligonucleotide
aagcagaccuggugcucag

SEQ ID NO: 1982373 - RNA, 19 nt, Artificial Sequence
  Description of Artificial Sequence: Synthetic oligonucleotide
cucagucugccgccaaugc

SEQ ID NO: 1982374 - RNA, 19 nt, Artificial Sequence
  Description of Artificial Sequence: Synthetic oligonucleotide
cuacauaacugucccuuca

SEQ ID NO: 1982375 - RNA, 19 nt, Artificial Sequence
  Description of Artificial Sequence: Synthetic oligonucleotide
gcuauaccgguccacaaca

SEQ ID NO: 1982376 - RNA, 19 nt, Artificial Sequence
  Description of Artificial Sequence: Synthetic oligonucleotide
caagguguccaacuucuga

SEQ ID NO: 1982377 - RNA, 19 nt, Artificial Sequence
  Description of Artificial Sequence: Synthetic oligonucleotide
aaguagcaauaucuuuauu

SEQ ID NO: 1982378 - RNA, 19 nt, Artificial Sequence
  Description of Artificial Sequence: Synthetic oligonucleotide
uauagacacuugugauaga

SEQ ID NO: 1982379 - RNA, 19 nt, Artificial Sequence
  Description of Artificial Sequence: Synthetic oligonucleotide
auaccgguccacaacaaaa

SEQ ID NO: 1982380 - RNA, 19 nt, Artificial Sequence
  Description of Artificial Sequence: Synthetic oligonucleotide
ccacaacaaaaccacauuc

SEQ ID NO: 1982381 - RNA, 19 nt, Artificial Sequence
  Description of Artificial Sequence: Synthetic oligonucleotide
gugauagaagaccaacacu

SEQ ID NO: 1982382 - RNA, 19 nt, Artificial Sequence
  Description of Artificial Sequence: Synthetic oligonucleotide
agccagacaauagccuggg

SEQ ID NO: 1982383 - RNA, 19 nt, Artificial Sequence
  Description of Artificial Sequence: Synthetic oligonucleotide
guguccaacuucugacacc

SEQ ID NO: 1982384 - RNA, 19 nt, Artificial Sequence
  Description of Artificial Sequence: Synthetic oligonucleotide
acaucgugcaaaacaagaa

SEQ ID NO: 1982385 - RNA, 19 nt, Artificial Sequence
  Description of Artificial Sequence: Synthetic oligonucleotide
auugagaugugccgacaua

SEQ ID NO: 1982386 - RNA, 19 nt, Artificial Sequence
  Description of Artificial Sequence: Synthetic oligonucleotide
accagaccucuaaggaagc

SEQ ID NO: 1982387 - RNA, 19 nt, Artificial Sequence
  Description of Artificial Sequence: Synthetic oligonucleotide
caaauuccucuaacuugug

SEQ ID NO: 1982388 - RNA, 19 nt, Artificial Sequence
  Description of Artificial Sequence: Synthetic oligonucleotide
ugaagacacuggacaagua

SEQ ID NO: 1982389 - RNA, 19 nt, Artificial Sequence
  Description of Artificial Sequence: Synthetic oligonucleotide
acuggcuaacaagacugug

SEQ ID NO: 1982390 - RNA, 19 nt, Artificial Sequence
  Description of Artificial Sequence: Synthetic oligonucleotide
aucucugagcacacacaac

SEQ ID NO: 1982391 - RNA, 19 nt, Artificial Sequence
  Description of Artificial Sequence: Synthetic oligonucleotide
cauuaaccaccaaccagga

SEQ ID NO: 1982392 - RNA, 19 nt, Artificial Sequence
  Description of Artificial Sequence: Synthetic oligonucleotide
acucccuagcccaacugag

SEQ ID NO: 1982393 - RNA, 19 nt, Artificial Sequence
  Description of Artificial Sequence: Synthetic oligonucleotide
uucucagcugaagcagacc

SEQ ID NO: 1982394 - RNA, 19 nt, Artificial Sequence
  Description of Artificial Sequence: Synthetic oligonucleotide
cauucucagcugaagcaga

SEQ ID NO: 1982395 - RNA, 19 nt, Artificial Sequence
  Description of Artificial Sequence: Synthetic oligonucleotide
uaauccagucagagccaga

SEQ ID NO: 1982396 - RNA, 19 nt, Artificial Sequence
  Description of Artificial Sequence: Synthetic oligonucleotide
caacaauggccagcuauac

SEQ ID NO: 1982397 - RNA, 19 nt, Artificial Sequence
  Description of Artificial Sequence: Synthetic oligonucleotide
acagggaaagauccccuua

SEQ ID NO: 1982398 - RNA, 19 nt, Artificial Sequence
  Description of Artificial Sequence: Synthetic oligonucleotide
guuaucuggacagcuuguc

SEQ ID NO: 1982399 - RNA, 19 nt, Artificial Sequence
  Description of Artificial Sequence: Synthetic oligonucleotide
guaaacgauguugcaucug

SEQ ID NO: 1982400 - RNA, 19 nt, Artificial Sequence
  Description of Artificial Sequence: Synthetic oligonucleotide
uggugcucagucugccgcc

SEQ ID NO: 1982401 - RNA, 19 nt, Artificial Sequence
  Description of Artificial Sequence: Synthetic oligonucleotide
gacauaucacagaggcgac

SEQ ID NO: 1982402 - RNA, 19 nt, Artificial Sequence
  Description of Artificial Sequence: Synthetic oligonucleotide
ucccaauggcgggaacugg

SEQ ID NO: 1982403 - RNA, 19 nt, Artificial Sequence
  Description of Artificial Sequence: Synthetic oligonucleotide
aagcugacgggaggggucu

SEQ ID NO: 1982404 - RNA, 19 nt, Artificial Sequence
  Description of Artificial Sequence: Synthetic oligonucleotide
aggagggucacgcccaguu

SEQ ID NO: 1982405 - RNA, 19 nt, Artificial Sequence
  Description of Artificial Sequence: Synthetic oligonucleotide
uccgagcagagagagggaa

SEQ ID NO: 1982406 - RNA, 19 nt, Artificial Sequence
  Description of Artificial Sequence: Synthetic oligonucleotide
uugcaucuggccuggccaa

SEQ ID NO: 1982407 - RNA, 19 nt, Artificial Sequence
  Description of Artificial Sequence: Synthetic oligonucleotide
uguggagaaguggcuacau

SEQ ID NO: 1982408 - RNA, 19 nt, Artificial Sequence
  Description of Artificial Sequence: Synthetic oligonucleotide
agacaauagccuggggaca

SEQ ID NO: 1982409 - RNA, 19 nt, Artificial Sequence
  Description of Artificial Sequence: Synthetic oligonucleotide
aaccaccaaccaggagccc

SEQ ID NO: 1982410 - RNA, 19 nt, Artificial Sequence
  Description of Artificial Sequence: Synthetic oligonucleotide
agggaaagauccccuuaaa

SEQ ID NO: 1982411 - RNA, 19 nt, Artificial Sequence
  Description of Artificial Sequence: Synthetic oligonucleotide
cuguauagacacuugugau

SEQ ID NO: 1982412 - RNA, 19 nt, Artificial Sequence
  Description of Artificial Sequence: Synthetic oligonucleotide
cuggcuaacaagacugugu

SEQ ID NO: 1982413 - RNA, 19 nt, Artificial Sequence
  Description of Artificial Sequence: Synthetic oligonucleotide
aacuuggauggcugcugua

SEQ ID NO: 1982414 - RNA, 19 nt, Artificial Sequence
  Description of Artificial Sequence: Synthetic oligonucleotide
uucucagggugaagacacu

SEQ ID NO: 1982415 - RNA, 19 nt, Artificial Sequence
  Description of Artificial Sequence: Synthetic oligonucleotide
ucacgcccaguuugcauaa

SEQ ID NO: 1982416 - RNA, 19 nt, Artificial Sequence
  Description of Artificial Sequence: Synthetic oligonucleotide
cacaacaauggccagcuau

SEQ ID NO: 1982417 - RNA, 19 nt, Artificial Sequence
  Description of Artificial Sequence: Synthetic oligonucleotide
ccaaccaggagccccuagg

SEQ ID NO: 1982418 - RNA, 19 nt, Artificial Sequence
  Description of Artificial Sequence: Synthetic oligonucleotide
auggcgggaacuggcuaac

SEQ ID NO: 1982419 - RNA, 19 nt, Artificial Sequence
  Description of Artificial Sequence: Synthetic oligonucleotide
gcucugaccaccaauuauc

SEQ ID NO: 1982420 - RNA, 19 nt, Artificial Sequence
  Description of Artificial Sequence: Synthetic oligonucleotide
agcuuguccucugcuuagg

SEQ ID NO: 1982421 - RNA, 19 nt, Artificial Sequence
  Description of Artificial Sequence: Synthetic oligonucleotide
acauaucacagaggcgaca

SEQ ID NO: 1982422 - RNA, 19 nt, Artificial Sequence
  Description of Artificial Sequence: Synthetic oligonucleotide
accauucccucacaucauu

SEQ ID NO: 1982423 - RNA, 19 nt, Artificial Sequence
  Description of Artificial Sequence: Synthetic oligonucleotide
ccacauucucaaaugcaac

SEQ ID NO: 1982424 - RNA, 19 nt, Artificial Sequence
  Description of Artificial Sequence: Synthetic oligonucleotide
auggccagcuauaccgguc

SEQ ID NO: 1982425 - RNA, 19 nt, Artificial Sequence
  Description of Artificial Sequence: Synthetic oligonucleotide
uuccgagcagagagaggga

SEQ ID NO: 1982426 - RNA, 19 nt, Artificial Sequence
  Description of Artificial Sequence: Synthetic oligonucleotide
gcaacuccauuuccgagca

SEQ ID NO: 1982427 - RNA, 19 nt, Artificial Sequence
  Description of Artificial Sequence: Synthetic oligonucleotide
agaccaacacuggaggaua

SEQ ID NO: 1982428 - RNA, 19 nt, Artificial Sequence
  Description of Artificial Sequence: Synthetic oligonucleotide
acgggaggggucuccuuug

SEQ ID NO: 1982429 - RNA, 19 nt, Artificial Sequence
  Description of Artificial Sequence: Synthetic oligonucleotide
cgugcaaaacaagaaacug

SEQ ID NO: 1982430 - RNA, 19 nt, Artificial Sequence
  Description of Artificial Sequence: Synthetic oligonucleotide
gaucacaaaggggcaggca

SEQ ID NO: 1982431 - RNA, 19 nt, Artificial Sequence
  Description of Artificial Sequence: Synthetic oligonucleotide
cgacauaucacagaggcga

SEQ ID NO: 1982432 - RNA, 19 nt, Artificial Sequence
  Description of Artificial Sequence: Synthetic oligonucleotide
acaaaucucugagcacaca

SEQ ID NO: 1982433 - RNA, 19 nt, Artificial Sequence
  Description of Artificial Sequence: Synthetic oligonucleotide
cgcucuguggagaaguggc

SEQ ID NO: 1982434 - RNA, 19 nt, Artificial Sequence
  Description of Artificial Sequence: Synthetic oligonucleotide
ggcuaacaagacugugugc

SEQ ID NO: 1982435 - RNA, 19 nt, Artificial Sequence
  Description of Artificial Sequence: Synthetic oligonucleotide
cucccaauggcgggaacug

SEQ ID NO: 1982436 - RNA, 19 nt, Artificial Sequence
  Description of Artificial Sequence: Synthetic oligonucleotide
aacuugugcuggguguuua

SEQ ID NO: 1982437 - RNA, 19 nt, Artificial Sequence
  Description of Artificial Sequence: Synthetic oligonucleotide
gaaucaccgcucacccacc

SEQ ID NO: 1982438 - RNA, 19 nt, Artificial Sequence
  Description of Artificial Sequence: Synthetic oligonucleotide
cauguaaacgauguugcau

SEQ ID NO: 1982439 - RNA, 19 nt, Artificial Sequence
  Description of Artificial Sequence: Synthetic oligonucleotide
augugccgacauaucacag

SEQ ID NO: 1982440 - RNA, 19 nt, Artificial Sequence
  Description of Artificial Sequence: Synthetic oligonucleotide
ccuagcccaacugagucag

SEQ ID NO: 1982441 - RNA, 19 nt, Artificial Sequence
  Description of Artificial Sequence: Synthetic oligonucleotide
uggcuacauaacugucccu

SEQ ID NO: 1982442 - RNA, 19 nt, Artificial Sequence
  Description of Artificial Sequence: Synthetic oligonucleotide
cuggacagcuuguccucug

SEQ ID NO: 1982443 - RNA, 19 nt, Artificial Sequence
  Description of Artificial Sequence: Synthetic oligonucleotide
gugaagacacuggacaagu

SEQ ID NO: 1982444 - RNA, 19 nt, Artificial Sequence
  Description of Artificial Sequence: Synthetic oligonucleotide
acaauagccuggggacaag

SEQ ID NO: 1982445 - RNA, 19 nt, Artificial Sequence
  Description of Artificial Sequence: Synthetic oligonucleotide
gcuacauaacugucccuuc

SEQ ID NO: 1982446 - RNA, 19 nt, Artificial Sequence
  Description of Artificial Sequence: Synthetic oligonucleotide
ccgacauaucacagaggcg

SEQ ID NO: 1982447 - RNA, 19 nt, Artificial Sequence
  Description of Artificial Sequence: Synthetic oligonucleotide
gagucaggggcagugagau

SEQ ID NO: 1982448 - RNA, 19 nt, Artificial Sequence
  Description of Artificial Sequence: Synthetic oligonucleotide
gggaaacagagcaacucca

SEQ ID NO: 1982449 - RNA, 19 nt, Artificial Sequence
  Description of Artificial Sequence: Synthetic oligonucleotide
cccuaggagggucacgccc

SEQ ID NO: 1982450 - RNA, 19 nt, Artificial Sequence
  Description of Artificial Sequence: Synthetic oligonucleotide
caguuugcauaaagaagcu

SEQ ID NO: 1982451 - RNA, 19 nt, Artificial Sequence
  Description of Artificial Sequence: Synthetic oligonucleotide
cuauaccgguccacaacaa

SEQ ID NO: 1982452 - RNA, 19 nt, Artificial Sequence
  Description of Artificial Sequence: Synthetic oligonucleotide
gggugaagacacuggacaa

SEQ ID NO: 1982453 - RNA, 19 nt, Artificial Sequence
  Description of Artificial Sequence: Synthetic oligonucleotide
gcgacaaaucucugagcac

SEQ ID NO: 1982454 - RNA, 19 nt, Artificial Sequence
  Description of Artificial Sequence: Synthetic oligonucleotide
cagaggcgacaaaucucug

SEQ ID NO: 1982455 - RNA, 19 nt, Artificial Sequence
  Description of Artificial Sequence: Synthetic oligonucleotide
guccacaacaaaaccacau

SEQ ID NO: 1982456 - RNA, 19 nt, Artificial Sequence
  Description of Artificial Sequence: Synthetic oligonucleotide
cugucccuucaaacaaaca

SEQ ID NO: 1982457 - RNA, 19 nt, Artificial Sequence
  Description of Artificial Sequence: Synthetic oligonucleotide
cugcuguauagacacuugu

SEQ ID NO: 1982458 - RNA, 19 nt, Artificial Sequence
  Description of Artificial Sequence: Synthetic oligonucleotide
cgcucacccaccaccaagg

SEQ ID NO: 1982459 - RNA, 19 nt, Artificial Sequence
  Description of Artificial Sequence: Synthetic oligonucleotide
cagagccagacaauagccu

SEQ ID NO: 1982460 - RNA, 19 nt, Artificial Sequence
  Description of Artificial Sequence: Synthetic oligonucleotide
acaagacugugugcccaca

SEQ ID NO: 1982461 - RNA, 19 nt, Artificial Sequence
  Description of Artificial Sequence: Synthetic oligonucleotide
gccccuaggagggucacgc

SEQ ID NO: 1982462 - RNA, 19 nt, Artificial Sequence
  Description of Artificial Sequence: Synthetic oligonucleotide
gacugugugcccacauucu

SEQ ID NO: 1982463 - RNA, 19 nt, Artificial Sequence
  Description of Artificial Sequence: Synthetic oligonucleotide
caauagccuggggacaaga

SEQ ID NO: 1982464 - RNA, 19 nt, Artificial Sequence
  Description of Artificial Sequence: Synthetic oligonucleotide
gggaacuggcuaacaagac

SEQ ID NO: 1982465 - RNA, 19 nt, Artificial Sequence
  Description of Artificial Sequence: Synthetic oligonucleotide
ccaaagaaucaccgcucac

SEQ ID NO: 1982466 - RNA, 19 nt, Artificial Sequence
  Description of Artificial Sequence: Synthetic oligonucleotide
gaaccauguaaacgauguu

SEQ ID NO: 1982467 - RNA, 19 nt, Artificial Sequence
  Description of Artificial Sequence: Synthetic oligonucleotide
gugugcccacauucucagc

SEQ ID NO: 1982468 - RNA, 19 nt, Artificial Sequence
  Description of Artificial Sequence: Synthetic oligonucleotide
ggcuauguacagguuaucu

SEQ ID NO: 1982469 - RNA, 19 nt, Artificial Sequence
  Description of Artificial Sequence: Synthetic oligonucleotide
cgacaaaucucugagcaca

SEQ ID NO: 1982470 - RNA, 19 nt, Artificial Sequence
  Description of Artificial Sequence: Synthetic oligonucleotide
caacuccauuuccgagcag

SEQ ID NO: 1982471 - RNA, 19 nt, Artificial Sequence
  Description of Artificial Sequence: Synthetic oligonucleotide
cucuguggagaaguggcua

SEQ ID NO: 1982472 - RNA, 19 nt, Artificial Sequence
  Description of Artificial Sequence: Synthetic oligonucleotide
gaccaacacuggaggauaa

SEQ ID NO: 1982473 - RNA, 19 nt, Artificial Sequence
  Description of Artificial Sequence: Synthetic oligonucleotide
ccauguaaacgauguugca

SEQ ID NO: 1982474 - RNA, 19 nt, Artificial Sequence
  Description of Artificial Sequence: Synthetic oligonucleotide
gacgggaggggucuccuuu

SEQ ID NO: 1982475 - RNA, 19 nt, Artificial Sequence
  Description of Artificial Sequence: Synthetic oligonucleotide
cagcuauaccgguccacaa

SEQ ID NO: 1982476 - RNA, 19 nt, Artificial Sequence
  Description of Artificial Sequence: Synthetic oligonucleotide
ggcgggaacuggcuaacaa

SEQ ID NO: 1982477 - RNA, 19 nt, Artificial Sequence
  Description of Artificial Sequence: Synthetic oligonucleotide
gcucagucugccgccaaug

SEQ ID NO: 1982478 - RNA, 19 nt, Artificial Sequence
  Description of Artificial Sequence: Synthetic oligonucleotide
uacagcugcccagcucaau

SEQ ID NO: 1982479 - RNA, 19 nt, Artificial Sequence
  Description of Artificial Sequence: Synthetic oligonucleotide
acaaaggggcaggcaacuu

SEQ ID NO: 1982480 - RNA, 19 nt, Artificial Sequence
  Description of Artificial Sequence: Synthetic oligonucleotide
cuguggagaaguggcuaca

SEQ ID NO: 1982481 - RNA, 19 nt, Artificial Sequence
  Description of Artificial Sequence: Synthetic oligonucleotide
agccccuaggagggucacg

SEQ ID NO: 1982482 - RNA, 19 nt, Artificial Sequence
  Description of Artificial Sequence: Synthetic oligonucleotide
gccagacaauagccugggg

SEQ ID NO: 1982483 - RNA, 19 nt, Artificial Sequence
  Description of Artificial Sequence: Synthetic oligonucleotide
gccgccaaugcaggaaccc

SEQ ID NO: 1982484 - RNA, 19 nt, Artificial Sequence
  Description of Artificial Sequence: Synthetic oligonucleotide
ccgagcagagagagggaac

SEQ ID NO: 1982485 - RNA, 19 nt, Artificial Sequence
  Description of Artificial Sequence: Synthetic oligonucleotide
gcaucuggccuggccaaag

SEQ ID NO: 1982486 - RNA, 19 nt, Artificial Sequence
  Description of Artificial Sequence: Synthetic oligonucleotide
caauggcgggaacuggcua

SEQ ID NO: 1982487 - RNA, 19 nt, Artificial Sequence
  Description of Artificial Sequence: Synthetic oligonucleotide
uggcgggaacuggcuaaca

SEQ ID NO: 1982488 - RNA, 19 nt, Artificial Sequence
  Description of Artificial Sequence: Synthetic oligonucleotide
ggcuacauaacugucccuu

SEQ ID NO: 1982489 - RNA, 19 nt, Artificial Sequence
  Description of Artificial Sequence: Synthetic oligonucleotide
cacccaccaccaagggcuc

SEQ ID NO: 1982490 - RNA, 19 nt, Artificial Sequence
  Description of Artificial Sequence: Synthetic oligonucleotide
ugacgggaggggucuccuu

SEQ ID NO: 1982491 - RNA, 19 nt, Artificial Sequence
  Description of Artificial Sequence: Synthetic oligonucleotide
cacaaaggggcaggcaacu

SEQ ID NO: 1982492 - RNA, 19 nt, Artificial Sequence
  Description of Artificial Sequence: Synthetic oligonucleotide
cucccuagcccaacugagu

SEQ ID NO: 1982493 - RNA, 19 nt, Artificial Sequence
  Description of Artificial Sequence: Synthetic oligonucleotide
ccaagguguccaacuucug

SEQ ID NO: 1982494 - RNA, 19 nt, Artificial Sequence
  Description of Artificial Sequence: Synthetic oligonucleotide
accgcucacccaccaccaa

SEQ ID NO: 1982495 - RNA, 19 nt, Artificial Sequence
  Description of Artificial Sequence: Synthetic oligonucleotide
ccagcuauaccgguccaca

SEQ ID NO: 1982496 - RNA, 19 nt, Artificial Sequence
  Description of Artificial Sequence: Synthetic oligonucleotide
cuaacuugugcuggguguu

SEQ ID NO: 1982497 - RNA, 19 nt, Artificial Sequence
  Description of Artificial Sequence: Synthetic oligonucleotide
cagguuaucuggacagcuu

SEQ ID NO: 1982498 - RNA, 19 nt, Artificial Sequence
  Description of Artificial Sequence: Synthetic oligonucleotide
cagcucugaccaccaauua

SEQ ID NO: 1982499 - RNA, 19 nt, Artificial Sequence
  Description of Artificial Sequence: Synthetic oligonucleotide
ucccucccaauggcgggaa

SEQ ID NO: 1982500 - RNA, 19 nt, Artificial Sequence
  Description of Artificial Sequence: Synthetic oligonucleotide
caagacugugugcccacau

SEQ ID NO: 1982501 - RNA, 19 nt, Artificial Sequence
  Description of Artificial Sequence: Synthetic oligonucleotide
gguuaucuggacagcuugu

SEQ ID NO: 1982502 - RNA, 19 nt, Artificial Sequence
  Description of Artificial Sequence: Synthetic oligonucleotide
ccgcucuguggagaagugg

SEQ ID NO: 1982503 - RNA, 19 nt, Artificial Sequence
  Description of Artificial Sequence: Synthetic oligonucleotide
agcagaccuggugcucagu

SEQ ID NO: 1982504 - RNA, 19 nt, Artificial Sequence
  Description of Artificial Sequence: Synthetic oligonucleotide
agcugacgggaggggucuc

SEQ ID NO: 1982505 - RNA, 19 nt, Artificial Sequence
  Description of Artificial Sequence: Synthetic oligonucleotide
gagccccuaggagggucac

SEQ ID NO: 1982506 - RNA, 19 nt, Artificial Sequence
  Description of Artificial Sequence: Synthetic oligonucleotide
gcugacgggaggggucucc

SEQ ID NO: 1982507 - RNA, 19 nt, Artificial Sequence
  Description of Artificial Sequence: Synthetic oligonucleotide
caccaauuaucugcucacu

SEQ ID NO: 1982508 - RNA, 19 nt, Artificial Sequence
  Description of Artificial Sequence: Synthetic oligonucleotide
cuugugcuggguguuuaau

SEQ ID NO: 1982509 - RNA, 19 nt, Artificial Sequence
  Description of Artificial Sequence: Synthetic oligonucleotide
gccagcuauaccgguccac

SEQ ID NO: 1982510 - RNA, 19 nt, Artificial Sequence
  Description of Artificial Sequence: Synthetic oligonucleotide
ccauucccucacaucauua

SEQ ID NO: 1982511 - RNA, 19 nt, Artificial Sequence
  Description of Artificial Sequence: Synthetic oligonucleotide
cccgcucuguggagaagug

SEQ ID NO: 1982512 - RNA, 19 nt, Artificial Sequence
  Description of Artificial Sequence: Synthetic oligonucleotide
gcaacucccuagcccaacu

SEQ ID NO: 1982513 - RNA, 19 nt, Artificial Sequence
  Description of Artificial Sequence: Synthetic oligonucleotide
cccuagcccaacugaguca

SEQ ID NO: 1982514 - RNA, 19 nt, Artificial Sequence
  Description of Artificial Sequence: Synthetic oligonucleotide
cucccucccaauggcggga

SEQ ID NO: 1982515 - RNA, 19 nt, Artificial Sequence
  Description of Artificial Sequence: Synthetic oligonucleotide
ggugcucagucugccgcca

SEQ ID NO: 1982516 - RNA, 19 nt, Artificial Sequence
  Description of Artificial Sequence: Synthetic oligonucleotide
cugucauggggcaggucuu

SEQ ID NO: 1982517 - RNA, 19 nt, Artificial Sequence
  Description of Artificial Sequence: Synthetic oligonucleotide
gcaggcaacuuggauggcu

SEQ ID NO: 1982518 - RNA, 19 nt, Artificial Sequence
  Description of Artificial Sequence: Synthetic oligonucleotide
guccaacuucugacaccac

SEQ ID NO: 1982519 - RNA, 19 nt, Artificial Sequence
  Description of Artificial Sequence: Synthetic oligonucleotide
ggcugcuguauagacacuu

SEQ ID NO: 1982520 - RNA, 19 nt, Artificial Sequence
  Description of Artificial Sequence: Synthetic oligonucleotide
ggggcaggucuuuggcaaa

SEQ ID NO: 1982521 - RNA, 19 nt, Artificial Sequence
  Description of Artificial Sequence: Synthetic oligonucleotide
ggucacgcccaguuugcau

SEQ ID NO: 1982522 - RNA, 19 nt, Artificial Sequence
  Description of Artificial Sequence: Synthetic oligonucleotide
ggccagcuauaccggucca

SEQ ID NO: 1982523 - RNA, 19 nt, Artificial Sequence
  Description of Artificial Sequence: Synthetic oligonucleotide
caggggcagugagaucaca

SEQ ID NO: 1982524 - RNA, 19 nt, Artificial Sequence
  Description of Artificial Sequence: Synthetic oligonucleotide
ccagaccucuaaggaagca

SEQ ID NO: 1982525 - RNA, 19 nt, Artificial Sequence
  Description of Artificial Sequence: Synthetic oligonucleotide
ggcaggcaacuuggauggc

SEQ ID NO: 1982526 - RNA, 19 nt, Artificial Sequence
  Description of Artificial Sequence: Synthetic oligonucleotide
gggucacgcccaguuugca

SEQ ID NO: 1982527 - RNA, 19 nt, Artificial Sequence
  Description of Artificial Sequence: Synthetic oligonucleotide
ccgccaaugcaggaaccca

SEQ ID NO: 1982528 - RNA, 19 nt, Artificial Sequence
  Description of Artificial Sequence: Synthetic oligonucleotide
ccaccaaccaggagccccu

SEQ ID NO: 1982529 - RNA, 19 nt, Artificial Sequence
  Description of Artificial Sequence: Synthetic oligonucleotide
ccagucagagccagacaau

SEQ ID NO: 1982530 - RNA, 19 nt, Artificial Sequence
  Description of Artificial Sequence: Synthetic oligonucleotide
ccucccaauggcgggaacu

SEQ ID NO: 1982531 - RNA, 19 nt, Artificial Sequence
  Description of Artificial Sequence: Synthetic oligonucleotide
cacgcccaguuugcauaaa

SEQ ID NO: 1982532 - RNA, 19 nt, Artificial Sequence
  Description of Artificial Sequence: Synthetic oligonucleotide
caacugagucaggggcagu

SEQ ID NO: 1982533 - RNA, 19 nt, Artificial Sequence
  Description of Artificial Sequence: Synthetic oligonucleotide
cccucccaauggcgggaac

SEQ ID NO: 1982534 - RNA, 19 nt, Artificial Sequence
  Description of Artificial Sequence: Synthetic oligonucleotide
gccuggggacaagacuguu

SEQ ID NO: 1982535 - RNA, 19 nt, Artificial Sequence
  Description of Artificial Sequence: Synthetic oligonucleotide
aagacuuuggcacuaaggg

SEQ ID NO: 1982536 - RNA, 19 nt, Artificial Sequence
  Description of Artificial Sequence: Synthetic oligonucleotide
gacauugguacguagguag

SEQ ID NO: 1982537 - RNA, 19 nt, Artificial Sequence
  Description of Artificial Sequence: Synthetic oligonucleotide
acugugaagaguuggggac

SEQ ID NO: 1982538 - RNA, 19 nt, Artificial Sequence
  Description of Artificial Sequence: Synthetic oligonucleotide
aggaggaacauccccaggc

SEQ ID NO: 1982539 - RNA, 19 nt, Artificial Sequence
  Description of Artificial Sequence: Synthetic oligonucleotide
uacuugguggcccagaaga

SEQ ID NO: 1982540 - RNA, 19 nt, Artificial Sequence
  Description of Artificial Sequence: Synthetic oligonucleotide
uggaucacgacugugaaga

SEQ ID NO: 1982541 - RNA, 19 nt, Artificial Sequence
  Description of Artificial Sequence: Synthetic oligonucleotide
uccugugaguacuuggugg

SEQ ID NO: 1982542 - RNA, 19 nt, Artificial Sequence
  Description of Artificial Sequence: Synthetic oligonucleotide
gacuuuggcacuaaggggc

SEQ ID NO: 1982543 - RNA, 19 nt, Artificial Sequence
  Description of Artificial Sequence: Synthetic oligonucleotide
ucguguuucuugauagugg

SEQ ID NO: 1982544 - RNA, 19 nt, Artificial Sequence
  Description of Artificial Sequence: Synthetic oligonucleotide
ugacccagcgagaaggagg

SEQ ID NO: 1982545 - RNA, 19 nt, Artificial Sequence
  Description of Artificial Sequence: Synthetic oligonucleotide
  modified_base (3)..(3): a, c, u, g, unknown or other
ucnguuucugccuacgcac

SEQ ID NO: 1982546 - RNA, 19 nt, Artificial Sequence
  Description of Artificial Sequence: Synthetic oligonucleotide
ucugccuacgcacagcaca

SEQ ID NO: 1982547 - RNA, 19 nt, Artificial Sequence
  Description of Artificial Sequence: Synthetic oligonucleotide
aguacaaugaggacauugg

SEQ ID NO: 1982548 - RNA, 19 nt, Artificial Sequence
  Description of Artificial Sequence: Synthetic oligonucleotide
aucagggugagguugaccu

SEQ ID NO: 1982549 - RNA, 19 nt, Artificial Sequence
  Description of Artificial Sequence: Synthetic oligonucleotide
ugguggaggauccuagccg

SEQ ID NO: 1982550 - RNA, 19 nt, Artificial Sequence
  Description of Artificial Sequence: Synthetic oligonucleotide
  modified_base (4)..(4): a, c, u, g, unknown or other
uucnguuucugccuacgca

SEQ ID NO: 1982551 - RNA, 19 nt, Artificial Sequence
  Description of Artificial Sequence: Synthetic oligonucleotide
augcagaagucccaggagg

SEQ ID NO: 1982552 - RNA, 19 nt, Artificial Sequence
  Description of Artificial Sequence: Synthetic oligonucleotide
gaaggcgggagcuggaggg

SEQ ID NO: 1982553 - RNA, 19 nt, Artificial Sequence
  Description of Artificial Sequence: Synthetic oligonucleotide
gacgcgaagcucgagagcg

SEQ ID NO: 1982554 - RNA, 19 nt, Artificial Sequence
  Description of Artificial Sequence: Synthetic oligonucleotide
ugaguaguuggcgaagagg

SEQ ID NO: 1982555 - RNA, 19 nt, Artificial Sequence
  Description of Artificial Sequence: Synthetic oligonucleotide
agcccaggagucuucaccc

SEQ ID NO: 1982556 - RNA, 19 nt, Artificial Sequence
  Description of Artificial Sequence: Synthetic oligonucleotide
agagcgaggggacucgggc

SEQ ID NO: 1982557 - RNA, 19 nt, Artificial Sequence
  Description of Artificial Sequence: Synthetic oligonucleotide
auugguacguagguaggcc

SEQ ID NO: 1982558 - RNA, 19 nt, Artificial Sequence
  Description of Artificial Sequence: Synthetic oligonucleotide
uccagcuggaucacgacug

SEQ ID NO: 1982559 - RNA, 19 nt, Artificial Sequence
  Description of Artificial Sequence: Synthetic oligonucleotide
auucgcaggcguuguagcc

SEQ ID NO: 1982560 - RNA, 19 nt, Artificial Sequence
  Description of Artificial Sequence: Synthetic oligonucleotide
uugaccucggugcugggag

SEQ ID NO: 1982561 - RNA, 19 nt, Artificial Sequence
  Description of Artificial Sequence: Synthetic oligonucleotide
acguagguaggccagcagg

SEQ ID NO: 1982562 - RNA, 19 nt, Artificial Sequence
  Description of Artificial Sequence: Synthetic oligonucleotide
guaguuggcgaagaggccg

SEQ ID NO: 1982563 - RNA, 19 nt, Artificial Sequence
  Description of Artificial Sequence: Synthetic oligonucleotide
agcacagucugacccagcg

SEQ ID NO: 1982564 - RNA, 19 nt, Artificial Sequence
  Description of Artificial Sequence: Synthetic oligonucleotide
aaaagggacuccuccuugu

SEQ ID NO: 1982565 - RNA, 19 nt, Artificial Sequence
  Description of Artificial Sequence: Synthetic oligonucleotide
uuccguagcccguggaugg

SEQ ID NO: 1982566 - RNA, 19 nt, Artificial Sequence
  Description of Artificial Sequence: Synthetic oligonucleotide
caguucauugcugauuucg

SEQ ID NO: 1982567 - RNA, 19 nt, Artificial Sequence
  Description of Artificial Sequence: Synthetic oligonucleotide
aauccggggcagaaggacc

SEQ ID NO: 1982568 - RNA, 19 nt, Artificial Sequence
  Description of Artificial Sequence: Synthetic oligonucleotide
cacacggugaggacgaggc

SEQ ID NO: 1982569 - RNA, 19 nt, Artificial Sequence
  Description of Artificial Sequence: Synthetic oligonucleotide
uuucugccuacgcacagca

SEQ ID NO: 1982570 - RNA, 19 nt, Artificial Sequence
  Description of Artificial Sequence: Synthetic oligonucleotide
gaguacaaugaggacauug

SEQ ID NO: 1982571 - RNA, 19 nt, Artificial Sequence
  Description of Artificial Sequence: Synthetic oligonucleotide
cacuaggaguacaaugagg

SEQ ID NO: 1982572 - RNA, 19 nt, Artificial Sequence
  Description of Artificial Sequence: Synthetic oligonucleotide
uguggcagcgccucuacca

SEQ ID NO: 1982573 - RNA, 19 nt, Artificial Sequence
  Description of Artificial Sequence: Synthetic oligonucleotide
ucuugauaguggcagcuuc

SEQ ID NO: 1982574 - RNA, 19 nt, Artificial Sequence
  Description of Artificial Sequence: Synthetic oligonucleotide
uguccugugaguacuuggu

SEQ ID NO: 1982575 - RNA, 19 nt, Artificial Sequence
  Description of Artificial Sequence: Synthetic oligonucleotide
ucacccaccgaauucuccc

SEQ ID NO: 1982576 - RNA, 19 nt, Artificial Sequence
  Description of Artificial Sequence: Synthetic oligonucleotide
gaggacauugguacguagg

SEQ ID NO: 1982577 - RNA, 19 nt, Artificial Sequence
  Description of Artificial Sequence: Synthetic oligonucleotide
uccuggaccugccacacca

SEQ ID NO: 1982578 - RNA, 19 nt, Artificial Sequence
  Description of Artificial Sequence: Synthetic oligonucleotide
aggaaccgcggccagaaag

SEQ ID NO: 1982579 - RNA, 19 nt, Artificial Sequence
  Description of Artificial Sequence: Synthetic oligonucleotide
agugccacuucuccuggac

SEQ ID NO: 1982580 - RNA, 19 nt, Artificial Sequence
  Description of Artificial Sequence: Synthetic oligonucleotide
ugagguaacggagggcgcg

SEQ ID NO: 1982581 - RNA, 19 nt, Artificial Sequence
  Description of Artificial Sequence: Synthetic oligonucleotide
agccacuaggaguacaaug

SEQ ID NO: 1982582 - RNA, 19 nt, Artificial Sequence
  Description of Artificial Sequence: Synthetic oligonucleotide
aggacauugguacguaggu

SEQ ID NO: 1982583 - RNA, 19 nt, Artificial Sequence
  Description of Artificial Sequence: Synthetic oligonucleotide
gucugacccagcgagaagg

SEQ ID NO: 1982584 - RNA, 19 nt, Artificial Sequence
  Description of Artificial Sequence: Synthetic oligonucleotide
uauucgcaggcguuguagc

SEQ ID NO: 1982585 - RNA, 19 nt, Artificial Sequence
  Description of Artificial Sequence: Synthetic oligonucleotide
ugguacguagguaggccag

SEQ ID NO: 1982586 - RNA, 19 nt, Artificial Sequence
  Description of Artificial Sequence: Synthetic oligonucleotide
guagccguaggacucgcag

SEQ ID NO: 1982587 - RNA, 19 nt, Artificial Sequence
  Description of Artificial Sequence: Synthetic oligonucleotide
gaccaaggaaguugacuag

SEQ ID NO: 1982588 - RNA, 19 nt, Artificial Sequence
  Description of Artificial Sequence: Synthetic oligonucleotide
guucauugcugauuucgug

SEQ ID NO: 1982589 - RNA, 19 nt, Artificial Sequence
  Description of Artificial Sequence: Synthetic oligonucleotide
uccgggaccaccugccagg

SEQ ID NO: 1982590 - RNA, 19 nt, Artificial Sequence
  Description of Artificial Sequence: Synthetic oligonucleotide
uucgcaggcguuguagccg

SEQ ID NO: 1982591 - RNA, 19 nt, Artificial Sequence
  Description of Artificial Sequence: Synthetic oligonucleotide
agaguuggggaccaaggaa

SEQ ID NO: 1982592 - RNA, 19 nt, Artificial Sequence
  Description of Artificial Sequence: Synthetic oligonucleotide
ugugaguacuugguggccc

SEQ ID NO: 1982593 - RNA, 19 nt, Artificial Sequence
  Description of Artificial Sequence: Synthetic oligonucleotide
gacgcacacggugaggacg

SEQ ID NO: 1982594 - RNA, 19 nt, Artificial Sequence
  Description of Artificial Sequence: Synthetic oligonucleotide
aaguugacuagggcaauga

SEQ ID NO: 1982595 - RNA, 19 nt, Artificial Sequence
  Description of Artificial Sequence: Synthetic oligonucleotide
gguggaggauccuagccgg

SEQ ID NO: 1982596 - RNA, 19 nt, Artificial Sequence
  Description of Artificial Sequence: Synthetic oligonucleotide
uugguacguagguaggcca

SEQ ID NO: 1982597 - RNA, 19 nt, Artificial Sequence
  Description of Artificial Sequence: Synthetic oligonucleotide
agggacuccuccuuguugu

SEQ ID NO: 1982598 - RNA, 19 nt, Artificial Sequence
  Description of Artificial Sequence: Synthetic oligonucleotide
ugaggacauugguacguag

SEQ ID NO: 1982599 - RNA, 19 nt, Artificial Sequence
  Description of Artificial Sequence: Synthetic oligonucleotide
ugggagacgcacacgguga

SEQ ID NO: 1982600 - RNA, 19 nt, Artificial Sequence
  Description of Artificial Sequence: Synthetic oligonucleotide
ggucacguagcccagagga

SEQ ID NO: 1982601 - RNA, 19 nt, Artificial Sequence
  Description of Artificial Sequence: Synthetic oligonucleotide
aggaccgcggacgcgaagc

SEQ ID NO: 1982602 - RNA, 19 nt, Artificial Sequence
  Description of Artificial Sequence: Synthetic oligonucleotide
aagcucgagagcgagggga

SEQ ID NO: 1982603 - RNA, 19 nt, Artificial Sequence
  Description of Artificial Sequence: Synthetic oligonucleotide
uaaggggcgcccuguagcc

SEQ ID NO: 1982604 - RNA, 19 nt, Artificial Sequence
  Description of Artificial Sequence: Synthetic oligonucleotide
cugauuucguguuucuuga

SEQ ID NO: 1982605 - RNA, 19 nt, Artificial Sequence
  Description of Artificial Sequence: Synthetic oligonucleotide
agaagacuuuggcacuaag

SEQ ID NO: 1982606 - RNA, 19 nt, Artificial Sequence
  Description of Artificial Sequence: Synthetic oligonucleotide
caggucguccaccaagugc

SEQ ID NO: 1982607 - RNA, 19 nt, Artificial Sequence
  Description of Artificial Sequence: Synthetic oligonucleotide
uugauaguggcagcuuccc

SEQ ID NO: 1982608 - RNA, 19 nt, Artificial Sequence
  Description of Artificial Sequence: Synthetic oligonucleotide
ucacguagcccagaggaac

SEQ ID NO: 1982609 - RNA, 19 nt, Artificial Sequence
  Description of Artificial Sequence: Synthetic oligonucleotide
ugagguugaccucggugcu

SEQ ID NO: 1982610 - RNA, 19 nt, Artificial Sequence
  Description of Artificial Sequence: Synthetic oligonucleotide
gauuucguguuucuugaua

SEQ ID NO: 1982611 - RNA, 19 nt, Artificial Sequence
  Description of Artificial Sequence: Synthetic oligonucleotide
agccguaggacucgcagcu

SEQ ID NO: 1982612 - RNA, 19 nt, Artificial Sequence
  Description of Artificial Sequence: Synthetic oligonucleotide
cacgacugugaagaguugg

SEQ ID NO: 1982613 - RNA, 19 nt, Artificial Sequence
  Description of Artificial Sequence: Synthetic oligonucleotide
gaggaacauccccaggcug

SEQ ID NO: 1982614 - RNA, 19 nt, Artificial Sequence
  Description of Artificial Sequence: Synthetic oligonucleotide
cugggcacgggaauccggg

SEQ ID NO: 1982615 - RNA, 19 nt, Artificial Sequence
  Description of Artificial Sequence: Synthetic oligonucleotide
cugguggaggauccuagcc

SEQ ID NO: 1982616 - RNA, 19 nt, Artificial Sequence
  Description of Artificial Sequence: Synthetic oligonucleotide
uuucguguuucuugauagu

SEQ ID NO: 1982617 - RNA, 19 nt, Artificial Sequence
  Description of Artificial Sequence: Synthetic oligonucleotide
ugauaguggcagcuuccca

SEQ ID NO: 1982618 - RNA, 19 nt, Artificial Sequence
  Description of Artificial Sequence: Synthetic oligonucleotide
agcgaggggacucgggcuc

SEQ ID NO: 1982619 - RNA, 19 nt, Artificial Sequence
  Description of Artificial Sequence: Synthetic oligonucleotide
guauucgcaggcguuguag

SEQ ID NO: 1982620 - RNA, 19 nt, Artificial Sequence
  Description of Artificial Sequence: Synthetic oligonucleotide
uuuggcacuaaggggcgcc

SEQ ID NO: 1982621 - RNA, 19 nt, Artificial Sequence
  Description of Artificial Sequence: Synthetic oligonucleotide
caccaagugccacuucucc

SEQ ID NO: 1982622 - RNA, 19 nt, Artificial Sequence
  Description of Artificial Sequence: Synthetic oligonucleotide
uaggacucgcagcugguuc

SEQ ID NO: 1982623 - RNA, 19 nt, Artificial Sequence
  Description of Artificial Sequence: Synthetic oligonucleotide
aggagaagacuuuggcacu

SEQ ID NO: 1982624 - RNA, 19 nt, Artificial Sequence
  Description of Artificial Sequence: Synthetic oligonucleotide
uacguagguaggccagcag

SEQ ID NO: 1982625 - RNA, 19 nt, Artificial Sequence
  Description of Artificial Sequence: Synthetic oligonucleotide
aggaguacaaugaggacau

SEQ ID NO: 1982626 - RNA, 19 nt, Artificial Sequence
  Description of Artificial Sequence: Synthetic oligonucleotide
acuaaggggcgcccuguag

SEQ ID NO: 1982627 - RNA, 19 nt, Artificial Sequence
  Description of Artificial Sequence: Synthetic oligonucleotide
  modified_base (5)..(5): a, c, u, g, unknown or other
guucnguuucugccuacgc

SEQ ID NO: 1982628 - RNA, 19 nt, Artificial Sequence
  Description of Artificial Sequence: Synthetic oligonucleotide
uggaccugccacaccagcu

SEQ ID NO: 1982629 - RNA, 19 nt, Artificial Sequence
  Description of Artificial Sequence: Synthetic oligonucleotide
cacguagcccagaggaacc

SEQ ID NO: 1982630 - RNA, 19 nt, Artificial Sequence
  Description of Artificial Sequence: Synthetic oligonucleotide
ugggagcugagguaacgga

SEQ ID NO: 1982631 - RNA, 19 nt, Artificial Sequence
  Description of Artificial Sequence: Synthetic oligonucleotide
acgacugugaagaguuggg

SEQ ID NO: 1982632 - RNA, 19 nt, Artificial Sequence
  Description of Artificial Sequence: Synthetic oligonucleotide
agcgagaaggaggaacauc

SEQ ID NO: 1982633 - RNA, 19 nt, Artificial Sequence
  Description of Artificial Sequence: Synthetic oligonucleotide
cauugguacguagguaggc

SEQ ID NO: 1982634 - RNA, 19 nt, Artificial Sequence
  Description of Artificial Sequence: Synthetic oligonucleotide
uguugcugagccagcucca

SEQ ID NO: 1982635 - RNA, 19 nt, Artificial Sequence
  Description of Artificial Sequence: Synthetic oligonucleotide
cugggagacgcacacggug

SEQ ID NO: 1982636 - RNA, 19 nt, Artificial Sequence
  Description of Artificial Sequence: Synthetic oligonucleotide
  modified_base (19)..(19): a, c, u, g, unknown or other
aggacucgcagcugguucn

SEQ ID NO: 1982637 - RNA, 19 nt, Artificial Sequence
  Description of Artificial Sequence: Synthetic oligonucleotide
uggaggauccuagccgggg

SEQ ID NO: 1982638 - RNA, 19 nt, Artificial Sequence
  Description of Artificial Sequence: Synthetic oligonucleotide
guuguagccguaggacucg

SEQ ID NO: 1982639 - RNA, 19 nt, Artificial Sequence
  Description of Artificial Sequence: Synthetic oligonucleotide
cugccuacgcacagcacag

SEQ ID NO: 1982640 - RNA, 19 nt, Artificial Sequence
  Description of Artificial Sequence: Synthetic oligonucleotide
agguugaccucggugcugg

SEQ ID NO: 1982641 - RNA, 19 nt, Artificial Sequence
  Description of Artificial Sequence: Synthetic oligonucleotide
ucugacccagcgagaagga

SEQ ID NO: 1982642 - RNA, 19 nt, Artificial Sequence
  Description of Artificial Sequence: Synthetic oligonucleotide
cacgcaccagaucagggug

SEQ ID NO: 1982643 - RNA, 19 nt, Artificial Sequence
  Description of Artificial Sequence: Synthetic oligonucleotide
agccgggguguccuggggc

SEQ ID NO: 1982644 - RNA, 19 nt, Artificial Sequence
  Description of Artificial Sequence: Synthetic oligonucleotide
gaaguugacuagggcaaug

SEQ ID NO: 1982645 - RNA, 19 nt, Artificial Sequence
  Description of Artificial Sequence: Synthetic oligonucleotide
guaacggagggcgcgcugg

SEQ ID NO: 1982646 - RNA, 19 nt, Artificial Sequence
  Description of Artificial Sequence: Synthetic oligonucleotide
acggagggcgcgcuggccg

SEQ ID NO: 1982647 - RNA, 19 nt, Artificial Sequence
  Description of Artificial Sequence: Synthetic oligonucleotide
uggucacguagcccagagg

SEQ ID NO: 1982648 - RNA, 19 nt, Artificial Sequence
  Description of Artificial Sequence: Synthetic oligonucleotide
aggaaguugacuagggcaa

SEQ ID NO: 1982649 - RNA, 19 nt, Artificial Sequence
  Description of Artificial Sequence: Synthetic oligonucleotide
acauugguacguagguagg

SEQ ID NO: 1982650 - RNA, 19 nt, Artificial Sequence
  Description of Artificial Sequence: Synthetic oligonucleotide
gaauccggggcagaaggac

SEQ ID NO: 1982651 - RNA, 19 nt, Artificial Sequence
  Description of Artificial Sequence: Synthetic oligonucleotide
aaagggacuccuccuuguu

SEQ ID NO: 1982652 - RNA, 19 nt, Artificial Sequence
  Description of Artificial Sequence: Synthetic oligonucleotide
gaggguaguucuccagcug

SEQ ID NO: 1982653 - RNA, 19 nt, Artificial Sequence
  Description of Artificial Sequence: Synthetic oligonucleotide
ggaccaaggaaguugacua

SEQ ID NO: 1982654 - RNA, 19 nt, Artificial Sequence
  Description of Artificial Sequence: Synthetic oligonucleotide
ggagucuucacccaccgaa

SEQ ID NO: 1982655 - RNA, 19 nt, Artificial Sequence
  Description of Artificial Sequence: Synthetic oligonucleotide
accgcggccagaaagcaag

SEQ ID NO: 1982656 - RNA, 19 nt, Artificial Sequence
  Description of Artificial Sequence: Synthetic oligonucleotide
gaggauccuagccggggug

SEQ ID NO: 1982657 - RNA, 19 nt, Artificial Sequence
  Description of Artificial Sequence: Synthetic oligonucleotide
gaagauggcgcugauggcu

SEQ ID NO: 1982658 - RNA, 19 nt, Artificial Sequence
  Description of Artificial Sequence: Synthetic oligonucleotide
gacuagggcaaugacucca

SEQ ID NO: 1982659 - RNA, 19 nt, Artificial Sequence
  Description of Artificial Sequence: Synthetic oligonucleotide
accgcggacgcgaagcucg

SEQ ID NO: 1982660 - RNA, 19 nt, Artificial Sequence
  Description of Artificial Sequence: Synthetic oligonucleotide
ggcagcuucccacacccgg

SEQ ID NO: 1982661 - RNA, 19 nt, Artificial Sequence
  Description of Artificial Sequence: Synthetic oligonucleotide
agaaggaccgcggacgcga

SEQ ID NO: 1982662 - RNA, 19 nt, Artificial Sequence
  Description of Artificial Sequence: Synthetic oligonucleotide
cugaguaguuggcgaagag

SEQ ID NO: 1982663 - RNA, 19 nt, Artificial Sequence
  Description of Artificial Sequence: Synthetic oligonucleotide
cugcuggucacguagccca

SEQ ID NO: 1982664 - RNA, 19 nt, Artificial Sequence
  Description of Artificial Sequence: Synthetic oligonucleotide
ugacuagggcaaugacucc

SEQ ID NO: 1982665 - RNA, 19 nt, Artificial Sequence
  Description of Artificial Sequence: Synthetic oligonucleotide
cuggaucacgacugugaag

SEQ ID NO: 1982666 - RNA, 19 nt, Artificial Sequence
  Description of Artificial Sequence: Synthetic oligonucleotide
gagacgcacacggugagga

SEQ ID NO: 1982667 - RNA, 19 nt, Artificial Sequence
  Description of Artificial Sequence: Synthetic oligonucleotide
cugugaagaguuggggacc

SEQ ID NO: 1982668 - RNA, 19 nt, Artificial Sequence
  Description of Artificial Sequence: Synthetic oligonucleotide
aguucauugcugauuucgu

SEQ ID NO: 1982669 - RNA, 19 nt, Artificial Sequence
  Description of Artificial Sequence: Synthetic oligonucleotide
aggagcucagccuggugga

SEQ ID NO: 1982670 - RNA, 19 nt, Artificial Sequence
  Description of Artificial Sequence: Synthetic oligonucleotide
ugaccucggugcugggagg

SEQ ID NO: 1982671 - RNA, 19 nt, Artificial Sequence
  Description of Artificial Sequence: Synthetic oligonucleotide
cuugguggcccagaagaug

SEQ ID NO: 1982672 - RNA, 19 nt, Artificial Sequence
  Description of Artificial Sequence: Synthetic oligonucleotide
cacggugaggacgaggcug

SEQ ID NO: 1982673 - RNA, 19 nt, Artificial Sequence
  Description of Artificial Sequence: Synthetic oligonucleotide
agacgcacacggugaggac

SEQ ID NO: 1982674 - RNA, 19 nt, Artificial Sequence
  Description of Artificial Sequence: Synthetic oligonucleotide
aaggggcgcccuguagccc

SEQ ID NO: 1982675 - RNA, 19 nt, Artificial Sequence
  Description of Artificial Sequence: Synthetic oligonucleotide
agcugagguaacggagggc

SEQ ID NO: 1982676 - RNA, 19 nt, Artificial Sequence
  Description of Artificial Sequence: Synthetic oligonucleotide
cuggucacguagcccagag

SEQ ID NO: 1982677 - RNA, 19 nt, Artificial Sequence
  Description of Artificial Sequence: Synthetic oligonucleotide
ucgagagcgaggggacucg

SEQ ID NO: 1982678 - RNA, 19 nt, Artificial Sequence
  Description of Artificial Sequence: Synthetic oligonucleotide
gugggagcugagguaacgg

SEQ ID NO: 1982679 - RNA, 19 nt, Artificial Sequence
  Description of Artificial Sequence: Synthetic oligonucleotide
guacuugguggcccagaag

SEQ ID NO: 1982680 - RNA, 19 nt, Artificial Sequence
  Description of Artificial Sequence: Synthetic oligonucleotide
ucacgacugugaagaguug

SEQ ID NO: 1982681 - RNA, 19 nt, Artificial Sequence
  Description of Artificial Sequence: Synthetic oligonucleotide
guccugugaguacuuggug

SEQ ID NO: 1982682 - RNA, 19 nt, Artificial Sequence
  Description of Artificial Sequence: Synthetic oligonucleotide
guugacuagggcaaugacu

SEQ ID NO: 1982683 - RNA, 19 nt, Artificial Sequence
  Description of Artificial Sequence: Synthetic oligonucleotide
agucugacccagcgagaag

SEQ ID NO: 1982684 - RNA, 19 nt, Artificial Sequence
  Description of Artificial Sequence: Synthetic oligonucleotide
cuagggcaaugacuccagg

SEQ ID NO: 1982685 - RNA, 19 nt, Artificial Sequence
  Description of Artificial Sequence: Synthetic oligonucleotide
gacccagcgagaaggagga

SEQ ID NO: 1982686 - RNA, 19 nt, Artificial Sequence
  Description of Artificial Sequence: Synthetic oligonucleotide
agcuggaucacgacuguga

SEQ ID NO: 1982687 - RNA, 19 nt, Artificial Sequence
  Description of Artificial Sequence: Synthetic oligonucleotide
ugggcacgggaauccgggg

SEQ ID NO: 1982688 - RNA, 19 nt, Artificial Sequence
  Description of Artificial Sequence: Synthetic oligonucleotide
gccacuaggaguacaauga

SEQ ID NO: 1982689 - RNA, 19 nt, Artificial Sequence
  Description of Artificial Sequence: Synthetic oligonucleotide
auccggggcagaaggaccg

SEQ ID NO: 1982690 - RNA, 19 nt, Artificial Sequence
  Description of Artificial Sequence: Synthetic oligonucleotide
cuuccguagcccguggaug

SEQ ID NO: 1982691 - RNA, 19 nt, Artificial Sequence
  Description of Artificial Sequence: Synthetic oligonucleotide
cuagccgggguguccuggg

SEQ ID NO: 1982692 - RNA, 19 nt, Artificial Sequence
  Description of Artificial Sequence: Synthetic oligonucleotide
ugauuucguguuucuugau

SEQ ID NO: 1982693 - RNA, 19 nt, Artificial Sequence
  Description of Artificial Sequence: Synthetic oligonucleotide
uggcauucgcccgggacug

SEQ ID NO: 1982694 - RNA, 19 nt, Artificial Sequence
  Description of Artificial Sequence: Synthetic oligonucleotide
aggcguuguagccguagga

SEQ ID NO: 1982695 - RNA, 19 nt, Artificial Sequence
  Description of Artificial Sequence: Synthetic oligonucleotide
  modified_base (7)..(7): a, c, u, g, unknown or other
ugguucnguuucugccuac

SEQ ID NO: 1982696 - RNA, 19 nt, Artificial Sequence
  Description of Artificial Sequence: Synthetic oligonucleotide
cuaccauccuccgcagugc

SEQ ID NO: 1982697 - RNA, 19 nt, Artificial Sequence
  Description of Artificial Sequence: Synthetic oligonucleotide
caggcguuguagccguagg

SEQ ID NO: 1982698 - RNA, 19 nt, Artificial Sequence
  Description of Artificial Sequence: Synthetic oligonucleotide
cugguauucgcaggcguug

SEQ ID NO: 1982699 - RNA, 19 nt, Artificial Sequence
  Description of Artificial Sequence: Synthetic oligonucleotide
  modified_base (16)..(16): a, c, u, g, unknown or other
acucgcagcugguucnguu

SEQ ID NO: 1982700 - RNA, 19 nt, Artificial Sequence
  Description of Artificial Sequence: Synthetic oligonucleotide
cucggugcugggaggguag

SEQ ID NO: 1982701 - RNA, 19 nt, Artificial Sequence
  Description of Artificial Sequence: Synthetic oligonucleotide
gaucagggugagguugacc

SEQ ID NO: 1982702 - RNA, 19 nt, Artificial Sequence
  Description of Artificial Sequence: Synthetic oligonucleotide
cugagguaacggagggcgc

SEQ ID NO: 1982703 - RNA, 19 nt, Artificial Sequence
  Description of Artificial Sequence: Synthetic oligonucleotide
gggaggguaguucuccagc

SEQ ID NO: 1982704 - RNA, 19 nt, Artificial Sequence
  Description of Artificial Sequence: Synthetic oligonucleotide
guacaaugaggacauuggu

SEQ ID NO: 1982705 - RNA, 19 nt, Artificial Sequence
  Description of Artificial Sequence: Synthetic oligonucleotide
aaggaccgcggacgcgaag

SEQ ID NO: 1982706 - RNA, 19 nt, Artificial Sequence
  Description of Artificial Sequence: Synthetic oligonucleotide
  modified_base (6)..(6): a, c, u, g, unknown or other
gguucnguuucugccuacg

SEQ ID NO: 1982707 - RNA, 19 nt, Artificial Sequence
  Description of Artificial Sequence: Synthetic oligonucleotide
acccaccgaauucucccag

SEQ ID NO: 1982708 - RNA, 19 nt, Artificial Sequence
  Description of Artificial Sequence: Synthetic oligonucleotide
agcucgagagcgaggggac

SEQ ID NO: 1982709 - RNA, 19 nt, Artificial Sequence
  Description of Artificial Sequence: Synthetic oligonucleotide
uggcgaagaggccgcaguc

SEQ ID NO: 1982710 - RNA, 19 nt, Artificial Sequence
  Description of Artificial Sequence: Synthetic oligonucleotide
ggcgcugauggcuccagcc

SEQ ID NO: 1982711 - RNA, 19 nt, Artificial Sequence
  Description of Artificial Sequence: Synthetic oligonucleotide
cgcagugccccacagaagc

SEQ ID NO: 1982712 - RNA, 19 nt, Artificial Sequence
  Description of Artificial Sequence: Synthetic oligonucleotide
accacgcaccagaucaggg

SEQ ID NO: 1982713 - RNA, 19 nt, Artificial Sequence
  Description of Artificial Sequence: Synthetic oligonucleotide
agaggaaccgcggccagaa

SEQ ID NO: 1982714 - RNA, 19 nt, Artificial Sequence
  Description of Artificial Sequence: Synthetic oligonucleotide
acguagcccagaggaaccg

SEQ ID NO: 1982715 - RNA, 19 nt, Artificial Sequence
  Description of Artificial Sequence: Synthetic oligonucleotide
ggaaggcgggagcuggagg

SEQ ID NO: 1982716 - RNA, 19 nt, Artificial Sequence
  Description of Artificial Sequence: Synthetic oligonucleotide
gguauugcagcaccaggaa

SEQ ID NO: 1982717 - RNA, 19 nt, Artificial Sequence
  Description of Artificial Sequence: Synthetic oligonucleotide
ggaccugccacaccagcug

SEQ ID NO: 1982718 - RNA, 19 nt, Artificial Sequence
  Description of Artificial Sequence: Synthetic oligonucleotide
gccagcuucagcaccacgc

SEQ ID NO: 1982719 - RNA, 19 nt, Artificial Sequence
  Description of Artificial Sequence: Synthetic oligonucleotide
uguuguccugugaguacuu

SEQ ID NO: 1982720 - RNA, 19 nt, Artificial Sequence
  Description of Artificial Sequence: Synthetic oligonucleotide
agcgggaaacugaaggcgu

SEQ ID NO: 1982721 - RNA, 19 nt, Artificial Sequence
  Description of Artificial Sequence: Synthetic oligonucleotide
uagccgggguguccugggg

SEQ ID NO: 1982722 - RNA, 19 nt, Artificial Sequence
  Description of Artificial Sequence: Synthetic oligonucleotide
gauccuagccggggugucc

SEQ ID NO: 1982723 - RNA, 19 nt, Artificial Sequence
  Description of Artificial Sequence: Synthetic oligonucleotide
cacccggaugcagaagucc

SEQ ID NO: 1982724 - RNA, 19 nt, Artificial Sequence
  Description of Artificial Sequence: Synthetic oligonucleotide
cugggcccgggucuguugc

SEQ ID NO: 1982725 - RNA, 19 nt, Artificial Sequence
  Description of Artificial Sequence: Synthetic oligonucleotide
ggaaccgcggccagaaagc

SEQ ID NO: 1982726 - RNA, 19 nt, Artificial Sequence
  Description of Artificial Sequence: Synthetic oligonucleotide
ugaguacuugguggcccag

SEQ ID NO: 1982727 - RNA, 19 nt, Artificial Sequence
  Description of Artificial Sequence: Synthetic oligonucleotide
ugcuuccguagcccgugga

SEQ ID NO: 1982728 - RNA, 19 nt, Artificial Sequence
  Description of Artificial Sequence: Synthetic oligonucleotide
ugguauucgcaggcguugu

SEQ ID NO: 1982729 - RNA, 19 nt, Artificial Sequence
  Description of Artificial Sequence: Synthetic oligonucleotide
agaucagggugagguugac

SEQ ID NO: 1982730 - RNA, 19 nt, Artificial Sequence
  Description of Artificial Sequence: Synthetic oligonucleotide
gagagcgaggggacucggg

SEQ ID NO: 1982731 - RNA, 19 nt, Artificial Sequence
  Description of Artificial Sequence: Synthetic oligonucleotide
aggcgggagcuggagggcc

SEQ ID NO: 1982732 - RNA, 19 nt, Artificial Sequence
  Description of Artificial Sequence: Synthetic oligonucleotide
gcgaagaggccgcaguccc

SEQ ID NO: 1982733 - RNA, 19 nt, Artificial Sequence
  Description of Artificial Sequence: Synthetic oligonucleotide
gagguaacggagggcgcgc

SEQ ID NO: 1982734 - RNA, 19 nt, Artificial Sequence
  Description of Artificial Sequence: Synthetic oligonucleotide
gugaguacuugguggccca

SEQ ID NO: 1982735 - RNA, 19 nt, Artificial Sequence
  Description of Artificial Sequence: Synthetic oligonucleotide
aguuggggaccaaggaagu

SEQ ID NO: 1982736 - RNA, 19 nt, Artificial Sequence
  Description of Artificial Sequence: Synthetic oligonucleotide
  modified_base (2)..(2): a, c, u, g, unknown or other
cnguuucugccuacgcaca

SEQ ID NO: 1982737 - RNA, 19 nt, Artificial Sequence
  Description of Artificial Sequence: Synthetic oligonucleotide
caccgaauucucccagcac

SEQ ID NO: 1982738 - RNA, 19 nt, Artificial Sequence
  Description of Artificial Sequence: Synthetic oligonucleotide
uucugccuacgcacagcac

SEQ ID NO: 1982739 - RNA, 19 nt, Artificial Sequence
  Description of Artificial Sequence: Synthetic oligonucleotide
aggggcgcccuguagcccu

SEQ ID NO: 1982740 - RNA, 19 nt, Artificial Sequence
  Description of Artificial Sequence: Synthetic oligonucleotide
ggcguuguagccguaggac

SEQ ID NO: 1982741 - RNA, 19 nt, Artificial Sequence
  Description of Artificial Sequence: Synthetic oligonucleotide
ucccagcacugguauucgc

SEQ ID NO: 1982742 - RNA, 19 nt, Artificial Sequence
  Description of Artificial Sequence: Synthetic oligonucleotide
accauccuccgcagugccc

SEQ ID NO: 1982743 - RNA, 19 nt, Artificial Sequence
  Description of Artificial Sequence: Synthetic oligonucleotide
caccagaucagggugaggu

SEQ ID NO: 1982744 - RNA, 19 nt, Artificial Sequence
  Description of Artificial Sequence: Synthetic oligonucleotide
ccagaucagggugagguug

SEQ ID NO: 1982745 - RNA, 19 nt, Artificial Sequence
  Description of Artificial Sequence: Synthetic oligonucleotide
uuggcacuaaggggcgccc

SEQ ID NO: 1982746 - RNA, 19 nt, Artificial Sequence
  Description of Artificial Sequence: Synthetic oligonucleotide
cagcuucagcaccacgcac

SEQ ID NO: 1982747 - RNA, 19 nt, Artificial Sequence
  Description of Artificial Sequence: Synthetic oligonucleotide
gagguugaccucggugcug

SEQ ID NO: 1982748 - RNA, 19 nt, Artificial Sequence
  Description of Artificial Sequence: Synthetic oligonucleotide
gaucacgacugugaagagu

SEQ ID NO: 1982749 - RNA, 19 nt, Artificial Sequence
  Description of Artificial Sequence: Synthetic oligonucleotide
cucgagagcgaggggacuc

SEQ ID NO: 1982750 - RNA, 19 nt, Artificial Sequence
  Description of Artificial Sequence: Synthetic oligonucleotide
agcuucccacacccggaug

SEQ ID NO: 1982751 - RNA, 19 nt, Artificial Sequence
  Description of Artificial Sequence: Synthetic oligonucleotide
uuccggggcuggaggagcu

SEQ ID NO: 1982752 - RNA, 19 nt, Artificial Sequence
  Description of Artificial Sequence: Synthetic oligonucleotide
ggaucacgacugugaagag

SEQ ID NO: 1982753 - RNA, 19 nt, Artificial Sequence
  Description of Artificial Sequence: Synthetic oligonucleotide
ccaggagucuucacccacc

SEQ ID NO: 1982754 - RNA, 19 nt, Artificial Sequence
  Description of Artificial Sequence: Synthetic oligonucleotide
uuguagccguaggacucgc

SEQ ID NO: 1982755 - RNA, 19 nt, Artificial Sequence
  Description of Artificial Sequence: Synthetic oligonucleotide
aggauccuagccggggugu

SEQ ID NO: 1982756 - RNA, 19 nt, Artificial Sequence
  Description of Artificial Sequence: Synthetic oligonucleotide
guggauggcucuggcauuc

SEQ ID NO: 1982757 - RNA, 19 nt, Artificial Sequence
  Description of Artificial Sequence: Synthetic oligonucleotide
acacccggaugcagaaguc

SEQ ID NO: 1982758 - RNA, 19 nt, Artificial Sequence
  Description of Artificial Sequence: Synthetic oligonucleotide
acugguauucgcaggcguu

SEQ ID NO: 1982759 - RNA, 19 nt, Artificial Sequence
  Description of Artificial Sequence: Synthetic oligonucleotide
gaaccgcggccagaaagca

SEQ ID NO: 1982760 - RNA, 19 nt, Artificial Sequence
  Description of Artificial Sequence: Synthetic oligonucleotide
cacacccggaugcagaagu

SEQ ID NO: 1982761 - RNA, 19 nt, Artificial Sequence
  Description of Artificial Sequence: Synthetic oligonucleotide
agcaagcccaggagucuuc

SEQ ID NO: 1982762 - RNA, 19 nt, Artificial Sequence
  Description of Artificial Sequence: Synthetic oligonucleotide
ccagcgagaaggaggaaca

SEQ ID NO: 1982763 - RNA, 19 nt, Artificial Sequence
  Description of Artificial Sequence: Synthetic oligonucleotide
gggagacgcacacggugag

SEQ ID NO: 1982764 - RNA, 19 nt, Artificial Sequence
  Description of Artificial Sequence: Synthetic oligonucleotide
cguuguagccguaggacuc

SEQ ID NO: 1982765 - RNA, 19 nt, Artificial Sequence
  Description of Artificial Sequence: Synthetic oligonucleotide
ggggcugaguaguuggcga

SEQ ID NO: 1982766 - RNA, 19 nt, Artificial Sequence
  Description of Artificial Sequence: Synthetic oligonucleotide
guuggcgaagaggccgcag

SEQ ID NO: 1982767 - RNA, 19 nt, Artificial Sequence
  Description of Artificial Sequence: Synthetic oligonucleotide
caggaguggcugguguggc

SEQ ID NO: 1982768 - RNA, 19 nt, Artificial Sequence
  Description of Artificial Sequence: Synthetic oligonucleotide
aggagucuucacccaccga

SEQ ID NO: 1982769 - RNA, 19 nt, Artificial Sequence
  Description of Artificial Sequence: Synthetic oligonucleotide
cacaccagcugcuuccgua

SEQ ID NO: 1982770 - RNA, 19 nt, Artificial Sequence
  Description of Artificial Sequence: Synthetic oligonucleotide
auccuagccgggguguccu

SEQ ID NO: 1982771 - RNA, 19 nt, Artificial Sequence
  Description of Artificial Sequence: Synthetic oligonucleotide
guacguagguaggccagca

SEQ ID NO: 1982772 - RNA, 19 nt, Artificial Sequence
  Description of Artificial Sequence: Synthetic oligonucleotide
ccauccuccgcagugcccc

SEQ ID NO: 1982773 - RNA, 19 nt, Artificial Sequence
  Description of Artificial Sequence: Synthetic oligonucleotide
gggcacgggaauccggggc

SEQ ID NO: 1982774 - RNA, 19 nt, Artificial Sequence
  Description of Artificial Sequence: Synthetic oligonucleotide
acgcacacggugaggacga

SEQ ID NO: 1982775 - RNA, 19 nt, Artificial Sequence
  Description of Artificial Sequence: Synthetic oligonucleotide
ggcacuaaggggcgcccug

SEQ ID NO: 1982776 - RNA, 19 nt, Artificial Sequence
  Description of Artificial Sequence: Synthetic oligonucleotide
cagaaggaccgcggacgcg

SEQ ID NO: 1982777 - RNA, 19 nt, Artificial Sequence
  Description of Artificial Sequence: Synthetic oligonucleotide
gguacguagguaggccagc

SEQ ID NO: 1982778 - RNA, 19 nt, Artificial Sequence
  Description of Artificial Sequence: Synthetic oligonucleotide
ccaggaguggcuggugugg

SEQ ID NO: 1982779 - RNA, 19 nt, Artificial Sequence
  Description of Artificial Sequence: Synthetic oligonucleotide
aggggacucgggcuccgga

SEQ ID NO: 1982780 - RNA, 19 nt, Artificial Sequence
  Description of Artificial Sequence: Synthetic oligonucleotide
gcuggaucacgacugugaa

SEQ ID NO: 1982781 - RNA, 19 nt, Artificial Sequence
  Description of Artificial Sequence: Synthetic oligonucleotide
  modified_base (9)..(9): a, c, u, g, unknown or other
gcugguucnguuucugccu

SEQ ID NO: 1982782 - RNA, 19 nt, Artificial Sequence
  Description of Artificial Sequence: Synthetic oligonucleotide
agcccguggauggcucugg

SEQ ID NO: 1982783 - RNA, 19 nt, Artificial Sequence
  Description of Artificial Sequence: Synthetic oligonucleotide
cugaaggcgugggagcuga

SEQ ID NO: 1982784 - RNA, 19 nt, Artificial Sequence
  Description of Artificial Sequence: Synthetic oligonucleotide
ggcgaagaggccgcagucc

SEQ ID NO: 1982785 - RNA, 19 nt, Artificial Sequence
  Description of Artificial Sequence: Synthetic oligonucleotide
cugcuuccguagcccgugg

SEQ ID NO: 1982786 - RNA, 19 nt, Artificial Sequence
  Description of Artificial Sequence: Synthetic oligonucleotide
uccguagcccguggauggc

SEQ ID NO: 1982787 - RNA, 19 nt, Artificial Sequence
  Description of Artificial Sequence: Synthetic oligonucleotide
cuggcgagccugggcacgg

SEQ ID NO: 1982788 - RNA, 19 nt, Artificial Sequence
  Description of Artificial Sequence: Synthetic oligonucleotide
cgacaggucguccaccaag

SEQ ID NO: 1982789 - RNA, 19 nt, Artificial Sequence
  Description of Artificial Sequence: Synthetic oligonucleotide
ggacgcgaagcucgagagc

SEQ ID NO: 1982790 - RNA, 19 nt, Artificial Sequence
  Description of Artificial Sequence: Synthetic oligonucleotide
guugaccucggugcuggga

SEQ ID NO: 1982791 - RNA, 19 nt, Artificial Sequence
  Description of Artificial Sequence: Synthetic oligonucleotide
guguggcagcgccucuacc

SEQ ID NO: 1982792 - RNA, 19 nt, Artificial Sequence
  Description of Artificial Sequence: Synthetic oligonucleotide
gccuacgcacagcacaguc

SEQ ID NO: 1982793 - RNA, 19 nt, Artificial Sequence
  Description of Artificial Sequence: Synthetic oligonucleotide
cccagcgagaaggaggaac

SEQ ID NO: 1982794 - RNA, 19 nt, Artificial Sequence
  Description of Artificial Sequence: Synthetic oligonucleotide
cagucugacccagcgagaa

SEQ ID NO: 1982795 - RNA, 19 nt, Artificial Sequence
  Description of Artificial Sequence: Synthetic oligonucleotide
ggagacgcacacggugagg

SEQ ID NO: 1982796 - RNA, 19 nt, Artificial Sequence
  Description of Artificial Sequence: Synthetic oligonucleotide
gagccugggcacgggaauc

SEQ ID NO: 1982797 - RNA, 19 nt, Artificial Sequence
  Description of Artificial Sequence: Synthetic oligonucleotide
gccggaaggcgggagcugg

SEQ ID NO: 1982798 - RNA, 19 nt, Artificial Sequence
  Description of Artificial Sequence: Synthetic oligonucleotide
ggaggguaguucuccagcu

SEQ ID NO: 1982799 - RNA, 19 nt, Artificial Sequence
  Description of Artificial Sequence: Synthetic oligonucleotide
gagcgaggggacucgggcu

SEQ ID NO: 1982800 - RNA, 19 nt, Artificial Sequence
  Description of Artificial Sequence: Synthetic oligonucleotide
cacccaccgaauucuccca

SEQ ID NO: 1982801 - RNA, 19 nt, Artificial Sequence
  Description of Artificial Sequence: Synthetic oligonucleotide
gcacugguauucgcaggcg

SEQ ID NO: 1982802 - RNA, 19 nt, Artificial Sequence
  Description of Artificial Sequence: Synthetic oligonucleotide
aaccgcggccagaaagcaa

SEQ ID NO: 1982803 - RNA, 19 nt, Artificial Sequence
  Description of Artificial Sequence: Synthetic oligonucleotide
ggggacucgggcuccggac

SEQ ID NO: 1982804 - RNA, 19 nt, Artificial Sequence
  Description of Artificial Sequence: Synthetic oligonucleotide
cggacgcgaagcucgagag

SEQ ID NO: 1982805 - RNA, 19 nt, Artificial Sequence
  Description of Artificial Sequence: Synthetic oligonucleotide
ggaggaacauccccaggcu

SEQ ID NO: 1982806 - RNA, 19 nt, Artificial Sequence
  Description of Artificial Sequence: Synthetic oligonucleotide
ccaggaaaagggacuccuc

SEQ ID NO: 1982807 - RNA, 19 nt, Artificial Sequence
  Description of Artificial Sequence: Synthetic oligonucleotide
uccuagccgggguguccug

SEQ ID NO: 1982808 - RNA, 19 nt, Artificial Sequence
  Description of Artificial Sequence: Synthetic oligonucleotide
acgcaccagaucaggguga

SEQ ID NO: 1982809 - RNA, 19 nt, Artificial Sequence
  Description of Artificial Sequence: Synthetic oligonucleotide
uggcacuaaggggcgcccu

SEQ ID NO: 1982810 - RNA, 19 nt, Artificial Sequence
  Description of Artificial Sequence: Synthetic oligonucleotide
acgggaauccggggcagaa

SEQ ID NO: 1982811 - RNA, 19 nt, Artificial Sequence
  Description of Artificial Sequence: Synthetic oligonucleotide
gcauucgcccgggacuggg

SEQ ID NO: 1982812 - RNA, 19 nt, Artificial Sequence
  Description of Artificial Sequence: Synthetic oligonucleotide
gccgggguguccuggggcc

SEQ ID NO: 1982813 - RNA, 19 nt, Artificial Sequence
  Description of Artificial Sequence: Synthetic oligonucleotide
gcacacggugaggacgagg

SEQ ID NO: 1982814 - RNA, 19 nt, Artificial Sequence
  Description of Artificial Sequence: Synthetic oligonucleotide
uccggggcagaaggaccgc

SEQ ID NO: 1982815 - RNA, 19 nt, Artificial Sequence
  Description of Artificial Sequence: Synthetic oligonucleotide
ggcgugggagcugagguaa

SEQ ID NO: 1982816 - RNA, 19 nt, Artificial Sequence
  Description of Artificial Sequence: Synthetic oligonucleotide
cccaggagucuucacccac

SEQ ID NO: 1982817 - RNA, 19 nt, Artificial Sequence
  Description of Artificial Sequence: Synthetic oligonucleotide
ugccuacgcacagcacagu

SEQ ID NO: 1982818 - RNA, 19 nt, Artificial Sequence
  Description of Artificial Sequence: Synthetic oligonucleotide
gucacguagcccagaggaa

SEQ ID NO: 1982819 - RNA, 19 nt, Artificial Sequence
  Description of Artificial Sequence: Synthetic oligonucleotide
ggacugggagacgcacacg

SEQ ID NO: 1982820 - RNA, 19 nt, Artificial Sequence
  Description of Artificial Sequence: Synthetic oligonucleotide
cacugguauucgcaggcgu

SEQ ID NO: 1982821 - RNA, 19 nt, Artificial Sequence
  Description of Artificial Sequence: Synthetic oligonucleotide
gcggacgcgaagcucgaga

SEQ ID NO: 1982822 - RNA, 19 nt, Artificial Sequence
  Description of Artificial Sequence: Synthetic oligonucleotide
gcgccucuaccauccuccg

SEQ ID NO: 1982823 - RNA, 19 nt, Artificial Sequence
  Description of Artificial Sequence: Synthetic oligonucleotide
gggaccaaggaaguugacu

SEQ ID NO: 1982824 - RNA, 19 nt, Artificial Sequence
  Description of Artificial Sequence: Synthetic oligonucleotide
agguaacggagggcgcgcu

SEQ ID NO: 1982825 - RNA, 19 nt, Artificial Sequence
  Description of Artificial Sequence: Synthetic oligonucleotide
cauucgcccgggacuggga

SEQ ID NO: 1982826 - RNA, 19 nt, Artificial Sequence
  Description of Artificial Sequence: Synthetic oligonucleotide
gcgcugauggcuccagcca

SEQ ID NO: 1982827 - RNA, 19 nt, Artificial Sequence
  Description of Artificial Sequence: Synthetic oligonucleotide
gguugaccucggugcuggg

SEQ ID NO: 1982828 - RNA, 19 nt, Artificial Sequence
  Description of Artificial Sequence: Synthetic oligonucleotide
ucggugcugggaggguagu

SEQ ID NO: 1982829 - RNA, 19 nt, Artificial Sequence
  Description of Artificial Sequence: Synthetic oligonucleotide
  modified_base (18)..(18): a, c, u, g, unknown or other
ggacucgcagcugguucng

SEQ ID NO: 1982830 - RNA, 19 nt, Artificial Sequence
  Description of Artificial Sequence: Synthetic oligonucleotide
ggagaagacuuuggcacua

SEQ ID NO: 1982831 - RNA, 19 nt, Artificial Sequence
  Description of Artificial Sequence: Synthetic oligonucleotide
aguuggcgaagaggccgca

SEQ ID NO: 1982832 - RNA, 19 nt, Artificial Sequence
  Description of Artificial Sequence: Synthetic oligonucleotide
ccaccuucaguucauugcu

SEQ ID NO: 1982833 - RNA, 19 nt, Artificial Sequence
  Description of Artificial Sequence: Synthetic oligonucleotide
agggcgcgcuggccggaag

SEQ ID NO: 1982834 - RNA, 19 nt, Artificial Sequence
  Description of Artificial Sequence: Synthetic oligonucleotide
gcgggaaacugaaggcgug

SEQ ID NO: 1982835 - RNA, 19 nt, Artificial Sequence
  Description of Artificial Sequence: Synthetic oligonucleotide
ccaccgaauucucccagca

SEQ ID NO: 1982836 - RNA, 19 nt, Artificial Sequence
  Description of Artificial Sequence: Synthetic oligonucleotide
ggacauugguacguaggua

SEQ ID NO: 1982837 - RNA, 19 nt, Artificial Sequence
  Description of Artificial Sequence: Synthetic oligonucleotide
gcgaagcucgagagcgagg

SEQ ID NO: 1982838 - RNA, 19 nt, Artificial Sequence
  Description of Artificial Sequence: Synthetic oligonucleotide
ggaauccggggcagaagga

SEQ ID NO: 1982839 - RNA, 19 nt, Artificial Sequence
  Description of Artificial Sequence: Synthetic oligonucleotide
ccuagccgggguguccugg

SEQ ID NO: 1982840 - RNA, 19 nt, Artificial Sequence
  Description of Artificial Sequence: Synthetic oligonucleotide
guggcagcgccucuaccau

SEQ ID NO: 1982841 - RNA, 19 nt, Artificial Sequence
  Description of Artificial Sequence: Synthetic oligonucleotide
cgggaaacugaaggcgugg

SEQ ID NO: 1982842 - RNA, 19 nt, Artificial Sequence
  Description of Artificial Sequence: Synthetic oligonucleotide
gguauucgcaggcguugua

SEQ ID NO: 1982843 - RNA, 19 nt, Artificial Sequence
  Description of Artificial Sequence: Synthetic oligonucleotide
ggaggauccuagccggggu

SEQ ID NO: 1982844 - RNA, 19 nt, Artificial Sequence
  Description of Artificial Sequence: Synthetic oligonucleotide
gaggaaccgcggccagaaa

SEQ ID NO: 1982845 - RNA, 19 nt, Artificial Sequence
  Description of Artificial Sequence: Synthetic oligonucleotide
guagcccguggauggcucu

SEQ ID NO: 1982846 - RNA, 19 nt, Artificial Sequence
  Description of Artificial Sequence: Synthetic oligonucleotide
cuccgcagugccccacaga

SEQ ID NO: 1982847 - RNA, 19 nt, Artificial Sequence
  Description of Artificial Sequence: Synthetic oligonucleotide
gccgcgacaggucguccac

SEQ ID NO: 1982848 - RNA, 19 nt, Artificial Sequence
  Description of Artificial Sequence: Synthetic oligonucleotide
gcaccacgcaccagaucag

SEQ ID NO: 1982849 - RNA, 19 nt, Artificial Sequence
  Description of Artificial Sequence: Synthetic oligonucleotide
cggggcagaaggaccgcgg

SEQ ID NO: 1982850 - RNA, 19 nt, Artificial Sequence
  Description of Artificial Sequence: Synthetic oligonucleotide
gcgcccuguagcccuggcc

SEQ ID NO: 1982851 - RNA, 19 nt, Artificial Sequence
  Description of Artificial Sequence: Synthetic oligonucleotide
gcccgggacugggagacgc

SEQ ID NO: 1982852 - RNA, 19 nt, Artificial Sequence
  Description of Artificial Sequence: Synthetic oligonucleotide
gcucuggcauucgcccggg

SEQ ID NO: 1982853 - RNA, 19 nt, Artificial Sequence
  Description of Artificial Sequence: Synthetic oligonucleotide
gcccgggucuguugcugag

SEQ ID NO: 1982854 - RNA, 19 nt, Artificial Sequence
  Description of Artificial Sequence: Synthetic oligonucleotide
gcaagcccaggagucuuca

SEQ ID NO: 1982855 - RNA, 19 nt, Artificial Sequence
  Description of Artificial Sequence: Synthetic oligonucleotide
ggcgcgcuggccggaaggc

SEQ ID NO: 1982856 - RNA, 19 nt, Artificial Sequence
  Description of Artificial Sequence: Synthetic oligonucleotide
ccuacgcacagcacagucu

SEQ ID NO: 1982857 - RNA, 19 nt, Artificial Sequence
  Description of Artificial Sequence: Synthetic oligonucleotide
cacuaaggggcgcccugua

SEQ ID NO: 1982858 - RNA, 19 nt, Artificial Sequence
  Description of Artificial Sequence: Synthetic oligonucleotide
ccgcagugccccacagaag

SEQ ID NO: 1982859 - RNA, 19 nt, Artificial Sequence
  Description of Artificial Sequence: Synthetic oligonucleotide
ggacgaggcugaagcagga

SEQ ID NO: 1982860 - RNA, 19 nt, Artificial Sequence
  Description of Artificial Sequence: Synthetic oligonucleotide
acgcgaagcucgagagcga

SEQ ID NO: 1982861 - RNA, 19 nt, Artificial Sequence
  Description of Artificial Sequence: Synthetic oligonucleotide
cagaggaaccgcggccaga

SEQ ID NO: 1982862 - RNA, 19 nt, Artificial Sequence
  Description of Artificial Sequence: Synthetic oligonucleotide
gcacgggaauccggggcag

SEQ ID NO: 1982863 - RNA, 19 nt, Artificial Sequence
  Description of Artificial Sequence: Synthetic oligonucleotide
gcaccagaucagggugagg

SEQ ID NO: 1982864 - RNA, 19 nt, Artificial Sequence
  Description of Artificial Sequence: Synthetic oligonucleotide
cgcgaagcucgagagcgag

SEQ ID NO: 1982865 - RNA, 19 nt, Artificial Sequence
  Description of Artificial Sequence: Synthetic oligonucleotide
gcuggccggaaggcgggag

SEQ ID NO: 1982866 - RNA, 19 nt, Artificial Sequence
  Description of Artificial Sequence: Synthetic oligonucleotide
ccguggauggcucuggcau

SEQ ID NO: 1982867 - RNA, 19 nt, Artificial Sequence
  Description of Artificial Sequence: Synthetic oligonucleotide
gacgaggcugaagcaggau

SEQ ID NO: 1982868 - RNA, 19 nt, Artificial Sequence
  Description of Artificial Sequence: Synthetic oligonucleotide
gcccguggauggcucuggc

SEQ ID NO: 1982869 - RNA, 19 nt, Artificial Sequence
  Description of Artificial Sequence: Synthetic oligonucleotide
gcuuccguagcccguggau

SEQ ID NO: 1982870 - RNA, 19 nt, Artificial Sequence
  Description of Artificial Sequence: Synthetic oligonucleotide
cccggaugcagaaguccca

SEQ ID NO: 1982871 - RNA, 19 nt, Artificial Sequence
  Description of Artificial Sequence: Synthetic oligonucleotide
ggcccgggucuguugcuga

SEQ ID NO: 1982872 - RNA, 19 nt, Artificial Sequence
  Description of Artificial Sequence: Synthetic oligonucleotide
cguagcccguggauggcuc

SEQ ID NO: 1982873 - RNA, 19 nt, Artificial Sequence
  Description of Artificial Sequence: Synthetic oligonucleotide
gcgcuggccggaaggcggg

SEQ ID NO: 1982874 - RNA, 19 nt, Artificial Sequence
  Description of Artificial Sequence: Synthetic oligonucleotide
ccacgcaccagaucagggu

SEQ ID NO: 1982875 - RNA, 19 nt, Artificial Sequence
  Description of Artificial Sequence: Synthetic oligonucleotide
ccgcggccagaaagcaagc

SEQ ID NO: 1982876 - RNA, 19 nt, Artificial Sequence
  Description of Artificial Sequence: Synthetic oligonucleotide
gcgcgcuggccggaaggcg

SEQ ID NO: 1982877 - RNA, 19 nt, Artificial Sequence
  Description of Artificial Sequence: Synthetic oligonucleotide
guaggacucgcagcugguu

SEQ ID NO: 1982878 - RNA, 19 nt, Artificial Sequence
  Description of Artificial Sequence: Synthetic oligonucleotide
cgcaccagaucagggugag

SEQ ID NO: 1982879 - RNA, 19 nt, Artificial Sequence
  Description of Artificial Sequence: Synthetic oligonucleotide
ggaaguugacuagggcaau

SEQ ID NO: 1982880 - RNA, 19 nt, Artificial Sequence
  Description of Artificial Sequence: Synthetic oligonucleotide
cacgggaauccggggcaga

SEQ ID NO: 1982881 - RNA, 19 nt, Artificial Sequence
  Description of Artificial Sequence: Synthetic oligonucleotide
gccguaggacucgcagcug

SEQ ID NO: 1982882 - RNA, 19 nt, Artificial Sequence
  Description of Artificial Sequence: Synthetic oligonucleotide
cagcuucccacacccggau

SEQ ID NO: 1982883 - RNA, 19 nt, Artificial Sequence
  Description of Artificial Sequence: Synthetic oligonucleotide
gcgaggggacucgggcucc

SEQ ID NO: 1982884 - RNA, 19 nt, Artificial Sequence
  Description of Artificial Sequence: Synthetic oligonucleotide
ggggaccaaggaaguugac

SEQ ID NO: 1982885 - RNA, 19 nt, Artificial Sequence
  Description of Artificial Sequence: Synthetic oligonucleotide
cgcgacaggucguccacca

SEQ ID NO: 1982886 - RNA, 19 nt, Artificial Sequence
  Description of Artificial Sequence: Synthetic oligonucleotide
  modified_base (17)..(17): a, c, u, g, unknown or other
gacucgcagcugguucngu

SEQ ID NO: 1982887 - RNA, 19 nt, Artificial Sequence
  Description of Artificial Sequence: Synthetic oligonucleotide
ccacacccggaugcagaag

SEQ ID NO: 1982888 - RNA, 19 nt, Artificial Sequence
  Description of Artificial Sequence: Synthetic oligonucleotide
gcuggucacguagcccaga

SEQ ID NO: 1982889 - RNA, 19 nt, Artificial Sequence
  Description of Artificial Sequence: Synthetic oligonucleotide
cucuggcauucgcccggga

SEQ ID NO: 1982890 - RNA, 19 nt, Artificial Sequence
  Description of Artificial Sequence: Synthetic oligonucleotide
cgagagcgaggggacucgg

SEQ ID NO: 1982891 - RNA, 19 nt, Artificial Sequence
  Description of Artificial Sequence: Synthetic oligonucleotide
cgccucuaccauccuccgc

SEQ ID NO: 1982892 - RNA, 19 nt, Artificial Sequence
  Description of Artificial Sequence: Synthetic oligonucleotide
ggccggaaggcgggagcug

SEQ ID NO: 1982893 - RNA, 19 nt, Artificial Sequence
  Description of Artificial Sequence: Synthetic oligonucleotide
ggaccgcggacgcgaagcu

SEQ ID NO: 1982894 - RNA, 19 nt, Artificial Sequence
  Description of Artificial Sequence: Synthetic oligonucleotide
gcgacaggucguccaccaa

SEQ ID NO: 1982895 - RNA, 19 nt, Artificial Sequence
  Description of Artificial Sequence: Synthetic oligonucleotide
acccagcgagaaggaggaa

SEQ ID NO: 1982896 - RNA, 19 nt, Artificial Sequence
  Description of Artificial Sequence: Synthetic oligonucleotide
gcgugggagcugagguaac

SEQ ID NO: 1982897 - RNA, 19 nt, Artificial Sequence
  Description of Artificial Sequence: Synthetic oligonucleotide
gggcgcccuguagcccugg

SEQ ID NO: 1982898 - RNA, 19 nt, Artificial Sequence
  Description of Artificial Sequence: Synthetic oligonucleotide
cccaggaggagaagacuuu

SEQ ID NO: 1982899 - RNA, 19 nt, Artificial Sequence
  Description of Artificial Sequence: Synthetic oligonucleotide
cggacucagcucgggcagc

SEQ ID NO: 1982900 - RNA, 19 nt, Artificial Sequence
  Description of Artificial Sequence: Synthetic oligonucleotide
ggcggcccucuuccagcuc

SEQ ID NO: 1982901 - RNA, 19 nt, Artificial Sequence
  Description of Artificial Sequence: Synthetic oligonucleotide
ccggggcuggaggagcuca

SEQ ID NO: 1982902 - RNA, 19 nt, Artificial Sequence
  Description of Artificial Sequence: Synthetic oligonucleotide
cccgggacugggagacgca

SEQ ID NO: 1982903 - RNA, 19 nt, Artificial Sequence
  Description of Artificial Sequence: Synthetic oligonucleotide
cgggaccaccugccagggg

SEQ ID NO: 1982904 - RNA, 19 nt, Artificial Sequence
  Description of Artificial Sequence: Synthetic oligonucleotide
cgaggggacucgggcuccg

SEQ ID NO: 1982905 - RNA, 19 nt, Artificial Sequence
  Description of Artificial Sequence: Synthetic oligonucleotide
ggggcgcccuguagcccug

SEQ ID NO: 1982906 - RNA, 19 nt, Artificial Sequence
  Description of Artificial Sequence: Synthetic oligonucleotide
gcucgagagcgaggggacu

SEQ ID NO: 1982907 - RNA, 19 nt, Artificial Sequence
  Description of Artificial Sequence: Synthetic oligonucleotide
cguaggacucgcagcuggu

SEQ ID NO: 1982908 - RNA, 19 nt, Artificial Sequence
  Description of Artificial Sequence: Synthetic oligonucleotide
cuucugggcccgggucugu

SEQ ID NO: 1982909 - RNA, 19 nt, Artificial Sequence
  Description of Artificial Sequence: Synthetic oligonucleotide
ggagggcgcgcuggccgga

SEQ ID NO: 1982910 - RNA, 19 nt, Artificial Sequence
  Description of Artificial Sequence: Synthetic oligonucleotide
ccucggugcugggagggua

SEQ ID NO: 1982911 - RNA, 19 nt, Artificial Sequence
  Description of Artificial Sequence: Synthetic oligonucleotide
ccgcggacgcgaagcucga

SEQ ID NO: 1982912 - RNA, 19 nt, Artificial Sequence
  Description of Artificial Sequence: Synthetic oligonucleotide
ggaguacaaugaggacauu

SEQ ID NO: 1982913 - RNA, 19 nt, Artificial Sequence
  Description of Artificial Sequence: Synthetic oligonucleotide
cgcggacgcgaagcucgag

SEQ ID NO: 1982914 - RNA, 19 nt, Artificial Sequence
  Description of Artificial Sequence: Synthetic oligonucleotide
cgcacacggugaggacgag

SEQ ID NO: 1982915 - RNA, 19 nt, Artificial Sequence
  Description of Artificial Sequence: Synthetic oligonucleotide
ccguagcccguggauggcu

SEQ ID NO: 1982916 - RNA, 19 nt, Artificial Sequence
  Description of Artificial Sequence: Synthetic oligonucleotide
cguccaccaagugccacuu

SEQ ID NO: 1982917 - RNA, 19 nt, Artificial Sequence
  Description of Artificial Sequence: Synthetic oligonucleotide
ccgggguguccuggggccu

SEQ ID NO: 1982918 - RNA, 19 nt, Artificial Sequence
  Description of Artificial Sequence: Synthetic oligonucleotide
cgcuggccggaaggcggga

SEQ ID NO: 1982919 - RNA, 19 nt, Artificial Sequence
  Description of Artificial Sequence: Synthetic oligonucleotide
cggugcugggaggguaguu

SEQ ID NO: 1982920 - RNA, 19 nt, Artificial Sequence
  Description of Artificial Sequence: Synthetic oligonucleotide
auuguaaagaacuagaaug

SEQ ID NO: 1982921 - RNA, 19 nt, Artificial Sequence
  Description of Artificial Sequence: Synthetic oligonucleotide
auaagaguaaaacuggacc

SEQ ID NO: 1982922 - RNA, 19 nt, Artificial Sequence
  Description of Artificial Sequence: Synthetic oligonucleotide
aacagaaaguuucuggacc

SEQ ID NO: 1982923 - RNA, 19 nt, Artificial Sequence
  Description of Artificial Sequence: Synthetic oligonucleotide
uaaagaacuagaaugagug

SEQ ID NO: 1982924 - RNA, 19 nt, Artificial Sequence
  Description of Artificial Sequence: Synthetic oligonucleotide
uaaauuaaucccaaaggcg

SEQ ID NO: 1982925 - RNA, 19 nt, Artificial Sequence
  Description of Artificial Sequence: Synthetic oligonucleotide
aaaucauuccguuaucugg

SEQ ID NO: 1982926 - RNA, 19 nt, Artificial Sequence
  Description of Artificial Sequence: Synthetic oligonucleotide
aauucaucucuguugaaac

SEQ ID NO: 1982927 - RNA, 19 nt, Artificial Sequence
  Description of Artificial Sequence: Synthetic oligonucleotide
aauacauaccagcaguuuc

SEQ ID NO: 1982928 - RNA, 19 nt, Artificial Sequence
  Description of Artificial Sequence: Synthetic oligonucleotide
acaucuacacuuuacagac

SEQ ID NO: 1982929 - RNA, 19 nt, Artificial Sequence
  Description of Artificial Sequence: Synthetic oligonucleotide
uuugacauguccuauagug

SEQ ID NO: 1982930 - RNA, 19 nt, Artificial Sequence
  Description of Artificial Sequence: Synthetic oligonucleotide
agcauuauuuauuaguaac

SEQ ID NO: 1982931 - RNA, 19 nt, Artificial Sequence
  Description of Artificial Sequence: Synthetic oligonucleotide
acucaguauaaauacauac

SEQ ID NO: 1982932 - RNA, 19 nt, Artificial Sequence
  Description of Artificial Sequence: Synthetic oligonucleotide
uucagaaugaacauuccag

SEQ ID NO: 1982933 - RNA, 19 nt, Artificial Sequence
  Description of Artificial Sequence: Synthetic oligonucleotide
aauaguuuucuuguuaguc

SEQ ID NO: 1982934 - RNA, 19 nt, Artificial Sequence
  Description of Artificial Sequence: Synthetic oligonucleotide
uauaaauacauaccagcag

SEQ ID NO: 1982935 - RNA, 19 nt, Artificial Sequence
  Description of Artificial Sequence: Synthetic oligonucleotide
uccauaagaguaaaacugg

SEQ ID NO: 1982936 - RNA, 19 nt, Artificial Sequence
  Description of Artificial Sequence: Synthetic oligonucleotide
uccuccaucauuuugaaac

SEQ ID NO: 1982937 - RNA, 19 nt, Artificial Sequence
  Description of Artificial Sequence: Synthetic oligonucleotide
uauguaccuaccuauaugc

SEQ ID NO: 1982938 - RNA, 19 nt, Artificial Sequence
  Description of Artificial Sequence: Synthetic oligonucleotide
aaacagaaaguuucuggac

SEQ ID NO: 1982939 - RNA, 19 nt, Artificial Sequence
  Description of Artificial Sequence: Synthetic oligonucleotide
acuguaaucaaguaguaca

SEQ ID NO: 1982940 - RNA, 19 nt, Artificial Sequence
  Description of Artificial Sequence: Synthetic oligonucleotide
uaagaguaaaacuggaccc

SEQ ID NO: 1982941 - RNA, 19 nt, Artificial Sequence
  Description of Artificial Sequence: Synthetic oligonucleotide
guuaacuugaaucugucgc

SEQ ID NO: 1982942 - RNA, 19 nt, Artificial Sequence
  Description of Artificial Sequence: Synthetic oligonucleotide
uagccugacaucuucaucg

SEQ ID NO: 1982943 - RNA, 19 nt, Artificial Sequence
  Description of Artificial Sequence: Synthetic oligonucleotide
acuauagauauuucaagag

SEQ ID NO: 1982944 - RNA, 19 nt, Artificial Sequence
  Description of Artificial Sequence: Synthetic oligonucleotide
uuaucugggagcuuggugc

SEQ ID NO: 1982945 - RNA, 19 nt, Artificial Sequence
  Description of Artificial Sequence: Synthetic oligonucleotide
uuugcaauaucgcugaauc

SEQ ID NO: 1982946 - RNA, 19 nt, Artificial Sequence
  Description of Artificial Sequence: Synthetic oligonucleotide
cuagaaugaguguacaagg

SEQ ID NO: 1982947 - RNA, 19 nt, Artificial Sequence
  Description of Artificial Sequence: Synthetic oligonucleotide
uuuaucaacauccuacuau

SEQ ID NO: 1982948 - RNA, 19 nt, Artificial Sequence
  Description of Artificial Sequence: Synthetic oligonucleotide
aaauuaaucccaaaggcgu

SEQ ID NO: 1982949 - RNA, 19 nt, Artificial Sequence
  Description of Artificial Sequence: Synthetic oligonucleotide
uucaucguuaacuugaauc

SEQ ID NO: 1982950 - RNA, 19 nt, Artificial Sequence
  Description of Artificial Sequence: Synthetic oligonucleotide
ucuguugaaacuguaauca

SEQ ID NO: 1982951 - RNA, 19 nt, Artificial Sequence
  Description of Artificial Sequence: Synthetic oligonucleotide
uccaucuacauucugagaa

SEQ ID NO: 1982952 - RNA, 19 nt, Artificial Sequence
  Description of Artificial Sequence: Synthetic oligonucleotide
ucuaauuguaaagaacuag

SEQ ID NO: 1982953 - RNA, 19 nt, Artificial Sequence
  Description of Artificial Sequence: Synthetic oligonucleotide
uguuucagcauuuaaaauu

SEQ ID NO: 1982954 - RNA, 19 nt, Artificial Sequence
  Description of Artificial Sequence: Synthetic oligonucleotide
aaugccuuugcaauaucgc

SEQ ID NO: 1982955 - RNA, 19 nt, Artificial Sequence
  Description of Artificial Sequence: Synthetic oligonucleotide
uacuauagauauuucaaga

SEQ ID NO: 1982956 - RNA, 19 nt, Artificial Sequence
  Description of Artificial Sequence: Synthetic oligonucleotide
ucaucguuaacuugaaucu

SEQ ID NO: 1982957 - RNA, 19 nt, Artificial Sequence
  Description of Artificial Sequence: Synthetic oligonucleotide
aaagcuagacgauccguuc

SEQ ID NO: 1982958 - RNA, 19 nt, Artificial Sequence
  Description of Artificial Sequence: Synthetic oligonucleotide
aaucauuccguuaucuggg

SEQ ID NO: 1982959 - RNA, 19 nt, Artificial Sequence
  Description of Artificial Sequence: Synthetic oligonucleotide
ugguuauuggaauucaucu

SEQ ID NO: 1982960 - RNA, 19 nt, Artificial Sequence
  Description of Artificial Sequence: Synthetic oligonucleotide
aaaagaaugcuugcuaucu

SEQ ID NO: 1982961 - RNA, 19 nt, Artificial Sequence
  Description of Artificial Sequence: Synthetic oligonucleotide
aacauccuacuauagauau

SEQ ID NO: 1982962 - RNA, 19 nt, Artificial Sequence
  Description of Artificial Sequence: Synthetic oligonucleotide
uuuguaugaugccaggugu

SEQ ID NO: 1982963 - RNA, 19 nt, Artificial Sequence
  Description of Artificial Sequence: Synthetic oligonucleotide
ucaacauccuacuauagau

SEQ ID NO: 1982964 - RNA, 19 nt, Artificial Sequence
  Description of Artificial Sequence: Synthetic oligonucleotide
uguaccuaccuauaugcag

SEQ ID NO: 1982965 - RNA, 19 nt, Artificial Sequence
  Description of Artificial Sequence: Synthetic oligonucleotide
acagaaaguuucuggaccg

SEQ ID NO: 1982966 - RNA, 19 nt, Artificial Sequence
  Description of Artificial Sequence: Synthetic oligonucleotide
uuauguaccuaccuauaug

SEQ ID NO: 1982967 - RNA, 19 nt, Artificial Sequence
  Description of Artificial Sequence: Synthetic oligonucleotide
gaaacagaaaguuucugga

SEQ ID NO: 1982968 - RNA, 19 nt, Artificial Sequence
  Description of Artificial Sequence: Synthetic oligonucleotide
auuccagaaaagcuagacg

SEQ ID NO: 1982969 - RNA, 19 nt, Artificial Sequence
  Description of Artificial Sequence: Synthetic oligonucleotide
aaguccaguggccaaauca

SEQ ID NO: 1982970 - RNA, 19 nt, Artificial Sequence
  Description of Artificial Sequence: Synthetic oligonucleotide
aucccaaaggcguaaguac

SEQ ID NO: 1982971 - RNA, 19 nt, Artificial Sequence
  Description of Artificial Sequence: Synthetic oligonucleotide
ucuccuugguccauaagag

SEQ ID NO: 1982972 - RNA, 19 nt, Artificial Sequence
  Description of Artificial Sequence: Synthetic oligonucleotide
gauaacuuccuuuguauga

SEQ ID NO: 1982973 - RNA, 19 nt, Artificial Sequence
  Description of Artificial Sequence: Synthetic oligonucleotide
ucguuauugcaucaauucc

SEQ ID NO: 1982974 - RNA, 19 nt, Artificial Sequence
  Description of Artificial Sequence: Synthetic oligonucleotide
uucguuauugcaucaauuc

SEQ ID NO: 1982975 - RNA, 19 nt, Artificial Sequence
  Description of Artificial Sequence: Synthetic oligonucleotide
acuagaaugaguguacaag

SEQ ID NO: 1982976 - RNA, 19 nt, Artificial Sequence
  Description of Artificial Sequence: Synthetic oligonucleotide
aaaggcguaaguaccacuc

SEQ ID NO: 1982977 - RNA, 19 nt, Artificial Sequence
  Description of Artificial Sequence: Synthetic oligonucleotide
auaguuuucuuguuagucu

SEQ ID NO: 1982978 - RNA, 19 nt, Artificial Sequence
  Description of Artificial Sequence: Synthetic oligonucleotide
uuaagcauucagaaugaac

SEQ ID NO: 1982979 - RNA, 19 nt, Artificial Sequence
  Description of Artificial Sequence: Synthetic oligonucleotide
aaaugccuuugcaauaucg

SEQ ID NO: 1982980 - RNA, 19 nt, Artificial Sequence
  Description of Artificial Sequence: Synthetic oligonucleotide
acagacauugcacgaggcc

SEQ ID NO: 1982981 - RNA, 19 nt, Artificial Sequence
  Description of Artificial Sequence: Synthetic oligonucleotide
uucccuacgaccaccaucu

SEQ ID NO: 1982982 - RNA, 19 nt, Artificial Sequence
  Description of Artificial Sequence: Synthetic oligonucleotide
uagaaugaguguacaaggc

SEQ ID NO: 1982983 - RNA, 19 nt, Artificial Sequence
  Description of Artificial Sequence: Synthetic oligonucleotide
gaaugaguguacaaggcag

SEQ ID NO: 1982984 - RNA, 19 nt, Artificial Sequence
  Description of Artificial Sequence: Synthetic oligonucleotide
auacauaccagcaguuucc

SEQ ID NO: 1982985 - RNA, 19 nt, Artificial Sequence
  Description of Artificial Sequence: Synthetic oligonucleotide
cuaauuguaaagaacuaga

SEQ ID NO: 1982986 - RNA, 19 nt, Artificial Sequence
  Description of Artificial Sequence: Synthetic oligonucleotide
guccauaagaguaaaacug

SEQ ID NO: 1982987 - RNA, 19 nt, Artificial Sequence
  Description of Artificial Sequence: Synthetic oligonucleotide
uuaacuugaaucugucgcu

SEQ ID NO: 1982988 - RNA, 19 nt, Artificial Sequence
  Description of Artificial Sequence: Synthetic oligonucleotide
agagacaacagaaaaggag

SEQ ID NO: 1982989 - RNA, 19 nt, Artificial Sequence
  Description of Artificial Sequence: Synthetic oligonucleotide
uauuucagaccccacugug

SEQ ID NO: 1982990 - RNA, 19 nt, Artificial Sequence
  Description of Artificial Sequence: Synthetic oligonucleotide
uaccacucaguauaaauac

SEQ ID NO: 1982991 - RNA, 19 nt, Artificial Sequence
  Description of Artificial Sequence: Synthetic oligonucleotide
aacuggacccaauauauuu

SEQ ID NO: 1982992 - RNA, 19 nt, Artificial Sequence
  Description of Artificial Sequence: Synthetic oligonucleotide
uccuacuauagauauuuca

SEQ ID NO: 1982993 - RNA, 19 nt, Artificial Sequence
  Description of Artificial Sequence: Synthetic oligonucleotide
auugcaucaauuccucuug

SEQ ID NO: 1982994 - RNA, 19 nt, Artificial Sequence
  Description of Artificial Sequence: Synthetic oligonucleotide
aacauuacaaugucagcuu

SEQ ID NO: 1982995 - RNA, 19 nt, Artificial Sequence
  Description of Artificial Sequence: Synthetic oligonucleotide
ugcuaucucuccuuggucc

SEQ ID NO: 1982996 - RNA, 19 nt, Artificial Sequence
  Description of Artificial Sequence: Synthetic oligonucleotide
aaagcauuauuuauuagua

SEQ ID NO: 1982997 - RNA, 19 nt, Artificial Sequence
  Description of Artificial Sequence: Synthetic oligonucleotide
aaagaacuagaaugagugu

SEQ ID NO: 1982998 - RNA, 19 nt, Artificial Sequence
  Description of Artificial Sequence: Synthetic oligonucleotide
ucaguacuuucuuuaagca

SEQ ID NO: 1982999 - RNA, 19 nt, Artificial Sequence
  Description of Artificial Sequence: Synthetic oligonucleotide
uuauuuugguuauuggaau

SEQ ID NO: 1983000 - RNA, 19 nt, Artificial Sequence
  Description of Artificial Sequence: Synthetic oligonucleotide
uguaaagaacuagaaugag

SEQ ID NO: 1983001 - RNA, 19 nt, Artificial Sequence
  Description of Artificial Sequence: Synthetic oligonucleotide
uuaucaacauccuacuaua

SEQ ID NO: 1983002 - RNA, 19 nt, Artificial Sequence
  Description of Artificial Sequence: Synthetic oligonucleotide
uuuacagacauugcacgag

SEQ ID NO: 1983003 - RNA, 19 nt, Artificial Sequence
  Description of Artificial Sequence: Synthetic oligonucleotide
uuuauguaccuaccuauau

SEQ ID NO: 1983004 - RNA, 19 nt, Artificial Sequence
  Description of Artificial Sequence: Synthetic oligonucleotide
agaaaagcuagacgauccg

SEQ ID NO: 1983005 - RNA, 19 nt, Artificial Sequence
  Description of Artificial Sequence: Synthetic oligonucleotide
cauaagaguaaaacuggac

SEQ ID NO: 1983006 - RNA, 19 nt, Artificial Sequence
  Description of Artificial Sequence: Synthetic oligonucleotide
agaacuagaaugaguguac

SEQ ID NO: 1983007 - RNA, 19 nt, Artificial Sequence
  Description of Artificial Sequence: Synthetic oligonucleotide
acacuuuacagacauugca

SEQ ID NO: 1983008 - RNA, 19 nt, Artificial Sequence
  Description of Artificial Sequence: Synthetic oligonucleotide
aauaucgcugaaucauacu

SEQ ID NO: 1983009 - RNA, 19 nt, Artificial Sequence
  Description of Artificial Sequence: Synthetic oligonucleotide
ucucuguugaaacuguaau

SEQ ID NO: 1983010 - RNA, 19 nt, Artificial Sequence
  Description of Artificial Sequence: Synthetic oligonucleotide
agaaugaguguacaaggca

SEQ ID NO: 1983011 - RNA, 19 nt, Artificial Sequence
  Description of Artificial Sequence: Synthetic oligonucleotide
aagaacuagaaugagugua

SEQ ID NO: 1983012 - RNA, 19 nt, Artificial Sequence
  Description of Artificial Sequence: Synthetic oligonucleotide
aauucagcaaaacccguuu

SEQ ID NO: 1983013 - RNA, 19 nt, Artificial Sequence
  Description of Artificial Sequence: Synthetic oligonucleotide
auauuuagucaucucauuu

SEQ ID NO: 1983014 - RNA, 19 nt, Artificial Sequence
  Description of Artificial Sequence: Synthetic oligonucleotide
ugugguuuauguaccuacc

SEQ ID NO: 1983015 - RNA, 19 nt, Artificial Sequence
  Description of Artificial Sequence: Synthetic oligonucleotide
ucgucuaauuguaaagaac

SEQ ID NO: 1983016 - RNA, 19 nt, Artificial Sequence
  Description of Artificial Sequence: Synthetic oligonucleotide
ugcaggcugacaaagucug

SEQ ID NO: 1983017 - RNA, 19 nt, Artificial Sequence
  Description of Artificial Sequence: Synthetic oligonucleotide
gacaacacacgcuagugca

SEQ ID NO: 1983018 - RNA, 19 nt, Artificial Sequence
  Description of Artificial Sequence: Synthetic oligonucleotide
uauuuagucaucucauuuu

SEQ ID NO: 1983019 - RNA, 19 nt, Artificial Sequence
  Description of Artificial Sequence: Synthetic oligonucleotide
aacacacgcuagugcaggc

SEQ ID NO: 1983020 - RNA, 19 nt, Artificial Sequence
  Description of Artificial Sequence: Synthetic oligonucleotide
ugacauguccuauaguguc

SEQ ID NO: 1983021 - RNA, 19 nt, Artificial Sequence
  Description of Artificial Sequence: Synthetic oligonucleotide
uugguuauuggaauucauc

SEQ ID NO: 1983022 - RNA, 19 nt, Artificial Sequence
  Description of Artificial Sequence: Synthetic oligonucleotide
gacccaauauauuuaguca

SEQ ID NO: 1983023 - RNA, 19 nt, Artificial Sequence
  Description of Artificial Sequence: Synthetic oligonucleotide
augcagauaacuuccuuug

SEQ ID NO: 1983024 - RNA, 19 nt, Artificial Sequence
  Description of Artificial Sequence: Synthetic oligonucleotide
guaauuuuccagcagaggu

SEQ ID NO: 1983025 - RNA, 19 nt, Artificial Sequence
  Description of Artificial Sequence: Synthetic oligonucleotide
ugaaucauacuugauuuuc

SEQ ID NO: 1983026 - RNA, 19 nt, Artificial Sequence
  Description of Artificial Sequence: Synthetic oligonucleotide
ugcaauaucgcugaaucau

SEQ ID NO: 1983027 - RNA, 19 nt, Artificial Sequence
  Description of Artificial Sequence: Synthetic oligonucleotide
cauuccguuaucugggagc

SEQ ID NO: 1983028 - RNA, 19 nt, Artificial Sequence
  Description of Artificial Sequence: Synthetic oligonucleotide
cuuuguaugaugccaggug

SEQ ID NO: 1983029 - RNA, 19 nt, Artificial Sequence
  Description of Artificial Sequence: Synthetic oligonucleotide
agaaugaacauuccagaaa

SEQ ID NO: 1983030 - RNA, 19 nt, Artificial Sequence
  Description of Artificial Sequence: Synthetic oligonucleotide
uaucaacauccuacuauag

SEQ ID NO: 1983031 - RNA, 19 nt, Artificial Sequence
  Description of Artificial Sequence: Synthetic oligonucleotide
auucccuacgaccaccauc

SEQ ID NO: 1983032 - RNA, 19 nt, Artificial Sequence
  Description of Artificial Sequence: Synthetic oligonucleotide
agauauuucaagagacaac

SEQ ID NO: 1983033 - RNA, 19 nt, Artificial Sequence
  Description of Artificial Sequence: Synthetic oligonucleotide
ugguccauaagaguaaaac

SEQ ID NO: 1983034 - RNA, 19 nt, Artificial Sequence
  Description of Artificial Sequence: Synthetic oligonucleotide
uacacuuuacagacauugc

SEQ ID NO: 1983035 - RNA, 19 nt, Artificial Sequence
  Description of Artificial Sequence: Synthetic oligonucleotide
ucccaaaggcguaaguacc

SEQ ID NO: 1983036 - RNA, 19 nt, Artificial Sequence
  Description of Artificial Sequence: Synthetic oligonucleotide
uccauaucuuccuccauca

SEQ ID NO: 1983037 - RNA, 19 nt, Artificial Sequence
  Description of Artificial Sequence: Synthetic oligonucleotide
aaaauauagaagggguuaa

SEQ ID NO: 1983038 - RNA, 19 nt, Artificial Sequence
  Description of Artificial Sequence: Synthetic oligonucleotide
agauaacuuccuuuguaug

SEQ ID NO: 1983039 - RNA, 19 nt, Artificial Sequence
  Description of Artificial Sequence: Synthetic oligonucleotide
auucagaaugaacauucca

SEQ ID NO: 1983040 - RNA, 19 nt, Artificial Sequence
  Description of Artificial Sequence: Synthetic oligonucleotide
ucccauaacauuagccuga

SEQ ID NO: 1983041 - RNA, 19 nt, Artificial Sequence
  Description of Artificial Sequence: Synthetic oligonucleotide
uaugcagauaacuuccuuu

SEQ ID NO: 1983042 - RNA, 19 nt, Artificial Sequence
  Description of Artificial Sequence: Synthetic oligonucleotide
auaucgcugaaucauacuu

SEQ ID NO: 1983043 - RNA, 19 nt, Artificial Sequence
  Description of Artificial Sequence: Synthetic oligonucleotide
aucaacauccuacuauaga

SEQ ID NO: 1983044 - RNA, 19 nt, Artificial Sequence
  Description of Artificial Sequence: Synthetic oligonucleotide
agcgagguuucguuauugc

SEQ ID NO: 1983045 - RNA, 19 nt, Artificial Sequence
  Description of Artificial Sequence: Synthetic oligonucleotide
uccaucauuuugaaacaga

SEQ ID NO: 1983046 - RNA, 19 nt, Artificial Sequence
  Description of Artificial Sequence: Synthetic oligonucleotide
aagaguaaaacuggaccca

SEQ ID NO: 1983047 - RNA, 19 nt, Artificial Sequence
  Description of Artificial Sequence: Synthetic oligonucleotide
aacagaaaaggaguaguaa

SEQ ID NO: 1983048 - RNA, 19 nt, Artificial Sequence
  Description of Artificial Sequence: Synthetic oligonucleotide
aagggguuaaguuuuccuu

SEQ ID NO: 1983049 - RNA, 19 nt, Artificial Sequence
  Description of Artificial Sequence: Synthetic oligonucleotide
agaaaguuucuggaccggc

SEQ ID NO: 1983050 - RNA, 19 nt, Artificial Sequence
  Description of Artificial Sequence: Synthetic oligonucleotide
uucgucuaauuguaaagaa

SEQ ID NO: 1983051 - RNA, 19 nt, Artificial Sequence
  Description of Artificial Sequence: Synthetic oligonucleotide
acccaauauauuuagucau

SEQ ID NO: 1983052 - RNA, 19 nt, Artificial Sequence
  Description of Artificial Sequence: Synthetic oligonucleotide
caaaucauuccguuaucug

SEQ ID NO: 1983053 - RNA, 19 nt, Artificial Sequence
  Description of Artificial Sequence: Synthetic oligonucleotide
caggcgaucagauugucuc

SEQ ID NO: 1983054 - RNA, 19 nt, Artificial Sequence
  Description of Artificial Sequence: Synthetic oligonucleotide
aucgcugaaucauacuuga

SEQ ID NO: 1983055 - RNA, 19 nt, Artificial Sequence
  Description of Artificial Sequence: Synthetic oligonucleotide
aacuagaaugaguguacaa

SEQ ID NO: 1983056 - RNA, 19 nt, Artificial Sequence
  Description of Artificial Sequence: Synthetic oligonucleotide
ucuggaccggcucuaauuc

SEQ ID NO: 1983057 - RNA, 19 nt, Artificial Sequence
  Description of Artificial Sequence: Synthetic oligonucleotide
caauaucgcugaaucauac

SEQ ID NO: 1983058 - RNA, 19 nt, Artificial Sequence
  Description of Artificial Sequence: Synthetic oligonucleotide
uguacaaggcaguaauuuu

SEQ ID NO: 1983059 - RNA, 19 nt, Artificial Sequence
  Description of Artificial Sequence: Synthetic oligonucleotide
aauuccucuuggccugcgg

SEQ ID NO: 1983060 - RNA, 19 nt, Artificial Sequence
  Description of Artificial Sequence: Synthetic oligonucleotide
uagacgauccguuccagaa

SEQ ID NO: 1983061 - RNA, 19 nt, Artificial Sequence
  Description of Artificial Sequence: Synthetic oligonucleotide
uuucguuauugcaucaauu

SEQ ID NO: 1983062 - RNA, 19 nt, Artificial Sequence
  Description of Artificial Sequence: Synthetic oligonucleotide
cuggacccaauauauuuag

SEQ ID NO: 1983063 - RNA, 19 nt, Artificial Sequence
  Description of Artificial Sequence: Synthetic oligonucleotide
auuacaaugucagcuuuca

SEQ ID NO: 1983064 - RNA, 19 nt, Artificial Sequence
  Description of Artificial Sequence: Synthetic oligonucleotide
uccguuaucugggagcuug

SEQ ID NO: 1983065 - RNA, 19 nt, Artificial Sequence
  Description of Artificial Sequence: Synthetic oligonucleotide
cagacauugcacgaggccc

SEQ ID NO: 1983066 - RNA, 19 nt, Artificial Sequence
  Description of Artificial Sequence: Synthetic oligonucleotide
cugugguuuauguaccuac

SEQ ID NO: 1983067 - RNA, 19 nt, Artificial Sequence
  Description of Artificial Sequence: Synthetic oligonucleotide
aaaauucagcaaaacccgu

SEQ ID NO: 1983068 - RNA, 19 nt, Artificial Sequence
  Description of Artificial Sequence: Synthetic oligonucleotide
gagguuucguuauugcauc

SEQ ID NO: 1983069 - RNA, 19 nt, Artificial Sequence
  Description of Artificial Sequence: Synthetic oligonucleotide
auacuugauuuuccaacug

SEQ ID NO: 1983070 - RNA, 19 nt, Artificial Sequence
  Description of Artificial Sequence: Synthetic oligonucleotide
aaaguccaguggccaaauc

SEQ ID NO: 1983071 - RNA, 19 nt, Artificial Sequence
  Description of Artificial Sequence: Synthetic oligonucleotide
uaccuauaugcagauaacu

SEQ ID NO: 1983072 - RNA, 19 nt, Artificial Sequence
  Description of Artificial Sequence: Synthetic oligonucleotide
aggcgaucagauugucucc

SEQ ID NO: 1983073 - RNA, 19 nt, Artificial Sequence
  Description of Artificial Sequence: Synthetic oligonucleotide
acugacaacacacgcuagu

SEQ ID NO: 1983074 - RNA, 19 nt, Artificial Sequence
  Description of Artificial Sequence: Synthetic oligonucleotide
ugguuuauguaccuaccua

SEQ ID NO: 1983075 - RNA, 19 nt, Artificial Sequence
  Description of Artificial Sequence: Synthetic oligonucleotide
uacagacauugcacgaggc

SEQ ID NO: 1983076 - RNA, 19 nt, Artificial Sequence
  Description of Artificial Sequence: Synthetic oligonucleotide
ccaauaguuuucuuguuag

SEQ ID NO: 1983077 - RNA, 19 nt, Artificial Sequence
  Description of Artificial Sequence: Synthetic oligonucleotide
ucagauugucuccgcaaac

SEQ ID NO: 1983078 - RNA, 19 nt, Artificial Sequence
  Description of Artificial Sequence: Synthetic oligonucleotide
ucauuccguuaucugggag

SEQ ID NO: 1983079 - RNA, 19 nt, Artificial Sequence
  Description of Artificial Sequence: Synthetic oligonucleotide
aaugaguguacaaggcagu

SEQ ID NO: 1983080 - RNA, 19 nt, Artificial Sequence
  Description of Artificial Sequence: Synthetic oligonucleotide
uauuggaauucaucucugu

SEQ ID NO: 1983081 - RNA, 19 nt, Artificial Sequence
  Description of Artificial Sequence: Synthetic oligonucleotide
guuaucugggagcuuggug

SEQ ID NO: 1983082 - RNA, 19 nt, Artificial Sequence
  Description of Artificial Sequence: Synthetic oligonucleotide
auucaucucuguugaaacu

SEQ ID NO: 1983083 - RNA, 19 nt, Artificial Sequence
  Description of Artificial Sequence: Synthetic oligonucleotide
ugcaucaauuccucuuggc

SEQ ID NO: 1983084 - RNA, 19 nt, Artificial Sequence
  Description of Artificial Sequence: Synthetic oligonucleotide
uuuugacauguccuauagu

SEQ ID NO: 1983085 - RNA, 19 nt, Artificial Sequence
  Description of Artificial Sequence: Synthetic oligonucleotide
ugcacacucccacaucuac

SEQ ID NO: 1983086 - RNA, 19 nt, Artificial Sequence
  Description of Artificial Sequence: Synthetic oligonucleotide
cuuuaagcauucagaauga

SEQ ID NO: 1983087 - RNA, 19 nt, Artificial Sequence
  Description of Artificial Sequence: Synthetic oligonucleotide
caauauauuuagucaucuc

SEQ ID NO: 1983088 - RNA, 19 nt, Artificial Sequence
  Description of Artificial Sequence: Synthetic oligonucleotide
auuucagaccccacugugg

SEQ ID NO: 1983089 - RNA, 19 nt, Artificial Sequence
  Description of Artificial Sequence: Synthetic oligonucleotide
ccuauaugcagauaacuuc

SEQ ID NO: 1983090 - RNA, 19 nt, Artificial Sequence
  Description of Artificial Sequence: Synthetic oligonucleotide
auaucuuccuccaucauuu

SEQ ID NO: 1983091 - RNA, 19 nt, Artificial Sequence
  Description of Artificial Sequence: Synthetic oligonucleotide
ggacccaauauauuuaguc

SEQ ID NO: 1983092 - RNA, 19 nt, Artificial Sequence
  Description of Artificial Sequence: Synthetic oligonucleotide
aaggcguaaguaccacuca

SEQ ID NO: 1983093 - RNA, 19 nt, Artificial Sequence
  Description of Artificial Sequence: Synthetic oligonucleotide
gaaaaggaguaguaacaaa

SEQ ID NO: 1983094 - RNA, 19 nt, Artificial Sequence
  Description of Artificial Sequence: Synthetic oligonucleotide
aaauacauaccagcaguuu

SEQ ID NO: 1983095 - RNA, 19 nt, Artificial Sequence
  Description of Artificial Sequence: Synthetic oligonucleotide
caucuacauucugagaagc

SEQ ID NO: 1983096 - RNA, 19 nt, Artificial Sequence
  Description of Artificial Sequence: Synthetic oligonucleotide
aaaagcuagacgauccguu

SEQ ID NO: 1983097 - RNA, 19 nt, Artificial Sequence
  Description of Artificial Sequence: Synthetic oligonucleotide
aggcguaaguaccacucag

SEQ ID NO: 1983098 - RNA, 19 nt, Artificial Sequence
  Description of Artificial Sequence: Synthetic oligonucleotide
gacaaagucugaaucuuuc

SEQ ID NO: 1983099 - RNA, 19 nt, Artificial Sequence
  Description of Artificial Sequence: Synthetic oligonucleotide
uaucugggagcuuggugcc

SEQ ID NO: 1983100 - RNA, 19 nt, Artificial Sequence
  Description of Artificial Sequence: Synthetic oligonucleotide
cagauugucuccgcaaacc

SEQ ID NO: 1983101 - RNA, 19 nt, Artificial Sequence
  Description of Artificial Sequence: Synthetic oligonucleotide
uguaugaugccaggugucu

SEQ ID NO: 1983102 - RNA, 19 nt, Artificial Sequence
  Description of Artificial Sequence: Synthetic oligonucleotide
gcaucaauuccucuuggcc

SEQ ID NO: 1983103 - RNA, 19 nt, Artificial Sequence
  Description of Artificial Sequence: Synthetic oligonucleotide
cuaccuauaugcagauaac

SEQ ID NO: 1983104 - RNA, 19 nt, Artificial Sequence
  Description of Artificial Sequence: Synthetic oligonucleotide
uuguaugaugccagguguc

SEQ ID NO: 1983105 - RNA, 19 nt, Artificial Sequence
  Description of Artificial Sequence: Synthetic oligonucleotide
gcuucgucuaauuguaaag

SEQ ID NO: 1983106 - RNA, 19 nt, Artificial Sequence
  Description of Artificial Sequence: Synthetic oligonucleotide
gacgauccguuccagaaaa

SEQ ID NO: 1983107 - RNA, 19 nt, Artificial Sequence
  Description of Artificial Sequence: Synthetic oligonucleotide
cuagugcaggcugacaaag

SEQ ID NO: 1983108 - RNA, 19 nt, Artificial Sequence
  Description of Artificial Sequence: Synthetic oligonucleotide
ucuucaucguuaacuugaa

SEQ ID NO: 1983109 - RNA, 19 nt, Artificial Sequence
  Description of Artificial Sequence: Synthetic oligonucleotide
uuaaucccaaaggcguaag

SEQ ID NO: 1983110 - RNA, 19 nt, Artificial Sequence
  Description of Artificial Sequence: Synthetic oligonucleotide
aucuacauucugagaagcg

SEQ ID NO: 1983111 - RNA, 19 nt, Artificial Sequence
  Description of Artificial Sequence: Synthetic oligonucleotide
aagucaacaccaauaguuu

SEQ ID NO: 1983112 - RNA, 19 nt, Artificial Sequence
  Description of Artificial Sequence: Synthetic oligonucleotide
uuccuuugauccaaagauu

SEQ ID NO: 1983113 - RNA, 19 nt, Artificial Sequence
  Description of Artificial Sequence: Synthetic oligonucleotide
cuuuacagacauugcacga

SEQ ID NO: 1983114 - RNA, 19 nt, Artificial Sequence
  Description of Artificial Sequence: Synthetic oligonucleotide
guacaaggcaguaauuuuc

SEQ ID NO: 1983115 - RNA, 19 nt, Artificial Sequence
  Description of Artificial Sequence: Synthetic oligonucleotide
ucguuaacuugaaucuguc

SEQ ID NO: 1983116 - RNA, 19 nt, Artificial Sequence
  Description of Artificial Sequence: Synthetic oligonucleotide
aauuccaggcgaucagauu

SEQ ID NO: 1983117 - RNA, 19 nt, Artificial Sequence
  Description of Artificial Sequence: Synthetic oligonucleotide
auaacuuccuuuguaugau

SEQ ID NO: 1983118 - RNA, 19 nt, Artificial Sequence
  Description of Artificial Sequence: Synthetic oligonucleotide
aucagauugucuccgcaaa

SEQ ID NO: 1983119 - RNA, 19 nt, Artificial Sequence
  Description of Artificial Sequence: Synthetic oligonucleotide
guuauugcaucaauuccuc

SEQ ID NO: 1983120 - RNA, 19 nt, Artificial Sequence
  Description of Artificial Sequence: Synthetic oligonucleotide
ugcuugcuaucucuccuug

SEQ ID NO: 1983121 - RNA, 19 nt, Artificial Sequence
  Description of Artificial Sequence: Synthetic oligonucleotide
gacauguccuauagugucc

SEQ ID NO: 1983122 - RNA, 19 nt, Artificial Sequence
  Description of Artificial Sequence: Synthetic oligonucleotide
auuagccugacaucuucau

SEQ ID NO: 1983123 - RNA, 19 nt, Artificial Sequence
  Description of Artificial Sequence: Synthetic oligonucleotide
gaucagauugucuccgcaa

SEQ ID NO: 1983124 - RNA, 19 nt, Artificial Sequence
  Description of Artificial Sequence: Synthetic oligonucleotide
aucguuaacuugaaucugu

SEQ ID NO: 1983125 - RNA, 19 nt, Artificial Sequence
  Description of Artificial Sequence: Synthetic oligonucleotide
uugcacgaggcccacugac

SEQ ID NO: 1983126 - RNA, 19 nt, Artificial Sequence
  Description of Artificial Sequence: Synthetic oligonucleotide
agcuucgucuaauuguaaa

SEQ ID NO: 1983127 - RNA, 19 nt, Artificial Sequence
  Description of Artificial Sequence: Synthetic oligonucleotide
gguuauuggaauucaucuc

SEQ ID NO: 1983128 - RNA, 19 nt, Artificial Sequence
  Description of Artificial Sequence: Synthetic oligonucleotide
caacacacgcuagugcagg

SEQ ID NO: 1983129 - RNA, 19 nt, Artificial Sequence
  Description of Artificial Sequence: Synthetic oligonucleotide
uacgaccaccaucuugaug

SEQ ID NO: 1983130 - RNA, 19 nt, Artificial Sequence
  Description of Artificial Sequence: Synthetic oligonucleotide
guaccuaccuauaugcaga

SEQ ID NO: 1983131 - RNA, 19 nt, Artificial Sequence
  Description of Artificial Sequence: Synthetic oligonucleotide
uacauaccagcaguuuccc

SEQ ID NO: 1983132 - RNA, 19 nt, Artificial Sequence
  Description of Artificial Sequence: Synthetic oligonucleotide
uucagagcgagguuucguu

SEQ ID NO: 1983133 - RNA, 19 nt, Artificial Sequence
  Description of Artificial Sequence: Synthetic oligonucleotide
cuucgucuaauuguaaaga

SEQ ID NO: 1983134 - RNA, 19 nt, Artificial Sequence
  Description of Artificial Sequence: Synthetic oligonucleotide
cauacuugauuuuccaacu

SEQ ID NO: 1983135 - RNA, 19 nt, Artificial Sequence
  Description of Artificial Sequence: Synthetic oligonucleotide
gugucccauaacauuagcc

SEQ ID NO: 1983136 - RNA, 19 nt, Artificial Sequence
  Description of Artificial Sequence: Synthetic oligonucleotide
ugcacgaggcccacugaca

SEQ ID NO: 1983137 - RNA, 19 nt, Artificial Sequence
  Description of Artificial Sequence: Synthetic oligonucleotide
uucuggaccggcucuaauu

SEQ ID NO: 1983138 - RNA, 19 nt, Artificial Sequence
  Description of Artificial Sequence: Synthetic oligonucleotide
ccuacuauagauauuucaa

SEQ ID NO: 1983139 - RNA, 19 nt, Artificial Sequence
  Description of Artificial Sequence: Synthetic oligonucleotide
uaacuugaaucugucgcuc

SEQ ID NO: 1983140 - RNA, 19 nt, Artificial Sequence
  Description of Artificial Sequence: Synthetic oligonucleotide
cugacaacacacgcuagug

SEQ ID NO: 1983141 - RNA, 19 nt, Artificial Sequence
  Description of Artificial Sequence: Synthetic oligonucleotide
cagaaugaacauuccagaa

SEQ ID NO: 1983142 - RNA, 19 nt, Artificial Sequence
  Description of Artificial Sequence: Synthetic oligonucleotide
accauuuaucaacauccua

SEQ ID NO: 1983143 - RNA, 19 nt, Artificial Sequence
  Description of Artificial Sequence: Synthetic oligonucleotide
uggacccaauauauuuagu

SEQ ID NO: 1983144 - RNA, 19 nt, Artificial Sequence
  Description of Artificial Sequence: Synthetic oligonucleotide
cuuugauccaaagauuuua

SEQ ID NO: 1983145 - RNA, 19 nt, Artificial Sequence
  Description of Artificial Sequence: Synthetic oligonucleotide
ugcggugucccauaacauu

SEQ ID NO: 1983146 - RNA, 19 nt, Artificial Sequence
  Description of Artificial Sequence: Synthetic oligonucleotide
auuaaucccaaaggcguaa

SEQ ID NO: 1983147 - RNA, 19 nt, Artificial Sequence
  Description of Artificial Sequence: Synthetic oligonucleotide
uugcuaucucuccuugguc

SEQ ID NO: 1983148 - RNA, 19 nt, Artificial Sequence
  Description of Artificial Sequence: Synthetic oligonucleotide
caucguuaacuugaaucug

SEQ ID NO: 1983149 - RNA, 19 nt, Artificial Sequence
  Description of Artificial Sequence: Synthetic oligonucleotide
ucagaccccacugugguuu

SEQ ID NO: 1983150 - RNA, 19 nt, Artificial Sequence
  Description of Artificial Sequence: Synthetic oligonucleotide
cugaaucuuuccuucagua

SEQ ID NO: 1983151 - RNA, 19 nt, Artificial Sequence
  Description of Artificial Sequence: Synthetic oligonucleotide
acaaggcaguaauuuucca

SEQ ID NO: 1983152 - RNA, 19 nt, Artificial Sequence
  Description of Artificial Sequence: Synthetic oligonucleotide
ccuacgaccaccaucuuga

SEQ ID NO: 1983153 - RNA, 19 nt, Artificial Sequence
  Description of Artificial Sequence: Synthetic oligonucleotide
ccuaccuauaugcagauaa

SEQ ID NO: 1983154 - RNA, 19 nt, Artificial Sequence
  Description of Artificial Sequence: Synthetic oligonucleotide
accuauaugcagauaacuu

SEQ ID NO: 1983155 - RNA, 19 nt, Artificial Sequence
  Description of Artificial Sequence: Synthetic oligonucleotide
gaccggcucuaauuccagg

SEQ ID NO: 1983156 - RNA, 19 nt, Artificial Sequence
  Description of Artificial Sequence: Synthetic oligonucleotide
ugaguguacaaggcaguaa

SEQ ID NO: 1983157 - RNA, 19 nt, Artificial Sequence
  Description of Artificial Sequence: Synthetic oligonucleotide
cacacgcuagugcaggcug

SEQ ID NO: 1983158 - RNA, 19 nt, Artificial Sequence
  Description of Artificial Sequence: Synthetic oligonucleotide
guaaagaacuagaaugagu

SEQ ID NO: 1983159 - RNA, 19 nt, Artificial Sequence
  Description of Artificial Sequence: Synthetic oligonucleotide
acugcuccauucccuacga

SEQ ID NO: 1983160 - RNA, 19 nt, Artificial Sequence
  Description of Artificial Sequence: Synthetic oligonucleotide
aucauuccguuaucuggga

SEQ ID NO: 1983161 - RNA, 19 nt, Artificial Sequence
  Description of Artificial Sequence: Synthetic oligonucleotide
uuucagagcgagguuucgu

SEQ ID NO: 1983162 - RNA, 19 nt, Artificial Sequence
  Description of Artificial Sequence: Synthetic oligonucleotide
ggcaguaauuuuccagcag

SEQ ID NO: 1983163 - RNA, 19 nt, Artificial Sequence
  Description of Artificial Sequence: Synthetic oligonucleotide
cuggaccggcucuaauucc

SEQ ID NO: 1983164 - RNA, 19 nt, Artificial Sequence
  Description of Artificial Sequence: Synthetic oligonucleotide
gguccauaagaguaaaacu

SEQ ID NO: 1983165 - RNA, 19 nt, Artificial Sequence
  Description of Artificial Sequence: Synthetic oligonucleotide
cuacauucugagaagcgcu

SEQ ID NO: 1983166 - RNA, 19 nt, Artificial Sequence
  Description of Artificial Sequence: Synthetic oligonucleotide
guaccacucaguauaaaua

SEQ ID NO: 1983167 - RNA, 19 nt, Artificial Sequence
  Description of Artificial Sequence: Synthetic oligonucleotide
cagggcaacauuacaaugu

SEQ ID NO: 1983168 - RNA, 19 nt, Artificial Sequence
  Description of Artificial Sequence: Synthetic oligonucleotide
agaagcgcugcagggcaac

SEQ ID NO: 1983169 - RNA, 19 nt, Artificial Sequence
  Description of Artificial Sequence: Synthetic oligonucleotide
aguccaguggccaaaucau

SEQ ID NO: 1983170 - RNA, 19 nt, Artificial Sequence
  Description of Artificial Sequence: Synthetic oligonucleotide
cucuaauuccaggcgauca

SEQ ID NO: 1983171 - RNA, 19 nt, Artificial Sequence
  Description of Artificial Sequence: Synthetic oligonucleotide
uuggugccuggguauuuca

SEQ ID NO: 1983172 - RNA, 19 nt, Artificial Sequence
  Description of Artificial Sequence: Synthetic oligonucleotide
agcuuucagagcgagguuu

SEQ ID NO: 1983173 - RNA, 19 nt, Artificial Sequence
  Description of Artificial Sequence: Synthetic oligonucleotide
gguuuauguaccuaccuau

SEQ ID NO: 1983174 - RNA, 19 nt, Artificial Sequence
  Description of Artificial Sequence: Synthetic oligonucleotide
cugcagggcaacauuacaa

SEQ ID NO: 1983175 - RNA, 19 nt, Artificial Sequence
  Description of Artificial Sequence: Synthetic oligonucleotide
cagaaaguuucuggaccgg

SEQ ID NO: 1983176 - RNA, 19 nt, Artificial Sequence
  Description of Artificial Sequence: Synthetic oligonucleotide
gcugaaucauacuugauuu

SEQ ID NO: 1983177 - RNA, 19 nt, Artificial Sequence
  Description of Artificial Sequence: Synthetic oligonucleotide
agacgauccguuccagaaa

SEQ ID NO: 1983178 - RNA, 19 nt, Artificial Sequence
  Description of Artificial Sequence: Synthetic oligonucleotide
uaccuaccuauaugcagau

SEQ ID NO: 1983179 - RNA, 19 nt, Artificial Sequence
  Description of Artificial Sequence: Synthetic oligonucleotide
cauccuacuauagauauuu

SEQ ID NO: 1983180 - RNA, 19 nt, Artificial Sequence
  Description of Artificial Sequence: Synthetic oligonucleotide
caacauccuacuauagaua

SEQ ID NO: 1983181 - RNA, 19 nt, Artificial Sequence
  Description of Artificial Sequence: Synthetic oligonucleotide
cccauucagauuuacaaaa

SEQ ID NO: 1983182 - RNA, 19 nt, Artificial Sequence
  Description of Artificial Sequence: Synthetic oligonucleotide
ggcgaucagauugucuccg

SEQ ID NO: 1983183 - RNA, 19 nt, Artificial Sequence
  Description of Artificial Sequence: Synthetic oligonucleotide
cacugacaacacacgcuag

SEQ ID NO: 1983184 - RNA, 19 nt, Artificial Sequence
  Description of Artificial Sequence: Synthetic oligonucleotide
cuugcuaucucuccuuggu

SEQ ID NO: 1983185 - RNA, 19 nt, Artificial Sequence
  Description of Artificial Sequence: Synthetic oligonucleotide
uggguauuucagaccccac

SEQ ID NO: 1983186 - RNA, 19 nt, Artificial Sequence
  Description of Artificial Sequence: Synthetic oligonucleotide
ucuacacuuuacagacauu

SEQ ID NO: 1983187 - RNA, 19 nt, Artificial Sequence
  Description of Artificial Sequence: Synthetic oligonucleotide
cagauaacuuccuuuguau

SEQ ID NO: 1983188 - RNA, 19 nt, Artificial Sequence
  Description of Artificial Sequence: Synthetic oligonucleotide
accacucaguauaaauaca

SEQ ID NO: 1983189 - RNA, 19 nt, Artificial Sequence
  Description of Artificial Sequence: Synthetic oligonucleotide
gagcgagguuucguuauug

SEQ ID NO: 1983190 - RNA, 19 nt, Artificial Sequence
  Description of Artificial Sequence: Synthetic oligonucleotide
gaaaagcuagacgauccgu

SEQ ID NO: 1983191 - RNA, 19 nt, Artificial Sequence
  Description of Artificial Sequence: Synthetic oligonucleotide
cauucugagaagcgcugca

SEQ ID NO: 1983192 - RNA, 19 nt, Artificial Sequence
  Description of Artificial Sequence: Synthetic oligonucleotide
guaugaugccaggugucug

SEQ ID NO: 1983193 - RNA, 19 nt, Artificial Sequence
  Description of Artificial Sequence: Synthetic oligonucleotide
agaggucuccaucuacauu

SEQ ID NO: 1983194 - RNA, 19 nt, Artificial Sequence
  Description of Artificial Sequence: Synthetic oligonucleotide
agacauugcacgaggccca

SEQ ID NO: 1983195 - RNA, 19 nt, Artificial Sequence
  Description of Artificial Sequence: Synthetic oligonucleotide
uggccaaaucauuccguua

SEQ ID NO: 1983196 - RNA, 19 nt, Artificial Sequence
  Description of Artificial Sequence: Synthetic oligonucleotide
uuucuggaccggcucuaau

SEQ ID NO: 1983197 - RNA, 19 nt, Artificial Sequence
  Description of Artificial Sequence: Synthetic oligonucleotide
acauaccagcaguuuccca

SEQ ID NO: 1983198 - RNA, 19 nt, Artificial Sequence
  Description of Artificial Sequence: Synthetic oligonucleotide
cccaauauauuuagucauc

SEQ ID NO: 1983199 - RNA, 19 nt, Artificial Sequence
  Description of Artificial Sequence: Synthetic oligonucleotide
aaacuggacccaauauauu

SEQ ID NO: 1983200 - RNA, 19 nt, Artificial Sequence
  Description of Artificial Sequence: Synthetic oligonucleotide
auugcacgaggcccacuga

SEQ ID NO: 1983201 - RNA, 19 nt, Artificial Sequence
  Description of Artificial Sequence: Synthetic oligonucleotide
cauguccuauagugucccc

SEQ ID NO: 1983202 - RNA, 19 nt, Artificial Sequence
  Description of Artificial Sequence: Synthetic oligonucleotide
gccuuugcaauaucgcuga

SEQ ID NO: 1983203 - RNA, 19 nt, Artificial Sequence
  Description of Artificial Sequence: Synthetic oligonucleotide
auccuacuauagauauuuc

SEQ ID NO: 1983204 - RNA, 19 nt, Artificial Sequence
  Description of Artificial Sequence: Synthetic oligonucleotide
gcuugcuaucucuccuugg

SEQ ID NO: 1983205 - RNA, 19 nt, Artificial Sequence
  Description of Artificial Sequence: Synthetic oligonucleotide
agacaacagaaaaggagua

SEQ ID NO: 1983206 - RNA, 19 nt, Artificial Sequence
  Description of Artificial Sequence: Synthetic oligonucleotide
aguggccaaaucauuccgu

SEQ ID NO: 1983207 - RNA, 19 nt, Artificial Sequence
  Description of Artificial Sequence: Synthetic oligonucleotide
acuggacccaauauauuua

SEQ ID NO: 1983208 - RNA, 19 nt, Artificial Sequence
  Description of Artificial Sequence: Synthetic oligonucleotide
guuuauguaccuaccuaua

SEQ ID NO: 1983209 - RNA, 19 nt, Artificial Sequence
  Description of Artificial Sequence: Synthetic oligonucleotide
ugauggcuacuuccauauc

SEQ ID NO: 1983210 - RNA, 19 nt, Artificial Sequence
  Description of Artificial Sequence: Synthetic oligonucleotide
gcagauaacuuccuuugua

SEQ ID NO: 1983211 - RNA, 19 nt, Artificial Sequence
  Description of Artificial Sequence: Synthetic oligonucleotide
cuagacgauccguuccaga

SEQ ID NO: 1983212 - RNA, 19 nt, Artificial Sequence
  Description of Artificial Sequence: Synthetic oligonucleotide
auguaccuaccuauaugca

SEQ ID NO: 1983213 - RNA, 19 nt, Artificial Sequence
  Description of Artificial Sequence: Synthetic oligonucleotide
uuccuccaucauuuugaaa

SEQ ID NO: 1983214 - RNA, 19 nt, Artificial Sequence
  Description of Artificial Sequence: Synthetic oligonucleotide
guuucguuauugcaucaau

SEQ ID NO: 1983215 - RNA, 19 nt, Artificial Sequence
  Description of Artificial Sequence: Synthetic oligonucleotide
gugucugcaugcacacucc

SEQ ID NO: 1983216 - RNA, 19 nt, Artificial Sequence
  Description of Artificial Sequence: Synthetic oligonucleotide
aaguaccacucaguauaaa

SEQ ID NO: 1983217 - RNA, 19 nt, Artificial Sequence
  Description of Artificial Sequence: Synthetic oligonucleotide
ucgcugaaucauacuugau

SEQ ID NO: 1983218 - RNA, 19 nt, Artificial Sequence
  Description of Artificial Sequence: Synthetic oligonucleotide
ccauaagaguaaaacugga

SEQ ID NO: 1983219 - RNA, 19 nt, Artificial Sequence
  Description of Artificial Sequence: Synthetic oligonucleotide
cuuggugccuggguauuuc

SEQ ID NO: 1983220 - RNA, 19 nt, Artificial Sequence
  Description of Artificial Sequence: Synthetic oligonucleotide
aggagaagcuucgucuaau

SEQ ID NO: 1983221 - RNA, 19 nt, Artificial Sequence
  Description of Artificial Sequence: Synthetic oligonucleotide
augaguguacaaggcagua

SEQ ID NO: 1983222 - RNA, 19 nt, Artificial Sequence
  Description of Artificial Sequence: Synthetic oligonucleotide
ccggcucuaauuccaggcg

SEQ ID NO: 1983223 - RNA, 19 nt, Artificial Sequence
  Description of Artificial Sequence: Synthetic oligonucleotide
aucucuccuugguccauaa

SEQ ID NO: 1983224 - RNA, 19 nt, Artificial Sequence
  Description of Artificial Sequence: Synthetic oligonucleotide
guguacaaggcaguaauuu

SEQ ID NO: 1983225 - RNA, 19 nt, Artificial Sequence
  Description of Artificial Sequence: Synthetic oligonucleotide
caucuacacuuuacagaca

SEQ ID NO: 1983226 - RNA, 19 nt, Artificial Sequence
  Description of Artificial Sequence: Synthetic oligonucleotide
gaccccacugugguuuaug

SEQ ID NO: 1983227 - RNA, 19 nt, Artificial Sequence
  Description of Artificial Sequence: Synthetic oligonucleotide
ggccaaaucauuccguuau

SEQ ID NO: 1983228 - RNA, 19 nt, Artificial Sequence
  Description of Artificial Sequence: Synthetic oligonucleotide
caguacuuucuuuaagcau

SEQ ID NO: 1983229 - RNA, 19 nt, Artificial Sequence
  Description of Artificial Sequence: Synthetic oligonucleotide
caauaguuuucuuguuagu

SEQ ID NO: 1983230 - RNA, 19 nt, Artificial Sequence
  Description of Artificial Sequence: Synthetic oligonucleotide
agagcgagguuucguuauu

SEQ ID NO: 1983231 - RNA, 19 nt, Artificial Sequence
  Description of Artificial Sequence: Synthetic oligonucleotide
cuccaucuacauucugaga

SEQ ID NO: 1983232 - RNA, 19 nt, Artificial Sequence
  Description of Artificial Sequence: Synthetic oligonucleotide
gcuaucucuccuuggucca

SEQ ID NO: 1983233 - RNA, 19 nt, Artificial Sequence
  Description of Artificial Sequence: Synthetic oligonucleotide
cugggagcuuggugccugg

SEQ ID NO: 1983234 - RNA, 19 nt, Artificial Sequence
  Description of Artificial Sequence: Synthetic oligonucleotide
acacacgcuagugcaggcu

SEQ ID NO: 1983235 - RNA, 19 nt, Artificial Sequence
  Description of Artificial Sequence: Synthetic oligonucleotide
aguguacaaggcaguaauu

SEQ ID NO: 1983236 - RNA, 19 nt, Artificial Sequence
  Description of Artificial Sequence: Synthetic oligonucleotide
gcguaaguaccacucagua

SEQ ID NO: 1983237 - RNA, 19 nt, Artificial Sequence
  Description of Artificial Sequence: Synthetic oligonucleotide
cacgaggcccacugacaac

SEQ ID NO: 1983238 - RNA, 19 nt, Artificial Sequence
  Description of Artificial Sequence: Synthetic oligonucleotide
aagcuucgucuaauuguaa

SEQ ID NO: 1983239 - RNA, 19 nt, Artificial Sequence
  Description of Artificial Sequence: Synthetic oligonucleotide
cguuauugcaucaauuccu

SEQ ID NO: 1983240 - RNA, 19 nt, Artificial Sequence
  Description of Artificial Sequence: Synthetic oligonucleotide
ggagcuuggugccugggua

SEQ ID NO: 1983241 - RNA, 19 nt, Artificial Sequence
  Description of Artificial Sequence: Synthetic oligonucleotide
acauuccagaaaagcuaga

SEQ ID NO: 1983242 - RNA, 19 nt, Artificial Sequence
  Description of Artificial Sequence: Synthetic oligonucleotide
uaucucuccuugguccaua

SEQ ID NO: 1983243 - RNA, 19 nt, Artificial Sequence
  Description of Artificial Sequence: Synthetic oligonucleotide
ggguauuucagaccccacu

SEQ ID NO: 1983244 - RNA, 19 nt, Artificial Sequence
  Description of Artificial Sequence: Synthetic oligonucleotide
gguuaaguuuuccuuugau

SEQ ID NO: 1983245 - RNA, 19 nt, Artificial Sequence
  Description of Artificial Sequence: Synthetic oligonucleotide
aguuucuggaccggcucua

SEQ ID NO: 1983246 - RNA, 19 nt, Artificial Sequence
  Description of Artificial Sequence: Synthetic oligonucleotide
caucucuguugaaacugua

SEQ ID NO: 1983247 - RNA, 19 nt, Artificial Sequence
  Description of Artificial Sequence: Synthetic oligonucleotide
cacgcuagugcaggcugac

SEQ ID NO: 1983248 - RNA, 19 nt, Artificial Sequence
  Description of Artificial Sequence: Synthetic oligonucleotide
caaaggcguaaguaccacu

SEQ ID NO: 1983249 - RNA, 19 nt, Artificial Sequence
  Description of Artificial Sequence: Synthetic oligonucleotide
cugaaucauacuugauuuu

SEQ ID NO: 1983250 - RNA, 19 nt, Artificial Sequence
  Description of Artificial Sequence: Synthetic oligonucleotide
cccuacgaccaccaucuug

SEQ ID NO: 1983251 - RNA, 19 nt, Artificial Sequence
  Description of Artificial Sequence: Synthetic oligonucleotide
gagcuuggugccuggguau

SEQ ID NO: 1983252 - RNA, 19 nt, Artificial Sequence
  Description of Artificial Sequence: Synthetic oligonucleotide
gccaaaucauuccguuauc

SEQ ID NO: 1983253 - RNA, 19 nt, Artificial Sequence
  Description of Artificial Sequence: Synthetic oligonucleotide
cccaaaggcguaaguacca

SEQ ID NO: 1983254 - RNA, 19 nt, Artificial Sequence
  Description of Artificial Sequence: Synthetic oligonucleotide
gcgaucagauugucuccgc

SEQ ID NO: 1983255 - RNA, 19 nt, Artificial Sequence
  Description of Artificial Sequence: Synthetic oligonucleotide
cugacaaagucugaaucuu

SEQ ID NO: 1983256 - RNA, 19 nt, Artificial Sequence
  Description of Artificial Sequence: Synthetic oligonucleotide
caggagaagcuucgucuaa

SEQ ID NO: 1983257 - RNA, 19 nt, Artificial Sequence
  Description of Artificial Sequence: Synthetic oligonucleotide
ccaauauauuuagucaucu

SEQ ID NO: 1983258 - RNA, 19 nt, Artificial Sequence
  Description of Artificial Sequence: Synthetic oligonucleotide
augucagcuuucagagcga

SEQ ID NO: 1983259 - RNA, 19 nt, Artificial Sequence
  Description of Artificial Sequence: Synthetic oligonucleotide
cuuugcaauaucgcugaau

SEQ ID NO: 1983260 - RNA, 19 nt, Artificial Sequence
  Description of Artificial Sequence: Synthetic oligonucleotide
gguuucguuauugcaucaa

SEQ ID NO: 1983261 - RNA, 19 nt, Artificial Sequence
  Description of Artificial Sequence: Synthetic oligonucleotide
ccguuaucugggagcuugg

SEQ ID NO: 1983262 - RNA, 19 nt, Artificial Sequence
  Description of Artificial Sequence: Synthetic oligonucleotide
cagagcgagguuucguuau

SEQ ID NO: 1983263 - RNA, 19 nt, Artificial Sequence
  Description of Artificial Sequence: Synthetic oligonucleotide
gaagcgcugcagggcaaca

SEQ ID NO: 1983264 - RNA, 19 nt, Artificial Sequence
  Description of Artificial Sequence: Synthetic oligonucleotide
acacgcuagugcaggcuga

SEQ ID NO: 1983265 - RNA, 19 nt, Artificial Sequence
  Description of Artificial Sequence: Synthetic oligonucleotide
cugcuccauucccuacgac

SEQ ID NO: 1983266 - RNA, 19 nt, Artificial Sequence
  Description of Artificial Sequence: Synthetic oligonucleotide
ccuggguauuucagacccc

SEQ ID NO: 1983267 - RNA, 19 nt, Artificial Sequence
  Description of Artificial Sequence: Synthetic oligonucleotide
gugcaggcugacaaagucu

SEQ ID NO: 1983268 - RNA, 19 nt, Artificial Sequence
  Description of Artificial Sequence: Synthetic oligonucleotide
ccuugguccauaagaguaa

SEQ ID NO: 1983269 - RNA, 19 nt, Artificial Sequence
  Description of Artificial Sequence: Synthetic oligonucleotide
gcuagacgauccguuccag

SEQ ID NO: 1983270 - RNA, 19 nt, Artificial Sequence
  Description of Artificial Sequence: Synthetic oligonucleotide
gcaauaucgcugaaucaua

SEQ ID NO: 1983271 - RNA, 19 nt, Artificial Sequence
  Description of Artificial Sequence: Synthetic oligonucleotide
ccaaaggcguaaguaccac

SEQ ID NO: 1983272 - RNA, 19 nt, Artificial Sequence
  Description of Artificial Sequence: Synthetic oligonucleotide
gcggugucccauaacauua

SEQ ID NO: 1983273 - RNA, 19 nt, Artificial Sequence
  Description of Artificial Sequence: Synthetic oligonucleotide
cacugugguuuauguaccu

SEQ ID NO: 1983274 - RNA, 19 nt, Artificial Sequence
  Description of Artificial Sequence: Synthetic oligonucleotide
ggaccggcucuaauuccag

SEQ ID NO: 1983275 - RNA, 19 nt, Artificial Sequence
  Description of Artificial Sequence: Synthetic oligonucleotide
cccauaacauuagccugac

SEQ ID NO: 1983276 - RNA, 19 nt, Artificial Sequence
  Description of Artificial Sequence: Synthetic oligonucleotide
aggugucugcaugcacacu

SEQ ID NO: 1983277 - RNA, 19 nt, Artificial Sequence
  Description of Artificial Sequence: Synthetic oligonucleotide
ccuauaguguccccuucaa

SEQ ID NO: 1983278 - RNA, 19 nt, Artificial Sequence
  Description of Artificial Sequence: Synthetic oligonucleotide
gccaggugucugcaugcac

SEQ ID NO: 1983279 - RNA, 19 nt, Artificial Sequence
  Description of Artificial Sequence: Synthetic oligonucleotide
acgcuagugcaggcugaca

SEQ ID NO: 1983280 - RNA, 19 nt, Artificial Sequence
  Description of Artificial Sequence: Synthetic oligonucleotide
gcucuaauuccaggcgauc

SEQ ID NO: 1983281 - RNA, 19 nt, Artificial Sequence
  Description of Artificial Sequence: Synthetic oligonucleotide
cuucaucguuaacuugaau

SEQ ID NO: 1983282 - RNA, 19 nt, Artificial Sequence
  Description of Artificial Sequence: Synthetic oligonucleotide
cccacugacaacacacgcu

SEQ ID NO: 1983283 - RNA, 19 nt, Artificial Sequence
  Description of Artificial Sequence: Synthetic oligonucleotide
cgcuagugcaggcugacaa

SEQ ID NO: 1983284 - RNA, 19 nt, Artificial Sequence
  Description of Artificial Sequence: Synthetic oligonucleotide
ggcguaaguaccacucagu

SEQ ID NO: 1983285 - RNA, 19 nt, Artificial Sequence
  Description of Artificial Sequence: Synthetic oligonucleotide
accuaccuauaugcagaua

SEQ ID NO: 1983286 - RNA, 19 nt, Artificial Sequence
  Description of Artificial Sequence: Synthetic oligonucleotide
cgcugcagggcaacauuac

SEQ ID NO: 1983287 - RNA, 19 nt, Artificial Sequence
  Description of Artificial Sequence: Synthetic oligonucleotide
cuuggccugcgguguccca

SEQ ID NO: 1983288 - RNA, 19 nt, Artificial Sequence
  Description of Artificial Sequence: Synthetic oligonucleotide
ucccuacgaccaccaucuu

SEQ ID NO: 1983289 - RNA, 19 nt, Artificial Sequence
  Description of Artificial Sequence: Synthetic oligonucleotide
cugcggugucccauaacau

SEQ ID NO: 1983290 - RNA, 19 nt, Artificial Sequence
  Description of Artificial Sequence: Synthetic oligonucleotide
augcacacucccacaucua

SEQ ID NO: 1983291 - RNA, 19 nt, Artificial Sequence
  Description of Artificial Sequence: Synthetic oligonucleotide
uuccguuaucugggagcuu

SEQ ID NO: 1983292 - RNA, 19 nt, Artificial Sequence
  Description of Artificial Sequence: Synthetic oligonucleotide
cgaucagauugucuccgca

SEQ ID NO: 1983293 - RNA, 19 nt, Artificial Sequence
  Description of Artificial Sequence: Synthetic oligonucleotide
cgcugaaucauacuugauu

SEQ ID NO: 1983294 - RNA, 19 nt, Artificial Sequence
  Description of Artificial Sequence: Synthetic oligonucleotide
cagaccccacugugguuua

SEQ ID NO: 1983295 - RNA, 19 nt, Artificial Sequence
  Description of Artificial Sequence: Synthetic oligonucleotide
cggcucuaauuccaggcga

SEQ ID NO: 1983296 - RNA, 19 nt, Artificial Sequence
  Description of Artificial Sequence: Synthetic oligonucleotide
ggcucuaauuccaggcgau

SEQ ID NO: 1983297 - RNA, 19 nt, Artificial Sequence
  Description of Artificial Sequence: Synthetic oligonucleotide
cguaaguaccacucaguau

SEQ ID NO: 1983298 - RNA, 19 nt, Artificial Sequence
  Description of Artificial Sequence: Synthetic oligonucleotide
agaccccacugugguuuau

SEQ ID NO: 1983299 - RNA, 19 nt, Artificial Sequence
  Description of Artificial Sequence: Synthetic oligonucleotide
guccaguggccaaaucauu

SEQ ID NO: 1983300 - RNA, 19 nt, Artificial Sequence
  Description of Artificial Sequence: Synthetic oligonucleotide
cuacgaccaccaucuugau

SEQ ID NO: 1983301 - RNA, 19 nt, Artificial Sequence
  Description of Artificial Sequence: Synthetic oligonucleotide
ccauaacauuagccugaca

SEQ ID NO: 1983302 - RNA, 19 nt, Artificial Sequence
  Description of Artificial Sequence: Synthetic oligonucleotide
cauucccuacgaccaccau

SEQ ID NO: 1983303 - RNA, 19 nt, Artificial Sequence
  Description of Artificial Sequence: Synthetic oligonucleotide
ccaggcgaucagauugucu

SEQ ID NO: 1983304 - RNA, 19 nt, Artificial Sequence
  Description of Artificial Sequence: Synthetic oligonucleotide
caccaucuugauggcuacu

SEQ ID NO: 1983305 - RNA, 19 nt, Artificial Sequence
  Description of Artificial Sequence: Synthetic oligonucleotide
ggccugcggugucccauaa

SEQ ID NO: 1983306 - RNA, 19 nt, Artificial Sequence
  Description of Artificial Sequence: Synthetic oligonucleotide
ccauaucuuccuccaucau

SEQ ID NO: 1983307 - RNA, 19 nt, Artificial Sequence
  Description of Artificial Sequence: Synthetic oligonucleotide
cguuaucugggagcuuggu

SEQ ID NO: 1983308 - RNA, 19 nt, Artificial Sequence
  Description of Artificial Sequence: Synthetic oligonucleotide
aacaaaauccuguuccggc

SEQ ID NO: 1983309 - RNA, 19 nt, Artificial Sequence
  Description of Artificial Sequence: Synthetic oligonucleotide
aaagccuuccccuugccgc

SEQ ID NO: 1983310 - RNA, 19 nt, Artificial Sequence
  Description of Artificial Sequence: Synthetic oligonucleotide
agagcugcaguccagacgc

SEQ ID NO: 1983311 - RNA, 19 nt, Artificial Sequence
  Description of Artificial Sequence: Synthetic oligonucleotide
acgcacauagaacagaugc

SEQ ID NO: 1983312 - RNA, 19 nt, Artificial Sequence
  Description of Artificial Sequence: Synthetic oligonucleotide
gugagcaacaguuugaagg

SEQ ID NO: 1983313 - RNA, 19 nt, Artificial Sequence
  Description of Artificial Sequence: Synthetic oligonucleotide
aaagaugguccccacagug

SEQ ID NO: 1983314 - RNA, 19 nt, Artificial Sequence
  Description of Artificial Sequence: Synthetic oligonucleotide
acagaauagagcugcaguc

SEQ ID NO: 1983315 - RNA, 19 nt, Artificial Sequence
  Description of Artificial Sequence: Synthetic oligonucleotide
uucguuagucaccugcucg

SEQ ID NO: 1983316 - RNA, 19 nt, Artificial Sequence
  Description of Artificial Sequence: Synthetic oligonucleotide
acagaugcauaacaccagc

SEQ ID NO: 1983317 - RNA, 19 nt, Artificial Sequence
  Description of Artificial Sequence: Synthetic oligonucleotide
aaaauccuguuccggcacc

SEQ ID NO: 1983318 - RNA, 19 nt, Artificial Sequence
  Description of Artificial Sequence: Synthetic oligonucleotide
uuuccuacaggaagguagg

SEQ ID NO: 1983319 - RNA, 19 nt, Artificial Sequence
  Description of Artificial Sequence: Synthetic oligonucleotide
acgugcaccaaguaugggc

SEQ ID NO: 1983320 - RNA, 19 nt, Artificial Sequence
  Description of Artificial Sequence: Synthetic oligonucleotide
agaacaaaauccuguuccg

SEQ ID NO: 1983321 - RNA, 19 nt, Artificial Sequence
  Description of Artificial Sequence: Synthetic oligonucleotide
ugaaggauaccucagccuc

SEQ ID NO: 1983322 - RNA, 19 nt, Artificial Sequence
  Description of Artificial Sequence: Synthetic oligonucleotide
cacagugaaacgaaacucc

SEQ ID NO: 1983323 - RNA, 19 nt, Artificial Sequence
  Description of Artificial Sequence: Synthetic oligonucleotide
auagaacagaugcauaaca

SEQ ID NO: 1983324 - RNA, 19 nt, Artificial Sequence
  Description of Artificial Sequence: Synthetic oligonucleotide
aguaguucacggaagcugc

SEQ ID NO: 1983325 - RNA, 19 nt, Artificial Sequence
  Description of Artificial Sequence: Synthetic oligonucleotide
aacaucuccgugcucaggu

SEQ ID NO: 1983326 - RNA, 19 nt, Artificial Sequence
  Description of Artificial Sequence: Synthetic oligonucleotide
guucauaggugacaggugc

SEQ ID NO: 1983327 - RNA, 19 nt, Artificial Sequence
  Description of Artificial Sequence: Synthetic oligonucleotide
guuuccuacaggaagguag

SEQ ID NO: 1983328 - RNA, 19 nt, Artificial Sequence
  Description of Artificial Sequence: Synthetic oligonucleotide
acaucagcgacgaagcccc

SEQ ID NO: 1983329 - RNA, 19 nt, Artificial Sequence
  Description of Artificial Sequence: Synthetic oligonucleotide
caugcaguagaccaucgcc

SEQ ID NO: 1983330 - RNA, 19 nt, Artificial Sequence
  Description of Artificial Sequence: Synthetic oligonucleotide
accaucgccggacaugacc

SEQ ID NO: 1983331 - RNA, 19 nt, Artificial Sequence
  Description of Artificial Sequence: Synthetic oligonucleotide
aagguacgaguccacgggg

SEQ ID NO: 1983332 - RNA, 19 nt, Artificial Sequence
  Description of Artificial Sequence: Synthetic oligonucleotide
aaggccgugggaguagucc

SEQ ID NO: 1983333 - RNA, 19 nt, Artificial Sequence
  Description of Artificial Sequence: Synthetic oligonucleotide
acaagguacgaguccacgg

SEQ ID NO: 1983334 - RNA, 19 nt, Artificial Sequence
  Description of Artificial Sequence: Synthetic oligonucleotide
auaggugacaggugccggc

SEQ ID NO: 1983335 - RNA, 19 nt, Artificial Sequence
  Description of Artificial Sequence: Synthetic oligonucleotide
gagcguuuccuacaggaag

SEQ ID NO: 1983336 - RNA, 19 nt, Artificial Sequence
  Description of Artificial Sequence: Synthetic oligonucleotide
gaacagaugcauaacacca

SEQ ID NO: 1983337 - RNA, 19 nt, Artificial Sequence
  Description of Artificial Sequence: Synthetic oligonucleotide
gaugcauaacaccagccuc

SEQ ID NO: 1983338 - RNA, 19 nt, Artificial Sequence
  Description of Artificial Sequence: Synthetic oligonucleotide
uuagucaccugcucguacc

SEQ ID NO: 1983339 - RNA, 19 nt, Artificial Sequence
  Description of Artificial Sequence: Synthetic oligonucleotide
aacaugccccuccgggucc

SEQ ID NO: 1983340 - RNA, 19 nt, Artificial Sequence
  Description of Artificial Sequence: Synthetic oligonucleotide
ugcaguagaccaucgccgg

SEQ ID NO: 1983341 - RNA, 19 nt, Artificial Sequence
  Description of Artificial Sequence: Synthetic oligonucleotide
agaugcauaacaccagccu

SEQ ID NO: 1983342 - RNA, 19 nt, Artificial Sequence
  Description of Artificial Sequence: Synthetic oligonucleotide
uucacacagcaucaguucu

SEQ ID NO: 1983343 - RNA, 19 nt, Artificial Sequence
  Description of Artificial Sequence: Synthetic oligonucleotide
caagguacgaguccacggg

SEQ ID NO: 1983344 - RNA, 19 nt, Artificial Sequence
  Description of Artificial Sequence: Synthetic oligonucleotide
ucagugagcaacaguuuga

SEQ ID NO: 1983345 - RNA, 19 nt, Artificial Sequence
  Description of Artificial Sequence: Synthetic oligonucleotide
acagugaaacgaaacuccc

SEQ ID NO: 1983346 - RNA, 19 nt, Artificial Sequence
  Description of Artificial Sequence: Synthetic oligonucleotide
agcaacaccagcacucugc

SEQ ID NO: 1983347 - RNA, 19 nt, Artificial Sequence
  Description of Artificial Sequence: Synthetic oligonucleotide
aacaagguacgaguccacg

SEQ ID NO: 1983348 - RNA, 19 nt, Artificial Sequence
  Description of Artificial Sequence: Synthetic oligonucleotide
uguacuucucacucuccag

SEQ ID NO: 1983349 - RNA, 19 nt, Artificial Sequence
  Description of Artificial Sequence: Synthetic oligonucleotide
agcauaguaguucacggaa

SEQ ID NO: 1983350 - RNA, 19 nt, Artificial Sequence
  Description of Artificial Sequence: Synthetic oligonucleotide
auucucaggguugcuaggc

SEQ ID NO: 1983351 - RNA, 19 nt, Artificial Sequence
  Description of Artificial Sequence: Synthetic oligonucleotide
uccaggggaacaagguacg

SEQ ID NO: 1983352 - RNA, 19 nt, Artificial Sequence
  Description of Artificial Sequence: Synthetic oligonucleotide
aucaguucuccauccacag

SEQ ID NO: 1983353 - RNA, 19 nt, Artificial Sequence
  Description of Artificial Sequence: Synthetic oligonucleotide
ccauccacagaaaacaugc

SEQ ID NO: 1983354 - RNA, 19 nt, Artificial Sequence
  Description of Artificial Sequence: Synthetic oligonucleotide
gaacaaaauccuguuccgg

SEQ ID NO: 1983355 - RNA, 19 nt, Artificial Sequence
  Description of Artificial Sequence: Synthetic oligonucleotide
ucagcgacgaagccccagg

SEQ ID NO: 1983356 - RNA, 19 nt, Artificial Sequence
  Description of Artificial Sequence: Synthetic oligonucleotide
ucauaggugacaggugccg

SEQ ID NO: 1983357 - RNA, 19 nt, Artificial Sequence
  Description of Artificial Sequence: Synthetic oligonucleotide
uaguaguucacggaagcug

SEQ ID NO: 1983358 - RNA, 19 nt, Artificial Sequence
  Description of Artificial Sequence: Synthetic oligonucleotide
gucuucguuagucaccugc

SEQ ID NO: 1983359 - RNA, 19 nt, Artificial Sequence
  Description of Artificial Sequence: Synthetic oligonucleotide
aaaaguaguuugggugcac

SEQ ID NO: 1983360 - RNA, 19 nt, Artificial Sequence
  Description of Artificial Sequence: Synthetic oligonucleotide
ugguagauucucaggguug

SEQ ID NO: 1983361 - RNA, 19 nt, Artificial Sequence
  Description of Artificial Sequence: Synthetic oligonucleotide
acaaaauccuguuccggca

SEQ ID NO: 1983362 - RNA, 19 nt, Artificial Sequence
  Description of Artificial Sequence: Synthetic oligonucleotide
aacagaugcauaacaccag

SEQ ID NO: 1983363 - RNA, 19 nt, Artificial Sequence
  Description of Artificial Sequence: Synthetic oligonucleotide
uucauaggugacaggugcc

SEQ ID NO: 1983364 - RNA, 19 nt, Artificial Sequence
  Description of Artificial Sequence: Synthetic oligonucleotide
ucuucguuagucaccugcu

SEQ ID NO: 1983365 - RNA, 19 nt, Artificial Sequence
  Description of Artificial Sequence: Synthetic oligonucleotide
uucucaggguugcuaggcg

SEQ ID NO: 1983366 - RNA, 19 nt, Artificial Sequence
  Description of Artificial Sequence: Synthetic oligonucleotide
aguuugggugcaccuggcc

SEQ ID NO: 1983367 - RNA, 19 nt, Artificial Sequence
  Description of Artificial Sequence: Synthetic oligonucleotide
aggggaacaagguacgagu

SEQ ID NO: 1983368 - RNA, 19 nt, Artificial Sequence
  Description of Artificial Sequence: Synthetic oligonucleotide
ccaaaaguaguuugggugc

SEQ ID NO: 1983369 - RNA, 19 nt, Artificial Sequence
  Description of Artificial Sequence: Synthetic oligonucleotide
guuacacuccauaugcuug

SEQ ID NO: 1983370 - RNA, 19 nt, Artificial Sequence
  Description of Artificial Sequence: Synthetic oligonucleotide
agguucauaggugacaggu

SEQ ID NO: 1983371 - RNA, 19 nt, Artificial Sequence
  Description of Artificial Sequence: Synthetic oligonucleotide
caucccuacucccacaaac

SEQ ID NO: 1983372 - RNA, 19 nt, Artificial Sequence
  Description of Artificial Sequence: Synthetic oligonucleotide
cucguacccagcauaguag

SEQ ID NO: 1983373 - RNA, 19 nt, Artificial Sequence
  Description of Artificial Sequence: Synthetic oligonucleotide
cacggaagcugccagugcg

SEQ ID NO: 1983374 - RNA, 19 nt, Artificial Sequence
  Description of Artificial Sequence: Synthetic oligonucleotide
cuaggcgaaagaugguccc

SEQ ID NO: 1983375 - RNA, 19 nt, Artificial Sequence
  Description of Artificial Sequence: Synthetic oligonucleotide
aaguaugggcaguuacacu

SEQ ID NO: 1983376 - RNA, 19 nt, Artificial Sequence
  Description of Artificial Sequence: Synthetic oligonucleotide
ugagcacagaauagagcug

SEQ ID NO: 1983377 - RNA, 19 nt, Artificial Sequence
  Description of Artificial Sequence: Synthetic oligonucleotide
ucuuagagggagcguuucc

SEQ ID NO: 1983378 - RNA, 19 nt, Artificial Sequence
  Description of Artificial Sequence: Synthetic oligonucleotide
ggugccacaaacaucuccg

SEQ ID NO: 1983379 - RNA, 19 nt, Artificial Sequence
  Description of Artificial Sequence: Synthetic oligonucleotide
gaacgugcaccaaguaugg

SEQ ID NO: 1983380 - RNA, 19 nt, Artificial Sequence
  Description of Artificial Sequence: Synthetic oligonucleotide
agcgacgaagccccaggcc

SEQ ID NO: 1983381 - RNA, 19 nt, Artificial Sequence
  Description of Artificial Sequence: Synthetic oligonucleotide
cugagcacagaauagagcu

SEQ ID NO: 1983382 - RNA, 19 nt, Artificial Sequence
  Description of Artificial Sequence: Synthetic oligonucleotide
guuugggugcaccuggccc

SEQ ID NO: 1983383 - RNA, 19 nt, Artificial Sequence
  Description of Artificial Sequence: Synthetic oligonucleotide
cagaauagagcugcagucc

SEQ ID NO: 1983384 - RNA, 19 nt, Artificial Sequence
  Description of Artificial Sequence: Synthetic oligonucleotide
agaaaacaugccccuccgg

SEQ ID NO: 1983385 - RNA, 19 nt, Artificial Sequence
  Description of Artificial Sequence: Synthetic oligonucleotide
aguuacacuccauaugcuu

SEQ ID NO: 1983386 - RNA, 19 nt, Artificial Sequence
  Description of Artificial Sequence: Synthetic oligonucleotide
aggccgugggaguaguccc

SEQ ID NO: 1983387 - RNA, 19 nt, Artificial Sequence
  Description of Artificial Sequence: Synthetic oligonucleotide
ucaggccguuccaugagcc

SEQ ID NO: 1983388 - RNA, 19 nt, Artificial Sequence
  Description of Artificial Sequence: Synthetic oligonucleotide
aguucacggaagcugccag

SEQ ID NO: 1983389 - RNA, 19 nt, Artificial Sequence
  Description of Artificial Sequence: Synthetic oligonucleotide
aucccuacucccacaaacc

SEQ ID NO: 1983390 - RNA, 19 nt, Artificial Sequence
  Description of Artificial Sequence: Synthetic oligonucleotide
augcaguagaccaucgccg

SEQ ID NO: 1983391 - RNA, 19 nt, Artificial Sequence
  Description of Artificial Sequence: Synthetic oligonucleotide
ucaugcaguagaccaucgc

SEQ ID NO: 1983392 - RNA, 19 nt, Artificial Sequence
  Description of Artificial Sequence: Synthetic oligonucleotide
caaguaugggcaguuacac

SEQ ID NO: 1983393 - RNA, 19 nt, Artificial Sequence
  Description of Artificial Sequence: Synthetic oligonucleotide
gaagcuccggaagagcugc

SEQ ID NO: 1983394 - RNA, 19 nt, Artificial Sequence
  Description of Artificial Sequence: Synthetic oligonucleotide
agcguuuccuacaggaagg

SEQ ID NO: 1983395 - RNA, 19 nt, Artificial Sequence
  Description of Artificial Sequence: Synthetic oligonucleotide
ucccuacucccacaaacca

SEQ ID NO: 1983396 - RNA, 19 nt, Artificial Sequence
  Description of Artificial Sequence: Synthetic oligonucleotide
auccaaaaguaguuugggu

SEQ ID NO: 1983397 - RNA, 19 nt, Artificial Sequence
  Description of Artificial Sequence: Synthetic oligonucleotide
ggaacgugcaccaaguaug

SEQ ID NO: 1983398 - RNA, 19 nt, Artificial Sequence
  Description of Artificial Sequence: Synthetic oligonucleotide
agcauggcccuggacaccc

SEQ ID NO: 1983399 - RNA, 19 nt, Artificial Sequence
  Description of Artificial Sequence: Synthetic oligonucleotide
caaaccauccaaaaguagu

SEQ ID NO: 1983400 - RNA, 19 nt, Artificial Sequence
  Description of Artificial Sequence: Synthetic oligonucleotide
agcaccagaacaaaauccu

SEQ ID NO: 1983401 - RNA, 19 nt, Artificial Sequence
  Description of Artificial Sequence: Synthetic oligonucleotide
caccccugcacgcacauag

SEQ ID NO: 1983402 - RNA, 19 nt, Artificial Sequence
  Description of Artificial Sequence: Synthetic oligonucleotide
cuccggaagagcugcaaag

SEQ ID NO: 1983403 - RNA, 19 nt, Artificial Sequence
  Description of Artificial Sequence: Synthetic oligonucleotide
ucguuagucaccugcucgu

SEQ ID NO: 1983404 - RNA, 19 nt, Artificial Sequence
  Description of Artificial Sequence: Synthetic oligonucleotide
aggaacgugcaccaaguau

SEQ ID NO: 1983405 - RNA, 19 nt, Artificial Sequence
  Description of Artificial Sequence: Synthetic oligonucleotide
uggggcucgcagcuggacg

SEQ ID NO: 1983406 - RNA, 19 nt, Artificial Sequence
  Description of Artificial Sequence: Synthetic oligonucleotide
ucucaggguugcuaggcga

SEQ ID NO: 1983407 - RNA, 19 nt, Artificial Sequence
  Description of Artificial Sequence: Synthetic oligonucleotide
uucacggaagcugccagug

SEQ ID NO: 1983408 - RNA, 19 nt, Artificial Sequence
  Description of Artificial Sequence: Synthetic oligonucleotide
gagggagcguuuccuacag

SEQ ID NO: 1983409 - RNA, 19 nt, Artificial Sequence
  Description of Artificial Sequence: Synthetic oligonucleotide
agugagcaacaguuugaag

SEQ ID NO: 1983410 - RNA, 19 nt, Artificial Sequence
  Description of Artificial Sequence: Synthetic oligonucleotide
ugggcaguuacacuccaua

SEQ ID NO: 1983411 - RNA, 19 nt, Artificial Sequence
  Description of Artificial Sequence: Synthetic oligonucleotide
uugaucaggaggucuucgu

SEQ ID NO: 1983412 - RNA, 19 nt, Artificial Sequence
  Description of Artificial Sequence: Synthetic oligonucleotide
aguaccagcaccagaacaa

SEQ ID NO: 1983413 - RNA, 19 nt, Artificial Sequence
  Description of Artificial Sequence: Synthetic oligonucleotide
augaccacgagggcauccc

SEQ ID NO: 1983414 - RNA, 19 nt, Artificial Sequence
  Description of Artificial Sequence: Synthetic oligonucleotide
ucguacccagcauaguagu

SEQ ID NO: 1983415 - RNA, 19 nt, Artificial Sequence
  Description of Artificial Sequence: Synthetic oligonucleotide
uccggaagagcugcaaagc

SEQ ID NO: 1983416 - RNA, 19 nt, Artificial Sequence
  Description of Artificial Sequence: Synthetic oligonucleotide
caaagccuuccccuugccg

SEQ ID NO: 1983417 - RNA, 19 nt, Artificial Sequence
  Description of Artificial Sequence: Synthetic oligonucleotide
cucaugcaguagaccaucg

SEQ ID NO: 1983418 - RNA, 19 nt, Artificial Sequence
  Description of Artificial Sequence: Synthetic oligonucleotide
uaggugacaggugccggcg

SEQ ID NO: 1983419 - RNA, 19 nt, Artificial Sequence
  Description of Artificial Sequence: Synthetic oligonucleotide
acaaaccauccaaaaguag

SEQ ID NO: 1983420 - RNA, 19 nt, Artificial Sequence
  Description of Artificial Sequence: Synthetic oligonucleotide
uagucaccugcucguaccc

SEQ ID NO: 1983421 - RNA, 19 nt, Artificial Sequence
  Description of Artificial Sequence: Synthetic oligonucleotide
cacucugcaaggccguggg

SEQ ID NO: 1983422 - RNA, 19 nt, Artificial Sequence
  Description of Artificial Sequence: Synthetic oligonucleotide
cucugcaaggccgugggag

SEQ ID NO: 1983423 - RNA, 19 nt, Artificial Sequence
  Description of Artificial Sequence: Synthetic oligonucleotide
gugggaguaguccccgagg

SEQ ID NO: 1983424 - RNA, 19 nt, Artificial Sequence
  Description of Artificial Sequence: Synthetic oligonucleotide
ugaucaggaggucuucguu

SEQ ID NO: 1983425 - RNA, 19 nt, Artificial Sequence
  Description of Artificial Sequence: Synthetic oligonucleotide
ucugcaaggccgugggagu

SEQ ID NO: 1983426 - RNA, 19 nt, Artificial Sequence
  Description of Artificial Sequence: Synthetic oligonucleotide
ggcaguuacacuccauaug

SEQ ID NO: 1983427 - RNA, 19 nt, Artificial Sequence
  Description of Artificial Sequence: Synthetic oligonucleotide
ugcguugccagagccuccg

SEQ ID NO: 1983428 - RNA, 19 nt, Artificial Sequence
  Description of Artificial Sequence: Synthetic oligonucleotide
aggcaucuuagagggagcg

SEQ ID NO: 1983429 - RNA, 19 nt, Artificial Sequence
  Description of Artificial Sequence: Synthetic oligonucleotide
aucuuagagggagcguuuc

SEQ ID NO: 1983430 - RNA, 19 nt, Artificial Sequence
  Description of Artificial Sequence: Synthetic oligonucleotide
agacgcggugcgcagcgac

SEQ ID NO: 1983431 - RNA, 19 nt, Artificial Sequence
  Description of Artificial Sequence: Synthetic oligonucleotide
ugcuaggcgaaagaugguc

SEQ ID NO: 1983432 - RNA, 19 nt, Artificial Sequence
  Description of Artificial Sequence: Synthetic oligonucleotide
caucaguucuccauccaca

SEQ ID NO: 1983433 - RNA, 19 nt, Artificial Sequence
  Description of Artificial Sequence: Synthetic oligonucleotide
gacggggcaucccuacucc

SEQ ID NO: 1983434 - RNA, 19 nt, Artificial Sequence
  Description of Artificial Sequence: Synthetic oligonucleotide
gaauagagcugcaguccag

SEQ ID NO: 1983435 - RNA, 19 nt, Artificial Sequence
  Description of Artificial Sequence: Synthetic oligonucleotide
guuagucaccugcucguac

SEQ ID NO: 1983436 - RNA, 19 nt, Artificial Sequence
  Description of Artificial Sequence: Synthetic oligonucleotide
aggagaugcaggcaucuua

SEQ ID NO: 1983437 - RNA, 19 nt, Artificial Sequence
  Description of Artificial Sequence: Synthetic oligonucleotide
uuagagggagcguuuccua

SEQ ID NO: 1983438 - RNA, 19 nt, Artificial Sequence
  Description of Artificial Sequence: Synthetic oligonucleotide
cuacucccacaaaccaucc

SEQ ID NO: 1983439 - RNA, 19 nt, Artificial Sequence
  Description of Artificial Sequence: Synthetic oligonucleotide
agguacgaguccacggggc

SEQ ID NO: 1983440 - RNA, 19 nt, Artificial Sequence
  Description of Artificial Sequence: Synthetic oligonucleotide
gaggucuucguuagucacc

SEQ ID NO: 1983441 - RNA, 19 nt, Artificial Sequence
  Description of Artificial Sequence: Synthetic oligonucleotide
aggaggucuucguuaguca

SEQ ID NO: 1983442 - RNA, 19 nt, Artificial Sequence
  Description of Artificial Sequence: Synthetic oligonucleotide
caugggugccacaaacauc

SEQ ID NO: 1983443 - RNA, 19 nt, Artificial Sequence
  Description of Artificial Sequence: Synthetic oligonucleotide
aacgugcaccaaguauggg

SEQ ID NO: 1983444 - RNA, 19 nt, Artificial Sequence
  Description of Artificial Sequence: Synthetic oligonucleotide
cugcucguacccagcauag

SEQ ID NO: 1983445 - RNA, 19 nt, Artificial Sequence
  Description of Artificial Sequence: Synthetic oligonucleotide
ucaggagaugcaggcaucu

SEQ ID NO: 1983446 - RNA, 19 nt, Artificial Sequence
  Description of Artificial Sequence: Synthetic oligonucleotide
aggccguuccaugagcccg

SEQ ID NO: 1983447 - RNA, 19 nt, Artificial Sequence
  Description of Artificial Sequence: Synthetic oligonucleotide
aaccauccaaaaguaguuu

SEQ ID NO: 1983448 - RNA, 19 nt, Artificial Sequence
  Description of Artificial Sequence: Synthetic oligonucleotide
aggucuucguuagucaccu

SEQ ID NO: 1983449 - RNA, 19 nt, Artificial Sequence
  Description of Artificial Sequence: Synthetic oligonucleotide
cauaggugacaggugccgg

SEQ ID NO: 1983450 - RNA, 19 nt, Artificial Sequence
  Description of Artificial Sequence: Synthetic oligonucleotide
ugcacgcacauagaacaga

SEQ ID NO: 1983451 - RNA, 19 nt, Artificial Sequence
  Description of Artificial Sequence: Synthetic oligonucleotide
acggggcaucccuacuccc

SEQ ID NO: 1983452 - RNA, 19 nt, Artificial Sequence
  Description of Artificial Sequence: Synthetic oligonucleotide
gggaacaagguacgagucc

SEQ ID NO: 1983453 - RNA, 19 nt, Artificial Sequence
  Description of Artificial Sequence: Synthetic oligonucleotide
guacccagcauaguaguuc

SEQ ID NO: 1983454 - RNA, 19 nt, Artificial Sequence
  Description of Artificial Sequence: Synthetic oligonucleotide
cgaaagaugguccccacag

SEQ ID NO: 1983455 - RNA, 19 nt, Artificial Sequence
  Description of Artificial Sequence: Synthetic oligonucleotide
gguagauucucaggguugc

SEQ ID NO: 1983456 - RNA, 19 nt, Artificial Sequence
  Description of Artificial Sequence: Synthetic oligonucleotide
ucgccggacaugaccacga

SEQ ID NO: 1983457 - RNA, 19 nt, Artificial Sequence
  Description of Artificial Sequence: Synthetic oligonucleotide
gauggcagucucccaguca

SEQ ID NO: 1983458 - RNA, 19 nt, Artificial Sequence
  Description of Artificial Sequence: Synthetic oligonucleotide
acaguagcagugugcaguu

SEQ ID NO: 1983459 - RNA, 19 nt, Artificial Sequence
  Description of Artificial Sequence: Synthetic oligonucleotide
ccuacucccacaaaccauc

SEQ ID NO: 1983460 - RNA, 19 nt, Artificial Sequence
  Description of Artificial Sequence: Synthetic oligonucleotide
cccacaaaccauccaaaag

SEQ ID NO: 1983461 - RNA, 19 nt, Artificial Sequence
  Description of Artificial Sequence: Synthetic oligonucleotide
ucaccugcucguacccagc

SEQ ID NO: 1983462 - RNA, 19 nt, Artificial Sequence
  Description of Artificial Sequence: Synthetic oligonucleotide
aguagaccaucgccggaca

SEQ ID NO: 1983463 - RNA, 19 nt, Artificial Sequence
  Description of Artificial Sequence: Synthetic oligonucleotide
acaggaacgugcaccaagu

SEQ ID NO: 1983464 - RNA, 19 nt, Artificial Sequence
  Description of Artificial Sequence: Synthetic oligonucleotide
cugcacgcacauagaacag

SEQ ID NO: 1983465 - RNA, 19 nt, Artificial Sequence
  Description of Artificial Sequence: Synthetic oligonucleotide
uaggcgaaagauggucccc

SEQ ID NO: 1983466 - RNA, 19 nt, Artificial Sequence
  Description of Artificial Sequence: Synthetic oligonucleotide
ugccagugcguugccagag

SEQ ID NO: 1983467 - RNA, 19 nt, Artificial Sequence
  Description of Artificial Sequence: Synthetic oligonucleotide
caggggaacaagguacgag

SEQ ID NO: 1983468 - RNA, 19 nt, Artificial Sequence
  Description of Artificial Sequence: Synthetic oligonucleotide
ugguccccacagugaaacg

SEQ ID NO: 1983469 - RNA, 19 nt, Artificial Sequence
  Description of Artificial Sequence: Synthetic oligonucleotide
caguaccagcaccagaaca

SEQ ID NO: 1983470 - RNA, 19 nt, Artificial Sequence
  Description of Artificial Sequence: Synthetic oligonucleotide
cuucguuagucaccugcuc

SEQ ID NO: 1983471 - RNA, 19 nt, Artificial Sequence
  Description of Artificial Sequence: Synthetic oligonucleotide
caguagaccaucgccggac

SEQ ID NO: 1983472 - RNA, 19 nt, Artificial Sequence
  Description of Artificial Sequence: Synthetic oligonucleotide
aucgccggacaugaccacg

SEQ ID NO: 1983473 - RNA, 19 nt, Artificial Sequence
  Description of Artificial Sequence: Synthetic oligonucleotide
uggcagucucccagucagg

SEQ ID NO: 1983474 - RNA, 19 nt, Artificial Sequence
  Description of Artificial Sequence: Synthetic oligonucleotide
caggcaucuuagagggagc

SEQ ID NO: 1983475 - RNA, 19 nt, Artificial Sequence
  Description of Artificial Sequence: Synthetic oligonucleotide
acgaagcuccggaagagcu

SEQ ID NO: 1983476 - RNA, 19 nt, Artificial Sequence
  Description of Artificial Sequence: Synthetic oligonucleotide
uggacaccccugcacgcac

SEQ ID NO: 1983477 - RNA, 19 nt, Artificial Sequence
  Description of Artificial Sequence: Synthetic oligonucleotide
ugcaccaaguaugggcagu

SEQ ID NO: 1983478 - RNA, 19 nt, Artificial Sequence
  Description of Artificial Sequence: Synthetic oligonucleotide
gucaggccguuccaugagc

SEQ ID NO: 1983479 - RNA, 19 nt, Artificial Sequence
  Description of Artificial Sequence: Synthetic oligonucleotide
aggcgccuguacuucucac

SEQ ID NO: 1983480 - RNA, 19 nt, Artificial Sequence
  Description of Artificial Sequence: Synthetic oligonucleotide
cagcauaguaguucacgga

SEQ ID NO: 1983481 - RNA, 19 nt, Artificial Sequence
  Description of Artificial Sequence: Synthetic oligonucleotide
gcgacagcagguucauagg

SEQ ID NO: 1983482 - RNA, 19 nt, Artificial Sequence
  Description of Artificial Sequence: Synthetic oligonucleotide
gguacgaguccacggggcc

SEQ ID NO: 1983483 - RNA, 19 nt, Artificial Sequence
  Description of Artificial Sequence: Synthetic oligonucleotide
cacggggcccuucugcgcc

SEQ ID NO: 1983484 - RNA, 19 nt, Artificial Sequence
  Description of Artificial Sequence: Synthetic oligonucleotide
uugcuaggcgaaagauggu

SEQ ID NO: 1983485 - RNA, 19 nt, Artificial Sequence
  Description of Artificial Sequence: Synthetic oligonucleotide
caacaguuugaaggauacc

SEQ ID NO: 1983486 - RNA, 19 nt, Artificial Sequence
  Description of Artificial Sequence: Synthetic oligonucleotide
agcucccuggcaugguucu

SEQ ID NO: 1983487 - RNA, 19 nt, Artificial Sequence
  Description of Artificial Sequence: Synthetic oligonucleotide
cacgcacauagaacagaug

SEQ ID NO: 1983488 - RNA, 19 nt, Artificial Sequence
  Description of Artificial Sequence: Synthetic oligonucleotide
ccacaaaccauccaaaagu

SEQ ID NO: 1983489 - RNA, 19 nt, Artificial Sequence
  Description of Artificial Sequence: Synthetic oligonucleotide
ugcaaggccgugggaguag

SEQ ID NO: 1983490 - RNA, 19 nt, Artificial Sequence
  Description of Artificial Sequence: Synthetic oligonucleotide
aguccagacgcggugcgca

SEQ ID NO: 1983491 - RNA, 19 nt, Artificial Sequence
  Description of Artificial Sequence: Synthetic oligonucleotide
gcaucaguucuccauccac

SEQ ID NO: 1983492 - RNA, 19 nt, Artificial Sequence
  Description of Artificial Sequence: Synthetic oligonucleotide
cccagcauaguaguucacg

SEQ ID NO: 1983493 - RNA, 19 nt, Artificial Sequence
  Description of Artificial Sequence: Synthetic oligonucleotide
gcuaggcgaaagauggucc

SEQ ID NO: 1983494 - RNA, 19 nt, Artificial Sequence
  Description of Artificial Sequence: Synthetic oligonucleotide
agggagcguuuccuacagg

SEQ ID NO: 1983495 - RNA, 19 nt, Artificial Sequence
  Description of Artificial Sequence: Synthetic oligonucleotide
agcaacaguuugaaggaua

SEQ ID NO: 1983496 - RNA, 19 nt, Artificial Sequence
  Description of Artificial Sequence: Synthetic oligonucleotide
uacgaguccacggggcccu

SEQ ID NO: 1983497 - RNA, 19 nt, Artificial Sequence
  Description of Artificial Sequence: Synthetic oligonucleotide
cugcauggccaggaagagg

SEQ ID NO: 1983498 - RNA, 19 nt, Artificial Sequence
  Description of Artificial Sequence: Synthetic oligonucleotide
cacauagaacagaugcaua

SEQ ID NO: 1983499 - RNA, 19 nt, Artificial Sequence
  Description of Artificial Sequence: Synthetic oligonucleotide
cacgaagcuccggaagagc

SEQ ID NO: 1983500 - RNA, 19 nt, Artificial Sequence
  Description of Artificial Sequence: Synthetic oligonucleotide
gaacaagguacgaguccac

SEQ ID NO: 1983501 - RNA, 19 nt, Artificial Sequence
  Description of Artificial Sequence: Synthetic oligonucleotide
gacgaagccccaggccagg

SEQ ID NO: 1983502 - RNA, 19 nt, Artificial Sequence
  Description of Artificial Sequence: Synthetic oligonucleotide
guaguucacggaagcugcc

SEQ ID NO: 1983503 - RNA, 19 nt, Artificial Sequence
  Description of Artificial Sequence: Synthetic oligonucleotide
caggguugcuaggcgaaag

SEQ ID NO: 1983504 - RNA, 19 nt, Artificial Sequence
  Description of Artificial Sequence: Synthetic oligonucleotide
gcugagcacagaauagagc

SEQ ID NO: 1983505 - RNA, 19 nt, Artificial Sequence
  Description of Artificial Sequence: Synthetic oligonucleotide
gcgacgaagccccaggcca

SEQ ID NO: 1983506 - RNA, 19 nt, Artificial Sequence
  Description of Artificial Sequence: Synthetic oligonucleotide
agugugcaguugaucagga

SEQ ID NO: 1983507 - RNA, 19 nt, Artificial Sequence
  Description of Artificial Sequence: Synthetic oligonucleotide
cagucaggccguuccauga

SEQ ID NO: 1983508 - RNA, 19 nt, Artificial Sequence
  Description of Artificial Sequence: Synthetic oligonucleotide
gguucauaggugacaggug

SEQ ID NO: 1983509 - RNA, 19 nt, Artificial Sequence
  Description of Artificial Sequence: Synthetic oligonucleotide
aggcgaaagauggucccca

SEQ ID NO: 1983510 - RNA, 19 nt, Artificial Sequence
  Description of Artificial Sequence: Synthetic oligonucleotide
ccacagugaaacgaaacuc

SEQ ID NO: 1983511 - RNA, 19 nt, Artificial Sequence
  Description of Artificial Sequence: Synthetic oligonucleotide
ccaaguaugggcaguuaca

SEQ ID NO: 1983512 - RNA, 19 nt, Artificial Sequence
  Description of Artificial Sequence: Synthetic oligonucleotide
guacgaguccacggggccc

SEQ ID NO: 1983513 - RNA, 19 nt, Artificial Sequence
  Description of Artificial Sequence: Synthetic oligonucleotide
aucagcgacgaagccccag

SEQ ID NO: 1983514 - RNA, 19 nt, Artificial Sequence
  Description of Artificial Sequence: Synthetic oligonucleotide
gacaugaccacgagggcau

SEQ ID NO: 1983515 - RNA, 19 nt, Artificial Sequence
  Description of Artificial Sequence: Synthetic oligonucleotide
ggauccaguuccucugcac

SEQ ID NO: 1983516 - RNA, 19 nt, Artificial Sequence
  Description of Artificial Sequence: Synthetic oligonucleotide
cagcgacgaagccccaggc

SEQ ID NO: 1983517 - RNA, 19 nt, Artificial Sequence
  Description of Artificial Sequence: Synthetic oligonucleotide
cccuggacaccccugcacg

SEQ ID NO: 1983518 - RNA, 19 nt, Artificial Sequence
  Description of Artificial Sequence: Synthetic oligonucleotide
gcccugguagauucucagg

SEQ ID NO: 1983519 - RNA, 19 nt, Artificial Sequence
  Description of Artificial Sequence: Synthetic oligonucleotide
cccguucaccaccucaugc

SEQ ID NO: 1983520 - RNA, 19 nt, Artificial Sequence
  Description of Artificial Sequence: Synthetic oligonucleotide
cucaggguugcuaggcgaa

SEQ ID NO: 1983521 - RNA, 19 nt, Artificial Sequence
  Description of Artificial Sequence: Synthetic oligonucleotide
gccuguacuucucacucuc

SEQ ID NO: 1983522 - RNA, 19 nt, Artificial Sequence
  Description of Artificial Sequence: Synthetic oligonucleotide
uccggauggcagucuccca

SEQ ID NO: 1983523 - RNA, 19 nt, Artificial Sequence
  Description of Artificial Sequence: Synthetic oligonucleotide
cuuagagggagcguuuccu

SEQ ID NO: 1983524 - RNA, 19 nt, Artificial Sequence
  Description of Artificial Sequence: Synthetic oligonucleotide
ccagugcguugccagagcc

SEQ ID NO: 1983525 - RNA, 19 nt, Artificial Sequence
  Description of Artificial Sequence: Synthetic oligonucleotide
ccggauggcagucucccag

SEQ ID NO: 1983526 - RNA, 19 nt, Artificial Sequence
  Description of Artificial Sequence: Synthetic oligonucleotide
gccgguucaggagaugcag

SEQ ID NO: 1983527 - RNA, 19 nt, Artificial Sequence
  Description of Artificial Sequence: Synthetic oligonucleotide
cagcucccuggcaugguuc

SEQ ID NO: 1983528 - RNA, 19 nt, Artificial Sequence
  Description of Artificial Sequence: Synthetic oligonucleotide
gcucguacccagcauagua

SEQ ID NO: 1983529 - RNA, 19 nt, Artificial Sequence
  Description of Artificial Sequence: Synthetic oligonucleotide
gcccaugggugccacaaac

SEQ ID NO: 1983530 - RNA, 19 nt, Artificial Sequence
  Description of Artificial Sequence: Synthetic oligonucleotide
gcgccuguacuucucacuc

SEQ ID NO: 1983531 - RNA, 19 nt, Artificial Sequence
  Description of Artificial Sequence: Synthetic oligonucleotide
caggcggaaggccaccaca

SEQ ID NO: 1983532 - RNA, 19 nt, Artificial Sequence
  Description of Artificial Sequence: Synthetic oligonucleotide
acgcggugcgcagcgacag

SEQ ID NO: 1983533 - RNA, 19 nt, Artificial Sequence
  Description of Artificial Sequence: Synthetic oligonucleotide
uccagacgcggugcgcagc

SEQ ID NO: 1983534 - RNA, 19 nt, Artificial Sequence
  Description of Artificial Sequence: Synthetic oligonucleotide
agccuuccccuugccgccc

SEQ ID NO: 1983535 - RNA, 19 nt, Artificial Sequence
  Description of Artificial Sequence: Synthetic oligonucleotide
guccagacgcggugcgcag

SEQ ID NO: 1983536 - RNA, 19 nt, Artificial Sequence
  Description of Artificial Sequence: Synthetic oligonucleotide
cacgagggcaucccaggga

SEQ ID NO: 1983537 - RNA, 19 nt, Artificial Sequence
  Description of Artificial Sequence: Synthetic oligonucleotide
ggcugcacgaagcuccgga

SEQ ID NO: 1983538 - RNA, 19 nt, Artificial Sequence
  Description of Artificial Sequence: Synthetic oligonucleotide
caucgccggacaugaccac

SEQ ID NO: 1983539 - RNA, 19 nt, Artificial Sequence
  Description of Artificial Sequence: Synthetic oligonucleotide
ccaucgccggacaugacca

SEQ ID NO: 1983540 - RNA, 19 nt, Artificial Sequence
  Description of Artificial Sequence: Synthetic oligonucleotide
ccagacgcggugcgcagcg

SEQ ID NO: 1983541 - RNA, 19 nt, Artificial Sequence
  Description of Artificial Sequence: Synthetic oligonucleotide
ugcucguacccagcauagu

SEQ ID NO: 1983542 - RNA, 19 nt, Artificial Sequence
  Description of Artificial Sequence: Synthetic oligonucleotide
cccugcacgcacauagaac

SEQ ID NO: 1983543 - RNA, 19 nt, Artificial Sequence
  Description of Artificial Sequence: Synthetic oligonucleotide
acaugaccacgagggcauc

SEQ ID NO: 1983544 - RNA, 19 nt, Artificial Sequence
  Description of Artificial Sequence: Synthetic oligonucleotide
acuggcuccuccaggggaa

SEQ ID NO: 1983545 - RNA, 19 nt, Artificial Sequence
  Description of Artificial Sequence: Synthetic oligonucleotide
cugguagauucucaggguu

SEQ ID NO: 1983546 - RNA, 19 nt, Artificial Sequence
  Description of Artificial Sequence: Synthetic oligonucleotide
cuucugcgccgguucagga

SEQ ID NO: 1983547 - RNA, 19 nt, Artificial Sequence
  Description of Artificial Sequence: Synthetic oligonucleotide
acggggcccuucugcgccg

SEQ ID NO: 1983548 - RNA, 19 nt, Artificial Sequence
  Description of Artificial Sequence: Synthetic oligonucleotide
ggacggggcaucccuacuc

SEQ ID NO: 1983549 - RNA, 19 nt, Artificial Sequence
  Description of Artificial Sequence: Synthetic oligonucleotide
ggggaacaagguacgaguc

SEQ ID NO: 1983550 - RNA, 19 nt, Artificial Sequence
  Description of Artificial Sequence: Synthetic oligonucleotide
ggugccggcggcacaguag

SEQ ID NO: 1983551 - RNA, 19 nt, Artificial Sequence
  Description of Artificial Sequence: Synthetic oligonucleotide
accugcucguacccagcau

SEQ ID NO: 1983552 - RNA, 19 nt, Artificial Sequence
  Description of Artificial Sequence: Synthetic oligonucleotide
agcccguucaccaccucau

SEQ ID NO: 1983553 - RNA, 19 nt, Artificial Sequence
  Description of Artificial Sequence: Synthetic oligonucleotide
ccuggacaccccugcacgc

SEQ ID NO: 1983554 - RNA, 19 nt, Artificial Sequence
  Description of Artificial Sequence: Synthetic oligonucleotide
ggcuacacaggggcuuccg

SEQ ID NO: 1983555 - RNA, 19 nt, Artificial Sequence
  Description of Artificial Sequence: Synthetic oligonucleotide
gacaggugccggcggcaca

SEQ ID NO: 1983556 - RNA, 19 nt, Artificial Sequence
  Description of Artificial Sequence: Synthetic oligonucleotide
gaugguccccacagugaaa

SEQ ID NO: 1983557 - RNA, 19 nt, Artificial Sequence
  Description of Artificial Sequence: Synthetic oligonucleotide
gcaguaccagcaccagaac

SEQ ID NO: 1983558 - RNA, 19 nt, Artificial Sequence
  Description of Artificial Sequence: Synthetic oligonucleotide
ccacgagggcaucccaggg

SEQ ID NO: 1983559 - RNA, 19 nt, Artificial Sequence
  Description of Artificial Sequence: Synthetic oligonucleotide
caguuacacuccauaugcu

SEQ ID NO: 1983560 - RNA, 19 nt, Artificial Sequence
  Description of Artificial Sequence: Synthetic oligonucleotide
ugggugccacaaacaucuc

SEQ ID NO: 1983561 - RNA, 19 nt, Artificial Sequence
  Description of Artificial Sequence: Synthetic oligonucleotide
ggcgaaagaugguccccac

SEQ ID NO: 1983562 - RNA, 19 nt, Artificial Sequence
  Description of Artificial Sequence: Synthetic oligonucleotide
ccuucugcgccgguucagg

SEQ ID NO: 1983563 - RNA, 19 nt, Artificial Sequence
  Description of Artificial Sequence: Synthetic oligonucleotide
caaggccgugggaguaguc

SEQ ID NO: 1983564 - RNA, 19 nt, Artificial Sequence
  Description of Artificial Sequence: Synthetic oligonucleotide
cguugccagagccuccggg

SEQ ID NO: 1983565 - RNA, 19 nt, Artificial Sequence
  Description of Artificial Sequence: Synthetic oligonucleotide
caguccagacgcggugcgc

SEQ ID NO: 1983566 - RNA, 19 nt, Artificial Sequence
  Description of Artificial Sequence: Synthetic oligonucleotide
gcgccgguucaggagaugc

SEQ ID NO: 1983567 - RNA, 19 nt, Artificial Sequence
  Description of Artificial Sequence: Synthetic oligonucleotide
gcgaaagaugguccccaca

SEQ ID NO: 1983568 - RNA, 19 nt, Artificial Sequence
  Description of Artificial Sequence: Synthetic oligonucleotide
gacgcggugcgcagcgaca

SEQ ID NO: 1983569 - RNA, 19 nt, Artificial Sequence
  Description of Artificial Sequence: Synthetic oligonucleotide
gccucacagcggcccaugg

SEQ ID NO: 1983570 - RNA, 19 nt, Artificial Sequence
  Description of Artificial Sequence: Synthetic oligonucleotide
gcggcacaguagcagugug

SEQ ID NO: 1983571 - RNA, 19 nt, Artificial Sequence
  Description of Artificial Sequence: Synthetic oligonucleotide
agcggcccaugggugccac

SEQ ID NO: 1983572 - RNA, 19 nt, Artificial Sequence
  Description of Artificial Sequence: Synthetic oligonucleotide
ggcaugguucugccgcuca

SEQ ID NO: 1983573 - RNA, 19 nt, Artificial Sequence
  Description of Artificial Sequence: Synthetic oligonucleotide
gggcaucccagggauccag

SEQ ID NO: 1983574 - RNA, 19 nt, Artificial Sequence
  Description of Artificial Sequence: Synthetic oligonucleotide
gggauccaguuccucugca

SEQ ID NO: 1983575 - RNA, 19 nt, Artificial Sequence
  Description of Artificial Sequence: Synthetic oligonucleotide
ggcccuucugcgccgguuc

SEQ ID NO: 1983576 - RNA, 19 nt, Artificial Sequence
  Description of Artificial Sequence: Synthetic oligonucleotide
cagugagagggcacuggcu

SEQ ID NO: 1983577 - RNA, 19 nt, Artificial Sequence
  Description of Artificial Sequence: Synthetic oligonucleotide
gccgugggaguaguccccg

SEQ ID NO: 1983578 - RNA, 19 nt, Artificial Sequence
  Description of Artificial Sequence: Synthetic oligonucleotide
caucuuagagggagcguuu

SEQ ID NO: 1983579 - RNA, 19 nt, Artificial Sequence
  Description of Artificial Sequence: Synthetic oligonucleotide
gcaguagaccaucgccgga

SEQ ID NO: 1983580 - RNA, 19 nt, Artificial Sequence
  Description of Artificial Sequence: Synthetic oligonucleotide
ugcgccgguucaggagaug

SEQ ID NO: 1983581 - RNA, 19 nt, Artificial Sequence
  Description of Artificial Sequence: Synthetic oligonucleotide
ccaccucaugcaguagacc

SEQ ID NO: 1983582 - RNA, 19 nt, Artificial Sequence
  Description of Artificial Sequence: Synthetic oligonucleotide
gugacaggugccggcggca

SEQ ID NO: 1983583 - RNA, 19 nt, Artificial Sequence
  Description of Artificial Sequence: Synthetic oligonucleotide
cccaugggugccacaaaca

SEQ ID NO: 1983584 - RNA, 19 nt, Artificial Sequence
  Description of Artificial Sequence: Synthetic oligonucleotide
ggagcguuuccuacaggaa

SEQ ID NO: 1983585 - RNA, 19 nt, Artificial Sequence
  Description of Artificial Sequence: Synthetic oligonucleotide
gggcaguuacacuccauau

SEQ ID NO: 1983586 - RNA, 19 nt, Artificial Sequence
  Description of Artificial Sequence: Synthetic oligonucleotide
gcaucuuagagggagcguu

SEQ ID NO: 1983587 - RNA, 19 nt, Artificial Sequence
  Description of Artificial Sequence: Synthetic oligonucleotide
gcuccggaagagcugcaaa

SEQ ID NO: 1983588 - RNA, 19 nt, Artificial Sequence
  Description of Artificial Sequence: Synthetic oligonucleotide
gacaccccugcacgcacau

SEQ ID NO: 1983589 - RNA, 19 nt, Artificial Sequence
  Description of Artificial Sequence: Synthetic oligonucleotide
gugcguugccagagccucc

SEQ ID NO: 1983590 - RNA, 19 nt, Artificial Sequence
  Description of Artificial Sequence: Synthetic oligonucleotide
ccugcucguacccagcaua

SEQ ID NO: 1983591 - RNA, 19 nt, Artificial Sequence
  Description of Artificial Sequence: Synthetic oligonucleotide
gagccuccggggaggcuac

SEQ ID NO: 1983592 - RNA, 19 nt, Artificial Sequence
  Description of Artificial Sequence: Synthetic oligonucleotide
aggugccggcggcacagua

SEQ ID NO: 1983593 - RNA, 19 nt, Artificial Sequence
  Description of Artificial Sequence: Synthetic oligonucleotide
guagaccaucgccggacau

SEQ ID NO: 1983594 - RNA, 19 nt, Artificial Sequence
  Description of Artificial Sequence: Synthetic oligonucleotide
cccgggguucagcaacacc

SEQ ID NO: 1983595 - RNA, 19 nt, Artificial Sequence
  Description of Artificial Sequence: Synthetic oligonucleotide
cuugccgccccgggguuca

SEQ ID NO: 1983596 - RNA, 19 nt, Artificial Sequence
  Description of Artificial Sequence: Synthetic oligonucleotide
augggcaguuacacuccau

SEQ ID NO: 1983597 - RNA, 19 nt, Artificial Sequence
  Description of Artificial Sequence: Synthetic oligonucleotide
cgcucagugagcaacaguu

SEQ ID NO: 1983598 - RNA, 19 nt, Artificial Sequence
  Description of Artificial Sequence: Synthetic oligonucleotide
cgacgaagccccaggccag

SEQ ID NO: 1983599 - RNA, 19 nt, Artificial Sequence
  Description of Artificial Sequence: Synthetic oligonucleotide
ggccgugggaguagucccc

SEQ ID NO: 1983600 - RNA, 19 nt, Artificial Sequence
  Description of Artificial Sequence: Synthetic oligonucleotide
ggucuucguuagucaccug

SEQ ID NO: 1983601 - RNA, 19 nt, Artificial Sequence
  Description of Artificial Sequence: Synthetic oligonucleotide
ucgcagcuggacggggcau

SEQ ID NO: 1983602 - RNA, 19 nt, Artificial Sequence
  Description of Artificial Sequence: Synthetic oligonucleotide
cagugcguugccagagccu

SEQ ID NO: 1983603 - RNA, 19 nt, Artificial Sequence
  Description of Artificial Sequence: Synthetic oligonucleotide
accccugcacgcacauaga

SEQ ID NO: 1983604 - RNA, 19 nt, Artificial Sequence
  Description of Artificial Sequence: Synthetic oligonucleotide
ugggugcaccuggcccugc

SEQ ID NO: 1983605 - RNA, 19 nt, Artificial Sequence
  Description of Artificial Sequence: Synthetic oligonucleotide
ccucugcacacaccagcuc

SEQ ID NO: 1983606 - RNA, 19 nt, Artificial Sequence
  Description of Artificial Sequence: Synthetic oligonucleotide
gaccaucgccggacaugac

SEQ ID NO: 1983607 - RNA, 19 nt, Artificial Sequence
  Description of Artificial Sequence: Synthetic oligonucleotide
gccgcucagugagcaacag

SEQ ID NO: 1983608 - RNA, 19 nt, Artificial Sequence
  Description of Artificial Sequence: Synthetic oligonucleotide
ccaugggugccacaaacau

SEQ ID NO: 1983609 - RNA, 19 nt, Artificial Sequence
  Description of Artificial Sequence: Synthetic oligonucleotide
ccacggggcccuucugcgc

SEQ ID NO: 1983610 - RNA, 19 nt, Artificial Sequence
  Description of Artificial Sequence: Synthetic oligonucleotide
cauggcccuggacaccccu

SEQ ID NO: 1983611 - RNA, 19 nt, Artificial Sequence
  Description of Artificial Sequence: Synthetic oligonucleotide
caucagcgacgaagcccca

SEQ ID NO: 1983612 - RNA, 19 nt, Artificial Sequence
  Description of Artificial Sequence: Synthetic oligonucleotide
cgccccgggguucagcaac

SEQ ID NO: 1983613 - RNA, 19 nt, Artificial Sequence
  Description of Artificial Sequence: Synthetic oligonucleotide
ccccugcacgcacauagaa

SEQ ID NO: 1983614 - RNA, 19 nt, Artificial Sequence
  Description of Artificial Sequence: Synthetic oligonucleotide
caccaaguaugggcaguua

SEQ ID NO: 1983615 - RNA, 19 nt, Artificial Sequence
  Description of Artificial Sequence: Synthetic oligonucleotide
ggaggcuacacaggggcuu

SEQ ID NO: 1983616 - RNA, 19 nt, Artificial Sequence
  Description of Artificial Sequence: Synthetic oligonucleotide
gcaucccuacucccacaaa

SEQ ID NO: 1983617 - RNA, 19 nt, Artificial Sequence
  Description of Artificial Sequence: Synthetic oligonucleotide
gcccuucugcgccgguuca

SEQ ID NO: 1983618 - RNA, 19 nt, Artificial Sequence
  Description of Artificial Sequence: Synthetic oligonucleotide
ccuccggggaggcuacaca

SEQ ID NO: 1983619 - RNA, 19 nt, Artificial Sequence
  Description of Artificial Sequence: Synthetic oligonucleotide
ggcaucuuagagggagcgu

SEQ ID NO: 1983620 - RNA, 19 nt, Artificial Sequence
  Description of Artificial Sequence: Synthetic oligonucleotide
ggcggcacaguagcagugu

SEQ ID NO: 1983621 - RNA, 19 nt, Artificial Sequence
  Description of Artificial Sequence: Synthetic oligonucleotide
ccgugcucaggugggugug

SEQ ID NO: 1983622 - RNA, 19 nt, Artificial Sequence
  Description of Artificial Sequence: Synthetic oligonucleotide
cggugcgcagcgacagcag

SEQ ID NO: 1983623 - RNA, 19 nt, Artificial Sequence
  Description of Artificial Sequence: Synthetic oligonucleotide
cccuacucccacaaaccau

SEQ ID NO: 1983624 - RNA, 19 nt, Artificial Sequence
  Description of Artificial Sequence: Synthetic oligonucleotide
cgugcucaggugggugugc

SEQ ID NO: 1983625 - RNA, 19 nt, Artificial Sequence
  Description of Artificial Sequence: Synthetic oligonucleotide
gcaucccagggauccaguu

SEQ ID NO: 1983626 - RNA, 19 nt, Artificial Sequence
  Description of Artificial Sequence: Synthetic oligonucleotide
gcguuuccuacaggaaggu

SEQ ID NO: 1983627 - RNA, 19 nt, Artificial Sequence
  Description of Artificial Sequence: Synthetic oligonucleotide
uugccgccccgggguucag

SEQ ID NO: 1983628 - RNA, 19 nt, Artificial Sequence
  Description of Artificial Sequence: Synthetic oligonucleotide
gccuccggggaggcuacac

SEQ ID NO: 1983629 - RNA, 19 nt, Artificial Sequence
  Description of Artificial Sequence: Synthetic oligonucleotide
acaccccugcacgcacaua

SEQ ID NO: 1983630 - RNA, 19 nt, Artificial Sequence
  Description of Artificial Sequence: Synthetic oligonucleotide
cugcacacaccagcucccu

SEQ ID NO: 1983631 - RNA, 19 nt, Artificial Sequence
  Description of Artificial Sequence: Synthetic oligonucleotide
ccaggggaacaagguacga

SEQ ID NO: 1983632 - RNA, 19 nt, Artificial Sequence
  Description of Artificial Sequence: Synthetic oligonucleotide
ccccaggcgccuguacuuc

SEQ ID NO: 1983633 - RNA, 19 nt, Artificial Sequence
  Description of Artificial Sequence: Synthetic oligonucleotide
cgccggacaugaccacgag

SEQ ID NO: 1983634 - RNA, 19 nt, Artificial Sequence
  Description of Artificial Sequence: Synthetic oligonucleotide
gcuggacggggcaucccua

SEQ ID NO: 1983635 - RNA, 19 nt, Artificial Sequence
  Description of Artificial Sequence: Synthetic oligonucleotide
cugcgccgguucaggagau

SEQ ID NO: 1983636 - RNA, 19 nt, Artificial Sequence
  Description of Artificial Sequence: Synthetic oligonucleotide
ccguuccaugagcccguuc

SEQ ID NO: 1983637 - RNA, 19 nt, Artificial Sequence
  Description of Artificial Sequence: Synthetic oligonucleotide
cagacgcggugcgcagcga

SEQ ID NO: 1983638 - RNA, 19 nt, Artificial Sequence
  Description of Artificial Sequence: Synthetic oligonucleotide
ggccguuccaugagcccgu

SEQ ID NO: 1983639 - RNA, 19 nt, Artificial Sequence
  Description of Artificial Sequence: Synthetic oligonucleotide
ccuguuccggcaccacagu

SEQ ID NO: 1983640 - RNA, 19 nt, Artificial Sequence
  Description of Artificial Sequence: Synthetic oligonucleotide
gcaaggccgugggaguagu

SEQ ID NO: 1983641 - RNA, 19 nt, Artificial Sequence
  Description of Artificial Sequence: Synthetic oligonucleotide
cuccggguccugggcucca

SEQ ID NO: 1983642 - RNA, 19 nt, Artificial Sequence
  Description of Artificial Sequence: Synthetic oligonucleotide
cgcggugcgcagcgacagc

SEQ ID NO: 1983643 - RNA, 19 nt, Artificial Sequence
  Description of Artificial Sequence: Synthetic oligonucleotide
ccgcucagugagcaacagu

SEQ ID NO: 1983644 - RNA, 19 nt, Artificial Sequence
  Description of Artificial Sequence: Synthetic oligonucleotide
ccgugggaguaguccccga

SEQ ID NO: 1983645 - RNA, 19 nt, Artificial Sequence
  Description of Artificial Sequence: Synthetic oligonucleotide
ccccgggguucagcaacac

SEQ ID NO: 1983646 - RNA, 19 nt, Artificial Sequence
  Description of Artificial Sequence: Synthetic oligonucleotide
cguuagucaccugcucgua

SEQ ID NO: 1983647 - RNA, 19 nt, Artificial Sequence
  Description of Artificial Sequence: Synthetic oligonucleotide
cguacccagcauaguaguu

SEQ ID NO: 1983648 - RNA, 19 nt, Artificial Sequence
  Description of Artificial Sequence: Synthetic oligonucleotide
cagccucacagcggcccau

SEQ ID NO: 1983649 - RNA, 19 nt, Artificial Sequence
  Description of Artificial Sequence: Synthetic oligonucleotide
cgaguccacggggcccuuc

SEQ ID NO: 1983650 - RNA, 19 nt, Artificial Sequence
  Description of Artificial Sequence: Synthetic oligonucleotide
ccgccccgggguucagcaa

SEQ ID NO: 1983651 - RNA, 19 nt, Artificial Sequence
  Description of Artificial Sequence: Synthetic oligonucleotide
gccguuccaugagcccguu

SEQ ID NO: 1983652 - RNA, 19 nt, Artificial Sequence
  Description of Artificial Sequence: Synthetic oligonucleotide
uuaauuuugucgaaggaga

SEQ ID NO: 1983653 - RNA, 19 nt, Artificial Sequence
  Description of Artificial Sequence: Synthetic oligonucleotide
uucacaacaagccucagga

SEQ ID NO: 1983654 - RNA, 19 nt, Artificial Sequence
  Description of Artificial Sequence: Synthetic oligonucleotide
uguccuauuagauagggga

SEQ ID NO: 1983655 - RNA, 19 nt, Artificial Sequence
  Description of Artificial Sequence: Synthetic oligonucleotide
aaauucugccgucccaucc

SEQ ID NO: 1983656 - RNA, 19 nt, Artificial Sequence
  Description of Artificial Sequence: Synthetic oligonucleotide
caugucaggauaaagcccg

SEQ ID NO: 1983657 - RNA, 19 nt, Artificial Sequence
  Description of Artificial Sequence: Synthetic oligonucleotide
augcauacaaggcacaggg

SEQ ID NO: 1983658 - RNA, 19 nt, Artificial Sequence
  Description of Artificial Sequence: Synthetic oligonucleotide
ugaaccgccacccucaacc

SEQ ID NO: 1983659 - RNA, 19 nt, Artificial Sequence
  Description of Artificial Sequence: Synthetic oligonucleotide
ugucgcaugcaccaaacgg

SEQ ID NO: 1983660 - RNA, 19 nt, Artificial Sequence
  Description of Artificial Sequence: Synthetic oligonucleotide
uacuuaauuuugucgaagg

SEQ ID NO: 1983661 - RNA, 19 nt, Artificial Sequence
  Description of Artificial Sequence: Synthetic oligonucleotide
accaauuaguggcacacgc

SEQ ID NO: 1983662 - RNA, 19 nt, Artificial Sequence
  Description of Artificial Sequence: Synthetic oligonucleotide
ugaauguuugugcacagca

SEQ ID NO: 1983663 - RNA, 19 nt, Artificial Sequence
  Description of Artificial Sequence: Synthetic oligonucleotide
aaaccaauuaguggcacac

SEQ ID NO: 1983664 - RNA, 19 nt, Artificial Sequence
  Description of Artificial Sequence: Synthetic oligonucleotide
ugccaaagaguucugagcc

SEQ ID NO: 1983665 - RNA, 19 nt, Artificial Sequence
  Description of Artificial Sequence: Synthetic oligonucleotide
uccaugucaggauaaagcc

SEQ ID NO: 1983666 - RNA, 19 nt, Artificial Sequence
  Description of Artificial Sequence: Synthetic oligonucleotide
uuucccuaaacucugguaa

SEQ ID NO: 1983667 - RNA, 19 nt, Artificial Sequence
  Description of Artificial Sequence: Synthetic oligonucleotide
ugucgaguaagggugaugg

SEQ ID NO: 1983668 - RNA, 19 nt, Artificial Sequence
  Description of Artificial Sequence: Synthetic oligonucleotide
ugaucaugggcacuggugc

SEQ ID NO: 1983669 - RNA, 19 nt, Artificial Sequence
  Description of Artificial Sequence: Synthetic oligonucleotide
agucaguucacaacaagcc

SEQ ID NO: 1983670 - RNA, 19 nt, Artificial Sequence
  Description of Artificial Sequence: Synthetic oligonucleotide
ugggguacaacaaggaugu

SEQ ID NO: 1983671 - RNA, 19 nt, Artificial Sequence
  Description of Artificial Sequence: Synthetic oligonucleotide
ucggagaagaugauggcag

SEQ ID NO: 1983672 - RNA, 19 nt, Artificial Sequence
  Description of Artificial Sequence: Synthetic oligonucleotide
auacaaggcacagggaucc

SEQ ID NO: 1983673 - RNA, 19 nt, Artificial Sequence
  Description of Artificial Sequence: Synthetic oligonucleotide
aacgugucauucuucagcu

SEQ ID NO: 1983674 - RNA, 19 nt, Artificial Sequence
  Description of Artificial Sequence: Synthetic oligonucleotide
gacucaaagagcugcaaug

SEQ ID NO: 1983675 - RNA, 19 nt, Artificial Sequence
  Description of Artificial Sequence: Synthetic oligonucleotide
gaacgugucauucuucagc

SEQ ID NO: 1983676 - RNA, 19 nt, Artificial Sequence
  Description of Artificial Sequence: Synthetic oligonucleotide
agugaguaugccaagcagc

SEQ ID NO: 1983677 - RNA, 19 nt, Artificial Sequence
  Description of Artificial Sequence: Synthetic oligonucleotide
gaguaugccaagcagcuug

SEQ ID NO: 1983678 - RNA, 19 nt, Artificial Sequence
  Description of Artificial Sequence: Synthetic oligonucleotide
uccugcaugggacucaaag

SEQ ID NO: 1983679 - RNA, 19 nt, Artificial Sequence
  Description of Artificial Sequence: Synthetic oligonucleotide
uguccaaucaagcccaacu

SEQ ID NO: 1983680 - RNA, 19 nt, Artificial Sequence
  Description of Artificial Sequence: Synthetic oligonucleotide
aaucaagcccaacuaccuc

SEQ ID NO: 1983681 - RNA, 19 nt, Artificial Sequence
  Description of Artificial Sequence: Synthetic oligonucleotide
aacauagcccaacucugag

SEQ ID NO: 1983682 - RNA, 19 nt, Artificial Sequence
  Description of Artificial Sequence: Synthetic oligonucleotide
ugcuggaucccguagacgc

SEQ ID NO: 1983683 - RNA, 19 nt, Artificial Sequence
  Description of Artificial Sequence: Synthetic oligonucleotide
caauuaguggcacacgccc

SEQ ID NO: 1983684 - RNA, 19 nt, Artificial Sequence
  Description of Artificial Sequence: Synthetic oligonucleotide
ucaggagaacgacaggugc

SEQ ID NO: 1983685 - RNA, 19 nt, Artificial Sequence
  Description of Artificial Sequence: Synthetic oligonucleotide
uuagauaggggaccagagc

SEQ ID NO: 1983686 - RNA, 19 nt, Artificial Sequence
  Description of Artificial Sequence: Synthetic oligonucleotide
aagauguccugcaugggac

SEQ ID NO: 1983687 - RNA, 19 nt, Artificial Sequence
  Description of Artificial Sequence: Synthetic oligonucleotide
uuuaccagguaccaugguc

SEQ ID NO: 1983688 - RNA, 19 nt, Artificial Sequence
  Description of Artificial Sequence: Synthetic oligonucleotide
ucguuuggccacaucacgg

SEQ ID NO: 1983689 - RNA, 19 nt, Artificial Sequence
  Description of Artificial Sequence: Synthetic oligonucleotide
cuuccagugcaaaaugucc

SEQ ID NO: 1983690 - RNA, 19 nt, Artificial Sequence
  Description of Artificial Sequence: Synthetic oligonucleotide
uguggucuuugguagagcc

SEQ ID NO: 1983691 - RNA, 19 nt, Artificial Sequence
  Description of Artificial Sequence: Synthetic oligonucleotide
gagacgugaauguuugugc

SEQ ID NO: 1983692 - RNA, 19 nt, Artificial Sequence
  Description of Artificial Sequence: Synthetic oligonucleotide
cuguugucgaguaagggug

SEQ ID NO: 1983693 - RNA, 19 nt, Artificial Sequence
  Description of Artificial Sequence: Synthetic oligonucleotide
uacaacaaggaugucggag

SEQ ID NO: 1983694 - RNA, 19 nt, Artificial Sequence
  Description of Artificial Sequence: Synthetic oligonucleotide
acucugguaaguaucggcc

SEQ ID NO: 1983695 - RNA, 19 nt, Artificial Sequence
  Description of Artificial Sequence: Synthetic oligonucleotide
auuuugucgaaggagacgu

SEQ ID NO: 1983696 - RNA, 19 nt, Artificial Sequence
  Description of Artificial Sequence: Synthetic oligonucleotide
agagggaaccuucuuagug

SEQ ID NO: 1983697 - RNA, 19 nt, Artificial Sequence
  Description of Artificial Sequence: Synthetic oligonucleotide
aaaaccaauuaguggcaca

SEQ ID NO: 1983698 - RNA, 19 nt, Artificial Sequence
  Description of Artificial Sequence: Synthetic oligonucleotide
aagaugaucaugggcacug

SEQ ID NO: 1983699 - RNA, 19 nt, Artificial Sequence
  Description of Artificial Sequence: Synthetic oligonucleotide
gguacaacaaggaugucgg

SEQ ID NO: 1983700 - RNA, 19 nt, Artificial Sequence
  Description of Artificial Sequence: Synthetic oligonucleotide
agcccaacuaccucauagc

SEQ ID NO: 1983701 - RNA, 19 nt, Artificial Sequence
  Description of Artificial Sequence: Synthetic oligonucleotide
cugggguacaacaaggaug

SEQ ID NO: 1983702 - RNA, 19 nt, Artificial Sequence
  Description of Artificial Sequence: Synthetic oligonucleotide
uccuacauguucugggucc

SEQ ID NO: 1983703 - RNA, 19 nt, Artificial Sequence
  Description of Artificial Sequence: Synthetic oligonucleotide
aucccguucgccuccaugg

SEQ ID NO: 1983704 - RNA, 19 nt, Artificial Sequence
  Description of Artificial Sequence: Synthetic oligonucleotide
uuccagugcaaaaugucca

SEQ ID NO: 1983705 - RNA, 19 nt, Artificial Sequence
  Description of Artificial Sequence: Synthetic oligonucleotide
ucuuaguggcugcagaguc

SEQ ID NO: 1983706 - RNA, 19 nt, Artificial Sequence
  Description of Artificial Sequence: Synthetic oligonucleotide
uugccaaagaguucugagc

SEQ ID NO: 1983707 - RNA, 19 nt, Artificial Sequence
  Description of Artificial Sequence: Synthetic oligonucleotide
ucuuuggugccacugucca

SEQ ID NO: 1983708 - RNA, 19 nt, Artificial Sequence
  Description of Artificial Sequence: Synthetic oligonucleotide
cagucgaccaaucucuucc

SEQ ID NO: 1983709 - RNA, 19 nt, Artificial Sequence
  Description of Artificial Sequence: Synthetic oligonucleotide
uaugccaagcagcuuguga

SEQ ID NO: 1983710 - RNA, 19 nt, Artificial Sequence
  Description of Artificial Sequence: Synthetic oligonucleotide
ugcaaggucaccgucuucc

SEQ ID NO: 1983711 - RNA, 19 nt, Artificial Sequence
  Description of Artificial Sequence: Synthetic oligonucleotide
auguuugugcacagcaucc

SEQ ID NO: 1983712 - RNA, 19 nt, Artificial Sequence
  Description of Artificial Sequence: Synthetic oligonucleotide
ucugguaaguaucggccug

SEQ ID NO: 1983713 - RNA, 19 nt, Artificial Sequence
  Description of Artificial Sequence: Synthetic oligonucleotide
caauguagcguuguggccc

SEQ ID NO: 1983714 - RNA, 19 nt, Artificial Sequence
  Description of Artificial Sequence: Synthetic oligonucleotide
aacaagccucaggagaacg

SEQ ID NO: 1983715 - RNA, 19 nt, Artificial Sequence
  Description of Artificial Sequence: Synthetic oligonucleotide
cuaccucauagccagacug

SEQ ID NO: 1983716 - RNA, 19 nt, Artificial Sequence
  Description of Artificial Sequence: Synthetic oligonucleotide
agagcaucagugaguaugc

SEQ ID NO: 1983717 - RNA, 19 nt, Artificial Sequence
  Description of Artificial Sequence: Synthetic oligonucleotide
uuguccuauuagauagggg

SEQ ID NO: 1983718 - RNA, 19 nt, Artificial Sequence
  Description of Artificial Sequence: Synthetic oligonucleotide
uauuagauaggggaccaga

SEQ ID NO: 1983719 - RNA, 19 nt, Artificial Sequence
  Description of Artificial Sequence: Synthetic oligonucleotide
aguaucggccugcuugucg

SEQ ID NO: 1983720 - RNA, 19 nt, Artificial Sequence
  Description of Artificial Sequence: Synthetic oligonucleotide
auuaguggcacacgcccag

SEQ ID NO: 1983721 - RNA, 19 nt, Artificial Sequence
  Description of Artificial Sequence: Synthetic oligonucleotide
aauguccauccuuagcaaa

SEQ ID NO: 1983722 - RNA, 19 nt, Artificial Sequence
  Description of Artificial Sequence: Synthetic oligonucleotide
cagagcaucagugaguaug

SEQ ID NO: 1983723 - RNA, 19 nt, Artificial Sequence
  Description of Artificial Sequence: Synthetic oligonucleotide
aaauguccauccuuagcaa

SEQ ID NO: 1983724 - RNA, 19 nt, Artificial Sequence
  Description of Artificial Sequence: Synthetic oligonucleotide
uccuauuagauaggggacc

SEQ ID NO: 1983725 - RNA, 19 nt, Artificial Sequence
  Description of Artificial Sequence: Synthetic oligonucleotide
cuuguccuauuagauaggg

SEQ ID NO: 1983726 - RNA, 19 nt, Artificial Sequence
  Description of Artificial Sequence: Synthetic oligonucleotide
gucgcaugcaccaaacggg

SEQ ID NO: 1983727 - RNA, 19 nt, Artificial Sequence
  Description of Artificial Sequence: Synthetic oligonucleotide
aaggagacgugaauguuug

SEQ ID NO: 1983728 - RNA, 19 nt, Artificial Sequence
  Description of Artificial Sequence: Synthetic oligonucleotide
guucacaacaagccucagg

SEQ ID NO: 1983729 - RNA, 19 nt, Artificial Sequence
  Description of Artificial Sequence: Synthetic oligonucleotide
uuaguggcugcagagucag

SEQ ID NO: 1983730 - RNA, 19 nt, Artificial Sequence
  Description of Artificial Sequence: Synthetic oligonucleotide
ucucuuaauggcucuggga

SEQ ID NO: 1983731 - RNA, 19 nt, Artificial Sequence
  Description of Artificial Sequence: Synthetic oligonucleotide
ugcagagucaguucacaac

SEQ ID NO: 1983732 - RNA, 19 nt, Artificial Sequence
  Description of Artificial Sequence: Synthetic oligonucleotide
ucgaaggagacgugaaugu

SEQ ID NO: 1983733 - RNA, 19 nt, Artificial Sequence
  Description of Artificial Sequence: Synthetic oligonucleotide
uaaguaucggccugcuugu

SEQ ID NO: 1983734 - RNA, 19 nt, Artificial Sequence
  Description of Artificial Sequence: Synthetic oligonucleotide
uuugucgaaggagacguga

SEQ ID NO: 1983735 - RNA, 19 nt, Artificial Sequence
  Description of Artificial Sequence: Synthetic oligonucleotide
acaucacggauguagggca

SEQ ID NO: 1983736 - RNA, 19 nt, Artificial Sequence
  Description of Artificial Sequence: Synthetic oligonucleotide
gucaggauaaagcccgugc

SEQ ID NO: 1983737 - RNA, 19 nt, Artificial Sequence
  Description of Artificial Sequence: Synthetic oligonucleotide
ggcaauguagcguuguggc

SEQ ID NO: 1983738 - RNA, 19 nt, Artificial Sequence
  Description of Artificial Sequence: Synthetic oligonucleotide
auuagauaggggaccagag

SEQ ID NO: 1983739 - RNA, 19 nt, Artificial Sequence
  Description of Artificial Sequence: Synthetic oligonucleotide
aauguagcguuguggccca

SEQ ID NO: 1983740 - RNA, 19 nt, Artificial Sequence
  Description of Artificial Sequence: Synthetic oligonucleotide
cauguaugucaucaggguc

SEQ ID NO: 1983741 - RNA, 19 nt, Artificial Sequence
  Description of Artificial Sequence: Synthetic oligonucleotide
uguagggcagugcaaacuu

SEQ ID NO: 1983742 - RNA, 19 nt, Artificial Sequence
  Description of Artificial Sequence: Synthetic oligonucleotide
cuuaauggcucugggaaac

SEQ ID NO: 1983743 - RNA, 19 nt, Artificial Sequence
  Description of Artificial Sequence: Synthetic oligonucleotide
aggaacgugucauucuuca

SEQ ID NO: 1983744 - RNA, 19 nt, Artificial Sequence
  Description of Artificial Sequence: Synthetic oligonucleotide
caaacgggaguguagucug

SEQ ID NO: 1983745 - RNA, 19 nt, Artificial Sequence
  Description of Artificial Sequence: Synthetic oligonucleotide
ucgaccaaucucuuccuca

SEQ ID NO: 1983746 - RNA, 19 nt, Artificial Sequence
  Description of Artificial Sequence: Synthetic oligonucleotide
agacgugaauguuugugca

SEQ ID NO: 1983747 - RNA, 19 nt, Artificial Sequence
  Description of Artificial Sequence: Synthetic oligonucleotide
uggcaauguagcguugugg

SEQ ID NO: 1983748 - RNA, 19 nt, Artificial Sequence
  Description of Artificial Sequence: Synthetic oligonucleotide
agccauggugcuugaaccg

SEQ ID NO: 1983749 - RNA, 19 nt, Artificial Sequence
  Description of Artificial Sequence: Synthetic oligonucleotide
caugguaaacaguaacuga

SEQ ID NO: 1983750 - RNA, 19 nt, Artificial Sequence
  Description of Artificial Sequence: Synthetic oligonucleotide
cucaaagagcugcaaugcc

SEQ ID NO: 1983751 - RNA, 19 nt, Artificial Sequence
  Description of Artificial Sequence: Synthetic oligonucleotide
uugucgcaugcaccaaacg

SEQ ID NO: 1983752 - RNA, 19 nt, Artificial Sequence
  Description of Artificial Sequence: Synthetic oligonucleotide
acggauguagggcagugca

SEQ ID NO: 1983753 - RNA, 19 nt, Artificial Sequence
  Description of Artificial Sequence: Synthetic oligonucleotide
agcaucagugaguaugcca

SEQ ID NO: 1983754 - RNA, 19 nt, Artificial Sequence
  Description of Artificial Sequence: Synthetic oligonucleotide
cauacaaggcacagggauc

SEQ ID NO: 1983755 - RNA, 19 nt, Artificial Sequence
  Description of Artificial Sequence: Synthetic oligonucleotide
agcccuaguuucccuaaac

SEQ ID NO: 1983756 - RNA, 19 nt, Artificial Sequence
  Description of Artificial Sequence: Synthetic oligonucleotide
uucgccuccaugguaaaca

SEQ ID NO: 1983757 - RNA, 19 nt, Artificial Sequence
  Description of Artificial Sequence: Synthetic oligonucleotide
aaccaauuaguggcacacg

SEQ ID NO: 1983758 - RNA, 19 nt, Artificial Sequence
  Description of Artificial Sequence: Synthetic oligonucleotide
uaguuucccuaaacucugg

SEQ ID NO: 1983759 - RNA, 19 nt, Artificial Sequence
  Description of Artificial Sequence: Synthetic oligonucleotide
uuccccugcaaggucaccg

SEQ ID NO: 1983760 - RNA, 19 nt, Artificial Sequence
  Description of Artificial Sequence: Synthetic oligonucleotide
ugguagagccaucgcuugg

SEQ ID NO: 1983761 - RNA, 19 nt, Artificial Sequence
  Description of Artificial Sequence: Synthetic oligonucleotide
uugguagagccaucgcuug

SEQ ID NO: 1983762 - RNA, 19 nt, Artificial Sequence
  Description of Artificial Sequence: Synthetic oligonucleotide
ucaggaacgugucauucuu

SEQ ID NO: 1983763 - RNA, 19 nt, Artificial Sequence
  Description of Artificial Sequence: Synthetic oligonucleotide
ucuuaauggcucugggaaa

SEQ ID NO: 1983764 - RNA, 19 nt, Artificial Sequence
  Description of Artificial Sequence: Synthetic oligonucleotide
cacgcugcucucaggaacg

SEQ ID NO: 1983765 - RNA, 19 nt, Artificial Sequence
  Description of Artificial Sequence: Synthetic oligonucleotide
gaugucggagaagaugaug

SEQ ID NO: 1983766 - RNA, 19 nt, Artificial Sequence
  Description of Artificial Sequence: Synthetic oligonucleotide
cacaucacggauguagggc

SEQ ID NO: 1983767 - RNA, 19 nt, Artificial Sequence
  Description of Artificial Sequence: Synthetic oligonucleotide
uuggaaaacauagcccaac

SEQ ID NO: 1983768 - RNA, 19 nt, Artificial Sequence
  Description of Artificial Sequence: Synthetic oligonucleotide
ugccacuguccaaucaagc

SEQ ID NO: 1983769 - RNA, 19 nt, Artificial Sequence
  Description of Artificial Sequence: Synthetic oligonucleotide
uguugucgaguaaggguga

SEQ ID NO: 1983770 - RNA, 19 nt, Artificial Sequence
  Description of Artificial Sequence: Synthetic oligonucleotide
uccagagggaaccuucuua

SEQ ID NO: 1983771 - RNA, 19 nt, Artificial Sequence
  Description of Artificial Sequence: Synthetic oligonucleotide
ucgcaugcaccaaacggga

SEQ ID NO: 1983772 - RNA, 19 nt, Artificial Sequence
  Description of Artificial Sequence: Synthetic oligonucleotide
gucgaaggagacgugaaug

SEQ ID NO: 1983773 - RNA, 19 nt, Artificial Sequence
  Description of Artificial Sequence: Synthetic oligonucleotide
guaucggccugcuugucgc

SEQ ID NO: 1983774 - RNA, 19 nt, Artificial Sequence
  Description of Artificial Sequence: Synthetic oligonucleotide
gauaaagcccgugcccuag

SEQ ID NO: 1983775 - RNA, 19 nt, Artificial Sequence
  Description of Artificial Sequence: Synthetic oligonucleotide
aaagaugaucaugggcacu

SEQ ID NO: 1983776 - RNA, 19 nt, Artificial Sequence
  Description of Artificial Sequence: Synthetic oligonucleotide
ccaaucaagcccaacuacc

SEQ ID NO: 1983777 - RNA, 19 nt, Artificial Sequence
  Description of Artificial Sequence: Synthetic oligonucleotide
cagugaguaugccaagcag

SEQ ID NO: 1983778 - RNA, 19 nt, Artificial Sequence
  Description of Artificial Sequence: Synthetic oligonucleotide
agccacuuguccuauuaga

SEQ ID NO: 1983779 - RNA, 19 nt, Artificial Sequence
  Description of Artificial Sequence: Synthetic oligonucleotide
cuugucgcaugcaccaaac

SEQ ID NO: 1983780 - RNA, 19 nt, Artificial Sequence
  Description of Artificial Sequence: Synthetic oligonucleotide
cauggucaccuccaugccc

SEQ ID NO: 1983781 - RNA, 19 nt, Artificial Sequence
  Description of Artificial Sequence: Synthetic oligonucleotide
uuggcaauguagcguugug

SEQ ID NO: 1983782 - RNA, 19 nt, Artificial Sequence
  Description of Artificial Sequence: Synthetic oligonucleotide
ugcaccagucgaccaaucu

SEQ ID NO: 1983783 - RNA, 19 nt, Artificial Sequence
  Description of Artificial Sequence: Synthetic oligonucleotide
uggguccuuuaccagguac

SEQ ID NO: 1983784 - RNA, 19 nt, Artificial Sequence
  Description of Artificial Sequence: Synthetic oligonucleotide
gacgugaauguuugugcac

SEQ ID NO: 1983785 - RNA, 19 nt, Artificial Sequence
  Description of Artificial Sequence: Synthetic oligonucleotide
uggucuuugguagagccau

SEQ ID NO: 1983786 - RNA, 19 nt, Artificial Sequence
  Description of Artificial Sequence: Synthetic oligonucleotide
cuucucuuaauggcucugg

SEQ ID NO: 1983787 - RNA, 19 nt, Artificial Sequence
  Description of Artificial Sequence: Synthetic oligonucleotide
auucugccgucccaucccg

SEQ ID NO: 1983788 - RNA, 19 nt, Artificial Sequence
  Description of Artificial Sequence: Synthetic oligonucleotide
gauguagggcagugcaaac

SEQ ID NO: 1983789 - RNA, 19 nt, Artificial Sequence
  Description of Artificial Sequence: Synthetic oligonucleotide
acucguuuggccacaucac

SEQ ID NO: 1983790 - RNA, 19 nt, Artificial Sequence
  Description of Artificial Sequence: Synthetic oligonucleotide
aauuaguggcacacgccca

SEQ ID NO: 1983791 - RNA, 19 nt, Artificial Sequence
  Description of Artificial Sequence: Synthetic oligonucleotide
uuuugucgaaggagacgug

SEQ ID NO: 1983792 - RNA, 19 nt, Artificial Sequence
  Description of Artificial Sequence: Synthetic oligonucleotide
aaugccugggguacaacaa

SEQ ID NO: 1983793 - RNA, 19 nt, Artificial Sequence
  Description of Artificial Sequence: Synthetic oligonucleotide
guggcccaaauucauccag

SEQ ID NO: 1983794 - RNA, 19 nt, Artificial Sequence
  Description of Artificial Sequence: Synthetic oligonucleotide
uugucgaaggagacgugaa

SEQ ID NO: 1983795 - RNA, 19 nt, Artificial Sequence
  Description of Artificial Sequence: Synthetic oligonucleotide
gaacgacaggugcugaaga

SEQ ID NO: 1983796 - RNA, 19 nt, Artificial Sequence
  Description of Artificial Sequence: Synthetic oligonucleotide
aggauaaagcccgugcccu

SEQ ID NO: 1983797 - RNA, 19 nt, Artificial Sequence
  Description of Artificial Sequence: Synthetic oligonucleotide
ucauagccagacugggcca

SEQ ID NO: 1983798 - RNA, 19 nt, Artificial Sequence
  Description of Artificial Sequence: Synthetic oligonucleotide
caagauguccugcauggga

SEQ ID NO: 1983799 - RNA, 19 nt, Artificial Sequence
  Description of Artificial Sequence: Synthetic oligonucleotide
ucaccgucuuccccacacg

SEQ ID NO: 1983800 - RNA, 19 nt, Artificial Sequence
  Description of Artificial Sequence: Synthetic oligonucleotide
ugcuugaaccgccacccuc

SEQ ID NO: 1983801 - RNA, 19 nt, Artificial Sequence
  Description of Artificial Sequence: Synthetic oligonucleotide
uguuugugcacagcaucca

SEQ ID NO: 1983802 - RNA, 19 nt, Artificial Sequence
  Description of Artificial Sequence: Synthetic oligonucleotide
ugucgaaggagacgugaau

SEQ ID NO: 1983803 - RNA, 19 nt, Artificial Sequence
  Description of Artificial Sequence: Synthetic oligonucleotide
ucgccuccaugguaaacag

SEQ ID NO: 1983804 - RNA, 19 nt, Artificial Sequence
  Description of Artificial Sequence: Synthetic oligonucleotide
cacuguccaaucaagccca

SEQ ID NO: 1983805 - RNA, 19 nt, Artificial Sequence
  Description of Artificial Sequence: Synthetic oligonucleotide
acgacaggugcugaagaag

SEQ ID NO: 1983806 - RNA, 19 nt, Artificial Sequence
  Description of Artificial Sequence: Synthetic oligonucleotide
uaauggcucugggaaacug

SEQ ID NO: 1983807 - RNA, 19 nt, Artificial Sequence
  Description of Artificial Sequence: Synthetic oligonucleotide
caaccauguaugucaucag

SEQ ID NO: 1983808 - RNA, 19 nt, Artificial Sequence
  Description of Artificial Sequence: Synthetic oligonucleotide
uucuuaguggcugcagagu

SEQ ID NO: 1983809 - RNA, 19 nt, Artificial Sequence
  Description of Artificial Sequence: Synthetic oligonucleotide
agccucaggagaacgacag

SEQ ID NO: 1983810 - RNA, 19 nt, Artificial Sequence
  Description of Artificial Sequence: Synthetic oligonucleotide
caugcaccaaacgggagug

SEQ ID NO: 1983811 - RNA, 19 nt, Artificial Sequence
  Description of Artificial Sequence: Synthetic oligonucleotide
ucuggguccaugucaggau

SEQ ID NO: 1983812 - RNA, 19 nt, Artificial Sequence
  Description of Artificial Sequence: Synthetic oligonucleotide
uguccauccuuagcaaaga

SEQ ID NO: 1983813 - RNA, 19 nt, Artificial Sequence
  Description of Artificial Sequence: Synthetic oligonucleotide
ccucagaugcauacaaggc

SEQ ID NO: 1983814 - RNA, 19 nt, Artificial Sequence
  Description of Artificial Sequence: Synthetic oligonucleotide
gcuccggaaaauucugccg

SEQ ID NO: 1983815 - RNA, 19 nt, Artificial Sequence
  Description of Artificial Sequence: Synthetic oligonucleotide
auggugcuugaaccgccac

SEQ ID NO: 1983816 - RNA, 19 nt, Artificial Sequence
  Description of Artificial Sequence: Synthetic oligonucleotide
ggagacgugaauguuugug

SEQ ID NO: 1983817 - RNA, 19 nt, Artificial Sequence
  Description of Artificial Sequence: Synthetic oligonucleotide
ggccacaucacggauguag

SEQ ID NO: 1983818 - RNA, 19 nt, Artificial Sequence
  Description of Artificial Sequence: Synthetic oligonucleotide
ccuuuaccagguaccaugg

SEQ ID NO: 1983819 - RNA, 19 nt, Artificial Sequence
  Description of Artificial Sequence: Synthetic oligonucleotide
aggagaacgacaggugcug

SEQ ID NO: 1983820 - RNA, 19 nt, Artificial Sequence
  Description of Artificial Sequence: Synthetic oligonucleotide
caaugccugggguacaaca

SEQ ID NO: 1983821 - RNA, 19 nt, Artificial Sequence
  Description of Artificial Sequence: Synthetic oligonucleotide
caucagugaguaugccaag

SEQ ID NO: 1983822 - RNA, 19 nt, Artificial Sequence
  Description of Artificial Sequence: Synthetic oligonucleotide
agcucuuccagugcaaaau

SEQ ID NO: 1983823 - RNA, 19 nt, Artificial Sequence
  Description of Artificial Sequence: Synthetic oligonucleotide
acuuguccuauuagauagg

SEQ ID NO: 1983824 - RNA, 19 nt, Artificial Sequence
  Description of Artificial Sequence: Synthetic oligonucleotide
guccuauuagauaggggac

SEQ ID NO: 1983825 - RNA, 19 nt, Artificial Sequence
  Description of Artificial Sequence: Synthetic oligonucleotide
ggaaaacauagcccaacuc

SEQ ID NO: 1983826 - RNA, 19 nt, Artificial Sequence
  Description of Artificial Sequence: Synthetic oligonucleotide
aguucugagccaagauguc

SEQ ID NO: 1983827 - RNA, 19 nt, Artificial Sequence
  Description of Artificial Sequence: Synthetic oligonucleotide
ucccuaaacucugguaagu

SEQ ID NO: 1983828 - RNA, 19 nt, Artificial Sequence
  Description of Artificial Sequence: Synthetic oligonucleotide
ccaauuaguggcacacgcc

SEQ ID NO: 1983829 - RNA, 19 nt, Artificial Sequence
  Description of Artificial Sequence: Synthetic oligonucleotide
ugcugcaccagucgaccaa

SEQ ID NO: 1983830 - RNA, 19 nt, Artificial Sequence
  Description of Artificial Sequence: Synthetic oligonucleotide
caccgucuuccccacacgc

SEQ ID NO: 1983831 - RNA, 19 nt, Artificial Sequence
  Description of Artificial Sequence: Synthetic oligonucleotide
cauccacaaaggcuccuac

SEQ ID NO: 1983832 - RNA, 19 nt, Artificial Sequence
  Description of Artificial Sequence: Synthetic oligonucleotide
caucacggauguagggcag

SEQ ID NO: 1983833 - RNA, 19 nt, Artificial Sequence
  Description of Artificial Sequence: Synthetic oligonucleotide
agucgaccaaucucuuccu

SEQ ID NO: 1983834 - RNA, 19 nt, Artificial Sequence
  Description of Artificial Sequence: Synthetic oligonucleotide
cugcuugucgcaugcacca

SEQ ID NO: 1983835 - RNA, 19 nt, Artificial Sequence
  Description of Artificial Sequence: Synthetic oligonucleotide
auguagggcagugcaaacu

SEQ ID NO: 1983836 - RNA, 19 nt, Artificial Sequence
  Description of Artificial Sequence: Synthetic oligonucleotide
cuuugguagagccaucgcu

SEQ ID NO: 1983837 - RNA, 19 nt, Artificial Sequence
  Description of Artificial Sequence: Synthetic oligonucleotide
cugguaaguaucggccugc

SEQ ID NO: 1983838 - RNA, 19 nt, Artificial Sequence
  Description of Artificial Sequence: Synthetic oligonucleotide
ggccuguggucuuugguag

SEQ ID NO: 1983839 - RNA, 19 nt, Artificial Sequence
  Description of Artificial Sequence: Synthetic oligonucleotide
guagagccaucgcuuggcc

SEQ ID NO: 1983840 - RNA, 19 nt, Artificial Sequence
  Description of Artificial Sequence: Synthetic oligonucleotide
uccugggcagcccuaguuu

SEQ ID NO: 1983841 - RNA, 19 nt, Artificial Sequence
  Description of Artificial Sequence: Synthetic oligonucleotide
uccggaaaauucugccguc

SEQ ID NO: 1983842 - RNA, 19 nt, Artificial Sequence
  Description of Artificial Sequence: Synthetic oligonucleotide
cagcuccggaaaauucugc

SEQ ID NO: 1983843 - RNA, 19 nt, Artificial Sequence
  Description of Artificial Sequence: Synthetic oligonucleotide
cccuagguuggcaauguag

SEQ ID NO: 1983844 - RNA, 19 nt, Artificial Sequence
  Description of Artificial Sequence: Synthetic oligonucleotide
ugucaggauaaagcccgug

SEQ ID NO: 1983845 - RNA, 19 nt, Artificial Sequence
  Description of Artificial Sequence: Synthetic oligonucleotide
agcaccagcaaaaccaauu

SEQ ID NO: 1983846 - RNA, 19 nt, Artificial Sequence
  Description of Artificial Sequence: Synthetic oligonucleotide
cccucaaccauguauguca

SEQ ID NO: 1983847 - RNA, 19 nt, Artificial Sequence
  Description of Artificial Sequence: Synthetic oligonucleotide
aaguaucggccugcuuguc

SEQ ID NO: 1983848 - RNA, 19 nt, Artificial Sequence
  Description of Artificial Sequence: Synthetic oligonucleotide
gaaaauucugccgucccau

SEQ ID NO: 1983849 - RNA, 19 nt, Artificial Sequence
  Description of Artificial Sequence: Synthetic oligonucleotide
ccaugguaaacaguaacug

SEQ ID NO: 1983850 - RNA, 19 nt, Artificial Sequence
  Description of Artificial Sequence: Synthetic oligonucleotide
acgugucauucuucagcuc

SEQ ID NO: 1983851 - RNA, 19 nt, Artificial Sequence
  Description of Artificial Sequence: Synthetic oligonucleotide
cccuaguuucccuaaacuc

SEQ ID NO: 1983852 - RNA, 19 nt, Artificial Sequence
  Description of Artificial Sequence: Synthetic oligonucleotide
acccucaaccauguauguc

SEQ ID NO: 1983853 - RNA, 19 nt, Artificial Sequence
  Description of Artificial Sequence: Synthetic oligonucleotide
guuucccuaaacucuggua

SEQ ID NO: 1983854 - RNA, 19 nt, Artificial Sequence
  Description of Artificial Sequence: Synthetic oligonucleotide
caaucaagcccaacuaccu

SEQ ID NO: 1983855 - RNA, 19 nt, Artificial Sequence
  Description of Artificial Sequence: Synthetic oligonucleotide
uggaucccguagacgcucc

SEQ ID NO: 1983856 - RNA, 19 nt, Artificial Sequence
  Description of Artificial Sequence: Synthetic oligonucleotide
gugaauguuugugcacagc

SEQ ID NO: 1983857 - RNA, 19 nt, Artificial Sequence
  Description of Artificial Sequence: Synthetic oligonucleotide
aagccucaggagaacgaca

SEQ ID NO: 1983858 - RNA, 19 nt, Artificial Sequence
  Description of Artificial Sequence: Synthetic oligonucleotide
ucacggauguagggcagug

SEQ ID NO: 1983859 - RNA, 19 nt, Artificial Sequence
  Description of Artificial Sequence: Synthetic oligonucleotide
ugcaccaaacgggagugua

SEQ ID NO: 1983860 - RNA, 19 nt, Artificial Sequence
  Description of Artificial Sequence: Synthetic oligonucleotide
cuauuagauaggggaccag

SEQ ID NO: 1983861 - RNA, 19 nt, Artificial Sequence
  Description of Artificial Sequence: Synthetic oligonucleotide
gagaacgacaggugcugaa

SEQ ID NO: 1983862 - RNA, 19 nt, Artificial Sequence
  Description of Artificial Sequence: Synthetic oligonucleotide
ccaucgcuuggccugagcc

SEQ ID NO: 1983863 - RNA, 19 nt, Artificial Sequence
  Description of Artificial Sequence: Synthetic oligonucleotide
cuccuacauguucuggguc

SEQ ID NO: 1983864 - RNA, 19 nt, Artificial Sequence
  Description of Artificial Sequence: Synthetic oligonucleotide
ggaacgugucauucuucag

SEQ ID NO: 1983865 - RNA, 19 nt, Artificial Sequence
  Description of Artificial Sequence: Synthetic oligonucleotide
uugucgaguaagggugaug

SEQ ID NO: 1983866 - RNA, 19 nt, Artificial Sequence
  Description of Artificial Sequence: Synthetic oligonucleotide
gguagagccaucgcuuggc

SEQ ID NO: 1983867 - RNA, 19 nt, Artificial Sequence
  Description of Artificial Sequence: Synthetic oligonucleotide
cuugugacuggccuguggu

SEQ ID NO: 1983868 - RNA, 19 nt, Artificial Sequence
  Description of Artificial Sequence: Synthetic oligonucleotide
aucgcuuggccugagccau

SEQ ID NO: 1983869 - RNA, 19 nt, Artificial Sequence
  Description of Artificial Sequence: Synthetic oligonucleotide
ccuaguuucccuaaacucu

SEQ ID NO: 1983870 - RNA, 19 nt, Artificial Sequence
  Description of Artificial Sequence: Synthetic oligonucleotide
caggaacgugucauucuuc

SEQ ID NO: 1983871 - RNA, 19 nt, Artificial Sequence
  Description of Artificial Sequence: Synthetic oligonucleotide
ggugauggcuuggaaaaca

SEQ ID NO: 1983872 - RNA, 19 nt, Artificial Sequence
  Description of Artificial Sequence: Synthetic oligonucleotide
uagcguuguggcccaaauu

SEQ ID NO: 1983873 - RNA, 19 nt, Artificial Sequence
  Description of Artificial Sequence: Synthetic oligonucleotide
gcauacaaggcacagggau

SEQ ID NO: 1983874 - RNA, 19 nt, Artificial Sequence
  Description of Artificial Sequence: Synthetic oligonucleotide
gcuugugacuggccugugg

SEQ ID NO: 1983875 - RNA, 19 nt, Artificial Sequence
  Description of Artificial Sequence: Synthetic oligonucleotide
gaaccgccacccucaacca

SEQ ID NO: 1983876 - RNA, 19 nt, Artificial Sequence
  Description of Artificial Sequence: Synthetic oligonucleotide
caucgcuuggccugagcca

SEQ ID NO: 1983877 - RNA, 19 nt, Artificial Sequence
  Description of Artificial Sequence: Synthetic oligonucleotide
gguccaugucaggauaaag

SEQ ID NO: 1983878 - RNA, 19 nt, Artificial Sequence
  Description of Artificial Sequence: Synthetic oligonucleotide
ggguccuuuaccagguacc

SEQ ID NO: 1983879 - RNA, 19 nt, Artificial Sequence
  Description of Artificial Sequence: Synthetic oligonucleotide
acaagccucaggagaacga

SEQ ID NO: 1983880 - RNA, 19 nt, Artificial Sequence
  Description of Artificial Sequence: Synthetic oligonucleotide
aacuugccaaagaguucug

SEQ ID NO: 1983881 - RNA, 19 nt, Artificial Sequence
  Description of Artificial Sequence: Synthetic oligonucleotide
ucccguucgccuccauggu

SEQ ID NO: 1983882 - RNA, 19 nt, Artificial Sequence
  Description of Artificial Sequence: Synthetic oligonucleotide
guagggcagugcaaacuug

SEQ ID NO: 1983883 - RNA, 19 nt, Artificial Sequence
  Description of Artificial Sequence: Synthetic oligonucleotide
augcccaaugccuggggua

SEQ ID NO: 1983884 - RNA, 19 nt, Artificial Sequence
  Description of Artificial Sequence: Synthetic oligonucleotide
cugcucucaggaacguguc

SEQ ID NO: 1983885 - RNA, 19 nt, Artificial Sequence
  Description of Artificial Sequence: Synthetic oligonucleotide
caucccguucgccuccaug

SEQ ID NO: 1983886 - RNA, 19 nt, Artificial Sequence
  Description of Artificial Sequence: Synthetic oligonucleotide
ucggccugcuugucgcaug

SEQ ID NO: 1983887 - RNA, 19 nt, Artificial Sequence
  Description of Artificial Sequence: Synthetic oligonucleotide
aacgggaguguagucuguu

SEQ ID NO: 1983888 - RNA, 19 nt, Artificial Sequence
  Description of Artificial Sequence: Synthetic oligonucleotide
gaaggagacgugaauguuu

SEQ ID NO: 1983889 - RNA, 19 nt, Artificial Sequence
  Description of Artificial Sequence: Synthetic oligonucleotide
gcaccagucgaccaaucuc

SEQ ID NO: 1983890 - RNA, 19 nt, Artificial Sequence
  Description of Artificial Sequence: Synthetic oligonucleotide
cuccggaaaauucugccgu

SEQ ID NO: 1983891 - RNA, 19 nt, Artificial Sequence
  Description of Artificial Sequence: Synthetic oligonucleotide
guaagggugauggcuugga

SEQ ID NO: 1983892 - RNA, 19 nt, Artificial Sequence
  Description of Artificial Sequence: Synthetic oligonucleotide
gcagcuugugacuggccug

SEQ ID NO: 1983893 - RNA, 19 nt, Artificial Sequence
  Description of Artificial Sequence: Synthetic oligonucleotide
aaacgggaguguagucugu

SEQ ID NO: 1983894 - RNA, 19 nt, Artificial Sequence
  Description of Artificial Sequence: Synthetic oligonucleotide
uugaaccgccacccucaac

SEQ ID NO: 1983895 - RNA, 19 nt, Artificial Sequence
  Description of Artificial Sequence: Synthetic oligonucleotide
acgcccagccagcuguugu

SEQ ID NO: 1983896 - RNA, 19 nt, Artificial Sequence
  Description of Artificial Sequence: Synthetic oligonucleotide
ugguaaguaucggccugcu

SEQ ID NO: 1983897 - RNA, 19 nt, Artificial Sequence
  Description of Artificial Sequence: Synthetic oligonucleotide
cucaaccauguaugucauc

SEQ ID NO: 1983898 - RNA, 19 nt, Artificial Sequence
  Description of Artificial Sequence: Synthetic oligonucleotide
aguucacaacaagccucag

SEQ ID NO: 1983899 - RNA, 19 nt, Artificial Sequence
  Description of Artificial Sequence: Synthetic oligonucleotide
aggagacgugaauguuugu

SEQ ID NO: 1983900 - RNA, 19 nt, Artificial Sequence
  Description of Artificial Sequence: Synthetic oligonucleotide
ggauguagggcagugcaaa

SEQ ID NO: 1983901 - RNA, 19 nt, Artificial Sequence
  Description of Artificial Sequence: Synthetic oligonucleotide
cacggauguagggcagugc

SEQ ID NO: 1983902 - RNA, 19 nt, Artificial Sequence
  Description of Artificial Sequence: Synthetic oligonucleotide
guacaacaaggaugucgga

SEQ ID NO: 1983903 - RNA, 19 nt, Artificial Sequence
  Description of Artificial Sequence: Synthetic oligonucleotide
caaauucauccagcaucug

SEQ ID NO: 1983904 - RNA, 19 nt, Artificial Sequence
  Description of Artificial Sequence: Synthetic oligonucleotide
uguagcguuguggcccaaa

SEQ ID NO: 1983905 - RNA, 19 nt, Artificial Sequence
  Description of Artificial Sequence: Synthetic oligonucleotide
uccccacgcugcucucagg

SEQ ID NO: 1983906 - RNA, 19 nt, Artificial Sequence
  Description of Artificial Sequence: Synthetic oligonucleotide
ccauggugcuugaaccgcc

SEQ ID NO: 1983907 - RNA, 19 nt, Artificial Sequence
  Description of Artificial Sequence: Synthetic oligonucleotide
caacaagccucaggagaac

SEQ ID NO: 1983908 - RNA, 19 nt, Artificial Sequence
  Description of Artificial Sequence: Synthetic oligonucleotide
ugaguaugccaagcagcuu

SEQ ID NO: 1983909 - RNA, 19 nt, Artificial Sequence
  Description of Artificial Sequence: Synthetic oligonucleotide
cucugguaaguaucggccu

SEQ ID NO: 1983910 - RNA, 19 nt, Artificial Sequence
  Description of Artificial Sequence: Synthetic oligonucleotide
caggagaacgacaggugcu

SEQ ID NO: 1983911 - RNA, 19 nt, Artificial Sequence
  Description of Artificial Sequence: Synthetic oligonucleotide
aucacggauguagggcagu

SEQ ID NO: 1983912 - RNA, 19 nt, Artificial Sequence
  Description of Artificial Sequence: Synthetic oligonucleotide
gucccaucccguucgccuc

SEQ ID NO: 1983913 - RNA, 19 nt, Artificial Sequence
  Description of Artificial Sequence: Synthetic oligonucleotide
ugacucguuuggccacauc

SEQ ID NO: 1983914 - RNA, 19 nt, Artificial Sequence
  Description of Artificial Sequence: Synthetic oligonucleotide
gugcccuagguuggcaaug

SEQ ID NO: 1983915 - RNA, 19 nt, Artificial Sequence
  Description of Artificial Sequence: Synthetic oligonucleotide
uucugccgucccaucccgu

SEQ ID NO: 1983916 - RNA, 19 nt, Artificial Sequence
  Description of Artificial Sequence: Synthetic oligonucleotide
auccagagggaaccuucuu

SEQ ID NO: 1983917 - RNA, 19 nt, Artificial Sequence
  Description of Artificial Sequence: Synthetic oligonucleotide
agcccaacucugaggccac

SEQ ID NO: 1983918 - RNA, 19 nt, Artificial Sequence
  Description of Artificial Sequence: Synthetic oligonucleotide
aggcacagggauccagguu

SEQ ID NO: 1983919 - RNA, 19 nt, Artificial Sequence
  Description of Artificial Sequence: Synthetic oligonucleotide
guuggcaauguagcguugu

SEQ ID NO: 1983920 - RNA, 19 nt, Artificial Sequence
  Description of Artificial Sequence: Synthetic oligonucleotide
gcaccaaacgggaguguag

SEQ ID NO: 1983921 - RNA, 19 nt, Artificial Sequence
  Description of Artificial Sequence: Synthetic oligonucleotide
gccauggugcuugaaccgc

SEQ ID NO: 1983922 - RNA, 19 nt, Artificial Sequence
  Description of Artificial Sequence: Synthetic oligonucleotide
cggaaaauucugccguccc

SEQ ID NO: 1983923 - RNA, 19 nt, Artificial Sequence
  Description of Artificial Sequence: Synthetic oligonucleotide
ucgcuuggccugagccaug

SEQ ID NO: 1983924 - RNA, 19 nt, Artificial Sequence
  Description of Artificial Sequence: Synthetic oligonucleotide
ccuauuagauaggggacca

SEQ ID NO: 1983925 - RNA, 19 nt, Artificial Sequence
  Description of Artificial Sequence: Synthetic oligonucleotide
accgucuuccccacacgcu

SEQ ID NO: 1983926 - RNA, 19 nt, Artificial Sequence
  Description of Artificial Sequence: Synthetic oligonucleotide
guaugccaagcagcuugug

SEQ ID NO: 1983927 - RNA, 19 nt, Artificial Sequence
  Description of Artificial Sequence: Synthetic oligonucleotide
gcaugcaccaaacgggagu

SEQ ID NO: 1983928 - RNA, 19 nt, Artificial Sequence
  Description of Artificial Sequence: Synthetic oligonucleotide
ccggaaaauucugccgucc

SEQ ID NO: 1983929 - RNA, 19 nt, Artificial Sequence
  Description of Artificial Sequence: Synthetic oligonucleotide
guagcguuguggcccaaau

SEQ ID NO: 1983930 - RNA, 19 nt, Artificial Sequence
  Description of Artificial Sequence: Synthetic oligonucleotide
cugccgucccaucccguuc

SEQ ID NO: 1983931 - RNA, 19 nt, Artificial Sequence
  Description of Artificial Sequence: Synthetic oligonucleotide
gggauccagguuccccugc

SEQ ID NO: 1983932 - RNA, 19 nt, Artificial Sequence
  Description of Artificial Sequence: Synthetic oligonucleotide
ccauggucaccuccaugcc

SEQ ID NO: 1983933 - RNA, 19 nt, Artificial Sequence
  Description of Artificial Sequence: Synthetic oligonucleotide
ugcuugucgcaugcaccaa

SEQ ID NO: 1983934 - RNA, 19 nt, Artificial Sequence
  Description of Artificial Sequence: Synthetic oligonucleotide
guucgccuccaugguaaac

SEQ ID NO: 1983935 - RNA, 19 nt, Artificial Sequence
  Description of Artificial Sequence: Synthetic oligonucleotide
ccgucuuccccacacgcuc

SEQ ID NO: 1983936 - RNA, 19 nt, Artificial Sequence
  Description of Artificial Sequence: Synthetic oligonucleotide
cugcaccagucgaccaauc

SEQ ID NO: 1983937 - RNA, 19 nt, Artificial Sequence
  Description of Artificial Sequence: Synthetic oligonucleotide
gacuggccuguggucuuug

SEQ ID NO: 1983938 - RNA, 19 nt, Artificial Sequence
  Description of Artificial Sequence: Synthetic oligonucleotide
ccgggcuuucuuuggugcc

SEQ ID NO: 1983939 - RNA, 19 nt, Artificial Sequence
  Description of Artificial Sequence: Synthetic oligonucleotide
guuuggccacaucacggau

SEQ ID NO: 1983940 - RNA, 19 nt, Artificial Sequence
  Description of Artificial Sequence: Synthetic oligonucleotide
uugacucguuuggccacau

SEQ ID NO: 1983941 - RNA, 19 nt, Artificial Sequence
  Description of Artificial Sequence: Synthetic oligonucleotide
caccaaacgggaguguagu

SEQ ID NO: 1983942 - RNA, 19 nt, Artificial Sequence
  Description of Artificial Sequence: Synthetic oligonucleotide
gcuugucgcaugcaccaaa

SEQ ID NO: 1983943 - RNA, 19 nt, Artificial Sequence
  Description of Artificial Sequence: Synthetic oligonucleotide
ccauguaugucaucagggu

SEQ ID NO: 1983944 - RNA, 19 nt, Artificial Sequence
  Description of Artificial Sequence: Synthetic oligonucleotide
augucaggauaaagcccgu

SEQ ID NO: 1983945 - RNA, 19 nt, Artificial Sequence
  Description of Artificial Sequence: Synthetic oligonucleotide
gcuccuacauguucugggu

SEQ ID NO: 1983946 - RNA, 19 nt, Artificial Sequence
  Description of Artificial Sequence: Synthetic oligonucleotide
gcccuaguuucccuaaacu

SEQ ID NO: 1983947 - RNA, 19 nt, Artificial Sequence
  Description of Artificial Sequence: Synthetic oligonucleotide
gugauggcuuggaaaacau

SEQ ID NO: 1983948 - RNA, 19 nt, Artificial Sequence
  Description of Artificial Sequence: Synthetic oligonucleotide
cuugaaccgccacccucaa

SEQ ID NO: 1983949 - RNA, 19 nt, Artificial Sequence
  Description of Artificial Sequence: Synthetic oligonucleotide
cugcaaggucaccgucuuc

SEQ ID NO: 1983950 - RNA, 19 nt, Artificial Sequence
  Description of Artificial Sequence: Synthetic oligonucleotide
ccacggagcaccagcaaaa

SEQ ID NO: 1983951 - RNA, 19 nt, Artificial Sequence
  Description of Artificial Sequence: Synthetic oligonucleotide
gagccaucgcuuggccuga

SEQ ID NO: 1983952 - RNA, 19 nt, Artificial Sequence
  Description of Artificial Sequence: Synthetic oligonucleotide
ggauaaagcccgugcccua

SEQ ID NO: 1983953 - RNA, 19 nt, Artificial Sequence
  Description of Artificial Sequence: Synthetic oligonucleotide
ggcacuggugccagaccug

SEQ ID NO: 1983954 - RNA, 19 nt, Artificial Sequence
  Description of Artificial Sequence: Synthetic oligonucleotide
cagguaccauggucaccuc

SEQ ID NO: 1983955 - RNA, 19 nt, Artificial Sequence
  Description of Artificial Sequence: Synthetic oligonucleotide
gcagcccuaguuucccuaa

SEQ ID NO: 1983956 - RNA, 19 nt, Artificial Sequence
  Description of Artificial Sequence: Synthetic oligonucleotide
agcuugugacuggccugug

SEQ ID NO: 1983957 - RNA, 19 nt, Artificial Sequence
  Description of Artificial Sequence: Synthetic oligonucleotide
cguuuggccacaucacgga

SEQ ID NO: 1983958 - RNA, 19 nt, Artificial Sequence
  Description of Artificial Sequence: Synthetic oligonucleotide
ggaguguagucuguuuccu

SEQ ID NO: 1983959 - RNA, 19 nt, Artificial Sequence
  Description of Artificial Sequence: Synthetic oligonucleotide
ccguucgccuccaugguaa

SEQ ID NO: 1983960 - RNA, 19 nt, Artificial Sequence
  Description of Artificial Sequence: Synthetic oligonucleotide
ggagaacgacaggugcuga

SEQ ID NO: 1983961 - RNA, 19 nt, Artificial Sequence
  Description of Artificial Sequence: Synthetic oligonucleotide
agcagccacuuguccuauu

SEQ ID NO: 1983962 - RNA, 19 nt, Artificial Sequence
  Description of Artificial Sequence: Synthetic oligonucleotide
gccugggguacaacaagga

SEQ ID NO: 1983963 - RNA, 19 nt, Artificial Sequence
  Description of Artificial Sequence: Synthetic oligonucleotide
guaccauggucaccuccau

SEQ ID NO: 1983964 - RNA, 19 nt, Artificial Sequence
  Description of Artificial Sequence: Synthetic oligonucleotide
cccaacucugaggccacug

SEQ ID NO: 1983965 - RNA, 19 nt, Artificial Sequence
  Description of Artificial Sequence: Synthetic oligonucleotide
acgcugcucucaggaacgu

SEQ ID NO: 1983966 - RNA, 19 nt, Artificial Sequence
  Description of Artificial Sequence: Synthetic oligonucleotide
gccuguggucuuugguaga

SEQ ID NO: 1983967 - RNA, 19 nt, Artificial Sequence
  Description of Artificial Sequence: Synthetic oligonucleotide
gccaucgcuuggccugagc

SEQ ID NO: 1983968 - RNA, 19 nt, Artificial Sequence
  Description of Artificial Sequence: Synthetic oligonucleotide
cacgcccagccagcuguug

SEQ ID NO: 1983969 - RNA, 19 nt, Artificial Sequence
  Description of Artificial Sequence: Synthetic oligonucleotide
guugucgaguaagggugau

SEQ ID NO: 1983970 - RNA, 19 nt, Artificial Sequence
  Description of Artificial Sequence: Synthetic oligonucleotide
cagcccuaguuucccuaaa

SEQ ID NO: 1983971 - RNA, 19 nt, Artificial Sequence
  Description of Artificial Sequence: Synthetic oligonucleotide
agccaucgcuuggccugag

SEQ ID NO: 1983972 - RNA, 19 nt, Artificial Sequence
  Description of Artificial Sequence: Synthetic oligonucleotide
caugggcacuggugccaga

SEQ ID NO: 1983973 - RNA, 19 nt, Artificial Sequence
  Description of Artificial Sequence: Synthetic oligonucleotide
caagcccaacuaccucaua

SEQ ID NO: 1983974 - RNA, 19 nt, Artificial Sequence
  Description of Artificial Sequence: Synthetic oligonucleotide
cacacgcucccgggcuuuc

SEQ ID NO: 1983975 - RNA, 19 nt, Artificial Sequence
  Description of Artificial Sequence: Synthetic oligonucleotide
cccuaaacucugguaagua

SEQ ID NO: 1983976 - RNA, 19 nt, Artificial Sequence
  Description of Artificial Sequence: Synthetic oligonucleotide
cagccagcuguugucgagu

SEQ ID NO: 1983977 - RNA, 19 nt, Artificial Sequence
  Description of Artificial Sequence: Synthetic oligonucleotide
ccugggguacaacaaggau

SEQ ID NO: 1983978 - RNA, 19 nt, Artificial Sequence
  Description of Artificial Sequence: Synthetic oligonucleotide
cuggguccuuuaccaggua

SEQ ID NO: 1983979 - RNA, 19 nt, Artificial Sequence
  Description of Artificial Sequence: Synthetic oligonucleotide
gccagcuguugucgaguaa

SEQ ID NO: 1983980 - RNA, 19 nt, Artificial Sequence
  Description of Artificial Sequence: Synthetic oligonucleotide
cagcccagccuugacucgu

SEQ ID NO: 1983981 - RNA, 19 nt, Artificial Sequence
  Description of Artificial Sequence: Synthetic oligonucleotide
gccgucccaucccguucgc

SEQ ID NO: 1983982 - RNA, 19 nt, Artificial Sequence
  Description of Artificial Sequence: Synthetic oligonucleotide
cagguccuucucuucucuu

SEQ ID NO: 1983983 - RNA, 19 nt, Artificial Sequence
  Description of Artificial Sequence: Synthetic oligonucleotide
cugagccauggugcuugaa

SEQ ID NO: 1983984 - RNA, 19 nt, Artificial Sequence
  Description of Artificial Sequence: Synthetic oligonucleotide
agcccagccuugacucguu

SEQ ID NO: 1983985 - RNA, 19 nt, Artificial Sequence
  Description of Artificial Sequence: Synthetic oligonucleotide
cgucccaucccguucgccu

SEQ ID NO: 1983986 - RNA, 19 nt, Artificial Sequence
  Description of Artificial Sequence: Synthetic oligonucleotide
cguuguggcccaaauucau

SEQ ID NO: 1983987 - RNA, 19 nt, Artificial Sequence
  Description of Artificial Sequence: Synthetic oligonucleotide
ccuuagcaaagaugaucau

SEQ ID NO: 1983988 - RNA, 19 nt, Artificial Sequence
  Description of Artificial Sequence: Synthetic oligonucleotide
ccgugcccuagguuggcaa

SEQ ID NO: 1983989 - RNA, 19 nt, Artificial Sequence
  Description of Artificial Sequence: Synthetic oligonucleotide
acacgcccagccagcuguu

SEQ ID NO: 1983990 - RNA, 19 nt, Artificial Sequence
  Description of Artificial Sequence: Synthetic oligonucleotide
auguagcguuguggcccaa

SEQ ID NO: 1983991 - RNA, 19 nt, Artificial Sequence
  Description of Artificial Sequence: Synthetic oligonucleotide
cuacauguucuggguccau

SEQ ID NO: 1983992 - RNA, 19 nt, Artificial Sequence
  Description of Artificial Sequence: Synthetic oligonucleotide
ccgucccaucccguucgcc

SEQ ID NO: 1983993 - RNA, 19 nt, Artificial Sequence
  Description of Artificial Sequence: Synthetic oligonucleotide
cacgcucccgggcuuucuu

SEQ ID NO: 1983994 - RNA, 19 nt, Artificial Sequence
  Description of Artificial Sequence: Synthetic oligonucleotide
cccguucgccuccauggua

SEQ ID NO: 1983995 - RNA, 19 nt, Artificial Sequence
  Description of Artificial Sequence: Synthetic oligonucleotide
gcccgugcccuagguuggc

SEQ ID NO: 1983996 - RNA, 19 nt, Artificial Sequence
  Description of Artificial Sequence: Synthetic oligonucleotide
ccccacacgcucccgggcu

SEQ ID NO: 1983997 - RNA, 19 nt, Artificial Sequence
  Description of Artificial Sequence: Synthetic oligonucleotide
cguucgccuccaugguaaa

SEQ ID NO: 1983998 - RNA, 19 nt, Artificial Sequence
  Description of Artificial Sequence: Synthetic oligonucleotide
cgugcccuagguuggcaau

SEQ ID NO: 1983999 - RNA, 19 nt, Artificial Sequence
  Description of Artificial Sequence: Synthetic oligonucleotide
cccgugcccuagguuggca

SEQ ID NO: 1984000 - RNA, 19 nt, Artificial Sequence
  Description of Artificial Sequence: Synthetic oligonucleotide
ccagagcaucagugaguau

SEQ ID NO: 1984001 - RNA, 19 nt, Artificial Sequence
  Description of Artificial Sequence: Synthetic oligonucleotide
cccaucccguucgccucca

SEQ ID NO: 1984002 - RNA, 19 nt, Artificial Sequence
  Description of Artificial Sequence: Synthetic oligonucleotide
gcccagccuugacucguuu

SEQ ID NO: 1984003 - RNA, 19 nt, Artificial Sequence
  Description of Artificial Sequence: Synthetic oligonucleotide
cccacacgcucccgggcuu

SEQ ID NO: 1984004 - RNA, 19 nt, Artificial Sequence
  Description of Artificial Sequence: Synthetic oligonucleotide
ccacacgcucccgggcuuu

SEQ ID NO: 1984005 - RNA, 19 nt, Artificial Sequence
  Description of Artificial Sequence: Synthetic oligonucleotide
ccaucccguucgccuccau

SEQ ID NO: 1984006 - RNA, 19 nt, Artificial Sequence
  Description of Artificial Sequence: Synthetic oligonucleotide
ugugcaucagcaaagaggg

SEQ ID NO: 1984007 - RNA, 19 nt, Artificial Sequence
  Description of Artificial Sequence: Synthetic oligonucleotide
uauucuuccauguuuacug

SEQ ID NO: 1984008 - RNA, 19 nt, Artificial Sequence
  Description of Artificial Sequence: Synthetic oligonucleotide
aaagagggaagccucauca

SEQ ID NO: 1984009 - RNA, 19 nt, Artificial Sequence
  Description of Artificial Sequence: Synthetic oligonucleotide
aucguagggauauucuucc

SEQ ID NO: 1984010 - RNA, 19 nt, Artificial Sequence
  Description of Artificial Sequence: Synthetic oligonucleotide
aaguggacaugguugcugc

SEQ ID NO: 1984011 - RNA, 19 nt, Artificial Sequence
  Description of Artificial Sequence: Synthetic oligonucleotide
aaugauugaggugugcauc

SEQ ID NO: 1984012 - RNA, 19 nt, Artificial Sequence
  Description of Artificial Sequence: Synthetic oligonucleotide
uuagcuucaauacuccgca

SEQ ID NO: 1984013 - RNA, 19 nt, Artificial Sequence
  Description of Artificial Sequence: Synthetic oligonucleotide
uacagcguugccuagagca

SEQ ID NO: 1984014 - RNA, 19 nt, Artificial Sequence
  Description of Artificial Sequence: Synthetic oligonucleotide
uguuuacugucucaggcag

SEQ ID NO: 1984015 - RNA, 19 nt, Artificial Sequence
  Description of Artificial Sequence: Synthetic oligonucleotide
aauacuccgcaucguaggg

SEQ ID NO: 1984016 - RNA, 19 nt, Artificial Sequence
  Description of Artificial Sequence: Synthetic oligonucleotide
cauguuuacugucucaggc

SEQ ID NO: 1984017 - RNA, 19 nt, Artificial Sequence
  Description of Artificial Sequence: Synthetic oligonucleotide
uccacgaaaguggacaugg

SEQ ID NO: 1984018 - RNA, 19 nt, Artificial Sequence
  Description of Artificial Sequence: Synthetic oligonucleotide
aauggcacaccagaaauga

SEQ ID NO: 1984019 - RNA, 19 nt, Artificial Sequence
  Description of Artificial Sequence: Synthetic oligonucleotide
uacugucucaggcagcagg

SEQ ID NO: 1984020 - RNA, 19 nt, Artificial Sequence
  Description of Artificial Sequence: Synthetic oligonucleotide
ucaauacuccgcaucguag

SEQ ID NO: 1984021 - RNA, 19 nt, Artificial Sequence
  Description of Artificial Sequence: Synthetic oligonucleotide
aaaccuuccugagagagca

SEQ ID NO: 1984022 - RNA, 19 nt, Artificial Sequence
  Description of Artificial Sequence: Synthetic oligonucleotide
uuaaguacagcguugccua

SEQ ID NO: 1984023 - RNA, 19 nt, Artificial Sequence
  Description of Artificial Sequence: Synthetic oligonucleotide
uuuaaguacagcguugccu

SEQ ID NO: 1984024 - RNA, 19 nt, Artificial Sequence
  Description of Artificial Sequence: Synthetic oligonucleotide
uagagcaugacaucaggca

SEQ ID NO: 1984025 - RNA, 19 nt, Artificial Sequence
  Description of Artificial Sequence: Synthetic oligonucleotide
auuuaaguacagcguugcc

SEQ ID NO: 1984026 - RNA, 19 nt, Artificial Sequence
  Description of Artificial Sequence: Synthetic oligonucleotide
caugguugcugccaaaacc

SEQ ID NO: 1984027 - RNA, 19 nt, Artificial Sequence
  Description of Artificial Sequence: Synthetic oligonucleotide
gauuuaaguacagcguugc

SEQ ID NO: 1984028 - RNA, 19 nt, Artificial Sequence
  Description of Artificial Sequence: Synthetic oligonucleotide
uuccugagagagcagaugu

SEQ ID NO: 1984029 - RNA, 19 nt, Artificial Sequence
  Description of Artificial Sequence: Synthetic oligonucleotide
gugugcaucagcaaagagg

SEQ ID NO: 1984030 - RNA, 19 nt, Artificial Sequence
  Description of Artificial Sequence: Synthetic oligonucleotide
agagggaagccucaucagg

SEQ ID NO: 1984031 - RNA, 19 nt, Artificial Sequence
  Description of Artificial Sequence: Synthetic oligonucleotide
aaaaccuuccugagagagc

SEQ ID NO: 1984032 - RNA, 19 nt, Artificial Sequence
  Description of Artificial Sequence: Synthetic oligonucleotide
gcaggcuuggcucaaaugg

SEQ ID NO: 1984033 - RNA, 19 nt, Artificial Sequence
  Description of Artificial Sequence: Synthetic oligonucleotide
caauacuccgcaucguagg

SEQ ID NO: 1984034 - RNA, 19 nt, Artificial Sequence
  Description of Artificial Sequence: Synthetic oligonucleotide
aaaugauugaggugugcau

SEQ ID NO: 1984035 - RNA, 19 nt, Artificial Sequence
  Description of Artificial Sequence: Synthetic oligonucleotide
ucaaauggcacaccagaaa

SEQ ID NO: 1984036 - RNA, 19 nt, Artificial Sequence
  Description of Artificial Sequence: Synthetic oligonucleotide
agcuucaauacuccgcauc

SEQ ID NO: 1984037 - RNA, 19 nt, Artificial Sequence
  Description of Artificial Sequence: Synthetic oligonucleotide
ugaggugugcaucagcaaa

SEQ ID NO: 1984038 - RNA, 19 nt, Artificial Sequence
  Description of Artificial Sequence: Synthetic oligonucleotide
aguuagcuucaauacuccg

SEQ ID NO: 1984039 - RNA, 19 nt, Artificial Sequence
  Description of Artificial Sequence: Synthetic oligonucleotide
uuuacugucucaggcagca

SEQ ID NO: 1984040 - RNA, 19 nt, Artificial Sequence
  Description of Artificial Sequence: Synthetic oligonucleotide
uccauguuuacugucucag

SEQ ID NO: 1984041 - RNA, 19 nt, Artificial Sequence
  Description of Artificial Sequence: Synthetic oligonucleotide
gccaaaaccuuccugagag

SEQ ID NO: 1984042 - RNA, 19 nt, Artificial Sequence
  Description of Artificial Sequence: Synthetic oligonucleotide
caucaggcgaguuagcuuc

SEQ ID NO: 1984043 - RNA, 19 nt, Artificial Sequence
  Description of Artificial Sequence: Synthetic oligonucleotide
cuagagcaugacaucaggc

SEQ ID NO: 1984044 - RNA, 19 nt, Artificial Sequence
  Description of Artificial Sequence: Synthetic oligonucleotide
aagagggaagccucaucag

SEQ ID NO: 1984045 - RNA, 19 nt, Artificial Sequence
  Description of Artificial Sequence: Synthetic oligonucleotide
caaaaccuuccugagagag

SEQ ID NO: 1984046 - RNA, 19 nt, Artificial Sequence
  Description of Artificial Sequence: Synthetic oligonucleotide
ugcaucagcaaagagggaa

SEQ ID NO: 1984047 - RNA, 19 nt, Artificial Sequence
  Description of Artificial Sequence: Synthetic oligonucleotide
aaaguggacaugguugcug

SEQ ID NO: 1984048 - RNA, 19 nt, Artificial Sequence
  Description of Artificial Sequence: Synthetic oligonucleotide
guagggauauucuuccaug

SEQ ID NO: 1984049 - RNA, 19 nt, Artificial Sequence
  Description of Artificial Sequence: Synthetic oligonucleotide
gcuucaauacuccgcaucg

SEQ ID NO: 1984050 - RNA, 19 nt, Artificial Sequence
  Description of Artificial Sequence: Synthetic oligonucleotide
acgaaaguggacaugguug

SEQ ID NO: 1984051 - RNA, 19 nt, Artificial Sequence
  Description of Artificial Sequence: Synthetic oligonucleotide
guuagcuucaauacuccgc

SEQ ID NO: 1984052 - RNA, 19 nt, Artificial Sequence
  Description of Artificial Sequence: Synthetic oligonucleotide
aguacagcguugccuagag

SEQ ID NO: 1984053 - RNA, 19 nt, Artificial Sequence
  Description of Artificial Sequence: Synthetic oligonucleotide
aucagcaaagagggaagcc

SEQ ID NO: 1984054 - RNA, 19 nt, Artificial Sequence
  Description of Artificial Sequence: Synthetic oligonucleotide
augauugaggugugcauca

SEQ ID NO: 1984055 - RNA, 19 nt, Artificial Sequence
  Description of Artificial Sequence: Synthetic oligonucleotide
agaaaugauugaggugugc

SEQ ID NO: 1984056 - RNA, 19 nt, Artificial Sequence
  Description of Artificial Sequence: Synthetic oligonucleotide
gaaaugauugaggugugca

SEQ ID NO: 1984057 - RNA, 19 nt, Artificial Sequence
  Description of Artificial Sequence: Synthetic oligonucleotide
acaugguugcugccaaaac

SEQ ID NO: 1984058 - RNA, 19 nt, Artificial Sequence
  Description of Artificial Sequence: Synthetic oligonucleotide
cacaccagaaaugauugag

SEQ ID NO: 1984059 - RNA, 19 nt, Artificial Sequence
  Description of Artificial Sequence: Synthetic oligonucleotide
uucaauacuccgcaucgua

SEQ ID NO: 1984060 - RNA, 19 nt, Artificial Sequence
  Description of Artificial Sequence: Synthetic oligonucleotide
caucguagggauauucuuc

SEQ ID NO: 1984061 - RNA, 19 nt, Artificial Sequence
  Description of Artificial Sequence: Synthetic oligonucleotide
auguuuacugucucaggca

SEQ ID NO: 1984062 - RNA, 19 nt, Artificial Sequence
  Description of Artificial Sequence: Synthetic oligonucleotide
cugagagagcagauguccg

SEQ ID NO: 1984063 - RNA, 19 nt, Artificial Sequence
  Description of Artificial Sequence: Synthetic oligonucleotide
agcaugacaucaggcaggc

SEQ ID NO: 1984064 - RNA, 19 nt, Artificial Sequence
  Description of Artificial Sequence: Synthetic oligonucleotide
uagggauauucuuccaugu

SEQ ID NO: 1984065 - RNA, 19 nt, Artificial Sequence
  Description of Artificial Sequence: Synthetic oligonucleotide
gauauucuuccauguuuac

SEQ ID NO: 1984066 - RNA, 19 nt, Artificial Sequence
  Description of Artificial Sequence: Synthetic oligonucleotide
accagaaaugauugaggug

SEQ ID NO: 1984067 - RNA, 19 nt, Artificial Sequence
  Description of Artificial Sequence: Synthetic oligonucleotide
gauugaggugugcaucagc

SEQ ID NO: 1984068 - RNA, 19 nt, Artificial Sequence
  Description of Artificial Sequence: Synthetic oligonucleotide
gagcaugacaucaggcagg

SEQ ID NO: 1984069 - RNA, 19 nt, Artificial Sequence
  Description of Artificial Sequence: Synthetic oligonucleotide
acugucucaggcagcaggc

SEQ ID NO: 1984070 - RNA, 19 nt, Artificial Sequence
  Description of Artificial Sequence: Synthetic oligonucleotide
aaauggcacaccagaaaug

SEQ ID NO: 1984071 - RNA, 19 nt, Artificial Sequence
  Description of Artificial Sequence: Synthetic oligonucleotide
guugcugccaaaaccuucc

SEQ ID NO: 1984072 - RNA, 19 nt, Artificial Sequence
  Description of Artificial Sequence: Synthetic oligonucleotide
acaccagaaaugauugagg

SEQ ID NO: 1984073 - RNA, 19 nt, Artificial Sequence
  Description of Artificial Sequence: Synthetic oligonucleotide
auugaggugugcaucagca

SEQ ID NO: 1984074 - RNA, 19 nt, Artificial Sequence
  Description of Artificial Sequence: Synthetic oligonucleotide
gagggaagccucaucaggc

SEQ ID NO: 1984075 - RNA, 19 nt, Artificial Sequence
  Description of Artificial Sequence: Synthetic oligonucleotide
uggcucaaauggcacacca

SEQ ID NO: 1984076 - RNA, 19 nt, Artificial Sequence
  Description of Artificial Sequence: Synthetic oligonucleotide
uggcacaccagaaaugauu

SEQ ID NO: 1984077 - RNA, 19 nt, Artificial Sequence
  Description of Artificial Sequence: Synthetic oligonucleotide
aguggacaugguugcugcc

SEQ ID NO: 1984078 - RNA, 19 nt, Artificial Sequence
  Description of Artificial Sequence: Synthetic oligonucleotide
gaggugugcaucagcaaag

SEQ ID NO: 1984079 - RNA, 19 nt, Artificial Sequence
  Description of Artificial Sequence: Synthetic oligonucleotide
augguugcugccaaaaccu

SEQ ID NO: 1984080 - RNA, 19 nt, Artificial Sequence
  Description of Artificial Sequence: Synthetic oligonucleotide
acaucaggcaggcuuggcu

SEQ ID NO: 1984081 - RNA, 19 nt, Artificial Sequence
  Description of Artificial Sequence: Synthetic oligonucleotide
caggcuuggcucaaauggc

SEQ ID NO: 1984082 - RNA, 19 nt, Artificial Sequence
  Description of Artificial Sequence: Synthetic oligonucleotide
ugccuagagcaugacauca

SEQ ID NO: 1984083 - RNA, 19 nt, Artificial Sequence
  Description of Artificial Sequence: Synthetic oligonucleotide
auauucuuccauguuuacu

SEQ ID NO: 1984084 - RNA, 19 nt, Artificial Sequence
  Description of Artificial Sequence: Synthetic oligonucleotide
gagacugccaggugcccag

SEQ ID NO: 1984085 - RNA, 19 nt, Artificial Sequence
  Description of Artificial Sequence: Synthetic oligonucleotide
ggcgaguuagcuucaauac

SEQ ID NO: 1984086 - RNA, 19 nt, Artificial Sequence
  Description of Artificial Sequence: Synthetic oligonucleotide
ugccaaaaccuuccugaga

SEQ ID NO: 1984087 - RNA, 19 nt, Artificial Sequence
  Description of Artificial Sequence: Synthetic oligonucleotide
gaguuagcuucaauacucc

SEQ ID NO: 1984088 - RNA, 19 nt, Artificial Sequence
  Description of Artificial Sequence: Synthetic oligonucleotide
aggcaggcccuccaguuuc

SEQ ID NO: 1984089 - RNA, 19 nt, Artificial Sequence
  Description of Artificial Sequence: Synthetic oligonucleotide
caucaggcaggcuuggcuc

SEQ ID NO: 1984090 - RNA, 19 nt, Artificial Sequence
  Description of Artificial Sequence: Synthetic oligonucleotide
uaaguacagcguugccuag

SEQ ID NO: 1984091 - RNA, 19 nt, Artificial Sequence
  Description of Artificial Sequence: Synthetic oligonucleotide
acgaugggcaucuuggcuu

SEQ ID NO: 1984092 - RNA, 19 nt, Artificial Sequence
  Description of Artificial Sequence: Synthetic oligonucleotide
uuccauguuuacugucuca

SEQ ID NO: 1984093 - RNA, 19 nt, Artificial Sequence
  Description of Artificial Sequence: Synthetic oligonucleotide
cuuggcucaaauggcacac

SEQ ID NO: 1984094 - RNA, 19 nt, Artificial Sequence
  Description of Artificial Sequence: Synthetic oligonucleotide
aggcgaguuagcuucaaua

SEQ ID NO: 1984095 - RNA, 19 nt, Artificial Sequence
  Description of Artificial Sequence: Synthetic oligonucleotide
ugcugccaaaaccuuccug

SEQ ID NO: 1984096 - RNA, 19 nt, Artificial Sequence
  Description of Artificial Sequence: Synthetic oligonucleotide
uccgugugcugguuaagga

SEQ ID NO: 1984097 - RNA, 19 nt, Artificial Sequence
  Description of Artificial Sequence: Synthetic oligonucleotide
cccacgaugggcaucuugg

SEQ ID NO: 1984098 - RNA, 19 nt, Artificial Sequence
  Description of Artificial Sequence: Synthetic oligonucleotide
uacuccgcaucguagggau

SEQ ID NO: 1984099 - RNA, 19 nt, Artificial Sequence
  Description of Artificial Sequence: Synthetic oligonucleotide
gagagagcagauguccgug

SEQ ID NO: 1984100 - RNA, 19 nt, Artificial Sequence
  Description of Artificial Sequence: Synthetic oligonucleotide
uccuugacuuggccugggg

SEQ ID NO: 1984101 - RNA, 19 nt, Artificial Sequence
  Description of Artificial Sequence: Synthetic oligonucleotide
gcagauguccgugugcugg

SEQ ID NO: 1984102 - RNA, 19 nt, Artificial Sequence
  Description of Artificial Sequence: Synthetic oligonucleotide
cugccaaaaccuuccugag

SEQ ID NO: 1984103 - RNA, 19 nt, Artificial Sequence
  Description of Artificial Sequence: Synthetic oligonucleotide
cagcaaagagggaagccuc

SEQ ID NO: 1984104 - RNA, 19 nt, Artificial Sequence
  Description of Artificial Sequence: Synthetic oligonucleotide
ggcacaccagaaaugauug

SEQ ID NO: 1984105 - RNA, 19 nt, Artificial Sequence
  Description of Artificial Sequence: Synthetic oligonucleotide
guugccuagagcaugacau

SEQ ID NO: 1984106 - RNA, 19 nt, Artificial Sequence
  Description of Artificial Sequence: Synthetic oligonucleotide
gcucaaauggcacaccaga

SEQ ID NO: 1984107 - RNA, 19 nt, Artificial Sequence
  Description of Artificial Sequence: Synthetic oligonucleotide
ucaucaggcgaguuagcuu

SEQ ID NO: 1984108 - RNA, 19 nt, Artificial Sequence
  Description of Artificial Sequence: Synthetic oligonucleotide
augacaucaggcaggcuug

SEQ ID NO: 1984109 - RNA, 19 nt, Artificial Sequence
  Description of Artificial Sequence: Synthetic oligonucleotide
cuuccauguuuacugucuc

SEQ ID NO: 1984110 - RNA, 19 nt, Artificial Sequence
  Description of Artificial Sequence: Synthetic oligonucleotide
agagagcagauguccgugu

SEQ ID NO: 1984111 - RNA, 19 nt, Artificial Sequence
  Description of Artificial Sequence: Synthetic oligonucleotide
cagaaaugauugaggugug

SEQ ID NO: 1984112 - RNA, 19 nt, Artificial Sequence
  Description of Artificial Sequence: Synthetic oligonucleotide
aaguacagcguugccuaga

SEQ ID NO: 1984113 - RNA, 19 nt, Artificial Sequence
  Description of Artificial Sequence: Synthetic oligonucleotide
cgaguuagcuucaauacuc

SEQ ID NO: 1984114 - RNA, 19 nt, Artificial Sequence
  Description of Artificial Sequence: Synthetic oligonucleotide
caucagcaaagagggaagc

SEQ ID NO: 1984115 - RNA, 19 nt, Artificial Sequence
  Description of Artificial Sequence: Synthetic oligonucleotide
ugauugaggugugcaucag

SEQ ID NO: 1984116 - RNA, 19 nt, Artificial Sequence
  Description of Artificial Sequence: Synthetic oligonucleotide
caugacaucaggcaggcuu

SEQ ID NO: 1984117 - RNA, 19 nt, Artificial Sequence
  Description of Artificial Sequence: Synthetic oligonucleotide
uccugagagagcagauguc

SEQ ID NO: 1984118 - RNA, 19 nt, Artificial Sequence
  Description of Artificial Sequence: Synthetic oligonucleotide
ggauuuaaguacagcguug

SEQ ID NO: 1984119 - RNA, 19 nt, Artificial Sequence
  Description of Artificial Sequence: Synthetic oligonucleotide
ccuagagcaugacaucagg

SEQ ID NO: 1984120 - RNA, 19 nt, Artificial Sequence
  Description of Artificial Sequence: Synthetic oligonucleotide
guccgugugcugguuaagg

SEQ ID NO: 1984121 - RNA, 19 nt, Artificial Sequence
  Description of Artificial Sequence: Synthetic oligonucleotide
cgaaaguggacaugguugc

SEQ ID NO: 1984122 - RNA, 19 nt, Artificial Sequence
  Description of Artificial Sequence: Synthetic oligonucleotide
ugacaucaggcaggcuugg

SEQ ID NO: 1984123 - RNA, 19 nt, Artificial Sequence
  Description of Artificial Sequence: Synthetic oligonucleotide
ccugagagagcagaugucc

SEQ ID NO: 1984124 - RNA, 19 nt, Artificial Sequence
  Description of Artificial Sequence: Synthetic oligonucleotide
ucucaggcagcaggcaggc

SEQ ID NO: 1984125 - RNA, 19 nt, Artificial Sequence
  Description of Artificial Sequence: Synthetic oligonucleotide
cucaaauggcacaccagaa

SEQ ID NO: 1984126 - RNA, 19 nt, Artificial Sequence
  Description of Artificial Sequence: Synthetic oligonucleotide
uugccuagagcaugacauc

SEQ ID NO: 1984127 - RNA, 19 nt, Artificial Sequence
  Description of Artificial Sequence: Synthetic oligonucleotide
uugaggugugcaucagcaa

SEQ ID NO: 1984128 - RNA, 19 nt, Artificial Sequence
  Description of Artificial Sequence: Synthetic oligonucleotide
agggauauucuuccauguu

SEQ ID NO: 1984129 - RNA, 19 nt, Artificial Sequence
  Description of Artificial Sequence: Synthetic oligonucleotide
cuuccugagagagcagaug

SEQ ID NO: 1984130 - RNA, 19 nt, Artificial Sequence
  Description of Artificial Sequence: Synthetic oligonucleotide
caccagaaaugauugaggu

SEQ ID NO: 1984131 - RNA, 19 nt, Artificial Sequence
  Description of Artificial Sequence: Synthetic oligonucleotide
caaagagggaagccucauc

SEQ ID NO: 1984132 - RNA, 19 nt, Artificial Sequence
  Description of Artificial Sequence: Synthetic oligonucleotide
ucguagggauauucuucca

SEQ ID NO: 1984133 - RNA, 19 nt, Artificial Sequence
  Description of Artificial Sequence: Synthetic oligonucleotide
ccagaaaugauugaggugu

SEQ ID NO: 1984134 - RNA, 19 nt, Artificial Sequence
  Description of Artificial Sequence: Synthetic oligonucleotide
gacaugguugcugccaaaa

SEQ ID NO: 1984135 - RNA, 19 nt, Artificial Sequence
  Description of Artificial Sequence: Synthetic oligonucleotide
ggugugcaucagcaaagag

SEQ ID NO: 1984136 - RNA, 19 nt, Artificial Sequence
  Description of Artificial Sequence: Synthetic oligonucleotide
guuuacugucucaggcagc

SEQ ID NO: 1984137 - RNA, 19 nt, Artificial Sequence
  Description of Artificial Sequence: Synthetic oligonucleotide
accuuccugagagagcaga

SEQ ID NO: 1984138 - RNA, 19 nt, Artificial Sequence
  Description of Artificial Sequence: Synthetic oligonucleotide
gccucaucaggcgaguuag

SEQ ID NO: 1984139 - RNA, 19 nt, Artificial Sequence
  Description of Artificial Sequence: Synthetic oligonucleotide
ccauguuuacugucucagg

SEQ ID NO: 1984140 - RNA, 19 nt, Artificial Sequence
  Description of Artificial Sequence: Synthetic oligonucleotide
auguccgugugcugguuaa

SEQ ID NO: 1984141 - RNA, 19 nt, Artificial Sequence
  Description of Artificial Sequence: Synthetic oligonucleotide
uuggcucaaauggcacacc

SEQ ID NO: 1984142 - RNA, 19 nt, Artificial Sequence
  Description of Artificial Sequence: Synthetic oligonucleotide
ugccaggugcccaggccca

SEQ ID NO: 1984143 - RNA, 19 nt, Artificial Sequence
  Description of Artificial Sequence: Synthetic oligonucleotide
uugcugccaaaaccuuccu

SEQ ID NO: 1984144 - RNA, 19 nt, Artificial Sequence
  Description of Artificial Sequence: Synthetic oligonucleotide
ggauauucuuccauguuua

SEQ ID NO: 1984145 - RNA, 19 nt, Artificial Sequence
  Description of Artificial Sequence: Synthetic oligonucleotide
ggaagccucaucaggcgag

SEQ ID NO: 1984146 - RNA, 19 nt, Artificial Sequence
  Description of Artificial Sequence: Synthetic oligonucleotide
ccgugugcugguuaaggag

SEQ ID NO: 1984147 - RNA, 19 nt, Artificial Sequence
  Description of Artificial Sequence: Synthetic oligonucleotide
agcaaagagggaagccuca

SEQ ID NO: 1984148 - RNA, 19 nt, Artificial Sequence
  Description of Artificial Sequence: Synthetic oligonucleotide
agcagauguccgugugcug

SEQ ID NO: 1984149 - RNA, 19 nt, Artificial Sequence
  Description of Artificial Sequence: Synthetic oligonucleotide
ugguugcugccaaaaccuu

SEQ ID NO: 1984150 - RNA, 19 nt, Artificial Sequence
  Description of Artificial Sequence: Synthetic oligonucleotide
agccucaucaggcgaguua

SEQ ID NO: 1984151 - RNA, 19 nt, Artificial Sequence
  Description of Artificial Sequence: Synthetic oligonucleotide
guggacaugguugcugcca

SEQ ID NO: 1984152 - RNA, 19 nt, Artificial Sequence
  Description of Artificial Sequence: Synthetic oligonucleotide
uguccgugugcugguuaag

SEQ ID NO: 1984153 - RNA, 19 nt, Artificial Sequence
  Description of Artificial Sequence: Synthetic oligonucleotide
auacuccgcaucguaggga

SEQ ID NO: 1984154 - RNA, 19 nt, Artificial Sequence
  Description of Artificial Sequence: Synthetic oligonucleotide
agcaggcaggcccuccagu

SEQ ID NO: 1984155 - RNA, 19 nt, Artificial Sequence
  Description of Artificial Sequence: Synthetic oligonucleotide
aggcuuggcucaaauggca

SEQ ID NO: 1984156 - RNA, 19 nt, Artificial Sequence
  Description of Artificial Sequence: Synthetic oligonucleotide
uuacugucucaggcagcag

SEQ ID NO: 1984157 - RNA, 19 nt, Artificial Sequence
  Description of Artificial Sequence: Synthetic oligonucleotide
gacaucaggcaggcuuggc

SEQ ID NO: 1984158 - RNA, 19 nt, Artificial Sequence
  Description of Artificial Sequence: Synthetic oligonucleotide
guacagcguugccuagagc

SEQ ID NO: 1984159 - RNA, 19 nt, Artificial Sequence
  Description of Artificial Sequence: Synthetic oligonucleotide
agcguugccuagagcauga

SEQ ID NO: 1984160 - RNA, 19 nt, Artificial Sequence
  Description of Artificial Sequence: Synthetic oligonucleotide
cagcguugccuagagcaug

SEQ ID NO: 1984161 - RNA, 19 nt, Artificial Sequence
  Description of Artificial Sequence: Synthetic oligonucleotide
aggcccacgaugggcaucu

SEQ ID NO: 1984162 - RNA, 19 nt, Artificial Sequence
  Description of Artificial Sequence: Synthetic oligonucleotide
uagcuucaauacuccgcau

SEQ ID NO: 1984163 - RNA, 19 nt, Artificial Sequence
  Description of Artificial Sequence: Synthetic oligonucleotide
aaccuuccugagagagcag

SEQ ID NO: 1984164 - RNA, 19 nt, Artificial Sequence
  Description of Artificial Sequence: Synthetic oligonucleotide
ggcucaaauggcacaccag

SEQ ID NO: 1984165 - RNA, 19 nt, Artificial Sequence
  Description of Artificial Sequence: Synthetic oligonucleotide
gguugcugccaaaaccuuc

SEQ ID NO: 1984166 - RNA, 19 nt, Artificial Sequence
  Description of Artificial Sequence: Synthetic oligonucleotide
acagcguugccuagagcau

SEQ ID NO: 1984167 - RNA, 19 nt, Artificial Sequence
  Description of Artificial Sequence: Synthetic oligonucleotide
cucaucaggcgaguuagcu

SEQ ID NO: 1984168 - RNA, 19 nt, Artificial Sequence
  Description of Artificial Sequence: Synthetic oligonucleotide
ggggagacugccaggugcc

SEQ ID NO: 1984169 - RNA, 19 nt, Artificial Sequence
  Description of Artificial Sequence: Synthetic oligonucleotide
gaaaguggacaugguugcu

SEQ ID NO: 1984170 - RNA, 19 nt, Artificial Sequence
  Description of Artificial Sequence: Synthetic oligonucleotide
gccuagagcaugacaucag

SEQ ID NO: 1984171 - RNA, 19 nt, Artificial Sequence
  Description of Artificial Sequence: Synthetic oligonucleotide
ccacgaugggcaucuuggc

SEQ ID NO: 1984172 - RNA, 19 nt, Artificial Sequence
  Description of Artificial Sequence: Synthetic oligonucleotide
gggaagccucaucaggcga

SEQ ID NO: 1984173 - RNA, 19 nt, Artificial Sequence
  Description of Artificial Sequence: Synthetic oligonucleotide
gcgaguuagcuucaauacu

SEQ ID NO: 1984174 - RNA, 19 nt, Artificial Sequence
  Description of Artificial Sequence: Synthetic oligonucleotide
cacgaaaguggacaugguu

SEQ ID NO: 1984175 - RNA, 19 nt, Artificial Sequence
  Description of Artificial Sequence: Synthetic oligonucleotide
agacugccaggugcccagg

SEQ ID NO: 1984176 - RNA, 19 nt, Artificial Sequence
  Description of Artificial Sequence: Synthetic oligonucleotide
ucaggcgaguuagcuucaa

SEQ ID NO: 1984177 - RNA, 19 nt, Artificial Sequence
  Description of Artificial Sequence: Synthetic oligonucleotide
ucaggcaggcuuggcucaa

SEQ ID NO: 1984178 - RNA, 19 nt, Artificial Sequence
  Description of Artificial Sequence: Synthetic oligonucleotide
ggcuuggcucaaauggcac

SEQ ID NO: 1984179 - RNA, 19 nt, Artificial Sequence
  Description of Artificial Sequence: Synthetic oligonucleotide
aagccucaucaggcgaguu

SEQ ID NO: 1984180 - RNA, 19 nt, Artificial Sequence
  Description of Artificial Sequence: Synthetic oligonucleotide
aucaggcgaguuagcuuca

SEQ ID NO: 1984181 - RNA, 19 nt, Artificial Sequence
  Description of Artificial Sequence: Synthetic oligonucleotide
auggcacaccagaaaugau

SEQ ID NO: 1984182 - RNA, 19 nt, Artificial Sequence
  Description of Artificial Sequence: Synthetic oligonucleotide
gcacaccagaaaugauuga

SEQ ID NO: 1984183 - RNA, 19 nt, Artificial Sequence
  Description of Artificial Sequence: Synthetic oligonucleotide
gagcuccacgaaaguggac

SEQ ID NO: 1984184 - RNA, 19 nt, Artificial Sequence
  Description of Artificial Sequence: Synthetic oligonucleotide
gaagccucaucaggcgagu

SEQ ID NO: 1984185 - RNA, 19 nt, Artificial Sequence
  Description of Artificial Sequence: Synthetic oligonucleotide
gcccacgaugggcaucuug

SEQ ID NO: 1984186 - RNA, 19 nt, Artificial Sequence
  Description of Artificial Sequence: Synthetic oligonucleotide
ccucaucaggcgaguuagc

SEQ ID NO: 1984187 - RNA, 19 nt, Artificial Sequence
  Description of Artificial Sequence: Synthetic oligonucleotide
gcaucguagggauauucuu

SEQ ID NO: 1984188 - RNA, 19 nt, Artificial Sequence
  Description of Artificial Sequence: Synthetic oligonucleotide
cuccgcaucguagggauau

SEQ ID NO: 1984189 - RNA, 19 nt, Artificial Sequence
  Description of Artificial Sequence: Synthetic oligonucleotide
cuucaauacuccgcaucgu

SEQ ID NO: 1984190 - RNA, 19 nt, Artificial Sequence
  Description of Artificial Sequence: Synthetic oligonucleotide
ggagacugccaggugccca

SEQ ID NO: 1984191 - RNA, 19 nt, Artificial Sequence
  Description of Artificial Sequence: Synthetic oligonucleotide
cugucucaggcagcaggca

SEQ ID NO: 1984192 - RNA, 19 nt, Artificial Sequence
  Description of Artificial Sequence: Synthetic oligonucleotide
cagauguccgugugcuggu

SEQ ID NO: 1984193 - RNA, 19 nt, Artificial Sequence
  Description of Artificial Sequence: Synthetic oligonucleotide
agauguccgugugcugguu

SEQ ID NO: 1984194 - RNA, 19 nt, Artificial Sequence
  Description of Artificial Sequence: Synthetic oligonucleotide
ccaaaaccuuccugagaga

SEQ ID NO: 1984195 - RNA, 19 nt, Artificial Sequence
  Description of Artificial Sequence: Synthetic oligonucleotide
uccgcaucguagggauauu

SEQ ID NO: 1984196 - RNA, 19 nt, Artificial Sequence
  Description of Artificial Sequence: Synthetic oligonucleotide
gugcaucagcaaagaggga

SEQ ID NO: 1984197 - RNA, 19 nt, Artificial Sequence
  Description of Artificial Sequence: Synthetic oligonucleotide
ccgcaucguagggauauuc

SEQ ID NO: 1984198 - RNA, 19 nt, Artificial Sequence
  Description of Artificial Sequence: Synthetic oligonucleotide
gggagacugccaggugccc

SEQ ID NO: 1984199 - RNA, 19 nt, Artificial Sequence
  Description of Artificial Sequence: Synthetic oligonucleotide
cguugccuagagcaugaca

SEQ ID NO: 1984200 - RNA, 19 nt, Artificial Sequence
  Description of Artificial Sequence: Synthetic oligonucleotide
cgcaucguagggauauucu

SEQ ID NO: 1984201 - RNA, 19 nt, Artificial Sequence
  Description of Artificial Sequence: Synthetic oligonucleotide
cguagggauauucuuccau

SEQ ID NO: 1984202 - RNA, 19 nt, Artificial Sequence
  Description of Artificial Sequence: Synthetic oligonucleotide
caggcgaguuagcuucaau

SEQ ID NO: 1984203 - RNA, 19 nt, Artificial Sequence
  Description of Artificial Sequence: Synthetic oligonucleotide
gcaaagagggaagccucau

SEQ ID NO: 1984204 - RNA, 19 nt, Artificial Sequence
  Description of Artificial Sequence: Synthetic oligonucleotide
acuccgcaucguagggaua

SEQ ID NO: 1984205 - RNA, 19 nt, Artificial Sequence
  Description of Artificial Sequence: Synthetic oligonucleotide
ccuuccugagagagcagau

SEQ ID NO: 1984206 - RNA, 19 nt, Artificial Sequence
  Description of Artificial Sequence: Synthetic oligonucleotide
caggcaggcccuccaguuu

SEQ ID NO: 1984207 - RNA, 19 nt, Artificial Sequence
  Description of Artificial Sequence: Synthetic oligonucleotide
gcguugccuagagcaugac

SEQ ID NO: 1984208 - RNA, 19 nt, Artificial Sequence
  Description of Artificial Sequence: Synthetic oligonucleotide
ccacgaaaguggacauggu

SEQ ID NO: 1984209 - RNA, 19 nt, Artificial Sequence
  Description of Artificial Sequence: Synthetic oligonucleotide
ggcaggcccuccaguuucu

SEQ ID NO: 1984210 - RNA, 19 nt, Artificial Sequence
  Description of Artificial Sequence: Synthetic oligonucleotide
cgaugggcaucuuggcuuu

SEQ ID NO: 1984211 - RNA, 19 nt, Artificial Sequence
  Description of Artificial Sequence: Synthetic oligonucleotide
gcaugacaucaggcaggcu

SEQ ID NO: 1984212 - RNA, 19 nt, Artificial Sequence
  Description of Artificial Sequence: Synthetic oligonucleotide
ggcccacgaugggcaucuu

SEQ ID NO: 1984213 - RNA, 19 nt, Artificial Sequence
  Description of Artificial Sequence: Synthetic oligonucleotide
gauaucuuaaaucccacgg

SEQ ID NO: 1984214 - RNA, 19 nt, Artificial Sequence
  Description of Artificial Sequence: Synthetic oligonucleotide
aucaucauaauaaagggcc

SEQ ID NO: 1984215 - RNA, 19 nt, Artificial Sequence
  Description of Artificial Sequence: Synthetic oligonucleotide
auaauaaagggccagcagg

SEQ ID NO: 1984216 - RNA, 19 nt, Artificial Sequence
  Description of Artificial Sequence: Synthetic oligonucleotide
uuauuaagcaucaucauaa

SEQ ID NO: 1984217 - RNA, 19 nt, Artificial Sequence
  Description of Artificial Sequence: Synthetic oligonucleotide
gaagcgauacauuugaacc

SEQ ID NO: 1984218 - RNA, 19 nt, Artificial Sequence
  Description of Artificial Sequence: Synthetic oligonucleotide
gaaccuauuaaugagacag

SEQ ID NO: 1984219 - RNA, 19 nt, Artificial Sequence
  Description of Artificial Sequence: Synthetic oligonucleotide
agcaggaguacucaggucc

SEQ ID NO: 1984220 - RNA, 19 nt, Artificial Sequence
  Description of Artificial Sequence: Synthetic oligonucleotide
caaaguuggagacugaagg

SEQ ID NO: 1984221 - RNA, 19 nt, Artificial Sequence
  Description of Artificial Sequence: Synthetic oligonucleotide
aaggcuggaauuauuaagc

SEQ ID NO: 1984222 - RNA, 19 nt, Artificial Sequence
  Description of Artificial Sequence: Synthetic oligonucleotide
aaaguuggagacugaaggg

SEQ ID NO: 1984223 - RNA, 19 nt, Artificial Sequence
  Description of Artificial Sequence: Synthetic oligonucleotide
aaagucagugcaaacgucc

SEQ ID NO: 1984224 - RNA, 19 nt, Artificial Sequence
  Description of Artificial Sequence: Synthetic oligonucleotide
ugaaaagucagugcaaacg

SEQ ID NO: 1984225 - RNA, 19 nt, Artificial Sequence
  Description of Artificial Sequence: Synthetic oligonucleotide
aauacucagccuuaaucuc

SEQ ID NO: 1984226 - RNA, 19 nt, Artificial Sequence
  Description of Artificial Sequence: Synthetic oligonucleotide
aagagaaguacguuggaug

SEQ ID NO: 1984227 - RNA, 19 nt, Artificial Sequence
  Description of Artificial Sequence: Synthetic oligonucleotide
gaauuauuaagcaucauca

SEQ ID NO: 1984228 - RNA, 19 nt, Artificial Sequence
  Description of Artificial Sequence: Synthetic oligonucleotide
aaggaagagaaguacguug

SEQ ID NO: 1984229 - RNA, 19 nt, Artificial Sequence
  Description of Artificial Sequence: Synthetic oligonucleotide
agagaaguacguuggaugg

SEQ ID NO: 1984230 - RNA, 19 nt, Artificial Sequence
  Description of Artificial Sequence: Synthetic oligonucleotide
uaucuuaaaucccacggug

SEQ ID NO: 1984231 - RNA, 19 nt, Artificial Sequence
  Description of Artificial Sequence: Synthetic oligonucleotide
aaauccacuccuauggugg

SEQ ID NO: 1984232 - RNA, 19 nt, Artificial Sequence
  Description of Artificial Sequence: Synthetic oligonucleotide
auaauccucacucuucagg

SEQ ID NO: 1984233 - RNA, 19 nt, Artificial Sequence
  Description of Artificial Sequence: Synthetic oligonucleotide
uaauaaagggccagcaggc

SEQ ID NO: 1984234 - RNA, 19 nt, Artificial Sequence
  Description of Artificial Sequence: Synthetic oligonucleotide
uuggauaucuuaaauccca

SEQ ID NO: 1984235 - RNA, 19 nt, Artificial Sequence
  Description of Artificial Sequence: Synthetic oligonucleotide
uccauuagggaauacugag

SEQ ID NO: 1984236 - RNA, 19 nt, Artificial Sequence
  Description of Artificial Sequence: Synthetic oligonucleotide
aagagacuagcaugguccc

SEQ ID NO: 1984237 - RNA, 19 nt, Artificial Sequence
  Description of Artificial Sequence: Synthetic oligonucleotide
uaaugcauaaggcacagua

SEQ ID NO: 1984238 - RNA, 19 nt, Artificial Sequence
  Description of Artificial Sequence: Synthetic oligonucleotide
aauucccggacauucucac

SEQ ID NO: 1984239 - RNA, 19 nt, Artificial Sequence
  Description of Artificial Sequence: Synthetic oligonucleotide
uucuggauaauccucacuc

SEQ ID NO: 1984240 - RNA, 19 nt, Artificial Sequence
  Description of Artificial Sequence: Synthetic oligonucleotide
aaaucguuccaucucaaaa

SEQ ID NO: 1984241 - RNA, 19 nt, Artificial Sequence
  Description of Artificial Sequence: Synthetic oligonucleotide
ucuccauuagggaauacug

SEQ ID NO: 1984242 - RNA, 19 nt, Artificial Sequence
  Description of Artificial Sequence: Synthetic oligonucleotide
agccuuaaucucuugggcc

SEQ ID NO: 1984243 - RNA, 19 nt, Artificial Sequence
  Description of Artificial Sequence: Synthetic oligonucleotide
ucagccuuaaucucuuggg

SEQ ID NO: 1984244 - RNA, 19 nt, Artificial Sequence
  Description of Artificial Sequence: Synthetic oligonucleotide
acaacgaugaccuuggaua

SEQ ID NO: 1984245 - RNA, 19 nt, Artificial Sequence
  Description of Artificial Sequence: Synthetic oligonucleotide
agugcaaacguccaggggu

SEQ ID NO: 1984246 - RNA, 19 nt, Artificial Sequence
  Description of Artificial Sequence: Synthetic oligonucleotide
auaaggcacaguauaaggc

SEQ ID NO: 1984247 - RNA, 19 nt, Artificial Sequence
  Description of Artificial Sequence: Synthetic oligonucleotide
aauuauuaagcaucaucau

SEQ ID NO: 1984248 - RNA, 19 nt, Artificial Sequence
  Description of Artificial Sequence: Synthetic oligonucleotide
ucuuaaaucccacggugcc

SEQ ID NO: 1984249 - RNA, 19 nt, Artificial Sequence
  Description of Artificial Sequence: Synthetic oligonucleotide
aaucccacggugccugucc

SEQ ID NO: 1984250 - RNA, 19 nt, Artificial Sequence
  Description of Artificial Sequence: Synthetic oligonucleotide
aaguuggagacugaagggg

SEQ ID NO: 1984251 - RNA, 19 nt, Artificial Sequence
  Description of Artificial Sequence: Synthetic oligonucleotide
uuugcgcacgugcaaagcg

SEQ ID NO: 1984252 - RNA, 19 nt, Artificial Sequence
  Description of Artificial Sequence: Synthetic oligonucleotide
auacauuugaaccucuccu

SEQ ID NO: 1984253 - RNA, 19 nt, Artificial Sequence
  Description of Artificial Sequence: Synthetic oligonucleotide
caacacuucaaaucguucc

SEQ ID NO: 1984254 - RNA, 19 nt, Artificial Sequence
  Description of Artificial Sequence: Synthetic oligonucleotide
accuuggauaucuuaaauc

SEQ ID NO: 1984255 - RNA, 19 nt, Artificial Sequence
  Description of Artificial Sequence: Synthetic oligonucleotide
aacacuucaaaucguucca

SEQ ID NO: 1984256 - RNA, 19 nt, Artificial Sequence
  Description of Artificial Sequence: Synthetic oligonucleotide
acgucauucagguugaaga

SEQ ID NO: 1984257 - RNA, 19 nt, Artificial Sequence
  Description of Artificial Sequence: Synthetic oligonucleotide
uauaaggcuggaauuauua

SEQ ID NO: 1984258 - RNA, 19 nt, Artificial Sequence
  Description of Artificial Sequence: Synthetic oligonucleotide
aauccacuccuaugguggc

SEQ ID NO: 1984259 - RNA, 19 nt, Artificial Sequence
  Description of Artificial Sequence: Synthetic oligonucleotide
uugaauucugaaguugggg

SEQ ID NO: 1984260 - RNA, 19 nt, Artificial Sequence
  Description of Artificial Sequence: Synthetic oligonucleotide
cacccaacacuucaaaucg

SEQ ID NO: 1984261 - RNA, 19 nt, Artificial Sequence
  Description of Artificial Sequence: Synthetic oligonucleotide
agggguugaauucugaagu

SEQ ID NO: 1984262 - RNA, 19 nt, Artificial Sequence
  Description of Artificial Sequence: Synthetic oligonucleotide
auuauuaagcaucaucaua

SEQ ID NO: 1984263 - RNA, 19 nt, Artificial Sequence
  Description of Artificial Sequence: Synthetic oligonucleotide
aagcgauacauuugaaccu

SEQ ID NO: 1984264 - RNA, 19 nt, Artificial Sequence
  Description of Artificial Sequence: Synthetic oligonucleotide
gauggcuugagcuccucgg

SEQ ID NO: 1984265 - RNA, 19 nt, Artificial Sequence
  Description of Artificial Sequence: Synthetic oligonucleotide
ccuuggauaucuuaaaucc

SEQ ID NO: 1984266 - RNA, 19 nt, Artificial Sequence
  Description of Artificial Sequence: Synthetic oligonucleotide
ugguauguuccaaggaugc

SEQ ID NO: 1984267 - RNA, 19 nt, Artificial Sequence
  Description of Artificial Sequence: Synthetic oligonucleotide
augaugauggcuugagcuc

SEQ ID NO: 1984268 - RNA, 19 nt, Artificial Sequence
  Description of Artificial Sequence: Synthetic oligonucleotide
gaauucugaaguuggggug

SEQ ID NO: 1984269 - RNA, 19 nt, Artificial Sequence
  Description of Artificial Sequence: Synthetic oligonucleotide
uacauuugaaccucuccug

SEQ ID NO: 1984270 - RNA, 19 nt, Artificial Sequence
  Description of Artificial Sequence: Synthetic oligonucleotide
cuuggauaucuuaaauccc

SEQ ID NO: 1984271 - RNA, 19 nt, Artificial Sequence
  Description of Artificial Sequence: Synthetic oligonucleotide
auuaaugagacaggucuuc

SEQ ID NO: 1984272 - RNA, 19 nt, Artificial Sequence
  Description of Artificial Sequence: Synthetic oligonucleotide
acugccuucaaggggaagc

SEQ ID NO: 1984273 - RNA, 19 nt, Artificial Sequence
  Description of Artificial Sequence: Synthetic oligonucleotide
aucauaauaaagggccagc

SEQ ID NO: 1984274 - RNA, 19 nt, Artificial Sequence
  Description of Artificial Sequence: Synthetic oligonucleotide
acaacaucuccaaugcgcc

SEQ ID NO: 1984275 - RNA, 19 nt, Artificial Sequence
  Description of Artificial Sequence: Synthetic oligonucleotide
aauacugagcaggaguacu

SEQ ID NO: 1984276 - RNA, 19 nt, Artificial Sequence
  Description of Artificial Sequence: Synthetic oligonucleotide
gacacugcccaauacucag

SEQ ID NO: 1984277 - RNA, 19 nt, Artificial Sequence
  Description of Artificial Sequence: Synthetic oligonucleotide
uaagcaucaucauaauaaa

SEQ ID NO: 1984278 - RNA, 19 nt, Artificial Sequence
  Description of Artificial Sequence: Synthetic oligonucleotide
aaggaugccacgucauuca

SEQ ID NO: 1984279 - RNA, 19 nt, Artificial Sequence
  Description of Artificial Sequence: Synthetic oligonucleotide
gaggaguacaggaucaucc

SEQ ID NO: 1984280 - RNA, 19 nt, Artificial Sequence
  Description of Artificial Sequence: Synthetic oligonucleotide
auaucuuaaaucccacggu

SEQ ID NO: 1984281 - RNA, 19 nt, Artificial Sequence
  Description of Artificial Sequence: Synthetic oligonucleotide
cauaauaaagggccagcag

SEQ ID NO: 1984282 - RNA, 19 nt, Artificial Sequence
  Description of Artificial Sequence: Synthetic oligonucleotide
acauucucaccagugaggg

SEQ ID NO: 1984283 - RNA, 19 nt, Artificial Sequence
  Description of Artificial Sequence: Synthetic oligonucleotide
uucccggacauucucacca

SEQ ID NO: 1984284 - RNA, 19 nt, Artificial Sequence
  Description of Artificial Sequence: Synthetic oligonucleotide
cauggucccaguuacacuc

SEQ ID NO: 1984285 - RNA, 19 nt, Artificial Sequence
  Description of Artificial Sequence: Synthetic oligonucleotide
cauuagggaauacugagca

SEQ ID NO: 1984286 - RNA, 19 nt, Artificial Sequence
  Description of Artificial Sequence: Synthetic oligonucleotide
ucagugcaaacguccaggg

SEQ ID NO: 1984287 - RNA, 19 nt, Artificial Sequence
  Description of Artificial Sequence: Synthetic oligonucleotide
aucuuaaaucccacggugc

SEQ ID NO: 1984288 - RNA, 19 nt, Artificial Sequence
  Description of Artificial Sequence: Synthetic oligonucleotide
gaagaauucccggacauuc

SEQ ID NO: 1984289 - RNA, 19 nt, Artificial Sequence
  Description of Artificial Sequence: Synthetic oligonucleotide
uuuaucgaaggugucuuug

SEQ ID NO: 1984290 - RNA, 19 nt, Artificial Sequence
  Description of Artificial Sequence: Synthetic oligonucleotide
ugaugcgaacaacaucucc

SEQ ID NO: 1984291 - RNA, 19 nt, Artificial Sequence
  Description of Artificial Sequence: Synthetic oligonucleotide
uuaucgaaggugucuuugc

SEQ ID NO: 1984292 - RNA, 19 nt, Artificial Sequence
  Description of Artificial Sequence: Synthetic oligonucleotide
ggaauuauuaagcaucauc

SEQ ID NO: 1984293 - RNA, 19 nt, Artificial Sequence
  Description of Artificial Sequence: Synthetic oligonucleotide
uucaaggggaagcucuuug

SEQ ID NO: 1984294 - RNA, 19 nt, Artificial Sequence
  Description of Artificial Sequence: Synthetic oligonucleotide
guugggguggcacaguacc

SEQ ID NO: 1984295 - RNA, 19 nt, Artificial Sequence
  Description of Artificial Sequence: Synthetic oligonucleotide
aaguacguuggauggguca

SEQ ID NO: 1984296 - RNA, 19 nt, Artificial Sequence
  Description of Artificial Sequence: Synthetic oligonucleotide
uccaucucaaaauccacuc

SEQ ID NO: 1984297 - RNA, 19 nt, Artificial Sequence
  Description of Artificial Sequence: Synthetic oligonucleotide
aggaagagaaguacguugg

SEQ ID NO: 1984298 - RNA, 19 nt, Artificial Sequence
  Description of Artificial Sequence: Synthetic oligonucleotide
cagaaccuauuaaugagac

SEQ ID NO: 1984299 - RNA, 19 nt, Artificial Sequence
  Description of Artificial Sequence: Synthetic oligonucleotide
acacggaagaagaauuccc

SEQ ID NO: 1984300 - RNA, 19 nt, Artificial Sequence
  Description of Artificial Sequence: Synthetic oligonucleotide
ucauaauaaagggccagca

SEQ ID NO: 1984301 - RNA, 19 nt, Artificial Sequence
  Description of Artificial Sequence: Synthetic oligonucleotide
guugaugcgaacaacaucu

SEQ ID NO: 1984302 - RNA, 19 nt, Artificial Sequence
  Description of Artificial Sequence: Synthetic oligonucleotide
cuagcauggucccaguuac

SEQ ID NO: 1984303 - RNA, 19 nt, Artificial Sequence
  Description of Artificial Sequence: Synthetic oligonucleotide
uguugaugcgaacaacauc

SEQ ID NO: 1984304 - RNA, 19 nt, Artificial Sequence
  Description of Artificial Sequence: Synthetic oligonucleotide
ucaagcucagccaggacau

SEQ ID NO: 1984305 - RNA, 19 nt, Artificial Sequence
  Description of Artificial Sequence: Synthetic oligonucleotide
uuggucugaaaagucagug

SEQ ID NO: 1984306 - RNA, 19 nt, Artificial Sequence
  Description of Artificial Sequence: Synthetic oligonucleotide
gaaaagucagugcaaacgu

SEQ ID NO: 1984307 - RNA, 19 nt, Artificial Sequence
  Description of Artificial Sequence: Synthetic oligonucleotide
cucgguaguagguggaagc

SEQ ID NO: 1984308 - RNA, 19 nt, Artificial Sequence
  Description of Artificial Sequence: Synthetic oligonucleotide
aggaucauccagucuuugg

SEQ ID NO: 1984309 - RNA, 19 nt, Artificial Sequence
  Description of Artificial Sequence: Synthetic oligonucleotide
cuugagugcaucagcgagc

SEQ ID NO: 1984310 - RNA, 19 nt, Artificial Sequence
  Description of Artificial Sequence: Synthetic oligonucleotide
uugcgcacgugcaaagcgg

SEQ ID NO: 1984311 - RNA, 19 nt, Artificial Sequence
  Description of Artificial Sequence: Synthetic oligonucleotide
ugcauaaggcacaguauaa

SEQ ID NO: 1984312 - RNA, 19 nt, Artificial Sequence
  Description of Artificial Sequence: Synthetic oligonucleotide
uaucgaaggugucuuugca

SEQ ID NO: 1984313 - RNA, 19 nt, Artificial Sequence
  Description of Artificial Sequence: Synthetic oligonucleotide
gaacccacaaggaagagaa

SEQ ID NO: 1984314 - RNA, 19 nt, Artificial Sequence
  Description of Artificial Sequence: Synthetic oligonucleotide
uguccggugcuccuggcag

SEQ ID NO: 1984315 - RNA, 19 nt, Artificial Sequence
  Description of Artificial Sequence: Synthetic oligonucleotide
aaccuauuaaugagacagg

SEQ ID NO: 1984316 - RNA, 19 nt, Artificial Sequence
  Description of Artificial Sequence: Synthetic oligonucleotide
agcauggucccaguuacac

SEQ ID NO: 1984317 - RNA, 19 nt, Artificial Sequence
  Description of Artificial Sequence: Synthetic oligonucleotide
uuggcauggugccaugggc

SEQ ID NO: 1984318 - RNA, 19 nt, Artificial Sequence
  Description of Artificial Sequence: Synthetic oligonucleotide
agcgauacauuugaaccuc

SEQ ID NO: 1984319 - RNA, 19 nt, Artificial Sequence
  Description of Artificial Sequence: Synthetic oligonucleotide
auuagggaauacugagcag

SEQ ID NO: 1984320 - RNA, 19 nt, Artificial Sequence
  Description of Artificial Sequence: Synthetic oligonucleotide
gucccaguuacacucuggg

SEQ ID NO: 1984321 - RNA, 19 nt, Artificial Sequence
  Description of Artificial Sequence: Synthetic oligonucleotide
augcauaaggcacaguaua

SEQ ID NO: 1984322 - RNA, 19 nt, Artificial Sequence
  Description of Artificial Sequence: Synthetic oligonucleotide
acaguauaaggcuggaauu

SEQ ID NO: 1984323 - RNA, 19 nt, Artificial Sequence
  Description of Artificial Sequence: Synthetic oligonucleotide
cugagcaggaguacucagg

SEQ ID NO: 1984324 - RNA, 19 nt, Artificial Sequence
  Description of Artificial Sequence: Synthetic oligonucleotide
ggaucauccagucuuuggc

SEQ ID NO: 1984325 - RNA, 19 nt, Artificial Sequence
  Description of Artificial Sequence: Synthetic oligonucleotide
ggucaaugcugccacacgg

SEQ ID NO: 1984326 - RNA, 19 nt, Artificial Sequence
  Description of Artificial Sequence: Synthetic oligonucleotide
gaagaagaauucccggaca

SEQ ID NO: 1984327 - RNA, 19 nt, Artificial Sequence
  Description of Artificial Sequence: Synthetic oligonucleotide
ucuggauaauccucacucu

SEQ ID NO: 1984328 - RNA, 19 nt, Artificial Sequence
  Description of Artificial Sequence: Synthetic oligonucleotide
uggauaucuuaaaucccac

SEQ ID NO: 1984329 - RNA, 19 nt, Artificial Sequence
  Description of Artificial Sequence: Synthetic oligonucleotide
ucaccagugagggaggaca

SEQ ID NO: 1984330 - RNA, 19 nt, Artificial Sequence
  Description of Artificial Sequence: Synthetic oligonucleotide
gaugccacgucauucaggu

SEQ ID NO: 1984331 - RNA, 19 nt, Artificial Sequence
  Description of Artificial Sequence: Synthetic oligonucleotide
auuaagcaucaucauaaua

SEQ ID NO: 1984332 - RNA, 19 nt, Artificial Sequence
  Description of Artificial Sequence: Synthetic oligonucleotide
ggauaucuuaaaucccacg

SEQ ID NO: 1984333 - RNA, 19 nt, Artificial Sequence
  Description of Artificial Sequence: Synthetic oligonucleotide
ugauggcuugagcuccucg

SEQ ID NO: 1984334 - RNA, 19 nt, Artificial Sequence
  Description of Artificial Sequence: Synthetic oligonucleotide
guugaauucugaaguuggg

SEQ ID NO: 1984335 - RNA, 19 nt, Artificial Sequence
  Description of Artificial Sequence: Synthetic oligonucleotide
aaugcauaaggcacaguau

SEQ ID NO: 1984336 - RNA, 19 nt, Artificial Sequence
  Description of Artificial Sequence: Synthetic oligonucleotide
ucagcgagccacugcuugg

SEQ ID NO: 1984337 - RNA, 19 nt, Artificial Sequence
  Description of Artificial Sequence: Synthetic oligonucleotide
acuguugaugcgaacaaca

SEQ ID NO: 1984338 - RNA, 19 nt, Artificial Sequence
  Description of Artificial Sequence: Synthetic oligonucleotide
guggaagcgauacauuuga

SEQ ID NO: 1984339 - RNA, 19 nt, Artificial Sequence
  Description of Artificial Sequence: Synthetic oligonucleotide
uggcauggugccaugggca

SEQ ID NO: 1984340 - RNA, 19 nt, Artificial Sequence
  Description of Artificial Sequence: Synthetic oligonucleotide
ucuuugcgcacgugcaaag

SEQ ID NO: 1984341 - RNA, 19 nt, Artificial Sequence
  Description of Artificial Sequence: Synthetic oligonucleotide
uaguagguggaagcgauac

SEQ ID NO: 1984342 - RNA, 19 nt, Artificial Sequence
  Description of Artificial Sequence: Synthetic oligonucleotide
uucuccauuagggaauacu

SEQ ID NO: 1984343 - RNA, 19 nt, Artificial Sequence
  Description of Artificial Sequence: Synthetic oligonucleotide
uauuaagcaucaucauaau

SEQ ID NO: 1984344 - RNA, 19 nt, Artificial Sequence
  Description of Artificial Sequence: Synthetic oligonucleotide
aggacacugcccaauacuc

SEQ ID NO: 1984345 - RNA, 19 nt, Artificial Sequence
  Description of Artificial Sequence: Synthetic oligonucleotide
uccuucuuggaacccacaa

SEQ ID NO: 1984346 - RNA, 19 nt, Artificial Sequence
  Description of Artificial Sequence: Synthetic oligonucleotide
cuggaauuauuaagcauca

SEQ ID NO: 1984347 - RNA, 19 nt, Artificial Sequence
  Description of Artificial Sequence: Synthetic oligonucleotide
aucagcgagccacugcuug

SEQ ID NO: 1984348 - RNA, 19 nt, Artificial Sequence
  Description of Artificial Sequence: Synthetic oligonucleotide
ggaagcgauacauuugaac

SEQ ID NO: 1984349 - RNA, 19 nt, Artificial Sequence
  Description of Artificial Sequence: Synthetic oligonucleotide
acuagcauggucccaguua

SEQ ID NO: 1984350 - RNA, 19 nt, Artificial Sequence
  Description of Artificial Sequence: Synthetic oligonucleotide
agaaguacguuggaugggu

SEQ ID NO: 1984351 - RNA, 19 nt, Artificial Sequence
  Description of Artificial Sequence: Synthetic oligonucleotide
ggaagaagaauucccggac

SEQ ID NO: 1984352 - RNA, 19 nt, Artificial Sequence
  Description of Artificial Sequence: Synthetic oligonucleotide
gagaaguacguuggauggg

SEQ ID NO: 1984353 - RNA, 19 nt, Artificial Sequence
  Description of Artificial Sequence: Synthetic oligonucleotide
cagccuuaaucucuugggc

SEQ ID NO: 1984354 - RNA, 19 nt, Artificial Sequence
  Description of Artificial Sequence: Synthetic oligonucleotide
aaugggcaguuucuggaua

SEQ ID NO: 1984355 - RNA, 19 nt, Artificial Sequence
  Description of Artificial Sequence: Synthetic oligonucleotide
ucaaaucguuccaucucaa

SEQ ID NO: 1984356 - RNA, 19 nt, Artificial Sequence
  Description of Artificial Sequence: Synthetic oligonucleotide
agguggaagcgauacauuu

SEQ ID NO: 1984357 - RNA, 19 nt, Artificial Sequence
  Description of Artificial Sequence: Synthetic oligonucleotide
cacacggaagaagaauucc

SEQ ID NO: 1984358 - RNA, 19 nt, Artificial Sequence
  Description of Artificial Sequence: Synthetic oligonucleotide
aacgaugaccuuggauauc

SEQ ID NO: 1984359 - RNA, 19 nt, Artificial Sequence
  Description of Artificial Sequence: Synthetic oligonucleotide
cauccagucuuuggcaugg

SEQ ID NO: 1984360 - RNA, 19 nt, Artificial Sequence
  Description of Artificial Sequence: Synthetic oligonucleotide
agaaccuauuaaugagaca

SEQ ID NO: 1984361 - RNA, 19 nt, Artificial Sequence
  Description of Artificial Sequence: Synthetic oligonucleotide
guauguuccaaggaugcca

SEQ ID NO: 1984362 - RNA, 19 nt, Artificial Sequence
  Description of Artificial Sequence: Synthetic oligonucleotide
cugagcaaaagcagcacga

SEQ ID NO: 1984363 - RNA, 19 nt, Artificial Sequence
  Description of Artificial Sequence: Synthetic oligonucleotide
acgaacacugacacucccc

SEQ ID NO: 1984364 - RNA, 19 nt, Artificial Sequence
  Description of Artificial Sequence: Synthetic oligonucleotide
acauuggccucaaagguca

SEQ ID NO: 1984365 - RNA, 19 nt, Artificial Sequence
  Description of Artificial Sequence: Synthetic oligonucleotide
acgaugaccuuggauaucu

SEQ ID NO: 1984366 - RNA, 19 nt, Artificial Sequence
  Description of Artificial Sequence: Synthetic oligonucleotide
aggcuggaauuauuaagca

SEQ ID NO: 1984367 - RNA, 19 nt, Artificial Sequence
  Description of Artificial Sequence: Synthetic oligonucleotide
ugcgcacgugcaaagcggc

SEQ ID NO: 1984368 - RNA, 19 nt, Artificial Sequence
  Description of Artificial Sequence: Synthetic oligonucleotide
uggccucaaaggucaaugc

SEQ ID NO: 1984369 - RNA, 19 nt, Artificial Sequence
  Description of Artificial Sequence: Synthetic oligonucleotide
uccagucuuuggcauggug

SEQ ID NO: 1984370 - RNA, 19 nt, Artificial Sequence
  Description of Artificial Sequence: Synthetic oligonucleotide
ccaauacucagccuuaauc

SEQ ID NO: 1984371 - RNA, 19 nt, Artificial Sequence
  Description of Artificial Sequence: Synthetic oligonucleotide
aaggggacacccaacacuu

SEQ ID NO: 1984372 - RNA, 19 nt, Artificial Sequence
  Description of Artificial Sequence: Synthetic oligonucleotide
caacaucuccaaugcgccg

SEQ ID NO: 1984373 - RNA, 19 nt, Artificial Sequence
  Description of Artificial Sequence: Synthetic oligonucleotide
aucauccagucuuuggcau

SEQ ID NO: 1984374 - RNA, 19 nt, Artificial Sequence
  Description of Artificial Sequence: Synthetic oligonucleotide
gacgcggucccuccucacg

SEQ ID NO: 1984375 - RNA, 19 nt, Artificial Sequence
  Description of Artificial Sequence: Synthetic oligonucleotide
aguauaaggcuggaauuau

SEQ ID NO: 1984376 - RNA, 19 nt, Artificial Sequence
  Description of Artificial Sequence: Synthetic oligonucleotide
cgaacaacaucuccaaugc

SEQ ID NO: 1984377 - RNA, 19 nt, Artificial Sequence
  Description of Artificial Sequence: Synthetic oligonucleotide
cuuugcagaaccuauuaau

SEQ ID NO: 1984378 - RNA, 19 nt, Artificial Sequence
  Description of Artificial Sequence: Synthetic oligonucleotide
auacucagccuuaaucucu

SEQ ID NO: 1984379 - RNA, 19 nt, Artificial Sequence
  Description of Artificial Sequence: Synthetic oligonucleotide
augaccuuggauaucuuaa

SEQ ID NO: 1984380 - RNA, 19 nt, Artificial Sequence
  Description of Artificial Sequence: Synthetic oligonucleotide
uugaaccucuccugcccag

SEQ ID NO: 1984381 - RNA, 19 nt, Artificial Sequence
  Description of Artificial Sequence: Synthetic oligonucleotide
gaaggugucuuugcagaac

SEQ ID NO: 1984382 - RNA, 19 nt, Artificial Sequence
  Description of Artificial Sequence: Synthetic oligonucleotide
cuccauuagggaauacuga

SEQ ID NO: 1984383 - RNA, 19 nt, Artificial Sequence
  Description of Artificial Sequence: Synthetic oligonucleotide
uccgccaggacgcgguccc

SEQ ID NO: 1984384 - RNA, 19 nt, Artificial Sequence
  Description of Artificial Sequence: Synthetic oligonucleotide
ggaguacaggaucauccag

SEQ ID NO: 1984385 - RNA, 19 nt, Artificial Sequence
  Description of Artificial Sequence: Synthetic oligonucleotide
ggauaauccucacucuuca

SEQ ID NO: 1984386 - RNA, 19 nt, Artificial Sequence
  Description of Artificial Sequence: Synthetic oligonucleotide
ugagcaaaagcagcacgaa

SEQ ID NO: 1984387 - RNA, 19 nt, Artificial Sequence
  Description of Artificial Sequence: Synthetic oligonucleotide
acgcggucccuccucacgg

SEQ ID NO: 1984388 - RNA, 19 nt, Artificial Sequence
  Description of Artificial Sequence: Synthetic oligonucleotide
augcgaacaacaucuccaa

SEQ ID NO: 1984389 - RNA, 19 nt, Artificial Sequence
  Description of Artificial Sequence: Synthetic oligonucleotide
acugaaggggacacccaac

SEQ ID NO: 1984390 - RNA, 19 nt, Artificial Sequence
  Description of Artificial Sequence: Synthetic oligonucleotide
gaauacugagcaggaguac

SEQ ID NO: 1984391 - RNA, 19 nt, Artificial Sequence
  Description of Artificial Sequence: Synthetic oligonucleotide
ggaaugggcaguuucugga

SEQ ID NO: 1984392 - RNA, 19 nt, Artificial Sequence
  Description of Artificial Sequence: Synthetic oligonucleotide
cacaguauaaggcuggaau

SEQ ID NO: 1984393 - RNA, 19 nt, Artificial Sequence
  Description of Artificial Sequence: Synthetic oligonucleotide
augggcaguuucuggauaa

SEQ ID NO: 1984394 - RNA, 19 nt, Artificial Sequence
  Description of Artificial Sequence: Synthetic oligonucleotide
cuugguauguuccaaggau

SEQ ID NO: 1984395 - RNA, 19 nt, Artificial Sequence
  Description of Artificial Sequence: Synthetic oligonucleotide
aaaucccacggugccuguc

SEQ ID NO: 1984396 - RNA, 19 nt, Artificial Sequence
  Description of Artificial Sequence: Synthetic oligonucleotide
aggaguacucagguccuuc

SEQ ID NO: 1984397 - RNA, 19 nt, Artificial Sequence
  Description of Artificial Sequence: Synthetic oligonucleotide
uuuuaucgaaggugucuuu

SEQ ID NO: 1984398 - RNA, 19 nt, Artificial Sequence
  Description of Artificial Sequence: Synthetic oligonucleotide
ccauuagggaauacugagc

SEQ ID NO: 1984399 - RNA, 19 nt, Artificial Sequence
  Description of Artificial Sequence: Synthetic oligonucleotide
aggaugccacgucauucag

SEQ ID NO: 1984400 - RNA, 19 nt, Artificial Sequence
  Description of Artificial Sequence: Synthetic oligonucleotide
gacugaaggggacacccaa

SEQ ID NO: 1984401 - RNA, 19 nt, Artificial Sequence
  Description of Artificial Sequence: Synthetic oligonucleotide
ugcuggcaguuagauagag

SEQ ID NO: 1984402 - RNA, 19 nt, Artificial Sequence
  Description of Artificial Sequence: Synthetic oligonucleotide
gaggacacugcccaauacu

SEQ ID NO: 1984403 - RNA, 19 nt, Artificial Sequence
  Description of Artificial Sequence: Synthetic oligonucleotide
aggcacaguauaaggcugg

SEQ ID NO: 1984404 - RNA, 19 nt, Artificial Sequence
  Description of Artificial Sequence: Synthetic oligonucleotide
uacucagccuuaaucucuu

SEQ ID NO: 1984405 - RNA, 19 nt, Artificial Sequence
  Description of Artificial Sequence: Synthetic oligonucleotide
acaucuccaaugcgccgag

SEQ ID NO: 1984406 - RNA, 19 nt, Artificial Sequence
  Description of Artificial Sequence: Synthetic oligonucleotide
cagugcaaacguccagggg

SEQ ID NO: 1984407 - RNA, 19 nt, Artificial Sequence
  Description of Artificial Sequence: Synthetic oligonucleotide
uggcacaguaccccaggaa

SEQ ID NO: 1984408 - RNA, 19 nt, Artificial Sequence
  Description of Artificial Sequence: Synthetic oligonucleotide
gucuuugcagaaccuauua

SEQ ID NO: 1984409 - RNA, 19 nt, Artificial Sequence
  Description of Artificial Sequence: Synthetic oligonucleotide
agggacaacauguggucuu

SEQ ID NO: 1984410 - RNA, 19 nt, Artificial Sequence
  Description of Artificial Sequence: Synthetic oligonucleotide
aguacguuggaugggucau

SEQ ID NO: 1984411 - RNA, 19 nt, Artificial Sequence
  Description of Artificial Sequence: Synthetic oligonucleotide
cuuugcgcacgugcaaagc

SEQ ID NO: 1984412 - RNA, 19 nt, Artificial Sequence
  Description of Artificial Sequence: Synthetic oligonucleotide
gacaaugaugauggcuuga

SEQ ID NO: 1984413 - RNA, 19 nt, Artificial Sequence
  Description of Artificial Sequence: Synthetic oligonucleotide
uggaagcgauacauuugaa

SEQ ID NO: 1984414 - RNA, 19 nt, Artificial Sequence
  Description of Artificial Sequence: Synthetic oligonucleotide
ccuauuaaugagacagguc

SEQ ID NO: 1984415 - RNA, 19 nt, Artificial Sequence
  Description of Artificial Sequence: Synthetic oligonucleotide
aucccacggugccuguccg

SEQ ID NO: 1984416 - RNA, 19 nt, Artificial Sequence
  Description of Artificial Sequence: Synthetic oligonucleotide
uugcuggcaguuagauaga

SEQ ID NO: 1984417 - RNA, 19 nt, Artificial Sequence
  Description of Artificial Sequence: Synthetic oligonucleotide
ugcccaauacucagccuua

SEQ ID NO: 1984418 - RNA, 19 nt, Artificial Sequence
  Description of Artificial Sequence: Synthetic oligonucleotide
gaguacaggaucauccagu

SEQ ID NO: 1984419 - RNA, 19 nt, Artificial Sequence
  Description of Artificial Sequence: Synthetic oligonucleotide
ggcauccuucuccauuagg

SEQ ID NO: 1984420 - RNA, 19 nt, Artificial Sequence
  Description of Artificial Sequence: Synthetic oligonucleotide
gggguggaagucuuugcgc

SEQ ID NO: 1984421 - RNA, 19 nt, Artificial Sequence
  Description of Artificial Sequence: Synthetic oligonucleotide
acaguaccccaggaauggg

SEQ ID NO: 1984422 - RNA, 19 nt, Artificial Sequence
  Description of Artificial Sequence: Synthetic oligonucleotide
gguggaagcgauacauuug

SEQ ID NO: 1984423 - RNA, 19 nt, Artificial Sequence
  Description of Artificial Sequence: Synthetic oligonucleotide
gggaauacugagcaggagu

SEQ ID NO: 1984424 - RNA, 19 nt, Artificial Sequence
  Description of Artificial Sequence: Synthetic oligonucleotide
cacgucauucagguugaag

SEQ ID NO: 1984425 - RNA, 19 nt, Artificial Sequence
  Description of Artificial Sequence: Synthetic oligonucleotide
guaccccaggaaugggcag

SEQ ID NO: 1984426 - RNA, 19 nt, Artificial Sequence
  Description of Artificial Sequence: Synthetic oligonucleotide
guagguggaagcgauacau

SEQ ID NO: 1984427 - RNA, 19 nt, Artificial Sequence
  Description of Artificial Sequence: Synthetic oligonucleotide
agggaauacugagcaggag

SEQ ID NO: 1984428 - RNA, 19 nt, Artificial Sequence
  Description of Artificial Sequence: Synthetic oligonucleotide
uuaaugcauaaggcacagu

SEQ ID NO: 1984429 - RNA, 19 nt, Artificial Sequence
  Description of Artificial Sequence: Synthetic oligonucleotide
gcaggcgcaagugacgcgg

SEQ ID NO: 1984430 - RNA, 19 nt, Artificial Sequence
  Description of Artificial Sequence: Synthetic oligonucleotide
acgggcgccagaauguuca

SEQ ID NO: 1984431 - RNA, 19 nt, Artificial Sequence
  Description of Artificial Sequence: Synthetic oligonucleotide
gaccuuggauaucuuaaau

SEQ ID NO: 1984432 - RNA, 19 nt, Artificial Sequence
  Description of Artificial Sequence: Synthetic oligonucleotide
caguauaaggcuggaauua

SEQ ID NO: 1984433 - RNA, 19 nt, Artificial Sequence
  Description of Artificial Sequence: Synthetic oligonucleotide
caccagugagggaggacac

SEQ ID NO: 1984434 - RNA, 19 nt, Artificial Sequence
  Description of Artificial Sequence: Synthetic oligonucleotide
uagcauggucccaguuaca

SEQ ID NO: 1984435 - RNA, 19 nt, Artificial Sequence
  Description of Artificial Sequence: Synthetic oligonucleotide
ggacauuggccucaaaggu

SEQ ID NO: 1984436 - RNA, 19 nt, Artificial Sequence
  Description of Artificial Sequence: Synthetic oligonucleotide
gaagagaaguacguuggau

SEQ ID NO: 1984437 - RNA, 19 nt, Artificial Sequence
  Description of Artificial Sequence: Synthetic oligonucleotide
ggcgccagaauguucaucu

SEQ ID NO: 1984438 - RNA, 19 nt, Artificial Sequence
  Description of Artificial Sequence: Synthetic oligonucleotide
gacugcggcagcuccgcca

SEQ ID NO: 1984439 - RNA, 19 nt, Artificial Sequence
  Description of Artificial Sequence: Synthetic oligonucleotide
caaagcggccuccuuccuc

SEQ ID NO: 1984440 - RNA, 19 nt, Artificial Sequence
  Description of Artificial Sequence: Synthetic oligonucleotide
uacguuggaugggucauuu

SEQ ID NO: 1984441 - RNA, 19 nt, Artificial Sequence
  Description of Artificial Sequence: Synthetic oligonucleotide
ucccacggugccuguccgg

SEQ ID NO: 1984442 - RNA, 19 nt, Artificial Sequence
  Description of Artificial Sequence: Synthetic oligonucleotide
caaaucguuccaucucaaa

SEQ ID NO: 1984443 - RNA, 19 nt, Artificial Sequence
  Description of Artificial Sequence: Synthetic oligonucleotide
ggaauacugagcaggagua

SEQ ID NO: 1984444 - RNA, 19 nt, Artificial Sequence
  Description of Artificial Sequence: Synthetic oligonucleotide
caucacuguugaugcgaac

SEQ ID NO: 1984445 - RNA, 19 nt, Artificial Sequence
  Description of Artificial Sequence: Synthetic oligonucleotide
aggcgcaagugacgcgggg

SEQ ID NO: 1984446 - RNA, 19 nt, Artificial Sequence
  Description of Artificial Sequence: Synthetic oligonucleotide
ccacugcuugguauguucc

SEQ ID NO: 1984447 - RNA, 19 nt, Artificial Sequence
  Description of Artificial Sequence: Synthetic oligonucleotide
gcagaaccuauuaaugaga

SEQ ID NO: 1984448 - RNA, 19 nt, Artificial Sequence
  Description of Artificial Sequence: Synthetic oligonucleotide
gguauguuccaaggaugcc

SEQ ID NO: 1984449 - RNA, 19 nt, Artificial Sequence
  Description of Artificial Sequence: Synthetic oligonucleotide
gaaguacguuggauggguc

SEQ ID NO: 1984450 - RNA, 19 nt, Artificial Sequence
  Description of Artificial Sequence: Synthetic oligonucleotide
guccggugcuccuggcagg

SEQ ID NO: 1984451 - RNA, 19 nt, Artificial Sequence
  Description of Artificial Sequence: Synthetic oligonucleotide
gaaugggcaguuucuggau

SEQ ID NO: 1984452 - RNA, 19 nt, Artificial Sequence
  Description of Artificial Sequence: Synthetic oligonucleotide
gagcaggaguacucagguc

SEQ ID NO: 1984453 - RNA, 19 nt, Artificial Sequence
  Description of Artificial Sequence: Synthetic oligonucleotide
gaagcucuuuggucugaaa

SEQ ID NO: 1984454 - RNA, 19 nt, Artificial Sequence
  Description of Artificial Sequence: Synthetic oligonucleotide
ggaugccacgucauucagg

SEQ ID NO: 1984455 - RNA, 19 nt, Artificial Sequence
  Description of Artificial Sequence: Synthetic oligonucleotide
agacuagcauggucccagu

SEQ ID NO: 1984456 - RNA, 19 nt, Artificial Sequence
  Description of Artificial Sequence: Synthetic oligonucleotide
ugcggcagcuccgccagga

SEQ ID NO: 1984457 - RNA, 19 nt, Artificial Sequence
  Description of Artificial Sequence: Synthetic oligonucleotide
ccacaaggaagagaaguac

SEQ ID NO: 1984458 - RNA, 19 nt, Artificial Sequence
  Description of Artificial Sequence: Synthetic oligonucleotide
ggaagagaaguacguugga

SEQ ID NO: 1984459 - RNA, 19 nt, Artificial Sequence
  Description of Artificial Sequence: Synthetic oligonucleotide
gugccaugggcaggaagag

SEQ ID NO: 1984460 - RNA, 19 nt, Artificial Sequence
  Description of Artificial Sequence: Synthetic oligonucleotide
gcaguuucuggauaauccu

SEQ ID NO: 1984461 - RNA, 19 nt, Artificial Sequence
  Description of Artificial Sequence: Synthetic oligonucleotide
agugcaucagcgagccacu

SEQ ID NO: 1984462 - RNA, 19 nt, Artificial Sequence
  Description of Artificial Sequence: Synthetic oligonucleotide
ugcaaacguccagggguug

SEQ ID NO: 1984463 - RNA, 19 nt, Artificial Sequence
  Description of Artificial Sequence: Synthetic oligonucleotide
caggcgcaagugacgcggg

SEQ ID NO: 1984464 - RNA, 19 nt, Artificial Sequence
  Description of Artificial Sequence: Synthetic oligonucleotide
gcuggcaguuagauagagg

SEQ ID NO: 1984465 - RNA, 19 nt, Artificial Sequence
  Description of Artificial Sequence: Synthetic oligonucleotide
cccagaggaguacaggauc

SEQ ID NO: 1984466 - RNA, 19 nt, Artificial Sequence
  Description of Artificial Sequence: Synthetic oligonucleotide
agagacuagcaugguccca

SEQ ID NO: 1984467 - RNA, 19 nt, Artificial Sequence
  Description of Artificial Sequence: Synthetic oligonucleotide
ggcaguuagauagagguuu

SEQ ID NO: 1984468 - RNA, 19 nt, Artificial Sequence
  Description of Artificial Sequence: Synthetic oligonucleotide
aggacgcggucccuccuca

SEQ ID NO: 1984469 - RNA, 19 nt, Artificial Sequence
  Description of Artificial Sequence: Synthetic oligonucleotide
caacgaugaccuuggauau

SEQ ID NO: 1984470 - RNA, 19 nt, Artificial Sequence
  Description of Artificial Sequence: Synthetic oligonucleotide
ccucacgggcgccagaaug

SEQ ID NO: 1984471 - RNA, 19 nt, Artificial Sequence
  Description of Artificial Sequence: Synthetic oligonucleotide
ggcacaguaccccaggaau

SEQ ID NO: 1984472 - RNA, 19 nt, Artificial Sequence
  Description of Artificial Sequence: Synthetic oligonucleotide
gcacaguaccccaggaaug

SEQ ID NO: 1984473 - RNA, 19 nt, Artificial Sequence
  Description of Artificial Sequence: Synthetic oligonucleotide
ugagugcaucagcgagcca

SEQ ID NO: 1984474 - RNA, 19 nt, Artificial Sequence
  Description of Artificial Sequence: Synthetic oligonucleotide
gcaucagcgagccacugcu

SEQ ID NO: 1984475 - RNA, 19 nt, Artificial Sequence
  Description of Artificial Sequence: Synthetic oligonucleotide
cuguugaugcgaacaacau

SEQ ID NO: 1984476 - RNA, 19 nt, Artificial Sequence
  Description of Artificial Sequence: Synthetic oligonucleotide
gucuuugcgcacgugcaaa

SEQ ID NO: 1984477 - RNA, 19 nt, Artificial Sequence
  Description of Artificial Sequence: Synthetic oligonucleotide
ggaacccacaaggaagaga

SEQ ID NO: 1984478 - RNA, 19 nt, Artificial Sequence
  Description of Artificial Sequence: Synthetic oligonucleotide
auuggccucaaaggucaau

SEQ ID NO: 1984479 - RNA, 19 nt, Artificial Sequence
  Description of Artificial Sequence: Synthetic oligonucleotide
cugcccaauacucagccuu

SEQ ID NO: 1984480 - RNA, 19 nt, Artificial Sequence
  Description of Artificial Sequence: Synthetic oligonucleotide
ggcaggaagagacuagcau

SEQ ID NO: 1984481 - RNA, 19 nt, Artificial Sequence
  Description of Artificial Sequence: Synthetic oligonucleotide
acccaacacuucaaaucgu

SEQ ID NO: 1984482 - RNA, 19 nt, Artificial Sequence
  Description of Artificial Sequence: Synthetic oligonucleotide
cuuaaaucccacggugccu

SEQ ID NO: 1984483 - RNA, 19 nt, Artificial Sequence
  Description of Artificial Sequence: Synthetic oligonucleotide
cucaccagugagggaggac

SEQ ID NO: 1984484 - RNA, 19 nt, Artificial Sequence
  Description of Artificial Sequence: Synthetic oligonucleotide
gugucuuugcagaaccuau

SEQ ID NO: 1984485 - RNA, 19 nt, Artificial Sequence
  Description of Artificial Sequence: Synthetic oligonucleotide
cacgugcaaagcggccucc

SEQ ID NO: 1984486 - RNA, 19 nt, Artificial Sequence
  Description of Artificial Sequence: Synthetic oligonucleotide
ccuaugguggccuuguaau

SEQ ID NO: 1984487 - RNA, 19 nt, Artificial Sequence
  Description of Artificial Sequence: Synthetic oligonucleotide
ggugucuuugcagaaccua

SEQ ID NO: 1984488 - RNA, 19 nt, Artificial Sequence
  Description of Artificial Sequence: Synthetic oligonucleotide
cacucuucagggacaacau

SEQ ID NO: 1984489 - RNA, 19 nt, Artificial Sequence
  Description of Artificial Sequence: Synthetic oligonucleotide
ugggcaguuucuggauaau

SEQ ID NO: 1984490 - RNA, 19 nt, Artificial Sequence
  Description of Artificial Sequence: Synthetic oligonucleotide
cacgggcgccagaauguuc

SEQ ID NO: 1984491 - RNA, 19 nt, Artificial Sequence
  Description of Artificial Sequence: Synthetic oligonucleotide
auggucccaguuacacucu

SEQ ID NO: 1984492 - RNA, 19 nt, Artificial Sequence
  Description of Artificial Sequence: Synthetic oligonucleotide
caggacgcggucccuccuc

SEQ ID NO: 1984493 - RNA, 19 nt, Artificial Sequence
  Description of Artificial Sequence: Synthetic oligonucleotide
ggagacugaaggggacacc

SEQ ID NO: 1984494 - RNA, 19 nt, Artificial Sequence
  Description of Artificial Sequence: Synthetic oligonucleotide
ggcuggaauuauuaagcau

SEQ ID NO: 1984495 - RNA, 19 nt, Artificial Sequence
  Description of Artificial Sequence: Synthetic oligonucleotide
ggacacugcccaauacuca

SEQ ID NO: 1984496 - RNA, 19 nt, Artificial Sequence
  Description of Artificial Sequence: Synthetic oligonucleotide
ggaguacucagguccuucu

SEQ ID NO: 1984497 - RNA, 19 nt, Artificial Sequence
  Description of Artificial Sequence: Synthetic oligonucleotide
acguuggaugggucauuuu

SEQ ID NO: 1984498 - RNA, 19 nt, Artificial Sequence
  Description of Artificial Sequence: Synthetic oligonucleotide
uccucacgggcgccagaau

SEQ ID NO: 1984499 - RNA, 19 nt, Artificial Sequence
  Description of Artificial Sequence: Synthetic oligonucleotide
ucacgggcgccagaauguu

SEQ ID NO: 1984500 - RNA, 19 nt, Artificial Sequence
  Description of Artificial Sequence: Synthetic oligonucleotide
caggcacccuggagagccc

SEQ ID NO: 1984501 - RNA, 19 nt, Artificial Sequence
  Description of Artificial Sequence: Synthetic oligonucleotide
cuaugguggccuuguaauu

SEQ ID NO: 1984502 - RNA, 19 nt, Artificial Sequence
  Description of Artificial Sequence: Synthetic oligonucleotide
acggugccuguccggugcu

SEQ ID NO: 1984503 - RNA, 19 nt, Artificial Sequence
  Description of Artificial Sequence: Synthetic oligonucleotide
caucuccaaugcgccgagc

SEQ ID NO: 1984504 - RNA, 19 nt, Artificial Sequence
  Description of Artificial Sequence: Synthetic oligonucleotide
cuguccggugcuccuggca

SEQ ID NO: 1984505 - RNA, 19 nt, Artificial Sequence
  Description of Artificial Sequence: Synthetic oligonucleotide
gggcaguuucuggauaauc

SEQ ID NO: 1984506 - RNA, 19 nt, Artificial Sequence
  Description of Artificial Sequence: Synthetic oligonucleotide
gcacgaacacugacacucc

SEQ ID NO: 1984507 - RNA, 19 nt, Artificial Sequence
  Description of Artificial Sequence: Synthetic oligonucleotide
gugcaucagcgagccacug

SEQ ID NO: 1984508 - RNA, 19 nt, Artificial Sequence
  Description of Artificial Sequence: Synthetic oligonucleotide
guauaaggcuggaauuauu

SEQ ID NO: 1984509 - RNA, 19 nt, Artificial Sequence
  Description of Artificial Sequence: Synthetic oligonucleotide
guaguagguggaagcgaua

SEQ ID NO: 1984510 - RNA, 19 nt, Artificial Sequence
  Description of Artificial Sequence: Synthetic oligonucleotide
gcacgugcaaagcggccuc

SEQ ID NO: 1984511 - RNA, 19 nt, Artificial Sequence
  Description of Artificial Sequence: Synthetic oligonucleotide
caaggaagagaaguacguu

SEQ ID NO: 1984512 - RNA, 19 nt, Artificial Sequence
  Description of Artificial Sequence: Synthetic oligonucleotide
gccuucaaggggaagcucu

SEQ ID NO: 1984513 - RNA, 19 nt, Artificial Sequence
  Description of Artificial Sequence: Synthetic oligonucleotide
gcaaacguccagggguuga

SEQ ID NO: 1984514 - RNA, 19 nt, Artificial Sequence
  Description of Artificial Sequence: Synthetic oligonucleotide
gagcuccucgguaguaggu

SEQ ID NO: 1984515 - RNA, 19 nt, Artificial Sequence
  Description of Artificial Sequence: Synthetic oligonucleotide
gccacgucauucagguuga

SEQ ID NO: 1984516 - RNA, 19 nt, Artificial Sequence
  Description of Artificial Sequence: Synthetic oligonucleotide
gggaggacacugcccaaua

SEQ ID NO: 1984517 - RNA, 19 nt, Artificial Sequence
  Description of Artificial Sequence: Synthetic oligonucleotide
cauuggccucaaaggucaa

SEQ ID NO: 1984518 - RNA, 19 nt, Artificial Sequence
  Description of Artificial Sequence: Synthetic oligonucleotide
augccacgucauucagguu

SEQ ID NO: 1984519 - RNA, 19 nt, Artificial Sequence
  Description of Artificial Sequence: Synthetic oligonucleotide
auccagucuuuggcauggu

SEQ ID NO: 1984520 - RNA, 19 nt, Artificial Sequence
  Description of Artificial Sequence: Synthetic oligonucleotide
gcauggucccaguuacacu

SEQ ID NO: 1984521 - RNA, 19 nt, Artificial Sequence
  Description of Artificial Sequence: Synthetic oligonucleotide
cggugcuccuggcaggcgc

SEQ ID NO: 1984522 - RNA, 19 nt, Artificial Sequence
  Description of Artificial Sequence: Synthetic oligonucleotide
cagcuccgccaggacgcgg

SEQ ID NO: 1984523 - RNA, 19 nt, Artificial Sequence
  Description of Artificial Sequence: Synthetic oligonucleotide
cggucccuccucacgggcg

SEQ ID NO: 1984524 - RNA, 19 nt, Artificial Sequence
  Description of Artificial Sequence: Synthetic oligonucleotide
cauucagguugaagacaau

SEQ ID NO: 1984525 - RNA, 19 nt, Artificial Sequence
  Description of Artificial Sequence: Synthetic oligonucleotide
ccccgacuucucaagcuca

SEQ ID NO: 1984526 - RNA, 19 nt, Artificial Sequence
  Description of Artificial Sequence: Synthetic oligonucleotide
gcacaguauaaggcuggaa

SEQ ID NO: 1984527 - RNA, 19 nt, Artificial Sequence
  Description of Artificial Sequence: Synthetic oligonucleotide
ggacgcggucccuccucac

SEQ ID NO: 1984528 - RNA, 19 nt, Artificial Sequence
  Description of Artificial Sequence: Synthetic oligonucleotide
cagcacgaacacugacacu

SEQ ID NO: 1984529 - RNA, 19 nt, Artificial Sequence
  Description of Artificial Sequence: Synthetic oligonucleotide
gugccuguccggugcuccu

SEQ ID NO: 1984530 - RNA, 19 nt, Artificial Sequence
  Description of Artificial Sequence: Synthetic oligonucleotide
gcgcacgugcaaagcggcc

SEQ ID NO: 1984531 - RNA, 19 nt, Artificial Sequence
  Description of Artificial Sequence: Synthetic oligonucleotide
cgcggucccuccucacggg

SEQ ID NO: 1984532 - RNA, 19 nt, Artificial Sequence
  Description of Artificial Sequence: Synthetic oligonucleotide
gggcgccagaauguucauc

SEQ ID NO: 1984533 - RNA, 19 nt, Artificial Sequence
  Description of Artificial Sequence: Synthetic oligonucleotide
cuucaaggggaagcucuuu

SEQ ID NO: 1984534 - RNA, 19 nt, Artificial Sequence
  Description of Artificial Sequence: Synthetic oligonucleotide
gcgauacauuugaaccucu

SEQ ID NO: 1984535 - RNA, 19 nt, Artificial Sequence
  Description of Artificial Sequence: Synthetic oligonucleotide
caucagcgagccacugcuu

SEQ ID NO: 1984536 - RNA, 19 nt, Artificial Sequence
  Description of Artificial Sequence: Synthetic oligonucleotide
gcccaauacucagccuuaa

SEQ ID NO: 1984537 - RNA, 19 nt, Artificial Sequence
  Description of Artificial Sequence: Synthetic oligonucleotide
gcaaagcggccuccuuccu

SEQ ID NO: 1984538 - RNA, 19 nt, Artificial Sequence
  Description of Artificial Sequence: Synthetic oligonucleotide
gggacaacauguggucuuu

SEQ ID NO: 1984539 - RNA, 19 nt, Artificial Sequence
  Description of Artificial Sequence: Synthetic oligonucleotide
ccccagaggaguacaggau

SEQ ID NO: 1984540 - RNA, 19 nt, Artificial Sequence
  Description of Artificial Sequence: Synthetic oligonucleotide
ccuucaaggggaagcucuu

SEQ ID NO: 1984541 - RNA, 19 nt, Artificial Sequence
  Description of Artificial Sequence: Synthetic oligonucleotide
ccggugcuccuggcaggcg

SEQ ID NO: 1984542 - RNA, 19 nt, Artificial Sequence
  Description of Artificial Sequence: Synthetic oligonucleotide
cccggacauucucaccagu

SEQ ID NO: 1984543 - RNA, 19 nt, Artificial Sequence
  Description of Artificial Sequence: Synthetic oligonucleotide
caagcucagccaggacauu

SEQ ID NO: 1984544 - RNA, 19 nt, Artificial Sequence
  Description of Artificial Sequence: Synthetic oligonucleotide
gcgccagaauguucaucuu

SEQ ID NO: 1984545 - RNA, 19 nt, Artificial Sequence
  Description of Artificial Sequence: Synthetic oligonucleotide
ccaggacgcggucccuccu

SEQ ID NO: 1984546 - RNA, 19 nt, Artificial Sequence
  Description of Artificial Sequence: Synthetic oligonucleotide
cgugcaaagcggccuccuu

SEQ ID NO: 1984547 - RNA, 19 nt, Artificial Sequence
  Description of Artificial Sequence: Synthetic oligonucleotide
cgaugaccuuggauaucuu

SEQ ID NO: 1984548 - RNA, 19 nt, Artificial Sequence
  Description of Artificial Sequence: Synthetic oligonucleotide
uaaaauagaaaucugguag

SEQ ID NO: 1984549 - RNA, 19 nt, Artificial Sequence
  Description of Artificial Sequence: Synthetic oligonucleotide
aaaaccagcaaacaccucc

SEQ ID NO: 1984550 - RNA, 19 nt, Artificial Sequence
  Description of Artificial Sequence: Synthetic oligonucleotide
uauaauacuauuagaaggg

SEQ ID NO: 1984551 - RNA, 19 nt, Artificial Sequence
  Description of Artificial Sequence: Synthetic oligonucleotide
aauaaauuaguauaauacu

SEQ ID NO: 1984552 - RNA, 19 nt, Artificial Sequence
  Description of Artificial Sequence: Synthetic oligonucleotide
auugcauuagaaaagaugc

SEQ ID NO: 1984553 - RNA, 19 nt, Artificial Sequence
  Description of Artificial Sequence: Synthetic oligonucleotide
auuaguauaauacuauuag

SEQ ID NO: 1984554 - RNA, 19 nt, Artificial Sequence
  Description of Artificial Sequence: Synthetic oligonucleotide
aaaauagaaaucugguagg

SEQ ID NO: 1984555 - RNA, 19 nt, Artificial Sequence
  Description of Artificial Sequence: Synthetic oligonucleotide
aaugaaggaaucucaaagg

SEQ ID NO: 1984556 - RNA, 19 nt, Artificial Sequence
  Description of Artificial Sequence: Synthetic oligonucleotide
aauaguaugcuccugagau

SEQ ID NO: 1984557 - RNA, 19 nt, Artificial Sequence
  Description of Artificial Sequence: Synthetic oligonucleotide
uauucaagcaaccaaguga

SEQ ID NO: 1984558 - RNA, 19 nt, Artificial Sequence
  Description of Artificial Sequence: Synthetic oligonucleotide
aguauaauacuauuagaag

SEQ ID NO: 1984559 - RNA, 19 nt, Artificial Sequence
  Description of Artificial Sequence: Synthetic oligonucleotide
uaguauaauacuauuagaa

SEQ ID NO: 1984560 - RNA, 19 nt, Artificial Sequence
  Description of Artificial Sequence: Synthetic oligonucleotide
aggacaauggucuuaugcc

SEQ ID NO: 1984561 - RNA, 19 nt, Artificial Sequence
  Description of Artificial Sequence: Synthetic oligonucleotide
uuucuuaggagcauugucc

SEQ ID NO: 1984562 - RNA, 19 nt, Artificial Sequence
  Description of Artificial Sequence: Synthetic oligonucleotide
caggcaucaauacagaugg

SEQ ID NO: 1984563 - RNA, 19 nt, Artificial Sequence
  Description of Artificial Sequence: Synthetic oligonucleotide
uguucuguuucuuaggagc

SEQ ID NO: 1984564 - RNA, 19 nt, Artificial Sequence
  Description of Artificial Sequence: Synthetic oligonucleotide
uaaauuaguauaauacuau

SEQ ID NO: 1984565 - RNA, 19 nt, Artificial Sequence
  Description of Artificial Sequence: Synthetic oligonucleotide
aaaauucucaggcaaaauu

SEQ ID NO: 1984566 - RNA, 19 nt, Artificial Sequence
  Description of Artificial Sequence: Synthetic oligonucleotide
uucucaggcaaaauucucg

SEQ ID NO: 1984567 - RNA, 19 nt, Artificial Sequence
  Description of Artificial Sequence: Synthetic oligonucleotide
aaauagaaaucugguaggg

SEQ ID NO: 1984568 - RNA, 19 nt, Artificial Sequence
  Description of Artificial Sequence: Synthetic oligonucleotide
cauuaguuugauuccaagg

SEQ ID NO: 1984569 - RNA, 19 nt, Artificial Sequence
  Description of Artificial Sequence: Synthetic oligonucleotide
ucugauguaaaauuauaaa

SEQ ID NO: 1984570 - RNA, 19 nt, Artificial Sequence
  Description of Artificial Sequence: Synthetic oligonucleotide
auucaagcaaccaagugac

SEQ ID NO: 1984571 - RNA, 19 nt, Artificial Sequence
  Description of Artificial Sequence: Synthetic oligonucleotide
auuaauaguaugcuccuga

SEQ ID NO: 1984572 - RNA, 19 nt, Artificial Sequence
  Description of Artificial Sequence: Synthetic oligonucleotide
gucauuaauaguaugcucc

SEQ ID NO: 1984573 - RNA, 19 nt, Artificial Sequence
  Description of Artificial Sequence: Synthetic oligonucleotide
uuaguauaauacuauuaga

SEQ ID NO: 1984574 - RNA, 19 nt, Artificial Sequence
  Description of Artificial Sequence: Synthetic oligonucleotide
aaaggaacacgcuucauuu

SEQ ID NO: 1984575 - RNA, 19 nt, Artificial Sequence
  Description of Artificial Sequence: Synthetic oligonucleotide
uuuguucuguuucuuagga

SEQ ID NO: 1984576 - RNA, 19 nt, Artificial Sequence
  Description of Artificial Sequence: Synthetic oligonucleotide
uaguuugauuccaaggaag

SEQ ID NO: 1984577 - RNA, 19 nt, Artificial Sequence
  Description of Artificial Sequence: Synthetic oligonucleotide
uuuauauaggagaggacaa

SEQ ID NO: 1984578 - RNA, 19 nt, Artificial Sequence
  Description of Artificial Sequence: Synthetic oligonucleotide
ugucauaugacaugaacau

SEQ ID NO: 1984579 - RNA, 19 nt, Artificial Sequence
  Description of Artificial Sequence: Synthetic oligonucleotide
gcauaaaugaguuuauugc

SEQ ID NO: 1984580 - RNA, 19 nt, Artificial Sequence
  Description of Artificial Sequence: Synthetic oligonucleotide
gacaagacagccuuaauaa

SEQ ID NO: 1984581 - RNA, 19 nt, Artificial Sequence
  Description of Artificial Sequence: Synthetic oligonucleotide
gacaugaacaugaccaagg

SEQ ID NO: 1984582 - RNA, 19 nt, Artificial Sequence
  Description of Artificial Sequence: Synthetic oligonucleotide
ucucaggcaaaauucucgg

SEQ ID NO: 1984583 - RNA, 19 nt, Artificial Sequence
  Description of Artificial Sequence: Synthetic oligonucleotide
agagauaugugacgguggg

SEQ ID NO: 1984584 - RNA, 19 nt, Artificial Sequence
  Description of Artificial Sequence: Synthetic oligonucleotide
uuaauaguaugcuccugag

SEQ ID NO: 1984585 - RNA, 19 nt, Artificial Sequence
  Description of Artificial Sequence: Synthetic oligonucleotide
guuagcuuuggccauuggg

SEQ ID NO: 1984586 - RNA, 19 nt, Artificial Sequence
  Description of Artificial Sequence: Synthetic oligonucleotide
auacuauuagaagggaugg

SEQ ID NO: 1984587 - RNA, 19 nt, Artificial Sequence
  Description of Artificial Sequence: Synthetic oligonucleotide
ugcauuagaaaagaugcca

SEQ ID NO: 1984588 - RNA, 19 nt, Artificial Sequence
  Description of Artificial Sequence: Synthetic oligonucleotide
ugaguuuauugcauuagaa

SEQ ID NO: 1984589 - RNA, 19 nt, Artificial Sequence
  Description of Artificial Sequence: Synthetic oligonucleotide
gaagggauggcauuuguuc

SEQ ID NO: 1984590 - RNA, 19 nt, Artificial Sequence
  Description of Artificial Sequence: Synthetic oligonucleotide
ugucccuugaccaauggaa

SEQ ID NO: 1984591 - RNA, 19 nt, Artificial Sequence
  Description of Artificial Sequence: Synthetic oligonucleotide
agauaugugacggugggag

SEQ ID NO: 1984592 - RNA, 19 nt, Artificial Sequence
  Description of Artificial Sequence: Synthetic oligonucleotide
acaauggucuuaugccucc

SEQ ID NO: 1984593 - RNA, 19 nt, Artificial Sequence
  Description of Artificial Sequence: Synthetic oligonucleotide
gauucucccagauuguaac

SEQ ID NO: 1984594 - RNA, 19 nt, Artificial Sequence
  Description of Artificial Sequence: Synthetic oligonucleotide
auaaaauagaaaucuggua

SEQ ID NO: 1984595 - RNA, 19 nt, Artificial Sequence
  Description of Artificial Sequence: Synthetic oligonucleotide
uuagcucugauguaaaauu

SEQ ID NO: 1984596 - RNA, 19 nt, Artificial Sequence
  Description of Artificial Sequence: Synthetic oligonucleotide
aauggucuuaugccuccac

SEQ ID NO: 1984597 - RNA, 19 nt, Artificial Sequence
  Description of Artificial Sequence: Synthetic oligonucleotide
uauugggacagagauaugu

SEQ ID NO: 1984598 - RNA, 19 nt, Artificial Sequence
  Description of Artificial Sequence: Synthetic oligonucleotide
uccccguuagcucugaugu

SEQ ID NO: 1984599 - RNA, 19 nt, Artificial Sequence
  Description of Artificial Sequence: Synthetic oligonucleotide
gaaucucaaaggaacacgc

SEQ ID NO: 1984600 - RNA, 19 nt, Artificial Sequence
  Description of Artificial Sequence: Synthetic oligonucleotide
ugaccaauggaacuccaca

SEQ ID NO: 1984601 - RNA, 19 nt, Artificial Sequence
  Description of Artificial Sequence: Synthetic oligonucleotide
aauuaguauaauacuauua

SEQ ID NO: 1984602 - RNA, 19 nt, Artificial Sequence
  Description of Artificial Sequence: Synthetic oligonucleotide
aacaugaccaaggucccuc

SEQ ID NO: 1984603 - RNA, 19 nt, Artificial Sequence
  Description of Artificial Sequence: Synthetic oligonucleotide
aaggaaguaaugaaggaau

SEQ ID NO: 1984604 - RNA, 19 nt, Artificial Sequence
  Description of Artificial Sequence: Synthetic oligonucleotide
uaugcuccugagauauugg

SEQ ID NO: 1984605 - RNA, 19 nt, Artificial Sequence
  Description of Artificial Sequence: Synthetic oligonucleotide
ucauuaauaguaugcuccu

SEQ ID NO: 1984606 - RNA, 19 nt, Artificial Sequence
  Description of Artificial Sequence: Synthetic oligonucleotide
aacagcgucaaaagugaac

SEQ ID NO: 1984607 - RNA, 19 nt, Artificial Sequence
  Description of Artificial Sequence: Synthetic oligonucleotide
gauauugggacagagauau

SEQ ID NO: 1984608 - RNA, 19 nt, Artificial Sequence
  Description of Artificial Sequence: Synthetic oligonucleotide
ugagauauugggacagaga

SEQ ID NO: 1984609 - RNA, 19 nt, Artificial Sequence
  Description of Artificial Sequence: Synthetic oligonucleotide
ugaaggaaucucaaaggaa

SEQ ID NO: 1984610 - RNA, 19 nt, Artificial Sequence
  Description of Artificial Sequence: Synthetic oligonucleotide
accaauggaacuccacagg

SEQ ID NO: 1984611 - RNA, 19 nt, Artificial Sequence
  Description of Artificial Sequence: Synthetic oligonucleotide
agccugacaagcuccuucc

SEQ ID NO: 1984612 - RNA, 19 nt, Artificial Sequence
  Description of Artificial Sequence: Synthetic oligonucleotide
gauuccaaggaaguaauga

SEQ ID NO: 1984613 - RNA, 19 nt, Artificial Sequence
  Description of Artificial Sequence: Synthetic oligonucleotide
uugcauuagaaaagaugcc

SEQ ID NO: 1984614 - RNA, 19 nt, Artificial Sequence
  Description of Artificial Sequence: Synthetic oligonucleotide
aacacgcuucauuuuauau

SEQ ID NO: 1984615 - RNA, 19 nt, Artificial Sequence
  Description of Artificial Sequence: Synthetic oligonucleotide
aauucucaggcaaaauucu

SEQ ID NO: 1984616 - RNA, 19 nt, Artificial Sequence
  Description of Artificial Sequence: Synthetic oligonucleotide
ugacacgaggcuauucaag

SEQ ID NO: 1984617 - RNA, 19 nt, Artificial Sequence
  Description of Artificial Sequence: Synthetic oligonucleotide
gucagcuggucauuaauag

SEQ ID NO: 1984618 - RNA, 19 nt, Artificial Sequence
  Description of Artificial Sequence: Synthetic oligonucleotide
caucaauacagauggcuac

SEQ ID NO: 1984619 - RNA, 19 nt, Artificial Sequence
  Description of Artificial Sequence: Synthetic oligonucleotide
ugggacagagauaugugac

SEQ ID NO: 1984620 - RNA, 19 nt, Artificial Sequence
  Description of Artificial Sequence: Synthetic oligonucleotide
auauaggagaggacaaugg

SEQ ID NO: 1984621 - RNA, 19 nt, Artificial Sequence
  Description of Artificial Sequence: Synthetic oligonucleotide
aaguaaugaaggaaucuca

SEQ ID NO: 1984622 - RNA, 19 nt, Artificial Sequence
  Description of Artificial Sequence: Synthetic oligonucleotide
gagauauugggacagagau

SEQ ID NO: 1984623 - RNA, 19 nt, Artificial Sequence
  Description of Artificial Sequence: Synthetic oligonucleotide
agccuuaauaaauuaguau

SEQ ID NO: 1984624 - RNA, 19 nt, Artificial Sequence
  Description of Artificial Sequence: Synthetic oligonucleotide
acauuaguuugauuccaag

SEQ ID NO: 1984625 - RNA, 19 nt, Artificial Sequence
  Description of Artificial Sequence: Synthetic oligonucleotide
uacagauggcuacuggaca

SEQ ID NO: 1984626 - RNA, 19 nt, Artificial Sequence
  Description of Artificial Sequence: Synthetic oligonucleotide
uucccugggaaauuuaaaa

SEQ ID NO: 1984627 - RNA, 19 nt, Artificial Sequence
  Description of Artificial Sequence: Synthetic oligonucleotide
gauuguaacucuugcuuuc

SEQ ID NO: 1984628 - RNA, 19 nt, Artificial Sequence
  Description of Artificial Sequence: Synthetic oligonucleotide
gauaugugacggugggagg

SEQ ID NO: 1984629 - RNA, 19 nt, Artificial Sequence
  Description of Artificial Sequence: Synthetic oligonucleotide
aauagaaaucugguagggu

SEQ ID NO: 1984630 - RNA, 19 nt, Artificial Sequence
  Description of Artificial Sequence: Synthetic oligonucleotide
aaagccguccccguuagcu

SEQ ID NO: 1984631 - RNA, 19 nt, Artificial Sequence
  Description of Artificial Sequence: Synthetic oligonucleotide
cugucauaugacaugaaca

SEQ ID NO: 1984632 - RNA, 19 nt, Artificial Sequence
  Description of Artificial Sequence: Synthetic oligonucleotide
auacagauggcuacuggac

SEQ ID NO: 1984633 - RNA, 19 nt, Artificial Sequence
  Description of Artificial Sequence: Synthetic oligonucleotide
aggacgcucaggcaacagc

SEQ ID NO: 1984634 - RNA, 19 nt, Artificial Sequence
  Description of Artificial Sequence: Synthetic oligonucleotide
ugugacggugggaggaggg

SEQ ID NO: 1984635 - RNA, 19 nt, Artificial Sequence
  Description of Artificial Sequence: Synthetic oligonucleotide
caagugacuaaaauucuca

SEQ ID NO: 1984636 - RNA, 19 nt, Artificial Sequence
  Description of Artificial Sequence: Synthetic oligonucleotide
ugucugucauaugacauga

SEQ ID NO: 1984637 - RNA, 19 nt, Artificial Sequence
  Description of Artificial Sequence: Synthetic oligonucleotide
uuguccuacgugcagccug

SEQ ID NO: 1984638 - RNA, 19 nt, Artificial Sequence
  Description of Artificial Sequence: Synthetic oligonucleotide
auuuuauauaggagaggac

SEQ ID NO: 1984639 - RNA, 19 nt, Artificial Sequence
  Description of Artificial Sequence: Synthetic oligonucleotide
gaaagaggguccaggacag

SEQ ID NO: 1984640 - RNA, 19 nt, Artificial Sequence
  Description of Artificial Sequence: Synthetic oligonucleotide
ucccgugcaguccuguuag

SEQ ID NO: 1984641 - RNA, 19 nt, Artificial Sequence
  Description of Artificial Sequence: Synthetic oligonucleotide
agggccgaagugcuugucc

SEQ ID NO: 1984642 - RNA, 19 nt, Artificial Sequence
  Description of Artificial Sequence: Synthetic oligonucleotide
cagagauaugugacggugg

SEQ ID NO: 1984643 - RNA, 19 nt, Artificial Sequence
  Description of Artificial Sequence: Synthetic oligonucleotide
uggcuacuggacaugacac

SEQ ID NO: 1984644 - RNA, 19 nt, Artificial Sequence
  Description of Artificial Sequence: Synthetic oligonucleotide
uaguaugcuccugagauau

SEQ ID NO: 1984645 - RNA, 19 nt, Artificial Sequence
  Description of Artificial Sequence: Synthetic oligonucleotide
uuguucuguuucuuaggag

SEQ ID NO: 1984646 - RNA, 19 nt, Artificial Sequence
  Description of Artificial Sequence: Synthetic oligonucleotide
auggcguugagagaacuuc

SEQ ID NO: 1984647 - RNA, 19 nt, Artificial Sequence
  Description of Artificial Sequence: Synthetic oligonucleotide
uggucauuaauaguaugcu

SEQ ID NO: 1984648 - RNA, 19 nt, Artificial Sequence
  Description of Artificial Sequence: Synthetic oligonucleotide
cuauucaagcaaccaagug

SEQ ID NO: 1984649 - RNA, 19 nt, Artificial Sequence
  Description of Artificial Sequence: Synthetic oligonucleotide
ugagagaacuuccccacau

SEQ ID NO: 1984650 - RNA, 19 nt, Artificial Sequence
  Description of Artificial Sequence: Synthetic oligonucleotide
uguccuuuggaaagagggu

SEQ ID NO: 1984651 - RNA, 19 nt, Artificial Sequence
  Description of Artificial Sequence: Synthetic oligonucleotide
uuaggagcauuguccuacg

SEQ ID NO: 1984652 - RNA, 19 nt, Artificial Sequence
  Description of Artificial Sequence: Synthetic oligonucleotide
acagccuuaauaaauuagu

SEQ ID NO: 1984653 - RNA, 19 nt, Artificial Sequence
  Description of Artificial Sequence: Synthetic oligonucleotide
acagagauaugugacggug

SEQ ID NO: 1984654 - RNA, 19 nt, Artificial Sequence
  Description of Artificial Sequence: Synthetic oligonucleotide
ucaagcaaccaagugacua

SEQ ID NO: 1984655 - RNA, 19 nt, Artificial Sequence
  Description of Artificial Sequence: Synthetic oligonucleotide
guuucuuaggagcauuguc

SEQ ID NO: 1984656 - RNA, 19 nt, Artificial Sequence
  Description of Artificial Sequence: Synthetic oligonucleotide
acaugaacaugaccaaggu

SEQ ID NO: 1984657 - RNA, 19 nt, Artificial Sequence
  Description of Artificial Sequence: Synthetic oligonucleotide
aggagcauuguccuacgug

SEQ ID NO: 1984658 - RNA, 19 nt, Artificial Sequence
  Description of Artificial Sequence: Synthetic oligonucleotide
acaccuccauauuagacau

SEQ ID NO: 1984659 - RNA, 19 nt, Artificial Sequence
  Description of Artificial Sequence: Synthetic oligonucleotide
agaguucccuccaggaggc

SEQ ID NO: 1984660 - RNA, 19 nt, Artificial Sequence
  Description of Artificial Sequence: Synthetic oligonucleotide
agauuguaacucuugcuuu

SEQ ID NO: 1984661 - RNA, 19 nt, Artificial Sequence
  Description of Artificial Sequence: Synthetic oligonucleotide
ggaaagaggguccaggaca

SEQ ID NO: 1984662 - RNA, 19 nt, Artificial Sequence
  Description of Artificial Sequence: Synthetic oligonucleotide
uauuagaagggauggcauu

SEQ ID NO: 1984663 - RNA, 19 nt, Artificial Sequence
  Description of Artificial Sequence: Synthetic oligonucleotide
agcgucaaaagugaacuca

SEQ ID NO: 1984664 - RNA, 19 nt, Artificial Sequence
  Description of Artificial Sequence: Synthetic oligonucleotide
uggcguugagagaacuucc

SEQ ID NO: 1984665 - RNA, 19 nt, Artificial Sequence
  Description of Artificial Sequence: Synthetic oligonucleotide
auaauacuauuagaaggga

SEQ ID NO: 1984666 - RNA, 19 nt, Artificial Sequence
  Description of Artificial Sequence: Synthetic oligonucleotide
aaaagccguccccguuagc

SEQ ID NO: 1984667 - RNA, 19 nt, Artificial Sequence
  Description of Artificial Sequence: Synthetic oligonucleotide
caggacaggauucucccag

SEQ ID NO: 1984668 - RNA, 19 nt, Artificial Sequence
  Description of Artificial Sequence: Synthetic oligonucleotide
aaggaaucucaaaggaaca

SEQ ID NO: 1984669 - RNA, 19 nt, Artificial Sequence
  Description of Artificial Sequence: Synthetic oligonucleotide
aagccguccccguuagcuc

SEQ ID NO: 1984670 - RNA, 19 nt, Artificial Sequence
  Description of Artificial Sequence: Synthetic oligonucleotide
guaugcuccugagauauug

SEQ ID NO: 1984671 - RNA, 19 nt, Artificial Sequence
  Description of Artificial Sequence: Synthetic oligonucleotide
guagaggacgcucaggcaa

SEQ ID NO: 1984672 - RNA, 19 nt, Artificial Sequence
  Description of Artificial Sequence: Synthetic oligonucleotide
ucucccagauuguaacucu

SEQ ID NO: 1984673 - RNA, 19 nt, Artificial Sequence
  Description of Artificial Sequence: Synthetic oligonucleotide
ucccagauuguaacucuug

SEQ ID NO: 1984674 - RNA, 19 nt, Artificial Sequence
  Description of Artificial Sequence: Synthetic oligonucleotide
aggaaguaaugaaggaauc

SEQ ID NO: 1984675 - RNA, 19 nt, Artificial Sequence
  Description of Artificial Sequence: Synthetic oligonucleotide
agcauuguccuacgugcag

SEQ ID NO: 1984676 - RNA, 19 nt, Artificial Sequence
  Description of Artificial Sequence: Synthetic oligonucleotide
gggacagagauaugugacg

SEQ ID NO: 1984677 - RNA, 19 nt, Artificial Sequence
  Description of Artificial Sequence: Synthetic oligonucleotide
acacgcuucauuuuauaua

SEQ ID NO: 1984678 - RNA, 19 nt, Artificial Sequence
  Description of Artificial Sequence: Synthetic oligonucleotide
acagauggcuacuggacau

SEQ ID NO: 1984679 - RNA, 19 nt, Artificial Sequence
  Description of Artificial Sequence: Synthetic oligonucleotide
agcaaacaccuccauauua

SEQ ID NO: 1984680 - RNA, 19 nt, Artificial Sequence
  Description of Artificial Sequence: Synthetic oligonucleotide
ggacagagauaugugacgg

SEQ ID NO: 1984681 - RNA, 19 nt, Artificial Sequence
  Description of Artificial Sequence: Synthetic oligonucleotide
caugacacgaggcuauuca

SEQ ID NO: 1984682 - RNA, 19 nt, Artificial Sequence
  Description of Artificial Sequence: Synthetic oligonucleotide
ccaauggaacuccacaggg

SEQ ID NO: 1984683 - RNA, 19 nt, Artificial Sequence
  Description of Artificial Sequence: Synthetic oligonucleotide
accaaggucccucucggcu

SEQ ID NO: 1984684 - RNA, 19 nt, Artificial Sequence
  Description of Artificial Sequence: Synthetic oligonucleotide
ucggcucgcuuguacaugc

SEQ ID NO: 1984685 - RNA, 19 nt, Artificial Sequence
  Description of Artificial Sequence: Synthetic oligonucleotide
uguccaaauggcguugaga

SEQ ID NO: 1984686 - RNA, 19 nt, Artificial Sequence
  Description of Artificial Sequence: Synthetic oligonucleotide
uguagaggacgcucaggca

SEQ ID NO: 1984687 - RNA, 19 nt, Artificial Sequence
  Description of Artificial Sequence: Synthetic oligonucleotide
aggaacacgcuucauuuua

SEQ ID NO: 1984688 - RNA, 19 nt, Artificial Sequence
  Description of Artificial Sequence: Synthetic oligonucleotide
uuauauaggagaggacaau

SEQ ID NO: 1984689 - RNA, 19 nt, Artificial Sequence
  Description of Artificial Sequence: Synthetic oligonucleotide
aguaaugaaggaaucucaa

SEQ ID NO: 1984690 - RNA, 19 nt, Artificial Sequence
  Description of Artificial Sequence: Synthetic oligonucleotide
uacuauuagaagggauggc

SEQ ID NO: 1984691 - RNA, 19 nt, Artificial Sequence
  Description of Artificial Sequence: Synthetic oligonucleotide
aaucucaaaggaacacgcu

SEQ ID NO: 1984692 - RNA, 19 nt, Artificial Sequence
  Description of Artificial Sequence: Synthetic oligonucleotide
uccuaucucccugcgagcc

SEQ ID NO: 1984693 - RNA, 19 nt, Artificial Sequence
  Description of Artificial Sequence: Synthetic oligonucleotide
ucccuugaccaauggaacu

SEQ ID NO: 1984694 - RNA, 19 nt, Artificial Sequence
  Description of Artificial Sequence: Synthetic oligonucleotide
uguccuacgugcagccuga

SEQ ID NO: 1984695 - RNA, 19 nt, Artificial Sequence
  Description of Artificial Sequence: Synthetic oligonucleotide
uugucccuugaccaaugga

SEQ ID NO: 1984696 - RNA, 19 nt, Artificial Sequence
  Description of Artificial Sequence: Synthetic oligonucleotide
guaaugaaggaaucucaaa

SEQ ID NO: 1984697 - RNA, 19 nt, Artificial Sequence
  Description of Artificial Sequence: Synthetic oligonucleotide
uugagagaacuuccccaca

SEQ ID NO: 1984698 - RNA, 19 nt, Artificial Sequence
  Description of Artificial Sequence: Synthetic oligonucleotide
uguuagcuuuggccauugg

SEQ ID NO: 1984699 - RNA, 19 nt, Artificial Sequence
  Description of Artificial Sequence: Synthetic oligonucleotide
agacauuaguuugauucca

SEQ ID NO: 1984700 - RNA, 19 nt, Artificial Sequence
  Description of Artificial Sequence: Synthetic oligonucleotide
agaaaucugguaggguuug

SEQ ID NO: 1984701 - RNA, 19 nt, Artificial Sequence
  Description of Artificial Sequence: Synthetic oligonucleotide
auuagaagggauggcauuu

SEQ ID NO: 1984702 - RNA, 19 nt, Artificial Sequence
  Description of Artificial Sequence: Synthetic oligonucleotide
uccaaauggcguugagaga

SEQ ID NO: 1984703 - RNA, 19 nt, Artificial Sequence
  Description of Artificial Sequence: Synthetic oligonucleotide
acgcucaggcaacagcguc

SEQ ID NO: 1984704 - RNA, 19 nt, Artificial Sequence
  Description of Artificial Sequence: Synthetic oligonucleotide
uguuucuuaggagcauugu

SEQ ID NO: 1984705 - RNA, 19 nt, Artificial Sequence
  Description of Artificial Sequence: Synthetic oligonucleotide
auggucuuaugccuccacu

SEQ ID NO: 1984706 - RNA, 19 nt, Artificial Sequence
  Description of Artificial Sequence: Synthetic oligonucleotide
auugggacagagauaugug

SEQ ID NO: 1984707 - RNA, 19 nt, Artificial Sequence
  Description of Artificial Sequence: Synthetic oligonucleotide
uggucuuaugccuccacuu

SEQ ID NO: 1984708 - RNA, 19 nt, Artificial Sequence
  Description of Artificial Sequence: Synthetic oligonucleotide
cucgcuuguacaugcccag

SEQ ID NO: 1984709 - RNA, 19 nt, Artificial Sequence
  Description of Artificial Sequence: Synthetic oligonucleotide
uagaggacgcucaggcaac

SEQ ID NO: 1984710 - RNA, 19 nt, Artificial Sequence
  Description of Artificial Sequence: Synthetic oligonucleotide
gacaauggucuuaugccuc

SEQ ID NO: 1984711 - RNA, 19 nt, Artificial Sequence
  Description of Artificial Sequence: Synthetic oligonucleotide
acuaaaauucucaggcaaa

SEQ ID NO: 1984712 - RNA, 19 nt, Artificial Sequence
  Description of Artificial Sequence: Synthetic oligonucleotide
gucauaugacaugaacaug

SEQ ID NO: 1984713 - RNA, 19 nt, Artificial Sequence
  Description of Artificial Sequence: Synthetic oligonucleotide
ggacgcucaggcaacagcg

SEQ ID NO: 1984714 - RNA, 19 nt, Artificial Sequence
  Description of Artificial Sequence: Synthetic oligonucleotide
uacaugcccagguggaguc

SEQ ID NO: 1984715 - RNA, 19 nt, Artificial Sequence
  Description of Artificial Sequence: Synthetic oligonucleotide
cuacuggacaugacacgag

SEQ ID NO: 1984716 - RNA, 19 nt, Artificial Sequence
  Description of Artificial Sequence: Synthetic oligonucleotide
acacgaggcuauucaagca

SEQ ID NO: 1984717 - RNA, 19 nt, Artificial Sequence
  Description of Artificial Sequence: Synthetic oligonucleotide
acgaggcuauucaagcaac

SEQ ID NO: 1984718 - RNA, 19 nt, Artificial Sequence
  Description of Artificial Sequence: Synthetic oligonucleotide
gaagcuguccaguccuauc

SEQ ID NO: 1984719 - RNA, 19 nt, Artificial Sequence
  Description of Artificial Sequence: Synthetic oligonucleotide
cuacgugcagccugacaag

SEQ ID NO: 1984720 - RNA, 19 nt, Artificial Sequence
  Description of Artificial Sequence: Synthetic oligonucleotide
uggaauguggguguccuuu

SEQ ID NO: 1984721 - RNA, 19 nt, Artificial Sequence
  Description of Artificial Sequence: Synthetic oligonucleotide
uccaguguagaggacgcuc

SEQ ID NO: 1984722 - RNA, 19 nt, Artificial Sequence
  Description of Artificial Sequence: Synthetic oligonucleotide
uacgugcagccugacaagc

SEQ ID NO: 1984723 - RNA, 19 nt, Artificial Sequence
  Description of Artificial Sequence: Synthetic oligonucleotide
agggugucugucauaugac

SEQ ID NO: 1984724 - RNA, 19 nt, Artificial Sequence
  Description of Artificial Sequence: Synthetic oligonucleotide
gaggcuauucaagcaacca

SEQ ID NO: 1984725 - RNA, 19 nt, Artificial Sequence
  Description of Artificial Sequence: Synthetic oligonucleotide
caaggucccucucggcucg

SEQ ID NO: 1984726 - RNA, 19 nt, Artificial Sequence
  Description of Artificial Sequence: Synthetic oligonucleotide
cuccauauuagacauuagu

SEQ ID NO: 1984727 - RNA, 19 nt, Artificial Sequence
  Description of Artificial Sequence: Synthetic oligonucleotide
ugcuuguccaaauggcguu

SEQ ID NO: 1984728 - RNA, 19 nt, Artificial Sequence
  Description of Artificial Sequence: Synthetic oligonucleotide
caagcaaccaagugacuaa

SEQ ID NO: 1984729 - RNA, 19 nt, Artificial Sequence
  Description of Artificial Sequence: Synthetic oligonucleotide
cauuaauaguaugcuccug

SEQ ID NO: 1984730 - RNA, 19 nt, Artificial Sequence
  Description of Artificial Sequence: Synthetic oligonucleotide
ggcuacuggacaugacacg

SEQ ID NO: 1984731 - RNA, 19 nt, Artificial Sequence
  Description of Artificial Sequence: Synthetic oligonucleotide
auaguaugcuccugagaua

SEQ ID NO: 1984732 - RNA, 19 nt, Artificial Sequence
  Description of Artificial Sequence: Synthetic oligonucleotide
aggcaacagcgucaaaagu

SEQ ID NO: 1984733 - RNA, 19 nt, Artificial Sequence
  Description of Artificial Sequence: Synthetic oligonucleotide
aaagaggguccaggacagg

SEQ ID NO: 1984734 - RNA, 19 nt, Artificial Sequence
  Description of Artificial Sequence: Synthetic oligonucleotide
uucaagcaaccaagugacu

SEQ ID NO: 1984735 - RNA, 19 nt, Artificial Sequence
  Description of Artificial Sequence: Synthetic oligonucleotide
augacacgaggcuauucaa

SEQ ID NO: 1984736 - RNA, 19 nt, Artificial Sequence
  Description of Artificial Sequence: Synthetic oligonucleotide
cucaaaggaacacgcuuca

SEQ ID NO: 1984737 - RNA, 19 nt, Artificial Sequence
  Description of Artificial Sequence: Synthetic oligonucleotide
accaagugacuaaaauucu

SEQ ID NO: 1984738 - RNA, 19 nt, Artificial Sequence
  Description of Artificial Sequence: Synthetic oligonucleotide
uggacaugacacgaggcua

SEQ ID NO: 1984739 - RNA, 19 nt, Artificial Sequence
  Description of Artificial Sequence: Synthetic oligonucleotide
aagcaaccaagugacuaaa

SEQ ID NO: 1984740 - RNA, 19 nt, Artificial Sequence
  Description of Artificial Sequence: Synthetic oligonucleotide
acaugacacgaggcuauuc

SEQ ID NO: 1984741 - RNA, 19 nt, Artificial Sequence
  Description of Artificial Sequence: Synthetic oligonucleotide
ccaagugacuaaaauucuc

SEQ ID NO: 1984742 - RNA, 19 nt, Artificial Sequence
  Description of Artificial Sequence: Synthetic oligonucleotide
agguggagucagcugguca

SEQ ID NO: 1984743 - RNA, 19 nt, Artificial Sequence
  Description of Artificial Sequence: Synthetic oligonucleotide
cagauuguaacucuugcuu

SEQ ID NO: 1984744 - RNA, 19 nt, Artificial Sequence
  Description of Artificial Sequence: Synthetic oligonucleotide
acaugaccaaggucccucu

SEQ ID NO: 1984745 - RNA, 19 nt, Artificial Sequence
  Description of Artificial Sequence: Synthetic oligonucleotide
gcuggucauuaauaguaug

SEQ ID NO: 1984746 - RNA, 19 nt, Artificial Sequence
  Description of Artificial Sequence: Synthetic oligonucleotide
uccuacgugcagccugaca

SEQ ID NO: 1984747 - RNA, 19 nt, Artificial Sequence
  Description of Artificial Sequence: Synthetic oligonucleotide
cagccuuaauaaauuagua

SEQ ID NO: 1984748 - RNA, 19 nt, Artificial Sequence
  Description of Artificial Sequence: Synthetic oligonucleotide
cccagauuguaacucuugc

SEQ ID NO: 1984749 - RNA, 19 nt, Artificial Sequence
  Description of Artificial Sequence: Synthetic oligonucleotide
aaccagcaaacaccuccau

SEQ ID NO: 1984750 - RNA, 19 nt, Artificial Sequence
  Description of Artificial Sequence: Synthetic oligonucleotide
guccccguuagcucugaug

SEQ ID NO: 1984751 - RNA, 19 nt, Artificial Sequence
  Description of Artificial Sequence: Synthetic oligonucleotide
cuaucucccugcgagccac

SEQ ID NO: 1984752 - RNA, 19 nt, Artificial Sequence
  Description of Artificial Sequence: Synthetic oligonucleotide
uaucucccugcgagccacg

SEQ ID NO: 1984753 - RNA, 19 nt, Artificial Sequence
  Description of Artificial Sequence: Synthetic oligonucleotide
gacauuaguuugauuccaa

SEQ ID NO: 1984754 - RNA, 19 nt, Artificial Sequence
  Description of Artificial Sequence: Synthetic oligonucleotide
ugccuuccugcagaggucu

SEQ ID NO: 1984755 - RNA, 19 nt, Artificial Sequence
  Description of Artificial Sequence: Synthetic oligonucleotide
aauggcguugagagaacuu

SEQ ID NO: 1984756 - RNA, 19 nt, Artificial Sequence
  Description of Artificial Sequence: Synthetic oligonucleotide
agauggcuacuggacauga

SEQ ID NO: 1984757 - RNA, 19 nt, Artificial Sequence
  Description of Artificial Sequence: Synthetic oligonucleotide
caucaaccacagugucugg

SEQ ID NO: 1984758 - RNA, 19 nt, Artificial Sequence
  Description of Artificial Sequence: Synthetic oligonucleotide
cacgaggcuauucaagcaa

SEQ ID NO: 1984759 - RNA, 19 nt, Artificial Sequence
  Description of Artificial Sequence: Synthetic oligonucleotide
gucccuugaccaauggaac

SEQ ID NO: 1984760 - RNA, 19 nt, Artificial Sequence
  Description of Artificial Sequence: Synthetic oligonucleotide
uggagaggcgggcgguccc

SEQ ID NO: 1984761 - RNA, 19 nt, Artificial Sequence
  Description of Artificial Sequence: Synthetic oligonucleotide
uaggagcauuguccuacgu

SEQ ID NO: 1984762 - RNA, 19 nt, Artificial Sequence
  Description of Artificial Sequence: Synthetic oligonucleotide
caguguagaggacgcucag

SEQ ID NO: 1984763 - RNA, 19 nt, Artificial Sequence
  Description of Artificial Sequence: Synthetic oligonucleotide
aggacaggauucucccaga

SEQ ID NO: 1984764 - RNA, 19 nt, Artificial Sequence
  Description of Artificial Sequence: Synthetic oligonucleotide
cuauuagaagggauggcau

SEQ ID NO: 1984765 - RNA, 19 nt, Artificial Sequence
  Description of Artificial Sequence: Synthetic oligonucleotide
agcuugccuuccugcagag

SEQ ID NO: 1984766 - RNA, 19 nt, Artificial Sequence
  Description of Artificial Sequence: Synthetic oligonucleotide
gaacacgcuucauuuuaua

SEQ ID NO: 1984767 - RNA, 19 nt, Artificial Sequence
  Description of Artificial Sequence: Synthetic oligonucleotide
ggaauguggguguccuuug

SEQ ID NO: 1984768 - RNA, 19 nt, Artificial Sequence
  Description of Artificial Sequence: Synthetic oligonucleotide
ccuacgugcagccugacaa

SEQ ID NO: 1984769 - RNA, 19 nt, Artificial Sequence
  Description of Artificial Sequence: Synthetic oligonucleotide
gcuacuggacaugacacga

SEQ ID NO: 1984770 - RNA, 19 nt, Artificial Sequence
  Description of Artificial Sequence: Synthetic oligonucleotide
ugacggugggaggaggggu

SEQ ID NO: 1984771 - RNA, 19 nt, Artificial Sequence
  Description of Artificial Sequence: Synthetic oligonucleotide
acucuugcuuucuguuuaa

SEQ ID NO: 1984772 - RNA, 19 nt, Artificial Sequence
  Description of Artificial Sequence: Synthetic oligonucleotide
gcaacagcgucaaaaguga

SEQ ID NO: 1984773 - RNA, 19 nt, Artificial Sequence
  Description of Artificial Sequence: Synthetic oligonucleotide
uggcaaccuggguggaaug

SEQ ID NO: 1984774 - RNA, 19 nt, Artificial Sequence
  Description of Artificial Sequence: Synthetic oligonucleotide
gaccaaggucccucucggc

SEQ ID NO: 1984775 - RNA, 19 nt, Artificial Sequence
  Description of Artificial Sequence: Synthetic oligonucleotide
guuagcucugauguaaaau

SEQ ID NO: 1984776 - RNA, 19 nt, Artificial Sequence
  Description of Artificial Sequence: Synthetic oligonucleotide
aagggccgaagugcuuguc

SEQ ID NO: 1984777 - RNA, 19 nt, Artificial Sequence
  Description of Artificial Sequence: Synthetic oligonucleotide
caugcccagguggagucag

SEQ ID NO: 1984778 - RNA, 19 nt, Artificial Sequence
  Description of Artificial Sequence: Synthetic oligonucleotide
ucccuugucccuugaccaa

SEQ ID NO: 1984779 - RNA, 19 nt, Artificial Sequence
  Description of Artificial Sequence: Synthetic oligonucleotide
agucagcuggucauuaaua

SEQ ID NO: 1984780 - RNA, 19 nt, Artificial Sequence
  Description of Artificial Sequence: Synthetic oligonucleotide
ucccucucggcucgcuugu

SEQ ID NO: 1984781 - RNA, 19 nt, Artificial Sequence
  Description of Artificial Sequence: Synthetic oligonucleotide
cuugaccaauggaacucca

SEQ ID NO: 1984782 - RNA, 19 nt, Artificial Sequence
  Description of Artificial Sequence: Synthetic oligonucleotide
gugacggugggaggagggg

SEQ ID NO: 1984783 - RNA, 19 nt, Artificial Sequence
  Description of Artificial Sequence: Synthetic oligonucleotide
cucaggcaaaauucucgga

SEQ ID NO: 1984784 - RNA, 19 nt, Artificial Sequence
  Description of Artificial Sequence: Synthetic oligonucleotide
ucccacagguguggcaacc

SEQ ID NO: 1984785 - RNA, 19 nt, Artificial Sequence
  Description of Artificial Sequence: Synthetic oligonucleotide
guccuaucucccugcgagc

SEQ ID NO: 1984786 - RNA, 19 nt, Artificial Sequence
  Description of Artificial Sequence: Synthetic oligonucleotide
agauauugggacagagaua

SEQ ID NO: 1984787 - RNA, 19 nt, Artificial Sequence
  Description of Artificial Sequence: Synthetic oligonucleotide
gcguugagagaacuucccc

SEQ ID NO: 1984788 - RNA, 19 nt, Artificial Sequence
  Description of Artificial Sequence: Synthetic oligonucleotide
agaggacaauggucuuaug

SEQ ID NO: 1984789 - RNA, 19 nt, Artificial Sequence
  Description of Artificial Sequence: Synthetic oligonucleotide
caguccuguuagcuuuggc

SEQ ID NO: 1984790 - RNA, 19 nt, Artificial Sequence
  Description of Artificial Sequence: Synthetic oligonucleotide
augugacggugggaggagg

SEQ ID NO: 1984791 - RNA, 19 nt, Artificial Sequence
  Description of Artificial Sequence: Synthetic oligonucleotide
acgcuucauuuuauauagg

SEQ ID NO: 1984792 - RNA, 19 nt, Artificial Sequence
  Description of Artificial Sequence: Synthetic oligonucleotide
uuccugcagaggucugaga

SEQ ID NO: 1984793 - RNA, 19 nt, Artificial Sequence
  Description of Artificial Sequence: Synthetic oligonucleotide
ggacaauggucuuaugccu

SEQ ID NO: 1984794 - RNA, 19 nt, Artificial Sequence
  Description of Artificial Sequence: Synthetic oligonucleotide
gguguccuuuggaaagagg

SEQ ID NO: 1984795 - RNA, 19 nt, Artificial Sequence
  Description of Artificial Sequence: Synthetic oligonucleotide
ggaaguaaugaaggaaucu

SEQ ID NO: 1984796 - RNA, 19 nt, Artificial Sequence
  Description of Artificial Sequence: Synthetic oligonucleotide
caaaggaacacgcuucauu

SEQ ID NO: 1984797 - RNA, 19 nt, Artificial Sequence
  Description of Artificial Sequence: Synthetic oligonucleotide
cgcuucauuuuauauagga

SEQ ID NO: 1984798 - RNA, 19 nt, Artificial Sequence
  Description of Artificial Sequence: Synthetic oligonucleotide
ggcucgcuuguacaugccc

SEQ ID NO: 1984799 - RNA, 19 nt, Artificial Sequence
  Description of Artificial Sequence: Synthetic oligonucleotide
ggcguugagagaacuuccc

SEQ ID NO: 1984800 - RNA, 19 nt, Artificial Sequence
  Description of Artificial Sequence: Synthetic oligonucleotide
cuggccugggauuugcaua

SEQ ID NO: 1984801 - RNA, 19 nt, Artificial Sequence
  Description of Artificial Sequence: Synthetic oligonucleotide
acgggcacaggcaucaaua

SEQ ID NO: 1984802 - RNA, 19 nt, Artificial Sequence
  Description of Artificial Sequence: Synthetic oligonucleotide
agcuggucauuaauaguau

SEQ ID NO: 1984803 - RNA, 19 nt, Artificial Sequence
  Description of Artificial Sequence: Synthetic oligonucleotide
aucucccugcgagccacgg

SEQ ID NO: 1984804 - RNA, 19 nt, Artificial Sequence
  Description of Artificial Sequence: Synthetic oligonucleotide
uugcagcauaaaugaguuu

SEQ ID NO: 1984805 - RNA, 19 nt, Artificial Sequence
  Description of Artificial Sequence: Synthetic oligonucleotide
cuguuagcuuuggccauug

SEQ ID NO: 1984806 - RNA, 19 nt, Artificial Sequence
  Description of Artificial Sequence: Synthetic oligonucleotide
aggagggguuccuggccug

SEQ ID NO: 1984807 - RNA, 19 nt, Artificial Sequence
  Description of Artificial Sequence: Synthetic oligonucleotide
ucccugcgagccacgggca

SEQ ID NO: 1984808 - RNA, 19 nt, Artificial Sequence
  Description of Artificial Sequence: Synthetic oligonucleotide
gaggacgcucaggcaacag

SEQ ID NO: 1984809 - RNA, 19 nt, Artificial Sequence
  Description of Artificial Sequence: Synthetic oligonucleotide
cagauggcuacuggacaug

SEQ ID NO: 1984810 - RNA, 19 nt, Artificial Sequence
  Description of Artificial Sequence: Synthetic oligonucleotide
caugaccaaggucccucuc

SEQ ID NO: 1984811 - RNA, 19 nt, Artificial Sequence
  Description of Artificial Sequence: Synthetic oligonucleotide
agaagcuguccaguccuau

SEQ ID NO: 1984812 - RNA, 19 nt, Artificial Sequence
  Description of Artificial Sequence: Synthetic oligonucleotide
aaggucccucucggcucgc

SEQ ID NO: 1984813 - RNA, 19 nt, Artificial Sequence
  Description of Artificial Sequence: Synthetic oligonucleotide
gcgucaaaagugaacucac

SEQ ID NO: 1984814 - RNA, 19 nt, Artificial Sequence
  Description of Artificial Sequence: Synthetic oligonucleotide
ccuugaccaauggaacucc

SEQ ID NO: 1984815 - RNA, 19 nt, Artificial Sequence
  Description of Artificial Sequence: Synthetic oligonucleotide
auuguccuacgugcagccu

SEQ ID NO: 1984816 - RNA, 19 nt, Artificial Sequence
  Description of Artificial Sequence: Synthetic oligonucleotide
agggguuccuggccuggga

SEQ ID NO: 1984817 - RNA, 19 nt, Artificial Sequence
  Description of Artificial Sequence: Synthetic oligonucleotide
acggugggaggagggguuc

SEQ ID NO: 1984818 - RNA, 19 nt, Artificial Sequence
  Description of Artificial Sequence: Synthetic oligonucleotide
uguggcaaccuggguggaa

SEQ ID NO: 1984819 - RNA, 19 nt, Artificial Sequence
  Description of Artificial Sequence: Synthetic oligonucleotide
ggggacagcuggaaauacc

SEQ ID NO: 1984820 - RNA, 19 nt, Artificial Sequence
  Description of Artificial Sequence: Synthetic oligonucleotide
ggauuugcauaggggagga

SEQ ID NO: 1984821 - RNA, 19 nt, Artificial Sequence
  Description of Artificial Sequence: Synthetic oligonucleotide
gugcuuguccaaauggcgu

SEQ ID NO: 1984822 - RNA, 19 nt, Artificial Sequence
  Description of Artificial Sequence: Synthetic oligonucleotide
auauugggacagagauaug

SEQ ID NO: 1984823 - RNA, 19 nt, Artificial Sequence
  Description of Artificial Sequence: Synthetic oligonucleotide
cgaggcuauucaagcaacc

SEQ ID NO: 1984824 - RNA, 19 nt, Artificial Sequence
  Description of Artificial Sequence: Synthetic oligonucleotide
ccaaggucccucucggcuc

SEQ ID NO: 1984825 - RNA, 19 nt, Artificial Sequence
  Description of Artificial Sequence: Synthetic oligonucleotide
ccaguguagaggacgcuca

SEQ ID NO: 1984826 - RNA, 19 nt, Artificial Sequence
  Description of Artificial Sequence: Synthetic oligonucleotide
gcuuguccaaauggcguug

SEQ ID NO: 1984827 - RNA, 19 nt, Artificial Sequence
  Description of Artificial Sequence: Synthetic oligonucleotide
ccuccauauuagacauuag

SEQ ID NO: 1984828 - RNA, 19 nt, Artificial Sequence
  Description of Artificial Sequence: Synthetic oligonucleotide
caacagcgucaaaagugaa

SEQ ID NO: 1984829 - RNA, 19 nt, Artificial Sequence
  Description of Artificial Sequence: Synthetic oligonucleotide
aggcuggaucuggauggag

SEQ ID NO: 1984830 - RNA, 19 nt, Artificial Sequence
  Description of Artificial Sequence: Synthetic oligonucleotide
gcgagccacgggcacaggc

SEQ ID NO: 1984831 - RNA, 19 nt, Artificial Sequence
  Description of Artificial Sequence: Synthetic oligonucleotide
agaggacgcucaggcaaca

SEQ ID NO: 1984832 - RNA, 19 nt, Artificial Sequence
  Description of Artificial Sequence: Synthetic oligonucleotide
ccaguccuaucucccugcg

SEQ ID NO: 1984833 - RNA, 19 nt, Artificial Sequence
  Description of Artificial Sequence: Synthetic oligonucleotide
acgugcagccugacaagcu

SEQ ID NO: 1984834 - RNA, 19 nt, Artificial Sequence
  Description of Artificial Sequence: Synthetic oligonucleotide
ggauucucccagauuguaa

SEQ ID NO: 1984835 - RNA, 19 nt, Artificial Sequence
  Description of Artificial Sequence: Synthetic oligonucleotide
ggguguccuuuggaaagag

SEQ ID NO: 1984836 - RNA, 19 nt, Artificial Sequence
  Description of Artificial Sequence: Synthetic oligonucleotide
gaagggccgaagugcuugu

SEQ ID NO: 1984837 - RNA, 19 nt, Artificial Sequence
  Description of Artificial Sequence: Synthetic oligonucleotide
ggggcccaagcaauguccc

SEQ ID NO: 1984838 - RNA, 19 nt, Artificial Sequence
  Description of Artificial Sequence: Synthetic oligonucleotide
ggugucugucauaugacau

SEQ ID NO: 1984839 - RNA, 19 nt, Artificial Sequence
  Description of Artificial Sequence: Synthetic oligonucleotide
gcucgcuuguacaugccca

SEQ ID NO: 1984840 - RNA, 19 nt, Artificial Sequence
  Description of Artificial Sequence: Synthetic oligonucleotide
gucccgugcaguccuguua

SEQ ID NO: 1984841 - RNA, 19 nt, Artificial Sequence
  Description of Artificial Sequence: Synthetic oligonucleotide
agaggcgggcggucccgug

SEQ ID NO: 1984842 - RNA, 19 nt, Artificial Sequence
  Description of Artificial Sequence: Synthetic oligonucleotide
cacaggcaucaauacagau

SEQ ID NO: 1984843 - RNA, 19 nt, Artificial Sequence
  Description of Artificial Sequence: Synthetic oligonucleotide
ccuugucccuugaccaaug

SEQ ID NO: 1984844 - RNA, 19 nt, Artificial Sequence
  Description of Artificial Sequence: Synthetic oligonucleotide
uccccacaucaaccacagu

SEQ ID NO: 1984845 - RNA, 19 nt, Artificial Sequence
  Description of Artificial Sequence: Synthetic oligonucleotide
gaaaucugguaggguuugu

SEQ ID NO: 1984846 - RNA, 19 nt, Artificial Sequence
  Description of Artificial Sequence: Synthetic oligonucleotide
caggauucucccagauugu

SEQ ID NO: 1984847 - RNA, 19 nt, Artificial Sequence
  Description of Artificial Sequence: Synthetic oligonucleotide
acaugcccagguggaguca

SEQ ID NO: 1984848 - RNA, 19 nt, Artificial Sequence
  Description of Artificial Sequence: Synthetic oligonucleotide
ccagauuguaacucuugcu

SEQ ID NO: 1984849 - RNA, 19 nt, Artificial Sequence
  Description of Artificial Sequence: Synthetic oligonucleotide
gguggaauguggguguccu

SEQ ID NO: 1984850 - RNA, 19 nt, Artificial Sequence
  Description of Artificial Sequence: Synthetic oligonucleotide
ccuucccugggaaauuuaa

SEQ ID NO: 1984851 - RNA, 19 nt, Artificial Sequence
  Description of Artificial Sequence: Synthetic oligonucleotide
ggagaggcgggcggucccg

SEQ ID NO: 1984852 - RNA, 19 nt, Artificial Sequence
  Description of Artificial Sequence: Synthetic oligonucleotide
caguccuaucucccugcga

SEQ ID NO: 1984853 - RNA, 19 nt, Artificial Sequence
  Description of Artificial Sequence: Synthetic oligonucleotide
gccugacaagcuccuuccc

SEQ ID NO: 1984854 - RNA, 19 nt, Artificial Sequence
  Description of Artificial Sequence: Synthetic oligonucleotide
caauggucuuaugccucca

SEQ ID NO: 1984855 - RNA, 19 nt, Artificial Sequence
  Description of Artificial Sequence: Synthetic oligonucleotide
ccacagguguggcaaccug

SEQ ID NO: 1984856 - RNA, 19 nt, Artificial Sequence
  Description of Artificial Sequence: Synthetic oligonucleotide
cagguggagucagcugguc

SEQ ID NO: 1984857 - RNA, 19 nt, Artificial Sequence
  Description of Artificial Sequence: Synthetic oligonucleotide
gacgcucaggcaacagcgu

SEQ ID NO: 1984858 - RNA, 19 nt, Artificial Sequence
  Description of Artificial Sequence: Synthetic oligonucleotide
cccguuagcucugauguaa

SEQ ID NO: 1984859 - RNA, 19 nt, Artificial Sequence
  Description of Artificial Sequence: Synthetic oligonucleotide
gcccagguggagucagcug

SEQ ID NO: 1984860 - RNA, 19 nt, Artificial Sequence
  Description of Artificial Sequence: Synthetic oligonucleotide
gcuugccuuccugcagagg

SEQ ID NO: 1984861 - RNA, 19 nt, Artificial Sequence
  Description of Artificial Sequence: Synthetic oligonucleotide
ggguggaaugugggugucc

SEQ ID NO: 1984862 - RNA, 19 nt, Artificial Sequence
  Description of Artificial Sequence: Synthetic oligonucleotide
aguaugcuccugagauauu

SEQ ID NO: 1984863 - RNA, 19 nt, Artificial Sequence
  Description of Artificial Sequence: Synthetic oligonucleotide
cucuugcuuucuguuuaaa

SEQ ID NO: 1984864 - RNA, 19 nt, Artificial Sequence
  Description of Artificial Sequence: Synthetic oligonucleotide
cugguaggguuuguuuugu

SEQ ID NO: 1984865 - RNA, 19 nt, Artificial Sequence
  Description of Artificial Sequence: Synthetic oligonucleotide
ggacaugacacgaggcuau

SEQ ID NO: 1984866 - RNA, 19 nt, Artificial Sequence
  Description of Artificial Sequence: Synthetic oligonucleotide
cauaggggaggaagagcuu

SEQ ID NO: 1984867 - RNA, 19 nt, Artificial Sequence
  Description of Artificial Sequence: Synthetic oligonucleotide
gcagcauaaaugaguuuau

SEQ ID NO: 1984868 - RNA, 19 nt, Artificial Sequence
  Description of Artificial Sequence: Synthetic oligonucleotide
ggccgaagugcuuguccaa

SEQ ID NO: 1984869 - RNA, 19 nt, Artificial Sequence
  Description of Artificial Sequence: Synthetic oligonucleotide
gacggugggaggagggguu

SEQ ID NO: 1984870 - RNA, 19 nt, Artificial Sequence
  Description of Artificial Sequence: Synthetic oligonucleotide
ggaacacgcuucauuuuau

SEQ ID NO: 1984871 - RNA, 19 nt, Artificial Sequence
  Description of Artificial Sequence: Synthetic oligonucleotide
gacaugacacgaggcuauu

SEQ ID NO: 1984872 - RNA, 19 nt, Artificial Sequence
  Description of Artificial Sequence: Synthetic oligonucleotide
ccuaucucccugcgagcca

SEQ ID NO: 1984873 - RNA, 19 nt, Artificial Sequence
  Description of Artificial Sequence: Synthetic oligonucleotide
ggcggucccgugcaguccu

SEQ ID NO: 1984874 - RNA, 19 nt, Artificial Sequence
  Description of Artificial Sequence: Synthetic oligonucleotide
ccguuagcucugauguaaa

SEQ ID NO: 1984875 - RNA, 19 nt, Artificial Sequence
  Description of Artificial Sequence: Synthetic oligonucleotide
gucugcccacagaguuccc

SEQ ID NO: 1984876 - RNA, 19 nt, Artificial Sequence
  Description of Artificial Sequence: Synthetic oligonucleotide
cguuagcucugauguaaaa

SEQ ID NO: 1984877 - RNA, 19 nt, Artificial Sequence
  Description of Artificial Sequence: Synthetic oligonucleotide
ggguccaggacaggauucu

SEQ ID NO: 1984878 - RNA, 19 nt, Artificial Sequence
  Description of Artificial Sequence: Synthetic oligonucleotide
guccuacgugcagccugac

SEQ ID NO: 1984879 - RNA, 19 nt, Artificial Sequence
  Description of Artificial Sequence: Synthetic oligonucleotide
cacgggcacaggcaucaau

SEQ ID NO: 1984880 - RNA, 19 nt, Artificial Sequence
  Description of Artificial Sequence: Synthetic oligonucleotide
guggaauguggguguccuu

SEQ ID NO: 1984881 - RNA, 19 nt, Artificial Sequence
  Description of Artificial Sequence: Synthetic oligonucleotide
gggcggucccgugcagucc

SEQ ID NO: 1984882 - RNA, 19 nt, Artificial Sequence
  Description of Artificial Sequence: Synthetic oligonucleotide
cgggcggucccgugcaguc

SEQ ID NO: 1984883 - RNA, 19 nt, Artificial Sequence
  Description of Artificial Sequence: Synthetic oligonucleotide
cuccaguguagaggacgcu

SEQ ID NO: 1984884 - RNA, 19 nt, Artificial Sequence
  Description of Artificial Sequence: Synthetic oligonucleotide
gagaggcgggcggucccgu

SEQ ID NO: 1984885 - RNA, 19 nt, Artificial Sequence
  Description of Artificial Sequence: Synthetic oligonucleotide
gccguccccguuagcucug

SEQ ID NO: 1984886 - RNA, 19 nt, Artificial Sequence
  Description of Artificial Sequence: Synthetic oligonucleotide
ccgaagugcuuguccaaau

SEQ ID NO: 1984887 - RNA, 19 nt, Artificial Sequence
  Description of Artificial Sequence: Synthetic oligonucleotide
caccuccauauuagacauu

SEQ ID NO: 1984888 - RNA, 19 nt, Artificial Sequence
  Description of Artificial Sequence: Synthetic oligonucleotide
ggauggcauuuguucuguu

SEQ ID NO: 1984889 - RNA, 19 nt, Artificial Sequence
  Description of Artificial Sequence: Synthetic oligonucleotide
ggucccgugcaguccuguu

SEQ ID NO: 1984890 - RNA, 19 nt, Artificial Sequence
  Description of Artificial Sequence: Synthetic oligonucleotide
ccccguuagcucugaugua

SEQ ID NO: 1984891 - RNA, 19 nt, Artificial Sequence
  Description of Artificial Sequence: Synthetic oligonucleotide
ccacagggugucugucaua

SEQ ID NO: 1984892 - RNA, 19 nt, Artificial Sequence
  Description of Artificial Sequence: Synthetic oligonucleotide
gcggucccgugcaguccug

SEQ ID NO: 1984893 - RNA, 19 nt, Artificial Sequence
  Description of Artificial Sequence: Synthetic oligonucleotide
cccuugucccuugaccaau

SEQ ID NO: 1984894 - RNA, 19 nt, Artificial Sequence
  Description of Artificial Sequence: Synthetic oligonucleotide
ccguccccguuagcucuga

SEQ ID NO: 1984895 - RNA, 19 nt, Artificial Sequence
  Description of Artificial Sequence: Synthetic oligonucleotide
cggucccgugcaguccugu

SEQ ID NO: 1984896 - RNA, 19 nt, Artificial Sequence
  Description of Artificial Sequence: Synthetic oligonucleotide
cguccccguuagcucugau

SEQ ID NO: 1984897 - RNA, 19 nt, Artificial Sequence
  Description of Artificial Sequence: Synthetic oligonucleotide
aaugcaaucaaacauugcc

SEQ ID NO: 1984898 - RNA, 19 nt, Artificial Sequence
  Description of Artificial Sequence: Synthetic oligonucleotide
aaaaguauccgcuauggug

SEQ ID NO: 1984899 - RNA, 19 nt, Artificial Sequence
  Description of Artificial Sequence: Synthetic oligonucleotide
aagacauugaugaugaagg

SEQ ID NO: 1984900 - RNA, 19 nt, Artificial Sequence
  Description of Artificial Sequence: Synthetic oligonucleotide
acaacgaagacauugauga

SEQ ID NO: 1984901 - RNA, 19 nt, Artificial Sequence
  Description of Artificial Sequence: Synthetic oligonucleotide
uauaccacuacaaaguaca

SEQ ID NO: 1984902 - RNA, 19 nt, Artificial Sequence
  Description of Artificial Sequence: Synthetic oligonucleotide
gucaucuagacacaaaugg

SEQ ID NO: 1984903 - RNA, 19 nt, Artificial Sequence
  Description of Artificial Sequence: Synthetic oligonucleotide
acgaugaggaccaagaucc

SEQ ID NO: 1984904 - RNA, 19 nt, Artificial Sequence
  Description of Artificial Sequence: Synthetic oligonucleotide
aaacucacucauuacuggc

SEQ ID NO: 1984905 - RNA, 19 nt, Artificial Sequence
  Description of Artificial Sequence: Synthetic oligonucleotide
aaaugcuucagcaaagacg

SEQ ID NO: 1984906 - RNA, 19 nt, Artificial Sequence
  Description of Artificial Sequence: Synthetic oligonucleotide
uguuagaugcucuacaucu

SEQ ID NO: 1984907 - RNA, 19 nt, Artificial Sequence
  Description of Artificial Sequence: Synthetic oligonucleotide
uguugugugggcaugauga

SEQ ID NO: 1984908 - RNA, 19 nt, Artificial Sequence
  Description of Artificial Sequence: Synthetic oligonucleotide
uuggaagacagcaacaagc

SEQ ID NO: 1984909 - RNA, 19 nt, Artificial Sequence
  Description of Artificial Sequence: Synthetic oligonucleotide
gaaacaaagagugcgaugc

SEQ ID NO: 1984910 - RNA, 19 nt, Artificial Sequence
  Description of Artificial Sequence: Synthetic oligonucleotide
cuuaaagucucucuggccg

SEQ ID NO: 1984911 - RNA, 19 nt, Artificial Sequence
  Description of Artificial Sequence: Synthetic oligonucleotide
cuagacuugacuaaagcag

SEQ ID NO: 1984912 - RNA, 19 nt, Artificial Sequence
  Description of Artificial Sequence: Synthetic oligonucleotide
agaaauacaaaaguauccg

SEQ ID NO: 1984913 - RNA, 19 nt, Artificial Sequence
  Description of Artificial Sequence: Synthetic oligonucleotide
uaaagcagaaugcagguac

SEQ ID NO: 1984914 - RNA, 19 nt, Artificial Sequence
  Description of Artificial Sequence: Synthetic oligonucleotide
accacuacaaaguacaugu

SEQ ID NO: 1984915 - RNA, 19 nt, Artificial Sequence
  Description of Artificial Sequence: Synthetic oligonucleotide
ucaucuagacacaaauggg

SEQ ID NO: 1984916 - RNA, 19 nt, Artificial Sequence
  Description of Artificial Sequence: Synthetic oligonucleotide
aaaggggaagcuguaaagc

SEQ ID NO: 1984917 - RNA, 19 nt, Artificial Sequence
  Description of Artificial Sequence: Synthetic oligonucleotide
agacacuuggcacaaaagg

SEQ ID NO: 1984918 - RNA, 19 nt, Artificial Sequence
  Description of Artificial Sequence: Synthetic oligonucleotide
uauuccauuggaaaacuca

SEQ ID NO: 1984919 - RNA, 19 nt, Artificial Sequence
  Description of Artificial Sequence: Synthetic oligonucleotide
uguaaagcucugcagaaca

SEQ ID NO: 1984920 - RNA, 19 nt, Artificial Sequence
  Description of Artificial Sequence: Synthetic oligonucleotide
gacguauaccacuacaaag

SEQ ID NO: 1984921 - RNA, 19 nt, Artificial Sequence
  Description of Artificial Sequence: Synthetic oligonucleotide
uuaacagacacuuggcaca

SEQ ID NO: 1984922 - RNA, 19 nt, Artificial Sequence
  Description of Artificial Sequence: Synthetic oligonucleotide
aagagugcgaugcaggacu

SEQ ID NO: 1984923 - RNA, 19 nt, Artificial Sequence
  Description of Artificial Sequence: Synthetic oligonucleotide
cuugacuaaagcagaaugc

SEQ ID NO: 1984924 - RNA, 19 nt, Artificial Sequence
  Description of Artificial Sequence: Synthetic oligonucleotide
acccaaguaaaacacaaag

SEQ ID NO: 1984925 - RNA, 19 nt, Artificial Sequence
  Description of Artificial Sequence: Synthetic oligonucleotide
gacuaaagcagaaugcagg

SEQ ID NO: 1984926 - RNA, 19 nt, Artificial Sequence
  Description of Artificial Sequence: Synthetic oligonucleotide
aaaguauccgcuaugguga

SEQ ID NO: 1984927 - RNA, 19 nt, Artificial Sequence
  Description of Artificial Sequence: Synthetic oligonucleotide
auauccaaacgugagggcc

SEQ ID NO: 1984928 - RNA, 19 nt, Artificial Sequence
  Description of Artificial Sequence: Synthetic oligonucleotide
acuugacuaaagcagaaug

SEQ ID NO: 1984929 - RNA, 19 nt, Artificial Sequence
  Description of Artificial Sequence: Synthetic oligonucleotide
uuaccuuuguucaaaacau

SEQ ID NO: 1984930 - RNA, 19 nt, Artificial Sequence
  Description of Artificial Sequence: Synthetic oligonucleotide
augaaggaaacaaagagug

SEQ ID NO: 1984931 - RNA, 19 nt, Artificial Sequence
  Description of Artificial Sequence: Synthetic oligonucleotide
cacauauagagccacgugc

SEQ ID NO: 1984932 - RNA, 19 nt, Artificial Sequence
  Description of Artificial Sequence: Synthetic oligonucleotide
cagagauuuguuaacagac

SEQ ID NO: 1984933 - RNA, 19 nt, Artificial Sequence
  Description of Artificial Sequence: Synthetic oligonucleotide
aauacaaaaguauccgcua

SEQ ID NO: 1984934 - RNA, 19 nt, Artificial Sequence
  Description of Artificial Sequence: Synthetic oligonucleotide
cuguaacauacucauaucc

SEQ ID NO: 1984935 - RNA, 19 nt, Artificial Sequence
  Description of Artificial Sequence: Synthetic oligonucleotide
gaagacauugaugaugaag

SEQ ID NO: 1984936 - RNA, 19 nt, Artificial Sequence
  Description of Artificial Sequence: Synthetic oligonucleotide
aacauucaggaagucauuc

SEQ ID NO: 1984937 - RNA, 19 nt, Artificial Sequence
  Description of Artificial Sequence: Synthetic oligonucleotide
acuaacagagauuuguuaa

SEQ ID NO: 1984938 - RNA, 19 nt, Artificial Sequence
  Description of Artificial Sequence: Synthetic oligonucleotide
uccgcuauggugaugagaa

SEQ ID NO: 1984939 - RNA, 19 nt, Artificial Sequence
  Description of Artificial Sequence: Synthetic oligonucleotide
aacgaagacauugaugaug

SEQ ID NO: 1984940 - RNA, 19 nt, Artificial Sequence
  Description of Artificial Sequence: Synthetic oligonucleotide
aaagcuugugaacgugagg

SEQ ID NO: 1984941 - RNA, 19 nt, Artificial Sequence
  Description of Artificial Sequence: Synthetic oligonucleotide
aagcuugugaacgugagga

SEQ ID NO: 1984942 - RNA, 19 nt, Artificial Sequence
  Description of Artificial Sequence: Synthetic oligonucleotide
agucauucaucccuguuag

SEQ ID NO: 1984943 - RNA, 19 nt, Artificial Sequence
  Description of Artificial Sequence: Synthetic oligonucleotide
aauguucuuaaagucucuc

SEQ ID NO: 1984944 - RNA, 19 nt, Artificial Sequence
  Description of Artificial Sequence: Synthetic oligonucleotide
aacgugagggccauaauag

SEQ ID NO: 1984945 - RNA, 19 nt, Artificial Sequence
  Description of Artificial Sequence: Synthetic oligonucleotide
acauacucauauccaaacg

SEQ ID NO: 1984946 - RNA, 19 nt, Artificial Sequence
  Description of Artificial Sequence: Synthetic oligonucleotide
uuggaaaacucacucauua

SEQ ID NO: 1984947 - RNA, 19 nt, Artificial Sequence
  Description of Artificial Sequence: Synthetic oligonucleotide
aacauugccaacccaagua

SEQ ID NO: 1984948 - RNA, 19 nt, Artificial Sequence
  Description of Artificial Sequence: Synthetic oligonucleotide
acgaacaugccccugagca

SEQ ID NO: 1984949 - RNA, 19 nt, Artificial Sequence
  Description of Artificial Sequence: Synthetic oligonucleotide
aacucacucauuacuggcc

SEQ ID NO: 1984950 - RNA, 19 nt, Artificial Sequence
  Description of Artificial Sequence: Synthetic oligonucleotide
agccacgugcccuaguucc

SEQ ID NO: 1984951 - RNA, 19 nt, Artificial Sequence
  Description of Artificial Sequence: Synthetic oligonucleotide
acaaaaguauccgcuaugg

SEQ ID NO: 1984952 - RNA, 19 nt, Artificial Sequence
  Description of Artificial Sequence: Synthetic oligonucleotide
ucgaacuuccugcuuauug

SEQ ID NO: 1984953 - RNA, 19 nt, Artificial Sequence
  Description of Artificial Sequence: Synthetic oligonucleotide
ugacuaaagcagaaugcag

SEQ ID NO: 1984954 - RNA, 19 nt, Artificial Sequence
  Description of Artificial Sequence: Synthetic oligonucleotide
uuacuggccgcaaagcuug

SEQ ID NO: 1984955 - RNA, 19 nt, Artificial Sequence
  Description of Artificial Sequence: Synthetic oligonucleotide
gauggcacgaacaugcccc

SEQ ID NO: 1984956 - RNA, 19 nt, Artificial Sequence
  Description of Artificial Sequence: Synthetic oligonucleotide
guuaacagacacuuggcac

SEQ ID NO: 1984957 - RNA, 19 nt, Artificial Sequence
  Description of Artificial Sequence: Synthetic oligonucleotide
agcaaagacggagacaacg

SEQ ID NO: 1984958 - RNA, 19 nt, Artificial Sequence
  Description of Artificial Sequence: Synthetic oligonucleotide
aaggggaagcuguaaagcu

SEQ ID NO: 1984959 - RNA, 19 nt, Artificial Sequence
  Description of Artificial Sequence: Synthetic oligonucleotide
uagucaucuagacacaaau

SEQ ID NO: 1984960 - RNA, 19 nt, Artificial Sequence
  Description of Artificial Sequence: Synthetic oligonucleotide
uugacuaaagcagaaugca

SEQ ID NO: 1984961 - RNA, 19 nt, Artificial Sequence
  Description of Artificial Sequence: Synthetic oligonucleotide
cugcauaucagaaccaaug

SEQ ID NO: 1984962 - RNA, 19 nt, Artificial Sequence
  Description of Artificial Sequence: Synthetic oligonucleotide
acacuuggcacaaaagggc

SEQ ID NO: 1984963 - RNA, 19 nt, Artificial Sequence
  Description of Artificial Sequence: Synthetic oligonucleotide
acuuccugcauaucagaac

SEQ ID NO: 1984964 - RNA, 19 nt, Artificial Sequence
  Description of Artificial Sequence: Synthetic oligonucleotide
gaagacagcaacaagcaga

SEQ ID NO: 1984965 - RNA, 19 nt, Artificial Sequence
  Description of Artificial Sequence: Synthetic oligonucleotide
ugcgaugcaggacucaaug

SEQ ID NO: 1984966 - RNA, 19 nt, Artificial Sequence
  Description of Artificial Sequence: Synthetic oligonucleotide
aggagauugauggcgaugg

SEQ ID NO: 1984967 - RNA, 19 nt, Artificial Sequence
  Description of Artificial Sequence: Synthetic oligonucleotide
ucaaaacauuugaacaaac

SEQ ID NO: 1984968 - RNA, 19 nt, Artificial Sequence
  Description of Artificial Sequence: Synthetic oligonucleotide
uaauagugaugagaaagcc

SEQ ID NO: 1984969 - RNA, 19 nt, Artificial Sequence
  Description of Artificial Sequence: Synthetic oligonucleotide
auuccauuggaaaacucac

SEQ ID NO: 1984970 - RNA, 19 nt, Artificial Sequence
  Description of Artificial Sequence: Synthetic oligonucleotide
aaacgugagggccauaaua

SEQ ID NO: 1984971 - RNA, 19 nt, Artificial Sequence
  Description of Artificial Sequence: Synthetic oligonucleotide
acuguaacauacucauauc

SEQ ID NO: 1984972 - RNA, 19 nt, Artificial Sequence
  Description of Artificial Sequence: Synthetic oligonucleotide
acuaaagcagaaugcaggu

SEQ ID NO: 1984973 - RNA, 19 nt, Artificial Sequence
  Description of Artificial Sequence: Synthetic oligonucleotide
aacaaagagugcgaugcag

SEQ ID NO: 1984974 - RNA, 19 nt, Artificial Sequence
  Description of Artificial Sequence: Synthetic oligonucleotide
cuuuguucaaaacauuuga

SEQ ID NO: 1984975 - RNA, 19 nt, Artificial Sequence
  Description of Artificial Sequence: Synthetic oligonucleotide
uacucauauccaaacguga

SEQ ID NO: 1984976 - RNA, 19 nt, Artificial Sequence
  Description of Artificial Sequence: Synthetic oligonucleotide
acucacucauuacuggccg

SEQ ID NO: 1984977 - RNA, 19 nt, Artificial Sequence
  Description of Artificial Sequence: Synthetic oligonucleotide
ugcagaacauucaggaagu

SEQ ID NO: 1984978 - RNA, 19 nt, Artificial Sequence
  Description of Artificial Sequence: Synthetic oligonucleotide
agggccauaauagugauga

SEQ ID NO: 1984979 - RNA, 19 nt, Artificial Sequence
  Description of Artificial Sequence: Synthetic oligonucleotide
aaagggcuuagagaaaaug

SEQ ID NO: 1984980 - RNA, 19 nt, Artificial Sequence
  Description of Artificial Sequence: Synthetic oligonucleotide
gagugcuacagccugaaca

SEQ ID NO: 1984981 - RNA, 19 nt, Artificial Sequence
  Description of Artificial Sequence: Synthetic oligonucleotide
cuaacagagauuuguuaac

SEQ ID NO: 1984982 - RNA, 19 nt, Artificial Sequence
  Description of Artificial Sequence: Synthetic oligonucleotide
agauaggccacgcuaacca

SEQ ID NO: 1984983 - RNA, 19 nt, Artificial Sequence
  Description of Artificial Sequence: Synthetic oligonucleotide
cucauauccaaacgugagg

SEQ ID NO: 1984984 - RNA, 19 nt, Artificial Sequence
  Description of Artificial Sequence: Synthetic oligonucleotide
ugauggaacagacgaugag

SEQ ID NO: 1984985 - RNA, 19 nt, Artificial Sequence
  Description of Artificial Sequence: Synthetic oligonucleotide
aagaucccaccagcgaucc

SEQ ID NO: 1984986 - RNA, 19 nt, Artificial Sequence
  Description of Artificial Sequence: Synthetic oligonucleotide
cacaguguucagaagguag

SEQ ID NO: 1984987 - RNA, 19 nt, Artificial Sequence
  Description of Artificial Sequence: Synthetic oligonucleotide
aaagagugcgaugcaggac

SEQ ID NO: 1984988 - RNA, 19 nt, Artificial Sequence
  Description of Artificial Sequence: Synthetic oligonucleotide
aacuaacagagauuuguua

SEQ ID NO: 1984989 - RNA, 19 nt, Artificial Sequence
  Description of Artificial Sequence: Synthetic oligonucleotide
ucuuaaagucucucuggcc

SEQ ID NO: 1984990 - RNA, 19 nt, Artificial Sequence
  Description of Artificial Sequence: Synthetic oligonucleotide
ucaccucugaacuaacaga

SEQ ID NO: 1984991 - RNA, 19 nt, Artificial Sequence
  Description of Artificial Sequence: Synthetic oligonucleotide
acaggggaacccuuccugc

SEQ ID NO: 1984992 - RNA, 19 nt, Artificial Sequence
  Description of Artificial Sequence: Synthetic oligonucleotide
aagggcuuagagaaaaugu

SEQ ID NO: 1984993 - RNA, 19 nt, Artificial Sequence
  Description of Artificial Sequence: Synthetic oligonucleotide
uuauuggccgguuuaccug

SEQ ID NO: 1984994 - RNA, 19 nt, Artificial Sequence
  Description of Artificial Sequence: Synthetic oligonucleotide
augaaagacaggcccaaug

SEQ ID NO: 1984995 - RNA, 19 nt, Artificial Sequence
  Description of Artificial Sequence: Synthetic oligonucleotide
agcugucaaucccaggugg

SEQ ID NO: 1984996 - RNA, 19 nt, Artificial Sequence
  Description of Artificial Sequence: Synthetic oligonucleotide
aguacauguugauggaaca

SEQ ID NO: 1984997 - RNA, 19 nt, Artificial Sequence
  Description of Artificial Sequence: Synthetic oligonucleotide
cauguugauggaacagacg

SEQ ID NO: 1984998 - RNA, 19 nt, Artificial Sequence
  Description of Artificial Sequence: Synthetic oligonucleotide
ugggcaugaugacagcucc

SEQ ID NO: 1984999 - RNA, 19 nt, Artificial Sequence
  Description of Artificial Sequence: Synthetic oligonucleotide
aaaugggucagcauccaca

SEQ ID NO: 1985000 - RNA, 19 nt, Artificial Sequence
  Description of Artificial Sequence: Synthetic oligonucleotide
uugauggaacagacgauga

SEQ ID NO: 1985001 - RNA, 19 nt, Artificial Sequence
  Description of Artificial Sequence: Synthetic oligonucleotide
ccguuagucaucuagacac

SEQ ID NO: 1985002 - RNA, 19 nt, Artificial Sequence
  Description of Artificial Sequence: Synthetic oligonucleotide
agaacauucaggaagucau

SEQ ID NO: 1985003 - RNA, 19 nt, Artificial Sequence
  Description of Artificial Sequence: Synthetic oligonucleotide
ucauucaucccuguuagau

SEQ ID NO: 1985004 - RNA, 19 nt, Artificial Sequence
  Description of Artificial Sequence: Synthetic oligonucleotide
agguacauguugugugggc

SEQ ID NO: 1985005 - RNA, 19 nt, Artificial Sequence
  Description of Artificial Sequence: Synthetic oligonucleotide
uaacagagauuuguuaaca

SEQ ID NO: 1985006 - RNA, 19 nt, Artificial Sequence
  Description of Artificial Sequence: Synthetic oligonucleotide
uggacguauaccacuacaa

SEQ ID NO: 1985007 - RNA, 19 nt, Artificial Sequence
  Description of Artificial Sequence: Synthetic oligonucleotide
cucauuacuggccgcaaag

SEQ ID NO: 1985008 - RNA, 19 nt, Artificial Sequence
  Description of Artificial Sequence: Synthetic oligonucleotide
ugccaacccaaguaaaaca

SEQ ID NO: 1985009 - RNA, 19 nt, Artificial Sequence
  Description of Artificial Sequence: Synthetic oligonucleotide
uauuggccgguuuaccugc

SEQ ID NO: 1985010 - RNA, 19 nt, Artificial Sequence
  Description of Artificial Sequence: Synthetic oligonucleotide
aaucccaggugguaccugu

SEQ ID NO: 1985011 - RNA, 19 nt, Artificial Sequence
  Description of Artificial Sequence: Synthetic oligonucleotide
cacgcuaaccacugcagcc

SEQ ID NO: 1985012 - RNA, 19 nt, Artificial Sequence
  Description of Artificial Sequence: Synthetic oligonucleotide
aucuagacacaaauggguc

SEQ ID NO: 1985013 - RNA, 19 nt, Artificial Sequence
  Description of Artificial Sequence: Synthetic oligonucleotide
acguauaccacuacaaagu

SEQ ID NO: 1985014 - RNA, 19 nt, Artificial Sequence
  Description of Artificial Sequence: Synthetic oligonucleotide
guaacauacucauauccaa

SEQ ID NO: 1985015 - RNA, 19 nt, Artificial Sequence
  Description of Artificial Sequence: Synthetic oligonucleotide
aacaagcagagugggauga

SEQ ID NO: 1985016 - RNA, 19 nt, Artificial Sequence
  Description of Artificial Sequence: Synthetic oligonucleotide
aaacaaagagugcgaugca

SEQ ID NO: 1985017 - RNA, 19 nt, Artificial Sequence
  Description of Artificial Sequence: Synthetic oligonucleotide
cauuugaacaaacucaccu

SEQ ID NO: 1985018 - RNA, 19 nt, Artificial Sequence
  Description of Artificial Sequence: Synthetic oligonucleotide
aggaccaagaucccaccag

SEQ ID NO: 1985019 - RNA, 19 nt, Artificial Sequence
  Description of Artificial Sequence: Synthetic oligonucleotide
ggagacaacgaagacauug

SEQ ID NO: 1985020 - RNA, 19 nt, Artificial Sequence
  Description of Artificial Sequence: Synthetic oligonucleotide
uauuaccuuuguucaaaac

SEQ ID NO: 1985021 - RNA, 19 nt, Artificial Sequence
  Description of Artificial Sequence: Synthetic oligonucleotide
cuggccguuagucaucuag

SEQ ID NO: 1985022 - RNA, 19 nt, Artificial Sequence
  Description of Artificial Sequence: Synthetic oligonucleotide
uguucagaagguagaguuc

SEQ ID NO: 1985023 - RNA, 19 nt, Artificial Sequence
  Description of Artificial Sequence: Synthetic oligonucleotide
auguucuuaaagucucucu

SEQ ID NO: 1985024 - RNA, 19 nt, Artificial Sequence
  Description of Artificial Sequence: Synthetic oligonucleotide
gaaagacaggcccaaugca

SEQ ID NO: 1985025 - RNA, 19 nt, Artificial Sequence
  Description of Artificial Sequence: Synthetic oligonucleotide
auacaaaaguauccgcuau

SEQ ID NO: 1985026 - RNA, 19 nt, Artificial Sequence
  Description of Artificial Sequence: Synthetic oligonucleotide
uggaaaacucacucauuac

SEQ ID NO: 1985027 - RNA, 19 nt, Artificial Sequence
  Description of Artificial Sequence: Synthetic oligonucleotide
ggaugauggaaccaccugc

SEQ ID NO: 1985028 - RNA, 19 nt, Artificial Sequence
  Description of Artificial Sequence: Synthetic oligonucleotide
uggugaugagaacuccacc

SEQ ID NO: 1985029 - RNA, 19 nt, Artificial Sequence
  Description of Artificial Sequence: Synthetic oligonucleotide
uuccauuggaaaacucacu

SEQ ID NO: 1985030 - RNA, 19 nt, Artificial Sequence
  Description of Artificial Sequence: Synthetic oligonucleotide
auacucauauccaaacgug

SEQ ID NO: 1985031 - RNA, 19 nt, Artificial Sequence
  Description of Artificial Sequence: Synthetic oligonucleotide
uuuaccugccuagacuuga

SEQ ID NO: 1985032 - RNA, 19 nt, Artificial Sequence
  Description of Artificial Sequence: Synthetic oligonucleotide
cacaaagcccagauaggcc

SEQ ID NO: 1985033 - RNA, 19 nt, Artificial Sequence
  Description of Artificial Sequence: Synthetic oligonucleotide
acucauauccaaacgugag

SEQ ID NO: 1985034 - RNA, 19 nt, Artificial Sequence
  Description of Artificial Sequence: Synthetic oligonucleotide
uuaaagucucucuggccgu

SEQ ID NO: 1985035 - RNA, 19 nt, Artificial Sequence
  Description of Artificial Sequence: Synthetic oligonucleotide
aaacucaccucugaacuaa

SEQ ID NO: 1985036 - RNA, 19 nt, Artificial Sequence
  Description of Artificial Sequence: Synthetic oligonucleotide
ugggaugauggaaccaccu

SEQ ID NO: 1985037 - RNA, 19 nt, Artificial Sequence
  Description of Artificial Sequence: Synthetic oligonucleotide
aaggaaacaaagagugcga

SEQ ID NO: 1985038 - RNA, 19 nt, Artificial Sequence
  Description of Artificial Sequence: Synthetic oligonucleotide
acggagacaacgaagacau

SEQ ID NO: 1985039 - RNA, 19 nt, Artificial Sequence
  Description of Artificial Sequence: Synthetic oligonucleotide
cauauccaaacgugagggc

SEQ ID NO: 1985040 - RNA, 19 nt, Artificial Sequence
  Description of Artificial Sequence: Synthetic oligonucleotide
uuccgcaagccauauuugu

SEQ ID NO: 1985041 - RNA, 19 nt, Artificial Sequence
  Description of Artificial Sequence: Synthetic oligonucleotide
uaggccacgcuaaccacug

SEQ ID NO: 1985042 - RNA, 19 nt, Artificial Sequence
  Description of Artificial Sequence: Synthetic oligonucleotide
agccugaacaggauggcac

SEQ ID NO: 1985043 - RNA, 19 nt, Artificial Sequence
  Description of Artificial Sequence: Synthetic oligonucleotide
cauauagagccacgugccc

SEQ ID NO: 1985044 - RNA, 19 nt, Artificial Sequence
  Description of Artificial Sequence: Synthetic oligonucleotide
aggcccaaugcaaucaaac

SEQ ID NO: 1985045 - RNA, 19 nt, Artificial Sequence
  Description of Artificial Sequence: Synthetic oligonucleotide
uuuuagcuauuaccuuugu

SEQ ID NO: 1985046 - RNA, 19 nt, Artificial Sequence
  Description of Artificial Sequence: Synthetic oligonucleotide
acagacacuuggcacaaaa

SEQ ID NO: 1985047 - RNA, 19 nt, Artificial Sequence
  Description of Artificial Sequence: Synthetic oligonucleotide
ugaacgugaggauggguau

SEQ ID NO: 1985048 - RNA, 19 nt, Artificial Sequence
  Description of Artificial Sequence: Synthetic oligonucleotide
gauccuccagccuauucca

SEQ ID NO: 1985049 - RNA, 19 nt, Artificial Sequence
  Description of Artificial Sequence: Synthetic oligonucleotide
aacgugaggauggguauga

SEQ ID NO: 1985050 - RNA, 19 nt, Artificial Sequence
  Description of Artificial Sequence: Synthetic oligonucleotide
uccgcaagccauauuuguc

SEQ ID NO: 1985051 - RNA, 19 nt, Artificial Sequence
  Description of Artificial Sequence: Synthetic oligonucleotide
ugccuagacuugacuaaag

SEQ ID NO: 1985052 - RNA, 19 nt, Artificial Sequence
  Description of Artificial Sequence: Synthetic oligonucleotide
uaccacuacaaaguacaug

SEQ ID NO: 1985053 - RNA, 19 nt, Artificial Sequence
  Description of Artificial Sequence: Synthetic oligonucleotide
uggccguuagucaucuaga

SEQ ID NO: 1985054 - RNA, 19 nt, Artificial Sequence
  Description of Artificial Sequence: Synthetic oligonucleotide
ugauggcgauggcugagcc

SEQ ID NO: 1985055 - RNA, 19 nt, Artificial Sequence
  Description of Artificial Sequence: Synthetic oligonucleotide
agccuauuccauuggaaaa

SEQ ID NO: 1985056 - RNA, 19 nt, Artificial Sequence
  Description of Artificial Sequence: Synthetic oligonucleotide
ugcagacaggagauugaug

SEQ ID NO: 1985057 - RNA, 19 nt, Artificial Sequence
  Description of Artificial Sequence: Synthetic oligonucleotide
augcaaucaaacauugcca

SEQ ID NO: 1985058 - RNA, 19 nt, Artificial Sequence
  Description of Artificial Sequence: Synthetic oligonucleotide
cauaucagaaccaaugauu

SEQ ID NO: 1985059 - RNA, 19 nt, Artificial Sequence
  Description of Artificial Sequence: Synthetic oligonucleotide
auggaacagacgaugagga

SEQ ID NO: 1985060 - RNA, 19 nt, Artificial Sequence
  Description of Artificial Sequence: Synthetic oligonucleotide
gugcccuaguuccuggacg

SEQ ID NO: 1985061 - RNA, 19 nt, Artificial Sequence
  Description of Artificial Sequence: Synthetic oligonucleotide
gguaugagagcaaagggga

SEQ ID NO: 1985062 - RNA, 19 nt, Artificial Sequence
  Description of Artificial Sequence: Synthetic oligonucleotide
uuccuggacguauaccacu

SEQ ID NO: 1985063 - RNA, 19 nt, Artificial Sequence
  Description of Artificial Sequence: Synthetic oligonucleotide
gaugcucuacaucuuggaa

SEQ ID NO: 1985064 - RNA, 19 nt, Artificial Sequence
  Description of Artificial Sequence: Synthetic oligonucleotide
uugccaacccaaguaaaac

SEQ ID NO: 1985065 - RNA, 19 nt, Artificial Sequence
  Description of Artificial Sequence: Synthetic oligonucleotide
gauggguaugagagcaaag

SEQ ID NO: 1985066 - RNA, 19 nt, Artificial Sequence
  Description of Artificial Sequence: Synthetic oligonucleotide
aaagcagaaugcagguaca

SEQ ID NO: 1985067 - RNA, 19 nt, Artificial Sequence
  Description of Artificial Sequence: Synthetic oligonucleotide
gagacaacgaagacauuga

SEQ ID NO: 1985068 - RNA, 19 nt, Artificial Sequence
  Description of Artificial Sequence: Synthetic oligonucleotide
ucaaccuguggagugcuac

SEQ ID NO: 1985069 - RNA, 19 nt, Artificial Sequence
  Description of Artificial Sequence: Synthetic oligonucleotide
ugucaaucccaggugguac

SEQ ID NO: 1985070 - RNA, 19 nt, Artificial Sequence
  Description of Artificial Sequence: Synthetic oligonucleotide
gacauugaugaugaaggaa

SEQ ID NO: 1985071 - RNA, 19 nt, Artificial Sequence
  Description of Artificial Sequence: Synthetic oligonucleotide
agagauuuguuaacagaca

SEQ ID NO: 1985072 - RNA, 19 nt, Artificial Sequence
  Description of Artificial Sequence: Synthetic oligonucleotide
aagcccagauaggccacgc

SEQ ID NO: 1985073 - RNA, 19 nt, Artificial Sequence
  Description of Artificial Sequence: Synthetic oligonucleotide
cacuguaacauacucauau

SEQ ID NO: 1985074 - RNA, 19 nt, Artificial Sequence
  Description of Artificial Sequence: Synthetic oligonucleotide
auauagagccacgugcccu

SEQ ID NO: 1985075 - RNA, 19 nt, Artificial Sequence
  Description of Artificial Sequence: Synthetic oligonucleotide
caucuagacacaaaugggu

SEQ ID NO: 1985076 - RNA, 19 nt, Artificial Sequence
  Description of Artificial Sequence: Synthetic oligonucleotide
uauagagccacgugcccua

SEQ ID NO: 1985077 - RNA, 19 nt, Artificial Sequence
  Description of Artificial Sequence: Synthetic oligonucleotide
ugcccuaguuccuggacgu

SEQ ID NO: 1985078 - RNA, 19 nt, Artificial Sequence
  Description of Artificial Sequence: Synthetic oligonucleotide
gaucccaccagcgauccuc

SEQ ID NO: 1985079 - RNA, 19 nt, Artificial Sequence
  Description of Artificial Sequence: Synthetic oligonucleotide
ggaaacaaagagugcgaug

SEQ ID NO: 1985080 - RNA, 19 nt, Artificial Sequence
  Description of Artificial Sequence: Synthetic oligonucleotide
cuauggugaugagaacucc

SEQ ID NO: 1985081 - RNA, 19 nt, Artificial Sequence
  Description of Artificial Sequence: Synthetic oligonucleotide
caagaucccaccagcgauc

SEQ ID NO: 1985082 - RNA, 19 nt, Artificial Sequence
  Description of Artificial Sequence: Synthetic oligonucleotide
uuccugcauaucagaacca

SEQ ID NO: 1985083 - RNA, 19 nt, Artificial Sequence
  Description of Artificial Sequence: Synthetic oligonucleotide
cuauuccauuggaaaacuc

SEQ ID NO: 1985084 - RNA, 19 nt, Artificial Sequence
  Description of Artificial Sequence: Synthetic oligonucleotide
aacucaccucugaacuaac

SEQ ID NO: 1985085 - RNA, 19 nt, Artificial Sequence
  Description of Artificial Sequence: Synthetic oligonucleotide
cuuccgcaagccauauuug

SEQ ID NO: 1985086 - RNA, 19 nt, Artificial Sequence
  Description of Artificial Sequence: Synthetic oligonucleotide
uucugguugagcugucaau

SEQ ID NO: 1985087 - RNA, 19 nt, Artificial Sequence
  Description of Artificial Sequence: Synthetic oligonucleotide
cuaguuccuggacguauac

SEQ ID NO: 1985088 - RNA, 19 nt, Artificial Sequence
  Description of Artificial Sequence: Synthetic oligonucleotide
auugauggcgauggcugag

SEQ ID NO: 1985089 - RNA, 19 nt, Artificial Sequence
  Description of Artificial Sequence: Synthetic oligonucleotide
cuguuagaugcucuacauc

SEQ ID NO: 1985090 - RNA, 19 nt, Artificial Sequence
  Description of Artificial Sequence: Synthetic oligonucleotide
agacaacgaagacauugau

SEQ ID NO: 1985091 - RNA, 19 nt, Artificial Sequence
  Description of Artificial Sequence: Synthetic oligonucleotide
acaguguucagaagguaga

SEQ ID NO: 1985092 - RNA, 19 nt, Artificial Sequence
  Description of Artificial Sequence: Synthetic oligonucleotide
auggcgauggcugagccaa

SEQ ID NO: 1985093 - RNA, 19 nt, Artificial Sequence
  Description of Artificial Sequence: Synthetic oligonucleotide
cuacagccugaacaggaug

SEQ ID NO: 1985094 - RNA, 19 nt, Artificial Sequence
  Description of Artificial Sequence: Synthetic oligonucleotide
uggaacagacgaugaggac

SEQ ID NO: 1985095 - RNA, 19 nt, Artificial Sequence
  Description of Artificial Sequence: Synthetic oligonucleotide
accugccuagacuugacua

SEQ ID NO: 1985096 - RNA, 19 nt, Artificial Sequence
  Description of Artificial Sequence: Synthetic oligonucleotide
agacacaaaugggucagca

SEQ ID NO: 1985097 - RNA, 19 nt, Artificial Sequence
  Description of Artificial Sequence: Synthetic oligonucleotide
ugagggccauaauagugau

SEQ ID NO: 1985098 - RNA, 19 nt, Artificial Sequence
  Description of Artificial Sequence: Synthetic oligonucleotide
aaguauccgcuauggugau

SEQ ID NO: 1985099 - RNA, 19 nt, Artificial Sequence
  Description of Artificial Sequence: Synthetic oligonucleotide
uuaccugccuagacuugac

SEQ ID NO: 1985100 - RNA, 19 nt, Artificial Sequence
  Description of Artificial Sequence: Synthetic oligonucleotide
uggaaccaccugcucguug

SEQ ID NO: 1985101 - RNA, 19 nt, Artificial Sequence
  Description of Artificial Sequence: Synthetic oligonucleotide
cacaggggaacccuuccug

SEQ ID NO: 1985102 - RNA, 19 nt, Artificial Sequence
  Description of Artificial Sequence: Synthetic oligonucleotide
agccugcucaaccugugga

SEQ ID NO: 1985103 - RNA, 19 nt, Artificial Sequence
  Description of Artificial Sequence: Synthetic oligonucleotide
uugugaacgugaggauggg

SEQ ID NO: 1985104 - RNA, 19 nt, Artificial Sequence
  Description of Artificial Sequence: Synthetic oligonucleotide
cauuggaaaacucacucau

SEQ ID NO: 1985105 - RNA, 19 nt, Artificial Sequence
  Description of Artificial Sequence: Synthetic oligonucleotide
ugcuuauuggccgguuuac

SEQ ID NO: 1985106 - RNA, 19 nt, Artificial Sequence
  Description of Artificial Sequence: Synthetic oligonucleotide
caccacauauagagccacg

SEQ ID NO: 1985107 - RNA, 19 nt, Artificial Sequence
  Description of Artificial Sequence: Synthetic oligonucleotide
caugccccugagcacuugg

SEQ ID NO: 1985108 - RNA, 19 nt, Artificial Sequence
  Description of Artificial Sequence: Synthetic oligonucleotide
ccgcaagccauauuugucc

SEQ ID NO: 1985109 - RNA, 19 nt, Artificial Sequence
  Description of Artificial Sequence: Synthetic oligonucleotide
cugcucaaccuguggagug

SEQ ID NO: 1985110 - RNA, 19 nt, Artificial Sequence
  Description of Artificial Sequence: Synthetic oligonucleotide
uccugcauaucagaaccaa

SEQ ID NO: 1985111 - RNA, 19 nt, Artificial Sequence
  Description of Artificial Sequence: Synthetic oligonucleotide
cucacucauuacuggccgc

SEQ ID NO: 1985112 - RNA, 19 nt, Artificial Sequence
  Description of Artificial Sequence: Synthetic oligonucleotide
ugcucaaccuguggagugc

SEQ ID NO: 1985113 - RNA, 19 nt, Artificial Sequence
  Description of Artificial Sequence: Synthetic oligonucleotide
uugauggcgauggcugagc

SEQ ID NO: 1985114 - RNA, 19 nt, Artificial Sequence
  Description of Artificial Sequence: Synthetic oligonucleotide
gcacaaaagggcuuagaga

SEQ ID NO: 1985115 - RNA, 19 nt, Artificial Sequence
  Description of Artificial Sequence: Synthetic oligonucleotide
gacaggagauugauggcga

SEQ ID NO: 1985116 - RNA, 19 nt, Artificial Sequence
  Description of Artificial Sequence: Synthetic oligonucleotide
uaacagacacuuggcacaa

SEQ ID NO: 1985117 - RNA, 19 nt, Artificial Sequence
  Description of Artificial Sequence: Synthetic oligonucleotide
gaacgugaggauggguaug

SEQ ID NO: 1985118 - RNA, 19 nt, Artificial Sequence
  Description of Artificial Sequence: Synthetic oligonucleotide
gaugacagcucccaccgau

SEQ ID NO: 1985119 - RNA, 19 nt, Artificial Sequence
  Description of Artificial Sequence: Synthetic oligonucleotide
auuacuggccgcaaagcuu

SEQ ID NO: 1985120 - RNA, 19 nt, Artificial Sequence
  Description of Artificial Sequence: Synthetic oligonucleotide
gccuagacuugacuaaagc

SEQ ID NO: 1985121 - RNA, 19 nt, Artificial Sequence
  Description of Artificial Sequence: Synthetic oligonucleotide
acgugagggccauaauagu

SEQ ID NO: 1985122 - RNA, 19 nt, Artificial Sequence
  Description of Artificial Sequence: Synthetic oligonucleotide
agggcuuagagaaaauguu

SEQ ID NO: 1985123 - RNA, 19 nt, Artificial Sequence
  Description of Artificial Sequence: Synthetic oligonucleotide
gccugaacaggauggcacg

SEQ ID NO: 1985124 - RNA, 19 nt, Artificial Sequence
  Description of Artificial Sequence: Synthetic oligonucleotide
cuaaccacugcagccacca

SEQ ID NO: 1985125 - RNA, 19 nt, Artificial Sequence
  Description of Artificial Sequence: Synthetic oligonucleotide
uaccugccuagacuugacu

SEQ ID NO: 1985126 - RNA, 19 nt, Artificial Sequence
  Description of Artificial Sequence: Synthetic oligonucleotide
agagccacgugcccuaguu

SEQ ID NO: 1985127 - RNA, 19 nt, Artificial Sequence
  Description of Artificial Sequence: Synthetic oligonucleotide
cagauaggccacgcuaacc

SEQ ID NO: 1985128 - RNA, 19 nt, Artificial Sequence
  Description of Artificial Sequence: Synthetic oligonucleotide
ugcucguuguuuucccaaa

SEQ ID NO: 1985129 - RNA, 19 nt, Artificial Sequence
  Description of Artificial Sequence: Synthetic oligonucleotide
aacccaaguaaaacacaaa

SEQ ID NO: 1985130 - RNA, 19 nt, Artificial Sequence
  Description of Artificial Sequence: Synthetic oligonucleotide
aggauggcacgaacaugcc

SEQ ID NO: 1985131 - RNA, 19 nt, Artificial Sequence
  Description of Artificial Sequence: Synthetic oligonucleotide
uggccgcaaagcuugugaa

SEQ ID NO: 1985132 - RNA, 19 nt, Artificial Sequence
  Description of Artificial Sequence: Synthetic oligonucleotide
gauggcgauggcugagcca

SEQ ID NO: 1985133 - RNA, 19 nt, Artificial Sequence
  Description of Artificial Sequence: Synthetic oligonucleotide
gugaacgugaggaugggua

SEQ ID NO: 1985134 - RNA, 19 nt, Artificial Sequence
  Description of Artificial Sequence: Synthetic oligonucleotide
gaacaugccccugagcacu

SEQ ID NO: 1985135 - RNA, 19 nt, Artificial Sequence
  Description of Artificial Sequence: Synthetic oligonucleotide
guaaaacacaaagcccaga

SEQ ID NO: 1985136 - RNA, 19 nt, Artificial Sequence
  Description of Artificial Sequence: Synthetic oligonucleotide
guuagucaucuagacacaa

SEQ ID NO: 1985137 - RNA, 19 nt, Artificial Sequence
  Description of Artificial Sequence: Synthetic oligonucleotide
ugugaacgugaggaugggu

SEQ ID NO: 1985138 - RNA, 19 nt, Artificial Sequence
  Description of Artificial Sequence: Synthetic oligonucleotide
ucucuggccguuagucauc

SEQ ID NO: 1985139 - RNA, 19 nt, Artificial Sequence
  Description of Artificial Sequence: Synthetic oligonucleotide
ugagagcaaaggggaagcu

SEQ ID NO: 1985140 - RNA, 19 nt, Artificial Sequence
  Description of Artificial Sequence: Synthetic oligonucleotide
ggauggcacgaacaugccc

SEQ ID NO: 1985141 - RNA, 19 nt, Artificial Sequence
  Description of Artificial Sequence: Synthetic oligonucleotide
acgcuaaccacugcagcca

SEQ ID NO: 1985142 - RNA, 19 nt, Artificial Sequence
  Description of Artificial Sequence: Synthetic oligonucleotide
agcuugugaacgugaggau

SEQ ID NO: 1985143 - RNA, 19 nt, Artificial Sequence
  Description of Artificial Sequence: Synthetic oligonucleotide
caaagacggagacaacgaa

SEQ ID NO: 1985144 - RNA, 19 nt, Artificial Sequence
  Description of Artificial Sequence: Synthetic oligonucleotide
augcagguacauguugugu

SEQ ID NO: 1985145 - RNA, 19 nt, Artificial Sequence
  Description of Artificial Sequence: Synthetic oligonucleotide
ugaugacagcucccaccga

SEQ ID NO: 1985146 - RNA, 19 nt, Artificial Sequence
  Description of Artificial Sequence: Synthetic oligonucleotide
ggcccaaugcaaucaaaca

SEQ ID NO: 1985147 - RNA, 19 nt, Artificial Sequence
  Description of Artificial Sequence: Synthetic oligonucleotide
acaaaugggucagcaucca

SEQ ID NO: 1985148 - RNA, 19 nt, Artificial Sequence
  Description of Artificial Sequence: Synthetic oligonucleotide
uuggcacaaaagggcuuag

SEQ ID NO: 1985149 - RNA, 19 nt, Artificial Sequence
  Description of Artificial Sequence: Synthetic oligonucleotide
uagacacaaaugggucagc

SEQ ID NO: 1985150 - RNA, 19 nt, Artificial Sequence
  Description of Artificial Sequence: Synthetic oligonucleotide
gccuauuccauuggaaaac

SEQ ID NO: 1985151 - RNA, 19 nt, Artificial Sequence
  Description of Artificial Sequence: Synthetic oligonucleotide
agugcgaugcaggacucaa

SEQ ID NO: 1985152 - RNA, 19 nt, Artificial Sequence
  Description of Artificial Sequence: Synthetic oligonucleotide
gaacuccaccccacagggg

SEQ ID NO: 1985153 - RNA, 19 nt, Artificial Sequence
  Description of Artificial Sequence: Synthetic oligonucleotide
uauccgcuauggugaugag

SEQ ID NO: 1985154 - RNA, 19 nt, Artificial Sequence
  Description of Artificial Sequence: Synthetic oligonucleotide
cuggccgcaaagcuuguga

SEQ ID NO: 1985155 - RNA, 19 nt, Artificial Sequence
  Description of Artificial Sequence: Synthetic oligonucleotide
auuggccgguuuaccugcc

SEQ ID NO: 1985156 - RNA, 19 nt, Artificial Sequence
  Description of Artificial Sequence: Synthetic oligonucleotide
ucccuguuagaugcucuac

SEQ ID NO: 1985157 - RNA, 19 nt, Artificial Sequence
  Description of Artificial Sequence: Synthetic oligonucleotide
uggagugcuacagccugaa

SEQ ID NO: 1985158 - RNA, 19 nt, Artificial Sequence
  Description of Artificial Sequence: Synthetic oligonucleotide
augccccugagcacuuggc

SEQ ID NO: 1985159 - RNA, 19 nt, Artificial Sequence
  Description of Artificial Sequence: Synthetic oligonucleotide
auggcacgaacaugccccu

SEQ ID NO: 1985160 - RNA, 19 nt, Artificial Sequence
  Description of Artificial Sequence: Synthetic oligonucleotide
ggacguauaccacuacaaa

SEQ ID NO: 1985161 - RNA, 19 nt, Artificial Sequence
  Description of Artificial Sequence: Synthetic oligonucleotide
caggagauugauggcgaug

SEQ ID NO: 1985162 - RNA, 19 nt, Artificial Sequence
  Description of Artificial Sequence: Synthetic oligonucleotide
gguagaguucugguugagc

SEQ ID NO: 1985163 - RNA, 19 nt, Artificial Sequence
  Description of Artificial Sequence: Synthetic oligonucleotide
agagugcgaugcaggacuc

SEQ ID NO: 1985164 - RNA, 19 nt, Artificial Sequence
  Description of Artificial Sequence: Synthetic oligonucleotide
guuccuggacguauaccac

SEQ ID NO: 1985165 - RNA, 19 nt, Artificial Sequence
  Description of Artificial Sequence: Synthetic oligonucleotide
cuuccugcagacaggagau

SEQ ID NO: 1985166 - RNA, 19 nt, Artificial Sequence
  Description of Artificial Sequence: Synthetic oligonucleotide
ggccguuagucaucuagac

SEQ ID NO: 1985167 - RNA, 19 nt, Artificial Sequence
  Description of Artificial Sequence: Synthetic oligonucleotide
gcuauuaccuuuguucaaa

SEQ ID NO: 1985168 - RNA, 19 nt, Artificial Sequence
  Description of Artificial Sequence: Synthetic oligonucleotide
uggcacaaaagggcuuaga

SEQ ID NO: 1985169 - RNA, 19 nt, Artificial Sequence
  Description of Artificial Sequence: Synthetic oligonucleotide
caccagcgauccuccagcc

SEQ ID NO: 1985170 - RNA, 19 nt, Artificial Sequence
  Description of Artificial Sequence: Synthetic oligonucleotide
gugguaccugugcccacag

SEQ ID NO: 1985171 - RNA, 19 nt, Artificial Sequence
  Description of Artificial Sequence: Synthetic oligonucleotide
uggccgguuuaccugccua

SEQ ID NO: 1985172 - RNA, 19 nt, Artificial Sequence
  Description of Artificial Sequence: Synthetic oligonucleotide
auccgcuauggugaugaga

SEQ ID NO: 1985173 - RNA, 19 nt, Artificial Sequence
  Description of Artificial Sequence: Synthetic oligonucleotide
ggaagcuguaaagcucugc

SEQ ID NO: 1985174 - RNA, 19 nt, Artificial Sequence
  Description of Artificial Sequence: Synthetic oligonucleotide
ccaccagcgauccuccagc

SEQ ID NO: 1985175 - RNA, 19 nt, Artificial Sequence
  Description of Artificial Sequence: Synthetic oligonucleotide
ggccgguuuaccugccuag

SEQ ID NO: 1985176 - RNA, 19 nt, Artificial Sequence
  Description of Artificial Sequence: Synthetic oligonucleotide
caaccuguggagugcuaca

SEQ ID NO: 1985177 - RNA, 19 nt, Artificial Sequence
  Description of Artificial Sequence: Synthetic oligonucleotide
gcaaagacggagacaacga

SEQ ID NO: 1985178 - RNA, 19 nt, Artificial Sequence
  Description of Artificial Sequence: Synthetic oligonucleotide
cagaagguagaguucuggu

SEQ ID NO: 1985179 - RNA, 19 nt, Artificial Sequence
  Description of Artificial Sequence: Synthetic oligonucleotide
augacagcucccaccgaug

SEQ ID NO: 1985180 - RNA, 19 nt, Artificial Sequence
  Description of Artificial Sequence: Synthetic oligonucleotide
gaacuaacagagauuuguu

SEQ ID NO: 1985181 - RNA, 19 nt, Artificial Sequence
  Description of Artificial Sequence: Synthetic oligonucleotide
gagggccauaauagugaug

SEQ ID NO: 1985182 - RNA, 19 nt, Artificial Sequence
  Description of Artificial Sequence: Synthetic oligonucleotide
gcuuccgcaagccauauuu

SEQ ID NO: 1985183 - RNA, 19 nt, Artificial Sequence
  Description of Artificial Sequence: Synthetic oligonucleotide
ggcacgaacaugccccuga

SEQ ID NO: 1985184 - RNA, 19 nt, Artificial Sequence
  Description of Artificial Sequence: Synthetic oligonucleotide
gagccacgugcccuaguuc

SEQ ID NO: 1985185 - RNA, 19 nt, Artificial Sequence
  Description of Artificial Sequence: Synthetic oligonucleotide
agguagaguucugguugag

SEQ ID NO: 1985186 - RNA, 19 nt, Artificial Sequence
  Description of Artificial Sequence: Synthetic oligonucleotide
uaaagucucucuggccguu

SEQ ID NO: 1985187 - RNA, 19 nt, Artificial Sequence
  Description of Artificial Sequence: Synthetic oligonucleotide
aaagucucucuggccguua

SEQ ID NO: 1985188 - RNA, 19 nt, Artificial Sequence
  Description of Artificial Sequence: Synthetic oligonucleotide
gcuuauuggccgguuuacc

SEQ ID NO: 1985189 - RNA, 19 nt, Artificial Sequence
  Description of Artificial Sequence: Synthetic oligonucleotide
cugggcuucacuguaacau

SEQ ID NO: 1985190 - RNA, 19 nt, Artificial Sequence
  Description of Artificial Sequence: Synthetic oligonucleotide
acaguccaugaaagacagg

SEQ ID NO: 1985191 - RNA, 19 nt, Artificial Sequence
  Description of Artificial Sequence: Synthetic oligonucleotide
gccguuagucaucuagaca

SEQ ID NO: 1985192 - RNA, 19 nt, Artificial Sequence
  Description of Artificial Sequence: Synthetic oligonucleotide
acucaccucugaacuaaca

SEQ ID NO: 1985193 - RNA, 19 nt, Artificial Sequence
  Description of Artificial Sequence: Synthetic oligonucleotide
ggaaccaccugcucguugu

SEQ ID NO: 1985194 - RNA, 19 nt, Artificial Sequence
  Description of Artificial Sequence: Synthetic oligonucleotide
gggcuucacuguaacauac

SEQ ID NO: 1985195 - RNA, 19 nt, Artificial Sequence
  Description of Artificial Sequence: Synthetic oligonucleotide
cugcuuauuggccgguuua

SEQ ID NO: 1985196 - RNA, 19 nt, Artificial Sequence
  Description of Artificial Sequence: Synthetic oligonucleotide
gucauucaucccuguuaga

SEQ ID NO: 1985197 - RNA, 19 nt, Artificial Sequence
  Description of Artificial Sequence: Synthetic oligonucleotide
gcccaaugcaaucaaacau

SEQ ID NO: 1985198 - RNA, 19 nt, Artificial Sequence
  Description of Artificial Sequence: Synthetic oligonucleotide
guaugagagcaaaggggaa

SEQ ID NO: 1985199 - RNA, 19 nt, Artificial Sequence
  Description of Artificial Sequence: Synthetic oligonucleotide
auagagccacgugcccuag

SEQ ID NO: 1985200 - RNA, 19 nt, Artificial Sequence
  Description of Artificial Sequence: Synthetic oligonucleotide
accucugaacuaacagaga

SEQ ID NO: 1985201 - RNA, 19 nt, Artificial Sequence
  Description of Artificial Sequence: Synthetic oligonucleotide
cugcucguuguuuucccaa

SEQ ID NO: 1985202 - RNA, 19 nt, Artificial Sequence
  Description of Artificial Sequence: Synthetic oligonucleotide
caggggaacccuuccugca

SEQ ID NO: 1985203 - RNA, 19 nt, Artificial Sequence
  Description of Artificial Sequence: Synthetic oligonucleotide
guacauguugugugggcau

SEQ ID NO: 1985204 - RNA, 19 nt, Artificial Sequence
  Description of Artificial Sequence: Synthetic oligonucleotide
auaccacuacaaaguacau

SEQ ID NO: 1985205 - RNA, 19 nt, Artificial Sequence
  Description of Artificial Sequence: Synthetic oligonucleotide
gcauaucagaaccaaugau

SEQ ID NO: 1985206 - RNA, 19 nt, Artificial Sequence
  Description of Artificial Sequence: Synthetic oligonucleotide
cacugcagccaccacauau

SEQ ID NO: 1985207 - RNA, 19 nt, Artificial Sequence
  Description of Artificial Sequence: Synthetic oligonucleotide
ccacgcuaaccacugcagc

SEQ ID NO: 1985208 - RNA, 19 nt, Artificial Sequence
  Description of Artificial Sequence: Synthetic oligonucleotide
cccaggugguaccugugcc

SEQ ID NO: 1985209 - RNA, 19 nt, Artificial Sequence
  Description of Artificial Sequence: Synthetic oligonucleotide
ggccacgcuaaccacugca

SEQ ID NO: 1985210 - RNA, 19 nt, Artificial Sequence
  Description of Artificial Sequence: Synthetic oligonucleotide
cucucuggccguuagucau

SEQ ID NO: 1985211 - RNA, 19 nt, Artificial Sequence
  Description of Artificial Sequence: Synthetic oligonucleotide
cuaaagcagaaugcaggua

SEQ ID NO: 1985212 - RNA, 19 nt, Artificial Sequence
  Description of Artificial Sequence: Synthetic oligonucleotide
caggugguaccugugccca

SEQ ID NO: 1985213 - RNA, 19 nt, Artificial Sequence
  Description of Artificial Sequence: Synthetic oligonucleotide
ccaacccaaguaaaacaca

SEQ ID NO: 1985214 - RNA, 19 nt, Artificial Sequence
  Description of Artificial Sequence: Synthetic oligonucleotide
gacuugacuaaagcagaau

SEQ ID NO: 1985215 - RNA, 19 nt, Artificial Sequence
  Description of Artificial Sequence: Synthetic oligonucleotide
acgugcccuaguuccugga

SEQ ID NO: 1985216 - RNA, 19 nt, Artificial Sequence
  Description of Artificial Sequence: Synthetic oligonucleotide
gccacgcuaaccacugcag

SEQ ID NO: 1985217 - RNA, 19 nt, Artificial Sequence
  Description of Artificial Sequence: Synthetic oligonucleotide
cucugaacuaacagagauu

SEQ ID NO: 1985218 - RNA, 19 nt, Artificial Sequence
  Description of Artificial Sequence: Synthetic oligonucleotide
acgugaggauggguaugag

SEQ ID NO: 1985219 - RNA, 19 nt, Artificial Sequence
  Description of Artificial Sequence: Synthetic oligonucleotide
ccagauaggccacgcuaac

SEQ ID NO: 1985220 - RNA, 19 nt, Artificial Sequence
  Description of Artificial Sequence: Synthetic oligonucleotide
acuggccgcaaagcuugug

SEQ ID NO: 1985221 - RNA, 19 nt, Artificial Sequence
  Description of Artificial Sequence: Synthetic oligonucleotide
cugccuagacuugacuaaa

SEQ ID NO: 1985222 - RNA, 19 nt, Artificial Sequence
  Description of Artificial Sequence: Synthetic oligonucleotide
ccugccuagacuugacuaa

SEQ ID NO: 1985223 - RNA, 19 nt, Artificial Sequence
  Description of Artificial Sequence: Synthetic oligonucleotide
caucccuguuagaugcucu

SEQ ID NO: 1985224 - RNA, 19 nt, Artificial Sequence
  Description of Artificial Sequence: Synthetic oligonucleotide
auccaaacgugagggccau

SEQ ID NO: 1985225 - RNA, 19 nt, Artificial Sequence
  Description of Artificial Sequence: Synthetic oligonucleotide
ggauggguaugagagcaaa

SEQ ID NO: 1985226 - RNA, 19 nt, Artificial Sequence
  Description of Artificial Sequence: Synthetic oligonucleotide
gcagagugggaugauggaa

SEQ ID NO: 1985227 - RNA, 19 nt, Artificial Sequence
  Description of Artificial Sequence: Synthetic oligonucleotide
cagcauccacaguguucag

SEQ ID NO: 1985228 - RNA, 19 nt, Artificial Sequence
  Description of Artificial Sequence: Synthetic oligonucleotide
ccgguuuaccugccuagac

SEQ ID NO: 1985229 - RNA, 19 nt, Artificial Sequence
  Description of Artificial Sequence: Synthetic oligonucleotide
cugaacaggauggcacgaa

SEQ ID NO: 1985230 - RNA, 19 nt, Artificial Sequence
  Description of Artificial Sequence: Synthetic oligonucleotide
gcccagauaggccacgcua

SEQ ID NO: 1985231 - RNA, 19 nt, Artificial Sequence
  Description of Artificial Sequence: Synthetic oligonucleotide
aacaugccccugagcacuu

SEQ ID NO: 1985232 - RNA, 19 nt, Artificial Sequence
  Description of Artificial Sequence: Synthetic oligonucleotide
cccaaugcaaucaaacauu

SEQ ID NO: 1985233 - RNA, 19 nt, Artificial Sequence
  Description of Artificial Sequence: Synthetic oligonucleotide
uggcacgaacaugccccug

SEQ ID NO: 1985234 - RNA, 19 nt, Artificial Sequence
  Description of Artificial Sequence: Synthetic oligonucleotide
ccaccacauauagagccac

SEQ ID NO: 1985235 - RNA, 19 nt, Artificial Sequence
  Description of Artificial Sequence: Synthetic oligonucleotide
guaaagcucugcagaacau

SEQ ID NO: 1985236 - RNA, 19 nt, Artificial Sequence
  Description of Artificial Sequence: Synthetic oligonucleotide
ggcgauggcugagccaaug

SEQ ID NO: 1985237 - RNA, 19 nt, Artificial Sequence
  Description of Artificial Sequence: Synthetic oligonucleotide
ccagcgauccuccagccua

SEQ ID NO: 1985238 - RNA, 19 nt, Artificial Sequence
  Description of Artificial Sequence: Synthetic oligonucleotide
gagugcgaugcaggacuca

SEQ ID NO: 1985239 - RNA, 19 nt, Artificial Sequence
  Description of Artificial Sequence: Synthetic oligonucleotide
cccagauaggccacgcuaa

SEQ ID NO: 1985240 - RNA, 19 nt, Artificial Sequence
  Description of Artificial Sequence: Synthetic oligonucleotide
ucccaccagcgauccucca

SEQ ID NO: 1985241 - RNA, 19 nt, Artificial Sequence
  Description of Artificial Sequence: Synthetic oligonucleotide
gcgauggcugagccaauga

SEQ ID NO: 1985242 - RNA, 19 nt, Artificial Sequence
  Description of Artificial Sequence: Synthetic oligonucleotide
cagccugaacaggauggca

SEQ ID NO: 1985243 - RNA, 19 nt, Artificial Sequence
  Description of Artificial Sequence: Synthetic oligonucleotide
caggcccaaugcaaucaaa

SEQ ID NO: 1985244 - RNA, 19 nt, Artificial Sequence
  Description of Artificial Sequence: Synthetic oligonucleotide
gcucguuguuuucccaaaa

SEQ ID NO: 1985245 - RNA, 19 nt, Artificial Sequence
  Description of Artificial Sequence: Synthetic oligonucleotide
ccaaacgugagggccauaa

SEQ ID NO: 1985246 - RNA, 19 nt, Artificial Sequence
  Description of Artificial Sequence: Synthetic oligonucleotide
cugucaaucccagguggua

SEQ ID NO: 1985247 - RNA, 19 nt, Artificial Sequence
  Description of Artificial Sequence: Synthetic oligonucleotide
aggauggguaugagagcaa

SEQ ID NO: 1985248 - RNA, 19 nt, Artificial Sequence
  Description of Artificial Sequence: Synthetic oligonucleotide
gaguucugguugagcuguc

SEQ ID NO: 1985249 - RNA, 19 nt, Artificial Sequence
  Description of Artificial Sequence: Synthetic oligonucleotide
ccuguuagaugcucuacau

SEQ ID NO: 1985250 - RNA, 19 nt, Artificial Sequence
  Description of Artificial Sequence: Synthetic oligonucleotide
ggagugcuacagccugaac

SEQ ID NO: 1985251 - RNA, 19 nt, Artificial Sequence
  Description of Artificial Sequence: Synthetic oligonucleotide
uccugcuuauuggccgguu

SEQ ID NO: 1985252 - RNA, 19 nt, Artificial Sequence
  Description of Artificial Sequence: Synthetic oligonucleotide
caacgaagacauugaugau

SEQ ID NO: 1985253 - RNA, 19 nt, Artificial Sequence
  Description of Artificial Sequence: Synthetic oligonucleotide
agcuuccgcaagccauauu

SEQ ID NO: 1985254 - RNA, 19 nt, Artificial Sequence
  Description of Artificial Sequence: Synthetic oligonucleotide
ccuggacguauaccacuac

SEQ ID NO: 1985255 - RNA, 19 nt, Artificial Sequence
  Description of Artificial Sequence: Synthetic oligonucleotide
cgugaggauggguaugaga

SEQ ID NO: 1985256 - RNA, 19 nt, Artificial Sequence
  Description of Artificial Sequence: Synthetic oligonucleotide
gcuaaccacugcagccacc

SEQ ID NO: 1985257 - RNA, 19 nt, Artificial Sequence
  Description of Artificial Sequence: Synthetic oligonucleotide
gcgauccuccagccuauuc

SEQ ID NO: 1985258 - RNA, 19 nt, Artificial Sequence
  Description of Artificial Sequence: Synthetic oligonucleotide
ccaagaucccaccagcgau

SEQ ID NO: 1985259 - RNA, 19 nt, Artificial Sequence
  Description of Artificial Sequence: Synthetic oligonucleotide
uggcgauggcugagccaau

SEQ ID NO: 1985260 - RNA, 19 nt, Artificial Sequence
  Description of Artificial Sequence: Synthetic oligonucleotide
ucuggccguuagucaucua

SEQ ID NO: 1985261 - RNA, 19 nt, Artificial Sequence
  Description of Artificial Sequence: Synthetic oligonucleotide
ccuaguuccuggacguaua

SEQ ID NO: 1985262 - RNA, 19 nt, Artificial Sequence
  Description of Artificial Sequence: Synthetic oligonucleotide
cguuagucaucuagacaca

SEQ ID NO: 1985263 - RNA, 19 nt, Artificial Sequence
  Description of Artificial Sequence: Synthetic oligonucleotide
acuccaccccacaggggaa

SEQ ID NO: 1985264 - RNA, 19 nt, Artificial Sequence
  Description of Artificial Sequence: Synthetic oligonucleotide
caaacgugagggccauaau

SEQ ID NO: 1985265 - RNA, 19 nt, Artificial Sequence
  Description of Artificial Sequence: Synthetic oligonucleotide
cgugcccuaguuccuggac

SEQ ID NO: 1985266 - RNA, 19 nt, Artificial Sequence
  Description of Artificial Sequence: Synthetic oligonucleotide
accugugcccacaguccau

SEQ ID NO: 1985267 - RNA, 19 nt, Artificial Sequence
  Description of Artificial Sequence: Synthetic oligonucleotide
cucaaccuguggagugcua

SEQ ID NO: 1985268 - RNA, 19 nt, Artificial Sequence
  Description of Artificial Sequence: Synthetic oligonucleotide
ccaugaaagacaggcccaa

SEQ ID NO: 1985269 - RNA, 19 nt, Artificial Sequence
  Description of Artificial Sequence: Synthetic oligonucleotide
gccgguuuaccugccuaga

SEQ ID NO: 1985270 - RNA, 19 nt, Artificial Sequence
  Description of Artificial Sequence: Synthetic oligonucleotide
gcucccaccgaugcccaca

SEQ ID NO: 1985271 - RNA, 19 nt, Artificial Sequence
  Description of Artificial Sequence: Synthetic oligonucleotide
uccaaacgugagggccaua

SEQ ID NO: 1985272 - RNA, 19 nt, Artificial Sequence
  Description of Artificial Sequence: Synthetic oligonucleotide
gcugucaaucccagguggu

SEQ ID NO: 1985273 - RNA, 19 nt, Artificial Sequence
  Description of Artificial Sequence: Synthetic oligonucleotide
caugaaagacaggcccaau

SEQ ID NO: 1985274 - RNA, 19 nt, Artificial Sequence
  Description of Artificial Sequence: Synthetic oligonucleotide
cauguugugugggcaugau

SEQ ID NO: 1985275 - RNA, 19 nt, Artificial Sequence
  Description of Artificial Sequence: Synthetic oligonucleotide
gcuacagccugaacaggau

SEQ ID NO: 1985276 - RNA, 19 nt, Artificial Sequence
  Description of Artificial Sequence: Synthetic oligonucleotide
agcgauccuccagccuauu

SEQ ID NO: 1985277 - RNA, 19 nt, Artificial Sequence
  Description of Artificial Sequence: Synthetic oligonucleotide
cagcgauccuccagccuau

SEQ ID NO: 1985278 - RNA, 19 nt, Artificial Sequence
  Description of Artificial Sequence: Synthetic oligonucleotide
gcucaaccuguggagugcu

SEQ ID NO: 1985279 - RNA, 19 nt, Artificial Sequence
  Description of Artificial Sequence: Synthetic oligonucleotide
ccugcucaaccuguggagu

SEQ ID NO: 1985280 - RNA, 19 nt, Artificial Sequence
  Description of Artificial Sequence: Synthetic oligonucleotide
gugcgaugcaggacucaau

SEQ ID NO: 1985281 - RNA, 19 nt, Artificial Sequence
  Description of Artificial Sequence: Synthetic oligonucleotide
ccgcaaagcuugugaacgu

SEQ ID NO: 1985282 - RNA, 19 nt, Artificial Sequence
  Description of Artificial Sequence: Synthetic oligonucleotide
cagcuuccgcaagccauau

SEQ ID NO: 1985283 - RNA, 19 nt, Artificial Sequence
  Description of Artificial Sequence: Synthetic oligonucleotide
cccuaguuccuggacguau

SEQ ID NO: 1985284 - RNA, 19 nt, Artificial Sequence
  Description of Artificial Sequence: Synthetic oligonucleotide
cucgaacuuccugcuuauu

SEQ ID NO: 1985285 - RNA, 19 nt, Artificial Sequence
  Description of Artificial Sequence: Synthetic oligonucleotide
gcccuaguuccuggacgua

SEQ ID NO: 1985286 - RNA, 19 nt, Artificial Sequence
  Description of Artificial Sequence: Synthetic oligonucleotide
ccgaugcccacagccugcu

SEQ ID NO: 1985287 - RNA, 19 nt, Artificial Sequence
  Description of Artificial Sequence: Synthetic oligonucleotide
uguaguauagucaaaacug

SEQ ID NO: 1985288 - RNA, 19 nt, Artificial Sequence
  Description of Artificial Sequence: Synthetic oligonucleotide
uauucuaagaugaauuuag

SEQ ID NO: 1985289 - RNA, 19 nt, Artificial Sequence
  Description of Artificial Sequence: Synthetic oligonucleotide
ucaucuaaaagacaaacca

SEQ ID NO: 1985290 - RNA, 19 nt, Artificial Sequence
  Description of Artificial Sequence: Synthetic oligonucleotide
auaauaaucagucucgcag

SEQ ID NO: 1985291 - RNA, 19 nt, Artificial Sequence
  Description of Artificial Sequence: Synthetic oligonucleotide
uauaaaggcuacuucaugg

SEQ ID NO: 1985292 - RNA, 19 nt, Artificial Sequence
  Description of Artificial Sequence: Synthetic oligonucleotide
gaaauugauucuuauaaag

SEQ ID NO: 1985293 - RNA, 19 nt, Artificial Sequence
  Description of Artificial Sequence: Synthetic oligonucleotide
aaacuuucacaacacaccg

SEQ ID NO: 1985294 - RNA, 19 nt, Artificial Sequence
  Description of Artificial Sequence: Synthetic oligonucleotide
uuguauuccacaaauaaca

SEQ ID NO: 1985295 - RNA, 19 nt, Artificial Sequence
  Description of Artificial Sequence: Synthetic oligonucleotide
uuaauguuagaguuuaucc

SEQ ID NO: 1985296 - RNA, 19 nt, Artificial Sequence
  Description of Artificial Sequence: Synthetic oligonucleotide
uuugaauaugcaaauacca

SEQ ID NO: 1985297 - RNA, 19 nt, Artificial Sequence
  Description of Artificial Sequence: Synthetic oligonucleotide
cuucucauaacauaacucg

SEQ ID NO: 1985298 - RNA, 19 nt, Artificial Sequence
  Description of Artificial Sequence: Synthetic oligonucleotide
ucuaagaugaauuuaguaa

SEQ ID NO: 1985299 - RNA, 19 nt, Artificial Sequence
  Description of Artificial Sequence: Synthetic oligonucleotide
aagagcauaauaaucaguc

SEQ ID NO: 1985300 - RNA, 19 nt, Artificial Sequence
  Description of Artificial Sequence: Synthetic oligonucleotide
gaugaauuuaguaaucagg

SEQ ID NO: 1985301 - RNA, 19 nt, Artificial Sequence
  Description of Artificial Sequence: Synthetic oligonucleotide
aaaugcagcauuguauucc

SEQ ID NO: 1985302 - RNA, 19 nt, Artificial Sequence
  Description of Artificial Sequence: Synthetic oligonucleotide
uggcauaucaucuaaaaga

SEQ ID NO: 1985303 - RNA, 19 nt, Artificial Sequence
  Description of Artificial Sequence: Synthetic oligonucleotide
aacagagaaauaaagguuc

SEQ ID NO: 1985304 - RNA, 19 nt, Artificial Sequence
  Description of Artificial Sequence: Synthetic oligonucleotide
ucauaauaaaucccaaacc

SEQ ID NO: 1985305 - RNA, 19 nt, Artificial Sequence
  Description of Artificial Sequence: Synthetic oligonucleotide
uuagaguuuauccauccag

SEQ ID NO: 1985306 - RNA, 19 nt, Artificial Sequence
  Description of Artificial Sequence: Synthetic oligonucleotide
aaacgguaauuuuaguuuc

SEQ ID NO: 1985307 - RNA, 19 nt, Artificial Sequence
  Description of Artificial Sequence: Synthetic oligonucleotide
ucuuugaauaugcaaauac

SEQ ID NO: 1985308 - RNA, 19 nt, Artificial Sequence
  Description of Artificial Sequence: Synthetic oligonucleotide
guaaucaggaaauugauuc

SEQ ID NO: 1985309 - RNA, 19 nt, Artificial Sequence
  Description of Artificial Sequence: Synthetic oligonucleotide
acuauuauuuuagaacucc

SEQ ID NO: 1985310 - RNA, 19 nt, Artificial Sequence
  Description of Artificial Sequence: Synthetic oligonucleotide
aauauuaucauggcauauc

SEQ ID NO: 1985311 - RNA, 19 nt, Artificial Sequence
  Description of Artificial Sequence: Synthetic oligonucleotide
uuauuuuguaguauaguca

SEQ ID NO: 1985312 - RNA, 19 nt, Artificial Sequence
  Description of Artificial Sequence: Synthetic oligonucleotide
aacacuuucucacagacuu

SEQ ID NO: 1985313 - RNA, 19 nt, Artificial Sequence
  Description of Artificial Sequence: Synthetic oligonucleotide
agaaagauaaacuucguaa

SEQ ID NO: 1985314 - RNA, 19 nt, Artificial Sequence
  Description of Artificial Sequence: Synthetic oligonucleotide
agugagcacaguuaaauuc

SEQ ID NO: 1985315 - RNA, 19 nt, Artificial Sequence
  Description of Artificial Sequence: Synthetic oligonucleotide
uuucacaacacaccgagca

SEQ ID NO: 1985316 - RNA, 19 nt, Artificial Sequence
  Description of Artificial Sequence: Synthetic oligonucleotide
aauuaaacgguaauuuuag

SEQ ID NO: 1985317 - RNA, 19 nt, Artificial Sequence
  Description of Artificial Sequence: Synthetic oligonucleotide
aauguuagaguuuauccau

SEQ ID NO: 1985318 - RNA, 19 nt, Artificial Sequence
  Description of Artificial Sequence: Synthetic oligonucleotide
aaauguaauucuuugcuaa

SEQ ID NO: 1985319 - RNA, 19 nt, Artificial Sequence
  Description of Artificial Sequence: Synthetic oligonucleotide
uaaacuucguaagaaaucc

SEQ ID NO: 1985320 - RNA, 19 nt, Artificial Sequence
  Description of Artificial Sequence: Synthetic oligonucleotide
uagaucagaauuuuaauuc

SEQ ID NO: 1985321 - RNA, 19 nt, Artificial Sequence
  Description of Artificial Sequence: Synthetic oligonucleotide
aguuuauccauccagggcu

SEQ ID NO: 1985322 - RNA, 19 nt, Artificial Sequence
  Description of Artificial Sequence: Synthetic oligonucleotide
auucuuugcuaauuuauuc

SEQ ID NO: 1985323 - RNA, 19 nt, Artificial Sequence
  Description of Artificial Sequence: Synthetic oligonucleotide
aggaaauugauucuuauaa

SEQ ID NO: 1985324 - RNA, 19 nt, Artificial Sequence
  Description of Artificial Sequence: Synthetic oligonucleotide
uagaacuccauauaaauau

SEQ ID NO: 1985325 - RNA, 19 nt, Artificial Sequence
  Description of Artificial Sequence: Synthetic oligonucleotide
uuagagaaauacaacauua

SEQ ID NO: 1985326 - RNA, 19 nt, Artificial Sequence
  Description of Artificial Sequence: Synthetic oligonucleotide
uagaguuuauccauccagg

SEQ ID NO: 1985327 - RNA, 19 nt, Artificial Sequence
  Description of Artificial Sequence: Synthetic oligonucleotide
acaguuaaauucuucuggg

SEQ ID NO: 1985328 - RNA, 19 nt, Artificial Sequence
  Description of Artificial Sequence: Synthetic oligonucleotide
cuuugaauaugcaaauacc

SEQ ID NO: 1985329 - RNA, 19 nt, Artificial Sequence
  Description of Artificial Sequence: Synthetic oligonucleotide
acuuucugaaggcaaacac

SEQ ID NO: 1985330 - RNA, 19 nt, Artificial Sequence
  Description of Artificial Sequence: Synthetic oligonucleotide
aguuaaauucuucugggug

SEQ ID NO: 1985331 - RNA, 19 nt, Artificial Sequence
  Description of Artificial Sequence: Synthetic oligonucleotide
uuguaguauagucaaaacu

SEQ ID NO: 1985332 - RNA, 19 nt, Artificial Sequence
  Description of Artificial Sequence: Synthetic oligonucleotide
uaauguuagaguuuaucca

SEQ ID NO: 1985333 - RNA, 19 nt, Artificial Sequence
  Description of Artificial Sequence: Synthetic oligonucleotide
aaagucaccaacuuauuuu

SEQ ID NO: 1985334 - RNA, 19 nt, Artificial Sequence
  Description of Artificial Sequence: Synthetic oligonucleotide
aauaugcaaauaccaauga

SEQ ID NO: 1985335 - RNA, 19 nt, Artificial Sequence
  Description of Artificial Sequence: Synthetic oligonucleotide
gaauuuaguaaucaggaaa

SEQ ID NO: 1985336 - RNA, 19 nt, Artificial Sequence
  Description of Artificial Sequence: Synthetic oligonucleotide
aaagcaaguaucaugccag

SEQ ID NO: 1985337 - RNA, 19 nt, Artificial Sequence
  Description of Artificial Sequence: Synthetic oligonucleotide
cauaauaaaucccaaacca

SEQ ID NO: 1985338 - RNA, 19 nt, Artificial Sequence
  Description of Artificial Sequence: Synthetic oligonucleotide
aaaugagauccuuaaagaa

SEQ ID NO: 1985339 - RNA, 19 nt, Artificial Sequence
  Description of Artificial Sequence: Synthetic oligonucleotide
aagaaaauucuuugaauau

SEQ ID NO: 1985340 - RNA, 19 nt, Artificial Sequence
  Description of Artificial Sequence: Synthetic oligonucleotide
ugcuaauuuauucuaagau

SEQ ID NO: 1985341 - RNA, 19 nt, Artificial Sequence
  Description of Artificial Sequence: Synthetic oligonucleotide
uuaucauggcauaucaucu

SEQ ID NO: 1985342 - RNA, 19 nt, Artificial Sequence
  Description of Artificial Sequence: Synthetic oligonucleotide
ugaguugucaaauauuauc

SEQ ID NO: 1985343 - RNA, 19 nt, Artificial Sequence
  Description of Artificial Sequence: Synthetic oligonucleotide
acuuucacaacacaccgag

SEQ ID NO: 1985344 - RNA, 19 nt, Artificial Sequence
  Description of Artificial Sequence: Synthetic oligonucleotide
aacauaacucgcaauacag

SEQ ID NO: 1985345 - RNA, 19 nt, Artificial Sequence
  Description of Artificial Sequence: Synthetic oligonucleotide
gucauaauaaaucccaaac

SEQ ID NO: 1985346 - RNA, 19 nt, Artificial Sequence
  Description of Artificial Sequence: Synthetic oligonucleotide
guuaaauucuucugggugc

SEQ ID NO: 1985347 - RNA, 19 nt, Artificial Sequence
  Description of Artificial Sequence: Synthetic oligonucleotide
uuuaguaaucaggaaauug

SEQ ID NO: 1985348 - RNA, 19 nt, Artificial Sequence
  Description of Artificial Sequence: Synthetic oligonucleotide
cacaguuaaauucuucugg

SEQ ID NO: 1985349 - RNA, 19 nt, Artificial Sequence
  Description of Artificial Sequence: Synthetic oligonucleotide
agucaaagaaaauucuuug

SEQ ID NO: 1985350 - RNA, 19 nt, Artificial Sequence
  Description of Artificial Sequence: Synthetic oligonucleotide
aauaccaaugaguugucaa

SEQ ID NO: 1985351 - RNA, 19 nt, Artificial Sequence
  Description of Artificial Sequence: Synthetic oligonucleotide
agcuucaaggaacaugucg

SEQ ID NO: 1985352 - RNA, 19 nt, Artificial Sequence
  Description of Artificial Sequence: Synthetic oligonucleotide
aauuuaguaaucaggaaau

SEQ ID NO: 1985353 - RNA, 19 nt, Artificial Sequence
  Description of Artificial Sequence: Synthetic oligonucleotide
auaaaggcuacuucauggg

SEQ ID NO: 1985354 - RNA, 19 nt, Artificial Sequence
  Description of Artificial Sequence: Synthetic oligonucleotide
gauccuuaaagaaagauaa

SEQ ID NO: 1985355 - RNA, 19 nt, Artificial Sequence
  Description of Artificial Sequence: Synthetic oligonucleotide
gaauaugcaaauaccaaug

SEQ ID NO: 1985356 - RNA, 19 nt, Artificial Sequence
  Description of Artificial Sequence: Synthetic oligonucleotide
cauaacucgcaauacagug

SEQ ID NO: 1985357 - RNA, 19 nt, Artificial Sequence
  Description of Artificial Sequence: Synthetic oligonucleotide
uaaacgguaauuuuaguuu

SEQ ID NO: 1985358 - RNA, 19 nt, Artificial Sequence
  Description of Artificial Sequence: Synthetic oligonucleotide
cauaucaucuaaaagacaa

SEQ ID NO: 1985359 - RNA, 19 nt, Artificial Sequence
  Description of Artificial Sequence: Synthetic oligonucleotide
aagcauugaugacuucgcc

SEQ ID NO: 1985360 - RNA, 19 nt, Artificial Sequence
  Description of Artificial Sequence: Synthetic oligonucleotide
uauagucaaaacuggauau

SEQ ID NO: 1985361 - RNA, 19 nt, Artificial Sequence
  Description of Artificial Sequence: Synthetic oligonucleotide
uauaaaaugcagcauugua

SEQ ID NO: 1985362 - RNA, 19 nt, Artificial Sequence
  Description of Artificial Sequence: Synthetic oligonucleotide
uuaaacgguaauuuuaguu

SEQ ID NO: 1985363 - RNA, 19 nt, Artificial Sequence
  Description of Artificial Sequence: Synthetic oligonucleotide
auagcccagagcuucaagg

SEQ ID NO: 1985364 - RNA, 19 nt, Artificial Sequence
  Description of Artificial Sequence: Synthetic oligonucleotide
uuagaucagaauuuuaauu

SEQ ID NO: 1985365 - RNA, 19 nt, Artificial Sequence
  Description of Artificial Sequence: Synthetic oligonucleotide
ucucauaacauaacucgca

SEQ ID NO: 1985366 - RNA, 19 nt, Artificial Sequence
  Description of Artificial Sequence: Synthetic oligonucleotide
uaaucagucucgcaguaug

SEQ ID NO: 1985367 - RNA, 19 nt, Artificial Sequence
  Description of Artificial Sequence: Synthetic oligonucleotide
uuuagagaaauacaacauu

SEQ ID NO: 1985368 - RNA, 19 nt, Artificial Sequence
  Description of Artificial Sequence: Synthetic oligonucleotide
auauuaucauggcauauca

SEQ ID NO: 1985369 - RNA, 19 nt, Artificial Sequence
  Description of Artificial Sequence: Synthetic oligonucleotide
agaguuuauccauccaggg

SEQ ID NO: 1985370 - RNA, 19 nt, Artificial Sequence
  Description of Artificial Sequence: Synthetic oligonucleotide
auuguauuccacaaauaac

SEQ ID NO: 1985371 - RNA, 19 nt, Artificial Sequence
  Description of Artificial Sequence: Synthetic oligonucleotide
uccucaacaaacccaaugu

SEQ ID NO: 1985372 - RNA, 19 nt, Artificial Sequence
  Description of Artificial Sequence: Synthetic oligonucleotide
uuugcaaagcggcuugucc

SEQ ID NO: 1985373 - RNA, 19 nt, Artificial Sequence
  Description of Artificial Sequence: Synthetic oligonucleotide
auuuuagaacuccauauaa

SEQ ID NO: 1985374 - RNA, 19 nt, Artificial Sequence
  Description of Artificial Sequence: Synthetic oligonucleotide
uuauaaaggcuacuucaug

SEQ ID NO: 1985375 - RNA, 19 nt, Artificial Sequence
  Description of Artificial Sequence: Synthetic oligonucleotide
uugaauaugcaaauaccaa

SEQ ID NO: 1985376 - RNA, 19 nt, Artificial Sequence
  Description of Artificial Sequence: Synthetic oligonucleotide
aacgucugcccuuccaaac

SEQ ID NO: 1985377 - RNA, 19 nt, Artificial Sequence
  Description of Artificial Sequence: Synthetic oligonucleotide
gcuacuauuauuuuagaac

SEQ ID NO: 1985378 - RNA, 19 nt, Artificial Sequence
  Description of Artificial Sequence: Synthetic oligonucleotide
aucaucuaaaagacaaacc

SEQ ID NO: 1985379 - RNA, 19 nt, Artificial Sequence
  Description of Artificial Sequence: Synthetic oligonucleotide
uucguaagaaauccaaguc

SEQ ID NO: 1985380 - RNA, 19 nt, Artificial Sequence
  Description of Artificial Sequence: Synthetic oligonucleotide
auaacauaacucgcaauac

SEQ ID NO: 1985381 - RNA, 19 nt, Artificial Sequence
  Description of Artificial Sequence: Synthetic oligonucleotide
uuuuagaacuccauauaaa

SEQ ID NO: 1985382 - RNA, 19 nt, Artificial Sequence
  Description of Artificial Sequence: Synthetic oligonucleotide
acacacacgaaacaggaca

SEQ ID NO: 1985383 - RNA, 19 nt, Artificial Sequence
  Description of Artificial Sequence: Synthetic oligonucleotide
gagcauaauaaucagucuc

SEQ ID NO: 1985384 - RNA, 19 nt, Artificial Sequence
  Description of Artificial Sequence: Synthetic oligonucleotide
cuagucauaauaaauccca

SEQ ID NO: 1985385 - RNA, 19 nt, Artificial Sequence
  Description of Artificial Sequence: Synthetic oligonucleotide
agaugaauuuaguaaucag

SEQ ID NO: 1985386 - RNA, 19 nt, Artificial Sequence
  Description of Artificial Sequence: Synthetic oligonucleotide
uucucauaacauaacucgc

SEQ ID NO: 1985387 - RNA, 19 nt, Artificial Sequence
  Description of Artificial Sequence: Synthetic oligonucleotide
uguuagaguuuauccaucc

SEQ ID NO: 1985388 - RNA, 19 nt, Artificial Sequence
  Description of Artificial Sequence: Synthetic oligonucleotide
uuuuguaguauagucaaaa

SEQ ID NO: 1985389 - RNA, 19 nt, Artificial Sequence
  Description of Artificial Sequence: Synthetic oligonucleotide
agcauaauaaucagucucg

SEQ ID NO: 1985390 - RNA, 19 nt, Artificial Sequence
  Description of Artificial Sequence: Synthetic oligonucleotide
uuuagaucagaauuuuaau

SEQ ID NO: 1985391 - RNA, 19 nt, Artificial Sequence
  Description of Artificial Sequence: Synthetic oligonucleotide
uaacucgcaauacagugcu

SEQ ID NO: 1985392 - RNA, 19 nt, Artificial Sequence
  Description of Artificial Sequence: Synthetic oligonucleotide
augaauuuaguaaucagga

SEQ ID NO: 1985393 - RNA, 19 nt, Artificial Sequence
  Description of Artificial Sequence: Synthetic oligonucleotide
aaugcagcauuguauucca

SEQ ID NO: 1985394 - RNA, 19 nt, Artificial Sequence
  Description of Artificial Sequence: Synthetic oligonucleotide
gaaauucacagagugagca

SEQ ID NO: 1985395 - RNA, 19 nt, Artificial Sequence
  Description of Artificial Sequence: Synthetic oligonucleotide
gcuaauuuauucuaagaug

SEQ ID NO: 1985396 - RNA, 19 nt, Artificial Sequence
  Description of Artificial Sequence: Synthetic oligonucleotide
agcacaguuaaauucuucu

SEQ ID NO: 1985397 - RNA, 19 nt, Artificial Sequence
  Description of Artificial Sequence: Synthetic oligonucleotide
aacccaauguaagccaucg

SEQ ID NO: 1985398 - RNA, 19 nt, Artificial Sequence
  Description of Artificial Sequence: Synthetic oligonucleotide
guaguauagucaaaacugg

SEQ ID NO: 1985399 - RNA, 19 nt, Artificial Sequence
  Description of Artificial Sequence: Synthetic oligonucleotide
auacagugcucccuucucc

SEQ ID NO: 1985400 - RNA, 19 nt, Artificial Sequence
  Description of Artificial Sequence: Synthetic oligonucleotide
aagaugaauuuaguaauca

SEQ ID NO: 1985401 - RNA, 19 nt, Artificial Sequence
  Description of Artificial Sequence: Synthetic oligonucleotide
acucgcaauacagugcucc

SEQ ID NO: 1985402 - RNA, 19 nt, Artificial Sequence
  Description of Artificial Sequence: Synthetic oligonucleotide
aagauaaacuucguaagaa

SEQ ID NO: 1985403 - RNA, 19 nt, Artificial Sequence
  Description of Artificial Sequence: Synthetic oligonucleotide
uaauaaucagucucgcagu

SEQ ID NO: 1985404 - RNA, 19 nt, Artificial Sequence
  Description of Artificial Sequence: Synthetic oligonucleotide
acaccgagcauacaaagca

SEQ ID NO: 1985405 - RNA, 19 nt, Artificial Sequence
  Description of Artificial Sequence: Synthetic oligonucleotide
ugucaaauauuaucauggc

SEQ ID NO: 1985406 - RNA, 19 nt, Artificial Sequence
  Description of Artificial Sequence: Synthetic oligonucleotide
agaaaauucuuugaauaug

SEQ ID NO: 1985407 - RNA, 19 nt, Artificial Sequence
  Description of Artificial Sequence: Synthetic oligonucleotide
uuuguaguauagucaaaac

SEQ ID NO: 1985408 - RNA, 19 nt, Artificial Sequence
  Description of Artificial Sequence: Synthetic oligonucleotide
aacgguaauuuuaguuucc

SEQ ID NO: 1985409 - RNA, 19 nt, Artificial Sequence
  Description of Artificial Sequence: Synthetic oligonucleotide
aagaaagauaaacuucgua

SEQ ID NO: 1985410 - RNA, 19 nt, Artificial Sequence
  Description of Artificial Sequence: Synthetic oligonucleotide
auaacucgcaauacagugc

SEQ ID NO: 1985411 - RNA, 19 nt, Artificial Sequence
  Description of Artificial Sequence: Synthetic oligonucleotide
augacuugguugcaguggg

SEQ ID NO: 1985412 - RNA, 19 nt, Artificial Sequence
  Description of Artificial Sequence: Synthetic oligonucleotide
gagaaauaaagguucaaua

SEQ ID NO: 1985413 - RNA, 19 nt, Artificial Sequence
  Description of Artificial Sequence: Synthetic oligonucleotide
agcauuguauuccacaaau

SEQ ID NO: 1985414 - RNA, 19 nt, Artificial Sequence
  Description of Artificial Sequence: Synthetic oligonucleotide
uuagaacuccauauaaaua

SEQ ID NO: 1985415 - RNA, 19 nt, Artificial Sequence
  Description of Artificial Sequence: Synthetic oligonucleotide
aauguaauucuuugcuaau

SEQ ID NO: 1985416 - RNA, 19 nt, Artificial Sequence
  Description of Artificial Sequence: Synthetic oligonucleotide
uaaaggcuacuucaugggc

SEQ ID NO: 1985417 - RNA, 19 nt, Artificial Sequence
  Description of Artificial Sequence: Synthetic oligonucleotide
auggcauaucaucuaaaag

SEQ ID NO: 1985418 - RNA, 19 nt, Artificial Sequence
  Description of Artificial Sequence: Synthetic oligonucleotide
caaagaacuucucauaaca

SEQ ID NO: 1985419 - RNA, 19 nt, Artificial Sequence
  Description of Artificial Sequence: Synthetic oligonucleotide
aacuuauuuuguaguauag

SEQ ID NO: 1985420 - RNA, 19 nt, Artificial Sequence
  Description of Artificial Sequence: Synthetic oligonucleotide
cacgaaacaggacacgugc

SEQ ID NO: 1985421 - RNA, 19 nt, Artificial Sequence
  Description of Artificial Sequence: Synthetic oligonucleotide
acaaagcaaguaucaugcc

SEQ ID NO: 1985422 - RNA, 19 nt, Artificial Sequence
  Description of Artificial Sequence: Synthetic oligonucleotide
accggccacauucaggagc

SEQ ID NO: 1985423 - RNA, 19 nt, Artificial Sequence
  Description of Artificial Sequence: Synthetic oligonucleotide
uaguauagucaaaacugga

SEQ ID NO: 1985424 - RNA, 19 nt, Artificial Sequence
  Description of Artificial Sequence: Synthetic oligonucleotide
aaucccaaaccaucuguga

SEQ ID NO: 1985425 - RNA, 19 nt, Artificial Sequence
  Description of Artificial Sequence: Synthetic oligonucleotide
auuuagaucagaauuuuaa

SEQ ID NO: 1985426 - RNA, 19 nt, Artificial Sequence
  Description of Artificial Sequence: Synthetic oligonucleotide
aguauggcucuccaucuuc

SEQ ID NO: 1985427 - RNA, 19 nt, Artificial Sequence
  Description of Artificial Sequence: Synthetic oligonucleotide
gaguuuauccauccagggc

SEQ ID NO: 1985428 - RNA, 19 nt, Artificial Sequence
  Description of Artificial Sequence: Synthetic oligonucleotide
acaaaccaaaacuuuuaca

SEQ ID NO: 1985429 - RNA, 19 nt, Artificial Sequence
  Description of Artificial Sequence: Synthetic oligonucleotide
uucaaagcauugaugacuu

SEQ ID NO: 1985430 - RNA, 19 nt, Artificial Sequence
  Description of Artificial Sequence: Synthetic oligonucleotide
aaaacgucugcccuuccaa

SEQ ID NO: 1985431 - RNA, 19 nt, Artificial Sequence
  Description of Artificial Sequence: Synthetic oligonucleotide
aagcaaguaucaugccagg

SEQ ID NO: 1985432 - RNA, 19 nt, Artificial Sequence
  Description of Artificial Sequence: Synthetic oligonucleotide
auaaaaugcagcauuguau

SEQ ID NO: 1985433 - RNA, 19 nt, Artificial Sequence
  Description of Artificial Sequence: Synthetic oligonucleotide
caacaaacccaauguaagc

SEQ ID NO: 1985434 - RNA, 19 nt, Artificial Sequence
  Description of Artificial Sequence: Synthetic oligonucleotide
uuaaauucuucugggugcc

SEQ ID NO: 1985435 - RNA, 19 nt, Artificial Sequence
  Description of Artificial Sequence: Synthetic oligonucleotide
agaaaacacaggcuaguca

SEQ ID NO: 1985436 - RNA, 19 nt, Artificial Sequence
  Description of Artificial Sequence: Synthetic oligonucleotide
ugugacuuucugaaggcaa

SEQ ID NO: 1985437 - RNA, 19 nt, Artificial Sequence
  Description of Artificial Sequence: Synthetic oligonucleotide
uucuccucaacaaacccaa

SEQ ID NO: 1985438 - RNA, 19 nt, Artificial Sequence
  Description of Artificial Sequence: Synthetic oligonucleotide
aguaucaugccagguauag

SEQ ID NO: 1985439 - RNA, 19 nt, Artificial Sequence
  Description of Artificial Sequence: Synthetic oligonucleotide
ucugugacuuucugaaggc

SEQ ID NO: 1985440 - RNA, 19 nt, Artificial Sequence
  Description of Artificial Sequence: Synthetic oligonucleotide
aauaaucagucucgcagua

SEQ ID NO: 1985441 - RNA, 19 nt, Artificial Sequence
  Description of Artificial Sequence: Synthetic oligonucleotide
aggcuagucauaauaaauc

SEQ ID NO: 1985442 - RNA, 19 nt, Artificial Sequence
  Description of Artificial Sequence: Synthetic oligonucleotide
ugaauuuaguaaucaggaa

SEQ ID NO: 1985443 - RNA, 19 nt, Artificial Sequence
  Description of Artificial Sequence: Synthetic oligonucleotide
ugauucuuauaaaggcuac

SEQ ID NO: 1985444 - RNA, 19 nt, Artificial Sequence
  Description of Artificial Sequence: Synthetic oligonucleotide
cuuccaaacuuucacaaca

SEQ ID NO: 1985445 - RNA, 19 nt, Artificial Sequence
  Description of Artificial Sequence: Synthetic oligonucleotide
caaaccaaaacuuuuacau

SEQ ID NO: 1985446 - RNA, 19 nt, Artificial Sequence
  Description of Artificial Sequence: Synthetic oligonucleotide
auaaaucccaaaccaucug

SEQ ID NO: 1985447 - RNA, 19 nt, Artificial Sequence
  Description of Artificial Sequence: Synthetic oligonucleotide
cauaacauaacucgcaaua

SEQ ID NO: 1985448 - RNA, 19 nt, Artificial Sequence
  Description of Artificial Sequence: Synthetic oligonucleotide
auugauucuuauaaaggcu

SEQ ID NO: 1985449 - RNA, 19 nt, Artificial Sequence
  Description of Artificial Sequence: Synthetic oligonucleotide
agggcuacuauuauuuuag

SEQ ID NO: 1985450 - RNA, 19 nt, Artificial Sequence
  Description of Artificial Sequence: Synthetic oligonucleotide
aaauauuaucauggcauau

SEQ ID NO: 1985451 - RNA, 19 nt, Artificial Sequence
  Description of Artificial Sequence: Synthetic oligonucleotide
uacuauuauuuuagaacuc

SEQ ID NO: 1985452 - RNA, 19 nt, Artificial Sequence
  Description of Artificial Sequence: Synthetic oligonucleotide
uugcuucaaagcauugaug

SEQ ID NO: 1985453 - RNA, 19 nt, Artificial Sequence
  Description of Artificial Sequence: Synthetic oligonucleotide
gucgccagcuucuaugggg

SEQ ID NO: 1985454 - RNA, 19 nt, Artificial Sequence
  Description of Artificial Sequence: Synthetic oligonucleotide
uugcaaagcggcuuguccu

SEQ ID NO: 1985455 - RNA, 19 nt, Artificial Sequence
  Description of Artificial Sequence: Synthetic oligonucleotide
aauguaagccaucguguuu

SEQ ID NO: 1985456 - RNA, 19 nt, Artificial Sequence
  Description of Artificial Sequence: Synthetic oligonucleotide
agguauagcccagagcuuc

SEQ ID NO: 1985457 - RNA, 19 nt, Artificial Sequence
  Description of Artificial Sequence: Synthetic oligonucleotide
aaucagucucgcaguaugg

SEQ ID NO: 1985458 - RNA, 19 nt, Artificial Sequence
  Description of Artificial Sequence: Synthetic oligonucleotide
gucaaauauuaucauggca

SEQ ID NO: 1985459 - RNA, 19 nt, Artificial Sequence
  Description of Artificial Sequence: Synthetic oligonucleotide
acgguaauuuuaguuuccc

SEQ ID NO: 1985460 - RNA, 19 nt, Artificial Sequence
  Description of Artificial Sequence: Synthetic oligonucleotide
auuuagagaaauacaacau

SEQ ID NO: 1985461 - RNA, 19 nt, Artificial Sequence
  Description of Artificial Sequence: Synthetic oligonucleotide
aaaucccaaaccaucugug

SEQ ID NO: 1985462 - RNA, 19 nt, Artificial Sequence
  Description of Artificial Sequence: Synthetic oligonucleotide
agagcauaauaaucagucu

SEQ ID NO: 1985463 - RNA, 19 nt, Artificial Sequence
  Description of Artificial Sequence: Synthetic oligonucleotide
aaaauucuuugaauaugca

SEQ ID NO: 1985464 - RNA, 19 nt, Artificial Sequence
  Description of Artificial Sequence: Synthetic oligonucleotide
agucauaauaaaucccaaa

SEQ ID NO: 1985465 - RNA, 19 nt, Artificial Sequence
  Description of Artificial Sequence: Synthetic oligonucleotide
uuccaaacuuucacaacac

SEQ ID NO: 1985466 - RNA, 19 nt, Artificial Sequence
  Description of Artificial Sequence: Synthetic oligonucleotide
acacaccgagcauacaaag

SEQ ID NO: 1985467 - RNA, 19 nt, Artificial Sequence
  Description of Artificial Sequence: Synthetic oligonucleotide
uggggaacucgcauccacg

SEQ ID NO: 1985468 - RNA, 19 nt, Artificial Sequence
  Description of Artificial Sequence: Synthetic oligonucleotide
cuucaaggaacaugucgcc

SEQ ID NO: 1985469 - RNA, 19 nt, Artificial Sequence
  Description of Artificial Sequence: Synthetic oligonucleotide
caugucgccagcuucuaug

SEQ ID NO: 1985470 - RNA, 19 nt, Artificial Sequence
  Description of Artificial Sequence: Synthetic oligonucleotide
auaccaaugaguugucaaa

SEQ ID NO: 1985471 - RNA, 19 nt, Artificial Sequence
  Description of Artificial Sequence: Synthetic oligonucleotide
uuauucuaagaugaauuua

SEQ ID NO: 1985472 - RNA, 19 nt, Artificial Sequence
  Description of Artificial Sequence: Synthetic oligonucleotide
aggagcaaagaacuucuca

SEQ ID NO: 1985473 - RNA, 19 nt, Artificial Sequence
  Description of Artificial Sequence: Synthetic oligonucleotide
guauagucaaaacuggaua

SEQ ID NO: 1985474 - RNA, 19 nt, Artificial Sequence
  Description of Artificial Sequence: Synthetic oligonucleotide
uuccccagagccacgagga

SEQ ID NO: 1985475 - RNA, 19 nt, Artificial Sequence
  Description of Artificial Sequence: Synthetic oligonucleotide
aagacaaaccaaaacuuuu

SEQ ID NO: 1985476 - RNA, 19 nt, Artificial Sequence
  Description of Artificial Sequence: Synthetic oligonucleotide
augucgccagcuucuaugg

SEQ ID NO: 1985477 - RNA, 19 nt, Artificial Sequence
  Description of Artificial Sequence: Synthetic oligonucleotide
ugccagguuugcuucaaag

SEQ ID NO: 1985478 - RNA, 19 nt, Artificial Sequence
  Description of Artificial Sequence: Synthetic oligonucleotide
ucuauggggaacucgcauc

SEQ ID NO: 1985479 - RNA, 19 nt, Artificial Sequence
  Description of Artificial Sequence: Synthetic oligonucleotide
auuaaacgguaauuuuagu

SEQ ID NO: 1985480 - RNA, 19 nt, Artificial Sequence
  Description of Artificial Sequence: Synthetic oligonucleotide
cuaagaugaauuuaguaau

SEQ ID NO: 1985481 - RNA, 19 nt, Artificial Sequence
  Description of Artificial Sequence: Synthetic oligonucleotide
gacuugguuuuaauguuag

SEQ ID NO: 1985482 - RNA, 19 nt, Artificial Sequence
  Description of Artificial Sequence: Synthetic oligonucleotide
ucgccaaggaucuuccucu

SEQ ID NO: 1985483 - RNA, 19 nt, Artificial Sequence
  Description of Artificial Sequence: Synthetic oligonucleotide
aacuucguaagaaauccaa

SEQ ID NO: 1985484 - RNA, 19 nt, Artificial Sequence
  Description of Artificial Sequence: Synthetic oligonucleotide
ucaggaaauugauucuuau

SEQ ID NO: 1985485 - RNA, 19 nt, Artificial Sequence
  Description of Artificial Sequence: Synthetic oligonucleotide
aacuaaaauuaaacgguaa

SEQ ID NO: 1985486 - RNA, 19 nt, Artificial Sequence
  Description of Artificial Sequence: Synthetic oligonucleotide
aaucaggaaauugauucuu

SEQ ID NO: 1985487 - RNA, 19 nt, Artificial Sequence
  Description of Artificial Sequence: Synthetic oligonucleotide
ucccaaaccaucugugacu

SEQ ID NO: 1985488 - RNA, 19 nt, Artificial Sequence
  Description of Artificial Sequence: Synthetic oligonucleotide
uauuaucauggcauaucau

SEQ ID NO: 1985489 - RNA, 19 nt, Artificial Sequence
  Description of Artificial Sequence: Synthetic oligonucleotide
ugggcagaaaacacaggcu

SEQ ID NO: 1985490 - RNA, 19 nt, Artificial Sequence
  Description of Artificial Sequence: Synthetic oligonucleotide
gauauuuagaucagaauuu

SEQ ID NO: 1985491 - RNA, 19 nt, Artificial Sequence
  Description of Artificial Sequence: Synthetic oligonucleotide
caaagcaaguaucaugcca

SEQ ID NO: 1985492 - RNA, 19 nt, Artificial Sequence
  Description of Artificial Sequence: Synthetic oligonucleotide
ucaugccagguauagccca

SEQ ID NO: 1985493 - RNA, 19 nt, Artificial Sequence
  Description of Artificial Sequence: Synthetic oligonucleotide
ucagucucgcaguauggcu

SEQ ID NO: 1985494 - RNA, 19 nt, Artificial Sequence
  Description of Artificial Sequence: Synthetic oligonucleotide
aguauagucaaaacuggau

SEQ ID NO: 1985495 - RNA, 19 nt, Artificial Sequence
  Description of Artificial Sequence: Synthetic oligonucleotide
ugccaagacuuccccagag

SEQ ID NO: 1985496 - RNA, 19 nt, Artificial Sequence
  Description of Artificial Sequence: Synthetic oligonucleotide
caucuaaaagacaaaccaa

SEQ ID NO: 1985497 - RNA, 19 nt, Artificial Sequence
  Description of Artificial Sequence: Synthetic oligonucleotide
cacacacgaaacaggacac

SEQ ID NO: 1985498 - RNA, 19 nt, Artificial Sequence
  Description of Artificial Sequence: Synthetic oligonucleotide
uucuauggggaacucgcau

SEQ ID NO: 1985499 - RNA, 19 nt, Artificial Sequence
  Description of Artificial Sequence: Synthetic oligonucleotide
aaccaucugugacuuucug

SEQ ID NO: 1985500 - RNA, 19 nt, Artificial Sequence
  Description of Artificial Sequence: Synthetic oligonucleotide
aucaugccagguauagccc

SEQ ID NO: 1985501 - RNA, 19 nt, Artificial Sequence
  Description of Artificial Sequence: Synthetic oligonucleotide
ggcauaucaucuaaaagac

SEQ ID NO: 1985502 - RNA, 19 nt, Artificial Sequence
  Description of Artificial Sequence: Synthetic oligonucleotide
uagcccagagcuucaagga

SEQ ID NO: 1985503 - RNA, 19 nt, Artificial Sequence
  Description of Artificial Sequence: Synthetic oligonucleotide
cacaccgagcauacaaagc

SEQ ID NO: 1985504 - RNA, 19 nt, Artificial Sequence
  Description of Artificial Sequence: Synthetic oligonucleotide
cuggauauuuagaucagaa

SEQ ID NO: 1985505 - RNA, 19 nt, Artificial Sequence
  Description of Artificial Sequence: Synthetic oligonucleotide
gacuuuucagaaauucaca

SEQ ID NO: 1985506 - RNA, 19 nt, Artificial Sequence
  Description of Artificial Sequence: Synthetic oligonucleotide
cacaacacaccgagcauac

SEQ ID NO: 1985507 - RNA, 19 nt, Artificial Sequence
  Description of Artificial Sequence: Synthetic oligonucleotide
acuucguaagaaauccaag

SEQ ID NO: 1985508 - RNA, 19 nt, Artificial Sequence
  Description of Artificial Sequence: Synthetic oligonucleotide
ugcggaugggcuuuccaca

SEQ ID NO: 1985509 - RNA, 19 nt, Artificial Sequence
  Description of Artificial Sequence: Synthetic oligonucleotide
aaauaccaaugaguuguca

SEQ ID NO: 1985510 - RNA, 19 nt, Artificial Sequence
  Description of Artificial Sequence: Synthetic oligonucleotide
uaucauggcauaucaucua

SEQ ID NO: 1985511 - RNA, 19 nt, Artificial Sequence
  Description of Artificial Sequence: Synthetic oligonucleotide
accaacuuauuuuguagua

SEQ ID NO: 1985512 - RNA, 19 nt, Artificial Sequence
  Description of Artificial Sequence: Synthetic oligonucleotide
aaacgucugcccuuccaaa

SEQ ID NO: 1985513 - RNA, 19 nt, Artificial Sequence
  Description of Artificial Sequence: Synthetic oligonucleotide
cuucguaagaaauccaagu

SEQ ID NO: 1985514 - RNA, 19 nt, Artificial Sequence
  Description of Artificial Sequence: Synthetic oligonucleotide
aaacccaauguaagccauc

SEQ ID NO: 1985515 - RNA, 19 nt, Artificial Sequence
  Description of Artificial Sequence: Synthetic oligonucleotide
aaauucuucugggugccaa

SEQ ID NO: 1985516 - RNA, 19 nt, Artificial Sequence
  Description of Artificial Sequence: Synthetic oligonucleotide
augacuucgccaaggaucu

SEQ ID NO: 1985517 - RNA, 19 nt, Artificial Sequence
  Description of Artificial Sequence: Synthetic oligonucleotide
cauaauaaucagucucgca

SEQ ID NO: 1985518 - RNA, 19 nt, Artificial Sequence
  Description of Artificial Sequence: Synthetic oligonucleotide
gcaaauaccaaugaguugu

SEQ ID NO: 1985519 - RNA, 19 nt, Artificial Sequence
  Description of Artificial Sequence: Synthetic oligonucleotide
uucaaggaacaugucgcca

SEQ ID NO: 1985520 - RNA, 19 nt, Artificial Sequence
  Description of Artificial Sequence: Synthetic oligonucleotide
uucacaacacaccgagcau

SEQ ID NO: 1985521 - RNA, 19 nt, Artificial Sequence
  Description of Artificial Sequence: Synthetic oligonucleotide
acgaaacaggacacgugcc

SEQ ID NO: 1985522 - RNA, 19 nt, Artificial Sequence
  Description of Artificial Sequence: Synthetic oligonucleotide
uugcggaugggcuuuccac

SEQ ID NO: 1985523 - RNA, 19 nt, Artificial Sequence
  Description of Artificial Sequence: Synthetic oligonucleotide
agauccuuaaagaaagaua

SEQ ID NO: 1985524 - RNA, 19 nt, Artificial Sequence
  Description of Artificial Sequence: Synthetic oligonucleotide
aacaggacacgugccaggu

SEQ ID NO: 1985525 - RNA, 19 nt, Artificial Sequence
  Description of Artificial Sequence: Synthetic oligonucleotide
auguuagaguuuauccauc

SEQ ID NO: 1985526 - RNA, 19 nt, Artificial Sequence
  Description of Artificial Sequence: Synthetic oligonucleotide
caugggcagaaaacacagg

SEQ ID NO: 1985527 - RNA, 19 nt, Artificial Sequence
  Description of Artificial Sequence: Synthetic oligonucleotide
aaacuucguaagaaaucca

SEQ ID NO: 1985528 - RNA, 19 nt, Artificial Sequence
  Description of Artificial Sequence: Synthetic oligonucleotide
ucgcauccacggcauauug

SEQ ID NO: 1985529 - RNA, 19 nt, Artificial Sequence
  Description of Artificial Sequence: Synthetic oligonucleotide
ucgccagcuucuaugggga

SEQ ID NO: 1985530 - RNA, 19 nt, Artificial Sequence
  Description of Artificial Sequence: Synthetic oligonucleotide
uuuuaauguuagaguuuau

SEQ ID NO: 1985531 - RNA, 19 nt, Artificial Sequence
  Description of Artificial Sequence: Synthetic oligonucleotide
ugggcuuuccacaggccac

SEQ ID NO: 1985532 - RNA, 19 nt, Artificial Sequence
  Description of Artificial Sequence: Synthetic oligonucleotide
cuuucacaacacaccgagc

SEQ ID NO: 1985533 - RNA, 19 nt, Artificial Sequence
  Description of Artificial Sequence: Synthetic oligonucleotide
cccaauguaagccaucgug

SEQ ID NO: 1985534 - RNA, 19 nt, Artificial Sequence
  Description of Artificial Sequence: Synthetic oligonucleotide
uaccaaugaguugucaaau

SEQ ID NO: 1985535 - RNA, 19 nt, Artificial Sequence
  Description of Artificial Sequence: Synthetic oligonucleotide
ugucgccagcuucuauggg

SEQ ID NO: 1985536 - RNA, 19 nt, Artificial Sequence
  Description of Artificial Sequence: Synthetic oligonucleotide
caaauauuaucauggcaua

SEQ ID NO: 1985537 - RNA, 19 nt, Artificial Sequence
  Description of Artificial Sequence: Synthetic oligonucleotide
cucgcaauacagugcuccc

SEQ ID NO: 1985538 - RNA, 19 nt, Artificial Sequence
  Description of Artificial Sequence: Synthetic oligonucleotide
aaacacuuucucacagacu

SEQ ID NO: 1985539 - RNA, 19 nt, Artificial Sequence
  Description of Artificial Sequence: Synthetic oligonucleotide
cagucucgcaguauggcuc

SEQ ID NO: 1985540 - RNA, 19 nt, Artificial Sequence
  Description of Artificial Sequence: Synthetic oligonucleotide
auguaagccaucguguuuu

SEQ ID NO: 1985541 - RNA, 19 nt, Artificial Sequence
  Description of Artificial Sequence: Synthetic oligonucleotide
gcuagucauaauaaauccc

SEQ ID NO: 1985542 - RNA, 19 nt, Artificial Sequence
  Description of Artificial Sequence: Synthetic oligonucleotide
ugaugacuucgccaaggau

SEQ ID NO: 1985543 - RNA, 19 nt, Artificial Sequence
  Description of Artificial Sequence: Synthetic oligonucleotide
guuagaguuuauccaucca

SEQ ID NO: 1985544 - RNA, 19 nt, Artificial Sequence
  Description of Artificial Sequence: Synthetic oligonucleotide
aacuuucacaacacaccga

SEQ ID NO: 1985545 - RNA, 19 nt, Artificial Sequence
  Description of Artificial Sequence: Synthetic oligonucleotide
aacacaccgagcauacaaa

SEQ ID NO: 1985546 - RNA, 19 nt, Artificial Sequence
  Description of Artificial Sequence: Synthetic oligonucleotide
aauccaagucaaagaaaau

SEQ ID NO: 1985547 - RNA, 19 nt, Artificial Sequence
  Description of Artificial Sequence: Synthetic oligonucleotide
cucauaacauaacucgcaa

SEQ ID NO: 1985548 - RNA, 19 nt, Artificial Sequence
  Description of Artificial Sequence: Synthetic oligonucleotide
agcuucuauggggaacucg

SEQ ID NO: 1985549 - RNA, 19 nt, Artificial Sequence
  Description of Artificial Sequence: Synthetic oligonucleotide
agucucgcaguauggcucu

SEQ ID NO: 1985550 - RNA, 19 nt, Artificial Sequence
  Description of Artificial Sequence: Synthetic oligonucleotide
caacacaccgagcauacaa

SEQ ID NO: 1985551 - RNA, 19 nt, Artificial Sequence
  Description of Artificial Sequence: Synthetic oligonucleotide
gagcaaagaacuucucaua

SEQ ID NO: 1985552 - RNA, 19 nt, Artificial Sequence
  Description of Artificial Sequence: Synthetic oligonucleotide
gcuucuauggggaacucgc

SEQ ID NO: 1985553 - RNA, 19 nt, Artificial Sequence
  Description of Artificial Sequence: Synthetic oligonucleotide
auucuaagaugaauuuagu

SEQ ID NO: 1985554 - RNA, 19 nt, Artificial Sequence
  Description of Artificial Sequence: Synthetic oligonucleotide
aagcggcuuguccuucuug

SEQ ID NO: 1985555 - RNA, 19 nt, Artificial Sequence
  Description of Artificial Sequence: Synthetic oligonucleotide
aacacaggcuagucauaau

SEQ ID NO: 1985556 - RNA, 19 nt, Artificial Sequence
  Description of Artificial Sequence: Synthetic oligonucleotide
gcacaguuaaauucuucug

SEQ ID NO: 1985557 - RNA, 19 nt, Artificial Sequence
  Description of Artificial Sequence: Synthetic oligonucleotide
ggggaacucgcauccacgg

SEQ ID NO: 1985558 - RNA, 19 nt, Artificial Sequence
  Description of Artificial Sequence: Synthetic oligonucleotide
acgucugcccuuccaaacu

SEQ ID NO: 1985559 - RNA, 19 nt, Artificial Sequence
  Description of Artificial Sequence: Synthetic oligonucleotide
acauaacucgcaauacagu

SEQ ID NO: 1985560 - RNA, 19 nt, Artificial Sequence
  Description of Artificial Sequence: Synthetic oligonucleotide
ucacagagugagcaugcuu

SEQ ID NO: 1985561 - RNA, 19 nt, Artificial Sequence
  Description of Artificial Sequence: Synthetic oligonucleotide
ggaacucgcauccacggca

SEQ ID NO: 1985562 - RNA, 19 nt, Artificial Sequence
  Description of Artificial Sequence: Synthetic oligonucleotide
ggaugggcuuuccacaggc

SEQ ID NO: 1985563 - RNA, 19 nt, Artificial Sequence
  Description of Artificial Sequence: Synthetic oligonucleotide
acacacgaaacaggacacg

SEQ ID NO: 1985564 - RNA, 19 nt, Artificial Sequence
  Description of Artificial Sequence: Synthetic oligonucleotide
gagccacgaggaaaggucc

SEQ ID NO: 1985565 - RNA, 19 nt, Artificial Sequence
  Description of Artificial Sequence: Synthetic oligonucleotide
acgaggaaagguccccuga

SEQ ID NO: 1985566 - RNA, 19 nt, Artificial Sequence
  Description of Artificial Sequence: Synthetic oligonucleotide
ccagguauagcccagagcu

SEQ ID NO: 1985567 - RNA, 19 nt, Artificial Sequence
  Description of Artificial Sequence: Synthetic oligonucleotide
ccaaggaucuuccucuggc

SEQ ID NO: 1985568 - RNA, 19 nt, Artificial Sequence
  Description of Artificial Sequence: Synthetic oligonucleotide
acauuguugcggaugggcu

SEQ ID NO: 1985569 - RNA, 19 nt, Artificial Sequence
  Description of Artificial Sequence: Synthetic oligonucleotide
ggaacaugucgccagcuuc

SEQ ID NO: 1985570 - RNA, 19 nt, Artificial Sequence
  Description of Artificial Sequence: Synthetic oligonucleotide
agacaaaccaaaacuuuua

SEQ ID NO: 1985571 - RNA, 19 nt, Artificial Sequence
  Description of Artificial Sequence: Synthetic oligonucleotide
auagucaaaacuggauauu

SEQ ID NO: 1985572 - RNA, 19 nt, Artificial Sequence
  Description of Artificial Sequence: Synthetic oligonucleotide
guauggcucuccaucuucc

SEQ ID NO: 1985573 - RNA, 19 nt, Artificial Sequence
  Description of Artificial Sequence: Synthetic oligonucleotide
cacacacacgaaacaggac

SEQ ID NO: 1985574 - RNA, 19 nt, Artificial Sequence
  Description of Artificial Sequence: Synthetic oligonucleotide
acggcauauuguuccaaaa

SEQ ID NO: 1985575 - RNA, 19 nt, Artificial Sequence
  Description of Artificial Sequence: Synthetic oligonucleotide
uauccauccagggcuacua

SEQ ID NO: 1985576 - RNA, 19 nt, Artificial Sequence
  Description of Artificial Sequence: Synthetic oligonucleotide
ucacagacuugguuuuaau

SEQ ID NO: 1985577 - RNA, 19 nt, Artificial Sequence
  Description of Artificial Sequence: Synthetic oligonucleotide
ugcagugagcacaguuaaa

SEQ ID NO: 1985578 - RNA, 19 nt, Artificial Sequence
  Description of Artificial Sequence: Synthetic oligonucleotide
cagaaaacacaggcuaguc

SEQ ID NO: 1985579 - RNA, 19 nt, Artificial Sequence
  Description of Artificial Sequence: Synthetic oligonucleotide
ugcaaagcggcuuguccuu

SEQ ID NO: 1985580 - RNA, 19 nt, Artificial Sequence
  Description of Artificial Sequence: Synthetic oligonucleotide
caaguaucaugccagguau

SEQ ID NO: 1985581 - RNA, 19 nt, Artificial Sequence
  Description of Artificial Sequence: Synthetic oligonucleotide
guaucaugccagguauagc

SEQ ID NO: 1985582 - RNA, 19 nt, Artificial Sequence
  Description of Artificial Sequence: Synthetic oligonucleotide
cuacuucaugggcagaaaa

SEQ ID NO: 1985583 - RNA, 19 nt, Artificial Sequence
  Description of Artificial Sequence: Synthetic oligonucleotide
cuguugacuuuucagaaau

SEQ ID NO: 1985584 - RNA, 19 nt, Artificial Sequence
  Description of Artificial Sequence: Synthetic oligonucleotide
gauucuuauaaaggcuacu

SEQ ID NO: 1985585 - RNA, 19 nt, Artificial Sequence
  Description of Artificial Sequence: Synthetic oligonucleotide
uuauccauccagggcuacu

SEQ ID NO: 1985586 - RNA, 19 nt, Artificial Sequence
  Description of Artificial Sequence: Synthetic oligonucleotide
cauccacggcauauuguuc

SEQ ID NO: 1985587 - RNA, 19 nt, Artificial Sequence
  Description of Artificial Sequence: Synthetic oligonucleotide
agcaaguaucaugccaggu

SEQ ID NO: 1985588 - RNA, 19 nt, Artificial Sequence
  Description of Artificial Sequence: Synthetic oligonucleotide
cacagagugagcaugcuuu

SEQ ID NO: 1985589 - RNA, 19 nt, Artificial Sequence
  Description of Artificial Sequence: Synthetic oligonucleotide
caaggaucuuccucuggca

SEQ ID NO: 1985590 - RNA, 19 nt, Artificial Sequence
  Description of Artificial Sequence: Synthetic oligonucleotide
acagagugagcaugcuuuu

SEQ ID NO: 1985591 - RNA, 19 nt, Artificial Sequence
  Description of Artificial Sequence: Synthetic oligonucleotide
gcauaauaaucagucucgc

SEQ ID NO: 1985592 - RNA, 19 nt, Artificial Sequence
  Description of Artificial Sequence: Synthetic oligonucleotide
gcaccggccacauucagga

SEQ ID NO: 1985593 - RNA, 19 nt, Artificial Sequence
  Description of Artificial Sequence: Synthetic oligonucleotide
ucgcaauacagugcucccu

SEQ ID NO: 1985594 - RNA, 19 nt, Artificial Sequence
  Description of Artificial Sequence: Synthetic oligonucleotide
auuccacaaauaacagaga

SEQ ID NO: 1985595 - RNA, 19 nt, Artificial Sequence
  Description of Artificial Sequence: Synthetic oligonucleotide
ucucgcaguauggcucucc

SEQ ID NO: 1985596 - RNA, 19 nt, Artificial Sequence
  Description of Artificial Sequence: Synthetic oligonucleotide
aaagcggcuuguccuucuu

SEQ ID NO: 1985597 - RNA, 19 nt, Artificial Sequence
  Description of Artificial Sequence: Synthetic oligonucleotide
auggcucuccaucuuccaa

SEQ ID NO: 1985598 - RNA, 19 nt, Artificial Sequence
  Description of Artificial Sequence: Synthetic oligonucleotide
auaaucagucucgcaguau

SEQ ID NO: 1985599 - RNA, 19 nt, Artificial Sequence
  Description of Artificial Sequence: Synthetic oligonucleotide
uuuauccauccagggcuac

SEQ ID NO: 1985600 - RNA, 19 nt, Artificial Sequence
  Description of Artificial Sequence: Synthetic oligonucleotide
ucaaagcauugaugacuuc

SEQ ID NO: 1985601 - RNA, 19 nt, Artificial Sequence
  Description of Artificial Sequence: Synthetic oligonucleotide
aacucgcaauacagugcuc

SEQ ID NO: 1985602 - RNA, 19 nt, Artificial Sequence
  Description of Artificial Sequence: Synthetic oligonucleotide
agucaaaacuggauauuua

SEQ ID NO: 1985603 - RNA, 19 nt, Artificial Sequence
  Description of Artificial Sequence: Synthetic oligonucleotide
aggaacaugucgccagcuu

SEQ ID NO: 1985604 - RNA, 19 nt, Artificial Sequence
  Description of Artificial Sequence: Synthetic oligonucleotide
cacgaggaaagguccccug

SEQ ID NO: 1985605 - RNA, 19 nt, Artificial Sequence
  Description of Artificial Sequence: Synthetic oligonucleotide
cuucuauggggaacucgca

SEQ ID NO: 1985606 - RNA, 19 nt, Artificial Sequence
  Description of Artificial Sequence: Synthetic oligonucleotide
gaacaugucgccagcuucu

SEQ ID NO: 1985607 - RNA, 19 nt, Artificial Sequence
  Description of Artificial Sequence: Synthetic oligonucleotide
cguaagaaauccaagucaa

SEQ ID NO: 1985608 - RNA, 19 nt, Artificial Sequence
  Description of Artificial Sequence: Synthetic oligonucleotide
ccacaaauaacagagaaau

SEQ ID NO: 1985609 - RNA, 19 nt, Artificial Sequence
  Description of Artificial Sequence: Synthetic oligonucleotide
uggcaccggccacauucag

SEQ ID NO: 1985610 - RNA, 19 nt, Artificial Sequence
  Description of Artificial Sequence: Synthetic oligonucleotide
auccagggcuacuauuauu

SEQ ID NO: 1985611 - RNA, 19 nt, Artificial Sequence
  Description of Artificial Sequence: Synthetic oligonucleotide
cagggcuacuauuauuuua

SEQ ID NO: 1985612 - RNA, 19 nt, Artificial Sequence
  Description of Artificial Sequence: Synthetic oligonucleotide
uauggggaacucgcaucca

SEQ ID NO: 1985613 - RNA, 19 nt, Artificial Sequence
  Description of Artificial Sequence: Synthetic oligonucleotide
cuuccucuggcaccggcca

SEQ ID NO: 1985614 - RNA, 19 nt, Artificial Sequence
  Description of Artificial Sequence: Synthetic oligonucleotide
aucaggaaauugauucuua

SEQ ID NO: 1985615 - RNA, 19 nt, Artificial Sequence
  Description of Artificial Sequence: Synthetic oligonucleotide
acccaauguaagccaucgu

SEQ ID NO: 1985616 - RNA, 19 nt, Artificial Sequence
  Description of Artificial Sequence: Synthetic oligonucleotide
agugcucccuucuccucaa

SEQ ID NO: 1985617 - RNA, 19 nt, Artificial Sequence
  Description of Artificial Sequence: Synthetic oligonucleotide
acucgcauccacggcauau

SEQ ID NO: 1985618 - RNA, 19 nt, Artificial Sequence
  Description of Artificial Sequence: Synthetic oligonucleotide
ucuccucaacaaacccaau

SEQ ID NO: 1985619 - RNA, 19 nt, Artificial Sequence
  Description of Artificial Sequence: Synthetic oligonucleotide
agucaccaacuuauuuugu

SEQ ID NO: 1985620 - RNA, 19 nt, Artificial Sequence
  Description of Artificial Sequence: Synthetic oligonucleotide
caggagcaaagaacuucuc

SEQ ID NO: 1985621 - RNA, 19 nt, Artificial Sequence
  Description of Artificial Sequence: Synthetic oligonucleotide
cacggcauauuguuccaaa

SEQ ID NO: 1985622 - RNA, 19 nt, Artificial Sequence
  Description of Artificial Sequence: Synthetic oligonucleotide
cuggaacuguugacuuuuc

SEQ ID NO: 1985623 - RNA, 19 nt, Artificial Sequence
  Description of Artificial Sequence: Synthetic oligonucleotide
caguuaaauucuucugggu

SEQ ID NO: 1985624 - RNA, 19 nt, Artificial Sequence
  Description of Artificial Sequence: Synthetic oligonucleotide
uuccucuggcaccggccac

SEQ ID NO: 1985625 - RNA, 19 nt, Artificial Sequence
  Description of Artificial Sequence: Synthetic oligonucleotide
aacaugucgccagcuucua

SEQ ID NO: 1985626 - RNA, 19 nt, Artificial Sequence
  Description of Artificial Sequence: Synthetic oligonucleotide
gccagguauagcccagagc

SEQ ID NO: 1985627 - RNA, 19 nt, Artificial Sequence
  Description of Artificial Sequence: Synthetic oligonucleotide
caauguaagccaucguguu

SEQ ID NO: 1985628 - RNA, 19 nt, Artificial Sequence
  Description of Artificial Sequence: Synthetic oligonucleotide
cagacuugguuuuaauguu

SEQ ID NO: 1985629 - RNA, 19 nt, Artificial Sequence
  Description of Artificial Sequence: Synthetic oligonucleotide
cgguaauuuuaguuucccc

SEQ ID NO: 1985630 - RNA, 19 nt, Artificial Sequence
  Description of Artificial Sequence: Synthetic oligonucleotide
cucgcaguauggcucucca

SEQ ID NO: 1985631 - RNA, 19 nt, Artificial Sequence
  Description of Artificial Sequence: Synthetic oligonucleotide
cagugcucccuucuccuca

SEQ ID NO: 1985632 - RNA, 19 nt, Artificial Sequence
  Description of Artificial Sequence: Synthetic oligonucleotide
gggaacucgcauccacggc

SEQ ID NO: 1985633 - RNA, 19 nt, Artificial Sequence
  Description of Artificial Sequence: Synthetic oligonucleotide
ccaauguaagccaucgugu

SEQ ID NO: 1985634 - RNA, 19 nt, Artificial Sequence
  Description of Artificial Sequence: Synthetic oligonucleotide
uguugcggaugggcuuucc

SEQ ID NO: 1985635 - RNA, 19 nt, Artificial Sequence
  Description of Artificial Sequence: Synthetic oligonucleotide
ccaagucaaagaaaauucu

SEQ ID NO: 1985636 - RNA, 19 nt, Artificial Sequence
  Description of Artificial Sequence: Synthetic oligonucleotide
gacuuccccagagccacga

SEQ ID NO: 1985637 - RNA, 19 nt, Artificial Sequence
  Description of Artificial Sequence: Synthetic oligonucleotide
ggcaccggccacauucagg

SEQ ID NO: 1985638 - RNA, 19 nt, Artificial Sequence
  Description of Artificial Sequence: Synthetic oligonucleotide
ucgcaguauggcucuccau

SEQ ID NO: 1985639 - RNA, 19 nt, Artificial Sequence
  Description of Artificial Sequence: Synthetic oligonucleotide
uccccagagccacgaggaa

SEQ ID NO: 1985640 - RNA, 19 nt, Artificial Sequence
  Description of Artificial Sequence: Synthetic oligonucleotide
acgugccagguuugcuuca

SEQ ID NO: 1985641 - RNA, 19 nt, Artificial Sequence
  Description of Artificial Sequence: Synthetic oligonucleotide
gcauaucaucuaaaagaca

SEQ ID NO: 1985642 - RNA, 19 nt, Artificial Sequence
  Description of Artificial Sequence: Synthetic oligonucleotide
cagcauuguauuccacaaa

SEQ ID NO: 1985643 - RNA, 19 nt, Artificial Sequence
  Description of Artificial Sequence: Synthetic oligonucleotide
cacacgaaacaggacacgu

SEQ ID NO: 1985644 - RNA, 19 nt, Artificial Sequence
  Description of Artificial Sequence: Synthetic oligonucleotide
guuuauccauccagggcua

SEQ ID NO: 1985645 - RNA, 19 nt, Artificial Sequence
  Description of Artificial Sequence: Synthetic oligonucleotide
aacucgcauccacggcaua

SEQ ID NO: 1985646 - RNA, 19 nt, Artificial Sequence
  Description of Artificial Sequence: Synthetic oligonucleotide
aggacacgugccagguuug

SEQ ID NO: 1985647 - RNA, 19 nt, Artificial Sequence
  Description of Artificial Sequence: Synthetic oligonucleotide
gcccagagcuucaaggaac

SEQ ID NO: 1985648 - RNA, 19 nt, Artificial Sequence
  Description of Artificial Sequence: Synthetic oligonucleotide
acaacacaccgagcauaca

SEQ ID NO: 1985649 - RNA, 19 nt, Artificial Sequence
  Description of Artificial Sequence: Synthetic oligonucleotide
caggacacgugccagguuu

SEQ ID NO: 1985650 - RNA, 19 nt, Artificial Sequence
  Description of Artificial Sequence: Synthetic oligonucleotide
cuggcaccggccacauuca

SEQ ID NO: 1985651 - RNA, 19 nt, Artificial Sequence
  Description of Artificial Sequence: Synthetic oligonucleotide
gugccaagacuuccccaga

SEQ ID NO: 1985652 - RNA, 19 nt, Artificial Sequence
  Description of Artificial Sequence: Synthetic oligonucleotide
ccaaugaguugucaaauau

SEQ ID NO: 1985653 - RNA, 19 nt, Artificial Sequence
  Description of Artificial Sequence: Synthetic oligonucleotide
cauuguugcggaugggcuu

SEQ ID NO: 1985654 - RNA, 19 nt, Artificial Sequence
  Description of Artificial Sequence: Synthetic oligonucleotide
gcauccacggcauauuguu

SEQ ID NO: 1985655 - RNA, 19 nt, Artificial Sequence
  Description of Artificial Sequence: Synthetic oligonucleotide
ugggcacacaugggaguuc

SEQ ID NO: 1985656 - RNA, 19 nt, Artificial Sequence
  Description of Artificial Sequence: Synthetic oligonucleotide
caccggccacauucaggag

SEQ ID NO: 1985657 - RNA, 19 nt, Artificial Sequence
  Description of Artificial Sequence: Synthetic oligonucleotide
ggcuacuucaugggcagaa

SEQ ID NO: 1985658 - RNA, 19 nt, Artificial Sequence
  Description of Artificial Sequence: Synthetic oligonucleotide
augccagguauagcccaga

SEQ ID NO: 1985659 - RNA, 19 nt, Artificial Sequence
  Description of Artificial Sequence: Synthetic oligonucleotide
gccacgaggaaaggucccc

SEQ ID NO: 1985660 - RNA, 19 nt, Artificial Sequence
  Description of Artificial Sequence: Synthetic oligonucleotide
gccagcuucuauggggaac

SEQ ID NO: 1985661 - RNA, 19 nt, Artificial Sequence
  Description of Artificial Sequence: Synthetic oligonucleotide
gaacucgcauccacggcau

SEQ ID NO: 1985662 - RNA, 19 nt, Artificial Sequence
  Description of Artificial Sequence: Synthetic oligonucleotide
ggacacgugccagguuugc

SEQ ID NO: 1985663 - RNA, 19 nt, Artificial Sequence
  Description of Artificial Sequence: Synthetic oligonucleotide
caaagcggcuuguccuucu

SEQ ID NO: 1985664 - RNA, 19 nt, Artificial Sequence
  Description of Artificial Sequence: Synthetic oligonucleotide
gcacacaugggaguucgcu

SEQ ID NO: 1985665 - RNA, 19 nt, Artificial Sequence
  Description of Artificial Sequence: Synthetic oligonucleotide
cagcuucuauggggaacuc

SEQ ID NO: 1985666 - RNA, 19 nt, Artificial Sequence
  Description of Artificial Sequence: Synthetic oligonucleotide
cagagccacgaggaaaggu

SEQ ID NO: 1985667 - RNA, 19 nt, Artificial Sequence
  Description of Artificial Sequence: Synthetic oligonucleotide
gcuacuucaugggcagaaa

SEQ ID NO: 1985668 - RNA, 19 nt, Artificial Sequence
  Description of Artificial Sequence: Synthetic oligonucleotide
cggaugggcuuuccacagg

SEQ ID NO: 1985669 - RNA, 19 nt, Artificial Sequence
  Description of Artificial Sequence: Synthetic oligonucleotide
cagguauagcccagagcuu

SEQ ID NO: 1985670 - RNA, 19 nt, Artificial Sequence
  Description of Artificial Sequence: Synthetic oligonucleotide
cuucgccaaggaucuuccu

SEQ ID NO: 1985671 - RNA, 19 nt, Artificial Sequence
  Description of Artificial Sequence: Synthetic oligonucleotide
caguauggcucuccaucuu

SEQ ID NO: 1985672 - RNA, 19 nt, Artificial Sequence
  Description of Artificial Sequence: Synthetic oligonucleotide
cucgcauccacggcauauu

SEQ ID NO: 1985673 - RNA, 19 nt, Artificial Sequence
  Description of Artificial Sequence: Synthetic oligonucleotide
gucucgcaguauggcucuc

SEQ ID NO: 1985674 - RNA, 19 nt, Artificial Sequence
  Description of Artificial Sequence: Synthetic oligonucleotide
gucugcccuuccaaacuuu

SEQ ID NO: 1985675 - RNA, 19 nt, Artificial Sequence
  Description of Artificial Sequence: Synthetic oligonucleotide
cccaaaccaucugugacuu

SEQ ID NO: 1985676 - RNA, 19 nt, Artificial Sequence
  Description of Artificial Sequence: Synthetic oligonucleotide
cgcaauacagugcucccuu

SEQ ID NO: 1985677 - RNA, 19 nt, Artificial Sequence
  Description of Artificial Sequence: Synthetic oligonucleotide
cgcauccacggcauauugu

SEQ ID NO: 1985678 - RNA, 19 nt, Artificial Sequence
  Description of Artificial Sequence: Synthetic oligonucleotide
cccugaugacuugguugca

SEQ ID NO: 1985679 - RNA, 19 nt, Artificial Sequence
  Description of Artificial Sequence: Synthetic oligonucleotide
ccacggcauauuguuccaa

SEQ ID NO: 1985680 - RNA, 19 nt, Artificial Sequence
  Description of Artificial Sequence: Synthetic oligonucleotide
ccacgaggaaagguccccu

SEQ ID NO: 1985681 - RNA, 19 nt, Artificial Sequence
  Description of Artificial Sequence: Synthetic oligonucleotide
ccagagcuucaaggaacau

SEQ ID NO: 1985682 - RNA, 19 nt, Artificial Sequence
  Description of Artificial Sequence: Synthetic oligonucleotide
aaguuuauaacucaaaucc

SEQ ID NO: 1985683 - RNA, 19 nt, Artificial Sequence
  Description of Artificial Sequence: Synthetic oligonucleotide
agaauagacaaucuaaagc

SEQ ID NO: 1985684 - RNA, 19 nt, Artificial Sequence
  Description of Artificial Sequence: Synthetic oligonucleotide
auacauaacagaaagaugc

SEQ ID NO: 1985685 - RNA, 19 nt, Artificial Sequence
  Description of Artificial Sequence: Synthetic oligonucleotide
aguaccuuaagucauaaac

SEQ ID NO: 1985686 - RNA, 19 nt, Artificial Sequence
  Description of Artificial Sequence: Synthetic oligonucleotide
aauaccacuuuacaaaagg

SEQ ID NO: 1985687 - RNA, 19 nt, Artificial Sequence
  Description of Artificial Sequence: Synthetic oligonucleotide
aauauacugcauuuaacac

SEQ ID NO: 1985688 - RNA, 19 nt, Artificial Sequence
  Description of Artificial Sequence: Synthetic oligonucleotide
aauuguaauacauaacaga

SEQ ID NO: 1985689 - RNA, 19 nt, Artificial Sequence
  Description of Artificial Sequence: Synthetic oligonucleotide
uauauggacaggaagauga

SEQ ID NO: 1985690 - RNA, 19 nt, Artificial Sequence
  Description of Artificial Sequence: Synthetic oligonucleotide
aauauacgcaguguuaacc

SEQ ID NO: 1985691 - RNA, 19 nt, Artificial Sequence
  Description of Artificial Sequence: Synthetic oligonucleotide
acauagaaaucccauauac

SEQ ID NO: 1985692 - RNA, 19 nt, Artificial Sequence
  Description of Artificial Sequence: Synthetic oligonucleotide
gaauagacaaucuaaagca

SEQ ID NO: 1985693 - RNA, 19 nt, Artificial Sequence
  Description of Artificial Sequence: Synthetic oligonucleotide
  modified_base (18)..(18): a, c, u, g, unknown or other
uguaguguuaaccugucng

SEQ ID NO: 1985694 - RNA, 19 nt, Artificial Sequence
  Description of Artificial Sequence: Synthetic oligonucleotide
acucuaaagugacaaaugc

SEQ ID NO: 1985695 - RNA, 19 nt, Artificial Sequence
  Description of Artificial Sequence: Synthetic oligonucleotide
uauccuuuuguuuaaaaug

SEQ ID NO: 1985696 - RNA, 19 nt, Artificial Sequence
  Description of Artificial Sequence: Synthetic oligonucleotide
uuaaaaugcuuaauuacug

SEQ ID NO: 1985697 - RNA, 19 nt, Artificial Sequence
  Description of Artificial Sequence: Synthetic oligonucleotide
uaguguuggaaucagagug

SEQ ID NO: 1985698 - RNA, 19 nt, Artificial Sequence
  Description of Artificial Sequence: Synthetic oligonucleotide
uaagucauaaacucaaugu

SEQ ID NO: 1985699 - RNA, 19 nt, Artificial Sequence
  Description of Artificial Sequence: Synthetic oligonucleotide
ucuauagccaaugaaauca

SEQ ID NO: 1985700 - RNA, 19 nt, Artificial Sequence
  Description of Artificial Sequence: Synthetic oligonucleotide
aaugcuuaauuacuggcug

SEQ ID NO: 1985701 - RNA, 19 nt, Artificial Sequence
  Description of Artificial Sequence: Synthetic oligonucleotide
aaaagucuacccaauuucc

SEQ ID NO: 1985702 - RNA, 19 nt, Artificial Sequence
  Description of Artificial Sequence: Synthetic oligonucleotide
uaaaaugcuuaauuacugg

SEQ ID NO: 1985703 - RNA, 19 nt, Artificial Sequence
  Description of Artificial Sequence: Synthetic oligonucleotide
uucaguacacucuaaagug

SEQ ID NO: 1985704 - RNA, 19 nt, Artificial Sequence
  Description of Artificial Sequence: Synthetic oligonucleotide
ucuaccgucacauucagcu

SEQ ID NO: 1985705 - RNA, 19 nt, Artificial Sequence
  Description of Artificial Sequence: Synthetic oligonucleotide
caaucuaaagcauuugugc

SEQ ID NO: 1985706 - RNA, 19 nt, Artificial Sequence
  Description of Artificial Sequence: Synthetic oligonucleotide
uguacagagaagcaguagc

SEQ ID NO: 1985707 - RNA, 19 nt, Artificial Sequence
  Description of Artificial Sequence: Synthetic oligonucleotide
aaucagagcuuguacagag

SEQ ID NO: 1985708 - RNA, 19 nt, Artificial Sequence
  Description of Artificial Sequence: Synthetic oligonucleotide
aaucuaaagcauuugugca

SEQ ID NO: 1985709 - RNA, 19 nt, Artificial Sequence
  Description of Artificial Sequence: Synthetic oligonucleotide
uaguuaaagugcuaaauug

SEQ ID NO: 1985710 - RNA, 19 nt, Artificial Sequence
  Description of Artificial Sequence: Synthetic oligonucleotide
ucaacaguaccuagaaggg

SEQ ID NO: 1985711 - RNA, 19 nt, Artificial Sequence
  Description of Artificial Sequence: Synthetic oligonucleotide
uuaaucagagcuuguacag

SEQ ID NO: 1985712 - RNA, 19 nt, Artificial Sequence
  Description of Artificial Sequence: Synthetic oligonucleotide
aaaugcuaguguuggaauc

SEQ ID NO: 1985713 - RNA, 19 nt, Artificial Sequence
  Description of Artificial Sequence: Synthetic oligonucleotide
uuaauccccaccauuguag

SEQ ID NO: 1985714 - RNA, 19 nt, Artificial Sequence
  Description of Artificial Sequence: Synthetic oligonucleotide
uauacugcauuuaacacau

SEQ ID NO: 1985715 - RNA, 19 nt, Artificial Sequence
  Description of Artificial Sequence: Synthetic oligonucleotide
aaauauacgcaguguuaac

SEQ ID NO: 1985716 - RNA, 19 nt, Artificial Sequence
  Description of Artificial Sequence: Synthetic oligonucleotide
cauuuuaacuguucuauag

SEQ ID NO: 1985717 - RNA, 19 nt, Artificial Sequence
  Description of Artificial Sequence: Synthetic oligonucleotide
aguuaaucagagcuuguac

SEQ ID NO: 1985718 - RNA, 19 nt, Artificial Sequence
  Description of Artificial Sequence: Synthetic oligonucleotide
accauuguaguuaaagugc

SEQ ID NO: 1985719 - RNA, 19 nt, Artificial Sequence
  Description of Artificial Sequence: Synthetic oligonucleotide
uauaaauauacgcaguguu

SEQ ID NO: 1985720 - RNA, 19 nt, Artificial Sequence
  Description of Artificial Sequence: Synthetic oligonucleotide
agaaagaugccccaugcag

SEQ ID NO: 1985721 - RNA, 19 nt, Artificial Sequence
  Description of Artificial Sequence: Synthetic oligonucleotide
uacugguugauccacaaga

SEQ ID NO: 1985722 - RNA, 19 nt, Artificial Sequence
  Description of Artificial Sequence: Synthetic oligonucleotide
uuauauaaauauacgcagu

SEQ ID NO: 1985723 - RNA, 19 nt, Artificial Sequence
  Description of Artificial Sequence: Synthetic oligonucleotide
uaaccauagacacuuuaag

SEQ ID NO: 1985724 - RNA, 19 nt, Artificial Sequence
  Description of Artificial Sequence: Synthetic oligonucleotide
aaaucccauauacaaaccu

SEQ ID NO: 1985725 - RNA, 19 nt, Artificial Sequence
  Description of Artificial Sequence: Synthetic oligonucleotide
uagaauagacaaucuaaag

SEQ ID NO: 1985726 - RNA, 19 nt, Artificial Sequence
  Description of Artificial Sequence: Synthetic oligonucleotide
ugugcaaaagacucuguag

SEQ ID NO: 1985727 - RNA, 19 nt, Artificial Sequence
  Description of Artificial Sequence: Synthetic oligonucleotide
guagcuuacugguugaucc

SEQ ID NO: 1985728 - RNA, 19 nt, Artificial Sequence
  Description of Artificial Sequence: Synthetic oligonucleotide
uugaacuuucaacaguacc

SEQ ID NO: 1985729 - RNA, 19 nt, Artificial Sequence
  Description of Artificial Sequence: Synthetic oligonucleotide
aauagaguuggcuaccaaa

SEQ ID NO: 1985730 - RNA, 19 nt, Artificial Sequence
  Description of Artificial Sequence: Synthetic oligonucleotide
aaaccaaauaccacuuuac

SEQ ID NO: 1985731 - RNA, 19 nt, Artificial Sequence
  Description of Artificial Sequence: Synthetic oligonucleotide
uaaagaaguuuauaacuca

SEQ ID NO: 1985732 - RNA, 19 nt, Artificial Sequence
  Description of Artificial Sequence: Synthetic oligonucleotide
auauacugcauuuaacaca

SEQ ID NO: 1985733 - RNA, 19 nt, Artificial Sequence
  Description of Artificial Sequence: Synthetic oligonucleotide
uauacucucccauucgucc

SEQ ID NO: 1985734 - RNA, 19 nt, Artificial Sequence
  Description of Artificial Sequence: Synthetic oligonucleotide
agccaaugaaaucagcuuc

SEQ ID NO: 1985735 - RNA, 19 nt, Artificial Sequence
  Description of Artificial Sequence: Synthetic oligonucleotide
uuaacuguucuauagccaa

SEQ ID NO: 1985736 - RNA, 19 nt, Artificial Sequence
  Description of Artificial Sequence: Synthetic oligonucleotide
  modified_base (15)..(15): a, c, u, g, unknown or other
aguguuaaccugucnguac

SEQ ID NO: 1985737 - RNA, 19 nt, Artificial Sequence
  Description of Artificial Sequence: Synthetic oligonucleotide
uuauaacucaaauccuugc

SEQ ID NO: 1985738 - RNA, 19 nt, Artificial Sequence
  Description of Artificial Sequence: Synthetic oligonucleotide
auaaauaaucucaauauau

SEQ ID NO: 1985739 - RNA, 19 nt, Artificial Sequence
  Description of Artificial Sequence: Synthetic oligonucleotide
uaccgucacauucagcugg

SEQ ID NO: 1985740 - RNA, 19 nt, Artificial Sequence
  Description of Artificial Sequence: Synthetic oligonucleotide
aauacauaacagaaagaug

SEQ ID NO: 1985741 - RNA, 19 nt, Artificial Sequence
  Description of Artificial Sequence: Synthetic oligonucleotide
agaagcuauauacauagaa

SEQ ID NO: 1985742 - RNA, 19 nt, Artificial Sequence
  Description of Artificial Sequence: Synthetic oligonucleotide
aguguuucucccauuauac

SEQ ID NO: 1985743 - RNA, 19 nt, Artificial Sequence
  Description of Artificial Sequence: Synthetic oligonucleotide
augaaaguuugccaauuuc

SEQ ID NO: 1985744 - RNA, 19 nt, Artificial Sequence
  Description of Artificial Sequence: Synthetic oligonucleotide
ucucccauuauacucuccc

SEQ ID NO: 1985745 - RNA, 19 nt, Artificial Sequence
  Description of Artificial Sequence: Synthetic oligonucleotide
uuauacgaaaggcaucugu

SEQ ID NO: 1985746 - RNA, 19 nt, Artificial Sequence
  Description of Artificial Sequence: Synthetic oligonucleotide
acauaacagaaagaugccc

SEQ ID NO: 1985747 - RNA, 19 nt, Artificial Sequence
  Description of Artificial Sequence: Synthetic oligonucleotide
cuaaauuguaauacauaac

SEQ ID NO: 1985748 - RNA, 19 nt, Artificial Sequence
  Description of Artificial Sequence: Synthetic oligonucleotide
auuguaauacauaacagaa

SEQ ID NO: 1985749 - RNA, 19 nt, Artificial Sequence
  Description of Artificial Sequence: Synthetic oligonucleotide
cucggugucgcuuuguggg

SEQ ID NO: 1985750 - RNA, 19 nt, Artificial Sequence
  Description of Artificial Sequence: Synthetic oligonucleotide
aaaggcucucccaaaaguc

SEQ ID NO: 1985751 - RNA, 19 nt, Artificial Sequence
  Description of Artificial Sequence: Synthetic oligonucleotide
aaccaaauaccacuuuaca

SEQ ID NO: 1985752 - RNA, 19 nt, Artificial Sequence
  Description of Artificial Sequence: Synthetic oligonucleotide
caguguuaaccauagacac

SEQ ID NO: 1985753 - RNA, 19 nt, Artificial Sequence
  Description of Artificial Sequence: Synthetic oligonucleotide
uuaaagugcuaaauuguaa

SEQ ID NO: 1985754 - RNA, 19 nt, Artificial Sequence
  Description of Artificial Sequence: Synthetic oligonucleotide
auaacucaaauccuugcca

SEQ ID NO: 1985755 - RNA, 19 nt, Artificial Sequence
  Description of Artificial Sequence: Synthetic oligonucleotide
uacauaacagaaagaugcc

SEQ ID NO: 1985756 - RNA, 19 nt, Artificial Sequence
  Description of Artificial Sequence: Synthetic oligonucleotide
uucuuugaacuuucaacag

SEQ ID NO: 1985757 - RNA, 19 nt, Artificial Sequence
  Description of Artificial Sequence: Synthetic oligonucleotide
uaccuuaagucauaaacuc

SEQ ID NO: 1985758 - RNA, 19 nt, Artificial Sequence
  Description of Artificial Sequence: Synthetic oligonucleotide
cauagacacuuuaaguacc

SEQ ID NO: 1985759 - RNA, 19 nt, Artificial Sequence
  Description of Artificial Sequence: Synthetic oligonucleotide
guuaaucagagcuuguaca

SEQ ID NO: 1985760 - RNA, 19 nt, Artificial Sequence
  Description of Artificial Sequence: Synthetic oligonucleotide
gaaucagaguguuggcugg

SEQ ID NO: 1985761 - RNA, 19 nt, Artificial Sequence
  Description of Artificial Sequence: Synthetic oligonucleotide
agugcuaaauuguaauaca

SEQ ID NO: 1985762 - RNA, 19 nt, Artificial Sequence
  Description of Artificial Sequence: Synthetic oligonucleotide
uacgcaguguuaaccauag

SEQ ID NO: 1985763 - RNA, 19 nt, Artificial Sequence
  Description of Artificial Sequence: Synthetic oligonucleotide
aguuauacgaaaggcaucu

SEQ ID NO: 1985764 - RNA, 19 nt, Artificial Sequence
  Description of Artificial Sequence: Synthetic oligonucleotide
agacucuguaguguuaacc

SEQ ID NO: 1985765 - RNA, 19 nt, Artificial Sequence
  Description of Artificial Sequence: Synthetic oligonucleotide
aaugcuaguguuggaauca

SEQ ID NO: 1985766 - RNA, 19 nt, Artificial Sequence
  Description of Artificial Sequence: Synthetic oligonucleotide
uuuccuggaguuaaucaga

SEQ ID NO: 1985767 - RNA, 19 nt, Artificial Sequence
  Description of Artificial Sequence: Synthetic oligonucleotide
cuugcacagauauauggac

SEQ ID NO: 1985768 - RNA, 19 nt, Artificial Sequence
  Description of Artificial Sequence: Synthetic oligonucleotide
auauacgcaguguuaacca

SEQ ID NO: 1985769 - RNA, 19 nt, Artificial Sequence
  Description of Artificial Sequence: Synthetic oligonucleotide
aacuuucaacaguaccuag

SEQ ID NO: 1985770 - RNA, 19 nt, Artificial Sequence
  Description of Artificial Sequence: Synthetic oligonucleotide
  modified_base (14)..(14): a, c, u, g, unknown or other
guguuaaccugucnguacc

SEQ ID NO: 1985771 - RNA, 19 nt, Artificial Sequence
  Description of Artificial Sequence: Synthetic oligonucleotide
agcaguagcuuacugguug

SEQ ID NO: 1985772 - RNA, 19 nt, Artificial Sequence
  Description of Artificial Sequence: Synthetic oligonucleotide
aaagugcuaaauuguaaua

SEQ ID NO: 1985773 - RNA, 19 nt, Artificial Sequence
  Description of Artificial Sequence: Synthetic oligonucleotide
cugaguguagaauagacaa

SEQ ID NO: 1985774 - RNA, 19 nt, Artificial Sequence
  Description of Artificial Sequence: Synthetic oligonucleotide
uaaagugacaaaugcuagu

SEQ ID NO: 1985775 - RNA, 19 nt, Artificial Sequence
  Description of Artificial Sequence: Synthetic oligonucleotide
aaagaugccccaugcagaa

SEQ ID NO: 1985776 - RNA, 19 nt, Artificial Sequence
  Description of Artificial Sequence: Synthetic oligonucleotide
uauacauagaaaucccaua

SEQ ID NO: 1985777 - RNA, 19 nt, Artificial Sequence
  Description of Artificial Sequence: Synthetic oligonucleotide
cauuauacucucccauucg

SEQ ID NO: 1985778 - RNA, 19 nt, Artificial Sequence
  Description of Artificial Sequence: Synthetic oligonucleotide
cauuaauaugaaaguuugc

SEQ ID NO: 1985779 - RNA, 19 nt, Artificial Sequence
  Description of Artificial Sequence: Synthetic oligonucleotide
aggaaugugccguuccuuc

SEQ ID NO: 1985780 - RNA, 19 nt, Artificial Sequence
  Description of Artificial Sequence: Synthetic oligonucleotide
uguaguuaaagugcuaaau

SEQ ID NO: 1985781 - RNA, 19 nt, Artificial Sequence
  Description of Artificial Sequence: Synthetic oligonucleotide
gaguguagaauagacaauc

SEQ ID NO: 1985782 - RNA, 19 nt, Artificial Sequence
  Description of Artificial Sequence: Synthetic oligonucleotide
uagacaaucuaaagcauuu

SEQ ID NO: 1985783 - RNA, 19 nt, Artificial Sequence
  Description of Artificial Sequence: Synthetic oligonucleotide
agaguuggcuaccaaauau

SEQ ID NO: 1985784 - RNA, 19 nt, Artificial Sequence
  Description of Artificial Sequence: Synthetic oligonucleotide
aagucuacccaauuuccau

SEQ ID NO: 1985785 - RNA, 19 nt, Artificial Sequence
  Description of Artificial Sequence: Synthetic oligonucleotide
aauuacuggcuguccaagu

SEQ ID NO: 1985786 - RNA, 19 nt, Artificial Sequence
  Description of Artificial Sequence: Synthetic oligonucleotide
uguuugugugucuucuacc

SEQ ID NO: 1985787 - RNA, 19 nt, Artificial Sequence
  Description of Artificial Sequence: Synthetic oligonucleotide
caugcagaaauauacugca

SEQ ID NO: 1985788 - RNA, 19 nt, Artificial Sequence
  Description of Artificial Sequence: Synthetic oligonucleotide
cugucagaaaagucuaccc

SEQ ID NO: 1985789 - RNA, 19 nt, Artificial Sequence
  Description of Artificial Sequence: Synthetic oligonucleotide
agcuauauacauagaaauc

SEQ ID NO: 1985790 - RNA, 19 nt, Artificial Sequence
  Description of Artificial Sequence: Synthetic oligonucleotide
gaaauauacugcauuuaac

SEQ ID NO: 1985791 - RNA, 19 nt, Artificial Sequence
  Description of Artificial Sequence: Synthetic oligonucleotide
gaaugugccguuccuucgg

SEQ ID NO: 1985792 - RNA, 19 nt, Artificial Sequence
  Description of Artificial Sequence: Synthetic oligonucleotide
aagaauggagaaaucauua

SEQ ID NO: 1985793 - RNA, 19 nt, Artificial Sequence
  Description of Artificial Sequence: Synthetic oligonucleotide
  modified_base (13)..(13): a, c, u, g, unknown or other
uguuaaccugucnguaccc

SEQ ID NO: 1985794 - RNA, 19 nt, Artificial Sequence
  Description of Artificial Sequence: Synthetic oligonucleotide
ucaccuuuauuuauauaaa

SEQ ID NO: 1985795 - RNA, 19 nt, Artificial Sequence
  Description of Artificial Sequence: Synthetic oligonucleotide
uagaaaucccauauacaaa

SEQ ID NO: 1985796 - RNA, 19 nt, Artificial Sequence
  Description of Artificial Sequence: Synthetic oligonucleotide
aacuguucuauagccaaug

SEQ ID NO: 1985797 - RNA, 19 nt, Artificial Sequence
  Description of Artificial Sequence: Synthetic oligonucleotide
  modified_base (10)..(10): a, c, u, g, unknown or other
uaaccugucnguacccuuc

SEQ ID NO: 1985798 - RNA, 19 nt, Artificial Sequence
  Description of Artificial Sequence: Synthetic oligonucleotide
aguuaaagugcuaaauugu

SEQ ID NO: 1985799 - RNA, 19 nt, Artificial Sequence
  Description of Artificial Sequence: Synthetic oligonucleotide
ugcuaaauuguaauacaua

SEQ ID NO: 1985800 - RNA, 19 nt, Artificial Sequence
  Description of Artificial Sequence: Synthetic oligonucleotide
agugacaaaugcuaguguu

SEQ ID NO: 1985801 - RNA, 19 nt, Artificial Sequence
  Description of Artificial Sequence: Synthetic oligonucleotide
acccaauuuccauuuuaac

SEQ ID NO: 1985802 - RNA, 19 nt, Artificial Sequence
  Description of Artificial Sequence: Synthetic oligonucleotide
auaacagaaagaugcccca

SEQ ID NO: 1985803 - RNA, 19 nt, Artificial Sequence
  Description of Artificial Sequence: Synthetic oligonucleotide
uggaguuaaucagagcuug

SEQ ID NO: 1985804 - RNA, 19 nt, Artificial Sequence
  Description of Artificial Sequence: Synthetic oligonucleotide
uauagccaaugaaaucagc

SEQ ID NO: 1985805 - RNA, 19 nt, Artificial Sequence
  Description of Artificial Sequence: Synthetic oligonucleotide
aagacucuguaguguuaac

SEQ ID NO: 1985806 - RNA, 19 nt, Artificial Sequence
  Description of Artificial Sequence: Synthetic oligonucleotide
aaagaaguuuauaacucaa

SEQ ID NO: 1985807 - RNA, 19 nt, Artificial Sequence
  Description of Artificial Sequence: Synthetic oligonucleotide
  modified_base (4)..(4): a, c, u, g, unknown or other
gucnguacccuucaguaca

SEQ ID NO: 1985808 - RNA, 19 nt, Artificial Sequence
  Description of Artificial Sequence: Synthetic oligonucleotide
acaaucuaaagcauuugug

SEQ ID NO: 1985809 - RNA, 19 nt, Artificial Sequence
  Description of Artificial Sequence: Synthetic oligonucleotide
uuuaauccccaccauugua

SEQ ID NO: 1985810 - RNA, 19 nt, Artificial Sequence
  Description of Artificial Sequence: Synthetic oligonucleotide
gguugauccacaagaaugg

SEQ ID NO: 1985811 - RNA, 19 nt, Artificial Sequence
  Description of Artificial Sequence: Synthetic oligonucleotide
auacucucccauucguccg

SEQ ID NO: 1985812 - RNA, 19 nt, Artificial Sequence
  Description of Artificial Sequence: Synthetic oligonucleotide
uucuauagccaaugaaauc

SEQ ID NO: 1985813 - RNA, 19 nt, Artificial Sequence
  Description of Artificial Sequence: Synthetic oligonucleotide
auagccaaugaaaucagcu

SEQ ID NO: 1985814 - RNA, 19 nt, Artificial Sequence
  Description of Artificial Sequence: Synthetic oligonucleotide
aaauaccacuuuacaaaag

SEQ ID NO: 1985815 - RNA, 19 nt, Artificial Sequence
  Description of Artificial Sequence: Synthetic oligonucleotide
cacucuaaagugacaaaug

SEQ ID NO: 1985816 - RNA, 19 nt, Artificial Sequence
  Description of Artificial Sequence: Synthetic oligonucleotide
auauuuaauccccaccauu

SEQ ID NO: 1985817 - RNA, 19 nt, Artificial Sequence
  Description of Artificial Sequence: Synthetic oligonucleotide
gaagcaguagcuuacuggu

SEQ ID NO: 1985818 - RNA, 19 nt, Artificial Sequence
  Description of Artificial Sequence: Synthetic oligonucleotide
uuugaacuuucaacaguac

SEQ ID NO: 1985819 - RNA, 19 nt, Artificial Sequence
  Description of Artificial Sequence: Synthetic oligonucleotide
ugagcacaaacaccacugc

SEQ ID NO: 1985820 - RNA, 19 nt, Artificial Sequence
  Description of Artificial Sequence: Synthetic oligonucleotide
aaaauagaguuggcuacca

SEQ ID NO: 1985821 - RNA, 19 nt, Artificial Sequence
  Description of Artificial Sequence: Synthetic oligonucleotide
auauaaauauacgcagugu

SEQ ID NO: 1985822 - RNA, 19 nt, Artificial Sequence
  Description of Artificial Sequence: Synthetic oligonucleotide
accccaguuauacgaaagg

SEQ ID NO: 1985823 - RNA, 19 nt, Artificial Sequence
  Description of Artificial Sequence: Synthetic oligonucleotide
aaagacucuguaguguuaa

SEQ ID NO: 1985824 - RNA, 19 nt, Artificial Sequence
  Description of Artificial Sequence: Synthetic oligonucleotide
uaauuacuggcuguccaag

SEQ ID NO: 1985825 - RNA, 19 nt, Artificial Sequence
  Description of Artificial Sequence: Synthetic oligonucleotide
uacccaauuuccauuuuaa

SEQ ID NO: 1985826 - RNA, 19 nt, Artificial Sequence
  Description of Artificial Sequence: Synthetic oligonucleotide
uccuuuuguuuaaaaugcu

SEQ ID NO: 1985827 - RNA, 19 nt, Artificial Sequence
  Description of Artificial Sequence: Synthetic oligonucleotide
uuauacucucccauucguc

SEQ ID NO: 1985828 - RNA, 19 nt, Artificial Sequence
  Description of Artificial Sequence: Synthetic oligonucleotide
ugugccguuccuucggacc

SEQ ID NO: 1985829 - RNA, 19 nt, Artificial Sequence
  Description of Artificial Sequence: Synthetic oligonucleotide
uuaaguaccuuaagucaua

SEQ ID NO: 1985830 - RNA, 19 nt, Artificial Sequence
  Description of Artificial Sequence: Synthetic oligonucleotide
uuacugguugauccacaag

SEQ ID NO: 1985831 - RNA, 19 nt, Artificial Sequence
  Description of Artificial Sequence: Synthetic oligonucleotide
ugugugucuucuaccguca

SEQ ID NO: 1985832 - RNA, 19 nt, Artificial Sequence
  Description of Artificial Sequence: Synthetic oligonucleotide
cauucguccgagcacucgg

SEQ ID NO: 1985833 - RNA, 19 nt, Artificial Sequence
  Description of Artificial Sequence: Synthetic oligonucleotide
agcuucuuaaaggcucucc

SEQ ID NO: 1985834 - RNA, 19 nt, Artificial Sequence
  Description of Artificial Sequence: Synthetic oligonucleotide
uccaaguuuugugucucgg

SEQ ID NO: 1985835 - RNA, 19 nt, Artificial Sequence
  Description of Artificial Sequence: Synthetic oligonucleotide
augaaaucagcuucuuaaa

SEQ ID NO: 1985836 - RNA, 19 nt, Artificial Sequence
  Description of Artificial Sequence: Synthetic oligonucleotide
gucagaaaagucuacccaa

SEQ ID NO: 1985837 - RNA, 19 nt, Artificial Sequence
  Description of Artificial Sequence: Synthetic oligonucleotide
agacacuuuaaguaccuua

SEQ ID NO: 1985838 - RNA, 19 nt, Artificial Sequence
  Description of Artificial Sequence: Synthetic oligonucleotide
ugaguguagaauagacaau

SEQ ID NO: 1985839 - RNA, 19 nt, Artificial Sequence
  Description of Artificial Sequence: Synthetic oligonucleotide
gacaaucuaaagcauuugu

SEQ ID NO: 1985840 - RNA, 19 nt, Artificial Sequence
  Description of Artificial Sequence: Synthetic oligonucleotide
gacacuuuaaguaccuuaa

SEQ ID NO: 1985841 - RNA, 19 nt, Artificial Sequence
  Description of Artificial Sequence: Synthetic oligonucleotide
  modified_base (5)..(5): a, c, u, g, unknown or other
ugucnguacccuucaguac

SEQ ID NO: 1985842 - RNA, 19 nt, Artificial Sequence
  Description of Artificial Sequence: Synthetic oligonucleotide
auauacauagaaaucccau

SEQ ID NO: 1985843 - RNA, 19 nt, Artificial Sequence
  Description of Artificial Sequence: Synthetic oligonucleotide
cagagaagcaguagcuuac

SEQ ID NO: 1985844 - RNA, 19 nt, Artificial Sequence
  Description of Artificial Sequence: Synthetic oligonucleotide
ccuagugucuuccugagug

SEQ ID NO: 1985845 - RNA, 19 nt, Artificial Sequence
  Description of Artificial Sequence: Synthetic oligonucleotide
uuccauucaccuuuauuua

SEQ ID NO: 1985846 - RNA, 19 nt, Artificial Sequence
  Description of Artificial Sequence: Synthetic oligonucleotide
ugaugaguguuucucccau

SEQ ID NO: 1985847 - RNA, 19 nt, Artificial Sequence
  Description of Artificial Sequence: Synthetic oligonucleotide
uuugugugucuucuaccgu

SEQ ID NO: 1985848 - RNA, 19 nt, Artificial Sequence
  Description of Artificial Sequence: Synthetic oligonucleotide
aaauagaguuggcuaccaa

SEQ ID NO: 1985849 - RNA, 19 nt, Artificial Sequence
  Description of Artificial Sequence: Synthetic oligonucleotide
gcuaguguuggaaucagag

SEQ ID NO: 1985850 - RNA, 19 nt, Artificial Sequence
  Description of Artificial Sequence: Synthetic oligonucleotide
uccauucaccuuuauuuau

SEQ ID NO: 1985851 - RNA, 19 nt, Artificial Sequence
  Description of Artificial Sequence: Synthetic oligonucleotide
gcuuugugggcucugcugg

SEQ ID NO: 1985852 - RNA, 19 nt, Artificial Sequence
  Description of Artificial Sequence: Synthetic oligonucleotide
aguagcuuacugguugauc

SEQ ID NO: 1985853 - RNA, 19 nt, Artificial Sequence
  Description of Artificial Sequence: Synthetic oligonucleotide
cuguuugugugucuucuac

SEQ ID NO: 1985854 - RNA, 19 nt, Artificial Sequence
  Description of Artificial Sequence: Synthetic oligonucleotide
aaucccauauacaaaccuu

SEQ ID NO: 1985855 - RNA, 19 nt, Artificial Sequence
  Description of Artificial Sequence: Synthetic oligonucleotide
aacucaaauccuugccaaa

SEQ ID NO: 1985856 - RNA, 19 nt, Artificial Sequence
  Description of Artificial Sequence: Synthetic oligonucleotide
acacucuaaagugacaaau

SEQ ID NO: 1985857 - RNA, 19 nt, Artificial Sequence
  Description of Artificial Sequence: Synthetic oligonucleotide
uuguacagagaagcaguag

SEQ ID NO: 1985858 - RNA, 19 nt, Artificial Sequence
  Description of Artificial Sequence: Synthetic oligonucleotide
aguuugccaauuucuuuga

SEQ ID NO: 1985859 - RNA, 19 nt, Artificial Sequence
  Description of Artificial Sequence: Synthetic oligonucleotide
ucccaaaaguccaccccag

SEQ ID NO: 1985860 - RNA, 19 nt, Artificial Sequence
  Description of Artificial Sequence: Synthetic oligonucleotide
uggaaucagaguguuggcu

SEQ ID NO: 1985861 - RNA, 19 nt, Artificial Sequence
  Description of Artificial Sequence: Synthetic oligonucleotide
aaugugccguuccuucgga

SEQ ID NO: 1985862 - RNA, 19 nt, Artificial Sequence
  Description of Artificial Sequence: Synthetic oligonucleotide
aagaaaccaaauaccacuu

SEQ ID NO: 1985863 - RNA, 19 nt, Artificial Sequence
  Description of Artificial Sequence: Synthetic oligonucleotide
ccauagacacuuuaaguac

SEQ ID NO: 1985864 - RNA, 19 nt, Artificial Sequence
  Description of Artificial Sequence: Synthetic oligonucleotide
auaaauauacgcaguguua

SEQ ID NO: 1985865 - RNA, 19 nt, Artificial Sequence
  Description of Artificial Sequence: Synthetic oligonucleotide
auagaguuggcuaccaaau

SEQ ID NO: 1985866 - RNA, 19 nt, Artificial Sequence
  Description of Artificial Sequence: Synthetic oligonucleotide
uguuggaaucagaguguug

SEQ ID NO: 1985867 - RNA, 19 nt, Artificial Sequence
  Description of Artificial Sequence: Synthetic oligonucleotide
ccaaauaccacuuuacaaa

SEQ ID NO: 1985868 - RNA, 19 nt, Artificial Sequence
  Description of Artificial Sequence: Synthetic oligonucleotide
acuguucuauagccaauga

SEQ ID NO: 1985869 - RNA, 19 nt, Artificial Sequence
  Description of Artificial Sequence: Synthetic oligonucleotide
  modified_base (9)..(9): a, c, u, g, unknown or other
aaccugucnguacccuuca

SEQ ID NO: 1985870 - RNA, 19 nt, Artificial Sequence
  Description of Artificial Sequence: Synthetic oligonucleotide
acucggugucgcuuugugg

SEQ ID NO: 1985871 - RNA, 19 nt, Artificial Sequence
  Description of Artificial Sequence: Synthetic oligonucleotide
uggcuguccaaguuuugug

SEQ ID NO: 1985872 - RNA, 19 nt, Artificial Sequence
  Description of Artificial Sequence: Synthetic oligonucleotide
agcuuacugguugauccac

SEQ ID NO: 1985873 - RNA, 19 nt, Artificial Sequence
  Description of Artificial Sequence: Synthetic oligonucleotide
  modified_base (3)..(3): a, c, u, g, unknown or other
ucnguacccuucaguacac

SEQ ID NO: 1985874 - RNA, 19 nt, Artificial Sequence
  Description of Artificial Sequence: Synthetic oligonucleotide
uauacgcaguguuaaccau

SEQ ID NO: 1985875 - RNA, 19 nt, Artificial Sequence
  Description of Artificial Sequence: Synthetic oligonucleotide
caacaguaccuagaagggg

SEQ ID NO: 1985876 - RNA, 19 nt, Artificial Sequence
  Description of Artificial Sequence: Synthetic oligonucleotide
gugacaaaugcuaguguug

SEQ ID NO: 1985877 - RNA, 19 nt, Artificial Sequence
  Description of Artificial Sequence: Synthetic oligonucleotide
  modified_base (16)..(16): a, c, u, g, unknown or other
uaguguuaaccugucngua

SEQ ID NO: 1985878 - RNA, 19 nt, Artificial Sequence
  Description of Artificial Sequence: Synthetic oligonucleotide
auauauggacaggaagaug

SEQ ID NO: 1985879 - RNA, 19 nt, Artificial Sequence
  Description of Artificial Sequence: Synthetic oligonucleotide
gugccguuccuucggaccg

SEQ ID NO: 1985880 - RNA, 19 nt, Artificial Sequence
  Description of Artificial Sequence: Synthetic oligonucleotide
auauggacaggaagaugac

SEQ ID NO: 1985881 - RNA, 19 nt, Artificial Sequence
  Description of Artificial Sequence: Synthetic oligonucleotide
cuggucaucuuuccuggag

SEQ ID NO: 1985882 - RNA, 19 nt, Artificial Sequence
  Description of Artificial Sequence: Synthetic oligonucleotide
augcuuaauuacuggcugu

SEQ ID NO: 1985883 - RNA, 19 nt, Artificial Sequence
  Description of Artificial Sequence: Synthetic oligonucleotide
uacccuucaguacacucua

SEQ ID NO: 1985884 - RNA, 19 nt, Artificial Sequence
  Description of Artificial Sequence: Synthetic oligonucleotide
gugcaaaagacucuguagu

SEQ ID NO: 1985885 - RNA, 19 nt, Artificial Sequence
  Description of Artificial Sequence: Synthetic oligonucleotide
ucccauauacaaaccuuua

SEQ ID NO: 1985886 - RNA, 19 nt, Artificial Sequence
  Description of Artificial Sequence: Synthetic oligonucleotide
cuucuuaaaggcucuccca

SEQ ID NO: 1985887 - RNA, 19 nt, Artificial Sequence
  Description of Artificial Sequence: Synthetic oligonucleotide
acuuucaacaguaccuaga

SEQ ID NO: 1985888 - RNA, 19 nt, Artificial Sequence
  Description of Artificial Sequence: Synthetic oligonucleotide
guuaaagugcuaaauugua

SEQ ID NO: 1985889 - RNA, 19 nt, Artificial Sequence
  Description of Artificial Sequence: Synthetic oligonucleotide
cucucccaaaaguccaccc

SEQ ID NO: 1985890 - RNA, 19 nt, Artificial Sequence
  Description of Artificial Sequence: Synthetic oligonucleotide
caccccaguuauacgaaag

SEQ ID NO: 1985891 - RNA, 19 nt, Artificial Sequence
  Description of Artificial Sequence: Synthetic oligonucleotide
uacacucuaaagugacaaa

SEQ ID NO: 1985892 - RNA, 19 nt, Artificial Sequence
  Description of Artificial Sequence: Synthetic oligonucleotide
ugcuuaauuacuggcuguc

SEQ ID NO: 1985893 - RNA, 19 nt, Artificial Sequence
  Description of Artificial Sequence: Synthetic oligonucleotide
guacacucuaaagugacaa

SEQ ID NO: 1985894 - RNA, 19 nt, Artificial Sequence
  Description of Artificial Sequence: Synthetic oligonucleotide
cacagauauauggacagga

SEQ ID NO: 1985895 - RNA, 19 nt, Artificial Sequence
  Description of Artificial Sequence: Synthetic oligonucleotide
ggaaugugccguuccuucg

SEQ ID NO: 1985896 - RNA, 19 nt, Artificial Sequence
  Description of Artificial Sequence: Synthetic oligonucleotide
aguccaccccaguuauacg

SEQ ID NO: 1985897 - RNA, 19 nt, Artificial Sequence
  Description of Artificial Sequence: Synthetic oligonucleotide
gugaggaaugugccguucc

SEQ ID NO: 1985898 - RNA, 19 nt, Artificial Sequence
  Description of Artificial Sequence: Synthetic oligonucleotide
ccuucaguacacucuaaag

SEQ ID NO: 1985899 - RNA, 19 nt, Artificial Sequence
  Description of Artificial Sequence: Synthetic oligonucleotide
agacaaucuaaagcauuug

SEQ ID NO: 1985900 - RNA, 19 nt, Artificial Sequence
  Description of Artificial Sequence: Synthetic oligonucleotide
auagacaaucuaaagcauu

SEQ ID NO: 1985901 - RNA, 19 nt, Artificial Sequence
  Description of Artificial Sequence: Synthetic oligonucleotide
auagacacuuuaaguaccu

SEQ ID NO: 1985902 - RNA, 19 nt, Artificial Sequence
  Description of Artificial Sequence: Synthetic oligonucleotide
aucucaauauauacaaaua

SEQ ID NO: 1985903 - RNA, 19 nt, Artificial Sequence
  Description of Artificial Sequence: Synthetic oligonucleotide
uucuuuccugagcuugagu

SEQ ID NO: 1985904 - RNA, 19 nt, Artificial Sequence
  Description of Artificial Sequence: Synthetic oligonucleotide
uccuucggaccgcuguuug

SEQ ID NO: 1985905 - RNA, 19 nt, Artificial Sequence
  Description of Artificial Sequence: Synthetic oligonucleotide
guaccuuaagucauaaacu

SEQ ID NO: 1985906 - RNA, 19 nt, Artificial Sequence
  Description of Artificial Sequence: Synthetic oligonucleotide
guccaccccaguuauacga

SEQ ID NO: 1985907 - RNA, 19 nt, Artificial Sequence
  Description of Artificial Sequence: Synthetic oligonucleotide
aaguaccuuaagucauaaa

SEQ ID NO: 1985908 - RNA, 19 nt, Artificial Sequence
  Description of Artificial Sequence: Synthetic oligonucleotide
ugaguguuucucccauuau

SEQ ID NO: 1985909 - RNA, 19 nt, Artificial Sequence
  Description of Artificial Sequence: Synthetic oligonucleotide
  modified_base (11)..(11): a, c, u, g, unknown or other
uuaaccugucnguacccuu

SEQ ID NO: 1985910 - RNA, 19 nt, Artificial Sequence
  Description of Artificial Sequence: Synthetic oligonucleotide
cgcaguguuaaccauagac

SEQ ID NO: 1985911 - RNA, 19 nt, Artificial Sequence
  Description of Artificial Sequence: Synthetic oligonucleotide
gauauauggacaggaagau

SEQ ID NO: 1985912 - RNA, 19 nt, Artificial Sequence
  Description of Artificial Sequence: Synthetic oligonucleotide
uacucucccauucguccga

SEQ ID NO: 1985913 - RNA, 19 nt, Artificial Sequence
  Description of Artificial Sequence: Synthetic oligonucleotide
agaguguuggcuggaauau

SEQ ID NO: 1985914 - RNA, 19 nt, Artificial Sequence
  Description of Artificial Sequence: Synthetic oligonucleotide
  modified_base (6)..(6): a, c, u, g, unknown or other
cugucnguacccuucagua

SEQ ID NO: 1985915 - RNA, 19 nt, Artificial Sequence
  Description of Artificial Sequence: Synthetic oligonucleotide
cuucuaccgucacauucag

SEQ ID NO: 1985916 - RNA, 19 nt, Artificial Sequence
  Description of Artificial Sequence: Synthetic oligonucleotide
ucccauucguccgagcacu

SEQ ID NO: 1985917 - RNA, 19 nt, Artificial Sequence
  Description of Artificial Sequence: Synthetic oligonucleotide
aguguuaaccauagacacu

SEQ ID NO: 1985918 - RNA, 19 nt, Artificial Sequence
  Description of Artificial Sequence: Synthetic oligonucleotide
ucagaguguuggcuggaau

SEQ ID NO: 1985919 - RNA, 19 nt, Artificial Sequence
  Description of Artificial Sequence: Synthetic oligonucleotide
uggcuaccaaauauuuaau

SEQ ID NO: 1985920 - RNA, 19 nt, Artificial Sequence
  Description of Artificial Sequence: Synthetic oligonucleotide
ccuggggugaccuaguguc

SEQ ID NO: 1985921 - RNA, 19 nt, Artificial Sequence
  Description of Artificial Sequence: Synthetic oligonucleotide
uacuggcuguccaaguuuu

SEQ ID NO: 1985922 - RNA, 19 nt, Artificial Sequence
  Description of Artificial Sequence: Synthetic oligonucleotide
cacuuuaaguaccuuaagu

SEQ ID NO: 1985923 - RNA, 19 nt, Artificial Sequence
  Description of Artificial Sequence: Synthetic oligonucleotide
gaacuuucaacaguaccua

SEQ ID NO: 1985924 - RNA, 19 nt, Artificial Sequence
  Description of Artificial Sequence: Synthetic oligonucleotide
uucguccgagcacucggug

SEQ ID NO: 1985925 - RNA, 19 nt, Artificial Sequence
  Description of Artificial Sequence: Synthetic oligonucleotide
  modified_base (17)..(17): a, c, u, g, unknown or other
guaguguuaaccugucngu

SEQ ID NO: 1985926 - RNA, 19 nt, Artificial Sequence
  Description of Artificial Sequence: Synthetic oligonucleotide
ugcuaguguuggaaucaga

SEQ ID NO: 1985927 - RNA, 19 nt, Artificial Sequence
  Description of Artificial Sequence: Synthetic oligonucleotide
ggcuaccaaauauuuaauc

SEQ ID NO: 1985928 - RNA, 19 nt, Artificial Sequence
  Description of Artificial Sequence: Synthetic oligonucleotide
accuuaagucauaaacuca

SEQ ID NO: 1985929 - RNA, 19 nt, Artificial Sequence
  Description of Artificial Sequence: Synthetic oligonucleotide
gucauaaacucaauguagu

SEQ ID NO: 1985930 - RNA, 19 nt, Artificial Sequence
  Description of Artificial Sequence: Synthetic oligonucleotide
uuucucccauuauacucuc

SEQ ID NO: 1985931 - RNA, 19 nt, Artificial Sequence
  Description of Artificial Sequence: Synthetic oligonucleotide
guccaaguuuugugucucg

SEQ ID NO: 1985932 - RNA, 19 nt, Artificial Sequence
  Description of Artificial Sequence: Synthetic oligonucleotide
cucuaaagugacaaaugcu

SEQ ID NO: 1985933 - RNA, 19 nt, Artificial Sequence
  Description of Artificial Sequence: Synthetic oligonucleotide
gcaguguuaaccauagaca

SEQ ID NO: 1985934 - RNA, 19 nt, Artificial Sequence
  Description of Artificial Sequence: Synthetic oligonucleotide
ccuuaagucauaaacucaa

SEQ ID NO: 1985935 - RNA, 19 nt, Artificial Sequence
  Description of Artificial Sequence: Synthetic oligonucleotide
aauccccaccauuguaguu

SEQ ID NO: 1985936 - RNA, 19 nt, Artificial Sequence
  Description of Artificial Sequence: Synthetic oligonucleotide
ugcucccacaaugaugagu

SEQ ID NO: 1985937 - RNA, 19 nt, Artificial Sequence
  Description of Artificial Sequence: Synthetic oligonucleotide
accaaauauuuaaucccca

SEQ ID NO: 1985938 - RNA, 19 nt, Artificial Sequence
  Description of Artificial Sequence: Synthetic oligonucleotide
uucucccauuauacucucc

SEQ ID NO: 1985939 - RNA, 19 nt, Artificial Sequence
  Description of Artificial Sequence: Synthetic oligonucleotide
gacaaaugcuaguguugga

SEQ ID NO: 1985940 - RNA, 19 nt, Artificial Sequence
  Description of Artificial Sequence: Synthetic oligonucleotide
cucccaaaaguccacccca

SEQ ID NO: 1985941 - RNA, 19 nt, Artificial Sequence
  Description of Artificial Sequence: Synthetic oligonucleotide
augugccguuccuucggac

SEQ ID NO: 1985942 - RNA, 19 nt, Artificial Sequence
  Description of Artificial Sequence: Synthetic oligonucleotide
cuucggaccgcuguuugug

SEQ ID NO: 1985943 - RNA, 19 nt, Artificial Sequence
  Description of Artificial Sequence: Synthetic oligonucleotide
uuccugaguguagaauaga

SEQ ID NO: 1985944 - RNA, 19 nt, Artificial Sequence
  Description of Artificial Sequence: Synthetic oligonucleotide
uacagagaagcaguagcuu

SEQ ID NO: 1985945 - RNA, 19 nt, Artificial Sequence
  Description of Artificial Sequence: Synthetic oligonucleotide
gcugucagaaaagucuacc

SEQ ID NO: 1985946 - RNA, 19 nt, Artificial Sequence
  Description of Artificial Sequence: Synthetic oligonucleotide
ucggugucgcuuugugggc

SEQ ID NO: 1985947 - RNA, 19 nt, Artificial Sequence
  Description of Artificial Sequence: Synthetic oligonucleotide
ucguccgagcacucggugu

SEQ ID NO: 1985948 - RNA, 19 nt, Artificial Sequence
  Description of Artificial Sequence: Synthetic oligonucleotide
gaguuaaucagagcuugua

SEQ ID NO: 1985949 - RNA, 19 nt, Artificial Sequence
  Description of Artificial Sequence: Synthetic oligonucleotide
ccuggaguuaaucagagcu

SEQ ID NO: 1985950 - RNA, 19 nt, Artificial Sequence
  Description of Artificial Sequence: Synthetic oligonucleotide
ucggaccgcuguuugugug

SEQ ID NO: 1985951 - RNA, 19 nt, Artificial Sequence
  Description of Artificial Sequence: Synthetic oligonucleotide
aucccauauacaaaccuuu

SEQ ID NO: 1985952 - RNA, 19 nt, Artificial Sequence
  Description of Artificial Sequence: Synthetic oligonucleotide
acagauauauggacaggaa

SEQ ID NO: 1985953 - RNA, 19 nt, Artificial Sequence
  Description of Artificial Sequence: Synthetic oligonucleotide
guguuaaccauagacacuu

SEQ ID NO: 1985954 - RNA, 19 nt, Artificial Sequence
  Description of Artificial Sequence: Synthetic oligonucleotide
guucuauagccaaugaaau

SEQ ID NO: 1985955 - RNA, 19 nt, Artificial Sequence
  Description of Artificial Sequence: Synthetic oligonucleotide
ucccacaaugaugaguguu

SEQ ID NO: 1985956 - RNA, 19 nt, Artificial Sequence
  Description of Artificial Sequence: Synthetic oligonucleotide
cagaguguuggcuggaaua

SEQ ID NO: 1985957 - RNA, 19 nt, Artificial Sequence
  Description of Artificial Sequence: Synthetic oligonucleotide
caagaauggagaaaucauu

SEQ ID NO: 1985958 - RNA, 19 nt, Artificial Sequence
  Description of Artificial Sequence: Synthetic oligonucleotide
ugucuuccugaguguagaa

SEQ ID NO: 1985959 - RNA, 19 nt, Artificial Sequence
  Description of Artificial Sequence: Synthetic oligonucleotide
caauuuccauuuuaacugu

SEQ ID NO: 1985960 - RNA, 19 nt, Artificial Sequence
  Description of Artificial Sequence: Synthetic oligonucleotide
ucuacccaauuuccauuuu

SEQ ID NO: 1985961 - RNA, 19 nt, Artificial Sequence
  Description of Artificial Sequence: Synthetic oligonucleotide
augcuaguguuggaaucag

SEQ ID NO: 1985962 - RNA, 19 nt, Artificial Sequence
  Description of Artificial Sequence: Synthetic oligonucleotide
uucggaccgcuguuugugu

SEQ ID NO: 1985963 - RNA, 19 nt, Artificial Sequence
  Description of Artificial Sequence: Synthetic oligonucleotide
gcaaggugaggaaugugcc

SEQ ID NO: 1985964 - RNA, 19 nt, Artificial Sequence
  Description of Artificial Sequence: Synthetic oligonucleotide
cuucuuuccugagcuugag

SEQ ID NO: 1985965 - RNA, 19 nt, Artificial Sequence
  Description of Artificial Sequence: Synthetic oligonucleotide
aguacacucuaaagugaca

SEQ ID NO: 1985966 - RNA, 19 nt, Artificial Sequence
  Description of Artificial Sequence: Synthetic oligonucleotide
ucgcuuugugggcucugcu

SEQ ID NO: 1985967 - RNA, 19 nt, Artificial Sequence
  Description of Artificial Sequence: Synthetic oligonucleotide
uguuaaccauagacacuuu

SEQ ID NO: 1985968 - RNA, 19 nt, Artificial Sequence
  Description of Artificial Sequence: Synthetic oligonucleotide
cuacccaauuuccauuuua

SEQ ID NO: 1985969 - RNA, 19 nt, Artificial Sequence
  Description of Artificial Sequence: Synthetic oligonucleotide
guacagagaagcaguagcu

SEQ ID NO: 1985970 - RNA, 19 nt, Artificial Sequence
  Description of Artificial Sequence: Synthetic oligonucleotide
cacucggugucgcuuugug

SEQ ID NO: 1985971 - RNA, 19 nt, Artificial Sequence
  Description of Artificial Sequence: Synthetic oligonucleotide
  modified_base (8)..(8): a, c, u, g, unknown or other
accugucnguacccuucag

SEQ ID NO: 1985972 - RNA, 19 nt, Artificial Sequence
  Description of Artificial Sequence: Synthetic oligonucleotide
caaaugcuaguguuggaau

SEQ ID NO: 1985973 - RNA, 19 nt, Artificial Sequence
  Description of Artificial Sequence: Synthetic oligonucleotide
uuugugggcucugcugguc

SEQ ID NO: 1985974 - RNA, 19 nt, Artificial Sequence
  Description of Artificial Sequence: Synthetic oligonucleotide
ccugaguguagaauagaca

SEQ ID NO: 1985975 - RNA, 19 nt, Artificial Sequence
  Description of Artificial Sequence: Synthetic oligonucleotide
gcuggaauaucaggcuucc

SEQ ID NO: 1985976 - RNA, 19 nt, Artificial Sequence
  Description of Artificial Sequence: Synthetic oligonucleotide
cagcugucagaaaagucua

SEQ ID NO: 1985977 - RNA, 19 nt, Artificial Sequence
  Description of Artificial Sequence: Synthetic oligonucleotide
guuggcuaccaaauauuua

SEQ ID NO: 1985978 - RNA, 19 nt, Artificial Sequence
  Description of Artificial Sequence: Synthetic oligonucleotide
auacgcaguguuaaccaua

SEQ ID NO: 1985979 - RNA, 19 nt, Artificial Sequence
  Description of Artificial Sequence: Synthetic oligonucleotide
guguuucucccauuauacu

SEQ ID NO: 1985980 - RNA, 19 nt, Artificial Sequence
  Description of Artificial Sequence: Synthetic oligonucleotide
cauuguaguuaaagugcua

SEQ ID NO: 1985981 - RNA, 19 nt, Artificial Sequence
  Description of Artificial Sequence: Synthetic oligonucleotide
guccccuggggugaccuag

SEQ ID NO: 1985982 - RNA, 19 nt, Artificial Sequence
  Description of Artificial Sequence: Synthetic oligonucleotide
cuuaagucauaaacucaau

SEQ ID NO: 1985983 - RNA, 19 nt, Artificial Sequence
  Description of Artificial Sequence: Synthetic oligonucleotide
ccaguuauacgaaaggcau

SEQ ID NO: 1985984 - RNA, 19 nt, Artificial Sequence
  Description of Artificial Sequence: Synthetic oligonucleotide
agcacucggugucgcuuug

SEQ ID NO: 1985985 - RNA, 19 nt, Artificial Sequence
  Description of Artificial Sequence: Synthetic oligonucleotide
cugcccuuucugugcuugc

SEQ ID NO: 1985986 - RNA, 19 nt, Artificial Sequence
  Description of Artificial Sequence: Synthetic oligonucleotide
aucagagcuuguacagaga

SEQ ID NO: 1985987 - RNA, 19 nt, Artificial Sequence
  Description of Artificial Sequence: Synthetic oligonucleotide
gucgcuuugugggcucugc

SEQ ID NO: 1985988 - RNA, 19 nt, Artificial Sequence
  Description of Artificial Sequence: Synthetic oligonucleotide
  modified_base (19)..(19): a, c, u, g, unknown or other
cuguaguguuaaccugucn

SEQ ID NO: 1985989 - RNA, 19 nt, Artificial Sequence
  Description of Artificial Sequence: Synthetic oligonucleotide
gucuacccaauuuccauuu

SEQ ID NO: 1985990 - RNA, 19 nt, Artificial Sequence
  Description of Artificial Sequence: Synthetic oligonucleotide
aagcaguagcuuacugguu

SEQ ID NO: 1985991 - RNA, 19 nt, Artificial Sequence
  Description of Artificial Sequence: Synthetic oligonucleotide
uccgagcacucggugucgc

SEQ ID NO: 1985992 - RNA, 19 nt, Artificial Sequence
  Description of Artificial Sequence: Synthetic oligonucleotide
uagacacuuuaaguaccuu

SEQ ID NO: 1985993 - RNA, 19 nt, Artificial Sequence
  Description of Artificial Sequence: Synthetic oligonucleotide
cuguccaaguuuugugucu

SEQ ID NO: 1985994 - RNA, 19 nt, Artificial Sequence
  Description of Artificial Sequence: Synthetic oligonucleotide
gaguuggcuaccaaauauu

SEQ ID NO: 1985995 - RNA, 19 nt, Artificial Sequence
  Description of Artificial Sequence: Synthetic oligonucleotide
accgcuguuugugugucuu

SEQ ID NO: 1985996 - RNA, 19 nt, Artificial Sequence
  Description of Artificial Sequence: Synthetic oligonucleotide
auucguccgagcacucggu

SEQ ID NO: 1985997 - RNA, 19 nt, Artificial Sequence
  Description of Artificial Sequence: Synthetic oligonucleotide
aagaugccccaugcagaaa

SEQ ID NO: 1985998 - RNA, 19 nt, Artificial Sequence
  Description of Artificial Sequence: Synthetic oligonucleotide
  modified_base (12)..(12): a, c, u, g, unknown or other
guuaaccugucnguacccu

SEQ ID NO: 1985999 - RNA, 19 nt, Artificial Sequence
  Description of Artificial Sequence: Synthetic oligonucleotide
gagcuugagucucuccaau

SEQ ID NO: 1986000 - RNA, 19 nt, Artificial Sequence
  Description of Artificial Sequence: Synthetic oligonucleotide
gcaaaagacucuguagugu

SEQ ID NO: 1986001 - RNA, 19 nt, Artificial Sequence
  Description of Artificial Sequence: Synthetic oligonucleotide
ggcuggaauaucaggcuuc

SEQ ID NO: 1986002 - RNA, 19 nt, Artificial Sequence
  Description of Artificial Sequence: Synthetic oligonucleotide
ugucgcuuugugggcucug

SEQ ID NO: 1986003 - RNA, 19 nt, Artificial Sequence
  Description of Artificial Sequence: Synthetic oligonucleotide
acucucccauucguccgag

SEQ ID NO: 1986004 - RNA, 19 nt, Artificial Sequence
  Description of Artificial Sequence: Synthetic oligonucleotide
cucucccauucguccgagc

SEQ ID NO: 1986005 - RNA, 19 nt, Artificial Sequence
  Description of Artificial Sequence: Synthetic oligonucleotide
guccgagcacucggugucg

SEQ ID NO: 1986006 - RNA, 19 nt, Artificial Sequence
  Description of Artificial Sequence: Synthetic oligonucleotide
cuggaguuaaucagagcuu

SEQ ID NO: 1986007 - RNA, 19 nt, Artificial Sequence
  Description of Artificial Sequence: Synthetic oligonucleotide
cccauauacaaaccuuuaa

SEQ ID NO: 1986008 - RNA, 19 nt, Artificial Sequence
  Description of Artificial Sequence: Synthetic oligonucleotide
ccauuguaguuaaagugcu

SEQ ID NO: 1986009 - RNA, 19 nt, Artificial Sequence
  Description of Artificial Sequence: Synthetic oligonucleotide
ugccguuccuucggaccgc

SEQ ID NO: 1986010 - RNA, 19 nt, Artificial Sequence
  Description of Artificial Sequence: Synthetic oligonucleotide
uuccuucggaccgcuguuu

SEQ ID NO: 1986011 - RNA, 19 nt, Artificial Sequence
  Description of Artificial Sequence: Synthetic oligonucleotide
caucuguccccugggguga

SEQ ID NO: 1986012 - RNA, 19 nt, Artificial Sequence
  Description of Artificial Sequence: Synthetic oligonucleotide
ugcccugcucugcccuuuc

SEQ ID NO: 1986013 - RNA, 19 nt, Artificial Sequence
  Description of Artificial Sequence: Synthetic oligonucleotide
ccaccauuguaguuaaagu

SEQ ID NO: 1986014 - RNA, 19 nt, Artificial Sequence
  Description of Artificial Sequence: Synthetic oligonucleotide
gccaaugaaaucagcuucu

SEQ ID NO: 1986015 - RNA, 19 nt, Artificial Sequence
  Description of Artificial Sequence: Synthetic oligonucleotide
gcucucccaaaaguccacc

SEQ ID NO: 1986016 - RNA, 19 nt, Artificial Sequence
  Description of Artificial Sequence: Synthetic oligonucleotide
cgcuuugugggcucugcug

SEQ ID NO: 1986017 - RNA, 19 nt, Artificial Sequence
  Description of Artificial Sequence: Synthetic oligonucleotide
ccauucguccgagcacucg

SEQ ID NO: 1986018 - RNA, 19 nt, Artificial Sequence
  Description of Artificial Sequence: Synthetic oligonucleotide
ucuguccccuggggugacc

SEQ ID NO: 1986019 - RNA, 19 nt, Artificial Sequence
  Description of Artificial Sequence: Synthetic oligonucleotide
ggugaggaaugugccguuc

SEQ ID NO: 1986020 - RNA, 19 nt, Artificial Sequence
  Description of Artificial Sequence: Synthetic oligonucleotide
  modified_base (7)..(7): a, c, u, g, unknown or other
ccugucnguacccuucagu

SEQ ID NO: 1986021 - RNA, 19 nt, Artificial Sequence
  Description of Artificial Sequence: Synthetic oligonucleotide
gcuuacugguugauccaca

SEQ ID NO: 1986022 - RNA, 19 nt, Artificial Sequence
  Description of Artificial Sequence: Synthetic oligonucleotide
ggggugaccuagugucuuc

SEQ ID NO: 1986023 - RNA, 19 nt, Artificial Sequence
  Description of Artificial Sequence: Synthetic oligonucleotide
gaggaaugugccguuccuu

SEQ ID NO: 1986024 - RNA, 19 nt, Artificial Sequence
  Description of Artificial Sequence: Synthetic oligonucleotide
uguccccuggggugaccua

SEQ ID NO: 1986025 - RNA, 19 nt, Artificial Sequence
  Description of Artificial Sequence: Synthetic oligonucleotide
cccuucaguacacucuaaa

SEQ ID NO: 1986026 - RNA, 19 nt, Artificial Sequence
  Description of Artificial Sequence: Synthetic oligonucleotide
guuccuucggaccgcuguu

SEQ ID NO: 1986027 - RNA, 19 nt, Artificial Sequence
  Description of Artificial Sequence: Synthetic oligonucleotide
cuggggugaccuagugucu

SEQ ID NO: 1986028 - RNA, 19 nt, Artificial Sequence
  Description of Artificial Sequence: Synthetic oligonucleotide
ccaaguuuugugucucggu

SEQ ID NO: 1986029 - RNA, 19 nt, Artificial Sequence
  Description of Artificial Sequence: Synthetic oligonucleotide
ggaccgcuguuuguguguc

SEQ ID NO: 1986030 - RNA, 19 nt, Artificial Sequence
  Description of Artificial Sequence: Synthetic oligonucleotide
cccacaaugaugaguguuu

SEQ ID NO: 1986031 - RNA, 19 nt, Artificial Sequence
  Description of Artificial Sequence: Synthetic oligonucleotide
caucuuuccuggaguuaau

SEQ ID NO: 1986032 - RNA, 19 nt, Artificial Sequence
  Description of Artificial Sequence: Synthetic oligonucleotide
ggaguuaaucagagcuugu

SEQ ID NO: 1986033 - RNA, 19 nt, Artificial Sequence
  Description of Artificial Sequence: Synthetic oligonucleotide
gaccgcuguuugugugucu

SEQ ID NO: 1986034 - RNA, 19 nt, Artificial Sequence
  Description of Artificial Sequence: Synthetic oligonucleotide
acccuucaguacacucuaa

SEQ ID NO: 1986035 - RNA, 19 nt, Artificial Sequence
  Description of Artificial Sequence: Synthetic oligonucleotide
ccccaugcagaaauauacu

SEQ ID NO: 1986036 - RNA, 19 nt, Artificial Sequence
  Description of Artificial Sequence: Synthetic oligonucleotide
cccauuauacucucccauu

SEQ ID NO: 1986037 - RNA, 19 nt, Artificial Sequence
  Description of Artificial Sequence: Synthetic oligonucleotide
cucccacaaugaugagugu

SEQ ID NO: 1986038 - RNA, 19 nt, Artificial Sequence
  Description of Artificial Sequence: Synthetic oligonucleotide
ccgcuguuugugugucuuc

SEQ ID NO: 1986039 - RNA, 19 nt, Artificial Sequence
  Description of Artificial Sequence: Synthetic oligonucleotide
ccaccccaguuauacgaaa

SEQ ID NO: 1986040 - RNA, 19 nt, Artificial Sequence
  Description of Artificial Sequence: Synthetic oligonucleotide
ccgcaaggugaggaaugug

SEQ ID NO: 1986041 - RNA, 19 nt, Artificial Sequence
  Description of Artificial Sequence: Synthetic oligonucleotide
ccccuggggugaccuagug

SEQ ID NO: 1986042 - RNA, 19 nt, Artificial Sequence
  Description of Artificial Sequence: Synthetic oligonucleotide
cucccgcaaggugaggaau

SEQ ID NO: 1986043 - RNA, 19 nt, Artificial Sequence
  Description of Artificial Sequence: Synthetic oligonucleotide
caguagcuuacugguugau

SEQ ID NO: 1986044 - RNA, 19 nt, Artificial Sequence
  Description of Artificial Sequence: Synthetic oligonucleotide
  modified_base (2)..(2): a, c, u, g, unknown or other
cnguacccuucaguacacu

SEQ ID NO: 1986045 - RNA, 19 nt, Artificial Sequence
  Description of Artificial Sequence: Synthetic oligonucleotide
gugucgcuuugugggcucu

SEQ ID NO: 1986046 - RNA, 19 nt, Artificial Sequence
  Description of Artificial Sequence: Synthetic oligonucleotide
ccuucggaccgcuguuugu

SEQ ID NO: 1986047 - RNA, 19 nt, Artificial Sequence
  Description of Artificial Sequence: Synthetic oligonucleotide
ccguuccuucggaccgcug

SEQ ID NO: 1986048 - RNA, 19 nt, Artificial Sequence
  Description of Artificial Sequence: Synthetic oligonucleotide
cccgcaaggugaggaaugu

SEQ ID NO: 1986049 - RNA, 19 nt, Artificial Sequence
  Description of Artificial Sequence: Synthetic oligonucleotide
cucugcccuuucugugcuu

SEQ ID NO: 1986050 - RNA, 19 nt, Artificial Sequence
  Description of Artificial Sequence: Synthetic oligonucleotide
gccguuccuucggaccgcu

SEQ ID NO: 1986051 - RNA, 19 nt, Artificial Sequence
  Description of Artificial Sequence: Synthetic oligonucleotide
ccgagcacucggugucgcu

SEQ ID NO: 1986052 - RNA, 19 nt, Artificial Sequence
  Description of Artificial Sequence: Synthetic oligonucleotide
ccccaccauuguaguuaaa

SEQ ID NO: 1986053 - RNA, 19 nt, Artificial Sequence
  Description of Artificial Sequence: Synthetic oligonucleotide
cgagcacucggugucgcuu

SEQ ID NO: 1986054 - RNA, 19 nt, Artificial Sequence
  Description of Artificial Sequence: Synthetic oligonucleotide
cggugucgcuuugugggcu

SEQ ID NO: 1986055 - RNA, 19 nt, Artificial Sequence
  Description of Artificial Sequence: Synthetic oligonucleotide
ccgucacauucagcugggu

SEQ ID NO: 1986056 - RNA, 19 nt, Artificial Sequence
  Description of Artificial Sequence: Synthetic oligonucleotide
  modified_base (1)..(1): a, c, u, g, unknown or other
nguacccuucaguacacuc

SEQ ID NO: 1986057 - RNA, 19 nt, Artificial Sequence
  Description of Artificial Sequence: Synthetic oligonucleotide
aaagguagagcucccgagc

SEQ ID NO: 1986058 - RNA, 19 nt, Artificial Sequence
  Description of Artificial Sequence: Synthetic oligonucleotide
ugguacaucuuccacaccg

SEQ ID NO: 1986059 - RNA, 19 nt, Artificial Sequence
  Description of Artificial Sequence: Synthetic oligonucleotide
caugacgcaaccacgagcg

SEQ ID NO: 1986060 - RNA, 19 nt, Artificial Sequence
  Description of Artificial Sequence: Synthetic oligonucleotide
aagcgugccacuuguaggg

SEQ ID NO: 1986061 - RNA, 19 nt, Artificial Sequence
  Description of Artificial Sequence: Synthetic oligonucleotide
uuaacagcaccuguggacg

SEQ ID NO: 1986062 - RNA, 19 nt, Artificial Sequence
  Description of Artificial Sequence: Synthetic oligonucleotide
agugcugucagauggcgcg

SEQ ID NO: 1986063 - RNA, 19 nt, Artificial Sequence
  Description of Artificial Sequence: Synthetic oligonucleotide
ucuaccuuggcugaaaggu

SEQ ID NO: 1986064 - RNA, 19 nt, Artificial Sequence
  Description of Artificial Sequence: Synthetic oligonucleotide
aaguccgacccugagauuc

SEQ ID NO: 1986065 - RNA, 19 nt, Artificial Sequence
  Description of Artificial Sequence: Synthetic oligonucleotide
ucagauggcgcgaacucgg

SEQ ID NO: 1986066 - RNA, 19 nt, Artificial Sequence
  Description of Artificial Sequence: Synthetic oligonucleotide
accgacagggucaugaugc

SEQ ID NO: 1986067 - RNA, 19 nt, Artificial Sequence
  Description of Artificial Sequence: Synthetic oligonucleotide
ugacucaaaucacuucccg

SEQ ID NO: 1986068 - RNA, 19 nt, Artificial Sequence
  Description of Artificial Sequence: Synthetic oligonucleotide
gacucaaaucacuucccgg

SEQ ID NO: 1986069 - RNA, 19 nt, Artificial Sequence
  Description of Artificial Sequence: Synthetic oligonucleotide
acucaaaucacuucccggu

SEQ ID NO: 1986070 - RNA, 19 nt, Artificial Sequence
  Description of Artificial Sequence: Synthetic oligonucleotide
ucaaaucacuucccggucc

SEQ ID NO: 1986071 - RNA, 19 nt, Artificial Sequence
  Description of Artificial Sequence: Synthetic oligonucleotide
aguaaguugcaggcgaucg

SEQ ID NO: 1986072 - RNA, 19 nt, Artificial Sequence
  Description of Artificial Sequence: Synthetic oligonucleotide
acccugagauucaagaucc

SEQ ID NO: 1986073 - RNA, 19 nt, Artificial Sequence
  Description of Artificial Sequence: Synthetic oligonucleotide
gaaagguagagcucccgag

SEQ ID NO: 1986074 - RNA, 19 nt, Artificial Sequence
  Description of Artificial Sequence: Synthetic oligonucleotide
uccucagaaggccaccacg

SEQ ID NO: 1986075 - RNA, 19 nt, Artificial Sequence
  Description of Artificial Sequence: Synthetic oligonucleotide
uaccuuggcugaaagguag

SEQ ID NO: 1986076 - RNA, 19 nt, Artificial Sequence
  Description of Artificial Sequence: Synthetic oligonucleotide
acgcaagccaccucgcugc

SEQ ID NO: 1986077 - RNA, 19 nt, Artificial Sequence
  Description of Artificial Sequence: Synthetic oligonucleotide
agagugguacaucuuccac

SEQ ID NO: 1986078 - RNA, 19 nt, Artificial Sequence
  Description of Artificial Sequence: Synthetic oligonucleotide
uccucuugcguguccaugg

SEQ ID NO: 1986079 - RNA, 19 nt, Artificial Sequence
  Description of Artificial Sequence: Synthetic oligonucleotide
ugcgggaguaaguugcagg

SEQ ID NO: 1986080 - RNA, 19 nt, Artificial Sequence
  Description of Artificial Sequence: Synthetic oligonucleotide
ugaaagguagagcucccga

SEQ ID NO: 1986081 - RNA, 19 nt, Artificial Sequence
  Description of Artificial Sequence: Synthetic oligonucleotide
ucuugcguguccauggccu

SEQ ID NO: 1986082 - RNA, 19 nt, Artificial Sequence
  Description of Artificial Sequence: Synthetic oligonucleotide
acaagcgugccacuuguag

SEQ ID NO: 1986083 - RNA, 19 nt, Artificial Sequence
  Description of Artificial Sequence: Synthetic oligonucleotide
uuguagggcccgaagcgcg

SEQ ID NO: 1986084 - RNA, 19 nt, Artificial Sequence
  Description of Artificial Sequence: Synthetic oligonucleotide
cugugcgggaguaaguugc

SEQ ID NO: 1986085 - RNA, 19 nt, Artificial Sequence
  Description of Artificial Sequence: Synthetic oligonucleotide
acgggugugcguuuucggc

SEQ ID NO: 1986086 - RNA, 19 nt, Artificial Sequence
  Description of Artificial Sequence: Synthetic oligonucleotide
ggagaagcgccuuuggagg

SEQ ID NO: 1986087 - RNA, 19 nt, Artificial Sequence
  Description of Artificial Sequence: Synthetic oligonucleotide
caagcgugccacuuguagg

SEQ ID NO: 1986088 - RNA, 19 nt, Artificial Sequence
  Description of Artificial Sequence: Synthetic oligonucleotide
ggagacgcaagccaccucg

SEQ ID NO: 1986089 - RNA, 19 nt, Artificial Sequence
  Description of Artificial Sequence: Synthetic oligonucleotide
uacaucuuccacaccgaca

SEQ ID NO: 1986090 - RNA, 19 nt, Artificial Sequence
  Description of Artificial Sequence: Synthetic oligonucleotide
uacgcuagugaaacggccu

SEQ ID NO: 1986091 - RNA, 19 nt, Artificial Sequence
  Description of Artificial Sequence: Synthetic oligonucleotide
uguggacgcacugugggag

SEQ ID NO: 1986092 - RNA, 19 nt, Artificial Sequence
  Description of Artificial Sequence: Synthetic oligonucleotide
guaaguugcaggcgaucgg

SEQ ID NO: 1986093 - RNA, 19 nt, Artificial Sequence
  Description of Artificial Sequence: Synthetic oligonucleotide
ggcgaggugacucaaauca

SEQ ID NO: 1986094 - RNA, 19 nt, Artificial Sequence
  Description of Artificial Sequence: Synthetic oligonucleotide
gagugguacaucuuccaca

SEQ ID NO: 1986095 - RNA, 19 nt, Artificial Sequence
  Description of Artificial Sequence: Synthetic oligonucleotide
agcagacuggagaagcgcc

SEQ ID NO: 1986096 - RNA, 19 nt, Artificial Sequence
  Description of Artificial Sequence: Synthetic oligonucleotide
aggugacucaaaucacuuc

SEQ ID NO: 1986097 - RNA, 19 nt, Artificial Sequence
  Description of Artificial Sequence: Synthetic oligonucleotide
agaaaguccgacccugaga

SEQ ID NO: 1986098 - RNA, 19 nt, Artificial Sequence
  Description of Artificial Sequence: Synthetic oligonucleotide
agggucaugaugcgcugcg

SEQ ID NO: 1986099 - RNA, 19 nt, Artificial Sequence
  Description of Artificial Sequence: Synthetic oligonucleotide
ugucagauggcgcgaacuc

SEQ ID NO: 1986100 - RNA, 19 nt, Artificial Sequence
  Description of Artificial Sequence: Synthetic oligonucleotide
uugcuugggaccagcccgg

SEQ ID NO: 1986101 - RNA, 19 nt, Artificial Sequence
  Description of Artificial Sequence: Synthetic oligonucleotide
gcucggacuccucagaagg

SEQ ID NO: 1986102 - RNA, 19 nt, Artificial Sequence
  Description of Artificial Sequence: Synthetic oligonucleotide
agauggcgcgaacucgggc

SEQ ID NO: 1986103 - RNA, 19 nt, Artificial Sequence
  Description of Artificial Sequence: Synthetic oligonucleotide
agcgccgucgcucgggugg

SEQ ID NO: 1986104 - RNA, 19 nt, Artificial Sequence
  Description of Artificial Sequence: Synthetic oligonucleotide
aaaucacuucccggucccc

SEQ ID NO: 1986105 - RNA, 19 nt, Artificial Sequence
  Description of Artificial Sequence: Synthetic oligonucleotide
agcgcuacgcaagacgagg

SEQ ID NO: 1986106 - RNA, 19 nt, Artificial Sequence
  Description of Artificial Sequence: Synthetic oligonucleotide
acgcaaggcagcaggaagc

SEQ ID NO: 1986107 - RNA, 19 nt, Artificial Sequence
  Description of Artificial Sequence: Synthetic oligonucleotide
gacgcaagccaccucgcug

SEQ ID NO: 1986108 - RNA, 19 nt, Artificial Sequence
  Description of Artificial Sequence: Synthetic oligonucleotide
uguagacugcgguggagac

SEQ ID NO: 1986109 - RNA, 19 nt, Artificial Sequence
  Description of Artificial Sequence: Synthetic oligonucleotide
aagcgcguacgcuagugaa

SEQ ID NO: 1986110 - RNA, 19 nt, Artificial Sequence
  Description of Artificial Sequence: Synthetic oligonucleotide
cucuaccuuggcugaaagg

SEQ ID NO: 1986111 - RNA, 19 nt, Artificial Sequence
  Description of Artificial Sequence: Synthetic oligonucleotide
augcgagagugguacaucu

SEQ ID NO: 1986112 - RNA, 19 nt, Artificial Sequence
  Description of Artificial Sequence: Synthetic oligonucleotide
gaagcaccgcgucugcccc

SEQ ID NO: 1986113 - RNA, 19 nt, Artificial Sequence
  Description of Artificial Sequence: Synthetic oligonucleotide
uacgcaagacgagggacag

SEQ ID NO: 1986114 - RNA, 19 nt, Artificial Sequence
  Description of Artificial Sequence: Synthetic oligonucleotide
gagagugguacaucuucca

SEQ ID NO: 1986115 - RNA, 19 nt, Artificial Sequence
  Description of Artificial Sequence: Synthetic oligonucleotide
cugcaugcgagagugguac

SEQ ID NO: 1986116 - RNA, 19 nt, Artificial Sequence
  Description of Artificial Sequence: Synthetic oligonucleotide
aaguugcaggcgaucggcg

SEQ ID NO: 1986117 - RNA, 19 nt, Artificial Sequence
  Description of Artificial Sequence: Synthetic oligonucleotide
gucagauggcgcgaacucg

SEQ ID NO: 1986118 - RNA, 19 nt, Artificial Sequence
  Description of Artificial Sequence: Synthetic oligonucleotide
cuuguagggcccgaagcgc

SEQ ID NO: 1986119 - RNA, 19 nt, Artificial Sequence
  Description of Artificial Sequence: Synthetic oligonucleotide
gaggcuagggaaggcaccc

SEQ ID NO: 1986120 - RNA, 19 nt, Artificial Sequence
  Description of Artificial Sequence: Synthetic oligonucleotide
accacgagcgcuugcacaa

SEQ ID NO: 1986121 - RNA, 19 nt, Artificial Sequence
  Description of Artificial Sequence: Synthetic oligonucleotide
cucaaaucacuucccgguc

SEQ ID NO: 1986122 - RNA, 19 nt, Artificial Sequence
  Description of Artificial Sequence: Synthetic oligonucleotide
ugacgcaaccacgagcgcu

SEQ ID NO: 1986123 - RNA, 19 nt, Artificial Sequence
  Description of Artificial Sequence: Synthetic oligonucleotide
ugugcgggaguaaguugca

SEQ ID NO: 1986124 - RNA, 19 nt, Artificial Sequence
  Description of Artificial Sequence: Synthetic oligonucleotide
augacgcaaccacgagcgc

SEQ ID NO: 1986125 - RNA, 19 nt, Artificial Sequence
  Description of Artificial Sequence: Synthetic oligonucleotide
gucuccuggccucgcagcg

SEQ ID NO: 1986126 - RNA, 19 nt, Artificial Sequence
  Description of Artificial Sequence: Synthetic oligonucleotide
gaagcgccuuuggaggacg

SEQ ID NO: 1986127 - RNA, 19 nt, Artificial Sequence
  Description of Artificial Sequence: Synthetic oligonucleotide
gugacucaaaucacuuccc

SEQ ID NO: 1986128 - RNA, 19 nt, Artificial Sequence
  Description of Artificial Sequence: Synthetic oligonucleotide
gggacaguccuuaacagca

SEQ ID NO: 1986129 - RNA, 19 nt, Artificial Sequence
  Description of Artificial Sequence: Synthetic oligonucleotide
gcguacgcuagugaaacgg

SEQ ID NO: 1986130 - RNA, 19 nt, Artificial Sequence
  Description of Artificial Sequence: Synthetic oligonucleotide
cucggacuccucagaaggc

SEQ ID NO: 1986131 - RNA, 19 nt, Artificial Sequence
  Description of Artificial Sequence: Synthetic oligonucleotide
uuuucggcuccggcgacgc

SEQ ID NO: 1986132 - RNA, 19 nt, Artificial Sequence
  Description of Artificial Sequence: Synthetic oligonucleotide
cuacgcaagacgagggaca

SEQ ID NO: 1986133 - RNA, 19 nt, Artificial Sequence
  Description of Artificial Sequence: Synthetic oligonucleotide
guugcaggcgaucggcgac

SEQ ID NO: 1986134 - RNA, 19 nt, Artificial Sequence
  Description of Artificial Sequence: Synthetic oligonucleotide
gcgggaguaaguugcaggc

SEQ ID NO: 1986135 - RNA, 19 nt, Artificial Sequence
  Description of Artificial Sequence: Synthetic oligonucleotide
acggcucgcaccagcacgc

SEQ ID NO: 1986136 - RNA, 19 nt, Artificial Sequence
  Description of Artificial Sequence: Synthetic oligonucleotide
accgcgucugccccaugac

SEQ ID NO: 1986137 - RNA, 19 nt, Artificial Sequence
  Description of Artificial Sequence: Synthetic oligonucleotide
agaagcgccuuuggaggac

SEQ ID NO: 1986138 - RNA, 19 nt, Artificial Sequence
  Description of Artificial Sequence: Synthetic oligonucleotide
gggaguaaguugcaggcga

SEQ ID NO: 1986139 - RNA, 19 nt, Artificial Sequence
  Description of Artificial Sequence: Synthetic oligonucleotide
gagaagcgccuuuggagga

SEQ ID NO: 1986140 - RNA, 19 nt, Artificial Sequence
  Description of Artificial Sequence: Synthetic oligonucleotide
cacgggugugcguuuucgg

SEQ ID NO: 1986141 - RNA, 19 nt, Artificial Sequence
  Description of Artificial Sequence: Synthetic oligonucleotide
ugcguguccauggccuccg

SEQ ID NO: 1986142 - RNA, 19 nt, Artificial Sequence
  Description of Artificial Sequence: Synthetic oligonucleotide
ugugcguuuucggcuccgg

SEQ ID NO: 1986143 - RNA, 19 nt, Artificial Sequence
  Description of Artificial Sequence: Synthetic oligonucleotide
agcaccuguggacgcacug

SEQ ID NO: 1986144 - RNA, 19 nt, Artificial Sequence
  Description of Artificial Sequence: Synthetic oligonucleotide
gaagcgcguacgcuaguga

SEQ ID NO: 1986145 - RNA, 19 nt, Artificial Sequence
  Description of Artificial Sequence: Synthetic oligonucleotide
aaggccaccacggcucgca

SEQ ID NO: 1986146 - RNA, 19 nt, Artificial Sequence
  Description of Artificial Sequence: Synthetic oligonucleotide
cucuucuccaccggucccg

SEQ ID NO: 1986147 - RNA, 19 nt, Artificial Sequence
  Description of Artificial Sequence: Synthetic oligonucleotide
ugcgcugcgcuuccuucug

SEQ ID NO: 1986148 - RNA, 19 nt, Artificial Sequence
  Description of Artificial Sequence: Synthetic oligonucleotide
ggcacccucggccugugcg

SEQ ID NO: 1986149 - RNA, 19 nt, Artificial Sequence
  Description of Artificial Sequence: Synthetic oligonucleotide
cucuugcguguccauggcc

SEQ ID NO: 1986150 - RNA, 19 nt, Artificial Sequence
  Description of Artificial Sequence: Synthetic oligonucleotide
agacgagggacagcuguag

SEQ ID NO: 1986151 - RNA, 19 nt, Artificial Sequence
  Description of Artificial Sequence: Synthetic oligonucleotide
gaccagcccggcgucagcg

SEQ ID NO: 1986152 - RNA, 19 nt, Artificial Sequence
  Description of Artificial Sequence: Synthetic oligonucleotide
uguagggcccgaagcgcgu

SEQ ID NO: 1986153 - RNA, 19 nt, Artificial Sequence
  Description of Artificial Sequence: Synthetic oligonucleotide
aacagcaccuguggacgca

SEQ ID NO: 1986154 - RNA, 19 nt, Artificial Sequence
  Description of Artificial Sequence: Synthetic oligonucleotide
aggcgggccuucuugcuug

SEQ ID NO: 1986155 - RNA, 19 nt, Artificial Sequence
  Description of Artificial Sequence: Synthetic oligonucleotide
cacgcugagcaugcugucg

SEQ ID NO: 1986156 - RNA, 19 nt, Artificial Sequence
  Description of Artificial Sequence: Synthetic oligonucleotide
cucaguccuuccccgggcc

SEQ ID NO: 1986157 - RNA, 19 nt, Artificial Sequence
  Description of Artificial Sequence: Synthetic oligonucleotide
cagauggcgcgaacucggg

SEQ ID NO: 1986158 - RNA, 19 nt, Artificial Sequence
  Description of Artificial Sequence: Synthetic oligonucleotide
cacgagcgcuugcacaagc

SEQ ID NO: 1986159 - RNA, 19 nt, Artificial Sequence
  Description of Artificial Sequence: Synthetic oligonucleotide
caccuguggacgcacugug

SEQ ID NO: 1986160 - RNA, 19 nt, Artificial Sequence
  Description of Artificial Sequence: Synthetic oligonucleotide
aagcgccuuuggaggacgc

SEQ ID NO: 1986161 - RNA, 19 nt, Artificial Sequence
  Description of Artificial Sequence: Synthetic oligonucleotide
cagcagacuggagaagcgc

SEQ ID NO: 1986162 - RNA, 19 nt, Artificial Sequence
  Description of Artificial Sequence: Synthetic oligonucleotide
agcgugccacuuguagggc

SEQ ID NO: 1986163 - RNA, 19 nt, Artificial Sequence
  Description of Artificial Sequence: Synthetic oligonucleotide
auggcgcgaacucgggcug

SEQ ID NO: 1986164 - RNA, 19 nt, Artificial Sequence
  Description of Artificial Sequence: Synthetic oligonucleotide
gcgagagugguacaucuuc

SEQ ID NO: 1986165 - RNA, 19 nt, Artificial Sequence
  Description of Artificial Sequence: Synthetic oligonucleotide
gagugcugucagauggcgc

SEQ ID NO: 1986166 - RNA, 19 nt, Artificial Sequence
  Description of Artificial Sequence: Synthetic oligonucleotide
acgagcgcuugcacaagcg

SEQ ID NO: 1986167 - RNA, 19 nt, Artificial Sequence
  Description of Artificial Sequence: Synthetic oligonucleotide
aaaguccgacccugagauu

SEQ ID NO: 1986168 - RNA, 19 nt, Artificial Sequence
  Description of Artificial Sequence: Synthetic oligonucleotide
guuuucggcuccggcgacg

SEQ ID NO: 1986169 - RNA, 19 nt, Artificial Sequence
  Description of Artificial Sequence: Synthetic oligonucleotide
ccaugacgcaaccacgagc

SEQ ID NO: 1986170 - RNA, 19 nt, Artificial Sequence
  Description of Artificial Sequence: Synthetic oligonucleotide
gacgcgggcgaggcuaggg

SEQ ID NO: 1986171 - RNA, 19 nt, Artificial Sequence
  Description of Artificial Sequence: Synthetic oligonucleotide
caagaaaguccgacccuga

SEQ ID NO: 1986172 - RNA, 19 nt, Artificial Sequence
  Description of Artificial Sequence: Synthetic oligonucleotide
agacgcaagccaccucgcu

SEQ ID NO: 1986173 - RNA, 19 nt, Artificial Sequence
  Description of Artificial Sequence: Synthetic oligonucleotide
cuugcguguccauggccuc

SEQ ID NO: 1986174 - RNA, 19 nt, Artificial Sequence
  Description of Artificial Sequence: Synthetic oligonucleotide
augcgcugcgcuuccuucu

SEQ ID NO: 1986175 - RNA, 19 nt, Artificial Sequence
  Description of Artificial Sequence: Synthetic oligonucleotide
gggccaagaaaguccgacc

SEQ ID NO: 1986176 - RNA, 19 nt, Artificial Sequence
  Description of Artificial Sequence: Synthetic oligonucleotide
gcuagugaaacggccuugc

SEQ ID NO: 1986177 - RNA, 19 nt, Artificial Sequence
  Description of Artificial Sequence: Synthetic oligonucleotide
gaguaaguugcaggcgauc

SEQ ID NO: 1986178 - RNA, 19 nt, Artificial Sequence
  Description of Artificial Sequence: Synthetic oligonucleotide
ugcaugcgagagugguaca

SEQ ID NO: 1986179 - RNA, 19 nt, Artificial Sequence
  Description of Artificial Sequence: Synthetic oligonucleotide
ugcgagagugguacaucuu

SEQ ID NO: 1986180 - RNA, 19 nt, Artificial Sequence
  Description of Artificial Sequence: Synthetic oligonucleotide
caugcgagagugguacauc

SEQ ID NO: 1986181 - RNA, 19 nt, Artificial Sequence
  Description of Artificial Sequence: Synthetic oligonucleotide
uuucggcuccggcgacgcg

SEQ ID NO: 1986182 - RNA, 19 nt, Artificial Sequence
  Description of Artificial Sequence: Synthetic oligonucleotide
uccgacgucuccucccuuu

SEQ ID NO: 1986183 - RNA, 19 nt, Artificial Sequence
  Description of Artificial Sequence: Synthetic oligonucleotide
ccugagauucaagauccag

SEQ ID NO: 1986184 - RNA, 19 nt, Artificial Sequence
  Description of Artificial Sequence: Synthetic oligonucleotide
ucgcucggguggcugcugc

SEQ ID NO: 1986185 - RNA, 19 nt, Artificial Sequence
  Description of Artificial Sequence: Synthetic oligonucleotide
acgcuagugaaacggccuu

SEQ ID NO: 1986186 - RNA, 19 nt, Artificial Sequence
  Description of Artificial Sequence: Synthetic oligonucleotide
caccgacagggucaugaug

SEQ ID NO: 1986187 - RNA, 19 nt, Artificial Sequence
  Description of Artificial Sequence: Synthetic oligonucleotide
uugcguguccauggccucc

SEQ ID NO: 1986188 - RNA, 19 nt, Artificial Sequence
  Description of Artificial Sequence: Synthetic oligonucleotide
aucggcgaccuccgacguc

SEQ ID NO: 1986189 - RNA, 19 nt, Artificial Sequence
  Description of Artificial Sequence: Synthetic oligonucleotide
ccgagcgcuacgcaagacg

SEQ ID NO: 1986190 - RNA, 19 nt, Artificial Sequence
  Description of Artificial Sequence: Synthetic oligonucleotide
ccaagaaaguccgacccug

SEQ ID NO: 1986191 - RNA, 19 nt, Artificial Sequence
  Description of Artificial Sequence: Synthetic oligonucleotide
aagacgagggacagcugua

SEQ ID NO: 1986192 - RNA, 19 nt, Artificial Sequence
  Description of Artificial Sequence: Synthetic oligonucleotide
ucgcugcaugcgagagugg

SEQ ID NO: 1986193 - RNA, 19 nt, Artificial Sequence
  Description of Artificial Sequence: Synthetic oligonucleotide
ucgcagcgcuuccucuugc

SEQ ID NO: 1986194 - RNA, 19 nt, Artificial Sequence
  Description of Artificial Sequence: Synthetic oligonucleotide
cucgcagcgcuuccucuug

SEQ ID NO: 1986195 - RNA, 19 nt, Artificial Sequence
  Description of Artificial Sequence: Synthetic oligonucleotide
uagagcucccgagcgcuac

SEQ ID NO: 1986196 - RNA, 19 nt, Artificial Sequence
  Description of Artificial Sequence: Synthetic oligonucleotide
gagcaugcugucggccggg

SEQ ID NO: 1986197 - RNA, 19 nt, Artificial Sequence
  Description of Artificial Sequence: Synthetic oligonucleotide
uaggcgggccuucuugcuu

SEQ ID NO: 1986198 - RNA, 19 nt, Artificial Sequence
  Description of Artificial Sequence: Synthetic oligonucleotide
gagacgcaagccaccucgc

SEQ ID NO: 1986199 - RNA, 19 nt, Artificial Sequence
  Description of Artificial Sequence: Synthetic oligonucleotide
agcgccuuuggaggacgcg

SEQ ID NO: 1986200 - RNA, 19 nt, Artificial Sequence
  Description of Artificial Sequence: Synthetic oligonucleotide
acgcacugugggagaaggc

SEQ ID NO: 1986201 - RNA, 19 nt, Artificial Sequence
  Description of Artificial Sequence: Synthetic oligonucleotide
aggccccacacccacgcaa

SEQ ID NO: 1986202 - RNA, 19 nt, Artificial Sequence
  Description of Artificial Sequence: Synthetic oligonucleotide
cgaucggcgaccuccgacg

SEQ ID NO: 1986203 - RNA, 19 nt, Artificial Sequence
  Description of Artificial Sequence: Synthetic oligonucleotide
gagcgcuacgcaagacgag

SEQ ID NO: 1986204 - RNA, 19 nt, Artificial Sequence
  Description of Artificial Sequence: Synthetic oligonucleotide
cuagugaaacggccuugca

SEQ ID NO: 1986205 - RNA, 19 nt, Artificial Sequence
  Description of Artificial Sequence: Synthetic oligonucleotide
caggaagcaccgcgucugc

SEQ ID NO: 1986206 - RNA, 19 nt, Artificial Sequence
  Description of Artificial Sequence: Synthetic oligonucleotide
ggucccgccgaccuucccc

SEQ ID NO: 1986207 - RNA, 19 nt, Artificial Sequence
  Description of Artificial Sequence: Synthetic oligonucleotide
cguacgcuagugaaacggc

SEQ ID NO: 1986208 - RNA, 19 nt, Artificial Sequence
  Description of Artificial Sequence: Synthetic oligonucleotide
ggcucggacuccucagaag

SEQ ID NO: 1986209 - RNA, 19 nt, Artificial Sequence
  Description of Artificial Sequence: Synthetic oligonucleotide
agggcggguccacacccug

SEQ ID NO: 1986210 - RNA, 19 nt, Artificial Sequence
  Description of Artificial Sequence: Synthetic oligonucleotide
uggagacgcaagccaccuc

SEQ ID NO: 1986211 - RNA, 19 nt, Artificial Sequence
  Description of Artificial Sequence: Synthetic oligonucleotide
cgcgucugccccaugacgc

SEQ ID NO: 1986212 - RNA, 19 nt, Artificial Sequence
  Description of Artificial Sequence: Synthetic oligonucleotide
gugguacaucuuccacacc

SEQ ID NO: 1986213 - RNA, 19 nt, Artificial Sequence
  Description of Artificial Sequence: Synthetic oligonucleotide
gcuucggccgcccgcggcg

SEQ ID NO: 1986214 - RNA, 19 nt, Artificial Sequence
  Description of Artificial Sequence: Synthetic oligonucleotide
gcuccggcgacgcggcucg

SEQ ID NO: 1986215 - RNA, 19 nt, Artificial Sequence
  Description of Artificial Sequence: Synthetic oligonucleotide
ccgacccugagauucaaga

SEQ ID NO: 1986216 - RNA, 19 nt, Artificial Sequence
  Description of Artificial Sequence: Synthetic oligonucleotide
cugucggccgggcggcagg

SEQ ID NO: 1986217 - RNA, 19 nt, Artificial Sequence
  Description of Artificial Sequence: Synthetic oligonucleotide
gcgccuuuggaggacgcgg

SEQ ID NO: 1986218 - RNA, 19 nt, Artificial Sequence
  Description of Artificial Sequence: Synthetic oligonucleotide
ccuugcacgggcagccggg

SEQ ID NO: 1986219 - RNA, 19 nt, Artificial Sequence
  Description of Artificial Sequence: Synthetic oligonucleotide
gcgaacucgggcugcugag

SEQ ID NO: 1986220 - RNA, 19 nt, Artificial Sequence
  Description of Artificial Sequence: Synthetic oligonucleotide
cucgcaccagcacgcugag

SEQ ID NO: 1986221 - RNA, 19 nt, Artificial Sequence
  Description of Artificial Sequence: Synthetic oligonucleotide
ggagaaggcaggcgcccgc

SEQ ID NO: 1986222 - RNA, 19 nt, Artificial Sequence
  Description of Artificial Sequence: Synthetic oligonucleotide
agggcccgaagcgcguacg

SEQ ID NO: 1986223 - RNA, 19 nt, Artificial Sequence
  Description of Artificial Sequence: Synthetic oligonucleotide
cuguggacgcacuguggga

SEQ ID NO: 1986224 - RNA, 19 nt, Artificial Sequence
  Description of Artificial Sequence: Synthetic oligonucleotide
cagcccggcgucagcgccg

SEQ ID NO: 1986225 - RNA, 19 nt, Artificial Sequence
  Description of Artificial Sequence: Synthetic oligonucleotide
gcgcguacgcuagugaaac

SEQ ID NO: 1986226 - RNA, 19 nt, Artificial Sequence
  Description of Artificial Sequence: Synthetic oligonucleotide
ggcgacgcggcucggacuc

SEQ ID NO: 1986227 - RNA, 19 nt, Artificial Sequence
  Description of Artificial Sequence: Synthetic oligonucleotide
ugcugucagauggcgcgaa

SEQ ID NO: 1986228 - RNA, 19 nt, Artificial Sequence
  Description of Artificial Sequence: Synthetic oligonucleotide
ccagggcggguccacaccc

SEQ ID NO: 1986229 - RNA, 19 nt, Artificial Sequence
  Description of Artificial Sequence: Synthetic oligonucleotide
ccugugcgggaguaaguug

SEQ ID NO: 1986230 - RNA, 19 nt, Artificial Sequence
  Description of Artificial Sequence: Synthetic oligonucleotide
gcgguggagacgcaagcca

SEQ ID NO: 1986231 - RNA, 19 nt, Artificial Sequence
  Description of Artificial Sequence: Synthetic oligonucleotide
ccucuaccuuggcugaaag

SEQ ID NO: 1986232 - RNA, 19 nt, Artificial Sequence
  Description of Artificial Sequence: Synthetic oligonucleotide
gugcgggaguaaguugcag

SEQ ID NO: 1986233 - RNA, 19 nt, Artificial Sequence
  Description of Artificial Sequence: Synthetic oligonucleotide
ggucaugaugcgcugcgcu

SEQ ID NO: 1986234 - RNA, 19 nt, Artificial Sequence
  Description of Artificial Sequence: Synthetic oligonucleotide
aggcgaucggcgaccuccg

SEQ ID NO: 1986235 - RNA, 19 nt, Artificial Sequence
  Description of Artificial Sequence: Synthetic oligonucleotide
cccgaagcgcguacgcuag

SEQ ID NO: 1986236 - RNA, 19 nt, Artificial Sequence
  Description of Artificial Sequence: Synthetic oligonucleotide
ccgacagggucaugaugcg

SEQ ID NO: 1986237 - RNA, 19 nt, Artificial Sequence
  Description of Artificial Sequence: Synthetic oligonucleotide
aggcacccucggccugugc

SEQ ID NO: 1986238 - RNA, 19 nt, Artificial Sequence
  Description of Artificial Sequence: Synthetic oligonucleotide
acgcggcucggacuccuca

SEQ ID NO: 1986239 - RNA, 19 nt, Artificial Sequence
  Description of Artificial Sequence: Synthetic oligonucleotide
gugugcguuuucggcuccg

SEQ ID NO: 1986240 - RNA, 19 nt, Artificial Sequence
  Description of Artificial Sequence: Synthetic oligonucleotide
gcugccccggcgcuugcgg

SEQ ID NO: 1986241 - RNA, 19 nt, Artificial Sequence
  Description of Artificial Sequence: Synthetic oligonucleotide
cccuuuccaccucuucuag

SEQ ID NO: 1986242 - RNA, 19 nt, Artificial Sequence
  Description of Artificial Sequence: Synthetic oligonucleotide
gcgugccacuuguagggcc

SEQ ID NO: 1986243 - RNA, 19 nt, Artificial Sequence
  Description of Artificial Sequence: Synthetic oligonucleotide
agcgcguacgcuagugaaa

SEQ ID NO: 1986244 - RNA, 19 nt, Artificial Sequence
  Description of Artificial Sequence: Synthetic oligonucleotide
uccaccggucccgccgacc

SEQ ID NO: 1986245 - RNA, 19 nt, Artificial Sequence
  Description of Artificial Sequence: Synthetic oligonucleotide
gugccacuuguagggcccg

SEQ ID NO: 1986246 - RNA, 19 nt, Artificial Sequence
  Description of Artificial Sequence: Synthetic oligonucleotide
gcugagcaugcugucggcc

SEQ ID NO: 1986247 - RNA, 19 nt, Artificial Sequence
  Description of Artificial Sequence: Synthetic oligonucleotide
aguccgacccugagauuca

SEQ ID NO: 1986248 - RNA, 19 nt, Artificial Sequence
  Description of Artificial Sequence: Synthetic oligonucleotide
cugccccggcgcuugcggc

SEQ ID NO: 1986249 - RNA, 19 nt, Artificial Sequence
  Description of Artificial Sequence: Synthetic oligonucleotide
gcgcuacgcaagacgaggg

SEQ ID NO: 1986250 - RNA, 19 nt, Artificial Sequence
  Description of Artificial Sequence: Synthetic oligonucleotide
ccacuuguagggcccgaag

SEQ ID NO: 1986251 - RNA, 19 nt, Artificial Sequence
  Description of Artificial Sequence: Synthetic oligonucleotide
ggugugcguuuucggcucc

SEQ ID NO: 1986252 - RNA, 19 nt, Artificial Sequence
  Description of Artificial Sequence: Synthetic oligonucleotide
ugcaggcgaucggcgaccu

SEQ ID NO: 1986253 - RNA, 19 nt, Artificial Sequence
  Description of Artificial Sequence: Synthetic oligonucleotide
ugcuugggaccagcccggc

SEQ ID NO: 1986254 - RNA, 19 nt, Artificial Sequence
  Description of Artificial Sequence: Synthetic oligonucleotide
gcgaucggcgaccuccgac

SEQ ID NO: 1986255 - RNA, 19 nt, Artificial Sequence
  Description of Artificial Sequence: Synthetic oligonucleotide
gaucggcgaccuccgacgu

SEQ ID NO: 1986256 - RNA, 19 nt, Artificial Sequence
  Description of Artificial Sequence: Synthetic oligonucleotide
ugucggccgggcggcaggc

SEQ ID NO: 1986257 - RNA, 19 nt, Artificial Sequence
  Description of Artificial Sequence: Synthetic oligonucleotide
cccaugacgcaaccacgag

SEQ ID NO: 1986258 - RNA, 19 nt, Artificial Sequence
  Description of Artificial Sequence: Synthetic oligonucleotide
ccucuugcguguccauggc

SEQ ID NO: 1986259 - RNA, 19 nt, Artificial Sequence
  Description of Artificial Sequence: Synthetic oligonucleotide
ccgcgucugccccaugacg

SEQ ID NO: 1986260 - RNA, 19 nt, Artificial Sequence
  Description of Artificial Sequence: Synthetic oligonucleotide
ccaccucgcugcaugcgag

SEQ ID NO: 1986261 - RNA, 19 nt, Artificial Sequence
  Description of Artificial Sequence: Synthetic oligonucleotide
gucaugaugcgcugcgcuu

SEQ ID NO: 1986262 - RNA, 19 nt, Artificial Sequence
  Description of Artificial Sequence: Synthetic oligonucleotide
ccgaccuuccccagccggc

SEQ ID NO: 1986263 - RNA, 19 nt, Artificial Sequence
  Description of Artificial Sequence: Synthetic oligonucleotide
cucuucuaggcgggccuuc

SEQ ID NO: 1986264 - RNA, 19 nt, Artificial Sequence
  Description of Artificial Sequence: Synthetic oligonucleotide
gaggcgggucgcagggcgc

SEQ ID NO: 1986265 - RNA, 19 nt, Artificial Sequence
  Description of Artificial Sequence: Synthetic oligonucleotide
cgagcgcuacgcaagacga

SEQ ID NO: 1986266 - RNA, 19 nt, Artificial Sequence
  Description of Artificial Sequence: Synthetic oligonucleotide
gacgcaaccacgagcgcuu

SEQ ID NO: 1986267 - RNA, 19 nt, Artificial Sequence
  Description of Artificial Sequence: Synthetic oligonucleotide
cugucagauggcgcgaacu

SEQ ID NO: 1986268 - RNA, 19 nt, Artificial Sequence
  Description of Artificial Sequence: Synthetic oligonucleotide
gucugccccaugacgcaac

SEQ ID NO: 1986269 - RNA, 19 nt, Artificial Sequence
  Description of Artificial Sequence: Synthetic oligonucleotide
ccacgggugugcguuuucg

SEQ ID NO: 1986270 - RNA, 19 nt, Artificial Sequence
  Description of Artificial Sequence: Synthetic oligonucleotide
gcgaggugacucaaaucac

SEQ ID NO: 1986271 - RNA, 19 nt, Artificial Sequence
  Description of Artificial Sequence: Synthetic oligonucleotide
gccaccucgcugcaugcga

SEQ ID NO: 1986272 - RNA, 19 nt, Artificial Sequence
  Description of Artificial Sequence: Synthetic oligonucleotide
ccccaugacgcaaccacga

SEQ ID NO: 1986273 - RNA, 19 nt, Artificial Sequence
  Description of Artificial Sequence: Synthetic oligonucleotide
ggccccacacccacgcaag

SEQ ID NO: 1986274 - RNA, 19 nt, Artificial Sequence
  Description of Artificial Sequence: Synthetic oligonucleotide
ucccgccgaccuuccccag

SEQ ID NO: 1986275 - RNA, 19 nt, Artificial Sequence
  Description of Artificial Sequence: Synthetic oligonucleotide
cuucggccgcccgcggcgg

SEQ ID NO: 1986276 - RNA, 19 nt, Artificial Sequence
  Description of Artificial Sequence: Synthetic oligonucleotide
ugccacuuguagggcccga

SEQ ID NO: 1986277 - RNA, 19 nt, Artificial Sequence
  Description of Artificial Sequence: Synthetic oligonucleotide
aggacgcgggcgaggcuag

SEQ ID NO: 1986278 - RNA, 19 nt, Artificial Sequence
  Description of Artificial Sequence: Synthetic oligonucleotide
ccuuccccgggccucuggc

SEQ ID NO: 1986279 - RNA, 19 nt, Artificial Sequence
  Description of Artificial Sequence: Synthetic oligonucleotide
gcgaggcuagggaaggcac

SEQ ID NO: 1986280 - RNA, 19 nt, Artificial Sequence
  Description of Artificial Sequence: Synthetic oligonucleotide
gcugucagauggcgcgaac

SEQ ID NO: 1986281 - RNA, 19 nt, Artificial Sequence
  Description of Artificial Sequence: Synthetic oligonucleotide
cuugcacaagcgugccacu

SEQ ID NO: 1986282 - RNA, 19 nt, Artificial Sequence
  Description of Artificial Sequence: Synthetic oligonucleotide
gcacaagcgugccacuugu

SEQ ID NO: 1986283 - RNA, 19 nt, Artificial Sequence
  Description of Artificial Sequence: Synthetic oligonucleotide
cccggcgucagcgccgucg

SEQ ID NO: 1986284 - RNA, 19 nt, Artificial Sequence
  Description of Artificial Sequence: Synthetic oligonucleotide
gggcccgaagcgcguacgc

SEQ ID NO: 1986285 - RNA, 19 nt, Artificial Sequence
  Description of Artificial Sequence: Synthetic oligonucleotide
ggcgggccuucuugcuugg

SEQ ID NO: 1986286 - RNA, 19 nt, Artificial Sequence
  Description of Artificial Sequence: Synthetic oligonucleotide
uggccucgcagcgcuuccu

SEQ ID NO: 1986287 - RNA, 19 nt, Artificial Sequence
  Description of Artificial Sequence: Synthetic oligonucleotide
uccggcgacgcggcucgga

SEQ ID NO: 1986288 - RNA, 19 nt, Artificial Sequence
  Description of Artificial Sequence: Synthetic oligonucleotide
gccaagaaaguccgacccu

SEQ ID NO: 1986289 - RNA, 19 nt, Artificial Sequence
  Description of Artificial Sequence: Synthetic oligonucleotide
cuaggcgggccuucuugcu

SEQ ID NO: 1986290 - RNA, 19 nt, Artificial Sequence
  Description of Artificial Sequence: Synthetic oligonucleotide
cgggaguaaguugcaggcg

SEQ ID NO: 1986291 - RNA, 19 nt, Artificial Sequence
  Description of Artificial Sequence: Synthetic oligonucleotide
gggucaugaugcgcugcgc

SEQ ID NO: 1986292 - RNA, 19 nt, Artificial Sequence
  Description of Artificial Sequence: Synthetic oligonucleotide
cagccggcccuggccacgg

SEQ ID NO: 1986293 - RNA, 19 nt, Artificial Sequence
  Description of Artificial Sequence: Synthetic oligonucleotide
ucggccugugcgggaguaa

SEQ ID NO: 1986294 - RNA, 19 nt, Artificial Sequence
  Description of Artificial Sequence: Synthetic oligonucleotide
cgggccaagaaaguccgac

SEQ ID NO: 1986295 - RNA, 19 nt, Artificial Sequence
  Description of Artificial Sequence: Synthetic oligonucleotide
ggugcaggcgaggguccag

SEQ ID NO: 1986296 - RNA, 19 nt, Artificial Sequence
  Description of Artificial Sequence: Synthetic oligonucleotide
acgcaaccacgagcgcuug

SEQ ID NO: 1986297 - RNA, 19 nt, Artificial Sequence
  Description of Artificial Sequence: Synthetic oligonucleotide
agcaccgcgucugccccau

SEQ ID NO: 1986298 - RNA, 19 nt, Artificial Sequence
  Description of Artificial Sequence: Synthetic oligonucleotide
gcccgaagcgcguacgcua

SEQ ID NO: 1986299 - RNA, 19 nt, Artificial Sequence
  Description of Artificial Sequence: Synthetic oligonucleotide
cacaagcgugccacuugua

SEQ ID NO: 1986300 - RNA, 19 nt, Artificial Sequence
  Description of Artificial Sequence: Synthetic oligonucleotide
cgcguacgcuagugaaacg

SEQ ID NO: 1986301 - RNA, 19 nt, Artificial Sequence
  Description of Artificial Sequence: Synthetic oligonucleotide
ccggcgucagcgccgucgc

SEQ ID NO: 1986302 - RNA, 19 nt, Artificial Sequence
  Description of Artificial Sequence: Synthetic oligonucleotide
gucgcucggguggcugcug

SEQ ID NO: 1986303 - RNA, 19 nt, Artificial Sequence
  Description of Artificial Sequence: Synthetic oligonucleotide
ggccucgcagcgcuuccuc

SEQ ID NO: 1986304 - RNA, 19 nt, Artificial Sequence
  Description of Artificial Sequence: Synthetic oligonucleotide
ccgcucuccccgcagcuuc

SEQ ID NO: 1986305 - RNA, 19 nt, Artificial Sequence
  Description of Artificial Sequence: Synthetic oligonucleotide
gcgcuugcacaagcgugcc

SEQ ID NO: 1986306 - RNA, 19 nt, Artificial Sequence
  Description of Artificial Sequence: Synthetic oligonucleotide
cgaacucgggcugcugagc

SEQ ID NO: 1986307 - RNA, 19 nt, Artificial Sequence
  Description of Artificial Sequence: Synthetic oligonucleotide
cgaagcgcguacgcuagug

SEQ ID NO: 1986308 - RNA, 19 nt, Artificial Sequence
  Description of Artificial Sequence: Synthetic oligonucleotide
ggccuugcacgggcagccg

SEQ ID NO: 1986309 - RNA, 19 nt, Artificial Sequence
  Description of Artificial Sequence: Synthetic oligonucleotide
cgacgucuccucccuuucc

SEQ ID NO: 1986310 - RNA, 19 nt, Artificial Sequence
  Description of Artificial Sequence: Synthetic oligonucleotide
gcggcucggacuccucaga

SEQ ID NO: 1986311 - RNA, 19 nt, Artificial Sequence
  Description of Artificial Sequence: Synthetic oligonucleotide
ccgacgucuccucccuuuc

SEQ ID NO: 1986312 - RNA, 19 nt, Artificial Sequence
  Description of Artificial Sequence: Synthetic oligonucleotide
cuggccacgggugugcguu

SEQ ID NO: 1986313 - RNA, 19 nt, Artificial Sequence
  Description of Artificial Sequence: Synthetic oligonucleotide
ggcgggaggcgggucgcag

SEQ ID NO: 1986314 - RNA, 19 nt, Artificial Sequence
  Description of Artificial Sequence: Synthetic oligonucleotide
agcccggcgucagcgccgu

SEQ ID NO: 1986315 - RNA, 19 nt, Artificial Sequence
  Description of Artificial Sequence: Synthetic oligonucleotide
ccggcgacgcggcucggac

SEQ ID NO: 1986316 - RNA, 19 nt, Artificial Sequence
  Description of Artificial Sequence: Synthetic oligonucleotide
cccacgcaaggcagcagga

SEQ ID NO: 1986317 - RNA, 19 nt, Artificial Sequence
  Description of Artificial Sequence: Synthetic oligonucleotide
gacgcggcucggacuccuc

SEQ ID NO: 1986318 - RNA, 19 nt, Artificial Sequence
  Description of Artificial Sequence: Synthetic oligonucleotide
ggaguaaguugcaggcgau

SEQ ID NO: 1986319 - RNA, 19 nt, Artificial Sequence
  Description of Artificial Sequence: Synthetic oligonucleotide
cccgccgaccuuccccagc

SEQ ID NO: 1986320 - RNA, 19 nt, Artificial Sequence
  Description of Artificial Sequence: Synthetic oligonucleotide
guagagcucccgagcgcua

SEQ ID NO: 1986321 - RNA, 19 nt, Artificial Sequence
  Description of Artificial Sequence: Synthetic oligonucleotide
cugccccaugacgcaacca

SEQ ID NO: 1986322 - RNA, 19 nt, Artificial Sequence
  Description of Artificial Sequence: Synthetic oligonucleotide
ggcgcccgcgcccucagcu

SEQ ID NO: 1986323 - RNA, 19 nt, Artificial Sequence
  Description of Artificial Sequence: Synthetic oligonucleotide
guagggcccgaagcgcgua

SEQ ID NO: 1986324 - RNA, 19 nt, Artificial Sequence
  Description of Artificial Sequence: Synthetic oligonucleotide
guccgacccugagauucaa

SEQ ID NO: 1986325 - RNA, 19 nt, Artificial Sequence
  Description of Artificial Sequence: Synthetic oligonucleotide
gcaugcgagagugguacau

SEQ ID NO: 1986326 - RNA, 19 nt, Artificial Sequence
  Description of Artificial Sequence: Synthetic oligonucleotide
cguuuucggcuccggcgac

SEQ ID NO: 1986327 - RNA, 19 nt, Artificial Sequence
  Description of Artificial Sequence: Synthetic oligonucleotide
cucuggcgggaggcggguc

SEQ ID NO: 1986328 - RNA, 19 nt, Artificial Sequence
  Description of Artificial Sequence: Synthetic oligonucleotide
gccucuaccuuggcugaaa

SEQ ID NO: 1986329 - RNA, 19 nt, Artificial Sequence
  Description of Artificial Sequence: Synthetic oligonucleotide
cgcgaacucgggcugcuga

SEQ ID NO: 1986330 - RNA, 19 nt, Artificial Sequence
  Description of Artificial Sequence: Synthetic oligonucleotide
cccucggccugugcgggag

SEQ ID NO: 1986331 - RNA, 19 nt, Artificial Sequence
  Description of Artificial Sequence: Synthetic oligonucleotide
cggccugugcgggaguaag

SEQ ID NO: 1986332 - RNA, 19 nt, Artificial Sequence
  Description of Artificial Sequence: Synthetic oligonucleotide
ccacgagcgcuugcacaag

SEQ ID NO: 1986333 - RNA, 19 nt, Artificial Sequence
  Description of Artificial Sequence: Synthetic oligonucleotide
gccacgggugugcguuuuc

SEQ ID NO: 1986334 - RNA, 19 nt, Artificial Sequence
  Description of Artificial Sequence: Synthetic oligonucleotide
cucggccugugcgggagua

SEQ ID NO: 1986335 - RNA, 19 nt, Artificial Sequence
  Description of Artificial Sequence: Synthetic oligonucleotide
gcgcuugcggcuggcucug

SEQ ID NO: 1986336 - RNA, 19 nt, Artificial Sequence
  Description of Artificial Sequence: Synthetic oligonucleotide
ggcgaggguccagagugcu

SEQ ID NO: 1986337 - RNA, 19 nt, Artificial Sequence
  Description of Artificial Sequence: Synthetic oligonucleotide
ggggcgccgcucuccccgc

SEQ ID NO: 1986338 - RNA, 19 nt, Artificial Sequence
  Description of Artificial Sequence: Synthetic oligonucleotide
gccacuuguagggcccgaa

SEQ ID NO: 1986339 - RNA, 19 nt, Artificial Sequence
  Description of Artificial Sequence: Synthetic oligonucleotide
ggcgggucgcagggcgcgg

SEQ ID NO: 1986340 - RNA, 19 nt, Artificial Sequence
  Description of Artificial Sequence: Synthetic oligonucleotide
ggacgcgggcgaggcuagg

SEQ ID NO: 1986341 - RNA, 19 nt, Artificial Sequence
  Description of Artificial Sequence: Synthetic oligonucleotide
cgcuacgcaagacgaggga

SEQ ID NO: 1986342 - RNA, 19 nt, Artificial Sequence
  Description of Artificial Sequence: Synthetic oligonucleotide
gccugugcgggaguaaguu

SEQ ID NO: 1986343 - RNA, 19 nt, Artificial Sequence
  Description of Artificial Sequence: Synthetic oligonucleotide
ggcgaucggcgaccuccga

SEQ ID NO: 1986344 - RNA, 19 nt, Artificial Sequence
  Description of Artificial Sequence: Synthetic oligonucleotide
gcgggccuucuugcuuggg

SEQ ID NO: 1986345 - RNA, 19 nt, Artificial Sequence
  Description of Artificial Sequence: Synthetic oligonucleotide
cgggugugcguuuucggcu

SEQ ID NO: 1986346 - RNA, 19 nt, Artificial Sequence
  Description of Artificial Sequence: Synthetic oligonucleotide
cagggcggguccacacccu

SEQ ID NO: 1986347 - RNA, 19 nt, Artificial Sequence
  Description of Artificial Sequence: Synthetic oligonucleotide
cgacccugagauucaagau

SEQ ID NO: 1986348 - RNA, 19 nt, Artificial Sequence
  Description of Artificial Sequence: Synthetic oligonucleotide
gccucgcagcgcuuccucu

SEQ ID NO: 1986349 - RNA, 19 nt, Artificial Sequence
  Description of Artificial Sequence: Synthetic oligonucleotide
cccgagcgcuacgcaagac

SEQ ID NO: 1986350 - RNA, 19 nt, Artificial Sequence
  Description of Artificial Sequence: Synthetic oligonucleotide
cuccggcgacgcggcucgg

SEQ ID NO: 1986351 - RNA, 19 nt, Artificial Sequence
  Description of Artificial Sequence: Synthetic oligonucleotide
ccaccggucccgccgaccu

SEQ ID NO: 1986352 - RNA, 19 nt, Artificial Sequence
  Description of Artificial Sequence: Synthetic oligonucleotide
gcgccgucgcucggguggc

SEQ ID NO: 1986353 - RNA, 19 nt, Artificial Sequence
  Description of Artificial Sequence: Synthetic oligonucleotide
gcaggcgaucggcgaccuc

SEQ ID NO: 1986354 - RNA, 19 nt, Artificial Sequence
  Description of Artificial Sequence: Synthetic oligonucleotide
cgcgggcgaggcuagggaa

SEQ ID NO: 1986355 - RNA, 19 nt, Artificial Sequence
  Description of Artificial Sequence: Synthetic oligonucleotide
ggccugugcgggaguaagu

SEQ ID NO: 1986356 - RNA, 19 nt, Artificial Sequence
  Description of Artificial Sequence: Synthetic oligonucleotide
cgccgaccuuccccagccg

SEQ ID NO: 1986357 - RNA, 19 nt, Artificial Sequence
  Description of Artificial Sequence: Synthetic oligonucleotide
gcgacgcggcucggacucc

SEQ ID NO: 1986358 - RNA, 19 nt, Artificial Sequence
  Description of Artificial Sequence: Synthetic oligonucleotide
gccggcccuggccacgggu

SEQ ID NO: 1986359 - RNA, 19 nt, Artificial Sequence
  Description of Artificial Sequence: Synthetic oligonucleotide
ccucgcagcgcuuccucuu

SEQ ID NO: 1986360 - RNA, 19 nt, Artificial Sequence
  Description of Artificial Sequence: Synthetic oligonucleotide
ccgggcggcaggcuggcgu

SEQ ID NO: 1986361 - RNA, 19 nt, Artificial Sequence
  Description of Artificial Sequence: Synthetic oligonucleotide
gcaccgcgucugccccaug

SEQ ID NO: 1986362 - RNA, 19 nt, Artificial Sequence
  Description of Artificial Sequence: Synthetic oligonucleotide
ccccggcgcuugcggcugg

SEQ ID NO: 1986363 - RNA, 19 nt, Artificial Sequence
  Description of Artificial Sequence: Synthetic oligonucleotide
gggcgccgcucuccccgca

SEQ ID NO: 1986364 - RNA, 19 nt, Artificial Sequence
  Description of Artificial Sequence: Synthetic oligonucleotide
cuccgacgucuccucccuu

SEQ ID NO: 1986365 - RNA, 19 nt, Artificial Sequence
  Description of Artificial Sequence: Synthetic oligonucleotide
gcucuggcgggaggcgggu

SEQ ID NO: 1986366 - RNA, 19 nt, Artificial Sequence
  Description of Artificial Sequence: Synthetic oligonucleotide
cgucugccccaugacgcaa

SEQ ID NO: 1986367 - RNA, 19 nt, Artificial Sequence
  Description of Artificial Sequence: Synthetic oligonucleotide
caccggucccgccgaccuu

SEQ ID NO: 1986368 - RNA, 19 nt, Artificial Sequence
  Description of Artificial Sequence: Synthetic oligonucleotide
ccgaagcgcguacgcuagu

SEQ ID NO: 1986369 - RNA, 19 nt, Artificial Sequence
  Description of Artificial Sequence: Synthetic oligonucleotide
ccucuucuaggcgggccuu

SEQ ID NO: 1986370 - RNA, 19 nt, Artificial Sequence
  Description of Artificial Sequence: Synthetic oligonucleotide
cgacgcggcucggacuccu

SEQ ID NO: 1986371 - RNA, 19 nt, Artificial Sequence
  Description of Artificial Sequence: Synthetic oligonucleotide
ccggcgcuugcggcuggcu

SEQ ID NO: 1986372 - RNA, 19 nt, Artificial Sequence
  Description of Artificial Sequence: Synthetic oligonucleotide
cggcgucagcgccgucgcu

SEQ ID NO: 1986373 - RNA, 19 nt, Artificial Sequence
  Description of Artificial Sequence: Synthetic oligonucleotide
auugacacgaucuucaccg

SEQ ID NO: 1986374 - RNA, 19 nt, Artificial Sequence
  Description of Artificial Sequence: Synthetic oligonucleotide
ugaacuauaaaucaccgac

SEQ ID NO: 1986375 - RNA, 19 nt, Artificial Sequence
  Description of Artificial Sequence: Synthetic oligonucleotide
ucaaaaucuacacacaaca

SEQ ID NO: 1986376 - RNA, 19 nt, Artificial Sequence
  Description of Artificial Sequence: Synthetic oligonucleotide
aaaaucuacacacaacaca

SEQ ID NO: 1986377 - RNA, 19 nt, Artificial Sequence
  Description of Artificial Sequence: Synthetic oligonucleotide
uuuuaucuaucucuagucg

SEQ ID NO: 1986378 - RNA, 19 nt, Artificial Sequence
  Description of Artificial Sequence: Synthetic oligonucleotide
uuuaucuaucucuagucgg

SEQ ID NO: 1986379 - RNA, 19 nt, Artificial Sequence
  Description of Artificial Sequence: Synthetic oligonucleotide
gaagcgaugauccugggcc

SEQ ID NO: 1986380 - RNA, 19 nt, Artificial Sequence
  Description of Artificial Sequence: Synthetic oligonucleotide
auugacgagaccccuaagc

SEQ ID NO: 1986381 - RNA, 19 nt, Artificial Sequence
  Description of Artificial Sequence: Synthetic oligonucleotide
caugauaugauugauuugc

SEQ ID NO: 1986382 - RNA, 19 nt, Artificial Sequence
  Description of Artificial Sequence: Synthetic oligonucleotide
uuuuauacaccaccugggg

SEQ ID NO: 1986383 - RNA, 19 nt, Artificial Sequence
  Description of Artificial Sequence: Synthetic oligonucleotide
aaccccauauuugauaagc

SEQ ID NO: 1986384 - RNA, 19 nt, Artificial Sequence
  Description of Artificial Sequence: Synthetic oligonucleotide
ucugacugaugcuugaagg

SEQ ID NO: 1986385 - RNA, 19 nt, Artificial Sequence
  Description of Artificial Sequence: Synthetic oligonucleotide
uauuugauaagcuuuccgu

SEQ ID NO: 1986386 - RNA, 19 nt, Artificial Sequence
  Description of Artificial Sequence: Synthetic oligonucleotide
auuugauaagcuuuccguc

SEQ ID NO: 1986387 - RNA, 19 nt, Artificial Sequence
  Description of Artificial Sequence: Synthetic oligonucleotide
uugacgagaccccuaagcg

SEQ ID NO: 1986388 - RNA, 19 nt, Artificial Sequence
  Description of Artificial Sequence: Synthetic oligonucleotide
auuuuguucaguuuccgug

SEQ ID NO: 1986389 - RNA, 19 nt, Artificial Sequence
  Description of Artificial Sequence: Synthetic oligonucleotide
aaaucaccgacuucuucac

SEQ ID NO: 1986390 - RNA, 19 nt, Artificial Sequence
  Description of Artificial Sequence: Synthetic oligonucleotide
auauuugauaagcuuuccg

SEQ ID NO: 1986391 - RNA, 19 nt, Artificial Sequence
  Description of Artificial Sequence: Synthetic oligonucleotide
cugacaauugacgagaccc

SEQ ID NO: 1986392 - RNA, 19 nt, Artificial Sequence
  Description of Artificial Sequence: Synthetic oligonucleotide
ugaacuguccuucugggcu

SEQ ID NO: 1986393 - RNA, 19 nt, Artificial Sequence
  Description of Artificial Sequence: Synthetic oligonucleotide
aauauacagauuauuccag

SEQ ID NO: 1986394 - RNA, 19 nt, Artificial Sequence
  Description of Artificial Sequence: Synthetic oligonucleotide
ucggaaaugggcuacguug

SEQ ID NO: 1986395 - RNA, 19 nt, Artificial Sequence
  Description of Artificial Sequence: Synthetic oligonucleotide
uuugauaagcuuuccguca

SEQ ID NO: 1986396 - RNA, 19 nt, Artificial Sequence
  Description of Artificial Sequence: Synthetic oligonucleotide
uuuccgucacacaugauca

SEQ ID NO: 1986397 - RNA, 19 nt, Artificial Sequence
  Description of Artificial Sequence: Synthetic oligonucleotide
uguaauauguucccauaga

SEQ ID NO: 1986398 - RNA, 19 nt, Artificial Sequence
  Description of Artificial Sequence: Synthetic oligonucleotide
uuaucuaucucuagucggc

SEQ ID NO: 1986399 - RNA, 19 nt, Artificial Sequence
  Description of Artificial Sequence: Synthetic oligonucleotide
agcaauauacagauuauuc

SEQ ID NO: 1986400 - RNA, 19 nt, Artificial Sequence
  Description of Artificial Sequence: Synthetic oligonucleotide
ucuacacacaacacaaaca

SEQ ID NO: 1986401 - RNA, 19 nt, Artificial Sequence
  Description of Artificial Sequence: Synthetic oligonucleotide
uuuccgugaacuauaaauc

SEQ ID NO: 1986402 - RNA, 19 nt, Artificial Sequence
  Description of Artificial Sequence: Synthetic oligonucleotide
aagcgucacauucucacuc

SEQ ID NO: 1986403 - RNA, 19 nt, Artificial Sequence
  Description of Artificial Sequence: Synthetic oligonucleotide
uccagggccgaucuaagcg

SEQ ID NO: 1986404 - RNA, 19 nt, Artificial Sequence
  Description of Artificial Sequence: Synthetic oligonucleotide
aaaugggcuacguugggcu

SEQ ID NO: 1986405 - RNA, 19 nt, Artificial Sequence
  Description of Artificial Sequence: Synthetic oligonucleotide
gaaggucugacaauugacg

SEQ ID NO: 1986406 - RNA, 19 nt, Artificial Sequence
  Description of Artificial Sequence: Synthetic oligonucleotide
cucuguuucucccaggagg

SEQ ID NO: 1986407 - RNA, 19 nt, Artificial Sequence
  Description of Artificial Sequence: Synthetic oligonucleotide
cuuuuaucuaucucuaguc

SEQ ID NO: 1986408 - RNA, 19 nt, Artificial Sequence
  Description of Artificial Sequence: Synthetic oligonucleotide
uuuuguucaguuuccguga

SEQ ID NO: 1986409 - RNA, 19 nt, Artificial Sequence
  Description of Artificial Sequence: Synthetic oligonucleotide
agugcuaauaaccccauau

SEQ ID NO: 1986410 - RNA, 19 nt, Artificial Sequence
  Description of Artificial Sequence: Synthetic oligonucleotide
agauuauuccaguucagga

SEQ ID NO: 1986411 - RNA, 19 nt, Artificial Sequence
  Description of Artificial Sequence: Synthetic oligonucleotide
uucuuuucgugccaggaga

SEQ ID NO: 1986412 - RNA, 19 nt, Artificial Sequence
  Description of Artificial Sequence: Synthetic oligonucleotide
ucuugagccacuugcagca

SEQ ID NO: 1986413 - RNA, 19 nt, Artificial Sequence
  Description of Artificial Sequence: Synthetic oligonucleotide
cuaagcgucacauucucac

SEQ ID NO: 1986414 - RNA, 19 nt, Artificial Sequence
  Description of Artificial Sequence: Synthetic oligonucleotide
ucaucaauuagggugccag

SEQ ID NO: 1986415 - RNA, 19 nt, Artificial Sequence
  Description of Artificial Sequence: Synthetic oligonucleotide
accacaucaccacagucgg

SEQ ID NO: 1986416 - RNA, 19 nt, Artificial Sequence
  Description of Artificial Sequence: Synthetic oligonucleotide
auuuuauacaccaccuggg

SEQ ID NO: 1986417 - RNA, 19 nt, Artificial Sequence
  Description of Artificial Sequence: Synthetic oligonucleotide
gagugaacuguccuucugg

SEQ ID NO: 1986418 - RNA, 19 nt, Artificial Sequence
  Description of Artificial Sequence: Synthetic oligonucleotide
uuccgugaacuauaaauca

SEQ ID NO: 1986419 - RNA, 19 nt, Artificial Sequence
  Description of Artificial Sequence: Synthetic oligonucleotide
cauucucacucauugacac

SEQ ID NO: 1986420 - RNA, 19 nt, Artificial Sequence
  Description of Artificial Sequence: Synthetic oligonucleotide
aagcgcaccacaucaccac

SEQ ID NO: 1986421 - RNA, 19 nt, Artificial Sequence
  Description of Artificial Sequence: Synthetic oligonucleotide
ugcuaauaaccccauauuu

SEQ ID NO: 1986422 - RNA, 19 nt, Artificial Sequence
  Description of Artificial Sequence: Synthetic oligonucleotide
aagcgaugauccugggccc

SEQ ID NO: 1986423 - RNA, 19 nt, Artificial Sequence
  Description of Artificial Sequence: Synthetic oligonucleotide
cuuuccgucacacaugauc

SEQ ID NO: 1986424 - RNA, 19 nt, Artificial Sequence
  Description of Artificial Sequence: Synthetic oligonucleotide
ugaaggucugacaauugac

SEQ ID NO: 1986425 - RNA, 19 nt, Artificial Sequence
  Description of Artificial Sequence: Synthetic oligonucleotide
uuauucuggacugaagcga

SEQ ID NO: 1986426 - RNA, 19 nt, Artificial Sequence
  Description of Artificial Sequence: Synthetic oligonucleotide
uuagcugagugaacugucc

SEQ ID NO: 1986427 - RNA, 19 nt, Artificial Sequence
  Description of Artificial Sequence: Synthetic oligonucleotide
ucuucaccggcuuuuggag

SEQ ID NO: 1986428 - RNA, 19 nt, Artificial Sequence
  Description of Artificial Sequence: Synthetic oligonucleotide
cacauucucacucauugac

SEQ ID NO: 1986429 - RNA, 19 nt, Artificial Sequence
  Description of Artificial Sequence: Synthetic oligonucleotide
cucuagucggccuugcugc

SEQ ID NO: 1986430 - RNA, 19 nt, Artificial Sequence
  Description of Artificial Sequence: Synthetic oligonucleotide
uucagguucuuuucgugcc

SEQ ID NO: 1986431 - RNA, 19 nt, Artificial Sequence
  Description of Artificial Sequence: Synthetic oligonucleotide
uucucacucauugacacga

SEQ ID NO: 1986432 - RNA, 19 nt, Artificial Sequence
  Description of Artificial Sequence: Synthetic oligonucleotide
aguacgagagcccagcaau

SEQ ID NO: 1986433 - RNA, 19 nt, Artificial Sequence
  Description of Artificial Sequence: Synthetic oligonucleotide
ucucuagucggccuugcug

SEQ ID NO: 1986434 - RNA, 19 nt, Artificial Sequence
  Description of Artificial Sequence: Synthetic oligonucleotide
uacugugaacaccaagucu

SEQ ID NO: 1986435 - RNA, 19 nt, Artificial Sequence
  Description of Artificial Sequence: Synthetic oligonucleotide
ugacaauugacgagacccc

SEQ ID NO: 1986436 - RNA, 19 nt, Artificial Sequence
  Description of Artificial Sequence: Synthetic oligonucleotide
ugauccugggccccaagag

SEQ ID NO: 1986437 - RNA, 19 nt, Artificial Sequence
  Description of Artificial Sequence: Synthetic oligonucleotide
aaagcacggagccauuuau

SEQ ID NO: 1986438 - RNA, 19 nt, Artificial Sequence
  Description of Artificial Sequence: Synthetic oligonucleotide
aucuaagcgucacauucuc

SEQ ID NO: 1986439 - RNA, 19 nt, Artificial Sequence
  Description of Artificial Sequence: Synthetic oligonucleotide
cuguaauauguucccauag

SEQ ID NO: 1986440 - RNA, 19 nt, Artificial Sequence
  Description of Artificial Sequence: Synthetic oligonucleotide
ucaggaggucaucaauuag

SEQ ID NO: 1986441 - RNA, 19 nt, Artificial Sequence
  Description of Artificial Sequence: Synthetic oligonucleotide
cacauuuuguucaguuucc

SEQ ID NO: 1986442 - RNA, 19 nt, Artificial Sequence
  Description of Artificial Sequence: Synthetic oligonucleotide
auauacagauuauuccagu

SEQ ID NO: 1986443 - RNA, 19 nt, Artificial Sequence
  Description of Artificial Sequence: Synthetic oligonucleotide
uuugcugcuguaagguucu

SEQ ID NO: 1986444 - RNA, 19 nt, Artificial Sequence
  Description of Artificial Sequence: Synthetic oligonucleotide
aaagucaccugaguacgag

SEQ ID NO: 1986445 - RNA, 19 nt, Artificial Sequence
  Description of Artificial Sequence: Synthetic oligonucleotide
acgccgguaggguagaggg

SEQ ID NO: 1986446 - RNA, 19 nt, Artificial Sequence
  Description of Artificial Sequence: Synthetic oligonucleotide
uugauaagcuuuccgucac

SEQ ID NO: 1986447 - RNA, 19 nt, Artificial Sequence
  Description of Artificial Sequence: Synthetic oligonucleotide
uccgugaacuauaaaucac

SEQ ID NO: 1986448 - RNA, 19 nt, Artificial Sequence
  Description of Artificial Sequence: Synthetic oligonucleotide
gucacacaugaucagcggg

SEQ ID NO: 1986449 - RNA, 19 nt, Artificial Sequence
  Description of Artificial Sequence: Synthetic oligonucleotide
uccucggagaagcuuuccg

SEQ ID NO: 1986450 - RNA, 19 nt, Artificial Sequence
  Description of Artificial Sequence: Synthetic oligonucleotide
uuuggaggcguccagcaau

SEQ ID NO: 1986451 - RNA, 19 nt, Artificial Sequence
  Description of Artificial Sequence: Synthetic oligonucleotide
ugcgaaagucaccugagua

SEQ ID NO: 1986452 - RNA, 19 nt, Artificial Sequence
  Description of Artificial Sequence: Synthetic oligonucleotide
uuccucgccaaucaccaug

SEQ ID NO: 1986453 - RNA, 19 nt, Artificial Sequence
  Description of Artificial Sequence: Synthetic oligonucleotide
cucggagaagcuuuccggg

SEQ ID NO: 1986454 - RNA, 19 nt, Artificial Sequence
  Description of Artificial Sequence: Synthetic oligonucleotide
agcaaucucuaugaagagg

SEQ ID NO: 1986455 - RNA, 19 nt, Artificial Sequence
  Description of Artificial Sequence: Synthetic oligonucleotide
guuuccgugaacuauaaau

SEQ ID NO: 1986456 - RNA, 19 nt, Artificial Sequence
  Description of Artificial Sequence: Synthetic oligonucleotide
agggucaucuacugugaac

SEQ ID NO: 1986457 - RNA, 19 nt, Artificial Sequence
  Description of Artificial Sequence: Synthetic oligonucleotide
uucaccggcuuuuggaggc

SEQ ID NO: 1986458 - RNA, 19 nt, Artificial Sequence
  Description of Artificial Sequence: Synthetic oligonucleotide
uuucgugccaggagacagg

SEQ ID NO: 1986459 - RNA, 19 nt, Artificial Sequence
  Description of Artificial Sequence: Synthetic oligonucleotide
uacguugggcuucacgaug

SEQ ID NO: 1986460 - RNA, 19 nt, Artificial Sequence
  Description of Artificial Sequence: Synthetic oligonucleotide
aggaaggaguaguggcucc

SEQ ID NO: 1986461 - RNA, 19 nt, Artificial Sequence
  Description of Artificial Sequence: Synthetic oligonucleotide
cagauuauuccaguucagg

SEQ ID NO: 1986462 - RNA, 19 nt, Artificial Sequence
  Description of Artificial Sequence: Synthetic oligonucleotide
aggucugacaauugacgag

SEQ ID NO: 1986463 - RNA, 19 nt, Artificial Sequence
  Description of Artificial Sequence: Synthetic oligonucleotide
ugacgagaccccuaagcgc

SEQ ID NO: 1986464 - RNA, 19 nt, Artificial Sequence
  Description of Artificial Sequence: Synthetic oligonucleotide
uagagcucucggaaauggg

SEQ ID NO: 1986465 - RNA, 19 nt, Artificial Sequence
  Description of Artificial Sequence: Synthetic oligonucleotide
ucuuuucgugccaggagac

SEQ ID NO: 1986466 - RNA, 19 nt, Artificial Sequence
  Description of Artificial Sequence: Synthetic oligonucleotide
aucaauuagggugccagug

SEQ ID NO: 1986467 - RNA, 19 nt, Artificial Sequence
  Description of Artificial Sequence: Synthetic oligonucleotide
ucugacaauugacgagacc

SEQ ID NO: 1986468 - RNA, 19 nt, Artificial Sequence
  Description of Artificial Sequence: Synthetic oligonucleotide
augcuugaaggucugacaa

SEQ ID NO: 1986469 - RNA, 19 nt, Artificial Sequence
  Description of Artificial Sequence: Synthetic oligonucleotide
aucuacugugaacaccaag

SEQ ID NO: 1986470 - RNA, 19 nt, Artificial Sequence
  Description of Artificial Sequence: Synthetic oligonucleotide
aauugacgagaccccuaag

SEQ ID NO: 1986471 - RNA, 19 nt, Artificial Sequence
  Description of Artificial Sequence: Synthetic oligonucleotide
caugcgaaagucaccugag

SEQ ID NO: 1986472 - RNA, 19 nt, Artificial Sequence
  Description of Artificial Sequence: Synthetic oligonucleotide
ucuuccucggagaagcuuu

SEQ ID NO: 1986473 - RNA, 19 nt, Artificial Sequence
  Description of Artificial Sequence: Synthetic oligonucleotide
cuaagcgcaccacaucacc

SEQ ID NO: 1986474 - RNA, 19 nt, Artificial Sequence
  Description of Artificial Sequence: Synthetic oligonucleotide
auuagcugagugaacuguc

SEQ ID NO: 1986475 - RNA, 19 nt, Artificial Sequence
  Description of Artificial Sequence: Synthetic oligonucleotide
acugggucccgccuggcgg

SEQ ID NO: 1986476 - RNA, 19 nt, Artificial Sequence
  Description of Artificial Sequence: Synthetic oligonucleotide
ugagugaacuguccuucug

SEQ ID NO: 1986477 - RNA, 19 nt, Artificial Sequence
  Description of Artificial Sequence: Synthetic oligonucleotide
aguuugaggaaggaguagu

SEQ ID NO: 1986478 - RNA, 19 nt, Artificial Sequence
  Description of Artificial Sequence: Synthetic oligonucleotide
aggccuuuggugcucugac

SEQ ID NO: 1986479 - RNA, 19 nt, Artificial Sequence
  Description of Artificial Sequence: Synthetic oligonucleotide
augauugauuugcugcugu

SEQ ID NO: 1986480 - RNA, 19 nt, Artificial Sequence
  Description of Artificial Sequence: Synthetic oligonucleotide
uccucgccaaucaccaugc

SEQ ID NO: 1986481 - RNA, 19 nt, Artificial Sequence
  Description of Artificial Sequence: Synthetic oligonucleotide
ggugccagugcuaauaacc

SEQ ID NO: 1986482 - RNA, 19 nt, Artificial Sequence
  Description of Artificial Sequence: Synthetic oligonucleotide
uccuguaauauguucccau

SEQ ID NO: 1986483 - RNA, 19 nt, Artificial Sequence
  Description of Artificial Sequence: Synthetic oligonucleotide
cauugacacgaucuucacc

SEQ ID NO: 1986484 - RNA, 19 nt, Artificial Sequence
  Description of Artificial Sequence: Synthetic oligonucleotide
ugcagcaccuacuccgugc

SEQ ID NO: 1986485 - RNA, 19 nt, Artificial Sequence
  Description of Artificial Sequence: Synthetic oligonucleotide
uaugauugauuugcugcug

SEQ ID NO: 1986486 - RNA, 19 nt, Artificial Sequence
  Description of Artificial Sequence: Synthetic oligonucleotide
ugacacgaucuucaccggc

SEQ ID NO: 1986487 - RNA, 19 nt, Artificial Sequence
  Description of Artificial Sequence: Synthetic oligonucleotide
uaauaaccccauauuugau

SEQ ID NO: 1986488 - RNA, 19 nt, Artificial Sequence
  Description of Artificial Sequence: Synthetic oligonucleotide
uuuccagggccgaucuaag

SEQ ID NO: 1986489 - RNA, 19 nt, Artificial Sequence
  Description of Artificial Sequence: Synthetic oligonucleotide
ucucuguuucucccaggag

SEQ ID NO: 1986490 - RNA, 19 nt, Artificial Sequence
  Description of Artificial Sequence: Synthetic oligonucleotide
uucgugccaggagacaggg

SEQ ID NO: 1986491 - RNA, 19 nt, Artificial Sequence
  Description of Artificial Sequence: Synthetic oligonucleotide
ucuaagcgucacauucuca

SEQ ID NO: 1986492 - RNA, 19 nt, Artificial Sequence
  Description of Artificial Sequence: Synthetic oligonucleotide
ucuaucucuagucggccuu

SEQ ID NO: 1986493 - RNA, 19 nt, Artificial Sequence
  Description of Artificial Sequence: Synthetic oligonucleotide
uuuguucaguuuccgugaa

SEQ ID NO: 1986494 - RNA, 19 nt, Artificial Sequence
  Description of Artificial Sequence: Synthetic oligonucleotide
gacugaagcgaugauccug

SEQ ID NO: 1986495 - RNA, 19 nt, Artificial Sequence
  Description of Artificial Sequence: Synthetic oligonucleotide
cuucaccggcuuuuggagg

SEQ ID NO: 1986496 - RNA, 19 nt, Artificial Sequence
  Description of Artificial Sequence: Synthetic oligonucleotide
ucugggcaaugucauuagc

SEQ ID NO: 1986497 - RNA, 19 nt, Artificial Sequence
  Description of Artificial Sequence: Synthetic oligonucleotide
uaggguagagggugcagca

SEQ ID NO: 1986498 - RNA, 19 nt, Artificial Sequence
  Description of Artificial Sequence: Synthetic oligonucleotide
uaucuaucucuagucggcc

SEQ ID NO: 1986499 - RNA, 19 nt, Artificial Sequence
  Description of Artificial Sequence: Synthetic oligonucleotide
gacgagaccccuaagcgca

SEQ ID NO: 1986500 - RNA, 19 nt, Artificial Sequence
  Description of Artificial Sequence: Synthetic oligonucleotide
uugacacgaucuucaccgg

SEQ ID NO: 1986501 - RNA, 19 nt, Artificial Sequence
  Description of Artificial Sequence: Synthetic oligonucleotide
ugggcgggcggacacgccg

SEQ ID NO: 1986502 - RNA, 19 nt, Artificial Sequence
  Description of Artificial Sequence: Synthetic oligonucleotide
uagcugagugaacuguccu

SEQ ID NO: 1986503 - RNA, 19 nt, Artificial Sequence
  Description of Artificial Sequence: Synthetic oligonucleotide
ucaccaugcgaaagucacc

SEQ ID NO: 1986504 - RNA, 19 nt, Artificial Sequence
  Description of Artificial Sequence: Synthetic oligonucleotide
uaagcgucacauucucacu

SEQ ID NO: 1986505 - RNA, 19 nt, Artificial Sequence
  Description of Artificial Sequence: Synthetic oligonucleotide
ucuucacaccagcaguaaa

SEQ ID NO: 1986506 - RNA, 19 nt, Artificial Sequence
  Description of Artificial Sequence: Synthetic oligonucleotide
ggccccaagaguuugagga

SEQ ID NO: 1986507 - RNA, 19 nt, Artificial Sequence
  Description of Artificial Sequence: Synthetic oligonucleotide
aggaggguccaugauauga

SEQ ID NO: 1986508 - RNA, 19 nt, Artificial Sequence
  Description of Artificial Sequence: Synthetic oligonucleotide
ugacugaugcuugaagguc

SEQ ID NO: 1986509 - RNA, 19 nt, Artificial Sequence
  Description of Artificial Sequence: Synthetic oligonucleotide
ugauaagcuuuccgucaca

SEQ ID NO: 1986510 - RNA, 19 nt, Artificial Sequence
  Description of Artificial Sequence: Synthetic oligonucleotide
aaucaccgacuucuucaca

SEQ ID NO: 1986511 - RNA, 19 nt, Artificial Sequence
  Description of Artificial Sequence: Synthetic oligonucleotide
auauguucccauagagcuc

SEQ ID NO: 1986512 - RNA, 19 nt, Artificial Sequence
  Description of Artificial Sequence: Synthetic oligonucleotide
ggaguaguggcuccaauuc

SEQ ID NO: 1986513 - RNA, 19 nt, Artificial Sequence
  Description of Artificial Sequence: Synthetic oligonucleotide
ugucauuagcugagugaac

SEQ ID NO: 1986514 - RNA, 19 nt, Artificial Sequence
  Description of Artificial Sequence: Synthetic oligonucleotide
ucaccgacuucuucacacc

SEQ ID NO: 1986515 - RNA, 19 nt, Artificial Sequence
  Description of Artificial Sequence: Synthetic oligonucleotide
ccgugaacuauaaaucacc

SEQ ID NO: 1986516 - RNA, 19 nt, Artificial Sequence
  Description of Artificial Sequence: Synthetic oligonucleotide
aaucaccaugcgaaaguca

SEQ ID NO: 1986517 - RNA, 19 nt, Artificial Sequence
  Description of Artificial Sequence: Synthetic oligonucleotide
guaggcgaaggccaggcuc

SEQ ID NO: 1986518 - RNA, 19 nt, Artificial Sequence
  Description of Artificial Sequence: Synthetic oligonucleotide
auaagcuuuccgucacaca

SEQ ID NO: 1986519 - RNA, 19 nt, Artificial Sequence
  Description of Artificial Sequence: Synthetic oligonucleotide
acgagagcccagcaaucuc

SEQ ID NO: 1986520 - RNA, 19 nt, Artificial Sequence
  Description of Artificial Sequence: Synthetic oligonucleotide
ugaguacgagagcccagca

SEQ ID NO: 1986521 - RNA, 19 nt, Artificial Sequence
  Description of Artificial Sequence: Synthetic oligonucleotide
gugaacuauaaaucaccga

SEQ ID NO: 1986522 - RNA, 19 nt, Artificial Sequence
  Description of Artificial Sequence: Synthetic oligonucleotide
cugaguacgagagcccagc

SEQ ID NO: 1986523 - RNA, 19 nt, Artificial Sequence
  Description of Artificial Sequence: Synthetic oligonucleotide
uuccgucacacaugaucag

SEQ ID NO: 1986524 - RNA, 19 nt, Artificial Sequence
  Description of Artificial Sequence: Synthetic oligonucleotide
guuugaggaaggaguagug

SEQ ID NO: 1986525 - RNA, 19 nt, Artificial Sequence
  Description of Artificial Sequence: Synthetic oligonucleotide
aucuaucucuagucggccu

SEQ ID NO: 1986526 - RNA, 19 nt, Artificial Sequence
  Description of Artificial Sequence: Synthetic oligonucleotide
gauugauuugcugcuguaa

SEQ ID NO: 1986527 - RNA, 19 nt, Artificial Sequence
  Description of Artificial Sequence: Synthetic oligonucleotide
uguaagguucugggcaaug

SEQ ID NO: 1986528 - RNA, 19 nt, Artificial Sequence
  Description of Artificial Sequence: Synthetic oligonucleotide
auuagggugccagugcuaa

SEQ ID NO: 1986529 - RNA, 19 nt, Artificial Sequence
  Description of Artificial Sequence: Synthetic oligonucleotide
aggaguaguggcuccaauu

SEQ ID NO: 1986530 - RNA, 19 nt, Artificial Sequence
  Description of Artificial Sequence: Synthetic oligonucleotide
gugccagugcuaauaaccc

SEQ ID NO: 1986531 - RNA, 19 nt, Artificial Sequence
  Description of Artificial Sequence: Synthetic oligonucleotide
accaagucuagcaugggau

SEQ ID NO: 1986532 - RNA, 19 nt, Artificial Sequence
  Description of Artificial Sequence: Synthetic oligonucleotide
gagggugcagcaccuacuc

SEQ ID NO: 1986533 - RNA, 19 nt, Artificial Sequence
  Description of Artificial Sequence: Synthetic oligonucleotide
guaggguagagggugcagc

SEQ ID NO: 1986534 - RNA, 19 nt, Artificial Sequence
  Description of Artificial Sequence: Synthetic oligonucleotide
agcgucacauucucacuca

SEQ ID NO: 1986535 - RNA, 19 nt, Artificial Sequence
  Description of Artificial Sequence: Synthetic oligonucleotide
aaccacccuuuccacauuu

SEQ ID NO: 1986536 - RNA, 19 nt, Artificial Sequence
  Description of Artificial Sequence: Synthetic oligonucleotide
uacgagagcccagcaaucu

SEQ ID NO: 1986537 - RNA, 19 nt, Artificial Sequence
  Description of Artificial Sequence: Synthetic oligonucleotide
caggauccugcgcaggccc

SEQ ID NO: 1986538 - RNA, 19 nt, Artificial Sequence
  Description of Artificial Sequence: Synthetic oligonucleotide
gugaacuguccuucugggc

SEQ ID NO: 1986539 - RNA, 19 nt, Artificial Sequence
  Description of Artificial Sequence: Synthetic oligonucleotide
ugauugauuugcugcugua

SEQ ID NO: 1986540 - RNA, 19 nt, Artificial Sequence
  Description of Artificial Sequence: Synthetic oligonucleotide
gcauuuuauacaccaccug

SEQ ID NO: 1986541 - RNA, 19 nt, Artificial Sequence
  Description of Artificial Sequence: Synthetic oligonucleotide
gggucaucuacugugaaca

SEQ ID NO: 1986542 - RNA, 19 nt, Artificial Sequence
  Description of Artificial Sequence: Synthetic oligonucleotide
gaagugagccaggauccug

SEQ ID NO: 1986543 - RNA, 19 nt, Artificial Sequence
  Description of Artificial Sequence: Synthetic oligonucleotide
agcgaugauccugggcccc

SEQ ID NO: 1986544 - RNA, 19 nt, Artificial Sequence
  Description of Artificial Sequence: Synthetic oligonucleotide
aagcuuuccgggagcauga

SEQ ID NO: 1986545 - RNA, 19 nt, Artificial Sequence
  Description of Artificial Sequence: Synthetic oligonucleotide
uuccagggccgaucuaagc

SEQ ID NO: 1986546 - RNA, 19 nt, Artificial Sequence
  Description of Artificial Sequence: Synthetic oligonucleotide
aaugggcuacguugggcuu

SEQ ID NO: 1986547 - RNA, 19 nt, Artificial Sequence
  Description of Artificial Sequence: Synthetic oligonucleotide
gaacuauaaaucaccgacu

SEQ ID NO: 1986548 - RNA, 19 nt, Artificial Sequence
  Description of Artificial Sequence: Synthetic oligonucleotide
cgaucuaagcgucacauuc

SEQ ID NO: 1986549 - RNA, 19 nt, Artificial Sequence
  Description of Artificial Sequence: Synthetic oligonucleotide
ggaaaugggcuacguuggg

SEQ ID NO: 1986550 - RNA, 19 nt, Artificial Sequence
  Description of Artificial Sequence: Synthetic oligonucleotide
acacaugaucagcggguug

SEQ ID NO: 1986551 - RNA, 19 nt, Artificial Sequence
  Description of Artificial Sequence: Synthetic oligonucleotide
agguucucggggaagugag

SEQ ID NO: 1986552 - RNA, 19 nt, Artificial Sequence
  Description of Artificial Sequence: Synthetic oligonucleotide
ugcuugaaggucugacaau

SEQ ID NO: 1986553 - RNA, 19 nt, Artificial Sequence
  Description of Artificial Sequence: Synthetic oligonucleotide
gaugauccugggccccaag

SEQ ID NO: 1986554 - RNA, 19 nt, Artificial Sequence
  Description of Artificial Sequence: Synthetic oligonucleotide
ucuagucggccuugcugca

SEQ ID NO: 1986555 - RNA, 19 nt, Artificial Sequence
  Description of Artificial Sequence: Synthetic oligonucleotide
ccuccuguaauauguuccc

SEQ ID NO: 1986556 - RNA, 19 nt, Artificial Sequence
  Description of Artificial Sequence: Synthetic oligonucleotide
cacaugaucagcggguuga

SEQ ID NO: 1986557 - RNA, 19 nt, Artificial Sequence
  Description of Artificial Sequence: Synthetic oligonucleotide
uucucggggaagugagcca

SEQ ID NO: 1986558 - RNA, 19 nt, Artificial Sequence
  Description of Artificial Sequence: Synthetic oligonucleotide
ggucaccgcacucuucagg

SEQ ID NO: 1986559 - RNA, 19 nt, Artificial Sequence
  Description of Artificial Sequence: Synthetic oligonucleotide
ucggccuugcugcauuuua

SEQ ID NO: 1986560 - RNA, 19 nt, Artificial Sequence
  Description of Artificial Sequence: Synthetic oligonucleotide
ccucggagaagcuuuccgg

SEQ ID NO: 1986561 - RNA, 19 nt, Artificial Sequence
  Description of Artificial Sequence: Synthetic oligonucleotide
uagggugccagugcuaaua

SEQ ID NO: 1986562 - RNA, 19 nt, Artificial Sequence
  Description of Artificial Sequence: Synthetic oligonucleotide
agucuagcaugggauucuc

SEQ ID NO: 1986563 - RNA, 19 nt, Artificial Sequence
  Description of Artificial Sequence: Synthetic oligonucleotide
augauaugauugauuugcu

SEQ ID NO: 1986564 - RNA, 19 nt, Artificial Sequence
  Description of Artificial Sequence: Synthetic oligonucleotide
aaggccuuuggugcucuga

SEQ ID NO: 1986565 - RNA, 19 nt, Artificial Sequence
  Description of Artificial Sequence: Synthetic oligonucleotide
uggcgguacacugcggagc

SEQ ID NO: 1986566 - RNA, 19 nt, Artificial Sequence
  Description of Artificial Sequence: Synthetic oligonucleotide
ggucugacaauugacgaga

SEQ ID NO: 1986567 - RNA, 19 nt, Artificial Sequence
  Description of Artificial Sequence: Synthetic oligonucleotide
uuggaggcguccagcaaua

SEQ ID NO: 1986568 - RNA, 19 nt, Artificial Sequence
  Description of Artificial Sequence: Synthetic oligonucleotide
cucacucauugacacgauc

SEQ ID NO: 1986569 - RNA, 19 nt, Artificial Sequence
  Description of Artificial Sequence: Synthetic oligonucleotide
augcgaaagucaccugagu

SEQ ID NO: 1986570 - RNA, 19 nt, Artificial Sequence
  Description of Artificial Sequence: Synthetic oligonucleotide
ggcguccagcaauauacag

SEQ ID NO: 1986571 - RNA, 19 nt, Artificial Sequence
  Description of Artificial Sequence: Synthetic oligonucleotide
ucuggacugaagcgaugau

SEQ ID NO: 1986572 - RNA, 19 nt, Artificial Sequence
  Description of Artificial Sequence: Synthetic oligonucleotide
caauugacgagaccccuaa

SEQ ID NO: 1986573 - RNA, 19 nt, Artificial Sequence
  Description of Artificial Sequence: Synthetic oligonucleotide
cauagagcucucggaaaug

SEQ ID NO: 1986574 - RNA, 19 nt, Artificial Sequence
  Description of Artificial Sequence: Synthetic oligonucleotide
gcuuuuaucuaucucuagu

SEQ ID NO: 1986575 - RNA, 19 nt, Artificial Sequence
  Description of Artificial Sequence: Synthetic oligonucleotide
acgcccgagcucugcagcg

SEQ ID NO: 1986576 - RNA, 19 nt, Artificial Sequence
  Description of Artificial Sequence: Synthetic oligonucleotide
gcaaucucuaugaagaggu

SEQ ID NO: 1986577 - RNA, 19 nt, Artificial Sequence
  Description of Artificial Sequence: Synthetic oligonucleotide
caccugaguacgagagccc

SEQ ID NO: 1986578 - RNA, 19 nt, Artificial Sequence
  Description of Artificial Sequence: Synthetic oligonucleotide
agucggggucuugagccac

SEQ ID NO: 1986579 - RNA, 19 nt, Artificial Sequence
  Description of Artificial Sequence: Synthetic oligonucleotide
gaccccuaagcgcaccaca

SEQ ID NO: 1986580 - RNA, 19 nt, Artificial Sequence
  Description of Artificial Sequence: Synthetic oligonucleotide
ggguccaugauaugauuga

SEQ ID NO: 1986581 - RNA, 19 nt, Artificial Sequence
  Description of Artificial Sequence: Synthetic oligonucleotide
cggaaaugggcuacguugg

SEQ ID NO: 1986582 - RNA, 19 nt, Artificial Sequence
  Description of Artificial Sequence: Synthetic oligonucleotide
gaguacgagagcccagcaa

SEQ ID NO: 1986583 - RNA, 19 nt, Artificial Sequence
  Description of Artificial Sequence: Synthetic oligonucleotide
gucaaccacccuuuccaca

SEQ ID NO: 1986584 - RNA, 19 nt, Artificial Sequence
  Description of Artificial Sequence: Synthetic oligonucleotide
cuggcgguacacugcggag

SEQ ID NO: 1986585 - RNA, 19 nt, Artificial Sequence
  Description of Artificial Sequence: Synthetic oligonucleotide
gaguaguggcuccaauucu

SEQ ID NO: 1986586 - RNA, 19 nt, Artificial Sequence
  Description of Artificial Sequence: Synthetic oligonucleotide
cugacugaugcuugaaggu

SEQ ID NO: 1986587 - RNA, 19 nt, Artificial Sequence
  Description of Artificial Sequence: Synthetic oligonucleotide
ggcuacguugggcuucacg

SEQ ID NO: 1986588 - RNA, 19 nt, Artificial Sequence
  Description of Artificial Sequence: Synthetic oligonucleotide
ggagccguaggcgaaggcc

SEQ ID NO: 1986589 - RNA, 19 nt, Artificial Sequence
  Description of Artificial Sequence: Synthetic oligonucleotide
agcaugggauucuccugcu

SEQ ID NO: 1986590 - RNA, 19 nt, Artificial Sequence
  Description of Artificial Sequence: Synthetic oligonucleotide
gaucuaagcgucacauucu

SEQ ID NO: 1986591 - RNA, 19 nt, Artificial Sequence
  Description of Artificial Sequence: Synthetic oligonucleotide
agcgcaccacaucaccaca

SEQ ID NO: 1986592 - RNA, 19 nt, Artificial Sequence
  Description of Artificial Sequence: Synthetic oligonucleotide
gucaccgcacucuucaggu

SEQ ID NO: 1986593 - RNA, 19 nt, Artificial Sequence
  Description of Artificial Sequence: Synthetic oligonucleotide
cucgccaaucaccaugcga

SEQ ID NO: 1986594 - RNA, 19 nt, Artificial Sequence
  Description of Artificial Sequence: Synthetic oligonucleotide
gagccguaggcgaaggcca

SEQ ID NO: 1986595 - RNA, 19 nt, Artificial Sequence
  Description of Artificial Sequence: Synthetic oligonucleotide
uaucucuagucggccuugc

SEQ ID NO: 1986596 - RNA, 19 nt, Artificial Sequence
  Description of Artificial Sequence: Synthetic oligonucleotide
ggcgguacacugcggagcc

SEQ ID NO: 1986597 - RNA, 19 nt, Artificial Sequence
  Description of Artificial Sequence: Synthetic oligonucleotide
ucagguucucggggaagug

SEQ ID NO: 1986598 - RNA, 19 nt, Artificial Sequence
  Description of Artificial Sequence: Synthetic oligonucleotide
ucucacucauugacacgau

SEQ ID NO: 1986599 - RNA, 19 nt, Artificial Sequence
  Description of Artificial Sequence: Synthetic oligonucleotide
cuaucucuagucggccuug

SEQ ID NO: 1986600 - RNA, 19 nt, Artificial Sequence
  Description of Artificial Sequence: Synthetic oligonucleotide
caugaucagcggguugaag

SEQ ID NO: 1986601 - RNA, 19 nt, Artificial Sequence
  Description of Artificial Sequence: Synthetic oligonucleotide
cacgcccgagcucugcagc

SEQ ID NO: 1986602 - RNA, 19 nt, Artificial Sequence
  Description of Artificial Sequence: Synthetic oligonucleotide
cuuccucggagaagcuuuc

SEQ ID NO: 1986603 - RNA, 19 nt, Artificial Sequence
  Description of Artificial Sequence: Synthetic oligonucleotide
gggcaaugucauuagcuga

SEQ ID NO: 1986604 - RNA, 19 nt, Artificial Sequence
  Description of Artificial Sequence: Synthetic oligonucleotide
cauuuuguucaguuuccgu

SEQ ID NO: 1986605 - RNA, 19 nt, Artificial Sequence
  Description of Artificial Sequence: Synthetic oligonucleotide
accaugcgaaagucaccug

SEQ ID NO: 1986606 - RNA, 19 nt, Artificial Sequence
  Description of Artificial Sequence: Synthetic oligonucleotide
aucucuagucggccuugcu

SEQ ID NO: 1986607 - RNA, 19 nt, Artificial Sequence
  Description of Artificial Sequence: Synthetic oligonucleotide
accccauauuugauaagcu

SEQ ID NO: 1986608 - RNA, 19 nt, Artificial Sequence
  Description of Artificial Sequence: Synthetic oligonucleotide
agaccccuaagcgcaccac

SEQ ID NO: 1986609 - RNA, 19 nt, Artificial Sequence
  Description of Artificial Sequence: Synthetic oligonucleotide
gauucuccugcugugcacu

SEQ ID NO: 1986610 - RNA, 19 nt, Artificial Sequence
  Description of Artificial Sequence: Synthetic oligonucleotide
gacaauugacgagaccccu

SEQ ID NO: 1986611 - RNA, 19 nt, Artificial Sequence
  Description of Artificial Sequence: Synthetic oligonucleotide
gauccugcgcaggcccacg

SEQ ID NO: 1986612 - RNA, 19 nt, Artificial Sequence
  Description of Artificial Sequence: Synthetic oligonucleotide
gacacgaucuucaccggcu

SEQ ID NO: 1986613 - RNA, 19 nt, Artificial Sequence
  Description of Artificial Sequence: Synthetic oligonucleotide
ucucggaaaugggcuacgu

SEQ ID NO: 1986614 - RNA, 19 nt, Artificial Sequence
  Description of Artificial Sequence: Synthetic oligonucleotide
cucucggaaaugggcuacg

SEQ ID NO: 1986615 - RNA, 19 nt, Artificial Sequence
  Description of Artificial Sequence: Synthetic oligonucleotide
ucaccggcuuuuggaggcg

SEQ ID NO: 1986616 - RNA, 19 nt, Artificial Sequence
  Description of Artificial Sequence: Synthetic oligonucleotide
gagaccccuaagcgcacca

SEQ ID NO: 1986617 - RNA, 19 nt, Artificial Sequence
  Description of Artificial Sequence: Synthetic oligonucleotide
agccacuugcagcaagguu

SEQ ID NO: 1986618 - RNA, 19 nt, Artificial Sequence
  Description of Artificial Sequence: Synthetic oligonucleotide
agcucucggaaaugggcua

SEQ ID NO: 1986619 - RNA, 19 nt, Artificial Sequence
  Description of Artificial Sequence: Synthetic oligonucleotide
gaccccggcaccaaaguua

SEQ ID NO: 1986620 - RNA, 19 nt, Artificial Sequence
  Description of Artificial Sequence: Synthetic oligonucleotide
gcugagugaacuguccuuc

SEQ ID NO: 1986621 - RNA, 19 nt, Artificial Sequence
  Description of Artificial Sequence: Synthetic oligonucleotide
aucagcggguugaaguaga

SEQ ID NO: 1986622 - RNA, 19 nt, Artificial Sequence
  Description of Artificial Sequence: Synthetic oligonucleotide
agcaagucagggugcuuuu

SEQ ID NO: 1986623 - RNA, 19 nt, Artificial Sequence
  Description of Artificial Sequence: Synthetic oligonucleotide
gccgguaggguagagggug

SEQ ID NO: 1986624 - RNA, 19 nt, Artificial Sequence
  Description of Artificial Sequence: Synthetic oligonucleotide
caugggcgggcggacacgc

SEQ ID NO: 1986625 - RNA, 19 nt, Artificial Sequence
  Description of Artificial Sequence: Synthetic oligonucleotide
cacugggucccgccuggcg

SEQ ID NO: 1986626 - RNA, 19 nt, Artificial Sequence
  Description of Artificial Sequence: Synthetic oligonucleotide
uuccucggagaagcuuucc

SEQ ID NO: 1986627 - RNA, 19 nt, Artificial Sequence
  Description of Artificial Sequence: Synthetic oligonucleotide
agagggugcagcaccuacu

SEQ ID NO: 1986628 - RNA, 19 nt, Artificial Sequence
  Description of Artificial Sequence: Synthetic oligonucleotide
gccaaucaccaugcgaaag

SEQ ID NO: 1986629 - RNA, 19 nt, Artificial Sequence
  Description of Artificial Sequence: Synthetic oligonucleotide
cauuagcugagugaacugu

SEQ ID NO: 1986630 - RNA, 19 nt, Artificial Sequence
  Description of Artificial Sequence: Synthetic oligonucleotide
aagcacggagccauuuauu

SEQ ID NO: 1986631 - RNA, 19 nt, Artificial Sequence
  Description of Artificial Sequence: Synthetic oligonucleotide
ggucaucuacugugaacac

SEQ ID NO: 1986632 - RNA, 19 nt, Artificial Sequence
  Description of Artificial Sequence: Synthetic oligonucleotide
cacgccgguaggguagagg

SEQ ID NO: 1986633 - RNA, 19 nt, Artificial Sequence
  Description of Artificial Sequence: Synthetic oligonucleotide
cccggcaccaaaguuauuc

SEQ ID NO: 1986634 - RNA, 19 nt, Artificial Sequence
  Description of Artificial Sequence: Synthetic oligonucleotide
cagggccgaucuaagcguc

SEQ ID NO: 1986635 - RNA, 19 nt, Artificial Sequence
  Description of Artificial Sequence: Synthetic oligonucleotide
ggagccauuuauucaaaau

SEQ ID NO: 1986636 - RNA, 19 nt, Artificial Sequence
  Description of Artificial Sequence: Synthetic oligonucleotide
caccgacuucuucacacca

SEQ ID NO: 1986637 - RNA, 19 nt, Artificial Sequence
  Description of Artificial Sequence: Synthetic oligonucleotide
ugggcuacguugggcuuca

SEQ ID NO: 1986638 - RNA, 19 nt, Artificial Sequence
  Description of Artificial Sequence: Synthetic oligonucleotide
auccugggccccaagaguu

SEQ ID NO: 1986639 - RNA, 19 nt, Artificial Sequence
  Description of Artificial Sequence: Synthetic oligonucleotide
gucugacaauugacgagac

SEQ ID NO: 1986640 - RNA, 19 nt, Artificial Sequence
  Description of Artificial Sequence: Synthetic oligonucleotide
uuagggugccagugcuaau

SEQ ID NO: 1986641 - RNA, 19 nt, Artificial Sequence
  Description of Artificial Sequence: Synthetic oligonucleotide
gcuucacgauguucaagac

SEQ ID NO: 1986642 - RNA, 19 nt, Artificial Sequence
  Description of Artificial Sequence: Synthetic oligonucleotide
agaccccggcaccaaaguu

SEQ ID NO: 1986643 - RNA, 19 nt, Artificial Sequence
  Description of Artificial Sequence: Synthetic oligonucleotide
uuuccucgccaaucaccau

SEQ ID NO: 1986644 - RNA, 19 nt, Artificial Sequence
  Description of Artificial Sequence: Synthetic oligonucleotide
gugcuaauaaccccauauu

SEQ ID NO: 1986645 - RNA, 19 nt, Artificial Sequence
  Description of Artificial Sequence: Synthetic oligonucleotide
ggacacgccgguaggguag

SEQ ID NO: 1986646 - RNA, 19 nt, Artificial Sequence
  Description of Artificial Sequence: Synthetic oligonucleotide
gucuagcaugggauucucc

SEQ ID NO: 1986647 - RNA, 19 nt, Artificial Sequence
  Description of Artificial Sequence: Synthetic oligonucleotide
cccuaagcgcaccacauca

SEQ ID NO: 1986648 - RNA, 19 nt, Artificial Sequence
  Description of Artificial Sequence: Synthetic oligonucleotide
caccaugcgaaagucaccu

SEQ ID NO: 1986649 - RNA, 19 nt, Artificial Sequence
  Description of Artificial Sequence: Synthetic oligonucleotide
guacgagagcccagcaauc

SEQ ID NO: 1986650 - RNA, 19 nt, Artificial Sequence
  Description of Artificial Sequence: Synthetic oligonucleotide
acaauugacgagaccccua

SEQ ID NO: 1986651 - RNA, 19 nt, Artificial Sequence
  Description of Artificial Sequence: Synthetic oligonucleotide
gccaggauccugcgcaggc

SEQ ID NO: 1986652 - RNA, 19 nt, Artificial Sequence
  Description of Artificial Sequence: Synthetic oligonucleotide
caguuuccgugaacuauaa

SEQ ID NO: 1986653 - RNA, 19 nt, Artificial Sequence
  Description of Artificial Sequence: Synthetic oligonucleotide
caggcggcggucaccgcac

SEQ ID NO: 1986654 - RNA, 19 nt, Artificial Sequence
  Description of Artificial Sequence: Synthetic oligonucleotide
agagcccagcaaucucuau

SEQ ID NO: 1986655 - RNA, 19 nt, Artificial Sequence
  Description of Artificial Sequence: Synthetic oligonucleotide
gaaggaguaguggcuccaa

SEQ ID NO: 1986656 - RNA, 19 nt, Artificial Sequence
  Description of Artificial Sequence: Synthetic oligonucleotide
ccuaagcgcaccacaucac

SEQ ID NO: 1986657 - RNA, 19 nt, Artificial Sequence
  Description of Artificial Sequence: Synthetic oligonucleotide
cagcaagguuucuuccaca

SEQ ID NO: 1986658 - RNA, 19 nt, Artificial Sequence
  Description of Artificial Sequence: Synthetic oligonucleotide
cuuuucgugccaggagaca

SEQ ID NO: 1986659 - RNA, 19 nt, Artificial Sequence
  Description of Artificial Sequence: Synthetic oligonucleotide
gcguccagcaauauacaga

SEQ ID NO: 1986660 - RNA, 19 nt, Artificial Sequence
  Description of Artificial Sequence: Synthetic oligonucleotide
caucaauuagggugccagu

SEQ ID NO: 1986661 - RNA, 19 nt, Artificial Sequence
  Description of Artificial Sequence: Synthetic oligonucleotide
ccccaagaguuugaggaag

SEQ ID NO: 1986662 - RNA, 19 nt, Artificial Sequence
  Description of Artificial Sequence: Synthetic oligonucleotide
uccugggccccaagaguuu

SEQ ID NO: 1986663 - RNA, 19 nt, Artificial Sequence
  Description of Artificial Sequence: Synthetic oligonucleotide
cagguucucggggaaguga

SEQ ID NO: 1986664 - RNA, 19 nt, Artificial Sequence
  Description of Artificial Sequence: Synthetic oligonucleotide
ucgugccaggagacagggu

SEQ ID NO: 1986665 - RNA, 19 nt, Artificial Sequence
  Description of Artificial Sequence: Synthetic oligonucleotide
ccugaguacgagagcccag

SEQ ID NO: 1986666 - RNA, 19 nt, Artificial Sequence
  Description of Artificial Sequence: Synthetic oligonucleotide
caggaggguccaugauaug

SEQ ID NO: 1986667 - RNA, 19 nt, Artificial Sequence
  Description of Artificial Sequence: Synthetic oligonucleotide
gaacuguccuucugggcuu

SEQ ID NO: 1986668 - RNA, 19 nt, Artificial Sequence
  Description of Artificial Sequence: Synthetic oligonucleotide
gccacuugcagcaagguuu

SEQ ID NO: 1986669 - RNA, 19 nt, Artificial Sequence
  Description of Artificial Sequence: Synthetic oligonucleotide
ucaccgcacucuucagguu

SEQ ID NO: 1986670 - RNA, 19 nt, Artificial Sequence
  Description of Artificial Sequence: Synthetic oligonucleotide
acgagaccccuaagcgcac

SEQ ID NO: 1986671 - RNA, 19 nt, Artificial Sequence
  Description of Artificial Sequence: Synthetic oligonucleotide
accccggcaccaaaguuau

SEQ ID NO: 1986672 - RNA, 19 nt, Artificial Sequence
  Description of Artificial Sequence: Synthetic oligonucleotide
gugccaggagacaggguca

SEQ ID NO: 1986673 - RNA, 19 nt, Artificial Sequence
  Description of Artificial Sequence: Synthetic oligonucleotide
cuccuguaauauguuccca

SEQ ID NO: 1986674 - RNA, 19 nt, Artificial Sequence
  Description of Artificial Sequence: Synthetic oligonucleotide
ggguugaaguagaccccgg

SEQ ID NO: 1986675 - RNA, 19 nt, Artificial Sequence
  Description of Artificial Sequence: Synthetic oligonucleotide
cggagaagcuuuccgggag

SEQ ID NO: 1986676 - RNA, 19 nt, Artificial Sequence
  Description of Artificial Sequence: Synthetic oligonucleotide
aggcguccagcaauauaca

SEQ ID NO: 1986677 - RNA, 19 nt, Artificial Sequence
  Description of Artificial Sequence: Synthetic oligonucleotide
accggcuuuuggaggcguc

SEQ ID NO: 1986678 - RNA, 19 nt, Artificial Sequence
  Description of Artificial Sequence: Synthetic oligonucleotide
gcaugggauucuccugcug

SEQ ID NO: 1986679 - RNA, 19 nt, Artificial Sequence
  Description of Artificial Sequence: Synthetic oligonucleotide
agaagcuuuccgggagcau

SEQ ID NO: 1986680 - RNA, 19 nt, Artificial Sequence
  Description of Artificial Sequence: Synthetic oligonucleotide
cugagugaacuguccuucu

SEQ ID NO: 1986681 - RNA, 19 nt, Artificial Sequence
  Description of Artificial Sequence: Synthetic oligonucleotide
gcggguugaaguagacccc

SEQ ID NO: 1986682 - RNA, 19 nt, Artificial Sequence
  Description of Artificial Sequence: Synthetic oligonucleotide
ggcggacacgccgguaggg

SEQ ID NO: 1986683 - RNA, 19 nt, Artificial Sequence
  Description of Artificial Sequence: Synthetic oligonucleotide
cuacguugggcuucacgau

SEQ ID NO: 1986684 - RNA, 19 nt, Artificial Sequence
  Description of Artificial Sequence: Synthetic oligonucleotide
ccacaucaccacagucggg

SEQ ID NO: 1986685 - RNA, 19 nt, Artificial Sequence
  Description of Artificial Sequence: Synthetic oligonucleotide
gggcggacacgccgguagg

SEQ ID NO: 1986686 - RNA, 19 nt, Artificial Sequence
  Description of Artificial Sequence: Synthetic oligonucleotide
agucggccuugcugcauuu

SEQ ID NO: 1986687 - RNA, 19 nt, Artificial Sequence
  Description of Artificial Sequence: Synthetic oligonucleotide
gguucucggggaagugagc

SEQ ID NO: 1986688 - RNA, 19 nt, Artificial Sequence
  Description of Artificial Sequence: Synthetic oligonucleotide
gcuugaaggucugacaauu

SEQ ID NO: 1986689 - RNA, 19 nt, Artificial Sequence
  Description of Artificial Sequence: Synthetic oligonucleotide
gacacgccgguaggguaga

SEQ ID NO: 1986690 - RNA, 19 nt, Artificial Sequence
  Description of Artificial Sequence: Synthetic oligonucleotide
augggcgggcggacacgcc

SEQ ID NO: 1986691 - RNA, 19 nt, Artificial Sequence
  Description of Artificial Sequence: Synthetic oligonucleotide
gggucuugagccacuugca

SEQ ID NO: 1986692 - RNA, 19 nt, Artificial Sequence
  Description of Artificial Sequence: Synthetic oligonucleotide
gcaggcggcggucaccgca

SEQ ID NO: 1986693 - RNA, 19 nt, Artificial Sequence
  Description of Artificial Sequence: Synthetic oligonucleotide
gcucucggaaaugggcuac

SEQ ID NO: 1986694 - RNA, 19 nt, Artificial Sequence
  Description of Artificial Sequence: Synthetic oligonucleotide
ccuggcgguacacugcgga

SEQ ID NO: 1986695 - RNA, 19 nt, Artificial Sequence
  Description of Artificial Sequence: Synthetic oligonucleotide
ggaggcguccagcaauaua

SEQ ID NO: 1986696 - RNA, 19 nt, Artificial Sequence
  Description of Artificial Sequence: Synthetic oligonucleotide
ccgguaggguagagggugc

SEQ ID NO: 1986697 - RNA, 19 nt, Artificial Sequence
  Description of Artificial Sequence: Synthetic oligonucleotide
cggcaccaaaguuauucug

SEQ ID NO: 1986698 - RNA, 19 nt, Artificial Sequence
  Description of Artificial Sequence: Synthetic oligonucleotide
cuuuggugcucugacugau

SEQ ID NO: 1986699 - RNA, 19 nt, Artificial Sequence
  Description of Artificial Sequence: Synthetic oligonucleotide
aggauccugcgcaggccca

SEQ ID NO: 1986700 - RNA, 19 nt, Artificial Sequence
  Description of Artificial Sequence: Synthetic oligonucleotide
uggaggcguccagcaauau

SEQ ID NO: 1986701 - RNA, 19 nt, Artificial Sequence
  Description of Artificial Sequence: Synthetic oligonucleotide
ccguaggcgaaggccaggc

SEQ ID NO: 1986702 - RNA, 19 nt, Artificial Sequence
  Description of Artificial Sequence: Synthetic oligonucleotide
gcccgagcucugcagcgcc

SEQ ID NO: 1986703 - RNA, 19 nt, Artificial Sequence
  Description of Artificial Sequence: Synthetic oligonucleotide
gccccaagaguuugaggaa

SEQ ID NO: 1986704 - RNA, 19 nt, Artificial Sequence
  Description of Artificial Sequence: Synthetic oligonucleotide
ccgccuggcgguacacugc

SEQ ID NO: 1986705 - RNA, 19 nt, Artificial Sequence
  Description of Artificial Sequence: Synthetic oligonucleotide
gccgaucuaagcgucacau

SEQ ID NO: 1986706 - RNA, 19 nt, Artificial Sequence
  Description of Artificial Sequence: Synthetic oligonucleotide
gggccgaucuaagcgucac

SEQ ID NO: 1986707 - RNA, 19 nt, Artificial Sequence
  Description of Artificial Sequence: Synthetic oligonucleotide
cagcaccuacuccgugcuc

SEQ ID NO: 1986708 - RNA, 19 nt, Artificial Sequence
  Description of Artificial Sequence: Synthetic oligonucleotide
cgggcggacacgccgguag

SEQ ID NO: 1986709 - RNA, 19 nt, Artificial Sequence
  Description of Artificial Sequence: Synthetic oligonucleotide
cagcaagucagggugcuuu

SEQ ID NO: 1986710 - RNA, 19 nt, Artificial Sequence
  Description of Artificial Sequence: Synthetic oligonucleotide
cagugcuaauaaccccaua

SEQ ID NO: 1986711 - RNA, 19 nt, Artificial Sequence
  Description of Artificial Sequence: Synthetic oligonucleotide
gccguaggcgaaggccagg

SEQ ID NO: 1986712 - RNA, 19 nt, Artificial Sequence
  Description of Artificial Sequence: Synthetic oligonucleotide
ggccgaucuaagcgucaca

SEQ ID NO: 1986713 - RNA, 19 nt, Artificial Sequence
  Description of Artificial Sequence: Synthetic oligonucleotide
cugcggagccguaggcgaa

SEQ ID NO: 1986714 - RNA, 19 nt, Artificial Sequence
  Description of Artificial Sequence: Synthetic oligonucleotide
acacgccgguaggguagag

SEQ ID NO: 1986715 - RNA, 19 nt, Artificial Sequence
  Description of Artificial Sequence: Synthetic oligonucleotide
gguccaugauaugauugau

SEQ ID NO: 1986716 - RNA, 19 nt, Artificial Sequence
  Description of Artificial Sequence: Synthetic oligonucleotide
ggauccugcgcaggcccac

SEQ ID NO: 1986717 - RNA, 19 nt, Artificial Sequence
  Description of Artificial Sequence: Synthetic oligonucleotide
ccccuaagcgcaccacauc

SEQ ID NO: 1986718 - RNA, 19 nt, Artificial Sequence
  Description of Artificial Sequence: Synthetic oligonucleotide
ccucgccaaucaccaugcg

SEQ ID NO: 1986719 - RNA, 19 nt, Artificial Sequence
  Description of Artificial Sequence: Synthetic oligonucleotide
guagagggugcagcaccua

SEQ ID NO: 1986720 - RNA, 19 nt, Artificial Sequence
  Description of Artificial Sequence: Synthetic oligonucleotide
ccccauauuugauaagcuu

SEQ ID NO: 1986721 - RNA, 19 nt, Artificial Sequence
  Description of Artificial Sequence: Synthetic oligonucleotide
cugggucccgccuggcggu

SEQ ID NO: 1986722 - RNA, 19 nt, Artificial Sequence
  Description of Artificial Sequence: Synthetic oligonucleotide
ccagggccgaucuaagcgu

SEQ ID NO: 1986723 - RNA, 19 nt, Artificial Sequence
  Description of Artificial Sequence: Synthetic oligonucleotide
cacacaugaucagcggguu

SEQ ID NO: 1986724 - RNA, 19 nt, Artificial Sequence
  Description of Artificial Sequence: Synthetic oligonucleotide
guucuuuuccagggccgau

SEQ ID NO: 1986725 - RNA, 19 nt, Artificial Sequence
  Description of Artificial Sequence: Synthetic oligonucleotide
ccaugggcgggcggacacg

SEQ ID NO: 1986726 - RNA, 19 nt, Artificial Sequence
  Description of Artificial Sequence: Synthetic oligonucleotide
caccacagucggggucuug

SEQ ID NO: 1986727 - RNA, 19 nt, Artificial Sequence
  Description of Artificial Sequence: Synthetic oligonucleotide
cugccccgccaugggcggg

SEQ ID NO: 1986728 - RNA, 19 nt, Artificial Sequence
  Description of Artificial Sequence: Synthetic oligonucleotide
gcgguacacugcggagccg

SEQ ID NO: 1986729 - RNA, 19 nt, Artificial Sequence
  Description of Artificial Sequence: Synthetic oligonucleotide
ggucccgccuggcgguaca

SEQ ID NO: 1986730 - RNA, 19 nt, Artificial Sequence
  Description of Artificial Sequence: Synthetic oligonucleotide
ccggcaccaaaguuauucu

SEQ ID NO: 1986731 - RNA, 19 nt, Artificial Sequence
  Description of Artificial Sequence: Synthetic oligonucleotide
cacgaucuucaccggcuuu

SEQ ID NO: 1986732 - RNA, 19 nt, Artificial Sequence
  Description of Artificial Sequence: Synthetic oligonucleotide
ggcggcggucaccgcacuc

SEQ ID NO: 1986733 - RNA, 19 nt, Artificial Sequence
  Description of Artificial Sequence: Synthetic oligonucleotide
cuguuucucccaggagggu

SEQ ID NO: 1986734 - RNA, 19 nt, Artificial Sequence
  Description of Artificial Sequence: Synthetic oligonucleotide
gcgaugauccugggcccca

SEQ ID NO: 1986735 - RNA, 19 nt, Artificial Sequence
  Description of Artificial Sequence: Synthetic oligonucleotide
cggagccauuuauucaaaa

SEQ ID NO: 1986736 - RNA, 19 nt, Artificial Sequence
  Description of Artificial Sequence: Synthetic oligonucleotide
ugggucccgccuggcggua

SEQ ID NO: 1986737 - RNA, 19 nt, Artificial Sequence
  Description of Artificial Sequence: Synthetic oligonucleotide
gccuggcgguacacugcgg

SEQ ID NO: 1986738 - RNA, 19 nt, Artificial Sequence
  Description of Artificial Sequence: Synthetic oligonucleotide
cggucaccgcacucuucag

SEQ ID NO: 1986739 - RNA, 19 nt, Artificial Sequence
  Description of Artificial Sequence: Synthetic oligonucleotide
cgagaccccuaagcgcacc

SEQ ID NO: 1986740 - RNA, 19 nt, Artificial Sequence
  Description of Artificial Sequence: Synthetic oligonucleotide
ggcggucaccgcacucuuc

SEQ ID NO: 1986741 - RNA, 19 nt, Artificial Sequence
  Description of Artificial Sequence: Synthetic oligonucleotide
ccagugcuaauaaccccau

SEQ ID NO: 1986742 - RNA, 19 nt, Artificial Sequence
  Description of Artificial Sequence: Synthetic oligonucleotide
gcgucacauucucacucau

SEQ ID NO: 1986743 - RNA, 19 nt, Artificial Sequence
  Description of Artificial Sequence: Synthetic oligonucleotide
gucggggucuugagccacu

SEQ ID NO: 1986744 - RNA, 19 nt, Artificial Sequence
  Description of Artificial Sequence: Synthetic oligonucleotide
gguacacugcggagccgua

SEQ ID NO: 1986745 - RNA, 19 nt, Artificial Sequence
  Description of Artificial Sequence: Synthetic oligonucleotide
cccacgcccgagcucugca

SEQ ID NO: 1986746 - RNA, 19 nt, Artificial Sequence
  Description of Artificial Sequence: Synthetic oligonucleotide
gcacugggucccgccuggc

SEQ ID NO: 1986747 - RNA, 19 nt, Artificial Sequence
  Description of Artificial Sequence: Synthetic oligonucleotide
gcggacacgccgguagggu

SEQ ID NO: 1986748 - RNA, 19 nt, Artificial Sequence
  Description of Artificial Sequence: Synthetic oligonucleotide
caccggcuuuuggaggcgu

SEQ ID NO: 1986749 - RNA, 19 nt, Artificial Sequence
  Description of Artificial Sequence: Synthetic oligonucleotide
ccgaucuaagcgucacauu

SEQ ID NO: 1986750 - RNA, 19 nt, Artificial Sequence
  Description of Artificial Sequence: Synthetic oligonucleotide
cgcccgagcucugcagcgc

SEQ ID NO: 1986751 - RNA, 19 nt, Artificial Sequence
  Description of Artificial Sequence: Synthetic oligonucleotide
gucggccuugcugcauuuu

SEQ ID NO: 1986752 - RNA, 19 nt, Artificial Sequence
  Description of Artificial Sequence: Synthetic oligonucleotide
cggacacgccgguagggua

SEQ ID NO: 1986753 - RNA, 19 nt, Artificial Sequence
  Description of Artificial Sequence: Synthetic oligonucleotide
gggucccgccuggcgguac

SEQ ID NO: 1986754 - RNA, 19 nt, Artificial Sequence
  Description of Artificial Sequence: Synthetic oligonucleotide
cgggagcaugaggcaggcg

SEQ ID NO: 1986755 - RNA, 19 nt, Artificial Sequence
  Description of Artificial Sequence: Synthetic oligonucleotide
ccccgccaugggcgggcgg

SEQ ID NO: 1986756 - RNA, 19 nt, Artificial Sequence
  Description of Artificial Sequence: Synthetic oligonucleotide
cgguacacugcggagccgu

SEQ ID NO: 1986757 - RNA, 19 nt, Artificial Sequence
  Description of Artificial Sequence: Synthetic oligonucleotide
cgguaggguagagggugca

SEQ ID NO: 1986758 - RNA, 19 nt, Artificial Sequence
  Description of Artificial Sequence: Synthetic oligonucleotide
ggcgggcggacacgccggu

SEQ ID NO: 1986759 - RNA, 19 nt, Artificial Sequence
  Description of Artificial Sequence: Synthetic oligonucleotide
gcuuuccgucacacaugau

SEQ ID NO: 1986760 - RNA, 19 nt, Artificial Sequence
  Description of Artificial Sequence: Synthetic oligonucleotide
gggcuacguugggcuucac

SEQ ID NO: 1986761 - RNA, 19 nt, Artificial Sequence
  Description of Artificial Sequence: Synthetic oligonucleotide
cgccgguaggguagagggu

SEQ ID NO: 1986762 - RNA, 19 nt, Artificial Sequence
  Description of Artificial Sequence: Synthetic oligonucleotide
gcgggcggacacgccggua

SEQ ID NO: 1986763 - RNA, 19 nt, Artificial Sequence
  Description of Artificial Sequence: Synthetic oligonucleotide
cggcggucaccgcacucuu

SEQ ID NO: 1986764 - RNA, 19 nt, Artificial Sequence
  Description of Artificial Sequence: Synthetic oligonucleotide
ccccggcaccaaaguuauu

SEQ ID NO: 1986765 - RNA, 19 nt, Artificial Sequence
  Description of Artificial Sequence: Synthetic oligonucleotide
aaugcauuuccuuggaaag

SEQ ID NO: 1986766 - RNA, 19 nt, Artificial Sequence
  Description of Artificial Sequence: Synthetic oligonucleotide
aguugucucauacugaggg

SEQ ID NO: 1986767 - RNA, 19 nt, Artificial Sequence
  Description of Artificial Sequence: Synthetic oligonucleotide
uucgaaaggauccacuggg

SEQ ID NO: 1986768 - RNA, 19 nt, Artificial Sequence
  Description of Artificial Sequence: Synthetic oligonucleotide
ucuaaugcagcccauugag

SEQ ID NO: 1986769 - RNA, 19 nt, Artificial Sequence
  Description of Artificial Sequence: Synthetic oligonucleotide
uuugauacuucuucuaacc

SEQ ID NO: 1986770 - RNA, 19 nt, Artificial Sequence
  Description of Artificial Sequence: Synthetic oligonucleotide
ucugugaccagccuggaag

SEQ ID NO: 1986771 - RNA, 19 nt, Artificial Sequence
  Description of Artificial Sequence: Synthetic oligonucleotide
aaaguucuauuucaaacgu

SEQ ID NO: 1986772 - RNA, 19 nt, Artificial Sequence
  Description of Artificial Sequence: Synthetic oligonucleotide
guugguuucacgcacaggc

SEQ ID NO: 1986773 - RNA, 19 nt, Artificial Sequence
  Description of Artificial Sequence: Synthetic oligonucleotide
acuacagguacauuagagg

SEQ ID NO: 1986774 - RNA, 19 nt, Artificial Sequence
  Description of Artificial Sequence: Synthetic oligonucleotide
cuacagguacauuagaggc

SEQ ID NO: 1986775 - RNA, 19 nt, Artificial Sequence
  Description of Artificial Sequence: Synthetic oligonucleotide
ucuccuaaaacucugccgu

SEQ ID NO: 1986776 - RNA, 19 nt, Artificial Sequence
  Description of Artificial Sequence: Synthetic oligonucleotide
aacgucuucuguaagucgc

SEQ ID NO: 1986777 - RNA, 19 nt, Artificial Sequence
  Description of Artificial Sequence: Synthetic oligonucleotide
cucaucaacuucuacgugg

SEQ ID NO: 1986778 - RNA, 19 nt, Artificial Sequence
  Description of Artificial Sequence: Synthetic oligonucleotide
aaacacguuggcuaccauc

SEQ ID NO: 1986779 - RNA, 19 nt, Artificial Sequence
  Description of Artificial Sequence: Synthetic oligonucleotide
cauugaaagcugcagaacc

SEQ ID NO: 1986780 - RNA, 19 nt, Artificial Sequence
  Description of Artificial Sequence: Synthetic oligonucleotide
ugugcauuccucuugacuc

SEQ ID NO: 1986781 - RNA, 19 nt, Artificial Sequence
  Description of Artificial Sequence: Synthetic oligonucleotide
uucuacguggccaagguac

SEQ ID NO: 1986782 - RNA, 19 nt, Artificial Sequence
  Description of Artificial Sequence: Synthetic oligonucleotide
ugacugauggggaugagug

SEQ ID NO: 1986783 - RNA, 19 nt, Artificial Sequence
  Description of Artificial Sequence: Synthetic oligonucleotide
aaggguugguuucacgcac

SEQ ID NO: 1986784 - RNA, 19 nt, Artificial Sequence
  Description of Artificial Sequence: Synthetic oligonucleotide
ucuauuucaaacgucuucu

SEQ ID NO: 1986785 - RNA, 19 nt, Artificial Sequence
  Description of Artificial Sequence: Synthetic oligonucleotide
aguccauccgcugacaccc

SEQ ID NO: 1986786 - RNA, 19 nt, Artificial Sequence
  Description of Artificial Sequence: Synthetic oligonucleotide
aaacgucuucuguaagucg

SEQ ID NO: 1986787 - RNA, 19 nt, Artificial Sequence
  Description of Artificial Sequence: Synthetic oligonucleotide
uucuccuaaaacucugccg

SEQ ID NO: 1986788 - RNA, 19 nt, Artificial Sequence
  Description of Artificial Sequence: Synthetic oligonucleotide
agcuacacuuuccaguucg

SEQ ID NO: 1986789 - RNA, 19 nt, Artificial Sequence
  Description of Artificial Sequence: Synthetic oligonucleotide
aaaggauccacugggcagg

SEQ ID NO: 1986790 - RNA, 19 nt, Artificial Sequence
  Description of Artificial Sequence: Synthetic oligonucleotide
uguaagucgcuggagaaag

SEQ ID NO: 1986791 - RNA, 19 nt, Artificial Sequence
  Description of Artificial Sequence: Synthetic oligonucleotide
caucccauuggccacaggg

SEQ ID NO: 1986792 - RNA, 19 nt, Artificial Sequence
  Description of Artificial Sequence: Synthetic oligonucleotide
uccgcugacacccacagaa

SEQ ID NO: 1986793 - RNA, 19 nt, Artificial Sequence
  Description of Artificial Sequence: Synthetic oligonucleotide
gauacuucuucuaaccagc

SEQ ID NO: 1986794 - RNA, 19 nt, Artificial Sequence
  Description of Artificial Sequence: Synthetic oligonucleotide
uuaacugggaagcuacacu

SEQ ID NO: 1986795 - RNA, 19 nt, Artificial Sequence
  Description of Artificial Sequence: Synthetic oligonucleotide
aucuacaccauugaaagcu

SEQ ID NO: 1986796 - RNA, 19 nt, Artificial Sequence
  Description of Artificial Sequence: Synthetic oligonucleotide
uacuuaacugggaagcuac

SEQ ID NO: 1986797 - RNA, 19 nt, Artificial Sequence
  Description of Artificial Sequence: Synthetic oligonucleotide
uaagucgcuggagaaaggg

SEQ ID NO: 1986798 - RNA, 19 nt, Artificial Sequence
  Description of Artificial Sequence: Synthetic oligonucleotide
agggacaaaggcuggcugc

SEQ ID NO: 1986799 - RNA, 19 nt, Artificial Sequence
  Description of Artificial Sequence: Synthetic oligonucleotide
uugauacuucuucuaacca

SEQ ID NO: 1986800 - RNA, 19 nt, Artificial Sequence
  Description of Artificial Sequence: Synthetic oligonucleotide
acugguacaggcugagagg

SEQ ID NO: 1986801 - RNA, 19 nt, Artificial Sequence
  Description of Artificial Sequence: Synthetic oligonucleotide
ucugccacugguguggacg

SEQ ID NO: 1986802 - RNA, 19 nt, Artificial Sequence
  Description of Artificial Sequence: Synthetic oligonucleotide
aguucuauuucaaacgucu

SEQ ID NO: 1986803 - RNA, 19 nt, Artificial Sequence
  Description of Artificial Sequence: Synthetic oligonucleotide
aacacguuggcuaccaucu

SEQ ID NO: 1986804 - RNA, 19 nt, Artificial Sequence
  Description of Artificial Sequence: Synthetic oligonucleotide
aaagcugcagaaccauuga

SEQ ID NO: 1986805 - RNA, 19 nt, Artificial Sequence
  Description of Artificial Sequence: Synthetic oligonucleotide
auugcuacaggugcuagag

SEQ ID NO: 1986806 - RNA, 19 nt, Artificial Sequence
  Description of Artificial Sequence: Synthetic oligonucleotide
accauugaggugcugagca

SEQ ID NO: 1986807 - RNA, 19 nt, Artificial Sequence
  Description of Artificial Sequence: Synthetic oligonucleotide
ugaugguagcacuaguugu

SEQ ID NO: 1986808 - RNA, 19 nt, Artificial Sequence
  Description of Artificial Sequence: Synthetic oligonucleotide
auuucaaacgucuucugua

SEQ ID NO: 1986809 - RNA, 19 nt, Artificial Sequence
  Description of Artificial Sequence: Synthetic oligonucleotide
acugggaagcuacacuuuc

SEQ ID NO: 1986810 - RNA, 19 nt, Artificial Sequence
  Description of Artificial Sequence: Synthetic oligonucleotide
ucaaacgucuucuguaagu

SEQ ID NO: 1986811 - RNA, 19 nt, Artificial Sequence
  Description of Artificial Sequence: Synthetic oligonucleotide
cacuacagguacauuagag

SEQ ID NO: 1986812 - RNA, 19 nt, Artificial Sequence
  Description of Artificial Sequence: Synthetic oligonucleotide
cacuaguugucucauacug

SEQ ID NO: 1986813 - RNA, 19 nt, Artificial Sequence
  Description of Artificial Sequence: Synthetic oligonucleotide
caauuuccugguuagcagc

SEQ ID NO: 1986814 - RNA, 19 nt, Artificial Sequence
  Description of Artificial Sequence: Synthetic oligonucleotide
gaaagcugcagaaccauug

SEQ ID NO: 1986815 - RNA, 19 nt, Artificial Sequence
  Description of Artificial Sequence: Synthetic oligonucleotide
uuggacuugcuuucuaaug

SEQ ID NO: 1986816 - RNA, 19 nt, Artificial Sequence
  Description of Artificial Sequence: Synthetic oligonucleotide
uacuucuucuaaccagcgg

SEQ ID NO: 1986817 - RNA, 19 nt, Artificial Sequence
  Description of Artificial Sequence: Synthetic oligonucleotide
caggcauugcuacaggugc

SEQ ID NO: 1986818 - RNA, 19 nt, Artificial Sequence
  Description of Artificial Sequence: Synthetic oligonucleotide
cuuugauacuucuucuaac

SEQ ID NO: 1986819 - RNA, 19 nt, Artificial Sequence
  Description of Artificial Sequence: Synthetic oligonucleotide
uuucaaacgucuucuguaa

SEQ ID NO: 1986820 - RNA, 19 nt, Artificial Sequence
  Description of Artificial Sequence: Synthetic oligonucleotide
uccucuugacucaucaacu

SEQ ID NO: 1986821 - RNA, 19 nt, Artificial Sequence
  Description of Artificial Sequence: Synthetic oligonucleotide
ucuucuaaccagcggucag

SEQ ID NO: 1986822 - RNA, 19 nt, Artificial Sequence
  Description of Artificial Sequence: Synthetic oligonucleotide
ugggguaaugcccacuaca

SEQ ID NO: 1986823 - RNA, 19 nt, Artificial Sequence
  Description of Artificial Sequence: Synthetic oligonucleotide
uggacgacuggccucuggg

SEQ ID NO: 1986824 - RNA, 19 nt, Artificial Sequence
  Description of Artificial Sequence: Synthetic oligonucleotide
cuuggaaagguggugcugg

SEQ ID NO: 1986825 - RNA, 19 nt, Artificial Sequence
  Description of Artificial Sequence: Synthetic oligonucleotide
aggcgaggaaugcauuucc

SEQ ID NO: 1986826 - RNA, 19 nt, Artificial Sequence
  Description of Artificial Sequence: Synthetic oligonucleotide
agggaguacgucugugacc

SEQ ID NO: 1986827 - RNA, 19 nt, Artificial Sequence
  Description of Artificial Sequence: Synthetic oligonucleotide
aagcugcagaaccauugag

SEQ ID NO: 1986828 - RNA, 19 nt, Artificial Sequence
  Description of Artificial Sequence: Synthetic oligonucleotide
aaccauugaggugcugagc

SEQ ID NO: 1986829 - RNA, 19 nt, Artificial Sequence
  Description of Artificial Sequence: Synthetic oligonucleotide
agaggcagcacccgaggac

SEQ ID NO: 1986830 - RNA, 19 nt, Artificial Sequence
  Description of Artificial Sequence: Synthetic oligonucleotide
uaaagaagggacugauggu

SEQ ID NO: 1986831 - RNA, 19 nt, Artificial Sequence
  Description of Artificial Sequence: Synthetic oligonucleotide
uucaaacgucuucuguaag

SEQ ID NO: 1986832 - RNA, 19 nt, Artificial Sequence
  Description of Artificial Sequence: Synthetic oligonucleotide
ucuacaccauugaaagcug

SEQ ID NO: 1986833 - RNA, 19 nt, Artificial Sequence
  Description of Artificial Sequence: Synthetic oligonucleotide
cacugguacaggcugagag

SEQ ID NO: 1986834 - RNA, 19 nt, Artificial Sequence
  Description of Artificial Sequence: Synthetic oligonucleotide
cuucgaaaggauccacugg

SEQ ID NO: 1986835 - RNA, 19 nt, Artificial Sequence
  Description of Artificial Sequence: Synthetic oligonucleotide
ugggaagcuacacuuucca

SEQ ID NO: 1986836 - RNA, 19 nt, Artificial Sequence
  Description of Artificial Sequence: Synthetic oligonucleotide
acaucuuucuuucuccuaa

SEQ ID NO: 1986837 - RNA, 19 nt, Artificial Sequence
  Description of Artificial Sequence: Synthetic oligonucleotide
cauuagaggcuggauaggg

SEQ ID NO: 1986838 - RNA, 19 nt, Artificial Sequence
  Description of Artificial Sequence: Synthetic oligonucleotide
aaguucuauuucaaacguc

SEQ ID NO: 1986839 - RNA, 19 nt, Artificial Sequence
  Description of Artificial Sequence: Synthetic oligonucleotide
gaaccauugaggugcugag

SEQ ID NO: 1986840 - RNA, 19 nt, Artificial Sequence
  Description of Artificial Sequence: Synthetic oligonucleotide
aguacgucugugaccagcc

SEQ ID NO: 1986841 - RNA, 19 nt, Artificial Sequence
  Description of Artificial Sequence: Synthetic oligonucleotide
uggccaagguacuuaacug

SEQ ID NO: 1986842 - RNA, 19 nt, Artificial Sequence
  Description of Artificial Sequence: Synthetic oligonucleotide
uaacugggaagcuacacuu

SEQ ID NO: 1986843 - RNA, 19 nt, Artificial Sequence
  Description of Artificial Sequence: Synthetic oligonucleotide
aacuucuacguggccaagg

SEQ ID NO: 1986844 - RNA, 19 nt, Artificial Sequence
  Description of Artificial Sequence: Synthetic oligonucleotide
uuccugguuagcagcauca

SEQ ID NO: 1986845 - RNA, 19 nt, Artificial Sequence
  Description of Artificial Sequence: Synthetic oligonucleotide
uacgucugugaccagccug

SEQ ID NO: 1986846 - RNA, 19 nt, Artificial Sequence
  Description of Artificial Sequence: Synthetic oligonucleotide
ucuguaagucgcuggagaa

SEQ ID NO: 1986847 - RNA, 19 nt, Artificial Sequence
  Description of Artificial Sequence: Synthetic oligonucleotide
aagaacuuccuuucagcuu

SEQ ID NO: 1986848 - RNA, 19 nt, Artificial Sequence
  Description of Artificial Sequence: Synthetic oligonucleotide
aagggacugaugguagcac

SEQ ID NO: 1986849 - RNA, 19 nt, Artificial Sequence
  Description of Artificial Sequence: Synthetic oligonucleotide
gacugauggggaugagugg

SEQ ID NO: 1986850 - RNA, 19 nt, Artificial Sequence
  Description of Artificial Sequence: Synthetic oligonucleotide
agcugcagaaccauugagg

SEQ ID NO: 1986851 - RNA, 19 nt, Artificial Sequence
  Description of Artificial Sequence: Synthetic oligonucleotide
cugggaugggguaaugccc

SEQ ID NO: 1986852 - RNA, 19 nt, Artificial Sequence
  Description of Artificial Sequence: Synthetic oligonucleotide
ugagaggcgaggaaugcau

SEQ ID NO: 1986853 - RNA, 19 nt, Artificial Sequence
  Description of Artificial Sequence: Synthetic oligonucleotide
cuaaugcagcccauugagc

SEQ ID NO: 1986854 - RNA, 19 nt, Artificial Sequence
  Description of Artificial Sequence: Synthetic oligonucleotide
uccuaaaacucugccguag

SEQ ID NO: 1986855 - RNA, 19 nt, Artificial Sequence
  Description of Artificial Sequence: Synthetic oligonucleotide
gaaaggguugguaggggag

SEQ ID NO: 1986856 - RNA, 19 nt, Artificial Sequence
  Description of Artificial Sequence: Synthetic oligonucleotide
cauugaggugcugagcagg

SEQ ID NO: 1986857 - RNA, 19 nt, Artificial Sequence
  Description of Artificial Sequence: Synthetic oligonucleotide
aauuuccugguuagcagca

SEQ ID NO: 1986858 - RNA, 19 nt, Artificial Sequence
  Description of Artificial Sequence: Synthetic oligonucleotide
cugguacaggcugagaggc

SEQ ID NO: 1986859 - RNA, 19 nt, Artificial Sequence
  Description of Artificial Sequence: Synthetic oligonucleotide
agaugugcauuccucuuga

SEQ ID NO: 1986860 - RNA, 19 nt, Artificial Sequence
  Description of Artificial Sequence: Synthetic oligonucleotide
agaaccauugaggugcuga

SEQ ID NO: 1986861 - RNA, 19 nt, Artificial Sequence
  Description of Artificial Sequence: Synthetic oligonucleotide
ucgaaaggauccacugggc

SEQ ID NO: 1986862 - RNA, 19 nt, Artificial Sequence
  Description of Artificial Sequence: Synthetic oligonucleotide
ugacacccacagaacagcc

SEQ ID NO: 1986863 - RNA, 19 nt, Artificial Sequence
  Description of Artificial Sequence: Synthetic oligonucleotide
ucuucacagaugugcauuc

SEQ ID NO: 1986864 - RNA, 19 nt, Artificial Sequence
  Description of Artificial Sequence: Synthetic oligonucleotide
cucggacgcucuuugauac

SEQ ID NO: 1986865 - RNA, 19 nt, Artificial Sequence
  Description of Artificial Sequence: Synthetic oligonucleotide
aagagaccuggagaggcag

SEQ ID NO: 1986866 - RNA, 19 nt, Artificial Sequence
  Description of Artificial Sequence: Synthetic oligonucleotide
augugcauuccucuugacu

SEQ ID NO: 1986867 - RNA, 19 nt, Artificial Sequence
  Description of Artificial Sequence: Synthetic oligonucleotide
uggccucugggacauaaac

SEQ ID NO: 1986868 - RNA, 19 nt, Artificial Sequence
  Description of Artificial Sequence: Synthetic oligonucleotide
acuucuacguggccaaggu

SEQ ID NO: 1986869 - RNA, 19 nt, Artificial Sequence
  Description of Artificial Sequence: Synthetic oligonucleotide
aagcuacacuuuccaguuc

SEQ ID NO: 1986870 - RNA, 19 nt, Artificial Sequence
  Description of Artificial Sequence: Synthetic oligonucleotide
ugcugguuggccaggcuug

SEQ ID NO: 1986871 - RNA, 19 nt, Artificial Sequence
  Description of Artificial Sequence: Synthetic oligonucleotide
ugguuucacgcacaggcau

SEQ ID NO: 1986872 - RNA, 19 nt, Artificial Sequence
  Description of Artificial Sequence: Synthetic oligonucleotide
uugguuucacgcacaggca

SEQ ID NO: 1986873 - RNA, 19 nt, Artificial Sequence
  Description of Artificial Sequence: Synthetic oligonucleotide
uggagaggcagcacccgag

SEQ ID NO: 1986874 - RNA, 19 nt, Artificial Sequence
  Description of Artificial Sequence: Synthetic oligonucleotide
uucacgcacaggcauugcu

SEQ ID NO: 1986875 - RNA, 19 nt, Artificial Sequence
  Description of Artificial Sequence: Synthetic oligonucleotide
gaggacugaccccacucag

SEQ ID NO: 1986876 - RNA, 19 nt, Artificial Sequence
  Description of Artificial Sequence: Synthetic oligonucleotide
gagggaguacgucugugac

SEQ ID NO: 1986877 - RNA, 19 nt, Artificial Sequence
  Description of Artificial Sequence: Synthetic oligonucleotide
cuuaacugggaagcuacac

SEQ ID NO: 1986878 - RNA, 19 nt, Artificial Sequence
  Description of Artificial Sequence: Synthetic oligonucleotide
ucuacguggccaagguacu

SEQ ID NO: 1986879 - RNA, 19 nt, Artificial Sequence
  Description of Artificial Sequence: Synthetic oligonucleotide
ugguuggccaggcuuggug

SEQ ID NO: 1986880 - RNA, 19 nt, Artificial Sequence
  Description of Artificial Sequence: Synthetic oligonucleotide
cucagagggaguacgucug

SEQ ID NO: 1986881 - RNA, 19 nt, Artificial Sequence
  Description of Artificial Sequence: Synthetic oligonucleotide
aucugucugccacuggugu

SEQ ID NO: 1986882 - RNA, 19 nt, Artificial Sequence
  Description of Artificial Sequence: Synthetic oligonucleotide
auugaaagcugcagaacca

SEQ ID NO: 1986883 - RNA, 19 nt, Artificial Sequence
  Description of Artificial Sequence: Synthetic oligonucleotide
uucuaaccagcggucagcc

SEQ ID NO: 1986884 - RNA, 19 nt, Artificial Sequence
  Description of Artificial Sequence: Synthetic oligonucleotide
augccugcuuccugaggcc

SEQ ID NO: 1986885 - RNA, 19 nt, Artificial Sequence
  Description of Artificial Sequence: Synthetic oligonucleotide
caaacgucuucuguaaguc

SEQ ID NO: 1986886 - RNA, 19 nt, Artificial Sequence
  Description of Artificial Sequence: Synthetic oligonucleotide
gcaauuuccugguuagcag

SEQ ID NO: 1986887 - RNA, 19 nt, Artificial Sequence
  Description of Artificial Sequence: Synthetic oligonucleotide
uuagugcgcugcuuggacu

SEQ ID NO: 1986888 - RNA, 19 nt, Artificial Sequence
  Description of Artificial Sequence: Synthetic oligonucleotide
ugggaccacacccacuggu

SEQ ID NO: 1986889 - RNA, 19 nt, Artificial Sequence
  Description of Artificial Sequence: Synthetic oligonucleotide
ccaaggguugguuucacgc

SEQ ID NO: 1986890 - RNA, 19 nt, Artificial Sequence
  Description of Artificial Sequence: Synthetic oligonucleotide
cuucuucuaaccagcgguc

SEQ ID NO: 1986891 - RNA, 19 nt, Artificial Sequence
  Description of Artificial Sequence: Synthetic oligonucleotide
ggaggcuuaaagaagggac

SEQ ID NO: 1986892 - RNA, 19 nt, Artificial Sequence
  Description of Artificial Sequence: Synthetic oligonucleotide
ugagcuucgaaaggaucca

SEQ ID NO: 1986893 - RNA, 19 nt, Artificial Sequence
  Description of Artificial Sequence: Synthetic oligonucleotide
cugggaagcuacacuuucc

SEQ ID NO: 1986894 - RNA, 19 nt, Artificial Sequence
  Description of Artificial Sequence: Synthetic oligonucleotide
ggauccacugggcaggugc

SEQ ID NO: 1986895 - RNA, 19 nt, Artificial Sequence
  Description of Artificial Sequence: Synthetic oligonucleotide
ugaguccauccgcugacac

SEQ ID NO: 1986896 - RNA, 19 nt, Artificial Sequence
  Description of Artificial Sequence: Synthetic oligonucleotide
ucugucugccacuggugug

SEQ ID NO: 1986897 - RNA, 19 nt, Artificial Sequence
  Description of Artificial Sequence: Synthetic oligonucleotide
guuagugcgcugcuuggac

SEQ ID NO: 1986898 - RNA, 19 nt, Artificial Sequence
  Description of Artificial Sequence: Synthetic oligonucleotide
auacuucuucuaaccagcg

SEQ ID NO: 1986899 - RNA, 19 nt, Artificial Sequence
  Description of Artificial Sequence: Synthetic oligonucleotide
cacgcacaggcauugcuac

SEQ ID NO: 1986900 - RNA, 19 nt, Artificial Sequence
  Description of Artificial Sequence: Synthetic oligonucleotide
acauuagaggcuggauagg

SEQ ID NO: 1986901 - RNA, 19 nt, Artificial Sequence
  Description of Artificial Sequence: Synthetic oligonucleotide
cagaugugcauuccucuug

SEQ ID NO: 1986902 - RNA, 19 nt, Artificial Sequence
  Description of Artificial Sequence: Synthetic oligonucleotide
agcaggaggcuuaaagaag

SEQ ID NO: 1986903 - RNA, 19 nt, Artificial Sequence
  Description of Artificial Sequence: Synthetic oligonucleotide
cauuccucuugacucauca

SEQ ID NO: 1986904 - RNA, 19 nt, Artificial Sequence
  Description of Artificial Sequence: Synthetic oligonucleotide
aggcuuaaagaagggacug

SEQ ID NO: 1986905 - RNA, 19 nt, Artificial Sequence
  Description of Artificial Sequence: Synthetic oligonucleotide
caacccugaguccauccgc

SEQ ID NO: 1986906 - RNA, 19 nt, Artificial Sequence
  Description of Artificial Sequence: Synthetic oligonucleotide
cugacacccacagaacagc

SEQ ID NO: 1986907 - RNA, 19 nt, Artificial Sequence
  Description of Artificial Sequence: Synthetic oligonucleotide
ucacgcacaggcauugcua

SEQ ID NO: 1986908 - RNA, 19 nt, Artificial Sequence
  Description of Artificial Sequence: Synthetic oligonucleotide
gcccauugagcuucgaaag

SEQ ID NO: 1986909 - RNA, 19 nt, Artificial Sequence
  Description of Artificial Sequence: Synthetic oligonucleotide
cuucuaaccagcggucagc

SEQ ID NO: 1986910 - RNA, 19 nt, Artificial Sequence
  Description of Artificial Sequence: Synthetic oligonucleotide
augggguaaugcccacuac

SEQ ID NO: 1986911 - RNA, 19 nt, Artificial Sequence
  Description of Artificial Sequence: Synthetic oligonucleotide
gaguacgucugugaccagc

SEQ ID NO: 1986912 - RNA, 19 nt, Artificial Sequence
  Description of Artificial Sequence: Synthetic oligonucleotide
cauccgcugacacccacag

SEQ ID NO: 1986913 - RNA, 19 nt, Artificial Sequence
  Description of Artificial Sequence: Synthetic oligonucleotide
ugguguggacgacuggccu

SEQ ID NO: 1986914 - RNA, 19 nt, Artificial Sequence
  Description of Artificial Sequence: Synthetic oligonucleotide
uucuucuaaccagcgguca

SEQ ID NO: 1986915 - RNA, 19 nt, Artificial Sequence
  Description of Artificial Sequence: Synthetic oligonucleotide
caagguacuuaacugggaa

SEQ ID NO: 1986916 - RNA, 19 nt, Artificial Sequence
  Description of Artificial Sequence: Synthetic oligonucleotide
auuggccacaggguaggac

SEQ ID NO: 1986917 - RNA, 19 nt, Artificial Sequence
  Description of Artificial Sequence: Synthetic oligonucleotide
gaugggguaaugcccacua

SEQ ID NO: 1986918 - RNA, 19 nt, Artificial Sequence
  Description of Artificial Sequence: Synthetic oligonucleotide
auagggcaucccauuggcc

SEQ ID NO: 1986919 - RNA, 19 nt, Artificial Sequence
  Description of Artificial Sequence: Synthetic oligonucleotide
ccagcggucagccucagag

SEQ ID NO: 1986920 - RNA, 19 nt, Artificial Sequence
  Description of Artificial Sequence: Synthetic oligonucleotide
acguuggcuaccaucuggg

SEQ ID NO: 1986921 - RNA, 19 nt, Artificial Sequence
  Description of Artificial Sequence: Synthetic oligonucleotide
cugguguggacgacuggcc

SEQ ID NO: 1986922 - RNA, 19 nt, Artificial Sequence
  Description of Artificial Sequence: Synthetic oligonucleotide
cugauggggaugaguggcc

SEQ ID NO: 1986923 - RNA, 19 nt, Artificial Sequence
  Description of Artificial Sequence: Synthetic oligonucleotide
accuggagaggcagcaccc

SEQ ID NO: 1986924 - RNA, 19 nt, Artificial Sequence
  Description of Artificial Sequence: Synthetic oligonucleotide
gacguauggcugcaauuuc

SEQ ID NO: 1986925 - RNA, 19 nt, Artificial Sequence
  Description of Artificial Sequence: Synthetic oligonucleotide
gcuaccaucugggaugggg

SEQ ID NO: 1986926 - RNA, 19 nt, Artificial Sequence
  Description of Artificial Sequence: Synthetic oligonucleotide
agggacugaugguagcacu

SEQ ID NO: 1986927 - RNA, 19 nt, Artificial Sequence
  Description of Artificial Sequence: Synthetic oligonucleotide
acuaguugucucauacuga

SEQ ID NO: 1986928 - RNA, 19 nt, Artificial Sequence
  Description of Artificial Sequence: Synthetic oligonucleotide
acaggcauugcuacaggug

SEQ ID NO: 1986929 - RNA, 19 nt, Artificial Sequence
  Description of Artificial Sequence: Synthetic oligonucleotide
uggccugcagugccaaaca

SEQ ID NO: 1986930 - RNA, 19 nt, Artificial Sequence
  Description of Artificial Sequence: Synthetic oligonucleotide
gaagggacugaugguagca

SEQ ID NO: 1986931 - RNA, 19 nt, Artificial Sequence
  Description of Artificial Sequence: Synthetic oligonucleotide
guuucacgcacaggcauug

SEQ ID NO: 1986932 - RNA, 19 nt, Artificial Sequence
  Description of Artificial Sequence: Synthetic oligonucleotide
acagaugugcauuccucuu

SEQ ID NO: 1986933 - RNA, 19 nt, Artificial Sequence
  Description of Artificial Sequence: Synthetic oligonucleotide
gguagcacuaguugucuca

SEQ ID NO: 1986934 - RNA, 19 nt, Artificial Sequence
  Description of Artificial Sequence: Synthetic oligonucleotide
ucgcuggagaaaggguugg

SEQ ID NO: 1986935 - RNA, 19 nt, Artificial Sequence
  Description of Artificial Sequence: Synthetic oligonucleotide
gauggggaugaguggccug

SEQ ID NO: 1986936 - RNA, 19 nt, Artificial Sequence
  Description of Artificial Sequence: Synthetic oligonucleotide
accacacccacugguacag

SEQ ID NO: 1986937 - RNA, 19 nt, Artificial Sequence
  Description of Artificial Sequence: Synthetic oligonucleotide
gccaagguacuuaacuggg

SEQ ID NO: 1986938 - RNA, 19 nt, Artificial Sequence
  Description of Artificial Sequence: Synthetic oligonucleotide
ggguaaugcccacuacagg

SEQ ID NO: 1986939 - RNA, 19 nt, Artificial Sequence
  Description of Artificial Sequence: Synthetic oligonucleotide
uggcuaccaucugggaugg

SEQ ID NO: 1986940 - RNA, 19 nt, Artificial Sequence
  Description of Artificial Sequence: Synthetic oligonucleotide
agaggcgaggaaugcauuu

SEQ ID NO: 1986941 - RNA, 19 nt, Artificial Sequence
  Description of Artificial Sequence: Synthetic oligonucleotide
guauggcugcaauuuccug

SEQ ID NO: 1986942 - RNA, 19 nt, Artificial Sequence
  Description of Artificial Sequence: Synthetic oligonucleotide
aguccccggacguauggcu

SEQ ID NO: 1986943 - RNA, 19 nt, Artificial Sequence
  Description of Artificial Sequence: Synthetic oligonucleotide
guggccaagguacuuaacu

SEQ ID NO: 1986944 - RNA, 19 nt, Artificial Sequence
  Description of Artificial Sequence: Synthetic oligonucleotide
gggaguacgucugugacca

SEQ ID NO: 1986945 - RNA, 19 nt, Artificial Sequence
  Description of Artificial Sequence: Synthetic oligonucleotide
agccugccaucaucuacac

SEQ ID NO: 1986946 - RNA, 19 nt, Artificial Sequence
  Description of Artificial Sequence: Synthetic oligonucleotide
gacugaccccacucagucc

SEQ ID NO: 1986947 - RNA, 19 nt, Artificial Sequence
  Description of Artificial Sequence: Synthetic oligonucleotide
cccacuacagguacauuag

SEQ ID NO: 1986948 - RNA, 19 nt, Artificial Sequence
  Description of Artificial Sequence: Synthetic oligonucleotide
gggguaaugcccacuacag

SEQ ID NO: 1986949 - RNA, 19 nt, Artificial Sequence
  Description of Artificial Sequence: Synthetic oligonucleotide
guugucucauacugaggga

SEQ ID NO: 1986950 - RNA, 19 nt, Artificial Sequence
  Description of Artificial Sequence: Synthetic oligonucleotide
caaggguugguuucacgca

SEQ ID NO: 1986951 - RNA, 19 nt, Artificial Sequence
  Description of Artificial Sequence: Synthetic oligonucleotide
cacuuuccaguucggacuc

SEQ ID NO: 1986952 - RNA, 19 nt, Artificial Sequence
  Description of Artificial Sequence: Synthetic oligonucleotide
agagaccuggagaggcagc

SEQ ID NO: 1986953 - RNA, 19 nt, Artificial Sequence
  Description of Artificial Sequence: Synthetic oligonucleotide
ggaagcuacacuuuccagu

SEQ ID NO: 1986954 - RNA, 19 nt, Artificial Sequence
  Description of Artificial Sequence: Synthetic oligonucleotide
acgacuggccucugggaca

SEQ ID NO: 1986955 - RNA, 19 nt, Artificial Sequence
  Description of Artificial Sequence: Synthetic oligonucleotide
cuucacagaugugcauucc

SEQ ID NO: 1986956 - RNA, 19 nt, Artificial Sequence
  Description of Artificial Sequence: Synthetic oligonucleotide
gccaucaucuacaccauug

SEQ ID NO: 1986957 - RNA, 19 nt, Artificial Sequence
  Description of Artificial Sequence: Synthetic oligonucleotide
cugcagaaccauugaggug

SEQ ID NO: 1986958 - RNA, 19 nt, Artificial Sequence
  Description of Artificial Sequence: Synthetic oligonucleotide
gggguuagugcgcugcuug

SEQ ID NO: 1986959 - RNA, 19 nt, Artificial Sequence
  Description of Artificial Sequence: Synthetic oligonucleotide
gaugugcauuccucuugac

SEQ ID NO: 1986960 - RNA, 19 nt, Artificial Sequence
  Description of Artificial Sequence: Synthetic oligonucleotide
guaagucgcuggagaaagg

SEQ ID NO: 1986961 - RNA, 19 nt, Artificial Sequence
  Description of Artificial Sequence: Synthetic oligonucleotide
gaccacacccacugguaca

SEQ ID NO: 1986962 - RNA, 19 nt, Artificial Sequence
  Description of Artificial Sequence: Synthetic oligonucleotide
cagcggucagccucagagg

SEQ ID NO: 1986963 - RNA, 19 nt, Artificial Sequence
  Description of Artificial Sequence: Synthetic oligonucleotide
augguagcacuaguugucu

SEQ ID NO: 1986964 - RNA, 19 nt, Artificial Sequence
  Description of Artificial Sequence: Synthetic oligonucleotide
uagugcgcugcuuggacuu

SEQ ID NO: 1986965 - RNA, 19 nt, Artificial Sequence
  Description of Artificial Sequence: Synthetic oligonucleotide
uccccggacguauggcugc

SEQ ID NO: 1986966 - RNA, 19 nt, Artificial Sequence
  Description of Artificial Sequence: Synthetic oligonucleotide
gaggcuuaaagaagggacu

SEQ ID NO: 1986967 - RNA, 19 nt, Artificial Sequence
  Description of Artificial Sequence: Synthetic oligonucleotide
aggaggcuuaaagaaggga

SEQ ID NO: 1986968 - RNA, 19 nt, Artificial Sequence
  Description of Artificial Sequence: Synthetic oligonucleotide
acuuuccaguucggacucc

SEQ ID NO: 1986969 - RNA, 19 nt, Artificial Sequence
  Description of Artificial Sequence: Synthetic oligonucleotide
ugauggggaugaguggccu

SEQ ID NO: 1986970 - RNA, 19 nt, Artificial Sequence
  Description of Artificial Sequence: Synthetic oligonucleotide
cagccucagagggaguacg

SEQ ID NO: 1986971 - RNA, 19 nt, Artificial Sequence
  Description of Artificial Sequence: Synthetic oligonucleotide
gucgcuggagaaaggguug

SEQ ID NO: 1986972 - RNA, 19 nt, Artificial Sequence
  Description of Artificial Sequence: Synthetic oligonucleotide
ggacugaccccacucaguc

SEQ ID NO: 1986973 - RNA, 19 nt, Artificial Sequence
  Description of Artificial Sequence: Synthetic oligonucleotide
caucaacuucuacguggcc

SEQ ID NO: 1986974 - RNA, 19 nt, Artificial Sequence
  Description of Artificial Sequence: Synthetic oligonucleotide
uugguaggggagggguuag

SEQ ID NO: 1986975 - RNA, 19 nt, Artificial Sequence
  Description of Artificial Sequence: Synthetic oligonucleotide
gggaagcuacacuuuccag

SEQ ID NO: 1986976 - RNA, 19 nt, Artificial Sequence
  Description of Artificial Sequence: Synthetic oligonucleotide
gacgcucuuugauacuucu

SEQ ID NO: 1986977 - RNA, 19 nt, Artificial Sequence
  Description of Artificial Sequence: Synthetic oligonucleotide
gaggcgaggaaugcauuuc

SEQ ID NO: 1986978 - RNA, 19 nt, Artificial Sequence
  Description of Artificial Sequence: Synthetic oligonucleotide
ggguuagugcgcugcuugg

SEQ ID NO: 1986979 - RNA, 19 nt, Artificial Sequence
  Description of Artificial Sequence: Synthetic oligonucleotide
guuggccaggcuuggugac

SEQ ID NO: 1986980 - RNA, 19 nt, Artificial Sequence
  Description of Artificial Sequence: Synthetic oligonucleotide
cauugcuacaggugcuaga

SEQ ID NO: 1986981 - RNA, 19 nt, Artificial Sequence
  Description of Artificial Sequence: Synthetic oligonucleotide
gcugacacccacagaacag

SEQ ID NO: 1986982 - RNA, 19 nt, Artificial Sequence
  Description of Artificial Sequence: Synthetic oligonucleotide
caucaucuacaccauugaa

SEQ ID NO: 1986983 - RNA, 19 nt, Artificial Sequence
  Description of Artificial Sequence: Synthetic oligonucleotide
uccauccgcugacacccac

SEQ ID NO: 1986984 - RNA, 19 nt, Artificial Sequence
  Description of Artificial Sequence: Synthetic oligonucleotide
ugguagcacuaguugucuc

SEQ ID NO: 1986985 - RNA, 19 nt, Artificial Sequence
  Description of Artificial Sequence: Synthetic oligonucleotide
gaccccacucaguccccgg

SEQ ID NO: 1986986 - RNA, 19 nt, Artificial Sequence
  Description of Artificial Sequence: Synthetic oligonucleotide
cagguacauuagaggcugg

SEQ ID NO: 1986987 - RNA, 19 nt, Artificial Sequence
  Description of Artificial Sequence: Synthetic oligonucleotide
cugugaccagccuggaaga

SEQ ID NO: 1986988 - RNA, 19 nt, Artificial Sequence
  Description of Artificial Sequence: Synthetic oligonucleotide
gaagagaccuggagaggca

SEQ ID NO: 1986989 - RNA, 19 nt, Artificial Sequence
  Description of Artificial Sequence: Synthetic oligonucleotide
ggugcuagagccuuaguuu

SEQ ID NO: 1986990 - RNA, 19 nt, Artificial Sequence
  Description of Artificial Sequence: Synthetic oligonucleotide
gcaucaggggcaugggccc

SEQ ID NO: 1986991 - RNA, 19 nt, Artificial Sequence
  Description of Artificial Sequence: Synthetic oligonucleotide
agcuucgaaaggauccacu

SEQ ID NO: 1986992 - RNA, 19 nt, Artificial Sequence
  Description of Artificial Sequence: Synthetic oligonucleotide
ugaccccacucaguccccg

SEQ ID NO: 1986993 - RNA, 19 nt, Artificial Sequence
  Description of Artificial Sequence: Synthetic oligonucleotide
agaccuggagaggcagcac

SEQ ID NO: 1986994 - RNA, 19 nt, Artificial Sequence
  Description of Artificial Sequence: Synthetic oligonucleotide
cugcaugccugcuuccuga

SEQ ID NO: 1986995 - RNA, 19 nt, Artificial Sequence
  Description of Artificial Sequence: Synthetic oligonucleotide
uacguggccaagguacuua

SEQ ID NO: 1986996 - RNA, 19 nt, Artificial Sequence
  Description of Artificial Sequence: Synthetic oligonucleotide
aucccauuggccacagggu

SEQ ID NO: 1986997 - RNA, 19 nt, Artificial Sequence
  Description of Artificial Sequence: Synthetic oligonucleotide
uuucacgcacaggcauugc

SEQ ID NO: 1986998 - RNA, 19 nt, Artificial Sequence
  Description of Artificial Sequence: Synthetic oligonucleotide
ucagccucagagggaguac

SEQ ID NO: 1986999 - RNA, 19 nt, Artificial Sequence
  Description of Artificial Sequence: Synthetic oligonucleotide
aacugggaagcuacacuuu

SEQ ID NO: 1987000 - RNA, 19 nt, Artificial Sequence
  Description of Artificial Sequence: Synthetic oligonucleotide
gguuggccaggcuugguga

SEQ ID NO: 1987001 - RNA, 19 nt, Artificial Sequence
  Description of Artificial Sequence: Synthetic oligonucleotide
acguggccaagguacuuaa

SEQ ID NO: 1987002 - RNA, 19 nt, Artificial Sequence
  Description of Artificial Sequence: Synthetic oligonucleotide
cuugacucaucaacuucua

SEQ ID NO: 1987003 - RNA, 19 nt, Artificial Sequence
  Description of Artificial Sequence: Synthetic oligonucleotide
gguacaggcugagaggcga

SEQ ID NO: 1987004 - RNA, 19 nt, Artificial Sequence
  Description of Artificial Sequence: Synthetic oligonucleotide
acuuaacugggaagcuaca

SEQ ID NO: 1987005 - RNA, 19 nt, Artificial Sequence
  Description of Artificial Sequence: Synthetic oligonucleotide
agccuuugaagaacuuccu

SEQ ID NO: 1987006 - RNA, 19 nt, Artificial Sequence
  Description of Artificial Sequence: Synthetic oligonucleotide
ggagggguuagugcgcugc

SEQ ID NO: 1987007 - RNA, 19 nt, Artificial Sequence
  Description of Artificial Sequence: Synthetic oligonucleotide
ucggacgcucuuugauacu

SEQ ID NO: 1987008 - RNA, 19 nt, Artificial Sequence
  Description of Artificial Sequence: Synthetic oligonucleotide
ggguugguuucacgcacag

SEQ ID NO: 1987009 - RNA, 19 nt, Artificial Sequence
  Description of Artificial Sequence: Synthetic oligonucleotide
ggaccacacccacugguac

SEQ ID NO: 1987010 - RNA, 19 nt, Artificial Sequence
  Description of Artificial Sequence: Synthetic oligonucleotide
gcccacuacagguacauua

SEQ ID NO: 1987011 - RNA, 19 nt, Artificial Sequence
  Description of Artificial Sequence: Synthetic oligonucleotide
gagcuucgaaaggauccac

SEQ ID NO: 1987012 - RNA, 19 nt, Artificial Sequence
  Description of Artificial Sequence: Synthetic oligonucleotide
guacuuaacugggaagcua

SEQ ID NO: 1987013 - RNA, 19 nt, Artificial Sequence
  Description of Artificial Sequence: Synthetic oligonucleotide
cuaccaucugggauggggu

SEQ ID NO: 1987014 - RNA, 19 nt, Artificial Sequence
  Description of Artificial Sequence: Synthetic oligonucleotide
aggguugguaggggagggg

SEQ ID NO: 1987015 - RNA, 19 nt, Artificial Sequence
  Description of Artificial Sequence: Synthetic oligonucleotide
gugggaccacacccacugg

SEQ ID NO: 1987016 - RNA, 19 nt, Artificial Sequence
  Description of Artificial Sequence: Synthetic oligonucleotide
augcccacuacagguacau

SEQ ID NO: 1987017 - RNA, 19 nt, Artificial Sequence
  Description of Artificial Sequence: Synthetic oligonucleotide
ggcuggauagggcauccca

SEQ ID NO: 1987018 - RNA, 19 nt, Artificial Sequence
  Description of Artificial Sequence: Synthetic oligonucleotide
aggguaggacugggcaggg

SEQ ID NO: 1987019 - RNA, 19 nt, Artificial Sequence
  Description of Artificial Sequence: Synthetic oligonucleotide
uacaggugcuagagccuua

SEQ ID NO: 1987020 - RNA, 19 nt, Artificial Sequence
  Description of Artificial Sequence: Synthetic oligonucleotide
gggaccucugcaugccugc

SEQ ID NO: 1987021 - RNA, 19 nt, Artificial Sequence
  Description of Artificial Sequence: Synthetic oligonucleotide
aggcuggauagggcauccc

SEQ ID NO: 1987022 - RNA, 19 nt, Artificial Sequence
  Description of Artificial Sequence: Synthetic oligonucleotide
gguguggacgacuggccuc

SEQ ID NO: 1987023 - RNA, 19 nt, Artificial Sequence
  Description of Artificial Sequence: Synthetic oligonucleotide
agaacagccuucacugcuu

SEQ ID NO: 1987024 - RNA, 19 nt, Artificial Sequence
  Description of Artificial Sequence: Synthetic oligonucleotide
acucaguccccggacguau

SEQ ID NO: 1987025 - RNA, 19 nt, Artificial Sequence
  Description of Artificial Sequence: Synthetic oligonucleotide
ggggaugaguggccugagg

SEQ ID NO: 1987026 - RNA, 19 nt, Artificial Sequence
  Description of Artificial Sequence: Synthetic oligonucleotide
cuacacuuuccaguucgga

SEQ ID NO: 1987027 - RNA, 19 nt, Artificial Sequence
  Description of Artificial Sequence: Synthetic oligonucleotide
guaggacugggcagggaca

SEQ ID NO: 1987028 - RNA, 19 nt, Artificial Sequence
  Description of Artificial Sequence: Synthetic oligonucleotide
cuuggacuugcuuucuaau

SEQ ID NO: 1987029 - RNA, 19 nt, Artificial Sequence
  Description of Artificial Sequence: Synthetic oligonucleotide
guugguaggggagggguua

SEQ ID NO: 1987030 - RNA, 19 nt, Artificial Sequence
  Description of Artificial Sequence: Synthetic oligonucleotide
gugcuagagccuuaguuuu

SEQ ID NO: 1987031 - RNA, 19 nt, Artificial Sequence
  Description of Artificial Sequence: Synthetic oligonucleotide
uggggaugaguggccugag

SEQ ID NO: 1987032 - RNA, 19 nt, Artificial Sequence
  Description of Artificial Sequence: Synthetic oligonucleotide
aggacugaccccacucagu

SEQ ID NO: 1987033 - RNA, 19 nt, Artificial Sequence
  Description of Artificial Sequence: Synthetic oligonucleotide
gguugguuucacgcacagg

SEQ ID NO: 1987034 - RNA, 19 nt, Artificial Sequence
  Description of Artificial Sequence: Synthetic oligonucleotide
ccagccugccaucaucuac

SEQ ID NO: 1987035 - RNA, 19 nt, Artificial Sequence
  Description of Artificial Sequence: Synthetic oligonucleotide
ggcaggugccugcagggac

SEQ ID NO: 1987036 - RNA, 19 nt, Artificial Sequence
  Description of Artificial Sequence: Synthetic oligonucleotide
gugaccagccuggaagaga

SEQ ID NO: 1987037 - RNA, 19 nt, Artificial Sequence
  Description of Artificial Sequence: Synthetic oligonucleotide
gcuacacuuuccaguucgg

SEQ ID NO: 1987038 - RNA, 19 nt, Artificial Sequence
  Description of Artificial Sequence: Synthetic oligonucleotide
uuccugaggccagccugcc

SEQ ID NO: 1987039 - RNA, 19 nt, Artificial Sequence
  Description of Artificial Sequence: Synthetic oligonucleotide
ccauugaaagcugcagaac

SEQ ID NO: 1987040 - RNA, 19 nt, Artificial Sequence
  Description of Artificial Sequence: Synthetic oligonucleotide
cacccgaggacugacccca

SEQ ID NO: 1987041 - RNA, 19 nt, Artificial Sequence
  Description of Artificial Sequence: Synthetic oligonucleotide
ggcugagaggcgaggaaug

SEQ ID NO: 1987042 - RNA, 19 nt, Artificial Sequence
  Description of Artificial Sequence: Synthetic oligonucleotide
ccauugaggugcugagcag

SEQ ID NO: 1987043 - RNA, 19 nt, Artificial Sequence
  Description of Artificial Sequence: Synthetic oligonucleotide
acgucuucuguaagucgcu

SEQ ID NO: 1987044 - RNA, 19 nt, Artificial Sequence
  Description of Artificial Sequence: Synthetic oligonucleotide
uagcacuaguugucucaua

SEQ ID NO: 1987045 - RNA, 19 nt, Artificial Sequence
  Description of Artificial Sequence: Synthetic oligonucleotide
aggcauugcuacaggugcu

SEQ ID NO: 1987046 - RNA, 19 nt, Artificial Sequence
  Description of Artificial Sequence: Synthetic oligonucleotide
gcaugccugcuuccugagg

SEQ ID NO: 1987047 - RNA, 19 nt, Artificial Sequence
  Description of Artificial Sequence: Synthetic oligonucleotide
ugucugccacuggugugga

SEQ ID NO: 1987048 - RNA, 19 nt, Artificial Sequence
  Description of Artificial Sequence: Synthetic oligonucleotide
guccccggacguauggcug

SEQ ID NO: 1987049 - RNA, 19 nt, Artificial Sequence
  Description of Artificial Sequence: Synthetic oligonucleotide
cuguaagucgcuggagaaa

SEQ ID NO: 1987050 - RNA, 19 nt, Artificial Sequence
  Description of Artificial Sequence: Synthetic oligonucleotide
cccacucaguccccggacg

SEQ ID NO: 1987051 - RNA, 19 nt, Artificial Sequence
  Description of Artificial Sequence: Synthetic oligonucleotide
cuaaaacucugccguaguu

SEQ ID NO: 1987052 - RNA, 19 nt, Artificial Sequence
  Description of Artificial Sequence: Synthetic oligonucleotide
aggguugguuucacgcaca

SEQ ID NO: 1987053 - RNA, 19 nt, Artificial Sequence
  Description of Artificial Sequence: Synthetic oligonucleotide
cagcggaggccuguggcug

SEQ ID NO: 1987054 - RNA, 19 nt, Artificial Sequence
  Description of Artificial Sequence: Synthetic oligonucleotide
cacaggcauugcuacaggu

SEQ ID NO: 1987055 - RNA, 19 nt, Artificial Sequence
  Description of Artificial Sequence: Synthetic oligonucleotide
cccaaggguugguuucacg

SEQ ID NO: 1987056 - RNA, 19 nt, Artificial Sequence
  Description of Artificial Sequence: Synthetic oligonucleotide
caacuucuacguggccaag

SEQ ID NO: 1987057 - RNA, 19 nt, Artificial Sequence
  Description of Artificial Sequence: Synthetic oligonucleotide
ccaggcuuggugacugaug

SEQ ID NO: 1987058 - RNA, 19 nt, Artificial Sequence
  Description of Artificial Sequence: Synthetic oligonucleotide
ggaaugcauuuccuuggaa

SEQ ID NO: 1987059 - RNA, 19 nt, Artificial Sequence
  Description of Artificial Sequence: Synthetic oligonucleotide
gcauugcuacaggugcuag

SEQ ID NO: 1987060 - RNA, 19 nt, Artificial Sequence
  Description of Artificial Sequence: Synthetic oligonucleotide
ggcuuaaagaagggacuga

SEQ ID NO: 1987061 - RNA, 19 nt, Artificial Sequence
  Description of Artificial Sequence: Synthetic oligonucleotide
gggcccaaggguugguuuc

SEQ ID NO: 1987062 - RNA, 19 nt, Artificial Sequence
  Description of Artificial Sequence: Synthetic oligonucleotide
cugaggccagccugccauc

SEQ ID NO: 1987063 - RNA, 19 nt, Artificial Sequence
  Description of Artificial Sequence: Synthetic oligonucleotide
cuucuacguggccaaggua

SEQ ID NO: 1987064 - RNA, 19 nt, Artificial Sequence
  Description of Artificial Sequence: Synthetic oligonucleotide
auccgcugacacccacaga

SEQ ID NO: 1987065 - RNA, 19 nt, Artificial Sequence
  Description of Artificial Sequence: Synthetic oligonucleotide
gggacaaaggcuggcugca

SEQ ID NO: 1987066 - RNA, 19 nt, Artificial Sequence
  Description of Artificial Sequence: Synthetic oligonucleotide
agccucagagggaguacgu

SEQ ID NO: 1987067 - RNA, 19 nt, Artificial Sequence
  Description of Artificial Sequence: Synthetic oligonucleotide
gguacuuaacugggaagcu

SEQ ID NO: 1987068 - RNA, 19 nt, Artificial Sequence
  Description of Artificial Sequence: Synthetic oligonucleotide
ccaagguacuuaacuggga

SEQ ID NO: 1987069 - RNA, 19 nt, Artificial Sequence
  Description of Artificial Sequence: Synthetic oligonucleotide
aaccagcggucagccucag

SEQ ID NO: 1987070 - RNA, 19 nt, Artificial Sequence
  Description of Artificial Sequence: Synthetic oligonucleotide
gguuagugcgcugcuugga

SEQ ID NO: 1987071 - RNA, 19 nt, Artificial Sequence
  Description of Artificial Sequence: Synthetic oligonucleotide
gucugugaccagccuggaa

SEQ ID NO: 1987072 - RNA, 19 nt, Artificial Sequence
  Description of Artificial Sequence: Synthetic oligonucleotide
ggacgacuggccucuggga

SEQ ID NO: 1987073 - RNA, 19 nt, Artificial Sequence
  Description of Artificial Sequence: Synthetic oligonucleotide
guagcacuaguugucucau

SEQ ID NO: 1987074 - RNA, 19 nt, Artificial Sequence
  Description of Artificial Sequence: Synthetic oligonucleotide
gaacagccuucacugcuuu

SEQ ID NO: 1987075 - RNA, 19 nt, Artificial Sequence
  Description of Artificial Sequence: Synthetic oligonucleotide
gaccagccuggaagagacc

SEQ ID NO: 1987076 - RNA, 19 nt, Artificial Sequence
  Description of Artificial Sequence: Synthetic oligonucleotide
cuggauagggcaucccauu

SEQ ID NO: 1987077 - RNA, 19 nt, Artificial Sequence
  Description of Artificial Sequence: Synthetic oligonucleotide
ggacguauggcugcaauuu

SEQ ID NO: 1987078 - RNA, 19 nt, Artificial Sequence
  Description of Artificial Sequence: Synthetic oligonucleotide
ccgaggacugaccccacuc

SEQ ID NO: 1987079 - RNA, 19 nt, Artificial Sequence
  Description of Artificial Sequence: Synthetic oligonucleotide
gagggguuagugcgcugcu

SEQ ID NO: 1987080 - RNA, 19 nt, Artificial Sequence
  Description of Artificial Sequence: Synthetic oligonucleotide
ggaugaguggccugaggau

SEQ ID NO: 1987081 - RNA, 19 nt, Artificial Sequence
  Description of Artificial Sequence: Synthetic oligonucleotide
gcucggacgcucuuugaua

SEQ ID NO: 1987082 - RNA, 19 nt, Artificial Sequence
  Description of Artificial Sequence: Synthetic oligonucleotide
cuuuccaguucggacuccu

SEQ ID NO: 1987083 - RNA, 19 nt, Artificial Sequence
  Description of Artificial Sequence: Synthetic oligonucleotide
guguggacgacuggccucu

SEQ ID NO: 1987084 - RNA, 19 nt, Artificial Sequence
  Description of Artificial Sequence: Synthetic oligonucleotide
cuuucuaaugcagcccauu

SEQ ID NO: 1987085 - RNA, 19 nt, Artificial Sequence
  Description of Artificial Sequence: Synthetic oligonucleotide
ccacagaacagccuucacu

SEQ ID NO: 1987086 - RNA, 19 nt, Artificial Sequence
  Description of Artificial Sequence: Synthetic oligonucleotide
ccuuggaaagguggugcug

SEQ ID NO: 1987087 - RNA, 19 nt, Artificial Sequence
  Description of Artificial Sequence: Synthetic oligonucleotide
guucggacuccuucuucau

SEQ ID NO: 1987088 - RNA, 19 nt, Artificial Sequence
  Description of Artificial Sequence: Synthetic oligonucleotide
ccucagagggaguacgucu

SEQ ID NO: 1987089 - RNA, 19 nt, Artificial Sequence
  Description of Artificial Sequence: Synthetic oligonucleotide
gguacauuagaggcuggau

SEQ ID NO: 1987090 - RNA, 19 nt, Artificial Sequence
  Description of Artificial Sequence: Synthetic oligonucleotide
gcacuaguugucucauacu

SEQ ID NO: 1987091 - RNA, 19 nt, Artificial Sequence
  Description of Artificial Sequence: Synthetic oligonucleotide
gccaaacacguuggcuacc

SEQ ID NO: 1987092 - RNA, 19 nt, Artificial Sequence
  Description of Artificial Sequence: Synthetic oligonucleotide
accagcggucagccucaga

SEQ ID NO: 1987093 - RNA, 19 nt, Artificial Sequence
  Description of Artificial Sequence: Synthetic oligonucleotide
gggaugggguaaugcccac

SEQ ID NO: 1987094 - RNA, 19 nt, Artificial Sequence
  Description of Artificial Sequence: Synthetic oligonucleotide
ggaguacgucugugaccag

SEQ ID NO: 1987095 - RNA, 19 nt, Artificial Sequence
  Description of Artificial Sequence: Synthetic oligonucleotide
ccacuacagguacauuaga

SEQ ID NO: 1987096 - RNA, 19 nt, Artificial Sequence
  Description of Artificial Sequence: Synthetic oligonucleotide
agggguuagugcgcugcuu

SEQ ID NO: 1987097 - RNA, 19 nt, Artificial Sequence
  Description of Artificial Sequence: Synthetic oligonucleotide
acgcucuuugauacuucuu

SEQ ID NO: 1987098 - RNA, 19 nt, Artificial Sequence
  Description of Artificial Sequence: Synthetic oligonucleotide
guacgucugugaccagccu

SEQ ID NO: 1987099 - RNA, 19 nt, Artificial Sequence
  Description of Artificial Sequence: Synthetic oligonucleotide
ccgcugacacccacagaac

SEQ ID NO: 1987100 - RNA, 19 nt, Artificial Sequence
  Description of Artificial Sequence: Synthetic oligonucleotide
aucaggggcaugggcccaa

SEQ ID NO: 1987101 - RNA, 19 nt, Artificial Sequence
  Description of Artificial Sequence: Synthetic oligonucleotide
cuggccucugggacauaaa

SEQ ID NO: 1987102 - RNA, 19 nt, Artificial Sequence
  Description of Artificial Sequence: Synthetic oligonucleotide
cgcugacacccacagaaca

SEQ ID NO: 1987103 - RNA, 19 nt, Artificial Sequence
  Description of Artificial Sequence: Synthetic oligonucleotide
cagaaccauugaggugcug

SEQ ID NO: 1987104 - RNA, 19 nt, Artificial Sequence
  Description of Artificial Sequence: Synthetic oligonucleotide
ggcauugcuacaggugcua

SEQ ID NO: 1987105 - RNA, 19 nt, Artificial Sequence
  Description of Artificial Sequence: Synthetic oligonucleotide
acccgaggacugaccccac

SEQ ID NO: 1987106 - RNA, 19 nt, Artificial Sequence
  Description of Artificial Sequence: Synthetic oligonucleotide
cuacaggugcuagagccuu

SEQ ID NO: 1987107 - RNA, 19 nt, Artificial Sequence
  Description of Artificial Sequence: Synthetic oligonucleotide
ggacgcucuuugauacuuc

SEQ ID NO: 1987108 - RNA, 19 nt, Artificial Sequence
  Description of Artificial Sequence: Synthetic oligonucleotide
gaccucugcaugccugcuu

SEQ ID NO: 1987109 - RNA, 19 nt, Artificial Sequence
  Description of Artificial Sequence: Synthetic oligonucleotide
cccacagaacagccuucac

SEQ ID NO: 1987110 - RNA, 19 nt, Artificial Sequence
  Description of Artificial Sequence: Synthetic oligonucleotide
ggcucggacgcucuuugau

SEQ ID NO: 1987111 - RNA, 19 nt, Artificial Sequence
  Description of Artificial Sequence: Synthetic oligonucleotide
gcgaggaaugcauuuccuu

SEQ ID NO: 1987112 - RNA, 19 nt, Artificial Sequence
  Description of Artificial Sequence: Synthetic oligonucleotide
gccucagagggaguacguc

SEQ ID NO: 1987113 - RNA, 19 nt, Artificial Sequence
  Description of Artificial Sequence: Synthetic oligonucleotide
ugcccacuacagguacauu

SEQ ID NO: 1987114 - RNA, 19 nt, Artificial Sequence
  Description of Artificial Sequence: Synthetic oligonucleotide
caucaggggcaugggccca

SEQ ID NO: 1987115 - RNA, 19 nt, Artificial Sequence
  Description of Artificial Sequence: Synthetic oligonucleotide
ggguugguaggggaggggu

SEQ ID NO: 1987116 - RNA, 19 nt, Artificial Sequence
  Description of Artificial Sequence: Synthetic oligonucleotide
cucugcaugccugcuuccu

SEQ ID NO: 1987117 - RNA, 19 nt, Artificial Sequence
  Description of Artificial Sequence: Synthetic oligonucleotide
ggcccaaggguugguuuca

SEQ ID NO: 1987118 - RNA, 19 nt, Artificial Sequence
  Description of Artificial Sequence: Synthetic oligonucleotide
ccccacucaguccccggac

SEQ ID NO: 1987119 - RNA, 19 nt, Artificial Sequence
  Description of Artificial Sequence: Synthetic oligonucleotide
gagaggcgaggaaugcauu

SEQ ID NO: 1987120 - RNA, 19 nt, Artificial Sequence
  Description of Artificial Sequence: Synthetic oligonucleotide
gcuacaggugcuagagccu

SEQ ID NO: 1987121 - RNA, 19 nt, Artificial Sequence
  Description of Artificial Sequence: Synthetic oligonucleotide
ccugaggccagccugccau

SEQ ID NO: 1987122 - RNA, 19 nt, Artificial Sequence
  Description of Artificial Sequence: Synthetic oligonucleotide
cguauggcugcaauuuccu

SEQ ID NO: 1987123 - RNA, 19 nt, Artificial Sequence
  Description of Artificial Sequence: Synthetic oligonucleotide
ccauccgcugacacccaca

SEQ ID NO: 1987124 - RNA, 19 nt, Artificial Sequence
  Description of Artificial Sequence: Synthetic oligonucleotide
cauuggccacaggguagga

SEQ ID NO: 1987125 - RNA, 19 nt, Artificial Sequence
  Description of Artificial Sequence: Synthetic oligonucleotide
gcuggauagggcaucccau

SEQ ID NO: 1987126 - RNA, 19 nt, Artificial Sequence
  Description of Artificial Sequence: Synthetic oligonucleotide
gaggccagccugccaucau

SEQ ID NO: 1987127 - RNA, 19 nt, Artificial Sequence
  Description of Artificial Sequence: Synthetic oligonucleotide
cguggccaagguacuuaac

SEQ ID NO: 1987128 - RNA, 19 nt, Artificial Sequence
  Description of Artificial Sequence: Synthetic oligonucleotide
ggcgaggaaugcauuuccu

SEQ ID NO: 1987129 - RNA, 19 nt, Artificial Sequence
  Description of Artificial Sequence: Synthetic oligonucleotide
caaacacguuggcuaccau

SEQ ID NO: 1987130 - RNA, 19 nt, Artificial Sequence
  Description of Artificial Sequence: Synthetic oligonucleotide
cacucaguccccggacgua

SEQ ID NO: 1987131 - RNA, 19 nt, Artificial Sequence
  Description of Artificial Sequence: Synthetic oligonucleotide
gguuucacgcacaggcauu

SEQ ID NO: 1987132 - RNA, 19 nt, Artificial Sequence
  Description of Artificial Sequence: Synthetic oligonucleotide
gggcucggacgcucuuuga

SEQ ID NO: 1987133 - RNA, 19 nt, Artificial Sequence
  Description of Artificial Sequence: Synthetic oligonucleotide
guccauccgcugacaccca

SEQ ID NO: 1987134 - RNA, 19 nt, Artificial Sequence
  Description of Artificial Sequence: Synthetic oligonucleotide
cugcuuggacuugcuuucu

SEQ ID NO: 1987135 - RNA, 19 nt, Artificial Sequence
  Description of Artificial Sequence: Synthetic oligonucleotide
ggaugggguaaugcccacu

SEQ ID NO: 1987136 - RNA, 19 nt, Artificial Sequence
  Description of Artificial Sequence: Synthetic oligonucleotide
cagggaccucugcaugccu

SEQ ID NO: 1987137 - RNA, 19 nt, Artificial Sequence
  Description of Artificial Sequence: Synthetic oligonucleotide
caggugcuagagccuuagu

SEQ ID NO: 1987138 - RNA, 19 nt, Artificial Sequence
  Description of Artificial Sequence: Synthetic oligonucleotide
caggugccugcagggaccu

SEQ ID NO: 1987139 - RNA, 19 nt, Artificial Sequence
  Description of Artificial Sequence: Synthetic oligonucleotide
cuacguggccaagguacuu

SEQ ID NO: 1987140 - RNA, 19 nt, Artificial Sequence
  Description of Artificial Sequence: Synthetic oligonucleotide
ggguaggacugggcaggga

SEQ ID NO: 1987141 - RNA, 19 nt, Artificial Sequence
  Description of Artificial Sequence: Synthetic oligonucleotide
gguugguaggggagggguu

SEQ ID NO: 1987142 - RNA, 19 nt, Artificial Sequence
  Description of Artificial Sequence: Synthetic oligonucleotide
ccggacguauggcugcaau

SEQ ID NO: 1987143 - RNA, 19 nt, Artificial Sequence
  Description of Artificial Sequence: Synthetic oligonucleotide
gccaggcuuggugacugau

SEQ ID NO: 1987144 - RNA, 19 nt, Artificial Sequence
  Description of Artificial Sequence: Synthetic oligonucleotide
gggugggaccacacccacu

SEQ ID NO: 1987145 - RNA, 19 nt, Artificial Sequence
  Description of Artificial Sequence: Synthetic oligonucleotide
gcagcccauugagcuucga

SEQ ID NO: 1987146 - RNA, 19 nt, Artificial Sequence
  Description of Artificial Sequence: Synthetic oligonucleotide
cggacguauggcugcaauu

SEQ ID NO: 1987147 - RNA, 19 nt, Artificial Sequence
  Description of Artificial Sequence: Synthetic oligonucleotide
gacuggccucugggacaua

SEQ ID NO: 1987148 - RNA, 19 nt, Artificial Sequence
  Description of Artificial Sequence: Synthetic oligonucleotide
gcgcugcuuggacuugcuu

SEQ ID NO: 1987149 - RNA, 19 nt, Artificial Sequence
  Description of Artificial Sequence: Synthetic oligonucleotide
cggacgcucuuugauacuu

SEQ ID NO: 1987150 - RNA, 19 nt, Artificial Sequence
  Description of Artificial Sequence: Synthetic oligonucleotide
cccgaggacugaccccacu

SEQ ID NO: 1987151 - RNA, 19 nt, Artificial Sequence
  Description of Artificial Sequence: Synthetic oligonucleotide
ccccggacguauggcugca

SEQ ID NO: 1987152 - RNA, 19 nt, Artificial Sequence
  Description of Artificial Sequence: Synthetic oligonucleotide
gcggaggccuguggcugcu

SEQ ID NO: 1987153 - RNA, 19 nt, Artificial Sequence
  Description of Artificial Sequence: Synthetic oligonucleotide
cccggacguauggcugcaa

SEQ ID NO: 1987154 - RNA, 19 nt, Artificial Sequence
  Description of Artificial Sequence: Synthetic oligonucleotide
auaaugagaaaccuggggc

SEQ ID NO: 1987155 - RNA, 19 nt, Artificial Sequence
  Description of Artificial Sequence: Synthetic oligonucleotide
aauaaugagaaaccugggg

SEQ ID NO: 1987156 - RNA, 19 nt, Artificial Sequence
  Description of Artificial Sequence: Synthetic oligonucleotide
uauacuaguaaacacuuug

SEQ ID NO: 1987157 - RNA, 19 nt, Artificial Sequence
  Description of Artificial Sequence: Synthetic oligonucleotide
ugaaauauuccccacauuc

SEQ ID NO: 1987158 - RNA, 19 nt, Artificial Sequence
  Description of Artificial Sequence: Synthetic oligonucleotide
uguaacuggaauuaaagac

SEQ ID NO: 1987159 - RNA, 19 nt, Artificial Sequence
  Description of Artificial Sequence: Synthetic oligonucleotide
uuaagaugagauauacuag

SEQ ID NO: 1987160 - RNA, 19 nt, Artificial Sequence
  Description of Artificial Sequence: Synthetic oligonucleotide
gaauuaaagacucucccgc

SEQ ID NO: 1987161 - RNA, 19 nt, Artificial Sequence
  Description of Artificial Sequence: Synthetic oligonucleotide
agauguuaugcuugaaggc

SEQ ID NO: 1987162 - RNA, 19 nt, Artificial Sequence
  Description of Artificial Sequence: Synthetic oligonucleotide
uucucugcgaaccauacug

SEQ ID NO: 1987163 - RNA, 19 nt, Artificial Sequence
  Description of Artificial Sequence: Synthetic oligonucleotide
uuuugggugaaauauuccc

SEQ ID NO: 1987164 - RNA, 19 nt, Artificial Sequence
  Description of Artificial Sequence: Synthetic oligonucleotide
ucauugaauaaugagaaac

SEQ ID NO: 1987165 - RNA, 19 nt, Artificial Sequence
  Description of Artificial Sequence: Synthetic oligonucleotide
agaagcguuucuuaacgcc

SEQ ID NO: 1987166 - RNA, 19 nt, Artificial Sequence
  Description of Artificial Sequence: Synthetic oligonucleotide
guuaagaugagauauacua

SEQ ID NO: 1987167 - RNA, 19 nt, Artificial Sequence
  Description of Artificial Sequence: Synthetic oligonucleotide
uccacgaucaccaucgggc

SEQ ID NO: 1987168 - RNA, 19 nt, Artificial Sequence
  Description of Artificial Sequence: Synthetic oligonucleotide
uggaauuaaagacucuccc

SEQ ID NO: 1987169 - RNA, 19 nt, Artificial Sequence
  Description of Artificial Sequence: Synthetic oligonucleotide
uguacgauuucccacacuc

SEQ ID NO: 1987170 - RNA, 19 nt, Artificial Sequence
  Description of Artificial Sequence: Synthetic oligonucleotide
uugaauaaugagaaaccug

SEQ ID NO: 1987171 - RNA, 19 nt, Artificial Sequence
  Description of Artificial Sequence: Synthetic oligonucleotide
aaagcgauaauggacuuug

SEQ ID NO: 1987172 - RNA, 19 nt, Artificial Sequence
  Description of Artificial Sequence: Synthetic oligonucleotide
ugagauauacuaguaaaca

SEQ ID NO: 1987173 - RNA, 19 nt, Artificial Sequence
  Description of Artificial Sequence: Synthetic oligonucleotide
uacuaguaaacacuuugcc

SEQ ID NO: 1987174 - RNA, 19 nt, Artificial Sequence
  Description of Artificial Sequence: Synthetic oligonucleotide
uuugggugaaauauucccc

SEQ ID NO: 1987175 - RNA, 19 nt, Artificial Sequence
  Description of Artificial Sequence: Synthetic oligonucleotide
uguagaaaugguucagaag

SEQ ID NO: 1987176 - RNA, 19 nt, Artificial Sequence
  Description of Artificial Sequence: Synthetic oligonucleotide
auuaaagacucucccgcac

SEQ ID NO: 1987177 - RNA, 19 nt, Artificial Sequence
  Description of Artificial Sequence: Synthetic oligonucleotide
auuucauugaauaaugaga

SEQ ID NO: 1987178 - RNA, 19 nt, Artificial Sequence
  Description of Artificial Sequence: Synthetic oligonucleotide
aaccaguucucugcgaacc

SEQ ID NO: 1987179 - RNA, 19 nt, Artificial Sequence
  Description of Artificial Sequence: Synthetic oligonucleotide
gagauauacuaguaaacac

SEQ ID NO: 1987180 - RNA, 19 nt, Artificial Sequence
  Description of Artificial Sequence: Synthetic oligonucleotide
cugcgaaccauacugacgg

SEQ ID NO: 1987181 - RNA, 19 nt, Artificial Sequence
  Description of Artificial Sequence: Synthetic oligonucleotide
uuccccacaccuauaacgg

SEQ ID NO: 1987182 - RNA, 19 nt, Artificial Sequence
  Description of Artificial Sequence: Synthetic oligonucleotide
aagcucaagucucagcgag

SEQ ID NO: 1987183 - RNA, 19 nt, Artificial Sequence
  Description of Artificial Sequence: Synthetic oligonucleotide
aagggcuugccauggacgg

SEQ ID NO: 1987184 - RNA, 19 nt, Artificial Sequence
  Description of Artificial Sequence: Synthetic oligonucleotide
ugucaucccagaaagcuca

SEQ ID NO: 1987185 - RNA, 19 nt, Artificial Sequence
  Description of Artificial Sequence: Synthetic oligonucleotide
uaaugagaaaccuggggca

SEQ ID NO: 1987186 - RNA, 19 nt, Artificial Sequence
  Description of Artificial Sequence: Synthetic oligonucleotide
gacgaaaccaguucucugc

SEQ ID NO: 1987187 - RNA, 19 nt, Artificial Sequence
  Description of Artificial Sequence: Synthetic oligonucleotide
aauuaaagacucucccgca

SEQ ID NO: 1987188 - RNA, 19 nt, Artificial Sequence
  Description of Artificial Sequence: Synthetic oligonucleotide
uccgcgaucaaggagaagc

SEQ ID NO: 1987189 - RNA, 19 nt, Artificial Sequence
  Description of Artificial Sequence: Synthetic oligonucleotide
guuguaacuggaauuaaag

SEQ ID NO: 1987190 - RNA, 19 nt, Artificial Sequence
  Description of Artificial Sequence: Synthetic oligonucleotide
ucugcgaaccauacugacg

SEQ ID NO: 1987191 - RNA, 19 nt, Artificial Sequence
  Description of Artificial Sequence: Synthetic oligonucleotide
guucagaaggccuucgcgg

SEQ ID NO: 1987192 - RNA, 19 nt, Artificial Sequence
  Description of Artificial Sequence: Synthetic oligonucleotide
uuguaacuggaauuaaaga

SEQ ID NO: 1987193 - RNA, 19 nt, Artificial Sequence
  Description of Artificial Sequence: Synthetic oligonucleotide
agaaagcucaagucucagc

SEQ ID NO: 1987194 - RNA, 19 nt, Artificial Sequence
  Description of Artificial Sequence: Synthetic oligonucleotide
ggaauuaaagacucucccg

SEQ ID NO: 1987195 - RNA, 19 nt, Artificial Sequence
  Description of Artificial Sequence: Synthetic oligonucleotide
agauauacuaguaaacacu

SEQ ID NO: 1987196 - RNA, 19 nt, Artificial Sequence
  Description of Artificial Sequence: Synthetic oligonucleotide
augagauauacuaguaaac

SEQ ID NO: 1987197 - RNA, 19 nt, Artificial Sequence
  Description of Artificial Sequence: Synthetic oligonucleotide
ugggacauggcuaaucccu

SEQ ID NO: 1987198 - RNA, 19 nt, Artificial Sequence
  Description of Artificial Sequence: Synthetic oligonucleotide
uuccauuccucccaggaga

SEQ ID NO: 1987199 - RNA, 19 nt, Artificial Sequence
  Description of Artificial Sequence: Synthetic oligonucleotide
guguguaucuuccaguggc

SEQ ID NO: 1987200 - RNA, 19 nt, Artificial Sequence
  Description of Artificial Sequence: Synthetic oligonucleotide
uguguaucuuccaguggcg

SEQ ID NO: 1987201 - RNA, 19 nt, Artificial Sequence
  Description of Artificial Sequence: Synthetic oligonucleotide
auugaauaaugagaaaccu

SEQ ID NO: 1987202 - RNA, 19 nt, Artificial Sequence
  Description of Artificial Sequence: Synthetic oligonucleotide
agaguuuugggugaaauau

SEQ ID NO: 1987203 - RNA, 19 nt, Artificial Sequence
  Description of Artificial Sequence: Synthetic oligonucleotide
aaccucagauccccucucc

SEQ ID NO: 1987204 - RNA, 19 nt, Artificial Sequence
  Description of Artificial Sequence: Synthetic oligonucleotide
aaaugagggagauguuaug

SEQ ID NO: 1987205 - RNA, 19 nt, Artificial Sequence
  Description of Artificial Sequence: Synthetic oligonucleotide
gcgauaauggacuuugagg

SEQ ID NO: 1987206 - RNA, 19 nt, Artificial Sequence
  Description of Artificial Sequence: Synthetic oligonucleotide
uguaagucaccugaugccc

SEQ ID NO: 1987207 - RNA, 19 nt, Artificial Sequence
  Description of Artificial Sequence: Synthetic oligonucleotide
gaaccauacugacggaucc

SEQ ID NO: 1987208 - RNA, 19 nt, Artificial Sequence
  Description of Artificial Sequence: Synthetic oligonucleotide
gaggacacaaguucaaaga

SEQ ID NO: 1987209 - RNA, 19 nt, Artificial Sequence
  Description of Artificial Sequence: Synthetic oligonucleotide
ugaguuaugucaucccaga

SEQ ID NO: 1987210 - RNA, 19 nt, Artificial Sequence
  Description of Artificial Sequence: Synthetic oligonucleotide
ugggagauuucauugaaua

SEQ ID NO: 1987211 - RNA, 19 nt, Artificial Sequence
  Description of Artificial Sequence: Synthetic oligonucleotide
aggagaagcguuucuuaac

SEQ ID NO: 1987212 - RNA, 19 nt, Artificial Sequence
  Description of Artificial Sequence: Synthetic oligonucleotide
uauaacggcuuuuccccgg

SEQ ID NO: 1987213 - RNA, 19 nt, Artificial Sequence
  Description of Artificial Sequence: Synthetic oligonucleotide
agcgauaauggacuuugag

SEQ ID NO: 1987214 - RNA, 19 nt, Artificial Sequence
  Description of Artificial Sequence: Synthetic oligonucleotide
ggagaagcguuucuuaacg

SEQ ID NO: 1987215 - RNA, 19 nt, Artificial Sequence
  Description of Artificial Sequence: Synthetic oligonucleotide
aaucccuccugcaagcccg

SEQ ID NO: 1987216 - RNA, 19 nt, Artificial Sequence
  Description of Artificial Sequence: Synthetic oligonucleotide
ucugucaucacagucuggu

SEQ ID NO: 1987217 - RNA, 19 nt, Artificial Sequence
  Description of Artificial Sequence: Synthetic oligonucleotide
aguuaugucaucccagaaa

SEQ ID NO: 1987218 - RNA, 19 nt, Artificial Sequence
  Description of Artificial Sequence: Synthetic oligonucleotide
ucgugaaucucagugcagg

SEQ ID NO: 1987219 - RNA, 19 nt, Artificial Sequence
  Description of Artificial Sequence: Synthetic oligonucleotide
aaaccucagauccccucuc

SEQ ID NO: 1987220 - RNA, 19 nt, Artificial Sequence
  Description of Artificial Sequence: Synthetic oligonucleotide
aaggagaagcguuucuuaa

SEQ ID NO: 1987221 - RNA, 19 nt, Artificial Sequence
  Description of Artificial Sequence: Synthetic oligonucleotide
uugggugccuccccaaccg

SEQ ID NO: 1987222 - RNA, 19 nt, Artificial Sequence
  Description of Artificial Sequence: Synthetic oligonucleotide
ggagucgugaaucucagug

SEQ ID NO: 1987223 - RNA, 19 nt, Artificial Sequence
  Description of Artificial Sequence: Synthetic oligonucleotide
gacgguuaggugcucaaug

SEQ ID NO: 1987224 - RNA, 19 nt, Artificial Sequence
  Description of Artificial Sequence: Synthetic oligonucleotide
uggacuuugaggccuuccc

SEQ ID NO: 1987225 - RNA, 19 nt, Artificial Sequence
  Description of Artificial Sequence: Synthetic oligonucleotide
ugugaaguccuugauggga

SEQ ID NO: 1987226 - RNA, 19 nt, Artificial Sequence
  Description of Artificial Sequence: Synthetic oligonucleotide
acgaucaccaucgggcucc

SEQ ID NO: 1987227 - RNA, 19 nt, Artificial Sequence
  Description of Artificial Sequence: Synthetic oligonucleotide
gaugucugucaucacaguc

SEQ ID NO: 1987228 - RNA, 19 nt, Artificial Sequence
  Description of Artificial Sequence: Synthetic oligonucleotide
gacuuugaggccuucccug

SEQ ID NO: 1987229 - RNA, 19 nt, Artificial Sequence
  Description of Artificial Sequence: Synthetic oligonucleotide
uccuguacgauuucccaca

SEQ ID NO: 1987230 - RNA, 19 nt, Artificial Sequence
  Description of Artificial Sequence: Synthetic oligonucleotide
aaagcucaagucucagcga

SEQ ID NO: 1987231 - RNA, 19 nt, Artificial Sequence
  Description of Artificial Sequence: Synthetic oligonucleotide
agaugagauauacuaguaa

SEQ ID NO: 1987232 - RNA, 19 nt, Artificial Sequence
  Description of Artificial Sequence: Synthetic oligonucleotide
ccuugaugggaaaugaggg

SEQ ID NO: 1987233 - RNA, 19 nt, Artificial Sequence
  Description of Artificial Sequence: Synthetic oligonucleotide
cuuaaagggcuugccaugg

SEQ ID NO: 1987234 - RNA, 19 nt, Artificial Sequence
  Description of Artificial Sequence: Synthetic oligonucleotide
auuucgcccgugugaaagc

SEQ ID NO: 1987235 - RNA, 19 nt, Artificial Sequence
  Description of Artificial Sequence: Synthetic oligonucleotide
agucgugaaucucagugca

SEQ ID NO: 1987236 - RNA, 19 nt, Artificial Sequence
  Description of Artificial Sequence: Synthetic oligonucleotide
ccuauaacggcuuuucccc

SEQ ID NO: 1987237 - RNA, 19 nt, Artificial Sequence
  Description of Artificial Sequence: Synthetic oligonucleotide
guguaagucaccugaugcc

SEQ ID NO: 1987238 - RNA, 19 nt, Artificial Sequence
  Description of Artificial Sequence: Synthetic oligonucleotide
ggagauguuaugcuugaag

SEQ ID NO: 1987239 - RNA, 19 nt, Artificial Sequence
  Description of Artificial Sequence: Synthetic oligonucleotide
acaaaccucagauccccuc

SEQ ID NO: 1987240 - RNA, 19 nt, Artificial Sequence
  Description of Artificial Sequence: Synthetic oligonucleotide
acgaaaccaguucucugcg

SEQ ID NO: 1987241 - RNA, 19 nt, Artificial Sequence
  Description of Artificial Sequence: Synthetic oligonucleotide
gagucgugaaucucagugc

SEQ ID NO: 1987242 - RNA, 19 nt, Artificial Sequence
  Description of Artificial Sequence: Synthetic oligonucleotide
ggagucaucaagcaguuuc

SEQ ID NO: 1987243 - RNA, 19 nt, Artificial Sequence
  Description of Artificial Sequence: Synthetic oligonucleotide
ggccacaaaccucagaucc

SEQ ID NO: 1987244 - RNA, 19 nt, Artificial Sequence
  Description of Artificial Sequence: Synthetic oligonucleotide
uccgcaagauuccaccuga

SEQ ID NO: 1987245 - RNA, 19 nt, Artificial Sequence
  Description of Artificial Sequence: Synthetic oligonucleotide
auaauggacuuugaggccu

SEQ ID NO: 1987246 - RNA, 19 nt, Artificial Sequence
  Description of Artificial Sequence: Synthetic oligonucleotide
uacgccuucccacacucgc

SEQ ID NO: 1987247 - RNA, 19 nt, Artificial Sequence
  Description of Artificial Sequence: Synthetic oligonucleotide
gacacaaguucaaagaugu

SEQ ID NO: 1987248 - RNA, 19 nt, Artificial Sequence
  Description of Artificial Sequence: Synthetic oligonucleotide
cacuuugccacaguaagug

SEQ ID NO: 1987249 - RNA, 19 nt, Artificial Sequence
  Description of Artificial Sequence: Synthetic oligonucleotide
ucacggccaaagcagacga

SEQ ID NO: 1987250 - RNA, 19 nt, Artificial Sequence
  Description of Artificial Sequence: Synthetic oligonucleotide
uucucaguggccagggccu

SEQ ID NO: 1987251 - RNA, 19 nt, Artificial Sequence
  Description of Artificial Sequence: Synthetic oligonucleotide
cucagauccccucuccgcg

SEQ ID NO: 1987252 - RNA, 19 nt, Artificial Sequence
  Description of Artificial Sequence: Synthetic oligonucleotide
agaaaccuggggcagggcu

SEQ ID NO: 1987253 - RNA, 19 nt, Artificial Sequence
  Description of Artificial Sequence: Synthetic oligonucleotide
cuauaacggcuuuuccccg

SEQ ID NO: 1987254 - RNA, 19 nt, Artificial Sequence
  Description of Artificial Sequence: Synthetic oligonucleotide
aggacacaaguucaaagau

SEQ ID NO: 1987255 - RNA, 19 nt, Artificial Sequence
  Description of Artificial Sequence: Synthetic oligonucleotide
aaguccuugaugggaaaug

SEQ ID NO: 1987256 - RNA, 19 nt, Artificial Sequence
  Description of Artificial Sequence: Synthetic oligonucleotide
ggauuugccacacucgcug

SEQ ID NO: 1987257 - RNA, 19 nt, Artificial Sequence
  Description of Artificial Sequence: Synthetic oligonucleotide
uaaucccuccugcaagccc

SEQ ID NO: 1987258 - RNA, 19 nt, Artificial Sequence
  Description of Artificial Sequence: Synthetic oligonucleotide
gagaagcguuucuuaacgc

SEQ ID NO: 1987259 - RNA, 19 nt, Artificial Sequence
  Description of Artificial Sequence: Synthetic oligonucleotide
cauggcuaaucccuccugc

SEQ ID NO: 1987260 - RNA, 19 nt, Artificial Sequence
  Description of Artificial Sequence: Synthetic oligonucleotide
uguaucuuccaguggcggu

SEQ ID NO: 1987261 - RNA, 19 nt, Artificial Sequence
  Description of Artificial Sequence: Synthetic oligonucleotide
caagucucagcgaggacac

SEQ ID NO: 1987262 - RNA, 19 nt, Artificial Sequence
  Description of Artificial Sequence: Synthetic oligonucleotide
cauuucgcccgugugaaag

SEQ ID NO: 1987263 - RNA, 19 nt, Artificial Sequence
  Description of Artificial Sequence: Synthetic oligonucleotide
gguucagaaggccuucgcg

SEQ ID NO: 1987264 - RNA, 19 nt, Artificial Sequence
  Description of Artificial Sequence: Synthetic oligonucleotide
uguacgccuucccacacuc

SEQ ID NO: 1987265 - RNA, 19 nt, Artificial Sequence
  Description of Artificial Sequence: Synthetic oligonucleotide
caaccgaaaggcuuuucug

SEQ ID NO: 1987266 - RNA, 19 nt, Artificial Sequence
  Description of Artificial Sequence: Synthetic oligonucleotide
uucauugaauaaugagaaa

SEQ ID NO: 1987267 - RNA, 19 nt, Artificial Sequence
  Description of Artificial Sequence: Synthetic oligonucleotide
uaaagacucucccgcacuc

SEQ ID NO: 1987268 - RNA, 19 nt, Artificial Sequence
  Description of Artificial Sequence: Synthetic oligonucleotide
uucuguacgccuucccaca

SEQ ID NO: 1987269 - RNA, 19 nt, Artificial Sequence
  Description of Artificial Sequence: Synthetic oligonucleotide
agggcggagagaucuccgc

SEQ ID NO: 1987270 - RNA, 19 nt, Artificial Sequence
  Description of Artificial Sequence: Synthetic oligonucleotide
ucucugcgaaccauacuga

SEQ ID NO: 1987271 - RNA, 19 nt, Artificial Sequence
  Description of Artificial Sequence: Synthetic oligonucleotide
acgguuaggugcucaauga

SEQ ID NO: 1987272 - RNA, 19 nt, Artificial Sequence
  Description of Artificial Sequence: Synthetic oligonucleotide
accgaaaggcuuuucugca

SEQ ID NO: 1987273 - RNA, 19 nt, Artificial Sequence
  Description of Artificial Sequence: Synthetic oligonucleotide
gguuaggugcucaaugagg

SEQ ID NO: 1987274 - RNA, 19 nt, Artificial Sequence
  Description of Artificial Sequence: Synthetic oligonucleotide
aaagcagacgaaaccaguu

SEQ ID NO: 1987275 - RNA, 19 nt, Artificial Sequence
  Description of Artificial Sequence: Synthetic oligonucleotide
cucaaaggacacacagccc

SEQ ID NO: 1987276 - RNA, 19 nt, Artificial Sequence
  Description of Artificial Sequence: Synthetic oligonucleotide
gccauggacgguuaggugc

SEQ ID NO: 1987277 - RNA, 19 nt, Artificial Sequence
  Description of Artificial Sequence: Synthetic oligonucleotide
ucaccugaugcccgaggag

SEQ ID NO: 1987278 - RNA, 19 nt, Artificial Sequence
  Description of Artificial Sequence: Synthetic oligonucleotide
ucucagcgaggacacaagu

SEQ ID NO: 1987279 - RNA, 19 nt, Artificial Sequence
  Description of Artificial Sequence: Synthetic oligonucleotide
cuugaugggaaaugaggga

SEQ ID NO: 1987280 - RNA, 19 nt, Artificial Sequence
  Description of Artificial Sequence: Synthetic oligonucleotide
ucucagggcucuugggugc

SEQ ID NO: 1987281 - RNA, 19 nt, Artificial Sequence
  Description of Artificial Sequence: Synthetic oligonucleotide
cacaguaagugcauuugca

SEQ ID NO: 1987282 - RNA, 19 nt, Artificial Sequence
  Description of Artificial Sequence: Synthetic oligonucleotide
guaagucaccugaugcccg

SEQ ID NO: 1987283 - RNA, 19 nt, Artificial Sequence
  Description of Artificial Sequence: Synthetic oligonucleotide
caagauuccaccugaguua

SEQ ID NO: 1987284 - RNA, 19 nt, Artificial Sequence
  Description of Artificial Sequence: Synthetic oligonucleotide
accucagauccccucuccg

SEQ ID NO: 1987285 - RNA, 19 nt, Artificial Sequence
  Description of Artificial Sequence: Synthetic oligonucleotide
cuugccauggacgguuagg

SEQ ID NO: 1987286 - RNA, 19 nt, Artificial Sequence
  Description of Artificial Sequence: Synthetic oligonucleotide
gauauacuaguaaacacuu

SEQ ID NO: 1987287 - RNA, 19 nt, Artificial Sequence
  Description of Artificial Sequence: Synthetic oligonucleotide
aagaugagauauacuagua

SEQ ID NO: 1987288 - RNA, 19 nt, Artificial Sequence
  Description of Artificial Sequence: Synthetic oligonucleotide
accaucgggcuccacagga

SEQ ID NO: 1987289 - RNA, 19 nt, Artificial Sequence
  Description of Artificial Sequence: Synthetic oligonucleotide
uaagucaccugaugcccga

SEQ ID NO: 1987290 - RNA, 19 nt, Artificial Sequence
  Description of Artificial Sequence: Synthetic oligonucleotide
gagaucuccgcaagauucc

SEQ ID NO: 1987291 - RNA, 19 nt, Artificial Sequence
  Description of Artificial Sequence: Synthetic oligonucleotide
uuaaagggcuugccaugga

SEQ ID NO: 1987292 - RNA, 19 nt, Artificial Sequence
  Description of Artificial Sequence: Synthetic oligonucleotide
agucaccugaugcccgagg

SEQ ID NO: 1987293 - RNA, 19 nt, Artificial Sequence
  Description of Artificial Sequence: Synthetic oligonucleotide
uauuccccacauucacugc

SEQ ID NO: 1987294 - RNA, 19 nt, Artificial Sequence
  Description of Artificial Sequence: Synthetic oligonucleotide
uugccauggacgguuaggu

SEQ ID NO: 1987295 - RNA, 19 nt, Artificial Sequence
  Description of Artificial Sequence: Synthetic oligonucleotide
uguuaugcuugaaggcuuu

SEQ ID NO: 1987296 - RNA, 19 nt, Artificial Sequence
  Description of Artificial Sequence: Synthetic oligonucleotide
cuugggugccuccccaacc

SEQ ID NO: 1987297 - RNA, 19 nt, Artificial Sequence
  Description of Artificial Sequence: Synthetic oligonucleotide
auggcuaaucccuccugca

SEQ ID NO: 1987298 - RNA, 19 nt, Artificial Sequence
  Description of Artificial Sequence: Synthetic oligonucleotide
cguguaagucaccugaugc

SEQ ID NO: 1987299 - RNA, 19 nt, Artificial Sequence
  Description of Artificial Sequence: Synthetic oligonucleotide
uuugaggccuucccugcuc

SEQ ID NO: 1987300 - RNA, 19 nt, Artificial Sequence
  Description of Artificial Sequence: Synthetic oligonucleotide
ccuuugggagucaucaagc

SEQ ID NO: 1987301 - RNA, 19 nt, Artificial Sequence
  Description of Artificial Sequence: Synthetic oligonucleotide
cuuaaugaggaaggcuuuc

SEQ ID NO: 1987302 - RNA, 19 nt, Artificial Sequence
  Description of Artificial Sequence: Synthetic oligonucleotide
aguccuugaugggaaauga

SEQ ID NO: 1987303 - RNA, 19 nt, Artificial Sequence
  Description of Artificial Sequence: Synthetic oligonucleotide
gugaaagcgauaauggacu

SEQ ID NO: 1987304 - RNA, 19 nt, Artificial Sequence
  Description of Artificial Sequence: Synthetic oligonucleotide
ucuguacgccuucccacac

SEQ ID NO: 1987305 - RNA, 19 nt, Artificial Sequence
  Description of Artificial Sequence: Synthetic oligonucleotide
guguaucuuccaguggcgg

SEQ ID NO: 1987306 - RNA, 19 nt, Artificial Sequence
  Description of Artificial Sequence: Synthetic oligonucleotide
ggcuaaucccuccugcaag

SEQ ID NO: 1987307 - RNA, 19 nt, Artificial Sequence
  Description of Artificial Sequence: Synthetic oligonucleotide
gugaaucucagugcagggc

SEQ ID NO: 1987308 - RNA, 19 nt, Artificial Sequence
  Description of Artificial Sequence: Synthetic oligonucleotide
cuuugggagucaucaagca

SEQ ID NO: 1987309 - RNA, 19 nt, Artificial Sequence
  Description of Artificial Sequence: Synthetic oligonucleotide
ucuccgcaagauuccaccu

SEQ ID NO: 1987310 - RNA, 19 nt, Artificial Sequence
  Description of Artificial Sequence: Synthetic oligonucleotide
cuguagaaaugguucagaa

SEQ ID NO: 1987311 - RNA, 19 nt, Artificial Sequence
  Description of Artificial Sequence: Synthetic oligonucleotide
aaagacucucccgcacuca

SEQ ID NO: 1987312 - RNA, 19 nt, Artificial Sequence
  Description of Artificial Sequence: Synthetic oligonucleotide
aguuguaacuggaauuaaa

SEQ ID NO: 1987313 - RNA, 19 nt, Artificial Sequence
  Description of Artificial Sequence: Synthetic oligonucleotide
cuccugcaagcccggaucg

SEQ ID NO: 1987314 - RNA, 19 nt, Artificial Sequence
  Description of Artificial Sequence: Synthetic oligonucleotide
ugaaagcgauaauggacuu

SEQ ID NO: 1987315 - RNA, 19 nt, Artificial Sequence
  Description of Artificial Sequence: Synthetic oligonucleotide
ucuugggugccuccccaac

SEQ ID NO: 1987316 - RNA, 19 nt, Artificial Sequence
  Description of Artificial Sequence: Synthetic oligonucleotide
aaguuguaacuggaauuaa

SEQ ID NO: 1987317 - RNA, 19 nt, Artificial Sequence
  Description of Artificial Sequence: Synthetic oligonucleotide
guuaggugcucaaugaggu

SEQ ID NO: 1987318 - RNA, 19 nt, Artificial Sequence
  Description of Artificial Sequence: Synthetic oligonucleotide
acauggcuaaucccuccug

SEQ ID NO: 1987319 - RNA, 19 nt, Artificial Sequence
  Description of Artificial Sequence: Synthetic oligonucleotide
ccaguggcgguuaagauga

SEQ ID NO: 1987320 - RNA, 19 nt, Artificial Sequence
  Description of Artificial Sequence: Synthetic oligonucleotide
gaaaugagggagauguuau

SEQ ID NO: 1987321 - RNA, 19 nt, Artificial Sequence
  Description of Artificial Sequence: Synthetic oligonucleotide
cacggagucgugaaucuca

SEQ ID NO: 1987322 - RNA, 19 nt, Artificial Sequence
  Description of Artificial Sequence: Synthetic oligonucleotide
aaucucagugcagggcgga

SEQ ID NO: 1987323 - RNA, 19 nt, Artificial Sequence
  Description of Artificial Sequence: Synthetic oligonucleotide
ucagauccccucuccgcga

SEQ ID NO: 1987324 - RNA, 19 nt, Artificial Sequence
  Description of Artificial Sequence: Synthetic oligonucleotide
cuccacgaucaccaucggg

SEQ ID NO: 1987325 - RNA, 19 nt, Artificial Sequence
  Description of Artificial Sequence: Synthetic oligonucleotide
agccuccacgaucaccauc

SEQ ID NO: 1987326 - RNA, 19 nt, Artificial Sequence
  Description of Artificial Sequence: Synthetic oligonucleotide
cuucgcggcuucuguacgc

SEQ ID NO: 1987327 - RNA, 19 nt, Artificial Sequence
  Description of Artificial Sequence: Synthetic oligonucleotide
uccacaggauggcggggcc

SEQ ID NO: 1987328 - RNA, 19 nt, Artificial Sequence
  Description of Artificial Sequence: Synthetic oligonucleotide
ucacugcaaccgaaaggcu

SEQ ID NO: 1987329 - RNA, 19 nt, Artificial Sequence
  Description of Artificial Sequence: Synthetic oligonucleotide
auaacggcuuuuccccggu

SEQ ID NO: 1987330 - RNA, 19 nt, Artificial Sequence
  Description of Artificial Sequence: Synthetic oligonucleotide
caucgggcuccacaggaug

SEQ ID NO: 1987331 - RNA, 19 nt, Artificial Sequence
  Description of Artificial Sequence: Synthetic oligonucleotide
gaguuaugucaucccagaa

SEQ ID NO: 1987332 - RNA, 19 nt, Artificial Sequence
  Description of Artificial Sequence: Synthetic oligonucleotide
uuccaguggcgguuaagau

SEQ ID NO: 1987333 - RNA, 19 nt, Artificial Sequence
  Description of Artificial Sequence: Synthetic oligonucleotide
gaaaccuggggcagggcuc

SEQ ID NO: 1987334 - RNA, 19 nt, Artificial Sequence
  Description of Artificial Sequence: Synthetic oligonucleotide
agucucagcgaggacacaa

SEQ ID NO: 1987335 - RNA, 19 nt, Artificial Sequence
  Description of Artificial Sequence: Synthetic oligonucleotide
cuaaucccuccugcaagcc

SEQ ID NO: 1987336 - RNA, 19 nt, Artificial Sequence
  Description of Artificial Sequence: Synthetic oligonucleotide
gucaccugaugcccgagga

SEQ ID NO: 1987337 - RNA, 19 nt, Artificial Sequence
  Description of Artificial Sequence: Synthetic oligonucleotide
ucuuccaguggcgguuaag

SEQ ID NO: 1987338 - RNA, 19 nt, Artificial Sequence
  Description of Artificial Sequence: Synthetic oligonucleotide
gagcacggagucgugaauc

SEQ ID NO: 1987339 - RNA, 19 nt, Artificial Sequence
  Description of Artificial Sequence: Synthetic oligonucleotide
cuuccaguggcgguuaaga

SEQ ID NO: 1987340 - RNA, 19 nt, Artificial Sequence
  Description of Artificial Sequence: Synthetic oligonucleotide
accugaugcccgaggagac

SEQ ID NO: 1987341 - RNA, 19 nt, Artificial Sequence
  Description of Artificial Sequence: Synthetic oligonucleotide
gguugggagauuucauuga

SEQ ID NO: 1987342 - RNA, 19 nt, Artificial Sequence
  Description of Artificial Sequence: Synthetic oligonucleotide
cuccgcaagauuccaccug

SEQ ID NO: 1987343 - RNA, 19 nt, Artificial Sequence
  Description of Artificial Sequence: Synthetic oligonucleotide
agucaucaagcaguuucca

SEQ ID NO: 1987344 - RNA, 19 nt, Artificial Sequence
  Description of Artificial Sequence: Synthetic oligonucleotide
cagggcggagagaucuccg

SEQ ID NO: 1987345 - RNA, 19 nt, Artificial Sequence
  Description of Artificial Sequence: Synthetic oligonucleotide
guucaaagaugucugucau

SEQ ID NO: 1987346 - RNA, 19 nt, Artificial Sequence
  Description of Artificial Sequence: Synthetic oligonucleotide
gagacccgagcacggaguc

SEQ ID NO: 1987347 - RNA, 19 nt, Artificial Sequence
  Description of Artificial Sequence: Synthetic oligonucleotide
aucgggucacccggguggc

SEQ ID NO: 1987348 - RNA, 19 nt, Artificial Sequence
  Description of Artificial Sequence: Synthetic oligonucleotide
caaggagaagcguuucuua

SEQ ID NO: 1987349 - RNA, 19 nt, Artificial Sequence
  Description of Artificial Sequence: Synthetic oligonucleotide
uaauggacuuugaggccuu

SEQ ID NO: 1987350 - RNA, 19 nt, Artificial Sequence
  Description of Artificial Sequence: Synthetic oligonucleotide
uucgcggcuucuguacgcc

SEQ ID NO: 1987351 - RNA, 19 nt, Artificial Sequence
  Description of Artificial Sequence: Synthetic oligonucleotide
acacaaguucaaagauguc

SEQ ID NO: 1987352 - RNA, 19 nt, Artificial Sequence
  Description of Artificial Sequence: Synthetic oligonucleotide
ucuccgcgaucaaggagaa

SEQ ID NO: 1987353 - RNA, 19 nt, Artificial Sequence
  Description of Artificial Sequence: Synthetic oligonucleotide
gggagauuucauugaauaa

SEQ ID NO: 1987354 - RNA, 19 nt, Artificial Sequence
  Description of Artificial Sequence: Synthetic oligonucleotide
ggugaaauauuccccacau

SEQ ID NO: 1987355 - RNA, 19 nt, Artificial Sequence
  Description of Artificial Sequence: Synthetic oligonucleotide
uggcgguuaagaugagaua

SEQ ID NO: 1987356 - RNA, 19 nt, Artificial Sequence
  Description of Artificial Sequence: Synthetic oligonucleotide
uggacgguuaggugcucaa

SEQ ID NO: 1987357 - RNA, 19 nt, Artificial Sequence
  Description of Artificial Sequence: Synthetic oligonucleotide
agcucaagucucagcgagg

SEQ ID NO: 1987358 - RNA, 19 nt, Artificial Sequence
  Description of Artificial Sequence: Synthetic oligonucleotide
cuccccaaccguguaaguc

SEQ ID NO: 1987359 - RNA, 19 nt, Artificial Sequence
  Description of Artificial Sequence: Synthetic oligonucleotide
caggagaaguacacagcca

SEQ ID NO: 1987360 - RNA, 19 nt, Artificial Sequence
  Description of Artificial Sequence: Synthetic oligonucleotide
caaccguguaagucaccug

SEQ ID NO: 1987361 - RNA, 19 nt, Artificial Sequence
  Description of Artificial Sequence: Synthetic oligonucleotide
acacuuugccacaguaagu

SEQ ID NO: 1987362 - RNA, 19 nt, Artificial Sequence
  Description of Artificial Sequence: Synthetic oligonucleotide
cauuugcaguuuucuucuc

SEQ ID NO: 1987363 - RNA, 19 nt, Artificial Sequence
  Description of Artificial Sequence: Synthetic oligonucleotide
gcaagauuccaccugaguu

SEQ ID NO: 1987364 - RNA, 19 nt, Artificial Sequence
  Description of Artificial Sequence: Synthetic oligonucleotide
uccugcaagcccggaucgg

SEQ ID NO: 1987365 - RNA, 19 nt, Artificial Sequence
  Description of Artificial Sequence: Synthetic oligonucleotide
cuccacaggauggcggggc

SEQ ID NO: 1987366 - RNA, 19 nt, Artificial Sequence
  Description of Artificial Sequence: Synthetic oligonucleotide
gcacuuaaagggcuugcca

SEQ ID NO: 1987367 - RNA, 19 nt, Artificial Sequence
  Description of Artificial Sequence: Synthetic oligonucleotide
gaucuccgcaagauuccac

SEQ ID NO: 1987368 - RNA, 19 nt, Artificial Sequence
  Description of Artificial Sequence: Synthetic oligonucleotide
cacauucacugcaaccgaa

SEQ ID NO: 1987369 - RNA, 19 nt, Artificial Sequence
  Description of Artificial Sequence: Synthetic oligonucleotide
ugcgaaccauacugacgga

SEQ ID NO: 1987370 - RNA, 19 nt, Artificial Sequence
  Description of Artificial Sequence: Synthetic oligonucleotide
auauacuaguaaacacuuu

SEQ ID NO: 1987371 - RNA, 19 nt, Artificial Sequence
  Description of Artificial Sequence: Synthetic oligonucleotide
gucgugaaucucagugcag

SEQ ID NO: 1987372 - RNA, 19 nt, Artificial Sequence
  Description of Artificial Sequence: Synthetic oligonucleotide
acggagucgugaaucucag

SEQ ID NO: 1987373 - RNA, 19 nt, Artificial Sequence
  Description of Artificial Sequence: Synthetic oligonucleotide
gcuucuguacgccuuccca

SEQ ID NO: 1987374 - RNA, 19 nt, Artificial Sequence
  Description of Artificial Sequence: Synthetic oligonucleotide
ucgggcuccacaggauggc

SEQ ID NO: 1987375 - RNA, 19 nt, Artificial Sequence
  Description of Artificial Sequence: Synthetic oligonucleotide
ccccucuccgcgaucaagg

SEQ ID NO: 1987376 - RNA, 19 nt, Artificial Sequence
  Description of Artificial Sequence: Synthetic oligonucleotide
caaugaggucagaguuuug

SEQ ID NO: 1987377 - RNA, 19 nt, Artificial Sequence
  Description of Artificial Sequence: Synthetic oligonucleotide
ggcgguuaagaugagauau

SEQ ID NO: 1987378 - RNA, 19 nt, Artificial Sequence
  Description of Artificial Sequence: Synthetic oligonucleotide
aguggcgguuaagaugaga

SEQ ID NO: 1987379 - RNA, 19 nt, Artificial Sequence
  Description of Artificial Sequence: Synthetic oligonucleotide
aggauuugccacacucgcu

SEQ ID NO: 1987380 - RNA, 19 nt, Artificial Sequence
  Description of Artificial Sequence: Synthetic oligonucleotide
ccucagauccccucuccgc

SEQ ID NO: 1987381 - RNA, 19 nt, Artificial Sequence
  Description of Artificial Sequence: Synthetic oligonucleotide
aagcgauaauggacuuuga

SEQ ID NO: 1987382 - RNA, 19 nt, Artificial Sequence
  Description of Artificial Sequence: Synthetic oligonucleotide
cgugaaucucagugcaggg

SEQ ID NO: 1987383 - RNA, 19 nt, Artificial Sequence
  Description of Artificial Sequence: Synthetic oligonucleotide
agacccgagcacggagucg

SEQ ID NO: 1987384 - RNA, 19 nt, Artificial Sequence
  Description of Artificial Sequence: Synthetic oligonucleotide
cucaagucucagcgaggac

SEQ ID NO: 1987385 - RNA, 19 nt, Artificial Sequence
  Description of Artificial Sequence: Synthetic oligonucleotide
agauccccucuccgcgauc

SEQ ID NO: 1987386 - RNA, 19 nt, Artificial Sequence
  Description of Artificial Sequence: Synthetic oligonucleotide
guggcgguuaagaugagau

SEQ ID NO: 1987387 - RNA, 19 nt, Artificial Sequence
  Description of Artificial Sequence: Synthetic oligonucleotide
ccgcgaucaaggagaagcg

SEQ ID NO: 1987388 - RNA, 19 nt, Artificial Sequence
  Description of Artificial Sequence: Synthetic oligonucleotide
gcuccuguacgauuuccca

SEQ ID NO: 1987389 - RNA, 19 nt, Artificial Sequence
  Description of Artificial Sequence: Synthetic oligonucleotide
ugccuccccaaccguguaa

SEQ ID NO: 1987390 - RNA, 19 nt, Artificial Sequence
  Description of Artificial Sequence: Synthetic oligonucleotide
uaucuuccaguggcgguua

SEQ ID NO: 1987391 - RNA, 19 nt, Artificial Sequence
  Description of Artificial Sequence: Synthetic oligonucleotide
ccuugucacggccaaagca

SEQ ID NO: 1987392 - RNA, 19 nt, Artificial Sequence
  Description of Artificial Sequence: Synthetic oligonucleotide
cacgaucaccaucgggcuc

SEQ ID NO: 1987393 - RNA, 19 nt, Artificial Sequence
  Description of Artificial Sequence: Synthetic oligonucleotide
cccggaucgggucacccgg

SEQ ID NO: 1987394 - RNA, 19 nt, Artificial Sequence
  Description of Artificial Sequence: Synthetic oligonucleotide
aucucagugcagggcggag

SEQ ID NO: 1987395 - RNA, 19 nt, Artificial Sequence
  Description of Artificial Sequence: Synthetic oligonucleotide
gucaucaagcaguuuccau

SEQ ID NO: 1987396 - RNA, 19 nt, Artificial Sequence
  Description of Artificial Sequence: Synthetic oligonucleotide
cgguuaagaugagauauac

SEQ ID NO: 1987397 - RNA, 19 nt, Artificial Sequence
  Description of Artificial Sequence: Synthetic oligonucleotide
cgaaccauacugacggauc

SEQ ID NO: 1987398 - RNA, 19 nt, Artificial Sequence
  Description of Artificial Sequence: Synthetic oligonucleotide
ccgaggagacccgagcacg

SEQ ID NO: 1987399 - RNA, 19 nt, Artificial Sequence
  Description of Artificial Sequence: Synthetic oligonucleotide
auggacgguuaggugcuca

SEQ ID NO: 1987400 - RNA, 19 nt, Artificial Sequence
  Description of Artificial Sequence: Synthetic oligonucleotide
ccugcaagcccggaucggg

SEQ ID NO: 1987401 - RNA, 19 nt, Artificial Sequence
  Description of Artificial Sequence: Synthetic oligonucleotide
uucccugcuccuguacgau

SEQ ID NO: 1987402 - RNA, 19 nt, Artificial Sequence
  Description of Artificial Sequence: Synthetic oligonucleotide
gacccgagcacggagucgu

SEQ ID NO: 1987403 - RNA, 19 nt, Artificial Sequence
  Description of Artificial Sequence: Synthetic oligonucleotide
ccuccugcaagcccggauc

SEQ ID NO: 1987404 - RNA, 19 nt, Artificial Sequence
  Description of Artificial Sequence: Synthetic oligonucleotide
ggcuucuguacgccuuccc

SEQ ID NO: 1987405 - RNA, 19 nt, Artificial Sequence
  Description of Artificial Sequence: Synthetic oligonucleotide
agcgaggacacaaguucaa

SEQ ID NO: 1987406 - RNA, 19 nt, Artificial Sequence
  Description of Artificial Sequence: Synthetic oligonucleotide
ccuucgcggcuucuguacg

SEQ ID NO: 1987407 - RNA, 19 nt, Artificial Sequence
  Description of Artificial Sequence: Synthetic oligonucleotide
ugcaaccgaaaggcuuuuc

SEQ ID NO: 1987408 - RNA, 19 nt, Artificial Sequence
  Description of Artificial Sequence: Synthetic oligonucleotide
gccuucgcggcuucuguac

SEQ ID NO: 1987409 - RNA, 19 nt, Artificial Sequence
  Description of Artificial Sequence: Synthetic oligonucleotide
gugcagggcggagagaucu

SEQ ID NO: 1987410 - RNA, 19 nt, Artificial Sequence
  Description of Artificial Sequence: Synthetic oligonucleotide
cucugcgcucucagggcuc

SEQ ID NO: 1987411 - RNA, 19 nt, Artificial Sequence
  Description of Artificial Sequence: Synthetic oligonucleotide
aagucucagcgaggacaca

SEQ ID NO: 1987412 - RNA, 19 nt, Artificial Sequence
  Description of Artificial Sequence: Synthetic oligonucleotide
cacugcaaccgaaaggcuu

SEQ ID NO: 1987413 - RNA, 19 nt, Artificial Sequence
  Description of Artificial Sequence: Synthetic oligonucleotide
ucgcggcuucuguacgccu

SEQ ID NO: 1987414 - RNA, 19 nt, Artificial Sequence
  Description of Artificial Sequence: Synthetic oligonucleotide
gaaagcgauaauggacuuu

SEQ ID NO: 1987415 - RNA, 19 nt, Artificial Sequence
  Description of Artificial Sequence: Synthetic oligonucleotide
gccucugcgcucucagggc

SEQ ID NO: 1987416 - RNA, 19 nt, Artificial Sequence
  Description of Artificial Sequence: Synthetic oligonucleotide
ggaucgggucacccgggug

SEQ ID NO: 1987417 - RNA, 19 nt, Artificial Sequence
  Description of Artificial Sequence: Synthetic oligonucleotide
ggcggagagaucuccgcaa

SEQ ID NO: 1987418 - RNA, 19 nt, Artificial Sequence
  Description of Artificial Sequence: Synthetic oligonucleotide
ccguguaagucaccugaug

SEQ ID NO: 1987419 - RNA, 19 nt, Artificial Sequence
  Description of Artificial Sequence: Synthetic oligonucleotide
gguuaagaugagauauacu

SEQ ID NO: 1987420 - RNA, 19 nt, Artificial Sequence
  Description of Artificial Sequence: Synthetic oligonucleotide
cagacgaaaccaguucucu

SEQ ID NO: 1987421 - RNA, 19 nt, Artificial Sequence
  Description of Artificial Sequence: Synthetic oligonucleotide
gccuccccaaccguguaag

SEQ ID NO: 1987422 - RNA, 19 nt, Artificial Sequence
  Description of Artificial Sequence: Synthetic oligonucleotide
caagcccggaucgggucac

SEQ ID NO: 1987423 - RNA, 19 nt, Artificial Sequence
  Description of Artificial Sequence: Synthetic oligonucleotide
cgguuaggugcucaaugag

SEQ ID NO: 1987424 - RNA, 19 nt, Artificial Sequence
  Description of Artificial Sequence: Synthetic oligonucleotide
ccucuccgcgaucaaggag

SEQ ID NO: 1987425 - RNA, 19 nt, Artificial Sequence
  Description of Artificial Sequence: Synthetic oligonucleotide
accguguaagucaccugau

SEQ ID NO: 1987426 - RNA, 19 nt, Artificial Sequence
  Description of Artificial Sequence: Synthetic oligonucleotide
gcccgugugaaagcgauaa

SEQ ID NO: 1987427 - RNA, 19 nt, Artificial Sequence
  Description of Artificial Sequence: Synthetic oligonucleotide
ggacuuugaggccuucccu

SEQ ID NO: 1987428 - RNA, 19 nt, Artificial Sequence
  Description of Artificial Sequence: Synthetic oligonucleotide
ccuguacgauuucccacac

SEQ ID NO: 1987429 - RNA, 19 nt, Artificial Sequence
  Description of Artificial Sequence: Synthetic oligonucleotide
cucagcgaggacacaaguu

SEQ ID NO: 1987430 - RNA, 19 nt, Artificial Sequence
  Description of Artificial Sequence: Synthetic oligonucleotide
gugaaauauuccccacauu

SEQ ID NO: 1987431 - RNA, 19 nt, Artificial Sequence
  Description of Artificial Sequence: Synthetic oligonucleotide
gggacauggcuaaucccuc

SEQ ID NO: 1987432 - RNA, 19 nt, Artificial Sequence
  Description of Artificial Sequence: Synthetic oligonucleotide
cucccaggagaaguacaca

SEQ ID NO: 1987433 - RNA, 19 nt, Artificial Sequence
  Description of Artificial Sequence: Synthetic oligonucleotide
ccccaaccguguaagucac

SEQ ID NO: 1987434 - RNA, 19 nt, Artificial Sequence
  Description of Artificial Sequence: Synthetic oligonucleotide
gcaagcccggaucggguca

SEQ ID NO: 1987435 - RNA, 19 nt, Artificial Sequence
  Description of Artificial Sequence: Synthetic oligonucleotide
gggcggagagaucuccgca

SEQ ID NO: 1987436 - RNA, 19 nt, Artificial Sequence
  Description of Artificial Sequence: Synthetic oligonucleotide
agggcuugccauggacggu

SEQ ID NO: 1987437 - RNA, 19 nt, Artificial Sequence
  Description of Artificial Sequence: Synthetic oligonucleotide
caguggcgguuaagaugag

SEQ ID NO: 1987438 - RNA, 19 nt, Artificial Sequence
  Description of Artificial Sequence: Synthetic oligonucleotide
cagugcagggcggagagau

SEQ ID NO: 1987439 - RNA, 19 nt, Artificial Sequence
  Description of Artificial Sequence: Synthetic oligonucleotide
ccuggggcagggcuccacc

SEQ ID NO: 1987440 - RNA, 19 nt, Artificial Sequence
  Description of Artificial Sequence: Synthetic oligonucleotide
gcccgaggagacccgagca

SEQ ID NO: 1987441 - RNA, 19 nt, Artificial Sequence
  Description of Artificial Sequence: Synthetic oligonucleotide
gcucuugggugccucccca

SEQ ID NO: 1987442 - RNA, 19 nt, Artificial Sequence
  Description of Artificial Sequence: Synthetic oligonucleotide
cccgaggagacccgagcac

SEQ ID NO: 1987443 - RNA, 19 nt, Artificial Sequence
  Description of Artificial Sequence: Synthetic oligonucleotide
aggagccuuugggagucau

SEQ ID NO: 1987444 - RNA, 19 nt, Artificial Sequence
  Description of Artificial Sequence: Synthetic oligonucleotide
ccaguguguaucuuccagu

SEQ ID NO: 1987445 - RNA, 19 nt, Artificial Sequence
  Description of Artificial Sequence: Synthetic oligonucleotide
ccggguggccacaaaccuc

SEQ ID NO: 1987446 - RNA, 19 nt, Artificial Sequence
  Description of Artificial Sequence: Synthetic oligonucleotide
ccgcaagauuccaccugag

SEQ ID NO: 1987447 - RNA, 19 nt, Artificial Sequence
  Description of Artificial Sequence: Synthetic oligonucleotide
ccggaucgggucacccggg

SEQ ID NO: 1987448 - RNA, 19 nt, Artificial Sequence
  Description of Artificial Sequence: Synthetic oligonucleotide
ucgggucacccggguggcc

SEQ ID NO: 1987449 - RNA, 19 nt, Artificial Sequence
  Description of Artificial Sequence: Synthetic oligonucleotide
gucagaguuuugggugaaa

SEQ ID NO: 1987450 - RNA, 19 nt, Artificial Sequence
  Description of Artificial Sequence: Synthetic oligonucleotide
gcggcuucuguacgccuuc

SEQ ID NO: 1987451 - RNA, 19 nt, Artificial Sequence
  Description of Artificial Sequence: Synthetic oligonucleotide
cacggccaaagcagacgaa

SEQ ID NO: 1987452 - RNA, 19 nt, Artificial Sequence
  Description of Artificial Sequence: Synthetic oligonucleotide
cugcaagcccggaucgggu

SEQ ID NO: 1987453 - RNA, 19 nt, Artificial Sequence
  Description of Artificial Sequence: Synthetic oligonucleotide
cauggacgguuaggugcuc

SEQ ID NO: 1987454 - RNA, 19 nt, Artificial Sequence
  Description of Artificial Sequence: Synthetic oligonucleotide
uggcggggcccugggacau

SEQ ID NO: 1987455 - RNA, 19 nt, Artificial Sequence
  Description of Artificial Sequence: Synthetic oligonucleotide
ccaaccguguaagucaccu

SEQ ID NO: 1987456 - RNA, 19 nt, Artificial Sequence
  Description of Artificial Sequence: Synthetic oligonucleotide
cuccgcgaucaaggagaag

SEQ ID NO: 1987457 - RNA, 19 nt, Artificial Sequence
  Description of Artificial Sequence: Synthetic oligonucleotide
gcgguuaagaugagauaua

SEQ ID NO: 1987458 - RNA, 19 nt, Artificial Sequence
  Description of Artificial Sequence: Synthetic oligonucleotide
agacucucccgcacucauu

SEQ ID NO: 1987459 - RNA, 19 nt, Artificial Sequence
  Description of Artificial Sequence: Synthetic oligonucleotide
cccaaccguguaagucacc

SEQ ID NO: 1987460 - RNA, 19 nt, Artificial Sequence
  Description of Artificial Sequence: Synthetic oligonucleotide
ccauggacgguuaggugcu

SEQ ID NO: 1987461 - RNA, 19 nt, Artificial Sequence
  Description of Artificial Sequence: Synthetic oligonucleotide
ccccacaccuauaacggcu

SEQ ID NO: 1987462 - RNA, 19 nt, Artificial Sequence
  Description of Artificial Sequence: Synthetic oligonucleotide
gccuucccugcuccuguac

SEQ ID NO: 1987463 - RNA, 19 nt, Artificial Sequence
  Description of Artificial Sequence: Synthetic oligonucleotide
gcgaucaaggagaagcguu

SEQ ID NO: 1987464 - RNA, 19 nt, Artificial Sequence
  Description of Artificial Sequence: Synthetic oligonucleotide
auccccucuccgcgaucaa

SEQ ID NO: 1987465 - RNA, 19 nt, Artificial Sequence
  Description of Artificial Sequence: Synthetic oligonucleotide
ccuccacgaucaccaucgg

SEQ ID NO: 1987466 - RNA, 19 nt, Artificial Sequence
  Description of Artificial Sequence: Synthetic oligonucleotide
cuguacgccuucccacacu

SEQ ID NO: 1987467 - RNA, 19 nt, Artificial Sequence
  Description of Artificial Sequence: Synthetic oligonucleotide
gaucaccaucgggcuccac

SEQ ID NO: 1987468 - RNA, 19 nt, Artificial Sequence
  Description of Artificial Sequence: Synthetic oligonucleotide
ggagacccgagcacggagu

SEQ ID NO: 1987469 - RNA, 19 nt, Artificial Sequence
  Description of Artificial Sequence: Synthetic oligonucleotide
gcgaggacacaaguucaaa

SEQ ID NO: 1987470 - RNA, 19 nt, Artificial Sequence
  Description of Artificial Sequence: Synthetic oligonucleotide
gcuuaaugaggaaggcuuu

SEQ ID NO: 1987471 - RNA, 19 nt, Artificial Sequence
  Description of Artificial Sequence: Synthetic oligonucleotide
cccugggacauggcuaauc

SEQ ID NO: 1987472 - RNA, 19 nt, Artificial Sequence
  Description of Artificial Sequence: Synthetic oligonucleotide
ccgagcacggagucgugaa

SEQ ID NO: 1987473 - RNA, 19 nt, Artificial Sequence
  Description of Artificial Sequence: Synthetic oligonucleotide
ggugccuccccaaccgugu

SEQ ID NO: 1987474 - RNA, 19 nt, Artificial Sequence
  Description of Artificial Sequence: Synthetic oligonucleotide
gccgccuugucacggccaa

SEQ ID NO: 1987475 - RNA, 19 nt, Artificial Sequence
  Description of Artificial Sequence: Synthetic oligonucleotide
ccauuccucccaggagaag

SEQ ID NO: 1987476 - RNA, 19 nt, Artificial Sequence
  Description of Artificial Sequence: Synthetic oligonucleotide
gugccuccccaaccgugua

SEQ ID NO: 1987477 - RNA, 19 nt, Artificial Sequence
  Description of Artificial Sequence: Synthetic oligonucleotide
ccacgaucaccaucgggcu

SEQ ID NO: 1987478 - RNA, 19 nt, Artificial Sequence
  Description of Artificial Sequence: Synthetic oligonucleotide
gcgaaccauacugacggau

SEQ ID NO: 1987479 - RNA, 19 nt, Artificial Sequence
  Description of Artificial Sequence: Synthetic oligonucleotide
cccucuccgcgaucaagga

SEQ ID NO: 1987480 - RNA, 19 nt, Artificial Sequence
  Description of Artificial Sequence: Synthetic oligonucleotide
ggccuucgcggcuucugua

SEQ ID NO: 1987481 - RNA, 19 nt, Artificial Sequence
  Description of Artificial Sequence: Synthetic oligonucleotide
gcauuucgcccgugugaaa

SEQ ID NO: 1987482 - RNA, 19 nt, Artificial Sequence
  Description of Artificial Sequence: Synthetic oligonucleotide
gggagauguuaugcuugaa

SEQ ID NO: 1987483 - RNA, 19 nt, Artificial Sequence
  Description of Artificial Sequence: Synthetic oligonucleotide
ggauggcggggcccuggga

SEQ ID NO: 1987484 - RNA, 19 nt, Artificial Sequence
  Description of Artificial Sequence: Synthetic oligonucleotide
gucacccggguggccacaa

SEQ ID NO: 1987485 - RNA, 19 nt, Artificial Sequence
  Description of Artificial Sequence: Synthetic oligonucleotide
ccggccgccuugucacggc

SEQ ID NO: 1987486 - RNA, 19 nt, Artificial Sequence
  Description of Artificial Sequence: Synthetic oligonucleotide
gucugguacaggagccuuu

SEQ ID NO: 1987487 - RNA, 19 nt, Artificial Sequence
  Description of Artificial Sequence: Synthetic oligonucleotide
acccgagcacggagucgug

SEQ ID NO: 1987488 - RNA, 19 nt, Artificial Sequence
  Description of Artificial Sequence: Synthetic oligonucleotide
ccgcacucauugcacuuaa

SEQ ID NO: 1987489 - RNA, 19 nt, Artificial Sequence
  Description of Artificial Sequence: Synthetic oligonucleotide
gggcuugccauggacgguu

SEQ ID NO: 1987490 - RNA, 19 nt, Artificial Sequence
  Description of Artificial Sequence: Synthetic oligonucleotide
ccucugcgcucucagggcu

SEQ ID NO: 1987491 - RNA, 19 nt, Artificial Sequence
  Description of Artificial Sequence: Synthetic oligonucleotide
ggccgccuugucacggcca

SEQ ID NO: 1987492 - RNA, 19 nt, Artificial Sequence
  Description of Artificial Sequence: Synthetic oligonucleotide
cgcaagauuccaccugagu

SEQ ID NO: 1987493 - RNA, 19 nt, Artificial Sequence
  Description of Artificial Sequence: Synthetic oligonucleotide
ggacgguuaggugcucaau

SEQ ID NO: 1987494 - RNA, 19 nt, Artificial Sequence
  Description of Artificial Sequence: Synthetic oligonucleotide
ccccggccgccuugucacg

SEQ ID NO: 1987495 - RNA, 19 nt, Artificial Sequence
  Description of Artificial Sequence: Synthetic oligonucleotide
cccgagcacggagucguga

SEQ ID NO: 1987496 - RNA, 19 nt, Artificial Sequence
  Description of Artificial Sequence: Synthetic oligonucleotide
cggcuucuguacgccuucc

SEQ ID NO: 1987497 - RNA, 19 nt, Artificial Sequence
  Description of Artificial Sequence: Synthetic oligonucleotide
cugcaaccgaaaggcuuuu

SEQ ID NO: 1987498 - RNA, 19 nt, Artificial Sequence
  Description of Artificial Sequence: Synthetic oligonucleotide
ggcuugccauggacgguua

SEQ ID NO: 1987499 - RNA, 19 nt, Artificial Sequence
  Description of Artificial Sequence: Synthetic oligonucleotide
ccaucgggcuccacaggau

SEQ ID NO: 1987500 - RNA, 19 nt, Artificial Sequence
  Description of Artificial Sequence: Synthetic oligonucleotide
ggcggggcccugggacaug

SEQ ID NO: 1987501 - RNA, 19 nt, Artificial Sequence
  Description of Artificial Sequence: Synthetic oligonucleotide
ccuccccaaccguguaagu

SEQ ID NO: 1987502 - RNA, 19 nt, Artificial Sequence
  Description of Artificial Sequence: Synthetic oligonucleotide
cgcgaucaaggagaagcgu

SEQ ID NO: 1987503 - RNA, 19 nt, Artificial Sequence
  Description of Artificial Sequence: Synthetic oligonucleotide
cccuccugcaagcccggau

SEQ ID NO: 1987504 - RNA, 19 nt, Artificial Sequence
  Description of Artificial Sequence: Synthetic oligonucleotide
ccacaccuauaacggcuuu

SEQ ID NO: 1987505 - RNA, 19 nt, Artificial Sequence
  Description of Artificial Sequence: Synthetic oligonucleotide
cgagcacggagucgugaau

SEQ ID NO: 1987506 - RNA, 19 nt, Artificial Sequence
  Description of Artificial Sequence: Synthetic oligonucleotide
cggagucgugaaucucagu

SEQ ID NO: 1987507 - RNA, 19 nt, Artificial Sequence
  Description of Artificial Sequence: Synthetic oligonucleotide
cgcggcuucuguacgccuu

SEQ ID NO: 1987508 - RNA, 19 nt, Artificial Sequence
  Description of Artificial Sequence: Synthetic oligonucleotide
cgcccgugugaaagcgaua

SEQ ID NO: 1987509 - RNA, 19 nt, Artificial Sequence
  Description of Artificial Sequence: Synthetic oligonucleotide
cggaucgggucacccgggu

SEQ ID NO: 1987510 - RNA, 19 nt, Artificial Sequence
  Description of Artificial Sequence: Synthetic oligonucleotide
cgaucaccaucgggcucca

SEQ ID NO: 1987511 - RNA, 19 nt, Artificial Sequence
  Description of Artificial Sequence: Synthetic oligonucleotide
ccgccuugucacggccaaa

SEQ ID NO: 1987512 - RNA, 19 nt, Artificial Sequence
  Description of Artificial Sequence: Synthetic oligonucleotide
cugcgcucucagggcucuu

SEQ ID NO: 1987513 - RNA, 19 nt, Artificial Sequence
  Description of Artificial Sequence: Synthetic oligonucleotide
aauacuguaguccaaaagu

SEQ ID NO: 1987514 - RNA, 19 nt, Artificial Sequence
  Description of Artificial Sequence: Synthetic oligonucleotide
augcuagauacuuugaugc

SEQ ID NO: 1987515 - RNA, 19 nt, Artificial Sequence
  Description of Artificial Sequence: Synthetic oligonucleotide
acagcaauucaacacaccc

SEQ ID NO: 1987516 - RNA, 19 nt, Artificial Sequence
  Description of Artificial Sequence: Synthetic oligonucleotide
aaaauuaagcuuaauuuag

SEQ ID NO: 1987517 - RNA, 19 nt, Artificial Sequence
  Description of Artificial Sequence: Synthetic oligonucleotide
uuaguuuaugucacggugg

SEQ ID NO: 1987518 - RNA, 19 nt, Artificial Sequence
  Description of Artificial Sequence: Synthetic oligonucleotide
uuuacauauaaacuucaug

SEQ ID NO: 1987519 - RNA, 19 nt, Artificial Sequence
  Description of Artificial Sequence: Synthetic oligonucleotide
aauuaagcuuaauuuagca

SEQ ID NO: 1987520 - RNA, 19 nt, Artificial Sequence
  Description of Artificial Sequence: Synthetic oligonucleotide
aaugcuagauacuuugaug

SEQ ID NO: 1987521 - RNA, 19 nt, Artificial Sequence
  Description of Artificial Sequence: Synthetic oligonucleotide
uuuagagaguaacauaugu

SEQ ID NO: 1987522 - RNA, 19 nt, Artificial Sequence
  Description of Artificial Sequence: Synthetic oligonucleotide
aaaacaacgccucguccgc

SEQ ID NO: 1987523 - RNA, 19 nt, Artificial Sequence
  Description of Artificial Sequence: Synthetic oligonucleotide
uagauugucaauuuguuuc

SEQ ID NO: 1987524 - RNA, 19 nt, Artificial Sequence
  Description of Artificial Sequence: Synthetic oligonucleotide
ucaaucuaugguuaaauac

SEQ ID NO: 1987525 - RNA, 19 nt, Artificial Sequence
  Description of Artificial Sequence: Synthetic oligonucleotide
uuaagcuuaauuuagcaua

SEQ ID NO: 1987526 - RNA, 19 nt, Artificial Sequence
  Description of Artificial Sequence: Synthetic oligonucleotide
aaauuaagcuuaauuuagc

SEQ ID NO: 1987527 - RNA, 19 nt, Artificial Sequence
  Description of Artificial Sequence: Synthetic oligonucleotide
aaguagucgaaauuuguug

SEQ ID NO: 1987528 - RNA, 19 nt, Artificial Sequence
  Description of Artificial Sequence: Synthetic oligonucleotide
ugaugcauguucuaaauac

SEQ ID NO: 1987529 - RNA, 19 nt, Artificial Sequence
  Description of Artificial Sequence: Synthetic oligonucleotide
uaagcuuaauuuagcauag

SEQ ID NO: 1987530 - RNA, 19 nt, Artificial Sequence
  Description of Artificial Sequence: Synthetic oligonucleotide
aaucuggugagagaacacc

SEQ ID NO: 1987531 - RNA, 19 nt, Artificial Sequence
  Description of Artificial Sequence: Synthetic oligonucleotide
cauugaacaguucaguuag

SEQ ID NO: 1987532 - RNA, 19 nt, Artificial Sequence
  Description of Artificial Sequence: Synthetic oligonucleotide
acuaaggaaauaaagaugu

SEQ ID NO: 1987533 - RNA, 19 nt, Artificial Sequence
  Description of Artificial Sequence: Synthetic oligonucleotide
agcuuaguaauacaucuuc

SEQ ID NO: 1987534 - RNA, 19 nt, Artificial Sequence
  Description of Artificial Sequence: Synthetic oligonucleotide
aaaccuuucuaucaauccu

SEQ ID NO: 1987535 - RNA, 19 nt, Artificial Sequence
  Description of Artificial Sequence: Synthetic oligonucleotide
aucauuaccugaaauuugc

SEQ ID NO: 1987536 - RNA, 19 nt, Artificial Sequence
  Description of Artificial Sequence: Synthetic oligonucleotide
agcuuaauuuagcauaguc

SEQ ID NO: 1987537 - RNA, 19 nt, Artificial Sequence
  Description of Artificial Sequence: Synthetic oligonucleotide
aguaacauauguuauuuau

SEQ ID NO: 1987538 - RNA, 19 nt, Artificial Sequence
  Description of Artificial Sequence: Synthetic oligonucleotide
uuaccugaaauuugcaggc

SEQ ID NO: 1987539 - RNA, 19 nt, Artificial Sequence
  Description of Artificial Sequence: Synthetic oligonucleotide
cuauacagcaauucaacac

SEQ ID NO: 1987540 - RNA, 19 nt, Artificial Sequence
  Description of Artificial Sequence: Synthetic oligonucleotide
uuuauucccaaguuugaca

SEQ ID NO: 1987541 - RNA, 19 nt, Artificial Sequence
  Description of Artificial Sequence: Synthetic oligonucleotide
cuugcaauacuuuguacag

SEQ ID NO: 1987542 - RNA, 19 nt, Artificial Sequence
  Description of Artificial Sequence: Synthetic oligonucleotide
agcaauucaacacacccug

SEQ ID NO: 1987543 - RNA, 19 nt, Artificial Sequence
  Description of Artificial Sequence: Synthetic oligonucleotide
uaguuuaugucacgguggg

SEQ ID NO: 1987544 - RNA, 19 nt, Artificial Sequence
  Description of Artificial Sequence: Synthetic oligonucleotide
guuaguuuaugucacggug

SEQ ID NO: 1987545 - RNA, 19 nt, Artificial Sequence
  Description of Artificial Sequence: Synthetic oligonucleotide
uagagaguaacauauguua

SEQ ID NO: 1987546 - RNA, 19 nt, Artificial Sequence
  Description of Artificial Sequence: Synthetic oligonucleotide
auaacuaaaacagauuuau

SEQ ID NO: 1987547 - RNA, 19 nt, Artificial Sequence
  Description of Artificial Sequence: Synthetic oligonucleotide
acacuaaggaaauaaagau

SEQ ID NO: 1987548 - RNA, 19 nt, Artificial Sequence
  Description of Artificial Sequence: Synthetic oligonucleotide
ugagagaacaccuuugcuc

SEQ ID NO: 1987549 - RNA, 19 nt, Artificial Sequence
  Description of Artificial Sequence: Synthetic oligonucleotide
gaugcauacuuuucuauac

SEQ ID NO: 1987550 - RNA, 19 nt, Artificial Sequence
  Description of Artificial Sequence: Synthetic oligonucleotide
ucuaugugaaucuggugag

SEQ ID NO: 1987551 - RNA, 19 nt, Artificial Sequence
  Description of Artificial Sequence: Synthetic oligonucleotide
aguaauacaucuuccauuu

SEQ ID NO: 1987552 - RNA, 19 nt, Artificial Sequence
  Description of Artificial Sequence: Synthetic oligonucleotide
aagaaccuuacaucuuggg

SEQ ID NO: 1987553 - RNA, 19 nt, Artificial Sequence
  Description of Artificial Sequence: Synthetic oligonucleotide
aagauacuucagcuguuac

SEQ ID NO: 1987554 - RNA, 19 nt, Artificial Sequence
  Description of Artificial Sequence: Synthetic oligonucleotide
uauuacacuaaggaaauaa

SEQ ID NO: 1987555 - RNA, 19 nt, Artificial Sequence
  Description of Artificial Sequence: Synthetic oligonucleotide
aguuugacaagccaccucu

SEQ ID NO: 1987556 - RNA, 19 nt, Artificial Sequence
  Description of Artificial Sequence: Synthetic oligonucleotide
ugcauacuuuucuauacag

SEQ ID NO: 1987557 - RNA, 19 nt, Artificial Sequence
  Description of Artificial Sequence: Synthetic oligonucleotide
uuauucccaaguuugacaa

SEQ ID NO: 1987558 - RNA, 19 nt, Artificial Sequence
  Description of Artificial Sequence: Synthetic oligonucleotide
uccaaaagucuuuacauau

SEQ ID NO: 1987559 - RNA, 19 nt, Artificial Sequence
  Description of Artificial Sequence: Synthetic oligonucleotide
ugaaguacauagaugcccu

SEQ ID NO: 1987560 - RNA, 19 nt, Artificial Sequence
  Description of Artificial Sequence: Synthetic oligonucleotide
aguagucgaaauuuguugu

SEQ ID NO: 1987561 - RNA, 19 nt, Artificial Sequence
  Description of Artificial Sequence: Synthetic oligonucleotide
uugaaguacauagaugccc

SEQ ID NO: 1987562 - RNA, 19 nt, Artificial Sequence
  Description of Artificial Sequence: Synthetic oligonucleotide
guuuaugucacggugggag

SEQ ID NO: 1987563 - RNA, 19 nt, Artificial Sequence
  Description of Artificial Sequence: Synthetic oligonucleotide
aaaugcuagauacuuugau

SEQ ID NO: 1987564 - RNA, 19 nt, Artificial Sequence
  Description of Artificial Sequence: Synthetic oligonucleotide
aaccuugcaguaucuuucg

SEQ ID NO: 1987565 - RNA, 19 nt, Artificial Sequence
  Description of Artificial Sequence: Synthetic oligonucleotide
ugucuugaaguacauagau

SEQ ID NO: 1987566 - RNA, 19 nt, Artificial Sequence
  Description of Artificial Sequence: Synthetic oligonucleotide
gucuaugugaaucugguga

SEQ ID NO: 1987567 - RNA, 19 nt, Artificial Sequence
  Description of Artificial Sequence: Synthetic oligonucleotide
uucuugaauacuguagucc

SEQ ID NO: 1987568 - RNA, 19 nt, Artificial Sequence
  Description of Artificial Sequence: Synthetic oligonucleotide
uucugauugaugcauacuu

SEQ ID NO: 1987569 - RNA, 19 nt, Artificial Sequence
  Description of Artificial Sequence: Synthetic oligonucleotide
ugcaguaucuuucguaaac

SEQ ID NO: 1987570 - RNA, 19 nt, Artificial Sequence
  Description of Artificial Sequence: Synthetic oligonucleotide
uauacucccgacaccaucu

SEQ ID NO: 1987571 - RNA, 19 nt, Artificial Sequence
  Description of Artificial Sequence: Synthetic oligonucleotide
uucuguaucauuaccugaa

SEQ ID NO: 1987572 - RNA, 19 nt, Artificial Sequence
  Description of Artificial Sequence: Synthetic oligonucleotide
uuggucuaugugaaucugg

SEQ ID NO: 1987573 - RNA, 19 nt, Artificial Sequence
  Description of Artificial Sequence: Synthetic oligonucleotide
auuagcgcagggcucacgg

SEQ ID NO: 1987574 - RNA, 19 nt, Artificial Sequence
  Description of Artificial Sequence: Synthetic oligonucleotide
cacuaaggaaauaaagaug

SEQ ID NO: 1987575 - RNA, 19 nt, Artificial Sequence
  Description of Artificial Sequence: Synthetic oligonucleotide
aaguuugacaagccaccuc

SEQ ID NO: 1987576 - RNA, 19 nt, Artificial Sequence
  Description of Artificial Sequence: Synthetic oligonucleotide
aauuuagcauagucauuug

SEQ ID NO: 1987577 - RNA, 19 nt, Artificial Sequence
  Description of Artificial Sequence: Synthetic oligonucleotide
uuuaugucacggugggagg

SEQ ID NO: 1987578 - RNA, 19 nt, Artificial Sequence
  Description of Artificial Sequence: Synthetic oligonucleotide
aauucauccuugaaccuug

SEQ ID NO: 1987579 - RNA, 19 nt, Artificial Sequence
  Description of Artificial Sequence: Synthetic oligonucleotide
ucuuucguaaaccuuucua

SEQ ID NO: 1987580 - RNA, 19 nt, Artificial Sequence
  Description of Artificial Sequence: Synthetic oligonucleotide
uuugaugcauguucuaaau

SEQ ID NO: 1987581 - RNA, 19 nt, Artificial Sequence
  Description of Artificial Sequence: Synthetic oligonucleotide
agaaccuuacaucuugggu

SEQ ID NO: 1987582 - RNA, 19 nt, Artificial Sequence
  Description of Artificial Sequence: Synthetic oligonucleotide
uuucguaaaccuuucuauc

SEQ ID NO: 1987583 - RNA, 19 nt, Artificial Sequence
  Description of Artificial Sequence: Synthetic oligonucleotide
ugcauguucuaaauacugu

SEQ ID NO: 1987584 - RNA, 19 nt, Artificial Sequence
  Description of Artificial Sequence: Synthetic oligonucleotide
auacuguaguccaaaaguc

SEQ ID NO: 1987585 - RNA, 19 nt, Artificial Sequence
  Description of Artificial Sequence: Synthetic oligonucleotide
uaaaugcuagauacuuuga

SEQ ID NO: 1987586 - RNA, 19 nt, Artificial Sequence
  Description of Artificial Sequence: Synthetic oligonucleotide
cacgguucccguuaguccg

SEQ ID NO: 1987587 - RNA, 19 nt, Artificial Sequence
  Description of Artificial Sequence: Synthetic oligonucleotide
caauccuugucccacucgg

SEQ ID NO: 1987588 - RNA, 19 nt, Artificial Sequence
  Description of Artificial Sequence: Synthetic oligonucleotide
uuagcauagucauuuguuu

SEQ ID NO: 1987589 - RNA, 19 nt, Artificial Sequence
  Description of Artificial Sequence: Synthetic oligonucleotide
caucucguuauggagaagc

SEQ ID NO: 1987590 - RNA, 19 nt, Artificial Sequence
  Description of Artificial Sequence: Synthetic oligonucleotide
aaagaaccuuacaucuugg

SEQ ID NO: 1987591 - RNA, 19 nt, Artificial Sequence
  Description of Artificial Sequence: Synthetic oligonucleotide
ucuaauuagcgcagggcuc

SEQ ID NO: 1987592 - RNA, 19 nt, Artificial Sequence
  Description of Artificial Sequence: Synthetic oligonucleotide
ucaauccuugucccacucg

SEQ ID NO: 1987593 - RNA, 19 nt, Artificial Sequence
  Description of Artificial Sequence: Synthetic oligonucleotide
uuugacaagccaccucuga

SEQ ID NO: 1987594 - RNA, 19 nt, Artificial Sequence
  Description of Artificial Sequence: Synthetic oligonucleotide
auuuggucuaugugaaucu

SEQ ID NO: 1987595 - RNA, 19 nt, Artificial Sequence
  Description of Artificial Sequence: Synthetic oligonucleotide
cuuugauuuggucuaugug

SEQ ID NO: 1987596 - RNA, 19 nt, Artificial Sequence
  Description of Artificial Sequence: Synthetic oligonucleotide
uuuguccuuagauugucaa

SEQ ID NO: 1987597 - RNA, 19 nt, Artificial Sequence
  Description of Artificial Sequence: Synthetic oligonucleotide
aaucuaugguuaaauacau

SEQ ID NO: 1987598 - RNA, 19 nt, Artificial Sequence
  Description of Artificial Sequence: Synthetic oligonucleotide
aacauauguuauuuauaua

SEQ ID NO: 1987599 - RNA, 19 nt, Artificial Sequence
  Description of Artificial Sequence: Synthetic oligonucleotide
ugauugaugcauacuuuuc

SEQ ID NO: 1987600 - RNA, 19 nt, Artificial Sequence
  Description of Artificial Sequence: Synthetic oligonucleotide
ucgaaauuuguugucuuga

SEQ ID NO: 1987601 - RNA, 19 nt, Artificial Sequence
  Description of Artificial Sequence: Synthetic oligonucleotide
gacagcaacgaugagguga

SEQ ID NO: 1987602 - RNA, 19 nt, Artificial Sequence
  Description of Artificial Sequence: Synthetic oligonucleotide
auguucuaaauacuguuuu

SEQ ID NO: 1987603 - RNA, 19 nt, Artificial Sequence
  Description of Artificial Sequence: Synthetic oligonucleotide
ugaggugacaucaguacuu

SEQ ID NO: 1987604 - RNA, 19 nt, Artificial Sequence
  Description of Artificial Sequence: Synthetic oligonucleotide
guuaguccgcgccacaccc

SEQ ID NO: 1987605 - RNA, 19 nt, Artificial Sequence
  Description of Artificial Sequence: Synthetic oligonucleotide
agucggcucuaauuagcgc

SEQ ID NO: 1987606 - RNA, 19 nt, Artificial Sequence
  Description of Artificial Sequence: Synthetic oligonucleotide
ugaugcauacuuuucuaua

SEQ ID NO: 1987607 - RNA, 19 nt, Artificial Sequence
  Description of Artificial Sequence: Synthetic oligonucleotide
uccagcuuaguaauacauc

SEQ ID NO: 1987608 - RNA, 19 nt, Artificial Sequence
  Description of Artificial Sequence: Synthetic oligonucleotide
aguuaguuuaugucacggu

SEQ ID NO: 1987609 - RNA, 19 nt, Artificial Sequence
  Description of Artificial Sequence: Synthetic oligonucleotide
uuuggucauuugaacacaa

SEQ ID NO: 1987610 - RNA, 19 nt, Artificial Sequence
  Description of Artificial Sequence: Synthetic oligonucleotide
ucauuaccugaaauuugca

SEQ ID NO: 1987611 - RNA, 19 nt, Artificial Sequence
  Description of Artificial Sequence: Synthetic oligonucleotide
gauuaagccacauguaaau

SEQ ID NO: 1987612 - RNA, 19 nt, Artificial Sequence
  Description of Artificial Sequence: Synthetic oligonucleotide
acagcaacgaugaggugac

SEQ ID NO: 1987613 - RNA, 19 nt, Artificial Sequence
  Description of Artificial Sequence: Synthetic oligonucleotide
uugcaauacuuuguacagg

SEQ ID NO: 1987614 - RNA, 19 nt, Artificial Sequence
  Description of Artificial Sequence: Synthetic oligonucleotide
aaguacauagaugcccuga

SEQ ID NO: 1987615 - RNA, 19 nt, Artificial Sequence
  Description of Artificial Sequence: Synthetic oligonucleotide
gacaccaucucguuaugga

SEQ ID NO: 1987616 - RNA, 19 nt, Artificial Sequence
  Description of Artificial Sequence: Synthetic oligonucleotide
ucggcucuaauuagcgcag

SEQ ID NO: 1987617 - RNA, 19 nt, Artificial Sequence
  Description of Artificial Sequence: Synthetic oligonucleotide
uugcaggcaggcauugaag

SEQ ID NO: 1987618 - RNA, 19 nt, Artificial Sequence
  Description of Artificial Sequence: Synthetic oligonucleotide
caguuaguuuaugucacgg

SEQ ID NO: 1987619 - RNA, 19 nt, Artificial Sequence
  Description of Artificial Sequence: Synthetic oligonucleotide
agaguaacauauguuauuu

SEQ ID NO: 1987620 - RNA, 19 nt, Artificial Sequence
  Description of Artificial Sequence: Synthetic oligonucleotide
uaccccggugcccaggccg

SEQ ID NO: 1987621 - RNA, 19 nt, Artificial Sequence
  Description of Artificial Sequence: Synthetic oligonucleotide
ucacgguucccguuagucc

SEQ ID NO: 1987622 - RNA, 19 nt, Artificial Sequence
  Description of Artificial Sequence: Synthetic oligonucleotide
ucguuauggagaagcaaaa

SEQ ID NO: 1987623 - RNA, 19 nt, Artificial Sequence
  Description of Artificial Sequence: Synthetic oligonucleotide
cucguuauggagaagcaaa

SEQ ID NO: 1987624 - RNA, 19 nt, Artificial Sequence
  Description of Artificial Sequence: Synthetic oligonucleotide
uuuccagcuuaguaauaca

SEQ ID NO: 1987625 - RNA, 19 nt, Artificial Sequence
  Description of Artificial Sequence: Synthetic oligonucleotide
augaggugacaucaguacu

SEQ ID NO: 1987626 - RNA, 19 nt, Artificial Sequence
  Description of Artificial Sequence: Synthetic oligonucleotide
ugaacaguucaguuaguuu

SEQ ID NO: 1987627 - RNA, 19 nt, Artificial Sequence
  Description of Artificial Sequence: Synthetic oligonucleotide
ugcuagauacuuugaugca

SEQ ID NO: 1987628 - RNA, 19 nt, Artificial Sequence
  Description of Artificial Sequence: Synthetic oligonucleotide
uugacaagccaccucugau

SEQ ID NO: 1987629 - RNA, 19 nt, Artificial Sequence
  Description of Artificial Sequence: Synthetic oligonucleotide
cuaucaauccuugucccac

SEQ ID NO: 1987630 - RNA, 19 nt, Artificial Sequence
  Description of Artificial Sequence: Synthetic oligonucleotide
uaguccgcgccacaccccg

SEQ ID NO: 1987631 - RNA, 19 nt, Artificial Sequence
  Description of Artificial Sequence: Synthetic oligonucleotide
gucggcucuaauuagcgca

SEQ ID NO: 1987632 - RNA, 19 nt, Artificial Sequence
  Description of Artificial Sequence: Synthetic oligonucleotide
aaacaacgccucguccgcc

SEQ ID NO: 1987633 - RNA, 19 nt, Artificial Sequence
  Description of Artificial Sequence: Synthetic oligonucleotide
ucucaaucuaugguuaaau

SEQ ID NO: 1987634 - RNA, 19 nt, Artificial Sequence
  Description of Artificial Sequence: Synthetic oligonucleotide
ucuguaucauuaccugaaa

SEQ ID NO: 1987635 - RNA, 19 nt, Artificial Sequence
  Description of Artificial Sequence: Synthetic oligonucleotide
cuuguauacucccgacacc

SEQ ID NO: 1987636 - RNA, 19 nt, Artificial Sequence
  Description of Artificial Sequence: Synthetic oligonucleotide
uaucuuucguaaaccuuuc

SEQ ID NO: 1987637 - RNA, 19 nt, Artificial Sequence
  Description of Artificial Sequence: Synthetic oligonucleotide
ugaaauuugcaggcaggca

SEQ ID NO: 1987638 - RNA, 19 nt, Artificial Sequence
  Description of Artificial Sequence: Synthetic oligonucleotide
aguacauagaugcccugau

SEQ ID NO: 1987639 - RNA, 19 nt, Artificial Sequence
  Description of Artificial Sequence: Synthetic oligonucleotide
uuuggucuaugugaaucug

SEQ ID NO: 1987640 - RNA, 19 nt, Artificial Sequence
  Description of Artificial Sequence: Synthetic oligonucleotide
uacucccgacaccaucucg

SEQ ID NO: 1987641 - RNA, 19 nt, Artificial Sequence
  Description of Artificial Sequence: Synthetic oligonucleotide
gucgaaauuuguugucuug

SEQ ID NO: 1987642 - RNA, 19 nt, Artificial Sequence
  Description of Artificial Sequence: Synthetic oligonucleotide
uugaugcauguucuaaaua

SEQ ID NO: 1987643 - RNA, 19 nt, Artificial Sequence
  Description of Artificial Sequence: Synthetic oligonucleotide
gugacagcuccacaccccg

SEQ ID NO: 1987644 - RNA, 19 nt, Artificial Sequence
  Description of Artificial Sequence: Synthetic oligonucleotide
uagucgaaauuuguugucu

SEQ ID NO: 1987645 - RNA, 19 nt, Artificial Sequence
  Description of Artificial Sequence: Synthetic oligonucleotide
aggugacaucaguacuugc

SEQ ID NO: 1987646 - RNA, 19 nt, Artificial Sequence
  Description of Artificial Sequence: Synthetic oligonucleotide
augcauguucuaaauacug

SEQ ID NO: 1987647 - RNA, 19 nt, Artificial Sequence
  Description of Artificial Sequence: Synthetic oligonucleotide
agccacauguaaaugcuag

SEQ ID NO: 1987648 - RNA, 19 nt, Artificial Sequence
  Description of Artificial Sequence: Synthetic oligonucleotide
cauugaagauacuucagcu

SEQ ID NO: 1987649 - RNA, 19 nt, Artificial Sequence
  Description of Artificial Sequence: Synthetic oligonucleotide
ccaaguuugacaagccacc

SEQ ID NO: 1987650 - RNA, 19 nt, Artificial Sequence
  Description of Artificial Sequence: Synthetic oligonucleotide
ucaguacuugcaauacuuu

SEQ ID NO: 1987651 - RNA, 19 nt, Artificial Sequence
  Description of Artificial Sequence: Synthetic oligonucleotide
gacuuguauacucccgaca

SEQ ID NO: 1987652 - RNA, 19 nt, Artificial Sequence
  Description of Artificial Sequence: Synthetic oligonucleotide
aacaacgccucguccgcca

SEQ ID NO: 1987653 - RNA, 19 nt, Artificial Sequence
  Description of Artificial Sequence: Synthetic oligonucleotide
uacuugcaauacuuuguac

SEQ ID NO: 1987654 - RNA, 19 nt, Artificial Sequence
  Description of Artificial Sequence: Synthetic oligonucleotide
aaccuuucuaucaauccuu

SEQ ID NO: 1987655 - RNA, 19 nt, Artificial Sequence
  Description of Artificial Sequence: Synthetic oligonucleotide
gaaguacauagaugcccug

SEQ ID NO: 1987656 - RNA, 19 nt, Artificial Sequence
  Description of Artificial Sequence: Synthetic oligonucleotide
gcagcugcggccuaccccg

SEQ ID NO: 1987657 - RNA, 19 nt, Artificial Sequence
  Description of Artificial Sequence: Synthetic oligonucleotide
guucccguuaguccgcgcc

SEQ ID NO: 1987658 - RNA, 19 nt, Artificial Sequence
  Description of Artificial Sequence: Synthetic oligonucleotide
ugacaagccaccucugauu

SEQ ID NO: 1987659 - RNA, 19 nt, Artificial Sequence
  Description of Artificial Sequence: Synthetic oligonucleotide
uguaguccaaaagucuuua

SEQ ID NO: 1987660 - RNA, 19 nt, Artificial Sequence
  Description of Artificial Sequence: Synthetic oligonucleotide
uucaacacacccugaguuu

SEQ ID NO: 1987661 - RNA, 19 nt, Artificial Sequence
  Description of Artificial Sequence: Synthetic oligonucleotide
cagacagcaacgaugaggu

SEQ ID NO: 1987662 - RNA, 19 nt, Artificial Sequence
  Description of Artificial Sequence: Synthetic oligonucleotide
gauuuguccuuagauuguc

SEQ ID NO: 1987663 - RNA, 19 nt, Artificial Sequence
  Description of Artificial Sequence: Synthetic oligonucleotide
aacgaugaggugacaucag

SEQ ID NO: 1987664 - RNA, 19 nt, Artificial Sequence
  Description of Artificial Sequence: Synthetic oligonucleotide
agagaguaacauauguuau

SEQ ID NO: 1987665 - RNA, 19 nt, Artificial Sequence
  Description of Artificial Sequence: Synthetic oligonucleotide
aauuagcgcagggcucacg

SEQ ID NO: 1987666 - RNA, 19 nt, Artificial Sequence
  Description of Artificial Sequence: Synthetic oligonucleotide
cuauggaccgaccgcgccc

SEQ ID NO: 1987667 - RNA, 19 nt, Artificial Sequence
  Description of Artificial Sequence: Synthetic oligonucleotide
caauacuuuguacaggagu

SEQ ID NO: 1987668 - RNA, 19 nt, Artificial Sequence
  Description of Artificial Sequence: Synthetic oligonucleotide
ucuggugagagaacaccuu

SEQ ID NO: 1987669 - RNA, 19 nt, Artificial Sequence
  Description of Artificial Sequence: Synthetic oligonucleotide
uaucaauccuugucccacu

SEQ ID NO: 1987670 - RNA, 19 nt, Artificial Sequence
  Description of Artificial Sequence: Synthetic oligonucleotide
cuuucguaaaccuuucuau

SEQ ID NO: 1987671 - RNA, 19 nt, Artificial Sequence
  Description of Artificial Sequence: Synthetic oligonucleotide
cuuugcuccagcacagaca

SEQ ID NO: 1987672 - RNA, 19 nt, Artificial Sequence
  Description of Artificial Sequence: Synthetic oligonucleotide
cuaauuagcgcagggcuca

SEQ ID NO: 1987673 - RNA, 19 nt, Artificial Sequence
  Description of Artificial Sequence: Synthetic oligonucleotide
acgaugaggugacaucagu

SEQ ID NO: 1987674 - RNA, 19 nt, Artificial Sequence
  Description of Artificial Sequence: Synthetic oligonucleotide
gaggugacaucaguacuug

SEQ ID NO: 1987675 - RNA, 19 nt, Artificial Sequence
  Description of Artificial Sequence: Synthetic oligonucleotide
acaccccgugcgcagcugc

SEQ ID NO: 1987676 - RNA, 19 nt, Artificial Sequence
  Description of Artificial Sequence: Synthetic oligonucleotide
cucuaauuagcgcagggcu

SEQ ID NO: 1987677 - RNA, 19 nt, Artificial Sequence
  Description of Artificial Sequence: Synthetic oligonucleotide
ucggcggacuuguauacuc

SEQ ID NO: 1987678 - RNA, 19 nt, Artificial Sequence
  Description of Artificial Sequence: Synthetic oligonucleotide
ggugggaggaccuuuuauc

SEQ ID NO: 1987679 - RNA, 19 nt, Artificial Sequence
  Description of Artificial Sequence: Synthetic oligonucleotide
cccaaguuugacaagccac

SEQ ID NO: 1987680 - RNA, 19 nt, Artificial Sequence
  Description of Artificial Sequence: Synthetic oligonucleotide
auacucccgacaccaucuc

SEQ ID NO: 1987681 - RNA, 19 nt, Artificial Sequence
  Description of Artificial Sequence: Synthetic oligonucleotide
agucgaaauuuguugucuu

SEQ ID NO: 1987682 - RNA, 19 nt, Artificial Sequence
  Description of Artificial Sequence: Synthetic oligonucleotide
uauggaccgaccgcgcccc

SEQ ID NO: 1987683 - RNA, 19 nt, Artificial Sequence
  Description of Artificial Sequence: Synthetic oligonucleotide
caccaucucguuauggaga

SEQ ID NO: 1987684 - RNA, 19 nt, Artificial Sequence
  Description of Artificial Sequence: Synthetic oligonucleotide
uuaguccgcgccacacccc

SEQ ID NO: 1987685 - RNA, 19 nt, Artificial Sequence
  Description of Artificial Sequence: Synthetic oligonucleotide
uucccguuaguccgcgcca

SEQ ID NO: 1987686 - RNA, 19 nt, Artificial Sequence
  Description of Artificial Sequence: Synthetic oligonucleotide
ugcucggcggacuuguaua

SEQ ID NO: 1987687 - RNA, 19 nt, Artificial Sequence
  Description of Artificial Sequence: Synthetic oligonucleotide
gaugcccugaugauuuguc

SEQ ID NO: 1987688 - RNA, 19 nt, Artificial Sequence
  Description of Artificial Sequence: Synthetic oligonucleotide
ggcucuaauuagcgcaggg

SEQ ID NO: 1987689 - RNA, 19 nt, Artificial Sequence
  Description of Artificial Sequence: Synthetic oligonucleotide
uucucaaucuaugguuaaa

SEQ ID NO: 1987690 - RNA, 19 nt, Artificial Sequence
  Description of Artificial Sequence: Synthetic oligonucleotide
gagaguaacauauguuauu

SEQ ID NO: 1987691 - RNA, 19 nt, Artificial Sequence
  Description of Artificial Sequence: Synthetic oligonucleotide
ugucacggugggaggaccu

SEQ ID NO: 1987692 - RNA, 19 nt, Artificial Sequence
  Description of Artificial Sequence: Synthetic oligonucleotide
ccuugucccacucggaacc

SEQ ID NO: 1987693 - RNA, 19 nt, Artificial Sequence
  Description of Artificial Sequence: Synthetic oligonucleotide
gaguaacauauguuauuua

SEQ ID NO: 1987694 - RNA, 19 nt, Artificial Sequence
  Description of Artificial Sequence: Synthetic oligonucleotide
cucaaucuaugguuaaaua

SEQ ID NO: 1987695 - RNA, 19 nt, Artificial Sequence
  Description of Artificial Sequence: Synthetic oligonucleotide
aguaucuuucguaaaccuu

SEQ ID NO: 1987696 - RNA, 19 nt, Artificial Sequence
  Description of Artificial Sequence: Synthetic oligonucleotide
uguauacucccgacaccau

SEQ ID NO: 1987697 - RNA, 19 nt, Artificial Sequence
  Description of Artificial Sequence: Synthetic oligonucleotide
gcaguaucuuucguaaacc

SEQ ID NO: 1987698 - RNA, 19 nt, Artificial Sequence
  Description of Artificial Sequence: Synthetic oligonucleotide
aagcuuaauuuagcauagu

SEQ ID NO: 1987699 - RNA, 19 nt, Artificial Sequence
  Description of Artificial Sequence: Synthetic oligonucleotide
acuucucaaucuaugguua

SEQ ID NO: 1987700 - RNA, 19 nt, Artificial Sequence
  Description of Artificial Sequence: Synthetic oligonucleotide
ggaaggccgcuauggaccg

SEQ ID NO: 1987701 - RNA, 19 nt, Artificial Sequence
  Description of Artificial Sequence: Synthetic oligonucleotide
guaucuuucguaaaccuuu

SEQ ID NO: 1987702 - RNA, 19 nt, Artificial Sequence
  Description of Artificial Sequence: Synthetic oligonucleotide
agcaacgaugaggugacau

SEQ ID NO: 1987703 - RNA, 19 nt, Artificial Sequence
  Description of Artificial Sequence: Synthetic oligonucleotide
cucacgguucccguuaguc

SEQ ID NO: 1987704 - RNA, 19 nt, Artificial Sequence
  Description of Artificial Sequence: Synthetic oligonucleotide
cuuagauugucaauuuguu

SEQ ID NO: 1987705 - RNA, 19 nt, Artificial Sequence
  Description of Artificial Sequence: Synthetic oligonucleotide
gaagauacuucagcuguua

SEQ ID NO: 1987706 - RNA, 19 nt, Artificial Sequence
  Description of Artificial Sequence: Synthetic oligonucleotide
gaguuucacuucucaaucu

SEQ ID NO: 1987707 - RNA, 19 nt, Artificial Sequence
  Description of Artificial Sequence: Synthetic oligonucleotide
uugcaguaucuuucguaaa

SEQ ID NO: 1987708 - RNA, 19 nt, Artificial Sequence
  Description of Artificial Sequence: Synthetic oligonucleotide
cucggaaccccauguuuuc

SEQ ID NO: 1987709 - RNA, 19 nt, Artificial Sequence
  Description of Artificial Sequence: Synthetic oligonucleotide
auccuugaaccuugcagua

SEQ ID NO: 1987710 - RNA, 19 nt, Artificial Sequence
  Description of Artificial Sequence: Synthetic oligonucleotide
gcauacuuuucuauacagc

SEQ ID NO: 1987711 - RNA, 19 nt, Artificial Sequence
  Description of Artificial Sequence: Synthetic oligonucleotide
ugggaggaccuuuuaucua

SEQ ID NO: 1987712 - RNA, 19 nt, Artificial Sequence
  Description of Artificial Sequence: Synthetic oligonucleotide
cauguaaaugcuagauacu

SEQ ID NO: 1987713 - RNA, 19 nt, Artificial Sequence
  Description of Artificial Sequence: Synthetic oligonucleotide
accuuucuaucaauccuug

SEQ ID NO: 1987714 - RNA, 19 nt, Artificial Sequence
  Description of Artificial Sequence: Synthetic oligonucleotide
ggcauugaagauacuucag

SEQ ID NO: 1987715 - RNA, 19 nt, Artificial Sequence
  Description of Artificial Sequence: Synthetic oligonucleotide
gucucuacagcuucuguau

SEQ ID NO: 1987716 - RNA, 19 nt, Artificial Sequence
  Description of Artificial Sequence: Synthetic oligonucleotide
ucggaaccccauguuuucc

SEQ ID NO: 1987717 - RNA, 19 nt, Artificial Sequence
  Description of Artificial Sequence: Synthetic oligonucleotide
acucccgacaccaucucgu

SEQ ID NO: 1987718 - RNA, 19 nt, Artificial Sequence
  Description of Artificial Sequence: Synthetic oligonucleotide
ucccacucggaaccccaug

SEQ ID NO: 1987719 - RNA, 19 nt, Artificial Sequence
  Description of Artificial Sequence: Synthetic oligonucleotide
uagaugcccugaugauuug

SEQ ID NO: 1987720 - RNA, 19 nt, Artificial Sequence
  Description of Artificial Sequence: Synthetic oligonucleotide
cugaguaaguagucgaaau

SEQ ID NO: 1987721 - RNA, 19 nt, Artificial Sequence
  Description of Artificial Sequence: Synthetic oligonucleotide
auuuguccuuagauuguca

SEQ ID NO: 1987722 - RNA, 19 nt, Artificial Sequence
  Description of Artificial Sequence: Synthetic oligonucleotide
cacgagacccugugacagc

SEQ ID NO: 1987723 - RNA, 19 nt, Artificial Sequence
  Description of Artificial Sequence: Synthetic oligonucleotide
cggaaggccgcuauggacc

SEQ ID NO: 1987724 - RNA, 19 nt, Artificial Sequence
  Description of Artificial Sequence: Synthetic oligonucleotide
gcucuaauuagcgcagggc

SEQ ID NO: 1987725 - RNA, 19 nt, Artificial Sequence
  Description of Artificial Sequence: Synthetic oligonucleotide
ccuugaaccuugcaguauc

SEQ ID NO: 1987726 - RNA, 19 nt, Artificial Sequence
  Description of Artificial Sequence: Synthetic oligonucleotide
acgagacccugugacagcu

SEQ ID NO: 1987727 - RNA, 19 nt, Artificial Sequence
  Description of Artificial Sequence: Synthetic oligonucleotide
gcaacgaugaggugacauc

SEQ ID NO: 1987728 - RNA, 19 nt, Artificial Sequence
  Description of Artificial Sequence: Synthetic oligonucleotide
ggcggacuuguauacuccc

SEQ ID NO: 1987729 - RNA, 19 nt, Artificial Sequence
  Description of Artificial Sequence: Synthetic oligonucleotide
ggccacgagacccugugac

SEQ ID NO: 1987730 - RNA, 19 nt, Artificial Sequence
  Description of Artificial Sequence: Synthetic oligonucleotide
caguaucuuucguaaaccu

SEQ ID NO: 1987731 - RNA, 19 nt, Artificial Sequence
  Description of Artificial Sequence: Synthetic oligonucleotide
ggacuuguauacucccgac

SEQ ID NO: 1987732 - RNA, 19 nt, Artificial Sequence
  Description of Artificial Sequence: Synthetic oligonucleotide
uccuugaaccuugcaguau

SEQ ID NO: 1987733 - RNA, 19 nt, Artificial Sequence
  Description of Artificial Sequence: Synthetic oligonucleotide
guuugacaagccaccucug

SEQ ID NO: 1987734 - RNA, 19 nt, Artificial Sequence
  Description of Artificial Sequence: Synthetic oligonucleotide
ggccgcuauggaccgaccg

SEQ ID NO: 1987735 - RNA, 19 nt, Artificial Sequence
  Description of Artificial Sequence: Synthetic oligonucleotide
aucucguuauggagaagca

SEQ ID NO: 1987736 - RNA, 19 nt, Artificial Sequence
  Description of Artificial Sequence: Synthetic oligonucleotide
agcgcagggcucacgguuc

SEQ ID NO: 1987737 - RNA, 19 nt, Artificial Sequence
  Description of Artificial Sequence: Synthetic oligonucleotide
acucggaaccccauguuuu

SEQ ID NO: 1987738 - RNA, 19 nt, Artificial Sequence
  Description of Artificial Sequence: Synthetic oligonucleotide
acgguucccguuaguccgc

SEQ ID NO: 1987739 - RNA, 19 nt, Artificial Sequence
  Description of Artificial Sequence: Synthetic oligonucleotide
ugcggccuaccccggugcc

SEQ ID NO: 1987740 - RNA, 19 nt, Artificial Sequence
  Description of Artificial Sequence: Synthetic oligonucleotide
uugaaccuugcaguaucuu

SEQ ID NO: 1987741 - RNA, 19 nt, Artificial Sequence
  Description of Artificial Sequence: Synthetic oligonucleotide
gugagagaacaccuuugcu

SEQ ID NO: 1987742 - RNA, 19 nt, Artificial Sequence
  Description of Artificial Sequence: Synthetic oligonucleotide
gcuauggaccgaccgcgcc

SEQ ID NO: 1987743 - RNA, 19 nt, Artificial Sequence
  Description of Artificial Sequence: Synthetic oligonucleotide
agacagcaacgaugaggug

SEQ ID NO: 1987744 - RNA, 19 nt, Artificial Sequence
  Description of Artificial Sequence: Synthetic oligonucleotide
aagccacauguaaaugcua

SEQ ID NO: 1987745 - RNA, 19 nt, Artificial Sequence
  Description of Artificial Sequence: Synthetic oligonucleotide
gccgcuauggaccgaccgc

SEQ ID NO: 1987746 - RNA, 19 nt, Artificial Sequence
  Description of Artificial Sequence: Synthetic oligonucleotide
ucccgacaccaucucguua

SEQ ID NO: 1987747 - RNA, 19 nt, Artificial Sequence
  Description of Artificial Sequence: Synthetic oligonucleotide
gccgagucggcucuaauua

SEQ ID NO: 1987748 - RNA, 19 nt, Artificial Sequence
  Description of Artificial Sequence: Synthetic oligonucleotide
cuaugugaaucuggugaga

SEQ ID NO: 1987749 - RNA, 19 nt, Artificial Sequence
  Description of Artificial Sequence: Synthetic oligonucleotide
uaauuagcgcagggcucac

SEQ ID NO: 1987750 - RNA, 19 nt, Artificial Sequence
  Description of Artificial Sequence: Synthetic oligonucleotide
ccacgagacccugugacag

SEQ ID NO: 1987751 - RNA, 19 nt, Artificial Sequence
  Description of Artificial Sequence: Synthetic oligonucleotide
cugcggccuaccccggugc

SEQ ID NO: 1987752 - RNA, 19 nt, Artificial Sequence
  Description of Artificial Sequence: Synthetic oligonucleotide
cauuucccgccgaucccuc

SEQ ID NO: 1987753 - RNA, 19 nt, Artificial Sequence
  Description of Artificial Sequence: Synthetic oligonucleotide
uccgcgccacaccccgugc

SEQ ID NO: 1987754 - RNA, 19 nt, Artificial Sequence
  Description of Artificial Sequence: Synthetic oligonucleotide
aucuaugguuaaauacaua

SEQ ID NO: 1987755 - RNA, 19 nt, Artificial Sequence
  Description of Artificial Sequence: Synthetic oligonucleotide
caccccgugcgcagcugcg

SEQ ID NO: 1987756 - RNA, 19 nt, Artificial Sequence
  Description of Artificial Sequence: Synthetic oligonucleotide
gcggacuuguauacucccg

SEQ ID NO: 1987757 - RNA, 19 nt, Artificial Sequence
  Description of Artificial Sequence: Synthetic oligonucleotide
gccacauguaaaugcuaga

SEQ ID NO: 1987758 - RNA, 19 nt, Artificial Sequence
  Description of Artificial Sequence: Synthetic oligonucleotide
ucccguuaguccgcgccac

SEQ ID NO: 1987759 - RNA, 19 nt, Artificial Sequence
  Description of Artificial Sequence: Synthetic oligonucleotide
ccgagucggcucuaauuag

SEQ ID NO: 1987760 - RNA, 19 nt, Artificial Sequence
  Description of Artificial Sequence: Synthetic oligonucleotide
accuuacaucuuggguguc

SEQ ID NO: 1987761 - RNA, 19 nt, Artificial Sequence
  Description of Artificial Sequence: Synthetic oligonucleotide
ccgcuauggaccgaccgcg

SEQ ID NO: 1987762 - RNA, 19 nt, Artificial Sequence
  Description of Artificial Sequence: Synthetic oligonucleotide
guccgcgccacaccccgug

SEQ ID NO: 1987763 - RNA, 19 nt, Artificial Sequence
  Description of Artificial Sequence: Synthetic oligonucleotide
gccauuucccgccgauccc

SEQ ID NO: 1987764 - RNA, 19 nt, Artificial Sequence
  Description of Artificial Sequence: Synthetic oligonucleotide
gcucggcggacuuguauac

SEQ ID NO: 1987765 - RNA, 19 nt, Artificial Sequence
  Description of Artificial Sequence: Synthetic oligonucleotide
ggaccgaccgcgccccucc

SEQ ID NO: 1987766 - RNA, 19 nt, Artificial Sequence
  Description of Artificial Sequence: Synthetic oligonucleotide
ugcgcagcugcggccuacc

SEQ ID NO: 1987767 - RNA, 19 nt, Artificial Sequence
  Description of Artificial Sequence: Synthetic oligonucleotide
caaguuugacaagccaccu

SEQ ID NO: 1987768 - RNA, 19 nt, Artificial Sequence
  Description of Artificial Sequence: Synthetic oligonucleotide
ucccgccgaucccuccggc

SEQ ID NO: 1987769 - RNA, 19 nt, Artificial Sequence
  Description of Artificial Sequence: Synthetic oligonucleotide
ccuugcaguaucuuucgua

SEQ ID NO: 1987770 - RNA, 19 nt, Artificial Sequence
  Description of Artificial Sequence: Synthetic oligonucleotide
ucacggugggaggaccuuu

SEQ ID NO: 1987771 - RNA, 19 nt, Artificial Sequence
  Description of Artificial Sequence: Synthetic oligonucleotide
accccgugcgcagcugcgg

SEQ ID NO: 1987772 - RNA, 19 nt, Artificial Sequence
  Description of Artificial Sequence: Synthetic oligonucleotide
ggcucacgguucccguuag

SEQ ID NO: 1987773 - RNA, 19 nt, Artificial Sequence
  Description of Artificial Sequence: Synthetic oligonucleotide
gcuagauacuuugaugcau

SEQ ID NO: 1987774 - RNA, 19 nt, Artificial Sequence
  Description of Artificial Sequence: Synthetic oligonucleotide
gaggaccuuuuaucuacuu

SEQ ID NO: 1987775 - RNA, 19 nt, Artificial Sequence
  Description of Artificial Sequence: Synthetic oligonucleotide
acggugggaggaccuuuua

SEQ ID NO: 1987776 - RNA, 19 nt, Artificial Sequence
  Description of Artificial Sequence: Synthetic oligonucleotide
gccacgagacccugugaca

SEQ ID NO: 1987777 - RNA, 19 nt, Artificial Sequence
  Description of Artificial Sequence: Synthetic oligonucleotide
ccgcggaaggccgcuaugg

SEQ ID NO: 1987778 - RNA, 19 nt, Artificial Sequence
  Description of Artificial Sequence: Synthetic oligonucleotide
aggccgcuauggaccgacc

SEQ ID NO: 1987779 - RNA, 19 nt, Artificial Sequence
  Description of Artificial Sequence: Synthetic oligonucleotide
gcaggcauugaagauacuu

SEQ ID NO: 1987780 - RNA, 19 nt, Artificial Sequence
  Description of Artificial Sequence: Synthetic oligonucleotide
cguuaguccgcgccacacc

SEQ ID NO: 1987781 - RNA, 19 nt, Artificial Sequence
  Description of Artificial Sequence: Synthetic oligonucleotide
ccgccgaucccuccggcgc

SEQ ID NO: 1987782 - RNA, 19 nt, Artificial Sequence
  Description of Artificial Sequence: Synthetic oligonucleotide
gaccgaccgcgccccuccc

SEQ ID NO: 1987783 - RNA, 19 nt, Artificial Sequence
  Description of Artificial Sequence: Synthetic oligonucleotide
cagcugcggccuaccccgg

SEQ ID NO: 1987784 - RNA, 19 nt, Artificial Sequence
  Description of Artificial Sequence: Synthetic oligonucleotide
cacucggaaccccauguuu

SEQ ID NO: 1987785 - RNA, 19 nt, Artificial Sequence
  Description of Artificial Sequence: Synthetic oligonucleotide
gaucccuccggcgccgagu

SEQ ID NO: 1987786 - RNA, 19 nt, Artificial Sequence
  Description of Artificial Sequence: Synthetic oligonucleotide
cgaugaggugacaucagua

SEQ ID NO: 1987787 - RNA, 19 nt, Artificial Sequence
  Description of Artificial Sequence: Synthetic oligonucleotide
ccccauguuuuccagcuua

SEQ ID NO: 1987788 - RNA, 19 nt, Artificial Sequence
  Description of Artificial Sequence: Synthetic oligonucleotide
uggaccgaccgcgccccuc

SEQ ID NO: 1987789 - RNA, 19 nt, Artificial Sequence
  Description of Artificial Sequence: Synthetic oligonucleotide
gguucccguuaguccgcgc

SEQ ID NO: 1987790 - RNA, 19 nt, Artificial Sequence
  Description of Artificial Sequence: Synthetic oligonucleotide
ccguuaguccgcgccacac

SEQ ID NO: 1987791 - RNA, 19 nt, Artificial Sequence
  Description of Artificial Sequence: Synthetic oligonucleotide
gccgccacugggccacgag

SEQ ID NO: 1987792 - RNA, 19 nt, Artificial Sequence
  Description of Artificial Sequence: Synthetic oligonucleotide
gggcucacgguucccguua

SEQ ID NO: 1987793 - RNA, 19 nt, Artificial Sequence
  Description of Artificial Sequence: Synthetic oligonucleotide
ccgcgccacaccccgugcg

SEQ ID NO: 1987794 - RNA, 19 nt, Artificial Sequence
  Description of Artificial Sequence: Synthetic oligonucleotide
auggaccgaccgcgccccu

SEQ ID NO: 1987795 - RNA, 19 nt, Artificial Sequence
  Description of Artificial Sequence: Synthetic oligonucleotide
cacaccccgugcgcagcug

SEQ ID NO: 1987796 - RNA, 19 nt, Artificial Sequence
  Description of Artificial Sequence: Synthetic oligonucleotide
gccgcggaaggccgcuaug

SEQ ID NO: 1987797 - RNA, 19 nt, Artificial Sequence
  Description of Artificial Sequence: Synthetic oligonucleotide
cgcuauggaccgaccgcgc

SEQ ID NO: 1987798 - RNA, 19 nt, Artificial Sequence
  Description of Artificial Sequence: Synthetic oligonucleotide
cugcucggcggacuuguau

SEQ ID NO: 1987799 - RNA, 19 nt, Artificial Sequence
  Description of Artificial Sequence: Synthetic oligonucleotide
ccgacaccaucucguuaug

SEQ ID NO: 1987800 - RNA, 19 nt, Artificial Sequence
  Description of Artificial Sequence: Synthetic oligonucleotide
gccgaucccuccggcgccg

SEQ ID NO: 1987801 - RNA, 19 nt, Artificial Sequence
  Description of Artificial Sequence: Synthetic oligonucleotide
cagggcucacgguucccgu

SEQ ID NO: 1987802 - RNA, 19 nt, Artificial Sequence
  Description of Artificial Sequence: Synthetic oligonucleotide
cacggugggaggaccuuuu

SEQ ID NO: 1987803 - RNA, 19 nt, Artificial Sequence
  Description of Artificial Sequence: Synthetic oligonucleotide
ccaucucguuauggagaag

SEQ ID NO: 1987804 - RNA, 19 nt, Artificial Sequence
  Description of Artificial Sequence: Synthetic oligonucleotide
cucccgacaccaucucguu

SEQ ID NO: 1987805 - RNA, 19 nt, Artificial Sequence
  Description of Artificial Sequence: Synthetic oligonucleotide
cucggcggacuuguauacu

SEQ ID NO: 1987806 - RNA, 19 nt, Artificial Sequence
  Description of Artificial Sequence: Synthetic oligonucleotide
cggcucuaauuagcgcagg

SEQ ID NO: 1987807 - RNA, 19 nt, Artificial Sequence
  Description of Artificial Sequence: Synthetic oligonucleotide
cguccgccauuucccgccg

SEQ ID NO: 1987808 - RNA, 19 nt, Artificial Sequence
  Description of Artificial Sequence: Synthetic oligonucleotide
gcggccuaccccggugccc

SEQ ID NO: 1987809 - RNA, 19 nt, Artificial Sequence
  Description of Artificial Sequence: Synthetic oligonucleotide
aguccgcgccacaccccgu

SEQ ID NO: 1987810 - RNA, 19 nt, Artificial Sequence
  Description of Artificial Sequence: Synthetic oligonucleotide
ccauuucccgccgaucccu

SEQ ID NO: 1987811 - RNA, 19 nt, Artificial Sequence
  Description of Artificial Sequence: Synthetic oligonucleotide
cagcaacgaugaggugaca

SEQ ID NO: 1987812 - RNA, 19 nt, Artificial Sequence
  Description of Artificial Sequence: Synthetic oligonucleotide
gucacggugggaggaccuu

SEQ ID NO: 1987813 - RNA, 19 nt, Artificial Sequence
  Description of Artificial Sequence: Synthetic oligonucleotide
cgguucccguuaguccgcg

SEQ ID NO: 1987814 - RNA, 19 nt, Artificial Sequence
  Description of Artificial Sequence: Synthetic oligonucleotide
cccguuaguccgcgccaca

SEQ ID NO: 1987815 - RNA, 19 nt, Artificial Sequence
  Description of Artificial Sequence: Synthetic oligonucleotide
gcgccacaccccgugcgca

SEQ ID NO: 1987816 - RNA, 19 nt, Artificial Sequence
  Description of Artificial Sequence: Synthetic oligonucleotide
gcucacgguucccguuagu

SEQ ID NO: 1987817 - RNA, 19 nt, Artificial Sequence
  Description of Artificial Sequence: Synthetic oligonucleotide
caacgccucguccgccauu

SEQ ID NO: 1987818 - RNA, 19 nt, Artificial Sequence
  Description of Artificial Sequence: Synthetic oligonucleotide
cgaucccuccggcgccgag

SEQ ID NO: 1987819 - RNA, 19 nt, Artificial Sequence
  Description of Artificial Sequence: Synthetic oligonucleotide
ggccgcggaaggccgcuau

SEQ ID NO: 1987820 - RNA, 19 nt, Artificial Sequence
  Description of Artificial Sequence: Synthetic oligonucleotide
ggcgccgagucggcucuaa

SEQ ID NO: 1987821 - RNA, 19 nt, Artificial Sequence
  Description of Artificial Sequence: Synthetic oligonucleotide
aggccgcggaaggccgcua

SEQ ID NO: 1987822 - RNA, 19 nt, Artificial Sequence
  Description of Artificial Sequence: Synthetic oligonucleotide
cggccuaccccggugccca

SEQ ID NO: 1987823 - RNA, 19 nt, Artificial Sequence
  Description of Artificial Sequence: Synthetic oligonucleotide
cgcagggcucacgguuccc

SEQ ID NO: 1987824 - RNA, 19 nt, Artificial Sequence
  Description of Artificial Sequence: Synthetic oligonucleotide
ccccggugcccaggccgcg

SEQ ID NO: 1987825 - RNA, 19 nt, Artificial Sequence
  Description of Artificial Sequence: Synthetic oligonucleotide
ccacaccccgugcgcagcu

SEQ ID NO: 1987826 - RNA, 19 nt, Artificial Sequence
  Description of Artificial Sequence: Synthetic oligonucleotide
ccgugcgcagcugcggccu

SEQ ID NO: 1987827 - RNA, 19 nt, Artificial Sequence
  Description of Artificial Sequence: Synthetic oligonucleotide
gcgccgagucggcucuaau

SEQ ID NO: 1987828 - RNA, 19 nt, Artificial Sequence
  Description of Artificial Sequence: Synthetic oligonucleotide
cuccggcgccgagucggcu

SEQ ID NO: 1987829 - RNA, 19 nt, Artificial Sequence
  Description of Artificial Sequence: Synthetic oligonucleotide
ccgaucccuccggcgccga

SEQ ID NO: 1987830 - RNA, 19 nt, Artificial Sequence
  Description of Artificial Sequence: Synthetic oligonucleotide
cgugcgcagcugcggccua

SEQ ID NO: 1987831 - RNA, 19 nt, Artificial Sequence
  Description of Artificial Sequence: Synthetic oligonucleotide
cggcgccgagucggcucua

SEQ ID NO: 1987832 - RNA, 19 nt, Artificial Sequence
  Description of Artificial Sequence: Synthetic oligonucleotide
guuauuaggauccaggccg

SEQ ID NO: 1987833 - RNA, 19 nt, Artificial Sequence
  Description of Artificial Sequence: Synthetic oligonucleotide
acgaauaaauuccagaagg

SEQ ID NO: 1987834 - RNA, 19 nt, Artificial Sequence
  Description of Artificial Sequence: Synthetic oligonucleotide
ucacucaccagccagauag

SEQ ID NO: 1987835 - RNA, 19 nt, Artificial Sequence
  Description of Artificial Sequence: Synthetic oligonucleotide
uguggcacgaauaaauucc

SEQ ID NO: 1987836 - RNA, 19 nt, Artificial Sequence
  Description of Artificial Sequence: Synthetic oligonucleotide
aaugcaccuuccuuugucc

SEQ ID NO: 1987837 - RNA, 19 nt, Artificial Sequence
  Description of Artificial Sequence: Synthetic oligonucleotide
aaccggaaggcaaagagcc

SEQ ID NO: 1987838 - RNA, 19 nt, Artificial Sequence
  Description of Artificial Sequence: Synthetic oligonucleotide
uucuccacaccacauagcg

SEQ ID NO: 1987839 - RNA, 19 nt, Artificial Sequence
  Description of Artificial Sequence: Synthetic oligonucleotide
ucugacagaaccaguaucc

SEQ ID NO: 1987840 - RNA, 19 nt, Artificial Sequence
  Description of Artificial Sequence: Synthetic oligonucleotide
ucaaacaaacuaaugcacc

SEQ ID NO: 1987841 - RNA, 19 nt, Artificial Sequence
  Description of Artificial Sequence: Synthetic oligonucleotide
agguuauuaggauccaggc

SEQ ID NO: 1987842 - RNA, 19 nt, Artificial Sequence
  Description of Artificial Sequence: Synthetic oligonucleotide
gaucaugucccuccgauag

SEQ ID NO: 1987843 - RNA, 19 nt, Artificial Sequence
  Description of Artificial Sequence: Synthetic oligonucleotide
gaaaccggaaggcaaagag

SEQ ID NO: 1987844 - RNA, 19 nt, Artificial Sequence
  Description of Artificial Sequence: Synthetic oligonucleotide
gaaaucuagagccagucca

SEQ ID NO: 1987845 - RNA, 19 nt, Artificial Sequence
  Description of Artificial Sequence: Synthetic oligonucleotide
ucuaaacuugcccacugcc

SEQ ID NO: 1987846 - RNA, 19 nt, Artificial Sequence
  Description of Artificial Sequence: Synthetic oligonucleotide
gauguuaccuccaagucug

SEQ ID NO: 1987847 - RNA, 19 nt, Artificial Sequence
  Description of Artificial Sequence: Synthetic oligonucleotide
ugaagccugaucacuaaag

SEQ ID NO: 1987848 - RNA, 19 nt, Artificial Sequence
  Description of Artificial Sequence: Synthetic oligonucleotide
aucacuaaaguguggcacg

SEQ ID NO: 1987849 - RNA, 19 nt, Artificial Sequence
  Description of Artificial Sequence: Synthetic oligonucleotide
uaaaguguggcacgaauaa

SEQ ID NO: 1987850 - RNA, 19 nt, Artificial Sequence
  Description of Artificial Sequence: Synthetic oligonucleotide
aagccugaucacuaaagug

SEQ ID NO: 1987851 - RNA, 19 nt, Artificial Sequence
  Description of Artificial Sequence: Synthetic oligonucleotide
aacuaaugcaccuuccuuu

SEQ ID NO: 1987852 - RNA, 19 nt, Artificial Sequence
  Description of Artificial Sequence: Synthetic oligonucleotide
aaaccggaaggcaaagagc

SEQ ID NO: 1987853 - RNA, 19 nt, Artificial Sequence
  Description of Artificial Sequence: Synthetic oligonucleotide
ugugucacucaccagccag

SEQ ID NO: 1987854 - RNA, 19 nt, Artificial Sequence
  Description of Artificial Sequence: Synthetic oligonucleotide
guaaguguccugaagaggc

SEQ ID NO: 1987855 - RNA, 19 nt, Artificial Sequence
  Description of Artificial Sequence: Synthetic oligonucleotide
auacacaggacgcaaacca

SEQ ID NO: 1987856 - RNA, 19 nt, Artificial Sequence
  Description of Artificial Sequence: Synthetic oligonucleotide
acauacacaggacgcaaac

SEQ ID NO: 1987857 - RNA, 19 nt, Artificial Sequence
  Description of Artificial Sequence: Synthetic oligonucleotide
aagccuaaagcugacaccu

SEQ ID NO: 1987858 - RNA, 19 nt, Artificial Sequence
  Description of Artificial Sequence: Synthetic oligonucleotide
auaucagacacccuccgug

SEQ ID NO: 1987859 - RNA, 19 nt, Artificial Sequence
  Description of Artificial Sequence: Synthetic oligonucleotide
acaaucuuccggcagaaga

SEQ ID NO: 1987860 - RNA, 19 nt, Artificial Sequence
  Description of Artificial Sequence: Synthetic oligonucleotide
agucucuggaaguccaagc

SEQ ID NO: 1987861 - RNA, 19 nt, Artificial Sequence
  Description of Artificial Sequence: Synthetic oligonucleotide
aaguccaagccaugcuccc

SEQ ID NO: 1987862 - RNA, 19 nt, Artificial Sequence
  Description of Artificial Sequence: Synthetic oligonucleotide
aaaucuagagccaguccac

SEQ ID NO: 1987863 - RNA, 19 nt, Artificial Sequence
  Description of Artificial Sequence: Synthetic oligonucleotide
gagguuauuaggauccagg

SEQ ID NO: 1987864 - RNA, 19 nt, Artificial Sequence
  Description of Artificial Sequence: Synthetic oligonucleotide
gaggcuacuacccggacug

SEQ ID NO: 1987865 - RNA, 19 nt, Artificial Sequence
  Description of Artificial Sequence: Synthetic oligonucleotide
aaguccuucccggauuucc

SEQ ID NO: 1987866 - RNA, 19 nt, Artificial Sequence
  Description of Artificial Sequence: Synthetic oligonucleotide
aggauucuaaacuugccca

SEQ ID NO: 1987867 - RNA, 19 nt, Artificial Sequence
  Description of Artificial Sequence: Synthetic oligonucleotide
aaaccaucacagcucagca

SEQ ID NO: 1987868 - RNA, 19 nt, Artificial Sequence
  Description of Artificial Sequence: Synthetic oligonucleotide
aaucuagagccaguccacc

SEQ ID NO: 1987869 - RNA, 19 nt, Artificial Sequence
  Description of Artificial Sequence: Synthetic oligonucleotide
gaaaggccgagagaaaccg

SEQ ID NO: 1987870 - RNA, 19 nt, Artificial Sequence
  Description of Artificial Sequence: Synthetic oligonucleotide
uuauuaggauccaggccgg

SEQ ID NO: 1987871 - RNA, 19 nt, Artificial Sequence
  Description of Artificial Sequence: Synthetic oligonucleotide
aucugacagaaccaguauc

SEQ ID NO: 1987872 - RNA, 19 nt, Artificial Sequence
  Description of Artificial Sequence: Synthetic oligonucleotide
uccaagucugcucugcagc

SEQ ID NO: 1987873 - RNA, 19 nt, Artificial Sequence
  Description of Artificial Sequence: Synthetic oligonucleotide
agauguuaccuccaagucu

SEQ ID NO: 1987874 - RNA, 19 nt, Artificial Sequence
  Description of Artificial Sequence: Synthetic oligonucleotide
uuaccuccaagucugcucu

SEQ ID NO: 1987875 - RNA, 19 nt, Artificial Sequence
  Description of Artificial Sequence: Synthetic oligonucleotide
acauagcgcaagucgaaac

SEQ ID NO: 1987876 - RNA, 19 nt, Artificial Sequence
  Description of Artificial Sequence: Synthetic oligonucleotide
cauagcgcaagucgaaacc

SEQ ID NO: 1987877 - RNA, 19 nt, Artificial Sequence
  Description of Artificial Sequence: Synthetic oligonucleotide
caccacauagcgcaagucg

SEQ ID NO: 1987878 - RNA, 19 nt, Artificial Sequence
  Description of Artificial Sequence: Synthetic oligonucleotide
gaagacaagcacaccagag

SEQ ID NO: 1987879 - RNA, 19 nt, Artificial Sequence
  Description of Artificial Sequence: Synthetic oligonucleotide
aaacuaaugcaccuuccuu

SEQ ID NO: 1987880 - RNA, 19 nt, Artificial Sequence
  Description of Artificial Sequence: Synthetic oligonucleotide
cagaggauucuaaacuugc

SEQ ID NO: 1987881 - RNA, 19 nt, Artificial Sequence
  Description of Artificial Sequence: Synthetic oligonucleotide
ucuagagccaguccaccug

SEQ ID NO: 1987882 - RNA, 19 nt, Artificial Sequence
  Description of Artificial Sequence: Synthetic oligonucleotide
uccaacugaucuuccaagc

SEQ ID NO: 1987883 - RNA, 19 nt, Artificial Sequence
  Description of Artificial Sequence: Synthetic oligonucleotide
gacugucugugucacaggc

SEQ ID NO: 1987884 - RNA, 19 nt, Artificial Sequence
  Description of Artificial Sequence: Synthetic oligonucleotide
cacgaauaaauuccagaag

SEQ ID NO: 1987885 - RNA, 19 nt, Artificial Sequence
  Description of Artificial Sequence: Synthetic oligonucleotide
cuugaguggaccagagagc

SEQ ID NO: 1987886 - RNA, 19 nt, Artificial Sequence
  Description of Artificial Sequence: Synthetic oligonucleotide
cugaucacuaaaguguggc

SEQ ID NO: 1987887 - RNA, 19 nt, Artificial Sequence
  Description of Artificial Sequence: Synthetic oligonucleotide
ucucuggaaguccaagcca

SEQ ID NO: 1987888 - RNA, 19 nt, Artificial Sequence
  Description of Artificial Sequence: Synthetic oligonucleotide
aaucuuccggcagaagaag

SEQ ID NO: 1987889 - RNA, 19 nt, Artificial Sequence
  Description of Artificial Sequence: Synthetic oligonucleotide
cuguaaguguccugaagag

SEQ ID NO: 1987890 - RNA, 19 nt, Artificial Sequence
  Description of Artificial Sequence: Synthetic oligonucleotide
aacugaucuuccaagcucu

SEQ ID NO: 1987891 - RNA, 19 nt, Artificial Sequence
  Description of Artificial Sequence: Synthetic oligonucleotide
cuucccgcuaaacagcagc

SEQ ID NO: 1987892 - RNA, 19 nt, Artificial Sequence
  Description of Artificial Sequence: Synthetic oligonucleotide
auucuaaacuugcccacug

SEQ ID NO: 1987893 - RNA, 19 nt, Artificial Sequence
  Description of Artificial Sequence: Synthetic oligonucleotide
ugacagaaccaguauccgc

SEQ ID NO: 1987894 - RNA, 19 nt, Artificial Sequence
  Description of Artificial Sequence: Synthetic oligonucleotide
uucuaaacuugcccacugc

SEQ ID NO: 1987895 - RNA, 19 nt, Artificial Sequence
  Description of Artificial Sequence: Synthetic oligonucleotide
aaguguggcacgaauaaau

SEQ ID NO: 1987896 - RNA, 19 nt, Artificial Sequence
  Description of Artificial Sequence: Synthetic oligonucleotide
agaggauucuaaacuugcc

SEQ ID NO: 1987897 - RNA, 19 nt, Artificial Sequence
  Description of Artificial Sequence: Synthetic oligonucleotide
uccuguaaguguccugaag

SEQ ID NO: 1987898 - RNA, 19 nt, Artificial Sequence
  Description of Artificial Sequence: Synthetic oligonucleotide
gucucuggaaguccaagcc

SEQ ID NO: 1987899 - RNA, 19 nt, Artificial Sequence
  Description of Artificial Sequence: Synthetic oligonucleotide
cacuggauaucagacaccc

SEQ ID NO: 1987900 - RNA, 19 nt, Artificial Sequence
  Description of Artificial Sequence: Synthetic oligonucleotide
uaaugcaccuuccuuuguc

SEQ ID NO: 1987901 - RNA, 19 nt, Artificial Sequence
  Description of Artificial Sequence: Synthetic oligonucleotide
aguggacgcuuccaguagg

SEQ ID NO: 1987902 - RNA, 19 nt, Artificial Sequence
  Description of Artificial Sequence: Synthetic oligonucleotide
agccugaucacuaaagugu

SEQ ID NO: 1987903 - RNA, 19 nt, Artificial Sequence
  Description of Artificial Sequence: Synthetic oligonucleotide
uccugaaaccacuggauau

SEQ ID NO: 1987904 - RNA, 19 nt, Artificial Sequence
  Description of Artificial Sequence: Synthetic oligonucleotide
ugcuccgaggcuacuaccc

SEQ ID NO: 1987905 - RNA, 19 nt, Artificial Sequence
  Description of Artificial Sequence: Synthetic oligonucleotide
caagccuaaagcugacacc

SEQ ID NO: 1987906 - RNA, 19 nt, Artificial Sequence
  Description of Artificial Sequence: Synthetic oligonucleotide
gagaaaggccgagagaaac

SEQ ID NO: 1987907 - RNA, 19 nt, Artificial Sequence
  Description of Artificial Sequence: Synthetic oligonucleotide
acuaaaguguggcacgaau

SEQ ID NO: 1987908 - RNA, 19 nt, Artificial Sequence
  Description of Artificial Sequence: Synthetic oligonucleotide
gacgcuuccaguaggaaca

SEQ ID NO: 1987909 - RNA, 19 nt, Artificial Sequence
  Description of Artificial Sequence: Synthetic oligonucleotide
gcaagucgaaaccagcgcg

SEQ ID NO: 1987910 - RNA, 19 nt, Artificial Sequence
  Description of Artificial Sequence: Synthetic oligonucleotide
gacgcaaaccaucacagcu

SEQ ID NO: 1987911 - RNA, 19 nt, Artificial Sequence
  Description of Artificial Sequence: Synthetic oligonucleotide
uccggcagaagaagccugg

SEQ ID NO: 1987912 - RNA, 19 nt, Artificial Sequence
  Description of Artificial Sequence: Synthetic oligonucleotide
caagucgaaaccagcgcgc

SEQ ID NO: 1987913 - RNA, 19 nt, Artificial Sequence
  Description of Artificial Sequence: Synthetic oligonucleotide
ucggacuccucaauuccag

SEQ ID NO: 1987914 - RNA, 19 nt, Artificial Sequence
  Description of Artificial Sequence: Synthetic oligonucleotide
ccaugguucucaaugaccc

SEQ ID NO: 1987915 - RNA, 19 nt, Artificial Sequence
  Description of Artificial Sequence: Synthetic oligonucleotide
ugaucacuaaaguguggca

SEQ ID NO: 1987916 - RNA, 19 nt, Artificial Sequence
  Description of Artificial Sequence: Synthetic oligonucleotide
gguuauuaggauccaggcc

SEQ ID NO: 1987917 - RNA, 19 nt, Artificial Sequence
  Description of Artificial Sequence: Synthetic oligonucleotide
ugccucaaacaaacuaaug

SEQ ID NO: 1987918 - RNA, 19 nt, Artificial Sequence
  Description of Artificial Sequence: Synthetic oligonucleotide
gaguggaccagagagccgc

SEQ ID NO: 1987919 - RNA, 19 nt, Artificial Sequence
  Description of Artificial Sequence: Synthetic oligonucleotide
cuggugugaacacccagcc

SEQ ID NO: 1987920 - RNA, 19 nt, Artificial Sequence
  Description of Artificial Sequence: Synthetic oligonucleotide
accucggacuccucaauuc

SEQ ID NO: 1987921 - RNA, 19 nt, Artificial Sequence
  Description of Artificial Sequence: Synthetic oligonucleotide
uccugccucaaacaaacua

SEQ ID NO: 1987922 - RNA, 19 nt, Artificial Sequence
  Description of Artificial Sequence: Synthetic oligonucleotide
ucaugucccuccgauaggc

SEQ ID NO: 1987923 - RNA, 19 nt, Artificial Sequence
  Description of Artificial Sequence: Synthetic oligonucleotide
gcauacugcuccuugagug

SEQ ID NO: 1987924 - RNA, 19 nt, Artificial Sequence
  Description of Artificial Sequence: Synthetic oligonucleotide
ucugcucagcccugaagcc

SEQ ID NO: 1987925 - RNA, 19 nt, Artificial Sequence
  Description of Artificial Sequence: Synthetic oligonucleotide
ucggucacgaaguccuucc

SEQ ID NO: 1987926 - RNA, 19 nt, Artificial Sequence
  Description of Artificial Sequence: Synthetic oligonucleotide
caacugaucuuccaagcuc

SEQ ID NO: 1987927 - RNA, 19 nt, Artificial Sequence
  Description of Artificial Sequence: Synthetic oligonucleotide
uaggauccaggccggaaca

SEQ ID NO: 1987928 - RNA, 19 nt, Artificial Sequence
  Description of Artificial Sequence: Synthetic oligonucleotide
agagccgcaggacagcaca

SEQ ID NO: 1987929 - RNA, 19 nt, Artificial Sequence
  Description of Artificial Sequence: Synthetic oligonucleotide
gaagccuggaucggcacag

SEQ ID NO: 1987930 - RNA, 19 nt, Artificial Sequence
  Description of Artificial Sequence: Synthetic oligonucleotide
cuagagccaguccaccugc

SEQ ID NO: 1987931 - RNA, 19 nt, Artificial Sequence
  Description of Artificial Sequence: Synthetic oligonucleotide
gccgagagaaaccggaagg

SEQ ID NO: 1987932 - RNA, 19 nt, Artificial Sequence
  Description of Artificial Sequence: Synthetic oligonucleotide
guuaccuccaagucugcuc

SEQ ID NO: 1987933 - RNA, 19 nt, Artificial Sequence
  Description of Artificial Sequence: Synthetic oligonucleotide
uagcgcaagucgaaaccag

SEQ ID NO: 1987934 - RNA, 19 nt, Artificial Sequence
  Description of Artificial Sequence: Synthetic oligonucleotide
aggacgcaaaccaucacag

SEQ ID NO: 1987935 - RNA, 19 nt, Artificial Sequence
  Description of Artificial Sequence: Synthetic oligonucleotide
uccucaauuccagccaagc

SEQ ID NO: 1987936 - RNA, 19 nt, Artificial Sequence
  Description of Artificial Sequence: Synthetic oligonucleotide
aaguuguccaggccacacu

SEQ ID NO: 1987937 - RNA, 19 nt, Artificial Sequence
  Description of Artificial Sequence: Synthetic oligonucleotide
uuccagccaagcacgaagu

SEQ ID NO: 1987938 - RNA, 19 nt, Artificial Sequence
  Description of Artificial Sequence: Synthetic oligonucleotide
uucccgcuaaacagcagca

SEQ ID NO: 1987939 - RNA, 19 nt, Artificial Sequence
  Description of Artificial Sequence: Synthetic oligonucleotide
ucgaaaccagcgcgcagag

SEQ ID NO: 1987940 - RNA, 19 nt, Artificial Sequence
  Description of Artificial Sequence: Synthetic oligonucleotide
uggggagccacaucugaca

SEQ ID NO: 1987941 - RNA, 19 nt, Artificial Sequence
  Description of Artificial Sequence: Synthetic oligonucleotide
accagaggauucuaaacuu

SEQ ID NO: 1987942 - RNA, 19 nt, Artificial Sequence
  Description of Artificial Sequence: Synthetic oligonucleotide
cauacacaggacgcaaacc

SEQ ID NO: 1987943 - RNA, 19 nt, Artificial Sequence
  Description of Artificial Sequence: Synthetic oligonucleotide
guauccgccccagugaagc

SEQ ID NO: 1987944 - RNA, 19 nt, Artificial Sequence
  Description of Artificial Sequence: Synthetic oligonucleotide
uggcacgaauaaauuccag

SEQ ID NO: 1987945 - RNA, 19 nt, Artificial Sequence
  Description of Artificial Sequence: Synthetic oligonucleotide
gaaguggacgcuuccagua

SEQ ID NO: 1987946 - RNA, 19 nt, Artificial Sequence
  Description of Artificial Sequence: Synthetic oligonucleotide
aucuuccggcagaagaagc

SEQ ID NO: 1987947 - RNA, 19 nt, Artificial Sequence
  Description of Artificial Sequence: Synthetic oligonucleotide
agaaccaguauccgcccca

SEQ ID NO: 1987948 - RNA, 19 nt, Artificial Sequence
  Description of Artificial Sequence: Synthetic oligonucleotide
aaggccgagagaaaccgga

SEQ ID NO: 1987949 - RNA, 19 nt, Artificial Sequence
  Description of Artificial Sequence: Synthetic oligonucleotide
acaggacgcaaaccaucac

SEQ ID NO: 1987950 - RNA, 19 nt, Artificial Sequence
  Description of Artificial Sequence: Synthetic oligonucleotide
agcgcaagucgaaaccagc

SEQ ID NO: 1987951 - RNA, 19 nt, Artificial Sequence
  Description of Artificial Sequence: Synthetic oligonucleotide
gugagcauccucccuacac

SEQ ID NO: 1987952 - RNA, 19 nt, Artificial Sequence
  Description of Artificial Sequence: Synthetic oligonucleotide
ggauaucagacacccuccg

SEQ ID NO: 1987953 - RNA, 19 nt, Artificial Sequence
  Description of Artificial Sequence: Synthetic oligonucleotide
cacgccuuccacaaucuuc

SEQ ID NO: 1987954 - RNA, 19 nt, Artificial Sequence
  Description of Artificial Sequence: Synthetic oligonucleotide
gccuaaagcugacaccucg

SEQ ID NO: 1987955 - RNA, 19 nt, Artificial Sequence
  Description of Artificial Sequence: Synthetic oligonucleotide
ccucaaacaaacuaaugca

SEQ ID NO: 1987956 - RNA, 19 nt, Artificial Sequence
  Description of Artificial Sequence: Synthetic oligonucleotide
cugacagaaccaguauccg

SEQ ID NO: 1987957 - RNA, 19 nt, Artificial Sequence
  Description of Artificial Sequence: Synthetic oligonucleotide
ugggacacgccuuccacaa

SEQ ID NO: 1987958 - RNA, 19 nt, Artificial Sequence
  Description of Artificial Sequence: Synthetic oligonucleotide
aaaggccgagagaaaccgg

SEQ ID NO: 1987959 - RNA, 19 nt, Artificial Sequence
  Description of Artificial Sequence: Synthetic oligonucleotide
guguggcacgaauaaauuc

SEQ ID NO: 1987960 - RNA, 19 nt, Artificial Sequence
  Description of Artificial Sequence: Synthetic oligonucleotide
auagcgcaagucgaaacca

SEQ ID NO: 1987961 - RNA, 19 nt, Artificial Sequence
  Description of Artificial Sequence: Synthetic oligonucleotide
uuccggcagaagaagccug

SEQ ID NO: 1987962 - RNA, 19 nt, Artificial Sequence
  Description of Artificial Sequence: Synthetic oligonucleotide
aucuagagccaguccaccu

SEQ ID NO: 1987963 - RNA, 19 nt, Artificial Sequence
  Description of Artificial Sequence: Synthetic oligonucleotide
gcacgaauaaauuccagaa

SEQ ID NO: 1987964 - RNA, 19 nt, Artificial Sequence
  Description of Artificial Sequence: Synthetic oligonucleotide
cugcucgucuccaugguuc

SEQ ID NO: 1987965 - RNA, 19 nt, Artificial Sequence
  Description of Artificial Sequence: Synthetic oligonucleotide
agcgcgcagagaaaggccg

SEQ ID NO: 1987966 - RNA, 19 nt, Artificial Sequence
  Description of Artificial Sequence: Synthetic oligonucleotide
agcauacugcuccuugagu

SEQ ID NO: 1987967 - RNA, 19 nt, Artificial Sequence
  Description of Artificial Sequence: Synthetic oligonucleotide
ggaaaucuagagccagucc

SEQ ID NO: 1987968 - RNA, 19 nt, Artificial Sequence
  Description of Artificial Sequence: Synthetic oligonucleotide
gucggcucugcuccgaggc

SEQ ID NO: 1987969 - RNA, 19 nt, Artificial Sequence
  Description of Artificial Sequence: Synthetic oligonucleotide
uggugugaacacccagccc

SEQ ID NO: 1987970 - RNA, 19 nt, Artificial Sequence
  Description of Artificial Sequence: Synthetic oligonucleotide
ucacuaaaguguggcacga

SEQ ID NO: 1987971 - RNA, 19 nt, Artificial Sequence
  Description of Artificial Sequence: Synthetic oligonucleotide
cuaaaguguggcacgaaua

SEQ ID NO: 1987972 - RNA, 19 nt, Artificial Sequence
  Description of Artificial Sequence: Synthetic oligonucleotide
cagggcguccucuccaggg

SEQ ID NO: 1987973 - RNA, 19 nt, Artificial Sequence
  Description of Artificial Sequence: Synthetic oligonucleotide
agaagguucuccaacugau

SEQ ID NO: 1987974 - RNA, 19 nt, Artificial Sequence
  Description of Artificial Sequence: Synthetic oligonucleotide
uccgaggcuacuacccgga

SEQ ID NO: 1987975 - RNA, 19 nt, Artificial Sequence
  Description of Artificial Sequence: Synthetic oligonucleotide
ggucacgaaguccuucccg

SEQ ID NO: 1987976 - RNA, 19 nt, Artificial Sequence
  Description of Artificial Sequence: Synthetic oligonucleotide
uccagccaagcacgaagug

SEQ ID NO: 1987977 - RNA, 19 nt, Artificial Sequence
  Description of Artificial Sequence: Synthetic oligonucleotide
cagcccugaagccugauca

SEQ ID NO: 1987978 - RNA, 19 nt, Artificial Sequence
  Description of Artificial Sequence: Synthetic oligonucleotide
ggcacgaauaaauuccaga

SEQ ID NO: 1987979 - RNA, 19 nt, Artificial Sequence
  Description of Artificial Sequence: Synthetic oligonucleotide
cugugucacaggcccauag

SEQ ID NO: 1987980 - RNA, 19 nt, Artificial Sequence
  Description of Artificial Sequence: Synthetic oligonucleotide
cuccgaggcuacuacccgg

SEQ ID NO: 1987981 - RNA, 19 nt, Artificial Sequence
  Description of Artificial Sequence: Synthetic oligonucleotide
guucucaaugacccaguca

SEQ ID NO: 1987982 - RNA, 19 nt, Artificial Sequence
  Description of Artificial Sequence: Synthetic oligonucleotide
aggcccauaggccuccuga

SEQ ID NO: 1987983 - RNA, 19 nt, Artificial Sequence
  Description of Artificial Sequence: Synthetic oligonucleotide
aagucgaaaccagcgcgca

SEQ ID NO: 1987984 - RNA, 19 nt, Artificial Sequence
  Description of Artificial Sequence: Synthetic oligonucleotide
cuccaagucugcucugcag

SEQ ID NO: 1987985 - RNA, 19 nt, Artificial Sequence
  Description of Artificial Sequence: Synthetic oligonucleotide
accacauagcgcaagucga

SEQ ID NO: 1987986 - RNA, 19 nt, Artificial Sequence
  Description of Artificial Sequence: Synthetic oligonucleotide
ggaaguccaagccaugcuc

SEQ ID NO: 1987987 - RNA, 19 nt, Artificial Sequence
  Description of Artificial Sequence: Synthetic oligonucleotide
acaucugacagaaccagua

SEQ ID NO: 1987988 - RNA, 19 nt, Artificial Sequence
  Description of Artificial Sequence: Synthetic oligonucleotide
cacaggacgcaaaccauca

SEQ ID NO: 1987989 - RNA, 19 nt, Artificial Sequence
  Description of Artificial Sequence: Synthetic oligonucleotide
ccggaacauacacaggacg

SEQ ID NO: 1987990 - RNA, 19 nt, Artificial Sequence
  Description of Artificial Sequence: Synthetic oligonucleotide
agaagccuggaucggcaca

SEQ ID NO: 1987991 - RNA, 19 nt, Artificial Sequence
  Description of Artificial Sequence: Synthetic oligonucleotide
ggccggaacauacacagga

SEQ ID NO: 1987992 - RNA, 19 nt, Artificial Sequence
  Description of Artificial Sequence: Synthetic oligonucleotide
cagauaggcugggacacgc

SEQ ID NO: 1987993 - RNA, 19 nt, Artificial Sequence
  Description of Artificial Sequence: Synthetic oligonucleotide
ccaagccuaaagcugacac

SEQ ID NO: 1987994 - RNA, 19 nt, Artificial Sequence
  Description of Artificial Sequence: Synthetic oligonucleotide
ucuucccgcuaaacagcag

SEQ ID NO: 1987995 - RNA, 19 nt, Artificial Sequence
  Description of Artificial Sequence: Synthetic oligonucleotide
caggacgcaaaccaucaca

SEQ ID NO: 1987996 - RNA, 19 nt, Artificial Sequence
  Description of Artificial Sequence: Synthetic oligonucleotide
augcucccgagcauacugc

SEQ ID NO: 1987997 - RNA, 19 nt, Artificial Sequence
  Description of Artificial Sequence: Synthetic oligonucleotide
ucucaaugacccagucaaa

SEQ ID NO: 1987998 - RNA, 19 nt, Artificial Sequence
  Description of Artificial Sequence: Synthetic oligonucleotide
gaacauacacaggacgcaa

SEQ ID NO: 1987999 - RNA, 19 nt, Artificial Sequence
  Description of Artificial Sequence: Synthetic oligonucleotide
aucagacacccuccgugug

SEQ ID NO: 1988000 - RNA, 19 nt, Artificial Sequence
  Description of Artificial Sequence: Synthetic oligonucleotide
agucgaaaccagcgcgcag

SEQ ID NO: 1988001 - RNA, 19 nt, Artificial Sequence
  Description of Artificial Sequence: Synthetic oligonucleotide
cuaaagcugacaccucgga

SEQ ID NO: 1988002 - RNA, 19 nt, Artificial Sequence
  Description of Artificial Sequence: Synthetic oligonucleotide
caagcacaccagaggauuc

SEQ ID NO: 1988003 - RNA, 19 nt, Artificial Sequence
  Description of Artificial Sequence: Synthetic oligonucleotide
cuucaccaagccuaaagcu

SEQ ID NO: 1988004 - RNA, 19 nt, Artificial Sequence
  Description of Artificial Sequence: Synthetic oligonucleotide
ccuggugugaacacccagc

SEQ ID NO: 1988005 - RNA, 19 nt, Artificial Sequence
  Description of Artificial Sequence: Synthetic oligonucleotide
ccuaaagcugacaccucgg

SEQ ID NO: 1988006 - RNA, 19 nt, Artificial Sequence
  Description of Artificial Sequence: Synthetic oligonucleotide
ccuguaaguguccugaaga

SEQ ID NO: 1988007 - RNA, 19 nt, Artificial Sequence
  Description of Artificial Sequence: Synthetic oligonucleotide
cuacuacccggacugucug

SEQ ID NO: 1988008 - RNA, 19 nt, Artificial Sequence
  Description of Artificial Sequence: Synthetic oligonucleotide
cuccuugaguggaccagag

SEQ ID NO: 1988009 - RNA, 19 nt, Artificial Sequence
  Description of Artificial Sequence: Synthetic oligonucleotide
uccgauaggccuccuugua

SEQ ID NO: 1988010 - RNA, 19 nt, Artificial Sequence
  Description of Artificial Sequence: Synthetic oligonucleotide
gauaggcugggacacgccu

SEQ ID NO: 1988011 - RNA, 19 nt, Artificial Sequence
  Description of Artificial Sequence: Synthetic oligonucleotide
gcucugcucgucuccaugg

SEQ ID NO: 1988012 - RNA, 19 nt, Artificial Sequence
  Description of Artificial Sequence: Synthetic oligonucleotide
ggcacagcguuucuccucc

SEQ ID NO: 1988013 - RNA, 19 nt, Artificial Sequence
  Description of Artificial Sequence: Synthetic oligonucleotide
ggugcuggcauccaggagu

SEQ ID NO: 1988014 - RNA, 19 nt, Artificial Sequence
  Description of Artificial Sequence: Synthetic oligonucleotide
acuacccggacugucugug

SEQ ID NO: 1988015 - RNA, 19 nt, Artificial Sequence
  Description of Artificial Sequence: Synthetic oligonucleotide
agauaggcugggacacgcc

SEQ ID NO: 1988016 - RNA, 19 nt, Artificial Sequence
  Description of Artificial Sequence: Synthetic oligonucleotide
uacccggacugucuguguc

SEQ ID NO: 1988017 - RNA, 19 nt, Artificial Sequence
  Description of Artificial Sequence: Synthetic oligonucleotide
cagaagguucuccaacuga

SEQ ID NO: 1988018 - RNA, 19 nt, Artificial Sequence
  Description of Artificial Sequence: Synthetic oligonucleotide
auaggccuccugaaaccac

SEQ ID NO: 1988019 - RNA, 19 nt, Artificial Sequence
  Description of Artificial Sequence: Synthetic oligonucleotide
ccaagucugcucugcagcg

SEQ ID NO: 1988020 - RNA, 19 nt, Artificial Sequence
  Description of Artificial Sequence: Synthetic oligonucleotide
cggaacauacacaggacgc

SEQ ID NO: 1988021 - RNA, 19 nt, Artificial Sequence
  Description of Artificial Sequence: Synthetic oligonucleotide
cagaagaagccuggaucgg

SEQ ID NO: 1988022 - RNA, 19 nt, Artificial Sequence
  Description of Artificial Sequence: Synthetic oligonucleotide
ugcucgucuccaugguucu

SEQ ID NO: 1988023 - RNA, 19 nt, Artificial Sequence
  Description of Artificial Sequence: Synthetic oligonucleotide
caugucccuccgauaggcc

SEQ ID NO: 1988024 - RNA, 19 nt, Artificial Sequence
  Description of Artificial Sequence: Synthetic oligonucleotide
gaaccaguauccgccccag

SEQ ID NO: 1988025 - RNA, 19 nt, Artificial Sequence
  Description of Artificial Sequence: Synthetic oligonucleotide
cuccgugugucacucacca

SEQ ID NO: 1988026 - RNA, 19 nt, Artificial Sequence
  Description of Artificial Sequence: Synthetic oligonucleotide
ggacgcuuccaguaggaac

SEQ ID NO: 1988027 - RNA, 19 nt, Artificial Sequence
  Description of Artificial Sequence: Synthetic oligonucleotide
agcacgaaguggacgcuuc

SEQ ID NO: 1988028 - RNA, 19 nt, Artificial Sequence
  Description of Artificial Sequence: Synthetic oligonucleotide
caccagaggauucuaaacu

SEQ ID NO: 1988029 - RNA, 19 nt, Artificial Sequence
  Description of Artificial Sequence: Synthetic oligonucleotide
cagcgcgcagagaaaggcc

SEQ ID NO: 1988030 - RNA, 19 nt, Artificial Sequence
  Description of Artificial Sequence: Synthetic oligonucleotide
uccucccuacaccucugga

SEQ ID NO: 1988031 - RNA, 19 nt, Artificial Sequence
  Description of Artificial Sequence: Synthetic oligonucleotide
ugugagcauccucccuaca

SEQ ID NO: 1988032 - RNA, 19 nt, Artificial Sequence
  Description of Artificial Sequence: Synthetic oligonucleotide
acccagucaaaguucccaa

SEQ ID NO: 1988033 - RNA, 19 nt, Artificial Sequence
  Description of Artificial Sequence: Synthetic oligonucleotide
accacgcuucaccaagccu

SEQ ID NO: 1988034 - RNA, 19 nt, Artificial Sequence
  Description of Artificial Sequence: Synthetic oligonucleotide
gucgaaaccagcgcgcaga

SEQ ID NO: 1988035 - RNA, 19 nt, Artificial Sequence
  Description of Artificial Sequence: Synthetic oligonucleotide
ucugcucgucuccaugguu

SEQ ID NO: 1988036 - RNA, 19 nt, Artificial Sequence
  Description of Artificial Sequence: Synthetic oligonucleotide
ugccugugagcauccuccc

SEQ ID NO: 1988037 - RNA, 19 nt, Artificial Sequence
  Description of Artificial Sequence: Synthetic oligonucleotide
uggaucggcacagcguuuc

SEQ ID NO: 1988038 - RNA, 19 nt, Artificial Sequence
  Description of Artificial Sequence: Synthetic oligonucleotide
uccgccccagugaagcagu

SEQ ID NO: 1988039 - RNA, 19 nt, Artificial Sequence
  Description of Artificial Sequence: Synthetic oligonucleotide
gccaccacgcuucaccaag

SEQ ID NO: 1988040 - RNA, 19 nt, Artificial Sequence
  Description of Artificial Sequence: Synthetic oligonucleotide
gauaucagacacccuccgu

SEQ ID NO: 1988041 - RNA, 19 nt, Artificial Sequence
  Description of Artificial Sequence: Synthetic oligonucleotide
ccggauuuccucuucccgc

SEQ ID NO: 1988042 - RNA, 19 nt, Artificial Sequence
  Description of Artificial Sequence: Synthetic oligonucleotide
caaacuaaugcaccuuccu

SEQ ID NO: 1988043 - RNA, 19 nt, Artificial Sequence
  Description of Artificial Sequence: Synthetic oligonucleotide
cacagcguuucuccucccc

SEQ ID NO: 1988044 - RNA, 19 nt, Artificial Sequence
  Description of Artificial Sequence: Synthetic oligonucleotide
ccgaguggggccauggagc

SEQ ID NO: 1988045 - RNA, 19 nt, Artificial Sequence
  Description of Artificial Sequence: Synthetic oligonucleotide
gacaccucggacuccucaa

SEQ ID NO: 1988046 - RNA, 19 nt, Artificial Sequence
  Description of Artificial Sequence: Synthetic oligonucleotide
caucacagcucagcagacc

SEQ ID NO: 1988047 - RNA, 19 nt, Artificial Sequence
  Description of Artificial Sequence: Synthetic oligonucleotide
cccgcuaaacagcagcacc

SEQ ID NO: 1988048 - RNA, 19 nt, Artificial Sequence
  Description of Artificial Sequence: Synthetic oligonucleotide
auacugcuccuugagugga

SEQ ID NO: 1988049 - RNA, 19 nt, Artificial Sequence
  Description of Artificial Sequence: Synthetic oligonucleotide
gauucuaaacuugcccacu

SEQ ID NO: 1988050 - RNA, 19 nt, Artificial Sequence
  Description of Artificial Sequence: Synthetic oligonucleotide
ggggagccacaucugacag

SEQ ID NO: 1988051 - RNA, 19 nt, Artificial Sequence
  Description of Artificial Sequence: Synthetic oligonucleotide
uccgugugucacucaccag

SEQ ID NO: 1988052 - RNA, 19 nt, Artificial Sequence
  Description of Artificial Sequence: Synthetic oligonucleotide
ggacacgccuuccacaauc

SEQ ID NO: 1988053 - RNA, 19 nt, Artificial Sequence
  Description of Artificial Sequence: Synthetic oligonucleotide
agaucaugucccuccgaua

SEQ ID NO: 1988054 - RNA, 19 nt, Artificial Sequence
  Description of Artificial Sequence: Synthetic oligonucleotide
caggagucucuggaagucc

SEQ ID NO: 1988055 - RNA, 19 nt, Artificial Sequence
  Description of Artificial Sequence: Synthetic oligonucleotide
ucacaggcccauaggccuc

SEQ ID NO: 1988056 - RNA, 19 nt, Artificial Sequence
  Description of Artificial Sequence: Synthetic oligonucleotide
acgaaguccuucccggauu

SEQ ID NO: 1988057 - RNA, 19 nt, Artificial Sequence
  Description of Artificial Sequence: Synthetic oligonucleotide
gcgcaagucgaaaccagcg

SEQ ID NO: 1988058 - RNA, 19 nt, Artificial Sequence
  Description of Artificial Sequence: Synthetic oligonucleotide
ugcagcgccucggucacga

SEQ ID NO: 1988059 - RNA, 19 nt, Artificial Sequence
  Description of Artificial Sequence: Synthetic oligonucleotide
ccugaucacuaaagugugg

SEQ ID NO: 1988060 - RNA, 19 nt, Artificial Sequence
  Description of Artificial Sequence: Synthetic oligonucleotide
aguguggcacgaauaaauu

SEQ ID NO: 1988061 - RNA, 19 nt, Artificial Sequence
  Description of Artificial Sequence: Synthetic oligonucleotide
cugcuccgaggcuacuacc

SEQ ID NO: 1988062 - RNA, 19 nt, Artificial Sequence
  Description of Artificial Sequence: Synthetic oligonucleotide
ugucacucaccagccagau

SEQ ID NO: 1988063 - RNA, 19 nt, Artificial Sequence
  Description of Artificial Sequence: Synthetic oligonucleotide
uacuacccggacugucugu

SEQ ID NO: 1988064 - RNA, 19 nt, Artificial Sequence
  Description of Artificial Sequence: Synthetic oligonucleotide
ccugccucaaacaaacuaa

SEQ ID NO: 1988065 - RNA, 19 nt, Artificial Sequence
  Description of Artificial Sequence: Synthetic oligonucleotide
caugguaaugcuccugccu

SEQ ID NO: 1988066 - RNA, 19 nt, Artificial Sequence
  Description of Artificial Sequence: Synthetic oligonucleotide
auguuaccuccaagucugc

SEQ ID NO: 1988067 - RNA, 19 nt, Artificial Sequence
  Description of Artificial Sequence: Synthetic oligonucleotide
aaccaguauccgccccagu

SEQ ID NO: 1988068 - RNA, 19 nt, Artificial Sequence
  Description of Artificial Sequence: Synthetic oligonucleotide
ggaacauacacaggacgca

SEQ ID NO: 1988069 - RNA, 19 nt, Artificial Sequence
  Description of Artificial Sequence: Synthetic oligonucleotide
ugcugucggcucugcuccg

SEQ ID NO: 1988070 - RNA, 19 nt, Artificial Sequence
  Description of Artificial Sequence: Synthetic oligonucleotide
caaugacccagucaaaguu

SEQ ID NO: 1988071 - RNA, 19 nt, Artificial Sequence
  Description of Artificial Sequence: Synthetic oligonucleotide
caugguucucaaugaccca

SEQ ID NO: 1988072 - RNA, 19 nt, Artificial Sequence
  Description of Artificial Sequence: Synthetic oligonucleotide
ggagguuauuaggauccag

SEQ ID NO: 1988073 - RNA, 19 nt, Artificial Sequence
  Description of Artificial Sequence: Synthetic oligonucleotide
uccacaccacauagcgcaa

SEQ ID NO: 1988074 - RNA, 19 nt, Artificial Sequence
  Description of Artificial Sequence: Synthetic oligonucleotide
ccucggacuccucaauucc

SEQ ID NO: 1988075 - RNA, 19 nt, Artificial Sequence
  Description of Artificial Sequence: Synthetic oligonucleotide
gcuccgaggcuacuacccg

SEQ ID NO: 1988076 - RNA, 19 nt, Artificial Sequence
  Description of Artificial Sequence: Synthetic oligonucleotide
cauaggccuccugaaacca

SEQ ID NO: 1988077 - RNA, 19 nt, Artificial Sequence
  Description of Artificial Sequence: Synthetic oligonucleotide
ccuccgauaggccuccuug

SEQ ID NO: 1988078 - RNA, 19 nt, Artificial Sequence
  Description of Artificial Sequence: Synthetic oligonucleotide
gauaggccuccuuguaggu

SEQ ID NO: 1988079 - RNA, 19 nt, Artificial Sequence
  Description of Artificial Sequence: Synthetic oligonucleotide
auccgccccagugaagcag

SEQ ID NO: 1988080 - RNA, 19 nt, Artificial Sequence
  Description of Artificial Sequence: Synthetic oligonucleotide
cagcgccucggucacgaag

SEQ ID NO: 1988081 - RNA, 19 nt, Artificial Sequence
  Description of Artificial Sequence: Synthetic oligonucleotide
gccugaucacuaaagugug

SEQ ID NO: 1988082 - RNA, 19 nt, Artificial Sequence
  Description of Artificial Sequence: Synthetic oligonucleotide
ggacgcaaaccaucacagc

SEQ ID NO: 1988083 - RNA, 19 nt, Artificial Sequence
  Description of Artificial Sequence: Synthetic oligonucleotide
ucggcucugcuccgaggcu

SEQ ID NO: 1988084 - RNA, 19 nt, Artificial Sequence
  Description of Artificial Sequence: Synthetic oligonucleotide
cccggauuuccucuucccg

SEQ ID NO: 1988085 - RNA, 19 nt, Artificial Sequence
  Description of Artificial Sequence: Synthetic oligonucleotide
ucccgcuaaacagcagcac

SEQ ID NO: 1988086 - RNA, 19 nt, Artificial Sequence
  Description of Artificial Sequence: Synthetic oligonucleotide
caccaagccuaaagcugac

SEQ ID NO: 1988087 - RNA, 19 nt, Artificial Sequence
  Description of Artificial Sequence: Synthetic oligonucleotide
gaccagagagccgcaggac

SEQ ID NO: 1988088 - RNA, 19 nt, Artificial Sequence
  Description of Artificial Sequence: Synthetic oligonucleotide
agggaccccgccccuucuc

SEQ ID NO: 1988089 - RNA, 19 nt, Artificial Sequence
  Description of Artificial Sequence: Synthetic oligonucleotide
cauccucccuacaccucug

SEQ ID NO: 1988090 - RNA, 19 nt, Artificial Sequence
  Description of Artificial Sequence: Synthetic oligonucleotide
cugggacacgccuuccaca

SEQ ID NO: 1988091 - RNA, 19 nt, Artificial Sequence
  Description of Artificial Sequence: Synthetic oligonucleotide
accagcgcgcagagaaagg

SEQ ID NO: 1988092 - RNA, 19 nt, Artificial Sequence
  Description of Artificial Sequence: Synthetic oligonucleotide
uaccuccaagucugcucug

SEQ ID NO: 1988093 - RNA, 19 nt, Artificial Sequence
  Description of Artificial Sequence: Synthetic oligonucleotide
ccgagagaaaccggaaggc

SEQ ID NO: 1988094 - RNA, 19 nt, Artificial Sequence
  Description of Artificial Sequence: Synthetic oligonucleotide
ggacagcacagauguuacc

SEQ ID NO: 1988095 - RNA, 19 nt, Artificial Sequence
  Description of Artificial Sequence: Synthetic oligonucleotide
ucgucuccaugguucucaa

SEQ ID NO: 1988096 - RNA, 19 nt, Artificial Sequence
  Description of Artificial Sequence: Synthetic oligonucleotide
aaaccagcgcgcagagaaa

SEQ ID NO: 1988097 - RNA, 19 nt, Artificial Sequence
  Description of Artificial Sequence: Synthetic oligonucleotide
agccuaaagcugacaccuc

SEQ ID NO: 1988098 - RNA, 19 nt, Artificial Sequence
  Description of Artificial Sequence: Synthetic oligonucleotide
cagagagccgcaggacagc

SEQ ID NO: 1988099 - RNA, 19 nt, Artificial Sequence
  Description of Artificial Sequence: Synthetic oligonucleotide
caguauccgccccagugaa

SEQ ID NO: 1988100 - RNA, 19 nt, Artificial Sequence
  Description of Artificial Sequence: Synthetic oligonucleotide
aguauccgccccagugaag

SEQ ID NO: 1988101 - RNA, 19 nt, Artificial Sequence
  Description of Artificial Sequence: Synthetic oligonucleotide
cgcuucaccaagccuaaag

SEQ ID NO: 1988102 - RNA, 19 nt, Artificial Sequence
  Description of Artificial Sequence: Synthetic oligonucleotide
cugaagccugaucacuaaa

SEQ ID NO: 1988103 - RNA, 19 nt, Artificial Sequence
  Description of Artificial Sequence: Synthetic oligonucleotide
gagccgcaggacagcacag

SEQ ID NO: 1988104 - RNA, 19 nt, Artificial Sequence
  Description of Artificial Sequence: Synthetic oligonucleotide
aggagguuauuaggaucca

SEQ ID NO: 1988105 - RNA, 19 nt, Artificial Sequence
  Description of Artificial Sequence: Synthetic oligonucleotide
cagaucaugucccuccgau

SEQ ID NO: 1988106 - RNA, 19 nt, Artificial Sequence
  Description of Artificial Sequence: Synthetic oligonucleotide
gaccccgccccuucuccac

SEQ ID NO: 1988107 - RNA, 19 nt, Artificial Sequence
  Description of Artificial Sequence: Synthetic oligonucleotide
cugucggcucugcuccgag

SEQ ID NO: 1988108 - RNA, 19 nt, Artificial Sequence
  Description of Artificial Sequence: Synthetic oligonucleotide
ccacgcuucaccaagccua

SEQ ID NO: 1988109 - RNA, 19 nt, Artificial Sequence
  Description of Artificial Sequence: Synthetic oligonucleotide
uggacgcuuccaguaggaa

SEQ ID NO: 1988110 - RNA, 19 nt, Artificial Sequence
  Description of Artificial Sequence: Synthetic oligonucleotide
cgcaagucgaaaccagcgc

SEQ ID NO: 1988111 - RNA, 19 nt, Artificial Sequence
  Description of Artificial Sequence: Synthetic oligonucleotide
ccagcgcgcagagaaaggc

SEQ ID NO: 1988112 - RNA, 19 nt, Artificial Sequence
  Description of Artificial Sequence: Synthetic oligonucleotide
ggccauggagccaccacgc

SEQ ID NO: 1988113 - RNA, 19 nt, Artificial Sequence
  Description of Artificial Sequence: Synthetic oligonucleotide
cacaggcccauaggccucc

SEQ ID NO: 1988114 - RNA, 19 nt, Artificial Sequence
  Description of Artificial Sequence: Synthetic oligonucleotide
ggcgccuccgaguggggcc

SEQ ID NO: 1988115 - RNA, 19 nt, Artificial Sequence
  Description of Artificial Sequence: Synthetic oligonucleotide
cacgcuucaccaagccuaa

SEQ ID NO: 1988116 - RNA, 19 nt, Artificial Sequence
  Description of Artificial Sequence: Synthetic oligonucleotide
cugccucaaacaaacuaau

SEQ ID NO: 1988117 - RNA, 19 nt, Artificial Sequence
  Description of Artificial Sequence: Synthetic oligonucleotide
ccgagcauacugcuccuug

SEQ ID NO: 1988118 - RNA, 19 nt, Artificial Sequence
  Description of Artificial Sequence: Synthetic oligonucleotide
cacgaaguggacgcuucca

SEQ ID NO: 1988119 - RNA, 19 nt, Artificial Sequence
  Description of Artificial Sequence: Synthetic oligonucleotide
aggccggaacauacacagg

SEQ ID NO: 1988120 - RNA, 19 nt, Artificial Sequence
  Description of Artificial Sequence: Synthetic oligonucleotide
cacauagcgcaagucgaaa

SEQ ID NO: 1988121 - RNA, 19 nt, Artificial Sequence
  Description of Artificial Sequence: Synthetic oligonucleotide
auaggcugggacacgccuu

SEQ ID NO: 1988122 - RNA, 19 nt, Artificial Sequence
  Description of Artificial Sequence: Synthetic oligonucleotide
gcacgaaguggacgcuucc

SEQ ID NO: 1988123 - RNA, 19 nt, Artificial Sequence
  Description of Artificial Sequence: Synthetic oligonucleotide
agucucugcucagcccuga

SEQ ID NO: 1988124 - RNA, 19 nt, Artificial Sequence
  Description of Artificial Sequence: Synthetic oligonucleotide
acacgccuuccacaaucuu

SEQ ID NO: 1988125 - RNA, 19 nt, Artificial Sequence
  Description of Artificial Sequence: Synthetic oligonucleotide
gaaguccuucccggauuuc

SEQ ID NO: 1988126 - RNA, 19 nt, Artificial Sequence
  Description of Artificial Sequence: Synthetic oligonucleotide
guaaugcuccugccucaaa

SEQ ID NO: 1988127 - RNA, 19 nt, Artificial Sequence
  Description of Artificial Sequence: Synthetic oligonucleotide
gggaccccgccccuucucc

SEQ ID NO: 1988128 - RNA, 19 nt, Artificial Sequence
  Description of Artificial Sequence: Synthetic oligonucleotide
gacacgccuuccacaaucu

SEQ ID NO: 1988129 - RNA, 19 nt, Artificial Sequence
  Description of Artificial Sequence: Synthetic oligonucleotide
gagagccgcaggacagcac

SEQ ID NO: 1988130 - RNA, 19 nt, Artificial Sequence
  Description of Artificial Sequence: Synthetic oligonucleotide
agcacaccagaggauucua

SEQ ID NO: 1988131 - RNA, 19 nt, Artificial Sequence
  Description of Artificial Sequence: Synthetic oligonucleotide
agccccgcugcugucggcu

SEQ ID NO: 1988132 - RNA, 19 nt, Artificial Sequence
  Description of Artificial Sequence: Synthetic oligonucleotide
aggauccaggccggaacau

SEQ ID NO: 1988133 - RNA, 19 nt, Artificial Sequence
  Description of Artificial Sequence: Synthetic oligonucleotide
auccaggccggaacauaca

SEQ ID NO: 1988134 - RNA, 19 nt, Artificial Sequence
  Description of Artificial Sequence: Synthetic oligonucleotide
cgaauaaauuccagaaggu

SEQ ID NO: 1988135 - RNA, 19 nt, Artificial Sequence
  Description of Artificial Sequence: Synthetic oligonucleotide
cccuccgugugucacucac

SEQ ID NO: 1988136 - RNA, 19 nt, Artificial Sequence
  Description of Artificial Sequence: Synthetic oligonucleotide
cuaaugcaccuuccuuugu

SEQ ID NO: 1988137 - RNA, 19 nt, Artificial Sequence
  Description of Artificial Sequence: Synthetic oligonucleotide
ccuccgugugucacucacc

SEQ ID NO: 1988138 - RNA, 19 nt, Artificial Sequence
  Description of Artificial Sequence: Synthetic oligonucleotide
ccugugagcauccucccua

SEQ ID NO: 1988139 - RNA, 19 nt, Artificial Sequence
  Description of Artificial Sequence: Synthetic oligonucleotide
ccaggagucucuggaaguc

SEQ ID NO: 1988140 - RNA, 19 nt, Artificial Sequence
  Description of Artificial Sequence: Synthetic oligonucleotide
gugaacacccagccccgcu

SEQ ID NO: 1988141 - RNA, 19 nt, Artificial Sequence
  Description of Artificial Sequence: Synthetic oligonucleotide
gccggaacauacacaggac

SEQ ID NO: 1988142 - RNA, 19 nt, Artificial Sequence
  Description of Artificial Sequence: Synthetic oligonucleotide
ccucccuacaccucuggaa

SEQ ID NO: 1988143 - RNA, 19 nt, Artificial Sequence
  Description of Artificial Sequence: Synthetic oligonucleotide
ccgcaggacagcacagaug

SEQ ID NO: 1988144 - RNA, 19 nt, Artificial Sequence
  Description of Artificial Sequence: Synthetic oligonucleotide
accccgccccuucuccaca

SEQ ID NO: 1988145 - RNA, 19 nt, Artificial Sequence
  Description of Artificial Sequence: Synthetic oligonucleotide
aguggaccagagagccgca

SEQ ID NO: 1988146 - RNA, 19 nt, Artificial Sequence
  Description of Artificial Sequence: Synthetic oligonucleotide
gggcaugguaaugcuccug

SEQ ID NO: 1988147 - RNA, 19 nt, Artificial Sequence
  Description of Artificial Sequence: Synthetic oligonucleotide
aggccgagagaaaccggaa

SEQ ID NO: 1988148 - RNA, 19 nt, Artificial Sequence
  Description of Artificial Sequence: Synthetic oligonucleotide
ggcccauaggccuccugaa

SEQ ID NO: 1988149 - RNA, 19 nt, Artificial Sequence
  Description of Artificial Sequence: Synthetic oligonucleotide
ccuccgaguggggccaugg

SEQ ID NO: 1988150 - RNA, 19 nt, Artificial Sequence
  Description of Artificial Sequence: Synthetic oligonucleotide
cacgaaguccuucccggau

SEQ ID NO: 1988151 - RNA, 19 nt, Artificial Sequence
  Description of Artificial Sequence: Synthetic oligonucleotide
gucacucaccagccagaua

SEQ ID NO: 1988152 - RNA, 19 nt, Artificial Sequence
  Description of Artificial Sequence: Synthetic oligonucleotide
cggacuccucaauuccagc

SEQ ID NO: 1988153 - RNA, 19 nt, Artificial Sequence
  Description of Artificial Sequence: Synthetic oligonucleotide
ccacauagcgcaagucgaa

SEQ ID NO: 1988154 - RNA, 19 nt, Artificial Sequence
  Description of Artificial Sequence: Synthetic oligonucleotide
cacuaaaguguggcacgaa

SEQ ID NO: 1988155 - RNA, 19 nt, Artificial Sequence
  Description of Artificial Sequence: Synthetic oligonucleotide
ccaggccggaacauacaca

SEQ ID NO: 1988156 - RNA, 19 nt, Artificial Sequence
  Description of Artificial Sequence: Synthetic oligonucleotide
acccuccgugugucacuca

SEQ ID NO: 1988157 - RNA, 19 nt, Artificial Sequence
  Description of Artificial Sequence: Synthetic oligonucleotide
aggcuacuacccggacugu

SEQ ID NO: 1988158 - RNA, 19 nt, Artificial Sequence
  Description of Artificial Sequence: Synthetic oligonucleotide
cucugcucgucuccauggu

SEQ ID NO: 1988159 - RNA, 19 nt, Artificial Sequence
  Description of Artificial Sequence: Synthetic oligonucleotide
cucugcuccgaggcuacua

SEQ ID NO: 1988160 - RNA, 19 nt, Artificial Sequence
  Description of Artificial Sequence: Synthetic oligonucleotide
ccuggaucggcacagcguu

SEQ ID NO: 1988161 - RNA, 19 nt, Artificial Sequence
  Description of Artificial Sequence: Synthetic oligonucleotide
cccggacugucugugucac

SEQ ID NO: 1988162 - RNA, 19 nt, Artificial Sequence
  Description of Artificial Sequence: Synthetic oligonucleotide
accagccgcggggcgccuc

SEQ ID NO: 1988163 - RNA, 19 nt, Artificial Sequence
  Description of Artificial Sequence: Synthetic oligonucleotide
cuacccggacugucugugu

SEQ ID NO: 1988164 - RNA, 19 nt, Artificial Sequence
  Description of Artificial Sequence: Synthetic oligonucleotide
ggauccaggccggaacaua

SEQ ID NO: 1988165 - RNA, 19 nt, Artificial Sequence
  Description of Artificial Sequence: Synthetic oligonucleotide
ccaguccaccugcucugac

SEQ ID NO: 1988166 - RNA, 19 nt, Artificial Sequence
  Description of Artificial Sequence: Synthetic oligonucleotide
gcacagcguuucuccuccc

SEQ ID NO: 1988167 - RNA, 19 nt, Artificial Sequence
  Description of Artificial Sequence: Synthetic oligonucleotide
cggucacgaaguccuuccc

SEQ ID NO: 1988168 - RNA, 19 nt, Artificial Sequence
  Description of Artificial Sequence: Synthetic oligonucleotide
gcacaccagaggauucuaa

SEQ ID NO: 1988169 - RNA, 19 nt, Artificial Sequence
  Description of Artificial Sequence: Synthetic oligonucleotide
cgccuuccacaaucuuccg

SEQ ID NO: 1988170 - RNA, 19 nt, Artificial Sequence
  Description of Artificial Sequence: Synthetic oligonucleotide
cuccugccucaaacaaacu

SEQ ID NO: 1988171 - RNA, 19 nt, Artificial Sequence
  Description of Artificial Sequence: Synthetic oligonucleotide
cggggcgccuccgaguggg

SEQ ID NO: 1988172 - RNA, 19 nt, Artificial Sequence
  Description of Artificial Sequence: Synthetic oligonucleotide
caagcacgaaguggacgcu

SEQ ID NO: 1988173 - RNA, 19 nt, Artificial Sequence
  Description of Artificial Sequence: Synthetic oligonucleotide
gccgcaggacagcacagau

SEQ ID NO: 1988174 - RNA, 19 nt, Artificial Sequence
  Description of Artificial Sequence: Synthetic oligonucleotide
caccucggacuccucaauu

SEQ ID NO: 1988175 - RNA, 19 nt, Artificial Sequence
  Description of Artificial Sequence: Synthetic oligonucleotide
aggagggaccccgccccuu

SEQ ID NO: 1988176 - RNA, 19 nt, Artificial Sequence
  Description of Artificial Sequence: Synthetic oligonucleotide
ccuacaccucuggaaaucu

SEQ ID NO: 1988177 - RNA, 19 nt, Artificial Sequence
  Description of Artificial Sequence: Synthetic oligonucleotide
cgcggggcgccuccgagug

SEQ ID NO: 1988178 - RNA, 19 nt, Artificial Sequence
  Description of Artificial Sequence: Synthetic oligonucleotide
ccgaggcuacuacccggac

SEQ ID NO: 1988179 - RNA, 19 nt, Artificial Sequence
  Description of Artificial Sequence: Synthetic oligonucleotide
cgcgcagagaaaggccgag

SEQ ID NO: 1988180 - RNA, 19 nt, Artificial Sequence
  Description of Artificial Sequence: Synthetic oligonucleotide
gggcgccuccgaguggggc

SEQ ID NO: 1988181 - RNA, 19 nt, Artificial Sequence
  Description of Artificial Sequence: Synthetic oligonucleotide
acgcuucaccaagccuaaa

SEQ ID NO: 1988182 - RNA, 19 nt, Artificial Sequence
  Description of Artificial Sequence: Synthetic oligonucleotide
ggaucggcacagcguuucu

SEQ ID NO: 1988183 - RNA, 19 nt, Artificial Sequence
  Description of Artificial Sequence: Synthetic oligonucleotide
gcgcagagaaaggccgaga

SEQ ID NO: 1988184 - RNA, 19 nt, Artificial Sequence
  Description of Artificial Sequence: Synthetic oligonucleotide
gcugucggcucugcuccga

SEQ ID NO: 1988185 - RNA, 19 nt, Artificial Sequence
  Description of Artificial Sequence: Synthetic oligonucleotide
ccgccccuucuccacacca

SEQ ID NO: 1988186 - RNA, 19 nt, Artificial Sequence
  Description of Artificial Sequence: Synthetic oligonucleotide
cuggaucggcacagcguuu

SEQ ID NO: 1988187 - RNA, 19 nt, Artificial Sequence
  Description of Artificial Sequence: Synthetic oligonucleotide
gcgccucggucacgaaguc

SEQ ID NO: 1988188 - RNA, 19 nt, Artificial Sequence
  Description of Artificial Sequence: Synthetic oligonucleotide
ccccgccccuucuccacac

SEQ ID NO: 1988189 - RNA, 19 nt, Artificial Sequence
  Description of Artificial Sequence: Synthetic oligonucleotide
ccccagugaagcagucucu

SEQ ID NO: 1988190 - RNA, 19 nt, Artificial Sequence
  Description of Artificial Sequence: Synthetic oligonucleotide
ccggaaggcaaagagccuu

SEQ ID NO: 1988191 - RNA, 19 nt, Artificial Sequence
  Description of Artificial Sequence: Synthetic oligonucleotide
cccagcagaucaugucccu

SEQ ID NO: 1988192 - RNA, 19 nt, Artificial Sequence
  Description of Artificial Sequence: Synthetic oligonucleotide
cgaggcuacuacccggacu

SEQ ID NO: 1988193 - RNA, 19 nt, Artificial Sequence
  Description of Artificial Sequence: Synthetic oligonucleotide
ccgccccagugaagcaguc

SEQ ID NO: 1988194 - RNA, 19 nt, Artificial Sequence
  Description of Artificial Sequence: Synthetic oligonucleotide
gggacacgccuuccacaau

SEQ ID NO: 1988195 - RNA, 19 nt, Artificial Sequence
  Description of Artificial Sequence: Synthetic oligonucleotide
ccggacugucugugucaca

SEQ ID NO: 1988196 - RNA, 19 nt, Artificial Sequence
  Description of Artificial Sequence: Synthetic oligonucleotide
cgaaguccuucccggauuu

SEQ ID NO: 1988197 - RNA, 19 nt, Artificial Sequence
  Description of Artificial Sequence: Synthetic oligonucleotide
gccuccgaguggggccaug

SEQ ID NO: 1988198 - RNA, 19 nt, Artificial Sequence
  Description of Artificial Sequence: Synthetic oligonucleotide
gcagcgccucggucacgaa

SEQ ID NO: 1988199 - RNA, 19 nt, Artificial Sequence
  Description of Artificial Sequence: Synthetic oligonucleotide
cgaaaccagcgcgcagaga

SEQ ID NO: 1988200 - RNA, 19 nt, Artificial Sequence
  Description of Artificial Sequence: Synthetic oligonucleotide
gcaggacagcacagauguu

SEQ ID NO: 1988201 - RNA, 19 nt, Artificial Sequence
  Description of Artificial Sequence: Synthetic oligonucleotide
gcucugcuccgaggcuacu

SEQ ID NO: 1988202 - RNA, 19 nt, Artificial Sequence
  Description of Artificial Sequence: Synthetic oligonucleotide
cccgagcauacugcuccuu

SEQ ID NO: 1988203 - RNA, 19 nt, Artificial Sequence
  Description of Artificial Sequence: Synthetic oligonucleotide
auuaucaaaauucugaggc

SEQ ID NO: 1988204 - RNA, 19 nt, Artificial Sequence
  Description of Artificial Sequence: Synthetic oligonucleotide
aaagguaaaagguuuccgc

SEQ ID NO: 1988205 - RNA, 19 nt, Artificial Sequence
  Description of Artificial Sequence: Synthetic oligonucleotide
uuugguaccacaaaggccc

SEQ ID NO: 1988206 - RNA, 19 nt, Artificial Sequence
  Description of Artificial Sequence: Synthetic oligonucleotide
uaugagguaagguuaaggg

SEQ ID NO: 1988207 - RNA, 19 nt, Artificial Sequence
  Description of Artificial Sequence: Synthetic oligonucleotide
aaauccaggagcuuacagg

SEQ ID NO: 1988208 - RNA, 19 nt, Artificial Sequence
  Description of Artificial Sequence: Synthetic oligonucleotide
uuuacuggaaaacuuguug

SEQ ID NO: 1988209 - RNA, 19 nt, Artificial Sequence
  Description of Artificial Sequence: Synthetic oligonucleotide
agcaugauuaguguaaugc

SEQ ID NO: 1988210 - RNA, 19 nt, Artificial Sequence
  Description of Artificial Sequence: Synthetic oligonucleotide
uacauuucuauucuauucc

SEQ ID NO: 1988211 - RNA, 19 nt, Artificial Sequence
  Description of Artificial Sequence: Synthetic oligonucleotide
aauguuuucuguccgcguc

SEQ ID NO: 1988212 - RNA, 19 nt, Artificial Sequence
  Description of Artificial Sequence: Synthetic oligonucleotide
auagccuagaauuauuauc

SEQ ID NO: 1988213 - RNA, 19 nt, Artificial Sequence
  Description of Artificial Sequence: Synthetic oligonucleotide
uagccuagaauuauuauca

SEQ ID NO: 1988214 - RNA, 19 nt, Artificial Sequence
  Description of Artificial Sequence: Synthetic oligonucleotide
uauuaucaaaauucugagg

SEQ ID NO: 1988215 - RNA, 19 nt, Artificial Sequence
  Description of Artificial Sequence: Synthetic oligonucleotide
auuccaauagccuagaauu

SEQ ID NO: 1988216 - RNA, 19 nt, Artificial Sequence
  Description of Artificial Sequence: Synthetic oligonucleotide
ucaccuaugaucuuguccu

SEQ ID NO: 1988217 - RNA, 19 nt, Artificial Sequence
  Description of Artificial Sequence: Synthetic oligonucleotide
ugagguaagguuaaggguc

SEQ ID NO: 1988218 - RNA, 19 nt, Artificial Sequence
  Description of Artificial Sequence: Synthetic oligonucleotide
aaugccuggucuccgcucc

SEQ ID NO: 1988219 - RNA, 19 nt, Artificial Sequence
  Description of Artificial Sequence: Synthetic oligonucleotide
guagcuucuucccauagcg

SEQ ID NO: 1988220 - RNA, 19 nt, Artificial Sequence
  Description of Artificial Sequence: Synthetic oligonucleotide
cuauucuauuccaauagcc

SEQ ID NO: 1988221 - RNA, 19 nt, Artificial Sequence
  Description of Artificial Sequence: Synthetic oligonucleotide
uauucuauuccaauagccu

SEQ ID NO: 1988222 - RNA, 19 nt, Artificial Sequence
  Description of Artificial Sequence: Synthetic oligonucleotide
cuucagaguuucuagaacc

SEQ ID NO: 1988223 - RNA, 19 nt, Artificial Sequence
  Description of Artificial Sequence: Synthetic oligonucleotide
aacuaacugccuucuuucc

SEQ ID NO: 1988224 - RNA, 19 nt, Artificial Sequence
  Description of Artificial Sequence: Synthetic oligonucleotide
gaucguaagacaaagcaug

SEQ ID NO: 1988225 - RNA, 19 nt, Artificial Sequence
  Description of Artificial Sequence: Synthetic oligonucleotide
ugaauuuacaauguuuucu

SEQ ID NO: 1988226 - RNA, 19 nt, Artificial Sequence
  Description of Artificial Sequence: Synthetic oligonucleotide
uuacaauguuuucuguccg

SEQ ID NO: 1988227 - RNA, 19 nt, Artificial Sequence
  Description of Artificial Sequence: Synthetic oligonucleotide
uucuauuccaauagccuag

SEQ ID NO: 1988228 - RNA, 19 nt, Artificial Sequence
  Description of Artificial Sequence: Synthetic oligonucleotide
acacuauccaaacaucuuc

SEQ ID NO: 1988229 - RNA, 19 nt, Artificial Sequence
  Description of Artificial Sequence: Synthetic oligonucleotide
aguuaacugggacuggaac

SEQ ID NO: 1988230 - RNA, 19 nt, Artificial Sequence
  Description of Artificial Sequence: Synthetic oligonucleotide
ucuauucuauuccaauagc

SEQ ID NO: 1988231 - RNA, 19 nt, Artificial Sequence
  Description of Artificial Sequence: Synthetic oligonucleotide
caggcuugaauuuacaaug

SEQ ID NO: 1988232 - RNA, 19 nt, Artificial Sequence
  Description of Artificial Sequence: Synthetic oligonucleotide
uccgccauggcuuuacugg

SEQ ID NO: 1988233 - RNA, 19 nt, Artificial Sequence
  Description of Artificial Sequence: Synthetic oligonucleotide
aaaagguuuccgccauggc

SEQ ID NO: 1988234 - RNA, 19 nt, Artificial Sequence
  Description of Artificial Sequence: Synthetic oligonucleotide
aacucaguuaacugggacu

SEQ ID NO: 1988235 - RNA, 19 nt, Artificial Sequence
  Description of Artificial Sequence: Synthetic oligonucleotide
cuggaacucaguuaacugg

SEQ ID NO: 1988236 - RNA, 19 nt, Artificial Sequence
  Description of Artificial Sequence: Synthetic oligonucleotide
aguuaaaggaaauccaaau

SEQ ID NO: 1988237 - RNA, 19 nt, Artificial Sequence
  Description of Artificial Sequence: Synthetic oligonucleotide
uuacuggaaaacuuguugu

SEQ ID NO: 1988238 - RNA, 19 nt, Artificial Sequence
  Description of Artificial Sequence: Synthetic oligonucleotide
agagcaaauauuccggaug

SEQ ID NO: 1988239 - RNA, 19 nt, Artificial Sequence
  Description of Artificial Sequence: Synthetic oligonucleotide
aaauauuccggauguugcu

SEQ ID NO: 1988240 - RNA, 19 nt, Artificial Sequence
  Description of Artificial Sequence: Synthetic oligonucleotide
gaaguaaucgucagguucc

SEQ ID NO: 1988241 - RNA, 19 nt, Artificial Sequence
  Description of Artificial Sequence: Synthetic oligonucleotide
guuaacugggacuggaacc

SEQ ID NO: 1988242 - RNA, 19 nt, Artificial Sequence
  Description of Artificial Sequence: Synthetic oligonucleotide
uuaguguaaugccuggucu

SEQ ID NO: 1988243 - RNA, 19 nt, Artificial Sequence
  Description of Artificial Sequence: Synthetic oligonucleotide
agaaagguaaaagguuucc

SEQ ID NO: 1988244 - RNA, 19 nt, Artificial Sequence
  Description of Artificial Sequence: Synthetic oligonucleotide
uccaguuaaaggaaaucca

SEQ ID NO: 1988245 - RNA, 19 nt, Artificial Sequence
  Description of Artificial Sequence: Synthetic oligonucleotide
acuaggacggcuuuuccag

SEQ ID NO: 1988246 - RNA, 19 nt, Artificial Sequence
  Description of Artificial Sequence: Synthetic oligonucleotide
aauucugaggcacaauauu

SEQ ID NO: 1988247 - RNA, 19 nt, Artificial Sequence
  Description of Artificial Sequence: Synthetic oligonucleotide
auccaaacaucuucaaauc

SEQ ID NO: 1988248 - RNA, 19 nt, Artificial Sequence
  Description of Artificial Sequence: Synthetic oligonucleotide
uaaaagguuuccgccaugg

SEQ ID NO: 1988249 - RNA, 19 nt, Artificial Sequence
  Description of Artificial Sequence: Synthetic oligonucleotide
uauuccaauagccuagaau

SEQ ID NO: 1988250 - RNA, 19 nt, Artificial Sequence
  Description of Artificial Sequence: Synthetic oligonucleotide
aauagccuagaauuauuau

SEQ ID NO: 1988251 - RNA, 19 nt, Artificial Sequence
  Description of Artificial Sequence: Synthetic oligonucleotide
ucaccugguaacuaacugc

SEQ ID NO: 1988252 - RNA, 19 nt, Artificial Sequence
  Description of Artificial Sequence: Synthetic oligonucleotide
aaucaccuuguaaagauga

SEQ ID NO: 1988253 - RNA, 19 nt, Artificial Sequence
  Description of Artificial Sequence: Synthetic oligonucleotide
ugauuaguguaaugccugg

SEQ ID NO: 1988254 - RNA, 19 nt, Artificial Sequence
  Description of Artificial Sequence: Synthetic oligonucleotide
auauuccggauguugcugg

SEQ ID NO: 1988255 - RNA, 19 nt, Artificial Sequence
  Description of Artificial Sequence: Synthetic oligonucleotide
uccgcgucaccuaugaucu

SEQ ID NO: 1988256 - RNA, 19 nt, Artificial Sequence
  Description of Artificial Sequence: Synthetic oligonucleotide
uggauaugugcucaaggac

SEQ ID NO: 1988257 - RNA, 19 nt, Artificial Sequence
  Description of Artificial Sequence: Synthetic oligonucleotide
ccuuguaaagaugagaggg

SEQ ID NO: 1988258 - RNA, 19 nt, Artificial Sequence
  Description of Artificial Sequence: Synthetic oligonucleotide
guagagagugaacuccugg

SEQ ID NO: 1988259 - RNA, 19 nt, Artificial Sequence
  Description of Artificial Sequence: Synthetic oligonucleotide
cucgugcucagguagagag

SEQ ID NO: 1988260 - RNA, 19 nt, Artificial Sequence
  Description of Artificial Sequence: Synthetic oligonucleotide
cucgugaccagccacuucc

SEQ ID NO: 1988261 - RNA, 19 nt, Artificial Sequence
  Description of Artificial Sequence: Synthetic oligonucleotide
aguguaaugccuggucucc

SEQ ID NO: 1988262 - RNA, 19 nt, Artificial Sequence
  Description of Artificial Sequence: Synthetic oligonucleotide
cuccaguuaaaggaaaucc

SEQ ID NO: 1988263 - RNA, 19 nt, Artificial Sequence
  Description of Artificial Sequence: Synthetic oligonucleotide
ugaucguaagacaaagcau

SEQ ID NO: 1988264 - RNA, 19 nt, Artificial Sequence
  Description of Artificial Sequence: Synthetic oligonucleotide
cuucaaaucucuccgucag

SEQ ID NO: 1988265 - RNA, 19 nt, Artificial Sequence
  Description of Artificial Sequence: Synthetic oligonucleotide
uaacuaacugccuucuuuc

SEQ ID NO: 1988266 - RNA, 19 nt, Artificial Sequence
  Description of Artificial Sequence: Synthetic oligonucleotide
aagacaaagcaugauuagu

SEQ ID NO: 1988267 - RNA, 19 nt, Artificial Sequence
  Description of Artificial Sequence: Synthetic oligonucleotide
ucagcucacgacaauacau

SEQ ID NO: 1988268 - RNA, 19 nt, Artificial Sequence
  Description of Artificial Sequence: Synthetic oligonucleotide
cugaucguaagacaaagca

SEQ ID NO: 1988269 - RNA, 19 nt, Artificial Sequence
  Description of Artificial Sequence: Synthetic oligonucleotide
gauaugugcucaaggaccc

SEQ ID NO: 1988270 - RNA, 19 nt, Artificial Sequence
  Description of Artificial Sequence: Synthetic oligonucleotide
caccugguaacuaacugcc

SEQ ID NO: 1988271 - RNA, 19 nt, Artificial Sequence
  Description of Artificial Sequence: Synthetic oligonucleotide
uaaucgucagguuccacac

SEQ ID NO: 1988272 - RNA, 19 nt, Artificial Sequence
  Description of Artificial Sequence: Synthetic oligonucleotide
agacaaagcaugauuagug

SEQ ID NO: 1988273 - RNA, 19 nt, Artificial Sequence
  Description of Artificial Sequence: Synthetic oligonucleotide
uguaaagaugagaggggac

SEQ ID NO: 1988274 - RNA, 19 nt, Artificial Sequence
  Description of Artificial Sequence: Synthetic oligonucleotide
aacccaauggcaguauuug

SEQ ID NO: 1988275 - RNA, 19 nt, Artificial Sequence
  Description of Artificial Sequence: Synthetic oligonucleotide
ucaccgaucaccugguaac

SEQ ID NO: 1988276 - RNA, 19 nt, Artificial Sequence
  Description of Artificial Sequence: Synthetic oligonucleotide
ucuccgucagcucacgaca

SEQ ID NO: 1988277 - RNA, 19 nt, Artificial Sequence
  Description of Artificial Sequence: Synthetic oligonucleotide
uucagaguuucuagaaccu

SEQ ID NO: 1988278 - RNA, 19 nt, Artificial Sequence
  Description of Artificial Sequence: Synthetic oligonucleotide
ugguucuguccaaaugggg

SEQ ID NO: 1988279 - RNA, 19 nt, Artificial Sequence
  Description of Artificial Sequence: Synthetic oligonucleotide
uagagagugaacuccugga

SEQ ID NO: 1988280 - RNA, 19 nt, Artificial Sequence
  Description of Artificial Sequence: Synthetic oligonucleotide
gaugagaggggacugccac

SEQ ID NO: 1988281 - RNA, 19 nt, Artificial Sequence
  Description of Artificial Sequence: Synthetic oligonucleotide
uguagcuucuucccauagc

SEQ ID NO: 1988282 - RNA, 19 nt, Artificial Sequence
  Description of Artificial Sequence: Synthetic oligonucleotide
uugaauuuacaauguuuuc

SEQ ID NO: 1988283 - RNA, 19 nt, Artificial Sequence
  Description of Artificial Sequence: Synthetic oligonucleotide
acagccccggccaagaagc

SEQ ID NO: 1988284 - RNA, 19 nt, Artificial Sequence
  Description of Artificial Sequence: Synthetic oligonucleotide
uggaaaacuuguuguuucc

SEQ ID NO: 1988285 - RNA, 19 nt, Artificial Sequence
  Description of Artificial Sequence: Synthetic oligonucleotide
agaggggacugccacauug

SEQ ID NO: 1988286 - RNA, 19 nt, Artificial Sequence
  Description of Artificial Sequence: Synthetic oligonucleotide
acaauguuuucuguccgcg

SEQ ID NO: 1988287 - RNA, 19 nt, Artificial Sequence
  Description of Artificial Sequence: Synthetic oligonucleotide
guaugagguaagguuaagg

SEQ ID NO: 1988288 - RNA, 19 nt, Artificial Sequence
  Description of Artificial Sequence: Synthetic oligonucleotide
gacaauacauuucuauucu

SEQ ID NO: 1988289 - RNA, 19 nt, Artificial Sequence
  Description of Artificial Sequence: Synthetic oligonucleotide
agagugaacuccuggaaau

SEQ ID NO: 1988290 - RNA, 19 nt, Artificial Sequence
  Description of Artificial Sequence: Synthetic oligonucleotide
acucaguuaacugggacug

SEQ ID NO: 1988291 - RNA, 19 nt, Artificial Sequence
  Description of Artificial Sequence: Synthetic oligonucleotide
guccucaccgaucaccugg

SEQ ID NO: 1988292 - RNA, 19 nt, Artificial Sequence
  Description of Artificial Sequence: Synthetic oligonucleotide
acugccuucuuuccaucac

SEQ ID NO: 1988293 - RNA, 19 nt, Artificial Sequence
  Description of Artificial Sequence: Synthetic oligonucleotide
gacgcgaagcucuucgcag

SEQ ID NO: 1988294 - RNA, 19 nt, Artificial Sequence
  Description of Artificial Sequence: Synthetic oligonucleotide
uccugaucguaagacaaag

SEQ ID NO: 1988295 - RNA, 19 nt, Artificial Sequence
  Description of Artificial Sequence: Synthetic oligonucleotide
aucgucagguuccacaccu

SEQ ID NO: 1988296 - RNA, 19 nt, Artificial Sequence
  Description of Artificial Sequence: Synthetic oligonucleotide
uacaauguuuucuguccgc

SEQ ID NO: 1988297 - RNA, 19 nt, Artificial Sequence
  Description of Artificial Sequence: Synthetic oligonucleotide
guaaucgucagguuccaca

SEQ ID NO: 1988298 - RNA, 19 nt, Artificial Sequence
  Description of Artificial Sequence: Synthetic oligonucleotide
ucuccgcuccaguuaaagg

SEQ ID NO: 1988299 - RNA, 19 nt, Artificial Sequence
  Description of Artificial Sequence: Synthetic oligonucleotide
guagauuccgggcuccugc

SEQ ID NO: 1988300 - RNA, 19 nt, Artificial Sequence
  Description of Artificial Sequence: Synthetic oligonucleotide
gaauuauuaucaaaauucu

SEQ ID NO: 1988301 - RNA, 19 nt, Artificial Sequence
  Description of Artificial Sequence: Synthetic oligonucleotide
ugugcucaaggacccaucu

SEQ ID NO: 1988302 - RNA, 19 nt, Artificial Sequence
  Description of Artificial Sequence: Synthetic oligonucleotide
agauccuggaggcucaccu

SEQ ID NO: 1988303 - RNA, 19 nt, Artificial Sequence
  Description of Artificial Sequence: Synthetic oligonucleotide
uucccauagcgacucagga

SEQ ID NO: 1988304 - RNA, 19 nt, Artificial Sequence
  Description of Artificial Sequence: Synthetic oligonucleotide
augauuaguguaaugccug

SEQ ID NO: 1988305 - RNA, 19 nt, Artificial Sequence
  Description of Artificial Sequence: Synthetic oligonucleotide
caaagcaugauuaguguaa

SEQ ID NO: 1988306 - RNA, 19 nt, Artificial Sequence
  Description of Artificial Sequence: Synthetic oligonucleotide
aagcaugauuaguguaaug

SEQ ID NO: 1988307 - RNA, 19 nt, Artificial Sequence
  Description of Artificial Sequence: Synthetic oligonucleotide
ccuagaauuauuaucaaaa

SEQ ID NO: 1988308 - RNA, 19 nt, Artificial Sequence
  Description of Artificial Sequence: Synthetic oligonucleotide
ucaccuuguaaagaugaga

SEQ ID NO: 1988309 - RNA, 19 nt, Artificial Sequence
  Description of Artificial Sequence: Synthetic oligonucleotide
acuaacugccuucuuucca

SEQ ID NO: 1988310 - RNA, 19 nt, Artificial Sequence
  Description of Artificial Sequence: Synthetic oligonucleotide
uguguccucgugaccagcc

SEQ ID NO: 1988311 - RNA, 19 nt, Artificial Sequence
  Description of Artificial Sequence: Synthetic oligonucleotide
aggcugaagggacacuggg

SEQ ID NO: 1988312 - RNA, 19 nt, Artificial Sequence
  Description of Artificial Sequence: Synthetic oligonucleotide
cuuccucgugcucagguag

SEQ ID NO: 1988313 - RNA, 19 nt, Artificial Sequence
  Description of Artificial Sequence: Synthetic oligonucleotide
acgacaauacauuucuauu

SEQ ID NO: 1988314 - RNA, 19 nt, Artificial Sequence
  Description of Artificial Sequence: Synthetic oligonucleotide
uguaaugccuggucuccgc

SEQ ID NO: 1988315 - RNA, 19 nt, Artificial Sequence
  Description of Artificial Sequence: Synthetic oligonucleotide
aaagcaugauuaguguaau

SEQ ID NO: 1988316 - RNA, 19 nt, Artificial Sequence
  Description of Artificial Sequence: Synthetic oligonucleotide
cagguagagagugaacucc

SEQ ID NO: 1988317 - RNA, 19 nt, Artificial Sequence
  Description of Artificial Sequence: Synthetic oligonucleotide
guaagacaaagcaugauua

SEQ ID NO: 1988318 - RNA, 19 nt, Artificial Sequence
  Description of Artificial Sequence: Synthetic oligonucleotide
ucagguagagagugaacuc

SEQ ID NO: 1988319 - RNA, 19 nt, Artificial Sequence
  Description of Artificial Sequence: Synthetic oligonucleotide
uucaaaucucuccgucagc

SEQ ID NO: 1988320 - RNA, 19 nt, Artificial Sequence
  Description of Artificial Sequence: Synthetic oligonucleotide
uagauuccgggcuccugcg

SEQ ID NO: 1988321 - RNA, 19 nt, Artificial Sequence
  Description of Artificial Sequence: Synthetic oligonucleotide
gcaugauuaguguaaugcc

SEQ ID NO: 1988322 - RNA, 19 nt, Artificial Sequence
  Description of Artificial Sequence: Synthetic oligonucleotide
acgcgaagcucuucgcagc

SEQ ID NO: 1988323 - RNA, 19 nt, Artificial Sequence
  Description of Artificial Sequence: Synthetic oligonucleotide
ucaguuaacugggacugga

SEQ ID NO: 1988324 - RNA, 19 nt, Artificial Sequence
  Description of Artificial Sequence: Synthetic oligonucleotide
aaucucuccgucagcucac

SEQ ID NO: 1988325 - RNA, 19 nt, Artificial Sequence
  Description of Artificial Sequence: Synthetic oligonucleotide
acaaagcaugauuagugua

SEQ ID NO: 1988326 - RNA, 19 nt, Artificial Sequence
  Description of Artificial Sequence: Synthetic oligonucleotide
caauggcaguauuugguac

SEQ ID NO: 1988327 - RNA, 19 nt, Artificial Sequence
  Description of Artificial Sequence: Synthetic oligonucleotide
agaccugacaucuuuucua

SEQ ID NO: 1988328 - RNA, 19 nt, Artificial Sequence
  Description of Artificial Sequence: Synthetic oligonucleotide
agaaaccgccgcgaggccc

SEQ ID NO: 1988329 - RNA, 19 nt, Artificial Sequence
  Description of Artificial Sequence: Synthetic oligonucleotide
uuccaauagccuagaauua

SEQ ID NO: 1988330 - RNA, 19 nt, Artificial Sequence
  Description of Artificial Sequence: Synthetic oligonucleotide
cccauagcgacucaggaag

SEQ ID NO: 1988331 - RNA, 19 nt, Artificial Sequence
  Description of Artificial Sequence: Synthetic oligonucleotide
uaguguaaugccuggucuc

SEQ ID NO: 1988332 - RNA, 19 nt, Artificial Sequence
  Description of Artificial Sequence: Synthetic oligonucleotide
uccaauagccuagaauuau

SEQ ID NO: 1988333 - RNA, 19 nt, Artificial Sequence
  Description of Artificial Sequence: Synthetic oligonucleotide
agagagugaacuccuggaa

SEQ ID NO: 1988334 - RNA, 19 nt, Artificial Sequence
  Description of Artificial Sequence: Synthetic oligonucleotide
gggacuggaacccaauggc

SEQ ID NO: 1988335 - RNA, 19 nt, Artificial Sequence
  Description of Artificial Sequence: Synthetic oligonucleotide
gagguaagguuaagggucc

SEQ ID NO: 1988336 - RNA, 19 nt, Artificial Sequence
  Description of Artificial Sequence: Synthetic oligonucleotide
uccgcuccaguuaaaggaa

SEQ ID NO: 1988337 - RNA, 19 nt, Artificial Sequence
  Description of Artificial Sequence: Synthetic oligonucleotide
gacaaagcaugauuagugu

SEQ ID NO: 1988338 - RNA, 19 nt, Artificial Sequence
  Description of Artificial Sequence: Synthetic oligonucleotide
caugauuaguguaaugccu

SEQ ID NO: 1988339 - RNA, 19 nt, Artificial Sequence
  Description of Artificial Sequence: Synthetic oligonucleotide
gcaaauauuccggauguug

SEQ ID NO: 1988340 - RNA, 19 nt, Artificial Sequence
  Description of Artificial Sequence: Synthetic oligonucleotide
caaucaccuuguaaagaug

SEQ ID NO: 1988341 - RNA, 19 nt, Artificial Sequence
  Description of Artificial Sequence: Synthetic oligonucleotide
uaagggucccgacacuauc

SEQ ID NO: 1988342 - RNA, 19 nt, Artificial Sequence
  Description of Artificial Sequence: Synthetic oligonucleotide
ucuauuccaauagccuaga

SEQ ID NO: 1988343 - RNA, 19 nt, Artificial Sequence
  Description of Artificial Sequence: Synthetic oligonucleotide
uuguuguuuccugcugggg

SEQ ID NO: 1988344 - RNA, 19 nt, Artificial Sequence
  Description of Artificial Sequence: Synthetic oligonucleotide
auuccgggcuccugcgggc

SEQ ID NO: 1988345 - RNA, 19 nt, Artificial Sequence
  Description of Artificial Sequence: Synthetic oligonucleotide
agaagccguucagaaaccg

SEQ ID NO: 1988346 - RNA, 19 nt, Artificial Sequence
  Description of Artificial Sequence: Synthetic oligonucleotide
cucacgacaauacauuucu

SEQ ID NO: 1988347 - RNA, 19 nt, Artificial Sequence
  Description of Artificial Sequence: Synthetic oligonucleotide
gaaaccgccgcgaggcccg

SEQ ID NO: 1988348 - RNA, 19 nt, Artificial Sequence
  Description of Artificial Sequence: Synthetic oligonucleotide
gccacuuccaauguagucc

SEQ ID NO: 1988349 - RNA, 19 nt, Artificial Sequence
  Description of Artificial Sequence: Synthetic oligonucleotide
guccgcgucaccuaugauc

SEQ ID NO: 1988350 - RNA, 19 nt, Artificial Sequence
  Description of Artificial Sequence: Synthetic oligonucleotide
guggauucgugcugcuccg

SEQ ID NO: 1988351 - RNA, 19 nt, Artificial Sequence
  Description of Artificial Sequence: Synthetic oligonucleotide
acuauccaaacaucuucaa

SEQ ID NO: 1988352 - RNA, 19 nt, Artificial Sequence
  Description of Artificial Sequence: Synthetic oligonucleotide
acuuccaauguaguccuca

SEQ ID NO: 1988353 - RNA, 19 nt, Artificial Sequence
  Description of Artificial Sequence: Synthetic oligonucleotide
caaggacccaucugggcac

SEQ ID NO: 1988354 - RNA, 19 nt, Artificial Sequence
  Description of Artificial Sequence: Synthetic oligonucleotide
cacauuguccucaccgauc

SEQ ID NO: 1988355 - RNA, 19 nt, Artificial Sequence
  Description of Artificial Sequence: Synthetic oligonucleotide
acuggggucaggcuugaau

SEQ ID NO: 1988356 - RNA, 19 nt, Artificial Sequence
  Description of Artificial Sequence: Synthetic oligonucleotide
cacccgcuucuccugaucg

SEQ ID NO: 1988357 - RNA, 19 nt, Artificial Sequence
  Description of Artificial Sequence: Synthetic oligonucleotide
cugaggcacaauauuagaa

SEQ ID NO: 1988358 - RNA, 19 nt, Artificial Sequence
  Description of Artificial Sequence: Synthetic oligonucleotide
uagcgacucaggaaguaau

SEQ ID NO: 1988359 - RNA, 19 nt, Artificial Sequence
  Description of Artificial Sequence: Synthetic oligonucleotide
uuaagggucccgacacuau

SEQ ID NO: 1988360 - RNA, 19 nt, Artificial Sequence
  Description of Artificial Sequence: Synthetic oligonucleotide
gauccuggaggcucaccug

SEQ ID NO: 1988361 - RNA, 19 nt, Artificial Sequence
  Description of Artificial Sequence: Synthetic oligonucleotide
guucagaaaccgccgcgag

SEQ ID NO: 1988362 - RNA, 19 nt, Artificial Sequence
  Description of Artificial Sequence: Synthetic oligonucleotide
cucuccgucagcucacgac

SEQ ID NO: 1988363 - RNA, 19 nt, Artificial Sequence
  Description of Artificial Sequence: Synthetic oligonucleotide
aggggacugccacauuguc
